United States Patent Application Publication US 2014/0325702 A1 - sequence listing, part 18

SEQ ID NO: 19624 - DNA, 937 bp, Heterodera glycines
tcaatccgtccaacgccccccccccgggcaaatggcattcattcattcgtctttctgtcttcgtccgtcgttgtcgcacatttattatatgttgtgggtgtggacaacaaagaggacatcttgtgatgctatttggaatgggccaagaaacgaaagaaaatgcgtcgtcagattttgtatttatttgattcactatttttggatgtgatacgtttaattgaaaaatacaaaaagtttattcgattatcacagagacaaacttatgggaattatcaacactaataacaaaactatacgtaattaaattagagaatttggtccacaaaataaatgaattaggctaaataagttaacaaaaatgacatttcagcggaatgttgcacctctgcgagaattaaagtgaaacagcaaaatttgagagaatcggccaataaacaatcagcggaatacaaataaaaatatgtatataataataaattgtttattacacagatgtaaaaatgggattaaggctaattgaaaggctattcagttcattttgttcgtctgataaagaaaattgcagaaataacccagcgatttgttagtgatttgatttgtgtgactattgcgcggagatgaaagaacagcagcaaaaaaggtgtggggggggatcagtcagcagttgcggtcggtcggtcattgcttcttttccattgcattatttcattcatttgttttttaattggtcgtctgtttctctctctgtcgctctctccgtttcccttacgattcgctcagtgtctcttcgccgtccgttgccagcggtttcagcgcgataatggccaacttcacggccttggcacattcccccgcccttggcagaatgaaataatgcacgcggtttatgtgcgattcgcccgtgggcaattcgtagccgaatttgaacgtcaaaaac

SEQ ID NO: 19625 - DNA, 1495 bp, Heterodera glycines
gtcctcccactgcagtactgttgccccttctccaccatttccgtcgtccgcccaccgtttgcgcaattcgtccgtcgacccatgcgaagtgccatcttcgtcgtcgtcatcgttgttgatgctgaacaccgactgcacgttgcggtagcgcttgccgaaccgatcggtgctgctcacgtgcttcacattctcttcgatgtccgtcccctttcgcgggccgaccgtttcccgcggcgccattgattcttttctcttcggcagcgattttttcaaccgtttgagaaacgtctaaaaggggacgtgcgtctgacaaagagcaatccgcaattggaacttttatttggcatttttgcggaccgaccatcgctttgccgttttctccctcctttgggcccccttctttgcattccgtgcagtcgttcctcctgtagtggttgctcagtttggtcaagttccctccatcctttagcatttggtgcagcgtccgatatcctccgtccacgaaggaaatgtgctcaaaattctgttgcagaaacttggcgatcaccatgttcatcaaatggtcgccgtcgtcggtggttccaaagcccaaaaagcaaatgtgttcattcggataattgtcctgcttgaacttcatcagcgaatccatcgcatagccaaacttttctgggtcatcgacaagctgaaaaagaaaaaacagacaatttcatccgatttttcagcttacagaccgtttcagcactcaaattgtatgagccggggatggagccggcgttgaagtgcttttggttgcgtgtgtcaattacaaaatagccaaagctcgtgctgttcagcgtcgtcacgtcaatggcacgtctgtacagctcgtggacggagatgggcaagcaaatgagccgattcagaggaatttcggcgtattcgtcgatgagatttgagccgaaaagcatacaatgaaagtcctaccggaaaattattacgaaaatattaatgaatttttttaatgaattaacttctctgatggaaattggcgttaatttgaggtgcacaaagcaaatttccaatagatcgttgacatcttcgcgtactgatcaacgaaatgcgatcaaaaagaaagaaagaaaagttatcaaaatttgcccacccattcggccgggaacgcttttcagcagggcgatgatgtcatcacgcgctttcatttgcaaaagctcctcacggaccccccgggtgaaagccaaggcaatgaaaaatatcagaaaaggatcgccctaaaatgagaaaatcaaatgtaagcgaagtcgacacccatccacgtacattttcaaaataattttgccaaatggtccagcaaagttcggcttccatgtctttgctcagcaatgagcagaaccagtcccggttgaactgttcgggctggatttagaacgagtccaagaaggagcagagcctcgggtcgtgggggggaacagaagacggtacaggtcgaacatttggagga

SEQ ID NO: 19626 - DNA, 1154 bp, Heterodera glycines
ctaactactctttttgatcaaaaaattcaatatatttattttattaaaaggattggttgatctctagacgttctgtcatttgattaaatttgatatttaaccaaaattttgtgatgaaaaactttttggaattaaaaaaatttgaaaaaacttcggcttcgaaaacttcgggtttttgggcttcgagcttcggacttcgccttcgaataaaaattgggcttcgccttcggcttcggcttcgagtgctaagccgagcttcgcccacctctgatccccatcccatctgctgcattctgttgcacctccttttgtgccgctctgctttttcacacctcttccaccgtggttgtacctcttcaacccgtggttatacctcttataatcacagttgtacctcttctaataacactgtacatcttccactagtggttgtgctttacaacccaatagtttatctaggtagcgaagctcaaaaagcgcgcagcgagcattgttttgttgctttttctttactttttttgcggtgcatttttggagggtccaaatcttacaaaataaaaatgttcttattcgggcgattgttcttattttgttcttatttcttaaaattctccagaaaatttgtaattttatggcataatttatttgattttcaaaaaatttttcccggcggcgcctatcggcaccgccggatctctccccttgcacgtacaccaaatttttaggaaaaagcgcgccgcaaaaaatagtgtttttagaagcaacaaattcttcgcttggccttaattgcataattgaactttttggtgaaaatctgttaacaaatcagaacgaaattacaaaaaaatttccggcggcgctatcggcaccgccagaccctctccccccgcctatttctcagagttttttggaaaaatgcgcaggaaaaaaatgtaaaaatctggttttttgatcatggatgctctgaaatttacaatttgcttatttcatcttcaaaattgctaaaaccaataatgagagacgaaagatataacatttaaaacattttagtcgaatagattgtaaaaataactgatttgaagcaattttgcaaaatgttcttatttttgaccctaaaatcttattttttggccctgacgttcttattttgaaaa

SEQ ID NO: 19627 - DNA, 1958 bp, Heterodera glycines
  unsure (1)..(1958): unsure at all n locations
aaaaacaaaacaatattttttttttctttttttttttttttttttttttttttttttaattttttttttgttaaaatagaaaaaatttgggattttttttttttttcccccaaaaaatttaaattttttgggttttggaaaaaaaagtgggccaactcttaaaaaaattaaatttaaagggtaaaaaaaaattttttttatttaaaaaccccaaattaatttaaatataagaaattaaattattggaagaaaaaataaactttataattttttatcaaaaaataatttaaaaacaaagaaaaattttcctaatttttcttatcggcgaaatataaaaangttcatccttgatcttcaaaattacttcagaaagttatgtcttttttttgaacattttttgatccgaactttctgaaaactcaatgaaattttctgaaattttttagctaatagagcaagccaagagctatcgcatgaaaagatcttttaatttggttgtgtntaagaaagttatgacgggttttttggcagttttacgaaacgcccatgttggcagtttttacgaaacgactagcacccaaaattaccaatttagtgggtttttgcctaactcttttaatcgggttgtataaattgataataatttttattagaatagacaccaataattaattagttaatttatttatttattttcaactatgcattaatatttatgtttcattgtataaaaattgcttcatttttttacaattttctgtaatttaaaattttgttctttggtatgtttcttctctaaaatgctcaatctcaaaatctgatcagatcgtgcgagtcgatccaaaaaaaaactcatcttccaccgaattatcatttcaatcttcagtctaaaattgttatttttttcctgaattctccatgctctgaatatgggtgggtatatccccaaaaaacgtcaaccagccgaaacaccgctggaaaaaacgtcgccgagacaaaacgtcgccaggacataacgtcgccgcaaaaaaaataaataggattttcaaaaattttataattttttttctgaaaactaaatgttactaaaaacaaaattttcagagtttctagaaaaaacttatgctaagtaactaaaaaaatgagtggaccccaaaatttcgctgccgaaaattttttaaaattttaaaattcgaaaatttaaaaaaaattgaaagcgattttttgttaatggaactcgtacacaagcaactcttccaataaaaatttcaattaacaaagcgtaagctttttctcagacttgaataatttttaagcttgagaattttttaaaatttaaaaaaaatttgcggcgacgttttgtcggcaacgtttcggcggcgacgttttttcttgctccgtctgattagtacgaaaaactttgcgaacaaaagttgggacttttatttacatattcttacatatcccggggttttacacatatttggtatatattttggattttttaacacttttttatagatttttaaagcaagtttttataaatgcgccaaaacccaagaaaattttgctaattttttcgtacatattttaatttttttacattttgagatttatagaaatctcttgtgaaataattaaagttttttttaacaagtacccctaaaaatggtatttcaaaaaaagagatatcaaaaattaatttttaaatatattaaaaggtgattctgctgagcctattagatcatcttttatggcattttgtgcctatttcaccctttacaaacaatttttttgcaaaaaagaaccatttgaaaaatttattaaaatatttggtacattttgtttttgaatatatttcttacatatccgaaatgtttcttgcatatatatgtncatncatttcttaagaaaaaaggaaaatttttgacaaatttttggcactttttaacatctat

SEQ ID NO: 19628 - DNA, 1371 bp, Heterodera glycines
aaattgcaaaaattagatggggtgcgtccctttgtaagaattctctcgtcgtctaacccgccccttctcatgcactatttcagggtctaaaaaatgaaaaaaaacaaatgatttttttgttaaaaatcatagaaacttttcagcttttaaattttaaacccgcacgattccgcgattcaaaaccgtgaaaaaaagcgagaaaactattgcattaaatttaagaacgaaaattttgacttgaaaatttcaaacatttgcctccaccttcttttaagtcccacccgagggcgagacagttccaaaatttgggtgccacataaatgtggatgtaatagtaccttaattggactatcactagtcaatttaggtgggggattttgggctctaatggaactgaaaattgcaaaaattagatggggtgcgtccctttgtaaggaattccctcgtcgtctaacccgccccttttcatgcactatttcagggtctaaaaaatgaaaaaaaaacaaatgattttttttgttaaaaatcatagaaacttttcggcttttaaattttaaacccgcacgattccgcgattcaaaaccgtgaaaaaaagcgagaaaactattgcattaaatttaagaacgaaaattttgacttgaaaatttcaaacatttgcctccaccttcttttaagtcccacccgagggcgagacagttccaaaatttgggtgccacataaatgtggatgtaatagtaccttaattggactatcactagtcaatttaggtgggggattttgggctctaatggaactgaaaattgcaaaaattagatggggtgcgtccctttgtaaggaattccctcgtcgtctaacccgccccttttcatgcactatttcagggtctaaaaaatgaaaaaaaaacaaatgatttttttgttaaaaatcatagaaacttttcagcttttaaattttaaacccgcacgattccgcgagcgattcgaaaacgaacgaaaattttgacttgaaaatttcaaacatttgcctccaccttcttttaagtcccacccgaaggcgaaaaaggtcccaaatttgggtggccacataaatggggatggaataataccttaattggactatacccaatcaatttaagtgggggattttgggctctaatggaactgaaaattggcaaaaataaatggggggcgtccctttggaaggaattccctcttcgctaaaccccccccttttctggacttttttcggggccaaaaaatgaaaaaaaaaccatggaatttttttggtaaaaaacaaaaaatttttccggttttaaatttaaacccgcccaatcccccgattcaaaacggggaaaaaaaaccaaaaaactat

SEQ ID NO: 19629 - DNA, 1517 bp, Heterodera glycines
ttttccatttatgctggattttgagaacagaaaaagttgagatttcgggattttggaacccgctcggtctcgatcaactcaggggagttcataaaaaattgtttaattgtttgctgtggaaacaaaatttgtacaaggatgaacgcattgtcggcggcggggtggcaggacgtgattgatggtgctgctgctgctggcttagattgttggaacctgggcgaaatttaatttaatttttttgtcttacagtacaaagtttactgtaatccatttccattaccaccgtagtttatcaagcatataacataaagtggttcatgactcggaataaaatcattaatataaaaatctaccaaaaactgtaatttaaaagaatatttttcctacagtatccttccatatgtcgtacaatggatggcttttatgtcctaccgtaatccagcattggaccagcgccggtgctgagttggatgatcggcaacattccgccaagcagagcagacggagaactcctttaaaaataaatttaaaaaatttttttaatttaaattcgaaaaaattttactgtgcgccgccagtcacaatgcgaattcgttgtcgcatatatttcatgagggcaagtttgatcaacgacaaaaagctgaaaaaagacaaaaaaaaaataaagaaattttttcattcggcgtattccatatattttccagaatatatttcaattttaattttttcccctttattttttacttaaaaatttgggttttttatagagtgccacgggaccgggacctggtagcggacaactgagtccaactgagtaccaaggtcccggttttgaccgggaccgggactagtcccggttttttcgcggttttcccagccaacaaattcccggtttttcaacccgaaaaggtcccggtccagggtttgcccaaaattcccgatcccgtggcactctagttttttatattaacaataaaatcctagttttattttattgttttataataccgaaacgtcttacacaatcatgaagcagacagccaaccaaatgtccaaagctgcaaaaatttaagtaaattttttgaaatttttaaattttatatacaaccaagaaaatttacctttcaaataactgactcttggcatcacctgaaaaaacattaaattctaaaaacacaacaaaatgcaattgccctgacgaacttcattgtaggagaaaagcagaaaagtgatggtcaaaatgctgtaaattagctgataaaattaaaaaattggcctcaaggctggcatacatggagatcatgtctgaaatacggtagttttttttttgttggatacggtataattcaattttatttgtatgcatttattatagcccgggcgggaacgggacctccgccgggactttcctgggatcccaatcctggcttttttggaaaaagtgccgaaatcggaatctcgacaaaaaccaatatttgaatccctttaatcttcttatcctggcgcctggtgccaat

SEQ ID NO: 19630 - DNA, 1178 bp, Heterodera glycines
atttaaattattttttaatgtaaaaaaaatttaaaaaaattatttaaacaatttttaccggtcgcatatgattccaactgggaagtgacaaatgcttctttgattcggaagtcgggcagccgaattttgtgcagtttcagtgcctcgcgttggcccttggaccagccgtaggacacctggtccgaggtgtacccatctggcaaaataatgcaattttttaaaatagttttcgaggttccgacaaaattagggttttccccgacattcagggagagaaaagtcgtggatcggggaggaaattctgtgaaaaaatttgtcggagaaggttagagaaattaaaaaaaatttcggtgagcaacccctaacaccatgaaaaaagccttcattaaaacaattaattttgtaaaattgtatacccccattaaaaaaatcaggcaaaaaattttacagctttcaatgccaagcttgcaggtctgcgaatcgaatggaaactgtaaagagaatgaaaaaaatattgaaaattaaactcattaaattctaattgggtcttgccaaagttaaatccatggggcacctaaaaaaggagaaaattttaaaaaatttaaaaaattcattgctttactcggccacaacggaaaggcgacgactgtaaagaatttggccattggactgtagtctgaaaattggacaaatgaaggaatgtaaaaattttaaaaaatttaaattgaaataatttttgtattgactttttaaacttctgaagaaaatttgtgtaaaagggcgccgccggagaaatttcaactttttaattatattacaaaaaattgcccaaaatttttatgacgaaaaattattagtttgccgtaatttctttcaagaaatcgtttcaataataaccaaataagtttcagttactgtaccaaaattatcgaaagatcgtcaaaatcagtaattttgctctcaaaaataccgtaaaaactcatagaaatttcttgagtggatactctcgggttttcagctttcgccaatcataatctttttttaaatctccttatctctctcgtaaaccaaattccgttcctcccggttccaatttttgtaattttgaattttgctctcgcccacatgagcagtgatcggtgtgagatggactgttcgcgcggatttttagtcgcaat

SEQ ID NO: 19631 - DNA, 1627 bp, Heterodera glycines
aaaaaaaaaacaaaaaccccgcgcggcggggggtttttttttttttttttttttaaaaaaaaaaaaaaaacccaccacccgccgggggggtttttttgttttttttttttaataaaaaaaaaaaaaacccccccccggggcggggggttttttttttttttaaaaaaaaaaaacccccacccgggggggggggtttttttttttttttttaaaaaaaaaaacccccccgggggtggggttttttttttttttaaaaaaaaaaaaccccccccggggggggggttttttttttttttttttaaaaaaaaaaaaccccccccgggggggggatttttttttgggtttttaaaaaaaacaaccaacccaaggcctgggagttttttttttttttcagaaaaaaaaataggtccacccaggggtaggaagtttttttgatattcagaaaaaacagctccagccagggctaggagttttattggattttcagaaaaaataggcccagccagggctaggagtttttttcgattttcagaaaaaacaggtccagccagggctaggagtttttttggtttttcagaaaaaacagtccacccagggctaggagtttttttgggttttcagaaaaaacagtcaagccagggctaggagttttattggattttcagaaaaaaaaataggtccagccagggctaggagttttcttggatattcagaaaaaacaggtccagccagggctaggagttttattggattttcagaaaaaataggcccagccagggctaggagttttcttcgattttcagaaaaaacaggtccagccagggctaggagttttcttggattttcagaaaaaacagtccagccagggctaggagttttcttgggttttcagaaaaaacagtcaagccagggctaggagttttattggattttcagaaaaaaaaataggtccagccagggctaggagttttcttggatattcagaaaaaacagtcaagccagggctaggagttttcttggattttcagaaaaaaataggtccagccagggctaggagttttcttcgattttcagaaaaaaacaggtccagccagggctaggagttttcttggattttcagaaaaaacaggtccagccagggctaggagttttattggattttcagaaaaaataggcccagccagggctaggagttttcttggattttcagaaaaaacaggtccagccagggctaggagttttcttggattttcagaaaaaacagtccagccagggctaggagttttcttgggttttcagaaaaaacagtcaagccatgggtaggagttttattggattttaggaaaaaaataggtccagccagggctaggagttttcttggatattcataaaaaacagtccagacaaggctatgagttttattggattttcataaaaaaaagaccagccaggcctaggagttttcttgggttttctgaaaaaaaaaaaagccacggcgagaagtttttttgttttttatgaaaaaaaaaaacccccccgccggggaggggtgtttttgttttttttttaaaaaaaaaaaacaaccccgcgggaggaggtttttttttttttttataaaaaaaaaaaa

SEQ ID NO: 19632 - DNA, 2251 bp, Heterodera glycines
  unsure (1)..(2251): unsure at all n locations
aaagtaaaatctgattacatattcgtgatcagcggcccaaataacncctaaagacatgtttttgnaagatttttgacgaaaaattttttcaactcaaaaatcctatgctcaccctttggtcccgaatccaaaaatcacttttatttttataacaattcttaaaaaagtgataaaaatgccaaaaaaaatttataaaatagagcaaaaaattgcggatttttgtagtattttactcttctctaatgacttttcagaaccgagttctgaatttttttctgaaaaatcgaaaatttccagaatttctggaataactttttttgtttttgtggtataaatttcaaataaatctcataaaattctcccgattttttgctattttttatgctttaaatgagctgaattggaccattttgaggcgagttatgaatttttataatttaggttgaattttcaagggccaaaaattattgatttttcaaaatttttttacctccctccaaaaaatccaaaacgcaatataaagtgcatattcgtgttcagcacctcaaactaccccagaaaagtattttttggcaattttaggagcaaaaaagtttctcatgaaatgcaaatccatggggtcccccctttggttttgcatttaaaaattcatttttgttttataactttttttatattaaagataaaaagaccaaataaagcacataagatagagcttaaaattctctacaaaaatggtctaagacgatttttcgctaaaatcaactcatgacgagttatgagcccgggactgaaatgtcccggtcaggccaaaaaatttttctatttccgggaaaaaatcgaaattttttcaaaaatgccaccaatcgatagagctcgaaaaactatgttttgaaagtgcccttagtttccctgggaaaaatcggcaaaaaaagataaaattcaaaaacgaaaaattttcgagggggcctagctcgaaaaattttgaaaattttcaaaatctgaaaacgccatcggatgcagctttaaaaactacacaaatgctcaagcggcgccaacccgctccgcttaacccccagcgagttattcgcgaaattcgaaaaatgccaaaaatggttttcaaattttgccaaagtgtacaggctaggcttttgcagctaggcatgccaaataagcgccagattatccctaacactccaacttaaaatcctcccaccaagcgtttttcgctcccgcttcttcccgcaatgatacaggccggcaaaaacggacaaaaaaatttttgggccgtttcagcgccgctggcgctcagttggccaccggatcgaaaaacccgtatttttcccagatgcgccgtcaaaagttggttgagtgatgtcacactcccgagcccctcccggcgcccgttcccgagattttggttttagagacgagtcctgagattattctatatagagtagaaactagcgtgttgtggcgcagtaattgctcggtgtagacagtatacttgtgagagatgaaaagaatatgcattaacatgagcgcttcgcgcaaaggacttcgttgctagtgcttgcgcggcttctttgtctaatagattcggtaaggcataatgcgttcattcggccgcttcccggcctcattttattattcttaattaattaaatttaactaatttattttcattaaaacattaaaatattatgctgttttaaaattcatttaattaaatataaagaaataataacaaacatatgaaaaatcatccaaaatagataaaagttaattaaaaatgcattcacttttaaatttttctttatttattttatagaaaaattattttcatttttttaaaattgaattataaaaaataacaaaaataattttgacttaataattagcattaaaatatagcaaaaaataaatcaaaaaatgatttacatcgtccgggttcgaacctgaccaactcaaaatgatgcctcagaatccccaatcacgcagggattctgaagtcttatcgatttctaaagtgaaatctgattacatattcgtgatcagcggcccaaataacccctaaaatcattttttggaagatttttggtgaaaaaaattttccactcaaaaatcctggtcggtcacacctctttgatcccaaattccaaaatcacttttatttctataacttttttaaaaaaagtgataaaaagctaaaataaaatttataaaatagagcaaaaaattgcggattttt

SEQ ID NO: 19633 - DNA, 1304 bp, Heterodera glycines
  unsure (1)..(1304): unsure at all n locations
ttcaagtaaggaagccttgaaattctgtaactttttgacgtatacgagtgcttactttactattttttttcacattataatataaaatagaaaattttataaattatacacaaagcaataaaaaaaacgtaaaatgaagcaggatgtaaatgtaaaaaagccacatcattttcgcatattatacgtcatttaacattcatattgcatagcgcaatttcatttccattggataagcatatcaattaaaaaattcatagccaggctaacatttgccatcttcgcgcattaaaaattaaatcaaaatgctcaggcataatgccaaactaatttttccatggtttagaaatggcgacttttgcctttcattgaccgaaacgttttcgagattcgttaactaagatggggtcaaaaccgcaaaaacgcgagaaaataaatgagataaaatttttggaatttgataaacttagcctctggatggaaaagtcacagagttaacttctaaataaattcttgccataatttgaagaatagggaaattagttttttttaaatattaaaattgcactaattttttaataaaaattgcaaaactaaagttttttttcttattatcggccttttttctaatcattaattggtcttagatgaaatttttgttaacatttttgctttcatgtatcattcttcttcatccgcaagtgaacgggaatccattcaatgaagttgtttgggctaacaactgccgaaaacacatcaacgaaatggaaatttcggccaaatatggtgggaaatactttaaaaaaaacataaaaaataaaattatttaaaatttaaatttgtcaaaatattaatgcttttaatgagagcacataactttgaaaaattattctaaacatattcctgaatttgaaagactgtgggttttaattcagaatgacggttagaataattccattaatacataaaaatatttttaataaatttaaaattacatacaatttcgtttttcaatgttttatttaatttagaatccaattctaatccgatcactagataaaacagaggttgggacctgttgagttcgctttttctcggactttgcaccgtaaaatgaccttaagaattttacattaagaaataaaaattagtccattctataaattttaaaaaagttctttagttgactattttattanattaaaaatctcttganaatatttgtatcatttgataattattanaaaattcgtttaaatgtttncataaattgtggcgacgnntttaaaatttgtcaaanaatttta

SEQ ID NO: 19634 - DNA, 1278 bp, Heterodera glycines
  unsure (1)..(1278): unsure at all n locations
attataaaatgaaattacaacgtggttgatcacttcaaaagtgcaaaaatcaaaaatctgattnttcttttttttttaaagaattttntaattataaacaagataaaagtgataaaatttacctaatattaaaaaaatcattagccagatgaagcataaatggcgtattttccatttaaaaaaatatatatttgagttcatttttaattttattcatttctaattgaactttaaaatattaaaaaatttaaaagtgatctggtaatgattttatttaatattaagaaatattaattatttttttcgaaatacaacaaaatttaaattacttttggacaattaatttatacatatgttgtccacaaagtaagcggattttcccttttgtggaccttttctttatgaaatcagatttttggttttttgcacttttttgtgaagcgtccgaatttgcactttttgtgaagtgacctagcactaattataaccattaagaaaacggtgcaaatctgagcagagctttgcataatttgacaaatgaaattggccaaaatggaaagtgcgaattgtcatacgcaattcacaaaaattatattaccgaagctaacaaaaagaacaacaaattcgacgcctcaaattcgcactttatgtatgaattggacaaaatcaacaaaatttcaattgaccaatcaacgaacacattgccaactgcattgatatggattaatcaattgcgcaccgatttcgccacgttggtgccagaaattgggctggtggacatttggcaaaacgttgacagttacacggaaacccgcgagttggtggtgaaattatgtgaaaaaattgctacaattcaaacagatgtgtcttacaatggcagtaatttggttaatcagatcatcagtgaagcaaaagataaattggaggacttcaaagaaaaaagcggtgggtcaaattgagtcgggcgcaaatttgtcactggttgtggtgttcgagatacggtattgaaccttaacgaattttgcagactaatagagaacactactaatatccaatgataacaagaattaaaatcttagttagatttgagcaaagttatgtgtaaaaacctatgattatagcacaccgcgcttcgtctcgggaaatattgcccgccatcaaaacgattaattagggaagggtacaggatggtgacaattagatgggaaataggacggggcgagagttcgtcatgaaaatgaggaaataaaatttttctcgttagtatctcgacctgca

SEQ ID NO: 19635 - DNA, 2040 bp, Heterodera glycines
  unsure (1)..(2040): unsure at all n locations
ttttaaaagattgaaaaagtgtctgaagagcaaaaatgaagcactcaaattaatgacaaaggaagtttttgaacaattccgtcaaaaaattgaaatgaatntaagtctttctgacttaattcttcggaaatgggcattaattgccaatagtaaacttggcgaaaatcaaataatcgggttccaagcttcaaatacatggactaacaggttcaaaaaaaggcaccggattgtatcgagaaaggtctgcaaaataaaattattaaaaaattaaataaaaattaagatcacaaaatttatttcaaaaaaacattttgtgaattatgaaaatgtaaagaaggaagcctctgaatttgttgaaaatattcggaaaattatcaaagatgagaaattttctgaaagagatctgcttaacgcggaccaatccggcttcgaacttgaaatgcatgccaagcgtaccttggcaccacttggaacaaaattagtcgaatgtgtagtgcaatcggtggaaagtactacacacagctataccataatgccattaataacggcgagcggaatattgctgtcaccactatttatagtcattgcagaacgatcgggaaaattcccgaaaaaaggaatattccaagtttttaaaaaatatattaccaaaatattggcaattttaaggcaaaaaacatttattcggttgctaataccagtcatattatgaccaaaacattgatggtcgaatgggttgaaaatgttctatacccaactttgcgctcaaaccaaaaaactatgcttttggttgatagttggccaggatggaatgaattcgagaccaaagaaggggtagaattaagcgtaaaacaaatacccaaacatggaaccggaatttgccaaccacttgatgtctacatttttcggtagattttttgtgtaaatattttaaaaagtttaaatttagtatgtggaaagaatttacaaggaaagtcactcaatttgttattgtttgtgaaattgatttaaatttgcacactcgggacaatatcattaaattgcaatcactgatacacaaccagctccaagcaagccggtttaatgcttggataaatttcgcgtggcgaaaagctggattttatgggaatgactccttcccaatttttacgcacccagttaaatattgttttgatgcaaaaaagcagccacatcaatgccaaaagaatgaatgtgccaatgttgttttaatccggtgcgctcattgcgaaatcttcctatgttttgaacatttttttgtcaattaccatatgtgtactgattaaatgattttgatttagagaaaattaaaataaaatttattaaaaacaataaaaaaaaatgtttgcgtaggggggactcgaactttccattacaaaaatgaaatcgtgacacacaaccaccctgacaaccggtcgcttgttgcttctccttttaaatttaatataatataattattaaatatttaaagcctcatatctcggcacagaagcttattccgcagctagaaaaaaaatttggcaatacaacccaggggtggtctacccacctacaaagtttcatttggaagttccaccatcacccgaacactctcctttgttagtgaagaaaatactcagtgtcgaatttatccagtgtcgaaattacatagcgccccgccagatccccctgttcccaattttttttttgaaaaaagcgcgccaaaaaagtagatatgcagcgaaatgaggaaaatagtctgcgaatagcaaaaaaaaataggggaaaaaatccatccaggtgaaattgaaaatcggaataattgtaattggaaagaggtttggactagagttgtacgggacagggaattttggcaaaaccgggaccgggacttttgggttgaaaaccgggactttttggctgggaaaaccgggaaaaaaccgggccttttcccggtaccggtcaaaactgggtccaaaccgggacttcggtactcagttgtacgtgtttttcagtaccaggtcccggtcccgtacaactcta

SEQ ID NO: 19636 - DNA, 1576 bp, Heterodera glycines
ccaccccttagtcaaatagacatttaatgcttggctaacagtttcattgtttttcgtcgagggccaaacatttctgcagtattcaacatgctagtattccattttctagatatatacagccaccatttaaaaaagttttaaattcaaagacataatgtgaatatatgctctttaaagggaaatttatagcggattaactaaatttctgaaatttcaatttatgttctattttattactcattttcattgtctttttcagacttttctctgcacaagaaattaaatagttctctatttatttaaatgctaactttgcataaataatttgataaaaataaaattttaccgaaaattttttctctcagttgaccaaaataataaatgcctaaaagccgtactatttttgcttcccacaataacccgaccaatatgaaacaaatttataaaattggccaatataattgagaaattttaaaatatcgctaaagtttattaatgaatatcataggccattgatgccctattttcagaattagaaacaaaacacagtgtctttattttgacttccgcatttattttcgttatgcacatccaactgaaagatacggacttttactcactgtagttcctgggtaatttataatttccacccttagtcaaatagacatttaatgcttggctaaaagtttcattgtttttcgtcgagggcctaacatttctgcagtattcaacatgctagtattccattttctagatatatacagccaccatttaaaaaagttttaaattcaaagacataatgtgaatatatgctctttaaagggaaatttatagcggattaactaaatttctgaaatttcaatttatgttctattttattactcattttcattgtctttttcagacttttctctgcacaagaaattaaatagttctctatttatttaaatgctaactttgcataaataatttgataaaaataaaattttaccgaaaattttttctctcagttgaccaaaataataaatgcctaaaagccgtactatttttgcttcccacaataacccgaccaatatgaaacaaatttataaaattggccaatataattgagaaattttaaaatatcgctaaagtttattaatgaatatcataggccattgatgccctattttcagaattagaaacaaaacacagtgtctttattttgacttccgcatttattttcgttatgcacatccaactgaaagatacggacttttactcactgtagttcctgggtaatttataatttccacccttagtcaaatagacatttaatgcttggctaaaagtttcattgtttttcgtcgagggcctaatatttctgcagtattcaacatgctagtattccattttctagatatatacagccaccatttaaaaaagttttaaattcaaagacataatgtgaatatatgctctttaaagggaaatttatagcggattaactaaatttctgaaatttcaatttatgttctattttattactcattttaatagtctttttcagacttttctctgcacaagaaattaaata

SEQ ID NO: 19637 - DNA, 2477 bp, Heterodera glycines
aaaaatccaggggggatttaattttatttatttaatttttaatgtaaaatatttttttaataataaatatttttataaaaataataataataaggtcatcgttctgtgttcgctaaacacccaattttgttcaccgaatctggcattttctattttgaaatcagaattaaaagctgtaaaaggtgaaattacaaaaaaaaattaagttcgatttgatttatattttaatttagtctttgctcaattggatttgccaccaaagcgatgccattgggcgaaaatgttggccaaaattcggacagttgtgcataccaaagcgatggccaattttggaccaatgggtcaaagaattttggaatgccgaacttttctcgtggcgatttcgtcggttgtggcattaatttggccactcggcggattatcttcacaaagaatggccaacctttgggtcttttattttattttaaattatttttatttgaattatttttcagatacttccgatttgttcctttcgcctccttttggttttccattgtttccgttcatttctttgaatgattctggcgatttgattgagacaaattttggaccacaattcaaattcgaccccgcaaaagtaaagagaacaaaattatttaatcaaattcagtgcagtttttctcggcagctattttttttatcaaaatttatgaaattgcacgccgaaaaaagttattgccgagtattgttgtgtaaactacaacagagccctaaattgtttggcctgaacaaaatggacattagtgccgatggtagcccctaattgcattatcgtaaaaacatgttataggaatcgctgatcacgaatttacatccatttagaccaatcccggacctgaattcaaacaaaaagtcgaaagcacattttccaacacatttatacaactaatcactccgaatgcataagtgtgtttcgtgaagactgtgcctataacatgttttacgacttaaacgggggctaccaacagcactattatcacctgaccattttttcaatttttaattctagcttcttttaaccaatttaagaacaaaatcaatcattttttcaaggactccaaaaacccaaagaaaatttttaaatttttttgtaaaaatttcttcatttttaaaggccgaagctgagaatcgaaagctgaaaaatgaaattgagaaaatacaggaaaaatttgacaagaaggaggagcaattggagaaggatttgggggaattgcagaaaaagttggtcgaaatggagcaacaacagaacgaacaacagaagagcaatgaacagatgaaaaaggtgggaaaagaaatatttacggcacattttgaacgatttcggcagaaggcattccaagaagagcttgagaaaaaggtcacggaacgaattgtggcagtgcagtcgaaggttgacaaaatggaaatggcacatcaacagcaaaagggtaagggaaatgagcaacgattactgtacctaccgtaacattgttttattactgtcaattattaattgaatttgttccaatttaagttgtcactgaaaaggcaatttttgagcgaatcggcgaattggagggacaacaaaaacaccaaaaacagcaaggggaaagggagacaaacggcgagaatatattttcaatatattattagttttaattatatttttaaatctaaatgcttttcatcttttaagaaatacggtatacgacttttgaaaatatcaatttgaataaaaaattaattgttttctatttttagcattcttacaatcgcaaaatgatcagaagaacattttggaaagaatcagtgaattggagaaagaacagaacagctgcagaaggaaaacatcggtaaaatatcaaaaataaattttaatggaataatttatttaatttcaaaaacatttaatgaattattctaattttttttttgaattatacgaccttttcatgatacaatttgataacttaacaacaattttaaaaaattaattgaaaattgcttcaaatttcagtttcggaagatcatttgaaagcaattttggagagaattggtcaattggagaagcagcaacaacagcagacaaaaggcgaggagaaattaaaatgaaaaaatatttaatcgaattaaatattttcatttatatttgtaaataaattcgatttttaagctactgcggggcaattgtcaaagattttggaaaaaattggtgaaatggaaaaacagaacgaaaacacggacaaaggcgagggaattttagcgaagaataaattatcaaaaattctttttttttgaataagtttcttatatgaattaagaatttcatttaaataaattataacatttttaatttttgaaaattaattttaggaactttggagcaattttcaaagatggaaaatgatcagaagaacaatgggaaagaatcagtgaatggagaagcagacacagaa

SEQ ID NO: 19638 - DNA, 2034 bp, Heterodera glycines
  unsure (1)..(2034): unsure at all n locations
aggcggagcgcaaataccgtatcaactcggagattactgtttcttacggtcncaaagaccacccaccgcaggcaaatggacagctcacgcgaagaaagcttccggagattcctcctcggacctttttgtcttctcagagtctttctccccattcaactggctatattaacttatccacaaacgcattgtctgtcttagacggacgcagggagccgaggacaaatcaaaatcatcagcaggtaacgaaaagcaaagctaattggaaatgggaagggaaaagacttaatgagacggaaacggtaaggaaaagagcaaggaatttgaaaaattaagaatactttttcaataatctgtatattttgaattggtttaagctgatctcaatgcactcaaacgtttgaataaatttataagaattggagaagtaaacaaacagaagtgaacgaacgcaatttatataaataataaatttatgcatttgattatttgtatgaaatgtctctaatttcctcaccatttttcatttttattaattcttctcatcttaaccgaatatcatatcttacttattgtatataaatgatctgtgttaatgagtagggcttcgttttttaggcacaaaaataggcaaataaaattttttattaacattttttaggtagcaaaacacataaaaaattaatcaaaaaaagctaatttggttatatttcaattgttttaaagtttttttttcgaataaggacaatatttatatcgtataagcttcaaaccaagtggaaaacgcattttcgagcttattcgagcgtatcaagtgcacagaaattttaggcatttgcctaaaaaacgaagccctattaattgagtaagaattatttcgtgtacattgtcaaaaatttatgtaaagttaaactaaaaatgaatatatatattcacaatttgtggatttgtatttttattatttggccattttatcatatcgaaaaatgaatagaattattttatcatttaatcattgccatttacaaaaaaaagaattgatttattcgccatttttatcagatgaccgccataacaaattctgaattttatcaaattattgtaaagcatcaaaaaaacggtcaccttcgaagctgattttgccgtctccgtcggtgtccgcttctgtgaataactgaaattgtgccatttgagtgcccttctttttgttggcccatccctcccaatttgcctgttcaatgactttgatcggaaaagcgctgcccaatcgcaattccatcaccaattttttcatctcttccgggtaaatgaacccatcgttatcctaaatgatggacttaaatgatcaacattggttcttcaatgtgtcggcttgccctgtcaaacattcggaattggttcagcaattctttgcgcatctccgcccgtccgtttccttcgcccgccctttccgcctcattcttctgctgctgcctgtccaagtccttctcctgcagccgcatcatttgcacaaattcttcgaaggtcactacgccgttttcttaacagaaacaccaatccattgtccatttgtcataccattttcccttgccaatcccactcactcactgtcttttgtccatttgtcctatgccatttgtcccatgccaatcccactcactcactgtcttttgtccatttgtcctatgccatttgtcccatgccaatcccactcactcactgtcttttgtccatttgtcccttgccaatcccactcattcactgtctttgtccatttgtcccttgccaatcccactcattcactgtctttgtccatttgtcctatgccatttgtcccttgccaatcccactcattcactgtctttgtccatttgtcccttgccaatcccactcactcactgtctttgtccatttgtcctatgccatttgtcccttgccaatcccactcactcactgtctttgtccatttgtcccttgccaatcccactcattcactgtctttgtccatttgtcctttgcccatcccactcactcact

SEQ ID NO: 19639 - DNA, 1038 bp, Heterodera glycines
tgtctttgtccaaatgtcctatgccatttgtcccttgccaatcgcactcactcaatgtctttgtccatttgtcccttgccaattgcactcactcactgtctttgtccatatgtcctatgccatttgtcccttgccaatcgcactcactcactgtctttgtccatttgtcccttgccaattgcactcactcactgtctttgtccatttgtcctatgccatttgtcccttgccaatcccacccactcactgtctttgtccatttgtcctatgccatttgtcccttgccaatcccactcattcactgtctttgtccatttgtcccttgccaatcccactcactcactgtctttgtccatttgtcctatgccatttgtcccttgccaatcccactcactcactgtctttgtccatttgtcccttgccaatcccactcactcactgtctttgtccatttgtcctatgccatttgtcccttgccaatcccactcactcactgtctttgtctccatttgtcccttgccaatcccactcactcactgtctttgtccatttgtcccttgccaatcccacttactcactttcattgtccatttgtcctatgccaatcccactcactcactgtctttgtccatttgtcctatgccaatcccactcactcactgtctttgtccatttgtcccttgccaatcccacttactcactttcattgtccatttgtcccttgccaatcccacttactcactgtctttgtccatttgtcccttgccaatcccactcactcactgtctttgtccatttgtcccttgccaatcccactcactcactgtctttgtccatttgtcccttgccaatcccactcattcactgtctttgtccatttgtcccttgccaatcccactcactcactgtctttgtccatttgtcctatgccatttgtcccttgccaatcccactcactcactgtctttgtccatttgtcccttgccaatcccactcacacactgtctttgtccatttgtcccttgccaatcccactca

SEQ ID NO: 19640 - DNA, 2362 bp, Heterodera glycines
atttaacatttgcaaatggcatttttactttttttttcttcttcgatcccagtcctaatgccaaacttcaagtgccgaacatctgaatacttttttggggaagagcaaaaataattggaatttcgagcatcgaaaagctcaactgattcgattagtcaattaaattattatatcatatttttcaatttcatttatttttgagtgcctaaaatatgtgcaataaagtttagcatttcaattttgtatgggtcttttccgcactatgacacttatacgccttttctggcacataattcgaaaagccagccattcatatttgtttaattattacgcaaatttataaaaggcattagtcgttgtatttttgcaaaagtgtttacattcaaaataagaaagcaattaattagactcaaaagaggaaggcaattaaattaattcaccgctcggctcaatttatggcccgcttcttatgtttatgctaaatttaaatgattgttatcagtgaccacttcacaatttatcactttttgcactgagtaaaagaaaatatatattttaaattccctaaattttcctttattttttgatcttttgtcttttttctcagctaaaaaacgtaatttccaggcaaatacaaccaaccactttttcacgtcatgaacttaattgtgttgtgttgcgtttgtcggtgatgtgtcgttcatcaaattaatgaattgaaggattatctcgggattgaatttgttaattgtccaattaagcaacataatttggctgcattttcttctcgtccatccaaatccgtcccaactctttgcacgggtacgccccctcccctcccccaacctctcaaaatgatcatcaacagatttgtaaattttgaacagctgctcgtccgtctccgtctgacttccccttttcgcttttcctatgctcttctcctgctgtttctgctgatttgcctccctaactcatcttcttccccaatgatcaaccttctgttgctggacatcgcttggctgtgcttttccttttactcactaattcatattccgccaccctcaaatccttgtcccattttgcgtaattacttcaattttacatttggtgaccaaaaataaggcacgagtatgtttatgaattcaatttattttttaaattctatgtatctgatacaatttaaaatagggacaaaactcaaaagttgaaaattttcccccgtgcgtttgacggcggcggttttagtgattaataaaaaagatggattactccaaagatgtctcctctgtcactcattacgattttaagagccacaaaaatgaaaaatatgggccagcagcagatgtgcatcagaagaataggctttgtgggttggttgacagagattgatcggctgatcagatggagaattccactgatcggcggaactgatcggaataatttaatcccaaattataattattataaattcggaattcattttgacccttcaccattatcaattatattattatttcaacaatttattattttttactgagcaagtgaatgtcagagaaacagaaataattatcgattcaaattcgcggaaaatcaaaacgatttaattgaaaatagattttatttttatttttttctctgccgatgatcggaccacaagtgattagtcgcctttgtttacgcaacattattcactcttccgtcattgctttgtgcgtcattgttaaccttatgcaagtcagctcatctcataattttaaatggagacacagaaaaaaggggaattttaattggtctaattaaaaaaattcaaatttctaacttttttgggcaaattgttattttcacggaaatttgttaccataataaaaatactagtattcaattttataattataattaattattttaaaaatacattttaaaaatggaagtgataaggaccagcagcttcatattctgtgttctgttcagtccgttttctgttctgtgccctacgtctctcttcgggacggttctccgcttttcggcatttattcccaggcaccgaccggcaaaaccgtcacccaattccttggcgttccgtttgctgagccgccaatcggtaattaaatctcattaatttttgtaggttttttctgctttaaggcaaactccgatttcggcgtcctgtgcctaaaaaaccgtggcgtgatcaatggaatgccaccgctttccgcgactcgtgcgttcagtcgccggacacttattttggcgacttttacggtgccacaatgtggtaaattgtagcacttgtttatttttggatagtttggcaattaattcaaaaaaacgaaatattttatttgtttattttaggaat

SEQ ID NO: 19641 - DNA, 766 bp, Heterodera glycines
gagagcccttctgatgctctattattttacataatttcaaaaaatttgatcaattcggaacaaagttatggccaaaagttcacatgtggcctggttttttgaattcttctagtcataatttttttgagcattaactaaattttttgaaacttagcaggctaatagagaacacttagagctttcgaatgataccaataatgttagatttggtttacaaagaaaaaagttatagtccaaaaacagggctggcccgaaacgagcggcgccgaaacgagggtgtccctttctaaggcatttttctgaccgttcaccaagcaagttatttcttatttcaaggaatccctaaattattctgtttattaaaagagttcattatgcaactcagtgggtttgcagcgatggtaaggcgtttcagaaaaatctatattagatttttctaccagtgacataataaaaactgttggtaggtaaaaaggttcttatcccttttgttaccccccctgaaattttttttaataattttttctagggcatttttatgcgctgaacagaatatgacgttcatttttagctatcatgagttttgcgtgaattacgtaaattttaaaaaggttcgtttaatcccataactctaggcagataatttgtagttttacccttagaatttttatatttatttattttctcagttcgacattgtatacgaagccaatttgcacgtagatgatatttataggcataatcaagaattcctaatgtgccattt

SEQ ID NO: 19642 - DNA, 1388 bp, Heterodera glycines
  unsure (1)..(1388): unsure at all n locations
tttgggttttaggatgcttaacatgaaagaaaaaagttggaatattttttaaaattaaaattttaattaaaataatggtaaagaaaatgtgaggaatattctatcaaagtggggaattgaacccaggcgaaaaattatgaaaggtagaaagtttaaccactacaccacatgtgcatgtgtgtaatcccatgactaaatgaaataaaatttaattttttctcaaaaatttctccttcttcaccaatttcctactcttttctcgaccagacccccattcttaccaatgcaaatttttaccggcggtaccggtactagacaaaccggtaacggtaatttcatttttgaaaaaaccggtaccggtaccggtaccaaaaaaaccggtaattaccggccagtaccggtaccggtaccgctcaaccctaattgcaatgtcatttttagaatgtggctacaaaaattgtgcgagattcgttgagcttttatagacaatctatcaaacaaatgcctatttttaatgcctacgcgctagagctacaaaatttcttctcaaatgtttttctgctgctttcaatgtgcatacatttatgtttgaaaatgctccaaagatgacggacccatttaccattcaagcatcctaaattaaaattttcataattttttttcattacaaaatatttactttcacccctttggcttaaagtttgatcggcctttttatagcattgaagaaacaatttttcgcattggcaaattaattcaaatttaaatattttgttggccgaatttcagaacacccgtttcattgcaatgtcatttttagaatgtggcgacaaaaattgtgcgagattcgttgagcttttatagacaatctatcaaacaagtgcctattttaaatgcctacgcgctagagctgcaaaatttcttctcaaatgtttttctgctgctttcaatgtgcatacatttatgtttgaaaatgctccaaagatgacggacccatttaccattcaagcatcctaaattaaaattttcataattttttttcattacaaaatatttactttcacccctttggcttaaagtttgatcggcatttttatagcattgaagaaacaatttttcgcattggcaaattaattcaaatttaaatattttgttggccgaatttcagaacacccgtttcattgcaatgtcatttttagaatgtggctacaaaaattgtgcgagattcgttgagcttttatagacaatctatcaaacaagtgcctatttttaatgcctacgcgctagagctgcaaaatttncttctcaatgtttttctgctgctttcatgtgcataaattatgtttgaaatgctccaagatgacggacccattaccattcagcatcct

SEQ ID NO: 19643 - DNA, 1479 bp, Heterodera glycines
atttttcaataacgcccggcctttccttcgcctcctctttgtcgctccgcttcaagacaacaagaattaaagtttggggttgaaattggtgcaaaaaggcaggtttctgcgaccaccgaaatttttcttttttttaatgattatttattgaaaaggacccattatttgggaccaaaaccctgttaaccgtacatgtttgatagaatataatcccaattttaacatttttcactataaacggatttttaggattcgcggaattgactgggcctgggaaaagcccgttgagcgcccagcccatccggcctctgttgttcagcaattttactcagaaaagcaaaccctgatcaatgccttgcaccgtttggacaacttttcgtctttgattttcctgcgaaaatcattcaacacagtgccaatgcgagttttctgaagaaaaaaatcagagaatttttgaaaggaaattcggtgcttattcagcagagatttggataggacataaatcccaattttcaaaggatggtgacgttggacctcagaaccagcaaaaatcaggaattaaaccaggaagaactaggcccaaattacccaaatttcaaaaaaaaatccaaaattttacactgagcaggtcgatgttcacccgctgttctccagggcagtgaccaattcaacggcgtcgtccatcttaaaacaaagacccaagaaatgtaatggcatcaaaagttagaaagaaaacaaaccgatttcgaaccatcggtcattttggtcaatttgcgtgagatttccacgatgtcttcctcatgcacattcattgtggacaaatggaaggcccaaaaatgtaggaaaaaggtaaagaacaaagaggagacagaggaatgcgtaaatttgacaagttactctgttaaaaaacagtactctttcggcatcttggcctcataattggcattttttgagtgcaaaacaattttttctttgctcggccactgcaaatgccatttcctatctcgacattttttaactgacgccatagtttttgaggaatgtccatttgcataaaaagcgagttatggctgatcaaaataaaaatgcaaaaaaaaggcatttaccaatgtaaattttgaattagcgcgcaaaaaattacgccattttcaactatggcgttattttatgcgctaattcaaaattcgctcgtaatcctttttgtattttttattttgatcaaccataactcgcttcattcccaactaaaccgaacaaatttgatgtaaaaaaaaagtatttaaaaaggagaatctttttctaagcgagtgctacgcagtttgacgcacaagagaacatttttgagtctttcaaatttttattacgttttaactaagtcttaggccgcagtttttgaacaaaatgctaaaactaatcatttttctattgattctaaaggtccaaagtgattttgtatccttataagcaaaattattagaa

SEQ ID NO: 19644 - DNA, 1493 bp, Heterodera glycines
cttggaccaaattcccccccccccccccctctcctcccacctgtgcccaatttttgtggtcgcgacagtttttctgtttttgccggcaaaagccttcgtcaccgaacgacaggaccgaagcgtagccacactcctcttcctcctgctgctgttgttgttgtgaggaagcggcgaacattgcacggaattcgagcgaattgcctttgtaccagcccaggggacagccacaaacctggcgaattatgagggggagagagagagaaataggtgacaaaaacggatgaattcttccctttaccaactccttaaaataattaccccagcccctatttgggacatttggattcaaaaaacaaaatattttatagcattagaattccgttgcttttttgttgtccacttccatacctccaacccgtactcgtcccggtagtgttccgcgcacgcgtagcgcaaccgtttgcaaaaggtgccgtcaattttgttatacgcctcgcagtacaaattgtactggttggtcggtatctaaaagaaaaaaaaatcaaaaccgtatcaggcaaagagacttattacggggacgggacgaaatctcgccgccggaatctcgccgcagaaatttcaaaaaaaaaaaaaaattcaaagttagaaatttttcaaggaaaaaattttagaaaaatttttttataagaaaattccaaaaaaaaactatgctaactttttttgaaaatttttcaaaaaaaacagtaaattttcataaaatttcaaaaaaaaattgctgaaaaatttttcaacaatttttttctttaaattttcttataaaaaaaaattttaagaattttttccttgaaaaatttctaagtttgcaaattttttttttgaaatttctgcggcgagatttcggccggcgagatttcggcggcgatattttgtctcggcgagattttggggtgcacccccatcctcccatggatacgggcctgaatctaatagtttaaaaaataaaatttttcgggctatgggcttggccctgggtgtttttcttgaaagatttccaagtttacaaaaaaattttaatttcttgtggggcgggaacatagtgttgtatctctaatttttctcattcaataatcaactttttttacattaatactttttgccccctctcgcctcagaatggactcgctggaagcggagaagcgtcgcttgcagggtcgcctcgacgagttggaggggggcggaacggcggcgaccgttgcgacgacgacgacaacagtcgccgacggcggcggcggtgtgccgacgaatgccgcctaagcaccataaaagcacaacataaattcaaattctatttttgaaacgcgtaaaacggaagaaagtcgtttcgtcgtcttcaattcttttcgtccatttttctccacaaaaagaaattttcggcgtttttttctctgttttttttgtttgtattacataaaatacacatttaaatattctct

SEQ ID NO: 19645 - DNA, 1311 bp, Heterodera glycines
aaaaaaataaaaaatatagtttggcaagaaattttaaaataaacgtatatatttataaaaattaaattttggaacagaattacaataaaataattcagttaaggttaattaaattgtatggtaataaattagaatggaacattgattaaagctgaataagagatttaaaaatgcataaatatttcattattatatgttttgttttggaaatttaatataaaaatattgtttttctttttttcattaataaagaaaaattatttgtttgccttttcaagaataattgaatgtataacataaaaataacacacatataagcaattttaacaaaaatatgaatgaaaattaaagcaaaaatatattaaaaacaaacaaaatatatattggaaaaaattggagctaattaaggtaagttaatcgttgcattaacaaggggggtgcaacgtattttaaaaaggttttgtgaacagattgttggccgataaataggttgtggtttttgatcattaattgttagcatccagtgctttgttggccggtaaatgtgttgttagaaaagttgtcgcggtgttttcttcaaaagtaaataaaaacaatttttacattaatacatattatgttaaataaataaagttcattcattcttttctttaaaaaataattcaaatggatctttcatttaattccgagaaagctcctccaaagcgtgccaaacgttcaccaattcagcgattaaaagctggagaaacgatgatgtgcgtataaaaaatataattaattaataaaataatatggttaagtgatataaaattggttttgattatggccgattctatgcggattgttggagaaaaaagcaaagtttggacgattattggtagcgatggagatgattacatcaacataacaatgtgggacaaaaacattgaaaggctgtctcgagaaatcgggaattcttttcaggcaatttttttatataaccaaaaaataaattgtttttaggaaaaaacttacattctcaaaacttgggctgtttttaaagttgccgaaccatttaattatggtagcgttgagttggaattgcgtgcccaagaaggctcaactgtaacaattgttaccaaaactgattatgttataaacggcatcaccaaagaaatgtactttgattttttgggatcaaaactggcactcaacgaaacaaatttcatgccatcaaaaattgaaaatttacggaaagggggagaaattcattgtaaaataacacaaaaaatacaataaaattaataaaattttagcgaagtcgaagcaaaa

SEQ ID NO: 19646 - DNA, 961 bp, Heterodera glycines
aaacgcttcgtgtctattttaaatcaaatatatagattcaaatttacaaaaatcaaagcaaaagttgttataaaaaccactctttaaaagaaactaaattattattttactggttaactaaattagcagcaattataaacttataatcatttaacaaatatattcctgcttacctaagtatgataaatatacaactaatttgaataaataaaatttttcatgcatttaaatgaagaaaaaatcaataaataaatatataacaaataatttatttgtttaatttttttttaaattcttgaaaaaatgcaattacaaaataaaacggctaaggaaataataaacaaaaatttgcctccgaaagcttaagaatgacctacaatactcatcgtttttaaatacatatcgtgctattattataataatttaaaatatttaatttttaaccttaaaattctttttgtaattttttataaaatgatttatttaatattaaaatctcaattcattttcgtcaaataacttaataaattttatcaatttgaattttaaggtttaaatacaaataaatatgaaaaattatgatcagtatatataacaattgaagactagacttttatacctactaaaatatagtaataaaaaacaattttttaataattaaaatatataaatatttgagagtagtacagacgattgaattaaacaataaaaattgatggtttttaataaaaattcctttaatcattttaattctaacacttgttaatagtttaaatgataatattgttttaaaaagtttgaagcaaatgaaaagttagtcgacagccatgttataataataatatcttaaaattaaaatcgcgtgatcagttttcttccattttaacctatttatttaaccataaaaatttaaattaaaaagacaaaacctaagtttcatttataacccaatatttggata

SEQ ID NO: 19647 - DNA, 1085 bp, Heterodera glycines
tagaaaagttcccaaaaaaggaaaatcctatttttttggattacagaagcaatttaaaaattcattaaaaaataaaaggttcattacgcaccgccctccctctcatgatcgagagtatttgtattatagaaaattacccaaaaaagagaaagccatttttttgggatacagatgcaatttaaaaattcattaaaaaataaaagggccattacgcaccgccctccctctcatgatcgagagtatttgtattatagaaaattatccaaaaaagagatagccatttttttgggatacagatgcaatttaaaaattcattaaaaaataaaagggccattacgcaccgtcctccctctcatgatcgagagtatttgtattatagaaaattatccaaaaaagagaaagccatttttttgggatacagatgcaatttaaaaattcattaaaaaataaaagggccattacgcaccgccctccctctcatgatcgagagtatttgtattatagaaaattacccaaaaaagagaaagccatttttttgggatacagatgcaatttaaaaattcattaaaaaataaaagggccattacgcaccgccctccctctcatgatcgagagtatttgtattatagaaaattatccaaaaaagagatagccatttttttgggatacagatgcaatttaaaaattcattaaaaaataaaagggccattacgcaccgtcctccctctcatgatcgagagtatttatttgtattatagaaaattacccaaaaaagagaaatccatttttttgggatacagatgcaatttaaaaattcattaaaaaataaaagggccattacgcaccgccctccctctcatgatcgagagtatttgtattatagaaaattacccaaaaaagagaaagccatttttttgggatacagatgcaatttaaaaattcattaaaaaaataaaagggccattacgcaccgccctccctctcatgatcgagagtatttgtattatagaaaattatccaaaaaagagaaagccatttttttgggatacagatgcaatttaaaaattcattaaaaaataaaaggg

SEQ ID NO: 19648 - DNA, 2716 bp, Heterodera glycines
tttaatttctgttttatttttatcgtttattcttatcattcaaataaataaagcttcatttccttgaaaatagcttttattttcaatcttgatagacttttaaatatttgcgacaataataaaaataatcattatttttcttgtgttgaatgatgtgtgtctcaatcaatcacgtatagctgtttaaattttataaacatttaaaatttcaagtattaaaattcaattaagctaaacctaattaatatctttcaataggcctaagaattcaaatttaaaaaaaaatcattgggtttcaaaaagtttctggttaaataaattttgtgtccacacttatttatggtacgattgtagttggtataaaaactattttttaagtctaaatgcattattaagtttttaactataagaataaataactaattataagcttgcgccgcaagtttttaatagattcattaattgttattatcgatttacctcgaatgcaaaatttgaaattcatttttattaaattcaagcgacaaaaatcgctcttcaacctgcttttcttggccgattttccattaaattttaataaaaatgtttcatttttatccttgaacagcgaaaattatttaattcatacaaattaaaaaattcttttgatggttcatttgtatattttttataatattttattgatttaaaaaaatgcatttagagtcgtttttatatatccgcaatttatttaaataaaaaaattattttatataatcgattattttcaagtaagatttgcaatattttttatattttgtttactgtaatttgtaatgtagaatcagaatgcttgcgaattttttaaaattatcttgccgacatgacagcattgcttagtgttaattttctgcttttaaattcagttttatattttgtatttgaattattactatgtctaattttaagcttatgcctgcaggttatcacatcaaagcggcgtttgtcctatttcataaatatttgtgaattatttaaatactagggtgtcccaaaagttttttctgattttttataacaatatcggtacccctgtaaataactaaatgttgaatataaaaaaaatagcgcaaagaaaaactcgcttgaccgatttttgaaccggtctaaaacccggttcaaattcaattctatgaaaaatgctgaaacatgtcaagcgattttttccttgcgctattttttatactcaacatttagttatttacaggggtgccgatattgctataaaaaatcggaaaaaacgtggaacaccatagtatattaatttttttgttatattttgaacttattgattaaaatttaaaaaaattaaactttttttttgtaagttatacttcattcttaatcggtttaatatatttttatataaaaaattaatactattctcacaaaaataaaagatttaatttaatattttataataggcacctctggtctgatgttacccattcttcccgagtcaattcattggtcagatcaaatagcacaactgagtcagcaaaagataatgaatttttttatagattcatattatgtttctggtaaatttaatttatttttaaattctgtctcatgaactatattttaattgatagttcattggacgtatttaacattttgacaaagacagataaattattttcttgtctattttttccgctccgttttctgccagccacataacgaattttcatcaatctttcgtatttaactattttaatttatgtgcctctttggttagcaattttttatatcaacttgaatctttttttcatcgcttgtttttaaattttgagtacagatttggtggcgttcagcaggtgggaaaggtggattttttaaaaacttttaattaaatgaatgaaattttgaatttttgctggcttccatatgtcaataattttttctgttccaacgcatttttataagaaattatttgagctctaatcgaagaattattttacaaatagcaaaatcctttaaaaaattatggctttaaaaaaaaaagatgcatttttatttaatgttttactgcagcacaatttctaatataatgtattaaaaatttttttttaaataaagttgatttaaaaggaatatttcatttaatttacaaaaagtttattttaatgtttcaaggcaatgtttttattttgggttatatcattaataagttccatttttcaagttgtggcgcaaagtagccatgctcatttgtcagcagaagaaatcatgatgaatttgggtttattttttagtaacctcatatatgaaataaattagcgtgtttatatgggtaaaaccaaaaaaaaaaggactaaaagtctaatatatggataaaaatgtcgataacaacaaaatttcccaaaatagtgccaaaatttctaaaacaattaaatttttactctttgcaaaaaacattaacttctcgacaaataaacatatatattaaaataattcaattataaactttctgtgttcgaatatgaaaattgattgttggaagaaatggagtgaaatgaaaatgactgctcatgtcagcgatgctcaccaatatagtacaaccaactaaattggtgttcggcatttctcactggttaattggcgtcactttccaaagcgacgccacagaacatataaagaacagcggagtcagagaatgagagaaaaattagtg

SEQ ID NO: 19649 - DNA, 2807 bp, Heterodera glycines
  unsure (1)..(2807): unsure at all n locations
gggttcattaatgcagggatgtcaaatttatatttattaaagaaatcacaaaaataaattaccaaatttacttaaagggaaaggtttttattttttatagttaaatctntagctccaaggttaaaatccccaaggtatacaacagttttctgaaatgtaaaggtcaaggaatntaaaaagatttttggtattttttaaattagtagaaggaggtcgataaataagaatcaaatttagtgaattgtaattttgaaattgcaatattagtatttcacacccaaattttgtttcagaaaactttacaaaaaactgtatatcttttttagcgagaaaagctatgccgcctccacgcttattcaatctgttagtgtaagaaatggtatgattttgaagaaaatttgaatgaaaaggaaattggttttcattcttaccccaggtttcagtaaaacagataaaatctaaatttaaggattcaaaaattgtttctatttgttcacatttgttatagatagaccttatattactaaagcaccttgtatacatttattaaacttatgaggacttttgaaaaatcttgcggtactagaatttacgtttgtaaaattttttgaaatttcagtgtgggtggttcccgcaagattttatgaattggatttatggcaaaaacaggaataattaccagggtcatcacgaaaaacagagacatcgtttcggtgaatgacatgtccagcataaacaatgaaattgagattaggaaattgggcgcgggctgtcttgcaacaattgatcaaattatgccgctccttgagttgttcaggggagagagatggacggacagagacagcttgaaatttggagtttttaagacgggttttattgcggagaaatgtttgtgtaatctttcgggttgacatttccactttgagaagtcggggcctccttcctttctttggcccatccggtaaatcttggtcggcattgcctcatttcgcaaacgtccagaatgtctaacacctgctgttggtcagcaatcgcgcgccgtgtagaggaaaggccactgtccgattccggaacgcccatcagaacgaccgaatgttctcgtcggtcctcctccagtaccgcgcgagtgtcctgggtcgacgtctcatgaaccatgtccaccgcgagcttgagaagtgcgtccagttggagaatgactgcacggactggctctgacacttcagtgcaggttagcagtgctgtgatgtccaaatgcgccgtgccgtcaagaaactgttgtcgttttgttggaattgttgagagaggcgatgttgtcaagtgtgccgcagtacgttttgctgataatttttgctggagtgaaccatggatttttaaaagattgggaggaaaagtcggcattattcccaattaatgaatttcatattttgaagccttaggaatgtaattttaagactttttcgctaatttttatttggcgggatttcgactcattttggctttggcgcgatttcgacgcagcgggattttgacagcgcgccaacaaaattatttcgggatacttgatttttgacctctcttttctcaatggggagaaatcgtagagacatgggaccttttcatcttgtagctaatttggtgggctacatgacatttcgccaactgacatttcgccaactcagccaaaaacattcatttcgccaactcagccaaaatcagacattttgccaactgacatctcaccaagtttacatctcgccaactgacatctcgccaacatgacgtttcgccaactcagccaaaatctgacgtttcgccaactaatttcgccaactagtcgaaaatttaattttaactatataatgatattaaatttattataaaagtgcttcaagcaaagaaatcttcataaaatatataaaatatcaataaaaaaacaataatatgaaaatgtttaaaatcaattttcatcggcctcagtttcttcaccactctctgaatttccacggacgtgaagtccctccgcaaagccttgaatcacgatcccgagcaggtgcaaggcgtttgtcaatccttcttccgattcaaagtcggcctcgtcaaggatccgcaccacattttgttctttgatgacgtaccgttgtcgtcgtttagtgcttttctggagctgttctgcgcgtccgatgtccaactgtttgttgatgtccttcgtgaatgcagcaatgaagtcactcaatgatggatgatggttgagctcacgttgaaaataccaaaaaataatgttttccgatgaaattttttactgcaaattgtccatgcgcggcttccatgccgttgttcgttcgctcaattgccatttgagccctggtgtatacattccaaaacgagatcgggaaacgtggaggacagacgatgtcttgttcccagcgtggaataagctgcaagctgctttcttctgacaatggaatggttggagttgaaggttgtggcgaatgcagtccgaattgtattggtccactgcctgttattatggatgcctgggacacactgaacgctaaaattgaaaaaaatttcataaattttatgacagaataggtgcatttacgagttgtgcttagagtgcgacgcagaagaaagtgtccgacatcagcatgcggttcaaatgcctccgccccgcgatcaatctcgaattgagtggtgccaatgtaggttttggcaaaatacgccagccatccttgaactccaagcggtgccgcgctgacaatagttgaaaaagcgcgccaaacgtaaagtggcggaatgagtgccaa

SEQ ID NO: 19650 - DNA, 1889 bp, Heterodera glycines
tttattatttttttgacccgaaaatttacatttaattcatttattttactaataattgtatgagatttttttaaaagtaatatttataataaaaattttttttttttattttattttaagtgctgacaatttaatataatatattcttttagtcccgataagtaatttaattctttttaaaatttttgcaattaatttaatattttcttattctcgtgcgattcttcgaatcgtttacattaatacgttactaataaagagaattcattacaaataaatattttccaataataataattattacttttttacagaaaaaatataatatttgtaaaaaagggaaagggtgtatttgaattttattttttttattatatcaattattaataaacagaaattaatagtcagtacttttatattaatcatttaaattgaagaaatgtaatccttcacattatttttaatatagttttaaaaatttatattaatatcgttttttaattatttaaattaattactttaagtaacgagcatatcattactacattaaatttgacaatcattgttttctttattgttattgttaatcgttattttaattatctatataaatttataaatgaattttctcatttttattatttacaaataataaaattagattgtcggccgagcttggatcttcaaaatccaccatcgatcgccaccttcatgaactcgagctggtgaacaggcgttgtcgacaagttccgtacgaattgactatagttcaaaactgaaaagtattttaatcctgaactatcttaaaaattatgatacacttaatgaatatatttagtttgagattgaacttgttgaataaaatggtaaaattaaaaaggtttttgattgatacaaaaatacaatttaacattttgaaaaggttttcgataataattaaaattttagtttgcaaataatcgtggttgaattatcattataataaaaagacaatctatttgtcacatgcaaaaaacgattggaaattcgaatattaaacaattattctatgcaattttttcaattaaaaattatttaagggattcttaatatctattagtttttagaatattaattaaaatagtttggtgcgattatttttgtttaggttattttctatagaaacttcatgtattaatatttatttttatccttacttcacaattatttgaaattcaatactaccaaataacttaattaatttgtttgtttttttaaattttttgctgtttcttttaaagtattaattgacctttaaatttaaatgatacacgcttgtacaattttttctgcgatgctaatacgaaattctgttattaaattagcgaataatttttacttgcgcatagatcttttattatttaattatttaaaaatgattaattgtttaaattctcaattctaaccttttaaactttgttgcactcaattatattaatatagattagtaatattttttaaaaaatatttttaattaatgagcaaagttcattttttgatattctttttttgtttattgttcaaatttttttatttgtaaattgttttggaacaaaaataattttattattctattaaaggtaaaaatgtagaataaaattaatcacgctattttttaatttcttatttatttattcaaaaataaaaataaccaaaagaagggcatgtgccacttatacttttggcggaaatgaggtgaaatgaaaggtagtgataaaagataattgaaattttgaatgaaaaagcagaaattaaaaaagtcaaacctcccaacaaaggaaaaattgttttttttttttttaggggttgaaaaaaaaggaaaaaaaaatttttttttttttttttttttt

SEQ ID NO: 19651 - DNA, 2135 bp, Heterodera glycines
  unsure (1)..(2135): unsure at all n locations
ccccccccccccctctgttttttgttgtttaaaaggcacctcccgctgaaaacgctcttcgccacatcgctgtgattgcncatccgccagcagagaagagaaaagcgcaggatcggtctcaatttgcccttctccgtcatgcatttcctccgctccgtcctcctccgcttcattcgcatatccctcataaaaatcctataagcattgctccatccatttattaaattattcatcgcaacattttgaattacctcaaagtgtttatcaaagggacgaaaattcgcaacacttttacgattactggtccgctgcgcctcctccaaatgtttgttgtgtaaagaataattcactgcacttttgcggtcaatgaacggctttttgtgtttgcccttaattaaggaaaagtgcaaatttcatgaagcgactatgcaaaacaaaaataataccattttagcagtgtaatgtcagaaacactgaaaagaaattggaaaattataatagtaagaaaaagtagaataagaatttcaattgggaaaacaaccaaaagcaagtgacaataatatggacaaatatgaacttgaaatttatttgggaaaccaatcaatataaacattaatacatagaatccacatataaaatataacgaagaaaattaaaacgtaattcactgcgctgatcgtgcataaagcgctaaaaaattcataaaatttagaaattcgatttttgattgctttctttcatgttacctttttttaacaattcctgctgatggtatcaattaaagccttttattttctgtttacgaatttcaaactttactgtgaaactaagtgaaataaaagaaacaaatattttaatgagctaaaaagatgaattagtaaaaaacgaaataaagtgagaatatgaaaatattgcaaaatggtcaaaacatctcattaagcgaaacaaaatgggccaattggtgctttgtcaagtgagtaaagcgatcgatcagaggaaaaattacgatcagttaggagaaaaacggcagaaatacacaaaacatggcacttcagaaacgttattttgcccatccgtcgtctatcagcgacgacctgtagaaaagaaaaaggacgacggcacgtcaggcgttcgggacgtaggggaagacgaaatgcgacgggaatgacgagagggtgccgaaaagaagttctgctgttgaagccgcggattgtcatgagagcgaggctaaaaaaaacgaaatgatggacgacgacattaattaaaggcaatccaattaaggggagaaagagaggaaagagttaaatgatttttcaaagggttttttattttatcaagactcattaatgccttatgagagaatctcgatttaaacatattcgttctcaaccgtgctgtaatggtgagatgaccgcagcgatcttccacgactgtgctcctcctctttttcattgttgtaccaacgctgctcgaactgcttgaatgtgttgttgccgttgctgtgctgattgtccttgttgtaccaacggtgctcgaactgcttgaagttgttgttgttgttgttgttggcgtgttgatcaacttcagcagatgctgaaattcgccgttgttgttgctgccattgccttccatgccatggcaaatccgtgccaacattcctacctcccccgctgcccccatctccgattggctccatgctgtccatgacttgacgtcgtgcccgtgccaccatcggctcctcgtcgctgctgtccccaccagcaccaccaccaacaaatgcgttaaatgtctgtactcgacgagttgaccaagccgactcaatggtcgaaatggtactgtcgttgttaccgaaggtggtgctgctgatgcaatttgaattcggtgcccaatttgaagagtatggacgatgcgacgatgggaacaccgaagggctggagaaataggacacaacgccagcagaatttgatgctgcaccaaagtcacttgctgacaaattggacggagtgattgcccgcggctggaaaagtaaattttaaaataaaaaacaatattttctttgtaagaattactttttgtattcctcaagttatacgaaaaagaatnntcgaatcacccactaatgaaanntttaattt

SEQ ID NO: 19652 - DNA, 1050 bp, Heterodera glycines
gtccatgtccaacaactgctgtggctgtgttttgctgtgctccgccggtgccaaagtccgtcgccacgacccgtcgaaggcgccggcggttcgttccaatcgcatcgaactgcgctgttccgcatctatcgctgtgtccagccgatttgcacgggagaaagcggtggatgacgaagagttgtcgacaaatccgctcgtccgtgtgatgaagcgttccgttttgcgaacccattcgtcgtcattgctaatgctgtttctgttgcggccgggggcgacggactttcgctgctgctggtggcgaatggtcgacgaaaaaggcgaagaaaaatgtgatggcgctcgtgcagtcaatgaaagcagcggagtctgcaaaaagaattaataaaaaaaataactaggaattttataagaaaatttcaaaaagaaattaaattagttcagtgaattttaggaaattttttttagaaaaacaaagtaactcatcataaaattttgaatggctgaaaaaattttcataaatttttgggggggagggggggaggaacgtagtgccccctcttttctcaatttgaataaattcagtccattgtaccgctctcgcatagggacgacgtggtcccagcccatatttggcggtgcgtccattattggcgctgaaactgctcatcctcggcgacatcgttgttgtcggcgttgttcggttgcgtttctcctccactccattcgctgccatttcccaccgtccctccccaatgctgttgtccgttctgaacagtgtcatccaactgcgcttcttcaaatgctttcgctttatctttggctgcggtgcctctgattcattttggtcgcacaatgatttggcttttgaacgtcccaaacattccattttttgagcaatgaacagttttgtcggagatggaaactcctaaatttatgagttttattaaaaaaataatcgttgatgaactaagccatgcaataatggccatagaacagaataacgagaaggaaaaccaatatcatatcccataaaacccggtggaattctgt

SEQ ID NO: 19653 - DNA, 2793 bp, Heterodera glycines
  unsure (1)..(2793): unsure at all n locations
acaaagaaggcgagtggatcggtggcaaatgatcagacccatgaacgaatgtgcttttccccacttaagggtggtgccgcaacaaaaagtacatacaaatagtcaaaaaaggtgccattgcaatgccaatttaaatattgccatcaaattcgccatcgttcccttaggctatcggtgtttggtgtgcaacaaagtgtacggtcgctacaactcggtcagttaccacgtgaccatttaccatcggaacccgcccatccgttgcgaggaggagggatgtcagttcaccaccaggcaagccaagcccagcggaatactgccaaaagagtgtctttccgtttagagaagcgcggtacattcactttcacaaatattaccgtcaccaaatcgcactgccggaatccatcgacttgggcaagtttaacaaccaatgggagacggacgaacaaattttaagacagaataggaaaaggggtcaaaattaagtgaacaaaacccaaaaagagtcgaatagagcgggcgaactctgttcaaagacattatatgtacacatataccgtattacttaaattttttccaatttacatttcggaggggggggcaattggatggcactccgttttgatatgttcgtcaattggtagaatattttgccaatttctgatttgaattgactccgccttctgctgttcagcttctcgcaaatgccctctgttaggctgtaaacacgtgtccaaaagcccggccatgttggacaaacacatccaccgacacgtggccgactgtttgaaggacggcgcgctttatgtgtgcacaatgccagcaaaaggaggcgaatcggaggcggaagtgcaggcggatgaggagcaggaacagtgccaattcagagcgaattcgcacgaagtgagaagcaaaaaaggaaagggggggggggcaaagggacaacaactaatgagtgatcggaaaaagtgatcaggtaggggggaagctttccacgtgttggcactgtgaggcatggcttatctcggccaattcaaattatccgtccaaaacctttcgcttttccctcatcagacaatgtatgagcatcttttgtccgttcattcgagcggcggccgcggcattaaaatagacgaatatcaaacgacagaaaaggagaaaaagggacagcaacagacgacgataatgcgaaaccatcagcaaacaccgccgatgagcgcatccgcaccagcgacaccgccaacaccgaacaacgcaagggcattccattgtgaggaatgcaatttcaagtgagtgatcagtggcggaggggaaggaagggcgatcactgactgatcaatcagagtgatcacagaggaaccgaacaaaaatgtagtgatcagaataaaagaaaatgactcctcgggaaattaagacaattttactttaggggacgcacattggtggcattggagcagcacaaagtgcaaaaacactctcaacgggcacggaccggcactttcccaaacataacgccaaaaatgtcgggtctgactgcgcattttgaaccgatgatccctcaacagaacggaggaaggtaagcggagtcggagagcggatgaaccatcattaaattgaatagaacgggataaattacggtgaaaagggggtcgtaataacttcccggactgaaaatgtagggactgaaactgactttcgctgccttatctttcatccaatgatctcaaagccatcagtgccttttcccctcaatgcttttcctctgtccccttccatttgcaatggtttgtttgttcagaccgctcaacggtctgtctcttctatctggcgttttgtccgccgcttctctgcccgactcgccgctttcgccgtcctccgtcggcggcggactatttccgcccgcctttccgtcgtcccttcttttcggcactgtgccgtctccgttcttcgctcagtcggccattgttgctgatcagcaacagcaactgatcgcccagctgatcgccgcccagcaaaagttggcctccgcgctgctcggctcaccgcccgccgcgcagcaaaacgcgacgcaaacggcgacaatggccgaagtcggcgactccaatcagcagaaaatgttctgaagggaagagaaggaagcgataaaaagccaaaagcgatcggaacagaacgcaaggaacgccggaccaatcagtggccaatttgctaattataagcatttgcaaatggcaacaaaaaggccaaccgaacaacacttttatttgtttgttaatttgttccgtccctcttctctctcccttccgttgtccctctctcctgcctctctctttctctgccagtcccccttttcccccatttcattttgttgcttttttctctgttttccctcttctgctcacctttccctcatttcctttcaattgcccttttccggtaagctttactccttctcaactcatcctttatttcctattatttttcttcttcccttatcctcaactttccatttattattttcactggaaaaggcgtaattattttttactatttttaaatttgttattttttggactatcgtcgaaagatgaaacgtaaaaaagcatccaactgaactattgtcatatttaatatcaaaatggggaaaaataatacaacatgaatacaaaacatattattgaacagagaatgaaaatggcatgatgctaattanagatgaaaatattatttataaattatgtgaaatncaaaagaattaggggggggtggcaaatgattgaggagggggggggggggggg

SEQ ID NO: 19654 - DNA, 3029 bp, Heterodera glycines
  unsure (1)..(3029): unsure at all n locations
ccgtcccccgcttctcccccccccccctctcctccccgccccattgtttgtcctccgatcgccccttttctccattcttcgccctcgggcgatgcgtcgcccatccgatgatcattattattattattacagtttatgtttaaatttccgataattcatctacagaaatgactttgttggtagctttttcagaatgcttcgtttgctttttaccttttccacaattttcacgggtttcggtctcgcctcgcccattaaaaatcgttcatcggcaacagaaacagtcgatgatcaaccgcaaaacgtaatttattatttttaaatgttaaaattaaattgaatttaatcgcaaaattttttactttagcaaatcggcacacaattcgttgaagtccgtcggttattagatgaaataaaaatagcttcaataaaacaacatggtcgcttctctgatcaggcaataagcaaaaagaaaaaaaatttgcttttttacttacaaaaataggacccaacccgagaaagggcacggcaacgaattcgggacaaagtggcgattaatgacggcaccgaggcgaccgtcaaccgagccgtggcggacgaccttttcgagaacgacattttgctgacattgccacaggccaagcaaatattggaggaaatcaaagaaggtgccgcgggcggaatgccatcgaatgaatgaataaaaagttcattcagtttcgccatcgaacaaacgacgcggaagacgacaggcgaacccaacgccgagctcaatttggggcaatgtgaacattccctacttgttccaagtctcgcaaaccgattgtgagattaagcacagagaatgggactgaatttgcaatttcagcaaattggcaaaataacatcagaaaagggcaccggcacattgagtgggcattggccataagccaaccctctgactcttttcattttgaagaagcctcacgtgtgtccgttttgtgttccaccaaaatgaccacgcgttgaaaggcaaagattacctgcaatactttcgtggctccggctgttggtcccaagtgggcaaaaccggcgggcgacagcccatttcgatcggatacggttgcgaatccgtaaactcatcgggttttggcatcttcgtcaatccctccccctctctccccctaaagctcggcatcgtcgctcacgaaactttgcatgcactcggactttggcacgaacagtcgcggctggacagggacagtttcgtcaggataaattacgactccattttgccggtaccttcgccattttgttgtcaatttattcatacgtctgtttttgtcagggcaccgaatcgaattttgaaaaacgaacaccggacacaagtgacaacctgggccaaccttacgtagaaggggcgaagttgaccatttgagacggcctttgtttaggatttggggtccgccatgcattacggcaacagggcattcgcatcggactttcgaaggtgcggcacccttcagacggcacatttggcctcttttgcttcagtttcaccattctgacggtggatcggatgtatcagcagacaataggacaacgcggcggactttccttcaaagacgccaaaatgatcaacacgcgctactgctcaggtggacagtggcgcattggcaccaaaatgggcaatacaaattgcagaaatatgcaagactaagttggactgtgacaacggcggatacaccgacccaacggattgcgaacggtgccgctgccccgacgtacgaatcattggcataaaattaaaaatggcatttgtttgttggcttagggatacgccggcgattactgccaacgcattcccagcagcagtaattaataaaataattaactacaccctagcatttgtctcgttccccaagattcccaaacttgtctaacgaccggcgaattcacccgccggccgatggccgggcagcctcaaaacaagttcactggtgccgcgtgcttcatgttattggcgaatccatgtaaatgaatgcgttcactaattaacccaaacgattaaataattaattatttagcctttgcatcggacacatagagttgtgataaacatcgaaaagttggacatgccctgcaaagattcgtgtgcctcctttttggagctcaaatacaaaaaggacaaaatagccacaggcaaatgacgtcaaaaagctttcatttcactttttattttgccatttttttgctatttaggtgccagactttgctgcggaaatgcgaccacaatttacgcggacattggcaccgatgtgctggtgattttgatgtcggacaacaatttggaagcgaagtacaccgggttcgagctgagttacaaatcgggcaagtgattagcgggagaccaaaagagaccataattagcaaattcacagagggcacagatccgacagtaatttcaccaatggtaacagcgaagccgacaattgctataacgaaaaggccgccgaaaacattgaccaacattacgccaaagataacaatagaaacaacgccaaggataacgacaacgacggacacaatgccaaggataacgacggaaacttcgccaaggacaactacggaaacatcgctaaaaacaacgacaacttcggaaccaacgaccgaaacgacggcggaaccaactaccccaaaagaagaagaggcaagttacttggatcagcagattgaaaagaaacacttaaaacggatgagcaggggatttggagcaaatggggcggatggagcggatgttcggcttcgtgcggtgcgtgcggtcacaggagaagagtccgcacgtgtttcaaaggcaaatgcaagtgcgttttgggcacaaaggcaatgcatggccaaacgctgttgttcaggggggagtccggccaaatggagcgttgcgccttcggaatttgccctttggccaaacaaagaacaanccgttgtcaaggtcgactggtaatgccattcaatgggatggaaagcctcgagttcggcacggtgattaatta

SEQ ID NO: 19655 - DNA, 2168 bp, Heterodera glycines
aattatatatttcttttccaaccaaaacgaagcccatttttggtgataatgatctgccgagtggcagaagtaacgccaattcctacggtatcgccaacaccgtaggaatattcggtattttttccttttccttcagcgttaatccaaatttcgccattgcttacatacgcaaaagcgccatttcccattcttcctttcaattctttctgttttttgagtacgaatccgatgctgatgacccaactgaaaaattaataataaagaaataacaataacaaataaataaaattttaatatttatgattaattttatattcaaaaataaaaaaaattcttactctttcctatttttaactgaaatttcgtagtaaaaaatctcggacgaattattattattcagcaaaatcggatgtttagcaaaaacagacgaacaacaaccttttgaggagaaaagtaaattatgaaaaaataccagcagaaaaatttctcttataatggacaatgagacttttgttgccaatgatttggagattctcatgacaaacattggcatcccaataattttgtcgcaaatttaaaagtgccttaaaataattaaaataaaattgctaacatatattttacccctaattcacctttctcttctgcttctgttctttatcaaattgactgactttttccaatcgagtcctttgatcaatttgcatttttgtgaattggtcagttttagctaaataattgttcaaatttaaaatggacaaataattaaacaaaatttcttgattcatcctacgaaaaatagtttttaataatttattcttatctaaaattcactcgcctttgctcgtgttttcgatctgctgctgtttttgctgcttttccatttcactgattttttccaaaattttcttctgatcattttgcaattgcgagaatccttaaatttttgaaaattggtcctcacagcttaaattaaatcaattttgaaatttaaatgtcaaattttattttcatattaatttgtcctcgccttttgactgttctttttgctgcttttccaattcactgattttttccaaaataattgccaaaatttcttctgatcattttgcaattgcgagaatccttcctcaacactagcttaaaatataaacccaattattacttaaaatggacgttaaaaatattttatccattaaaaaatgttttaatgccgaccaaaatggactgagaacgttatgacaactttttggctagcatattttttacttcgtaaatttgtacccagtaatttttgtggattgtgatcgcgactttgcatccatttatacaatttttaattcctaacccgaattcgaaaccaagattgaaaaatcagttttatcaatttttaaatttttggtttagaatttgggttaaggaattaggattagtcgaaatcgtgatcactgatccgttagtcattccaaaaacacatgggaagcttttatgactaggcttcataaacataattttatagaaaaaatggtcctctcccctttggttttattcaatgggcccaattttttgagtgttgcctaagttttaataatttgattttcgatattcctaataattaaattcacaactatttttatgacagtataattttgatactgtatccctaatttccgcattttccgggagctctcactattacgttttttaccatttttctccttttcctgttcaattttggccactttttctttcaatgccttctgttctcccatcagttcctggtactttaacttttgttccttctaaatttttaagattttttgacaaatttttactcgttattttttaaggtaaatctgacattttcgagttccaatttggccattttcaattccatttccattctggcaaacttttcacgaaattcctatttaaattaacaaaattgcttttgtatattgcataatttaaattatttttctcccaccccattgtttaggtatgtctatttttgtttttcttttgcccaccttaagctgttgttgatcagtgatcgattgttcactgttttttccatcaaataattgtccatcattgcccaaattaatagcattgccattcacttctaaaaatgacttaacttaaattttggacttaaaaaatttatt

SEQ ID NO: 19656 - DNA, 842 bp, Heterodera glycines
aaattcaaatttccttctattttccttttctcataatttacctccattttctgctggtgtgaaatcttctccataatttattgaattggtcgaaattgacatttctgagtttgatatctctaaaagagcttattgttagattttaaattttataaaaatgtttctgttgaataaatgacaaagaataaaaagagaaataaaaataaatgaccattccttcatttttaactaattttcggcaaaatgatgacctaaaacgaaagagcaaaaagaagaaaagaagtttccaacatcatcatttatgaacaattatttaagaattcttttattgccggaaggcaaaaaatggagagaagcaaaatatgtatgagaaggaacgaaggtggaggagggggaggtcaaatagacaggtcaaaaaagaaacggaaatcatgtgaagacctaattttgaagaatggtcaaaagaatcacacaaaaaataaaaatttaccaaaaattgttctactaatcatcaggggtgtgacctgttcttgctttctatgaaatgttctgatttggggtagtggcacaactttgctctgatttcttgaaaaaataagcactggtaagatgggggtttaaatccgaaaatgaaacgaaaatttttagacggacgaaaacgaaacacgaaaacgaaactcaaaaagtgccgaaaatgaaggacgaaacgaaatttcgtgcagccctggtctgggtgacaaaagagaaggaaactcgtgaaggagaaatttttcagaaaaaaaaattttttttttcatttaaggcgttgattcaaatgcatatatggtctagtggctaaacat

SEQ ID NO: 19657 - DNA, 842 bp, Heterodera glycines
taaatgagagagaaatagatggtgggagataagcaaaagagggggggggagaaaaggtggaggatgaaactcaaggaagaaaactaaaggagagagaaagagatggtgagagataagcaaaagaggaggggagagaaaagggggaggatgagagacaaggaagaaaactaaaggagagagaaagagatggtgagagataagcaaaagaggaggggagagaaaagggggggatgagagacaaggaagaaaactaaaggagagagaaagagatggtgagagataagcaaaagaggaggggagagaaaagggggaggatgagagacaaggaagaaaactaaaggagagagaaagagatggtgagagataagcaaaagaggaggggagagaaaagggggaggatgagagacaaggaagaaaactaaaggagagagaaagagatggtgagagataagcaaaagaggaggggagagaaaagggggaggatgagagacaaggaagaaaactaaaggagagagaaagagatggtgagagataagcaaaagaggaggggagagaaaaggggggggatgagagacaaggaagaaaactaaaggagagagaaagagatggtgagagataagcaaaagaggaggggagagaaaagggggaggatgagagacaaggaagaaaactaaaggagagagaaagagatggtgagagataagcaaaagaggaggggagagaaaagggggaggatgagagacaaggaagaaaactaaaggagagagaaagagatgggtgagagataagccaaaagaggagggggagaaaaggggggggattgagagacaaggaaaaaacta

SEQ ID NO: 19658 - DNA, 2126 bp, Heterodera glycines
attaagaattattacgccgtgatgcgcaatgccaatgcaaaaaatcaaatgaaagaggaaaccagcactagtacaaaaaccgaacagaactgaaagtgaaatgatcggaaaatgggggaggaagcgaactgattgataatttgattggcattgagagaggaggcacataccggagaggagtttttgttgggagttatggtccttaaattcacctcttactgatcatgaaaagcaagtaaaaattcgcaaatcatttgtttttattacataatcccgagtttatgctttggcatccaaatggtagccgccgattcggtaccgtgtctccgctaagtggttgatcactggtgttcttgctgctcacagtattttccttttccgtctttccattttcgaacattaactgtatattctgattcattagaaagcggcataaacttttttcgtttaattctgaattatttttcgtgaacatgaaattgaccaaaatggaatttatttgtcgtctgagatgtgtcccaaaaatccactaaattattttcatacataattttattcccaaattattttttcttatttttgtttttttatcaagtttcctcccttccaaaagaatattatttttcctaaaagtttgcctaaaatccacaaatatttttgctcagtactgattatattatatttttgtgtgatcttccttgaaattcaaatttaatttttaatttcatcaaatgacttacatttgtcccccgttcaaaaatttatctctataagttgaatatttttaaatttttttactaatataatagttcaaacattgccttttcattttttctctcattcttttcattttataaataaatcactatatttatataagcgtcgcgtgtaacagttgcgtgatgttccaacatcgctggcatttcccacactttagcccgctgctttttatccattttaggtttaaaaagtgtgataaataagcacacttaaaataatttaaaaactgacgttttcttacggaaggatgcgaatgggtgtaaaaataatgaattcgctcgagtcatttaccgaaattgcagtggctaattttccgggattatgtcgactgggtgaatttgattaaaagactatgaaattaattttatatacagcaaaaaatggcgacatccgttgtctcattattccttgacttgttccgttggttggcactcggatttggcattttgttcaatgccattttaatccaaatggttgttcgtcacactccaaaaccaatgcgaatttacagcaaagtgaacatgttttatcttaatgattttgaactgattaaaacatattcttaagatcctattgcaaacatgtgtgactgacctttcattacttcttatgatgttttttttctttccggtgcattttttatttaaagttgaaaatcaaatttattattttttatttatttaagtgcaattttataacggaaaagggcgaattcgcggcaattttgtacggtttggtcacaataaaaggcgtggagaagggaatttggaatttgttggcatttgtctgctttgtttttcttgtctatgtgtcaatgtttggctatgtgtcccaatttattttccgttatttccttattgtccggtactttaattaaaaataatttatataattaagcaaaattaatcaacgtaattaagcggcaaaaccatttcggctctgaattattttttgctgttttttctgatgcttctgttcccatttgcttattgcgtccatttgttcaattgctattttccgcctgctgaacacggactaatggaggataattatgttgcggaaattctcggcattaatctcgacgaacaaattccgttggcagcttttcctttaatgtactgatataaaatgtacttgagcccagcctgggattttgaaagtatcggcactttggcttagacaattgacgggacctggctgctcggtcaaaaaagccgttttaccgggcgccccgatcccggtcaaaattttagcgcggcgtccggaaatttttttttaaattttactaaatacttgaaagtatatcaaattttcaaaaaagtcttatttttgtctttaactttgaa

SEQ ID NO: 19659 - DNA, 2479 bp, Heterodera glycines
tctatccgtccacctctgttgcatatgccatccatttctctttcatttccttgtgtttttgccgtcatacccctcatcctatccaaagtccatccccattgtgccagtattaaattcactcaatttctccctcgggggctccgagatgtctgcagtgggtcagtcagtctgtgctgttccttgcctttggcaattctttcccaaataaccaattgcactgacccaccaaaatgctctgaggttgttgttgacccaaactattcccggttttaatgcgtaaatattttgttaatgcttttccttcaataaatccttttctcttaaaatggtaatttgaatggcttaaagccttaaacccggggacagaatagtatgtatgttgtaaaggccaatttggacgcacttttactgacgccaacaaaaatgcccccatcagcaggttaatgaaaagggcaccgaggctgcggctgccatagctgtgagccctatgacaattaggccagcaataaggtcaccgcctgcccaacttgttgccgaccgcccattcgtcgcttttctcgtcaatcacagccaaactgtgcttttcctcgccattttcttaggctgaatgaggtgaagaaagagctttggattggagttgggcactttttgttattggaccgcactttcaattttaaaaatttatctgctgggtcaatgctcgaataaacctccttttatcaaattttttgaatgtgacttttgattgttccatgttactactgttgattagccaaaactattgtacttgagagaaatttgctcttaatttttactgtcaaaacaaaaaagaaagagcggcctcacaacggagaaggacctgatctgctggaattgttctccaactccaattagcaaagtgtgtttatacgctttctttgttttgtgactttgctttgatcagttagacatgggcaacccattaacactttctgtactttttttgctgttgctttccttttttctccttcacagtttaccttatttttgctacaatttcttataaatcccacgaaatcataaactaattaacattgtctaatgcctaataaagctcaacgagaaaggcaccgaagcgagtgccgccactgcgataatcggagaagctgaagcgagtggcccaattgaacccgagccggcacttttcattgctaaccgccccttcttagtggcattgacatctgctggcaacaaatttctgttcactggaatgcttcaaagaatgaattaattaataatattaacagccgatcattgatcatcaaaaccaatgctaattaatcaaaattaattttcactaatttactattaattcattaataaaattccatgcaaatatgaagctaattgattattcaccgctccccccccctcccaaaaatttagggttaagccccgaccctcggaaaggaaattccccgacaaaatttgttggggacggctggagaaatttaaaaattatcggggaataaatttttataaaggaaaaaagactcaattttcagaacaatgaggagggaagtgaagcggccgcggccaccgccgtggtgatgatgacacggacggcgctggtcacacggccaaaaatcgaattcgtcgccgacagacacttttattttacgattgtacgcggggagggccaaatgctcttttcggggatattttccggatgaaaaacgaaatattgtggaaaacaatgaagggaaaacagcagacagataatgatcagaaaaaaatgttgcagaatcatattccaaaaagaaaatgaaaaagagaaaagtgaataaaatatttgtttgaatgtgcgcaaaagtcccccccccccattatttgcttcgttctaagaaccaattctcgtgagttaggtattcccttcgaatggatctctttttattaccccccaatcattgcttcgctttctttccatcactttgtaaatccgcttttttaccggcatttaaaaccgctcagagagcgtcgcccccgcgcccgaccccccaaggggggccagccgacggtcctcaacgccgggcgatcaccaaaaatgctttccagcgacgcccccggcgagcttcacgctcaggggacgacgccgcgtttcgtcatcgcgggtgctttggcgagcaaggcggaactcccaccgggaaaccgtactacagaaatgatcctgagaagtacagtctcaagaaaggaagggattggctgggaacaagtggaaaaggaagagagaaattaatgatgggatgaaaatggaggaagagaagagggagcaaacagtgcactttccctctcacttctcccttttctctgcccattaaatgaatgctatttttttcctctttaattccttctgcaagggcaattgacaaatggttcgcctctctctcatccccctccctctctgtctctctctctttcattttttcgccttggtcgctgc

SEQ ID NO: 19660 - DNA, 1760 bp, Heterodera glycines
  unsure (1)..(1760): unsure at all n locations
tgctgatgatgatgatggttggctgcactcaccacgcccagtgttggcaatttcgtcaatgctttcataccatttgcagcctttaccgttaaattgtaaataggaagagttggaagaatgtgaagcttcacttttggtgtcctcctcctcccgctcctcaatttcagtgaacaatcgaccaaataatcgccctccctttttgtcgtcgacaatttcaagcagttccctcggataataacggtcctcaccacgcgtaaagccttcaatgatgcatggcacataggggtagtgcaatttgacacggtgacgagcgtaaaaatgcgctgccacgttaatgttgaacggcttacgcagacgtccatatgcgggttcaaatgccgcgcctcgttcagtcattccaccaacgaaaaaacacttgcacattccattccgatccttgtatgttgtctggacctttttcccaatcaattgctgcaaaactcggactcggtcctctgggtggttcagtcgatcgcgaagtgactttgtcgggcaggagagaaattgagcacaaaattcgctgacgagaaccatttcagatttttttatgtctgaatgaagaaattcgagcggcttttataccggtgttccaactcaaatggataagctccgcccctttttattttattgcatgcataattaatgaatggaaaataaagtacgaaaataattaaacgttggaaaatgtaacttttaggtagaataatgcataattagtaggtggaagacacaattttgaaaaaattaagaaattgaaaatataatttaactgttcaacattttatttagcattaataatgaatacatgtcagggtttgaacaagttttgagaatatgtataaatttatcgaatgattttccatgggacatgtggtaaacaaagacaatacaatggggggcacatgttgatgtcaatggggactggtaggcttcaatgtttttgtgtaaacctttgggaaatttatttaaaaaggatgatgaaatacttggtggtatgggaagggcaaggctatcaaagtaaatcactggcgcgtccaagtcccgggcataaatggcacaccaatgggagccccctttgtgatgggggtcacggttcacaatgagtgccgcaggatactgtagggtggccggcgaaggcaactggtcactggcgaaacatcctcgaaaaatttgtgacgtccgttggttttctctcaatattttggtgatttgtgtgctgtccattacgtttcaaccaaaaaacagagcacaattggtgtaggaccaaactgacgataagcatcaaatacagagccaacagtgcccagcaaatgatttgttggaagaaattattttcctttgaggagtctttgcacaattgaatcagtggaggcaaaattgaggacacttgttcatctatcagcttctcttgcttagggcgttgaggatgggttgttgtggtggttgctggacttgccagccgggtcgaagttgtactgggaagtcgtgtcaataatttgcgtcttagatactctgggacacgcgttgtactgggttgagggctgctttttggccagcccatttttagtctttttatatattcggaatatgatgctgataacctcggntgtttgactggacacaacatcgaaatttaattnaaagtatgaagaaaataatttccacatttttgtattcatctttatcaaatgatagtggcataaaaaaaaaatgacagcctt

SEQ ID NO: 19661 - DNA, 1250 bp, Heterodera glycines
  unsure (1)..(1250): unsure at all n locations
cagctggacggtttgggctgatcaaaagttgtgcatggaattgtcccatttctcccgcggctcacgggggcgaccacttttgagtcgtcggtaatgaaactgaaagaagaaaaataatatcgcaatcgaaccaaagttttaaacatgtttccttcatttgataacttcactttttcaatgtcgaaagaatgtcgggactgtcgtgtttgtccgggtccctgacatcgaaaatgtaaatgttgtcggaactgatgttcacaataagttcgtcgcctcttttgttgaaggccaaatgcgtggccaaaaaacggccttcacttccaatgtgtaagttggcttaaagcatattttaaaatcaattttacaaagtgttgccaaccctagagtaaatctgtatccaaacttttatcgaaccagaaattcagaagccacaaatcgaattaaaatataaaaattttgctaattcgcattttattttgggatgggattcggtaatgctttgcggatcaggtcaattgttacccggcaataatcggatgatcggctctttcatattgcgcctgtcaaaaatgggcacgacggcgtcacttagcccggcagcgatcatttcgggcctgacctcgttgatggccaacgatttgagttggtattggctggacatgtccaacaagtcggaggtgcggttgtcacggaggtcgtattgccttgacgataattaaattttggaagtaaaccgagcaggtcacctgaaaaaatcgctgaaaaaagaaccaagaaaaattcagaaattttacacccctgaaaacgaaaattgtgctggtgaaccctgtggacggtcactagcgatagataaatgaactcacctcaaaacgccatcctcggaggttgaccagaaaagacgcggttccgctgcgcaagtggccaacttcttcaccctgccgccgcactcccacctttggatgtgtctgtgcccatcggcggtagcctgaccagaattgaacggtgtcctattgtttggtaattttgtcgagtaagaagcccagggagtgaattttttgatttttcaccccatataaattcactattcgaatatcattattggtcatgccgttaaacttaggcatattgcacctttgtgccatccctacaaccatcgaaaacatgacaatttctctttaccgccggctgatggtccnagtcatgcaaaagcacttgagcatcgncccgacgcggacacgagcagacgatcc

SEQ ID NO: 19662 - DNA, 1254 bp, Heterodera glycines
cgaaatctgtcgatacgaaatgctaactcgtttacccttaaatattctggagcgtacccaaataaaatgagaatttttatcagatcccggtccgttttttcaaaatccaggttttcaaacggtgtctaaatattaatgcaaaagtacgcacatgttggtcgtccgaaccacttgccaagagtgtgccagacacattccaattgatcgtgtttacacatcccccgtgtccatgcaatgtgtaggcgtgtgtcaatgaattaaccagtgcgcttgtcacacattgctctctgaacaaacgctcgggaacgaccaaattatcttctcgttgtctgattaaaccaattaaagtcatttctaaaattcgcttaaaataaaaacagtcctttaaaatactaatttcggctctattgcagttcacacgaccataaaaaattttttgcaactttagtgcaccataactttttcaagaagcatccaaaaaaaacattattatatgagccacattccaaattttcttctgtttagtctttaaaaagtaagtcatttggaaacagcgattatataatattcaacagtcagaaaatatgtacaaatagcaaaaaaggaaaattgaaaatcagaagttgcgaaaaggatgaattttcactctattagagaggggccgaaaaattggggttttcaatcctaatagagattctccatttttgtaggagtcgagtatttaataacttatgttgggtctgtaaacacactgaatatgtaaattactgcatgcaattagctttatgttttattccatcatttacatgtgtacatagcatacgcgttacaacatcaaatacaattatcgattaacacaaaggatcgatcgtaggggataatggtacgtaggggataatggtacagacaattgatcagagatgggatagatcacaaacaaacacagcaaatgttgtacttcgcagagcgcacatcgtccgttcatcgacttcttggcaattcacttgggcttcggaggttgcttaaatgtgaagttgaaagttagagaagtcaaaacccagcccattttcaactcaccgcccaggccgagacttcaattggagttggcgattgtgcaacgcctaaaattgagagttagtgaaaaaagcaaggaaaatcgacgcccttctctcccacctgcgtaggtcgacaaaccgggcatctgcgaatttgacatggttgagccttgcgccgcactctgtcccatcttggagg

SEQ ID NO: 19663 - DNA, 2740 bp, Heterodera glycines
ttatgaattattgagttattccaatttttcgtccgtatttgcaaaattacctcacttaaatttatcaatgccccctttggcattgtgattccgccaataaaaataacaatttttatattttaattgactgttcttttgcaatttactgctcaacaattagaaagttgagaaaagattgtgtatttgtaatggaaaaatccatccgatgtttaaattcccactcagaaaaaattttctcgactaagagtatcaaaattttttgtgggaattttcatggctaattgcttccaaaaacttttcttccttaacttatttaagtttttttgtcataaaggccataatataataatagatacatcaaaaatatttttcatgataaaatatcaagaattacaatggatgaaaattcctgcattttttctattataaataactgcatttttaaagaaaagttgcatcctttatcttagggattaatattgtatcagagtcaaaggcaatcagtcccacaaaatcctatattataataaaattaccactaattttgttgactgttcgtttagcctaatgtaagaagtcacattgcgttcacaaaaataagtcggattttctttgatagccttttcagttgaaaatttatggtcgtcaattcgtgccaaattttttcctattttaaaataatttatatattttgagtcaaattgaggtgtcattagttttttgaccaaaatttttaacacttttcttattaagaaaacatgttatcatagtgcataaagagaatttaaattttttggttttagctttctgaaattaataaattttatacaaacctttcgatgcagtagatttctaataaatattcaattacttcagaaaacaaaatgtcgaagacaaatgcagctcgcagtgttccgacctcccaaccaaaatgttgcccaaagtttcggaaatcctttactcaaaatgatttattttttttgggcacataattcaaaaaaataattaattgaccataattggcttcatatccaacaaattttgtaaattgcttttttaattaattaaacaaataaaattaaaattttcctttaatttcaaaatattgcttcatctttttttaatttgtcataatttgaaggtttaattagcgctgaaaataataaataattttaaaaagttagaaattcgcttacttttattgtattttggcaacaattcttttttccattttatcaatgtcagaaatgcccaatttcttcgcaaattctttctgtttgccttggccatataattttttaaattcatcaaatcgttcaatgaatttgcgctttttctcatcatagaagcgctttttcattttatttttatttagatttaattcatttttccatttttgtattaattgcagatttgttcctaataattttgcaatttttctctcaatttttccataatctttgcttttgtattttatttttccttcaacttttctttaattgcttcaaattttttaattatttctctctttttgtgatcatttatattcagatcacctttaaaaaggttctgatcggtataatttcccatttgatcatttggaccatttcccatttcttcacccatttgatcaactgctgctgattgtgagttctcatttcgctcattttgttcaatttttatcattaattcttctttttcgtttttgtcccatccgtcgccaaatatttcatcaaaattctgtcggattttgccggattcaattacaaaaacattaaaaaatataaaaactattaaatgccataaattcaaatttttctcatttattggcttaataaaaaatcgagatgtcctgattttttatatatgataaaaatgttttttctaattagtataaatcagctacaccatttgtggctgtggcgtgcttttttcaaaaattttggggaacaagctgggcggggagagggggtagggatgtgcgagaaatgattttttggaacaattttttaagagaaattacaatttttgggggcgccagcggtcccgataagcgccgccggggaaattttttttgggatttttaatgattttgttaagaaaatttgtttaaaattccggcacctaaaaatccttatttctcttaaaaaactggctaaaaatcgtaaatttggtcattatttggacaaaatctgttaacaatttgcactcaaatctgcgaaataaattatttaattttaagtaaaatttataatttatttaaatgttcattttcaactaataactcagaaaactattatcaaatacaatgctggtgaataatatgctaacattggcttttttcctttccgttgctttttattttttagtgaatgagcgggcgactgataatttgtattgtaactagagaccggaaatttcaaatttgaggatcccgctgcgggattggaactcaaaattttttgcgggacggggtcccgcgggattaatcccgcaaatcccgaatttaaaatttgcgggatcccgcgcgggattgcgggattttggaaatttcgaaaaaatttaaatttaatttaaaaaaatttcctaaaagcaaaaaatacctgacattttgaaaaagaaattttttagggctgggggtgcatttaaaggggctgatgggtcgactaagattttcaaatggatcagcagacggtaaaaagagatcgggaaccaaaatctcctaatgatccataaatat

SEQ ID NO: 19664 - DNA, 1760 bp, Heterodera glycines
ttcacattaagacctgaatatcaatactgatgagaaatttgtgaagcgaaacaataataaaaaaatgatttttcaggttacaatccttcgcgaaattttggaaaacatatttggtaaaaaaagtttttggttatttattttgactaatatttatttgatcataaataaatatttattaaaaaatttcgaatgtaaaaagaaattattttagcagaattttgaacaaggtttggcatttctttttgtttttagcaataacaaaacctgaaattgtacaatacgcctctataaataaatcagtgaagaatattattacagaaaaattcaaaaatttttttatttattaacgctttttgatagcaaaaccagggttgcaactgaaaatttttaaaatttgaatgcaatttgtaaaagttttcatccaatttttgctattttgatccatttttaatgaaaaaaaagtttttgtggtctgtcagtgccgataagcgcagctggggaaaaaggaataaaaaaaacaccgaaaaatcaaaatattgccataaatttggaagtgttggtagcagtttccataaaaatgaccatttttgtgaattcccaaaaagcagcaaaaatcagcatctcaagaaaaaaaaatcagctttgaccccttaaacagtaacaaagcagaattgggagccctgattatcgataatgaattaccaattaataaataatttttaaaaattttttgaactaaaaaataaaaaggagcacacacaaaatactcttttattttcaataaaatatttttccggataactcagaaaagtgttttaatgttttgtagtttgttttatttagaaaatttgttttagtgataaataaatggccttgggatggcactgaattccgatttccgacatttttagggtcggaattccgatttacaaaaatatttggggcctcggaatgccatccctgccattggataatcaaaaactaataatttgtttataagaaaattaaacaacattaagagaatatcttaagaaaatgaatttattccccttattatgcttaattttaattttaattagtccaattgtatcagaaaagctaaaactccaactgaaatcatttggcgaaatatttggagaaaattgtgaagaaaaagaagatgaaaatttgcaagaaaaaagagaaatgcttaaaaatattataaataaaagaaaaaattatgcaaaaaggaagaaaatacggagcaaaaaaatggagtaaaattgaaagaaaaatcggaagaacattagggtaaaaccacattatatttataggcggattaaaaaaatgggattaaagcaaaaaatacctaaaagatagaaattaaaaaatgatgaacaaaaaattgaaattgataattcaagcaaaaaagaaaaccttaggggtctattttctcaaattttttcaggtcatttaattccaaattcctggcggcgacggttaggcaccaaaaaaaaaagatgaaaaaagacataaaaaggcataaaataaaaaaagcacaaaaattaattcgacaaaagttttattagagtaaaaaacaaataaatgtaatatttcaagattttttcaaaataagaaaataatttttagaattttaaacccgcacgattccgcgattcgaaaaccgtgaaaaaaagcgcgaaaactattgcattaaatttaagaacgaaaattttgacttgaaaatttcaaacattttcctcccaacttcttttaagtcc

SEQ ID NO: 19665 - DNA, 955 bp, Heterodera glycines
aaaaagcgcgaaaacaataggataaaattaagaacgaagattttgacttgaaaatttcaaacattttcctccaccttcttttaagtcccacccgagggcgagacagttccaaaatttgggtgccacataaatgtggatgtaatagtaccttaattggactatcactagtcaaattaggtgggggattttgggctctaatggaactgaaaattgcaaaaattagatggggtgcgtccctttgtaaggaattccctcgtcgtctaacccgccccttttcatgcactatttcagggtctaaaaaatgaaaaaaaacaaatgatttttttttgttaaaaatcatagaaacttttcggcttttaaattttaaacccgcacgattccgcgattcgaaaaccgtgaaaaaagcgcgaaaacaataggataaaatttaagaacgaagattttgacttgaaaatttcaaacattttcctccaccttcttttaagtcccacccgagggcgagacagttccaaaatttgggtgccacataaatgtggatgtaatagtaccttaattggactatcactagtcaaattaggtgggggattttgggctctaatggaactgaaaattgcaaaaattagatggggtgcgtccctttgtaaggaattccctcgtcgtctaacccgccccttttcatgcactattttagggtctaaaaaatgaaaaaaaacaaatgatttttttttgttaaaaatcatagaaacttttcggcttttaaattttaaacccgcacgattccgcgattcgaaaaccgtgaaaaaagcgcgaaaacaataggataaaatttaagaacgaagattttgacttgaaaatttcaaacattttcctccaccttcttttaagtcccacccgagggcgagacagttccaaaatttgatgccacataaatgtggatgtaatagtaccttaattg

SEQ ID NO: 19666 - DNA, 1343 bp, Heterodera glycines
  unsure (1)..(1343): unsure at all n locations
attgtcgtaaagctgagttgtccaccaaccgagttgtccttttttaaaattcagcccttttctatttcaaccgcttaaacgataaatttattgaatttattttttgcattttcctttgatgtaaaaattcacattaaaatatttttctgcacacgaagtgacggattaaagttttgggcttaaaatgttcttcttgtcctgaaatattcacacgcaaattgcttagttggggatggaatttcagtgaatgaattcgccctttgacggctaaaaattattcggtaatttcatccaacggaaggtaaaaggaggctcatggaaataaacaataataatgctaataatttctgggaaaatttggccaaaaaatttggccaacagaattttcattttggcaaatggtcgaaaatggcctcctcctcctcctttaatatcaaaaatttgctggccattgcttcagccgaaccaaccaatccgaatccaaacagtcaaaatgccaatttggccattccatgcactaattcgtccgtttcggcaccccaaaataccaaaaatccgagcctagccattacgctatcaaaatgtggccaaaatgggccgccgcttccttctcagccggcactgctctttctgccaccaacaaatcagcaacaaattgtgccccgcggcggtgacactccgccggcgccgacactggcagagctgcaaatgttttttggactgaacggttggggcacaagcattcacagtttgaaatcagtcacttccttcgtttgatgtccccaggggttcaaatctttcatagtgagaaatatggtaatacaaaaagacaaaaaatggtaaaaatattgccaaaacaattaaaaatacattaaaaaaactatttgttcatcattttgagcaaatcgggaagtgttggcatttataaaaaaggatttaccaatttaatttcattttttaaaaagtttttccttttgtcgatgggcactgtaagaaaggctattttaaaaatttggcatttgttaaacagctgatcagaaaaaagagaaatgagcgaactgaataatgccatccattcttaatatagcaattaattggtcatttcgtgtcaatttgttcagtgcggaaacacgagtacagtcgcgcgcggcgtcggacaatcgaccganagccgcgccaggcgtacaccgcaccacagctgaacattttggaggagtcatttcgggtaattatattaattgnggaaaatannatgaaatttctgtgggcaaacacaaaattaannggcgacaataattgagtgtgcaaaagcgagtgcaattggccaacgaattggcactgac

SEQ ID NO: 19667 - DNA, 1155 bp, Heterodera glycines
  unsure (1)..(1155): unsure at all n locations
ctgaacttttggaggagtcatttcgggtaattattctccagggaataaaatgattctgnggggaacaaccctttaaggncgacaaatatttgagtgtgcaaaagcgagtgcaattggccaacgaattggcactgaccgaaacccaagtgaagacatggtttcagaacagaaggtgagttgatgagtgtgccaaaagcggacaaaatgatgccttattttgagaatcaaaaggaatttggaaaaaaaagggttttgtcgattaattaaggctttaattttgcgttcattttttatttttaaagttaaactttctgtgcattgataaaacggggtcattcggaattcgattcaaaaaaaaaatctcgaggataagaaattttgaactttaaaaaatatatatttggggtacaatgaaaagagggggtcattcaaaaaccatttgaattttggaaatttatagccaatttactaattaataactagggctgggctttttaggcacaaaaaatcgcgaaatagcacctaaataggcactaaaataggcatttaggcattaagcacaaaaactccgaaataggcaaagttaggcattataaaagtcatcgtagacaccccaaaccaagcggaaaatgcttttttcgtgcttatccgttcgtattaagtgcgcaaaaattttaggcatttgcctaaaaatcccagccctattaataattgattgcatctttattttgtcaaaattatgcagaacaaagtggaagaaacagttgactgattcgcttcgacagctgtgccaggaccaaatgtacggaagtgttgccaacggaggcaacggattgggccaaattgggatggacgaagacggcaattaattaacccggaaaattttgctttttcttttacctatcgaaatcctatcattcttctacattaaattcaaatgcgtttgttaataaaaaaaattcaaaaatcagcaacgccgcccagaagtattgaacgttcgcgcattccgattccattccgacattttggaactcggaattccgagtcttgaaatttttgggtgtagcaactgtaacaaattcttactttcattaattcatgacaacttgtttaattggtggtttcttttttttttgattgacaataagctgaaaa

SEQ ID NO: 19668 - DNA, 950 bp, Heterodera glycines
  unsure (1)..(950): unsure at all n locations
gagatgaaccaataaatagagagtgcagagaaaaaaaatctctcattttggcgtactatttttttgtctctgttattagagaagaactgaattcacttcgtgacgtttaaatttttttccggacgttaaatcttcttcaaattttgcatacctatagaaaaaaaaattctgcatcgattaatgcagaaattattcttgttttgcgctagttcaaaattacaagtttagaaggcccatatattttttctattgcatccaaatactatgaatttgcttagaaaaagctttttctaaatcagtgctttcgaatgatacncagaatgtccaatttggttggcaaaaagcttcaaaaataatttgcaaaaatcgtagttttttattttttggacaaaaataaataaaaataccgtactttctctatttgaatgcccctctctggtagaatgccctctccaataaaatgcccccctcaggagggatcgagtatatccgcagggattctggggctttgacgatgccgaaagcgaaatctgattgcagattcgttatcaaccccctaaaatattcctaaaaagtatttttcagctaaatttgggtgaaaaaatttttcccactcagaaaccatgtggtcccccttttggtcccaaattcccaaatcacttttatttttataatcttttccaaaaaaatagtacaaatatgaaataaatacaattctatagagcaaaaaattgcgggttttttgagtatattaattttcgaaaacatcctttaagaaccgagttctgattttttgtctgaatttcgaatttttccagaatttcttgaaaaaaatttcatttgatgatagaaatttagaataaaattcataaaattctccttatttttctctatttttaaagctttattgtacttaaattgacccactttgaaatgagttatgaattttc

SEQ ID NO: 19669 - DNA, 1773 bp, Heterodera glycines
gcaaaaagatacaggaaaaagaaaattctcgctttgaactttaaaaaattttcttaatttaattaattttaacagagtgcttaaaatagctcatactatcattgacgagaacagtttttatttattatgatggaagtggccattttgaagcaattttaaatccaataccaactgcagactgaaatatatgaaatgaaaaagaaaagagaattaagttatgtgttttatgattaattcttttaaacaattaatttgggaattttttatgtaaaatattaattttcttataatttttttgcaaaattcttaacgaccaaaaatcgatatttttcattttgatggttttttgactaacgcccattttgatggtttgtgaataacgacatagaagcgatcaaatccatttattcatcagctctgctgactgaatctcgtttcgtatcagattcctaacctaataataattataattagaataattaactcattgcaaagtatattacatgcgaattttgttgaataacggtcggtccggctgggagaatatcacaagagttgcatcctcaggtcacctcataaattaggagttattccgcaccaaaggctcgtgatatttgcgcaatatctttcactttttgcctcctgtgtggcgccattcatgtgcgtatatagttatccatatcataatattgagtccatatgattaaaaatcatcagatgttaaaattaatatcaaattagtgatcaccgaccttggaacccccaaattacaaattttggaattttttgagggggagggggcagcataacccggaagtaccagtgcgcctatcgccagcaaaaaatttccaacaaatttttcttttttttgatcaacattaatatttttaaaataaaagcacgctagcatttatttacatactcagagtgaaattagcaacaaaataaaaatacatcgagcaaatgtacgataagtgaacaactcgagaattaagtacttaggcttatgccttatgggacaacaacagagatcgaagaacatcgcatttcgatttaattgccgaatatactcgcgaggcctcccagcacagcaacgccttggaaactttcaggcgtaagcgcaacaaccaaaaggagaatagcgaacagaatcacgagaatcagaatgcagaggcacaagccgatgcacaccttagaaacaccgccttaaataggaaaatgggagggacgagttgagctaattggagaaacaaagtcaaaagtcacccaccaccatccatcgaactgtccgctccaaatcccgaagctgcaggagtggtgcctctgcgtcgcgttattctttttgttaacctgtcgagaaaaccgtaggcttcagacattgtgatgcggtttagttcagttaaataggtatttcactttgctaaaaattttttcaatgtaaaattgtatgaaaaaattggaggtcaggttgaaaaaggaatgaaagaccagcatccgttccgaaaaaaaattaattcacatccgggaatttttggctgggaaaatcgggaaaaacccgggactagtcccggtcccggtcaaaaccgggaccttggtactcagttgtactcggttgtccgcttccaggtcccggtcccgtggcactctagttttgatatagaatgaactcattaagcattgagcataatttggcgaataaaagtatatttacgatttttgatttcaaaaaattccctttgtttttttgataaaattcaaaatctttcacttttt

SEQ ID NO: 19670 - DNA, 1312 bp, Heterodera glycines
acataaacaaaaaagtgaagaaagagagagagagggaatggaagaaaaggggggggaagagcaaaattggtggaagaggaaggggaggggggcaaagccaaagcaaaatggaaatggggaggggagggggcagtgacggggagagccgctggttggtggtggcggtggacggatggccgaccaaaaggggggagggctctctcttcttctgtgtgtgctgtggtggtggcccgtgttttcgcaattttttgttgtcaacaacggcgggggacagtggcagcagcggaaaaatcccccgcccccttcagcactttctttgccattcttttttccacacatacaattttttatcatcccttccccccaccctccctatttttacttccataaaagaagagcatgatgaaaaagtgctatacgtacacatgcacatgcatatgtttgttgttgtgtatgcaaatatgccaaattgtataattacatgtttaattgccttgcctcatttgatgatgaaatttttggcaaattagctgtgtctatttatgacaaataaggaattattcgttaatgtaagcatatagctacaccaaatattttggattttacggttaaaatgatattctcacacatttatcaattacataattcacattcgttgctttattgttttattgatttgtgcactttaatttgtcaattcctttttcccttttgtttatgtacataattcggtttcaaaactttgttttcttaaacaaaataaaaattaccttaaaatggcagttttctaaaaacattacatacatactagtaaactgaaaaaaaaagaatttaagaatttgctcgacattaaatcaaacataaatttgaatttacgcaattacatattcttttccaattttggcgaaatatttttttttgtaaaacagagcttcaaaatttagtttttcttttaaaaatttactgacacattttcttccgatggttttgcccggtcattgatagaaaaccataaagaacattccgctgtgccaattacataaagcttaggtaaccaaaaaccaccaaaaataatgttgcgaattaagccctcaggctacaacacgcaatttgcttccatttcttttccaaaatcaaaatacgattttataacgcaattattttgtttcagaaaagtgtaatgatcaacaatgtttgactatgatcgagatttgaacattgcccagcagttggctgtaaatgttgacgcttttcaatggcagaaaaaggcaatcactcggactctgactgatgatgacgacactttgccctt

SEQ ID NO: 19671 - DNA, 1038 bp, Heterodera glycines
tttattcgttacgccttaagctgatttgaaagcaaacgaacattggcaattgaattgttttttgactttcgacgttcactcggaaaataaaagtaattaaaaactgaattaaatattaaaattattaaattaaaattgtgaataaaaaaagccaaagtaagacaaaaaaatagtcgatttgccatgtgtgtctttttttcttcaattggtgaaattaactttttaatcccacttccatcggttcatttttgcctccagtcagtgcagtgccgtcgccgtcggtgctatattgtctccgtagttcagctttggtcactgatctgtgccgtgccattcgctccattcggttttctcctttttccctctttattttggcctcatttttatggatgatcagaaaagtggcatgactatgttatcacaaaataaagtattaaaacttagtttaccagattagcttatcactccaaatttatcccttccttaatgtctctattaattaatgtcaattaattacctttttacacttcttccgttcccgaaattctgtctaatcaaccaacaaattgatttataccgaggagagttataagcggagcattcatgacacatttttgttcattaacacaaataaacagccaattaagaacagagcgaaggaaaggggagggaagggaaagaaaaggaagacgaagtgattgacagtcattatgtggtgattaggcaaaactgaaggacaacaaaaacaataactttcccccttatttgtccccttaacctctccccttcttcctccccctttcccttcttcctccccctttcccttcttcctccccctttcccttcttcctccccctttcccttcttcctccccctttcccttcttcctccccctttcccttcttcctccccctttcccttcttcctccccctttcccttcttcctccccctttcccttcttcctccccctttcccttcttcctccccctttccctcattacccctctctttactcccctttcgcccttttatgtccc

SEQ ID NO: 19672 - DNA, 2140 bp, Heterodera glycines
  unsure (1)..(2140): unsure at all n locations
agatacacacagagggaaaggagggataaaagaaagctgacagagagataaagacagtttggaagactctttgttgattanggctatttccgtgcaagttacgcacgggattcgatgcagtccggtgtccatttgtccgcttcgtcgagcagcggatcatcgaccgagaccactcggcacgaaaatgtgttctactgaaaattagtgnaataaatcggctttatcattcattggatatccttttatgttgcgctttttcacgtgtttaggctgatgagcgacttttgaagaaattgcctccaaacgtcgaatcggctgcccttttggtccgttcgtcccaattcgatcagtttttctctgatctccagttttcttcaggtggctaatgtcagtgctttggaccgtcctttgagtgcttttgtccgtcttaaatacccaaccgtatgttttgttttactcattagtggccaatttgtcacctctttcagttgcttcatcccgaattgcccgatcacccaattcccgtccgtttcatttatgtgttgctcaacccaatggacaattacccaaatgagacaataaacatcggtcgggcgatgggtgcgcttttgtcggatgaggttgaaaatgaatagggcaattagcaaagaacggacgcgggggaaaatagaaaaattatatttccaaaaataaaaaacactaatcgaatctgtgcaagttaccatttgtccaccaattttcactgatttggcatcgtctgactttgttttttcagcttcattaattaaatataattaattttattttgacccaattaatctcagcattcggctataatttcgtaatttgaatacttttgccaaatttcgtcagattttccaatcggtcgcctttcattgtttggagcgccacactttgtcggatgcggtcgacgaatttctgtcccaaattgttctcattccgccaggcaattgttcgctcgaaacacgatggaagccggcggacagagacgcgggaggggcggtcagaaaaagggcgaaaaactcaaaaaggaaaattggcgcgcgtttagacggtacgccacgtcggaatgctttacgccaattacacccaatcagtggacgaattgccctcctcatttgcaccgtttgtgcccagtgaatacagcaccagcaccaaagaggcggcagccgcctctcggcacttgcaattggcccacctcaacgcggacgcacggccttaccgtaccgggagacttttcgggggactgatggccgacctacggtgggattggggaaaaacaaaaataaatattccaaaatataaatatataattatcccaaaatataattccccccttcttcatcaggcgcaaattgccttggtttccgtcggatttctcggatttcttccgcggccgtctcagccaatccctcgccgccaccatccttctgttcttcgccaatctgtccaatataatcactttcggcgccattatggagcggtctttccaccaccaaattgcttccattgaaaatacgtttgaaaattacagaattaattactcatagttgttctcctaaattaattaatccaactaattaattaactaattaccccaattaatttgttaattaattgtctctctcttttcaaatataatttgtggcgctctgtccggccttctctttggcctattcagtgggcaaccgctgagtttgttttagctaattctgccaatgttctctcccatccttcagatgttctgtccgccaccggtcccactttgatctttgagaaaattctttttgatttttgcacgtaatttttcaattttttttttaatttccgccatttccgcccttccctttcagtaccaaccattgggagtttctgccctttcgcttttacgtcggcctttggatgagcttttatctgatcattttggtagccaccgatgcgtccgcgttggtcgcactgatcactcgcttcactgaggaggcatttgccactctgatctcgatcgtgttcatcatccaagcattcgagaagttgttcgagatcagttacgaggcaccgatcacccgacagccccagggggagggatcaaattgagaaaagaaagaacattgttgaagga

SEQ ID NO: 19673 - DNA, 2629 bp, Heterodera glycines
gatgttattcggaaaatgcgcgtagactgagcgcattttgtaccgaaatcccaaccagttccaccttttgatcatgttttcaatgtgtgagcacactgtgcgaatggctgccacttctttgcggatgccaaaccatttccgcacacggagcagctaaaaacccaccattttagcattttgaaagttggaaaaataaaagtttaaatttgagactattttaaacgaaagcgcaatcatttcaacaacaattagaaatgaaaagagcactctataaatttcagattttgtttgtttgttactcagaataccttcgggttttctcgcataatttcaatgtttaagtggcgaaagtcgcgcttgagcgtaccgcgcggtcccttcacagtcacaacacggttgttgagcgcgaaagtgacattgtctgggaatttgacgatgtcgctggattcaatcagcttcatttttcgttatgtttaaacagaaaattgatctgtaattgaaacttacaaaatctctttttttactcctagaaaaatatataacaaacaatactattatcataggagacttttaacattggcagcaaagatataacttgggtcaacaatcttccagtacctcataccagtctaggaataacttttcttgatttttttaataaattttcactaaacactaatattataggtccaacaagaggaaattcaattcttgatctttgtctttttacaaaccttgatttagtctcttcaattgaactaaaggatagtattgttttttcagaccattcagcattgtattttaatattgatattccttgccaaagacaaaaacccctaaaaattacggtcagaaatttcacccagtctaaaattaaagcattcaatacctatttactctccaatttatcttcatctttaagaacctggcaagagtgtaaagatcgatgcttttatcttgagaatttttatttaaatttattttggcgttttatcttcctttttattttaaaacaaaaattatggattttattgttgaaaaatcatgaaaacaaagtgtgtaggaaaaaaagcagagtgttgtaaatgcaacatgcaattcaatgtttattttctctgcacaatcgattgcccaagaacaaagtctccgcccccactcccccccccccccgcccactttgataaatctcctccattgcccactcacaatcattctcattttcccataaaaattttatgtagactaccgccgatggtacctccctctttaaaagaacatttctcaactttttttcgaaataaatttgtttatatgttttcagggttgggaaatacaattctaacacccatttcgaaccctggacctggattcgaacaaaaattatttaatttccagcaaaatttggaaatatgcaataaaatgattgaaataaagcgaaaatattctcctgaatgaaagacataccatttcttgaattggaaccgttgttttgttgcatctttcgaattttgtagaaacgaatttttattcgagtccgggtccaggcctcgagataggtcaaatggatgtttgaatcgtattctccgatcatgaaaatttaaaaataactacctatattcgaaaaaaaattgtttaagttttcgaaaaagcgatgggtagatcggtagtgttaccttttttgaaatcataaattataatggtaacatatttaacatattaagatttgctaaaaaaatttagttacctaaaatgcctgtgcgacaaattctctcgggtacccgcagaattgcgaccaaaagtttgtgttagtggtttttcaaattcgataatcatccgttttccctttgacagcgtttggaattggttcggcgaggttggccgattacgtgagtgatttaggattttaaagcattcaaattgctttattcaatcttttccatttagggtgtctttaaggccctcctcgagcccttagtggtttccaagtttgaagagctatcgcgcattagagtcgaaaaaattagtaatttttttcacttttttaattaacacagagtcttaaatttagcgatcttttttgggatcctcgttttcgtctcattggctgacgttgctatgaccctgcggaccaacgaacatgttggcgacgttgagcgccgtcttgaaagccgtcttgaagaccgttttgctgaccttcgagcgcttcttgagcgccgccttgacagcattgaccgccatctcggaacttctgacaaagtatattcagcttactggtatactctaaaatccagtcaatgtttttaactttcaaggcgacggatgccaagttgcccggccagtgatcccagtggaactctgacgaaggatctcgggtgttacctttaccgggtattgaattgaccaattgctttgttgttctcatcttttcactaaagtcgtaaaaataaagttttaatgtaaaatgttcactatttccgtgttcaatttctcgtctatttattttttatgtttcaaacattattcgctttttggtttgcctttgttcggttcgaatcgatgagaatcaagaaaaaggtaaataaataaatcgggcaacactgatcgattggtcaaatttttacagagggat

SEQ ID NO: 19674 - DNA, 2920 bp, Heterodera glycines
  unsure (1)..(2920): unsure at all n locations
gccaagttcaatataaaaaatgcgatttataaaatagcacaaatcaaactctaaaataatttcaaaaatcttaccatttttctgatccttttgtccacgcattcttcggtatcttcatcgtaatattcgctttgtcaaattattttttaaatttccttttaccctttgggtgcgtttgtggcacgtgatgtttggcaaactgcgctaatttgaccatttcctcgtccatctttggtttttcgtaggcattcgcacaattcacataaattgtggccattgtgaacacgcatcccccggcattttttgccaaatcgaccaatgccttcagcaattccgattttccgacaatatattcctttatttcagcatccaaagaaaggtaagaaagtccttcacaagcgaaacgtctgacatcgacctgacaaataaatgtgggaaaatattagacagccgtaaactgccaaaaaattccaaatattatagaaaaaaatccaccgaaaaattttctgccttttcaattaaaaatttatgacacgtgttcgccagtttcatgcgagattcatcgtccattggctgtttactgcaatcatcgccggcagacgaagcgcatttacaaaggcccaccaatgcgcggacacggacatttggatccgaagacaaaaataactttttaagcactggctaaaaggcattgttgaaaacaggagagctttaaatggctaaaataagagagacaaagtcctaatttaacaggcttctccatgcctattgcaccgatggaccccgtcaaattggttagatttttccaaaatgctttaaatactgaccagcccctgcttgatcatgttggtggccctttcgtatttgctcactgaaagcacaattaattcggctgcaacgctttgctgcagaaagtcgtcggaagaggccatctggagcattacttcggtgatttggtcgttggtcaccaaattaacgccaacatcaacgggcccttggagcaaagtgatcagaagagcagccaaattgattctgttctttggatcattaaggtcggacattaaaccaccaaatatttggtccaccctttctttgtaaatcgctctccgttggtcaaaaatcttaaatttatttatttctcatgaaggaattacaccgaccatatcgtcataaagttgagcaaggaaaacagaaacatggtgacgagtttcggaagtgactggatagtcgcattgttctggcaattgtgtggcaatgtgcaagattttgaaaagtcctctgtcctcgacaaaacgccaggacctgaaaaaaaaggaatggttccggtcgaagtttaaatgtggaattctctatcataaaatttattcttctaaacaaaaactaaaacaaaccatccacggggtaatcccccactcatatgcatcaaatttttaagcagaaggtcaatgctgatttctctcgctgttgccgaatattgcgggtccgttagaatttcttccaactcgagaatgagccgcagaattgcgaccttgttccgttcgactacttccgagtccggcttaatctccttggataaatccatcgccgccaatccgttgaacacacgctgaatgactgcgctggcagcctccgcatttgcaatcgatgggcgaagagaaggcagtcgagcgagggtttgtacggaaagcaattccatcatttggacggactggcaaagaacaaataaaatttttcacttcgcacacgaggggcacgtattccctccgaaattttaaccagttcttacgacaaaaatgactcttccccgctagtgcattattttacaaaaataatattaagcaaagatcgagaaaaatgtacataatttaaaaccaagaaaggcataccctttctcgtgacttggccaattcgtccaaaatcctaacagcacacagtgcttcttcgtccgatgcatttcctttgataactcccaacaattgcgccacaatttgtccattttgccaaactcgcattgccccgctatttgagtctcggcataaaacaagcaaattgttcatggcctaaataacagctcaaaactgtaacacatccatcccattcccttcacctttatgtgcttttctttgtcactttgttgctctccaaatgcaatttttagcatttcttccgcacgattttccacactttcgacctgttttaaacgctctgcgttgattttgagaagacgcgagcataattccactaacacactgaagtttattataaaattgcaagaattaatcagccgaaaattacgtgtcccctggtcgtaaacgaatggcctcttttgcatcattaaaagctgagccgattttgtctaatttttctctcgccaaagcgcgtctataataagactttgggtcgcttgggtttaattcaagtgctgaaataataattactgagcgagaatgttcacccataaaacatgccattgttgcagtcggactcggctccctcaaaatcgtccgtcttcagcttggccattgctctgttcttataaatgaccaatcgtaatttatcatcaggttttagctccaatgcttttgtatatacttcaatacatgacgtaaaatcttcgttttggtaaaatttgtttcctttttctttcagtgtttcagcggaatctccgtttaaagcctccatttgtttaagtatctaaaaaatcaaattattttgagtgttcgcaaaatttaaccccttttcctacattatacacatgtaagaatgatcaccaattgttatttctttgttctcgaaaacgaaagagtcttcctcctncaataaaccaatgatcggctatcattcgtgatctcgacccagagaaaaagcatgattaagcttaagntgtttaaaatcattctcccttctctctactctcact

SEQ ID NO: 19675 - DNA, 1880 bp, Heterodera glycines
atttgcgtcggtttgcccattccgtggcttttgcattttggtcttcgcaatggcttcatctccgtccagtccaatgggcttctctgttccatcgccatcctttttctcatgctttttgttctcgtcatcgccgtggtacagtgaaattgattcagcgctttttgaacaaattccgattggttcttactgttttccggcttttaaattccggcaaagtctgagtttggcccatggccaatgccaactttattccattgttcttaagacaatcactcggtggcgcatgaacaaagcattcggcatgatcatgttcttcgcttatctgctgttctgtttgctcagcgttctgctggagaaaagtttgctgtactgtccgctgaaattggtcagaaaagggaattggtgttaaaggaagggacgatcgaacggtggaaaacgaaacgaatttttcgaaccctcattttgtatactgtacaaattcgtttatttctaaaagtctaaagcgattttgtacccctataaccaaaatcattagaaattgcgaatttgtagttttttcatgtgttagagacatgaaaatagggggtgcaggtcgttccacaaaaaagctcagtgatcgataaaattaaataaataaatttaattattcaattcacaaaacacggtgccgtccggttaatactaatgtacggcgggacgcgtcattttcaaattttttcaatttttgacatcacttctcgccaattttctccatttgtagtagacatagcctgacgccattgataccattttgtagagctcatcgagctgtacaaaaaagccgctggtaccggcaagcttagcttgggttggccatcgacagggtcgggggcgagactgagggtcctccggcagatgtgccggacccatgacaggctccaagacgactcaccacgaaaatagggcacttatatgttatctgtgtacagatttcaaaaacaaattttttttatagattttcggggtcgggaaaaccgactctggcatctgttgtgacccaattcgaaccccgaacccggattcgatcaaaaaagtcaaaatccattttttaacaaaattcacattttatacaaaaaatcacttaacattttcatttttttaaaataatgactagggcatgataaaataaataattcgtaacattattaaaattgaataatctaaaatcagtgaaaattatgtttataaaatagagaccgagatttccaaattctccggaccggactggtattttaaaaaatgaccggatcccggatccggtctctcataatccggtcaatccggattttcatattgccggatccggattggtaaaaatttaaaatttcgcatcctaaattgagaaaaaacccgcaaaatgtcatcaattatatgtagaaattcggtgcaccagaaaatgtcgccgttgaaaagacaatttcgccaaaaaaatataatttttcaaattttcaagaaaaaatttaaaaaaaaacaattttaaagtttttttatttttgaaaacctatgttttttgggtaatcctggagtagggttaagccccgagccacccgacccgacccgagacgtttatgggacctattccccgcccccccgaatcattttgctaacaaaaatcatcatttgtggtcaaaaatcagcattttgaaaaattttcttattccaactgaaaaaaattataatgtttttttgcggcgctctttttctaaaagaaaaactttttgggaaaggggcccggcggtgccgacagtcgccgccgggggaaaaatttgaaatttgaacatttaaagttaaaaacattatgccaaagagatatttttcaaaggaaaatgaaaaaaagttat

SEQ ID NO: 19676 - DNA, 918 bp, Heterodera glycines
taatttgcagcagcaatttgagcatcgttgggttaaccatcgcttgttttttgtcgatcctcaagacccacaagttcacacacagggcattgaggcaacttggcgtgcagtgaaaaatggtcttcgtcatctccacggcactaaccccgagcttttacaaatggaaacgtattaatcgatgaagaatttttttccctgtcgatatgcaaaatttggttaaaattgtatgagtagaaaagtggagttgacccatagtgcgactgcatttaaactatatagacgaaatacaaaatttctttagggggggggagggaaaaatagagcaaatacggcagatgatcttttttccattcgcctaaaatgcgatgggatgcacaaaactgactagaacacatttttttattcctcgttacaacgcaactatacaggtgtagataaacatatattacatattaccaccggacaaaacaatacagggaaagagaataggcttaagctttggatgtgatcacttctgcccccgttccacgcacaaaaagcactttttgcaaattgtccgaaatcacctgaacatttttatattgttgcgtttaaaagtcaaagtacacctccaaataatggatgtagtcgtcgacttcgtcctcaaagaaaggcggctttgggagagaaaaaagaaccaattgactgcagcgcgagtgttccaaaataagcttattgagtcggattgccccgtgcattttatggaccttaattagggcgtaatgaggttaaatagaagatttgcattgtactcattcgttcacctttttgcgatccaatgacttcatcctctccgacgacggcctttgcccttccctccggcggttcgtctcccggttcgcattcagtcgaaggaacttgcgactcttcccgactttt

SEQ ID NO: 19677 - DNA, 2226 bp, Heterodera glycines
agaatttacaggaccccggcataagcgaggacctcaaggcgaagagacatgattgtctctataaagaaagacgtacggtaaaggggatacttgaaaatagaccacagaaggtagtgattgagaatcatgtacccggtccaaatgttgcaccatatctgggcctcaataaccaatccaaaccacaggagaccgaagaaccacggaaaataattattcctaggaaaagacttaaagagcaaactcctgatcctgaatcagataatgatacacttgaggagttaagtccggaacctcaaacaacatcaatactcaacccacccattccgatcaaaactattatacacccgacccttttaaatggtctttttaggtacgtgaaagaaaacaaagatttatttaaaattacggcggccggaaaggtacagtcgaacatgaatttgccgattgaaaacagtaattatagagatgttttgttgtatctcgcagggaagaaagatgaaacaccccggggtgcaaaatttctcaaagatcggttactgaaggatccaacagtaaaagacatggttgataaatcaaaggtcatgtggggacgtggaaggaaaaaggcaataaaatctataaaaacacccggcatagcacgagagaagaaacccttcaaaccactaatatgggccagactgtagagaaaatgttatcaaaaatttattttaatttaaaatctccggcaagttttgctggaattcaaaaaattttaaatgaggccaaaaagattgacccggaaattacgaccgatgacattaataaattcctagaaaagcagagaacatacacgattcacaagcccatcaggaaaaaattcccgagactaaagacggtaccgagcggcttccataccgattggcagtgcgatttgtgcatatttgatcagttgaaaaagcataacgacggttacaaatatctgttggtatgcatcgacgtgctgaaataataaatggaaaattattggcgcttatcgactcgatccttctgcgacgcctatacaatttatatttccatgataatgagctgaaattttgagaatttcaaagtgataatgaaatgtaaatagagaatctcacaatttcagctacttaatctctaaataaatactgcagcaatattgtagaaggatcgggttaataatattctctgatttattattttcacgaccatccttgtgaaattctcaaaatttcagctaattatcatctaaatataaactctaactgcgttgcggaaatattgagttgatagcgccaataatctccgacttattattttcacgaccatctttgtgaaattttcacattttcagctcattttcctccaaatgtatctgtataaatttgttcaagtaaattgtaaatcggaaattattagcgtttatcaactccatacttccgcaacactttatacagtttattttgagggggtaatgagctgaaattgtaagaattatacaagctggccaaaccaaaataataaatggaaaattattggcgcttatcgactcgatccttctgcgacgcctatacaatttatatttccatgataatgagctgaaattttgagaatttcaaagtgataatgaaatgtaaatagagaatctcacaatttcagctacttaatctctaaataaatactgcagcaatattgtagaaggatcgggttaataatattctctgatttattattttcacgaccatccttgtgaaattctcaaaatttcagctaattatcatctaaatataaactctaactgcgttgcggaaatattgagttgatagcgccaataatctccgacttattattttcacgaccatctttgtgaaattttcacattttcagctcattttcctccaaatgtatctgtataaatttgctcaagtaaattgtaaatcggaaattattagcgtttatcaactccatacttccgcaacactttatacagtttattttgagggggtaatgagctgaaattgtaagaattatacaagctggccaaaccaaaataataaatggaaaattattggcgcttatcgactcaatccttctgcgacgcctatacaatttatatttccatgataatgagctgaaattttgagaatttcaaagtgataatgaaatgtaaatagagaatctcacaatatcagctacttaatctctaaataaatactgcagcaatat

SEQ ID NO: 19678 - DNA, 822 bp, Heterodera glycines
tccaatcggttcgtttgtctgttaattgatcggttttcttttgccttggcatttcatttgatgagtcataattaatcagctttggcgtcacggcgatcggagcccaacgggcacatttcgaacggacatttaccaggaggacttttggccgcaggggtggggccaattgtcaccccgggggatgagtcagcaagtcacgcttgggaagaagttgcgcaacagatacgtagagcaactgggacaaatcagcggctcttacgacagtcatgagctgtatgtgcgggcaacggatgtcaaccgaacactgatcagtgccatttcggtgggggggggggggaggacaacaaagaaaaatgattggttgtttttgcagaatttcatcggcttttatggcaagggaaaagctggccgtgattacccaaatgaaagcgattggcccgccggctttgttccgatcgcaattcacacggtcgatggaaacaaagatttcatttctccgagtggttcgatgcttttccgtctcccacttcccccccccccccccccccctccgcaggttcgttgtgtccgcgttacgccgaattgtctgatttgattgggaacaccacggaatatcagaacacttatcaccaatattccgtatgagaagggaataacacttcgattgattcaaacattcgaaggttcttttagagtcttctgaaattcttgaacggatgaagccgaaaagaaaggtgacattgtcgacatttggctgtttcaagacactttctttgtcgaggtgaacaatatttgaaatggctttgaattgggaaaaagtgg

SEQ ID NO: 19679 - DNA, 1618 bp, Heterodera glycines
cgatcagcggcggcggcagaaagtgccattttcatatcctcaatgtgagacaattcaattaattattaattagtcacattttgttgccagcttttttttcaaattgcttttcgccgagaaaacgttgcgacaatgaattttggcttatttatctggtgataatttatttgtctgttcattattttgtctgttttcaaattgctgttaaagacgtgttttccccactcctctgttccttcctttgccccattcttcgaagtttcatccatcaaactaaaagcccccgcttcttcattctttcctccgattgatttgcttcttcagagaatcgcttttccgtcgcatattttttctcctctttaatcccatgaacataaaaaatgttcacttcatcacattctttcgataacatttctcgttttatctccgacttcgttccgtccccaaattcgtcttctcttcgaagtgccttttccaaaagtgaaagtgccattgaggcaattcttttctttccaccatttgtccgattttcatttgctttgaccatagactccgacaatcacaagcgatgaacggcactcatcgccgtgctcttcaatcagcaagtcttcctcaaggtcgccgctggcgtatgacagaatcgaacattggcaaagtgccaatgaaacgccaatttggcaaagggaaagaaaattgatgaagacgctaagattcacaataaacaaaactgatgaagaaaacgaagagaagggaagaagcaatgggacacagcgtaagtaaaaataaaacaaaacaaaaggaagaaaaagccatggattttagaagggaaaagctgcttttctcgaaaaaagactagtaagcattgaaaaaggagtcactcataagaatttcattacaattattaccgttgctattcatttagggaaaacaaaatttttgaaaatttgaagatgcgtcatcatccagccattgtttaagcaatcaaagcacaaaagaacaacagcagggagaaaatggcgaaggattgggtggacgaatagttttggtgttcaggaagtacaaaattggtgatccggaaagcacagtgtaaccattaagaaaacacaacacaaaagccttattcctcatcagtttgtctctcgtgcggcattcgcgagtggcgcttccccggcggattcttaattttttttttttcatttttaagtccataaatagcattaaaaaatacctgaacaacatacagctggggaatgacgtaactttgcacagtttcgtttttacttccattcccttgacaattgaattcagatttcatgtcaaatgtaacacaataccttaaatgtttaaaaaattggatctcccatttccaaatacccgtcacgtaaacgctcaggtggcgcgatcacacaagcgcgatagaacaccgacgtttttgggaagcgtgccatcacgagtgaaccgggaccaaataatgcgctggcattgtgccgaggatcggcacgaaaacggggcaatgggataatgtcttggcggggaactttcttcagcagaaaggggagcttttggcgcactagcgaatatttgacagttggcgtgacgggaggcgtccgactgagta

SEQ ID NO: 19680 - DNA, 1501 bp, Heterodera glycines
ggcgaatttgatctcccgcaaattcgctcttccatcaaatgatcgccgattttcgtcggctgtccgctttggtggtgtgttgtttcgtcctgtcgcattgccgatggtccgatcggcgtttttgcgctgcctcgggcgtccttcacgcagggaaggcgccacatccgctttttatcgctttctttcccctattcacgtgcctgccgtcagccggccctcccttcacccttttcgcccttccctttttgtcctttctttccttcatcatttcccgtttgccctatttttctcatcatttcatccatttatcactcctcgttcgcaacttcattcactcctacccgtcatcctcatttgtccgctcaacggacattcgcggctgtcgttcagccgcgacattcccacggctttgaaaacgtcgcttcgaacggaatgcgaccatttgtcgtttcagctccatcaccagcggtgacggctcggggtcctcttgatgtgaacttgacgtttcgttcgctctcatttcctggggcattgaaggcggtaccagctcaattgcttcaatccttgaaattgccggtgctcgccgtgtgcctcgagtagctctgttccgctgcgtccactgatttcccgtcaccaaattgcggatggtaacgatgacgggccccattaagtagacccataccaagggtatcaggacatcgcgcccaaaaatgaatgtgacgtaaatgcagcatgccgttgtccagtaggagacgagcagtcgaagtttgtccatgaaccattcttcggtgaggccaatcactccgctcgggagggctcccagtgtgagcgcacgcgccgttttgtgctccttctccttcgacttccattgatccaaacgcagccattcatccaagtgcgcgaatagcccttcgcctgtttcgttgtcgatcgtccatcgatgaaaaacaagcggcgtgatttccaacaacgatttgtctccagaggcttcgtggatctcagagatgctgctggagtcgattttctggatcgtagcggtgcgtgtgtcgattttgatccaattgctctggctcagttgcagataatggtagcggaaatttccacaatctgcgaatggtgatgacgctgtgaggatgtgaagctccggatccaggaatgcgttgagcgtcttcttgtcaatgcggatttggaccggaatgtagcggtaacagttgttgactgcttgatattccacattttgcattgaaaactcagcgcacgcgaagatttgcatcgtgtcctcgtttagccacctggccataacatccttgcgtcgtaaaagtcgtctggcctgaatggtcggatttcctctctggaacttcttcggcattccttggaaaaaagctgcgcgattgatcggcttgtggcgagttgtcctgcggttaattgtgctgcgagttgttcctcctggatggctctttttcccaatccacgatcgttgacgatcttcaggtactcatcc

SEQ ID NO: 19681 - DNA, 2200 bp, Heterodera glycines
ggccaaggccactgagtcccaaatgattaagtctcttcgatagacacattaatcccaccataattaagtttttattaaaatcttaaatgagtaaaatttacgaaaaattatgaatttacattcagtcccgaaaccccgacccggctggtccgggtctaataactattcttttaaatttttgaaatttctcaccaataatccactatagctctcatttattgagaagactattaaatgcacaattctctattttataaaaatttttatacatttttaatcaattttttattttcgtgaaaataatcaacaaaaaacgaaattaattaagacatttggcagtaccttaaaaattttgaagaatcaaaaggaattactgataaatgtttatttcttgtttcttctgattttttaaatattatttgccttactttcgaattgttttaaaaccaacatattttattgtatagtttaacattcaatgcattatattgcattttttcatcaaaaaaaattactacaaaagcctaatattgtaaataatttaaaaaacgccttaaatcattagaataataaattaaatttaagactataaatttaattaaggggggtccactaaattcagtcataatggtgaacaaaattaaaataatcttttttctttaaatctaataatcttggtatcattctaaagcccttcagaagccctattagacctacaaaaaaccaaaaaaaaaatttgacctgtaaagaagttattaagaaaaaatcacaaaaattttgacttttttgcaattttcagttagaacttttttagtaagcgactaatcgctaagcaattgcttagaaatagcttctaaacatgttcagctttcgaatgataccaagattgttagatttgatcgacaacaaaaaaagttatagtccaaaaacaagggctggcgccgaaacggcggcgccgaaacgatacagaccccagagaaataagttgtacaggaaaacatttgttggaacagagaaagaaaatataaaaatagtgcattcatataattcagaaaagaaacaaaacaaaagagagagtgagggtagaaaagtcttaccaatttgatttctctgtttctcatttaaacccatattttttatcattttcactagacacacttttttcccttcttcgttatccgcagccgctcgttacaccgccgccgccacgtattttactgcgccggaatggcgcaaatttttggctatataattcagcaagaatttcggaataatgatatagcttgaaggaaaatgtgattgctaatcagtgatcgcagatcactaaaatattcccaacaaattgatcaatcggtccattgcaggccaagcacgcgctgtaaaaaggagtagaaatcaacgagttcatcaatctgaaacaatgatgaaaagcagaattttcatggaattaaattggatcggcagatgttagttttaccaattttgcggtcggtgtgccgacaatctcgtgcccctggtccacccgtatctttgccaacacgggattccgttgccaactctcagcttgagtgcgcaataaatggtacagttgtgccgtatatttgagtgtatgtgccggcacaactcggtcctgaatcatttttattgttcggcactctgtcattgaattcgttgtgcattggcccttggggaggggggcgggggaatttgcttggactaatcggggattgatctcattggcactcgcaaagggaatttgttgttcattttggcacacattttttgatttgtccccaaagaagtttttatgcttgcttttttcttgactcgaaaaaatgcttttagtttttctttctgtttattacgacagtaaatgaattgtgatcatgcagaggctgcagaatactcaataaagcagcaaaaaaggaaggatctattcgcagattaatttacgagagcaaattgaaggttttttaattaaaaagggggcaaccaatggcaaattgtataagagataatcaagtaacacatgtatttcacttaatttgttattacttatctatattactttttttgtaatttgcaaaatttttacgattttgaattgcatttcgttaaaatttttcaagaaaaattttaaattagtgcgcaaaaaattacgtcaattacgctatttggcgaaatgatatttttgcctaac

SEQ ID NO: 19682 - DNA, 1302 bp, Heterodera glycines
tgatcatacaaattaatttttaaaattgatataaaattagcaacaacaatgccgaaaatcctttgaaaggcatttaataaaacagaaaaaaggaattgaaaaattttaaaaatttagaaaaagtaatcgaaagcacttcgaacaaaaatgagtgatcatcgaatgattcattcagtcatgaaatgatttgacaaatacaaatcaatcccgatgaaaaatatgtgaaattgatgattgccggtcggaatggattttccgttgagaatgccctccggcgcttccatcggcctattggtaccaccaacagaattgaaattcattttactgttcggtatttgcaaattcaatgtcgcccgcccatacaacgcaaatcgcttgagggcattaaaatattttaaacttaaaataactatacatcgaattaacaaaaataaattcaaatcaatttgttctgttaaaaaatcggttttctaaaataaaggaattttaaaaaaaattttacgaaaaaaaatttaattaattcttctatcaaagataacgttcttttattttgctatattcggacggggcctaatgtgatctcatcctcagggattccaacaatctcaaatggttttgttctggtatttaaaaataccgtatcggataaagtatggtaaaacatagtttttccatccggaaagcctatcctgtatgtgttgcggatccattctttttttttaattttggcaccaaattttaatgccaaaactgccaaattgatcattttgccatcagagtaaaagcttcggatcacactacaattctgtgaaaattcagactgcgatttgagcgcacctgtggtatccaatgtgccaatttggagccgttcggactgccgttggtgcttatattggagggaatgctaattaatagaggaatacggtgcattcccatttttttttagttaaccgaatgaatctttagggatgtaaaaaagatggccaaatctttttagcttttaaaattaataatatatcaattttgtggctaatttgaaaaggtattcttttcagttttaaaaaaattccacaaaattgatcgttagagaagaaattttagccagtctgtagaaattatcatcctttggccttaaaagtctttcatttatacgataatacgatattttgagctcagaacagaagcttttttgagtcagttcattattgtccgataatgtgcgagtgatacccgaaaatataaacacatttaattaaagaaatggaaggcattaaatgaaattggggctttaaaatgctctta

SEQ ID NO: 19683 - DNA, 2166 bp, Heterodera glycines
caatttgccgaataatttaatgtaaaaatgggttttaattagattgatggcatgcaaattattatgccataattaatttcgtgttttcagaatggaattattaaatttaattttttttttccgtccctactttggccgattgcattgccctccggcagtcttcggtgccttcgacattcgaaatttccgtggagcccaaataatgtgcagaaaatcgggcactgtcctccttcaaacgcaccctcagctcagcaatattcataattggagattggggagacacacttaaaaaatattattttgttattaattaatttattttatggaatgtttaatcactttttatgaataaaaaaacattatttttacccgaaaatattttgcctcaaattttgttgtccattttgatttaagctcgacataaattgcattgctgaacaagcttctcgtgatgaaccattcacagaaacattaggagacgatgaaccggaagaatttctttaaaaaattgaaaattaaattaaaatttattttaaattaaaaaaaatttttacgaatttgttctggatttatgcaatttctttcgctgttgcaccgccaaatccaaggaccgcataattcgagcgatgtgaccaagttgggtgacattcattttctggaaataggaataaaatgattaccaattaccataatttttcttattaccgtactttaaaaaaaaaatgttttttttaaataaaatattaatgaatttaaatcaaaatttaatcaaccgcacttccaaatcgcctctgctcagctttgcagcgatcacatccgttgtggatgtgagatttgccaacgcaaatgagcccaaatggtcgagaaggtccaatgagtcgagccaatccgacacaaattcgaattgctctaaaacgagttgttgggatgttttaaaatctcgggaaaaactgaaaatctaaaatcgaattttattcctcagggtttgaacaaattttatacagtctcaaattttaaaaaatgcgatcaaaattttccgattaaattcaaaaatataattaaataatttgttgttgttgttgtaccagcactgcgaatgtgctccggcactgtgttgtcgttgaggaaacggcatatttgcagttgcactcgtcgtggcaccccaatttcgtccatcagtgccgtgttcagtgatcccttcatgaagcggactgtgtcaaagccgtgccgatgaagcagttcggcaagcgcttgcgcactgcaaccattgttgttcaactgttgctgctgctgttgctggtgatgacgatgctcccgacttagtcccaccttgaccaattcgtgttttttaaattttgtaattcccgaatccttccctaaaacctcataattgcggatttttttaaaatttgatttgtccattgaacaaaacaaagcttatgaacgctaaattgatcatttagagaatactaatgacctggattctcaaccatcgaacaatgggttgataggcacaagctgtgacgccattggcgccggcacaactattaggtgactgaaaattggaaaatgggaatttataaaaaaataaataaacaaaaaaataataaattttatagagaaaatatttacagagctgctgttaaacgatgaaatagaattttttgacgaatttttcatcagtaaagaagggttttgattttgctgatcagcatgggcaatcagttgggaatcgtgttgaagggagtgcaacaattcatcaatctgaaaaaatattaaataataatttactaaaaattggataaaaaataaaaatattggaagcataaagatcaaatggtacaagctaaagattgaactttaaaaaataataaatcaatttttaaaattaagaaaattattctatacaaattaaaaaattaaaaactcataaaataattcacttctttccattgttcctcatggtccgccatggactgtttcctttgatggacgatactttcagcttcgctgctgctctgttgccgttgatgatgctgatgctgttgctgtactgcttgaacttcatgtgccaacggcggtgtgccaaaaatgccgccattttgtgccaccggcattgttgataatgggctgctgcttccattagcttctttttctgtccccatg

SEQ ID NO: 19684 - DNA, 2272 bp, Heterodera glycines
tcttacacacaccatcccagaaatgagctcctgtgccagaaaagatttgcatgtgtggctcagtggttttttaagatagtaaagggacaaagggtggtggttcgagtccgttgtgcaacatgaatattttcatttatttatgtccaaaatattaaaaaatgacgatttttgggaattgtttttgaagctttttcccaaccaaattggacaatcttggtatcattcgaaagctcttgatggggagaagctttttctaagcaaatgctaagcaatttgatgagttagaaaaaagatatgatgctttgaaattttgttttttgaataaattctcgaatcgacctattttcaaattaacctgacctatcattagatgcagaatatttttctctatcgatatgcaaaattaaaagaaattctgcctgaggaaaaaaaagttatgctgttcgaagtaaatgttgcttttcctaataataaaaatattagatagtacgccaaaaggagacaaaaaattagagaaaaaaagataatgtttttctctggcattctctatttattggtacacatctcgttttttgggatggtgtgtacagaggtcccagtggcctaaaacgcacgaaaaattgttttttggtggttgttaagctactttttgatagagatcggctacgggtcggacccgtatacggacttttacgggtccgtagtccgtattttttcggaccaatatggactactggtttttagtccgtaagtccgtatggatgcctagtccgtagtcccgtcctgatccgtattttcgcaaaatgccgatctctaattttttgagttattagggccgattttcttggtttttaggtatttttattactaaaagtttaaaatttgaaaaaaaaaattgttatgctgtacaatttatttacaaaatacaaacaaataaacaaaaatatatctctgacaaatgagaatctagctaaaagtttcaaaaatgcactcctaaaaatgaaaattttctcaaaaattcctctacaatttattatttatttgatgaaaatttttggttttccaaattatatatctccataaataaataaataacatatgtctttttcctgtaatttaaagcaatgtttttgggagctcgttcaactcttttcattgatcgtaaagatgccggccaaaaattggctaaggctttagcccatattttgcctcaacgtgataacattgtaagaatgagggctcttctgcagtttagtttccgatatacttttatgtgtacaaaaaaccctgaaatgttggagttcaatctttcaaatgctaccaaggatataggcatatgtattaaccaagtaagaaaaaaactatggcctaagaaaactgaggatggtcattgattggatgcgtaaactgcagtaacgccgaattgggtgccaaaacgatagtattttgtggtttaacaggtggttttggcacttccgcgtggcggagttccagtggcttgtgaagtcgctgatgcctttcaggctcctctcgatcttctgatggtaaatgcaaaaccatcggcactattaccatgatttttacttcataatatatattttaggtaagaaagataggtgctcctggccatgaagaatatggaattggtgctgttgtggaaggaaatccgcccgagctcgttatggtgggcagaagaaattgttgcctaatgtaaagttcaattctaagaatgaggaggctgtcagaattacacgaccatctgaagcatatgtgcaacagcaaatgcagaagcaactcaaagaaatggagagacagcgaaaagtgagtcatttaaaacacgcaaaaatggatttaaccgaaaattactaataaaactctaaatttagtataagtaaccaaaaatcaaatgaaataagaagattcaatacaaaattttgcgaagcaggaaaaagtgttgccgttactttagttcatgaaaaaaaattttatttgcggcgacgtgatgtcggcgttatttaggctagcattttttattactccgactttttttttaaaaatttaaaaaaagatctggtaaaaagaccaaaacgaaatatgggtcaagaagccgaaatcaaaacatccgtaattgatttaatgcactaaaaaggcacaccaaaattctatgcgtcatggatggacaaggggggggggtcaatttcgtaaattgtacggaggtcctaggcaatttagtgaaagttttggccaaaatcgaaaaggcactggtaaagat

SEQ ID NO: 19685 - DNA, 2580 bp, Heterodera glycines
  unsure (1)..(2580): unsure at all n locations
gtaaattgaatattttattgcgaatttaaaaggctctgaagatccagaagacgacaatagctcaacgccatttatttcactcggatcagttcaaatcgctcaagaaaacaactcaacagtcaaactccttggatttgcaacctctgatggagaccgacgacaaacgtagacaatctcaaactgagtctgattattatcggacttttcatctggaaacgggaacgaatcggcttggaaacgaagaccaaactaaccagcagagaaggagcccatcgccagcttcgcccttttcgcgatattcgccgggaatggcccgaaaatcatttggaaagctcgggaggacattaaggtaattggaaacccggttgattgtgaattttaccaattacaattaagtgcaaaggcgacaagtataagaggaacagttcaatcgggcgcacaatcggtagcgtttacgtcaacaaaaatagacctgatttttttcaattatttgccaagagatttcgtccgtcttttcgacttgaaggacttaattttcggagccaaaaagtgataaaaaaaacaaaatgtgcttatgtgaatgtcttgtttattgccctctcgccatgctaactaacaataaggtcgctcatgaagtcgtttcgcacactttgtccgctgcggatcacatccaatccggcatacagaatggggcaaagatggtcgcttccgttcctggttcgattatgaatgtcagcacggaactgttgcaggagggacaaaacggagtgaaggaagtcgttgatcagctgaaggcacttggagaggtgacggggagggaaatcaaaggcaaatcggcaaaaaaacatttgtacagcccggtgaacaaagtgatcgttcaccgttgtccataaaacgggagaagagtttggcgacgctcgagacactgtgccaacggacacagcaggcgcgagagcaatccgtccagttggcgtgtgacaccgggtaaagcaacaattagcggacaaatgttcagactgggatgatataagctcatacaaaatacaggggcggcgtcaaccaaaatttttgcgaaatggtttggctatgtaaattgacgatctttttttttgcggcgcgctttttccacaaaaaaaaattgacactcaagggggccggtaggcgccgccgggaaaattttttgaaaatttgggtacaatttgttaacagattttgtcaaaaaatgacaaattttgagattttgtgctattttttaagaataaataggctttttggggccggcggtgccgataggcgccgcctgggagaatttaaagaatttttaatgaatttggttaataaaatagtcaaaattttcagacatttccctcttttcctcttcgccggcgatcccctaaaaaaaattagaaaaaaaaaattaaaaaaaaataatccacttcttttacaccggcccctcctcggtacgaaatggtcccacattttgggccctttgcaggcgaaatggggggggggtcgacctcccccctatnattttgtatgtatgataggcgttaccaaataagaattttttttctatttgtcggaattaaaactcgcaaaaggttctgacgacgtttgttacaagtgtaacggaaccttaaatattaagttgttatgggtttgcccttggctggttgatttattctttaacaattttttttaacttcaataaccaccgggcccttctaattctcctattaatttactccttgcttattgttagtgtcattatctgacttgtcaatgacattttcatgcttacaattagatttgttctgggggcagaagaagcaccggtattatttggtgagcacggcaaaagcgatgaaagtcggcccattgggacgcctcccgagccaccgttttatatggtcgtgcgaatcgacagacgcaaaaagtgcaaacgtaagtcaaattctttgagaaatttagataaaaaagacaaaccaaaaaatgtgaataagcgtttattctttcttctgagatgttcgtcccaaatgccttcccgtgccatttcattgacccttcgccgtcgctttgacggcggaatagtcctcccccccccccccccttttatttatttcctcttcattatgtaccgcccatttcagcgataaatattttattagtttgaaaactcgagcctctaataatcgagttttgagaaagtttaaatttaatggatttctgagtaatattcgtttccttcccccgttttgttctgcgttaaatcattgcgttagcgatccgcctccctccgttcattttccgatcgattcctccgatttccgagtctctttgtgcttgcgtttctcttttggtttctttcgaaggcgtcggttggatctccgaaatccacacgtttcaatttacctattttatttggtatcgagcttttcgataatttcaattcctcttaattaagtatgatttcgttttcagaaaagactgttttggtgcaaaaagcgaatttgactgaaattggtgcgtcaacggagtcgaactttttggccgctgcagaactccttcaggacgaagacc

SEQ ID NO: 19686 - DNA, 1535 bp, Heterodera glycines
  unsure (1)..(1535): unsure at all n locations
gcggtggtggacgaggcggcggcgggcggggagggcaggcgctgcagcagccacaggatgaggacgaggtgggggaaggggagcgacagaggggagggatgggcaanatcgganagtgcacgtcgggtcttacaatttgcgagcgattgcataaggactaggttttaaagtgtctatctatgcgatttaaggcctgagaaaagctgttaacaaattacactcaaattttcaaaaattttcccgatcccaacctcaagagtttctgtgtcccttgttttttgtttttctaatttattttttttggttttattttttatttttttgtttgatcatgaatttgacattatttttaacaatcttcaaaaatcaaaaatatacatgatactatatttttcattttctcagattgtatagtaaaagtgttttaaagattagttcaatcaaaattgaaatagttggacttatggtagctaaggagtacatagctttaccccacctcgccaatcattcatctccttcctccaccgtcgcattgttttgtggcctttgtcgcatcactttgtggccaaataacacggacccccctactaaccccgtcgctgcgcatgcagtggcctcattaacgaatgattggtgcggtagggtaaagctaggtactccttagctaaaataagtccaatattttaattatgattgaactaatctttaaaacacttttactatacaatctgagaaaacgaaaaatatagtatcgtgtatatgttttttgcttttatttctatttcaagcctaatccaaatatgcttacttacctaatttatccaaaagtttccctactcttttggctcccgtaagatgttttttaaattttatttttaaatcaccaaatattatcaattgtgtgatcttacaaaaaacgatcaccatccatcagcggcaaaatgcgcagcgggtggccttgcgcgtgcgctgcgagcggcgcggccgcgtcaccccgatcaggtagtcgatccgcctcgactgacagcccagacatttggggcgcgcatcgtgcccctcgacctgaaaacatgaaccaaattaaatttttatcaaaaaatcaatgttttgtgtgtttacccaacgcctctgactgtcctcatccccccgcacgagtcctgtccacgggtcgatgctgtcttcgacctgccgcgcggcctgatcgcgcgccgcatccgcataacgctgccaccagccgttgtcacagcatgtgtcacagattgtgacacagccgcagttgttgcctcggactgtcaccgcacagtccaacccgtgctcacccatgcacaggaggcactgatcggaaaaatttaattctccgatcagtgcccccggcgcatcccccgaagggcttggcgtccgctgcggcacgggccgctcaaagtgcgtgcggggggtttcccacccctgcatcggattgttgttgttgtgcgccaggaatgcccgcgatgccgtcgtcgagccaaaacgctaaatgaattattagttaatgcata

SEQ ID NO: 19687 - DNA, 3603 bp, Heterodera glycines
  unsure (1)..(3603): unsure at all n locations
accaaatgttgggtttttattggattgaaacgagcgcaaaaaggccaatcattttccttccaaatttttagaacacaaaattgcgtccgtcagcaaacagttggacgagaagggcacaaagctcaaggaagcgttggagcagaacgcgtcgttgaaagacagaattggcacactcggtgagtattttgtgcccttaaatttaaggacatgtttcgaggacggatgagaaatttgtacaaaaaacaatttagagcaagaaaaattggaagtctcgcttctcattgaaacattgacaaagagtcgggacagactgcttcaggaaaaggtcggtttccgtcgacaaataataatttacagtttttgctgcccaattcaaattattaaaaccggggaaattgccaaaaaaaagtggcttattgttcgaaaatcgagattttcgaactttacatcataaaatgttaattcaattcgtcgtttttcaccttttttaatctaattggggtcggtgagccttttgctttactactggtattgttgcattcatttaaccattcatgattcgggtttttgaatttggtcacggcccaaattatgtttttcttgacctcaatggttaaaatattcgcacatttttaaatgattgataattgtcaattactttccttaagacggacctccgaaatgagctgcttggcctcgagaagcgcaaagatcagctcgaattgcaagtggccaagttgaacagcgaaaaacaccgccatttgggtacacaatccgctggttttctatcggttttaatttggcctaggatctgttccattttccccaaaaaaaaaacaaatttttcttttcagaagacatcagtgaactgcgccaaaagtgtgacgaattgtggggtgaacggaccgagttgcagagccaaattgacgacttccaaagtgacaaggcgctaattgtggtaggattttcttctctttttttggatggaattttgtggattttttcatgtttttatttttgaccctaacatataaacatgaaacataaaaaagcagtaaatataaaataaatgtctaataaacatttcaatgtccacgcctttcccttacatttccccccccccccatttttcaccatttttggttcaataacctcctttctctgcatattaataaaatgtacagcttctgttaacaaacaacaattttgttgtgtccctaaacctcccctcttcatctctgcccacacttctgtgtctctctggcattccccccccctcccccctctcaattgctgcacaattaaatatttgtttatgagccaaatgaccccttcgcagttcgacatttttgttcgcgcttttcaacacaaaccagcactgattgaaagtgtcatttgattgtttatttgtgtgcgtttgtggtgtgtctttgttgggtggtttctgctcttttttgtggtcacatcgctttgccccaaatttcgtcaaattccgcgcccctttttcattagttgcacacacaccccattttccagctcctttctgtaacaaaatacgcttcttttcctttgttaaatgtgcgcacctcccattcccccctcattttgccattgctttgtttaagcaaccgattcggacggaatggaatggtccaaaagttgttcaacaccagaagaagatgaagacgaagaagaaggtgtttcatgggttttcaatgtgtgaaaattgctcccaaaatttcctaccaaatcagtgcaaagtcccgaaaatatgtggcccaattggtaatatgccgctgccgacattggccagtgtgtgtgccaagtttaatgatggagctactactaatcctttgttggcggataatgttggcactattgaaattgatggtgatggtactgctggtgccaatgttgatgctgtgcgcccgtcaatgtcaaagtcggaaaaaagggcacttcgtagaagcagtaattaattacccaattaattgttgacgcaattcaacaaaattttttttccacagggaaaaaagctttttggaggaagcaaaacaattgtttgtccactcaacaaacaaacaaagaaataaaaaaagaagaaaaaaccgaaccaccgatcgatgtttaatccgaaaatgaatgaataaataaataatattcacttatcctgtttaatataattgccatttaatcaacataatctcgactgccaacatttcattcagttatgtaaaagttttctctaaattttgttgaattgtagttttttagttgttttcttttttgcattattgtattttaacatctttaatcttttttatgtgtcgcacattccatttttgtgcaaaatggggcaccctaattatttgttaaaagttggaaataaacattgttgcttgtcatattcacagatctggttaattctaacaaatgtttaataaatattatctaaaacacaatttaatagggcgctttctcaaaatgactttttttaagacttgtttattcataaaaaataaaaaagtcatcagaagggcgaaaaccacttactctgacgactattccggtaaatgtgtcgtagagtaagtgacaaaatatatggatgatcacaggaattaaaaaaagacaaaaatatgtgaaaataaataataaataaattgaggtcaaagtcaaatgaggtcgaaataccaaatcacttagaaatttgttacattctagctttcccggtcttacatattaccctagtgaactttaagttttattttaaattgatttaaagaatttgtttttattagttctttatctagttgattccacaattttgttaccctcccagcaaagggaatgaattttttgcccagtttgtattttgtgttaaatctataaaaggggatgttaaagcgtgctgatggattaaaaatagaaaatagtttcagatctgttcggccataaacaattttatgcgccatgaacagatcaaacagctttcgccttttctcaagtgttggcagttgcaggtattctaatcgattttggtatggaattggcggaaggctacatttaaaaaatactcttttggtgaaatatttttgacacttttcgatttttttaatatttttttgaagagacggattccaaacctctggagcgtattccaataaaggcctaatataagttttatataacgtaatccaaatcttagacgatttggatttaattattctaaacaaggaacgcatacgtaaatacgcattccttgttatttggttaatatgatcggaaaattgtaatttgttatcaatgtttactcctaaatccctaattgtatccacagcatttattgtatttccatcaaatttatatgtttcttttgggttttttgaacccaaatataatacaaaagttttttgcattgaaacttttatttgccatttatttgcccattcgaataaattatgcaatgctttatgcataatttctgtgtcggttcttgctttataacaaatatataatttaacatcatcagcatataattttattttcactcctgatggcaaagcatcaggaagatcgttaatatacatcanaaaataataaagg

SEQ ID NO: 19688 - DNA, 3328 bp, Heterodera glycines
  unsure (1)..(3328): unsure at all n locations
aaaaaaatctttttttctgtatattatggaataaatcaattcattttcctatcttttttacatatattctttcttcatgaattgtctgggcccgtttttgtattttaattaaagaaatatagaaaaaaaaaaattgtagtntaataaatttctttttgaaaatagggaatttatgggaatttataatataagttttgttaaaatttctctgtccaaaatttataatggtaattttaatgaaaaataatctaactaaagaaattttatttccaatctttctttgaaattttcttatttataccctaattcttaaaaaattcctttttttctgtatatttatgggataatttcaattcatttcttatctctttttttgtaatttttttgttcatttttatcatcggtttcatcttttttaactcatattctttcttttatgattcattatcatccaataaaagtgcaaaaagcaaatgaaggcattaagtaagtatgcattccaatgattaattattttctacaaaaattttcatttcaataaaacggacctaatattcattttttgaaaaaagaaataccaataattaatttttaatatatttaaagccccatttgacgcctttctaaaaaatttttgtccaaaaaaacatttttaaatttttatttacatattttgatacatgtttaggagttttatgcatctttcttacaaatcttacaaattttggtgattttaaaaaaaatttatttatccatactatgatcagaatgccaatttcaaataattgtcccactaaatttggcttttttgcaaattcatttgtgcaaatttttttgttgccaacaatctctgctttttggcacaaatagcttttgtttgttaatgacgacgatttccgcagttttcagtttcagtttcaatttcattttttgcctcaaggccctccaattttgtggaattggccccctttttcggataatctcattttcatttttttttcatccattttctggccacataaaaggcgaaattttgagggaatgaaattcaatttattatgcattatttaaaccaaactaaacccaatttccccattcaattatggttttgtgccgtatcatgctcatcaattactggcacaaaattttgttcctcatttttaaagtacgaaaattttggaaaaaaaaaatttacctaaaacaatgagatattgaaaagggggtacaaaagtttgatatacaacctaaaagcacaatctttataaaataagggaaatattttttatttataaaattaaaaaaaatttaaatgcttttccaaattaaaaaattttcattccccaattttaaaaattcaagtttagaattctaaattaccctaaaaaattttaattttcaagtttttttatacaaaatttcatattttcatttgataaattaaatatttttcaatattccatttaaaaatttgtataaatctatattaaagtttcagtttttcctttttaaaattcatttttcaattttctattattttcatacattttataaatacaaaatgtgccggattagcgttatttgcgcgttcgttcatactacgcaagcaaatgaatgggtaaagccggaaatgggctgaaaaatggcggcacattttgttggctccccgccttggcattgtgtctccacccgatttcaagttttgcctgtgctttaccgttaattaaaatgcatgctaaaagttcaattttcatattcgtaaaatgagacatttgaactattttttctacaaaatatatatggtgaagtgtctagaaattaattgtatatattatttctaattttctgactgtctgtttatgttagtgctctctgagcactctgatcaactttagctccgacccttctcgtaatgtggtccattccctaatgatcatttatcattgtttttttttaattttttttttttttttacttttttttaatcttaatttaagttgggttattagaattttggatatgttttgtcctaatttttttttatttctcaacttattccatctatttttttaaaatttttctaatactagttctgatttaactattaaggttgttggtcatcagtgatattgatattgattgatcgtatgaaattggtgataatatcggctgtttttttactctttttttattatctgacgaatttttttttattatataggagattattgacttattctattagaggtagctaatcatttgatttgaccagttaatttttttgtgcgtgttgttttaattcttttgatgtgattcattcatgaactttaccgatattttttgctgcacagatcgggggggagtgcatttaagcgaatgagagaattgggaaaaaaggggagacaacgggggaatggaggggaaaggctaagaaggaacagaaaaaaaggactaattgtaagctggcgtaaatcccatgcaaaaaccattttcaaatgtgaaaaaagcatttttatagacaaaaaaaaacgtaaaattaaacaattaaaatgctaaatttaatgtgcaaaaaaaaagttaagcaaaggaattctgctgatatgataatatgaattggcctttcactttttctctgtcctcccttttctctcttatcaattgtaaattaaaaaagaattattttaatttcgaattttgaaattcgatggtctttaaaacgttccagaagaatcggctatacgtttttttaatttaatcctcccaaatcccaaaactcgccttgcacattccggacccattgtccaccacgagagcagcaacttcttcgtcgcacatttttatcggctaattaatgaatacgaaatgaaatgaaaggctgaaattgttcaataagttccctagcaattcttgaatcggtttggccgtggtcgtcaagtcgaaagtgagcggtgtcgagcggcgggacggcctttttgttggcctctcccccaccaacgaaagtgatcacccccggggcagtgggcgtggcctatgggcaccggagggaaaagcataaagaaaaggaagagcagagacagcaaaaaagggacgtggagagagcaagcagagacaaccaaagttagaaaaaagtgaaaaaagaaagagagtagagagatagtcaagaagaaacgaaggaaggaaaaagagaaaaaaaagaaaaaagatagataatggaggcctttaaatgaagaatacatacatattcaaattttgaatgttaaatctttaaatgattcatgagccaaggttaattaatcccagattttgtcggccgtgataaaaaagcaatttt

SEQ ID NO: 19689 - DNA, 1607 bp, Heterodera glycines
ttctcgatatgtaagccattttagaccaaaaataaaaaaactcgaaaatttagtttcgactttttgcttgaattcgggttcggggtccgacataggtcaaaattaatgtcagattcggtttctccgacccttaaaacccctaatatgatcttctcgaaaaatttttcttaaaattttgtttttcgaaaaaaggggggggggggaggtaccatccgtagcaatctgtacaaagtgatgagcaacagcaaaagcacagcgacggcaacaacaaccaaaaagattcaacatttgctcattttttattgaaaatatattttgtcggcatcaaacatcacacgccaaaagttcagccccaaaagagtgatgcgattgacaatggcacaatttcgccgttcggcaatggctcggcaccgcgacgaaagcctaaaaaatggccaaatttgcaaaattgtaatatgtaaagcatattttgtagagcgcgaatggacggacggattccggcggggatttttcggtaatagtagggtttgccccccccccttttttatttgtccctatttcgaatcccggacccgaattcgaacaaaagtcgaaaattcaaaattttgaaaattcacttttatgttcgtacctgtataaaataaccatttttttgcggttacaatggtttgtgactaaatttagctttttttggtcaatttaggaacaaaagtgaaaattttcaaaattctgaattttcgacttttgttcgaattcgggtccgggattcgaaatagggcaaaatggatgtcagattcgtgatcagcgaccctgaaacccccgtaaacatgtttccacgacattttagaacaaaaaaattttcttttaaaaaagggggggcaccatcgatagtattaccgcaaccttatttaaacttttttgcatttaaggttcttgatgtaaacaaaacccaacaagaaccaaaggtggggtaattttttagaaactttaattttcgtcttttaaggctcctcctgatgaagtgaaagagacgccacagggagacaactcggaagaagttccaactgaagccattgttgttgatgttgtcgacacaccaaaggaagccgatagtgaaaatggaaaaaaagaaagtgaaactgcggagaaagatcagccatcgtcacagaattctcttggaaacgaccaaaagaatgaaaaagtaagagttgtttctcgatttgattttgttttatgtatttgcttcaattcagacttctccggctcaaggtggtcttccaaaatggatggtgcagaatgccaatgctccgccatccccttctcccgaggttgatgggcataaagagcagcagcagtcgtcagcatcgcctcaaaaagtgcgtggcagaggccgtggacgtcgtccggcagcggagaaaacagcagcacccaacgataaacgcgtccaatcgcctacggtattttgtgaatttccttttttattggtatacaaaaaattactctgttttattttcatttcaggatgataagacttcacaacgtccaagacggtcgacccggactcgtaaaagtacgcaaatcccgatgctggtaataagttataagaa

SEQ ID NO: 19690 - DNA, 2662 bp, Heterodera glycines
atttgaattttttgggcattaggtaagtccgaagtgccatcgattaggaaatttgatttgattataatggggcccgacacttttttggcacgtcggatatgccaaaaatggagataatcatcgtgcttaaaacttggcgttatatctggcccaggcttgaaaaaattagggcgaagacaaaaattttcaaccgttaataaagaaaaagctaaaaaaaaaattagttttatgaaaaacatttaataataaatttaaaaaatcttattttttttaattcattctttgttttttttgtggttcgagcaataaattaaagtttttttattacagaaatatttaaaaaaattttattttttgaataaatttaaattttttgaacattaagtaggtccgaaggtgcgatcgattgggaaatttttgccaaaattttactcgcaaatacccaccttaattgactttttttttttaaataatgagaaatcattttgcacaatttaaactataaacaaaaaacacgatgcgcaaactccaaaattccatgtccgtcctccgttccaattcatcttttggacggtaaaatgagcgattaataatgtcaaaattctcctcattttttacacgtgaatcgggcagccaaatttgagagcagcaaactgagtctcgcggtgattcagtctcacatttaataaattttaaataaattaattgagtcactgtgaggcaggcggttttactgtttaataaagtaattgggataggaattttggactatttatttctgttgatcaatcacttattccatgagtttgaaaaagtttaatcggtcaatgctggtactgaaatgcaatttcatttttaaagtgttaacaattcaaattgctattctattgaataatgatcaaatgatcactgatcagtcattgatcagctgtgtccatatgttcaaaagcgagcactgaaatgcaatctcatttttaaagtgttaacaatgccctgatcagtaactgatcacctttccatatgttcaaaagctggtactgaaaaggggccaatgctggtgctgaactagtttccattttgtgattgttagagaccgacttttgatgcatatgcctttttttctgcgcactagtttcgatgtattaagcataaaaaacacattttccacttggtttgaagcttctacgttgacttttattatgccttttttggcattttcgtgccttttaatgcctttttttcaattttttagtgcctattatagtgcctttttcgagatttttggtgcctttttttcgttcgccagtgattgtgtttcccataacattttggaattgttgactgatcaatggactggtatttgaatggcttcttaaattctgatcacttttgtctcttttgggtctgaaatgtccgtctcccgaccaatttcgccgcttttgatcacttttttccatttaagactttttttctctaaacatagcacaaataaatgaaacttttgctggctggctcctctactgcctctgatcaagtttttggtttggcgttttgtccgtccgtcctttcccccgtcaatttggcctcctcgtcgtccgtccgtctcatttttcattccatcgccggggtgtacaaaattatcaaataaacgatcaaactcactcaacacacacacacaataatttttgttatttttcttgattccgatcagcgcctaattgcccccgccattttgtgcctttaatttttttttttctaaattttcccattttccatcgcgcgatgcgatcgaagaaacgaataaaaaagaatgaagacacaaacaaacaaaaattgtttcgtccatcatcatcatcatcgtcaaatagttttggtgggaaatttcaattttaaatttgttacgcgccaattatcacaataacaaaccaacacataaaataattaattcttcgtaattattagggctggcaaaaaaaggcatcaaaaatcacgaaaagggcaaaaaaaggcatttaaaattttttttttattaaggatttttagggagaaaaacacgtaaaacttaaccaaaaaaatttattttggtcatttaaatgattattaaatattttataatgttttcgaaaaagggaaattttaatataaaactaaaatttttaccaagaaaaaaaattaaattattttttgagaaaatttttaagttcttaggggtgtattttctgaaatttttctggtcagttcttaggtgtgtattttcccaattttattgcattttaatggatttttcggtaaaaagcgccaaaaaggcaccaaaacggcaaaatgccaaaaaaggcatttaaggcacgaaaatcccgaaaaaggcaaaaaaaggcataataaaagtcaacgtagaagcctaaaaccaagtggaaaatgtgttttttatgcttaatatatcgaaactagcgcgcagaaaaaaaaaggcatatgcctcaaaatgcgagctccagtaattatttttgccattttttctgtttcgtcgtcattgaccctaattaggcgcttaaattaaaaatttcttgatataaccagcaaaagttttgtcaaatgagcaaaaagataattttgcgaaaaccctgagacagactcattatttaaaagtcattttttaagccaaaaa

SEQ ID NO: 19691 - DNA, 2303 bp, Heterodera glycines
  unsure (1)..(2303): unsure at all n locations
aaatcgcaaagcaacaaaantcgacatgagaaaaaattgggtcttttaaaaaaaaaacaaaaaaaacaaattttttaatttatagcaaataatttgacgggaacagtgagggcggaagacgacgaattttttagttttgtcacagagagtcccaacgaaattgaatttatggaagccgaaagagtcacgaaagtgccatcgggtaattctgcaacatttatgtaattacaatattcatggtaattttagcaaatttctcgcaacaaatgccgatttcgcctactaaaagaattggcaaaaaatcgcggcaccatcaaaggacaaagggaacggacgaaaagttattcccatttccaaacgaattagtggtcggtgatccgccagttgaaaatggacgcaaaacggcagcggaagaggacaaacggaggggacgtgtcattcttctgccggcaccgccccgggggaggtgggcgaaaagcaatcaattaaataataattgtcattagagaaaaacaattgtgcctttagagaaatattctcgtcgaaaaagcatcaaattttgaaaaatgatgaaaaaactgctggtgaaattgcaacggaaatgtaataatatttcatttcatatgtaaaataattaattttgaaaaccttaaggcaaacaaaacggactgacaattcgtcgacaatttctccaattgatgagaaaaaaggagcaaatgttgtcaaaaatggcacttcagcagagactgaccatatttatcaaaatcagaagcattggacaacgacattacgaaaaaatagcactggtgaaagaaataaatgaaaaatatgaaaagaaaaagtaaaaatggaatttctaataatttaaaggaaaattggtaattaattaattgattcatttcatgggctttgacgtttttcccttcaagggttttctgagtttcgcgtcacagaaatgctaccgcatcgtaatgccataatcgcaacctctgagtctccaattgttgttgatgccactaaaaaagattctctgacaatgccgctaatgattgaacggcttgaatttgttaatattttttaaaattatttaataattaattatatataatattttttaaactaatgactaaaagacactttttaggcgcgaaaactgcgtgaggaacaagtgaagctggaaatgttggaagcgattcgccgcgaacagcttggcaccgatgacccggacccgaattgtattatttgacaaaaagaccatttaaggggtaaatctttagtggagagacgaagacaagcaattgagaaaaagttgacacaactcgcacaatcggaaagaatccaccgagaaatgttggcacacaatcagcaaaggcacgagacggacaaagtgaatttggcatttgataagggaatcaaaatgacagaaggaacaaatttgaggttgcttcttcaattcgctcttcattcttagcgatgccatgcgaaacaatgcgacggttcgtccgttggtttcgcgtggacagcccccgggaatggattcgccaaaattgccaattggccaaacgccactttcccaatgccagctgtgaacagattgaggcattgttaagcaaatgcgtacgataattgcatatgcaatttccatatatttatatactttttctgtaaaataaaacaaaaaaccgaaagaatttgaggggggggggaggacaggagacctttttttgctcgtttaaaatattcgggacaatagtaattaaattaatttcttgtgcttaatgactagggcttccaattatatgcaaatctatatatttttcctggactgttggaggcctgaaacacatgaaaaacatgtttttagcttggtttgaagcttctaggatggatttctatatccatatttccatatcccttactatataataagcgagccgaagctccgcccacttttttggttgagttaaattggcggacttttatggcgattcgttcttttaataaaaagaagagaaaaatcaaaaaaacgttagaaaaagaaaaagaggaaaagtcagacataattataaccaaaaaattttttgcttcacaataatgcatatttcaaaatattcatttttgtttttattagagttcgagatttccaaaaatgccgggccgggccgggctgacttttccagaagtaaccgggttccgggctcggcctctcaaaacccggtcaacccggttaacccgggttttcaaattgccgggcccggcaccggattccgggttggtaaaattttaatttttacatgttaatt

SEQ ID NO: 19692 - DNA, 2706 bp, Heterodera glycines
atttgaaacggcttaacaaatatcctaaaggggtttagtacctgagtaaaccaacaaaatgaaaaaatggggtgagaaaggacagtacaaagtacctgggatcaaggaaatgaaaaaaaacaaggggaaaatgaataaaaaaggaaaaaaagagtggaaaataaaaatattttaaagagggaaagcaaaaataattaaaatttctaagaaaaaagcggaaaattaataaaaataatttttaaatttgagaaaaacagaatgccaagatgtgaaaataattttttaatttgagaaaacagaacgccaataatttagataaattttaaatttgaaaaaaacagaatgccaagaattaaaataatttttaaatttgagaaaacagaatgccaagatgtgaaaataattttttaatttgagaaagcagaatgccaagaattaaaataatttttaaatttgagaaaacagaatgccaagaattaaaataatttttaaatttgagaaagcagaatgccaagaattaaaataatttttaaatttgagaaaacagaatgccaataattaaaataatttttaaatttgagaaaacagaatgccaataaaataggcagtaaatttttgcgagaaaggtggggaaaaacaatgccaaaaatttgcaaaaaataattgggtaatttttggcacaaaatgtgtaacaatgggcaaaagaaaaggtttaaaatggggaaaaaatgccgaaaaagaaatgaaattgcggtaaaatggcacaaaacggtacaaagattggcaaaagaaagggttaaaatttggggcaaaacaataccaaaaattggcaaataataataggggaaattggcacaaaaacggtgcaaaaaaaaggcaaagaaatgttggctaaataatgccattctggcacaaaaataaataaatggctaaatgggtgaacaaatgccaaagaaggaaaaaattaaggcataaaaaaatgataagggattattgattggcttttccattcgtaaagtgaattaaatgaaatgaaaatgaccaaatggacagaaaaaatcaattaataaattgtttattgtctgaaggtgtcaaattgcataatgggcatgcgggaaggagggcggcaccacaaagtaaccaattaattaatttgtttatttggcacctttccaacacccacgccgcctccttaattgatttgtttatttgaccccctcccccattctcgccgcacgctcttgccccccttccgccgctggtgacgtcaaattttccctttatgagagcaaattaatgtttatcatcaattgccaatgtggccgagtggttagtgcgtcagtctggccgcccccctggggttcggatccgcttggtgcggggaatttttggagaattttaaatgaatttaaattcaacgtctttgacctttaagacgtttaaaataatttaaaattaaataaatttaattaaaataatttgcataaagtcgcgcagtcaaaaaagtcgcgcacccccctgcaataggtttgggtttgcaagaaaaaagtcgcgcaataggtttgggtttcaaaaaaaagtcgagcaataggttttggcttcagtactgaaaagtctggcgctcagatggcccgcgctcacctggcggcgctcaaatggctggcgctcagttggccatgcacccctcccataggtattgatttcatcgctagggtatggggggctaccgtaatccggtgaaatcacagtcattaactactggcctctctctctcctttccgaaccccggacccgaattcgaacaaaaagtcgaaaatttttaagacttgaaaattttgaaaaatttttcaaaaaaggtgtcataccatctaaactattaccgcagggctgccatccgtccttgaatggcaaggacgtccttgaaattgggccctctttcttgaaaataaaaaatgtccttgtatgcaaggacgtccttgaaaatgagcatttggaaaagtttaaaaaaatcaaagaaatttgagaaatctttgtaattttcaacaatattttgattaaattatggcattatgtcatttaaaaatgtaatttttgagaatttttgaaattttatggcattaagtcactagtcactatttttcttaaaaaattagccaaaaatcgcaaattttggtcatttttggacaaaaatctgtaaacaactcgcattaaaaattacaaatttttccggacccccctatcctcaaaaaaattttttaaaaagcgcgccgtaaaaaaacccattttataagcaaaaaaagtcgtcgcatggcttaaaatcgcaaaaattaggcagtttttggtgaaaatctgttaacaaattgcattcaaattttcaaaatttttccccggcggcgcctgtcggcaccgccggacccccccccctctgtcccacaaaatttttggaaaaagcgcgccacaaaaaaagcgtttttaaagcagaaaaaagtcgtcgtaaatgaagaaaatgataagtgaaaacaaaaaaatgttggaaaaaaacaattccggtgaaaaatgcaagccatttgaataaatattaaccattttgcattgcatataataaaaattttaaatgtccttggatttcatgaattttccccactatgtccttacaaatcggcatacccgtccttggaaaccgacttcggacgataccaaccctgt

SEQ ID NO: 19693 - DNA, 3290 bp, Heterodera glycines
atcctaataaataaatattttatatttaaataatttataacaaattaatgcgcaactaatttcaatcaataaatcaatggcaaaatagcaaaagattatgtaaagatgatatgtacatatattaaattaaatttaatataattctaattttatcaaaacaagaagaaaataaaaaagaacagccgactaagccgttccgccagtctgtctgcctcgacgagttaattgaaaaaaaattttttttaaattgtaataaactttaatcactttagttaattttcaaaaaacttcggcatttaaagtattaaaatatacattattttcctaatgaaagtttatccgttaaatattttaaacaaaatattttcgggtgctgacccgaccgagacattatttcattaatgtaaattattttttaaaaatttcttcaacacaaaatatttatgaaaacatgttacaagttacaaaagaaattttttcaaaatcaattcataaacaaagatagtttcaatagaaaaataagaattattttcaaaagaattctctattgcatattatttagtttaattatacaaaacacataaagaataacaaaaaataatataaatgaaaaaacattgagtctgaagcaattaactgaaataattataaaactaattaaaaaacgaatgctaataaaaagaaagcaaaaaatatctaataggtaaataacagtgccaccgttaaaattcttccaatgtgttcgtcgcgttgccgagttggtaatagttaaaaaatagtaataattctaagattcaaaagcaatgctagtgtaaagataaatttttctcaataaaaatgtacattcaaaatattaattttattaatttaaaaattaaaggaataagcctttttaatacggtatgaaataatgaaaaaaatactactacaaaatacaatatacaaataattgttagttatttatggtatagaaaattaattattttgataacaaataaattacaagtggtaatcaatttataaaattatatatttgtttatttaaaaaattatatattcaattcctataatagttgacaagaatatttttataatcaaattgcaaattttcattgtaatagtaaaatttattaatttgaaaaacaccaaaatttgtgcaaaaatcaaaaataaatattacgtataaattcaaaaaaaactaaaacttaaacaatatttgacagaattgttacttatctgataaaaatagttatgcttttattttttattttgtataattattattatttattagttttaacatatttgactgttttatttgaattatcataaatttgaaaatgataatcgattaaattacaaatgtttttgaatttaaacccatgatttgaacttttattaatgattaaaaaattccaaaaaaaacacaatgagaaacaatgattttgctttttttttgagacgacaaacaatttactgtactacgatctgtcgcataaattgtttgcgttcaaaaaattggacatcaatgaggtttgccattttggcgctattttattaaaatagactggatttttgttagtccttcttgttcatgaatctgacatctcttaactaattttatactttcctcacctaaatttgaaaagaaatttcctaaatcgaaattttttttatttttttttgaattttcccgttaaaaaatttaaaatattttttaattttcgggtaggggatccccggggagggggggggggggtatgctacacggggtatgtaccccctggaacaggacaaaacacagcctttgaacacagtcgagacataatacagccgagaataaattttttttaattttcaaacttagaaatcttattgttataaaaaatttttcttagaaaattctaagaaaaaatttttttattttccagcgatttttaaaaatttaatcataaattactatgttttttctaagattttttctttaaaaatttgcttgaaaattttttaaaaaaattattctcggctttctcgcttttccttgttgttgaagcccttgaagacacacatcacccgaattaccaaaaaaatttcgaacacaaatttaaataagaacagaaaaatttccagccactttttaacatatttttgccttttgcagaatgagatcgtcgtaagtttcacaacagacgaaatcacctacagagaccaactcctcaaacattttccgcaataataaatttttcatattgagtaaaaaatataaatattttcatagttattctttaaagtcttgataattttagagaattatcattttattttctgattacattatatcgtggtgagccgaagttacaaattaaatttaattatttttttattttaaataaacaaaaagttatatgcaaagaataccgaaaatttagactataactcaattaaaggaaaattaatcaaatgattattaagtagcgataaatttttttttattattaatttacattagatattttagacttgcaattttttcaaaaaacttatcttaagattatatccataggttctcatttttttacattttccattaatgtttcaaagaaattttaatgtttattataaataagaaattttttaatagaacaaaaattataaaattatttttaagctctacttttaattcaatattaagaatccatttgaatgaactctcatatctattttgaattatatctgactaataatttcttatatccatgatcaaaaagccttcaaaataattatgaaattaaaaacttaataaatgaaaaagatttaattttttcatttctattttcatagtaaaataatttttaattatgtgatatgattataaaacttcatttacaaatgcgattttatttaaaatttattgtattgaagaatattatattcattgtcaatttaataatattaattatattttttttggattttttcatttaattctcataaaaatcttttcaaatgcaatatttttaagtcaacaatttttttgtggttgtttatgattaatttttattgtcttaatctctcgtagaaggttgttttttcacttgttctggaaccgaaaacactcggttaaataagtaattgcctttatttttaacacattaacttaaaattaattttttgagattattttataaaaagttgaaaaaaatattttttcaatgtctttaaattaccgtaatcaaatttaaatcttagtattattaaaagtaaaaagtaagttttttttgttaattaaa

SEQ ID NO: 19694 - DNA, 1933 bp, Heterodera glycines
  unsure (1)..(1933): unsure at all n locations
taatgatgtatgcatgcctatggtaagtcagccaacaatacccttgtacgactaaaagttttgcttcacaaacagttgagcttatccgaatgaacaacgagtgnctaaagctgaagttagagcaccgcgaacgggctcggcatgatataatttttgagaatttggatcagagattaggtgatcaaggaattggtctaattccttccatttctaagcttaattcgggtcaaatacaaacggttttaaccaatccaacagcaacggtaaaacgaattttcaaaggaacatgcctaggcagagcaaatgagatattagcaactgaacatgattcaatttataaggaagctaatcatgatgaaacttatcaaaaattaaattccctcgggaagtctgaagtggaaattgatccaaaattcaaaataaactcagaaaaatcgtctgtaaaaggagcaaatttagacacgcttaaagcattatgtgaagaatttggggatattttcagtaaaagtcaatatggcttaggaaattgtgtggctggtgaacatgacattattactaccacagaggagccaatcgcctcaaaaccgcacagaattccatttaagtacagggatgaattgcagaagcacattgaccaacttcttgcgtcgggagtaatggtagaatctgacaccccttgggtatcaaatattgtcctagtacagaaaaaagatggtgggcttaggccgtgtattgactttagaaagctgaacgaggtcacagtacctgatcactttccattaccaagattggaatcgattttggaaatagtgggcaaatgccgttattatacatcattggatttagcgagtggctatcttcaaataaaattgagcgagcgtgcctcccgtaaatgtggggtgataactgagaacaaaatttatcaaatgatcaatcttccatttgggttaaaaaatgcaacaagtgcatttgcgagaataatggcacatgtgttgactggtcttgaaaatgtcatagcttatgttgatgaaattttgatttttactaaatcagaaaattttgatgagcatttggattgtctcagaaaagtttttgagagatttaggagattcaatttgaaattgagtccgaaaaaatgtacttttgcttcggcagacatggagtttcttggatatgtcgttagtgagaagggatacacacctagtctgagcaaagtagaaacaattctaagcctcaaaaacccgtccactgtgaaggaagtgagacaagtggtgggcatggcaagcttctttaggaaacacattccagctttttcgactattgttgagccattgacaaggttgactaggaaggaaaaatcctgggtttgggctgatgagcaacaaaaagcatttgaccaaattaagaaaattctttctgaaaaacctgtccttatttttccggactattctaagccatttcacatattttgtgacgcttcctcggttggtcaaggaggcgctctcatgcaatgggatgaagagaacaaaatttatagtgcgattgcgtactgtagtagaactttgtcaagggcagaacggaattggccgcctgttcaagttgaattaggtgcaattattttttcgcttcggcagtttaaaccatttatttttatgtccagtgttgagcttcacactgatcataaaccactggcttttcttttaaagaaagccgagacacaccagcacttagcgcgatggctagttgaattacagaattatagcgttaaaattgtacatatagcagggaaacaaaatacactggcagatgcattgtcccgcattcctcatgaagaattgagtccagaggaagttgaaaaacttaatgaaatggaagacatagctgagtttccaatttgtctagcactctctcctaggccgagagtagttcatga

SEQ ID NO: 19695 - DNA, 2038 bp, Heterodera glycines
tggaaagtgccaatcgattttcggcattttcgttcatacaattaaatgcggttatatatttcctcatatttatttattcacagtcgctcacacaacgacatgctgcgtcgtgcttcgtcggaccgggaccgtgccgtggcccacaaccgtggtcgcaacagtcgaagccgttcgcccatccgacgctcgtccactcgctctgacaaacacaacatttccggctcctccaccgccacatggcaatcgaagggtggctcttcgtcagcatcgtcccgttacgtgggcggcggcaagcagcgcgacggtggcagcggcggaacgggccgtagcaattcgcgtacccgagccggaatgtcctcctcatcatcgaatcaccatcaatcgtcgtcgtacgatcaacaacaaaagcaacagtttggtagcggtggcggcactgccgcgctgaatcccttctcccagccgcaacccttcgccggtggttcctccgtcggggcgctgtcctatggcaaacagcaacagtactcaattggcagcggtggtggtggtgggtcgtcacggatgacgtcggcaacttccactgtctctgctgctggtggtggtggcggtggttatgaacggcatggccaaatgcaaggtggcttttcgcgttttatgtgttggcactcaaaaaatccagcacttttttctataagattcaaggaaatataaaagattttcttgcgatttttaaaaaattttaaaacaaattttcggtttcaatttttatttggtcgtaatcaaactgtttcaaaaattcaatttcattttttggggattcttttgtcttttcaaatggactttttaaacgattttcaaattttttcccgcccaacaggacgttcttattataacgatcgttatgccgacacaacaactgctacgagtgcgtacgcctcgcgcaccgacccgtcatatggccagcgcattggccaacagttttccagcggcggtggggcgcgtgacgaaatgtacggtgtttcgagtggcgggggcggtgcgttcggagacagcggttacgccacatcctcgtaagtttttgtaagttgcattgaattgagtgcaacaacctatttgttttgcaataatttatgtatttgtgggaataattaatgttaaaatcccattagaaaacttagaaattttttttaaacttcaattaaaaaacaatagcaacactttaattaatgtaattaattgctttttcctccagggcgcagttcgcttcttcccgtggccaatcctccggcggtggtggtggtggccagccctcctcctcctattacaacagtcagtcgtcggcatgggcgaaccctgctaatagccgtgccacggaaatggtcaattcgcgcgcatttggcacgagcgccggtggaacttcagccagtggcaacggtggttggagcagacaaactgatgacattctctctggtaatagctgcttgagcttggcggatttttttatgaatttgaaatccggtaaatgggtcagggtgcacttcaatttttctccccctcctttcaaacccctgatttttttttacaagattagaaattcaacataatattttgataaaaattgctggaaaattttcaaacatttttattttccggggaggaaactacctgcttcggatcaatcaagatttaaactatgaaaaatttatgccatatcaatcatagttatatatttattttttgttgtgctttcagaatggaacatgtacggctcgccgtcgaagatgaccggtgcttcctcgtcatccggcggtcgctaccatcagcagcaatcgatgtcctacggtggagcaggaggccgatcgggcggttcactgtactcgggcggtggtggaggaggaagacgttattaagcacagggagagaaagagaggagttattttgactatggaaaggataacaaaaaaaaggaaattttgattcatttttcgacatttccctatcatcgaaatttggcaagttttttcttcaatatatgcttttc

SEQ ID NO: 19696 - DNA, 3444 bp, Heterodera glycines
  unsure (1)..(3444): unsure at all n locations
tcaaattaaaaatacaaaatngatgtaataaatgtgaaataaaaataaatcaaatgttaaattaacaggtaattattttaatgtaattgtggcacagaaatttcctactcagaactcattgcttttagtaaatccctgaattcctttgccttattaatttgcaccgctaaaactggaaggttgttccagtttcttattttttcttttttttaatttttttttaattctctttttagttttatcctatggaaaaaattattttgagttttggccgtgtggcgctttactcgtaaaagtaaaggcctcctggacctttctgagaaaacaaaacttttcccagtatcgaggctggtgaccctttaattattttaaaagctgttgttaaatcattgatttttcttctttcttccaatttgtgtaaactcgtgattttaagtctttccatatattttttgtacacaaatccacattttcgaaaagcttttcttgtgaaaaatttttgtacccgttcaattttgtctatatctttttttaaattagggttccaaacttcggtagcgtattctaattgaggtcgtacaaaagttttataagctgctgttagagtctttatttccctgcttttcaacactctcaaaatctgaaagcttctaagatatgcgtttcgtataattttgcttatgtgttctgaaaaattaagtttcgagtcaattataattcccaagtcacgaacattatccgattctgaaatcttttttgagttaataaaatattcttttttcatattatttttccctaaaataaaacaaaacatttttcagttgaaatttctaacccatttatttttgaccatttttccagagcctcaattgctttatccaactgattcgaatggtcatcattttcgtgggcataatataatttaacatcatcggcatacatttttatgccaactgatgccgcttcatttgtaataacggacggcagatcatttataaaaattaaaaagagtaatggccctaagacacttccctggggcactcctgaaaatattctgaaactttctgacaattcttcgccaattttaaccttaaaactccgattttttaaaaagttagttaaaaaattatgaatttttccttcaattccaatctttttgattttttgaagtaataaatcaattggaacagaatcaaacgccttgacaaaatcaatatagattatgtcaatttgttgattcttttgtatagaattatatatatcgtccatcatttttaatatttgagttgtagtcgatctattttttaagaacccaaattgttctttatcaaagaatcttgtactgttcagaaattctaaaattttactactcaaaattcgttcaaaaactctacagacagtgctggttaatgacaccggcctataatttaatggatcagttttttcgccttttttgaaaattggtattaccaaagatgtttgccatacttccggaatttgaccggaatccaaaattagcctaaatatatctgctaatatttttgtaattggctcagcacaattttttaataaaatgtaaggaacattatccggtgaagtggaattacgccggggaagtcttcttaatatattccaaattattcccgcattcaattcaatgtcagaaagtttaatcttattctgtgttgactgagtttgtggaccattaacaattgattttcttaaaaaagacttttgaaatatttctgctaatattttacatttttatacattgctggaaaacatatttccagcattatcaattagagtaggaatctcaaaaaattttgataacttatttcggataaatttgttaactgaattttgcccccgggaaataatttttgactctttttcatttctaaattggttcaattgttttttcacttcccttgaaattattttgtaatttaaaatgagatcacttttttcagggaatttttttacaagcttatgcaaacgtaatttctctgaaaataagtctcttattttttgaggatacgattgttttattatcgattttagatgtctattgggtataaaagtatcatataatttcagaactttatttaaaaattctttatatttttgatcaacggtgtacactgagtttattgataaatcaattcgattttcaagtatcgcccgacttaatttcgaaaaattaatatttttaaaatctcttctataaacactgggattattacgccggaatttttcatttattttaaatccgaccatttaatgatcggaagtttaaaaatgttccaatacaattaattcattaattaattctgattcactagtcattactaaatctaaaattgctttttctctggttgtttctttaacatgctgtatcaattgtttttggtccataaactcaatcagagaattagacatcggatcatttatttttttactttattttcatcccataatatatttgggatattaatatcaccacagaatatgatattttcagaatcactctggtcagaaatgaatttgagtagctttttagtattcggaactgtacaatttggtggacgatatatatttataatttgaattggttttttaaaaagtaatttaatgtgaataatttcgctttggtattttgtcccagagaaaagtgtctgataagggatgtttgattttaataaaattgccgatcctccgccctttttatcatttcggcttgcaaggattatttgatattgaccatgtactttaagttctgattctactgtatttctggagtttaaccaggtctcatttattagaattatagaaggatcatattttttggctatatgttctaagtcggctattttatttgttatcgatcgggcgtttattaataggcaagaaatccaaggatttttttctccggtattccaaatttttttgtctggtttgctcgcgtatccctagcgagttctgagcgggcggggatctttcagagatttgatctccaagtcgaccacaaaatatttgtactcacctgcggcaatgttggcctggtaggcttgttgccgtagggagtataaaattttgagttcgctttgggtcatatccctgcggactttgataaattgcggcaaattagggaattttttcagtgcattacggaacttgtaaagaaattggtcacgggaaaatttgtccaagaatggcaccttcaaaattcggtccttttttgtcccgccctcaggtcgtgtcctcgggtggcggtgaatgtccggcgaaagtttgtctttgacgccgcattcttctgcaatttgttccgccaatgcccgtccgtccatcgcctccggcaatttttcgatgactgcccgagtcgacatctctttgagctgttcggaattgatgattgcctcggtaatcatctgcgaaacggcg

SEQ ID NO: 19697 - DNA, 2198 bp, Heterodera glycines
ttaattactttattgtttttcattaatttgccatttcttttgtttcacttgttcgatttgcttgaagaggcgtccgttcagcagcgattgggccaaatcatccagtgattttcgttcaacgcaaatctgtggcgcgagaacgtaatcgcccacttcgagagtggcggcgtgcaaatcaatgccacgacggtataaagtgattggaagttcgctgttgaactcgcgcatgtcgacaatgacctgtaatttgatcggattaacaaagatatttaatccaattggaaaaatgaaaaataaaacggatttttttaaaattaaataaaatgaatttttttttgaaattgtatattaaaaatgaagaattttcgggggagggtgaccttcccccaccgcctgaaaagatataaaaatgaccaatggacgtaattgttcctcaaactcttcgtctacgatccgttgtgtggaggatgttgccgtccgtttgcgcgagtccgtccgattcattgtcagtcgtcgcaactgcgaaacgctgtcccgactgacgtcaaattctctcggcaccatcagcacctaaaacacaaaagaaaattgagcccttctctttttcgttgatttaagtcaaacgtacgccctgctctctgattagcatttcaattgcgtccgtttccctttggatggacgaaagaaagcgttcctcttcactgctcagggcacacacaaacgaatggacagtcatttggtggtctttgtttaccgctttaaacacctaaaaagttacaaattgccataaatcgttttgggtgtttcgccctttcacctcaatggcccgcgttgatgccaaatcggaactgtacatgatcagatgcttgggtcgcattgtttccaaacagttgatcaaccggtaacagttgttgttgttggactgctccagaaagacgagcaacgaatgaattgtgctgacaaacgatgttgaggttgaactgtttgccaacgatgacccgttgagtgtattctcttcatcttcaggcaattgtaaagtctttaaaaaagagccaatgtttggttgaatttaatggtttgtttcactttatcctcattgtcagtactctttgctctttcagcagatgttccaggctcaatgcagcaataattgcgcaccggcacccgttcgtccacattaatttcgctttgtatgtcaatttcatcatcgtcgccattcccggagtcttaattgaaattgctttcattaaaaatgctcttttctgcgcaagagtgtagccagtagcaacacacatggcttcgggggggggggctgaactcaaaaacagattttaggaatgtatattttttacagaaataccaaactagaaatatatatatatatatatatatattatatatatatatatatatatatatatataaatacgtacatatgtaataggtagggaccggatttataaggacaaaaaaaatccaaaatatggattataatatggacggaaaaatcgcaaaatatggacgaaatatggacaaaaacgctgacaaaaaaaacgaaaattggcacaaaattttctgaaaattggttggaatttttaaacataaacccataaattttccggtcaagaaataaaaaatcatttttaatacataaataatataatttgataattgaggcctcctatttattcattaccaaaaaaatttaatttacttaaaaaaaagcaaaaaatagtaaatttttgcaaaaaattaatttttacccgaattttctgatgaaaaattttttgcgcagtttttggtaattttctgaaaatttttcgattttgggcttattttccaaaaattttccatctttaggggtgtaatttggttgtttttttgtgaaaattccgaaatatagatttaaaatatggaaatatggacaaaaatccgaaaatatgtaaataaaaatcgcgatttttgttcgtaaactcaaaaaagaaagtgtttttcctactaattaggctatggagaagccaggaaaaaatatgtatttacattaaaaaaacagtcactattaataagctctaagtgatcttttaaggttagcttccaacaccagtacgtaaacaaaatttgaggaccaagtgtttttttttaccattttcattttattacataacctcccaattaccgtagctggcagatttcgtata

SEQ ID NO: 19698 - DNA, 1653 bp, Heterodera glycines
ctcagcacggtgctcaactgctaataaacagtgagacggtgtgcagtacggctggtccggacgaccgaaaggacaagtccgtgatgttaccgacgaagatgaagaggaagaaattgaagtgccaaagtttttaaccccaacaagccagacgcaggtaagcagccgatcacccaggaccaataagaaagcagcaaaacagcaaaaattgatcgagaagaaataccacctgttggccatcattatttctgatccgcagagatttggcgcaactgaccgtgggaaaatcattaacccaaattctcgaaagtgatgcgctcgcaggcatccgagtcgagcgtaattccgcgcaccttcagcttgtactcgtcctcccctgttgcgttgttgcgcagccacaagccgtaggccttgggtccagctaggcaaaaaaaaaattccatttattttgatctatttttaatgagtcttaccacaaatgaattccataatcgtgtggttcgggtactcgtcagcgagttacccgagctgctcaccacccgtaagtggttcccccagccgcgtcaggtagtcgtagaagatgctgtcagtgtcctgattataataaattatttcctattttcattttctgtccatttcttttcttgttcgtaaccaaattcaataatcttggtattatttgaaagcctaacatgtttagaagatatttctaagctattgcttcgcgattagacaattaccaaaaaagttataacatgaaattgcaaaaaagtcgaaaattttgaggttttttcctaataacttttttagaagctaaaatttttgtttgttttttgtaaggttaatagagcttgtgaagggctttcgaatgataccaaaattgttagatttggtcaacaagaaaaaaagttataataaaaaaactgaggctggcgccaaaacggcggcgccaaaacgacccgttcccctgcaattacctactttttatttcgcttctctgccgcacatcaggaaatgatgtaaatgacaggttttttccaccttagtttacaaaaaagttaaaccatttattttgccaaataaaaaatgccacaaatttgttggtactatttctagagatcggtattttgaaaaaagcctggacctggacctggattccatgttggacctggacctggattccatgttggacctggacctgccattcctgcactttcaaccacctatcaaagcagacacttttgccgtctgatcatcttcatcatcactaattttgcttacccatcagcaaagtaatcagaatgcccatcggcgtcgccccgcactgcagcgtgcgccaattctggtattccatccgacaaattgctggtgatgttgaatggcaacacaacaacaaaaactgctgccgtctgtatggatggtgcgaagggtgcggtgatggttgttcaactgttgttgttgctgatactgcttgaccaccaccaccaatgtgctgtttgcgttggtaaaaatcgaggaggaggaggaggacaatggagccgcaactgaagatgaacccaagctgttcaccagtccatcaaaaatgaggagcaggacggaaatcgatgtggagaggagatttatgtcacaaaatcgtaaggtttttggacatttttg

SEQ ID NO: 19699 - DNA, 1148 bp, Heterodera glycines
ataattgggactgcaaaaaaacagaaaaaataatgctaaatttgatacctcgtcaagttcaccctcaaaatccttttgtctgaattcgacgtccgcaagttctaatcgacgcgcaataaatcttacaaaaaaaaatcattttatttttgttcaatgtttttcaccgttttctcgcctcaaagggcaaagatgacatcagccaattaatgaagctgaaaattgtgactacaaccagcaaactataccaaatccacagcagaacaaaaatctaaaataatattttaaatttaaaaaggattaaatagaaatttcagtaattttattaaaatatatccgtatgcctttttaaataatttttctaagaattaaaaatactttttcaatgaaaatattaatgacaagaacgcattggacagtgtgtttttgaacattgcccaatattcgaatgtccatgtcacaataggtaacgcgtggaaaattgccggaatcactccatgctaaaaaaattgatttgcatttaatctgaccatttaaaatattttatatttaattacgccgtccatcaaacaaatcctgcagtacgccgagaccataatagcgataattgctggtttgtaaaaaccaattcatcaaaaacatctgaaattcttaaaataattcttacaatttgtgataataacttgtgaaaatttgttctcgagtatttttcaggtccttcatgaatctaacacctattttgactaattttaaaccctaatccgaacttgtataaaagtcgaattcaagtttattgttttttgatttttttttgaaataaagaagaggaactcagaattagttaaaataaatgtcagatgcgtgatcagggacaacaaaaacggcagggaacaaaattccaaactagacaaacccaaaagggtccccctttggttttaacaaaattcaaaatcggtaactttgataatagcgccgaaaataacccatgtgctcgaagttattaattaatttttcacctgcatgcaaacattgctcaaaaacaacagcttgatgcccatgtacagaaaggtcaaataagcctcgtaaaagcgcaaattcagcatccgcaaaaagcgatggtggtacgggtggagatggccgtgcccaaacgg

SEQ ID NO: 19700 - DNA, 902 bp, Heterodera glycines
aaaagtgcaaaatcaaaatctgcttttttctatgatttttatcaattattttaattagaaatttgttaaaattaataaaattaatacttaaatacacattcttcaaaaaatctcgaattaaccagattaatttgaattttttaaatattatactgtttcaatggcgcctataaattttacaaaataaagctatcataggcctaggtccaagcaatttagcttgagttgaagcggatacatttccatataaatatttccattttttcttaattttattcatttattatttttagtccatttgtaattgactttaaaatatcttaaaaattcaaagtaaactggttaaataatttatttaatattaataaattttaattattcttttattcgaaatccaataaaattttagaagaatgtgtatttaagcattaagttaattaaattttaacatatttataatttaaaaaattgacaaaaaaaaatcatagaaaaatcagattttttatttttgcatttttttaggtaggaatcgacctagcaccactttgactattaattttaaatttattttctttgattttcatacacgaagattaggggtttcttttaattttgtaataataaatagggctgcaaattatatgtaagaaaaatcgcaaaacatttacataaaatatttaagaaaatcccgaaatatgtaagaattaggtacaaaaatccccataaatctaaaaagcaagaaaattgttacatttttttgacaataaacaaaaaatgatcattctaaaaaataaaactttttggagcttaatccgacgtaaagcacatccgattgtcaaccaaaatgtttttgtatgccgaataagaacgctcaacttcgcatgaaatggatgaaatcagaa

SEQ ID NO: 19701 - DNA, 2220 bp, Heterodera glycines
  unsure (1)..(2220): unsure at all n locations
cataataatccgcaggacggcattcgnttggcaaaaatacataaagcacttgtaaaaatgtgaaattttacgaaattaggaaaaaaacccaaaattttgcgccaaaaacttaaatttttacgaaatcgaattcgttttcctatttcaccggaccgccacccatccaccgacagtgccaattttgagggcatttctggcaaggaaccgttgctgatcagcaaagtggtgcagaaggcgttcattgatgtgcggtgattgcccatgattagggcccggatttacatggattggatttccatataattgggcttaaatactcaaaattatcatttcacacataaattgtctattgaatttgatttaggtcaatgaggagggcactgtcgccgcggcagccacaaacgtccgaattgctcatcaatcgagcaaagaacgacgacaaaacttgcgttttgtcgctgaccatccgttctgtgcctttctgattcgcgatgactctgtgcttttcagtgcgattttccgcaaatgattcaatttattatttaatgtgtatttgtgttagatttggtaattatttttgttgtaattggatgatttgtataaatcttctttttttttgtgtgtttgtttttactatttttgcatttgattccaatttttaatattcttttatttgccgatgatgaagagtgattggatttacacattaaggaaaatcgcatatataatacataaatatgtaaaccaaacatgaaatacagtacctgaatccgaaaatgttaaaatatttatctccaaaaaatatgcgcaccaagaaatgtgcggaaaaaaatttattctgtattatctctaattgtcctcccctggggattatttctcgacctcctcagaaaaaggggggataattagatacggtgagataaatggagacggggataattagagataatctattccatgcccaataatttgcaatttgacgaaataattgtttatccagcaatttgctggtttttttgaatttattgttggtccaattcacctttagatttgggcttggtcttatggcaaaacttggtacagcataaaccaaattaaaaattgcaaaagcattactttttaataaatcgttaaatgacacaaagtcaaagattggatgttcagctggcggatggatggcacattacgacttgattctcgagttttcaatgccaatagggatgacaaaagtgacagtcaaaaagcataaaaaatcaaaaagtttataatttcgaatgatttcgaatgcttctcccccccaacatcgtgttgttcgatcagtgtgacttcttcacacgcacagccccaactgaacaaaatgccacaactattttagcaacttttctgccctttttagtgactttttaggaaaccatttctcgatgtttagcaactaaaaatcccatccaatttttctgttttctctgctcgtgtcttttcatttttaagcgcctgcttttggcagtggccaaacgaatcaataaaagtgccactgctcttccaagcatttggcacaaatgaccaccaccggccactgctgggccaagccattggctggccagtggccacccactaatgctgctctcatccaataaaataattttccaataatatattttttaattatattcattaataatgtcggctttcaacggtggatgaattattttgaaaattaaaaaaagtgcttcttcgggctttttcttgctcaattgccgaatttggttcttttattttaagcacacaatcgtgctcatctgctgctgctcgtttgtgcctcaatggttggaagggaaggacaaccaaaggacatttaagggaaggacagagccttccccgggccaaaaatttacgaggattaacctcggctcagcgtggcctgttacttagccatctaagccatctccgtctcgcaaaatgctcggcgtggcgccgccttagagcaggctcatcgacggagtcgtgcttaattccgcgcatgcaagcaaagcaagcttggagcacaggcatgaaacagcctacaggtttcttcattgccattggccctcaaattggggtgaaaagggtgccgaacggtcatttgattagaaaatgttgccaaaacttttgtatggggtaaatgggggtcattttctatgaatgccctatcgtttcgcttcttttctcttatgttttgttcat

SEQ ID NO: 19702 - DNA, 1983 bp, Heterodera glycines
  unsure (1)..(1983): unsure at all n locations
tgatataaattgtaacaaaaattaaattaaaaccttgatttttgcattgaaatgtatttttattttctgatttatttttacaataaatttactgaactttaaacgaacaaaataacacaatagaattcgaatttaatatctattaatagagagaaagtcatgaatattctaattaaagaagaaatatttttaataaaaccataatgaaaataaccattcctcactgtacataccaaaaattaataaaatgctcatttataaaatcgaaaataaacaaaaatttaaaaaatctaaaaattgccaaaatgaagaaaaaagttcataagtgaacaaggaagagaaaagcacactcatatattacggcttcgaaaatgctgctaaatatttacttgctgatccgaaaaaaaggaaaataaatttgaaactggctgaccatgagtgaaatttgcttcgctgagtcataaaaaaatcgatttaattaaaagctaataaagtgacacggaaaaaaccactgaaaaaatgattgattaaataacaaagtcgtcttttatcaaagtaaattaaaaaatttttggactttttcgtactttaaaccaattataaaaatgttgtcaagtatgtgcttggatttcagcttccaaaattagaaaattttaactgcaccatatatcatcattttgaaataaaatgcctatcattataaaaaaaaatgagtatntgaacgaaggcgccaaattncaaaatcttttattcccaactgatcaaatctaatcaaacataatttttagttgataattcgtgtttgaaagctttatttgattaaaaatattaaaagtaacaatatttaacaaaaccggataataaaattaatgattcctaacatttgttgatcagaggaaaccggtttatctgtcgaaaatagaattgagcaatgtctgatgttctccgatcttcagcagcagttcgttgcccttgtaccgcatgaagcgctcagactaaaacaaaaaataggtttttgaactgtgaaattgagtctgtccaacctgcttgttcaaaacgtggtgaaggtgttcgattccctgttcactgatccatgcgaaccacccccaacgcttggcaaagtctggaccatgggcgagaagccagtgtaattttggggtgaatccagcggcattgtttgtgtcgaatttagccggatgagtttcccaaagtttcttgaaaaggggaaaatgagaaaaaaagtatctttgccttgaaatagccatgaatggatgagcatttatttgagaaattgtcgaagctgctgcctttgtcgccaactgaatcccaacatcagtgtgacttggatgtccaggagtggactgattcgttcttgtctccttgttcggccccttttggtccattttccgggcggttttttgggcgagatgaaattggcctggtgacggcctggcgcacaactttgtcgatttcgggtactggagtgcctgaaaatgcggcattattgttaaaataaaaaaattaagaagtaatttgtctggtctaaagagatggctgaggttccgcgctatttccttagcacgttttgtccggctctgccttgacaagtggtccactgaactcactcttttgatcctgtgtccgttttgctctgttggtcgggttttgagcagtttcacctcttcagtttttttctgcagctggcgttccagcgtcccaattctgcgtttcgccttgttcagctccgtgcacagcctttgaattggcccttgctctgaaaatgaaattatgggggataaaattgattagaaaatctgatcactgattttacctgtttctgtctgagtggcaccatcggcggtttctaaaaccgtttgggttgactggactgttgctcgaaaatcggtgccagttgtttggtcggtagttgttggacgcgtgcggacatggggcctgataggcgttgttgacagtggccgtgga

SEQ ID NO: 19703 - DNA, 1781 bp, Heterodera glycines
  unsure (1)..(1781): unsure at all n locations
aatagtgagtaaaaatgccaaaatagtgaccaaatagttgcaaanagtccgaaatagtgacctaattttcagccaaaaattaagcaaaaataatttttatttactggttgcagttgcaaatgagctacatttcctttataaaattctcttagcaaatattgacattttttaaatcaaaaattttgtcaagaaaaaaaattttgggggagaatttttgaaaaaattttccaattcttagtggtgcattttaaaaaattttttggtcgattcttaggggtgtattttttgaaattttttttatcgattcttaggtgtgtattttttgattttattgcatttttgctaataaaatctctgaaaaatgtcgaaatagttaaaaaatagtgacaaaacgccaaaatagtgaattttcactattttagtgacgaagcgtgaaaatagtgatttctagtgatcgatagtgagatccaaatcgaaaaatttcaacgcagaaatgcgttttttgagctcctttcttcaaaacaatcaagcaaaaaaatagttaaatcattaaaagttgcatccctagttatcaaactttcaatttcaaaaaaaaatttggttgtcaaatttaattttcatttttatcaatttttaataatgaattgtaaattcttattttagttttttcgtgaacatactttgaattaatgcactatttttgacttaaattttgctttaacttttcatcttcgctttaatgtgagatgctaaatgtaacttaattgggctatgaaaaacaattaattagttaggtaaatgtgagtaaaattggactatccacccaaaacaattatcgattactttctttcttttcctacactcttttattgtcttttctttcactgactctgctctcctctttcagtgttctacttttttattgcaaaagtaacgccatttntaatgagaatggatcttgttgggtgttaggtaaagtgagagagagtgaacatctccaanccagtcagtcattgtgcatctcatttctccacaaaatgacttcctttaacatcagtttatttttttaattttttcatatcccggccaatcgatttgtgagagtatttactccaattaactttacaatctatataatttattttcaaataactaggctttttattaaacaaataatgaatttatgcttgcacaacattttaattatgtctcaaatttattattttttaataaaaagctttttgaaggatctctctttaatgtataaatttattgatggtccaataaaaaatccaattcattaaaacgtgggaaacgaccaattagaaacatttaaattttcgtaccaattggaatttttaatatgaataaataaaaatagtaaatttttaagaaatttttttttcaaatgaaatatataaaattaaaactttctatttttaaataaatgaaatgaaagaaattaatttgacctaataaaataataccttagcaatgtaacaataaattatgatgtatgaatttaattatgaaaaaatgtgagataataaatcaaataaattaacaaaatattcgaattatcaaacaagaggccaaaaaattaattgttaaaaaaccaaaattagacaaaagatactaaagatgctaatagaaaaaaattaactaataaaaacagtgagacagataaaaatgtaattgaaatcaaataaaaatttaattacggcttatgttaaactgagcanattataattgttttttgtttatttcgaaaantttataaa

SEQ ID NO: 19704 - DNA, 240 bp, Heterodera glycines
tgcggacatctacatttttgaattgaaaaaaaattggtaattactctttctttttctccatattgaccatcatactcatactccccccacccttttcttcttccgccacccacctcccttgatagtttaaactgaaggcgggaaacgacaatctgatccccatcaagctaacttctgcaggtcctgctcgagcggccgcccggggatcgatccccgatctagtaacatagatgacaccgc

SEQ ID NO: 19705 - DNA, 1297 bp, Heterodera glycines
ttgcctgtatggacttcttattttttatcactgttttcggacgtgaattttccatttttaatcgatctcgacttaaagttgtttgttcacaccgtttcaagcactttggataaaagcgaaaaatgcacggaaattttgatggtaaaactggcataaataaaaatttttaagtaaattgaggctttaaatttagtttatgtgtccaatcaatgaccatgctcagtttactaaagccatcttctttcttactaggtcattgctaacattgttggtatcaatcaacagcttaaagtctacacagaattttttgtacagtaaactgtgggttaataacacaatacataccgtattttctctaattatcacccactctattaatccctcagtctccaatattccagctttctgagagggttgaaaaataatccaccagtctccatttatcccccatgggtggtaaatagaatttttattttttcgaaaaaaataatttctttttaaaaatttaataaaaaataattaattacctaattcgtaattgaaactctaaatgtttaataaacataaaaaaatatacttaggatcattcaatagcccttaaaattttcaatttatatcaagtttccaaaaatttcatagcattatcgatgtaataagtagggagtccaattatatgcacatgcatatttttttcctggactgtgggaggcctgaaacgcacgaaaaacatgtttttagcttggtttgaagcttataggacgtatttccatatgcatattttgcatatttgtgcatattttgagatttatgtgcatatttgcatatttgtgcatattttggcatttcgtgcatattttatgtgcatatttgggcaatttttcgaaaaacctctattagaacggcccctaccagctaaattgggactttgaccccaaaaatcagaaaattttacgaaaaaatcattttttagcaaaattttctcgaaaatatacactttttatgtcaaaaataagcaaaaaagcaaaatttcgcttttccggttgggttttcactaaaatcagtaaattttagctttatcgtgtttttttacttctaaaatgacttttaataccatatttaaccatttttgaatgttttggcttatgtcggcgcccacgatcgacgaagccgagatgccagagaatgccgaaagaattaaatgccaaaaacggaagagacggagaaaataatttttgaacaaatttgcatatttcgcaattttttattaatttaaatttcatttcatttctctatttta

SEQ ID NO: 19706 - DNA, 680 bp, Heterodera glycines
tgtcacatatattttgtattttaattatttattttaactaattatttttcaaaattgttattaccatttgagggttttttcatttacgccttctcgcgacataccataccttcaaggataaagaaaaagaagttaatttttgatatacgaatttaaaataggtatgcggatgttgagtgatgtcgtttcttttataaaatttgttttataagttaatctattttaaatttaattaatgagtaatgtagaacccaattttgttaattaggtaatggattttttgttcctcttaattatttattttataaaatatttttatttaaataaatgtaaaataactaaaaatctaccgttttttagataaataccaacaaaaaaatgattataataatttttttatttaggtttttttttgttttacaatttatttctttatatcttacatacatctatttatttttataaattacgtattttttcattaaataaaacacattagagtaatttttaatttgcaaataattggtaattattttttctttgtgtgcataatcaattgtacaactcgtgccccaagtgcaaacaaaaattaatgtctcctaagagactaataaacgcatattaaataattttaaataaatatcatttataattatcatttatttttagcagagataatt

SEQ ID NO: 19707 - DNA, 1371 bp, Heterodera glycines
ccaactcccgtcaaatgaccacgaactactttcttattgacctggtaaaaaagaggggcatggtcatggttaaatgaccaccaacttcgtggttgtttgaccaaagttcgtggtatctcttgttgaccgaggtttaccatcaacttcatggttatttaaccattaccaccttcttattgaccgggcccgaatgtcatatatattttttattttaattatttattttaactaattatttttcaaaaattttttattcccatttgagagttattttttatttacgacctctctcgcgacataccctcaataataaaaaataaccgggttgataaagttcaatacaaattgtaagttaatgctagccccaatttattttcggaagatcgagtattttgttattcatttatgtttgctttaaaatgtatattttgtttagatcaataccaacaaaaatgaatattattaattttttatataacaaatttaatttttattaaaatctgttttaaaattaatgatccctaacttccagaatgcatttggctcgccatttaaacattttagaattcgctgatgttcttttttatagcaatatttttgtaatttttaatttgcaaataaatggtaattattttttctttgtgtgcataatcaattgcacaactcgtgccccaagtgcaaacaaaaattaatgtctcctaagagactaataaacgcatattaaataattttaaataaatatcatttataagtatcatttattttagcagagataattcttttaatttcatttaaatttttatttatactgctttaacagtaatgtatattttgccaaaaaacaaaaattaaattaataacgtttttcttagtaaaatttcgaaaattataaaatgtttattttaggttttatttaattatgataaattattttttcttttcatttttggcattaaattattttatttaaatctcatatgacagatgaaattttttgcatctgtaagaattataactgatttaatattgttattattgcgtttttaaacgttctttaattttttcattttttatgaatttgacgaaataaaaaataaatattataaaataaacaattaatcaattttatataagacaaatattataaatcctttaagattaatttttttttccttataaaagaagcagtattaaattttttgcttccaaactgcaaaagtttcattttctcttttatcagtttatttactttagttaatcaaattgatgtaaagcagggctaattaaatttaaaatttggaattatgtaaattttaccgatcccaggggggggattaaatatatttggtaacaatttttcaaatcctcatg

SEQ ID NO: 19708 - DNA, 1795 bp, Heterodera glycines
taataaataatattccaattttaaaaaatgaagaaggcgatcagttagagaccttggcatttatttttcaaataacttaaaatgggaaaaacatatagaatttattactaaaaaagcaataagaacatcttttgctttactcaagtcacttaaaactaaaagcccaaaaattctcataaatatattcaatgttattgtcgatccattttggaatttggttctccgatttttaatccatatatgaaaaaagacattgatgctcttgaaaatgttcaaaaaacatttttacgtattgtttttagacgtaataataataaggatccgggtataacgaactcctccaactctttaaacaagaatccctcttaaaacgcagaataaaaatagatttaaaactcttccatgatataattttggaaaagatccatattcagcataatgattccttttcaaaaacatattcagaactgaaaaatgattttattattaaaaccgcttattgttcaaccaatgttcggtatcattcgttttttattcgtacctctcgcctctataggtgtttgcctaaagaggcgaggttacttaattccattgactttgctaaacttcttgacacctatgatgttgattctttacttttgaaaccacctcatctcattcagtgaccaaatttatttatattgttatttatgtcggtgtcacgcttttgcgtataaattgattgattgattgattgattgattttgcgctattaatagcctaaaatattttttgttagcatttttggaatttatttgattttgggaaaatttaaaaaataataatgaatattttttaggttgttttgtgttaatgaatattttcaattttagataaatgccctcttaattaaacaatttatatttgaaaactgtcttacgcctcaccccttaagttcgcctatgaccaaatggttcgcgactgtccgaaaacgtgcaatgtttgcccgggagtttgtgaagatttgggcaccgaatgtcccgaccgacaaagggcgggttattgtgggagagcggtgagaaaaaaaagaaaatcaaattaagactaattaacaaaatatttaatttctttaaaataaatgtctgaaacatttgttactgtttttgttggctttataattttttttgcgttagctgtacaatgatttgatgaattggcaatgcccgcgaagttgcaaccgatgcggaaacagaaggcgaccacggggaagaatatacacaggcagaaaaagaagacaaatttaattaccactaatttatttattgaattattcacttttccccttccaccgaattctaattggttattggcagggctgccagattaaaattttcaaaagcctcatttggcatgcaaaaaacctcattttgtgtcaaaaagcctcatttttgcagatttattcaaaacacgtttaaaatgatcaaattttgtatttttgattgagcaattttttgtttgaaataagcattttgtgaaattctgagcatgaaaaatcaaagttgtttttttgcggcgctttttacaaaaattttttgggaaacagagggtcccggcggtgccgataggcgccgccggaaaatttttgtaatttttaatgtgatttgttaacagaatttgtccacaaaattgccaaattttgcaacttttagcaaaaattttaagaaataaaggattttttaggttccgcggtgcccatagccccgccggggaaaaattgaaaatttttaccaaatttttaacaaattttcattaaaaa

SEQ ID NO: 19709 - DNA, 988 bp, Heterodera glycines
ttcctggcttctccttgctctaaatagcaggaaaaacactttattttttgtgtttgcgaacaaaaaccgggacttttatttacatatttcggggttttcttacatatttgtacatattttggatttttttcatatatattttcatttttttactattttagtattttttacggaaatttttggaaatcctcaaaaaaaatccaaaatttcggcaaatatttttgtacatattttcatttttttttacatattttgaaaatttataaagaaaaaataagtttgaaaatgttgcctaaaaataccaaaaaaagtaatttttatgtcattttgtggctatttcatattttacggggattttctttcccaaaaaataccattaaaaaaattttatttacatatttggggttttttgtacatattttgggatttttcttacatatttatgtacatatttggaccactttttgtacatattttttgcagccctagttattaggtatataattttgcaacaaaaaaatgagcgagggaattgaagctgcacaaccttctcctgctcatgagcagattcagcaacaatccgttgataggcaaagcgaggataacgagcatcaaccgtcagatgtttcacaagcacctcagcaattgtgattttcttttgcatgtttataattaataaatttattaggtttgatgcgcgtcttccgtttccacctcatcaaatgcgtcctggatttcatcctcgttttccaccatttccaccgaatggcatggggggaccaccaatgcggccaccttttcgtccgcctccaaatttctcgcagcaacccggaggcactcaacctgataacttcccaccgtttttcaacagtcctgctcacagaagtgatttgtttttctttattctgactgtctcttctatttctacgggatttcttaatctttcttcccctgtctatttaaaggttataaaaaaaagatatatgac

SEQ ID NO: 19710 - DNA, 1405 bp, Heterodera glycines
  unsure (1)..(1405): unsure at all n locations
taaaagtaaaaaacgtcagaanttcgagagcgacgatgagaggnaggaggaagagcggntgaaagagggagagtccgacgcttccgaaactgaacaatcgcccgagcttcagccaacaaagaaaaaatctcgcaaagagaaaaagtatgtttttgttataatttacggcaaaagtttgtggtctcgatgatgaaactctttgtatgaatttgtttgaagaattttaccgagtactgagagactaacataaaattatgcttttctaaagtaattgtaaacttttattatagattgaaaaaaggaatatgcgtttttaaatgaattcgctaaggaaattgcttttgtcctctttctcataccattcttttatagggctgaaaaggaaagggagaagctgaaactggaacagcagcagcagcagcaactccagcaaaaacagcccaaacaaccattacctatacaagtggaaaaaccaattgaccccgcaatacaagccgaactcgacgcgcaaaaggaacgtgaaaaggttttgtttgtctcatcttattattcattttattattcttgaattttaggtaccgttggaagagcgtattaagcagtttcgtcagttgttggaagacaaaaaagtcagtgcgacaagttcatgggagaaggaactctcgaaggtgcagcgcattatcatttacaggatttgtcacttgcaaaatattttaaatttaagattgtctttgatcagcgctatcttctccttagtactgtggaaagaaaagctgcttttgaggcctattgtcgtgaacgggctgagattgaaagggcggagaagaagaaaagagcaaaagaagccaaggatgggtttcttaaacttatggaagaggctaaactgcatggaaagtctgcttttcaattacagatcatggcacaatgccttgatttttttaacattttaaggtcgacatttgcttccttctctacaaaatgggttaaagatgcacgtttcaaggcagtagagaaaatgcgtgaccgcgaggcttacttcaaggattacgttgaagaactctacaagaaggaaaaggaggagaaaaggaaggagcgcgaaaaggtgaacaaatgctaaaaagtaaacacttacaattggtttgcaggccaaggatgaattcaaagctcttctgagtgagcaaaatgatctgagacgcaattcaatctgggctatcgtgaagaaacggctggacaaagaagcgcgctacaagaacaaacatttggacagtgaaacgcgtcaacgccttttcgaggagcacgtgaaagactgtccggagccaactgaggttattaagctaatgaatattccgagaaaacaatttgtaggaagaggaggaggaagccaaacggttggcggctgaatctc

SEQ ID NO: 19711 - DNA, 514 bp, Heterodera glycines
cgcccgtcctgaggccgcgaagcggtcgaatgcacttgctcatcacttaacaaacgcgcatgcactagcaacgaagtcctttgcgcgaagcgctaatgtcagcgcccgcccatatataccaaaagtatactgtcttatgaatgcgtcctcgcgatgcctgtagaccaaatataagcgcaaagcatccgtctgaggccgcgaagcggccgaatgagtccacaatatttagaagtgcaaagcgcccgtcttgatgccgcgaagcggccgaatgttccccatagaattaaaaacgggcgcgaagccccgttctgaggccgcgaagcggccgaatgttccccacaaaatttagaaacgggcgcgaagcgcccgtttgaccccaacaaaatttaaatcgggtgcaaagcgcccgtccaagcccaacaaaattaagaaacggacgcaaaagcgcccgtctgaggccgcaaagcggccgaatgttccccacaaaattaaaaaacgggcgcgaagggcccgt

SEQ ID NO: 19712 - DNA, 986 bp, Heterodera glycines
  unsure (1)..(986): unsure at all n locations
atttgcaaccatccggtgctaccagaaagggatcgtgcctaggccgaaaataggacttttcccgaatttgggttccccgggataattgtgattttcccccaattttcccattccattttaattgtccaattccctataaattaattctccactctttacactcccacatccttttctttgacttctccattatccaattaacttgatcgatttatttattttaaaaatggaaaatggttgcggattgaaactgagaaatggaattgaaattaaatgtgaaatggaattgaaattgaatatgaaaatcggtgaaagtgattgtgatccgaattccaagatatttcagtgaaaaacggccaaaaagggaaaatcctgagggaaggtccgggaagggcgtggggaggaaaaccagaaaatgaattttgtccgggaatcgaaaaagggaaaaacggaaaaagggacggagaagattttgcttctctggagttgctcggtgtggaaagtccgggatgagccaactgatctcgcgtttcccacggggaaaaggatcagcgaaaaagctgatccttaatcccgccctttttgttactgtctgtgggggggaaataaaataggggtactgtacgtaacagtttattagggttgaatcatgtttaatgtgataaataatttgatgttttcattgttttggtttaagaaaagttcattataagttttatgtttattaagtctgaaaatggagcaaaatgaaccccaacaacaacaaggacaggaacagggacaaggacaacaacaaggacagcaacagggacaggaaccgcagggacaaggacaggaaccgcagggacagcaacagggacagcggcccgagatgngcaaaaccccatcggtttgctttataaaattgaataaggcttccaaacttaccctattaaaaatttgggtaatactnggagaattggtgtccctgcttaaattaaaatttt

SEQ ID NO: 19713 - DNA, 1118 bp, Heterodera glycines
gttataagcattaggaatctgtgaattcttgataatttataattgtttgcttttatagggattggagcgcaagcccaacaattcatgggggaacacaatggaggtcagggttttccggataagctcattttgtttacttaacatgcataatgatattcatttaggcaacggaggaggaaatcactggcggcaaaatgcgcccggacatggaggtcattttcattggcgttttatttttcgtttttaaaatttttctatttcgttcagtgcccttcggtggagcagtggcaaacaacggtggacaaggaggctatgggcaaaacatcgtacctggtctaaacggtggtcagggcggctatggacaaaacatcgtacccgctcagggtgatttactcaagactattcagtttattatttttatttaagtgtaaatttatataaaaggtaaaaaaaaacattttttgaatccaaattttacttttttgcattttagctggcgctggcggcgttggatactttccggcggcctaccagcagcacggagggcaaaatgtgccgggtggaggtcctttaaaatcaattaaatccttcacctgaaaaactgattctcattgtgttttaaattaacaggccagtagtgttgttcttcggatgagactgaatgtatgacgaaagactccgtcgatcgcttttattctcattctgtcgtcgtttttcccgctttattttggatgataataaatgctttacaaattgcagtattaattttttatagttgttttgtgaatgtgtatacctacattaatttcactttaatatttatgttcagttttcataataactttttgcttatggatgcgtacaaacctgaaatccgttccaatactttgaccggttgaaaaaaggccgctgcgtccaccctatcattgttcgacccgtgcagtccgtacacaccggtgagaccgaaatggtagccgttttctgcggcatatacccatccgacaattttgcgcgtttacccatttaattatgccaaacacaggcgtgtccaatacaaagccgaccgttgaagaacagttcaatggcggaaaaagacacaatttttgaatttgactgat

SEQ ID NO: 19714 - DNA, 2309 bp, Heterodera glycines
  unsure (1)..(2309): unsure at all n locations
ttaaccccacgagcgagaccgaggccccgaaaaatccgaaaaatttctcaactcgagaaccgagaccgaaaatctcgaaaagtaggggtcagggtttttagggatcagctaggtcgggatcggaataaactgcgaaaaatggcctaaatttccggggtcgggtaaggggccccctgccctagttatccacactttagacccaacaaattttctttctgttaagtgcctttctctgcaacaatattctgtcatgaacggccggtgcttgacccaaaatgccaaatttgcattctttctacaaatggttggacattttaacaaaattaccacgctaaattcataacccaattgttcaaattttaaatttgtgccagaaatacggtttgccaacttttgtgtcccattggcactgatttgtcgagaggtgaacgcacagcggcaggccaacatcaaaatttcgttggactccaccaaaacagcgctcgacctggcgacggtgttccccgaatttacgcagacaaaagagcgaaattcgttgggttttcagccattttttggcgaacaacggcagaatttgaccgtttctttgtttgtgtcaacaaaaatgagtgcgtgaggatgggagtgtgaatagataaaaatgggataatgcatcgatttattatcaaaaaagggacaaaagaccgacaaacaacccaaaatgggacaaaaggtcgaccgacatgcatttaaaacgggccaacgtatcgatgtgttacaaaatgggacaaaaggcctaacatttaccgaaaatgggacaaaaagccgacacaaaaccaaaattacccaaaatataggataaaaggcctaacatatttagaacggagcaatgaatcgatatatattaccaaaataggacaaaagacctacatatacaaaaagtaggacaaaacgccgacataaatcgaaatataacaaaggaccaacaattgagaccagattgatataatggaagccgaaagccaaacaaaaaatgtttttcgcgtcagatcgctaccgtattcaatccgattcgtgcgactttttgtacgccattctctcttgccttgtcgagcgggttcatcaactgcagcccgatgttcagctgcgttgtccgatcccaatgcatttgtttttgggcgaaattgccaaattcatcgaagttcgaatgactaaccctcaattagtgttatgctcgagaatcttggggtcaaatctttgatattttcggtctcgagcatcagcagcctaagccattgatagatagatagatacattgaatattttcgcattccaagaatggccccgaattcacactnctaatgggggggggggggggggtctttccacgagagtttgggtcgagattttcgcttggaactcatatccaaaattggggatgcatgccaatgaggtaaaatttggaaatttgttattttccgagtccgggtaaattggaaaaatttgctattttcagagcccggggaattttggaaaatttttgaaaatctgccttttccaaacctgaaaaatttcagtaattttatagagaaatttcgatccttttcccttgcgtttaaggccgagaatcagtttgaacagttagagaaggaagtgtgccgtgtgtctatccaaatgcgacatgttgaaacagtgtttttgagtgcaacaaagtgtggtgacggagaacagcagaacaatcagctgaccaacatcgggacactgctcaattacacccaccggtgaaaacgctgggggcaaaataattaattaattaccccctctttttcggcattttacaaaaatttttaaatgtttcgctgtgccaaggagaggcgctgccgtgaaaaagggttgtcacccgaatcttgaagtccaacgtttttccgaaatgacccgagtccgcagatttttcttatcccgaattccgtctcgaattttcttctgcccttttcccgacccgaatcccggcattttctcgccccgtggcaaccctgacaggggatggaatccccaggattttcatccctttcccgctttggcacaggcgcctaatttcggaatcgcaaaattataacaaattggtctggaatagtgtagcaatacattgattgatccctgatcgctgttcagagaattggccaattcattggacaaaattacgaatgggtcacaaatgttgagcanagggggacgccattcgctgcggtcactgctcaacctaatgaatgcgctgnttaaattaacgaaatcattttgccattcgacgggagcattcttgatggcacaga

SEQ ID NO: 19715 - DNA, 1559 bp, Heterodera glycines
  unsure (1)..(1559): unsure at all n locations
cattttgtgcaaacgacagggaggcgacggcgcaaaaaggacgatgcngtcactttgtcacatcgctcaagtgtgtccgcggtcggaatcacgcccatgtcgaacagcttgccgagcagcatccgtgccaacaccaacttgttcgggtttttgtcgtccaactcgcggatgcgtttggccatttctcggatctgcaaaaaaaaaagttttttttatgaggaaggaaaaactctggttctaaacccagtaaacccgccaaaaacttcaataatcccggcacgggaccctttctcccccccccccccaaaaaaaaccctgcaaaagtcgaatttttcgatcaaaatcgcaacccttttttgagtttcaatcatgcagcgcaccgaagtccgcaaatttcgaaattcccgggttctaccacacccaaccccctggccatcagcctgaatttgcggaaaacccgaattgtccatcccgctaaaagcaacgcatcaattgcaaaacatacagaattttgtaatttaagcctgggaggcccagcctaagcagttgtaattttcaaaagtttggaaatattttcgtcgttttaccatgaaaaccatgcccacaagttcaaatttcattattcgtcgtacctctctggacagtttgttgtacagtgtgtagtgctcgcgcttctccacatggtaacggcgcatgattttattctcatgaagactgttgtccaactcggccggccaattgatgaagtccactttcttcagcaactttttctcatggaatttcaatgtgcgcaccattttatttttttaatggaaaatgctaaattttaaatcaaatttgtaaaagaatttacacagataaacaatttaacaaattggataattaattaatttacagtgaatgattaagttttagcaattgttcaagtttatacatacataaaaaagttttgttttaatcaaataaaaaatgcaattaaatgtttttgaatgacacctaaacagaggcaaaagcgcaacgccaaatgtggaaaaatttttttttggctaattttgccacacgaaaacctaacaaaaatgggtcggaatcgtttcggcatcaagcgcttttcgaaaaagggggaggggacaaactgaactattaccgaacaatcaacctctcgttcgaatgatacagatttatgaaaatttgatggtctagcaaaaagaattcttggcgcagaaacggcactgtccgctaactatgtaacaaataaaaagttttctatgaccatttaacaaattcactaatcgattaatgaaaaaatgtatatttgttctttagtcaataaaaaaaatttcaaacgaacatttataagaaaatacagcttttggtgaacaatgaatggcaataaaaaaaagaattacctattttcaacgaaaaaatcagacaaaaaaacaaacatttttattgccataaataattcagatgaaaaatgttgagacataataaaataattacatatatattttttcactttgacttttgttgtgcgtgtgttacaaatgaactagagaaga

SEQ ID NO: 19716 - DNA, 1052 bp, Heterodera glycines
ggggcggggcgtcgggaattttccgctcaaaatggtgctagaggcaaaattctctctccgttcagtttatggggtggtgggttgactgcccgtaaaatttgaagtcaatcggacaaggggtgcgcgagttttgctgcgtaagtcttggggtgcgcgaggggcggggcgtcggaaatgtaccgcttaaaatggtgctagaggcgaagttctttccccgttcagtttatggggtggtgggttgactgcccgtaaaatttgaagtcaatcggacaaggggtgcgcgagtttaactgcgcaagtcttggggtgcgcgaaggggcggggcgtcgggaatgtaccgctcaaaatggtgctagaggcaaaattctttcgccgttcagtttatggggtggtgggttgactgcccgtaaaatttgaagtcaatcggacaaggggtgcgcgagttttgctgcgtaagtcttggggtgcgcgaggggcggggcgtcgggaatctaccgctcaaaatggtgctagaggcaaaattctttcgccgttcagtttatggggtggtgggttgactgccgtaaaatttgaagtcaatcggacaaggggtgcgcgagtttaactgcgcaagtcttggggtgcgcgaggggcggggcgtcgggaatgtaccgctcaaaatggtgctagaggcgaaattctttcgccgttcagtttatggggtggtgggttgactgcccgtaaaatttgaagtcaatcggacaaggggtgcgcgagtttaactgcgcaagtcttggggtgcgcgaggggcggggcgtcgggaatgtaccgctcaaaatggtgctagaggcaaaattctttcgccgttcagtttatggggtggtgggttgactgcccgtaaaatttgaagtcaatcggacaaggggtgcgcgagttttgctgcgtaagtcttggggtgcgcgaggggcggggcgtcgggaatctaccgctcaaaatggtgctagagggaaaattctttcgccgttcagtttatggggaggcgggttgactgcccgtaaaatttgaagtcaatc

SEQ ID NO: 19717 - DNA, 279 bp, Heterodera glycines
tataataacgctgcggacatctacatttttgaattgaccttaaattggtaattactctttctttttctccatattgaccatcatactcatactccccccaccctttctcctccttcattttttttttcctttccttctccaaccctctcctccctctcttgatagtttaaactgaaggcgggaaacgacaatctgatccccatcaagctagcttctgcaggtcctgctcgagcggccgcccggggatcgatccccgatctagtaacatagatgacaccg

SEQ ID NO: 19718 - DNA, 2259 bp, Heterodera glycines
  unsure (1)..(2259): unsure at all n locations
taattgagtctattttggcatattctcctcaattatcccattaatcattcccttatctcgccttcacaaattgtgttgttttgattaatgtattaattaaaaaatcttttcatattccttttaattttgttatttttttaaatgttagaatggaagcatttcaaaaataatcatcaaatattaaattaaatttggcaaaatctcaaaagaaaaaataataatttcacaattctaatctgtttttggctcaccactaaaacggctggacaaactcacgctcacgcggtgcgccttttctgcaatgtttcataagttaatgtaggatttatatacctaattttgtacgtatcatacaaatccattttcatatccatttttattctttatttttattgtaagtcaaaataaataagaggtcgtgtaaatcagggatgtgtgccgatgccctcaaaaaaaaattttcggcaatcggaactccgatcccaaaaatgtcgtaaataggcaaccggaaatcggcattccgacaaatccctgatttaattttgatgaaagattccaaatcaaaatggtcctctcctccctatggtttatcatcgagtccaattaaactgcaacaaaagtacccctgccggatgtttgtacttttcaatatccattctattgtaagattttaattgtatttgacattaccataattgggcccgacaacaacaatttacccttttccaatatgtatttgcttctcttctgttcaaatctcttccaagacactattcataatcataataaataaatacccccattaacacagncaagcaattttttttttttttgctttaccacctgccgctgcttgtctccctccgctgcttcttctgcttctagaaaggaatcatttatcataatgtgttgtattgtaaaaaggaaatattatatgtctatgtatgtatgcattatgattgttttttgtaagccctccttaattgtgatcagtcggtccctccctttcccctcgctcatttctccccttttttccccgtccgtcctcctcctcctcctcgtccccgtctgctggctacattctgttgcttgctgatgtcccccaacaacacagaggatgtcgtcgtcatgttttacacacacacacactcgtcggtcgtcaaatatttgcgcttgcgcaagctttgcttcttctgtcagccgctctcccatgtcccccctcccctgtgctcctcacagatcccccaaaattcactctctcgagcacatctcagtcaggtagggctgatgagagagtgtcctcctcctcacaaatccccaatgtatatccctccctcctccctccctgttgatgggatgttgcgaagctgagctgagctgcttcctctctccccatgtcttcttcaaagtcattcattgtcagtcacagttcttccttcctctcttctcccctctcatccgcttcatcttcatcatcattatcatttgctctcttcacgctcaagtaccaactaactcttgaatcactcactcactttgttttccaatgttcccaattttcgctcaaaaatcatttgcgcgggaaggaacgaacgcgtcggcggtcgagagcaaaaatcgctctagcgccccaatacttttttttttggggggggggggagggacagaaaaagcgggtagcacaagttttctttgttttgtttttgatgcattttttctttatttggtcttagggcgcgtgactgatttttgttcagtctcagtgggtctgactgcactgacaaatgagtaaaaaaaccgaaactcggaaaatttgaattttcgtctatagcgccaaaaaatttgggcagaaattcgaaaccttttcattcctccaaaaatgattcttcattgactggtggaattagcccacataaatttcccatccattttatatatgtagtacttattttgggatctcttccgctacccgactaaatttngattgttggtccatttttcaattttgcttcatgccaaaagcagcatcagtaatgccttcagcatcatccatcccatattaatgaactacaaaataataaatcccctggggaaggggggaacccctcacataaatccctcctcctcttcctgccatcggacgtcggcgaaattgggggattccctcccgctgcccnttttttntttgtttatttattattataaattatttttttgttttgtttgttcacgcgattaacacacccattaagcataatc

SEQ ID NO: 19719 - DNA, 1220 bp, Heterodera glycines
  unsure (1)..(1220): unsure at all n locations
ttatttttcgatcacgcatcaaccacccaacactcatccgacgctacacaatcacactccatcatcatcagcaagcagttcctgttgaagaaggacgccacagtcagtcagttcagtcaattgacgaaattcaagcaccgcaccccgacgaccgaattctgtccgtccccgtcggccgccagtgttcgtttgtccaatccgccaacaattttttgtgttgtgtgtgtatattttgctgcgaaaaaaacagcaccaatcaccaccaccaccatcaccactaatctacataaacaaacatacacaaatattccaccaccaccacatcccaattaaaaatcaacacacaaatcaaatcggtgggtgtcggctcggcctcccctccccttccgatcgacgacatcgcgtggtgattgttggtggtggtgtgattcattcattcattcgcacattccattcttttgtgctgcagcaaccccaaccccccaactcccatcccatcacacctaaccaacaacaacaaacaataacacatttgttgcacttgttgtaataacaggcaggcattttttgaggtccgttctagaaaaaaagaattaaatgctcacataaaaataaaacattttttaaatcaaattttaggtaatagtttaggaaatctcctttttcaaaaaaaaaacaaaaaaacacattcacgtttagcaaatcctctgagttttttcaaatagaccaactctttgttcgaattagtgttcgagtttgggttcaaatgggtgtccgacttcgaaatctcctaccctgagaactctaaaatcaacttcatctcgaaaaaattagaaatttatatattgcattatttattatccaattttttttttgcacctttcaattaatatttaggtagctaaatttttgtctaattttttactgatgcatattttatttttctgctatcccctgaatggtctcctcattcaaatttatccaaagcaatttgagttaatctctgacattaattaaaagattggatattgtcatatgcacttaagcacctactcaactcacaattgaccccattctcataaaaaccaaagagttaaatgaatccaaattatatttcatcggattcaaattaaaaaaaaagacagttttatttatgagtaattgtttttgactaaatatgtatttggccacgnatttgaagtctctggagttcccgggat

SEQ ID NO: 19720 - DNA, 955 bp, Heterodera glycines
  unsure (1)..(955): unsure at all n locations
ataatgcgaatagaatgagatgagaatggcgatgagatgttcgctctgtcgccctctgctgttgttgttggctggcggcaatgttaatggagacaaaacgagtaaatggcgcgacggggggggaagtgggcggatgatgaacgacacgccgtataaatttgtcagcagaacgatgcgaagggggggggagggtaagtgtctgaatttgtgatggttttagctgttgaggttgagtgacgaaaacaacggaaatttaatgaacatttattcgcgcaccaatcggtacggtaagtgagcgtgggaaatgggaaacggtagggaaattttgacggtttaatatgcaactgtatcatttatcttaatgtcattctataaaatttgttattatagcacttctcctgctgctttttattctgatgactggtaaaaaaaatagcatttccccatgagattgagaaaaagcaatttcccgaaagaagcattaacggatcatttgaggaaacaaaggatccatttggtcgataattggggttgtagaaggcagaatcggtagttcagctggtagaacactcttccggaaggccaacagaaacggcggttcaaattccccccccccccccgacagtttttccctcaaaggcttttctcagctcattactttattcacgaaaaataaaaacaaccatttaaaaccttttggtgaaaataataaatgtatattgacttcattaattatcattaataatcatttttatnnnatcatttccccccccccctccctattaatttctcaattacagtttcatttttgtttcgtttgaattcattctcccgcccccccttccttcgtctcccatttcatttgttcgaccttttctcctcccctcccattggctctctttcgtgccaccaagaagggaccgcccctttctccatatcgccagcgatgcaatga

SEQ ID NO: 19721 - DNA, 764 bp, Heterodera glycines
gacgactcgtataacctataaatgccacgatgacgactcgtataacctaaaaataccacgaggacgactcgtataacctaaaaatgccacgacgacgactcgtataacctataaatgccacgaggacgactcgtacaacctaaaaatgccacgaggacgactcgtataacctaaaaatgccacgacgacgactcgtataacctataaatgccacgaggacgactcgtataacctaaaaatgccacgacgacgactcgtataacctataaatgccacgacgacgactcgtataacctaaaaatgccacgaggacgactcgtataacctaaaaatgccacgacgacgactcgtataacctataaatgccacgaggacgactcgtataacctaaaaatgccacgacgacgactcgtataacctataaatgccacgacgacgactcgtataacctaaaaatgccacgacgacgactcgtataacctataaatgccacgaggacgactcgtataacctaaaaatgccacgaggacgactcgtataacctaaaaatgccacgacgacaattgtgcgagtcgtcgtcgtgtcattttttggttatacgagttagggttgcacccccgaccccgccccgacccccgacatttttggccatttttcggggttaaccccgacccgaaccccgacgcttccaaccccgaaccccgacccttaaccccgactcaagggcggggttaaatatacacccctaagaatggcatttttgt

SEQ ID NO: 19722 - DNA, 1443 bp, Heterodera glycines
  unsure (1)..(1443): unsure at all n locations
ttttaattcaataattatgggagcttctaggattagcacgttattgatgttttaatgattgtataacttttttttttaaattttagtcttccataatttttgtgaaagcgaacagaaccgcacaattattccatctttttgatttgaaattaaaaatgaaaattgatgtttagcagatatatttttttacaatgaaaatttcttacagtaattccatgtttaaaaaatttcattttcggaattggtgagaattttctgtagattctattaatcagtagaattttatggctttgaaactctgttttttgttggaaatatatattttataaatttatattttcaagaaaaaatatgaatgagaaattaagcttaggatttttggaaatttttttgttaatttttatagagtttacccaaaatcaaaattaactaataaaaatcccatattattttgttccgattttcttggcatatgaattagcgaaaatgcaatttcatttgccaaatttggcatctcaaagaaagctttaagcattttgccaaatgagtgattggcattttacgtgtgtgggataatttattttggtttaccttgtttcataaaaattactaaaagccataatgccaaaatttcactacatttatcatctacgttaattaaatcactttgccaaatttggcatctcgaaaaaagctttacgcatttttccaaatgagtgattggcattttatgtttgtgggataatttatttttggttattgtaaggaaggcaaatttctaattggcatttactcatttgataaactcaattccatttaattaataataataataataataataataataataataataataataataataataataataataaataattgccttaataaatttgcagaacatattaatttatgggaatggttttttgcaagcaattttaatttaggtaagtaaaaaataaatttgccaaatttcctcctgcaaaaatgaaagaattttgaaatagtttctatttttattcagttccgagctttagattggccaaaaagatttcttaaatgcttttcaaaaataaaaattgtttgaaaacggaaaaataatttgaattttattaaaataattggattttttgctttaatacaaatttctccctaaaattccaactttaggtaagagcagaatttccttaactttattttaatgacaaataaattttaatttaaaattcgaatatttaataaattcgtgatacttttcgaaaattgtattatacaaagcgaacatgacttttcttttattgtgaaaaacttgacatttgtgtcatttcctttaattcgtgctaataatttattttttttatctcaattttatttgaacatcccctcaatagtgtngtaataatcatttgctatctatcatttgctcataattat

SEQ ID NO: 19723 - DNA, 2172 bp, Heterodera glycines
cataaatcgcgaaatatggaaaatatggatatggaaacccatcctagaagcttcaaaccaagctaaaaacatgttgttcgtgcgtttcaggccctcaacagtccaggaaaaaaatatggatatccatatgattgccatccctagtgatcaatgatcagcgaattaagcttaaaaatcttaaatatcattccttgaaatgaaaatgctaattagtcattaaaacaccgcaatttgcttgaaaaatatttatttttaaattttttatataattcattatataatttaacaaaaattagtttaaaagatcctattttttgtttccaattttaaaattgatcttaaaatttccaagttttaaaagacatcaataaagcattaaaaaagtaaagtgctaattaggcaataaaactccgcatttgcgtgtaagaatttttcttttgaaaattcatttatataatttaacaaaaattagtttaaataaacctagatttggctaacaatttaaaaattacaaactctggaaccatttcagtataagcttattgcatttctcaggtacgctttacgatggtgccacacttttctccattgcgcttccggcacatttgctgctctcgatcatcccaatgtccgtgttcttcttgaccattgaccgaatttgtatcatacgctttggacacaattatggctatcagatcaagcgagtgttgaagctgtcctttcttagcgctttgtcggttggcattctgttcaacttcatcggaatgctctcggcaatgccagtgccaaccaagacgggtgggtcaggatgggtatttaagcattcgggttgcggtatcggccccaattttcgcgattcttcacattgttagatatcccatggcatttgaacggtgccattcccgaacctcccgcgtcttttcttccaatttaaaaaacaaaaattaattattaaacaaaatagtttagatttgttttttttaataccctaatattcgttttttaatttagaatgtgaaattttcggctgcattcttggcactgccgtccaattgtaccttggatggcgcgccttttgtgccattttgaacacaatcagtggcatttggttttttgtggttttttatcggtccaatcgtaaaatggcgtcaacagcaaaaatgttaaacaatgctggacaattgcaaattcgtcgtgccaatcgcgcggtatttacataataaagtgatttcttgaaaaactaaaatattattagaatttctttagaataatttgctgacatccgttgcaattgtcagtgaattgttcctctcatttttgccgcattttcttccatttatttgggaaagagtaagtagagaaatatatttgtcataaattattttaaaaatacatattttcattttaataaatgaattaatcgtgttttattttaacaatttatattaaatacatattaaataactgtaaatgatatttcgttaatttagtttgaattttcaatttataaaatataattgctttatttttataatatgatttataactattttttaaattgttttaaataaaatatttatttttttcattttttttaaatgatttttcgcagatttttggtgccggctcatcgcttggcactggccctttgtccgagttgatgagctcgatcgaagcattgctgttctcctctatatattcgcacatgttttcggcacgggacgccacttcaatgcatggcacgggaggaacattacaacagcaacaacagccataccatatggaaatgaattacagtaggcagaatatggaacgaagacggtctgaccgtgtggtaccaatggcaccgggacaacatcagccggtacaaatcctggtccgccaagttacgcccgtcgagaatataaacaacaggcctgggacctcgatggcacgctactgagaagaagcgagaaattttaagatgaatcacgatttcaaataaatgtgttgtgtgattttgtcctttttttctgaaattgtcctgattcagatggattcgtaattttttaaaacattttatttcaaaaatttatattaatttgattaagacaaaagcttatgttaaatctgttttttaaaataatttataatatgctcaagaagccaaaatctagaaaaaatagtcaagtt

SEQ ID NO: 19724 - DNA, 2437 bp, Heterodera glycines
gtaaagcattcgtattagcatcgaatattttacgactgatcagtcggatcaccctcacatgctcacaatctgtagtgatcgcattgaccatcttcaaatgccgaactgtacaaattaaagaacggcacgatcgatttatcgatcaatttatatgcatattttcgatatttatcaaaaatcgaacgaatcactttcccagtctctagcacaaaaatataaagcaaatatatgtaaatgacaggtgctaacaaaatttggagcgcggccgcactggggaaaatatttcacaatgaagccgaagcaattcctcaaaagcagcatttacccacatttgaacgattttaggtagggcagagattcttcagttaattataaataattaaattttagaaaattggccgacaatttggacccgacgcacaaattcagaaataaatttataaatgaaaacattttcgaatctgaacaaattgacgattaaaaatgacaacattttcagtttgttattctattaaagttaaagaataacaacatttaaaaaaatatttgtctaaacaaaatctaatattctttttgtccattttattcatttttcttgataattttttataattaaataaatttttcgacacctaatctgttttcacggtgacatgatgttattgagccaatgctctgtttgtctgatttattataattagggatgtcaaaaatatgtacaaaaagtgatcaaaatatgtacataaatatgtaaaaaaaatcccgaaatatttaagaaaaacccaaaatatgtataaaaaatgtaaaaaaattttttaaattgttattttttggaaaaaaaattcttcgtagagggtaagataggaacaaaatgtagcctaattagatattttaaaaattaaaaatgaaagtatgtacgaaaatttgccgaaattttggatttttttgaggatttccataaaaaatccttaaaatatgtaaaaaatgaaaaatgttagaaaaaagcccaaaatatgtaccaaatatgtataaaatcaagaaatatgtaaaatatgtataaaaccccgaaatatgtaaataaaagtcccgatttttgttcgcaaacacaaaaaagaaagtgtttttcctactatttagaccagggctctcagatctgaggatttatcctcattttgtggctttttgataggtcaatgaggtttttttttttgaaatgaggatttgaggatttttgtggctttttgaggatttttgaggcttttgagaatttttgagatttttggggaaaattcgtcagattttttaaattttgataagttggcataatgtttggcaattatttagtaatttgagtttttaatagagcttcgaaattttgaaaaaagcctgtatatgtgtacctatatgtatattccacaattaactattttttttactaggtttaatgtcatcaaaaagaaaatttcttattctgagttcaaaggaattaaacgtgtgaaatgtttttaaatattacaaattttcagtcattctacaaaacaaattttttttcccaagcagcgtctatcggcccgccggaccctacaaatcctttattttcttaaaaacttgctcaaaatcgcaaaatttggccatttttgtggacaaatctgttaacaaatcgcattaaaaattacaaaaaattttcaccggcggcgcctatcggcgccgccggaccccccccccccccaccttgttccccaaaagtttttttttgaaaaacgtcgcaaaaaaaaaagcaatttcggtttttcatgctcaaaatttcacaaaatgcttatttctaagaaaaaattgctcaaattgatcataggcaatcagaaataacatttgaacattttaagcgtgttttgtataaattttataaaaatgaggctttttgacccaaaatgaggcttttgaaaattttgatctgagagccctgatttagaccatggagaagccaggaaaaaaaatatgtatttacataaaattgacagccctagtaatttgttgtagctgtgaatttttaattcaggaccattccgtgcaaaatgccgataatttaatccgtgctgtttgttcaacaatttttctgttagtgggcattctgatcaattccgccattgtttttgcttaaaaatcacataataaacaaataaaaatggcagcgaaggaaattcaacacacggaacaaaaatgcacttttatatttaaatattaaatctcagatttcgctgtatttgttttgggacccggggtgggcgaagctcggcttagtactcgaagccgaaggcgaagcccaatttttattcgaagccgaagccgaatctcgaagcccaaaaaacccgaagttttcgaagccgaagttttttcaaaatttttttaattctaaaattttttttatcaccataatttc

SEQ ID NO: 19725 - DNA, 1080 bp, Heterodera glycines
tcatttgctgttttatccatattactggatatgagatatgcttgttaaagaagaacaggctcgagaattctaataattttaaccggcttagttttcaagacaattttctacaaattaaattaccgatttacaccgcaaaaaaaaactaagtttctttgagagtttatcattttccgctccactaaaacatcagtattttttgttctagcagttttacgcgtcccatggcaaaatattctagaggaaatgcgtcgaacaaccttcctgtttaaaatttttttcaattttaaatgtttttttgtaataaactaaatttgttgggacatgtaaaatgccatgggacgcataaaccgaccagagccgtatatataatgaaattttaaatttttttttgcaaaattttttttggctttgttgcagatgccgccgagacggaggagggcgaatacgacgtgaagaatctgatgaacaaattcctcaacatcgacctgacgccgaaggagcgggccagcaaattggacgagttggaggcgttgcgggtggaggccaagaacctgacgaagaaggtcacaaccgaaccgccgagggggggggggctcgaaaaaaaaactttttttgaaaattttgcccgttttacagttcgagcaggccaacctggactcagtggaggtgagcgaggacaagcggcgtcagctggaggcggagttcgagcagttgaagggtgcgctggcgaggggggcagggggcaaacctaaaaaaaaaattttccggaaaatttacaaatttccagaggacaggcatcgggcgcgccaggagtacgagcaggagatggccacggcggcagcgcaaggtggcgaaaaggaggaaattcaggtgtggccaattcaaaatgacccatcctaattagggatgggtggggtaattagctgactaattaccccactgttcactacaggtggcagccgatcacgcatccaaaatggcggcaaaatgggagaaggtgtgtgtggttgcgttatttttggaattttttggacaattaggcgccgttgaggaattttaaactataaaacgacacct

SEQ ID NO: 19726 - DNA, 1810 bp, Heterodera glycines
aaaaagaaagaaaaaagccaatgaaatatatcaattaattgaagtgtgggatttatttggtttaattacgcgtcctaaaattttcgaaactaattgggtaattaattaattaattaaaataatatttgttgacggggaaatagggagaaaaatgcacaggcaccttttagcactgatgaggcggaacagttggggacagacggcaccgcattttggcgcaattttttggatttaaatttttccgaaaattccgaaaaaaccaacaaattttccaccccctcgtcttccgtgcaaaaatacggtctaaaataatatattgctgatgaatgaattttatgcgttttaatcattctttttttgccattttgatcagtagttggaccacatcggcttgcgaatccatcgcagacggaggccaccttaaatcaattttgaaaatttaaatttgagaaaaaaacttagaatttcaatgaaaaaaatactgtaaattaaataaattaaaataaattccgatttaatttaactaattaatacgaattaaaaaaaaatttttttttgaacacagaaatttaaaaaatagcctttgattctaataatattccaagcctttcaaaatgccctgatattaaattcaaaactaatgaaaatctggtttttaaatggcaaaaatgaaaaattcccgataccttaatagagacaagggcggggtcgggataccgcgggattttcgcggaaaacccacgggattaaattcaggaacccgacctcggtacaccacaaaacgtcgccggccccgaaacgttgccgggacataacgtcgtcgcaaatttttttttaaattctataaaaaaaatcaagaaaattataaaaaattttagttggctagcctaatacgaaaaaaattctagaaaaaattagaaaaaaaaatattaaggaaatacaaggaaacaaaaacttttttttttcgttttttttggaaattcggaaaattagtttttattaagacttagattttcaaaaaagcttaaaattttaattttcttgaaattttgaaaaatttttataattttttttttggcggcgacgttttgtcccggcgacgtttcggcggcgacgtgacgttttgtcctgctccggcccgacctcggagtccgcccggcccaatcgttttcccaaaatcttcgggattcggtcggtatccccttctcgggatccgtcacggtcgtttttcaaaagcttcgggatttatcttggattcggtcggtttcccgactcgagatgactccaacccgagttggccggtccggtctcttttttttcatgatgtttaattttaattttttaattaatttttgtcccactgttcgtccgaattttgatggacgcggcctccgctgcccgtacagtgtccttgaccgactgcatcaaattctgcgcgttcagcaccagctgctccatggcctcctcgtcctcctctgtccctggacgggcaaaaagcatttttaaattttaaaaagcaaaaacaaaaataaataaacaaattaatatttggcaccgcattttggcattatcaaaaacatacaattattgaaactgagaaattgaaaagagtgttatttttaattagtttaataattattgtataaatttattcttttttatatgtatgaattaacttattttgtaaaaaataataaatttgccattaaaaaatgctttaattaaatttttttttaaataaaaaaataaaataattttaaaataaaaattgttgtttataattaaatataaaaaatcaaattaaattaat

SEQ ID NO: 19727 - DNA, 2485 bp, Heterodera glycines
aataaatcattaaaaatggagaaaaatcaggagaacattatgggttttatttggcttttgtaacataaatatgaaaaaagttattccagaaattatggaaaaattcggattttcagacaaaaatttataactcgcttctgaaaagatattcaggaaattaaaatgctacaaaaatccgcaatttttagctctattttataaattttacttcacatttttatcacttttttgaaaaatgttataaaaataaaagtgattttggaattcgggaccgaagggggtgaccaggatttttgattgaaaaaattttttcacaaaaatcttccaaaaacatgtcattagggctattttatgacgctgatcacgaatacgtgatcagattttacttttaacatcgataagacctcagaatccccgtgtgattggggattctgagggggggggagggggcaggttcgaatccggacggtgtacattatttttctatgctattttcactgtttttaattaatttgaagacttcttttaaattattataattcatttataaatattcaatctgtacgtttcaaactctctttttaattaataaaagaataatttattttattttttaaaatttattaattgtattatatttttattttactttttaataaacatttccttaataatctcgcgcgtcgtttcgtcgtccaaacaatcacaaaccgatgcgagcagcaattgctttttgtcagtgttattgaaatgattgcaaaaaaaaaaaaggaaaaatcctttaacgttggcaaggcctattaaccgaaacatttttttttcattaatggtaaaatcggctacatttttttaaattcaaaattttggccaaaaaataattcgtcaaaaaattggcgacaaaaatgatcaaagaaatatttgtgcaaggaatatttatcaataacaattgaattttttaaagttttgtttaataagaaacgattatgaccattacaccgcactaaatttggttctttttataccccttaaaatatttttaaagagccaaaaatgcctattttttgtcacacccatttttttggggttttgcctgcaaaatgatttacataatttattttttgcaaatttcttttaattccaagatggacaccgctgaaaggtcggcacgagcaggcgggatcgccattctccgttcccggtcaaatttggagaaaaaaacggaataagatgattcagttaaaaaatccaagtccaggcaattttcggcaacctggatttttgccgccccctaaaaattcttattctttaaaaaaaaaattggctcaaaatcgtaaaattttgtcattttttgaacaaaatcgttaagaaatcgcattaaaaattacaaaaaattccccggcggcgcctatcggcaccgccggactctcttccctcacccatcccaaaaaaatttcggaaaaatgcgccgaaaaaattgttaaaaatctgtttttttgattctgaatgtactgaaatttacaaattgcttatgttttccacaaaattgttaaaatcgattttggaaatatataaatttctcatttcaaagccggaattgctcagaaaaagttggcgttgagaaatatgttgctaatgcttaattttgttgaataaaaaatgcaatttaggttttggaagcgcgttttaaaaaatatccttattttttaccctaaaatcttatttttgaccagcgatgtacttattttgggaaattttcaaggataaccctgaaacaccgagaaattttcattatttgagagtcaaaaaccgagactctgatagtacaaccctagctgatcgattaaaatttataattaaaaatttaaataacattttgccaaaattaaaaatttctgtaggccttgtccatccactcacacggcgattcaattttgggctccaagtacaaataagtttattatttatttagtaatcagaacgccaaaactttgcaaaacttaaaatttattggggattttcccttgtaaaaatagaagagccgatctcgagttaaaaacttaactttcacaaaataaactttgaatcgctagagggggccaaaatatgggcctaggcaaaatttcaagaaaagttacccacaggaaaaaattttttcccagggcaaagttttttctttttctctcattttgacgcactatttccatgtctctaacatataaaataacacatggttcatttttttgccaataaacaattttttaaacttttgactaattaagaaatattcttcagaattttccccttcaaatgaccacaaaatggtttttgtttggctattattgcccaagtaataagctaaaaaaatttcataaaacaaagggtaaaataatagtgtgtacctttttactgtttgtattggttcttttggcgctccggaattttataattattttatttatttgctccaaaaaattcaaatttatac

SEQ ID NO: 19728 - DNA, 1230 bp, Heterodera glycines
tcgatgttgtacgtaaccaacgctttttgaatatgattttttattgccatgaaaacttttattaatgaaaaaataattctgccttcttctttaaaagaagaaattgaaattaacacacaacatagggaggacttgaacctgggacccctcttttggtgactaactcacagaccactaagacgaaaaatccagcataattgtacttggagcccaaaattgggccgctgtgttaaaaacccaaattcaaattaaatgattgtcaaatcctcattttccaaaaaaatcctcattgacctatcaaaaagccacaaaatggggataaatcctcagatctgcgagccctgttttaatgtaggtaaataaattcagttttattcagatcacagaattggtaaatttaaatggcaacgcaaagtaactttggaaaatttcaacagcgttcaagtcgacaatccagtaaattagtgttaggagtttgtttagtttagggaattaatgtattaaaggtcggatcatttctcaacaacccacgaaatgctttgatgaagcggctaaacgacggcgcattcagcaacaattggagtcacttgagaaagtccgtttattggcggaaaatgatgcatttcacgtttttcaggataatttccaagaggatccccacgcgaatatcacatggcacaaagcggcaccaaaatttgacgatgaaatggtttttggagacaaagaaaagaaaaggcgaaaacggaaaatcgcgtcaccctcaaaagtcagcggagcggagcaagcaagtgaatggaagtcgggggaagagaaaggaatcatttgatcattcagcgaaaaagggaaagaaaattgtggccgctttgacaaagacgcgatttaggaagacatttgctcaacttttggaggaagcgcaggtaaaccaaggcaaaataggggcgcgaattgttaaaaaaaaatcatgaattagaacttcggcgatttttggactttgtttaagtttggatgaagggttttttaattgacaaatgtcatcttttgtcagagggagcatttttcatgactttttcaaaaatgatggacccgagaccattcttatggcctaaatatgttggttagtgagccaatatccaaatgtttatttttattaagcgaaagcgcgaggaagaaactcaacagaggcggaaagagaccggcccagaactccttttgcccacctattacgaagtg

SEQ ID NO: 19729 - DNA, 1339 bp, Heterodera glycines
cactccccttgttcccaaaagttttttgaaaaagcgtgcgtcaaaaaaagtgacgtgaaaacaaacaaatcgtaaaaatttattattgatcccattaacaaatttgaccacagacctttctccaaccctcggatctcttcaaaaaatcttggacaatccattaccccattttcattatttatcggcatcgatggatctctcactttaatttagaaaaattggaccaaaacaaaactcaaatattttcataagactcaaacttgagtttttacttactccaattctattattaatccttttctgttctcagataaataatatctaagtcaacaaaagctcaaggaattctcaataaaatggccgattgttggggttcgttttcctatgtatcaataatattaaaatggtttcatcaaatggtacttttgtttttaatttcgatttcctcccgtaactccacatttttgttcagacgatgaagactacgacccatccgcgcaaatggcggacaaaatcgccagcctcggcttggacgacgtcattcggcaacagcaaccgaaaggggaaaaagtgccgacgcaagcgacgaataacagccgaaaagagggcacagcgaaagagggggcgacggaactgagcgaaagggaaaagagagaggcgcaaatgagggcggacggaacggcggcgatggatttgttcggtttggaattcgaaacaatccgaaaaaggggaaaagccaagccaaaggaaagggaaatagaaaatactcgaaataaagttgcaaaactcaataaatatcgaactcacattttctggccttatttacaacaatataaacggtatttagagtggtaacaaatgggaaacaccaaagaaacagtttaaattctgggaaattgaatggatttcacttttaaattctgggaaattgaatggatttcactttccctctttttaggcttggccgtcgagcgcaaggagcccacctttgacgaccttcgcacgaaggacgactttcaggcatttgcggataaattgggcgaacaaatcggggcgaggaatgaccacgcgaattactcactgtttgtcagtgctttggttgaccatatgacaaagccaagtgagcaaaaaaaaagggggaaaaaagcaaaaataaaaaccattttaagtgagcaaattgcaactgcaaatcgtcatggcaaaaatacaggtgaaaagcaccgtggaaattttttgaaaattcgagtgcaatttgttaacagattttcaccaaaaactgccaaagtttgcgatttttttagcaagtcgacgactttttttgttttttaaaaacgttttt

SEQ ID NO: 19730 - DNA, 1509 bp, Heterodera glycines
tcacaacatttcgctgggcacctgcggctgaatggtttcgtaattgcattctgcgtagatcggctgctgttgtgccgtcgtcctattggcattttcctcctccgccacttggtaaatgcccttcagaagtgcgttcagttggcccatcaatccgtcccaaaagaatcggtccctgaaactttgcgcgtcccacagactccacagctgcacattcagacgcatcatatggcccaactcttcgggcagtttgtccatttgattttgcagctgtttactctgttaattggggaggaaatggcatttaattacaaaaaattaaattatttttggcatttattacaaaattaattttaaatttttttcatttgaatcattctgctgctactgaccacataaacgatgagtttgtgcttggccaatttgtgtgagatggacacttgcaaagtgttccattcgtcccacagaaattcgggtgtcataaaaatgagaagtgcgcggctgtgctgcaccaaaaagtccaattcggcattatttccctgcagttggtgcccgtccgtcttgtaatagccgcacttgtgcagcaaacacagggaaaagcccatttccatcagaggccttaaggggtgaatggcaaaggaatgatggcaaaacggtcggagtgattgggaaattggccatccatgccataattaatccgcttggccattgccatttgtccgttccttccctccactcaccgacaaaattccctctccaacaatcgttcgtcccttttgtggtagctgatgaaaatgtcgtagctgatcagcggcactttctccgcatgttccggcaccaacatttgctgaggcgcaattggcatcggactgctgccgccgctggtgggcggcgaatgggaggaggccaaagagtcgctgttgttggcactgatcagacaagtggtctacaaaagatgatcaactgatcaagcgaagcagtgaacagagagaaaaattcgttttttaaaattaacatttgattatcgatgtttaaaaaaagggacatcgtcagccattccatttttgactaattcatatctgctgatcaaaaaagtttccatttgtcactttttttgaccacacaaaatatcttccctttaagctgattttccttgtgatcagttagcctttttctttgactctgatgattctttttctctctctctttttctctctcccctctcccccgcccttctctctctctctctttttctctctctctccctccccccctctcttttctctctctctctttttctctctctctctctctcccccgcccttctctctctctctctttttttctctctctctctcccctctccccccttctctctctctctttttttctctctctctctcccctctcccccttctctctttttttctctctctctccctcaccccctctcttttctctctctctctttttctctctctctctctctcccccgcccttctctctctctct

SEQ ID NO: 19731 - DNA, 2379 bp, Heterodera glycines
agcaccaagttgcgcagttcgcacatgtagaagagcagctctgggcagaaatctgtagatggaaaatatacacttttaatcagataccaaggccgaaaagctaaaattagaaaaaaattgaagtgaaaaggaaactattttattcatgattggtttttttaaatttttaaagggaaagtcaataaaatttaataaaattttaaagaagtttagcgatcaattggaaaattttcgaaaaaactttgtaattcatcagaaattgtgaaaaaatcgctagaaaatttatcctcacttgtccaccacaatggtggccaacccgctcctggccatcgcctttttgctggagaatgcggcttgcatcagctgaggccacagttcgctgtgccgcaacagccacagcacctcgtcccgggcgtaggccaagcccatccaaacgaatagacacttgggcccaagcagcccgggctggtcgccaatcagcaggcacagctcgcgcagtgccatccgcaaaaagtgccgtcgatgggcatgcaggtggccagccgcgtgcagcgtgtgcacacctggagggggggggggggagtagggatggcatgttttttggtgaacttcatttatctcacaaaacaattaccaaaatctaagatttgaaaaatatgggttttctaagaattttttgatcgctaaaataagcataaataaaaaaaatttaaaaacaaatgaaatctttaaaaactgcgaatttaccactatttcgggttttacaaagtcttcttctaaaaaatgcatttaaaaaaaaagaaatatctcttgaaaaaaaaatttataggccctttttcttgggaagtcttctggttttcttaggaaatgggaagaaatcagggacagcaggcaaaatgtgtattattttacaattttctcggcattttcccacaaaaacggtactgagtccacagaaaaaccatgccggaaccgcgtttcaattaggtctttaaaaatctaattcgatcaagcaccatcgtaaaaaaattcgaaaatttatcaaaaaaaaaattctcaaaaaactaataatacataataaaattttttgaattaaaaaaaaaattttttggcattaagaacaacattgtgtcctgcgcgcaataattcacaataattcaaacaatgaaacactgactgaccatctttcagctcgcccaccaactgcttgaccatgccgtactgttgttggtgctgctgttgcgattggtggttgtgttgctgctgctgcttgatgtgctccaacacggtgtgcaccaacggttggacaacaatgcactcgtcacggaacaaatgaaccaccaaacagtgctgaactgcccgttggtacagcgggccaaggttggccgaatgtgccgggtccaccagcaaccgatggcacaccgtcagaccgactataaataaatcgtggaatatgtggtgggtgatatgctgacaaatgccacggcatttcatccaaatttatattaaaaatagacatttggttggataaaaaacatttaaataaatatgcaaatttgttggaatagtgctaaagcagttcaaaacaaaaccttgaaacttggcttttatcaattggttatgaaaaaagattgatgttttttcatggttcactctttttcgtcaattgagtcataaaaattccggcatttaagttgaataatgtggccattttcaaaattttccaaattttttgttctttcacaactcaaaaatagcttttttgacttctccactcatttatttaaaagctcattctaaaaaagcattcatgaacaactacattcaagcagaatattgggtttaccgccaacaaatttttctgaaaattatagaaaaagtcaagttcccaatgaaaaatcgtagaccaaatcaatggttttgaaaaaagctgagctcggattcgttaaaattgttgctttttttgcactctgtccccacaaaaatgtgtttgtatataaatagtaaccaccaacaaatgatccactggtccatggtgtccagtgaaaggtattcgcatgcgattgtgccggtctgtgccgcgtaaagcatttgcttgggatgggccaccagcgagagcagtgccgcgtcgcgctgctgttccgccgaaatgttccgcttgaaataaatttcgcgcagcgaatccaacgcggcagcgaccaactgaaaacaaaaatggatgagagggaaattcaaatccatcaatttatatgaagtttgtaaaaaattatttaactctacagcagggatggcacggaattccgatttccaacgacatttgttgtgttggaaccccatttcagaaaatttttgggatcggaattccgctttccaacattt

SEQ ID NO: 19732 - DNA, 2491 bp, Heterodera glycines
gtcccttcatgttctactttgaaatgaaagtcaccaaattggggaaggtaaaatgacatttattaactaattaaattcacaaaattcgcataaaattattgtttttggcattttttatatttacatttttatagttttgcctcgattggattcgccaccaaagaaatgccattggacggagcaatcggacagcatttgaacagttacgggtaccgaagcgatggctcatttggctgcaatggtatcagtcggccgtataaaatgggatttggcaccatgccaatgccattcaacgcggcgattggacaacagagggaccgccgctacgttgggagtgccaattggccatttccattggaatttgtgcccgtgccaatgccatcggacggcgcattggcattccaatcgccagcattttccaccggagatgtggtcggatgcggcgtttgtttggccactcgacagatctttttgacgaagaatgtccgacgaaccggtgggccaaacacaaaacaaaaaagcaaataatttaaattacaatttgtcagatgactcctcttttttcactacaactcccatcaattctctgtttccatgcgtttctctgtggactggcgacaaaattgaggcgaactttgggccaagtttcaaattcaatttggccactctttgaagaaagccgaagaaacaacggaaagggcgattactcatttaattaattaattaattcattatccattcatttttcactttatttttttcacatttattttcagttttttatattatttatcatgcgtatttgttaacaaataaattttactgttctttttgtttgttttcattttttcatgtaaaaatttgatggaaaaaatggaacaggaagaaactcttgaacctgaagaaattaaaaacttaaagcaatttttaaaatattaaattactcaaaaaatctctttttttctttgccctcatttatgtcccattgtgttacaatttaaaacgtttttctcaaaccctttgcccaactgtaaaaattaattaaaactaaaaatacatatttctatcatatgaaaatattaaataaaaaaagtctgtaaaatataaaataattataaaatttttattataaaatgaaaaaagaagaaaaaagcttacaacaccttcgattcccaggacgtctccgttccaagtactaagaaggcccaacgttgcttaacttgccagatcggacgggatggcgtgctttcaacgtggtacggtcgtaagcacaaaggccccatttgaaaaccattaaatagtcaattttgtaatgcatttttcttctttggttaattaacccaacagaacaatggttgttaatagagaccggacaagagggtcggtcgaacggtttcggttaaaaaccgaaaaaaaaccgaaaccgaaaaaaaccgaaaaactcaaaaaattctcggtcgaacggtttcggttaaaaatccgaaaaaaccgaaccgaaaaaaaccgaagaaaaattttcggtataccgtttcggtttcggttttttttgaatttttatattttttccaaaaaaagcaataaaacatttttattaacagaaaaagctaaagatcacctctgaactaaattgtaaagctattgaagaagctctatcgaatggtgtactaattttggaaaattgaaaaaaggaagccaaaaaacattttttttaaatagtgagaaaaagtgccaaaatagttaaaaaagtccaaaatagtgacaaatagtgactaatacaaaacttttagtatcactatgatgaaattaccttacaaatagagatgattgaattttctattcataactctttcaatacctaatttaattctatgaacttttattaggtgcgggttgaaaagttacccgcagctgagggttagtcaaccgggttaagttacgttcaactcaggattgactcaaaataaaaaaaaccaaaaacacaaaaaatatttataaaaagtgtaaaaaaaattatgaaaatgtcatctatttaaataagtaaaatgctctttaaacaataatcgtatctttgtacaaagaaaaaaatccgctttcaatagaaaaaatatataaagaaagaaaatagacaatattatcttttttgaaaattaataacctaatatgttataaaaatggatataaattatatccttttgcatattttttctgcgcatgtgcaatgaagaaaggggttcaaattttttttttaatataattttaatgctattttttaactgattttgtctaaaaataacaaattttaggattttgggcttatttttttaagaaaagataggtttttggggggccgacgatgccgataggcgccgccgggggaaatttttaatgaattttgttaagaaaatggccaactgatttttgataaaagtcggtcggttttttcggttttctgattatttcggtcggtcggtttcggttaaaaaccgaaaaa

SEQ ID NO: 19733 - DNA, 2563 bp, Heterodera glycines
ccccagacatttgcgcctatgtccaaaatcgggttctaacttacatttcgtcaatccatgatagactaaacagctttaaataagcgatttaaagtgcttgtattcaataatttgatcgtcagaatttttgaaaaaataataaattttgcaacagaattattgtttctaataaacccaaaagaacctatttttcataaatttaatgctgttaaaaacctctaagattgaaaaaaatgtaagttagaacacgattttagacagattttaaattttatgatgaattgctaagtttttttcaaccccccccccccccctcccttaaattagacacattgtcagattgctcaccttatttttgattcggttggcataattcaaagaaccaagtgtttcaatggcatcaatctgattcgggttgacacatgtaatcattagggttcgactgaaaaaaacaaaattttaacaagaaaatttcaaaattgccgacctgttaccgccaagtgagtcctgaaggagacgagtgagtttcgagtcgcggtacggcacgtggacagtaccaattcgaccttttgcaccgcccagcgcagaaatgacattgccaagtgcaagctgtgaagtgtaaaaaatattgaattgctgcgcataaacaaatttctatttttggcaaaaattgccgaaatttatgatgttaatgcttatttttttgtgtttttacattatcttgaaaaatactgtaatatgagtacatttatagaggggggcattcaaattcaccatatcaaatagcctaattgtaaacagaattatgcagctctggatttgaatatacccagactttccccccccccccacattcgcttaccagtccggaattgatgctgatgctctcctttactcggtcaccggtggcgcccgttctgctcaggcgctcagagccagccaaatcaataaaatggaacttggcatgcaatgtttccaattcagttcctcctgtgcccatcttctcagaactttcctcctcatcatcaccaccttcatccgctgtgttgttctccttttcgtccgaatcgtcctaaattatgcaacactaattgtaagtataataaaatgtcacaccaccacccgcccaaatgttaatagtaaaaaacattggtcccgaaaaatgattggcaccctatagctcgaaaaatattcaaatccgaatgcgaggcgccgatattgagccacaagaaggcaaggcgcgtgttcaccgcctcggattaccccctaagaatttttctcaaattaaaaaatttcgtgaaccaatgtttctttatcattttgcccctccgccaaaaaaatcccgtacatcaaccggcaccactcgagtctgcttgatgttcaaggtgaaaatggcatgtgagcgtgatgactgtttgttcatatttgtcgctgcagttgttcgattttgggcaccaatggccagcgcggacagaatgtcctcctgcgaattgacacttcgcgatgatgcacccatcagcaaaatttcgtggcttgtcgggttctccatgatcttgatggaggatgagtcccggtccggtgacaaaagatcaatgagttcctcgttgtacagctacaaaagttgacgcgcaaatatacagtataaacagttagtttggtgtttggatacatcaagaaggttggcaaatgccagaatatcgcatgagttaaaaaatgggcaataatggtaaaaagtaaatttgggcttaaattgatagaacaaaaaaaaatggaaattggttttctacctctctcactgccttaaatatcgctgcttttttctagagaaatgagtaaatttgactcaattttctgagaatttttttgggtctattgtactctttaggcgcacaacgactcgactttcagatgtccaatcaatgaccacagtaagcgtcattggtcaactttttttcttacttggtcataattttctgtttgctgcatttagcccagaatttagtttggtatgacgccaaaaatgcaatagattcaaaatgccaaatcgtgatttttggggcaatactttgcttgggtaatcctgtattttattggtcccataaaaaaaagagattaaaaagttgtttttatgcaattcggagtagtacccgggggttttcgggggctctgatctatttcgaatccctaacccgaatccgaacatttttttataaaaaaattttaaaaaattgttgaaacgcatttcctatgatttttcggggtcgctaatcacgaatctaacttcagttttatctatgccaaactccggacccgaaatcgaacaaaaggagaaaattaatttttcaccaagaatcacatttattattcaaatgaacggaatataatagaaaataaagatttaaggccatttagtgaatttgaatcgattttggacaatacatgtgaattttggtgaaaaattaatttccgacttgtgttcgaattcgggttcgggattcgaaataggtcaaaattgatatcatattcgtgatcagcgccccgaaaacccccgagtattactccg

SEQ ID NO: 19734 - DNA, 2582 bp, Heterodera glycines
agtttttattgcatttttgttaatgactttttcaaaaatcctaaaataggcacataaggcactaaaaccctgaaataggcaaaaattggcattataaaagtcatcgtagacaccccaaacccagcgcaaaacgggttttcgtgcttatctttgcgtattaagtgcgcaaaaattttaggcatttgcctaaaaaaggaagcccttcatataataaattcatatgtgaaagaaactgccactttataaataatgaaaataaaaacaataaaacactttttactgaagtgacacgacactatttgtctaattaacggacggaaattaaaactaattagtcggcggaagtgcggcgtttttttctgtttgttgtttctctttgcttctcccactgctttttctttcgctttgtgtcgcttcgcttaaatgtttctgcttttcgcgcattttgcgcggaatttcatactctaattacttctataaatggcacatctatttgtaatttcttagtcaaggtgcctttcgctaaaaataatttaataattcaatgctttctaaacataattttaatctatttattaatttaacaattaattaatagcttttcttctattaatttaaacagaattaataatattttagtatattcttaatttaaccattaattaatagcttttcttctattaattaaaaataattaataatatttagtctatgttaatttaacaattcattaacctgtgatcgtaccgccgatgctctgaatgcatatgatggccatttttcagcaaaagtcaaactaataattaagttgaacaccttttctcgaatattgcctatttttggctaattttttcatcaaaatcgctaaatcataaggtgatctcgtgcccttaacatttttcatttcgagattcccgagaatgcagcacatttccattttctttcatatttcgacgaatgtcaatttttaaattaaaaaaaaatagcgctttctctttttccgtccattaatgaatggagagggcgatgaataatttgttttattattcattcttttctcttttcgcgcccccttttcttccttttctcgactcttttgcctttcccttctctaaccaaagagaaaagagagaattttaaatttatttttctgtttttttatttttgtttggttttctgtgcattctttcttttttaatttgttttacactaatgactctatggaacgccgcccgccactttacttttttttacgattttgaaacatttataaactgtccttcacacaattgagcgattagacaaaaagatgaattaaacgaggacttgcgactttaaaaattttatcttctgctcaacagtcttgaatttaattcggaaatttctttttctgtttttggcattgaatctcgatgccaattcttgtcttgtttctcggcactccatttctatggtttcggggctttattccattttacgcatccatggctatcctcagtctcttgggccataacttttttccttaattggccaaagcattcattctttgtatcaaacgaagcttaaagtctcgggaagttataatgcaagaaaagagcaagtaccggcattaagaaaaaataggatgagaaaaaacaaaattccgattatttgagtggaatagagccgcttttggttccgcagagtctcaggaaaatttcttcgatcagtctcaactttaaatatctggttttcgagactcggtatgtctcaaggtctaaatccgcaatcttcagccttgaccttgcgctctcgagaatgttgtctcataatattacgtaattcaaaataaaaagtataattatttattaattaatctccttttgtccatcattccatctatcgactcaccccaaaatctctccacaaagatccttttgtattgtattcggttattttattatttgttcagccgcagcggtcggatttattcaattgtcccgtccggcagaaacattagtgagcggagcagcagaggtgttccagcccaatttgtgcgatcgccttctaatggggtagcggatggaaagaaagggggcgactttctcgggccaacaccattcatcattcaacacattcgtgtctctctctttctcaactctctcattttctccatactccctttttacctcgtctactatatctccgcttcattttcgtccatctctcttttttatcactcgttcctctctgcttttgctatactattctcccgttcactctttcttcgtttttccgtcattaattctcccaatttactccatctctctctatctcccattttctctctctgtcgatttccccctccctaatccactgttaatttttcatctccgatcacttctgatcatcaaccaatcatatccatcgatcaaagttcatcatttttacaatacgcttattattttctgcaacgcctctgctgatcgatcacccaacaaaaacattcttgctctttctctcactctctccccctccctatctctgctccctatccatgtatgggtgtacttttttatccatttcgctatttcgttcacact

SEQ ID NO: 19735 - DNA, 2114 bp, Heterodera glycines
ccacaaaatttcacaaaatttagcacctttttcgcgttttgatgaacaaaagggccgaggcattgcccaaggaagtgtttaatgtgaccaatttccacaattttttgccaaattttgttcaaacgagcggcaaattagacatcaacaaattggacgacttcaaagagccattcgacggcaaaagtttcaacacttttctctttcaatcggtttgatcagatgaaaaataacaaatttttattaaaacaaaaattacagaaattaaccgaacaatttggtaaaattctatgcgaaatttgccgaggtaattagtggaaatactaattgattaattagttatttaatttttcattccaccacttttagaactcgtaaatgatgttgagctgctccgccgtcttcaagcagaacactttgacgtcatacttgccgaactttatgatccgtgccccatggcacttttccatcggattggcgccaaaacgaaacttggcactttagcgttgccgttgtaccaaatgactgtccgtccatttggtataccaacgctgagcagttacgtgacaagtgagtgaatgtgccaaaggggagggaatttaattaataaatttaatcaatttggttaattataatttagaataaaatacttttatttaaaaatattacataaaaaagtacaaaaaaaaattgttaaaaagatgtgatcacaccaatgaatggaggtcacaaaatgaattttgtggaacgatttgtgaattttgtcaacgatttgtgcgattggttgtttttgtcggatttggtggtttcatatgaggtcagcacaaaaataaaaataaaaatgtcaatttatatttaatttaaaataaaacaaattgatcttttagcagcaagttattgctgaagcatttggccaaaatttccccccgctgaaacaaattatgcgcaatgtttccctgctgtttacaaattcaaatcaagtcggaaaacaatggcaaaattgtcggaaaattaattttttagttctttgaaatgccgagaccaatttcgaacaaaattataaacattggaggaatcgtggaaatgaaagtgaaagaattggaaccggtaaattatgggataaaacaattttaaaaaattgaaatgaattcttaagggaattaaagtcatcgtggacaattccctggatggcacagtgattgtttccttcggcacttttgccgatattaactcaatgaaaagggaaatgaaaatggcatttttggaagcatttgcccgctttccgtactatgaatttatatggaaagttgaactgtctgatgaagatgccaaagtgtttgccaagtacaaaaatgtgaacccggtcaaatggatggaccaaaaatcgttgctaagtgagttaaaaaacgaaaaagtttgaaaattcagttaatcattgatcacttagtaataagttcactaaaattaattacccttaatttctgaggctttaaattttttcatattcggtcaatgcctaaattcttggtatcaaacgaaagctcaaagtctacagaaattttttatttagcgaattgcggaataaatgtttaacagacaaaaataaattgtcttgaatatacacgaaaatggtgaattcctgatttctattgcatactttttcttaatattaacatgttattttcttgtattttcgaaattccagaaacattgcgctttcgttgttacgaagaattttttttttaattttaacaacaaaaagcactaaaatttcaaaaatgttacatgtcggctcctatcggcacagacgggtcaccattttagctgtttttttttttgaaatttagccctaaaaatggcaaaagcagttttttttttgacgataaacggctagaaattcttgtttttgttccccggcgctgaaatttttaaaataacactggacaatggacaagtaagaaaaaattatatgccaagaaatttaggatggtcacttaatggacacgtaattgggactaaaccccaattttgttaatatttatataaattaagtaaaaagggccctatattaattattccccgtaaaaatttttctttttaacccaattttggccatt

SEQ ID NO: 19736 - DNA, 937 bp, Heterodera glycines
tatcattttgttttctttcattttcactattcataatcatacacaataggcgatagataatgcgttcattatgcataaattaaatcaaaattttcggagagagttttaacatacctatttataaactattttaaatttaatcaatcatattaaatagtaaacaattaattttcataatttatttgtatttttctatatttgtttttctattaaaataaatttaataaatataatcaattatatttttctctttaaatttcatcaataatttttttttaaattaatttattcttttttatattcatttattatttttaatttgatattttaaattttggcgatatgattttaatgttgccaacaaccagaaaaaacggaagatttcccgttgatgtggccaacaaccggaatatttcacgtttcatgttgccacaaccgggagttcatttgatgttgccaacaaccggaaaaaacaaccgtaagatttcccatttcatgttgccaacaaccggaaaaaacaaccggaagatttcacgttaaggttgccaacaaccgggagatttcccatttcatgttgcaacaaccggaatatttcacgtttcatgttgccacaaccgggagattttcatttgatgttgccatgattttccgtttaatgttgccaactaccgaaaaaacaaccggaagatttcacgttaaggttgccaacaaccgggagatttcccatttcatgttgcaacaaccggaatatttcacgtttcatgttgccacaaccgggagattttcatttgatgttgccatgattttccgtttaatgttgccaactactgaaaaaacaacctgaagatttcacgtttcatgttgtcaacaaccgggagatttcccatttcatgttgcaacaaccggaatatttcacgtttcatgctgccacaaccgg

SEQ ID NO: 19737 - DNA, 2344 bp, Heterodera glycines
tttaaggtccatttggcaaattttggcgctattgagaacgcccatttgagtattttaatacagaatttaatcgatgtgatcaggtcgagaaatgcacgacaattagtgaaagagtttggcgacaaatatttagaggaagtgatgaaggcaagttaaattgttccataaatgggcgagggcaggagcagtttaagcagcaaattattcgtttggcaatacagtggccgaaattgtcaatttcgtttttaagtttctcgacgaagcaatggcagcgtcaaatgagtctctcccgcttgccaaaattgtgcctgttttatgcgacgcctttgccaaaattggcaccgtttctttcggctccattttccattctttgctcagctcaacggaattgcacagattcactctttttgtatcggaatgcagcaaacgcgatgatttgttcgatgcaaatttaaaatgaatgatcaaaaattggtcatttttgaactgtccaatttataaaacaagtataactttttatgtgcaagtcatagccacatcattcaaaaggcaattcggtagagaattttgtgctctatccaatgagcatattcaaaatttctcaaaaaattttcccaaccccataagaattttttttgaaaattttcccaattttcagtgtctcttagggtgtcccgatcactatgaaggagtgatctgatcaagttggtgtaaaagacttttttgttcagcatcaaaagataagcttgcatgaattatttcagatttttaagagccttttgaaacagttttctaaggtttgttcaaagacttttttccaccagtgtatttctatttgttttttaaaattgaaaaataaatgcttttgattccctttcccataaatgataatgttttcgaattctcattttcctttatttatatatttttaatcattcactttactaaatattaagatttgaaggaatttgatgcgagaaaaaaagcgattgttaaaatttgctgaatatttgggacattgttcacgagaagtgagcctttctcttatttcgcatttcattctttcgccataggcgacagattacggaaagtgtgtggcaacgaacgcggagagaattcggaaaggcgactgttcgactgagttcgaccgactcatcgcctgtttaaagaagaggcgtaagttgggacaacatatttctgttgtttcgggttctagtagtttgctttatcatcagtttgtcctttcctttcggcattttgtccctttcattttgtctttgtcggcattttgtcctttcctttcggcatttcgtccctttctttttttctttgccttttgcgcccattccatcctttgactgttttctctttttagaagtgcgtctgtaaatcgctgctccgatgaaagtcaaacggcttaagcgtgccgctcacattttgactttttaccgttacaatttccattttcttcccccattttccgtccttctcgacggaactttttgccaagcggcgcttcagtcgaaaataaatcttcgagaacaaatgctaaaatatttggcgcaatccgtggaaatggtcgtcacgaaatgcgttttgaatgagctgcatcagttgggaaaaccactccacggcgccttggtcatctgcgaacaatttcgaattgccttttgcccccacaaaccgatgaggacggcgtcggaatgcatcgctcatttggcgagacggtcacgagaagaaggaaactcaaaacacattgtggggacgcaggtgggcgagcagtgacacagcaaaaaggggtagagaaactaataggccacgaaaagtcggactttggacccgaattcgaacagaataataaaactcattaatctaggaaaattggcaattttactgattgtgaataacaaaagtttaggatgaccaactgatggagaaattacgaaaagttggcggggtgccaatcatgtcaattcgcttcaatacaattttgctggaaaaggtaaaaaaatagtgaaaacgattgaattttcgcaaattgtttagccttcagaggaaagtaaaaaaatggcagaggaaaaaccatcgaaggaattggaaagagtcaaagaattaaaggacgaagcatttgcatccggagaaaaaagaaggaaacgcaaggccaaagggccaaatccactctcatgcaaaaagaaaaagaaaagcggcgaggggaaaaaagacggaaacgcggggaaagtgcccggggcatttggacaggaagagagcgaacggaaagggaaaagcgacgaagtgaccgaaagcagcggaagagacaatcccacgaaagactctagagatcccc

SEQ ID NO: 19738 - DNA, 1723 bp, Heterodera glycines
  unsure (1)..(1723): unsure at all n locations
tcattaaagtctgacaattacgaaaagtttcgggcactttntaatttcgtaattttatttgacantaattaagaattttgttgtatatcgtaacaaatataggaattcaatgtttttgctaatttgagaaatttaaattgtaggcactgcgttgggctgacgaacggtgccgtcaaaatggcatcgaatgttcgggggaaaatcgtcggaaaatgcttggcccaattttgatggctattcgattcccactaatggcacaggatgaatttgtgaaaagcattggtgagtgtgtgtaagggtgttccggagactcaaaaaattaatgaaattttgcccaaaaacgctccgactaacggaatccgatcctactcttgttactgtagtcaatttatccataataattatttacactgctttgtgagtagtaccacgacttgattgatgcttctccatagcgcgaattgaatttattaaattcacaagacacagtattttcttgttttgactactgtttttgggtacagtaagactattcgtttattgattttgcctataattttgacagttccgtccaaagtgttgactgtcgaagaaatgttccccgttttactgtcccatgcgacgacttatactgaaaatctatgaattttctaaaattcttaaaatccgttcaattcacagcaatatcgtaaagataaagggattttcgtggaatttgagacggcaattccggaagaaaaacaagacggaattcaccagttgagtttctcccttcaattaaattggaatttatgtggtaagcaattaaaaattgaaagaaaaaattttgatttccaataatttttaaaattcgcagaacccaaaatattaaaatttttgattaaacataactgttgttcgattttttaaagtttcacaaaatctcgatcatcacaaaatttgacccccgtccaaatttcatcctttttttttgtccttcgcacagaatttgaatcgatctgttactgcttggcgacattgcgaattgtttcacaaaagcaagataaagcggaccacattcagacccaacgccatttgttccaaaaaaatccatcgatttgtcacgaaagtacacttttatgcaaaatgccatttcagggtaacataaattgtaaatttagataagaaaaattaatttatgatttgatgagttccgagaatgggtggcacgacgaggagaaggacattctgacggttactgtggatgtcattgtggaaaatggtgggggagaggggggggggggggttaaaaagggtggaatcggacagactcggcacgggtgctggactttcctcaattggcattttgtgcattaccatttgttgcgattctgacaatgcaaaatttaaaaattcatccccaacttaaaatatttgatgctatttttagcagaaactcagccatcagtggacaacaaattggacaaactcaaaaacagcagaagtgaaacgcagctttgattaatggcacaaaaaatgtgccacattgaatttgcaatggattgggttttttccgtaattactaatgagtttaaaaaatttttggataatttttcaccggcatcaaacacttaatgaccattcgcttccatcggccattgtctgtcactttgttcggctcttccatttggttttataccattattttaacaattcgttcagactttacactaactattgtatt

SEQ ID NO: 19739 - DNA, 2722 bp, Heterodera glycines
  unsure (1)..(2722): unsure at all n locations
ccccccccccccccccggaaaattcaaaaaaaaagagaaaaattttccgttgggattttttcgtttaaaagtcaggcaaggatgctcattttgctgccattaactgtccttttttcgccatttttgtggtttttcccctccnccttcccttttttttgaccattcattcccccgcatttccctgtgattggcttcgctttttgccctttttttgccttccgtgccgcttaaatgtgccgcagccaatatttagaagaaaattttttgccttgtgatcactttggtcgttttggttctgttgggtggtgccgctgttgtgtacgttttggtggcgacaacaaccgcaaatccgtcgacgccgccacaacggacgcaacgacaaaaccacggcggaggggcggtgacgcaaacaccccgaggcggaagagtgcggcaaaaagcagcagccgcaccgattggccatcatttggggacaaatgccaacggcggcggagggagcgaaagaaaaggcgccgcaggggacggaccaccgcacttaacgcttaatcacaaaacacattaattaacaaaacgaacagcgcactttttcacattgccttttcacgacgcttcatttgctttgaatttaacccaccaccttttgctttttctagtcatttgtgtactgcgtgaacacattttaatatgcatatttaacataaacaaaccgttaaattccacgaaattttcgatttcgaaatttgtatgcatttttaataagatttttcaattccttttttagtttagttgataaattcatatcatttaatttctaaatgaatgactcatttaaattttgcctttgtcaaacgataaattttaaattaaaaagttagttgaattaaccactccaaaaaggcattgattttgcattgtttcaaaaacataacgattcttgttcactccatccgtttcagtagtgattgttgtcatgtcagtgatattcttcctctcatattccggttttttttgttttgtttatttgtaattttctgtttgcacttattctttgttgtatgatgttatgtatctacagtatttcctaaaatattatcccatgattttagggaggagtactagttcaggggagagtattattcaaaatttttatcacaaaaagataatttctgctcaaatttaaacaaaaatgagaactccaagtcccgaccaatttaattaaccccaatcccggaccaaacccccgccgtcgggttttcagccctaaatcaaaagctcttccaggaatggacagaaaaaaagttaaacgaattcaatttgaaaaaaacagaatttcgtgcagcaaatttgggatttttaaaacatttccgacctatatgtgaagagctagtatttgattttaggtaaaattttttaggagagtactaaaccaggagggagttctattttaggaaatacagtatcttacttttgtgtttgtcaaggctccttttttattactgtttctaaaagtctgtaaattgtcgtcgtcgtgcgttcatcgatttacccccttttcagcattcaaatagagattctattacagaatacgcgtcccattaactcttcgcgtcccaaaatttttttacgcatcccattattattggatttagcggaccggtgttagcagttggaaagttagcgggccgagacctaaaaatcgaattttttgattagaccgcctccccccgaagttaagggtctaaaataaaaaatccaaagggacgcaaaaaaacaacaggaagcgtagaaaaaaaccatgggacgcgtattctgtgcactttaacccacggtgtcccattcacacagctttcttaatttgcagaaaaagataatcatcctcatctgtctgctgattctcctcattgtggtcggccttatcgttttctccgcgttcaatccgttctgaaaaacttccaaacaaaagtgcagcatcggaagcaacttcatcagcagaaaataggacttacaatagttggagagggaaaacaacgttgaaatccgcctttttatacaaatatttttgcattttctggactctttcattcgcaaaatctcatattcccttcccccccctccgcttaattaatcggcctcaaaagagcaataaattttaaatttttgattgagtttttgatgcccttctaattgtaaattagccaaattccaattgtttttcccttatttgtgtcccttctttcttttgcacattctctttgaactcttccattttgttgttctgctagtgctctttttcactataattaacacaataaatgcttttaaccattcatttaattaccattcccccccccccttttccttttgtcatttttcgtccattttcttccgtccctttctctttttagaagaagttgtgcctgctcgccttcggactgaccattctgattgctctcatccttttcctaattattaaattcgggactgggtcatcgtaagctgtgaagttggagtttggaaattaaaccattcgtctggtcatgcacatacattttgatacgatcgctagaaaaacggctaagtccgtcagatgacatggcattggattgnngagtagagaatactancaaaaggngaattgngttttgcatttctctgnntgtaccgtgngagttttcgagtgtttacttttgcatgaaattccgactaaatgatatgcttaaaa

SEQ ID NO: 19740 - DNA, 2377 bp, Heterodera glycines
tttttggaaattttcgatttttttcggaaatagaaaaaattttgggcctaagcgggacatttgagtcccgggcccataactcgtcaggggtcggttttagccaaaaaatgccttagggcaaaattgtagaactttttaagctctatctaatggtatactatatgaagggaaattttcaaaaattttcgagctaggccccctagaaattttcaaaaattttttttgggttgaaaaagagggtgaaaaatatttttctggggtaaattagggtcctgagcacaaatatgatgtttattttaagtttcagattttttggaatattttaaaaattctttattttttggcaattttttggccctcgggattttggcttaatatttgaaaattcataacaaatcgaagggttgatcaattttacaggaataaagccttaaaaatagagaaaaatcaggataattttatggactttatttggaatttctatctaaaaaaggaaaaaagttattccagaatttctggaaattttcgatttttcagaaaaaaattcagaactcggttctataaaggtgtttttgaaattttaaatactgaaaaaatctgcaatttttttctctataatataaattttattttgcatttttatcacatttttaaaaaaagatacaaaaataaaagtgattttggggttcgggaccaaaggggggtgcacatggtttttaagtggaaaatttttttcaccaaaaatcctccaaaaatatgtctttaggggttatttgggccgctgatcacgaatacgtgatcagattttacttttgacatcgtcaagacctcagaatccctgtgtgattggggattctgaggcatcattttttgggggggggggggcgaagttcgaagccgggcggtgtacattatttttctttgtattttttgggttaattttcattacttttaataaatttaaatgtttggttttattaataataaatttttttagtttaattaaattattttttgatgaataatgattttcatttaaattatttattatatttaattaaagaatttcagctattattttaaaatttaattgtaaaatttttttcattcaatttaaataactatcaattattatacatttcataagggaggttcggacccgggcggtgtatattatttttaatgcattttttcgttatcttcaatgttttaaactaatctgaagatttgttgtagattattttaaaaaattttttacattaaagaatttaattatttattttttgaatttgtaaatttcatctaaaatttattaaataatcaatttttaattttcaacgttattttcaattaataaatggaggatttatttttaaatttaataaatttataattcatacaatttttaatttgaatttatgttgtacctcttctaatcactgttgtacctcttctaatcatagttgtacctcttctaatcactgatgtacctcttctaatcaccgttgtacctcttctgatcactgttgtagcacttttaatcaccattgtacctctcctaatcacagttgtacctcttttaatcacagttgtacctcttctgatcactgttgtacctcttctaatcactgttgtacctcttctaatcactgtttacctcttttagtcactgttttacctcttctaatcactgttgtaactcttctgatcactgttgtacctcttctaatcactgttgtacctcttctaatcactgttgcacctcttctaatcactgttgtacctcttctaatcactgttgtagcacttttaatcaccattgtacctctcctaatcacagttgtacctcttttaatcacagttatacctcttctgatcactgttgtacctcttctaatcactgttgtacctcttctaatcactgtttacctcttttagtcactgttttacctcttctaatcactgttgtaactcttctgatcactgttgtacctcttctaacacatcttccaacaatttttgtacctcgtctgagctcaacaacatttaaatacgggcgcgaagcgcccgtttggcctctacaaaattaaacaacgtgcgcgaagcgcccgtccaagcccaacaaaatttgaaaaacgggcgcgaagagcccgactgaggccgcgaagcggcctaacaagctaaaaaacgggcgcgaagcgcccgtcttgagcctcgatgtggactaaaaacccctaataattttttaaaaattcaaaaaaatcactccaaccaattcgatcaatttgaatcgcttcacagcctaggtagcgaagctcaagaagcgcgaagcgctttatcccaagcccagatccgacggttcacgcacccgctagtt

SEQ ID NO: 19741 - DNA, 1703 bp, Heterodera glycines
tattttatcaaataacaaatttatttataccattaacactttaaatgaaaaacgcgaacaaaaaaatcattaaataatgtataaaagtaaaagtaatttttctcataaaatcgtggaaagccattttcctttttcttttattaattattttatataataaaagatgggttataaataaggaagggatgcgagacaaatttcccattatctctccctttcctttcttttactctcttttcttttccattgcaatttactatctttttttcccactccctccttctcccacacacacgcacgcgtccaacagactgctgctgcacagcaacacgcgtctgttcactgtctgcccctcccatctgccgctgcccgcatagacagacagtcatacagtgcactatttcccaccatccctccctctaacctctacatcctaggaggagaaatcttttaccttctttttctgtgctatttcttttgccttcttcttcttcttaactatttattttcgtctcttttctttatattctcttctttttcaaaacaatttcttttcatctcttttcaaattcatttttaacgcaaaactcaaacaaaacgccacacaaattcaaacacggacacatacgggctgtatcgtttcgaatttcagaaattttttattaattattattttttaagttactaaagtgtgtgcttctccaatttgtgtcggtgtcttaaaacgcgaatgatgagtcagtcagcttattccttaaattgatgtgagaaaagcgataatttgtcttttaatgtgtgaccttcttccataaattaatcccttttgtgttattttattatccatccgtctctcttctgttcatattattatgatcagtagcatcattagagcagccaaatgttttactcatcagtctcatctctgatgcgattttcttaccgtcgtcccccaattaccgctcattataattattagttgtttttattgtactgtattaattaatttgttccgctgctgcaacaaatgctgatttgtgattgagtgacccattcattcattattattcattttgttcttttataaatcaaaagacaagctgtgtttatctaatgcatttttgatttttgttttgcatatccggttttatgataaatttatggaaattccctaataattttctctattaatttttttaagaaagtcggaaaaatcatttgaatttattatgtattttcacaaaaaggaaagcgggtttcgcaaaaaatgaattgacgattttaaaccgggatcaggatcccgtgcaaccctatgaaaaaagagattgcttactggactgaaattagtgtaccgaaaagtgaaataaaggcgctaattttcagttcaaaattgcaattttttacgagttcattctcattaaattttgtcccatcaattgaactccaatataaaaatgcctaattaatcgttaattagacaccaaattgacttttaaatgtttttaattttattgccacattttctagtgttatacatattttgctgtgttacctattttgggattctccgttctaaaatgaacgatcattgtgacttgctgaattatacttcctgttcttcagccgaccaattgcttagcattccctcccaacagcccgacccaccgaaacattccacgccataaagtgcgcaattaattaacaaa

SEQ ID NO: 19742 - DNA, 1246 bp, Heterodera glycines
tgccgggttaaacgcacaaaaaacaagttgtttttttgttcattttttctgtttttaggttttcgtatattttttgccatttttatgcatccgatttatttacatatacatatttgagaggttttttcttataagatacatttgatcactgatttgaattatgctcggtcgatcattctcaattcattcattccttctgcggctgatcactgtttttcttcgttttgtccatcactcattgtcagttcagatgacggcccttttgtgatgttttgtccggcttcttctgctggtggcggagacaatgggctaaattaagcaaaattttaattatttaaacaaaataaaatgccttttttaattgctcacccgatgcaattagtggtacgaaaaagccaaacgaagacactgttcaaattgttatcccaattttcatcattcttctgctgctgaaccgccgcggtctccccaataattttgcatcgtttcattatccatcggttgtcccatccctttgttttggccaatgtcagcttttcctttgtccattcgttcaccaattcgaatggcaccattggcattgacgacaattgcacataaaaatgaatttcgtaactgacggaagaaatggcattggcacggagaaattgctaaacaatttggaaacaaaaatcacaaaaatgttgggccacacctccttgaaattgttgatccaatcgaagttcgtttgtttgttgtaacctatgcaacgcaatcgcttgggttgtccatcttttctcggagagtgcaaccatttggacaatgcttggccagcagaaattgttgaatttggcacatcaaaatcatcaccaaacgcagcgggaaacaaaccacaggaatagattgaagtcaattggttgagatcggtgagaattgttggcgaaatgagacgacgcaaattgtccaaatgataaccatcgtaaaagcccaagtggcgaatgttttcagaaaaaatgggccaaatttcacgaacaaaaatatcccaaaccagctgctggccatccatgtctcgtgatgatggaatccacaaatctaaattggtgcctcttttgtcaaaaaatttggtgatttgaacgaagaaaagcgatgacggagtgatcgatgtaactgtgaaaatggaaggaaagcttttattgtcatagctctctgattttgatttacccatccgaagacgctaaaaaaggattttgctgggcaacggacggtc

SEQ ID NO: 19743 - DNA, 1628 bp, Heterodera glycines
aaacgaattttcaacacgaattaaaaaggagcggatggccaaaaaatcagaaatccaattaagggttttacctttaaacccaattttatgaaccttatataaagtaagctatggggaataacatcaaaagcttttacgaaaatcaatataaacacagtcaatattttttccattgtaaataccgtcaaaccaattttcaagagttaaaataagttgggtaacagtagaacgacctttaacaaacccaaattggtgtagggagattaggtcatgttttaaaaggaaactagtaattgccctgacaacaaatttttcaaaaattttacacagtgaacatgtgagggcaattggtctatagttggtgggacaacttttatccccttttttaaagagaggaattattatagattttttccaaaaggtcggtaattttccggtatcaaatgagattctgaaaagttcggtaacataaggcgcaaaagaatttattaacctgaaatttataccatccggtgaagtattatttttatttggtaaagatttaaggacccggccaacatcaacaacattaaattcaatatcattaattacaggagagtgacaaaaatttttgcaaaaatttcagctttttgatcaggagaaaaaataactgaattatcataatttaaagtgggaatcttttcttcacatttgatatattttcttaggtacgagaatagtttgttcttaccaccggatagttttttattttcacgtttaccaacaaagtttctggtttggatactaatatgaagggagatacttttatataggtgttcatatttggctttatctcgtttcattaatctgaatagtctggccttctctttaatagatgctaataagtgcgctggatatgatttagacttattcaaaaattttgtttcaggtatagtaatactcaaattttccaaaacaaagtcagtgaaaattttgtatttgtcctccatagtgtagaaaattttaatttcagtttaggttttaaaaaattaattttaaacaaaacagcggaatgatctgaatcaaaaagtccaccttcaacgctagcagcacttattaagtccttatttgtacataaaacaagatcaagaaaagattcacctctagttggctcagtaatgcaggatgtcaaattgtatttgttataaaaactataaaacaaatgtcccattttactgattgggactaaattttccttgttaatttttaaatccttagatccaaaattaaagtcaccgagaattatacaattctcggtaacataattatccaaaaaattaaaaagtgacttagctttactaaaactgacagaggggggcctataaattaaaataaaatttaaagattttgatttttgtagttgtaaaattaaaatttcacaaccgtatttagattcagaaagtttgataaaaaattgtagattatttttaaaaatgagggcaacacctccgccctttcggccagtcctattggtagaaagaatggtatatttttccaaaaatttagaatgaaaaggaaagttaacaccatccgaaccccatgtttcggttaaagacaaaaaatcgaaatttaaggattcgaaaacctgt

SEQ ID NO: 19744 - DNA, 857 bp, Heterodera glycines
  unsure (1)..(857): unsure at all n locations
cttcctttagtaacatttcaggtcgtaaaacgtattcgcgagaagtttacaagcctacagaatgaccaacagttcatgttgaagcgacagcgacacactgatcttcatgcaaaattgaacgccatcaaaaaggcactggaggagtggaacaaaagggaggaaaacgatctctattagtcgagtcatttgctctgtgatgtatgaaagaagtacatttccccccttttattatattatgggtacttcgaggtatgactgtcgctttgtgttttattccttttgttcgtctgaggacaggttgtagcgaaagaggaaattattaaaattaattacgtacctaataactttttggctacacctgttctaataattgacatagtattatggttagttcttctggcacaacactcattaaataacgacgagtatgccaatttcaattgtgtcttttcattctctcggtgttttatccaaaagatgttaattctcttactacaaatgtaatctaaaaaaggaatggtccgtatttttactttctttctcaaagggattatatgccttatattctcattattctaagtgttttttgatagcaaaagatgggaaagaaaaacaggctaaagcagttgctaggccgtttcaacgtggacacaaattgcgaattaagaggtgggcgaagagcgaaaaggacaaaaaatgtttttttaatggattttaagtcttgccttattctcttggtgacgctgtctgtgaaatgcttcttanagtcgatttaaccacgcaaacagtttggctatagcgaacgtccttnanntattggatgaggtgagcaaaaaaggattttaatgttttgcaaa

SEQ ID NO: 19745 - DNA, 1415 bp, Heterodera glycines
atcaaattttctgctggattgtccattacaaattgtccgggaaccttttaaatacctgtcgttgttgtttgaacaaagttggcttgcatttttatgttcattgattatgagccgactcggccttgtaaagtgcgtcgttggatctcgaaatacctattacatttacatgaatactgattgtgagtctggttctgtaaaaaaacgcttcttacaagcgttccatcattagacgaagatgaagcgccatttctttgcgacagagaagcatttcttctgctatttggcatctgaaccgaagatttctaaacggcaagaagtgagggtgtttcacggacaatccgagtcaccgtcaaagatcgtgacataatttcgtgtttgttggtctctgtttcggtcattcccgtgtcattgtcttgttcgtcttggtcaattacgagactgtccaaaagtgagcctggagttgatgagagagcagcttcgggagaaaagtcatcttcctcttttttgtccaataagtcactgccaagtgcaatcgttgaaaattgttgtggtatttttgatgagatgcattccaactcagcgcacgcattggtcgaaatgccacatttttcaaggtgctaaataataagattccaaaaaaggccttataaagagtaaatcgaatgttgtaattgttccctcacataaggaaggaaacgttgctaggaaactgattgtgagaggagggacagaataatccctcaaagcaaataatgacgaatggccaaatgcttttataggttcgtataactcaccgacaatgaaagactcgcagaataaacagttgcacattttgagggatcggagttctccaggacaacaagttggttgagccgaccatttttcacttccatgtcttaaacaaatgggtgagggaaaggaaagcaaatgctaagacaaaagaaatgcctagaaaatgaaatttcggattttcatttgctccatcttttgtttgtgaagaatcattcgaggctgagaaggggaaatgcagctgatgcgaaaggtcgaactgcgaaaccaattcaaagggttcccaacgaatcgaagccctgcaaaattcaaaaaccaatgaatgcattctgtcagtgtttctaaacttacacttgtctatgcgggcatacacacaaatataatccacaatggtcaaacaaaggcagctaacagcagaccaattgaaaagttaaatggcggttaaatcaaaataaaaagcgttttttcggactttttttgttcgctttttgcgaattcgtccgatggttggcgacgccgcgaactttgagccgttcagaggtggggggattctgctgatggaagagcacatttgtggagaaaagctaaaaagaaacaaacaataactgagaaaagcaaacggagga

SEQ ID NO: 19746 - DNA, 973 bp, Heterodera glycines
atggctctgtttttagtataaaattttatttttaaataaaaaaaaattttcgtgtggaaaatttaaactttttcatgaaatatttaaatattttcaaaaataaattaacaaaatcgcccggaaaatctgtaaaataccatattttattgataaataaatttatataaaattatttttgaaattttaatccaaaaaacgaatagattattaaaataaaatataaattgggatttaattgccaagaaatgagtgagtgccgtcgaataaacaaataaatgaatatttaatggcaccaaatgaatgccaacggcggcgggggatttttatattctccgcacaattttatggacagagcagacggaagagaagagaataaaaggggaaagaatcctccaaaagcgcagaaataataaatagaaaaatgcggcacaaaacgaagcgacgaaagggtaaaaatgggggaaaatcaacggaagggacgaaagagtcccaaattggaggggggggaggcaaagaatggcacggcacaatcagtgcaatttaagaaatattaagtcggagggggaatggcacaggggattaagctgcaggttgaaaaaggaaagctgagccaaattgggaacagaaatgaccaatcgaaaaatgtcgggacaaatgagtccagaaaatgccgtaagaaaaagtaaagggatggcaacattaaaatgataaattatgtcgccgaaattgtcgatgaaaaatattataaatgaatggctaatgagcaaaaattaggagggggggggggggggacgttttaaggagagcatggtcctccacagaatgccgaaatgtggacaatggccgaagacaaaaaaaaaaaataattaagcgtttccaatttggcagagctgggcctgatcaggacagggccataccggccaggccacagttggggcaggaaaagctgagaagtgcagtgccctaaggcaaa

SEQ ID NO: 19747 - DNA, 1619 bp, Heterodera glycines
aaggtggaaatcctaattaaaattatttttaattgccaattaaatttttggtaatcaatgactctgccactgatcactgattgattgatcagtctatctgtctgtcttctgtttgtttgctgtcccacctgaatgtccgactgtttttgccccaatgctgcaccgtcatgatcagcagcagcagtaacagttccgtcactgcacacattcactgtagcattgtcctccttgccgtccaccgaggacacctttattaggcaaaggaaaacaaaatcaaattcggcacaattttttggcatttcattcatcaaaaaacgccacgagggaaatgccatccattaaatgtggatatttggagcttttcatattcatttaatccaatattgggcacaaaagaacagaaaaagtggatggactctgatgagataaaataaataaaaataatttaattattaattaataaaaatttaatttgggacgccaccaaaaaaaaaagaaaagagaaaaaagcctgcctggaatctgctgctcatttggtgatttgctttttctaaggattttatgctttatcaatttgcagcaaaaaatctaaaaaaaataaataaaaaatgaaatttaaattaaaacattgaaatttaaattgaaattggaatttccgccggagaaatgataaaatgataaaataaaagcacaaaaatatgaagcaaaaatggataaaatgtgaagaaaaaacgaatggaataattgggggatggttcagaaattggagaaattggatgaattatttgctcaaaaagagagaatcgattaaaaataattgcaaataatcaattggcaaatttttgtttttaatgattttttgcgagaacattggcacttttagaattaattaaaataattagaaatggtcacgcctttcacattaattaattacctctttaattaccccgtggtttgaaaataatgcaacaaaaaccgctaatttacgttaaggtttcatttattaaaaattattgtattgctgggataatttgttggttaattgtctcatttggcaattagggctaagccattattatacccatgtaattaagatgtaaattaattaatttcgctcaattaataatttatttaaattaaaatgcttttcaaatgttagcacctcgaaaaattcgcatttttacagctgctgaaccgcggataaatttcagtgatgaactaattgtaagtgtaatgctaatgaggggaaggaagaaacagctgactacttaagaaaattagggggaaaagggggagaaaataaatgaaaaatcgagggaaatgttaattttttaaaattaaattataattttttaaaatgccaaaaatttaatggcaaaattatatttttgtggcaaaatatgactcttttttttgtcccgctgaaaagaaaaattggatttgctttccctggcggagaataattgcatttggcgggatgacttttgctcaagagtctcgactttgtcacggaaagcattcaaagaaaaaaagtgaacgaaatataatttattaaaattaaataaaaaattattttttacggcgaaaaaccctttcaaaagaagcggcttcttcaattg

SEQ ID NO: 19748 - DNA, 804 bp, Heterodera glycines
atatttagcctcgtttaaaatgactggtggggagaaatgcgagcaatttcatagaaacctcagaaaatttcgaggcaaaaaaaaccttgtgataaatcaaaatctgttattttgattttcaagctttacgctatgcctcaaaatgcccacttttaaaagtttcaccgaccttttctggttacagacttgacgctctcttatcagactttcttttcttttagaaatgaccccggcaagttcattagtgttgtgctttctgccctctcggcaatggtcaatctcgaggtggcacaaatcaacgtcctttctaaagtggatttgctaacggacaacgcgccttttcgtctggaatatttcgaggagctgcccaatttaacgcatctgaccgactgtcttaatgtatctttgaatttaaagtttaatgcatatctttttatttgtttttcaggatcatcctgccttaattcgttacaaaaaattgaatcagtccctctgcgaaatgatcgaaagttatgggatggtcaattttgtatcgctggacgtccaaaacaaagaccggatgggctttttgttgagattagcggacaatgcaaatgggtttaatctcgcaaatgttgaagatttccggaaagttgtaatgaatgattttagttgaaattgtttgctcttaaagataaaattatttttaactcaataattatgagatatttttgggaaacactttgtcagttggttgttttgctcggaattaaaattatttttaactcaataatatgagatatttttgggaaacactttgtcagt

SEQ ID NO: 19749 - DNA, 1751 bp, Heterodera glycines
gaaattggaaaatcaaaagaaattatgcttttcggactttttctcattcataatatgcaattaacctcagaaaaaggggaaggaaagcggaaaagagaaggggaagagagtgatgaaggtcagtggagagacgaggcaaagaaacgtgagaaagtccgtgaaaagattggggaaaatgagcaatttaaggccgaaggtgagcatacggtggaaagggtacggtgggacggaaagggtacggtaaaaaaagtgcaaaagaaacaaaaggggaaaccaagtgtatatgtacattcattgagctgaataaccaagaaacattggacattgtcaaccgtttgctcctctttagactgccctctttttgctttgccatttgccaattgccttttcatccaccgacattgacaacggcgttttgggtaattgctgaaattctgtccttttttggtctgttcacttattttgtgaaattctttttgtaaaggaactcccgaagttatttgtggtcgagattttgtccattttaaagtcgtcacaaaaaaggtaaaacaaaaggaaaacaattgaaatgaaagcaattaagcctttcggaggccgtgtttatgtcaaaggcgaattcggcaatccgaagtgcgtggagagtgcggggacgacgagggatggcacggaaagggagggagaagtcggcatcggacgggagggagtcgggaggaaaaacgcgccgaagacggaatttggtgggaagcggaggaatgcttaatgggccaagaataatcactccgttaaatccttcagatgctccggccaaaagagaaggtctgaaagagaagaacgaatactttggacaatccgagcataatccatggcgaccaatcggaacagtgccggaaggggaggaggaggagggggaagaagccgcgggcgaagggacggcacgcggaggagcgaacgcggcggaggaggcggcggacgaagagacactgcgacagctgctgctggtccgagccaaacaatggcaaacaaagtgccggaaggaatttaggagctgcagaagcgccacaaccacaacaccaacggctcccaactgacaatcccttcccatttgcccggcttcgcttccgctgaccaactgaagcgttggaggagtttcttgaagggaaagccgggactcgacgggcagggctttcgccgctacggcagccgactgagcccagacgcaaacggcgaatgcccattggtgaagaaaacaaaggccgaccaatggtgaatgaagtccccttctgaaggtgtgtcctccgtgtgaggaaatgaaggacaaagaaagtagtgggaaaggggcgggcggaggcgggagacagcggagattggccaaagagcacagtgccgagctgaaggtgcccttgggcgagtgcaacacgcgacgggacagaatggtaattgaggcagtgggaaacggctaattgccgggggtgcactaattgcaaacttacttaggccaaccccccggggatgcaagtcagcttcaccatcgtcgtcagcttccaccccaacttcatcacgcgtctgtcgtccgttctctccctttctgtcatttgtccactctttcaggcgttgaccgtgcttacaacatccaatgtgcttatcaggtgatgaaagctttactttttccgtgcctttgcttttaatgagtgccatcagcaggaacccgaaagaattctcagtgctcaaatcgatgtgaggtgagtttaagc

SEQ ID NO: 19750 - DNA, 1494 bp, Heterodera glycines
caatttaaaagtgaaattcatttcatttttcgaattgccatatgcctttctttctccctggccaacgaatgtttggccgaacatgccgagcccccgtcgttgttcatcatcacactgcccgtgccgcccttttcgctcggtgcgtttccgccgcctgcgctgcccccgccgggcaccgccgaaacggcgcccgtccgttgggcctccaaatcatcggacagcaccaaagaaagggacttcttcagaagtgggtcacctgaaagagctgaaggaataccaatacggttaacctcttactgtatattaatttcaaaaaagtcataaatagggttataaattgtatgattttgcatattttttctgcgcatatgctatgaagaaaggggctcaaaaatagcatttctacgttaaaattttttgatttggtgaaggtttttagtgcatataaaagcatattttgggggttttcgagaataaaagcatattttgccatttttgggcttttagagcatatttcggtcatttttagcaaattttcacaagaaaaatgcgaaaaaggcgaaaaatacacccctaaggatcgaccttttgtgaatttttaaaaaaatacacccttaaagatcggaaaatttttaattttctgtaagaacttaaggaaaaaattatttatatagaaaatgtaattttgttttagcatataataaaaattcaaaaatttagaaattcaatatttttgcaattgtctaaaaaatgctccttagtccttgttttggtgttttcaaagtcaattcttaatttatagacaatttttggcatttttttgagggttaaaagccattttgggtaatttttaaggcatattttagtgcatatttgggcatttttccggtttttagggcatatttgggggatttatcgtgcatattttatgcgcatatttggcattttttagtgcatacaacttcgaaccctagtcataaatcaattttttggttagtgtaaaattaatttgaatttaaaaatatgcaaatgttaatatgagatgatacgaattgaggaatggaaacccaattatataaatcattttaggattttgagttcatttacgggttaattgtgctatttgggaattcggcaaaatgcaaaataggaaaacagcataaactgaatccgacttctacaacattctgcaccaataattgattggaaataaacaattaaccattaagtattcgggaataaattaattaattagcgtgttccccgccgtgcttctcctttctgactttcgagtcgtcgctgttgcttcagccatcccagcccggccgggcccaaaatgcgctggaggatggcttgctcgcgctgcggattgttcggcatgaacatgccgcccattgctgttcaacattgcgatggtggcacattgtttgtgcccgggacggcccagcgcggacagcgagtcgggtctgcgcagcgtgccgttgcatgcgcgag

SEQ ID NO: 19751 - DNA, 813 bp, Heterodera glycines
  unsure (1)..(813): unsure at all n locations
gtcaattaatataaagttaattctgacgaaagcggcgttaagaacatgggaagtaaattgccaaaactaatttatggggagaaaaataaaacgaaattaaattaatttggggccaaaaatgtaatttttatgtgaagagataattcatttttagaatcgattttggaccaaaagtggcacagaatgcggcacaatgcctatcatttgaggagaaaattgcaaatgtaattggcctgtgccgtcaaaaaaaaatgaagaatggcatttttgtgatattaacgataattgcataactttgccttttaagagtcataaaaagagaatttgccaaaaatagacaaatgccaaaggcattgccaaaaagagaaaaatgcataaaaaagcgatttggacacaaagccaacgttcgctactttaaatattggccaaagaggcattagatcgaaggcagcttgcccgggtaggggacattaagttgtcatgagctgacagatgcaaaatggatggatttcccccccccccccgtggccaaatgttttgggaatggcgtatgccattgcctcgggggcgacccgacaagccggcgctgcccctccgcgctaattggcttttagcgccgacggctttgtgccgtgccaacgaagccattgggcaccatcgccctggggggggggaagacgaagaaatagaggaaaagggaagagccgggcaaaggtaaaaacggtggggagggggggagagaatggcaccaaaaagtgagtgagtggcgctatagtgggataataatgaatacttttcaacaanaaaataaca

SEQ ID NO: 19752 - DNA, 1183 bp, Heterodera glycines
aatattcttaattttcaaatgtgtgaggatgaatacaaaacctttatagatttagcttattaaaattgaaaataaaataaaacaatgcaaggataaacttcaaaattatataattgaaaatagaagaacttgtgaaaaaggaaaataaaaataatttaaaacagagtaataatttttatgattactagttaggatacgattttgtgctctaaaatctatcaaaataatgatgctttacaaaaattcttgtccaaaaaataaagaaataaattttggagatgaatcttaatgctcaattttctgaaaattcaattgtctttggaggtgtatttttcgttttataaattttgcggaataagtttttggcttaatgccaaaataggtaaaaaaagattttcctttttttaggaaaataagtataaaaactcaaaaagtaacttaacaaccacaaaaactattttgtgcatttcagaccataggaagttcaagaaaaccaggtaaaaactataaaaatcgtatccctagtatttgggacgaatagaaacagaaggttccgagttagaggccgatgaattagaaaaccgaacagcttgatcagatcgcggggttttgcgacgacaaagcagataaacaacaataagcccaaacaacgcaaggaaaccaactccgatacccgaaacaacgatcagaatggatagtgattgtgattcgccacccgattgtcctaacaaattgtcaaatgcgacaaaaattaacccagaccccacaatctctgctccttttttacgagggcttttccgattgatgagccgcctccttttgccccgcgtttcattcttttggccgctacatccgtttgttcatgcttcttttcttttggtccaccatccatttccggttcttggttctcagttttatatattttttaatataaattttatttacctggcatttgcttgtacggttcaggtttagaaccgcccgatttaacggcgcgatgctgtcgcagaacagcgcagttcaatgcgctgatgtgcgcgatcagcagactgaaatattgacaaagtcaatgattgggcagggttcaacacccccccccccccccccaccctctacaattactatacataagtgccaaattgttcatgttgtcgtcaagagtagggcccgcttgtttggatga

SEQ ID NO: 19753 - DNA, 987 bp, Heterodera glycines
  unsure (1)..(987): unsure at all n locations
ttgtttctataatttattgttttttntaatggttacttttttaccaaagtttgatcattctatgggaaaaagatacttttttcttacagaattgatcaaagttgatttgttttggaaaagataattatttgattaaaaaaatattttatttaccgagtttttaccgtttattttttcaacaataataatttttattacaaagttaattaacctttgtagaatttttttaccatttctataaatatttacaaaaattcaaaaactgattaaaaattatttattgggttgaaaataatgatggaaaaagtacaaaagttaaaaattcaagtttccacgagagactttattctctgttttatttttttattttttacattcatttatccccttattttttacttaattttatttatttttaaactcattttttcttgcagtaatcgtagagcatttctgcgacttcattcacatcggttttttaaaaagtgatgtaatttatatttattttcgagttttatggatttcaaaattatcattttttaatgttctggttttgacacgttaaaatctgagattgtttagataattaattaatttaaaaatatttagaatatggtaattgtttttattttaaattatttttgcctcaataattttgttaattttactaaactatgtatatttatcatttttagtggcagctctaaaaaacataatgaaaactgttaaagttgctatttatatttagctaatatgttattatttataataaattaatttaaagcattttttcttattcttttttctttaaaattgatttaccctcgaatcttcgaaaaatacttttattaaaatattgttattacaaacagattagtgatttttaaaagtgcaaattgataaaattttttgaaagttagcaagctaataattcaattcaagggatatcatatgaaatttgtctaacgccacagcatctactgataa

SEQ ID NO: 19754 - DNA, 2564 bp, Heterodera glycines
  unsure (1)..(2564): unsure at all n locations
aatgtgctcatttttgaacaaaatatgtcaaagcttttctggggagtttgccccctgttcnccgatttttaaaaaaaagctccgcaaaaaatagtttgaaaaaaagttatcataaaaaaattngagcgtttctattcaatttcgttaaattttttggctctaaattctgagggggcatttcgttagagtaactttctgacnccgccccttgtccatgtattttgcctggtgctgcttgacctggttgatcagtcgaacaaagcatcgatcaactccgttcgtcatcggtctcctccgctgctgctgttgttgctgctccttcgtcgcatttattgtcattcgctgttcgtccagcgaagagcgacggcaccactcaagcaattgcagcaaaggcatcagaatgggcttgtggacgagcagactttgagggcactgactgctggtcaacatgtactcgtacagacggatcaacatcatctgacaaaatgggggagggatagcaaagggaatcctcaaaaaatattggggggggggaacagtgggtaattctggcccaaaatttgcggattcaggtgacctcattgccgttttaatcaaatcgaaattgtataaaccccaaaaaatcaagaatgtttaaagcgtttgttctgtgcttctcacctgacatttgggccgcgcattggacggaactttggtcgcccaccgatgtacttttagaagaatttcctcgttgaaaaattggtccaaaatgggcccaattgacggttccgactgtgaattgacctccatcaccaacaaatggcaaatggtggacagcaattcgcagacctcaagaaattataatggacaatccatttttttgaagcctcaaactttgtccaatgaatcgcgtccaaattgcccggcggttatttccagcaattcctccaatctgagaacgcaaatgactattagtctttaaaatattttttcaaaggaggtcaaattctgctgacgaatctcattgtccgctgagttatctatcaaaattttcagcgcctaatggaaccaccgactcttactcttttttaaaaactaattttttgaagaattttagtttttttaaacagaaaaatcccttaaaataaccttgtccaacttttctccaactgcgtctcccatgcgcttgggtcagaggcgaattccacagaaagcacaaattcggggaggaaattcgccatggctccgtcataacttaaggcaacaatgagcaattatttaattagtattatgtaaatgtaacaaaatgggtgatgaagcaaccaatttaaggcattaaaaataattaattctttatgatttaccccgtgcctaattcggcagtgcccgccaattcgtctcggccaaatccgattggggagggggaggaagcactgttagaagagccctcggcatcagatgaggcggaaactgaacgttcttgggaggaagtgaggcgttggaacagtcttctcatcaaatgaccgaaaatttaaaaaattgggaaatgaaagagggaaaaggaagaaaaaagaataatagaagagagtaaaaagggcaatacaaaatgatgtattctcggtgccatggaaaaaataataatttttaaccattttcgctaagtttggcattagggaccaaattttgcaaaggaaaaaacatggaattattgggatacgttaggcatcgccgagaaaattaaggggtcaaatttattaaatttggaccgagttaagagcccgggactgaggtgaccaaatggctttggatcgaaccgtcaaaagcttaaaatcagggctcctagatctgaggttttatcctcattttgtggttttttgataggtcaatgaggatttcttttttgaaataagcatttgaggatttttgtggtttttaagttgaggatttttgaaaattttggggaaaattatcagaattgttaaattttatgattcattttgataaattggcataatgttttgctaaacatttaattggttttttaatagagttcaaaacgaaagtttcaccctaattttccaaaaaattttgctaaatttaaagtttttccgagatccacaaaattaggtgcaaattttgttttattcagagaacaatggtccaaggttgatgattttaaccacattaatatgtatttgtttaaaatgggttaatatttattaaaatatctctttgtaactttattttattaatatcgagcattcgctgtgcattaaattcttaaaaagtccatttgtaattgcttcattgttgttgttgttgctgttggtggccattgtttgtcgttgtgtaagggccgatgtcacgttcattgttaaagcggaccatcttaattaagtcccaatttcaacaatcattaattttaaatttagtataaagcataaacataaaattagaaaagaaaactcgctctaaaattcgataaaattaatttttgttttttaaagaaaagaagttaaaacaaaatttatgaaattatttgtttaaacatcatttatcagttatttttccgctcttttttactt

SEQ ID NO: 19755 - DNA, 904 bp, Heterodera glycines
tttcgtttaaatatattttttttcgttttttagggcatccaaattatggcaaattatcaacatgccagcaccggacagctttcattggtcagtaaattgaactaggtaattgactggaggggctgtcttttttggagtttgtgtgatttttcgtgaatttggcacaaaaatttaaaaacaaatgcacttgcaaatggaattgaacttttcaactccaaaacgagaatttaaccgaacgagccacgcgattctgttattgagaaaatatgcaactcaacaaaattatttgaaaattttgctcccttgaagaaaattcttttctttccaatttatgtcaatttattgagaacataacatatagatctccgtctccatgcaattcggcggttgtgttgcgcgtgtgttcacttccgtccaggagactgccggcgattggctgatcattgcgccgtttgtgctctcttcgctgcttaacggaatgatttttttgcaaattcttttatatgccaaaaagaaaaaaacggattaaaaaattgttttatgagtgaaaaatgtttgtttaaccgaggaaataaattttttttgcaattctaaattacctatttatgtttttatttgcaatacataccgtatttactgaattagacgactcctgctgagggctctattttcaattttttccatcggtccatatcaaatttttctcctatttttaaatttttgattaaattctattaaagaatttgtctttttagcctatttttgttaaataatacattcttaattgacaaactatcttggtatatacaacaggacaaaactgaatagtttaaggtggtggaccaccggtaacacaatttgaagaattttataaaaattgcttacatattagaaaaaatttatt

SEQ ID NO: 19756 - DNA, 796 bp, Heterodera glycines
gaagggcgaggggggagaagacgatcagcgtcgggatcattcgagggagtgatcagaggaagatgatccctcccccccccttcggatcatcatcttcatcatcactcagcagaaaagtcccaaaattccctaaaactgtcagctggcgccaaaggcaaaagccgaagagcgccttctactttctctcctcatcaccccctccccccccctttccgtcccccaggctttgctcctcataaatcctcctgcaaaatgtttatctccgcagggacaaaaaattggatttactattgccatctccgttggactttttggcacacatttccggcacttggccagcagagaaaaataaacaattttgacaatccaaaaaagggagggactgatgagggggagagaagaatgaagcagcagattttaggagagattattagcagcagggtgacaaaaaatgaagaatagaaaaatgagaggagaaaagttttaaaatgggggcggacatttaaaaaaaacatttgcattaatttccctttgtcactctccgccgatgattttcattctttgaaccgacgaatgaatgaacggaagcaaatggaaaatggaagaaatgatggacgaaacaaattgagggggggggggggcttttgagaaagggacaagtggagctaaaaacaaccaaatgagcaaaagagggggtgaagggggatgggaatgttgcggagagaggacatctgccggaggaggacaatggccgagtgaatagcgaacgcattcgtctgcccccccccctccctcg

SEQ ID NO: 19757 - DNA, 1661 bp, Heterodera glycines
  unsure (1)..(1661): unsure at all n locations
aagggaaatagagaaaggaaatgagagaaaaaatggaaaagttaaaagaaaaaaagagagaaagggtaagagaaaagcgaaaagggaaagaaaaaaggaaaaatagccaaatgcgcagataaattaaaaaatattgtttaatttagaacaatatctgaaagaatcaaatgatttcgattgaattttaatttttaatctgtaaaatggttaggtatatgtacatgttccaactttttaacctttccctccccagcagcagcagcaggtgtctcaagtctcaattggtccgattggtttttcaaaagtctttctctcaccacagtccgatcacggaccatacccaaaaccttaatttctatacaacattctcatttatttgtaaggtcacctaacatattcacggcatggaaatggtggaattttgatcgaattagaaccccaaattggggagggaagggaagggagagagtgatcggtggtgcggaaaggggaggaggaaaaaagagaaaaaagagagagagagagagggaaagagagggaaagagagaaaaaagagagagagagaggaaaagagagggaaagagaggaaggtcaataaaatgccaccacaaatgttgaagtacctattcacaaaaaaggaataaaagccaaaaacaaagataaaatttgactcgttaaaatgggcaaattgaaaaggaaagttgcgtcgtcggcggaagaaagtgtttttctttgtttttgatcctttgatcatccgtccctcctcccccactgatcatcccccttttgtatgtctcccatttgtccccccccccaaattcctacccattgtttgtgttgttcgtttcttgcgctcgctgctccaatggaccaatgattctcttctgtttgcactcgctcaatcactttttgtagtcattttgtcaatacaaatgaccaatttaatgtttgatcaatttgctaaaataaatgaaaaggtaaaaaacaaaaacaaaaatataattagtggtgccattgttgtaggatttgtccatgctaatgccttttttgctgctttaccgccataactatccatccatcagcaagaaatgagtaatgaggagctaatgggagaggagggaaagggaaagggcaacggacggagggacaaaagcaaaggaagaagcagtggacagcggaaagaggaggacgggactctcgagggcataacaaatgtccgtcgccggaaggagcggcgggggcaaataaataatgatgccgcccccacccccgccctttccccctctcttctctctgtctcatccaatctctgcctctttcccccctctcatccaaaatctctcttctgctgctggttgtccgtattatttattgactattaatttggctcccgagaagtgacattgccataattcactcgagagcgccctttcatttaatttatttctgtagttttttaacgtaacaaatacatattgggcgccgatgagcatataaaaaaaagttcatagtaaagacaaaaatttttcttattttatttaaaaaatttcgtcgttgcatattctccgagataaatttaaaaaataaaaaattaattgaaattgtcaaaatttgcaataaaatattatttcttatgcgagcagctggcataanntttggaa

SEQ ID NO: 19758 - DNA, 1731 bp, Heterodera glycines
  unsure (1)..(1731): unsure at all n locations
ccccttccctaaccctaaatccccttgggaaaagaaaaaatttcctttgtaaaaaaaagggcttttttttttcttccgattttttttttcattaattgaacaaaagattcgtaataaacttgaaagtttcaaaaaaagtccggagaagcgttatttgtcagacatttcatacgcaactgaggaggccgtgaattgggagtggaactcgttgaaccgaatgccgtaacaacctctgacagcgtgacnnaacagaatttgaaagaggctgaactctcaacagtgacctttgagcgcggaaaaaccaattatgggaccgattgcctatggttgaacggtatgtttaagcgccgcaaaaaataataaaaaataaatttccaaactattcaggatttcgttttacacaccactcaggaaatcgctggagatgcacaaatcgcagttgctcagcatatataaacatcacaaacaacggcgaaaccggagctagtggaaccttgagtcaaaaagaacacaaccacctcccagcacctcagaaacaacaagtttgtataaatttaaaaccaaataattaatgctttgttaaaggcagagtcaaggcgacagaaaatcaaagaaagtgtcctggccgagccgtgtctgaagcccacacgacttttggctaaagtgaggcgatcagcaacggatgaagcctttgttgccatgagctccaacaatgcgttgactgaaatgatgcggcgtgagaagaaaaagttgctgggaaacgtcgacgtgcaggacccactggcctttgtcattccagcaacgttacgcgaaaaacgtggcgaagacatcgtcttgtatgacagtcgcaatgtcaggcaaggcgaaaaggacgttgtccttattttcggcagtgttaaggtacattttttggctataaaattctgtttgttattggcattcctttagactctggacattttgcgccaatgtggcacgtggcacctcgatggaactttcaaatgtgctccagcgatgtgggagcagtgcttcgtcattggtgcttcagtgcatcagaggatgtgcatcagcatgtggtgtctcctgcctggaaaacagcgacgctactacgaagaagcactgaattttgtccgtgaacgcacctcaccagaggtcccaggcaaaggttaactcttcgatttacggaaaaggaataaattgaaaaattttatttttagttctttgtgactttgaaaaagccgaaatggcggccgtccgcgcggttttccccacggcactgattaagtgctgcatgttccactacgggcaaagcctgtacaggaacttcaaacgacttggtctcgtgcatttgtacggcgagaagacagaatatggtgaggcagttcgcaacacattcaggtaaaaaattaaatttagatttaaatcataattttttccagaagggttctctctttgccgcttttgcctcccgacattatcagaagagctttctcaattatcgtggcgtcttctcctcctggaatgccagtgttcttcctttacttctctcgaacatacatcggcttgacacagcgccagttgttggatggtgttaacgcatttggagataatccactcaatttttcacccattggcaatcattgtttgtttaaatttatgcattttatttccaaaaatttaataattagctgcactctggacaacaatttcgaccatcaattcggaacacag

SEQ ID NO: 19759 - DNA, 1924 bp, Heterodera glycines
  unsure (1)..(1924): unsure at all n locations
ccccctccctttttttaattttaaataaaatatttttggttttttcttccggtatggttcggtttccctgcacactctcgtagttcacttggtcaagagtacacctcgacaatgggcggactgttattcgaggtaactgcaggcatagggcccccgctcagtggcgggtctcattcgccgtgcaataccaaatcgctggaggcccatctgttgaattaatttattgaataaatttaataaagcatgagaaaataatgaaaaacgccaaattataaaaataatagcaaattcaatattcaattaagtaaatgagaaagggatttaacagctcaaatggactgagatagacttgagaccgagaagaaaaaatgatcagatgaattgtcggtatcgcattcccagaatattttttcataaaaatggcctctcattatgacagaggggaaacgaccagaaatactttaacaaaacggtacccccccccacccccgcccggaatttgaaaacatttcgaattttacaatatttacctggcacaactgtacgtaatgctgaacacctgctcactgaagaaaagttagaattttttttattatggattaattttctaattaaatgcaatcaaaattaattgttttatttgatcgcaccgacacggctgtctgcacacgcagtcgggctgagtggcagaccgcgcagccgctgtgcatttcacgacggagacactctcctgcaaatttgaatttaaatgcattgttagtaattaattaattatttttgctaaaaaaactttattgctggtcctaaaatgataattgtttctttaaaacggaatctttttcagctgatttttcattatttcaagcaattctcatttacaattttctaaaaaatatagaatttttatgcgtatgaattccatttttgtgttatcatttaaataatttcttgaagattaacactaactcagccgcgggtcgcccacgggacaattgctgaagttcaaatagcgaggaaaacgcgggtcgccacatctgttgatttgccaaaaatagaatatttgcagattaattatccttattattattaatttattattataaattttattcctagtaattaatatttattaattattatttcatttattataatctgtttcccgactgttcttcttacccgcactttctgaccagcatccgttggatgcacgaacgttggcaccccttcagcagaaggggattttcaataattaaattcgctaatttaggttatggatttgtcacatttggataacttttgattattacaggattttgcaagattttacctcagtggaatattccttgtcccgataaatatattcatcagttttgccttgctcaacacattcgccgtatggacttggcaaccgattaacacatcttcaaaattattatatatttttatttaatttttaaatcattaagctaatgttttcttttcaaaataattaaatgtttttttattactcacttcaaacggatgccaaatgagctaacgaagccagttggagcactaaaaataatttatttttaatttttttgaaaataagcaaattcattcctatggccatgtgtgtccggaaagggctgttcttcaggactaaaaacaagaattgaaatcaaaaagtacagtacgccacgcattgacttatgcacagtaatgcgaacaccggcagcttctgtcgagggcaaatagtcgctgacattgacaaaaacttggaaacggaggcctaaatatttgcaaagatttcaaatttcttaaatggcatttttcattttgttttttaattgaaacgcatttttaccataatttggcccggctcgttcactcaacacatttttgtcccgggtnggcattgaatgtgaaacagttgccataa

SEQ ID NO: 19760 - DNA, 2389 bp, Heterodera glycines
  unsure (1)..(2389): unsure at all n locations
ctctagagtatttttgtttaaaaggggcgaagnacctgaatatgccacatttagagaatgaaaaagcccaagaaagaacaataatccacattataaagttgcctcatccgaatcagccatagacggaaattatttcagtttagctcagcattacaaacgttttgaagcaattaattattcagctccacacaaaaattatcgtaaaaactctccaataatttcaataaaaatacataaaataaattcatggcttaaaagcgtcaccacctttactatgtgttgctacaccatttctcgcgactcatgtaaattcattatttttctttctatgtctcttctgtgtccatgcttctcggcccctggtcagtcgggcgtacgacagtcaatgaaaggcttctcccccccccccccccccgccccattcccctcacagctgacagatgtgctgctaatgctaatagggaaaaatgaaatggacgcgtaggcgaaaagaatcattcatcagcagctattcattctgggtgggacaagtaagggaagaaacgaaggaggcaaagccgaattgagaggtcaaaggcaggaacattagtagaaaattgggaaaaaataattaacacaaatgtgcaaattattccctagctgttggagttaattactgtttaaattttaaattaacaagtgttcatcgcctaatagataaaaattcattaaataaagaaaattatttattcacacttttattcaataaataaagttatctatctcggaaatttattcaaatgtttcccaattgtttttacgagtgttgataaaagatgaattagatggaagatttaaagcggaagaagtcgatgataacacaccaaaagaattatgatcagatacaggaagtgggtcaaattgactaagattaggactagaaaaaatattacttgtaattgtcgaattattttgatcggataaatcaatgagatcaccgacagaatgagcactttctatggatggtggagaaacagaacgcgttttggaagagggagaaaatttatccaggttaaattgtgaggtgtcaatcgtcagagggtccaatttctgtttgtacttcgaccgagaacgggcaacagacgaactcagccttctctttttgactgaagaaatggcatcctcttttcgtcttacgctcagtttgtttctgacctgaacttttttagatttttgtttaacacttataaaatttcaacacactgataacgaatggatttgatccttcaaagcaccaattacatcagttgcatttcctttcacctatgaagtaagaaaactttttttattagattatttgacacttttccaataaataagaactggtgcttctatataagaacccacgaattggtttttatcagggaaataaaggttttgtcttgaagaggttctcgtatggaaaatcaaatatttaattacttacagaagacactgcttgttgcagcatatccgtagtcttgttttgaaaaaagatataatttcacaaataaaatatttaagttaccgtaacagcaccgttcttgtccaattggcctctaactcccatcgattgagcctctctttcaaattcgtcaatggttgtcctattctcattcaattccgacaatttttcatcaataaatctttcgaaatattgcaccccatcttttccgatcaaggaagacagaaattgccggaggctaggacgttgtttttcagtaaacaatttcctgtcccagctgtaagaaccatgcgggtctattaaaagcaattgaaaatgatcaaactcaaactgatcagacatacccacaacaagaccagatacgtagttgccaaaaatcaacgcgttcgtctgcaaaaaggcccttgccagtgaatcagaaataaaaatatcgctggagaattttaaacgattccgcaaaaaattgaaagcttctaacggcagtttgtcatcatatggagaagtaagaagcttctcatccacgtccattataacaacatcccccaattccgccttgttctgagtttggaatgtttcttttggaattccgattaaatacggcatcggagccctaaaagacagaatataattaattcaaataaaaaacaattacattagcatatcagttaatttatgtggtagaatcggaataaacaaactttgcctaaaaatttaaatatttcaataaaaaaaatcaaacactaaccaaataaatggaaaaaacagttttgaaatgccgaagacgcaagccgaaagttgactaagtttggaagttgtaaaaatgatccttctttccttgagtattcttaaatttaaaggtagacaaaaaattttttaaacagaaatacgatgcnngtaaagctgtat

SEQ ID NO: 19761 - DNA, 1662 bp, Heterodera glycines
ctcggaatttttgaaaaattttacagaaattttaaaatatttcataagttaactttaaagttataaatcaaaattactaaatataaatgtatttatgtattaaaaaattaatattaaaaattaataatcaaattcaacaattgataaattggactgcaaaaaaatcaatttcctaacattgtctcctttaatccggtttcgcaaatccgtacaaatgagcccggctttagaaaacaatctttcgctttcaactgatccacaaggtgcgctcagaaattttcgggcaacacgacaaagaagaggccattttccatgttcttctttcaacttccagtaatagaaaatacaaacagaaattaaaaacagaaattaaaaattctcaagaaaattaagtttttttgagtccggcggtgccgataggtgccgtcggaaaaaaattgaaaatttctatgcaatttattaacataaattgtacaaaaattgctaattttttgaaaaaaaaactcaaaaaaattccgaaaaattccgacttttcatcaaaaatttcggaagtcggaagtcggaattccgaggccccaaaaattttcggaagtcggaagtcggaattccgaccccaaaaatgtcggaagtcggaactcggaagtcggaattccgtgccatccctgacgcacataagctattacaccagcaatttaaaaaaggcgaaaaagcggcgcctgcgtttggagaaagaaggaggaagacccaattttggtcccccgacccaacctgcaccaaaaaaagcgcatgttgtgtatcttttggtcagtacatggtccactgtactgggaactgctggcacctggcactattttggacagtaatagatacataaaccaactgcgggcggtggatatcgcttaccgcatccggcgccagcagggccaatttgacggtcccctactctttcaccatgacaatgctccgccacaccgttctcatttgacaacccagtacatttcccagacattgaattggaatgagttgccccacccgccttatagccctgacctagccccctcggattaccacctttttctttctctcaaaaactttttacggggtaggcgcttcactgaagacgccgaggtcgaggaggcggtggggcagtacctgacctcaaagatcggcacagattttttccgtcgcggcattaggaaacttccttctcgttggagaaaggttgttagggtccagggaaactattttgttgagtgatattgtatttatagttgttatgatggttatttttgatattttatttataaatttttttttctaaaaaagcgcccttttttatgcaacgacctagttaatgacagatgggatggacctctgattcctcaagtttttcgactaatgtacattaatttcattatttgggtggttttggttaggacctcgtcccacgacggtctccgtccgtcagctgtccggtgcaaatagtcaatgcccgccaaatggaagccgtccacgccgtggccaagccaaaaactgagcgctgcccgcacggcactcgaaacatttgcgttttgccggttcggtaccggcaaatcggcacgattggccacgtggaaatactaaaaaaggaattaatttaatattcgagcagagaagcggtag

SEQ ID NO: 19762 - DNA, 1596 bp, Heterodera glycines
  unsure (1)..(1596): unsure at all n locations
tccagtttttggacctggaagccaaacttcattttttcgcactgattaaccaaatgaaataaacccgcccaggagtttctcagaagaaatgattgttgggggtttatcggtaatcaaaaggaaacatattcccgattccactcccccgttgctactctgttatgcttggcagggaggacggtggttgggagcaaattctgcttaaccaaacagacagaatcacgccgcctattgagtgtttggtagaaccaagaaattcaaacgaatttttgagtggtgatgaccaggaagggcctatcccgtgttttttggaaccaaaaatcatgatcggagttcgtgaattctggcgttttattctggatcgtagggaaattcgaccgggaatttttgaaatccagacagttttcggaacgatttatgggggcgaagaaatggcaattgcctcgaaccccgggaattcgctaacctgcacaatcattcaatcagcacacattcagccggagtcagacgtcggccgcttctgggcattagagtcaattggcataactgactgtccaaaattgaatgatgatgaaaaggcactgaaaaaatttaatgagtcagtttctgctgaccctgaggggcgttatgaggtagctctcccatggaaggaggagggagagtacccggcggaaaatttcagattagcattttcaagactttctgcacttatacggagactgaaggaatcgccacaactttttagcggttgtaacgacattatacaggaatatttagagaaaggaataattgaaaaggcccatcgcgctaaaagtccgcaacatttcttgccccaccatacagtgatgggcaaaaagcttcgaatcgtttttgatgcttcatcccacgaaaagggtgcccaatcattaaacgaaatgttattttcggggccaaatctctatcctgatttagccggaaaactcattcagtttagggccacaaaataccctatttgggccgacatagaaaaggcttttctgatggtaagtctgaaagaatcggaccgtgaattttcaaaatttttgtgggtaaaaaatatatttgcaccactttctggggaaaatctcctcgttttccgctttcggaggataacattcggaatagtgtcttgcccttttctattggcagcgacgctccaacatcatttggaagcatttcccagtgagttagcagaggaaatccggtaaaaatctctgctttacgtcgataaccttctgcttttggctgattcgccggaggaagcatgcagaaaggcagccgaagcacagaaaattttcgccgcggctaaaatgcgtctgtgcgaattcattgcggctgatccgtcaagtttggacgaaatacctgaaaatgatcgcctccgaaatgaggcaccaacggtcctcggactaaaatggactatttgtgaggacaatttgtctttgacttttcctacggttcctagtccggatggtttaacccggagaacggtcctaaaaacagttgcgtcattttttgaccccttagggttatgttcgccttgtttggttggggcgaaattgntttttccaaaaannttat

SEQ ID NO: 19763 - DNA, 1730 bp, Heterodera glycines
ctgccgtattgtggtggacgcgtcctccgcggatggtaaccgcgtgtgttgcgagtaactgttttctgtctgtgtctgcgactctctcgtgcgaatttgaatgccaggtgggcccaagtttgggcacagcatcatcagttggacttcttcagaggcagaaccgcgtcgccattgttcactgacgttgtactgctcgtgcaacggctcctttacgcgtgaatgtgcgggcacaatttcgcgcgcacatcgaatgcaccggcgggcgggcgcaggggacgcttctcgttgtttttgtagccgaatttcatgggagaattgcgcttggccggttgcttgtgtgtgaagaatgatgtggccgccgaacaaagcaatccaattcaccaactcggcaagttgcggcgcttcccgtcgtgcccattggcagtgcacgcgctgctgctcctcggtgctttcgcgtgaccgcaacggcccgtggcttatcgtgttcttcagccaaacagtgagcggagtggcacgttccgcttcagcttgccgttgcaacattgcgtgcatgacctgttcaacgccctcggattggcctgtgcgcaactgttgccttgttgccttattcgctgttttgatggtacagaagctgtgtgagacgcgttcgtgtgaggactccaactcgcgcacgagttcaagctgttcatcgcccgaagcatcggtgcgcattctgatctctcctccccagcgtgccaactgccgcgtcagttccaccgcgtgcaaagagacaggccgatcgtatcgcaggtaaatgccttggtgcacatcgcctgcctcacggcaacggtatttctgcgcaggtaatgcgtgcgcaatccatcggatcaattcgactcgctgattctgttctggtcgatgtctcgtttcgatcacaatcgcatgctcttccgttgctgttcttgtgcgcagtacaggcagcggtgtactcagctcgttgggtatgcgcacagtgaacgcgtggtgcgcgaatgcggtgtctcgttcaagctcgcgggacactgaaaaatgcatgtcctccgcagcatcggcatccaaacgagcgtcgttgccaaatgaagcaatgtcaactgttgccctggcatgcatgtccaagcccaactctctctttgccttcagctcgtaattgaccgtctgctgttcatcaccagcttctcgcatttttgcgtgcattggcattcctctttgtgcacaaatttgcatcatctccgcattccgagcatccgcctgacgctgcagattgagaatcagcgacacattctcctgcgtgctttccaacaagcgcattgatgcaaaaccgatgcgttgcttgtgcggtacacgtacgcgatgcttttcggtgctcgcgagtttgctgaaatgcatggtcagcatgcgatgcgcttcttttggtgcctccgtgttaagcacataattgccaccgaggcgcgcatagttgcgagtgaggtcgacctcggctggcacaacctcatgcatgtacattgacgacaaatgcgcttgtacgtctaccgcctccgtgcaacgcttcgccatcctctcgccctcgcgtcccacccacactgttcgttgcgcgtcttcgtgttcagcctctcgcgtgtacttctcggtcacggtctcttgctcatcccccgcacttttggtgcgcaattgcagcggtaagtcctcaaagttttctcgcaatccccatctga

SEQ ID NO: 19764 - DNA, 1399 bp, Heterodera glycines
tgcaaaaaagttgcctaaaattggaaaagcatgtcattaaatgtgtgaattttccaaaatttcctcatctttatccttccttttgcacaattgtaatccaaaaacatttgaagattttcaagcgtaaaaagctttcgatcgtcagccaaacattgccaaggattttttcattttgaaaaatcgattcttatgggtgcatttttgttttttattgcatttttcataataattttttgttgaaaagcagaaacttttttaaatttcacaagtcaaaatagttgataaaaagtcgctctaaatcaaaaagtgatcgaagaaaatatgttttttgcgcttatctcaccatatggctagacttcaattcaaggggtaaaccaaaaacacgtttaatggttctataatggcgtataattaatagaaatcatcattttttggcgtaaaaccgacgatttcatggcgaaatgcaatttttttgtcgaaaaaatggacaaaattgggcaattttagccttttaaaagggtcaaacccatacaaatttggtatcattcgaaagctcttgacttgttaagtctaaaaaccaaagaaaaaagtcgaactgacgccatctaagcaccgggacaactgagtcccagtgaaaatggatatttcagtaccgaaaaataataaacgggaaataacaatttaaaagcaaaatttcgcaaaatggagcatgcgaagacggagcaagtagtggggcgagacggagggcttggaagacgtctgacgagcgccacaggcggttgactgcgggggcccgaagcgtacactcctaggacttaaacctgtcagaaacagtcagaaaggggatgctatatccttacataaaaatggtattcttgctggtactacttcaattttttgaataaataaataagtaaaaattttataatatggttattaatgtttcacccatttctagaccattttggagtacctgtggcaccgttgttgaacagattatatatatttgtggttgtctcctgcggaacgtacaacacatggaaactatgctatttcacatgcaaatccatctgtgactttaaatttgagctatttattgacacattttatttacatcttctatattatttatctgtatacgatttttaagctctatgaactgccatcagaggtaggcaataagttctaaaataactccaatatgggcactaaaaagctttattttacggcgtgctaaatgacatgatgcttctatatggtaacaaaattaatccaaatcacttttgagatacacaatttttataaaacttcttgtcactaaataaaaaactagttttggagaagaatttttaagaaaatcttacatgatttcgggtgtattttcctaaatcttttggtc

SEQ ID NO: 19765 - DNA, 812 bp, Heterodera glycines
gaatgggtgcatttaaaagggggaggggagagaaaaaaagaaatttgagagaatagcagctgatcaaaagcggaaaagggccatcaaaagacgagggcaaatcagttcaacatcactcattccaaagacacactgatcacttcgacccattccgatcagcagcagcagcaagcagctaaaacaccaccaccagcgccacctccgcccgtcgtacgtttgtccgctagactacgaaagagaaaagcgatgtgtgagcatcacatttaagaattgtccagtgcaaaaatgtgatgcaaagtcaaaccattgaaaacaaaggtcacaaaagcacgtggttttggcgttgggacacaaaaaaatgagtgaacttaacaaaatcaatcactatttattcaaccgactgaaaaattgagagagctgagtcaagccaaatcttttttaaggaaaagtataacttgggcggtattgtcgaactcggcatcggcccggtatggatgcaaaaatcgcttttataaaatggtattctctaaattgtttaaaaaatggcgattttttattacttttttcatcagtccactttttgcgatttttcgttacttaaattctccctactcggcaccgccgggtccaaacaacggctctaatgcactttatgagtccaatcgaatttatgagtccaaagcttttttatgagtccaatcaattgacattacctgctttttatacaataactttgttcatgttcgaacaaaccctatctttttgatatcattcgaaaagacaaagtctaaatgatataataatacgagaaa

SEQ ID NO: 19766 - DNA, 1148 bp, Heterodera glycines
tttgaaaaatgcaagtatatttaattggtgagtattttcaaaattatagttaatcaagaaaggccaataattgtcctctattagtgaaagaaaaaattcctattttactccgcagtattcaaagtcaaacagctgcagacagaaaaagtataactacttttaaattaaaataattaagagatgaaaattttaaaatatcttcgtagtatccgctactcaaatcttttttgcattaaactcattattttgagcataagtgagtccgagatagaattacacaaaatatgtgaatatgttcttgtgtttaattaaggcctttatgcgcatcttttaaccctttaataatagaagcgagttgaaaacagtctcactataaatatgtgcttattttaaaattatgaatacctcttttgaaaaatgcaagtatattttaattggtgagtaattttcaaaattattagctaatcaagaaaggccaaaaattgtcctctattagtgaaaagaaaaaattcctatttttactccgcagtattcaaagtcaaacagctgcagacagaaaaagtataactacttttaaattaaaataattaagagatgaaaattttaaaatatcttcgtagtatccgctactcaaatcttttttgcattaaactcattattttgagcataagtgagtccgagatagaattacacaaaatatgtgaatatgttcttgtgtttaattaaggcctttatgcgcatcttttaaccctttaataatagaagcgagttgaaaacagtctcactataaatatgtgcttattttaaaattatgaatacctcttttgaaaaatgcaagtatattttaattggtgagtaattttcaaaattattagctaatcaagaaaggccaaaaattgtcctctattagtgaaaagaaaaaattcctatttttactccgcagtattcaaagtcaaacagctgcagacagaaaaagtataactacttttaaattaaaataattaagagatgaaaattttaaaatatcttcgtagtatccgctactcaaatcttttttgcattaaactcattattttgagcataagtgagtccgagatagaattacacaaaatatgtgaatatgttcttgtgtttaattaaggccttta

SEQ ID NO: 19767 - DNA, 1872 bp, Heterodera glycines
tgcaggtcgaaaacaagaagcaacccaaggaggcgatcaaggagccccgttaagagtcggaaatgcagaccaagctgggttatctggatgaaaaggtaatgcaagccatgaaattggcttttactcaagctctgaagtcgatttgtgaatacatggttgaaactaggcggtgggcttcctccgcccttttgtctaatccaacaaattttgccaggtcagtgttcaactcaggaaaattattggcaaaaggcattggccccaacctgatcagaatctggccctgtgttgaactggcaaaagctgactaccaattctttccattggagcaagatcagagccaaactgaatgctacgagctaattcccatcaaatttggaacgtcaagtggaaccaaattggcattcgtcgatccaaaaacaatgatcgtaagttcagaatcaaaaattgcaccatgctcagaatttcgcaagcagttaattttcatcaatgatgcactgtatgaagttgatcagtggactgctcaagtaaagcaagtcaaagtggacaaaattgggaaagttggagaattcgcacccgaaattccgtcattcaaaccacacacatttcattatttggctttagtcaatctctccgacattttggaacaggtttacgatgccaattcgccaaaaatcagtgaaattacctatggccttcgatccacggacacaattgtcacaaaaacaatgtcaagccagtggaaagcagtcaagcaagagctgaaggatgcgattttcggcggatggatcagcacctaccaaacagttattgcaataatggttgcaattgtttttgcagacttcctggtacgttttggcttaatgcttagagctgaataccttggcaaaggaatctctggaaaaatggccttcggaactcaagccaattcaacttctgtgcacaatgaggatagtacaaggagcaaattaaatgccgcatcaatgcccaatttgcccattgcagaggaaggaattgaacttactcctctgaaactcattgagcccatcgagatgcgaatgcgcgccaaaaggagattgcgcaaggccagcagaaaggcaagttttagaattccggcccgcactgccctttctttcgcaaccattttatttttttccttctccaactcatctctcgcacaaaattcattgaatttgtcatcaaattgctccaatcttcatccatcctcaaatttaacacaattgctgattgttgccatgctcgttttgctcttaatcattattatcctaaccaaatggttcctctttcatcactctcaaaacactaacggaatgcctcactcacaaaacctcaacgaattatttgttagtaaatatggacaaaattgggctactactcacctgcaggatgtgaaagcacatctcgaattcttgcttaatacaacccactatctgaggcatgccctttcacccaaacatttcctgcactttaaagctctcataccaaatttgggagggaatccttatgtaatcgtcaaggatgacgggtctcttcgaaaaaggcacgaagccatttcagtccattcagtcgaaatagccagaaattatattaatttaggctcactaaatgaattgaacagccttaacccgcagacggctgtggttatcgcgcacatcaattctcttccaattcgctgtctcatggacactggcgcgagtctcagtgtcgcacctcgttcgattgcctcacaattgcgctgcaaactgatcccatcactcaaagaagcaatgagcgcatcaggccacataatcaaactcaaagaatatgcacagcttaaactcatcatcgggagggatcgaaacacaagtcacatta

SEQ ID NO: 19768 - DNA, 788 bp, Heterodera glycines
  unsure (1)..(788): unsure at all n locations
acgcaaatgcncagctgtcaaagtggaaatgggcgccattatctatgcattgcgcgaattcaggccatttatcttcatgtcagatattgaactgcacactgaccacaanccgctcgctnttctgctcaagaaagcggacaacagcccacatttggcgcgctggctgattgagttacaaaattatcaaatcaaaatcgtgcacatcgccgggagccaaaattcactagccgatgctctttctcgtgcagctgaagataagcctctgtctgaatttcgcaaattgcaggaattggatgacattgtcgaatttccggtatgtttagccatctcgcaatacgaccgagtggttttggacccttttgtcaacacggtgacgatacgacacaaggatggtaactcttatgaggtaaatttggaaaaagaactcaagaatgatcccgaggccacggcttatattgattttctgaaaattggcaaatttcctgactgtttagatgagaaagaaaaggacgagtttgccgtggccactgttaattttcaattggactctggcatcctttatttcaaagaatcgggatgccaaccacgaatttatgtcccaatttcgttgagaggcctaatttttgaatcatttcactcttcccttcttggtggtggtcatttgaattaccgtaagaccttagccaaatgccgcaagtattattggccaaaaatgcactcagacataattttgtgggtcaaattatgcattacgtgccagctgagacatcatcccactccggcttatc

SEQ ID NO: 19769 - DNA, 1309 bp, Heterodera glycines
  unsure (1)..(1309): unsure at all n locations
caggattttntgagtgaaaaatttttttcaataaaaatcttccaaaaacatgtctttatgggttaattgggccactgatcacgaatacgtaatcagattttacttttgacatcgttaagacctaagaatccctgtgtgattggggattctgaggcatcattttgaggggggggggcaggttcgaatccggacggtgtaacattatttttttgtgcatttttacgttattttcaatgattttaattaataaaatattttgttgagttaataaataaaaaattatatttaatttaatttttttttgataaataaattttataagtttaaattaattatttttttaattgatagaatttcatgtatttttttaattaaatttgttaaaaatattttcattttaatttaatgaatttactaatcactgttgtatcaatttatatttaaagatttgttgtaaattaataataaaagaatttatgtaaaaaataataattatcttttaataaagaatttcatattttttttaattgtttataaaaattaatttcatattaatttaaatattcaattattgtacatttcaaaattctctttttaattaataaaaggaataattaatttattttttaaaatttataataaattgcattcaatttttgtacctcttctaatcaatcacagttgtacctcttctaaacacttttgtacctcttctaacaattttgtacctcttctgatcacagtcaatttaagtgaattaaagctctaaaaatagagaaaaatcaggagaattttatgggttttatttagattttctttcatgaaactaaaaaaagttattccagaagttctggaaaaattcgaattttcagtaaaaaattcataactcggttctgaaaagatattttggaaaagtaaaataatataaaaatccgcaattttttgctctattttataaattttattttacatttttatcacttttttgaaaaaagttatagaaataaaagtgattttggggttcgggaccaaagggggtggacaggatttttgagtgaaaaaattttttcaaaaaaatattccaaaaatatgattttaggggttatttgggccgctgatcacgaatacgtatcagatccaattatgaatcgttagcccccaaaccccggggattgggatctgggggttttttttgggggggggggggggggggggggaaaaaacggggggggggggggatttttttctttctttttttttttttttttttgtttttttttttttttttttttttttatttttttttttt

SEQ ID NO: 19770 - DNA, 1161 bp, Heterodera glycines
agacctgaccttaaatcggcaaaaatcggatatggaagtttgacctactttctggcccttttcttattatgtccagttcttgaaaacagagatttgacctcgagacccagtctgattatcaaaaccgagaccatagaccaaaaccgtgagaccggagactgcagcaaaaaacacgattcttttaatccacccccccccccccccctctgcacagatggccacgctgcgctcgcccttcttcggcgagaagagcaacatcacgtcgctgacgcagaagatcagcgacgcggagtacccgccggtgcccgacgacagctacagtcagccggtgaccgcgctcatacagtactgcctgcgcccgaaagcggaggagcggcccagcgcggcgcaagtgcaccgtatggcgctgctgatggcacagcggtgggagggcactccgccctactgatgatgatgatgatgatgaagcagtcatgagagaggcgcgcaattaatttttaaaatttaaatttccataattttccaatttgtatttgttttttgttgtatttgctttttttcacttacagtaccatgccctttcaactacagtaccatgcccattttaaaaacttacttacttgtatttgttttacttaatttccaattttgttgttttattgtttttttgttttcatttaatttcccaccacaatttttggcatatacagtacatcactcactcattcccatttaattgtatacggtatacatacacataaaaatgctgtcgccagatgaagaattcactatgggtcaactccactgtgcagagaaaagcctagtactatctcgtcgtttctctttttctttgtaatttctctcactttggcgtactatctcttcattttaattatgtaaaaaacaacatttacttctctccgtctaactttttttctatacgttaaatccgtaccaaattttgcatagcgatagagaaaaaaattctgcatcgaatgatataaaagttttttgcaaaaataaggcaaactgtaaaactatttttggttaaagcctataaatattttaaaggatttaatgtgtaaaaaaaagaattttaacatcatcaaaccggtgcaacaacggtgggacaagagagaggagagataagcgcagacggcc

SEQ ID NO: 19771 - DNA, 795 bp, Heterodera glycines
caaatttgttcaatttagttggaaatgaagaaagttacggctaatcaaaataaacaatcaaaatggcagtgataagcgtaaatttgaattagcgcgaaataatttacgccaaatacgctatttggcgttatgagcaattttgtctaacactgggcttgacccatagtgagaattgtgaagagacagatagaaactctcgaagtgctttcaagagtcttgaaaaaaaaaataataatattggtacaaaattcggttagaaaaaccaaaaagacgaaaaaattaacaacaaaaaagtgttttttctccccggctgattttttgtttaaaaataatttattatactaatatttttaataccgattaaatttaattaattaatttttaaattcagtaaattaaagttgtggaaaaagagcgaaagaaacaaaaagaaagacgagagagtacagagaagagttttagtgagtgagggagagagagagagaacgagcgagagtcaatgagaggagagagaagagaagtggtcgtcggcgtgcgacgacatgacgaccacctgctgctgctgcctccccacttactctctcttcccctgtctattggcacacacactctctactacgcttttctcttcaggaagcactctctctcgtccgtcttgtttctttcccccatttgtccctcccgttaaacgctctttcccccactttttcaatatctctgctcccaaatgtgcaattttggtcgcctaaaatgctacccatatgttttcgatggtgcccgttccgtttccgaaac

SEQ ID NO: 19772 - DNA, 2439 bp, Heterodera glycines
tattttatttttttaagagaatgcttcattatttataattttattttatagatgataagattaaattctagtaaatagtctattttataattatgcgtaaaaaacgtccatggttcattgtcttccattcctcctcctccctcttcttctccattattttcctccgctaattcttcttctcttccctcctcttccttattctcttccatttctcctcttttcttttttccaccattaacttttaaaagaatgaagagaagacaagcgccgatgaccattccaattacaaaaggcattacgcttttcacctcgctaataatcgcctgtaaaaattgttgttttcaaattattattaaaaaaaatttgcttacaattaattttagaaattttaaagcgtaaaattcttataattttgcaaaaataatttttttttttttttgctttaaaaagaaacattgcgtgttaagaaaataaaaatgttgcaaaatatggccaaatttttctgagttgttttaccatttcctgacatttttgaggtaagaattcgatttatgttggaatttccatgcctcggaatgccatccatcccaccagttacatactttatttagttgttaatgggattttattttttgtgaaaagaatgctcatttttgcaataaaaccaaatcaaaattatatatacagtaccaaaaaaacacatactgtacctcaatttcccggcaattcccattcactttaagtttgttttcgataatctgaaacttaaaattaatatacataataaaaaaaagtcaacttaaaaaccatttctttaaaaaatctcgaaatattaccaaagtcaaaatagtgacaaaaagtctgaaatggtgacgaatagtgaaacaattttctgccacaatttgttctttggcccttttgtaatttggtcaacaattaaattgcacctttcgttactgttttgtaaccaattttcactaaaaaaaataatttggaaaatttcaacacatatcgtgaaattttaaaaatgaaaattcagaatatgtcaatttttaaaattactgtttttctcaggacggtacggtgccagcccaagttttggactacaacttttgtcgttgttggccaaatctaacaatcttggtatcattcgaaagcgtggtgagtcattccacaaaaaagctcagtgattgattggtcattttccggaagcctatcgcaccactttcggggcaccaaaagtgcctgatccggaacccggaccggcccggttaagaacaattttttgttcagtttttcaaaggctatctcccaggccgggtccggttcttgatccattcacttgaagcccgtcatgggtcgggcacatctgccggaggaccctcagcctcgcccccgaccctgtcgatggccaacccaagctaagcttgccggtaccagcgccttttttgtacagctcgatgagctctacaaaatggtatcaatggcgtcaggctagtctactacaaatggagaaaattggcgagaagtgatgtcaaaaatttaaaaatttgaaaatgacttgcgtcccgccgtacattagtattaaccggacggcaccgtgttttgtgaattgaataattaaatttatttatttaattttatcgatcactgagcttttttgtggaacgacctagcaccattcgaaagcccttcacaagctctattagccttacaaaaaagcaaaaaattttagcttgtaaaaaagttattaagaaaaaactttcaaaattttggtttttttttgttatttcactaagcaataggttagaaaaagcttcgaaacatataaagctttcgaatgataccaagattgttagatttggtcaacaatgaaaaaagttgtagtccaaaacttgggctggcaccgaaacggcgggcaccaaaccgtcccctaccggttttttattaatctcaaaaatgcttttagttttcgtaggtttaatcttttgctgttgtaactaattgctcttgatttttgcattttttccggttcgttaagaaaggaactacttcgttttattcttttcagcttagttagctgtttttttttatattttcataattacacgatacttttgggtcagtgtgccgtttttatttgctttcgtcgtttaaagtccaatgaaatcatgttcctcatcggcaagtacttgttcgacaggtgacacaagcagtaacacagaggcagcagaaggcacgtttttttcaccaattttgatttacgctattttttgaggtaatactagtaatagtatggtttacaggtcccacaaaaaaaagaggcaaaaaggggattttatgcaattcttcaaagtcctttatggttctcgagggcgctgatcacgaatataatattcatttcgaccaatttcgaaccccgaacccaaattcgaacaa

SEQ ID NO: 19773 - DNA, 917 bp, Heterodera glycines
caggaattattctcgtcattgtcaaagcgatgaaataaaaatttaccaaatgtttacttacctcttgaacttcctttgccggcactttagttctcttcaacaattctttaatgcattcggaggccaatgccggcgctgacaccgaagccaattgagaacggaaagagccaattggagttcgacatgcttccaaaatgaaggcttccttaaaaaagaaaacaaaacggtgacaattacaattttcttgaaaaacatttcataattttatttttatattattgcaatgaatagagcccggaatgaaaaaaatgcaggaatggatcagaattcctgcaaatcccgtgtattattccaatccgggctcatatgtatattatcccaaaagtaaaccttaatagtcgaaaatgcacgtatggatgtcgaagttaaaaatggatatttgccaattagtaaaaacatttaaatacaaaattttgtttccttctctgtggaattagtggactttcaaaataaaaccatcaaaatttaaatgaaaacaaaaataacattacaatatttgcggtaaaacttcggttctattgcagtttcgcggctaatcaatgataataggctcttttcttgcgtttttaagttcctgagactttaagctttcagtttatacaaagaatgcagtcattgacaaagtatgtacctaagaaaaaagttatggcctgggaaacttggattgtcattgattggatgcataaaagtcgaatggacgcataaactgaattaaccccttttttacgcaaattaattagaaaggattttttctttttttattattccggcggcacatcatttctagacaattgcctcgaaatgagtgtttctccgccgattgctttcccttcgccttctcattgccatttttcttc

SEQ ID NO: 19774 - DNA, 1875 bp, Heterodera glycines
ggggggggggggcccccccccccccccccccccccccccccccccccgggggggggggggggagggtgctctcccccccgcggcgaaaaaaacccccccctccttttttttttttttttttattttggggggggggggggggggcgcccaccccccccccccccccccccccccccccaaaaaaaaaaaaaaaaattttttttttttttttttttctctggccccccccccccccccccccccccccccccccccccccattatatttgggggggggaaaaaaaacccccccccccgaaaaaaaccccccccccacccccgcgcggttttttttttttgggcgggggggggtgtgttgttccccccccccccccccccccccggggggcccccccccccccccccccccccccaaaaaaaaaaaaaaaaattttttttttttttttttttttttataatttttttttttttttaaaaaaggggcgggggggggccccccccccccccccccttttttttttttttttgttttgtgtgtggggtgggggggcgccccgccgccgccgcctcttttttttttttcctttcttctcccacggggggggggggagagggggagaagaagaaaaaatttttttatatttattttttatttttttttttttttttcttttcttttcttttcttctacacacaacagccgacaagaaaaaaaagaaagaaaaaagggtgtttgttttttttttttttttttttttttttttttttaaaaaaaaaaaaaaaaaaaaaaacaaccccccccccccccccccccccccccccccccccgcgcgcggggggggtttgtttttttttttttttttttttttttttttttaaaaaaataaaaaaaacaaaacaaaaaaaacaacaccacacccccccccccccccccccccttgtgagaaaaaaaaaaaaaattttttatttatttattaatgaggagggggtgccaagaaacaaacaaaaaaaaactcattatgtccccccccccccccccccccccccccccccccccccccccgggggaaaaaaaaaaaaaaaaaaaaaaaaaaaaaaaccccccccccccccccccccccccccccccccccctttttttattaaaaaaaaaaaacaaaaaacaaaaaaaggaggggtgtttttttttttttttttttttttttcccccccccacacaaaaaaaaaaaaaaaaaaaaaaaaaaaaaaaaaaatccccccccccccccccccccccccttttttttttttttttttttttccccccccccccccccccccccccacaaaaaaaaaaaaaaaaattttatatggggggggggggggggggggggggggggggggggcccccacccccccccccccccccgggggggggggggggggggggggggggggttttttttttttttctcttttttttttcttctcccccccccccggcggggggtgggggggttttttttttttcttttttttgggggggggggggggggggggaggggaaaaaaaaaaaaaaaaaaaaaagaaagggggggggggggggggggggggaccccccccccccccctccctcgggggggggggcggccccctctcttttttttttttttatattattattttttttttcccccccccccccccccccgtgtttttttttttttttttgggaaaaaaaaaaaaaaccctcttttttttggtgggggggggggggggggttttcccccccaccccccccctttttttttttttttttcttttttttttttttctcccccccgcggggggggggggggggggggaggttttttttttttaaaggggggggggggg

SEQ ID NO: 19775 - DNA, 1757 bp, Heterodera glycines
tttttataacagagaagaggcaaagtgacattggccattgatgtcacagtgaaagatgataaaaaggagaaatcgcatttctcgatcccgacaaatccaacggaataatttcgatggaaattgaaaaagtgtcggaatttgcgagagaaatcgacagaagtgaacgtaaaagcgaatctcgtcacttacataaatgggcttccatggaaaataaattgaaaagaaaaatggaagcactgacaatgagaaatggttgggcttttaccttatgcgtgaacaagaaggtgcaaattaaatgctaattaatactaattgtaatgaatttccattaagataattattttttttaattttaatttattacaatatttaaggaactgatggatccaagcaaaggattttacaataaaagcgaggacaaagtgacattggccattgatgtcaattatttatttaaaaaataattgaataatataaagttaaataatcattttgtcagtttgcaagcaattttaggctggtttgaagcatcgtacaaacgtccttcttggaccgtaatcgaggaggctgcggacgcagaaactcaggctaacggagtgcaattgtcatttggtaagtattttacacatcctataaaattctaaaatttttattgtttgtaatcttttatgtcccacaaaaaatactgtatacgcttagtgaatttgcgcatttttttggtttttgaaaataaaaattctaataaatcctaatacatgtgagttaaataaaactttcgaaaatataagcaatgaataaacctcaaaattaatcaaatttatttaatattaatcgatgtttgttctatttttaatggtgaatgttgaaaaatctgcttaaagaaaaatccaaaagtttttgccttagttcaaaccccttaattgaaaatcatttcttaaatttgttattatgatttatagtgaaattggttaaattttcactcttttgtattgaattaaatatttttaaactcctacagacaaactcgctcaccggaacatcgaagactcatacacggtgaaacaacgcgaagcgatcgcattcgatttggtaggggagaggaattcgtatcgagatgctaacaaataagcacggaaaataggtctccaattgggaaaatcggtttaaaccattttttgcaccggttcaaaactcgaaaatgacgcaaattcaattatggttaatcaaggaattgctggagccgagcaaaggcttttacgataaaagcgaggcaaagtgactttggccatcgatgttacagtgaaagaagcaaaaacggaggacaaatcataaacaattaaggagattgaagaaagaaaaactctaattcttatttaagattattatttttttacttcataattaataacccttttatacattttcttatgtgctgataacaatttcaaaaactcgaaaaatacagaaaaaagggaactcccaactgtttaaaacgatcaaacccgggttaaatttagtatcacccgaaagctcatgaaagttgcatggttagccgttccagccattgccttaaaaacacgaaaaatacgaacatgaaacacgaaacgatcaacaccactggtttagatgattaatagttttcgtttttctgtttttttcccaaaagccccaaaaatatcaaaatatttatcacaatattgatttaaaacttgaaaaaatgattataatgcatagacttggtttttattatgcaattt

SEQ ID NO: 19776 - DNA, 917 bp, Heterodera glycines
aaggttcgtcaggcgggaggccgcgacatcggcggagtggcggcgccgggtgccgccgctcgtcccgggcaaattctgtggcttttgggactgactcgtctccaaactcaggtgggcactttgtccgtcacttcgtttcgttttgtccccctcactttgaatttcgttacttttgtcaatgtttcgtccgttggtcccttcacattatctttttgttttccatttgacgcttttcttttttaaatttttggcattctattatactttttttgggttagttcactaaatgccattctcttctcttccttttctttcgtccaactctctgtccgtcgtgccgtagtgctgcctctcttccgtctctgtctgtctctcatttgccaatgatccctctcccgctccgtttctctgctgatgtcctattttctcttcagatgagagttgtgaaggctttccaagccactgtgcagaattcccacccgtcttcgctgtctcttcaggcgggtgaccgtctccgccagtcttaccggcgacttcgaattgcgaaagaaattgagcgtgcgtaaatacttagcatttttttgcacttcttgcgctttgttgagtgccgcgcggattttattttggcatttgcgcttttcgtattctccaaaaagccacgactttcctatcttctttctgtcttcatctcttgttcagacattttggccctttgtcgttctaaattttaaatttggttgaggaataaaaaaagtccttaaaataaaagcctactttattttaggtaattaaatagggtaagtatttaaatattacgctaactttcactcaaaaatgaatggaaatctcggcgctatttgcaaagagtaaccttttgaaatttatcaaaaacaataggggggacccgttttgttttg

SEQ ID NO: 19777 - DNA, 1091 bp, Heterodera glycines
taattaaaaaataattttaacttttttatggtttcttgtcccataattttttcaaaaaaaaccccattgggggggggtaaagtttcggtttttaatattgaacaaggttcataaaaaactgcaaattttcttggcgatgcctataaataccgaaggagcccaaaatccccgttcaaaaaaattgaacaaaatgctcagttggtcattttgggtaaaactctcaaaaaggttcaattatattaaaataattaatttaaatgaattagttggattgtttttccatgtaccattgcttagcgcttgtcgtaaagaacttccagcggaatggaatttgtcttggtgaaatattctgctttcgtcttccatttctgcatcctcatttcttcctcttttgttaaccaatttccggaactgaggttcatctttagacggcaaaataaatggcattttggagcccttttttaagtcggaaataaactaaaagggaagttgtggttagaaaacaagaattctctcttggattgggtcggcccactccatacgaaggccgcgccccccccccttttcggtgcttcatactaacgaaggagggaccacgtccctatttaaggtatggtcatattcttgatcagtaactcggagaattccgtaagacataattcgtgacttaaaatttttctaaaaatgggggggggagggaatacaaattttacttaaccctgaattgaacaaattttttgtgctaacctcgtccttaagaagttcgtccaactcttccttgtccatttcctcgtccgattgccaatgtctcgcgtaaacatttgacgtgtcgacgacttcgctcttcagtgctcgccttagcatttcctttttgtcttctgtctccgttttcaaagtccgttcaatgcctttgactgggctttccaatcgtccaacaacagtctcttcgccttaagaattcgtttttaaaaaataacttttatcccgccaatgtgcctttaatgttcttcaatttgctgcgtttgctcgccatgtcatcgtcaccaaagccttgtgaaaatatgccctcagattggatgatcctctgctcc

SEQ ID NO: 19778 - DNA, 856 bp, Heterodera glycines
gtagggtggtacacaaattgtccctctaactatcatttgagctttcggctcttttggtgcccattgctttggtgcgttcccgtcgcgggtgccgtaagtaagcttttattgctgaagcaaaatccaaagcatagaaataagagcgtttggcagaagcctgccggaatataaccgctgcagtacctatctcactaatatcaatcgtaattataaaatgcctgctcggctcatttcccggtgatttgaaatctggaaaataaagaacgacatctcgaattattatctatttccgttcctcgagtgcttccgtttccttttcacccatttttaactcatgtattacgctgagaacctaaagacagtgtagcgtctatagtactaaaggaatgaataaattgcctatagtatgtcaaaaatcctaccagagaatgacgctcattttttgttgtggctcgttatgaatgcgatcactgatatacagtatatctgcgcccatttctataccatatctcctgcgcgaggtgacccgcaaatgctacgtgcgatcccacaaaaatgaaaatttttctaattttaattttaaaccggcatttctaaccccaaaaaatacaatttcaattgcggatcaattgctcttacaatgatttcgaggtaaataaaatgccatcaatataccaccaacaaaaattggccaatccttccgtaaaaaagaaaacacatgaaccttagcaatggagccactgcgttacacaagccaaaaggcataaccatgaattcataaaggccatattcttggttgtaggcaggtttttcaatgcaattttccttctattttcattctgccagaaacctgaca

SEQ ID NO: 19779 - DNA, 1388 bp, Heterodera glycines
tttataaaaaaaaaatccgcttgatcaaatactagtaaagcttgacttcataagcttatcgcatgattatcgtaaaaccaattacatccctctactcattgaaatgaaaccgattaattgaaaataaaacatttaatttatttaattaaaaataaataaatttgtccacgcctttgtggtggcaacggtgggcaaaaagaagggtgccgctttcggcttcttgggcggctcctttggcttgttgcgttgccgaatgtgctccaggtggggcaggccggcccaacgcgcgggcgccaggccggacagcgtgtacagcgacgggtccaactgcgcacgctcgggcagttcagcggaaccgtccagcgacagcgtggacagagacggtgctgaacaatgaatggggagaaatggctaatatgttccctcattatgtagggaacgttccccccgtcgtggtttcccctcgaattttttaaatttcaatgttcgatttcaaaaaacttaggaaattttcaagaaaatttcaagtaaaaaaatatttgaaaaattttgtaatttaccataagattttgaaaaatcgccagaaaattttttctaaaaaatttctccgtttgaaaatcaattttaaaaaaacaactaaattttttgaaattttttaataaaacgttttatttttctttttttctcaaaaatgtaaacaattaaggaaaaaagtttcgcaaatgtttaggtttaaaactttaagaaatgttgataaaaaattttcaacaaattcaagactggttaaaaatagacatcactagggatgggatttttaggtttttatctattttttttttgcggcttagttatgatgagagaagcccaaaaatagcattttctcctaacaattttcgatttagagcgactttttagcacctaaaaacacctattttggcgttttggcacctaaaatagtttacaacctattttggcatttttcgaatttttagcacctattttgggattttcccagaaatttcatagtaaaaatgcaataaaaacgaaaaatacacccctaagaatcgatcccaaaaaatttaaaaaaatatacccctaaaaattgaccaaaatttcagaaaatattcccctaagaaatgaaaaattttctcaaaaattcgtctccaaaatttatttatttattttcttgaccagttgcaattgtgcgggcgaaattgataaaaaattagtcacattttgaatttttgtacataaaaacactggattttttcaatttttaacacctattttggcctttttggagctttttagcacctattttgcacttttttagcacctattttgtacctattttgggatttttagcacctaaaagtcccatccctaga

SEQ ID NO: 19780 - DNA, 1857 bp, Heterodera glycines
aaatcccaaaaataaaaatattataaaaaattatataattattactttaactcgtcggggatcgtaccatagaaaaacgggaccaggtactttccgggttgaaaaaccgggaatttttggctggcaaaacagggaaaaacccgagacttttcccggtcccggtcaaaaccgggacgtaggtactcagttgtacgttctttcagtatcaggtcccggtcgcgtacaactctataaaaataaaataactggacaaaaaatttatgaaaattgtcttgaatttttgaaaaaacgaacacccgtgaattttttgtcagtaatgaagaataattttagatacatgaataatgagtttaataattaaaattctttcctcacctccatattcagcaacaaagcctgttcaaaagccacaaaaacatttggcaactttttaattgaaactttggcacaaaagttggcacattcttttaccaggccactgatgttatatttgtcagctataattaaatagtaatttatttaaaacccaatcataaattttcaccagcttttaaaacttccaacaaattattggcatccaatccgttaaaatgtttcgtgtaaataaatgttagcatcgttttgaacgcgccaatttcaatgtcggggatcacaatttgaccttcattgtaacggaacattgctttgaaaacatcggaagcactggagagaatcgctctatgagctgttacaatcttaaaaaagatcaaaaaattcaatttaaaatactgacgtaaaagtcttgagaatttagtaatttttcctacaaataaataatgataatatgttaggactcgggtgggaatcgaacccaccctaaagcccaatccgtgggcatccgaccattgagctaccgaggcatatttattggtcttatcaacattgaaattttgttgatcattaaactatattcaaaatttatatgcatttgcttatagattttgcagaaaatttttcgagaatttacaagatttccataaaaatatgttctaaaaatgtaattgtttatccttgggcattaagctatggtttttgctttttttgactcgcctcctttttgtcatccttcccaaccaaaaaatgaacatccgaatattctcctttcttcaacactttctccatttgatctgccaaagaattgacaatttttccattactggtgccttaaatttgaaatttattaagaggaggaatatatataagcatttcatggaattggctaaggggcatagccagcggaatttcgtattttaggaatacaacaggaacttagagaaagttcaatatatttacagatttaccttctttatcttttggcgggaaagcttttacatgcaaattggcaaaggcggaaaatataatagaataatagaatgcatatttcattctgtcaccttaaattagaaatttaaaaaaattaaatgttcagttggtcttagagccgagaattttgaaaaaatcgggatcggattccgggatatgattccagatgaaaaacccgggtttgctcggattcgaatcctgattttgccatggtcccgatccgggagtcttttagtgctagattccagccgggatatctcactatcagtcggcaaccctaaaatgtgaagtgggtccagccatgtaaaattaaaaaaatggggggaatgaatctcggaatggaatctattttaatatgaaaaaataatgaattttaagcgataaatcagcttatttatatgcccagtttgtagtggttgtaaacatttatagggaaataataaaagaaaattcaggacaattttaagaaacgatcattttgctgggaagatacaa

SEQ ID NO: 19781 - DNA, 2962 bp, Heterodera glycines
  unsure (1)..(2962): unsure at all n locations
tttcatcgtaactgggctcagataataaaagcattttcttattttcatctccgtccccgctctgccccaacttattaatctcctgcatgataacatccgcattgttctgcgggtacgcccgatacggcacccaaaccggggaagcaagcccagcacccgtaattgccactccaaacatccgcacttttcgcttcattttttcttccgtagtttttaaagccacctttatcatgttgtcgattgcatccttcatcgcttcatcggggcgctccacatccgggttgacacgaaattccgtaatatttttcgtaaatccaaatttttcgcaagttgtcgattggtaatccatcaatttataattttccatttcttcagcaaaattatttctgaacaaaaaaattttttgaaataattcttaaagggtattatcttataattgtatttataattgtttaagaaattatttttttatttaatttattaaaaatcacttacccgattgatcggaaatcccattttttggccattggcacggcgggttggaaggagttcacgcgtttaaaagacattttaaaacaagaaattgaaacagaagaattaaagagagcagagatttgaaaagaaaaagacgtaggtaaatagtaatagatttaattaatgcaaataaaaatagagcggagagaaataaaattagagcgtgaagagagtttaatgaaatccaactatttagttgaatgatttgcgatttgggccgggtgtgcgaaataggcaaaaagggggagggatctagtcacgtgactgtctggggttgccttaatttagggggtcatcaatcatttcggtagacagctgtctcattttattcaaaaccgtgcaaaaatcgtttggatattccttatttcgaaagtcatcaatcattttttttttgacaggtttgcaaaattacgggccatattgcgaaatagttggacccaaaactaaaaatatggagaaatttcaataagaaaccaatcaatcccattttattgacagttgacctaattaatgggccacactgcgaaataattggaacaaaagtcacgtgcagattgcgaaataatggaagagaaataaaaacacatcaatcaattttggttgacaggtgacctacttttgaaaaggtttttcatcccgatttatttattcattttcgatttttatttttaaacacaatttaaatgattaattttattgtccaatttataattgatattgtttgcagtcatttcaattaatttgcacttcttccaaattccgttatcgatttttttttcgcggcggcggcatcgcggcgcggggcgagcggggaggaaatgcaaaaaaaccccgcactgttttggcacattttcaataatgaatttttaatttcaggattagagaaaccgtcataaaaatctcaggatttgagaaaataaaaccgcccaaaaggtttgggatcaaaagatttaaatttgcaaaagaaaaattgaatttccttcacctgtcactttggtgacagacggatgattgatgaccttcccgcggcgctgcgcggcgcggagtgaaaaaacacccgcgaggatttggggaaattaaaatccacaaggcggcagacttcaaagaacaccctcccataggctcgggattggaacacccccgataggttttggtatttgggtggcatcttcaaaggaatgcgcccctcccatagatttgggattgtgcgggaaaatgtccgggcggcaccttcaaagggttgcacccctcccataggcaagggtttgtgcgcgaaacacccgcgagatacccgcgaggttttgacactttatactactggggtgtattttttgaacaaaaaatttttttagtcgattcttagggctttttttcgtttttattgcatttttacatgggtttttccgaaacttctaaaataaacgctaaaaatggcggaatatgcacaaaaataggcggtcaggcattaagcataaaaccccccgaatacaatagaattcaatattattaagttgtactttggacagtttttatgtgcatatagaaagccgaacaaatggaaacacgaaaaatgtgaaatggaaaccaaaataaaaaatggggaaaagctaaagctaaattgacagtgatggaagtgacagtcgacgcatggaaaagtgagtcaatcaaagaataaagacagaaagccaaaagtttgatagaaagcttggtcgtttagaaacggtaaagatgttcattatcacttttgtctgtagtttcttccttttctcttcttcagctgtggtgatgcaaaattgctggatgaaggcttctcctcctcctgctgcttgttggataaagaatgcttctcctcctcctgctgcttgttggataaagaatgcttctccatctgccgctcaatttcagcaagtgtcaagaaaatggttgaatttttttcgatgttataagcaacgattttttcaaagtccacgagtactttaccatctgctttttggcatataagtttttgttgttggttgggcaaaatgccaatctcttggatatttccgattttcgtcttcaaatcgcgcacagtgtccgcacgttttacacgaactgggtactttttctggttatattcaatgaaaatgtcaaactcaactaatgtcttgtaatgatattcataacaaacgtaaataactgcgccttctttaatttcatattgttccattgtataccattgttcaaaaaacatgtcataacttccaggagattgacgactctttaattttatatcatctatgttaatgtccaactcccttttcagcatttgcatggccttcttctccaaatcttctacgtagtcgctttttctgacccaaattgngtaatttttctcngtanaatgcacaaaaatttcatattcatcaaaatgtatgataatgacttg

SEQ ID NO: 19782 - DNA, 1625 bp, Heterodera glycines
  unsure (1)..(1625): unsure at all n locations
gctgtaactgttgttgcagttgtgccaattggtccgatgaatggttatgttgttgtgttttggcccattgggtgtgccaatggcattcgaattgaacgataatgcggaagcagatgacgatgatgatgaggaggaagaggatggcacattgaatgatgccaatgaatggaggggcgccgaatgagagcctatgagaaattaaaactttaaattaattttaatccttaatttttattaaactcaccgggcttaatatttaattaaattaaacgattaaaatcaaattattattttccaggtaataattaagcataatggtttcatcaaaattatattaaaacaagattaaaaaatcacaaatatttttattttgttaattttattattaatatatttatttaattgaataaaaattttaccatttttaagaattaatgatggcggtagaaaaatgattgctgttggttgcgctgttgctgatgttggcattgtcgcaaggaatggggggaagaacattggcattggcacaatgggtggaacagtgccagaaacattttgtggtggggatggcgatttgcgcggcttggacaacaaattttcaatggaaaaattcgctgccaatgaggaaattttcatttatataaaattttctttattttggattaactaaaattaggcaaattaacaaattacaattccgtccaaaaaatgttggaatattaaatttattgcctcgcttcgatgagaaaatactattttggcattgtgccattatagaaaagccaaatgccatttcgaatcacatggcttttgtgtaatgctaaaaatggaggaaaatccttttttgtgattgctttgatggcccatatatttaagaacagaaaaaaggaaaatcaaatttatataaaaaaagaccatgggaaattgaatgctaaataaggaaaaattcttattgtattcattcaaaaacatttaatgtaaaattaaaacaaacaaaattccaagatttatttcttattttcccaaaagaaataagttggatttatggaaaaattgtgatttttcaatgacaaaaagtggaaacaattaattaattggtgtcaattagttttaataagtagcaaatctctcaattaaaatttgtcgggttggttcttattctccaaatccgtgaagatttaacactcccaaccttagtgttccagcctaattttaaatatggcatttactgtgccaaaaaattatggcaacccaaaaaaaaattgggaccacgacgaaaattgtcgggggataatttgaaggcggccagcaagacaattattattataaacaataatatggaggaggaggaggcgattgtggcaccgctgcaggtcgaggtccagcaaaagctcaacttgtctattaactatcggtgtccccacaaaaaaaatatataatttattttcattttcccctttgttttgttgccgacagaaaatggctccggcgccgccgcatttttgaatatttatttcaacggcacttccctttcgtgccggcngggaggatcaacccccccccccatcatgggctgagaggatatataatgatggagtgaaagggtgctcgggcgtgagaaaatc

SEQ ID NO: 19783 - DNA, 1136 bp, Heterodera glycines
tttctcatattacctagggatagcgagagtctcggttcccggtctcgggattttagtctcggaaaacgagaaatttttacactgttaaggatgaccctttcggagaaaggtgaaacgatgaaaattatgaaatttttaataaattttcttaacaaaattctttaaaaataccaaaaaaaaaaattccgggcgcctatcggcgccgccggcccataaattcgcctaagatttcaaaatttgaatataaaatgcctatttttcagtgaaatccgaagaaaatattcataaaattacgtttttttctaatgcggcgcctattgcagcaaggggtgaactccgtctagccaattccatctcagcaaagttaaaatctatcttttttcttggtaaaatcagcaaaatcgtatcattcaacttaaatttttcaataaaaaatggcctttttgtcttaaatttctcacaaaaaaatccaatttttttaccgctgcgtctgtcggcgctgtaggtgaaaattttgcttttgaaagtgcgagttgattgttttatttttttaatttttaaattcattgtaacataagaatttaatgcctttttaaatgagtatttttcaagaaaaaaatatttcttaaacttttattacataactattttgctagaaaaggtattgaattattaaaatatttgaatttttattaattaaccatgaatatattcatgtcccttgttaataagtcttttgtatttctttattttatttaaatgatagaaaattcttctatcgttttagataatatatttaaatattttttttaatataatcaaatatatttgaatttatgtatttataattcaaaaaatctagagagaaaaaataatgaatatttaaaaaaataatttatgacacagtttatttactgttatatggaaccaaataaaatttcttagacaccaggaacgatttccatgtcataacggtcagcgcaacattttgatatgaatattggtaatttatagggaataaaatttaaaaaaatttttttatttccgtttaattatgaaataatcttatttaactttcttaaatttaatttttaaaaaatattttcaattttgaataattattttccaaatttttt

SEQ ID NO: 19784 - DNA, 1340 bp, Heterodera glycines
ccccccctttttcaaaaaaaaattttcaaattttttttttttcgattttacgccatttggggggggttttcagggtcgcagaatcccgatttctgatatcattttcggttcattttgagccattaacccctgattcgaacaaaaagttgaaatttaaattttcaaaaaattcacatttatgcaacaaaaaataataatgaaagtaatagttaaacaaaagtatttttatcaaataaaaaaaataatatattatattattttattgtattaaaaacacgaacaattccaaaattttaaaataaaaaactcaatatctaaaaacatttttaatcatataacaactgtatatgtctatatgataattaaatttgtacaaattataaataatattaatagataaaaccttttgtttaagtttagtattataaaaaaaattctggaataaataagcatgaggcatgaaaatttaataatttatattaaactgattcaaaaattaaaattaatgaattaaacataatcatttgcatacgattagtcaagccaacatggcaccaagttaaactcagctagtaattatttataaaaattaaaaataaatgaaaattcataacaaaaatgcctatcttcagaaaataagtaatgccatagaattaatcgtaggaattagaaaaaattctataaagcaattaatatttcaaaataatatgatacaattacacacgaaacatgtaccaaaaaattcattaaataatatacaagtttttttaatattaatttctcgtttagaatgaacacttaaaatcctaaattgcaaagatccgacgtgtaaaaaaatgcattgttcattctccatgaatattaaaaataatgtatttattaaaaaaattcccgatcttcagaaaataaataaattacataaattttttgtattcttgtttatctaagatatgcatatatatttcaaaaaataaatttcattaaataatttacaaattttttttctaatttcgcgaccagaatgaacacttaaatctttaagttgttaaggatcattaaatataaaacaaatcgaaacagtaaaaaattatcggaatgtatattttctgtcggatgatacatttatttgcaataaaaatgattaaaataaataatggaggactaaaaaaaactcattacaattgaatagtgtttaaaaaagctgaaaaaaattattgataaaacgaatactttagtttaaataatatcttgagagaaataaaaagcaaattaaatgttaaattccagtattgagtgtcgcatagaacagaatcataaataaatttagtttaaaataaatg

SEQ ID NO: 19785 - DNA, 2052 bp, Heterodera glycines
aatagttttttttttaatctttttaggttttatgtcttgtgctaaaataacatgcaactttaaatttcaaatttagaacagagtattttttgtgttttatgaattaaagaagcgctgtttagtaaatggatgcttcctttgaccaattcggtggtggaggatggggtgaccaaggcgaacaagaatttgcagcttcacaattccaaaaaaatatttatgacaaagttcctgtccccgttgcaatcgatgtccttatttccatgactggtgatgaagaaaaatatgttcttggaaatttttcttttaacacggtaatttgttgttgttttttgttgttgtaaattcatcattcttttcaggttcaattgatgggaaaagttgccaatgtgtcggaagttgaccaatgtacgacttacgagttatgcgatgccatggccacggatattcgtgtggcaaagagatttactgtcattcgttatattacggctgacttggttctttttccatttctacttatttgactaatatttactcttccataaaagcaacccgttaaagacgaggttttcacaattggccaattggtccaagtaattggaaagctgcggctgtataacaatcggctgagtgccgtctgcttcaatatccgtgaaggttttggtgtaaacatttcgcaaaaaatatacttaaaattcagttgaaattgatgagattgctattcacaaattggaatgcaaacttgccaaaatctactttgagaaggttttgtcctctcctattttaccacttccaattatttaggatttgaatatttagaatttgactgaattttcacttgggattgttgagaatgacacgattttccatggcaaagtgtccaaccaacggcctggctcgtcgattggccattcttttgctgggaatatggcaacacctaacagaaaactaagcgggacaaccactcaaatgactgcgaataggccgcaaatgtaccaacagaagcaacagttgaactttccaacgcattggacgcatcagcagcagaaagtaattggccaaattggaaaaataaattaattgcttatcgcttaagatttacgagttcattaagcacaatgcaattggcgaaggtttgtttaataaactcatgctttttgtgtccctcccttattttttttcgttaccatttgctaaaatctcagttctctttatttttttattgccgattcaaacttgagggggaaaggtcacaaatggaaactgataatatgttcttgcttcgttggtaattcgttctttctaaagcgggtgttcacaaggacgtgataagaaatgcgctgggtcttaatgcgagttgcaacacggacttggcaattctgagcaacgagggatcgatttacgcaacaattggtaattgagcaatgtgctaaaagctttcaaattcgttacgtttagatgatgaccattttgggaccattgtgtgacgtttcagccattcatttttcgttgacttatgacaattttggtcgatctcaacttttccatttaatgcttaaacttgcttattatctttgaaaccctcatcagttgattaatctctattcttaatttcatcctaattgattcacttttcttgctgttatgtttcgaatgactcccgatgagtgccgttcaattgcgagcgaaggcgaacgatcccttagagaaggcgacgctgttaacggtatgtgtgcaggcttttatttgcaaaaatgaaaaacatgcatatatttgctccgaatggcgaattttgaaattcggtagtgccggtgggtcaatggcaaaaaaaaacaaaaattcggaaaattagatttagaagtttaatagaataagtgaacatttactgttcatgaaatggtgtatcatgggtaaaacaggttgatttttattcccattatgaaaaccagggaagtacagagcaagagattttttgttatactggcctgcgtccatcgatgatgaccaatgggtcatgctaattctgaaaagggcctttttcgaaagggcccatta

SEQ ID NO: 19786 - DNA, 1554 bp, Heterodera glycines
cagattcgtgatcagcaatagaaaagcccagaatgcatgtttttattagatgtaaatttatttaaaaaatcaaatatgtgatgaaaaatcatagacaaaatcaatgatttttcgaattctgagcacagatccgtaatcagcgtattttttcacactagaaaagtcgaaaagaaaatttttaaatttatttttcgccgggacaccgatttttccagtattaccctaaattaaattgcttattgctttttcatgatgcatttggccattgcacgagagcgccaggatcgcgtgatgtgcgggttgggtcttgggaatattggaaatgcctatttttacttgggagaatatgaactttcgattggacaccacgaaaaggtgagacaacagttttacccttatcaaaatatttccattaacaaataagcgaattgaacttgcaaagaaacttggggaccaggcatcggttcgccgttcttacagcaacattggcaatgcctatgcattgatgggggattacgaaaacgcagaaaactcctacaggtcttcatgactgtgggtgaagcaaaattgtaatttgcaggcttgccttagcattggctcgtgagatgaatatcccggaattggtcgaccaattggacgcggatttggagaacctcagccatatcatggcgaagaacaaaagtgaatttcattagtatcatttggaattgttttgtaaatgttaggaatgggcgacccttccgcaaaacaatctgccgatataacgttcacaagcggcggaattaattcgtcgtttggaacggaatcaataaatttttgtttgtccgatgtcacaaatgccgatgagaattccgaccgcgacgaaatgtttgaacaaattgcacgactaaacagcaaacgaatcggcgaccaacttgcggattttaaaccagcattgcgcgatgcgaatccgcagcacatcattttgggtaaaatatatgctaaacaaaaataatagaaaattattccaggcatcagcagcgcttctaacagccgtcgcttttctcttccgagaaggggaatcggaaaaatgatgaagtcattgagtcttaagaaaataggagttggggcaacaccgaagcgtggaagggagcaaaaggacgaagcaactagttcgacagacaacagaccgaggagcacttcatctttgaaagttgggcttggaaaaaacgctgaagtcaaactggagttttgaccgatcattgcacaaacagtcgataatttattgttcatttatttttaagttggactttttatatttcaaaaatccgagaacataaattttggtgaacaataatggctgctgtgtcgtcttcatattcaataagcactagccttgtgtttgggtacaaacagaaacccgtcaggcactttccccagcagcatttcactgatacgaacccagtccgaactggcagggcttaaaaaatggtgggactggttccattccttttgctctgtacctcgaaagaagcattgcgagctcatctcttccgcggtacaacggcggacgat

SEQ ID NO: 19787 - DNA, 1087 bp, Heterodera glycines
ttttcgttggcatttattgataaatttaaaattatttacaatatttatagaacgaagtgccaatggaaatgccgacggcgatgagaacgttgcgcgaagtgcgcgagtcaaagggccaccaactgcacacatttgcccagcagctcgtccagctgacacagcacgtgcacgtggcacgcaaggagtacgacatggcacaactgagcactgaaacgaagccgttacgcgaaattcgacgcgatgcggtgggtgactaattagacgaaattgtttcatatatattatttaattttaaatttaataattttccaaaatgatgttatgacaacccctataaaattttttatatttttcgtgtcatgactctccaatttgctcacaggtgtgcaaacagttgcgcgagttcctcagcgagaacgagtggtgcgccgtgttgatggagaaccgtgctgcgttgggcgagcgcgtgcacaccgattggcatgacagcgtgcatggtgggcgcatgagtgatttgttgcaaaggcctgcactgcgtgtgcagcacgctgcagtgctttctgctgcctggggcaccaccagtggcacatattataggcgggcacgcaccggaagcacagtcacaaccaccacaaccactgccatacgcttacccgttaccatccagcacatactgtaggggagagaattgggcatactgtatcaaaaaactgtatttaaaacaattaaaattaaacaaaaacaattctctccctttccccttgcaataattaggcactaatttttcactttatgcacaattattaacaattagggtcccctcccacccaattaggtcctcccaatgttcaatttgcttttgctctaacatttctttatggccaactcaccgctttgaaggggcggggccgactgagcaccgaccgaccgaacgcttttcgcatttccattcgtcgaaaagtccacaaaatttgtgtgccatttttatttttttgattggtcggaaaagaattatacaaatttcatcccaaaaaattttgttgacatcaaagtgttgcatgcttcttttttactccttctttttttt

SEQ ID NO: 19788 - DNA, 1383 bp, Heterodera glycines
gagaaacgttgaggtatcccggacccgagacgtacactttcttagacatgaagaagttcatgaagaaaccgcgagcagcaccacgcttagcgagctgttcactgtctccagacgctccgattccggcttcatggacacagttgtgcacgaacgacattcagcggaagagagcgtgcattacaccaccggacaaccagtcatggaacaacggacgctgcaagtcgacatagaccgacggacgagccgagcgaagacgcaagtgcaagatgttgcagaaacagcacgcgcaacaaggagattttctgttgaaaatacgaaacagaacgtgtcgctgtctccgctgcaggtgaacaataaagaatggccaaagaggcgggaagaaaaagcatgcgtgacgataaaaaacggaaaagggacacgcccagatgctgctgcggtgtgccaatatttgatggtacccgaaaaatcagagcgcgccatgagttctcgagctgcactcgcctcgagtgggtcgagttacgtgaaaaggttaagcacggcgtcagaggatgaagcagttgggacgacgagcgcaccggcaccacgcgtaattggcattgaaacacgcattgagcaacagccaacgccgtacatacggcgcgagaaaacggtgctgaggacagagtcatggccaaagttggacagccgagccaaagtggaggaatggctaagggggacagaagagggaatgccggaagaaatgggagaggaacaattcggagaagaacaggatcaactgcagaatcatctaacagtgacaaaggcagaattggctcggccggaagaggcgctcggagtcagcgttgagaagccggaaagaagggaagcgaaggaagagcgccggatgagattggagcggcaagaaatggccttccagctggttcagcagctgttgagtgcaggacgaagtgaagcatcgctttcggaaaagcaacgggcaatggtttccgagcagttcaagcagttcggcctggaggagatgagcaccagcattgtgctggagcagctcgaagaagtggcgggcagacccgaggcaaaagtggcgctcaaagcgtggaagagcctggaagaaggactgagagtgctggctgttatggaagaacgggtcgggtttgaagcaacctggacgaccggagagacggagtcgggtgctgagaagacagtgcagttggcacgtgttgaagctgctcagaagcgagttgaagaagcgcaggagcagctaaggaccttccttacagtgttggtcgggccggaacagttcgaagaagccaaactgctccagaaaattccatggcacacgtcagccgaataccgaggcccggaatcgcgcgaagaatgacgaaa

SEQ ID NO: 19789 - DNA, 575 bp, Heterodera glycines
ttcatccgttcctatttggcgacatttttctgatcagtgtgccgcctgccgcccacatttggagaagcgggcgggcacaggatgtgaacttctccgccggataattccttatttcgatttggcagatcgatctctgcaatccaccgtactctgtcccgccggggctgtcagatcggctgaccgtttcgttttagggcccccacttctctctgcccttctctgatcattatcatcattgcaaattgtgtgtttttgtcggcaataagccggctgtcgcccgctttcgcttgattgtttgtttatttgttttcgcccgccgctgttcaatcgtcgcacaaatccccggcgggggaataaaagttgcaaatttctcccccccccccatttgtccatccaacaatttgagagaggatacacacagcacaatcatcacataaaatgtgttctcagctcacatagggccgggctcccccctcttcccccccccctctctttgatcacccggcctccatttcatgtgatcttgataggtactatcaggtattttatgtccccaatagtgaatcttacattgt

SEQ ID NO: 19790 - DNA, 1174 bp, Heterodera glycines
tttttgctgtgtgtgccgtgccatcgtcgtttccgccgtcccggccaaaaaaaaacgataaaaatatggccataaatctttttttttgtgtgtgcctttcccgagagaaaggcgcccattttcctgcccatttttcgcattgtctcgtcccatttttcccttcaaacaaattttttttttttttgttcacccaaacggcgaaagcgaaagaaaaatgacgacgtttgaccaacccgaggaaaatgaaagttccaaattcactcctcccataaaatgaaatggaggagagaaaagagaagaaagtcatgggacacggcgaagaaaatttattggcgatgggacggagtgatgggggaacggagccctaaatgggggacaatttggccggaaatgtaccaatttgtgcattattgttatgggagaaaggtgtgccaaaggtggagtgatcagaaacatgccaaattccgatggagtagtagtgctactcgagagcctcggtctcgactagagaaaagtttctcgcttttgacagtatttgaccggaaataaacaaatttgtattggtatggagaaggtgaaggcatgccaaagattggaatgaaaaagaattgtggataaaagtgtgtgccaacggttgggcgatcaggaaaattccagattaatgatattcgagagtcttgggctcggcccgagaaaagtttctcgacctttttcggtcttggcaaattcgcggtctcgagcagccctactaaagcagaaaaacggtggggagaagcaaatgggtgggagggaacaattaggccagaaagaataatatgtgagtatctcggtttttgtttggaaagagttggcacaaaagggaacgggtcgttttggcgccagcctcagtttttttattataactttttttcttgttgaccaaatctaacaattttggtatcattcgaaagcccttcacaagctctattagccttacaaaaaacaaacaaaaattttagcttctaaaaaagttattaggaaaaaacctcaaaattttcgacttttttgcaatttcatgttataacttttttggtaattgtctaatcgcgaagcaatagcttagaaatatcttctaaacatgttaagctttcgaataataccaagattatggattggttaagctctagagatcccc

SEQ ID NO: 19791 - DNA, 2588 bp, Heterodera glycines
ttggtactttcctgtttggaaggcacaccacatttacaatatgcaacaaacattgttcaatattaaaagaagacttattttgaaggcataaaagcaacaatttccgccaaaatttcctcaaatgcagcgacgttacgtcgctaacagccctcgcgtcatagaaattcgcataaatacgaatcaaacaattttaaaaaaatggagtgtgccttcaaaacaggaaattaccaaatattttaatatgattgaataaacaaaaaattctactttcttcaaattgaaaatattaaaaaatataaaagtagaattttcaagaattattgcggttctggttgactccactcataattattttaattattttttaattagactaatttccattaagctaattatgaatgggtatgagatatgtctgagcattaaaaatagaaaacgggcgaaagtatcgcacaaacaatgggcaaaaatgaatcagcccaaagtagagacaaacactcactcactcattttccattcacttacggcgcggtggtaaggcgatttgcgacggacggacgacgaaatgtaaacgatgggaaaagcacagcaaaaaaaaaaattagggatgggatttttaaggatgaaaaagtccaaaataaggccgtaaataagggcgaaaaagtcaaatttagggtataatttttaaaattgctgttttttacatgaaataatttcagactaaggcaaacaattttattcactgattgcagtacaaataagctatattttagaaaatttttttcatttcttagggtctatttttgaaaaatttagtgtcgattcataggggtatatttttcgaaatttttttgggtcgattcttaggggtgtatttttcgttttttattgcatttttgttaataaattttggacaaaacgccaaaataagggcaaaaacttattttaagggcgaacatccaaaataaggatttttaagggcgaacatcaaaaataaggatttctaaggtctaataagggcgtgaaaacgcaaaattttcagacaaaaaatgtgtttttcgtgtatttctcgttgagttaaagccgcagaaaaaataagtaaaaacttagaaatcccatccctattgatcattgaaattaatgcatatttttaatttgttttttattttttccgctaactaatttattttataaacttgaaagtctttaaaagagttctgtcgcacatcatttatattgatcgatttctgatcattcacaatgcgtattaatgttcttcacggctcagcgtccaaatcagccatcaaagcccattccaccgccaaatccgccgccaaatccaccgccgccgtagccataacgctttttccgaagtggaacacttaaaatttaatttaaaaaaggaacaaaaaactttttgaaaaatcttcaaattataaaattaggttgtttttttttgcacttttgaagcattcaatttttaagaaataaaacttccaatttttgccgaaattttcctaaaaattggcggaatgtgaaattacggcgtcaaaaagtgccgtaattggtctggcacagccattagaaagaaaaatggaatgccaaaaataaaaaataaaaatttatacctttcaatttgattgtccactgctggcatggcaattgttaatgaaaggcaaatggcaattaccagcagaacaacaaaaatggtggacaaagaagacattttcagtgtgaaatttgctgctaaaaaaatattcgaatgatttccaattaaacactatcatttgcctttaaatagaaaggtttgcgcacattaattagtaattaatacttgcaaattactaattaaaggcaaattaggtgcataagtttttgtaaaaaaaaatccatccccaattcgatgaatgaatgaataaaattaaaataaaattcatcaaattacgtgatactcttgatactctttggtcggaaacaacaaaattttgttcgttgaatccaaaacactttgaataggcttttaaaaaatttaaaaaaaattcaaattaccatttttaattagaggtacaggaaaagcacacgtttttaggacttcaagacgaatctggcattccacagcgtaatttgatcaaagtaacgccagaatttgttttttcataaatttttatgcatttttagggaataacggtccgatcgaacagcattcttttaatgttcgaatgattttacgaaaatgacaaggcaaaatcatgggaaaattttgccagttatttgaaagaaattaattgttttttctaattaaaaaaacagtttcaaaattgtaagcatttcgtaagttgctagtggtgccgtccatccgctgacgaaaaacaaataaattatgccaacattttaagtgcgtgccacgtttttttctgtttctctgtttatatacaaaaaaaaaattttaatgtttgacattatgaaactatatataataaattgtttttacataaacatattaaaaaaaatccacgaaatataacaaaaaattaaaattaatttcaattaaatattatttagcgatttaataaatgcctcctcatttt

SEQ ID NO: 19792 - DNA, 2555 bp, Heterodera glycines
ccttggacttgacttccaaaagcgtttgacatatttacgaattatctgcggaatttgggcatcgacccattctctcgtgcatttaatgtcttcgaaatcgacaaggcaacgcgaaaaagtgcgaatcattagcatgtcaggactaaaaagcaaaattagcattgggtcgtttgagaaatcggttccaccgaatttggtcaatctcgtaaaatgtgtcagcaattgccagcgtttctctgatccaacaatcgcccgttcgcagataaatgaggccgagagcgacggctgctgcgggagaagtcaaatgggtgttcagcgtgggcagttcgcgcacgtggctggagcacggctggccaatgccggaatggtcagcgtgccgtgcggtcgattgtccggacgttcctccgttgttgtggttggcacctgaaaacggctcagtatgctcgcattttgggactgtccaccgttcaaactctcgaccactccttcaatacctcctcccccgggcgtgtaagcacggccaagcgacgaattagccccgcccatccttggccccaccacattgttggcacgcatgcaagggcattggacttggtcgtagttcaaataggccatccttcgctcagccccctttagcagtttaatcagacggtctttcaacgagggagacgacgaaatggcaatttcagtgtcactaatttctttgccttttcctaaaaagaatggacttaaatgaactgccttgaaattgaaaggacaaacccaaattaatcagcccaattgcgaaaccggcggccagcacaaaagaatagcgatcttaagggaaaagtgtaaaagaaattggtcagaatacagaaggcacaattatagttttcttcaaccattggtatttttgtttgttttttaacggggcaacaaaaaaaatacatacccaaaaataggttattagaacataagtgaaaatttgtattttttatgttgttttttgtgcatttcggtctgaaggactaatcacctgaagattggtcgctttcacacggcacttctaaggacatttgattcaaaagcctgacaaaaattacgttaccgtgaaatagcaaaatgataccctaattgtaaggctgacaagaagggagcagttcgaactccccaccccgtatcaattcaccccccccccccctatctcacaatcactaccctcactttttgtaaaattgcaaaattaatgttttaattttctagtaaataacttttatggggggaggaattgttttttcttaaaaaactttattttttgccagagaaattttctgatacaaaaaaaatttgttgagggagtcaatgtagcataccgtgaacaaaaagttctgaagtaggactttaattcattttaaatggaaaaattcaaataattgtcagcccattgcgttaatattactggcttgacacagtgtgatttgtggtctcacagaagagaagtcccaaggagagaagggcggcagtttgtacgaccaaatcgatgcgaaattcgcagagagtcggttggaggaggaaaggcaaatgagtggcgatgattttgtatatctgtgaaaaatttattttttgattttcttaccatttggcggaatttataaaatgcgtcagcacgccgtaacataagtcaagcccccttccatgcccccccccccgtaaatgggcataacaatggagtgcaccctctcaagaccccttgtacattttgatgtaccgcctttctctccaccctcccccaaattcattacgtgcacttcgctcgtccctcgatgggctgccgcacatccgacgagcaatgcgatgaccaaatgtctattgttttgagtaagcagcaggtgaatgtcgtacaaattcatcatgcttcgcacgttgcccacaaagccagcggctaaaataaggccggcccgaacagtgttgggtaattcattttcagatgaattattggagaaaagacgccgtggaaagtcgccgcaaaaggaaaggccatgggccaaagcgttgtaaaaattagcccaatccatagcaattttatgggtctaaattatttgaattttggtgaaacccgaagagcagcaaacgggaaatgaatcgttgagcggatagtccacttggttacggccggagtgaactcggccattcagacaaatctgtcgcatgcccatcgcagggtccgaattttcttccgagaaacaatgacgggtacggaaatgcagcatcgcttgaccaaacggacgggtgagcgtacggatagccaccgacacgaggaattgttcgtgctgttcacgctgttggacatcgttgaatgaaagcttaatatgaaaatcaaagactcgtttctaaaacaatagaatgttatcattcccaaaagttcaaacaacggagacactcacaaccatttttcatcctttccttaccccaaatgctttattcgggattaaaattggcattgatggatcgagcatttgcttagcattgtaaagtctcaaatctgtcgtccaccgcgggactgtgacccatttgtg

SEQ ID NO: 19793 - DNA, 1244 bp, Heterodera glycines
tgtcccgcttaggccaaaattttttctatttccggaactattcgaaatttttccgaaaaaaataccattcgatagagctcgaaaaactatgttttggaagtggtctccgttttgccaggaaaattcgttaaaaaatcataaaattcaaaaacccgaaaaccattttttaggcctaactcgaaaaattttgaaaattttcgaaattttaaaatttggaaaaatcgggcttttaaagctctacaataagtctgctggccaccctgcgctcagctcaaagcctaatgagttattcgcctggtactgaagtgggaaaaaaaaattaactgagtctccgtgtctgtacaggtccgggatttggtctgatcaaaaaataaaaaataccggattatagaggacacttctgcggagtgccctcacagcgggcactttttgattcgggttttagaaaaaaagttaggggccctaaactgcaagaaaaagtgagaaatcgcttctcgggactcagtcgtccgcgctgaatttttttctatagttttcccggattctcctcaaaaagttgtaagacccttccaccactttcagggcgctcccggccttcggccgggagattttgttttttgaaacgaaactcaaaacctatataacatatatataactagcgtgtggcggcgcagtaattgctcggtgtagacagatgctttgcacagtatttgctcggtgtagacagtatacttttggtatatatgggcgggcgctgacatgagcgcttcgcgcaaaggacttcgttgctagtgcatgcgcggctttcataatcgatgcgtgtaccacaacatgcgtggctccccacccttccccccacgcttcccccctggcaacagtgattaatgaaagccctccacctttgagtgctcaaaattagtatttttacttgaattggaaatatctgttttttttttgttgctgtgcttcgaaattgtaaggtatattctgttgggtccaagttgaacgtccaaaataaatgtaattgaatctaagctgattactttactattcaccgagtattaatattagagcctggacgggaccgtggaaccgctgggatttttccgggatttcccggcccggcctttgtttttttatgattaaccaccgggaacgggagagacctgggaaaataggagtgactgttccgggatcccgccacggttcattttcaaatcccggtcccggcctgcctagctggg

SEQ ID NO: 19794 - DNA, 263 bp, Heterodera glycines
gtcattctatgttactagatcggggatcgatccccgggcggccgctcgagcaggacctgcagaagctagcttgatggggatcagattgtcgtttcccgccttcagtttaaactatcgggagcggcgcgtagcgggggaggtgggtggcggaagaagaaaagggtggggggagtatgagtatgatggtcaatatggagaaaaagaaagagtaattaccaattttttttcaattcaaaaatgtagatgtccgcagcgttattata

SEQ ID NO: 19795 - DNA, 1264 bp, Heterodera glycines
tgccgtacagattaaaatgcttacacgtcatatatctatgcataaagcatttaaaagcgatttgtctttttcctttgatatccatctacagaaattgccgtctgtgacgaaaacattatgatcaatcactgatttgacgtcatatttttcataatgctgtttctatttgcaaatatttctgacaccacagcaaattaagacgtcaggaaattgatggaaaaaagaaatttaaatttaactgagacggaatttggctgatgtcttatatttcattttgataaaatgatttggtctggtcagtgatatgatgtctcatcagtaatatgaggcaaattgaaataagcccaagcagagatcggttccaaaaatgagtagtcacaaatttcacaattcgccttcttttatgaattatgcgggatttgcgggattaatcctatcaattttaataaaattgaaatttatcgaatagtttcgacaaaatttttacaaaaaagttttttctgaaaaattttccgattttgggggatcaaaatcccaatttagctgctaggggccgttctaatagaggttttttgaaaaaatgcaaaaatatggacataaaatatggataaaaagccaaaatatggacaaatatggaaatatggagataaatcgcgaaataaagaaaatatggatataggaatccgtcctagaagcttctaatcaagctaaaaacatggttttcgtgcgtttcaggcctcccacagtccaggaaaaaaatatggattcccatataattttacgccctaattatgagtgacagcaacatattaaattaaattcttatcaactttttaaaatttatttgacagagcggttggcgccgcgaagcagcgcccaaacgctcgtgtttaaatattctgataaaaatcaataaataatttttttaagcaaatatagaaatatgccgaaaacatttttgaaatcacctttctctttttcatcttgttttagaattttaaaataaagcatattatttcgaaaatttctgttatattttatgttttcaaaaatttcggacttccgacctttttggggtcgcaattcagattctaatgtccgaaaaaattttttggggcctcggaatgccatacttgggcacagattcattttcgaaacattataagctgacgcagcttgatctttaactgaaatgaaaaatgtattttagtactaaagatttaatattttatttattgtttcatttactaaaaatccaaaatat

SEQ ID NO: 19796 - DNA, 1359 bp, Heterodera glycines
atgtaaatacatattttttcctgcattcgccatgctctaattagtaggaaaaacactttcttttttgtgttgcgagcaaaagttggacttttatttacatatttttacatatttcggggttttatacatatttggttcatattttagactttttcttacatattttcatttttttttacatattttgaggattttttatggaaattttcggaaattctcaaaaaaaaaaatccaaaaattcggcaaatttttcgtacatattttcatatttttattatatattttgagaatttttgtaaaatttataaaatttcttgtgaaaaataaaaattaatcaactaatttttaaaatactaaaatgtgattctaggcctatttaggtcatttttatggcattttgtgcctatttcaccctttccgaagaattttttttctaaaaaataaccattttaaaaattttatttacatatttggtacatattttgggtttttcttgcatatttcgggattttttttacatatttatgtacatattatgaccactttttgtacatatttttgacagccctaattattacatatactaaggataaaattaatgaatttgctcaaaaatttatttaatgagtaattccaaaaatttataatgagcattttaattgcatttatttttccttttttacttacaattttctacagtttgatgctcagaggcatactgcaaaaagtcggctttgaggccgagataaaaaacctttgcaaaatctgattccgcgaaaggaagtagcgtatcatcaataatcgacttaattttaattaaaaataagacaaatttagtaaataaaatttccatgaattcaagaaaacaaaatatttcgtaaattattatcactcagtctacttgtgcagtttaattaacctaattagagacaaaatgcaaaaatctttctttaaacaattgttttacgtacaaaataagtcactgaatacaaatccaaggaaaaactgaaaaatgctcaaattggattttcaccgttttttttttgctaaacaaatgaaaaccatgattgaaaaacggcttaagccatatttcgaggtgtaccatgactccgaataggccatttttcggtctatccccgacccggacgctaatcaccaaaaattcgaaaatcaataataaaatttcaaaaaaataaaaaaattttaaagaattttttgaaacattttttggtaaagtgcattggtacaggaaaacctagtaagtaattctccataaaaagaaaaaaatttctttcttagatatttgtggaaaattttttaagattttgaaatttctgtttggaaatttaaaaaatttga

SEQ ID NO: 19797 - DNA, 2655 bp, Heterodera glycines
  unsure (1)..(2655): unsure at all n locations
tgcctccgctaatccacgactccgtcgtaagtgatattcgtcccgtccgctgaaagtttcgccaaaatcctttgaagaagtgccgaatcgttgtgcgacttcaatgccgtcaacaacattagacagttgaattgttctttattcaattcactgaatttgaaaccggcccgcaatttacgatgtctgttgataaatagggcgaggatttttagtggcaaaaaaccccaaaataattaactaaatagtgacaaaaaaatgccaaaatagtggcaaaaatagtggcgaaaaagttccaaatttagggatgtaattttttaaacaactatttttaatttgaaaataatttaaaattaaggaaaaagatgttattcactgattgcagttacaaaatattttcttagcaaatattgaacaagaaaaaaaatttgggggaagaattttttccaattcttaggggtgtatttttgaaaaatttttaggtcgattcttaggggtgtatttttcgtttttattgcaattttgggaagttttccaaaaatgccaaaatagtggcaaaaataatgacaaggctccaaaatagtgattcctagtgatgaatagtggcattaaaacgaagaattgccgagctaaaaatgtgtttttcgtgcaattcccgtctaaataaagctgcagaaaaaatagttaaaaaactagaaatcctcgtcctacaaataaacataaatgaaaataattaatttaaataaatgtctcttcgggtcccacccgaacatagccaaaaatccgctggggcgtgagtccgtatttatcaaattttatttgtgcgcgagattttggcgttatgtgcatggttanatcgctaatctccaacccctaccaccagcaaacagcagaggatgcttattcctcggtccagttcttttaatgagagtgtacatcgatttatttatttgcaacccaaaccagcgaatcaaagttttgtaagcctgcaaaattcataaaaagggcaaggtcaaataaatttatggcctggaaggtgtaaaaacgagtttcatattcttttggtcataacttttttatctggctaattatttgaaattttgcaggcccatagaatttgttacatactgaaccaactcgtactgccccgtttcacctttttcagtaaaaaaattctcaacttttgtcaaaatcaaccaaattaaatataaacattttcttggtgtcattcaataggccttaagattcaatttactagcaaaattcaagaaaagcttcacatatttgaaaaataaattagaccaacaatcctaaaaaaaagtcgttcatcattttttttttaaatatgatcaaattttttgaaaattttcaaggaaattgagaacctcaagggctaattgtaagagtgaagcgaaactatttgatttgtttgactttgacagtacgagtcgaggcggtacgagttgggtttcatccatatacctatcttaataggcaatcgagcccggaattttgaaaagggtccagtttttatcccgatcccggctcttttttcaaaaaagccggaatcggaatcccggaaaaatccggcgggaccctctcgagatctaatcggtatgtcctatttctagcaaaaatgtcaaaattgtgtccccttttgcatcggatggagttgttgttgcgcaccggaaagggagcggatgtacactttttggttggccgggaagatcaaaaagaggcgagttgctaggggaaaaggctctaatgcactttatgagtccaattaattgacaatcccgcggtttttatacaataactnttgttcatattcataacaaaccctatctttgtggtttgctacgaaagatgagagaactacacttatattatttatttaatctcaacaggtattctgtctctaaaaaaattttcgagaaaatcaataatatccctcataatcccaagtaactatatttataaaataagactttttaggtgtacaaataatcaaaaaccatattttaatatttcgacattcctaattccaaaaatgctactcatttcaactgacatcttcatgagcctgtcgttagttgccgctttttctcattctgctccagtaactcaagggaaacgtaagttttcgaaactaattaataaaaatacttgaatttcattaatcaaattcttccacgaatggaagaacgaccacagagaatccaccaacttctgctggggctgtctcatcagtcgcacaagttgccaccgccgtattggcagtgactgccgccggactgccggatgccgactgtgcacgacgaccgattgggtatgccaaagaagcgtagactgaggtgacctatgttgcttctgccgttgatgccccgttgtctcaaccagaatcagcaccaactcaaagctttgcgacagatgattttaagacactggtcggtgccacttactgtgatcaaaagagccgtgtgttcacgcattatttatcatgaatatttaattgcgattaattccgatttttattttctgttttagttatttaaatttaacaattaattgtttttcctcaacccatgaacaaaattaaacctaacattctttttttagttttttggttttgactggaaaattattaattattttatt

SEQ ID NO: 19798 - DNA, 1415 bp, Heterodera glycines
tcataaaataggcagcgttttttgaagaaataaaatattggccagaaaatgcggtgcaaatggacaacaaattgccacccaaattgaaaatttcgcacagagaataaaatgccaacaaaatattcacagagccacggagtgttcttaaaaaaattaaagcctaattaaaaaataataatgtttgaaaacaaatcggcactttgtcctaattgtaacgaaaatgacggccaaattcatcgtggcaccaatggtcgccacaaagacaataattatgccgtaaatgacccctgtccaacatggctgctgatcactgcaaaccttgatcaaagcttccatctttatttgagtatgaaaaatatagcctttattaaaattagcttcaaaagtctgaaaaaccaatttttatctcaaatcagaatataaatatgttttaaattctttagttatgattagagaccgcattttgaggcctatgccttttttttctgcgcactcgttcccgtatattaaccataaataacacattttccacttggttggaggcttctatgttgacttttattatgcctttttttgcctttttcgggatttcgtgccttaaatgccttttttggcattttggcgttggtgccttcttttgacgtttttttccgattttagtgccttttttggcgttttttccgaaaattccattaaaaatagaataaaatcgggaaaatacacccttaagaaacgacttgaaaaattttcggaaaatacacacccctaagaattgaaaaattttctcaaaaattgatcgccaaaattcatttttttcttgataaaaaattctcggtttaaaaattttccttattcgaaaaacattataaaatattaataaccatttaaatgcccaaaattaagtttttggttaagttttacgtgttttgctccctaaaaaaccttagaaaaattttttaaaatgccttttttcatgcctttttcgcgatttttggtgcctttttatccgagctctactaatgacttatttgaatggaccaagcccaaccaaacaaatgcaaaatcatagagtaaatggacaagtgcagaacaaataattggggaaggatgaataattcgagaggactcactgaagaatgagtgatgacagctgaccacccaattttaaatattgacgacaaacaatttaaataaataaatatccaactgaccaatgcaaagggcaaatattagagagagacaacaaacggagagggacaattaaaattacaaattacaattgaacaaagggaagattctcgggatttttttaaataaattgaggggcttttaatgggtaataaaaaagttttttgtttctgaacaaaagttttgacgagtttttcgaaaatcaaaaaattataaaataatacgaa

SEQ ID NO: 19799 - DNA, 2989 bp, Heterodera glycines
  unsure (1)..(2989): unsure at all n locations
aaaaaataatttttgagttactagaattaatgccatgttttttttttaaagatatttttttaaaggatcccttaatcctcttgtccatttggcaagttgttttcgcttaggacgatcgagtgatcaaagaataatttcttccgagcgttttcgtcctaatggtccactccctgatcacttcaatttcacatgtacgcaaggccttttgtccatttgtcttactaagtaatgttcaattaaattgggcttagtaatagggcgcctgtgaaagtcaaatttcaaagaagaaaaaagtttattttttgaaattataaaaaaagtttttgaaatttttctacatttatcagtttaaaaaattttattttcacaaatactttttatggtaatgaggaatacccaaagcaaaattggcgaacttcacttatggaaggtccgtgctccgttcaccccccaacaattgtcagaatgtcaggtgacagctgatcgacatcacctaatcatccgggcgcctactccagacttgttcttaggcagctaaatacgagctcaaaaattcaaaatcttcccatttatagtagcagggtccattgtaaaaacaggaaaaaatctttccggaacaactcctccttatcctccaccatctcaagttggcgagtcatcacctccgggtccggcacaattccggtctctacacaaaaattgcatttctttaaaacccgctattgttctatgggagcacctcttcccccccccccccccatatcagaattttcttaaatttcaaaaaaaaaattttttttttaatttttagatttttttgaaattttctgttgctattaagttctctcaacttttcttaaaattcgttgaaataattttagtaagaaaattttgcatttttttactatataaacgcaccgatctcaagcatacgctcgccaatgaaaatgtcttgctgttcaatttcgacgatttgccttacacattgtgcgagccgttcggccaattcagtagatgcatctatgagcgaatagtgagtttatataccgtatggaaaaattgcgtttcagttcgatcattacttaccgtatttactcgattatagccccccccccgccctctcaaatttcagggggtccattcctttgccagagctttacggatttgtttgaacaaaaacaagtttcactaatagtacccggttcttggtggtgtttaagctgttcggcaacactttcggcaacagttccgcagcagccatcactgacttcaccaccgttctcctcgtcgtcgttggggggaacgagttcgatggaaatgccatcaccaacaatttgttgttgttgttgggcaacactttcggcaacagtgccagtgccatcgctgacttcgccgccgttctcctcgtcgtcgttggggggaacgagttcgatggaaatgccatcaccaacaatttgttgttgttgttgggcaacattttcggcaacaatgccgcagcagccatcggtgccatcaccaccgccgttctcctcgtcgtcgtcgttggggggaacgagttcgatgggaatgtcatcgcccacatttgcatcctcggcgttgtggtggtgttcgacaactgcggcggacggagggggaccacggacggaattcggagtgctcgcgagcaaatggtgggaaaagggtgaaacacttaaaaaagtgaattaaaaaactaataattaaactaaaattggatgccatcgactgaccattcgttgtcaaagggaaaacagtacaccaccaagtcaagggaacagccgagcacctaaaaagggtcaaaaaccaagtcatccatccattcgactcacgaaaagaggcccgtggaaaaccaaaaaaaaaacagacacaaatgatgttaaatgttggcggtacacaccaaaacacagccaagacataacacagccgggaacaaattaatttttttttcacttagaatttttcaagaaaaaaatcttagaaaaatcgaagtaaaaaattttccagagatttttataaaaaactttgtaattcgtcattaaattttgaaaaatcgctttaaaattttttgaaaaatgtctttttcttagaattttctgatttttttctagaagactttctggttttgaaaatttattcccggctatgttatgtttcgactgtatttcggtggttgtgttttgtcctgtcncaaaatgtatgatggttttttcccggtttttttttgccaatttagagcaattccacctgtccctgactcactccttcgtgaatgggacgcagttcgaggtgcacctgggccacacagtccgccggaccgatcagcacgcgtacattgagctcggcggtggccaacggtcgggccacgggcgctgtcgccgtcgaagatgatgaggagacgccggaggagccgccactcgcggaaaaggcaccgccgccattcggcgcactcgtcgttgtttgtaccattggaccctcaacaaacaatgtccattcctggaagaaacaaaacgggacgtcaacacaatcggagaggggacacagaattttttttgttttttttgctctccgggccaaaaattgtttcaccggtatgccaaaaaggacctatttttgccatttggggtcaaattttctaaaaatatggtacggcggagctgttttagtcgtcaccgataattttttttttggagttttaataagacatgggcaaatccaagcaaaaatttaataaaataagtaaaaatttctggccttgtcatccaactcgttgcactgcttccgccggttgtacagcgtcgtgacaaattcaattgggtcgtccaccacgcggtcgggccacacaatcacacgccgattgcccaccgagcaagagtcctccagggagcgcattttggagcggaacagacgatgcctgaaaaagcaaaaaataaaattgcaactcccanaaagagcgcatttttcagtttatttt

SEQ ID NO: 19800 - DNA, 837 bp, Heterodera glycines
cttcccccccccctatctccaaaagttttttaagaaaagcgcgcctcaaaaaagcgtttttaaaaaacaaaaatgcgtctcctggctaaaaatcgcaaaatttgtcattttttagacaaaatctgttagcaaatcgcatttaaatattacaaaaatttctcggcagcgcctatcggcaccgccggcctcatatactctactttctttttttggaaaaaacgcgccgcaaaaaaaacatttttattgattttttaaattttgagtaaaattttcttggcgctgcattgaacggacagattgaaacccttaaaattctggtaattgcattcagttttagattaaaaaataacaaaatgtaatgctttttaactgtttttacaaggtaacaatcaattttttcaaaaaatcttttttttggggtccaaatctttgttttagccggctaccagacatttgcggacggacatttgcggacggacttttgcggacggacatttgcggacggacatttgcggacggacatttgcggacggtttctgaataaaaaaaattattttttaagaaaattttttggaagagtgggcctcgtcagtacggtctcttccggttaaaaagcaactaattacgtgtgtttcggcccaaccgtagacacactaacttaaaaagcgcacacaaacaaacaaaaaaaagcaaagcaaataaattttttgattaattaatattttaaatttattaatggcttgccaaaggcccaactggcaatttaaatataatcagagacactcaagtaggtcaagttttttgtcattttgaatggcatataaaaactaatgttgt

SEQ ID NO: 19801 - DNA, 2017 bp, Heterodera glycines
  unsure (1)..(2017): unsure at all n locations
tagttgcaaatggcgaaaagaccgcgcacagncatgggcaatggactcgtagtacaccacgtctttctcgtctcacatgaacatcatcatggcgtaaccggagccaatctcaaaattgcaaagaaatcaattagtgtgataattactcacaaagaaaaaagatttacgtctcgagattcgtgtagatgaaatattgcgtgaatcgcatcgcaaaacaaacgccggccgcccatttgtcatatggtggcagtgtcggactcagcgattctttaccgtcctcacttttctaaaaattggaatttggcttcaaccgattgttttttattccgtactttgtccgtctgtttcgttgcgcccgcaaagcccacaaaagtttcttgaaacttaaacacctgaaaagattgggagaattaaattcaaagattggttgatatttgttgcttaccagcaaaagaatcagaaagatgttgaaaatggaagtgaaaagtgcgggcattgtgaacatggaaagtttgaggaaagaatggtcgctgaattcgaacaaaagcactccgtcgccgatgaaagtgaacaccatttgaagggctgaatttgagaaggcactttttgtggttttccaccatttaaatgatttgcctgggccaaggattacgcccaacgctacgccgccggtgatgtacgccgttgctttggttctgtcttcgggcaaacttgcagccgaagcgaaggatttgagcaggccaacctaaaccaatggaaaaccctaaatttctttacaaaaacaaatttggttttcacctgtgcccatccgatgccgacaatgaaacgagagacgagcatcacataacgcgtatgttcaggggggaacaactcgatcagaaagtaaatcaagttgccgacaaacatggtcaaattgcaaaggattctgaattgagcaacaaatcagggtagtttaacaataagcagatttttataaaaacaaaagggtccccctttggtttttgataaaattcaaaaacccaaagtctaaaaagtatctttttgaaattttttttcacttttttcaattattaaataacgtgaaatgcgtaccatatgttaaaaaaacaatttacataaaaataaagaaaaaaaaattagaccaaaaaaaagttgaaaaaattttcaaaatctgtcactttgcatatagcgccgatttaattctcttttagatgaattttcaattttgaaaaactttctgttgattcgctacgcttttgaacttaaaaaggaattgcaacaaatacgaagcaccttctgaagtcagaaggtgaagaaacattttgacttccaaaattgaacatgttatgttttcccaattttcctcccaataatttggcgaataacgaatgaaacggcactaacagaggcggcttcagcttccctatttgatttgaccaaatgccgaggagtggcgatgcgataatttgcgacaccgaatacatggtaatcaccacgccgaagaatccttcggacactgttttgtccttctgaaagcaaaaaatttttgcgtttaagttaaaatgacatccgaacccaaagggactaacagttctcaagaatgggtacatggaagtaaaaaacatggtgaattggacagaggaggagaaggtgagcagcgtgcacaggtaaatgcggctccacgcggtcttcggccgttcatccgcccgatcagccaacgaatgctgaagcccattcagcggagaaattttgtaggagccgcccgatttggccatagatcacagagagaagaagccgatcaacggcgaacggagaaaaatggtccaaaaaattcaggagagtaaaaagcaaaaactgaaaaaaataggacaatgaaagaaagacataagtgaaacatagcataaagcaccatagcaaaaaaagaggcataaaatatgaaacaggtatgaaactcagttgctgngaattctanaaaaaaaattaaatccaattacctatgtatatgaaaaagcattga

SEQ ID NO: 19802 - DNA, 2132 bp, Heterodera glycines
  unsure (1)..(2132): unsure at all n locations
aaaatattccgttcgatatttntgggggatttaaaaaataggaatttttttacaacatcatctaaataggtaattgcatgtttttcaattccttcgaaactctttaaaaagcggtgtaaaatcgaacaaatctttgtctagccgataaaaaattttagagaatgaaggagggaaaacaaatttttttttctagaaattttttaaaatatttaatgggcaaatgactcataatcacttcggcggcggtccgtttccgtgtctctttggccatcatttgcataaagttggtcaacaaccgtctaagcattcaatgaaaagaaagttttcgcaaggcgcacaaaattgggggaagtgtttttgaatgaaaacaaaatttcttgcccttaaaaatgaataatttttggctttttggaatagaagccggtgaaaattttatgcaaaactattgaagcaacgaatcgaaatttttaaatttacaagaaatataatgccaagttctcttgattttttttgctttcaaggacgtccttgttattcaaggacgaaccagagccggccgattttacacgtactttcattcatcatttctgttgtctttggacaatgaaaatttaagagaccaagatagacaagaaaaagctagatattttcatttgtccaataattttgattttttcatttttttttcaaaaattttggaaaaaacctaaattctttaagacacatataaaacgcagagaatgttagcgccatcctcagcctcagcagaacaaaatcacaaaatgttgatgccctccccaacaaaacatcacaaaaaaatgttgttgccatcggcggccatgaaaatgcgtcgcaaatgctcattcaatccggcatggcaacaccaatacgcatttgtccgccgtagcaaaaagggcaacggctttttttactgtgcctattgtgagaaggacatcaatgtgcaaacaatgggcatttcagcggtcaaatcgcacattgacaacaacaaacatcggcaaatggagcagcaacaaattgtcatgtcggcggtaattggaaatgccgagaacggcgccattgttgcggcacatcagcagcagcaacaatatcaaatgaataatcataattgtaatgctgttggaggagtaaaggcggaagaaccgccgttgcaacaactacaccaacagctttttggtacgacaaattgcatggggattttacataaggatgaaccccccccccaattcgtgtacttggccaaatcgtatactgtttttggaaaaaaaaacggtaacgaaacgatgttttgtcgaaaaatggtacgggtcggagcaatacgatttggtttttttaccatttctaccatttgttaagttgtatagagaccaatcatcagcagcagggctgggccatatgcttttggccataatttatgagccaattttgggttccgtaattacggattaaattaaaaaattttcatgctttccgtgtaattgtgaaattggtcttgttgaacagaacaattttaccaaattgataccaacaacaaaaaaccgataaattttacgactttttcttattttattgcattttttaatttgtttttttccaaaaaaacaatttcttcctatgctaatacatatttcatttaatatttttaaattatcacatctgatcagcaggcaaaatgaccaaaacaaaaaatcccggaaattggtggtattatttttaccgatttggcaattcgaccgcaaaatgcaaggtggaaggctgtccgtacatcaaaacgttgaacgcatcgcggagcaccaatgtgctgtcattccacctgaaaaagcatcacccccaccttttcaagcagcgcgaacaatttttgcaagacgagaggcaaagagtggacaaactgttcaacaacaataacaacaacagcaaaagcaataataagccattagaaaaagcatatggaggagcatttgcaagtgaaaaaagatttggggaaaaatgagagaaatttgggcatttaattacccataattacggtgcttttaatgacaattgacataaatttgcttaaacgtccccagccctgctgaatggatggacttttgttttgaactattgccgaggct

SEQ ID NO: 19803 - DNA, 2178 bp, Heterodera glycines
attaatgatattttaattctttgttttatttctcagaaaagaagtatatattttggcattcattactttgcagcatttggttttgaataattactttttatacagtaaaaatgtctttttccagttttttaattaatcaaattttgctattaaatagatttgtatctttcaataagaccaggttgagtgaaaattggtacattttaacaaacatgctaggaaaaccctttgaagcagatacggcactcaaaagatgaggagaatgaattttgaaaagatgtatacgaaaagggaaattaaagaaatactttgaaatttatattatatttatacaatctttaattaataaagtttattaaagaaataattcgttagaattattttttttaatttttaattcgtggtaaccccttaaataatgtatagctaaattatattttaacaaatatcaacaagattgtgctttaccaaattatattgataaaacgaaacatcaacctattaaaaagataatttattattttcatttaaacttcttaactcccgtatagattaatttggatttttatttcgttaagtttgtttcgttataaaaacttattatattttgcccttttttgttttcaaaataaatttaataagtaattaataattttataaattcttttattaactttttaaaataatcttatcttcccatttgtttttaacaaattaatgcttaaaaagtagataatattcccaatcaaattatcgattgattttcgatcgataatttgagtgtgtctactttttttttctctgacatccccttccacaaacccaaacctattggatggtctcctcgagagagagagagagtacattctatgatttctctgactaatgaaatcgactttaatttaatttgtttttttaaatttattaatcgataattttatttgaccccccccccccatacctattggatgatctttgattccttcaaccgaaacctattggatggacttgtgcgcgagaatttaattaatttaaattttaattaattaatttaaacgagcgagagctgcgcgactatttccgataaattatggaaaatcaaaaacatggtcgcggtctcgaaccgttgagagtggaagcgaggagcttaaccacttggccacaggggcagttgaaaggtatgggataattgttgactttatgatgaaaattccgttaaaatttattaatcgataattttatttgaccccccccccccatacctattggatgatctttgattccttcaaccgaaacctattggatggacttgtgcgcgagaatttaattaatttaaattttaattaattaatttaaacgagcgagagctgcgcgactatttccgataaattgtggaaaatcaaaaacatggtcgcggtctcgaaccgttgagagtggaagcgaggagcttaaccacttggccacaggggcagttgaaaggtatgggataattgttgactttatgatgaaaattccgttaaaatttattaatcgataattttatttgagcccccccccccaaaaaaaaggcaaaacctattgtaaggactgtacacaaataatcaataaacccaagcctattgcatatatcatatccgaagctttaagtaaattagcaaaaaacccttttcttccggctgggctcgaacccataccaacttactgtgctaaccaattggccattttatgccactgggaaagcaaaatccaattcattaaattgtaaaaaaatgacgtcatcatggaaagtaaaaaatactccgccccttttcttgttggtcacgcccattggtttttgttttgctttgctaagaatacgactccgccttttggctttttagtttcttttttccgcctccattttttttttttgctatttaaccacagtttttctaaataaaaatcattcgtgttccattttttaaaaaattccatcctccttcgttttttccgatcttcctgcaatgaattctcttaaacgctttcaactcccggagcaaggaacacgccagcaagaagagttggattccgttgaaccgaaaaacatcagcgatgtggtcaacttcaattcggccggcgttttttatgttttgggaaagagtgacaaatatgccagtaccgtgtttacaaagtccaaat

SEQ ID NO: 19804 - DNA, 2353 bp, Heterodera glycines
tagagtcttggaaattcaatcacggccagccctgattagaatacggtaaaaaactgtgttggagaggtggttatggaagacatgtgcttccaaatgtaattttttttaaattaaaatgaatttaaaaaatcaaatttgtttgagaactacagtaggacggcattagcccaagtggatacggtagaaattaatggtgtggtagagattcttatggagggagtgctccgaagtgttaatttttttttaattccaataaatgaaaaatagaggcatctgccacgcttttgcctcacctgtccgatctgccagtgttctgctgctgctgcatccagcagcaactccggctgtttggttgtgttgttggtactgctccatgtcgttgttgttgctggtgttgttgttgttgttgtgtgtgcttgttgctgtaacaaatccatggatcgcgactttttgctcccattttttgtggttgtacaccaattctgctgctgctgctgttgatgttgttgttgttgatgatgatcactatgctgttgatcatcatgctcattagcataattgttgttgttgctgttattgatgtaatttgccgtcggcgtcattaataagccatttttctttttggcattatgttgctgatctgcttaacgaaaatccggtgcaatattcgtcaaaaatttgttaaaatattggaaaatctccccggttaagcctgaacgaagcttcagatttttttttgacaaggataagtgcgcttactctaatcaatccagcttatgaccaggtttatcagtcggattcctttgaactgttacggctacaatctgcgacttaactattcagtcaagtcttgaatatttgcccactccattttgaataattcctacccctgcacacgcgccgcaatttgttgttcaactgcagctcgtcctggcactgttcgtcgccgtcctgctgctggtgctcccccttgcgatcgtcgccctcctccgacagaataagagcactgatcagcgcgtcaagcaacgagttgcgctgccggctggcccgtgccatggcacgctcgttccgctcaagcccatgtgcgagccgttcagccaggaacatgcccagtctccgctcgttgttgccgccgtccagtcgttcaagcgtgtccttgtgccgcaacggcaccgatccatcaccaacggccaattcagtacattgcgaatcatcctccatggaccacgaatcgactaactgaagttcaagctgttcagcagcagcacccatcgacgactgttcatcatcagcatcatcatcgtcgtcgtcgtcgtccattttgcagctgggcatttcgcgcatcattaacggcaagtggttgttgtccggttcgcctgctgggagcgattcgcgtgccgggcaaggctcgccggatgagtcccagcgctgacttactgtagtagcaatgttttcattgttgttgtttttgttgttggcgatatgtgccagtgactgatggtgttcaacagcagtagaagatggttctgtgttacataaaatgttgggtatggtataataattatcgtaccttcttggaaaagattactgcgaatttttttaaaattgaaatttagcaacgaaatcacgcaacctcatttacaaatataaaacaaaataaacttgcaccctcaccatgatcgtcgatatattcaagacgttcagcaacagttgccgccacattgcccacggcatcggcaagtgaccgtgccaagttggccaacttttgctgttggcaaatgccatcctccgccaatgatgacaacgacgtcgccaacagttttggccgattgttattgttgttgtcgtcgggctgttcaacgagttcgacgaaatggcggtagtcgctgcgcgagttcaccacgacgacgaacggcgactgttgggacagagagtggggtaccgcggtcgctgccgcagtcgctgacgctgccagcatcgcggtgcgctcgctgggcacgccgcagaatgtgggcgacaacagtgcgccaaacgaacgctttgccatcgctgacgaagacggaggcggtggtcgataggttctgtgaattttagtgaattttgtggaaaaactttagaaaataatatcaaaattcgaatttaattaatggcataattttctttaaaatttcaatggcatttttttggttgttgaaaagaggccctgataaattcattaagccatcattaagatgaggactatggatgtgccgggtcaaaaaaaaagctggtggggaacagggacggcacggaattccgattttcgaaaatttttggggcctaggaatgccatccctggtggggactattactt

SEQ ID NO: 19805 - DNA, 2386 bp, Heterodera glycines
  unsure (1)..(2386): unsure at all n locations
ccgatgaaagtggcttttccgtgtctttgagccacaaaaactttgtgacttctctatcttctggttccaaagaaatctgcaagaaagcagcttggatatccgcgagaagaggaaatgtggggcatcggaatcgcaaaagcattccgatgagatcaggtaaaagtaccggacctctgtacaaacagtcattcaaactgtttgtaccccttgtgtgagcactcgcgtcataaacgacgcgaagttttttgcccttagccaacactccttgatgcggaatgtagtgctcaagagtgccaggtgcttccctggcctcttcaatgataccttttgataactggtcgttgattgtgctgttatattgctgtagaagttcaggagaatgtctgagcttattcaaagtcgacattaaccttgaaaaggccattctgtagttcgaaggaagattcggtgtctcttccttccacggccatttaactgaatatcgtccgccgttttcacgacggattgatttgtcaaacagctgcattgctgtttgatcatcatcttcgttggggtcttcctttatccctaacgattccaaattaaagaaatattcaatttctttaacagctggcatctgcccttgattggattcatcaatggccaccattgacactcctgtatttgggacctttggtccgaagtctgactctccattaactagagggcccagtgttgtttggatgacaaacaacccaggcaaaacttcctttttgctttggaaaaatttccaaaagtgccgagcacttatgagaatctcaggttcgtcctgagaaaaacttagagcttggaaaacatcctgctcctccgatgtgtaatcatctgaattccactccaccattttgaatggagtggaaatttgctcggttcgattgagtaggatttcctcccacttattgtcactccgttgaatttgaacggagtagacaggtgaatggaaccgtattggtccattcctttcaccaccgaaaccgtagacttccatttcttcggaagtcaccttatgtggtttcagtttttcaattaacgggtcagacatatatgaagtctgactcgctgggtcaaaaagaaacatggctttgatcattcgacgaggatcgcgacttgaccggaccctcaatcgtcgggtcatcaaaaacgcgtgtgacttctttgtcacaacgctggttaaaacatttgttctttttccgtcaaaaattgatatttcagacggattttcccttattcttaagggttcatttaatgccgaaaaatgattctgagtcggacgaggtggttctcctcgtctgttggaggactgtttcttttgaacagcccctcctttggatgtttgttgaggagtggttcctctcggagcgtctccttcagaatagcagatcatgaagtggtgtttttcaccacattttggacacctctttggtgagctgcattgttgagagttatgcccttgcataaggcaattaaaacatcgatgttgatcagcaagccgccttctgcgtgctccaggtgttggatattttggacacttgcttggtgcgtatcccatgtcactacaaagagaacaaagtgggttcgttcctcgttctcgaggagaaaaatgtgtttgttccctctgattaacagtgttaaatgatctgtgtatttggggagacatcatccccacagactcatttctgttgttgggtcgccaatgaccctgacgaaattggttgggagagaaatttgttcctctcccttggaaattgttcctctgcatttgaggaggaaaatttcggggtttttcttccccacggaagacttgtgtacatctttgtacttcttccttcacttcaacaatggaagtgattgccttgcgtaggtcggaacaatcaaatgttccacctgaacgcatttccttctccaccacttgagtgaggagatagtatggcaatttggattttatcgtggaggccatgaacttattttgttcattttctccaaaatctgacaactgctgacaaatcctttcaatggactctgaaaactgcctcagagattgaaccgaatctgacggttttgaaagatggagcaactctgattggagtgtctccacaattgacttctcatccccaaatcttttcttgaggatttctaccactcgcgggtagttttcatctgaaggcgggtacaaatcaattgctcttcgagcaactgacttctcgggaagacatcccaagagataaatgtgttttttgaagtcttcaatttgaagactttcaactgaagtctcaaacagcttccaaaataaaggccattctcggggttcacccggaaaattttggaagcgaaatgnggcggcaacatcact

SEQ ID NO: 19806 - DNA, 1625 bp, Heterodera glycines
acagtacagcaccgttctcgtcgcattgcgtaccaaaacggacattctcctgcgcacatgtcaaagtcgaggatgtgcagcacttcatacacctttggcattgtttttgactttttgcttttccttgttgtcacctcctccgctccgttcacttcgattgtaatcgattttggtgtccgcgatttgaaaacaaatccgaagtttcgtgccgccgatgtcagcgccgcttcgtccggactttgtgcctaaacatgtgaatatatgcgggtgttttgctgtggaattgccgtgcctgatattccaacactttgcccggctttctctccggcattacggtgtggcaaatggccaacaaacgccaaaattcgtggaccaaaaggtgattaaaattaattagtaataaatattactaatatgttaatttgcacttcttcgacgcccctccgcgtgtcctccaccaatgtccggtcgtagaaacggaagtgcggctcgtgccaatgattgtccgaaaagtccaacgccggcggcgtttccttctcctcgtcaatcggcacaatttcgccacgttctgtcattacatcgccataacttcgtccattgatcgaacactttttgaacaccgaaaatggacaaaagcaaaataaatttatttgaaatatttaaaattaattaaatttgtttgttgttaaaatttacaatttttaattttaataaaaattaatttaattattttttaaaattaaaaaaatgtaaatattttttataatattttatcatttcttgccattatgttctgcgtcagtgtccccgtcttgtcactgaatacgtattgcacctgtcccaactcttcgttcagtgtgctcgtcctcgcccgtgccggagtgtccgttttgtcgtcgtacattttgatgtcgttgttaatgaatttcgagtgggccaaccgaatcatttcgacactttccattggggagagggaaaaccatatgcatacagtatgacgaagaaaatgcagtaagacaaagtgaacgtgaaataatggcatttgaaatgggagtgatttggagaagctttgctcgagagtcaaattcccgagtggacagagtctgcttttgcctttggcattttgcctttgtttgcccggggcattccctgcggcattacctaatgtatagcgaaattggcacgacggtgttcagcaaaatcatgtaggaaaagaattggagggcggcgatgatcagtgccttggacggtcccactgagttttggtcggtttcctcgtcgtcggaggcgggcaaagaaatgccattgaaagaagtcggcatggaaaggacttgtttggtgctgacgacgaactcatcccatggcaaaaacacgcggaactgacggcccgtgacgtgctcccaaaggccggacatcatagtgcaaatcaaacacattgccaacagaaacagaacaatctgaagaaggagaaaaagaagaagaagaagaagaaggacgatggagtggaagaaatgggaaaagagggaagaaagaaaagggaggaaaagagaaaagaaaggaagaagaaaaaaacagaggcagaaaaagagcacagagaaggcgaaagtgtgccgtggctgaggaag

SEQ ID NO: 19807 - DNA, 2411 bp, Heterodera glycines
acaaaatttttaaagaaagtgcaaattttttttttttttttaaataaattagttatttattaagttgctttccaattttcgttcgggaaacggcttcttatttggaacacctttcgttttcatatcagtgacgatacaaaccaacccttcaggcgtttatctattaaatctgctgtcatccccggtggcactacgaaattcattcaagtattagacaattcaatttaaatcaaggaaaattattttagcccccagacgtgtgttggaacgcaccgtttaaaaacaaaatcaggcaaatttacgatgaatggatggtgaatggagagaaagaaacaacggcgtccggaaatatgaaggctccgccaatggagacgtatctgcaatggattgtcaccgcctggaactcactctcgaaggaactgatcgccaaatctttcctgtcatgtggaattacggaggaaattaatggaagtaaagatgagctgatcaatgttttcaaggtcgtctatttgcagttttttgtgtatttttcaagtgttttaaggcggacggagccataccgaatgggcttaagcttctgagccaacgtcgcaatgaagaaaatgttgtgaaagcacttgaactaattgatttaggacaagatgaaagcgatgtctctgtcgacgttgctaatgaataatattttcatcaaatttattttcttttttaataaaattgatcgccccatgaagtctttttttaggggcctttaattagaggggggggccttctaccagaggtgggccttctattttcaacccctccaaaaaggggcctttaattggagggggccttctaccagaggggggccttctattgttcaacccctacaaaaaggggccttaaattagaggggggccttctaccaaggggggggccttcaaatacaggaaatacggtatttggtacatattttgggttagggatgcgatttttaggtaagaaaaatcccagaataggtacttaaataggtaaaaaaaaatctctaaataggtattaaataggtacaaaaattccaaaataggtaccaaaataggtaaataaaaatttttattaacgattttttagtggaaaaaagcaaacaaagagggaaaattttggttctacatatctctttgtaaacgaaaatttaaatatattaatattttcttagataatattgacattttaaattaaaaattttgtcaatagaaaaaataaataaattttgggataaatttttgagaaatttttccaattcttagggtgcatttttgaaaatttttttggtcgattcttatgggtatattttttgattttattgcatttttgttaagaattttttgaaaatccttaaaataggtaaccaaaatgccgaaataggtataaaaataggtacctaggtaataggtagaaaaatcccgaaataggtaaaaataggtattataaaagtgggtgtagaagctccaaaccaagctaaaaactcgttttttatgcttatctcaacgttacaagtgcgcaaaaattttaggtatttaactaaaaatcgcatccctagcaataaaaaataaaatataccccaaagaatcgacccaaaaattttctcaaaaaatacacccctaagaatcgatccgaaacttttcaaaaatgcactcctaagaaatgaaaaatttgtctccaaaattttttgtgtttaattactagggatgggatttctaagtttttacttattttttctgcggctttaactcaacgagaaatacacgaaaaacacattttttgtctgaaaatttttgcgttttcacgcccttattcgaccttagaaatccttatttttgatgttcgcccttagaaatccttattttggatgttcgcccttaaaataagtttttgtccttattttggcgttttgtccaaaatttattaacaaaaatgcaataaaaaacgaaaaatacacccctaagaatcgacccaaaaaaatttcgaaaaatatacccctatgaatcgacactaaatttttcaaaaatagaccctaagaaatgaaaaaaattttctaaaatatagcttatttgtactgcaatcagtgaataaaattgtttgccttagtctgaaattatttcatgtaaaaaacagcaattttaaaaattataccctaaatttgactttttcgcccttatttcgcgaatttttcgcccttatttacggccttattttggactttttcacccttaaaaatcccatccctaatttttttttttttgctgtgcttttcccatcgtttacatttcgtcgtccgtccgtcgcaaatcgccttaccaccgcgccgtaagtgaatggaaaatgagtgagtgagtgtttgtctctactttgggctgattcatttttgtccattg

SEQ ID NO: 19808 - DNA, 1913 bp, Heterodera glycines
agttggaaccggagggcttgggttatgggcatgcgtggcacccgtgagcagttggaatgggcatgcgtggcacccgtgctcagttggaatgggcatgcgtgcacccgtgaacagttggaacccgagggcttggcgaatgggcatgcgtggcacccgtgaacagttggaacccgaggcttggcgaatgggcatgtggcacccgtgagcagttggaatgggtatgcgtggcacccgtgagcagttggaatgggcatgcgtgcacccgtgaacagttggaacccgagggcttggcgaatgggcatgcgtggcacccgtgaacagttggaatgggtatgcgtggcacccgtgagcagtcggaaagcgagggcttggcgaatgggcatgcgtggcacccgtgctcagttggaatgggcatgcgtggcacccgtgctcagttggaacccgagggcttggcgaatgggcatgcgtggcacccgtgagcagttggaatgggcatgcgtggcacccgtgagcagttggaacccgagggcttggtttatgggcatgcgtggcacccgtgagcagttggaatgggcatgcgtggcacccgtgctcagttggaatgggcatgcgtggcacccgtgctcagttggaacccgaggcttggcgaatgggcatgcgtggcacccgtgaacagttggaacccgagggcttggcgaatgggcatgcgtggcacccgtgagcagttggaatgggcatgcgtggcacccgtgaacagttggaacccgaggcttggcgaatgggcatgcgtggcacccgtgaacagttggaacccgagggcttggcgaatgggcatgcgtggcacccgtgagcagttggaatgggtatgcgtggcacccgtgagcagtcggaaagcgagggcttggcgaatgggcatgcgtggcacccgtgctcagttggaatgggcatgcgtggcacccgtgctcagttggaacccgagggcttggcgaataggcatgcgtggcacccgtgctcagttggaatgggcatgcgtggcacccgtgagcagttggaatgggcatgcgtggcacccgtgagcagttggaacccgagggcttggcttatgggcatgcgtggcacccgtgagcagttggaatgggcatgcgtggcacccgtgctcagttggaatgggcatgcgtggcacccgtgagcagttggaatgggcatgcgtgcacccgtgaacagttggaacccgagggcttggcgaatgggcatgcgtggcacccgtgaacagttggaacccgagggcttggcgaatgggcatgcgtggcacccgtgagcagttggaatgggcatgcgtggcacccgtgagcagttggaacccgagggcttggcttatgggcatgcgtggcacccgtgagcagttggaatgggcatgcgtggcacccgtgctcagttggaatgggcatgcgtgcacccgtgaacagttggaacccgagggcttggcgaatgggcatgcgtggcacccgtgaacagttggaacccgaggcttggcgaatgggcatgcgtggcacccgtgagcagttggaatgggcatgcgtgcacccgtgaacagttggaacccgaggcttggcgaatgggcatgcgtggcacccgtgaacagttggaacccgagggcttggcgaatgggcatgcgtggcacccgtgagcagttggaatgggtatgcgtggcacccgtgagcagtcggaaagcgagggcttggcgaatgggcatgcgtggcacccgtgctcagttggaatgggcatgcgtggcacccgtgctcagttggaacccgagggcttggcgaataggcatgcgtggcacccgtgctcagttggaatgggcatgcgtggcacccgagagcagttggaatgggcatgcgtggcacccgtga

SEQ ID NO: 19809 - DNA, 2015 bp, Heterodera glycines
ataagaattgggataaaaatgatttaaaaaacaatttaaaataaaaaaatattataattttaattttgaatgggaatggaaaggccgacaaattccaaagtgcctttaagaagccaacatatttattatcattcattcattcagaggtcctcacactcgcattttgtcaatgaatttcatttccatattcattccttgaaatttgaggaacggaataattttttcgttttttttttttgcgggggatggaatgccaaaaatttgaaaatcggagaacaccgagcggagaatgtggaaggaaggccacacaacagtgagagcagagaaggcagaggcttggccgtaaagcatttttttcacgtaaatcgaaatgtgaaggaggaaaaggggtggggaaggtatcaatttcatggtcgtcatcacatagcacgagcacgaccacgacgatcgggcagagtggttgtgaagcgtggggggaggcattgttcggactgatcagagaagctaatggcttggccataaaagcgatgctaagggaggattgatcagaaagcggtgatcagagaagccaattgtttggccatcaaagcgccggaggggagaagcattgtgtggagatgctgcgggattgatcagagaaatagaaaggtgatcagagaagcaggtggcttggccagcgaaggaggggaaaagaagcagcaacagtaaagaatggagaagcatatagagaaaaaaaaagctgtgcatacggatcagagagtggtgatcggccatgaaatcgccggaaaagaaagcaaagtgctgcaggattgatcagagaatcagatcaaaagcatggaaagaaaaaatattgcgatagatcggagagtggcgatcagtaggtgctatgatgaagtaggggaaaggtgttgtgtgaaaaagtttcaggattgatcagagaaattagtaaagtgatggagaaaaaatatacggttcacgaaaaagtttcaaactggccagtaaacgagtgataagataaaaggccgcatggacagattaaataaataagaaaagtgaccagataagtcggtggcttgggaaaagattgaaccataaatgaaaagcataagcaaaaaaaatgccttcgaaagaacattggtgattagagataccgaaggcatggcaaacaaaagtgccgccggagagggaaagccgccagatcgatcagaaaaggaagggcgatcaaagaggcgcggcggctctaaagcatggccaacaaagcgccggaggggaaaagtatatagggacggggaggacaaggacaacagcaacaacaaaaaaaatgcttaacatacataagcgcacaaaacattaatgtgtgtgtgctcttctgctatgtgctgctgctatgagaatattttcgccgtcgggggcggcggcggcgggcggaggcgctatcgattaacgcgggggcggccaaagtgtggggggaggcggggaaatcggtgaaaagatcagcagcagcagcggcaacagagctggctgatgaaggagggagacgagacgagacgagagtgagccagcagcaagcaccccccgagaatgacagtggggggacggggagggtgactgatgggaaaatcggggtaatgggggggggggaaaggtatggagtgaatgatggcggcgacggcgtcggcggcggtgtagacagagagagagagtttaagcttaatgggggtggagaggaagctggctggcttgatcagcagtatgcagtgtgcaaaagcggaatgatgatacgaaatttggaatgcccatttttgattcggttgatcggtttggaagcagcagaacgaacggcgccgtgtgcctttttgatcactttttaaaaccgggagagagagagagagagagcgagagagagagcgagagagagagcgagaggttgattgatcaagtggaatttttggagggggcaagagaacgggagggagaggctttgatcagccggaaagcgaaaatcgaaagctttt

SEQ ID NO: 19810 - DNA, 1730 bp, Heterodera glycines
tttgctgtggtaaaattatctttcgtcgtgcaatgatctatttatcctccttttctgcatcagatcacaaataaatttttgatttattatttattattgggttcattcaccacccccgccccacccgcgcacccaccaaaacaattaatgaattaattcgctttgtgctggttacactctcccccaatttgtggaagagcagcaaccgcagcagcagtaatagggaaggttcttttgctgcgcatagcaaatacgtcaattccgatcacattactgcacagcattaactttcttctttctttctttctctctctctctctctcaccaccaccacttattaatgataattagaaataataattcactaattagtggctaggtgagtcatctaccgccacattttttcctttttgctcggggcgaaattgcgtggcaatcactccgcactttgatcaccaatttttcttgtacacaaaatgattttttcctcaataatgaatgttctgatcaaaatgtgaacaaagtgagagccatgaacaccctgacactccgatcaaaaaagtttaattattacaataaccgggggaggggaatcagtcggccgaatttcgtcacagtcatcggaggaggttggggtatcaggccgaggaccaattttgttaatttgtaaagtctgaggcccattctgagcaagaaatgctagaaaaaattaatcgaaacgttaatttctagtacattttagcagaaacaaacaatcaaaattttaatacattgagataagagaaatagagactaaggagttagaaaatgatcaaagttggagatagagagaaaaaaaagttatacgaaagagactatagtgatcagcgacctaattaaagacatattggcagaaaaaaaagagaaagagagagggcgaaaaagtagagggagagagggggagctgagaaaacaaagaaagtaacacattaacgaatggacaaagttggcaaaaatgggtgcagtattcgtgatcaacgaccttaaaaccccttaaaacttattttcattaatttctaaaacaatatagattgtcagtttgtgaaattagagaaagaaaagagagagaaagagagagagagagagagaaaaagagagagagagagagaaaaagagagagagagagagctaggaaaagtagaggaaaagtacagagacaaacaatgaggtagagatattgctgcggggatgagagtcacaaggttgcgcagagatgagaatggaatgtgccaaacacaataactcaccgcaagcttcgactttctccgtcctttcttcatacgtcacattttacgccccattcatggtttattgttttgttgatcagagcagtcggctgctgcggcaaacagtggtaaaactgattgctgcgctgatcagccaccgatcggtgtcaattagtgtagcgatcaatgtgtccggtgtccccccccccgcatcacaacggtcgccgtgcgtcgccgcattcccccgcggtgcacagtgctgcgcgaccccttcccacagcgcggcgccgacggcggcaagtcgaatgacaacggcggcggacgcagcgcaagcatatgaagcggtgcaagtattcacgtgaataacacattgatttggtcccttactcagtccatcgcttcatcaaatgatcattaactaattaattagccaattagtagtgactataatagttctgtctattg

SEQ ID NO: 19811 - DNA, 1837 bp, Heterodera glycines
gtatatttcaattttttgtttccctccaaatttggcattattccgccccatttggcaggtgacgcgcaaaaaaatcgaattgaatcccttcgcgaagggatttagagaccaaaagggcgacgaggaggaggaggaaaacggagacaaaaggcaattatttaattactttaaaaatttggtgacaaaaaaagttcagttttttggccgaaattgggacggcggacgaatggaaaaggaaaagcaaagggacggcggacaaaagcgacgaaaagtcagcggagagaaaataggaattttaaatgaattataacatataaatgacgagctgctcgggaagctttgaggcaaaaccatgggcgggggagggttcgaaccgccgtctgtgacttcccggaccaacgttcaaccggctgaactgccctggccctgtcttctccggctccctccccaacctttgcctatggagacttttttctaattttcatccccaaaatgccatccccccgcttcgtccacagaaatgccaccgtctccgtccgttgccccactaccgtactggtgaagtcctaccgtagccccccgcccgccccaccggcgcttccgtcggtgccgtgccatcactcgacccaaatgcgtacaccggtgccccgaccctttcctctgcactcgccgttttggccccctctgctgccgccccatttgttgagcggccttctcctccgaatcggtgccaatcaacagcaaatgagagagcaggcaaacagcgggggacggcagacagagaagggagacgagtgaacgtgtgaagaggagagacggcagagaaaaatgtgaaagaaacgaagcaaaaagaattttatcagtaaacaaaataaatatttatacacaaaaaagcgcagaaaaaggcaacttttcatctctctgtatacagtttctcacttttgcacactctctcgccgtgtctctcatttcgtgtccattttcattcgctcaactctctctccaacttttccttacttcccttcactctctcctccctttgcttgtctgtcgtatgttctcttttctcctctcgcttcttttcctctctcctcttgcgctgtctctcctctttcgcctccctctctcccctgatccgatcatagtacgacgtgctgaccacgtcacggggcgtttgaaagccgccggtgccggactgagtttgtagaatgagctgtaagggttaaggaggagaagctaatttacgaatggcggaagaataagaggtgatcaaaaaatgatcaatggaaaaagaactgatcataaaatggttaaaaatgatcagaagaaaaaaagccgatcaaaaagtagtctaatggtgggattactcgactgatcagacctgtccgccaagccaactcatgcacttgttcgactccatctgatctctctccgtccgatcgagtccggcaatattcatcgtcgcttggcgagtgccggccgcaaccacctgaaacggacgaagacgacagacactcttgtcgagaagcaatgggctttttctcgtttaaatcgaccaaatccctgtccttctcgtccgcttactcttatcgcttcgcgtccgtcccgtgccgcgcttgtctcattgacgcatgccaaccttggcagtgccgctcggctcaagatcagctcgtgcctgctccattctcggcccccaatgctaaccatcttttcgggccgtttgctgccgaataatcgtgcgcttttcgcctcggggttggacctttgggggagggggggggggagaagcatattaaactttgccatgcttttcctttgtccgtgcttcactcactga

SEQ ID NO: 19812 - DNA, 2162 bp, Heterodera glycines
  unsure (1)..(2162): unsure at all n locations
atcttcttcccttagccagttttaaaaaaaaatatataattatcctaaaaaggcaagtaattaaataaataaataaactaaatacacacacactcacccaattagtggccgggttgtgcaataaagactgtaaataaacataaataaaattagtaaaaaataaaataataaattaaaatgagcaaattttacatggttgccgtcgccccaggggaaaggctaaaaagatttaaaataaataatttaatttggaaaaacaaaaacaatttgagagcgaccacctttcgacgcgtggccaaatattcgtatgcgacgtactcagggcgtggagaatggtgctacgaaatgggaacaaaacaacaattaattaggtatattttaatgaaaaaatatataatgggtcattaattaattactttaattttacacggcttccccatttttgtttcaaaattcgtgaaaacaaatttcctagtgcttttgtagctgagctcggattgtggcattgcttttgagtaccgggacaacccgaattcgaaggaaaagtcaaaaaatgaaatttttttttcaaacttagcatttttgctgtaaagttggcttaaataattttttgttgctgtatcgatgagtacacccaagtccttttaaaaaaaaatatttaaatttaaaacgcagtttttaaaatgttttacggaattttgaaccaaattatggcaacaaatgcttatgcagattaaaaaaaatttaaaattgtgcgttacacccaccacattctgatggtccttccatccgcaactgaaaaagaatttcgtttttttttgagtttaaataattgtttttggcgttgtgcactcactagcccgcgaataccaacagtggcatcatgacgaaagcggagaatttcttccagaaggcggcaatctgaaaattttgtagtatactatagactcgtctttattaccatgtctaatgttaaaattgggaagggaaggggggggggtggcaaaatgccgtgaaatttgtgttgccatgcaatggaacgtgtcggcaccaatcagtcaccaaaccagtcacacaccggcacggcgtcacgcagtccggtcttgtagtgcttgtcaaagtcctcaaaatcgttgccaatccaatgcgtgccgctgcccacgccgcgtgccgacactgcacgcagtgccaccggcgacgggacgcccactggaacaaataatgatgttgtaattgaaatgtcataaaatttggtttttttatggataaccggagcccggcaatggtaaagttttgtggtttcttcgaaaaataaaattaaaaatttcgaaaatgcattttcgaggctaaaaaaatacgctgatcacgaatctgagctcggattttgcaaaatcattgattttttccatgacttttcatcaagtacttgatttttcaaaattttaagaaaattaatcgggcataaaaaactcatacacagatgttgtagagcacaaaaagagctttcgaataagctatctggagaagtcgagcttttagtttttttaagattttttgaaatttagttattgatcctttgtgggtcatatgagacggggtccggggttcgagcccgcttggctgcggcttattttttataatgatatttgatgaaaatcatagacaaaaacattggtttcgcatgatcagagctcggattcattttcaacgcatttttaacccctaattcatcagaaaaaataaaaatgaaatttctgaaaaagccaagtacttgatgaataatcatagacaaaaccaattattttgcaaaacgtatttttttagcctagaaaatgcacttcggaattattttattttatttttcgaagaaaccacaaaactaccattgctggatatttggttgtttttcgttgcttgtttttgtcaaaagtcggagtacacattgttttggttttgccgtacatcaaaacaacgtcgtcttactgtatctgatgggttttctcccattgcataaattgtttgtggggacatttgtccctttctggcattgatttgacctcctcagtctgttgcgtttggtggtttggttgagtttgtttttggttgcctttttacgagtgtctctcccccactgtcnagtgccatcctcggacagtgagcag

SEQ ID NO: 19813 - DNA, 1132 bp, Heterodera glycines
atttattaatttaaaatgaaattaatttttttgcaaattcaaaaaatacataatgaaaatttttaagtaaaaaaaattacaaaagtgattaaaagagctacaaaagtgattagaagaggtacaacggtgattagaagaggtacaaaagtgattagaagagctacaaaagtgattagaagaggtacaacggtgattagaagaggtacaaaagtgattaaaagagctacaaaagtgattagaagaggtacaacggtgattagaagaggtacaaaagtgattaaatgagctacaaaagtgattagaagaggtacaaccactgtcgaaaaggtacaataattgttggagaggtacaaaaattgttggaatggtacaacaatggttaaaaagagtacaatcatggttttaaaattaaataattaaggaaatcgtttattaaaaagtaagattaaaaattgaatgtaattaataaatttttaaaaataaaataaatttccttttattaattaaaaagagagtttgaaatgtacagggattgaatatttatttaaattgaaattaattttacaaattctaatttaaaaaatacaggagttctttaataaaagtaaataaattattattttaatttaaaacatcacaaaaaaataatttaatttaaattaaaaaattttattttttatggattaaacaaaactatttatatttattaaaatgaaaattaataatataatatttatttaatttgaaatgaaattaaacatgtaaaagtaatcaaaaaatgcacagaaaattaatgtacaccgtccggatccgaacctgcccctcccccctcaaaatgatgcctcagaatccccaatcacacagggattctgaggtcttaactatgtcaaaagtaaaatctgatcacgtattcgtgatcagcggcccaaataacccctaaaatcatattttggaagatttttggtgaaaaaaattttccactcaaaaatcctggtcacacccctgtctgtggtcccgaatctcaaaatcacttttatttttataaaaattcttaaaaaagtgataaaaatgtaaaataaaatttattttatagagaaaaaaattgcggatttttgtagtattttacttttcc

SEQ ID NO: 19814 - DNA, 2692 bp, Heterodera glycines
tgggatcagggctgggcgaagctcggctttgcactcgaagccgaagccgaaggcgaagcccaatttttattcgaaaccgaagtccgaagctcgaagcccaaaaaacccgaagttttcgaagccgaagccgaagttttttcaaaatttttttttaattccaaaaattttttcatgacaaaatttcggttaaatatcaaatagaccaaccaacaacccctttcgataaataaatataatgattttttttaacaatgtattttttaaatttttataattcttagaatactcacagtttttgagtcaatttaaaaaataaagggaattttggaactccggcggtgccgataggcgccgacgggaaaaatttgaaattttagtgacagatttagttcaaaaatgaaaagattttgcgattttaattgttaaatttatattaaatttccgtcgaaaaaagaataattttgaaaaattagaagaaaagaaagtacttggacgggaactgatccaaagaaacataatgaaaagagcaaagagcactaccactcgaccatgcgtgtgaacaaaaacataaaaacaaaaaattaataaatatatattaatttaagtttatcaaaagcccatcactaagggtgcattttcacattgaaaactcaatctttaggggtgtatttttcccgaaacttcgggtaaaatagccgaagcacgaagttcgaagctcaaaaaacccgaagttttcgaagccgaagccgaagtttcgcccacccctgatctgggatagaatattcttcatattttctttaccattattttaattgaaattttaattaaaaaaaatattccaactttttttctttcattttaagcatcctaaaaacccaaaaattaatcaattggtctttttttacaaattctgttaacaaatcgcattaaaaaatacaaaatttttcccggcggcgcctatcggcaccgccggccctccttgttccccaaaagtcttgagaaaaacgtgccgcgaaaaaagcggtgttgaaagcaaaaaaggtcattgatttacattaatttacatggccggagaccccttcgcaaaattggaaaattggccgctgatcccttgttttgcaataatctgaattttgaggtctacatctgaattttagtgttctttatcctgaatttgaaaaaaaaacttggtcaccctcaatatacatatacttctgaacaattctaatgctaaaaaacaggcactcgcgcgaaaactgaataaaaattttgtatttgaaaaattttgtccaaaaatttttacgttggaaaattaccggtttttaccggtaccggtaccggttttttacaattaccgattaccgctcaactctagataatactagtgagctgagttcccatttttaatcataaattaatatttttttagaaatctcaaaaataaaagcagtaaaaacgacgaatgaaaaaatcactcatttttgagaagaaaaaaaagcaaatttttgaattaaaatctgtgtacaattaaacaggaaaaaagttggctttttttttgcctttgtgcctgttttgaaactttttatttgtgctaaaagtggaagatttaatgatttaatcacaacaaaggggaactttgaaaaatgcatatgttaatggaagggtaacaattagcgaagtcaattgcaatcaataaaatatgttcagttgatgggcaattattggatgtacgaaattttgtgtccttttcgcttaagtcctatttttttaggttgaatttgaatttcaattcgttttgatccgtcaaaatattttcatttaatttttacattatcgttttaaaattttaaaaaatggaaaaaacttataaattttaagcataatctccatgctaaaaggctttgaaaagttatttgctggaaaatgaggtgatcatgaatttgaatttgatttcgaaaaatcaatgtttttgtctatgattttttctcaagtaccataaaaaataagctgcagtcaagcggactcgaaccccagcctccgtctcatatggcctctaagggcaaataattaaatttcaaaaaatcgtaaaaaactaaaaacttgacttctccagatattcaatagctcattcgaaagctctttttaagctctacaacatttgcatgtgagttatcaaaattttaaattatgtaaacgaaacgaaataaaaaaaaagcgcggtcttttcaatttcaaaacatatcaaaaatcacaacaattttaacttttatttttacatacctacttcttctggctttgtttttcctcatatatatgttacacatgtttcggttctattcactttatgagtccaatcaaaattttatgagtctagttcatttaactttctttaaatggtagattcttttgttttttgtaatattaccttcatcattcaaacttagtgctttcggatatatcaagaacaaagggattccctaaaagtcaattttagttaattgattggactcataaactctgagtggattcaaaatgcgtttggactcataaaatgcaaccgtactatgacaatttccatatttttccagtttagatgggtaaaaataaattcactgttattgaccatgacaatttgtctggtagtccggatagaaacagtggcattttgacgaactcgcttgacatttatgag

SEQ ID NO: 19815 - DNA, 2041 bp, Heterodera glycines
ttcgtcactgatcggcgcacgtcgtttgtcttcggtgctcttcgccgccgccgccttttagaattggggaaaatttgtaaaaaaaaatatacaaatcaaacccccccccccccacattttttgcactggtccggtgacgcgctgctttgccaccgactttgaaaattttcataaaattccctcccctcctcataacagacggttttgcctccaccggtcgatttcgtcgtcactgccggtgcactgagcgccacaatttcatcgctctctgtctctaccaccaacacatgaaaaatttaaatttaatgaaaagaaaaaattttttaaattttcttacttgcccattttccgcattgggcgctgtgtcgccgcctccatcggtcgccgccgccgccaaaacatcaacgtccggcacatgaaaatgggaaaaaaaggattatttaatgagaaaaattttgaaaaaaaaacattttttttcttacttgtccatttgccgctgtttcgccgcctccaatttcattgctccttccatcggtcgctgccgccaaaacatcaacgtccggcacatgaaaatgggaaaaaaattatttaatgggaaaaattttgaaaaaaaaaacatttttttcttacttgtccatttgccgttgtctcgccgccgccatcggtcgctgccaccaaaacaccaacgtgcggcacatgaaaatgggaaaaaaattatttaatgggaaaaattttgaaaaaattctttttacttgctggccattttgcgcatttgccgtcgtttcgtcctcgccaatttccctgtcccgggaacgcgcgccctacaaatgaaatttatttgattttaattattaaattttcaaaacaaattcataccccccaatgcaccgcgctggtttctataccagaaggagtaaaatactaaacaaaatttttttaattttatttttattttttttttggaaaacaggtaaaaattttacatttttcataaggtcggtggccacatttgccgccatccgtttgaggtgggatggcggcccacccgtcctcttagcaaagttacgtttcatttttttaataaaaaattggaaaacaattctaaaataacaacaaaatatttgcttaaattgttttttggggagtttggcgtcgctaaagtgaatgaatgaatgccattcattcgcccccccccctgccctcctcggtccaatgacctttcccagctagaaagcgtatggggaaaagaagcagagaaaacgacgccttattggcgtggtcatctccaccgaaaaatgaccccctcattcgcttatcggcacccccaattttctctgtctgtctgccacttcacaatttgctctctctctacccgctctttctcccttgccccctgcaatatctctcttcctcccttgccccacaatctgtctctttctctcttacgtcacaatctctccttcctctatctctcttcatcccttgcgcccttcccaccctcttccccctctcctccatctctcactcttttcttttctctgccccacaccactgcctgcgccccgcgccgccaccaaatgatcattaatcaccgcatcgctgaccaaaagtttttttttgccaaaaagttttacatcactgtcgaaaagtttaccccccccccataagcaaaagctttgtcccccattccacaaaagttttttaaaaatttccattggccaaacttttaaacgttttaccccctcccccatttaaaaatttaaagtacgtctacttaatgaatgccgattatgaggagagggaattattgctgaagagacgtgccgaagtgaccatcgattcttatctttggaaacgctaattaagattttatgatgattaatcagaagattgctatattatggtctagatacattaaaacctccccaaatcagtgaatgggtccatttctgatgctttatctgaactagactaaagtaccgctaaactattagtacttttgagtctaagtcggatcgcgacaaacacatagatgacaaaa

SEQ ID NO: 19816 - DNA, 1714 bp, Heterodera glycines
ccatgccatttattgtgttgcgtcacattttatcatcagcaattttatcaacgattaatcacaattaatgagttatgtaattacatataaataaaatacaaaggaaatggacgaatttgcggtgagcaagcaaaagtcaaacacatccaaacaataacataccgtatatgctctaattatagcccatgggggattatttttcaacctcctcagaaaaggggggataattagagactgggggattaatagagactgggctataattagagcatatacggtaattaagtaataacaataacacaatgtaacatcacatcattttcggtcacataatcgcatcaatcaatcaatcgattaattaattgattaattaattcattcatctttcttctgctgatcactcggcccgggagaagcggcgtcgagaagactgaaaaacgatgattcaattgcaattataactcatcattggcattttatgagagtttatgagtccaatcaattctaactttccttgattttttgtactttaccataattctgtccatttcaaaacaaaaccgtacatttttggatacgaattgaaagcacaaagtctaagcaattgttgacgattggactcataaaatcattaagcatttaaaattgtcgttcacccatcgtcgtatccgccgtcactgatccgaatgtcaattgggttctgtcgagcttggaattctttcaacacattatgccaatttctcccattccacgcaattggacaacggaagagcaaaaaggcatttggtgattgtaaaagtatcaatcgttctccagtcacttcgttgatcagttcaaatggcacaatgaagtcatgcggagacggcggaaagcgaaaacaaatgaaaaaagaaaccggagaagaagcattggaaaatgccttaaaatgggacaaaaaaatcatagaaaacctaattaaaagggataatcaccgctttaaacggttccatcattgacgaccattgatccgccgatgaattcaaacagtatccgagccacttcggcactttcgccgacaattctcaccgatctcgaccaattgaattcaatctattccggtgatttgttgcccgatgcgactgttgatgatgattttgatgggccaaatgcaacaatttctgctggccaaatgttgtcaaaatggttgcacagtccgagaaaagatggcatgccgaagcaattgcatttctttttgaaggagccaccaaatatggaatgggccaacactctcaaaaaggtgtggccatattttcgttagccaactgattttgattgcatttaattaatgtccgtccgttttcccattgtttagcattttctccgtgccaatgccatttcttcggtcagttaccaaattcaatttactgttcagcaaccgtcaacgcaaattgtgccatttgaattagcgaacgaacagaccaaggaaaagcggacactgatcaaagcaagcgcaaatgtttgggaagaccgctgggtaatgaaacggtgccaatattgggagacggcggcggttcaatgggcagcccaaaatttggacggatttagcactgtcgagtttcattattacgtcgaagctggcattgggtgagcaacaaaaaagcatttgattttgtttaaaaaattgtgccgaatttttaaggctttgtcgccacgtcgcaaatggtgtccaattatt

SEQ ID NO: 19817 - DNA, 3149 bp, Heterodera glycines
  unsure (1)..(3149): unsure at all n locations
tgttgtgtaccaacaatttattaataatcaaataaaaatanatgcacaaaatggtgaggtcggaggagtgcagcggcggaggataaatgtccaatgcgaatgaatggagcggagagccatgagtgagggaatgggcacccttataaagacgcggggtcagagaaatgtggaggagataggcagagagggagacaatggaaataatgtaagacagagaaagggggaggggaaaagtcaataacagtgatgaggtgtaagtgatctttgatcctatccaacaattaattaattaattgcaccaccattgggctccacagcttttgcgcgcacaatgtctttctcaaaatgggcgcataatggacacagcttgtatgcacatcaaacgcaatccaacagcagcaatagatgggtcgaaagctgtgccgccttttgtcaaagggcgccggcgctaccgatttggcggcggcaacaaattttaaggcaattaagtaataatgatggaaaaaacctgaaaatttaaatgggaaaatatgtaaatggaaaccccataaattaatagataaataagcaatgcttgttcaagaaaaagcaggaatgtgaaaagctggtttcaaaattattgcgtaaaaaattggaaatatcagggtgcgtgagtgtgtccaatctcgggtaagaaatttcacgcgtgcctcgaagcatattaggttctattgtttgggtttaaaagcttgtaaaattaattgagttttcaaggaattgttgataaataatagatagataccagggatatttcaagtttcgcttttagccttttgcattttcgcttttttaggccttttgcgttcgcttttcgcctttcatgtacaccaataaagattgggtttaaataaacattaatattgcaaataattttaatttttaaccattttgccaaatcttattaaaacaaagcaaatcggggtcgcaaccaaaagtttatgaataaattttagaaaaaaaaattcgaattttcccttttttgggcattttgctttcgttttttattttggtttcgactttttatttttgcaacattcctggaagatacctatttttacacaaattcgaaattttttggaccttttatcccatttaagtgccaatttaggaattttgtataaatcccattaaccaggctccaaccaaatcattgcacaaaaattcccaagttttttcttaaaatttgattcaaaaagatactccaatacgttaaaatgatcaattttagaaaaacctattaacaatttctccccttccaattcccaaaaattttttttggaaaaagcacacgcaagtgttgtgaaaagtgggggcactgctgaatattaataaagctgcgctggggttcgtccgtccattaaaagccaaccgccgcactcgcggggacggcggggggcaatcggtcgcaacgtcagagccaacggttttttggccatctcagtttagcattagcattattacgaatgaaatttaaagaaaattaagtattaaaattttaacaaaacgctaattttcaattttagtcaaaataaatttattattcaaaaaatgttttgaaattataaacgaaaaataatgaaaatgtaaaagttaattctaatagcttaagaaatgactggcttcgtcacctgctgtttttattacaatttttaaaaattttaagaaaaaatccattttttataagaaaaagtaataaaatattttttaaccaagaaaagcctcgaatgtaagaaaactccagagtgaagtaggtaaattgatttattttttattttaattttattacggtacattctatgttttttattttaatcaatttttttttttgcttttttgccaccaaattctttaataaaataaatttatttctcaaaaatatttatcaaaaggaaatttatttagttttttcaaaaactaatgattaaaaacatcatacaaataaaataaaggaataaaaattaatatattcgatttgttaaattttataaaaacttataaataatgaataatttttaaaaaaatatatcagtttatatttattattaaatttggtgaattggaaagcatttaaatagctacggaaataaaggagttattaaagttcaaattatttttaataacattggtgcaaaacttatgtaacaccgtaattatgtgttaaaataaacattatttactttaaccaaatatttaagacacattcaataaatacaaaactagcttttaacgtttcttgctttccacttttcatgaacaaaactgcgagttgaaaccctacaggtaaaagcaaccatgaaatgataaaaaaaaagtgtatacgaaaataatatttattaaataattttatataaaaaatctcaaactatttctgctggtaaattcgacactgagtattttcgacaataagtaatttcgacaatattagaatgaaattttttaaatttaaaatacgaaatttgtgaatgaaattaagaaacattaaaaccttaataatattttcaatattttggcattataaattaaataatatatttaacttttagctgatcagcattatataaatgaaataataaaaaatttcaacgaacaaaaataattaatttcataatttaaatcaaaagcacttatttttatttacaaaagaacctaaattaaagtagcaactttgttaacagattttcataaataaatgatcaatttttgcggttgttacatttttgcgcgttaaaatgatcaattttagaaaaacctattaacaatttctccccttccaattcccaaaaaaattttttggaaaaagcacacgcaagtgttgtgaaaagtgggggcactgctgaatattaataaagctgcgctggggttcgtccgtccattaaaacccaaccgctgcactcgcggggacggcggggggcgatcggtcgcaacgtcagagccaacggttttttttggccattctcagtttagcattagcattattaccgaataaaaattttaaagaaaattaagtatttaaaaattttaaacaaaacgctaattttccatttttagtcaaaataaattttattattcaaaaaaggttttgaaaattataaacgaaaaaataaagaaaa

SEQ ID NO: 19818 - DNA, 2507 bp, Heterodera glycines
aatcctaaatagacacgacgctttcattataaagctttaagggaggaaaagtaatacgaatatttcaatttcttacttatccgaatagacaaagataggttacacacgaacatttttatagaaattccggctgaaactaaaatccctcttttggtcttaacctatgatttttggcccattatggatgaattaagtatagaaggcgtcgcagaaatacattcatattttctaaattcgggtttcagaaaactaagatttaaaagaggctgaattacagatgcttttcaaattttgggtgtatccgaatagaaagaagttggaaatcagtacttttcacgcctataaaattcgggccgaaaaatattggtgtttgtgactagaaaaattgcagatgcatatcaaatgactacagaaaattacagcctccaagaaaataattgctttgcacaagcaatattttgtagagcccatcaaacacattgtgcttttaggaaaggcagaattatacaataggggcctttttattatgattacaacaaatcagcatggcgtctcaatgatatggtatgtttcagttaaggtttagccgatctacaaatttcggcactgtctattttgtaaaagcgaatcaaattcctttggattccaaagtggaattacagaattgcgacggcaaatcctaaatagacaacgacgctttcattataaagctttaagggagacaaagtaatacgaatatttcaatttcttacttatccgaatagacaaagataggttacacacgaacatttttatagaaattccggctgaaactaaaatccctcttttggtcttaacctatgatttttggcccattttggatgaattaagtatagaaggcgtcgcagaaatacattcatattttctaaattcgggtttcagaaaattaagatttaaaagaggctgaattacagatgcttttcaataaaattccatcaccggggaattatcacaaatggaattgggcaccgggatgggacaggaaatggagggcaccggggccacagaacaaaaatcaataaccgggggtcaaagaatgatcacgaatggggttatcacagttaaaggcaaatggaagggaggggagagaaacggcaaaaatgcctaatgaattttggttgtgaaattgggggcatttttggccgcttaaataacaataaatttaaataaaaagtggcaaatgtgagcagaacaaaatgggccgagaatttgggcacgaaatgaaaaacgggagacaaaatgaacagatgaacaaaatgggcggaaaacgggaaatttgggggttcatcgttctttggagtctcattcgccgaattggggacggtggcagaaaagttgcggttttgacaaattggtcattaattgtgcgcggggcatggaagaaacgcagaaaaacaattaacaatttggagggaaatggggggcagaggagtggaacggggtgcgcggggcatgtgaaagggagggggaagggtcgccacttcctttcttcaattctgctgatcaattgatcggcagtcggaatcccagagttccgacattccggcgtgaaaaagatgggcccgtcagaattcttttcgtctgggcctcccaaagggcgagtcttctgtaaggtcgagatggctctgtgttcgtggttgttggtaccgagccgttctggcgatcatgtccaatttgattggtgacatggatcgatgctctgccctgcgcgctggtggtttgggggttcgtggcatttcacgcagcggcattccctcttcgatcccgagtggtttggaaacggtgggtcggaatgtcggatgcgggcgtactccaacgaggctgagaagagtcactcggatgggattgagcaaatacgccagagtgcatggcagaacaatgtcgcgcagcatgaggaaggttgaataaacgcaggcgactcgaatccaccatgtgattgcttcgtcgatcaggccttttagccagcgcatggtgaatccttctattccgcccttcaacgcgcccaaagcttcagtccttgccgtaatgtgctgttccagcttgtccttgaactgctccgagttgatgaattcgttgatgtgcgggaagcgtgtcgcgtcagactcattgtcgagttgccatgcgtggaagatcaatggatgaagttccaaattgctattcgtttggttgatcgttgtttcgtacaattcgtggacgtagtccttcggcattcgtcgtgctgtgccggttcgagagacaatccataaccagatgttgggattgcttcgcagttgaagatgatggaaccgatagctattacagcttgcatgttgtgctgtcagcgagaggatgcgaagttccggatccaggaaagctgcgatagctcggtcgggaaagtgcgcagtcacgggaatgtagaggcgacagtcaatcattggcctgtatgagaaggcctgaagcgaaatgttgacacatgaaacacctccatt

SEQ ID NO: 19819 - DNA, 2591 bp, Heterodera glycines
cattaatagggatgggatttttagtgctaaaaaatcccaaaataattaactaaatagtgagaaaaaaatgtcaaaatagtggcaaaaatagtggcgaaaaagttccaaatttaggggtgtaattttttaaatagctgttttttaatttgaaaataatttaaaattaaggcaaacaattttattcactgattgcagttacaaataagatacatttcaaaattttcgggggtaaaacgcatacgattatcggccaacattgatttgtaaacagaaaaagatcgttcaacgtcacaaggtgtcaaaggagcaaatttgtaaaaagggaaaggtttggagaaacatctgactcagtgtttttttcggacagaatctggcaaaattgggagattttttcaattccatggttcttgtccacaatgtccgcgaattttttgcgaatttcgtttgccttttcgccataaacattgtccatttgattgtgaacgcctgtgaatacatccatggcatcgaaaatggtcattccttgtgtttccaattttgtaattgcagtagccaattgcccaaaatttgaatggatgtaagcaaggtcctgccaaactgaattgttgaaagtcaattgacattctttgatacacactgcatcatccgaattgaaagaattcactacctaaacaatgcaaatcattactacaaaaaactaaaataaataattgacaaaacgcgccattgttccactgtccaccttttcaagcgctttcacagaaattaagtgcgggggatgccatttttccatccaattttcctatcaacaaattggccatcattcgccccattttatcagtagtctcgtccactgaaatccaaacaaatgcttcaccaatgtcgtctttaatttttgtcattgtctaaaaatcaaaattgaaaaaaaaatttttgaacaatttatataacctcagaaaaaagttggaccaaataattttttcgaagagttgattggtccggcacggcgcgttgacaatacttttccaaaaatgaactcaaaactgcattgttcagtttaaaaaagggaatgttggccgatacaagtgctttgcaaaagtcggcagaaaattggtcctgtttgttttcatttgttgtcaaaaaaggctgatgctgcttgcttttcttttttgaaaatcggtccaaattagcgcgatgttttgcgtgttgttttaaatggcaatattgcgagcatggaatctgtggaaaattatcatgttgctgatgttgtttgttgcaagtcgttgttgtctttacctgctgttcacaaacttgacagaagattattttaccattaatggagtaaatttcttcgccttcaacttttttgatccagtcacgaataaatgcagatttagattgaattttgggcattttgattcgatatttcctttaaaaatatgggttttatttggtatatttgaagaaaattagtgaatattcctttacaaatttgtaaaatcgcgaaatagtggcaaaaataatgacaaaatgccaaaatagtggcaaaaaattattttagtggccaactttcgaaatagtttttttttagtggcgaagctccaaaatagtgattcctagtgatgaatagtggcactaaaaacgaaaaattttcgaaaaataatgtgtttttcgtgcatttctcgtcgagttaaagccgcagaaaaaatagttaaaaaactaagaatcccatccctatacattaatactaattttgcatttagcacaattttcactcggaatgcattgatttttggtaaatgaaaggacaattaatttctttaactttaacatttacaaatttagggttaaacagaacaacaattgtccgatttgtcgcgcaaaaactttcataatttcattaaaaaacggtttattttaatttgaaatacaataaatttttaccatttatttaattaatttagcgaaaccaaacgcaaatttgaactcagaaattgttggcgatgaaaatgtgtgatttctgagtttgttcattttttgtttgtttttctctgatcattcattcattttgctttgttcgggatgacatttgttgctcgtttttttttgaccaagaaaaactatttgcttcttaattttcaatgattttctttcttatttaacacggccaaactgatttatataatttttgaaaatcttagaaatatattatttgattgctcataatattcactaaatatgtaaagcgagaagataggtgaaggtgctataatagtcgataagataaagtgcatataatgttactcattctaagaataatttccttagtttaacaaatccgtcatacttttcaggtgtcattttaatacttttcttcaagaaataactcattaacataatatcaaagcaatttaaattcatttatgaggcaaaaaaattccattaactgaaatggtgagaagtttcgattttgagaaatatttattccactaggaattgcaaaaactaaacgcgaaagaaataaaataaaatgtaaattggttaattaaatcgttcaaaacagataccattgcttttattagtgtgatatc

SEQ ID NO: 19820 - DNA, 2167 bp, Heterodera glycines
  unsure (1)..(2167): unsure at all n locations
ttttttttttttgcatttcttttaattgcttttttgttattgcacagtaatttgagtaaaattcgttgaaaattagtttaaaaatatatttttgtttctaccccattcggggcattggcatattgccaacggcaaaatcattataattcggttaattattgatgccataatcctccaaagctaagtgcaaagctatggaaatgggcatttggatgcactttgtaaagcaatgggcatggtcatgccacataaattacgtggaaaatatgctaaattggcattaccacacccaacaaaatttgccatgctcaagcctctgtgggaatacagtaaattattgatttttatttttataaattatttttacgttttataatttccattggcatgaaaaagttggacctagaagcctcaaaccagggctgtcaactgaaaattttcaaaatctgcgtttggccgacaaaaaaccatcgtttgtggtcaaaaatcataatttttaaaattctattccaaatttaaaaaataaataaaaagtttttcggtgcgctttttccaaaaaactttttgaagaggggctggcggcgccgggaaaaatattgaaaatttgagtactatttgttaacagattttcaccataaattactaaattttacgatgggtccccgcacttttcttgtgccgaatcagtgagtcgccaccctacttttccattttacccatttttttggtgctgtttcaggaagaagtttccatacaaaacgcaattgaacggaaagagttcctctaagaaacgacataaaaattaaaaaaatacaccccccccccccctaaaaatggatgattatcaaaaattaagttctttaaattatcttttgtttttgctcatttttgaaaaaatgattgaattcgcaatagcagcgcttttccattccaggatggcattgcgggcgcgatcagtggcacgggaaaggagcacaagggactgggaatggctgaatgacaaaagctgcaaaaatgatcggatattcgggagcacatcatgaagagttgattgaaattgtgtactaatttggtccatcctttgaataagtcttttaaataggcaataatttgaaatcatgcatttcagtgaccttttacaagaaaaaattacacgcaaattgagctaaaatacgaacatgataataaaaataataataatggatattttatctatctattatttaaaaattatttttgattcttttttctcgcttttttcttatctgtgccccaccaaattaagcggttctttgatctcccccccccccccgacctttcaattacgctcaatgggtgttgctctcgatcactttttgtcacatccgacccaagaccgaatcgccgagggtcccaaattgtatgctttcccgaaataaaggcgttaatgttggattctgcaattatggggaataatgggatacaaaagacccttcagtaatctccgacattcaaagccaattccctactttttaacagatttcttacacattaaacatttggtaatacagaaaaatgtaattttttgtgttcatgtgccaaaattctcctgtaggaaacacttaggcaattaaaataattttggattttactaaaactttattaattttattttttgccattcttttggattcttggatggcaaattcggacttttttgctttcagttgtgtgcagatggtgatgtgcctgagagtttcgatgccataacttcaatcatttaattaaactcattcagcttatccagaaaaacaacaaaaagctcagaggggtgtcgaaatgcttaccaaattgttcttttcaatttttgaatgaattcagtgaagtgaagtttatacccaggtattatacaacaaacacttaattaaaatcattgtatgttaaaatctagaaaatttattaaaataaaaaaaatttaattaataaatttaaatgaaatgccacaaaaatattaataataaataagttaaaaatacttaaaactaaaggaagacaaataatattttgtgttgaaagaagtgttgcgtaaatgttgtgaattatggctttctgctcgaattcgtgttcaggatgtaaaatttgtcagaantgtatgtcagaatcggnngtcctactannatgacctgca

SEQ ID NO: 19821 - DNA, 2068 bp, Heterodera glycines
  unsure (1)..(2068): unsure at all n locations
gggggtcccccccccccccccccccggggatcggcctgattaagtgcttntcatgtaccaattccactgccatttggtttgtttttagctgcacactacgctcactgtgcccgattttatggttggccaatactttcccgaagtgatcgacggagtgttcaaagcgttggaggatccgtcaccagcggtgcgcgaagcaacgataacagttctgaacgaaatgctgcacaaattggagccgaaagaaggaacagagccggtgagaagcaaaggcattggcacggcaaacgcgaaaaagtcaggtggacatcaacagccattgtgaatgtgttggtggcacagtccaacgctcacacggccacggcacgcgaaatttctgttcaatggatggaccaagtggcaaaacgacacggagacaatcacttttggttgttcagattacttcgtattacggtgaccgcgtcctgcctcagctgtcctcctttctgctttcaattcttccccatttggccagcggagagaaaggtcttattacgcgttccgaccatctcaaccaaagcctaacggaattggtacagtatttattttattatttttattatttagctaatcccatttgtcatttggttagctcaaattcgactcttcaattcccgtcgagccgaccgttgaagtgcttttggcccatttgcgccacgaccgaatggaaacgcggatggccacgctgaattggattcggcaccttcactccgtccaaccaaataatgtaccaaatgatctaacccttttttgtggttaaagaaattgtcagatgtttcgctacatggaccgcttcttccccattcggctggaacttttgtcggacccggcggacgacgtgctaatgttggacattatgctgatcacggaaatttgtggccaaccaaaacagcagcaacagttggacattcgcactttgagacttggcgaggaacttaaccaagaagtgggggaggggagtggaaggtcactttcaacagcaaaatccccagttaagctgaagtccgtgtctccttacttggtcaaattcagcgtggccttgcttaagatgttcaaagacgatgacaaattaatcgacgagcgcggcattcacattgtccggtgcgtttttcaccagttgactacaatattgtaaattggtgcttcaattaagacaggtctgcttgttgcttgagccgacggatgtgtttcgttcgttggcattacttctcggcacaatggtgaacatcgacggatttgtccttccgactgcgggacaacagcagccacaactgacaacggccccctcaggcaccaaagacccctttttcgaccttcaatttgttgccaaaatggtcaaaatcctcaaccagattctgatgactaccaggtaaataaatccatttgtcggtcgatagaaaataatattttattttctgtgagctgtttcctctccgtcagcgactccgttgcccggagcaaaacgagtgggccgagttgtttcagaatatgtacaaatgttgggcccatcagcccatctgtttgctgtctttgtatttgctttcgcagaattaccaagtcaatattcaatcgaattttgtccttttttcctcgtaaattattcactgtttcagcccgcgttggagttggtcccgagactttctgagattgaaataacctttgatctgctgacagaggttgatcggcttgtgcaactcatcgagtccccaatccttgcttgtgcgtctgtcttctcgtatatatttcatattttgtttatttttttcagatgttcgaatggatttgcttcatcccgaccaccaaaaatccctttctgcgcttctttctgcccttttgatgttgttgccgcaaagcgaggcctttaatgtcctccaaaagcggcttcaggccgttccccatttggctgttctcgagtgggttattagtgcgcccttaaccaaccgagggagggaatttctctcttctatcataaatttaactttagggaatttgngtcttttcatattaaaattcgtacttttagtagtat

SEQ ID NO: 19822 - DNA, 706 bp, Heterodera glycines
aatccatgctcagatcatcgctcccactcacaacaggagctgtacagggcccaagaattgataggcttcctgtcccaagagtactctcatgggcaaggtgccaatgaggatatcatccatacaaattttctaattttatttttgttcgagttcgggtaaggggttcgaaattggcaaaaatgggtgctgtattcgtgatcagcgaccccaaaaaccccttaaaacttattttcattaatttataaaacacatttataggcatctgaaaatgtgtgttaaaagtatcatgtaaaggaaataaataccataaattttaccagattaagcctaggcccaaggaggcctagcctaaccgaggggaaaagtcagtgttttcgttttgagattgcttcgatggtcggcgatattaacgcctttccgtgctctgatgatccaagcattgatgggaaggacgaagaaacaattggaggagggacgaacgacatttctcagcagcgaaatgattgtggggacggggacaaacgatgcttcgaactgtcggtgatggtggccgagcccgggttcagaagacgcggaattgctctcgaggcctgcaagctgatgattgcttacattcttcaacgcataaggggaaagccaaattttatcgcgaaaatcagtgccttgggagggccccaagtttggcactcttccgagatcggctgaa

SEQ ID NO: 19823 - DNA, 2109 bp, Heterodera glycines
  unsure (1)..(2109): unsure at all n locations
accagggctggccgtgatcacggatcacggctcacgggaatcacggggtttttggggtgccgtgatcacggatcacggctcacggattttttcaatttttccgtgattttgatccgtgattggcattttatatagggaatttttgttgaaacgaaatcctggaaactggtggtattattttgagcggcagccaaattcaacagccaaatgcaaagaagaagggtgctcatatattaaaacactgtcaacttctctgagcactagcgttttatcatttcacctcaaaaagcatcatccaaatttatataaacagcgtgaagattttattaatgaagaaaagaaaaaatcagagaaaaaacccctacaactggcaaatccattgaagagagcctttgcaaatgctttttgtttgacgtcaatagaacaatcagttgaagcagaagaagaatctattgttaaatcgcccattttgttatcattaaatgccaaaagtagcaaaaactttttcttttttttttgtaaattcttaattttgaggtcaatggagcaaggaaggagcctatacaataagcgctaatcgagctttgatggaaatgctggccacacaattactgccatttaattttgtggacggagagggatttcgttgttttattgaaaagttgcagccaaaatacacaattccacacagaaaacactttgcattacatgaactgccgggtagttttgacgcaataaaagtactcaatttgcttttttactttgaaaaattttttatttaagaagtttgttatcgcggaattggattctatttacaaaatagggctaaccagcgatggatggacctcaaaggataaccgtcactctttaatctctgttaccggacattttttggacaaaaaatttcgaccaacattttatgttcttagtacaaaaccaataaagggtaatttaaaaataactaacaaatcaaaaaaaaaacaaaattaagggcgacatacagcagatgcaatttctgcttttattcgtgaaagcttgaacgaatttaaaatttcggaggacaaaatctcagcaataacacgcgacactgaaaatacaatgaaaaaagtttcaaaagatttgggatttgaatcaatcgattgcgctgcccatgtacttcaattggtaattaaaatttaaaaaatttaaatttcttttttaggtgtgacttaaaaaaattgatgaagaagaaagattgaaggaacttattgaaaatgtcaaaaaatttgttcgaaaagtacgaaagtcaagggttttgacagaaaattagctgaattccaatccaatgaagaaataccacaaacggttttgctaaaaaacacagaggtaattatattattttttaaaattaattacaaaaaatcatttactctgcttttacagaaccgaaacgcttcaagttccattatcattccactctttaaagttaattatttaacaatatatcttaatctaaatagcatttaggctattacgtttgcattacgtaaagagggggagaatcgattttcaaatatcaaaaatacaattgcattggccattgaaaagagactaaaccaattcgagaaccaaaaatatttggtgatttcgacccttcttgatccacggtttaaggctgtttatttggattgcaatcacgtagatggctacaaaaattggctaatcagtgaaatcgagagttatcacaatgaaaattacgtaatgaaatatttattttgagtttatattttaatttttagtataccgatgagttgttagttgaaaataatgcaagcgggtcaagttcaaccgacattttttctcaatttgaaaaagatgctgaattcgaccaattaattaatacagtaaagctttctttttaaacaatcgcattattgttcatttcacaggcaccatcgcccagcccatcagcgttagaaataaaacaaaaggctgaagttgaagtgaacgaatattggagagatgcgaaaattaaggcaaaatccgatctttatgcttactgngaaaatcattcacataaatggccgatgatcggaagaattgtgcccaaatttctttctccacccgcta

SEQ ID NO: 19824 - DNA, 2396 bp, Heterodera glycines
tgatcgacgcaaatggggaaatgggatttctaggcaaaatataacataaaacagcacaccaatttgttgcttaatcatggacatatttgcgttttgaaagaaaactcaaatcagcaataattgcaatttttttgagatttaaatcatcgaatttcgaaggttccaaccattaaaacaatttgacaaattcaaaaattcaccaaaaaaaaacataaaattcgtgcggtatgaaaaaaaactttttgacggtccgatgccaattttgtgttatggcagcaaaaaaaattccatcacaaatgggacaatgtattgattgacatacaggtgcgaatatgcccttgaccagcaaaaacattcaaaattgtcggtgccggaaatataatatttggtgtttgtttttggcaattttattaggcaacgcatggcggatgaatgtgcggattggcatgtaacagacggatgccggccatcaaacgcttgtaactgttctccaaattctttgccgacttcgggtccaaatcgacgatacgaatctgtaaataaaaccaaaataatttgtaatcggccgaagaattaaaaaaaaaaattatttaaaaaattggattaaaatttaaaatgcccccataaagcacatgccgaatatgcaaagtgaaatgaccgtccgtccagcccatgcacacgaatgtaacccctgtcgccgacagcagaaatctacagtaaaatgcacaaaatgattaaaaaaacaatttattatttaattgccgtaaatgagcaaccatttcatttgtgatggcatgctcatggacaagccgaatgctaacctaaacaaattatttggtgttttataatgcatgctaaaatgtgtctggatttggattatattagcagccgggacggagcaaaattcccaattcgaattgttttatataaaaaaaaatggaaatcggacaaaattttaatttttttttttgtaattttttattgggaaattcgctaaatttttgacagtgaataaaatgaatggcaaaaaactgagagtttcatttgttaaacgtgtaaatgtgctcaccatcagtgagcagtctttgattgtcgcggccagcaaatagcgctccaccaacgagcgcgggtcctccttctccagaaattccaaaaaatttattggcaacgacggaaaacttttgtaggagcgcgtcaacaaatttgcctttctgcgcaactgattctaaattcaaataagcatttaaaattagttttttttaaaactaacccaaaagatttgcttactaagaattttgaaatttaaaaaaaatgacgtaaacggaaaaagttcgaataatattgtgaaatgtgacagaattgtatggcctccgtaatcagaaaaaatcttcgtagtggacattttctgtttcctaaattttctctttttttctactaataatataagattttcaaaatttttttaaaatttcaaaaaaaaaatccgatttttgaataaaaattccatggcctaatggttaggattgaaaaaacatcagtgtgtgttcacctgcacatcgtccggcaaactcttgtacagctcgaaggcccgcaccattccgacggtgtcaatgcgttgagcggtcagcaaattgttcagcacactgccctcggtcagccgaaacttctcccgccggtcgtccgcaacaccggccaaaatgcaacagatctgaaggatatatatttatatatattttgttttaaaatatataatttgtgaaagaaattctatttgtaagccaaagtcccatcgttcatagtttaattttttttcctgaaatatttttttattatttttttttaattcaaaaatttttgtgaatttcgcgccatttttcgttttttaatggagtgtgtgcgtgcatcaaacagagaaagtgagtatcaatcattttaataatcgttttaattatcaattcaagtaaatcccgtaaaattccgaaaatcctgcccatgatcaccaaatatttgcgaaataaaaaccacaaagcacacacaccgcggacacaaaagtgtcaatgttcgctccgtcgctgggcccatggccgccgccgccgtcggaggccccggcggggaaaagtgcggcgccgagtgcgtgcggttcgaacgcgcagccgtcctcgtgcaccacgttgccgtcgacgaaaaggcgcaggttgtggtgcggttggtgcagcagtgagcgcagcgcccgctgcattcgcgcgcgcacgccgctgtacaacgccaacggacagaagtcgtacatggcatggaaggcggagctgtgatggcacttttcaatctggacaaagtggggttgaatagaattttgtaataatgtaaagttaactattttaaataaatttaatggaccg

SEQ ID NO: 19825 - DNA, 2612 bp, Heterodera glycines
aaaaagaactaaatttagacatccatttcaaactagtattggtgacatatttcttttgtttgaaacatatgaacttatttcgacctaagttcaaaaaaaatattaagaaaatcaatataattcaaaaaatttcaacgttgaagtcttcggcacccggtgcccaaaattttaaagttctacgcaaaacgaaaaaataaatttaggcttccaattataccaacataaatcgaataccccaaaaatttaaaatacacgttcgtttcgaatgtaagtcaaataatttggtttattaattcaaatttataattgcaaaattactcaaagaaaattaattttatatattaggtattaaaaaatgaaaatatttctttatatgctgatcaaatgattcaaccaaaagaacagatatcttacaatgcaaaatcttatctaaagcagattaatatttcatagttcgatcaaatttaaagaaattacgaagaaattcatacctttattatgtatcaatgatcactgatcatattgcaagtcataaaaatttcttattttcgattgaaagaataaattttaaaattataatgatgttaatcgataaattgaaaggaaaaacgtctcagagaagaaaggattatatatttaaaaattccaattacatacaactaaaattatagcaaaaatgaaaatttttacattctgatttaattaccctaatttaatgttcgataaacgataaatgcgttaatttattgaaaatttttaatggtcgttttgtgattatattgaatgtgaaaataaaaaaattgtgaaaattaaatgaaaaatttaaaacaattatttagtataataaataaattataaattaaaaccttttttatagaaaattggagcagaaaaaaagtgtttctataaaaagacatgaaactaaaaaacaacatatttttaatttaataaagagtttttaaaacaataaatcatttattaaaaattactactcgaatgaacttaaatattaaatgagggaatcataaacatggcacggctaatttaatgttttcggtgaactgcgcgaggcgaataggatgtttgacaaactggttaagataaatgccaatttttatctccgaaaaagtcaatcagacaaaataaacgatttaataaaaatgcttaaacaaagcgcttgataaatcaaaacagctgtaaaataataaagccaaaaagtcctaatttataattaaatgaaacgattattcatataaaaacaaaatataattatttaaagggtgattgtaaaaggaatattaatcctaattcatcataaacttgtatgaaaagggaataataagtgttatttattgtacgagaaatgattaataattaaacatgaaataaaaatacaaggtcgaaccgaaagtaactcgaataaactgatttaattaatttaaaaatttaacaaaataattatgaaaaattacaaaaaataaatattttttatataaacaagtatttaacaactaaatataaataaatgagtcaaaaaaatctttaaattattaatgaaactaaattaaatgaaataaattcaaaggagacgagtgaattttaaatttgtaattatgagctcccggcactcgacgtgagccaactcgaatccaattcaagagagttgtaaaagtgcgattttgtatcgcaataaaatgatagaaatcgacgcaaattctttaaaaataaagtatctaatatggccaataaaaagaaatcatttaaaaatattttctttctttaaattttttggtaacatttaaatgaaacttgttcttaataataagtaaaaaattgtttatcatttactagttaaaatcaacattaaaattaactaacataataaatggttttaaatttctatggaaaaattggtgttttttctgaaaacaaatatacattataaagaaaatattaattaagttatactttaaatcacacttaaatgtcgaaactaaatttattagacattttgtttaaataatttgcattaatgaactaaatttaaatatgcaaataaatttgagacaaagaaagggataaaaacaacaaactatataagatgaattatatttgcaaaataaataaaagtttatatgtaattaaagagaattaataaagacttcgaaaaatcaagttatgtagcgaaatggatgaagttacgcctattagtgaacaagagatagataaataattatttaaatatatataaagataaaaaaaattgcaaacatttataacatgttcagaaatataaatagaattaatcagtacacggcaataaattataatataaataacgcttacaaggtatgatgactaaaatgtaataaaatttaaatgaaatggtaaaacgatacttatggatattattcttaaacaaatatacggaccagggatggtccaaattggaaaataaaatgcgaaattttttctccaacttttttaatagtcaaaattagagtagagcgggaccgggaattttgggcttaaccgggtccgggaccttttcagaagggaaagcgtaggactttttggctgagaaaaccgggaataaaaaggggactggtccc

SEQ ID NO: 19826 - DNA, 1796 bp, Heterodera glycines
  unsure (1)..(1796): unsure at all n locations
tttaatttttcggcggaggaggaacggggcggggaatgaagtgcatacgcttntgaaaccaagcctagtccagttttggtccattcattcatttttataatttgagaattcatgaaaataatatttatttagcattaatgagagccgagaattcgttggttgctgtgaaaatgttgcctggtcaattttttattaaattaattaaataaaaatatttatttttatttgtgatttatagaatatgctgatgatttgtcaaaaagtgattttctgcgtgagattgggctgatgaaatcgttgggtttccatgaacgtcttgttaatatgcttgcatgtgtcacacaatcggagccatattgcttaattgttgaatattgctgtgatgggtgggtcaatttggtgctaggtcgtttcgtaaaactgccaattacagatttttcgagaaaattcaccataatttttcttaagcacaataaaattaaataatcttgatatcatacgattcagctggataaagaaatcattaaaataaattctttaaatcaatttaaaactaaaattaaactccttaacgtataaaatgaccggaaaagtgaattatctctttaattaaagatattatatattttatatagtgatttggttttattaatcattgacctcattcttatatttaattttgttgtgatttctttttttgtttaatgtttaatccatattactcgaggacgatttaatctatgacacgtccgcagagtaagtggattactcccttttgtggacttttttctttttttgcataaataaataaataaaagatcacttcctccgtcccttttgagcgttacttcgccaaagttttgactatttttaaatgaaaaataaatttatttgccccattttaaagggcttcccccattcggcacggaatggaattgcttttggtggactcggatttgacaattgttgacggtgaagtgacaccaacagcagcagaagcattagcagtgggaggaaacggtgagcgaaaatggaaaaaatgccgaaggacaaaatgtcaaaggatggttattaatggcgggcatttaaatttcaatttttctcatttctaattccctattacaatcccccccccaaccaaattccagcagaaaatgccatcccttccgttgctgctgtcgttgtgccatcgtcgccttcccccgtcgacgccgccgtcgttttcgcgttccccgtttttccttcaccgtccccgcttttgccatgtcccgccttcgatgttgacgtcgtgccctgcgcgtggtggaaacgcccgtcggcgagtgcacacgcaacgcgcgcttcatgcagcgcgtgtgcaggcgcatgtgcggcttttgcgacgcgcggccgacggaaaaacatttggaatttaaatttttgaaattcaattagaaaaatttatatgcaaatttatgattttgatcaatcaatcactaattcataattgatatttgtacaatgaaaaaagtcactcataaatcagaaaaattacagaatattttaaacagtaagaaacagaatcagcagaagagtggcgctagttggaacagttactgtagcttctttgtttcacaacaattgttcacattcaatttacctttacggagagaaactaggcgtaaaatgaaggagatgaaaataaatcaggcgttgatccgttctgaattcttaaaattcttcaaaaaatttgaaattttatggcgtaatgtcagaccctaaaaatactttgttttcttaaaaattggcttaaaatt

SEQ ID NO: 19827 - DNA, 1499 bp, Heterodera glycines
aatatcagtatataaatcaaagcgggggagagagaccctttgatttgggtttgcaaaatttttggcataataaatcgtgaattgaactagctgttatacctttcatccattttcgaccaaacccgaatccttaactctaattcaataagtcgaaaattttccttattttgaattcttgttctagttgtagttagggatttggatttttggtcaaaaagaaagatatcctgatcagaacgactcataaaactcccagaaacagattttacgatttgacgacacctaaaaaatttccaattttattttccgaatttatttcatttggaattctatgaaaaaggaattgtcttttgctaattaggtagcaaattacgaaaagaacatatgctagcttagtttgggcttatttcatgggaaaattaggtgggcggtactgctgcgcatatgtcgtcgtccaattcacacaatcagtcgttgttgttgtctgctgctgctggtggtggtcatcagctacaaaggccgccgccaccgccagtttctgtccaatccgccgccacacattcatcagttgcgacaaatgcaacaacacaacaacaccagcaacaacaacaccgtttcctcacaaatcatcaacagcaacaaaatgtttctggaacaactgctgcggttgtcaagcaacaacagcaacaagcacaacaacagctcctgaacagcagcagcaccatgggagcagcagaattgagcagtattttgcagcagacgcatcagcagcaacaggtgtttgttgctttgtgattggagttcggttttggagctggaacctgaatcaagattcaaataaatttttggcagtttggctttttttttgctggatcaagatttttgtccaggatagttcttgttcaatctgaaaactcaaatacggaaaaacaaacaaacaaatgaatagaaaagtcactcattcggaaaatacattaaaaaggggtccggaaagcggttttttaaacaaaatctttaaattttcaaaatttttgatccccaacccccctattactgaaccatttgaatgttttatttgaattttcttcaaatccatcgcttgctgatttgcttctgttcatagtttcagcttcaaaatgctggcgttccattgctcggtcttcccgcccaactgctcgcatcaggcatagagaactcgaacattcttcaaccaaatgctctgcgtatggtgcccggcacccaatacgccataatgggtatgttcgcaaggtgcactattctccccacctccaaaaaatttaaaaaatcgaaattagaaattaaaaaaaaaatttttttttaatttctacgatttttttaaaaaaaattttcggagggaggtgttgttcccttcttcgcatacttttttaataaattcacaatcaactcattgcccatccaattgtgtgcagatggacctggcggagcacagaatttgattctgcttgccaccgccgcta

SEQ ID NO: 19828 - DNA, 816 bp, Heterodera glycines
  unsure (1)..(816): unsure at all n locations
gcatatcggtcttttcaaactgtttgttcatggctanaatttcaaagttacattgatgcgacaaaagcaattccatctcatcaacaaattcagaaggttggcaggagtcgagtcagaaaaatacaatttttaatttaaaagaaatttcattgaaaactaaaaaattttttttgctaatttttcaatttttgctagcaaaaaaatcattttaagaaaaaaattaaaaatttatacgaattttatttgatcgaaaaataagcattgaaaaaaatgaaaaatcgctagactacctaaccgaaaaacaaaaaagaccaccaatccgctgggggtacccaaaaggaatccatttattgcactttatccgacttttgattctggcaaacatttcccacttttcttaacagtgtctcgttgacatcggtgacaagccgtcaaattttgttggcagtaaaaaatggattggatcattggaattgagcttttgcttggagacaatgttcggcatcaatgccaaaattctttcgtccaaaagtggtgctgatttggcagaacatgcccgggctctcatttatcattttgagaatggcggagcccctgtgatgattggtgagtgcctcccggttttttggaaaagttgtcggggtcgggagcgcctgaaaatgggagtcgaagttcagggatctcgtcccgggtctttttctaaatcccgaggtcccgttcactgggtctttttctaaatcccgaggtcccgttcactgggtctctttctaaatcccgaggtcccgttaactgagtcattttctaaataccggcgat

SEQ ID NO: 19829 - DNA, 798 bp, Heterodera glycines
ctttttcgcatttgatggacaaaagggccgaggcattgccaaaagaagtgtttaatgtgaccaatttccacaattttttgccaaaatttgttcaaacggcaaatttaacattaacaaattagatgaactcataaactcaaaagccgtttgacggcaaaagtttcaaaacttttctcttttaagcggttggtgatcacacgaaaaaatggaaaaattgttaatcaaacaaaaataacagaaaattaacgaaagtaaaataatttaattataaataattcgaacgaccttttattaattgaaaaaagaaagtaaattaattataacatcgaaaaataacaggataataaatgatcaattgcaaaatttttaattaataaaggggaatgatttattattaatttgttaaattaattaaaatgagcgcgaccgattcaaacatgtcgtccccaccccctcagaatccccaatcacacagagattctgaggtcttaacgatgtcaaaagtaaaatctgatcacgtattcgtgatcagcgtcataaaatacccttaaagacattttttcgagtgattttgggttataaaattttttcaaatcaaaaatcctgtgctcccctttagtcccaaatccaaaaattacttttatttttataacttttttcaaaaaagtaataaatgataaaataaaattcttattatagagaaaaaaattgcggattttatgaatatttttatattttttagcgcctttttgggcgcttcgcacccgttttgtaatttttttgggacattcggccgct

SEQ ID NO: 19830 - DNA, 1071 bp, Heterodera glycines
taaaataataatgcacaataataataatatttatttcatttgcccccgattccccattttcaaatgaataaattatatattcatttttgtcctttggttggccatttaacaaaattcaaaaaaagaaaagaaatctcaggatgaatttgacttgaaaaccacaaaaattggcatttttacaaaaatcagttagcaattctttatctttttaagaattttcgagaaagaaaaagcatttcttctgcttcgattggcaccgccggactttcttccctaaattttgtttgaaaataattttgttgtcattgtaaaaaaagtttttccctttgatttcaaaattccacttgcccacccaccccttctgctgccttcccgggctgctaattcactcattgtcagtgccaatgtccctttttggcactaattaactttcgcttacaaattaatgagtccgatttatacgcaagttagaaaaagtgtgaataaaatgcaaaacttgttttgttttgggaatgttctcgctttgtgcttgcttttctctttcaatttgctgtcacgcggcgaatgaggcgtatttggcacgctttagcagcggcgttctttcgtccgcccattcctcgcgctgtccaatcgcttccatcacttcgatggtgcgcgaatggccaatgccttggcaatgaatgaatgggagggaagggaatcctttctttttctgtgccgtccttctcacattttttgttcgtttccattttatcggtttttacgaaaattgcacgggaaagaggcgaacgttggccattttgaaagcaggcattagctgaaaatgttgctaatttaaatgccaattaaaatgaaacacccgccgctccgtttatagcctttgaaatttaaattggcattttccttttttggcacttcgtccattgtgccataatttctttctcttctcaccacagtacaaatagaaccaatcgtgcttcaattccgggaaaatgacccgtcgtccgtacaccgtcatcttttgccattcaatgagccgtgcctcggcattgtccgtccaatagaccatat

SEQ ID NO: 19831 - DNA, 1220 bp, Heterodera glycines
  unsure (1)..(1220): unsure at all n locations
ccttcttccccgttggcgaattgtccgcatcttccggtgacgaatcttccgcatcatccaatgacgaattgtccgcatcatccaatggcgaagcgtcttccaacggcaaattgtccgcatcatccaatgacgaatcgtccgcatcatacctgtgcaaggggggggggggctcagccaagaggtttttttttttgctctgctcttcggccaaaaaatttttttctccagtgttattaaaaaattgaatgagtgccatcggcccttcgtccgttggcattttgccattctctcatcctttccttaccacgacttcgctgtgtccgtcccgcacattcactcgcaccaatttgttcgtcggttccgcactttcgtccttcttcgagtgaatctcttgcaccgcgtagacgaagtcaccgtgcgcggcaatgtccgcatggcgcagcaaagtgccgtcaccgtccggcgtttcgctttgaatgatcggcttaggcaccgcgccgggggcggacaaaagccaaatgccgccggaatggcacaccaaaggactcccgccgttggcattgtgccattgcaagcacagcgaagcgccgccgtattcgtggacacttgaaaggatcaataatgttggcaaaacatatgatccgcttattttcccttaatcgctgccatttcccacctattcgtcacggaaatgtccggctgagtccattatcttccaacggcaaattgtccgcatcatccaatggcgaagcgtccgcgtcttccaacggcgaagcgtccacgtcttccaatggcaaattgcgcgcatcttccaatggcgaagcatccacgtcttccaacggcaaattgtccgcgtcttccaacggcaaattgtccgcatcttcttcgaaagtcagtgcacctcccacagtgcgctcatgcttcacagatgacggcttgatcagccaatttttgcgccaattaatcggtcggtattcacttactgtgtgacaatcagtggacaagtccaatctgatcagagaagaagccctccggggaccactggccagacagtacagcgccctttgatcaggcgacagacacagatgcttgaagacggtgaagccgagttcagtgggcgaaacgaacggcgtgggcggcacaccgtcgcacaagtgcccaagagcgtctccacccaaagagcggtcgngaaaacggaggacagcaattgcagacccatc

SEQ ID NO: 19832 - DNA, 1056 bp, Heterodera glycines
attcaccgccgacatccgacagtgtccacagtgccgtctctgtccatgccaatccgaaattgcttcgtccattgtccaaaattgttcgggccggccctcgcaatgttccgtcatcagccaaatccaccaagtggacggaagtcctctcccacgactgaacaaatcaaatgtcgaagaagtcccattccgtggtgtccaccatgtacgggcggttccattggatccagaccaaccaacggccattcggactcactcttggcgacgcgtaaaaatcggcaccttcactctaaaggagttcattggcatttgaatgagtgccatcggcccttcgtccgttggcattttgccattctctcatcctttccttaccacgacttcgctgtgtccgtcccgcacattcactcgcaccaatttgttcgtcggttccgcactttcgtccttcttcgagtgaatctcttgcaccgcgtagacgaagtcaccgtgcgcggcaatgtccgcatggcgcagcaaagtgccgtccacgtccggcatttcgctttgaatgatcggcttgggaaccgcgccgggggcggacaacagccaaatgccgccggaatggcacaccaaaggactcccgccattggcactgtgccattgcacgcacagagaagcgccgccgtattcgtggacacttgaaaaggtcaaaaatgatggcaaaggattcaccagctttattttcccttaatcgctgccatttcccacctattcgtcacggaaatgtccggctgagtccattatcttccaacggcaaattgtccgcatcatccaatggcgaagcgtccgcgtcttccaacggcgatttttcgttgccaaccttcttgtcagagtccagcgaagagtccgcacttttttggggaattcagatgatgacatagcaaacagacaatgggatggatgtccgcggggcgacacctgcaaatggcaaaacgccaaaggcatcaggggcgtatctagaaacatttttcgggggggggggggggagacccgacctgaagaccttttttttttgctatttaa

SEQ ID NO: 19833 - DNA, 1225 bp, Heterodera glycines
  unsure (1)..(1225): unsure at all n locations
aatttttgcgtttcgaattcatttntggaattaagaaaaataaaaattgataatcatttgatcatttttagcgcactttaagcaccgccgttaggcagcgcagttccaaaatttattccatgccacagatattatgggcaggacacgccaagtacctcaaacttgggtaattaaaccgaagaaagaagtgcagtggggaagaatgacgcccaaaatgaaggaaatattcgatgctgtgcgaactctttgtgacccctctctgactctgccaatgcagcagttgaccatttttaccactatttttctctcactcatcgtctgctcgtctctcctttattataagctattttcctaagccaacgcccttttctccctcttttctgttagtcatttctcattggtgttgacgatccaacattcagtgtacaaatttgttaaacctctcaacattttaaatcaaaatcctaataaaaatttcgttgaatttcttcgcctcttatttgtgcaaaattttcgaaaaagtaattttctatttaaaattaaaaaattcagaagcaaattcaagaattttttttatttttaaatgcattttttaccacatgaattatgattaaatttttgcgtttcgaattcattttggaattaagaaaaataaaaattgataatcatttgatcatttttagcgcactttaagcaccgccgttaggcagcgcagttccaaaatttattccatgccacagatattatgggcaggacacgccaagtacctcaaacttgggtaattaaaccgaagaaagaagtgcagtggggaagaatgacgcccaaaatgaaggaaatattcgatgctgtgcgaactctttgtgacccctctctgactctgccaatgcagcagttgaccatttttaccactatttttctctcactcatcgtctgctcgtctctcctttattataagctattttcctaagccaacgcccttttctccctcttttctgttagtcatttctcattggtgttgacgatccaacattcagtgtacaaatttgttaaacctctcaacattttaaatcaaaatcctaataaaaatttcgttgaatttcttcgcctcttatttgtgcaaattttcgaaaaagtaattttctatttaaaattaaaaaatcagaagcaaattcaagaattttttatttttaatgcatttttacacatgaaatatgattaaattttt

SEQ ID NO: 19834 - DNA, 2909 bp, Heterodera glycines
  unsure (1)..(2909): unsure at all n locations
aaaatttctattttttcccggaaatagaaaaaattcttggcctgagcgggacatttgagtcccgggcccataactcgtcaggggatggttttatcaaaaaaacgccttagggcataattgtagagctttttaagctctatcgaatggtgtgccatatggccggaaactttcaaaatttttcgagctaggccccctagaaattttcggaaattttttttcggacgaaaatgggggtgaaaaatatttttctggggtaaaataaggtgctgagtacgaatatgatgtctattttaagtttcataatttttggaatattttaaaaattctttattttttggcaattttttggccctcgggattttggcctaatatttgaaaattcataacaaatcgaagggtggatcaattttcgtgcaactatattattaaaatagagaaagatcaggagagtatacatagggctatcaaatgatatcatcaatgttggatttggatgccaaagaaaaaaagttatagtccaaaaacatgtgttcgtacgaaaacggcctggcccctaactttccatatacaaatcgtagaaccaccattccaaaagcaattcggtagcaaattctgtgctctttccagtgagcttgtccattttctctagaaaaaattttccagccccatagggatttcgaaaattccccgattttcagtgtattttgggtgtcccggtcactaggaaggagtgatctgatcaagttggtgtaagagacttttttgatcagcaccaaaagttgtgcgagcatgaattatttcaagtttttaaatgaactataagatagtttttcaggtttgagtcaagacttttttggggcactgtatttctctcacaaaaatgtaatttgtttgggaaatatttaaataataaatttatataataattatggtcagcaaataaaattaataaattaaaatagttatattattaattaattaaaatcattattcggtactgaaatgacccgccccttctgatcccccctcacccatacttttgacacttcgcccacacccataccaaaagtattcaaaatctgttttcatgaaaatatcaattagagcttccataaaaccccaatttcttgtaggcgtcaatttatttgttagaggaaataaataaataaatgcaagatttcaaaggttttttcaaattaatttttttaaattattaagaaaaataattatgagttcccagtttttaggggtacattaaaaaaaattcggtcggttcttatggtgtgttttttcgtagttattgcatatattcatagaagaaaaagcatatgtctcgaaatccgcactaatgatgatattgtttcatttatttatactatttacacctttgcctgttatgaaaacaattttaaaaactttaattaagcaaaactatttttgaaattagcttttgatgaataagatattataaattcacgtgaaagcaattttttaaataaaattttcattttattttgttgccttttacacataaaaaatggccattcacaaaaaggaaacaaaaaatgccggaaataaatttgcgcacaaaaaaatattacgtacagacaaattattttcattgattgatatggattatattaatgtatatttcatttatgtttttataaattaatattttttctaatatatttccccataaaatgcttttatttaaaattatgctaataaacaaatgcattattacggtttttatcattgtcataatattaatgactcaaaatgttgcggggggacaaaagaataaaaataaggcaaaaacagcgcaaaaaaataaatataattttgataataaaaataataatggaaataatcataaagagaatgggaagggacaaacggaattggaagaaaaggagcaaaaaaacagagaatgcccagaaaaagtgacgaacaaagaatggctaatcaaaggtttgaaatttcaaaaagatgaattaatttaaaatttaaaatttttaanaatgaaaaatacggtaaacaattcgaaattctattgtaagtgattaaaaattgaaacaattttagattattccaacaatgaaaatgaggagttggcagaaatgctcatgacctttttgaagggtgttgctttgaatggctttatctcatcagattttgaacggacttttagaataaattcgacaatttgctttttgaaaagatttattcaagaaatgatcaatttggagtctagccaaaacagaaaaatcagcaaagaaaataccaaattgatcaacaattactgggcagttatggtgaaaaaagagacggaggacgaaaaaagggaacaaatctgtaaactgtggcaatttggggcgcaaatgtaccgaaatttggcacaaattatggcacaaaatgaaatttttgagaaattttcattcgaaaatcgaattgataaaatatttggcgaggttattttcgcaatttatttttattatcatctttttgaattaattatttttctataaaatttagttaaataattcttatgaaaatgactgtggcacggccgggcaaaaacagcaaatattcaacagattatgcgaacccgatttaattttcattatcaatggtctaaatttggcaaaacttctggaaattaacgaaaatttgcgttactttttctgccacgaaattgaaatgggaaacgcaaaaatgtttttgggtaatttcatcgaagacgaagcgatgacgaggctggatgaccaattcccacaaataatgcgactaggcatggattttaatttaaaaaaagggataggtaaatcaaatgggtcccacccaataagctccaattaacccacaaaaaagtaaaaacttagagacgctgtcttccttttctcact

SEQ ID NO: 19835 - DNA, 1747 bp, Heterodera glycines
  unsure (1)..(1747): unsure at all n locations
gagcttccaaaacaaggtccattctcggggttcccccgagaaattgggcaatgttatcggcggaagcgtcacatcatgacgctgatgcaccactggtgcctgctgcacaacttgtgctggctgatttggctggggaattgcatcccccaagctccgagaggcctaaagctccttcaatggtgtcgacaagccctcngggcttggtcgacccccaatgcatgaaggccttgccttctggtttgaagtctctgtaattttgctcttcatcttgaagagcttgtcccttcactctcaggaaaatggcttcccattttccgttgtatttctccaaaagagaaattgttttgcagagattttgtctctccgcgattagatctgcacggacactttggtccgccagctctttgcccaagttttcttgggctgtctcaatgtacatcttgagacgcaccaccattggtgcaatggagatgcgcaagagctcactcattgctcttacgcttaatgaaaacacaataaacccctttgggttgtgtgtttgatccaagcgctaaggccgcgctttggattggtttggttggagggtaggcttacgactggaagccgacccctacggggctccaattttgtgggcaaaaggccacaaaaatttgcacttcccggcagaaggggaagcagactctcccggcagaaggggggagtcttttaagcaaagcgaatttctgtccaaaagacagaaattcactgaatgtccaaagggacaaattaaaggaggaaattcctctcctttaaacgaagggacaatttggaaggagaaatccttctcctttcctttgataagccttttgtgacccaacgggggtcaacggcttaatggtctgtattaaagggctcctgggtgtcccttttacagaaaatgataagactaagactctttcttaatctttattcaattcaattgcacaattacaatttaatgcaaatgcttggacagaaaactgtcccgacttaatgctgatcaagcagaagtgcttgtagaaatctcacaagatgaagtgaatcaagaagtgagaagtaagaagcaagaagcaagaagtgaggaaaatggagaatgggccgggcttttataccctcacaaatcaatgggggcggggccaggcacgtgaaaaatgtgcacaaacaaatggaaaaaaatccataaaaatatgaggaagagagaagatgactcataattaacgagcgagcgaatgcaaaattgatcgatgaaaaggattaaaaaataaatgaaaatttccaagaaatttgtgtcgcttttggcgacacagtgtcgcatattcatttgtcacatattccgcttcacgaagtttcgcctaaccttacaaattagtctcgacttaagaaatgtttcagtcattggttttggtttcaagttattgtctcggtctggcttctcatgatctttgatcaaagaatggaatttttgataaaccatagcccagttcggcggcttttttacttgttaatttaaaataatatttcctaaataagaaattttcccacctcaaaattctaaaaattaagggttttttgattttttacatttttgtctctgacagaaaatgttcttttcgcacgaaaattgctgcctgaaatgccaatattctgctgcaaaatgccctgatagcaaatccaaagcctaaaatttgttaaattttttaatttctcaaattttttatccacccgtcgt

SEQ ID NO: 19836 - DNA, 2062 bp, Heterodera glycines
ccattccctcccttttcgccttcgatgggccaccgaccgcgtggcattggcatttgaccatttcgttttaaaaattcaatgtgtttggatgaagacagaatttgcacgtcaaataaatattgcacagaaagtacggataataattaatgccctcgggggttgtttaaaaatttcattaaatttcagaaacaattgctgataattgccaagagggaactgtcgaaagtgaccaagaaattgttggatgatgaactgtcactcatatccgcgtccattggatgtagcttttacgttggctctaatcacggagtcacgggaacggactttctcggcctgacgtctctggaagtgttcaacaaaaaattggaaaaagtccttgccgaacgtgtcgattacgaagacccaaatgagattgaacgcgcggtgagaagtgagttttggcatattctttaacaaattgcgttcaaattttactggatcatcataaccccatcaattctctctctctctctttccatttcccaactaatattataaagttgcgaccccgacttcggggttggaaaagtcggggtttggggagaaaattccccgactaaatttgtcggggtggcaggagaaatctaaaaaatgtcgggggcaaaattttcataaaaagtcggaaaaagataaagaaaaatttccagaacaaaaatgtcttaaaaactcatttaaggacttttccattttatttgaagtgcaattgacgactttcgtaaaaccccgacatttcgggggcccaaccctagattaaagtgaaacgaaaaaaagtcgaattttaaataaactgacattcgataaacagtgaaatttatgagaaaattttcgataaatttacctccttcgccaattgccactggccatttttatctcttctgtataaagacaaaattttgcaacaaaaattgaattaaattaatgataattattttaattttcaaattccagttcttgtctgtcaagtcaatattgggattggttttctcgacattcggactgagacggattttgtcaatggacctgagcatatttttttacattatccgtcgtttttgtatcttccattttcaatctacaaaaaattcacaagattataattatctgaacacccgaactatataaaacaatatgaaattctgaaatgttcagttttatctagggttgcgaccccgaaccctgactttaacttttgagtgtactgtatgcttcgcaaactgtatgtaaatcactaacatttaaataatgataatacttttacgaaaagtttgatatgttttaatttgcaatgtcattgtttttgttttatcacaataaatgattgggatttctatgcatttgcttttgagtcaacggatggataattcacacaaacggcaaaattaatcaaatttttgtagaattaataatgtcgtgaatagggatgtcaattttatgtaaatacatatttttttcctggcttctccatgctctaaatagtaggaaaaacactttcttttttatgtttgcaaacaaaaatcgggacttttatttacatatttttacatatttcgggattttatacatatttggtacatattttggactttttcttacatattttgattttttttagataatttgcgggttttttacggaaatttttggaaatcctcaaaaaaaaatccaaaattttggcaaattttttattttttatacatattttgagaatttttgaaaatttttagaaatttctagtgaaaaaatttaaaaaaaaaaacttttttaaatgtacccctccaaaaataatttttttaaatgttacaaggtgattctaaacatatttaggtcatttttatgccattttacgcctatttaacactttacgaagaaggttttcccaaaaaataaccatttaaaaaaattttatttacatattttcgtacatattttgggtttttatacatatttcttacatatttggggatttttttacatatttatgtacatattttgaccaatttttgtacatatttttgacatccct

SEQ ID NO: 19837 - DNA, 2497 bp, Heterodera glycines
  unsure (1)..(2497): unsure at all n locations
agtgtcaatgcctattggcgaattgtgccaaaaacatctccttctaagccacaaatgncgntggntttgntgttnaaatttgtgcacatcggcaccaaacggaggcgacgaatgagctcattgttgaatcgttcatcaacttttcgttcactaatgagccgtttgctaattaaataataattattcttataaattttattaattaaggttccaaaaaacgcaaaatttgccgatttcaatggacaaaatttgggacacaaaaaataaaatgccatattttctcatcgaatttggccaaaacgagcaaaaaagtgcaatccgagaaaagggcgacggagaaaattttggtggcaaatggaacaatgaggcaaaaagtaatgttaattaattttaatggcatgccatttagaatgatggcatcggctccattctcaaagacattgcgccgcaaatggtcaacggcactttggcaaaaatgattcattttgtgccaccatcgaatgatgacaaaatgctcccatttttccaaattgaaaaacccaaatattcaaaattcataaccaaccgtacaaaattgttaccctaccaagatgatccgaacaaattcagtcagtaaaaataaatttaattttttaaaaattaattttggcactttttaagacagacctgacccatgtgatgaatacggcgcagattgcgtgccgatcagaaatttgttgttgaaaattgaggaattggaaaactgtggaaagaacgaaagcgaaaacgatgcggtaaaataaaaataaaaatttaaaaatatatttaaaaattattttagatgttcgaaatgccagaatgggccccaccacttccgccaccgatgaccatgaaaaagccatccgaaacattaatatgtgaaggggatttgttttgtgacaaacaaacgctgcgagaacagtacaaccgattgagggagagtgagttaaatttaaaaattcaattaattaatttaaaattaaaaataaataaaattaaaaaatcgaaaattaaaattcacagtttgtggaatgaagcccgaagaggtggaaagtcagcgcgaaaaacgacaatacaacccatacgaaaaatggaccgaatcaccgatcaaaatcgcattcgacgaaagagctcgtaataattaattttaccattatagttgtagtttaacagatgttttaagtgcctgattattagggctataattttgcatattttttctacgcatatgctatgtatgaagaaaggagctcaaaatagaattttacattaaaatttttggtttggtgaaggtttttagtgcatataaaagcatatttcggtcatttttggcaaattttcataagaaaaatgcaataaaaacgaaaaatacacccctaatttgtaaggatcgactttttgggaattaaaaaaatacacccttgaaaatcgaaaaaaaatttttgtaagaaattttggaaaaaaaattttgatacaaaagacaaaaaaataataattttgtctgacaatggaacattccgaactgtaaccactcagatcacttaaaaaccacttctatcctgtagagcatggtcgatttactattgccaattttcggcttttttggctacggcgccaaaaatgatcaaaaaaaaaaatcgatcaaactttcgaaagaccgataaaaatgacccaatttttaaaaattcataaaaaattttgaaaaaatgctagaaccatatacttcttttaataatgatcagcaaacaattctctatcaaatagcatcataaaacaaatttaaataactgcataaaaacatgctaggtggagtaagactttgataaaaattcaaaaaaattcatcatctgtcgagcgaatccgaacccacgacgggtcggggtcgttttggcgccgacgttttagcgccagcgagagttttttgattataacttttgttattgttaaccaaatttacatttcttgttatgattctaaagcttaacacgataacaggctataccccattcataaattcgtcaattaaaataataataagcttgtactaccatactaatcagaatttttagaatgtgtgctgatatatgccatactgctgtgaaaaattgttataactccattcagagaagagatagaaaaaaaaaaataaaaataggtttagagagcccatgaacagctgaatcggatgcaagtaccgccgttgctgtacgcctaacagttggtgagcaatgacggaaaattgcttaaaaaagaaaccaaacaaactcatcaattgtttgctcccgttgacaaaccgaagggtacattggggcaatggatgttgggctaccgtatcagttattaaaatttttgtttttcaaaaaggatactaaaactgggataaccccattcagagacaagtcaaaaaaaataataataggcttggactaccatactaattagaatttttagaatgtgtctgttaaatgcaaaactgttg

SEQ ID NO: 19838 - DNA, 2290 bp, Heterodera glycines
  unsure (1)..(2290): unsure at all n locations
ttcaattttacaaaaattaaaaatgcaaataccattttaacattagtcaaaaatgttttcatgaacccaacaaataaggcggaatgcaaaattcccacgtgttggcattgccaatgcaattgacccgccgtaaaatggcagaatgtcaaggtttctcatagacaccggcacggacaattttttgttttcctcaaaacagtctcaatggcaaaaccaactctgtttttttttaataaataaatttaaattatttttggcatttttttatattttttacaatataaagaaacattttttgaaattattttgactttattttaaaattttaaaataattaaaaaacaatttaacataaatttaaaaatcttaatcaatgaatattgattaaataaatacagttgttttttatttcttccaaatagcattgaaattttttctctaaatttccttataatatttaaataaataaatattttcccgcgattttttttgtatattttatttttgccaaaaaattcttcacttttttttttgcccaactcatcatgagatgatacaccacatcccgaacaaaacttgtacattttttgttgtgcatgtatgtatgtgttttgttgttttcttgctgctgccaatcatccacatggttaccacccatttggccacaaccatctgcccaaaccccgaaattcccccgaggggattttcgctttcggcggcaaaccattcctttggcaaaagccccccaccctccttccatttagtccccaaaaatcgggaagaagatgaagccttggctgggggggggagtggagaagtcgaaaaaggccccacgggtttgccgatgggatgaataattcagtgtccccatcccttggcccctcaacaagtacttcaaaatgtttatatgctttgcacagttgaggagcgtataatatgtcactgtaatttgaactaatatttttttgatataattaattaggctttttgaatgttaattaatgttggaaatatttaaataaatatttttaagtttttatttaaatattaagttaaatagtttaatttttcaacattaaattaggcttttttaagtatgtaaataaagtataaaatatttttgagttttcaaaattcattaaataattttatttttcaacattattatgcttttccaatattaattaatgctatgaataatcaaataaatatttttgaattttcattaaatattcgttatttgatccttaaaaattaaaggataatctataagtaaatttacaatatttttaataaaattttattctggtaaaaattaaatttttatcaatataattaatagtaaaattttttaaataaataaaaattcttaaattgaaaaaatattccattttaaattatagcacatgacatgcccttgcttatttatccttgtctgaaatccgttaattccccaattattattattattattgtaattattactcaaatgtgccgagctcttatcctttcggggtcccctgattcatttgccaggttataatgaatatttacaaatttgaaaataaaccgttccaatttttaaaatatgcattttaggtacccaaaatgggcacaaaccttcgaaaatgaacttagttttgaattcaaaacgcgcatgcccaatgcattactgctgtatacagatgatggcaagtttaaatgataaaacaaacagaaatttatacaataatttttgataaatatttttatcaatttttaataaataaactttatttgcaaagttcgtttaattttcaaaaagccttataaagttaaaaaatatataagaaaaaaattggaaaattttgtagtgaaaatgaaattttcttatttaaatgttctaagatttttttgaaaattggaatatttttcaaaaaattttaatgatattttgttattaaaaaatgttctgatattttttttttgcacatttttaagttggaatttttttaattttcatttttcaaaaaattggggtgaaaaactgaaaatttggcaaggatacaatttttcccaactgatttttttccactattttcaccagcccctctaatgnggtgacacaaaaaaaaatatttcaaaaataaaaattaatttttaaattttcttctatctcaggcactgttcaacaaaattttttcacaatttcattgcttgacgggcatatccaagtcgaatttcgtctnggcgagcagcagttccgaatgccgggacgacgtccggttatccaaatcggatttgtcaatgc

SEQ ID NO: 19839 - DNA, 1030 bp, Heterodera glycines
atattaatattaaaaatcagtacataaaaagtgttacaaaatgtcaattcttttttattacaaaattttcatgcggaaagattgaattgaaggttggcccgaaattcgcatcaattgtatcatcggagtcacgcaaagaaacgcatggaaaaagcaaaatggaagaacagaaggctaatttggcggtgtctgaatttttatataaaaattacttcactatgataattaaataatcccaatcagtctaattggcttaatcaattggtaagtgatttgtctgtttaatttacaattattccaacccaatcgttggccatttttcgtgaaaataaagcgccgagtggtcaaacaaatgccacatccgatgacatcatctcgcgaaaatgctgggagcatattccctctataggaagcattggtccaaaaatatccatctcctgtataggaaaagctgcccggaaagccaccaacaaaacaatccaatggcatttctttgggggcgaatccgatggcgacacggcttaaaagttggggcgtaattaaatgggcattcaaaattaataattatttcgtttcaatttaccttttgacgcttaaaatcgtaacttcgtaataaaaaaatccgcaattgccattcaaaatgggaaattctgcgaaggccgagagatattctgaagaaaaggcacaaaaaattattaaattccaaatgaatctcaaaataaattttaattttataaattaattgtgtttttactgtttccatctgcggctgctttataagtgatcgtttcgcagttgggcccactgatttccaattctttgtgacacgctttgacgtcccaacaattcggcggcggcggtgggggcgacggatttggggggatcggcgatgacgtcaattcacttttctggagcaaaagatgggcgactgaaatgaaaataaaacggtaaataaattgttaaatgcttttttagtcgattcattccttataaaaaacattaatttttaaaatttctttacaaattcatt

SEQ ID NO: 19840 - DNA, 823 bp, Heterodera glycines
tttcgaacgagtccaataatgttccatttgctggacaaagaaaaaagttatagccagaaacgtgctggcgcccaactgagcgagtccgtctcttcgtaccccccccctaacaaataagggactgttaagcttataaattaggcatagcattggttgcattttaaattgatatatacccaagtgtcgaataaagcaaaacataaaaatattcaaatttaatttatttttccacaattttgctgacccttttctgctcaatggatgacgatgattcgttgttgccaacattttgtgggtggtcagcagccgaaaaagcgaatgggtcattagtttctgaaatataaaaaaagtgaaaaaattttcataaattatgtaatattttttaattttctaccttttccattttgtaccaaatttgtgtgaacatttgaaagtgacatgttttgataaatattaaaataacaattaaacaataaatattaataatctaatttaattggtagaatgtaaaaggggattgttgtgttatcatagaaaagacaaatatttgtagaaattaaatgattgtgtagaggtggagggaggggggggggataattccttttgggaaaacacataaataaaaggagtaattaactggttaatattagagtacggaaatttcacatgtgcaatcccgcagcgggattgaaattcaaaatttttgcaggacggaatgccgtcgaagacacttggggctatccatgcaaaagaactaaaaatttggttgctttcgagcaaagttatatccaaaaatattctgatttgtgattttttgagtaca

SEQ ID NO: 19841 - DNA, 2902 bp, Heterodera glycines
  unsure (1)..(2902): unsure at all n locations
agaacttcaaagggtggctgtgattcgccgacgccggcggttgtccctgtgaaaactgcaaaggtggaaatcttaaagaaatgaggaggagggagggtaccatccgtaccataaccgagtggggttttttaaattttctacttaaaaatttttcacattttttaaaattaattttcatttttcagcacttataaagtgcaaatccgctaagggaagtgaggaagggatgattgaaggaagtgaatatcagtgctatgatgattcaaaatgcggtgccattttctgttcagccgataaaaatgaatttcgaagaatttttttattaactttcgggaaaaatgggggccaaccgaagaaaaaaaaaactagacgattgagtcgaatgggtaacgccaaatgggcgccaaatggaaaaatctttcgttttttagattcttatttattttttttttttcgcatttttcgctcatttttaggcaatattttggggaacgaatggagttgctacattggttactacggtgaacaatactatatcggactcagaacggtcgaatttaaattgcggccccgtgccaacaatgattagtggaagtgcacagtccactttggagcgatcggtgtgaacatgagcaatgcattgtttgtgccgccgttggtcaaaagtgtgtaaacagtagaggtgtgccgtgactgaaaaaacccgtgaaccgtgaccgtaaattggtcccgtaaatcatgaccgtgaccgtgatccaaaaaacccgtgaattcacggtaaccgtgaccgtgaccgtgaattttttgagtttattttttctcggtcggtaaattttttgctttttacaccgtctttttttctggtatgattttacaaaaaaaaaatttaaaaaagggggtccaggggagctgatagacgctgccgcaaaaaattttgaaaattagactctaattgtgcgcaatttttgtccaaaaaatgaccaaattttgcgaatttgagccaattttttatgaaataatatgttttgggggcccggcggtgccgatatgcgccgccgggggtaaaatttaaaatttgagtgcggcacacctctagtaaacagcgtggaaaattataaaattaaataaattatttaattaattgtctaatgagcttttaattggataaatctgacaaggatgagtctattttaaaaaatgtgcgagagtttagcataattttgaaactcaatttaagcatttttggaggaaaatgggcccctttttaagcagtttttttaacctttttagatgtttttttgtgcaaaaacctaaaaaaaaattttctgaaggaattgaatttgttgaaactgtaaaaaaataacaaaaaagaattttaggggttttttctataaaaccctataataaagtgagaaactaaaaaatttcagttttaaaaaaatatttcgggggaaaacaatggctggagggggtgagctgctccctaataaaagtattatttcatccgatttgaaaaatgtctaacaatgatcagggggtgataaaaacgatttgacactttatttaaaatttaattaattcactcatcacagcaatgaagtgcaaaaaagccaagcaaagtgaggaagggatgctggtaaaagataatgaggaacaaatcagcagcagcaacatttgctacagttacaatggaaaatgcggcgtcattttctgttcagcggaaaatggtacaataaataaatttatttaatttatattttagtcggaaagcgaaaaaacggtggaaatttactcgcaattaaagcacaaaaattgggcactcatcgattaaaaacgtggcttttgtgaaaaagtgttaaattttcttaattatgccaaaaaattaaaataaaaaatataccaaaaaaaatatttccaaattggcgacgccaaaacggttcgtcaggctggaatgtccccgaccgaaggttccaattaaaaaaaggattggaattgggagggaggtcagtcagctaatgccagtgttgaatttttataaagttttataagaaacccgtccagaattggtcaattgagttttttgaaacgtttaagagctttaaaaaaatctcaaaattacaaaaaattcgtaaaaattacacattactgtaattggcttattgagatttttaaattattaaaattaaattgttattttttaatttgttgtttaattgtagaatgcgaatgcgcgggcattcgcaacagtgttgaaagtgcattgatgatgatgatgatcgggctgatcactagtataaattaatattttttaaattaaattataaataattgtcttttttaatgctttttggcgctgttcaatgccaccaatttggatcagcttaatccgacactgaactgaagtggacgattaagaaatgaattgaatttgtgcaaaagacgctaagaaaagaggaaacccttcagcctcaattcgatcagttgaacagtttatgactatgatcagagatggacaaaattanaacatttactttttaaattttaaattgtgttaaaatcttaaatttcttcaaaagttagccgaaatttaccattcaaagaaaaaaatataagtgattttattactttaaatccattgcaaaattaaagaacagggctcctatttgtccttggatgctaaggacgtccttggatttggctttgggttttggaaagttgaaagtgtccttggttccaaggatgtcgttggaaatctgcattagaaaaaaaaatcaaaaacaatatttttgaattttataccaatattttgattatattatggcattatgtcatncacttntgtaaataatagtattttctaatggtagcttttggataggtttctaattccaaatctgaccta

SEQ ID NO: 19842 - DNA, 2106 bp, Heterodera glycines
atttttaacccttttcataggaaatgtttattattttcctattaaatgattaattaataataaatgacataaaataaaataatttcctgactggacagggggaaatggtcaatgaatttcaaaggcttctatttggaccacttttggtatttatcctacaaaatccggcccacatttaacgggcgggggagggcggagggagtagggacatagcctcaatccactgaaatgaaaaaatatttcaggcaatgtgaaaatttaatgtggtgcttgctgaccctcctcttattagtgaaatgcaaaaaaaaagaagtgtaatggcataatgttagactgggcttccagctgaaaattttcaaatctatcattttgcatgccgaaaagcttaattccggttcaaagaattttatcaagagtttaacaattgcattttaaatagttcaaaaattaaaaaaaatatatttacaaagaaaaacttatcaaacaaacaaaacgcaaaattacatttaaatcaaacagttgaaatcaatgttaacgaatttctcataaataaaggcaattacatttggatccaccacatgtgctcttgtggcgcaatcggttagcgcgttcggctgttaaccgaaaggttggtggttcgaatccacccaggagcggtttactttttatttcttttttaatcgacgtttaaggaaaacggagagggattttacattttaaatcattaaaaggaaaaaaatctatttattatgcatatcaaaactaatcatttttgaggagaattaatttttaagacggcttaaatcagtgcttatgacggtggaaacgatttttcgagtacacattttaaatagtcaagaaaagcaccaaaaattacaaaacggtgacacaaaagtccgaaaaagtaaagaaacaggtgacaaaattgtgagccaaaagcactcaaaaatataatttacagagaaataacaaatgaaaaattagcgagttttaatgttctcaattttcttaaaagaaaacttttttgaaagattctacgaaatttttttcatagatttccaaattctctcttccgccggaattaaaaattgattttttgaaaaggattttttccttttatagaaaaatgccaaaaaatgagtgtttggtttcgtataatttccttcgaaagtcgcaaaaaatagttgaatcatcaaaaaggccatcccaatcttaatattttaaacgctatgaaattccgactgttttgaaaatttcacgttcaaatctcaaaagaaggatttatctttgaaattttagaagctttgcccctgtgccaacgtattttgctgcaaaatttcagttcctttgcgatgttttgccctgctgaatcaattctaatgaagcaacaatttttgcattttttgataacaaatatttatttctgaaatcataatgcattaattgacttgcattctataataagaataattaaaaataatatttgtaatgaattacatttacaatattttcctcttaactttttaaataaaattagataaaattctgcttacaaaggaaggtccccaggtgtccgtgggatttccgaatgaaactttgtgggtgcatagagcacccatgggttcttaagaaaaatggtttcaatttctgccaaataagtacgagtgccgagttatgacgtgccaaactttttttatcccaataaattgaataatctattgcactgttttgtgctgtttagtggtgcagaggttgtgctctcacctttactttttccccccacaagttcgaatccctcttaagtaaattaatttttttttaattttgcccttgaatacccttttagaaatgtaattattttcattttttttttaatttaaaaattaaaatttaaatttatgcattttcgcacatgtgataatcatgaaaaaaatgagcaaagaataagaaaatctcacaataaccgcaacgaagtaaaatagtattttcacaatttattttttggcaagatctttatcttttggaacttcaaaaaaaaatttgaccggaagacaaaactctgaatgggaagccttgatcaaaggaaccggcttttctccccgaaaa

SEQ ID NO: 19843 - DNA, 2370 bp, Heterodera glycines
aaatttaaaaagccatattaatgcacttcagtatcatcctgtcctgaaaggcttcgaaaaaagaatttaattctcattttaaaatataactagattagtttaaaataaaaatatatattttgtgtcggcacactccaaatgacatggcaattcattagtccgttaattactcaccgcgtcattaagttcgcttccggcgctgaactggtccagcaactgtttgttcatcagttcgtacaggtaaagggcgctgatctggtggattatgtccgtgtacgtcttgtcgccctcgtcacattcgtattgcgccgccatttggtaaatttcctcccattccgtccccaattgtccgcgcactgagtccacaacacttttcagcatttccgcctcacttttgtttcgttcgctcactttgtccaattgttccagcagtttgccgtagcccattgaccacaaaagtgccgcaaagttttggcccatcagttcgaatatctgaaaaatagggccattttaaatattcccttttttcgctttacttcaaaattgctgttgtaaaatgactcttgcaaattttcaaagattcccaagaattcttcggtgatgattttgtcgagttcgtattgaattcttggcgacagactcaacccaatggttttctcgatgtttgcgagcccttaaaaatgtacataaaatgtgtgtgcttcgcaagactgggcgtaactggattttcaattaccgaaatccgtatatacgggagtccaaaaagccgtaatttaagtaattacgccctgccctggtgcccctcccatttccctccattcactgtctttccagcgcgcgctttgcgttttggcacttcgcgcattcgttgcccgcggcgtcgtgtcccctccgttcttccgctggttgtgccgttggctgttcatcgctttgtttgtcgttgtgtcgcatggcttttccctctgcttctctcccggcacccattctttggcatttgccaaccttagcagtgttttcaattcctccatctgttttttcagcaattctttgctgcttgacccatcagattccttcgactcttttttgagcaaaatctttcgcttccgcaaatgcattttgaattggtccaatgttagccatgggagaagcctcggcgcattttgcattgactcgaagcggcatttcccgtccaaaaaatccaaaatgccattagccgttggccttcgctcgggatcgtacaccaaaacggcctgaaacatgcaaaaaaacaagctcaatcatatagaaataaaatagctttaaaaaactaaaaaatatgtaaattaaacaataattactgtaacgatatgaaaaaggcgcggaaaatgcgctcggatgcttaggagcacggagaaattggcatagaattcgtcccaattcttttccattcgttcgtctatgtcatttgtattttgaatgtaaattcgccacaatacttcgatcactccgtaaacttttggcacctacaaacaaattataattaaaaataaaattttgatttaattaaatttaattattttaatagcttagtcataattccattttttgttttcgccttacaatttctttggcatccttctccggctcttcgtcgtgcgtccctttgaattccgtcccaattgccgccatttcgatggcgataatgccaatggcccaaatgtccgactttgagctcagttccatcgaatgttcattcattgggttgtatttccaattgcattggttgtaatgttcgggactcttgaggtaataaaaagcatttgccaaatcgaaaatgataaaagattaaccaatcgaatcaaaagcattttgaatggcaaattacgcaaattaaggaattggacggaccgatgggtgaatatttcatttaattatgcaaaattacgcataaaaataacaccaaatggcaaattatgcatgaaaaacttgggtatagaagcttcaaaccaagtcaaaaatgtattttcatactttccttatttgttagctcaaccaatgtaagcaaaatttttttaaacattttgagattatttagacacgaacgaatgctaacaaaaatatatccaagactaattagactcaaattaacttttaattgacccccaatgtcttcactttcccattgtgtcggctaatttattgagcattttcggcactgtcacttgcctggtaccattccgtggtcaacgggtcgttgctgacgaaccatttgcacgcgttcgcctgcttttccgtgctgttcagctgctccccgtactcgtcgatgaactgagaagcgccgaagtcgatgaaagcgatcagcgattgagtgccctcgcggacgaacaccaa

SEQ ID NO: 19844 - DNA, 2120 bp, Heterodera glycines
gatgcgactttggccacaaagcaagatgcgattattaggcagggggatgaaaaattgatgcggtgggaaaaattaaaatataggctcaactaaactccacagtgaacttaaattcgggactataatttcaggaaaaaggacgtaacattcgtgatcagcgaactagaacccccgaaggttgagacttaagattttttgttattattatttgggatactattttaaaaagttagataagatgcatttctctaattttaaaattttgttgactaatagtaagtataactaaatgatagcatgaatgcttattcaaagaaattatagtaaattgggctctcaagtgcctgggaggcagagagtttctaatttccaccatccacaaaattacaaaatgcgaatttaaataattttttcagaaacgaaatttaaaataagcacctgtttaaatatttagaaatgattgggaaaaaatgtagggtgcaatggaaaagatcaacaaaaaagttattttgaatcaaacaattattattattgtcaagaaaaccttaacacaaaaaaagggttgggtaatttcacaaaagaacggggatgatgggctactgtggggaggaaattttttttggtttttcttaatggaaaaataaattccaattaaatttttcagataatgttttaacctgcatattattaaataagttgtggaaataaaagattaaattatttaaaggaaaagaagcgaaagataaggattgtagatgtgtaggtaaaaaaaaagctttattgaagatatgatatagatgtatttgtagttaggggctgagctaaatttataactcaattaatccttcgtacaaacacgacgctctaaaggtctgagctatttaataataactcagattatcttagagaaataaaagacaaataaaatttaaaaataatttacctaattgggggtagtgcgctcccaaaaaacgtaaatgacaaaaagttaactttccgttcaaggtcgaaaatgacgaaaaaattaagtcgaattgtaaataatctatgaacaacaatctttaaacttttattttttaagcgaaaggtgttttttccaaggtaagaaacggataagaaagggccatgaaaaaaataaatggcaaaatgtctgaagaaaaaattctaaatatatttgttaagcatattttaaaatattaaatttctttatcaaaacaaaaaatattgttaggaaatgtttcagtttacagcaaaataaacaaaaaaaatttttgggaataaacacattaaaaacttttatattttgaaatgatacaaattcaaaaaaatgaataggttaaattttaattaaaacgtcattaaggaaaaacgaaagaaatatttggacgagaaaaattaattaacgattaaaaattaatcgctgtttaaaaaatttgcataactttacgcagaaggacagccaggatttggatgagaaaaattaattaacgattaaaaattagatggaaatttgagtagggcgggggggggtcaaatagtaaagctaatctgcagggagatgaaggttatcattgatagattttgttgtagaaataattaaattaaaaatctaagttgacaaggcacttaaattttaacatatttaatctttaaatatttttgagcattcattccgctgaagcgcggaaggagggaattgaaaattggaatcgattatgcgactcgggggaacggaaagtgagggaccaaagaaaggctgcaaaagagcggggagggagatattatcaacaaccaaatgcgtagctgtatattggcaaaaatgcactaaaattgggatctgtaatttgaacaacaacaaaaagcaacaattaatttatttgaatgagaaacccccctaaaaataaattagcagtatttaatttacggaaataatttgtcagaataaataaattcaattttaaaagtaaagggaattttggtgacaatttttttgtcataggtaatatttgcaaaaaaacgaaattttatggtaaagatgaaaaacctttaaaggggtacaaagaaaacatgaaaatattcaattttgtacatctttaatcaatttgcgcaatcgttgcaca

SEQ ID NO: 19845 - DNA, 2385 bp, Heterodera glycines
aaaggtggcaaagattagtaacgaggaaatggacgatgaagagggaaaattggcgcctgaatctgaattggactatgacgaactaaaccgaggggatttctacctaatcggaggcgtccatggtaagtttcgaacttttttgtgaattggtaaacatataaaatcttgaaagttgtgaaagactgaattactaaaaacatataaattcaattttagacccgatcagtcttcgttttgaagctgcgatccgtgaccaaaatgccgtcgaacataaaagtgccgaacgctactactggtacaaaatggcggaatgctttggcgacgaggaagccatgaagaacattctgcacgcgcagaatgtccaacaggccgaagaggccatgaaaaacatcaaaggcttcgacgttgccgaatgggacaaagtcagttggaatgagaaacattggtggaaaggaaaagggttttcaggtcaaacttaaacattgggaggacggacagcgactgaagcttgagcaagtccgttggatcgaaaatttgctggtgctgaccaaaaccacctacttggccattgcctctgaagacaaagtctcccctcccccatcggtccactttttactgtccatttttgcagtttttcggcactggatggcgcaagaatcgcgacgaggccaacaaaccgatcttttgggatgggaagaatgagggcgggaaagtgatgatgcacattcgccatgagctgaggccaaacactcatggactggtccacaggaggaagaggtccagcaaatgcacttctgccgtcttaatagtcaagaccatttccaggagtccaatacgaagttgcgcgagatgatgcggaacgtgtggcgccgcattgacccttcgaaacgtgccatgttcggcggtggccgttcggccggggtgccttcgcacggcggaggggcgcgtggcgggcgcggcggtggaaactttcattatcgcaaccattagacgaaacatttggcattccaaagaagagctttttattattggacattttcacattattcaacgaaaggatgagccaattttcaccacattatgttattttctggtcaaagactgactgttcaaaacgaaaactgttgaataaactgtgccaggggtttggtcaactgtctgggctaattgaattcgtttaaaaggatcaatttttcaattgatttgtccatctcagggtattagaaattatataaaattcggatatattttttctcccccgttttgtcttcagttttccgtgattctgttgctattgcttagataaaaaatggcgcccatttctccagttggcggcattctgctgaacatttccattgctcccatccctcggctttccgttgtgccgtcatttgttctctccgtcggtgccattttcatcgcttttgtgcaaaagccgtgccgaatgacgccagtgccattttctccgcttcccgcgatcctttcgatgtctgtcggtgcttttctctccaacatttcttctcccgatgggcacgtcctttgcaactgtgccattgtccctttgagcaatgcttctccgaaaatgtcgtcattttgttgcgattgtttcatcgtcctaactgaaccaatgaattgggagggaaaggaaaggccaccaaaattattttcagcgaatcctttcctctatctcaaattgcgccgttgtaagatatttcattgatcacttttcatcctttctctaattggtcagtccttttccgaatcactcttacctaattgacctgtttccttaattcccctttccctaattgacttctttccccaagtgatccgtccatttccctcccctccctaattgtccaattccctctcactttgtgcctctgccgttgtgttattgctgttgcttgtccccccacccgcttctccgtttgtctctgtcctgctgttgttgttgtggttgtgctgttgttgttgctgcatcgcttgcattgccgcggctgccaaagttgcggccgcggcggaactgtccaacggattggccattaaatgctgcgcgttccctcctccgctgccacaaagcgttggttgctgctgctgattcgttttggcacttacgctggcagcgattggggcggaagggcccccagcgccgacgccattccgacagtggcggaactgatttctgtcccggaaacggtgaaacaaaaacaattttattaacatcatatcccggtttgctctggagtccgtccgccctccccttctgctgcctctcataatttacccctgtgctcatgagcagtcactgatcacttccacttgtgattaatcccttccctcaaaggccccgttgatcactccccttctgatcgttccccttct

SEQ ID NO: 19846 - DNA, 1860 bp, Heterodera glycines
atggaaaaggaagccgtcacattatttcactgctgcgcctccccgttggctggcaccaatttttttggttggcacgggcgcaaaatgccgcttttgaaatatgattgggaaaaactgaccattaaatcacataataacacaacaatacctgtcaccccataccaattacattacgaaacatttttcaccattttcacctgttttgacatattttttcatatgtttcacacctgttatggaatattttgcacctcttttcaccacttattcctggacatttcacatatttccttggttttcacctcttttcaccaggacatttcacctatttcctattgttttcacctcttttcaccgcctatcacgggacgtttcccctatttcctattgttttcacctcttttcaacacttatcatgtggtattccacatgttgcatattatttttcacctgttctgcccttttttcaccggctatgacaatatttttcacctgttctgccttttcatctgctatgacaatatttttcacctgttctgcctttttcatctgctatgacaatatttttcacctgttctgccctttttatctgctatgacaatatttttcacctgttctgtccttttttcatctgctatgacaatatttttcacctgttccgcccttttttcatctgctatgacaatatttttcacctgttctgcccttttttcatctactatgacaatatttttcacctgttccgcccttttttcatctgctatgacaatatgtttcacctgttctgcccttttttcatctgctatgaaaaatattacggctaacaggagtgggccttcactttagaccgttccacccccgctagtcataatatcactttaattatttattcaactttatttaacaaaaaaaacacaataaaatacaaaaaaattaacaaaatccaaatggcatcacattaagttcttcatcgattatccccttctggcagaccggcttgtacattttgtgcttctccctcgtcaccagttttgaatccctcgtcggcctaaatattggtattaattttggaaatattttttaaaaactaacccaaaatcattcttgtagacaaagaaagccgggtccacctccccttttccataattcagaaccatctccttgaatgtatcgtagtgcaaagtcttcttattatccacatcgaacgtaatccctctaatcttcataacgtattcaatctcccccgtctgtttgcttctcatcttcaaggcatactgcttcgcccctccacagcaatattcttcaatctcatagccaccgtattcctcgctcatttctcccaaatatttccccgtcgtgatcggctccacatcccgatcgtgcctaacaaaaatactgtccgtgtccgtgtacaaaatctccccgccatggctctccgcttctctcatgaattccaataattttaacctcgccatactcgtcgtcctgaaaaattttaaataaaaataaaatttattttttctcaccataaactaatgattatgttgctcgacttgtgctccatcacaaagtcctccttgtccctgtatatcaatctaatcgcctcttccgaatattcaacaatatcacataattcaattttatgatcacacgcaattttataaaattccgacgccctatcaatcaccgcattcttgttcaaacaattctcatcgaaaactttccttaaaattttaagctaaaactctttcggaaaacccttaaatcttacccataagctatttagcatctactaggttatgcaccgcaaatcctggatttctctttcactttagcccattcactgtcgactccatattt

SEQ ID NO: 19847 - DNA, 1023 bp, Heterodera glycines
ttttcgacgtttccccgcccgcgcccgcacaattcgctcaaagtccgcaaattcgggtgcgttcagcattccgtcattgttgtcgtcaacgctggcttaagcaaaagagaaacgataggagaaacacagctttagaactgatcggatggtttaaatcttaatccatttttaataattatttttatcattatattttattattaaattaacattccctcctctctctgtctctctctgtctctctcacttttgtcacatatttcatccctccatgtttcctccctctctcccaatttcccctcaactcacccaacatttccaccacttcgcccggtccgatgccctcttgctcaaatgctgaattaacggcatgcttcaattggtcattgtgagtccctccattataaaatgataccgatcagttgcgcctccctcagattgacttggccatcctcgtctcgatcggccccctaaatttggccatttcccttagcccaccgttcctcaacacaacggatcaccttcaagatttgtctggccaagcgaatgctcatgccgcgaatgcgcctcctcagcttgctgaacagcacggcatccatcttgagcgcatttatcacagtttaatcagtttatctctctttctcttccctctctcccctccctctgctctcccttcctcctcctcctgttgtgcccttcccacctcgtccccactgctcggcaccaccaatcgccagatgcgttccacgtccctgttgctgatcccgtactccttcagaatgtaattctgcgcttccgtcagactcagctgtccgttgtggtccgtgtccacattttgcaaatatcgcagcgccgcgttctccgctttggccagcacaagcggacgaatgtcgttgaattctgtgggaaaattggaaaacaaattccgaatttcagcaattgtttattctcatccaacccagcgagttgagataggtgtccttgttttggtcgatttcattgaaaagactgaaaaagtgacga

SEQ ID NO: 19848 - DNA, 1211 bp, Heterodera glycines
ctgaaaaagtgacgaggaaaagaaatggaaaagtacgaacggtataaaaataaaatcgtaaaataaattccccctaaattttctcacttttccacaaccgacgagcttaagccatgatgaacaaactgaaagttaatggacagatttcaattcgaaaatgccgtttttatccctaaaatcattaattgaaaccaaccgcggcgtattggacctgaaaaacggaggataaagaaacattgccatttggggactgatcacaacagatgatcggtcactgactgatcagcaaatgatcactgccactgatcagctgctacaaacttcgcccagtgacaatgccccgtccccgtccaaatcgacgcttttgtccactggcgccgagaggggcgaagttggcaaagtgtcagtggttgaagccgactcatcgggcggagaaggcggcacttctgacggggggacaccgtcgatcggaggtggagacgaagatgcattttgatcagatactaaggcaatccaataaaatgatcgggaattcgtttcttttaccattatttgacgctgaaatttgggaggcgatttgttgttggatttggccattagaaaaggcagcaagatgttgttggggaagaatctgaggaagaatttgagcgaagaacgaacaaaagtcaacacaaagagagggggggggggaggaggacggcatttggtcgaaaacatttgagcgatcagaaaataaatttgatctgataagcccattcggacaaagcaaaagctatgagaatttcgtccagaaaataaaaatcaactgcgaattgaataatttcctataaagcccaaaaagttactgactgacgccaaaacaaattgtccgtcgggtgcgcggatcagcggaccattgttggccacaaattggggcggcggcggaggacgacgagggaattggccattaactgaaggcggacaataaaaagcagaaaaaaggggagagaaatcaccgtcgacggaagggggcgccaatttggaggccaaagcggcacgggagaagttggccccatttgaaggccagaagccattttggggagcggaagacgcagtgggaggagagggaggcggagacggggggacaacccgtagggggagggagatttataatttggaaaatcaaataggtaggtggagggggtaggggagtagtggggaaacccttgggg

SEQ ID NO: 19849 - DNA, 309 bp, Heterodera glycines
caccattaaaaagttcctcaatttccgctccgcattttccgcgatcattgctttttcagttgatatatcgtctagcaattggtcactaatacattgtgtatatattattattatgcatcaattcgttgaacaaataaagcgagatgggctgcaaattgctattgaaaacggtcacgcgcacgcgaaagaaactgcggggggtgggagagggttgggctgatgagggagtgcatagagagaggccgtggtggttagagagagtggtgagggcgagttggggcgaatgttctgtccgagaccgaccctccc

SEQ ID NO: 19850 - DNA, 1556 bp, Heterodera glycines
  unsure (1)..(1556): unsure at all n locations
gtcccccgcctatcatgggtgatcattttgctgtgtctgttcgtcctttttgtgttcatctcctcttggnccatgttcgtgctgtactggancaatcggagaagagagcggcgactgatgcggcgtcggatgttcggcagtgagaaatgtttttccgtgctcagctcaccgnccgaaggcaattacgtgacttcgtcggtgttcaccgccgatgccattggccccattcgaccgttgcaacgggtcggtcgcctttttaggcatttaatggattttttaaaatttaaataagattttcttccatttgatccttttagcccctcagtcccaagttttggcacttcttcaatcagcagcccccgccgactcccaacgcgccaaatttgcttcggtttggtcagaaccatcagctcaaccacaaccaccaccacagcaattttcggcacaacaattaccagcaacaacaacatcactcccattcgccctcttcttcggcatcttctgcttaccacgccccagtggaaatgttttttcgatcggcattataaatcagtgacatgaaaaatattgtacaaaattgtaaataaaatcataaaccgtgttaattgtaagaaaggaatgaatggaatttggtctcaatggcctctgaaacatcgaaatgacaataggtatttatttataaatttaaatcttaaaaacattgaaaaatataaattcgatgaaattatttggatggtaattgtttgtttttcttttctttttcactctttcattttccgctttgaaattggcattggcttccggtaaagccgatattgcaaaaacaagaagcaatgccgattgtgccgatgcaaaagccacggctgttgcaatttacactcggatcacacggcgctaaaaaggggggggggggggactttcaacgcttttcacaaaaagaccatcttggcatcgggtgccggccgagccgccattgcacagacacacggggaatgttttcgtgccaatgcaagtaccacgaccactgcaatcatcggccgaacaagtcttaagtatcaacatgttgaaagtgtgaattatggggggttcaaatatcctaatcagtgaggtcatcatagattagaaaaggtctgagtcaatcactgatggatgtaagggatggatcaactataacgcaaaggttgtcactgatcagtaaagggggaataaatcactgatcaagtgaacggttggctccttggttaatcataacgaaaaacgggatcaatcactgatcagaaatggggataaataaatcaatgctcaaacagagtcatattgttgttatacgattatttctccgcttcttttcgatacgaaaaatacccttttttcttacttgagcttcaaatacaagcggtgaattcccaaaattgttgcttgggacttgtgaaacaacggccgccttctgctgaagctgctaaaatgggttttggcacattttgaaatttgtttagactgaaccgaccacttgcggtgtcggcacggagaggggattcggcgcactgtctaaagct

SEQ ID NO: 19851 - DNA, 949 bp, Heterodera glycines
  unsure (1)..(949): unsure at all n locations
tgttgctgcctcatcagaagcagttgaagaaattgtgaaatcattgtcgtttgccgctagtgccttcatcaccattggcggcatcgatggactttgatggaggcccattctgcttaacatttaaagccataatttatatggcaatgggaaaggggcacccccccccccttccatttcatcgaaatttggtattttacatgaaatcggcggtcggtgctgtacgatcggtcgctggttttggagaaaccaattggccaagttcttccctgtgtccaatttgtgttgcttcgcacaattcaatggacgttctttttttggtcatcgttggaattgctggcgcttccccatgttgcgacgtcgtcttcgttgccatcgaccagaatttgtcgctgccgttgtcgtcatcctttgccgattcaccgcccatcggctcctcctttattgatggctctcgtggggcgtgagaaatgcttttttgcatcactgaacatgttgatatcaaattggcctgcccggaattcatctgatgtgtggctttagccactaattttgcagagattggatttggagcgattggtgtctgaagttgctggttaaaaaatgttggcggaggagcgcctctcgctgatgatgagcccccgttgggtttcctatgtaatacatgctataattttatgacaacttaacaatgtttactcgctgcttccacttccaggaactgacggtgcataacgataactgactcccggttgatttattccatgccgaaggccgagattcggtagaggaacccgtcctgctggcgccgaccctttgcgccctcccgaagatgccgaagatgtggcggtgatattgcgcacattggcactttggatctgatgaatatatgctggagtaaaagaaacaaaaaatataccataanttatagtttctgataattcagtcgttt

SEQ ID NO: 19852 - DNA, 1160 bp, Heterodera glycines
cttgtggttgaacgctgagagtcggttggcgactggtttttgtgccgttctgaacgtcacttgtcccggagcagtttgtctttgacgagaaggaatcgcttgtggagttgccgaaatttgttggatgggagcagccgactgttggtttattacgctgtgagatgttatggcatgttgctgtggttggatttgttcggcatttgaagaagagcgtctgctgttcttcgtatttgacaccgttggcttaataaatttgatttatcacatggaaagccaagaccactggccaccccatgcgattgtggcacggtcggccccatcgattgattaaacggcgattcggccgtcgcatttggtccactccctcccaacgattggccttgcgcgtcgtgcttttttgcctctttcatcagcaaatacgtgccgaaaatttcgtcgaacctttctctttccaacgactcgtgtatttgctggagagtgtagccaaatgcttgcaacttcaaaatgcgcctttcatcccgaacgtcttttgtcggttcggtgtaaggctttaattcgtcctcctcatagcccatattcatccatttatcccgcattatcatctccaaagttcctctccttatcgggtttaaaacgagaaacttcttcaggagattctcgcagtctaaaattagatataatattcttcaatgaattgcacagtttcggacctgttgacatgtaaaaagggactctgtacttccctctgagaacccgctcacgaagttcctaacaaaaagttcaatttgaatttaattgtgtgtttaagtgtaccttaaggttttggccatcaaacggaagactgccggaaacaagtgtgtaaaggataacaccaagactccaaacatccacttcaggaccgtcatattttttgccttgaaacaattcgggtgctgcatagggcggactgccacagaatgtgtcgagtttgttgcccggtgaaaatgtgttgctgaacccaaagtcggcaattttgatgttcatgtcggcatcgagcaacaaattctctgccttaaccacaaaatttgttccaataagaattagtttagaaaccttcaaatctctatgaataacattcttcgagtgaaggtattggacggcagaaacaattgacggaactt

SEQ ID NO: 19853 - DNA, 1913 bp, Heterodera glycines
  unsure (1)..(1913): unsure at all n locations
attgtggattattccagcagtgccgtcaaggtgcgcggaagaattttcaattaaatttatatgaaaaaatgacgaaaatttttaaatcaatttactcgggttgcacggaaaatggnggtggaccaccccgactgaaaagtgtaaaatttttaatgaagcttcatgaaagaaattttgacttaaaaattttcttagagaaaattagaattttctaaagagaaattctagaaattggaatttaaaaaaataaaaattcttaacttttttaaagtcttctctaaattttgccaaaaaatttttttactgtatttttaaaaatttttctgagttatagaacttagggtttgcagtttttaagaaacgcactagcacacttacatatcaatttttcgaaaatttcttaacattcatatagaccaataaatcaaaaaacacctgggattcgttatgtgccaacgaatcgtagttgtggaaattgaagcggtcaatcaactttttgcagaaatggaccccgcggcacgaattgcccatacggtccaacgggggcgaccacagcgcaatgcccatcagatttggcaccacaacaatggtcacgccggacacgcccgacttggccggcagccccacatggaacgcgaattggcccgagtagtcgtacatgccgcacgagttcatcagcgacagcacatcgcggcacgggcgggagccaatgcaacgctcgccggtcaacggacagacgcctaattaaataattttgggaatttaattagtaaaaatttaaatttggaaatttcatccggattaaatcttgttttctggacttctagtctgggtgcatttttcaaaaaaaaatacccggattgggatcctgagaaaaccctgacaagacccgagtctcctaacacgctcttgaagttagtctctcattgtatctctttacaatttatattatattttaataattttgacataagaataaaaatacagtatccttaactagaacagtattcaaaaaatagtcggtagctacaagtattttaaataatttcttcgtaaaatttattcatggtattatttatagaaaaagacttttctttacagagccaacaaattaatgttaaagttttaattgacctacaagcttcattaaatattattttgaatttcaattaatgccaattaaataattttgggcacctccgtttgccaatgttgcagcaatcactgccgccccctcacaattgacttccaatgaacacaattgaaaatagaaatccaatgtttccttgaggcttgtgtgttttgactcctccggaaaacagccattttcctgaaaatttgtcaaaaatttttacaaatctatacagcagtagtgcggaattctctatttcaattttccggaattcgatttccgataaatatttgggagttgattagcgatttccactttcaaaattaggactattaaaaattttagaaaatttttatatagttttttgtaaatttagaaatttctacacgtcttggatgccatttacagtaactaaccttcataaaataggcaagcgcaaaattgcgatcagcagtagcagcttcggatagaaaatcggcattgttgaagccaacatattcacctcctgccatcttcttgtactcgttgatcatctgtgtttcaataaatcttatccaggatacttttggcatttgagcaaaaagattattagttttttttacggcaaaaaaatacattttttagaattaattagtatttaaaaattattccaacgtattcaaatcgatcacccatgttcacctgtgcacggatctataaaaggcccttcctcgccccnctgttcgccgtcggaccctttattgtatctgagtgaagaagtaaaatgaaataatagaagtga

SEQ ID NO: 19854 - DNA, 2092 bp, Heterodera glycines
  unsure (1)..(2092): unsure at all n locations
tcgtatccgccatcgctgatcacaatgtcaaatgggttctgtcgagctttgaatgcatcgntcatatnttcccactttcttccatcccatccaattggacaacgggtgagccaaaagtcatttgctgattgcagaagatacaatttctctccagtcacttcgttgatccgatcaattggcacaacggagtcaagcggagaaggcggaaagtgaaaacaaatgcgaaaagtaaccggagaagaagcattggaaaatgcctgaaaatgggacaaaaaaatcatagaaaatccaattaaatagggataatcaccgctttaaactgttccatcgttgacgaccattgattcaccggtgaattcacagagtatctgagccacttgggcagaccatccggacgaggcgtgaacaaccatttggtcaccgcttgtccatccgacgcattggcactttcatcgggcggaaattcggggagaatgacgtcaccgaaagaaacatagtgaagggatggacaatcgttgagaagtgacggggccaattggcgcaaacggcgaaaagcgatggtattcaaaaacatcatcagatgcatagaatggcgaagcattggccaaatgttgagcaaaataaattccaaaatgcggtcattgccagtggtaatgtacaaatccgttgaacaaatggcgaaaaaacggtgaaaacggcgaagaaatgcgatgacattttgatcgatgtagctgaaaaaaagagaatgtagatgaaaaattccaaattaatcaattttttacgcgatcgaaatgcctcggaatccgatgactttgttcgacaacggattttgcaggattggcaatggatttccatcggaattgacaatttgcatttgtttggtgccattctctccaatttcgtggtaaatttgcattccgcccaatttccatttgcgtgttttgaagtgttcgtcgacgatgcagttaaaacggcggttgaccagcgcaatttcaaggccgagctgagaaggcgcaagaaaatcgaacaccaaaagccaacagtcgccgcagataaagctgaaaaattgaagaatttctatgaaatttccaaaattttcaattttatttacatttctttgtgagggcgtagtcgttttttgacattgcttgtgaataagaattaaaatttctgcagaaaatttttcgaataaaaaaaaattccagctttaattattttttaataaattttaaaaatattcattttttgcgtttggatatgcattggtggggaatgaattaaattgcaaaattggtaactctgtttcaagcgatgctcaccaacacaactaaatgttatccgtttctcatcggttaattggcgtcactttccaaagcgatgcctattttcttgatctttaaatttaatgatattaaagcaaatttaaattaaaatgctttttcatcgttgtattcctattcacaaaaaatagaaattctttgaactggccgaacggggcaaccaaagctctcacccgctactgacattagaaattattaatttcatagttttataattgatattaattttaggtaattaaaaataaatgttcttaattaggaagactgtttgattcatgttaagagattttctatctttaaatcattttaagaattataacctattaagaaataaaatttattaatattatttaagttttggaatgtttgaccaatttgttcttgtttattcgtcgacatgtcaatatcccattagtttttaatttgaaaaaattatacataatactggttgtgccacatttgcgccccaatgaaaaagaaaaaaaatttgtctgctttggccagagttaaaatgcctcacttaaatgataggaaattaactctgtttccagactcaaccacgaggaggtagcagacattgagtccacccaaaccacatcacaaattctaatgaaaaagctatttatataaaataatttaaatactaaaaactattcattataatacattcaagttgtacaaaccacaaaacatttattttttttgttttcattttatttttttatattttctttgttttttattattttctt

SEQ ID NO: 19855 - DNA, 2842 bp, Heterodera glycines
cttgattgtttaaacaattttattattatttccaatgcctccccaaacggcaccgtcggaccccaatcttaccatttttcgtaaatttgatcacaaaatgccaaaaaattagttattttttggcgaaaaatggctacaaattcctgttttttttttctcccggcgctgaaaattttaaaatacactggagaaaactttttttaggaactttatttttgacccgaagggcaaaaaaaaagtcttcaggacttctccgtccgaaatttttccatccgatttaagaccaccatcatttggatcccaacccttgccacgttcgcgttcgccttcatgctgatcatgcgcgattcgggcaccgcgccgtgggatgatcaggactttgggaacaccagctccgtgctcatggcactgtttcagtcgttcaccaaaacatcggcaatggtcggtcgggtcggcatgattatgatcatcatccgggggatttgaccacattttctgatcatacagaactcgcaaatttgggtcagaaagtgacaaactgaaaaaaaaccatagttttttggttccgatcaaatccaacaccacgtaaatgtttggttctgatcattctctgatcaaataaattagccaatcaaattttgttcttattagataataaatttattgcttctgaaaactttctgatcagtgaaatcccaaaattttttttactctgatcactttttgatcagaataaacttccaagctgatccgagaaccattacattcccaatttatagctccaatcattttataattagcaatcctccatcgatcagagaaccccccccccccaattccccactttacttttttaaaattctcatcatttttctgatcactttttcccaaccattttctgatcactgttttgccgcctttccctttgaagatgatcggtgaggttgaggccaacgacattttgggccgtaaggcgtgggtggccaactttttgctgattctgttcgaaattatcaccgtcattctgctgatgaatttgatggtgtcgctggcggtcggcgacgtcaacgaattgcgaatgaacgcggaggagcgaatgttgcgaatcaaagtgggacaaatagcaatgaaaaaaaaggaaaattttggaaaattgggaaaaatttatttgggagaatttgattttcaaggttagcctaactaagtgaaaattatgatttattttcctaaattccattgaaaaatgctaattttcgtccaaatttttggtattaattttaaaaaataaaagcaaaatttgaaaaaatggctagaatacgatttcggagccagctaaatgaaaatttcaaaatccaattgcttttaattattactcattaaagttttttttaatttttgccaaaattcgtagtatatttctatttttttaaataaagtaataaaaaaataaaacaaattctttgcattttaattcaaaaataaattaatgaattttttcaatttaaaatccaattaattctatgtgttgtaaataattttgagaaaaatatttttaaaaattttggaactcaatgcttaaaacatactttcaaaaatgaatagtaaaatccaaaatttatttaaatttaaaatccatttaatttttacgttcgaaatatcaaattttaattgttttggaaaaataattaggaaattttggaatcaatgcttaaaattaattctttaatgcaatttatttaattatgctttaaaatatgtttttgttactataatttttttttgaattttagacttaaaatccgtttaattcttttgctcaaaatactaaatttaattagttttagggaaataatattatgaaaataaatatttttgggtgctgtaattttaatttaaaattttttgaatttaaaatccaattaattccgggaactaaattttttaattgatttgggaaataatgttaaaaatcttagagttcaatgctaaagattaattactttaaaaggaaatttgtttaattatactgtaaaattttgggttactgtaataattttttgaattttaaattttttgaaggttaacttttgcatcgaagctcttcatttgtccgaacaaatctcatttctgaatggctttgtgcaagtgcttcatcggagccaaaccaacaacattttggtcatttacaaggccgaaaacattgtgcactctcggctgatgccaaacattcgtaagaaatgccaaaaaaaattgcctatcaaagaaatccgacggaattttgcaaaattttgtgtgttaaaattcggatttttacaaaattttcaattctacagaatttatggtttctgaaacctaaatttaacgaattttccctaaatttacacattttcaaaaaagaatttactaattttagataaaaattgaccacttttttgtaccataggcgacaaattttttggcggtgccgacggaagcggcacaaaaatgatggcatccgcgacagcgccgacggtacgccgtgagcgtgtgtacgacgtggtgatcaacagcaccagcgggctcaagctgcgcaaggagatgtcaacgaatcgagcaacactaatgagcatcaacgggtgcacgtgagttggacaattttggcatttgttcgagactctcgggctcatattaccaacttgaattttcgtagtcaaatattgatttgtcgctctcagctcagggccaattagtggtgttaaatttgtactcacttctccattcttttatcggtctcaattaagggtcaattaacggtatcgagtattgcagtcattctcgctctctctgggttaattatcgattc

SEQ ID NO: 19856 - DNA, 2289 bp, Heterodera glycines
  unsure (1)..(2289): unsure at all n locations
tgctagtgttaatgactcaccatttccctcctccgtgccctacaatccaattgaccggcaaaattgtcttcgccgtcaaccttctgctgctgctgttggttcgcctcgtctatttcctgctgctgctgctcattgtcaacatcgccttcgttctgttgttggtcatcaccctccgcatcgccatgttcttcatcagcatgttcatccgctgccgtgggttttgccttgtcaccagcctcatcttgggcagctgtccagtccgctttatccgccccttccacttgtgattgatccatctgttgctgatcagcgttggtgtcgtcattcttggcacatgcatcatcatcgtccaacatctgtcgctgatcacctaaatttagcgaaaaaatcattcaaaatgccctttttgtgcccaattactgaccctttgcgtgatccattgtctcattgttgtcatgttgctcccgctcctccgcttgctgttcgtcgttctgctcatcttcccacaattttgggtccaactgcgtctcttccggctcctcaacctcaccaaaattccaatcagcgcgatcatcaatgtcttcccgttgctgctggtcatcatcattgtcttcaccatctgcgttgggaaattgcttgtttatttattcactattccttttcgctaaattccttagttttttaagtctagtaaaaaaaaaataataaaaattttgaaaaacaaattttttttaaattcatcattaaattacaaaaaaaaaaaaattgcttgaaaatttttagaaattttttttcttagttttctaagaattctaagtttaaaaaattttaaaaatttattcccggctgtgttttggggtgcaccgcggcgaggagggggaaaatgagttgcccccgttattataacccaccaattccctgctcgtcgtcttcccctgcgtccaatgcctccaaacagccggcaaagtcatcatccacatcaattggttggtccgtttcgtccattttctgctgctgttgttgttgttgctgatcagcatcagcattgttttgctcgtcattcatttgttgctgttgttgttgatcatttccgtcattctgttgcaaatttgagaatggatcagtcagaaatacgaaaaaaaaagcatgcaagttcgagtcctctccatgacattaatttttttgtatgttttttttcttctttgaaaattatgaaaactatgcaaattccttacaatttttgatattgtgatcaaaccgtaatgtacagccttggtaaaaaagaaaaatttttaagcctaacaataagcctatttttcctacaataaacaaaattatttattttttatctccatgcctaacttttgactcaataatgtgtcaataaaataataaaaacagaaattgggattaaattatataatccaggtaccttaagcccctcaatttgttccatgttctccacttgggaagacacatcggtggcattcggtgccaaatcgccatcgccaaaaccatcgccagcttccgttcgtttagcatccgcttcatcgccacccttttgtctgtccgcaattggaattggattgacaaagccgttggtcaacagatggcagccgaccgcgctccaatgggcatggaatgaggccaattgggcaacaaaagtgccaatgtgatggtggagatggcacaacgccgaactgagtccatgtgccagtgtgtacgccttggcgagacggtccgccaccattggcgatgaaattgtggtgttaacggagcaattggaaaggaaccagtcgtacaattgagtaagcacctgcaaaaacaaacaaacaaaatttttaaaatatatgacaccagagatgaatagaattacgattttcaaaattttgagagcatcggaattctagtgcatgagtaacacgataaatcgagtttatccatgatctttcataaaatttgattttgaaaaaaaaatctatttttgatttactttttcttttgaattttttggtggtccagggtaaaatacaatcaacgacaacaacgacaatccacaataaacaaaatgttgcctcaacaactccataaacctcaaccttttcgctgttcaatttgttgacaaactcgagcacacgctttacacagtccaagagtggngggaggtgccgacgagccaatgccatcatcgttagcattgttgctgctgttgtactgctcgacctctttgtaaatggactgcagataaagcaacacggcactttccacacattcaaattccgtctggat

SEQ ID NO: 19857 - DNA, 2245 bp, Heterodera glycines
  unsure (1)..(2245): unsure at all n locations
aaaaaatgcaatgatgtaaacatgcaaataacaaattcctcaccaatattttgttgcggatgcgaatggaagtctggccttcttggaattggaggttcatgcgttccatcaaacgcttttataaacaaattagctgaaatggaggacatctaagcagggctcgaagaattctttccttttttcaaggaactcattttaagaaccaaaagtcatttacaaacaaaaaaaaaacatacgaaaacccaaaaatccacaaatgttttccagcattcacccagagttacactcataaaaatttaaattttctaggatcggctcgggtacggattaccattgaaaattttttaaaaaatattttttttttttgccttttttgaatgatatttaagaaattgccataactcatttcaaaagaaccaaaaattccaaaaatgagactaattcttcacacatgcgagccctgctgctgctgctaatggtcggtcatctgttgctggcctaccaattattttgtatttaccgtatttcttgaaatagagcctccgggggttctatttttcaacccccctcaaaaggggggggaaggctttatttcagcgggggtaaattcagggcggagctgtattatatgaaatacggtatgtacatattgtccttgttgtttttatttttcacacttttttgtatgtgtataaaggcattttttgcgtttttaaaattttgtttttggcatgggtaattaaaacataagtgcataaatctataaatgttagacaatttatcaaatgcttaaaaatatgaattggatgcttcatttttgtgtgactcttaggaatccgggtccaactttatgttattttaacccaatttttttaatgttctattgtactttatgaatccaatcgacttttataaatccaatgggattttataagtccaatttaagcaatgtcgaaaactgtacgattgattattagagaccgggtttttagggttttacccattttttgggtagtacttgatgagagaagcacgaaaatcacattttcaaataatttttgatttagagcgactttttagaacttaaaaacacctaaaacgggggttagcaccagggatgtgcctaggtcagggttcggatctgtcctgatttatcagatttgtcctgatttgaagggtccaaatctgataaaattaaaatgtcctgatttgtcagatttgtcctgattttgaggtagcgaccaaattttgtcctgatttgttgattctccgaaaaatctgtcaaatttctttataaatttggattggcgtaatgtttaagcaaatattttttaattttggtattatatttcttttttttgttgttaattttggctaattattttgttatttattgctttattgtttttctcttttgtttttaatttagcacctgcactagtactaacaaatggcaccgcctaagcgcacaaatgcttttaaaagtgaatatgccaatgaatttcaggggatcacaaaaagcaaggcaggagatgaatttgcgcattgcatcccatgcaattttgacatttctttgttgtccactggaaaaacggccattcctcatcatctgaagacggaaaaacacaagaaagcagcgaaagctgcaaattccgcaaaggcaattacggcattcatgccaagcaaatcggcaccaacgaatttggaccgtcaaacagcagcagcgaaggttgaattacaaattaaatcagaaataacttttatttgtttaggtgcttgggcatatcacaccgcgcgccatgcgcaaagctttaaatcggccgattgtgtctcagatttgttgtcaaaaatttttcctgattcaaaaattgcggcaaattacggatcaaaacaaaataaatgcgcagcaattattacaagttttcataaaattaaaggataaataaatcgagaataatttaggagtacttgctccgcattctgtctccattacgttgcaggaaatgactgggcttccgttttcactttcgattgactcatcaaatcataaaaccaccaaactttttcctttggtggttcgttacttcaatccaaaaaaaggaattgccgtcaaattgatcgacttagaggaattgagtggagagacttcggccgaagtttgaatcatactttattttttggctattactttgatttatagatttataatntggataattcaaattttggagcggcacaaattgga

SEQ ID NO: 19858 - DNA, 1914 bp, Heterodera glycines
accctggccaattgttattattatttgaaacttctactgaggatatatttatgcattttcgctgctttctgtcaaggtcatatgtgctcagcgggaggaagagttgcgccaccacacgaaactgaactcaactaacataaacattttggtgttgtgttgcaaattccatttgccctcctatggatttgtttggcgttttgttttatcccgctgtgatcaattaaatttgggtgtgccattgtttgggttgatgatgtgttggataaatatggatgtacatatatatccaccaaataaaacatccctggcgggggttatgttcttccaaacagagtcccaaacattgactttttctttgtttttcaagaacatcacccattttaatgagttttggacaggtgtcatccatccagtcccaatagctgtcggtgccttgaggggattttcgatgggatttggaggccagatcccctccaaattgccccatagggagcgcaaatttggcacttaatctgctgggaagaaaaaaaaatatgaggaaaggtgtgatgattgggggtaccaaatgtacattggtttttttggttttagcgctccccgccgccggggacagcaggtgtacctggaaatgaactccctaatgatgcttttgccttggcttaattgtctaatttgaaattttaataaattttaaatcaatcgccgagtgaacccattataattgtctggcgtaatgtcgaattctgaaatattttctttaattttttaggaaactatttttaaatatctttcttttccaagaaatcacaatttcaaaatgtttgtttccaagttccaacccacttgaacatagaacgccaatctaagaattcaattcaaatgcttggcggtatataaagtggattcgccccctccacccacaatttctcaaattgttttgccaaccaaccgacaacaaccacttctgttgctcatttggccagcagttgggcctcaaattgcgtgccaatctcggccccaaagctttagcccttactgacctcccaccctaggtccacagatttgagcgctgctcaattctccggatatccccccccacccaaacccgcgaggggatcattagcccagcagtaaggggacaactgcggcggcggcgcggacggtcacaacacagacagagagggcaggggcactcatttacggggccaaagccgttggttggccacaaattgggaattgagccgtgtggcccccgccggcgggcgatgatgccgccgccgttggcacggacggcgggagggggttaattatttatttatttatttgtgtgcacagagggcgaacacatgggaaaattaatcagagagaaaggcaacggcatcataatataccccacgagagtggtaataatgtttgagcaaaaattggtggtggtgatgaagcgcgcaagactcttctcgaccagtccagtcttgtgccttttattcactcgaggagaaaaaataaaaatggcagcccttatttttgagcctttctaattgattttcattttaaaataagttgaataccttggtaataaaaccgacatttcagacttgtgaaatttaaccccatatttcaactaaaaaacaaattgtgcccagtgaataaatgcaaatttttgaaacaaaaatttcccattttccgacaatttcacatcattcagcgtctctccattaattaggccatctcgatttgtttccactttgtcgagataagcgccgagggaggctctcgagcaaacaattaagctctcttgaatccgatgaaatgccctgctggctttgcgcgcatcatttatccatccccatgagataatcaccttaggcaggtgagcatcccactcgaccccggaggcattgaactgcccattaa

SEQ ID NO: 19859 - DNA, 1978 bp, Heterodera glycines
cttttaccgtatttattattagccattttatcaacgattaattcattcacaatgaatttcacatacaaataaaatacaatggaaatggacgcatttgcgagcaagcaaaggtcaaatacaaacagacaaattggtcataatacaatattgaaatggcaaagtgcccacatcatttaggttacataatcgcaccaattaaccatcaattaattcatttctgcttctgttgctgatcagtgatcactcggcccgggagaagcggcgtcgggaagactgaaaaaaaacgatgattctattgaactttaagccaattcaacaactattataagtccaaccaactaactacttaaccatccctttttttctaccataattctgtccattaaccgtacattttttggtaacatttgaaagcacaaagtctaattgtaagcaaaaatggtgattggactcatatgtaaaatcattttaaaattgttcacccgtcgtcgtatccgccatcttcgatccaaatgtcaattgggttcgtttcgttcaatacatcccatttcttatcatcccatccaattggacaacgctcgagccaaaaaccaccttcatattcttcaagtgtcaattgctccccagtcgcttggttgatcagatcaaattccacaacgaagtcaagcggagaagacgacggaaagtgaatgcgaaaagtagccggagaagaagcattggaaaatgcctaaaaaatgggacaaaaaatcatcgaaaacccaattaaatagggataatccaccgttttgaattgttccatcgttgacgtccattgctcctcctccattgaattaacagagcatttgaaccgcttcggcacaccgttcggatggggcgtcaacaaccatttggccaccgcttgaccatccgacgccatggcactgtcatcgggcggaaaagcgggcacaatgtcgttatttgacacggcaacaccgaagagagatggacaatcgctgagcattgacggggccaattgacggaaacggcgaaaaatgaaggcgttcaaaaacagaaaacgaatggaatcgcggaacattggccaaatgtggagcaaaaagtagtccaaaatgcgaacattttcagtggtaatgtccaagaatattgagcaaatggggaaaagacggtgaaaacggtggagaaattcgatgacattttgatcgatgtagctgaaaagtgcagaaaattatgaaaaatttcaatctaatcagtttttacttgatctgaatgcatttgctgaatccgatcactttgttcggcaacggattttgcgggattggcaatggatttccatcggcatcgtcaatttgcatttgcttggggccatttccgacaattttccatgtaattagcaattttttgttcaacatccatttgcgcgttttgaaatgttcgtccacgtagaagtcaaatcgacggctgatcagtgcaatttcgaggccaagttgagaaggcgcaagaaagtcgaacaccaaaagccaacaatcggcgcagataaagctgaaaaattcgaagaatattttcaaaattttcaaaaattttttgctttaattttatttacatttcttttttgggagggcgccgtcgttttttgacatgctcaaaaaagaaccaaagaatgctggcacagacgaccaacagcagaagaagacacacgtcaccccaactgaaaaatgaattgaatggaaagggagggaagccaaaagtgaaattttattttaaatccaatgaagctaattgtaagcctctgaattttgaaaatttaaaatttaagcaaaagaagaaatgtgaaccattagaaaaaagggaaataattaacgtacagaagtcctgaagacatttttgtagcaacaaaatgaccggaaaatccaggaagaatgaatgaatgaatggaatgtggtagagaggaagaaaaaaagcactttttatattaatatattag

SEQ ID NO: 19860 - DNA, 1199 bp, Heterodera glycines
  unsure (1)..(1199): unsure at all n locations
cgctcctccctgtttcttaataattttgtatttctgtccccccgcgggcgttgatgctattacctaatcattttttgttcctcgtcgaatcataggcgtctggcgatcacgtatggaagcgacctttaccttttcgaatgtgttacgagtagctgattttcgcgtagcccagatgacggaaagtgggcacgtgaaaagcacaaataaaaatggattcggcattgcaacaatttgagaaatcttatagaggactttgcaaatcgtgactcgtttaaatatttacgggcctgttcttatggctcgaatttttgaatttttttaatcaatcaatcaatcatttatacgcaaaagcgtgacgccgaaaaataaagaaataataatatcaaaacaatcaattggtcacttttggagttggggtggcaaagaaatcaacaaattaagatcagatctttcaagaagtttggcaaactcattaggatttagtaatctcgtctctttaggtaaaagtctatagagacgagaggttcgaataaagaacgagttgtatctaacattggttgagcaataagctattcttatagtgaattcgttttttacagggtttttggaaaaagaaaaggattcgttattttgtaaatttattttacctaaaattatttcatgaaaaagttttaagtctatttttaacctacgactttcaagcgacttttgatcataaatgtttaacaattcagcataattaggtaaatcaacagtataattgttacgtctaaatattactctcaaaaaagtttttagctaggtgtacgcttttttcaattttttttaaaaaaatatttaaaaaatctgacaataaattataattttagcaattagttttagttttttagccttaaatatataaccataagcggtggaaaatgaaaacgacaccttgttaggataggctactattgcagcatggttattttttaaattaatttttataaaattagaatattaggtataaatattgtggtgaaatgattgtggaccattacattgttagggaggatgagcgcgaacaaattggcggtgtaaataanatttgttcattggacgagagcaagtttggcaaaggaaaatacatagaggacgctgcatagaaggccactgataaaccatttttttatcatagaaaagcgaaaaagatcacctct

SEQ ID NO: 19861 - DNA, 460 bp, Heterodera glycines
cccttcgggcccccgcattcaaccgcctgtggcactcgtcagactgcttcccccgccctccgtctcgccccactacttgctccgtcttcgcatgctcccttttgcgaagttaaaaataaggttaccattaattataaaactaaaataatggttttcgtgttaaggaatgatcgaagacggattagaggattttcgccttgtggattgccctgaaatgttaaatgaggtatttattttgtgtaaattgtagctgaggatggcactcatacccaacgcatcgaggcgagttggaggcctgcgaaggactggtttcgcgagagacgcatccctgggttccaatttgcagaaacgctggtggagtatcagtggggccgggaactcaaaaagaatgaatggatcctttttcacatctcctccaagcggttcaccattattacaataaaaatttgtgaaaaactaa

SEQ ID NO: 19862 - DNA, 1548 bp, Heterodera glycines
ttcttcaaaaatgatttttaatacatatctagccattcttgaaagttttactttgcatttagcgaattgaagaaattttgagaaattttaccctaaatttggaaaaatttatgtccatattttgagattttagcaattttatgtccatattttgcgatttgttgtccatattttatggccatatttcgtggttttatatccatataattacacgccctaatgatgatatggtggaaaaaacagagaagacaggcccatgtcaattagttaatgaggcgttcgagattgttttgtacttaaccatccgagaaacaaatcatttcaagagtctcgaacgccaaccaacaaaatttggataggaattagaaatgttgaacacccagcccagaaggaataaagaatacaacgatttaaaacaattttaacaacggttgatggatggatggcctgcattttttggccaaaaattttagatcggtaaatcaaatttacggagaactattggcccaaaaattttgttcatgacaggttataacgcgggattaatcccgaaattttgcatcccgtaaaatcctcaaattataattccgtcgtcaaaattaaaaaaaatcgaacgggaaattttgaattgacagtgaggaaaacagcctggtaaaatactttctgtaaacaacgaaggcacttctatacaacggaggggtcaatgatacaaaaaaaaaacttgcaaaaaagcgactcgaaccatcgaaagccgaaaaattaaaaaaacaaactgaaaattttcgataaaattttcctacatgcccatagggaattgatgtttgtttttgcatgttcttcttggtcctattacaccagtcaggagttcaaatttttgtaaaataagacaattaacaaaactttggactccgcctaaatcgtagaagtgccggaaaaaagaaataattaaatttctgttggcgatttgttaggaaattgtgaaacaaatggatggaaatgaatggacagagagaacgaaagagtagaagttaaagggaagtcaaccaattatcggtcatcatcatcatttgttcatttaaatgtgtgtgtatccagtccgaatttcccgccaaacaatgcgccaatgacaacaccaagaaaaaaaagaaacactcgtccgtccgtcagtcaaatgccaagcgcacacacacaatcacactgtgatcagaagcccaacttcacgtatcggatgatctgagatgaatggggagatttagagggattatggaaatgattttttaaaatggatttttgtggatttattgcacctttaggcgtccaatctgctgaccagcctcaattttttaggccataacttttttcttatttgaacaatgtccatattcttggtatcaaatgaaagctttaagcctcggaagtttaaaaacttacatcaagaaaaaatacagtggagaaaaaaataaattcagttttttcggcgattaaattcaagcatttttttatttgtaaagacccatttgttttagcttagaatttatcatatagatt

SEQ ID NO: 19863 - DNA, 1369 bp, Heterodera glycines
atcaaactcgcccagaaagaaattcggaaaaattagggtcggcgctatcattccgaaaatgtggtggaattcttcagactgatgatcagaaaaagagataggcgtttttccaaaattttcgacatcaaactcgcccagaaaaaaattcggaaaaaattagggtcggcgctatcattccgaaaatgtggttggaattcttcagactgatgatcagaaaaagagataggcgtttttccaaaattttcaacatcaaactcgcccagaaagaaattcggaaaaaattagggtcggcgctatcattcggaaaatgtggttggaattcttcagactgatgatcagaaaaagagataggcgtttttccaaaattttcgacatcaaactcgcccagaaagaaattcggaaaaaactagggtcggcgctatcattccgaaaatgtcgttggaattcttcagactgatgatcagaaaaagagataggcgtttttccaaaattttcgacatcaaactcgcccagaaaaaaattcggaaaaaattagggtcggcgctatcattcggaaaatgtggttggaattcttcagactgatgatcagaaaaagagataggcgtttttccaaaattttcgacatcaaactcgcccagaaaaaaattcggaaaaaattagggtcggcgctatcattccgaaaatgtggttggaattcttcagactgatgatcagaaaaagagataggcgtttttccaaaattttcaacatcaaactcgcccagaaagaaattcggaaaaaattagggtcggcgctatcattcggaaaatgtggttggtgtcccgacttgctctggggtcgggccaaatgaattccacggtgcggggttcaggggcaggcagggacgagacacggaattaataaaaaatttattccgggaaatgacctcaaacttgggtaattaaacaaaaattttgaaatggtgaacgaattatcacaaattgatcacagaaatgccatcaccggggaattatcacaaatggaattgggcaccgggatgggacagaaatttcagaaatggggcaaatggaaaaatcacaaaattcaatgatagggaccgggtgaatgacagaaatggaacggacaattgggccgggggaaaaggacaatgaaatgagggggactgagagagggacggaagaggcattgcttgcctttgctggtgcttctgattgtaagaattggtggggatttgtccctttaaatacgagcaaaattgaaaaaaaagtggcgaaattgagcagaacgaaaatgggcccgaaattgggcatgaattgaaaagagggcacaaaaatgaccgaatgaacaaattgggaggaaaacgggaaat

SEQ ID NO: 19864 - DNA, 2073 bp, Heterodera glycines
tttttgagggtgccttctccacaattgtgggcattatggtgttggcacttgtggacgcccatatcattctgatctttttcaaagtgccctcatttgttggccatttgtccttatttcccccatttgtcagacggtgtttctcgtcatcactttttcactgctccacggaatggtctttctgcccattttgttgaccgtggcaatgccaaacgaacgaaaagtgccaacagaagcagcagacagagaagagagggaaaagcaaaaaaacgatgaaaggggagagaatgaatgaattttgatggagcagagaaaagaggggaagagatagagagaatgtgaaaagtggggaagagagcgagagagagagagaaaagagagagagaggaaagggagagagatagagagaggaaagggggagagagatagaggggaaagggggagagagagagagagaaaaaagggagagagatagagagaggaaagggggagagagtgaaaacgggagagagatgagagaaggagggagaaacagcaacgcaaagattcattttaaatttaaatcaatttttttgttattatgtatattgatttttgctggcagtgctaaaatgatcagttccgacgagtaattgagtctcattcctcccaaccgattaaatctgtcaaattttattagtaaggaaaaataaccaaaaacagtgaacatcgaagtgagatacagtaagaatcaaaacaatatgccattgtcacaacaaacataatatgattattatgtcaacaagaaaaaatgcttgcaaattcgtacctctcacaacttcaagtccttttgtatgccgagaagtttcgcggcagaaatgtgcaactgttccaattcgttttcctttaggttctgtttgatgatgaaattgatgccattggcccctacgacgacgggcagcgaaaggaaaacgtcgtcctcaatgccatgggtacccttaggggaataattaaataatttatgggttatcaggagctcattaagacaccaccttaacatttgtacttagtgcaaaaacattgcgactgtttgccattacgcactgcacaattatcgcaacagaaagtccgattgcccaacttaaagaatatttaacaaatgaaataaactcggtttttttgttaaagttcaaaaaagagatggaatgagacggtggacttgcctcgtgtaccccttcaacttgatgatgtcgtaggcgctgtccaccactttctgatggacttccttctcccaatttgtcgcttcgttttgaccgtccaacagagacaaactgacgcccgccacattcactccgctccacacggcaactgaaagtcgtcattttgttccaatatgatgtacccctagcaaaataaaaaaaaaggaatatgtcttaataattccaagtgaccgctcgagtctccgtgctccccaataacataggcatggcaattgaaaggggcgatgttgagacgctcagacagcaaagagcggaaacgagccgagtcgagattagtgccggaaccgaacacacgctcactgagccaaggggggagggcattggaaaagggaaaacagaaaaactaccgaggcagcccagagagtttccaagtgacgtaagtgagcacatcaactaaaggggggggggaaaccgcattattgaatagttttgggagtaaatcgggaatgactgactgacccggattagaaacgaccaaaatgatagtgtcgggagagtaacggacgagttccggcacaatgcctgaaattgatttgcaatgacccagcactttggcacctgccgcagcagtacccttgaagatctccacgttgcgtttgatcagattgagccgcgattcgccctcacgctgacgacacccggcggtgatcacacacactttagagccgacagtgcccgaataaccatctaaaaatggcaaaaatcaactgatttcggcaccgttaaagggacagtccagacgaacaacgtaccaatgctggcattcactacgaccccttggcgagtgaacgcaacgccgtgctgcaagtccatcact

SEQ ID NO: 19865 - DNA, 918 bp, Heterodera glycines
  unsure (1)..(918): unsure at all n locations
attcggcaaagtttttgatcaccccnttaacagttcgttgttccgatgccatttatcacttattgttactggagaattctccgcaaagtgcacaaggatatgatcggtaagaaaaataacggcgaaaaaaaatataaaaataattaagtgcaaaatgtccaattctcaaagtctctgtcgaattcacagcgcacagacgcattgaacagaaaaaaacgggtcaattacattctgattggcatggtaatcgcattcatcggctgcaatactccgatcaccgccgttaatttggccaaggatttcagttaatagcattaatcattgcttttgaccctcccaacatttctcgtttagagcaagagccgaattggctgaagaagcaggtatttctctcccccctctctctcccactctctctctctctctctctatctccctctctcactctctcctctctctctctctctctctctctctctctcactctctcctctctctctatctctctccactctctctcactctctctccctctttttccttctctctctcgcccccgccctctttctctttcttctctccatttttaattgaatttccaaatgcattaagccctatctttggccattagttgcccatgtgatcgcaatgtccaccatcgttttcaatccctttttgtttttttggctaaccgccaaagacaaaggtcaaaagggtaatttgaccggaatcggcacgacaacaagcgaaataatcacgtcattgatgtcgagaatgcacagtttgagaagcacagggggaaacgaagagagcaggtagagaaagaaagcaggggaaatagtgggaaaggagagtacacagatagatagagagagagagagagagggggagaaagaagggatgaggaataaagagaga

SEQ ID NO: 19866 - DNA, 1201 bp, Heterodera glycines
ttctcacaaccgttaattgcgcacgaaaacggccaaacaaaaaactcggcaaggaataatccgcgaggaatggcagagggacgaaggtcaccgctggccaaaatgcattccctcagggctaattccgtcctttagcattcgcaaccattaattattaattaactaattgctcatttgtattcaaagggattgtgcaacgactgaatgtgctttataattaccactcttttgccatcttaagctaaaagaccctctctgagtggtgcaatcccaaaagaaatattgtaaatatttataattcagacaaataataaaaatgcattaataaaaaagaacaattaattaattatacataactttaaaatgtaaggtagaaacattttaaaaataaaaatgaggaaagaatgcctaaagaattttctaaagaattatgataaaattaagtagtgacagatcatttgtggctgattaaggcaaattaggaaaaaaaacgagcgaaataaaaggaaaaattgggggaagggaagagaagggaatggaaggggaagagaagtaagagaagggggaggggagggaagggaagggaaaggaagagaagggaatggaaggggaagagaagtaagagaagggggaggggagggaatgatggcaaatggaaaaggaaagaaaggcaaaaaggagaggaggaaatggtgagcaaataggaaaacgttctgaagtcaggcgtaagtgctcagttcacgttggccctcccttccattcgcttggccatccgaaatttcgtcccttttcctttggcatccctccgacgccgccgttctctcatcgatttgctcggcgatcgaccgactcggacggggcacttcaaagtcagtcggatagcgagaacggaatttccatgtcgggtaaaggctgaggtaattcctcgggactaaagagagagcaaaagccatgcgcattttgccgctagctgtggtcatcccacccaatcctttgtcctctgaggcgcaatgctcacaaaaccaccaaaagtgtgtcggggcggtgccgtcggcgtcagcgtcccccgcggggcgctctccgccgccttcggtcccttcctcctcactcttccgcagcacgcgaagttcgtccccctccagaaaggacagttcgtcctctttctccgcttcatacgaataagcagcgtacacctgccaaa

SEQ ID NO: 19867 - DNA, 898 bp, Heterodera glycines
atgtatccagtaaaaaatattaaaaatcataataatgatgcaataagtgaatttctatagaaactttaagacagcccacagttaatcccaaagagcgggcacataacaagttgaagttaaatgattttaaaattataataagtgaaataatttaatttaaataatttttacagaaaacacagattaattttgatgaattctaatcgaagggcaataataacatggaagtgattataacaattattaaaatcattaaactttcacaaaattaaaaattagcaaaatccagagatacataggaattaaaaatatttacttaattgaaaaaaaactcaaatttgttttttaattttataatgaaattttatttaaaaattttatttttttaattttataaaataatctatttaaaattaaaaaaccgtgccctacgtgagcaatttaatatttaaatcctaacgtatcattgcatttatatttgtataacaattatgtaaataatattgttaactaggatttcttttatttataatttccattttttcctgtttattgaactatttgtcgttttttaatgatataacatgccaatttttctcatcaacgatggtctttaaaaatatgtcaaattttaacaatgatcttttttagaattaaccagaaaattaatatttaattaattttattaagaaaagttgaaatcgtttaaattagggttaagccccgagccctcggggggcgacatgtcgggggtcgggtcgggggggagctcaattgtcgggggtcggggaccccgatcgggtagtgatcaacaaaattttttatcgacaaactccattttttggtcgcaaatcttccttttttcactttaatcatatgattgcgtttttttttccgt

SEQ ID NO: 19868 - DNA, 1342 bp, Heterodera glycines
caaagaaaacattcaatgtccaattaattaattaaggtacactgctatgtgatgttcagagccattgtggtggcaaagttcgaggaggaatttgtgaggacgggtgccacgccatcaagtgggaacagaaacggaggagggggccaaaacaaccgattgctcagacgcatttaggacaaagcgaacaatggcataaataaaccgaaaattgttttgtcagaattctcaaaaatggaaacgcaaattccaattgtacaaatacgaggagaaaatctcaatagattatgacaaatcaacaaacgaatcaatcaacaacactgcttcactttaaaacgaacaaacgattttagaaatgataatagccgggcaaaaatgttaaaaaaatatttggtcgggttgggaaagaagtgatcagtctcgcaatcagtctgatcggtcctcgtccattcactcattaagcttggataatagttccaaaaggggcattgggtcgggtcgggggtctcggggtaggggctttaccctctagtttaaatatatgttttattacaaatataatttgttcgacaataattatcaatttaaaaaattaatgccacttaaattcaatttgataaaatttatttgtattaaactttttataaaaatgaattatattttttagaataaatatatacctaatataccttcaactctaaatttatttatttaatcttatatttggtgccttatcacgaatttaacgtgaccttttgtaacaccttgcagttaccattttattatagccttgatattttgccacattttattgtttcctatcctgttactaaatgatgtttactttgaccctttgtcttataatattttttaaatttcaagttataaataattttttcattataatcaataataatttttattgaataaaccaaattaaaacattataaaatatattttttgacttttatttatcaaaataattgttattataataattgctcttaatagttgaatttaattttattatctaattttctttttaaatatttgaatgaaaattttttgattttttattagattatttatttagatatttagcatttactatattcttttttttcacgtattcccaagctatactgattatcttttattatagatagttaaaactgatttattgttttaatatatatttataaattgaagaatatttttgcctcaggcattttttctcgctttcccgccatcatttctttttgtattcaacattttagtgaaaccgtttttaagcacggcattcaggaaactttatttgtaaaaataacatcaacttttaagagca

SEQ ID NO: 19869 - DNA, 2026 bp, Heterodera glycines
  unsure (1)..(2026): unsure at all n locations
agagtcatttatgacgggtcacatattttgacaaatacacattcgtttttgcattacaattaaatggatgaagccattgatcgcaaaaggggaattctctntagtccccaagaagacaacgcgttaatctcggcttatnttgctcgaaaatccataatcgaaggaagtttttcggcaactttaacaacaaaggaaaagaaaaatgcgtgggatgaagtcacacaagcagtgaatgccgttgtaagaaaaaaagagctaaacttaagcaatattctatgggtaaatttaggacgctcgatcagtgcgtgatcaagagcaaattaagcaacgctacagaaacaagctgaagcaatacaaaaacttcattgctgaaacaaaaatgccaccaactggtggtgggagaccgactgagcggaagcctttttttgatcaatttatggcggaggacacgcgaattgttggcatcattggcgaaaaccctattgaactaggttaaatctcaatcaattgacatttttctaatttataaattggcataggggaacgccccaaatcatctcctgcaattatcgactcaagcttttgctccggatcggagacttattctgctgctgctgttccgccatcatttacagatttgacaccgattcgtcatcaatcgggcggcgtgatcagtagcaaaaaacgaaaattttctactgcttctgctgattacatgtctgccgaaagaaaagaaattgtggaaatatttccagcagcatcatcaacagcaactgcacgcgatttacagattaaagtgcttgaaaaagaaagtgccaaactggatttggaaatggagaagcttaagcttgaaatagagcttttgaagctgaaaaaggatcgagaaatgcgccatcacttgggatataatattgaggagctttaatatatcaatgttcattgattttggatatattattccaattacaatttcgttatttcgttaatgaaataatttttaattccgtaataatttatatcatagacaaaaataaaagtcagattctttttctgcatgtaaaattaccctagaaaaaatttatttatttattttactatttaaattattaaataaatttacgttaaccacaactcgagttgtggttaagattccttaagaaagattaaaccacggttagatgagcataccggttggaaataaaccacggttaacgcaagttaaccgtggttaagcagtcagtaaaccacggttaactcaaccgtggtttagccttaaccacggttaaaaagggaaggacgagcataccggttaaggattcttaaccatggttaacgccgttaaccgtggtttaactctaaaccgcgagacgagcataaggcccctgaattgagttatgagtttccaaaaattatttcccgggctcaaaaaatgttccaaattttctgaaacgtaaaacaaggttcattccgttcaatattttaaggattttgtcaatgtctggtaaatatttaggcatttttctaacttttcatgaaaaattcagaaattttttaacaaaaatgcaataaaaaatgattttttttgaagcgataacatttttaggcgaaatgttcaaaatttttctgtaaataatcggtcgaaaaataagggactgggtcgttttggcgccgacgttttggcgccagcctcagtttttttattataactttttttcttgttgaccaaatctaacaatcttggtatcattcgaaagcccttcagaagctctattagccttacaaaaaacaaacaaaaattttagcttctaaaaaagttattaagaaaaaaactcaaaaatttcgacttttttggaatttcatgttataacttttttggtaattgtctaatcgcgaagcaatagcttagaaatagcttctaaacatgttcagctttcgaatgataccaagattgttagatttgatcgacaacaaaaaaagttatagtccaaaaacaagggctggcgccgaaacggcggcgccgaaacga

SEQ ID NO: 19870 - DNA, 2293 bp, Heterodera glycines
ttttccgtgtattttgtcgcaccatccagcaaagtatcgccacacatcgatgctcatgccgacgtgcgttttaagtgccaaagtgtaaacggcgccgctgtcgatggattcgatggtggccaactcagtccgatgttgatccattagatcagcgagtctgacagttttcctcggtcaacctgtccttttcttgtcgtttcacctgtaaaggattttcccacgttctcgtgccgaaatgcgtgaccattcgccgtggtaaaatgcctcttcggcacatcgcactgcaaagtcaacatcgccggcatctccctgaacggcatttttaaattttaagtttggcgctgttcgccaacttttggcactgtgcatattgacttttcgttgctcgggtcgatggtttgcattcgtcgtgccgaattgctctcacagaatttgccattgatgtacatttgcgtgggcacgcatatttttgtgccgttaaactccgattcaaactgaattttgatttgaatagcattgagttgcttcatttgttttgctttaccttttcaaattccaatctctccaaatcttctcccctaattttgcgtattattgcgattagaaagtcaccgaattgggagttcatgaaaatctaaaaaaataaaaataaatttggtaatttcaattccgagatgacttcgccgtttcgcatctcaacgccacaaactgtgcgaacttcttccacaagtcgcgtcacgtcggcgctggtcgccccggcgtcgaaaaaattcatttggtcgtcgatttgatcggacgccgagaaattcaaaatgcctcgccaaatattcttaatttatttgttagtttttatttaactaaataatcagtgccttcaacgatggcaccatttccttctcctctttgctcatttccaatttttcctccgcaatttcttccaccattccataatttgctgctttaattgtccgaccgtcattcattcgcattgtgtctacgtttacctattagtttttttgtatttttataattattttatttttttacaaattttccatccgccgttctcaacagaatgccccgggggtgtgcccaaagtttgcccccgggcacttcttccgccggcacttcgcgcgccgtcgccggtggttcgattcttttccacaatgacgagccgaacaaggtgactttttctccattaagacgagtccacgcctaactcaaaatcagaatatttgctaaattcgaacaaacccccggcacggaatcattccctctgataaaattgtgcaattggcgttgagtgccaattttggaccacacaatttctgccaattcgggctttgccgtaatgaacggttcataggaagcgccttccgtcggttgagggatttttggcgctttttcggcagcgattaaattcactgattcgacctcaaattatgtgaataaaatgcaaaattattcattttacaggaaaacacaatacagtatgcagcactaaattaactttttgttttgttatgcaaatgcaaattatgtgttaaatgccaattcgaaaaatgccgaccatcgctttgaccccctcggggaacaaaaagcgtttgtaaagagtgttcaaagtgtcggtctcttccacggcacacttccgctgcagcagaattggccccgtgtccaatccttcgtccgcccaaaacaccgttagccccgcctcttcgtctccttcgatcaaagtccaattgatggccgaagcacctctgaacaattccaaattcaaaaaaggaaaacgggtaaattaaattaaataaattgcctatgctttggcagaatcgacggatggtaaatgatggttttgtgcctgggaaagtccatcacttcctgcggaatgaattgggtacaaaaagcgacgacattcacttcggccgcgtactttttatactcgttgaaaagctaaaccattcaatgattcttttccatttgtgcttttcctcccaattttcacctcattttccaactcaaatttgcccgtttttttgttttttcttcgccaactttttgttttcagaattggctttttgtgtttctcggcctccagggcttaaaatttaattaaattctttttactttaaaatatttttgttttttcttacctagtaaatcagcccggccatttttgtccaattccgtgcacaccaaaacaatgtcatgccccgaactgatcaattgacggcacacttccgccccaaatgcttgttttccgatcagacagattttcatttcaaattcaaaatgg

SEQ ID NO: 19871 - DNA, 1600 bp, Heterodera glycines
agtgggctcgtctcggcaacaaatgatgaagcaatggtcgcccgctttctcttcccttgaggggatgttttgctgttttatctgtgtcactctttttctctcccttcaaaaacccacacactctttccttttgttacgcttctctgttccggtgagtgttgccttatgtatgcctgttctcgctgtctcactttctttcgcttctctctcgctctctctcctctgagttgggtcgtttcagtgccggtgtttcagtcccgttttggatagtcattttttcttgtcgaccaaatccaaacaatcttggtataatacgaaatcttagcatttctaagctgttcttggcgaaggtaaagtgtcgggttccaaatgccggtaccgaaacgaccgcaactcttccctcatttaggggtataaaataacaaaatttttgaggaaatttttcatttctcaggggtgtatttttgaaaattagacgaaatttatgtaaattaatctttatattcgggttcggggtccaaaatgggtgccggattcgctgcaaacaaagtgctggacacattaaggctgctaaatttcccgacacgaggaccaagactgagaatcccgagcagaattactggacatttgcaatgttaaattcatttcaaaaaatttttattttcgaatatacttttaattaaccacaacttttaaaaaaccaggtatatttaggctgcgtaggctgcgaagtaaaagaatttttacttttttttctaaattagttattgattttaaaaaatttgagtccaaaaatatttgagacggaaccggccctttgagtactaagacggaactggccagacggaactggccagacggaactgacccctactggtatatgaaacgaataaaatatttcatctttatttttattttaaattggcacaatgtcaatatttttcataaaaaattcttattcataagtagggctgggatttttatgtgctaaaaatcctgaaatatgtaataaaatatgtgctaaaaaccaaaaaaaggcctaaatatgtgttaaaaaatgcaaaaatatgtgctaaaaattggaaaaaccaatggtatttttgcataagaattccaaaaaactcattctttatcattttcgcccgcacaattgcaaataaaaaacatttggaggtgtttgggggtaaaattagtccttttttgataaattgtttttaaagataatttttccatcagttgagtaagtgccagcaagaaacttcgatatccagtaacgaattaatgaagaattcgattttcggtacacgaaataaataaagaaaattttgaaagagcctataaaaatggcaagaaagatgattttttggggtgcatttttgaattttttgtgtttttcttagatatttttttcaaaaatgccaaaatatgtgcaaaatatgtgccaaaccccgaaatatttgcgatatgtttttatgtgcgaaaacgccaaaatatgtgtttttatgtttttataagtcgctctaaatcaaaaattgttcggagaaaatgctatttttgggcttctctcgccataactaagccgcaaaaaaaatatgttaaa

SEQ ID NO: 19872 - DNA, 2486 bp, Heterodera glycines
taattactgttttttcattttttccagaaactttttgcaaagtcttcccccgggtctccaggcgcagatcaacgcggaaaaggaccccgagcggaagaagcaaataattcacttagttcattcccaaagacagcaacaggtgggagaggggtggggaggacaacgaatgtccgacatttcttggcgattatttcagcagcaaatgtttgagcaacagcagcagcagcatatggcgatgatgggtgcacagggcggaacagtgcacaatcagccggggccaatggcaatgcgaccgatgagtaagcgctttttaaatcgtcaatatttgataattccttaaatttgattggttgtacatttttaaattaccgttgtttaagctgcgcaacggatgcccatggttcaacccgcgaatggcaccacatcaattatattcgcaaccacaacaaatgcacagccaatgccgcaacagtcgacccaaaatgtccattttcagtcagtgatttttcaattttccatgctttttcccagaatattcacgcatttttaaaagctttaatagccaacttcgtcagaaatgcatttggaatggaaaaattttttgatttccttttaaattttccgtttacccaccccccccccccccgcttcagacgcatccccagccaaagttcattcgtcacccattcgtcctcccccactccgatggccactgccaataattatcagccgcgcgtttcctctgcctcgtcccatgctccacaaatgtttatgtccggtcagcagcagcaaatgccgggcggtggcgcacaaattcgcgccgtgacaacgacggcaccggggacagtgaaccaatcgcagcaatttgtacagcaacaacaacaagtcagttgtaaaatgaaaaaagcattgaatggtttggcaatttttaccatggaattgctgggctgacaaaagaatgtccatgagaaatttggacccacaaaaatcgttcccccttttgagatgagtcagcaacaattccatcggcaacaacaacaacagtttgagcaaatgtccgttcacatggcggcacaacaacagataaagtctgacaacggcatggtcggcagttaccaaattgggacccctacggcaccttccgccggggacagtggcgccgcctctcaaaatcgcatgacaacgtcgacgattgttgtgaagacggaaagcgggcttacaacagcgatggggtcgacgagtgttcgaactccggccggaggtctttatttgttgttatataatgcccaagcttttctcaaaattttgagaaaattaacaaaaaaaaatagagggatgggagcgaattttagggttgtttatgacaattcaaatacgtaaaatcgggcaattttctctccgctcgaatttgatatttgcaatacaatctgataggttgttccctttttaattgactttccgaatttcaatttctgtcctccattctcttcatttttgcatttttctctaactctcgcttttttccagccatcgatggtccgccttcggccgactcccatccgccttcggtgggcactgccaatggcatggcgacgggtcgtccgggctctgttcagcaacagttcggcaccgccgcttcgcaagtggacacggaggagcccgagtacaaaatgttgctgaaaaagttgtgcaaataccacgcggatgtaaagcgactgttgggccgtttcgagttggacacattgcccggggtggagatgaaaatcaaagcgtcactggtcaacgtcatccaagtgatggaaggcacgcggaagggcgggtgcgtttttgaggggaccggggagggtaattccccctttcaaaaatgaaatttttattaaattttcggaaatgaaaacctcataaacaaattttataaaattacaaaatttactttttcagtccggtgacaaagactctgctgcaaaaattgctatcaaatgtgcagacagtgctcgaacgtcaccacatttcccgtcatctgttcagcatagcgaagaaactgagcacattggcacctccacacaacggcacaagcgcaaacggtggcggagggacgacaccaacgacggcaccaaaggaagagccatttgagacggacccgtggcgaaatgttcgacacatggccataaagtatgaattctcatcgattaaacatttatcggaattaagaaaaggttacaagagtgactagtccaattgtttctcacttttcagattgcccgatgccgtgctgaccattttggaggacgagaagaagagcacggcagcagagaaacaacagaaaaaggccgacgacggtgggcaagaaacggccgattctgagagtggcgggaatgagtggacgggtcggaagcgaattcgacaacaaaacgagcaaaaggaggacgagaagggcgaaggaccaccgaccaaaaagagcctttggaaagagggccgaatgtaat

SEQ ID NO: 19873 - DNA, 2469 bp, Heterodera glycines
tcatagaccaaggcgagaaagaggtgattattcctcgccaatttcaccgaaattactacaatacgggccaaattgcgtgccatgatggcggtgcaattgcacttttggcatgccgaaaaattccgcataatttgtggccaaattgcctatgtggcctatctggtccaaaagaagagcatcccattcacattttggcgatcgcccacagaatgttttttaatggatcgcgaggatattttgtcctcaatgcgtacactactcaaaccttcccatttgaactttgtgatgagccgagtgatcggcacagtatgggatactatatcggatacggtacggcaaaagcgtggcgcgcttgcattgctggagaagctaattgggggtacagcactggttaaactgtgggagaacaaagaagccagggcgaagttaatggaggcaaattgtaagtgaaacaatgatggaacatacagacaaaatcaatgcacactgtcttcaacagtagattaggaaatagaatgctattagtacctcaacaggaagaattttggtttgagcttaaagtctgtattactgtaccggatcttttgtatttaaaaaaattattattggatattaaagtattggttctggtaataacaacccaatcctgtacagtaacaataaatttgattttcccatccgtaaaatttttaggccttttcaaattcctgtaaaaaatgacatataaaaaatgccatttaaatacttttttctccattttagttttcttcgacaaaaaccgactcgttgatcattatgtcagcattttgttgaacgccaacattgtgcctgattccgttgatcggatgcgccgcgatataaaatcggctgatctgatcgtttgggcccaatggttccaatcactcattgagcagcagcacaagggaaaatctcggtattccttacaccgggactacgtttggatgtatttacgcattgcgtacgacatgtacgacctcggaacggagaaaagcgaatttgaacacacttttaccaagatggaaacaatgatgagaagtaattagcggggatttgattgattgggatttatggaatgaatgaactaatgagagaagtaattagtggggattcgattgataggaattatggaacgaatgaaagaaatgatgataagtaattgttgatcaagttggtccctgattttagtcgtgaaatagcgattgataaggtgacccgaaaattgagcaccggaaaattttcttgggtgtctaatgttccggtatccaatgtgagggggatgtatctttaaatgggtatccgtgattttgtctaaaaaagcctttgtttaccttagaacaaaaaagtcctaaatgattcaataaatttgaagaggctaatcagaacggaaaattaataacatttaaaacttgatatagaggtgtagcaatacatccaaacatgataggtcatacaatacttgaacataacggaaaaaagtttagaaatcaccaaattactcatttcttcttctgctggtagtcgaggttcgctgatgggaaaattgcgcgaaaaatgggatgaaataattatggaagtttttcctgggagcaatttggaattggaagaatccgtggaacaagaaatggatataacggaatttatgcaacagcttcaccacagtatgatcagagaactttggcaaaatattcataagtccgatgcaattgttcagagaaaatttgaaaatataataaaaggtaaacaaaaactgggccaatttcgaaattttttggaaatacggaagcaacaacttatgtgaaaaaatgaaacaaaaaattactatttttcaaattaaatttatgttaaaagtgacaaaatttgcttcgctccaaagtgacattgacccaaataaataggatttgttggcatttatatagaaaaagccaatttggggggtgcacatgatttttgagtggaaaattttttctcacaaaaatcttccaaaaatatgtaattaggggttatttgggccgctgatcacgaatacgtgatcagattttacttttgacatcgtttaaacctcagaatccctgtgtgattggggattctgagacatcattttgaggggggggggggggaagttcggatccggacggtgtaacattatttttctgtgcatttttacgttattttcaatgattttaattaatttaaaatattttgttgagttaataaataaaaaattatatttaatttaatttttttttgataaataaattttataagtttaaattaattatttttttaattgatagaatttcatgtattttttaaattaaatttgttaaaaatattttcattttaatttaatgaatttactaatcactgttgtatcaatttatatttaaagatttgttgtaaattaataataaaagaatttatttaaaaaataacaattatcttttaata

SEQ ID NO: 19874 - DNA, 1940 bp, Heterodera glycines
agacggaagagaaagagtgaaaaaggaaaaattcgaagcaagaaggacggggagaaagaggaggaagagagaatgaagcagaaaagagggaggaacagcagcaaatcgacactttttgattttgccggtgctaatattgctaatggatgtcgtaaatccccgtcaaaatcctgaaaactacacaattttcgaaagaaaaatgcattcattcgattacacataggcaaaaaatttatgttgtggcgtgggttttgcaggagcacagcttgttccccaaatcccattaacgattttaaaaaaatcattaaatttctcagggaatttccggcaaattcaaacaatttattacaaatagagattcttagaccccctaagaatcggtcggggccgttttcgcgtgagtagctgtttaggactgaaattggtcggatttgtgcaaaacatccatgtttcgaatccgaacccgcattcggacaaatttattaactttttaatttttttatttcttgcggctaatatcttctacagtaatttgtcagtttggtcggatgtgcgtcaaacggaaaaaatatttaaaattttataaaaatataacaaaaaataacaaatttcagaacaaactaaggtcgcatttcatagtttcgggaaacaccagtgagaaaattgataatgttttcgggattcacattggcattggcataattgtgatcattttgggggaggtgaatgttattgatgtcgttatagagtgcgccgtcatgttctaacttaactttgtttcgttttgttttaattttttgctgctggtccatattatataatttaaatgggtcggggtcacttcggcgcggaccatttcggcgccgcaaattttgaaatgctataacttttttatttgtcagttaactttagccaatctggcatcatttgaaagctctatgtgtgctctatattcacatgtcaaaatagaaataaatgattcaaaaataaaaaagttatggcacacggcgccgaaaaagccaagaaaaagtcaatttttgaggttttttggccacaacttttttgtaaactgactaaattttttgaaattttgcaatctaatagagaatctcaagagctatcgaatcaaaaatatttaatttggttgataatgaaaaaagttgttagcaacggcgccgaaaaaggccggcgccgaagtgggcggttcccatttaaatagccttaatttagtttataaatagggcccggatttttatgtttttacatattttttttgcggcttagttatggcgagagaagcccaaaaatagcattatctccgaacaatttttgatttagagcgacttataaaaacataaaaacacatattttggcgttttgtcacataaaatatgttagcacatattttggggtttggcacatattttgcacatattttggcatttttgagaaaaattgcaataaaaatacaagaaaattgaaaaatacaccccctaaaaatcgacttttttcctaattattaacataattttcaaattaaaaaattttttcttcgattgtagaaactaatgaaatctcgaattcattaattcgtcattggatttcgaagttctctgctggaactttcaatttatagaaatgatttatcaaaaaaagacaattttaccccaaacacttcgaaatgtatttgatttgcgttgtatgggctaaaaatgataaagaatgagatttttgggaatttttatgcaaaaacacacttattttttcaatttttaacacatattttagcacatattttggcattttttgggggtttttagcacatatttcagcattttttagcacatattttattacatatttcaggatttttagcacataaaaaatccggggccctatttataaactcattaattataaaataaaaactcgttcaaaaa

SEQ ID NO: 19875 - DNA, 1933 bp, Heterodera glycines
tataacttttttgtgtaattgtctaatcgctaagcaatagcttagaaaaagcctctaaacatattaagctttcgaatgataccaaaaatgttggatttggatgacatagaaaaaagttacagaaagttatagttgaaaaacatgctggcgcccaaacggccgcgcccaaacgcagtggacccaaatttaggggtgtaaaatatgaaaaattattcaaataattgttgcaagaggccaaaatatttttcaaaaaattttttaagtgctaaaaacaaaaacaaaaaaatgcaccatacatataaatagggcttcgatttttaggtttttacatatttttttcctgagctccccgtggcctgaaacgcacgaaaaacatgtttttttgggctgttgttaagctacttttcgagttattagcacctattttctaggtttttatttttagcacctaaaaaacctaaaaaaattttaaaaaacttattttcacctattttggcattttgcccaaaatttgttaacaaaaatgaaataaaaaggaaaaacagacccctaagaatcgaccgaaaatttttttcaaaaaatatacccctaagaatcgactcgaaaattttcaaaaatatacctatgaaaaaagaaaaatttctcaaaaatcatctccaaaatttatttgtttattttcttggcgagaattttttattttgaaaattatctatctcattaatgatttggcataatatttttgctttttgaagaaaattttcgattttacaccccaaattcggaactttttggcacctattttcccatttttagcacctattttgggggttttttagaacctaaaacctacttattttggcagtttttagcacctaaaaatcgaagccctacatataaaacatttctgacataaaacgagagcatcaaatcaaattcctattggtgagatcgcgtcgatcatttctcaaatataattttcgttgctttcatccgtttcttcgtcttcttcttccgctggtggcgacaatggactaaaattaattaattttttcattttttgacaaaatcaaacattgcttttactgcccacccaatgtaatcactgccagcccacaaatttaattcgacattgttcaaattttcgtcgtcttcccatttaaccgccgccgccttttcactaattggacatcgctccaacagccaataaatgttatcaccctctttcagtgtcagcttttctttggtccgttcattctccaattcaaatggcacgatttgtgttgttggccacaaaactccaaaacgaattgtgtaactaacagaagtggtggtggtggcacggagaaatatctaaacaaaaaggaagcgcaataaaaaagcaattaattaattagtcagatcgtttaatgaaaatatggccgacaacacacccctttgaaattgttgacccattcaaaatttgaaatttgatgctcacagcaacgcaatcgcttcggttgtccatttgttgtcggagtgtgcaaccattttgacaacgcttggccagccgaagaagcagttgcagtatttggttgcccatcatcaaactgatcagcaacaattacaccggggcacagctgatcggaaaacacagaatgcagtcgagtgcaatcagtgagaaatgtcggcgaaatgtggcgacacaaagtgtcaaaatggttgtgacagagaaaacccaaatggtgaatgtttgtcgcaaaaatgggccaaatttggcggacaaaaacatcccaaattggctggacgttggtttctgaattaaacaccgcatataaatccaatttggtgccacttctgtcccaaatatgcttgttggaacgaagaaaagtgagcacagaatgatcaatgtacctgaagaaaagaaaaatgctttaacataaacaaaaattaaaaa

SEQ ID NO: 19876 - DNA, 1083 bp, Heterodera glycines
  unsure (1)..(1083): unsure at all n locations
ccgagcggttggcgccgcgaagcggcgccaagcgttctttaaattactaatatgcaatatgaatgaatgcgaattgtggaaatgtcttacaaaaaaaacataaaatgaaaacagatcgtcaaataatattttaaatggcgtcagcggtaacaataaaacaaacaacaaacaacttgtttttaaaggcaccttctgactgattatttggaacaatactatgaatcggctaaacatttgaccatgttcgctataagagcgtcaatcagggagtaaaccgttttttgctgttttttcaattttcgtgcctttaatcccttagtttttgcttttttcaattttttgtgtttttcctgcttattttggaaaaatttggtgttttttacagtgctaatcggtgatttttaggctgaaaaataagcactctaataatttcttaattgttagcccaaccaaccatttgaattctaatttatgggtatgtaaacccaaaataggaaaaaattttgagtgagatgagaaaataaattgtaaaatggctaaattttaagctgaatagatgaaaatgaatatatcgtctcaaatatagtacaaaatgaaagggaaattatgattagggatgcaatttatagttcctaaaaagtgccaaaataattattttttactttctaaaaaacccccaaaatggttgctaaaaataagtaaatagttgctaaaaacttccagatttaggggtgtaaaattgaaaattttcttcaaaaagcaaaaatattatgccagaccattaatgagatacacaattttcaaatccaaaattatcgtcaataaaataaagtagtgcatttttaaaaattttcgggttgattcttaagggtgtttttttcctttttattgcatttttgttaacaaattttgggcaaaacgccaaaatagttngaaaaagtttttatcaaaaattttatagttttttagttgctanaaataaaaaactggaaaatagttgctanaactcgaaaagtagcttacaattnnaacacggtcgaaaaaaacatgttttcgtgcatttcaggccacggggcgctcagg

SEQ ID NO: 19877 - DNA, 880 bp, Heterodera glycines
  unsure (1)..(880): unsure at all n locations
ttttataattaatttatttaattgttattaagcaaattaaacaaataaaattattttataattaattttttttttaattattaagcaaatttatctcaaataataaaacatttgtataacattcatagattaattttttttgacaaataactagagaaatctcgactgtaaaatatttactcaaattatataaatatatataattttattcatattttaagcaaaaaagcatggatggcggtttttatgcaccaacatctttgcagaaacagaatttgctctttccgatatgattgaaactattggaattttttattaaaaaaatttacgacgattgttcaaaattaatagattttttagtacccaagaagtaaaactcgcaaaaaatttactcagaagaaattctttggcgtgccataaagccgcagtccaaatggtaggtcgttaatcctatagaatgactaaaatatggattatgactcttaacataaataaatgtgatggaatttttgattataatcctactgctgatgaaccagcattttaaattattagctttattatttaatattataataagttatgttaagtattaactagatttggataatcctactgcattgattgaattaaatgcttgattatagattatatttattagggatttactttaaataaattaattataaaataattttatttgattgatttgcttaaaaacatttaaataaattaattataaaatttttgcggttttcgcgcaatgacgcggcaccatttggttgagaaagaaaaaagttatggtccaaaaattcggggctaggtcgtttcctanaaccgcaacaattgngcgtttcctaaaccgccaagtggtaggaaa

SEQ ID NO: 19878 - DNA, 1410 bp, Heterodera glycines
  unsure (1)..(1410): unsure at all n locations
cgtgtgcggaatataaaaattgcatttttagtcaagttttaacgcgtttgncatgcatgatttaataaaattaataatttgttttattttactagctgtgcaccacaaagttttggtatgtatgagnaataataaaaatttaaattctttataagtttataagacctttcattttcatgtaaataagtgatacattattttatcagcaaataattgaccaaagacaatgatagtcatatttttgatccgaaaaatgattaatatcataaatataaaattatttcaagaaattctggttgctaaattcggaaacaaaataaataaaagtaataggcaattttactttataaatgtaacattatttaaaactgctaaaatcgcaagaatagatacgaatattagcttttttcgtgtgcggaatataaaaattgcattttaagtcaagttttaacgcgttttgcatgcatgaatttaataaaattaataattggttttattttactagctgtgcaccaacaagttttggtatgtattgagaataataaaaattttaagtctttataagtttataagacctttcattttcatgtaaataagtgatacattattttatcagcaaataattggaccaaagacaatgatagtcatatttttgatccgaaaaatgattaatatcataaatataaaattatttcaagaaattctggttgctaaattcggaaacaaaataaataaaagtaataggcaattttactttataaatgtaacattatttaaaactgctaaaatcgcaagaatagatacgaatattagcttttttcgtgtgcggaatataaaaattgcattttaagtcaagttttaacgcgttttgcatgcatgaatttaataaaattaataattggttttattttactagctgtgcaccaacaagttttggtatgtattgagaataataaaaattttaattctttataagtttataagacctttcattttaatgtaaataagtgatacattattttatcagcaaataattggaccaaagacaatgatagtcatatttttgatccgaaaaatgattaatatcataaatataaaattatttcaagaaattctggttgctaaattcggaaacaaaataaataaaagtaataggcaattttactttataaatgtaacattatttaaaactgctaaaatcgcaagaatagatacgaatattagcttttttcgtgtgcggaatattaaaattgcattttaagtcaagttttaacgcgttttgcatgcatgattttaataaaattaataattggaattattttacttgctgtgcaccaacaaagttttggtatgtattgggaataatacaaattttcatctcttataaaggtataagacctttccttttaa

SEQ ID NO: 19879 - DNA, 2457 bp, Heterodera glycines
atttttcgtcgctggaagttgcggccgtagtgatctgcatggtttttttgatgaacttgagaaagcggccggttgagtcacgccagcctgttgataccttggtagaattgaataatccaatttttataattttttgtaagaccaagacggacaagtcatgatgttgctcagaacgagtagtatggaagtgatcagaagccgagctacgactataaataggcagacttattttaattgtgatgttgcatgcttgctatttaaatatagttgtataatatttggcttttttgcacatgaattataagacgatattggattcggctaaacttggtatagtcagcccccgggaaaagtcgattggcacttgcaaatttaatgtttttcatagtgttgcgaagtggataggttttgggaatcattagaatgaacacggcgagtcaattgtgggctccaagtacacaaatatatgtattataaatagattgttattcaattatcaattgattatttaatttaattatttaaataaattttccgtactgaaataacccgcctcttccgatcatccctcatcaatacttttgacacttcgccacatcgatacttttgacacttcgactcaccacgaactcaagggcttcagaatctgggctggacgtaattacggattacggaaattacggactttttggagttacggattacgggttacggatttttgggattattccgtaattttgatccgtttccatgcattttctctcattttttatttatataatttaatatcaattgttaattgcaaaataaaatattatttattctgttttcatgtttaatacagcgaaaagttttcgttgcatcttatatccttttctgttagcctaccaatggtaactttacagacttaaattttggaataaccggaatgttgtgacctaaaaatacggtacttggactgggactgactgggaatgtttttaagaaaaattcaaaaaattaattaataaatgaaagattttcttttttgtcttcattatccaccattctataacaattttaagacattttccttcatttgtgcgacatccaaaatttactttttttttcttcatatttacaaaaaagaattaaatgttaaatatatggtattttaaatactttgattttaagttctattgttaagaaacttaaagatatttttatttaaaaaatgtttaagaattactatttttattacaaattttaataaatagaacttataaatatttactttaaaattataagcaaaaagcttttaaataaaatattagtaaatttcttcctttatttaatttgtaattctcggttttttttcatttacttcactttaattcaaaaactcgatattttctcaatttaggttttaatgattttgcattttttttattcgccttttttatttacattttttacatttccttgtaaattattgtatttagtgaattatccggttttagtcaaaattaccaaaaatggtttgaaattttgttatattaatattattataattatttcgtattcaacttgcaaatttttaaaattatacatttctattatatttagattttctcctattaaataaatatgtttttagttaaattggaatataattaattgttgcttaactcttgtttttaagtcaatctcacacaaatttttaatatcttaaaataaattttttaattatcatttgtaaatgtttagatatagggcgcggatttttagggacgaaaaagttcaaaatagggccctaaacatgggcaaaaataagggcgaaaataggggcgaaacgccaatataggcacaaaaacttattttaggggcgaacactcaaaatagggatttctagggtcggataggggcgttaaaacgaaaattttcgaacaaaaaatgtgtttttcgtgcatttctcgtcgagttaaagccgcagaaaaaataagatgaaaaactatcacaaatatcgtgcaaattttatttgaaaagccgatattattttcgttaagcttttacatttaaaaaatttccttatataatttgaaatatttttaaattaccaaaatataaaaataaatatttttgggatcattcgccttctaatttcttactcgagttgttgcataccgtcactacatcataattaattattaatgctacggttccatttttggtttaaattagagtgtctaaaccgggacttttcgggttgaaaatccgggacttttcgggttaaaaaaccgggacttttcgggttgaaaaaccgggactttttgctgggaaaactgggaaaaaagcgggtatttcccggtcaaagctggtcaaaaccgagacctaggtactcagttgtcgcgctattttcagtaccagtctcggtccagtaacactctagtttaaattactattatgtacattatagct

SEQ ID NO: 19880 - DNA, 1397 bp, Heterodera glycines
cccaactgagcggttccggttttttgtttaccattttcttcatttatttttttgggataaatcgttgcatatatatcagtattcgagaaaatttaaaattaatgccaaaggacaaaaatgtaaatttagtggcaacagaaaatctataaaaaaataaaataaaattctaaaagccaatttatttttttaaagatttacaaaaaaatgccagggcttcttggatcaaaaatttaatacattgaactaattggttggaaaattttttgcgccgcgcccgatctttagcagaaaaaactgatgttttcgaagcaaaagtttcgcacgtccctagcggcatgctgaaaacgcgaagcgattctgaacgaacgtttaacatatttgtgtaataaaaatatatttagctgttagtaattcttggcatttttctctttttttcaaaataaggaaattgattatgtgttgtggtggcgatgaacaaagtgcgaaggaatgaatgaattggatgatggaaaatacaggcacaaaagggctgattctcaacagaacaatgctgacaaaaatgaatggaaaaaggccacaattattcaattgatggggaaaaaacaataatagtaatgataatgacaggtgtcaacttcacaaataatgaggacagagtcaacgttcacaaagaatgcgctttaacttatcgataactatatagtatatgtataaggcatatgcgaatttaagtgagcagatttacgaaaagttcggaaatcaaatacatatttaattaacccattattattaaattaaaaaatccccttttgtgggaaagacggattgatcacttaaacactggcaaattacaatgaaaaagatgcatttgtatgtagcttgtttacaatagcttatatagtgtgtgtgcttttcactgtttctgaacaatcatttttgggctaaaattgatgcgaaaatgtgacacaaaaccaatggaaacaaaggaaggaatgatgcgtcaaaataatgtgataataaaaataataaggcaataatttctgcaggaatttttttcttttttttgccatcattaatccatcaaaagtgccgttgatgactgcctccgctaagggaaaactgctgatgttgcggcacggccgggggacaaatgccgccaccgccgttggacgacgacgaagtggaggtagatgaactcattgctgccgcagccgctgtcgtgccgccgtccgcgccgtagaagcgctcctgggtggccaattcgtccgcaaattttgtctcaagtgtctgaaattggcgtcaaacaaattttactaattccattttcatcattgaatatatgatgaatgtttggcgcctggaaaaatagataaaaaacttttcaatttttttttggt

SEQ ID NO: 19881 - DNA, 1190 bp, Heterodera glycines
  unsure (1)..(1190): unsure at all n locations
catcatcgtccgcgttcttcgcctcgttgcgcaacactttggggcaacgccttgcggtcggcggtgagcgcgcgcaacagctgttcctccttggactggttgatgcggcgcacgtgctcctgttccttggcatgccgggccaacatgtgcgtccgctgtaagtggaacacgtcctgcggggagaaatgatttttaaaaatgaaaagttggagaaattttttgataaaatccaaaaaaacataaattcatgtaaccgcatttcttgtatttataatctgctgtacttattgttattataaattttttgtttttaaaaactgaaaaattttcctagcggccggcgcctgttggcagcgccggccttaaaattcttatttctattaaaaaaaattggctcaaaatcgcaaaatttgattaatttttggtgaatctgctaaaaatagtaaaaaatttcaaatttttcccagcggcgcctgctccaaaaggaaaaaggatcttttgaaaagaagccgagtgagttacctgataaaaaaacaaattgacaccattcgcataatttgacccatcgcctcttttttcatgtaagaggggactgttcccgatgcttgtctcgttgtctccttgttgaacaactcttggtatctgcttgactcaactcacccgaaactgttgggtgagcagcgcgtgtttctccgccaattgcgcctcctccaactcccacagcgccgtctccatgctgcgctccagctggtgcttctgctccaggaactgcttctccagcaggcacagcttctcccggtgccggtcccgcgcccgaagcagaaacacttcctgagagcgcatctgttgctcaacaaagtcggattcctggggaacaaagtgaaataatggacgaacggacggaaaaaaatacaaaaaaggttagccatgtttttcaaaaaaacaattttttaaaattcacactttttcgcagtggcgcctctccaactgatccttgcgctgcctgaacacggttttgcgctgcgcctttggcaacatgtccacttcctgcttcataattttctgctcttggcgtaaccgttcgcggaaaacgcccaagtcacgctcctgngcaaaatgcattagaaacatgnggcaaaatgcaggagaaaaaggggacttaattttataaaaaccataccatatcttcc

SEQ ID NO: 19882 - DNA, 1231 bp, Heterodera glycines
  unsure (1)..(1231): unsure at all n locations
ttaaaaactgataaccaaaagaattcaaaaaacctccgctattcgaactaataaaaatttcaaaagacaataaaattttcattgacgcaatcttgaaaatcaaattttctccaaacaaatttcgattcagagcgactttttagcacctaaaaacacccaaaacaggtattttcgaattttttgcaactattttagcctttttccagcaactcaaagcaaaagtacaataaaaacaaaaaatacaccccctaagaatcaataccaaaatttatgaaaatgttaaaataaaccactaagaaatgaaaaatttctcaaaaatacacttacaaaaattattatttattttcttgacaagatgcaacaattatgcagccgaaattgataaaaattagtcacttttggaattttggtacataaagacactgaatttttccaatttttaaatgaattgtcgcacttttttggattctagtgcagaatacgcgtcccatcgacttttacgcgtcccatggacttttacgcgtaccatcgacttttacgcgtcccatggacttttacgcgtcccatgattttttacgcgtcccattgaatttttacgcgtcccataatttaataattaaaaaaaaatcgattaatttttaaattcaatttaaaattttttatttttatatgttatcacattaaatcatatattttagttacgatcacatcacacatttttttgtcagacagggtagttatggcgcatttcttccaaaatatgctgaaatatttttgtgttttgttgatatcgacgaaatgcgtactgaaacaaataagtaggtaaaagttcgggggtggtcccatgtaaatgtttcagactgcttgaaagccctccaggtagcctcaattccctgtgtatgtattttagggttggcgggatctacgaagtaaatttgatgatttatccactcgtggttgtattgctgctgcatattatttatccctccgtatgccgcccaaccatccgctactatcgtgctttccacctcaatattttcagcgataatgggcagaagagtgtctgcagaccggtcgggcacagggaagaaccggaccttattagaccctctttgaatcatgccaaagacccattcgtatgggcgatttaacattcgaccccgatggtattttgccctatacaccttggtctcatncatctcgaccaccgtaccaacaaacccctcctaat

SEQ ID NO: 19883 - DNA, 804 bp, Heterodera glycines
aaaatccatgggacgcgtaaaagattatgggacgcgtaaaaattcaatgggacgcgtaaaaaatcatgggtccatgggacgcgtaaaagattatgggacgcgtaaaaattcaatgggacgcgtaaaaaatcatgggacgcgtaaacgtccatgggacgcgtaaaaacgaaaaatactaaaatttaaaccctgtttaatattctattaaaattgttaaaggaaatctaaagatatttattgtgaaataaaaaactttcaggtaataaagcggcttaaagaaacaataaactaatataataaaaataaaataaatattttgattgataaaattcgaatccatttacagaagaaaaggtgtaaacccaaaaaataaatgtaaatgaaaatttaattacaatcgaaataaaaaattattaaatctttctatttaaaaaataatcaaagccttttgttaatataatttactacaaattatggtaattataagaacttaattttataattaacaaaaccgttaagtgatttattaagttagtttaccaaaaacaattaattaaaaacataaaaaaacaaagtatcaaaaaaaaaagaatttattatatatcggagttatttgtcataaatctcaaaaaatgtaattttctggatccaggcctgtttagaatttttagatgttcctatgcaattaattgttttttccaaaaattttatttagctgctcagcggccgcttcgcgccttcaatgaaatctaaaagattttattaattaaaaaattaattagaataaatcttaatcatcttttt

SEQ ID NO: 19884 - DNA, 1667 bp, Heterodera glycines
tatcaattttaaagtcaaaagaaattggacggcacaaaacaataaaaattaccagataataaaaattggaatgaaagatggaaaaaaaagaatacaattttaagtgagaaaaacgcgaaaaaagacattatgccaaatttaattaacactaatgagtcattataattaaaattctacaacacctttcaggctacggggagctcaggaaaaaaatagtgaaaaactataaatcgtagaaccctatttattacatatttcgagatttttagcacaccaaaatcccgtccctacttataacgttagatataactagggctgggaatttaagtcactaaaaatcttcaaaaagtcgactaaaaaagttataaaaaatcaccaatatgtaacaaaaagattcaaaaaagcacgataaaatgcaaaaaagtcctgaaattagacgaaagataaaaaatcccattaatatggtttatagaataacattttgatcagatttttggatatttaattttttaaaagctacctaaaataggcataaaaaagtgattcatccaataattacgaaaaatttcatccaggtttcattgcctttacaccgattaaaagagaaaaacccattaaaaaagaaagaattcattgaacgatctgatgaatttagaagtttaaataaaggcaaactgaaagaatttttaaatctgcctgttttcaaaaataccattacataatgaaaatttaaataacttataaaatcatctgcatatattttttcgcgttaagataatttgcgttagatttgttaagaaattttttttttggtaaattgtcagttttaaacatttaaacgtaagttagctcgaattatcttcaaaatttaaacggcgccacagtcggttggatgccgatggacaatttggccgagaactggcacgtggacacattatgttggcatgttgttgagcctttccaggtcgtgggatgcgggctttcgtccaatgaacaaatgaacacatttgctgtacattgaacagaaaatgcgccgtattcgctacgtacaacgtccgattcctgaatcattttatgaacaataagattcatttgagtcaatttttgcacgaaaccatggatttgttatgcgtagggatgtcaattttatgcaaatgcatatttttttcctggattctccatgctctaattagtaggaaaaacacttatctgaatagaaaattattatatgcttaaaaagaaaaacccttacttttatgatcatttggcagcatttgttttttccacttccaaaatgtgtcattggaaatgcccaattccttcgcaaattctatctgtttgccatgggcatataaacttttaaatcttcaaatcgttcaatgaatttgcgctttttctcatcataaaaattcttttttattttgtttttatttaaatttaattcatttttccatttttgtattaattgccgatttgttcctaataattttgcaatttttctctcaattttgctttgatctttgcttcggaattttcctttttctctcaatttttctttaattgcatcaaattttttaattgtttctcttttttgttgattaattggaccatttcccatttcttcacccaggtgatcaactcctgatgtgttttcattttgctcgttt

SEQ ID NO: 19885 - DNA, 1783 bp, Heterodera glycines
taaacatgaccaaacaaattttatttttttctttcagaaaaatatttttcgtggcttttcttgttaagcacattgaattttataaactgactaaatttcaagtcattacgacaattatgactgaagttatagactttggtataaaaaggtgaacaaatttagttgatcttgctgatttgaaaacccttaattttttgtaaacataacatagttaagattttaagagctcattctaatgaaaacattcagatgaacagaataacaatgaaaaatatcattaaaaacttattttcgcaaatttattttaacatattaactgggggtcattttttatgcaacgacctagtaaatgcctacaactttacctgttttttgagttttcctgaaaaattagcagcggtgcgtggacggcgataagtgttgaatgttgacggacgagagagtggctgaaggatctcgaaaaggagaaagccattagaaatcaacatatgttcatttttacattttgttgctgtgtaagcagcggcggcggaggcccaaacgccggctgataattctgtggcggccatgcgtacgccgtgggaccgctgttggcgtcgaagttggtgtaattcgacaaaccgtacgggcgttcagcactcacatcggtagagaaatcctcccctctgcgctcacggaaattctgttgattcaatgaaattgttaggtttcattattatacttctgcaaataaaaaagtttgactttttttgagtttctccatatcacccactaaaacagaaccatatattgtaaaagtacagcacaaccaaagtaagaatatttgtgaacttcttttgccgaattgattagggcgatgttcgacaaataaaccagaaaaaaaaacttccaacccccatttgtttattgcttggattagtttaattttgtaaaaaccgaataattgccgcttaatggtcgcaaatcgatgtgccgtggcggtgctccctccaccggttcggtgcgcaccaaaaggtgggaggaaggcgcgtccgactgctcactcagcgacaaaagttgggcccccgcgtttccgttgctgccgtccttttgctgcatttgcttacgttgctgtgccaacagctttttttcttcaagcttaaatgctaattgttgacaactttttgttgtttcattttacttttttgattgttgcgggtgtcgccatatgcaagagaaataaattcaaatagtttaactattttctgaaaagagaaataaaagatcaacctcaacctcaacatttaaaatttatatttattagagattgcatttttaagcaaatgcctaatctgtggacttaatacgctcacagaacaaacccaactgtgagtgttcaaatcactttaaaatcagttttatatgtgtagagaattagtggatttgctattcatggcaagtcaattttggcttccagtgtaaataaatttattttttattctaatcagaacgccaaaactttgcataattttaaacctcataaattacaataaaaaaatgtctttctctcattttggcgtaaacaaattttcactttatgttggaattctgtgcgggttcgaaatagatgaaaatggatatcggggtactaaaggtgttttttaaccctttaaaattttaattttttgaaaagggagataaattgcattatgtatctaaattacaaggggttctaattaactttaattacatgtaaatttataaagttcaatatttacctatattaatttgaaatatacaagtg

SEQ ID NO: 19886 - DNA, 2147 bp, Heterodera glycines
tcaccttcacttgtttaatgtttattcgcagcaattctcacgcaatatttgcatagaaatttttgaatttttgaaaaactatcgccatattttcatattatttttaggtcatgaaccgttgtaattataatcagaaaattaaaacatcgaatccattgtacggacgtggatattttatcgagcagaaggaatacagtaattctaacggttgcggatttcgtaaggcgaatagaccgcttgttccgagtaatgcggccgacattgagagttgggagccaaaggtaggtcaaatacggtagttttaagaaatgtttatttttttacaggtaatgagcacccaagaaattagcaaattgactgctcgttgcgtgggtgtcactgatgcgtttatcaaacttgacaattacgtggacagtgtgaagaagtacaacccgtcgaatcatgatttgcttcgggttgtgtgtccttttcactgaccatttgatcaaagcattccaagttcagatgcaacgaatgcagcaccagtcaaagacattgacggaagacccggacaaatacgccgaacttattgtccaatgtgttgcaaatccaaacaagtttaatgggactcgccactgtttggagcttgtcattggcagacgagcacttgaggaatttattagtcgcaacgaatggacggaggaaagactgaaggactacgacattaagtgcgtttggccatccgatggatttgtttagttcgtttctaacagactatcttaaaataacttttttttctaatttagtgcaaattggaagttcgagcccaatgagttgactgtcccgccgattcccatttacaccgggtcactttcttctgcttgatatatttgaccggttaatgtgactattgaatatattttcaatatttgttttcactttttgacgctcataataaatactttaaacgaattagcgatgttttttttttgttggtgttttgcggtaattttttcttctaatccatatcatttgcatttaatgacccctccctccttccccccccttccccttttttatcgtatcgggctgatgacagtcctttcgcactgtcgtcggacagtaaatacatatttcaccattgtttatttgtgctgatgacgcggagagtgggcgggagaaaggcaacggcagactttgttttgaagggccttttaaaagcgatggaagcgcagcgagcgaagggatgaagcgaaatggagccgatttcttttgtttgctgggcaatgaatgcaaaagaaaatcggccgccggggttttgggattagagaagtgctgcaaattgcaaatcaccaccagcagaagtcagaagatcgtcgcataagtcagccgacgagaggaaagggaactgacggaaagggctaatcctttatcatcgtcgagagtcattcccgaaaatattttctgcaaattcatttcgccgtccgttcgcccccggggggggggggggggttagtccaaatacttttgtgttctctgcgaccttctctctttctctgcactccctttcttccttcactttgcttttgatcagcggcggaggatgtcagttgttttctctgttttcgccgccgtcgtctgtctcggcctcccgcgaaaacgaaaaccacacattcatttacagcagcgcactgctgctggtccaaatcccctcactctctcgccgcattttttgtcaaaatcggctgaatattctcccctccctcccccattttttcgacgcattctctcgtctctctgatcacttttcccgtctgtttttgtcattccgatcagtgtctgtctgctttccctccaacatttctctccccctttctcgctctctctctctctccccctttctttctcccccctccctatccgttgctctctctctctctccctttctttctcccccctccctatccgttgctctctctctctccccctttctttctcccccctccctatccgttgctctctctctcctcccccaccccattccaaccactcatcatcacccacccccaggaaaatgatgatgacttctccacccccttcccctcctttcccatgcatttgctaaatgcttttgttttgccatactgctgaaataatgcggacacttt

SEQ ID NO: 19887 - DNA, 2431 bp, Heterodera glycines
  unsure (1)..(2431): unsure at all n locations
tttaatttaaaaaaaataaatttaaataatttaaaacatcttttaaaattaattaaaaacagngaaaataacccataaatgcatagaaaaataatgtacaccgtccgggtccgaacctgcctctcccctcctcataagggtgccttgaatccccaatcacacagggattctgaggtcttaactatgtcaaaagtaaaatctgattacgtattcgtgatcaggggcccaaataacccctaaagacatattttttgaagatttttggtgaaaaaatttttcaactcaaaaatcctatgctcacccctttggtcccgaatcccaaaatcggttttatttttgtaacaattcgtaagaaagtgataaaaatgtaaaataaaatttatattataaagaaaaaaattgcggatttttgtagtattttaattttcaaaaattttttttcagaagggggttatgaatttttttctgaaaaatcgaaaattttcagaaattctggaataactttttttctttttaagatagaaatcccaaataaatcccataaaattctcctgatttttctctatttttataatataattgcatgaaaatttatccacccttcgatttgttatgaattttcgaaaattaacccaaaatcccgaaggccaaaaaattgacgaattttcaaaaatttttaaaaaattccaaaaaatctgaaacgaaaaacaaaggtcatattcgtgctcagcacctcaaaataccccagaaaaatattttacacccccttttcaacccaaaaaaaaaactccgaaaatttctaggnggcctagctcgaaaaattttgaaattttccagacttatagtacaccattcgatagagcttaaaaagttctacaattttgccctaaggcgttttttcgctaaaatcaacccctgacgagttatgggcctgggactgaaatgtcccgctcaggtcaaaaattttttctatttccgggaaaaaattgaaattttttcaaaaatattaccaatcgatagagcatcaaaaacggttgcttgaaagttgtctccgtttctctgggaaaaatcgttaaaaaatcataaaattcaaaaaccaaaaaaacgttttttaggcctaactcgaaaatttttgaaaattttcgaaattttaaaatttgcaaaaatcgagctcattgagctctacaaaaagtccgctggcgccccctggctcagatcaaacctgggcgtgctattcgcctggtactgaagtgtccaaaaaaagtgattcttacgttgcctaacctacaggtcaggcctttgatctgatcaaaaaatttttgctggcaaagttgtaggccacagttggggggtgtgccttttggggttcactaagccctaagagcaaaagcaaaaattttcgtaacactgagactgtcagcaaagtcagtttttgcgcccctggtactcagttggacgtcggacaaaaaaacctatagttttcccagatgccccgtcccaagatgcatacgtatgcaaaatttcaactccctacctattctcgatcccgagaaattggttttagcaacgaaaccccttaccgatataacatatatataactagcgggtgcgtgaaccgtcggctctgggctgggaaaaagcgcttcgcgctttgggagcttcgctacctagactgtgaagcgattcaaattgatcgaattggttggagatttcttttgaatttttaaaaaattattaggggtttttagtccacatcgaggctcaagacgggcgcttcgcgcccgttttttaaatttgttgaactcatacgggcgcttcgcgcccattttttagcttgtatggccgcttcgcggcctcagtcgggcgcttcgcgcccgtttttcaatttttgttggactcggacgggcgcttcgcgccagtttttttgatcgaattggttggagagaagctgactaaaagaggtacaaaagtgataaaagaggtacaaatctgatcagaagaggtacaacattattagaaggggtataaatctgattagaagaggtacaacagtgattagaagaggtaaaagaagaggtacaacagtgattaaaaaaggtacaaactgtgattagaagaggtacaacagtgattaaaaaagtacaaactgtgattagaagaggtacaacagtgattaaaagaggtacaacagtgattagaagaggtacaacagtgattaaaaaagtacaaactgtgattagaagagggacaacagtgattagaagaggtgcaaccacggaagggaaaggcacaacagtgaatttagctgggataaagcgcttcgcgcttcttgagcttcgctacctagattagctatcgggttgtgaaaagatttggaatttttaaaaaattatcagcgatttttaggccgcttcgcagcctcagacgggcg

SEQ ID NO: 19888 - DNA, 1274 bp, Heterodera glycines
cgctaatcacgaatatgaactcggatttgcccaattccgaaccccggacccgaattcgaacaaaaacttgaatttttttttcaaaagtatacgttaaaatcgatcaaattttggcgtaaaccgcggatttttatccaattaacaatttgaagcattattttaatcaaaaaataatagttgttgcatgaattagagttttttatcccaaaaaatgcattcttgaaattttttttcaatttttgttcgaactcgggtcaggagttcggatttgggccaatccaagttcagattcgtaatcagcacccttgaaaacccttaaaatatgaattttaaataaaaaatttttttcgggaccacaattccgaaagattgccttccgtgccatccctaactaagaggaaacctattttttgtcgtgtatttagtaaattttcaactaaaaatttcgttactaaaccaaagtatcatgtcaactcatacacaggggacgcgtaaaaccgactagaacctaattgtttgcaaaaaaacgcaaagaaaagttgtcaaaaattacaaagacaaaaggacacaccaaactaaaagcaaagggaccccctaaaataatgaaaaagagattttgaatcatcagcaaacattaaaatcataatttgaaaaagtgatttcattgtcaattttcgttgccttttatatgttttttcacaaaaaagggcctctcattttcaccttttaaccataaaatgcaaatgttttaaaggaaaggaaaggaaaatttaaattttgtttagcaattaattaattaattgttctaaaatcgcagcttttacccgtcaaatgacacggggaaggagaagcggcggaagctttgctcgccgcttccttcttcgaacagagcaaacaatgctaattcattaaaattcaatcataaattggccctgtttttcttctccccttacgccttgctcgtcgaatgatccgccgccgttgcgcaaaagaaacgaaacggcggcaacgccactgcgagtgcttcggagtgaggcggagcgggggcgaacgacgccgatagcggagggcacactcagccgaacggcgccaaaatgagcggacggagaggaaacggacagaaaatggcgatgagtcattggggggggggggggggaatgaggaaaagcctaaaagggtaaaaacactgacaaatgggagaagagagagagagagaggacgaaaagcaaagcgaaatggaggatcagcagcagaaacagcacccaatgggaatt

SEQ ID NO: 19889 - DNA, 2978 bp, Heterodera glycines
  unsure (1)..(2978): unsure at all n locations
ttgttttatattntaggcgcaaatcagttttagagggtactgatgacgaatctgaattcgtacatattttgtctaattcctaaccccggatccgaatttaacagaaatattttaaattaggtactaagttattatgtcgcctaaattgtttgcttaatagccaattttacggggtcatattccatttgaatccggtgactttgcgtggcgtttgaatttgcggaattggcatttcttttccatccaaattgacaattttcatttccttgctgccattttcttcaattttgcgtagaatttgaataaatttcagtgcccatttgcgcgtcttgaaattcgggagttttgtgcggaacaacgcattaacaaaatgaaagaacaattttaatttactttagaagaaatatggaggggctcaaaaattcaatgtgctttttttcttttaaaaattcatataaattaaattttatttgacatacataaaaaaattcgcgagctaaatacctaaaaagctagaaaaatcctcaaataggcacaaaaaaggcaaataaaacaattttttatggctttttagtctgaaatcacttaaaacttaaatacatcaaaatacgaatgattattaaatcctgtaaaaattagtataaaagcggttgctcttccaccgactgggcacacttgcaattaaaaaaaaatttttttttcttgagaatgttttacttaatgtcgcctctttttattttgttaaaatttaataaatttttgaggaaaaaagccaattgaactgaaaagtgtcaaaaactttctttaacaatttgcgccaacaaaatgtcagaccgccgaagagaagcggaggaaaaaatggcaaaagcaatgtaaaattaaaatgccaatttcaatttagaatttcctttttttcagcttcatctccgccgactgttggctttgtgtcttcgatttgcttccgacttctcaacttggcctcggaattgcgatgatcagccaccgatttgacttttacgtcgatgaacacttcaaaacgcgcaaatggacgctgaaacctattcaaattcgacgcaaaaatggagaaaatggcaccaaagaaatggaaattgtcaattacaatcgaaaagcattgccaattcctcaaattcaaatgccacggaaagtcatcggattcaaaagcatcagcatctagtaatttcgattatgaaaaatttagacaacacttcccatcattttcagtttcatcgaccaaaatgccatcgcttttctccgccattttcgcccacttttcgccgtctgtcaaattaatttggacatttatgcgcacagtgaccgcatttcggagttcattttgcgcaacatttggccaatgctcaacaaaaacattcatggcttgcgattgcccgccacattttttcaccgtttgcgtcaattccccccgtcaattctcaacgattgtccatcacttcgtgttgtcttctgtgtatgagggtttcttcagcgaatttccatgtgatgacagtgccatggcatcggataaacaagcggtgactaaatggcttttcactccacgtccggacaatgtgccaaaggtgttcaactgctacctgggcaaggatgatgcgagtttgacgtcgaaagttgaagcattcaaagcggcgtttatttaattgattcatttgccacttttacgggctttgggattctctgacaaaagcatttgcctaattaaacattgtgtggacaaaaatggtctctttctaagcgaaaagtgccacatttctcatttctttctcaatttttaatatttcaggcttttgcctcggcttcatctcctgccaatttcatcatttacgtttggtttccttcgtcttttgctgactccgatgtgccatttgaactgatcaacgaattgactcgtgaacaattgacattggaaaggattaacaatagcaaccgttttctgctgatccgttgtccaattgagcgagacgaaagcaaatggacaaaatgggaagaggaagcgattgattggcgaatttataatcagtgtaaccttcacattggaatttataatgatgataacatcggcaaaaggttaagcgaatgctttttcaaaaatccgattttatttggttttatttttaggcttctcaacgcaactcttgaaccaagtgatcagcagcagaagtgaatgtttgttaagaagtgatcgatcaatatgaattgcgttgttggataattatttttgttgcggtgattcaattgtattatatatatgtgtgggtatatgcctttaggataaattagagatttcctgaaatcccaggctcattcttttgatctaatgataaagtcggtagtcactgttccttcaataactgggtcgtcttaagtaccatttattaaacgatgttgacccgtttcgtttcattgtgccccccccctcgattttttagcaaagtcagacaaattaggacagttggctggatcagagaaatgtggacgattggcctactaataaaaattgagacaattgatcaactcataaaaattggtcggttagcgtactcagtaaaaagcccatcgtacggtagcggaaaaatcgcaaatgatgcaaatggaatgaagatttctttcatttccattgctttcccagtcgtccgtcgttcacactttccatgaaatgcggccaaatccgtcctgtgcccttccccttggccattccttccacgtcaacccttcgttttcccatccaaaacattttccgcttttcccttttagccaaacggccatttctttttttacacaaaagtatttatgcaacagtttaagcaaaagcaaatggaaaaggggagaataatatgttttgatagattttatctgtacacatattcgcgacatccttaacattgaaaaaagcgcaaaaattgcctcgactttgactacaaaagggatgtgaaaagtatgccaaa

SEQ ID NO: 19890 - DNA, 2936 bp, Heterodera glycines
gaaaattttctaaattttcggatgatagaccacgtgaaagatgagaaatttaaattattaaataaaaatttttaatttttttagttctctggcgccaagtcaccaaatggtaaagcgccaatgctcctgtggtggcagttggggcggttggggtggcggcggtggagcatgtaaaacaaattttgttataaatttaaattcagattttgggtctggaacagactcagagccggcgttgggtttgcgaaattttaggatttcgtactgtctaattccaagggcataaaaattgaaacggctgaattgggctaaatcttatgaaatgttttttgcggcataaattaatctgggggttttttccaaggacgcgctcggcactagaattcatggacactaagcatgttgagggggtagtgataatttcagactgtgaatcagattttgatctggaatagactgtctgaaatatgccagccctgaattttcgatatttaggggctttgtagatatccaattccattgacctaaaattttaaacggctcaaactaaattgcatcaaatctccgtgatttccaaggacgtccttggcactcacaatttaaggacatcaagcatgccgagtgttgctacaatttcaggctgttcctgtggccaatgcggccatacgggcggttacagcagtggcggatgttacggttgcatgtccggcacgagcggctgttactgtggaaagaaaaaatgaaaaaaaaatttttcaataaattagaggaaaaaaaatcggagaattattttaaagaaaataaataaattgttctaatgcattttattgtaatgttatttttatgaataaaaacaaattgattgtcatttttgggattttaatgatgataattattaattaattgattaatagtgctttttaaataaattaattgccattatgtattaatatatagattctattttaatttaaatacaaattatttttttaaatttttcttttcgaatgatgtcatgtgcttttttaataatatatttgtacaaaaactcgacaacatttttttaaggtgtaatttttttaattcccaaaaagtcgatctttattctcgaaaacccccaaaatatgacttatattcactaaaaattttagaaatgctatttttgagtccctttcttcatagaataagcgccgagattacattagcttagataataaaagaatacattttttaatttttatttaaaaaaaaaatttaaataactatctcttattttaaatattttttacgaatttttctttcgtccccaaaacctaagtcttaatgagatgattaattggttaattaatttgatccatattttggcagttcatgactttgtcatgagacataaattaccccctccccccaatatttggctagatttaattgaaaaagagcggaaaatgtttaaagtctcgacctaaacttgttttaaattgagcccaattcaacgcattcgtctcaaatttttgtgtctatttaatgtttgattttgtgttgaatcccatcatttttatttaaaaaaaataataatttaaattaataattatttttatatttgaagacgatttttttcaaatggccaccttcaaaacagctcctctcatcgctgttgctcttctgatccattttggatgcttaatgtttttgatggaagtgaacggtgaagtccatgttcaaaggtgcggcaaatttgtgaattcaattttttgccaaataccgaaaattttctaaattttcggatgatagaccacgtgaaagatgaaaaatttaatttttaattaaaaattttgaatttttttttagctctctggcaccaagtcatcaagtggtaaagcgtcattgctcttgtggtggcagttggggcggttggggtggcggcggtggagcatgtaaaacaaattttttataaaactaaaactcaaattatggtctggaacagaccgggccgggattggatttgagaaatttagggtttcacacaatccaattctaagggaataaaaaattgaaatggctaaattaggacgaaatctcattgtttttctacggcataaattattccggggtttttttccaaggatgcacttggcactcacaatttaaggacaccgagcatatgggttgttgctataatttcaggcggtgaattcggttctggaatagaccgtctgaagtatgcgagcctgaattttcaaaatttgtggctttggagatgcccaatcccctttggtatataaattgaaacggctcagatggctaaattttttgaaatccccgtgattcccaaggacgtccttggcactcacaatttaagggcgccaagcatgtcgagtgttgctacaatttcaggctgttcctgtggccaatgcggcaacatgggcggttacagcagtggcggatgttacggttgcatgtccggcatgggaggctgttactgtggaaagaaaaaatgaaaaatattttttttcattaaattagaagaaaaaaatcggaaaatatttttaccagaacgattaataatttgttataatgcatttcaatgtacttataatattctttctatggatacaaataaagaggtgtaatttttgaaatctaaatgattattattaattaattaattgggcataattgctattttgtatattcaaaattaatatataaattatattttaatttgaagacaaattattttttaaacatttttctatttttctttatcgagtgatgtcatgtgcttgtttaataatatttatacaaaaaacacgacaaattttttaaaattatttaagttttttaaaatatataattttgtaaagtcaataatgccaataatattattataataataaagcaattaaactgaatttccattgattgcttttctatat

SEQ ID NO: 19891 - DNA, 2361 bp, Heterodera glycines
gactgtccatctgtgccgaaaattggaacagaaactgtgcggcgaatcaggcgaaaaaaaagtgcaggaaatggacattttgaaagaggtgggacttcacgggaggatggcgcagtgggttaggacgaagttacccatgaggcattctcgggttcaattccgctcaatgatggacaaaatttaccaaaaaactgagaaaaaatgcggaataacgacgacgaggcatttgtctgagagcaacgaataggccgcgcttttttaatgtttaaaaattaaattattttaaatctaaggacatggaagccgaattgcttttgtgccacgaacgaatgaacgcgttggagacgacatgcaataatttggcacttttgttgggcggtcatttgggcggtagcgaatcgaacaaaagttgcgcattggaagaaaacgaaaagggcgattatttggcacaatttgccaatgaatgcagccgaattcggaaggaattgcagaaactgaagaaaaggtggagagaaaggaaataaaggaattttaacaaaaaaggaagtgaagaaagaaaagagagagaaaaaaagagaaggggcgaaaaagagcagtgagaaataaagaaagggtagtgaggaagagagagagagacagagaaagagagggggagagagaggggaggggagggagagaaagagagacggaaataatgaagaaagagaaaaaggaggagataaaggaatttgtaaagagagaaacaaagaatgggaagaggtacagagagtaaaaaaaatatgttaagattcgatcggaaagttgtgttctgttgtttaaacaaagtgccattcgtggaggataaggaaaattcaggcggaaaatggaaaaaccgaacagcagaatcagcagatcaaattggttaataattatcgatcacttgctctatttagcagctctgcccatttcattatcccattcgcttcagttgaatgtgccattcaaagttcggcactcatttccgtccgccctgtcccctcccctttctggcgttcgtatttgctgctttgtctgttcggtctgatagcctcttttggcgcccttttgtttgccacttcccgcgacggcaccgattggcgttggacatttgggccgcaattaaattacgagcgcggggcgccgcctttttaagcggagcatttgggagcaaatgagcagaagagagccttcccttaattgcttaattaattcattgactgttcactctttccgcattttattctcaaacatttaaagagtgcctctcgccttttcacctcttttattttcaattttattttttatttattttatttttattcattttcttttttctgaagcaatatctctcggctcgcgcggccacccatagacataaaaaagcctgcaatcccatgacattcaaaacgatgccatcatttatccccccccccccccataaatcatccacttaatttgctgaatcattatcattatcacaatattctgttaaatttaatcaccgatcatttctaccactcatcagcacatattttatttaattgtataatattatctttttactcattacgcaacaaaaacaaaaacaataaaaaggtctcaaaaataaagagaagataataaataatctaattcctcaaaaaaacgatgtaaaacgaattatcaacaaaatttattttcactttgttttaattcgattgaataaaatgaaaaagacaaatcgcaaatttaagcataaattgaaacaaactcatttgtcgcagaaaaagattctcttgcataactcttagattaagaaaatcgcatggatttgctttaaaattaatttttattttatgaattgactaaaatatttttaataaccttaagaaaggatattttttgtgtagaattaatgtgaaaatattatttatcaaagaaatggaaaacgaaaaaaagtgattttatttaatatttatttttaaaagcaataaaataagtttttagcttccggcttagctcaattgaaaatcgttgttcagttttttctgtccccagaaagtcccgcgcagttttcctcaaagtccatcccctgaataaataatttaaagaaaattaattattttaattttttgcttcatttaatttgtgttgcttaaattagcttttgtcgtttcttttcttcgttgagattagtcacagcgaagtttcgctttcacaaacagaaaaatattaagaagaaaaacagtttttggtctggttttgtgaaattccgaaacaataaaagaaaaacgaaaaaagaaatccgattcttttccccgcggtcccttcgattcgctcacttttcttttcctttctttttaa

SEQ ID NO: 19892 - DNA, 909 bp, Heterodera glycines
aaacgcaatataaagcgtatatacgtattcggcacctctctttatgccgtaaaaatgcattttggctaatttaggagcaaaaaatttttcatgaaatgcaaaaccatggggtcccccctatggtttttattttcaaaattcatttttattttataactttttttaaactaatgataaagagatgagataaagcacattatatagagtttaaaatgctctacaaaaaagctcttggacgatttttcgctaaaatcaactcctgacgagttatgggcctgggactgaaatgtcccgctcaaaccaaaaattttttctatttccgggaaaaaatcgaaattttttcaaaaataccaccaatcgatagagcttgaaaaactatgttttggaagtggtcttcatttctctgggaaaattcgttaaaaaatcaaaaaattcaaaaacgaaaaattttcgagggggcctagttcgaaaaattttgaaaattttcaaaatttaaaaaccccatcttatagagctcatcgagctgtacaaatagtttgctggcgctgacccgctcagctcaaaccccagcgagttattccgggagtaaaaaaaaacggaaaaaaacgaccaatttttagagttttccagaacgcacgtttgttctgatcaaaaaatgtttgctggcaaaattgtttggcacatccatctccagggcctttaattagccgattttcaaattaggcttttaaaaaatatttatagcccaaaaaaggcaaaaaaattttgaaaaaagccgtttcagcgccgctggcgctgaactgtccgtcggatcgaaaagtctatagttttctgcgcggcttccataatcgatgcgtgtaccacaacatgcgtgggtccccacccttccccccacgcttcccccctgcc

SEQ ID NO: 19893 - DNA, 2087 bp, Heterodera glycines
agcgttcagacctgtgctacgcggcatttccggactcaattcgtcggcaccgtcaacttatggtcacagtcctttgcggaatatgaatcacacggggcttaacccagggtaaatgagaaaattgagctatccgggaaaaaagttgttctttgtattaaaaatttataatattacgatttaattaaacacaacttttaaaaatcctcacacagctgatttatgaggtttagttattttcaggaaatatggtatataatttgccaaaaaataaattttttttccataaagaaaccctaaatttttagcttttttgtccttattaggtaaaaaatgtttggaaatattgtttttaacctatttattcattcgtttattggttttccggtttttggcaccctatgtttgaattccattgttttttgttgtccaataaatgtgtattcgttcagttctgactcttccgattctatgcaccattttcgtattcggagagcatcttttaatgagcaaaacaagtaaaatgcatttttaaaaagggaaaaaacaataaaacatttgttgctttgacagcgtttccaaattggaagaaattgtgcctgcctcgctatggcctgacccacggtttttccacggcttttccttttttcgacgtcaacgcgacccgatgttgcccagaggctattttcagaaagtaattgttttttttatcaatcacaatattctgccatatccctctcccaagagcattgttctcgtcagtgttctaccattggttacactttttcaacgtgttctttacgaggtggcattggcatttttcacaagtggcgaaactgcaattgaaacaggtctcttctatctctctctctttttgtgatcagcccgtgtaacataaaaaaacaaaaaattagagcgggaacccgaaggcatttttctaatcttcggccctttaaaacctgtatccgtgactaccgataaaggccgcctcgaagaagtttttttgtgttggaaatttatccaaatttccaaaaaatgcaattcctactccgctccctaaataagacgggcgtctgtgattaatacatttttgtcaaaattaattcattaatttaaatatttctgtcacagtgtgtttcaaattgaccggcattggcctccgcctacaaaagttggatgtccactttcattgccgttgtttgatctccattttcattatacaattcctgacattaggaattccgacggtcatggatttttgtctaaggtccgaaatacgaaaagaataccgtagcaggggcttttcaaccagagaaaatttttttaaaagttttcatggtttttaaacagttattacttgctccgttatgggtaaagaatggctgttcgttcgatcattttactttatttaaaggtcgaacatttgcaattgactaccaatggtacaacttcaaagtgcgaaaaagtttttcttatcgataatgacgaaagatacaatagccaaccggacgaactcacggaagaagtgagccattggaatttttaacaaaaatctacaaaaaaaaacaaagaaattgagattgacgggttgtggccaaaaaaaaattactcgaacaattttttttttgttgaaaacttacaggctataggacttgtaaatcgcctttaatcatacaataaacttttatttaatttgagtgaaaaattgaaaaagttattgcgtttgactgacgccaatgtgacctgggcccgaaatttgctctcaccattttgtagtttgagtttgtcgatcactgcaataacaacaacaactccaatacgctcaacaatttgtgtgaacgtcggatgattgtgagctctgagattaaagcggatcatcactttaacgagtcagtgtccattttcccattgtctgatcgagagcatagtctagttgctgttgtaaattttgggcctttttggcaccggcatcaaaagtgatcagaaaaaatcgatcaactttaacaccttggtaggagccacaaactttttttttcaaatgaacagaaagaaatctcttttttggattttatgaatattaaaaaaattta

SEQ ID NO: 19894 - DNA, 2428 bp, Heterodera glycines
tttatacacatcaaaagtttgccccttatacctattcttctttaatttgtataaaagtaattcatggggcactgagtcaaatgctttttgaaaatcaatataaatacagtcaacattttttccatttataattgcctcgtaccaatcttccacaactgttattagttgacttgtcgtagacctatttctaacaaaaccaaattggtattccgaaattttattgttttttaggaggaagttgtaaatattttggctaagaattctttccataaccctgcaaagtgagcaggttataggatgttaaagtctatatctgatataaagcattgattaacaaaagtattgcccagatttcctatgacaaaaaacaaagttatagttttcaagtatccatgggctaaagaggattgggttttcctcctttgtccatgtttcagttaacagaaaaatgtctatgtttttatttaccaaatttaaagctatttcatcaattttgttgtaaagtgatctaatattaactaagcatgctttaacttcccctattttcgttttggggttattgggcttaacatgcttaagaccggaaaagtgcgaatttataaatgttttttgagtgtgatttggtaaaatagcaagtcaattggtgttatttttaaatgccgcaatgtctgacctcagcatcactttgtcagcgtaaaccacccactcgccgccatcttcctttctttttctgctgcactcttcctgcagcacacgacgggccgggccttgagttcctcttggctgagtgaagggcgaattttgatgttgctcatccccagtttttgattgatttgagcgcgcagtttgttccattgtgccaaggtttgtctctgatgttttgagcagccgaaaattactttcatcaaccgcgggcggttttgacctgtccttgcttggtccggggaacccattctgtaaacagtgatcgggctctcgatgccaagctcatcgagaacgcctgagatggccgttcggtccgcagcgactcgctcggatggcttttgtttctgcgattcgggtagacccattacgacaacgcttcgccgccgctcatgatcttgcacagcttcgtccgcaatttgccgctgtttgagagtgaaaagttcactctgttggctttggacctgttgtagaagcgtcaagcagatttggaacaattggcgtgaaatagaacagtcggtgttgttgccgtcatcttcgttttcgtccataagcctaccaatgttagctagcttttctcccaagatgttgtatgagttgtcaatggcgagtctttttgtgttgtctgtggggggagagaggtgggaggaagaacgcttttcggtctgaggcatcgattggaatttaaggcgaattgaaattatcagtcatcacatagtcatttcaagagagagagagagagaaatagagatggagagagaagagaataaaggatatgggagagagaaagaaagaaaaacaaatagagagaggagagaaagactgagagaggagagtgaatgagagagaaagaaagaaaggcagagagagagagaaaaaagagatatggagaaagaagagaaggaaggatagaagaggagatggagagggggatagtaagagagagagagagagagaaagaaaggcagagagagagagagaggggtagaaagaaagaaagagagaattagtgatgagggaaagaaagaaaaagagaaggattgaatagaagagaaacaaaaaaaatacagagagagaaagagaagaaaggatataaaagaaaatggagagggagtgagtaagagagtgagagaaagaaagaaagacaaagagggaaaggaagagaaagacagagagaggagagtgaattagagagaaaaagaaagaaaaaaaaagagtgggtgagagagagagagataaaatatagagagtgaggagagagaagagaagaaaggatagaagagaagatggagagggagtgagtgagttagagagagaaagaaagagtgggagaaaaaaagggagaaggagggagagagagtggaaagagagaaaataagaataggagagaataaaatggaaggcgcgatggaaaggagttatttttaagtacaatacttacaaataagtacattttaaatttgtaagttttgcaccctccaaataagtacaaagggtaaccctgcaataaacaatattcatggaacgggaggaaactacaacaaatcgatggatgttgctcaattgtacaattgaatgggagtaattagttgaaaaacaaaaagatgttaaaataaaaactaatttctgaattgagaaaaaatgtaggggaaacgtgaaaaaagaatacctattatttccttataatgaataaatgtgatgataaaacacattcaatttgcattaa

SEQ ID NO: 19895 - DNA, 2285 bp, Heterodera glycines
  unsure (1)..(2285): unsure at all n locations
cgaaggaacttatgtttccaaattcttcgaaaattaccaattcggtgccaatgaagcatcagaaaatgccgccagtcaatttcaaaaattttggtaaatttcaacagaaacaccaaaatatggaacggcaattcaacaacaaatacggcgctaagcccatcactttccaaaatggagagccagttttcatttggaatttgaaaggcaataaggcaaattggttgccggcgacgattatcgagagagggcaactctccgacttatcgagttgacgttccgacgctccgttgcgcagtccaccgccttgtcaaccaaattcgccgccgtttcccagtagaaatggagaaaccgcaacttggccaagaaaatggaaatgatttggctggggaccaaacgaatcggacccccattaaggagattgaaaaagccaaatctccaattggctgaagtcaaaatgcgctgtgaacatcagcacgtgccaagagggcacctcagcgattggacatggacacgtcgaagccgaagtacgacatcgtccggccatgacatctcgcgcaggagggacttttccaaagaagggaggtgttggataagggaccacactgattattgattatattttccctttcactccctctcttattgtctctctcccgccccttgaccagccccataaatatgtctccctttccctcactcggggcattctcccattcattccaccatttcattattttatttatttattccctgctgtcctccatatttatttgtttaatanattatttatttatttatttgacaacatttgttttggtcgaagaccaaacatttttattgttgtagtaaatacacaacacttacataaaaaatgaagccctgataatcaatccaaagcaataaattctcattttttcatttatcaaataatttcacaattcctgtcatcaaattaaattaattaacagaattattgtcaattgaaaatgcaatttcccctgttcttcattttaattatatttttataatcgatccaagcaataaattctcatttcttcatttaataaataattcataaagataaaatttcctttttttagaattgtaaattattactaaatttattgccaattgaaaatgaaattctgtattttattatttttatttttgattgccctaattattccaattgaatcagaaaagaaaaaacttcagcagaaatcatttgatgcaatatttggagaaaaatgggaagaaaaagaagataaaagggaaataattgaaaaatattataaaataaaagagaaaataaagcaaaagggaagaaaatattcaacaaaagaatgggataaaattaatttgaaaattgcattaatttttctaaaatctctttacattgtgaatttattttatttttattgaaaatatgtttattattttcgaatgagctccagtagaaagtaataaaattttatttaatcattaatttaccaattggcaattattttgtcattaagataaaattattattattatttctttgcaattaaacaggatttccttattttattaagtaaaataatgatttattcagttttttaatcagaaaaaaaatcatttaaatgcctcaaaaatgaattgccatttaattgaagaaaaataaaatcttgaaaatgaaattctgtattttattatttttatttttgattgccctaattatgccaattgaatcagctaatgaaaaattacaacagaaatcatttgacgaaatatttggagaaaaatggcaagaaaaagaagaagaaagacgaaatgaactcaaaaaacgagaaataattggaaaattttataaaataaaagagaaaataaagcaaaaaggaagaaaatattcagcaaaagaatggaataaaattggagaaaaaatagcgaaaaaaatggggacaaatcgaaagaaaatttataaatggattaaagaatttggtcttcaaaaacgcaaatcttacaaatcaaaaactgatgaagaaaaaattgaaattgtactaaaattcattgaaatgacaaaagaatataagcaaaaaagtaaatattcacaaaaggaatggaaccaaaattatgccgaaatttgtaagaaaattggagttagcaaaactacaataataaaatggaagaaacaatttggaattagcaagaaaagaataacggaggaagcaaaaatggaaaaaatgaaaatttattgngaaattaaaaaagaanatccgannatgagtgacacggaaattgcaaaa

SEQ ID NO: 19896 - DNA, 602 bp, Heterodera glycines
atcattaattaagtcaaattaaatttacaaaaaataatatctaacattgtgccggtcctccatatccatatttcaaaaattggtcataattaattttataagtttattagttgttttttttgaaatttcgttttggcacttacttccacaatctgataaattttctcgtatcacatcaaaaaatgtcgtaacttttgtgtggatttggaattggttgaaatagatgtcaaattcctaattaacgacccgaatattcccgtcaacaagttttcatacttatggcaaaatttttcgggggcgccatactgtgaagaacaaattattttaacaaatttgtggcagatggaatgggacaatattgaaaaggatgtcaaaaaataatactccaaacattaattacttcattaattatttataaaatcttttcgtcgctaattgaaaaaaattgcttattaattgaaaggcgttggttgatcaatgaactatgatggatgaattacgtcattttactttcgtaaaagctaccctcaaaataattaatgagtctgtctggtggtgccgatggagaaaattaggaaaatttagttactatttattaaaga

SEQ ID NO: 19897 - DNA, 1512 bp, Heterodera glycines
gattagttgttgttttttctgccaaacaagcgccatggggaacgaatcggctgaacaaatacggagcgatttataaaaaaaaaaaattaaattttattaaataattcgaaatatccggcaatttttgtcccagcggtcaagcgattataaataaacccgatttaaaaaacaaagacatgaatttttcattttcaaaaattcatacaaaatttaatatagttttttaaaggaaggaagtatttttcaaatttaaagaaaattttttttattcatatgacactcttttcttttccttcttattatgaatttgtttttaaaaattatttccataatttcatttttaaaaattaaatttgggttggagtgaagttttttgcgggagttccgtgcgtgttttttctgcaaatttttgatgtttgtcccagtggcacttcagcaagcaacggaaaagagagaagcggacgaaacggcagcggagagcgaattcttttttttggcattttaccgcaatggcatttcgtccatttgccctctaattgggttcattaacactctttaatcgttcctcttttacactttcaattttattctctttttgttcatttcatttagtacattttctattaatgaatattatttttgttcgtttatttttataaaattaatttattcattcgctttttttatctctttttccatcagtggaatttgcacagtttttacaatttgtcatcgctaacacttttccgcttctatcaaaaaagcatccggcaaaaatgggctctgattttgctaatgagtcatttttcgtccattataatgaataaaataatggatgcaaaaaaataattatgttaattcaatactaaattatcgaaaataatgataaataaataaataatattggaattgaaaaatgaagaatttaaaaaatatacagtaatcacgataaatgcagatagtttggattacggtatgaattttccgtaatttaatccatcactccaatttaagttgatttccattaatcattggaaaagttaattacggacggagtgagaaattgattttgcaggtcgaagccatgactattaaagcatgtaaatgaaggaaattaattgttaattcgtgacatttgtaacacagttttcagagagtctctgcctttttatgccaaacatttgacagtaaaatattctgataaaatttttctcagttcaataaaaattttcgcgaaactcgaaccatgtgaacgaaattaaacttgagtagaaaaaacaaaactgatcgagaagtgattaccacatcatttttttttactcaagattgcgtatgaactttgacttaatcaaaccaaaattgaacttagtttgacttgataatttcactaagtactgtctttttatacttaagaaaattaaattcataatatttcgctttcatcccaaatgtgaggctttatcctcattttgtggtttttgtgaagccaatggggctaaattctcaaaagaa

SEQ ID NO: 19898 - DNA, 1305 bp, Heterodera glycines
  unsure (1)..(1305): unsure at all n locations
tttaattactattttaaaaatataantcatttttaaaataccgtgggccatggaactgcgttatttcggcaacctatcgaattgtgtcagaaaagaccgaagcggagaattccattgggacattgtgtgactgggttatcaacagatcaaacatcagccggggatttggattttcattacttttgctgtgagtaataatttaacatatttacttaattgatataattacggttaatcaaggaactgatggacccgagcaatggattgtatgacaaaaaagagaacaaagtgacattggccattgatgtcataactgttgatgagccaaaaatggagaaattcatttccgatcccaacaaatccaacggcacactttcaatggaaattgaaaaagtgtcggaatttgcgcgagaaatctttgagagtgaacgtaaaagcgaaactgtgcacatcaaaggattgccatgggtgaaaattactaataattaatatatattaacaacaattaattaattgatattgagcagaaaattggagttgcaaatgttcttcaacttttcgaattgtttcgcaaaagagcggcgtaaaggatttaaggagagaattaaatgacgatgtttttgacaataaaaacagaggctggggatatgccaatttcatttcatttgctgtgagtgacaattcaaataaatagtgcccaattaaattttaacataattaaggaactgatggacccgagcaatggattgtatgaccaaagcgaggacaaagtgacattggccattgatctcagtgtgaaagaagcgaatattgaggagaattcataaatacccaatatgatctggcaaaaatctcatcattgaattatcatcctatgggcctgctgtgtttagcttctttcttattgtttatcttttgggttttacaatattgatctatggattattaaagcggctttttttaagcattgaaatgaaattggcatatcccctgctgtgctttctattcaaataaatttattaattaaaggttgttaatttttattaataaatatttaatttgatttaatttccacatcattgtaagcggaacccaaaaggaaaatgcccaaaaatttcgcattgtcagtgcttccatttttcggatttatttgtgccacaatttttccacggcaatctttactcaaaatcgtgcaaattccgacgatttttcaatgtccataaaaagtgttccattggatttgcattgaaccaaaattaatttgtccttttttggtccatcaacagttgtgatatcaatggtcaa

SEQ ID NO: 19899 - DNA, 3305 bp, Heterodera glycines
cgctcatccgctggtgcagcgcgaacactcgtgccaacccttggggctcgcgttcgccttgcgccgcgtgaatgaacgcaagcagcacgcgctgagcgccgaccaccgagcggagtagggcggcatgggatgccaccaaatggtcaaggcaggagaacagcaaaagacggtcacgctgaaaatgaacggataagggtggcaattgaactgctcgagattctcggtttcggctctcgagtagccaaggtgaaattgaattattggtgtgtggaaacggatgatatcacagtctcagtttactcagaaaaagtcaaatctcggttccgacattggatcccggcggattcgggattcccgattacatccacctccaatttcaagactggccaatcagttgctgttccctcttcacctgtccataactttgcactgagccgccgccgtcgaacagagcaacgattgtctgctccaagcactcattcggcagcacatgttcagtgccgtcgtacagtttaatctgggcaaaaaaaaggaatattcaaagcaaaaaacacatcggaagaagcactgaagagagaagtagcggcaatgatttgggcggggggagggatctcatttttaatggccgactcgggaaaaactcgtacagagatcgagctttttaatatccccggagaggattacggatgaaaattcattttcgaaatcatccggactagaaacatgggaaaactctgtacaggatgctgtactcgaatgtccgacctctacagtagtgataatctcgtccgaattttcggggccctcggcctgaatctcgatttgtaaatttaaatggcccaaggattcgaaaagtgatcattcaattcaggggtcacaactgggctatcaagtaactaaaggtggaatattcttgcccatccgcgtgtaccaattggtgcagcgtggtgatcagaatgttggacagatggccacaatcttcgacctgaaaaacggagagaacttgtcgtcgtgtccatctcaatctccagcgttttgcctcactttggacagcaaaaagggaagcaactgatcaatttggggtcgagtgatcggcacattttcccacgccacaattttgacgtgcccttcggccttttgcttccctccagcggcggcggaaggtagcatttgcaaaacgacggcacacagttcgttcagtgcggcactgcgctcctccgcgtcgcgcgaggtcaatcgagcgctgacaaaatgatttgttccgttattagttaggtaattaatattattcgtttacacaaaattgttttgaaatttcgaaattagcattttaaaacagtccaaaaaaccggaatttggcttgaaaataaaaaacagttggcatttttcacggcacaccgttcgctctccacgtggccgagcagtgtttgctgtccgtcgctcagtgcggccacaattcgctgcacattctccgcttggcactcggtgagcagtgatttggccaaatccatcggcagaatttaatttgcaaaaccgaaaaattgttttatttttaaaaaattattaaatatttaaacagtaagaaataagaatatttgaatttgttagttaccattttatatttaaggaaagaaaaatttaggcacacaaaaaaaattcgcatttattcgcccataaaataaataaatatattttcaattctcaatttatgcgtacaaaaacagaagagaatattatattagttgagtgatattttgaaaaggtaggacaattaaatatcttcataaattaaatttatatatttttttaaaataatgcgactatttgaattttgtgaatgcacagtaatccatcggatgaacaaaataccataatcctatctgaaaatacaacaaaaaaaacagaaacaacaacagctttttgtataggaaaaagaaagggaaaaattgaaagtttgagcggcgggaaggaaaattctgtgaaaatgtgacacaaaaaagtgcacgattatacaaaaagaaaaaaggattttctcattttttaaaaaaattataggaattaaatgcgaaaatttaaaaatttaaataattagcaaagcgtagaaagaacagaaaaagcattgcgaggtaaaggcgaaaagaagcaaaaaaaagtatataggaaaagcgtcagacagtgattttgtgctcgaaaaatcggacaaagagtggtgatcggacttttcagggaatcactgatcaatctcgagtggtggtccgtcgagaaaagtctcgaccaaacggaatgccggccgatggaaatgccctatttctgcactccattctacagtaatattgcaaatacaaaatacatactgtcaagacaaaagttgaaatttaagtataaaggcaggcaaaacaaaaaaagggatttcacattttggttgtttcttaaaattgaaataaatgccacggggaaaaagcagagaattattgttacagaaattctgtgtgtattttttataaataaggaaaatagcgcaccaaaagaggagagattttgacgaaaaagaaaatgcgtaagcaaacaacaaatagaaaatgccaattgctgaagaaaaacaatgccgagaatgaattgcgatccccgcttttggaacaaagagaatttgtagtaaatttggggaccaaaaagccaacaaaatacgaatttgcgcaaatgaggacaactttttgagtataaataagacaaatgcttcaaaaagggaaaaaatcgaaaaaaaacaaataaattcaataaaaaaaaatattggaaatggcagcccaaagagtgaatgaatgatgtgacagaagaagatagttcggcacaaattcctcgggggatgggcttaaaaaaaggtttggtgcttctcgaatttttattttttaaaggaaaagccatccaaaattagtaaaattatcatcacccaattagtattgatttgccaggagaatatagacatccataaatccgatttgttgtcggtgatacgaaatttattcctccaattggccccaaccccttggacatatgtgaagaatgagttgaacaacaaaaaacaaaatgattgatgatgaaaagatagaggagagagagaagggaaacaaaagagagcgacagagacggaaatgctaaaaaaatataataaaagctttggcgatacgtataaattaattgttttggtgattggtggcggcgatgggcgtcgttttcgcctgccgcgctaaacatccgacagactccacgcccaaaccatttgcaacgatttgagacgctgaaaatcggaa

SEQ ID NO: 19900 - DNA, 2511 bp, Heterodera glycines
aattccacaagtatcttttcgggagacacttcgttctccttttcggaccacaagccgttgttgtccatttttcgcaacaacaagggaataaaggcttgcacagcgaatcgattgcagagatgggcaatcactttgctcggctatgacttcgaactcgaataccaaaatactgtgattttggtcaagcggaagttttgtcgcgcctaatcgcgaagacaccagtgccggacaacaaagtgatcattgcaaacattcgtgaaagcaatgaaacgggagtgttgaattttgttgcgaaaactctcccactggatcacagtgatttggctaacgccgcgaaaagtgatcaggtgatcaaaaatgtgaagaaatttgtctgctcacattggccaacaaagaacaaaatgaccgcagacattgttccgttccatcgacgacgagacgctttgaccatcgaggatgaatgtctgctttatgcggacagagttttgattccggcatcgcttcaaaaagatgtcttacaacttctgcaccgaggccatcccggaatgaagtgaatgaaaggtctccccaggcagtacgtttactggcctgggatggacgaacaaattgaaaattttgtcaaaatgtgcaacgaatgcacaatggaggcaaaaatgccggtgaagactgagcttcagtcgtggccgaaagctgacggaccgtggaaacgcgtacatttggattacgccggaccgttttatgggaaaaatgtttctaataattgttgacgcgtactcgaagtggcccgaggtcttcaaaatgcgttcatcgaattccgcggctacaatcgacaaattgcggtcactctgtgccagttatggccttcccgaaattttggtcacggacaacggcacacaattcgcttcaaaagaattgaaggaatttgtgaccgaaaatggcatcaaccatctgttctccgctccgtacaatcctatgtcgaacggacaagctgagcgttttgtcgatacgttcaagaggacatgccggaagatcaagggagaaggagcctcggaaatgttgaccacatttatggcaacataccggaccacgccttgtgaggctttgccggagtgcaaaagtccggacgaattgttcctgggaaggaaaccgcgcacgactttggacttgttgaggccaaaggcaaaggcaccgataattcgagacgaggccatagagaagcaatttaataggcgccatggagccaaaccgagatcttttgccgtgggcgataaggttctcgctcggcattgtctttcgcagccttggcgccccggaaaagtcaccaaatgtaaaggtgtcatttacgacgtcgaattttttgacggaaaattcggacggttccatgccaatcagttgcttgtgagaagcattgacgaaaacggcacaaacgcattgaacgtgttcaatgatgcgtttgatttgctattggcaccaccgctggttcagcatggtggacaagcgcaattgcctgtagtggcacccgctgctgtcatcgcaccagccgtggccgaagaacccgtcgtggaggaagctcatcgagcgcccgaagtgcctgctcaacgacgatcacagcgaaatcggcgaccgcctgatcgctacactccatcctgaacggacggatcagacggacgaatcgaacggacgtgtaagacggacggatcattggaagaaccgaggaaaagatttttttaagggggaagatgttgggaccggtactctattgtccgcccatattattttcattgtgtcttctaaacttgaataaaccctttatttattcacttcgccggtttggggtttgacggcacaacacgtccaaaaatctttttttttccattttgatggttttttgactaacgtcccgtcaccgtgcgattctccattcaaaatctattggccgttgtccatcgctctttcattttgaacgtcttttgtgaccacgagtcgctgcagtgtgaattttggtgaaaaataaattttcgatttttgttcgaatttgggtccggggttcgaaaagggtcgaaacggatgccggattcgtgaacagtggccccaaaaagcccaggagagatgttttaagcgatttaaaatttttttttattttgttaaggaatttcctaaaaatgtcgaaatagtaaatattcactatcgagaccgaaaatttcccgagactcgagaccaattttttatggctctaattttttgactcattttacgaacaaaatctgtgcacaaaaataaaaaaggcttcttcgtgatcgtttcgtccatctttcaccattcaaaatttcaatttttatccatattggaagcaaaaaaatgacacatttttgccattttggggtcaattctcagaagttgtttaacagaaatgcaatagaaataatttattttgacgcgatgacatttttggtgacatgttcaacaagggaagcaaaaattttccactaaataaatcagctgaaaaataat

SEQ ID NO: 19901 - DNA, 2094 bp, Heterodera glycines
gattaaaaggctcttttgaaatttgtcattcagcttttcctttcttttaaaatatacaaattttcaaagacaaaatataaatcaaaaccgcataaagctggtgcactccaaaacttcgccggccgaaatagaaaatggaaccaatcgcagataaatactgcagaaaaatcggccctagacgactaaaacaattaaatttagggaagtttggaatgggtaaattagcggcgacataacaaaaagttcgcatctctttatcatggttcacagatccgactgttcgtgcatcggctaattaacatattttacatcaattaaatacaattatgattatatatttccccctttaattgataccagacaaaatattaacgtaaaataagaaattaaaacctgcaaaattttggttggtagcaattttttgtcggttttcaatgatgatatcataataaaataatttcgtttcttctattagaacggcctccgtaattaaatagcctttggatcccttaggtccaaaaaagtcaatttttaggaatatttctcatgaataaaaatatttaatagcatgttagcactttttgattttttttttacatttcaaagatttgaaaaaacctagaatttatccctaaaattttgaaaaatttatatacttattttttcaatttttatgtgtgtcataattagcgattgtttttttttatgtaaatacatgttttttttcctggattctccatagtctaattagtaggaaaaaacactttttttttgtgtttgcgaacaaaagttgggacttttatttacatatttttacatatttgcgcaatttttcgtacatattttcattttttttttgcatattttgaggatttttgagaatttatagaaattttttgtgaaaaattataaattttttttttttgaaaatgtatcccaaaaaattgaatttttaaatcagatatcaaaaattaattgctaaaatactaaaagttggtttctaagcctatttagttgcctatttcaccctttatgaagaattttttccccaaaaaataaccattaaaaaaattttatttacatatttggtacatattttagcattttttatacatattttatttacatctttgcgatttttcttacataaaaaacaaacactactcatattttatctaagtgcttcaacctaccactaccccaacaaccctgaaccccatggtaaaaacccaattcgttttttgcggattcgtttttataacgattcgtttttgacccaattcgttcttattatcccgattcgtttttattatcccgattcgtttttttggttaaaaacttcattttcaatgaaaatttttatgtattacacgctactgctcaataaacaagactcagcgctaataaattgcagtctaaatgattctgacccaattttcatgtattttaataacaatgtaaaatttaagcatcttcaaatataaaagttaaataaaaattcatatgaattaattcatgatatccacttctccatcctctgaattaacatcaggcgagttttcatcttgcacttcattcaaacccatttcttcaaagtattgatcaacaagcagcccattttcatccaaactttgttcaagcaaaagccttgcatcttcttcaattatcatttcttcagcttcattacggtttgacggcggattgaagccaaccaaatgtccaattcttccataataattagacatggcttcaacaaattcatcattgcagtaatccgtgttcaaaaaagccaaaatatccgcctcgctgaggcaattcctctgtccaattcaagagtaattcaagcgggcgagctggcaattgtcttccttcatcaacggccactgcggtttcttcttcagcatgacttagttcctatcatttacgatacaaaagttagagacaaacaaactcaagtccatttggttcttttgagctgtacaattgcataaatcccattgattgaattcggcgatttatcgcttgcttcacatgaaacgcgcacatttttggtctgacagttggaaaaacatcgcaaaatgcattcactgacgc

SEQ ID NO: 19902 - DNA, 1123 bp, Heterodera glycines
agttggatttgcagtgacgtttggatggacattttccctctttttgaccatgcccaacttggcctcaaattggcacttatttcgtcgcgtttcgacggtttagtggacacgcattttgatggcaaatcagaattgaaatttggaggccaatcacaattggcaagggccgtcgtgtcacatcggcagcatttatgtgcggttacaagtctatgccgtttctgtcgcccgacagtccgctgaaactatttgttaagggcaaatctgagggatttccattgcccgaccgtccgctgtccaacaaaattcgcattaaatgccttcaaattaagtaaatcatcaatgaacagttcattacttacaattagctgataaaagcgggtgcaccccaaaacgttgccgaaaaagcttttggaccataactttgttcaatgtcaatcaatttaagcattgttggtgttgttcgatagctctatgtttttattattaatttgaaatttaaaaaatttatgttagaactcaaaaacctagcttttcgaacttttttttgccctgatttttttgtacatggataaaattttttgacaattatcagcttaatagagttttttaaatgctttcgaacaataccaagcatgtttaatttggttgagaaagaaaaatctggtccaaacgtccggcgacgtttcggctggcgccgttttgtcctgctgctcgtgacaaaagcagcccccccccccccgcttttcaggcacattgatcattccgtgatcgcttttctccatgccaacaagcaaatttgggacaaaagggccaccaatttgcgcattttcactttttactctaacaccaacatccaaccctttatggatgtgttggtccgagaaattttgcccatttttgcgccaaccattcaacgtttgcaatttctcgacgttgatctcttgatcaaatgccacagtgcttggcccacaattttgccggatctcactcggctgaactcaatcgatgctcatctgattttgcccagtttgggcgatgaccatttggatgcgccaactgcaacttcttcggctggccaagcgttgttcaaatggttgcacactccgagaaaagatggccaacc

SEQ ID NO: 19903 - DNA, 1255 bp, Heterodera glycines
  unsure (1)..(1255): unsure at all n locations
gcgatgcncaattagtgaaaaggcggcggatcaatgggaagacgaaaatttggacgatttgaatgccgtgagcattgatttgaatgatcacaatttcattgggtgagcaacgacggcatttgctgctactttgtcaaatccaatacaaattgtggcactcattttaggccattgtctccaccaccagcagcagaagaagaagaagcgggtcaaagcaactgaaaggtcggcgggagacaacagccaacctgaacagcagggcccagcagatggatgcactacgtttccagcagggttgccacgggtccaaaaaatatcaggtcggacgaaaaatcatcgggtcggatttcgggactagaaaaatgtcgggattcgggcggcaacccttgtttcccccctaacttagaaatttctaagaaaaaaatcttagaaagttttttataagacaattctaagaaaaattttcaaaaatttttatgatgaattactaaaatttttcaaaaaaattgatgaaaatctcatttgaaaaatctccgaaaacaatttttttttatgttattaaaatttattaaaaacatcaagccgcttaaactgggaaatgccagtccatattttgacattggagccctctgtctgggtcacggatgcgcaattccgatttcagggtttcaggcccaacaagtttcggaagtcggaattcctttacatccctggtccgggttcagtttcctatttcctgtttctgatttttcaattttccaaaattcccttaggtcgtctgatgaattaagggccgcccattgatcagcggaaaagaagtgattatttgagaaaagtccgatcatttgaatcactattgatcgatgtgaattgatttgtgttcttctttctcgttgaaatgattacttttatcgatttaaaaaccatgaaaaattattcaaaattcattgaaaatatttttaataaattaacaaattttcataatttcagttgcgtgggcaacgtcattttgatggacattttcccttattttgaccatgcccaactcggtctcaaattggcactggtttcgccccgttttgatggtttagtggacacgcattttgatcgcagggaattcacaatttggaggacaatcagaattcacaaggacgttggaccaacacctaaattacttgtcggtgttgaacgtgctgaatttctgttgcctgaccgtccgctgcccaacaaaattcgctttaattgccttcggatt

SEQ ID NO: 19904 - DNA, 2294 bp, Heterodera glycines
ctgtcgcgtccaatttctccgagttggacgcggtcatccatttcttggaggagttgcggccagacacggcaagtgaaccgaacagtgatttaatggcatttacccgtgacgagagtgatcagactgtgttacggtgctgatcagcccttaaataatcctaaaaaaaccggtagaaacccgagagaaattccgaaatctcgagacttgagcagcacttttttgttcaaaaggcaatttccctattggcccttctcattccgattattttgctggccacaactttgaacccgctttaccagcacatccatccctacctcaaatagtcagtttcaacagtttaatattaaattcgaaagataaaccaaaatttaaaatcggaatttcggcttctttttgttgtcggcttatttcatcccgccaattaacgctaattgttttcaaatggatttaaatttaaatgttcattcagtccgctgctgcacaccggcaactcgtcgcccagtcacgacgcgttcgccaccgacatttacgcgatggtcggctcgcagcagcacaacagtaccatttgctgccaacgcagcagctcaaccacaacaggaacaagcagtacacgacacaacaacaacagcagcaacagttcacctcgccgtacgccacctccaactacggttaccacgagctgacccatccaccggcctacagtatgagcatggtcggcggcggaggcacggggcaacgacgatagacaatggagatgaaccaacaaagaatggaagccagaatgaacaaccatgatcacacagttattttcatgtagatatgaggagttggagcctatctcttgccggaaaattgcaaattcattgtctggagcaaacaattttccagagtgaggaactttgaaaaagcacgggttaggtccgggtttccgagatgaaccggaacagaattccggattaaagattctgttttaacatgatctcctctagtccaaagcgtcttttaaaacatacataactctgagccaggaccctaaaacactaaatctttcggttattttctgacagatattttccgattggagccgaaaacccaataaattgaatttttgatctaaccgtcccaaagaaatttcaacacaatgctttaccgttctccgactttttgtgtagggcagtttctggagatttaaaaaatgtccgtcctattccttttaaacgaaatgccatttaaatttctttatgtttttatcatgggttggggtcatttccctaccgccacttccctaccagccatttccctaccggccacttccctaccagccatttccctaccgccatttccctactaaggcatttgggccatttccctaccaaaaatttttttgaaattttttggcaaaatttcaaaaatagaaagggtattttcaacattttgatgtttctcgtgaattataagacaataagttttttgtttaagttatagattagaaaatgcaggcaattctaacacaaaagaaccgtacaaagcttcaacacaacgggcattcatacatttttcacaagctgagtgctgacggtgaacttcgcttttggtcgtgtgaacatcatcacgcaaaagacatccgttgcaaagggcgccttcacactgacctcaacaacaacgctttacgtgaagttggcagccaccaatgtgaaccaagcacgatgtgtcactcgctcgcgtttctcccaattggagatttgacccctggaatcattgctctggacatggctcttcccgtaatcccgtccttgactggtaaattgacaatctcacaaattgtttactatttactgttctttatttattaggttcatcatgaactacacgggtcgtcttaagcatgatggaagccgaacacgcccgcgatttgacccaaattggagcgtttagactcgaacaatgcaaggcgatgaccggacgaataaccattcagaagccgcgaacagacgcctgcagtgctcatttgcctgttcacatccatcgatttggcgtttcagcaaagaaatatcgcgaagcagaccgccgaattctcacgatggttcaaaattatttgccacttaacaacggagacaccaacattttcccaattcatcagcctttcaatcacattttatcattacctttttgatcggaatttctcgaaattatgaaatgagaccgtgatttgaaacgagataaaaatgtttgttaattttcttgcttgttttaattaactgtttataatattcatactttggtagggaaatggc

SEQ ID NO: 19905 - DNA, 1850 bp, Heterodera glycines
cttccttctcgttggagaaaggttgttagggtccagggctttattttgttgagtgatattgtatttacagttgttatgattgttatttttgaaaatgaagtgccgatatcagatataacagtttttgcaatatcgattttgacaaaattccggtaataaatttatagctcctcttaattaatcttacgcacttttctgtttttggttcggctttaaatttgggaaaatcagcaaagggcccatttaattgcaaaaaaaaaaaacattcgtttccattctacatataaattaaggaaaaggcatttgaataaatcttatagttagctcaaattgttgcatttatgcctccgaaataattggcgtcttttcttgcaaatgcccttttttgttgttgttttttttttaatttcaaatccgggccccaaaacagaagagtaactaatcttacaaaaatgagtttagttttcctaaaaattcatgtgaattttccccccacccctccaaatttacgtttttacttccataatttatacaaaacatacaaactgatgcatccatccattaattaataataattaattaattaccctttttccgcttttcccattgcttttgaatgaatcggtccgtctctttttcgtatcattcattctttgcacaaataatattttctttctgctgaaccaattatttacatccaccagcatcatgtgttaaatactgcgtattttcacaaaagatttaacggctaacaaaattaacagtgaatgctttaaatgaaaagctgtccacactttcaattcaaataaaatttagaaattaagggccaacggcaaaaataggaaaatttttaatgaaaggtgttgtattctgctggatggcccaataaacagattcgccttttttcaaaatgcatctctctctctccccctccccccccccctctctctctcttctctctcttctctctccctctcctcctctctctttcgctttcccctctctctttccccctccccctctctctctccccctctttccttcctcctaccttctctttctgcccacccctccctttatcgtcgggtccatcctttcccccaacttacgatatatttgataggaatttttgtcgcgaaaatggggccaattcgtactttgctgggggcgggaattgctgacagccgctgacaattcaaaaagaccggcaacacaaaaacatttgcccaatgggaaaaaaaggaagcaatgagagagagaaacagagagagagaaagaggagagagagagaggagagagagagagaggagttagagaggagacagagagagagagaggagagagagaagagagagagagagagaggagagagagagagaggagacaaagagaggagagagagagaggagagagagagaggggagagagagagagaggagagagagaggagacagagagagataaagagagttagagagagagagaggagagcgagagaagagagagagaggagagagagaggagaggcaaggcataagagatagagagagagagagagaggagagagagaggagaggcaaggcataagagataaagagagtgagagagagagagaggagagcgagagaagagagagagaggagagagagaggagaggcaaggcataagagataaagagagtgagagagagagagaggagagcgagagaagagagagagaggagagagagaggagaggcaaggcataagagataaagagagtgagagagagagagaggagagcgagagaagagagagagaggagagagagaggagaggcaaggcataagagataaagagagtgagagagag

SEQ ID NO: 19906 - DNA, 1905 bp, Heterodera glycines
agatacgcccttgtcacgaataacaaagatagttgattaaattaaattgaactttaaaagcctttgtttaatttattattaaataaacaattaataataaattaattaatgtgcttaatggagaaagcttataagacacatgtttgaatttattttcattttgaatatgagggatagctcgattgattcgtttgcatttttcttcttaggctcatgtgcttagtgtatattaaatcgacagatgtccaaaaaaaatagcatacacaccgaaagttttaacgaatgtacaagccaatttaaatggtaaaagatgaagaaggcagataatggcatagagaaatgtgtacaagccaatgagggctagaaagtgaaaaaaagaaagtttacaaaataaggagtgaaggaacagattatagtgtacaagcaaaagagtttggaaaggagataaagagaagaagaaataaaatgatggatagtgcattattatgtagatagacggcttaagagaaaatggaggtcaaacaaattgatcatgttaagtcatttttgaaaatttattaaatcacaatcaaaagttttaatgaatgtgcaagccaatttaaatggtaaaaggatgaataagatggagaatggcataaagaaatagtgtacaagccaatgagggcagaaagaggaaaaagaaagttgacaaatcaaggagtaaaggcaaagattaagtgtacaagttgaagactttggtaagcagctataaagagaggaagaaataaagtaatggatgatagccctatattgtgtatatagacggattaagagaaattgaggtcaaacaattgaccatctgaagtcatttttgcaaattgtaaattccatttttgtttaatttaaattggtaattttaattaatttttagtaaaacatggagcttggaagccaaaaatataaattaaataaaaattcatcatcattatcaccatcaccgttgtcgaaaaagcggtggcttcctgttgaacttcaatttgaaattgcgcattggctgccgattaccgaaagcattgaacgcccattaatacaagcagcaaaatttccacttgttatagccaaatgtgttctgagtcggattgaaaagcgcaatattttattattccctgaagtttatttaaaaaggattcaaacacaaatttttaaaattcagcaagacactttttaccaaatcgagggcattgaaacatccagaaaaattggcaaaaaaagagaattatttataaaatgggtcggctatccttattcacaaaatagttgggaagacgaagaggaaattaaaaaggtttaatgaatgcgaaataagaatagaaaattagcaatttaatttagacagctccatttttgcactcaaaatggtgcaaaaaacactatgaaacaaattggttctcgggtatgcgacgcccgagaacctacctacaccttccaaaagaagcatagatatgacatgtgccatgttggaaagcgatgaggatggcgcagatgaggactttttgttaatgacccgtaaaaaaaagccaaaggtttagaattagttggggaggtcaattttatgtaaatacatttttcctatgttgtccttctccgagtattaagaaaacaaatataaaatcgggattcttcgatacaaaaaattcgaattttttataatgattcgtatatattttatttttaaatatataattagcttttttgaaaattttaaagacattttattacatatttcgggattttttttagatttatatataatttttgaaaacgggtagaaaaaaatatacatttacaggcgaaaaggaaagttaaaattgatgacgaaaattcaagtgtaaaaaatgcacataaaaagagtctgattgacgatga

SEQ ID NO: 19907 - DNA, 908 bp, Heterodera glycines
ttcgatgccaagttcgtttacgaatacaccaatgtccaattggcgtttctccgtttcggatgggttttggagaaatgcgtaaattttctcgtttaaaaacggatcagatgtaaagtctaaaacaaaatcatttttcaacttctaatcagtgaaatgatcaatatcaattagtgttggttgattggtctctcccaattactcaccgattaattttgtgttttccatcgctttttgccattctttttcgaataatatttcgcttttctcttcctttccctcctcttctctcgtttgcttattttcaaatgttctattttttcttcctttttgcgcattttttggcgttatgataaaatcctccgctaaattcgaactctttccttcactctgactctcttcgctcatttctctgtcttcactttttcgattcttctcgtctttgtcgtcgtctctttgcttttcgttgtcttttttgggctctctatctttgtttctctgcaactgtcgttgtctcaactttctatctcttttctctctctgtatctcttccattcttttcttcagttcttcttttcttttctcctcttctatcacttgttccattgtctcatccgcatgttttctctctcttttctttctctcccttttctcttctttctctgttaatttttctttctctctcattactttaacaaattttctgcactcttccccgtttaagccaaacaacaaattagctgtagcaatgttttcagcaccaataaattcttttaaacgatcttccgtatcgttaacatccgttaacactaaaacattttacttattttattaccctgttttggtaaattaagccaattagggaaaggtgccctcgccggaggggcggggcggggggggggggggggggg

SEQ ID NO: 19908 - DNA, 773 bp, Heterodera glycines
ttcgctgtccatccagcggtccaacacggagatgaagcaggacaattttgcaaccactttgtctgtttcatcagtgctgattaatgcaataaaataattggctttaagcgatgaatcataaaaaactaaaaataacaaaaaatattaaaattattttatttgattttattatataataattcatttaatcttttttcattaatttatgctttattctgtgctccaaatgattaccttctttgtttctcattttttctccatgctcaacactaatgagtgctaattgcttttccccaattaatttcttcagtcgggtccgcgccccacgcttttccgcgatgaattctttgacttcgtacaaatcgattttcattaaactgtccaaatgtttatggtgaatagccatgagcataaagtgttgttcctattaacaatacagataaattatttagccctaaaaatgtctcgaatctctaaaattttctgattttttagatagggtaaactaagtacttgaaaaacaatgggcggaccggacttgaaccggcgtctcttctggctttccggtccagtgttctaccggctcaactcccgccctctaattacccatataaatattaattaataagccatttattcattcattcgcacattgaatgcccgcatttgctcattaacatcggcacatttttcttctccgtcccaccgctggattttatactatatcattttgatcacttcttcattttttatttccctaataaaatttataa

SEQ ID NO: 19909 - DNA, 2497 bp, Heterodera glycines
  unsure (1)..(2497): unsure at all n locations
atttcgacagtggctgatttcgacagtggccgatttcgacagtggctgatttcgacagtgacagatttcgacagaattaaattattattttattattattcacataaaaaaggaaatgttattttttaaaatttactgtttactgtactaatgaaattaaatttgaatttttattttaattgtgcattcgaatattattgtatctggtttagttaactttgccatttggaacggtttcgagaatacgacaaaattagataacaaagggacaattaagctaatcttattaatgtttaaaaaatgccgtcagccggtgcaatctgataatctgcaacacgaattctccacatttcatcttcctcgatcattttccgagcaaatgaactcggccgttggttccccctaaggtgcacattccaaattgaatgccaaccctgaataaaggacatgaaaaaatggccacatcccaccacacttcaagcgaattgtttgttcttccaagcccttctgctactctgtccactacattcccgaatccaattatcagctgctccgcctgcatcgcgaaccaaaacttcttcgttttgtatgattcggcgaggtccaatccacgtgttaatgaaatagatgatcagctcttgaagctcaggagtcggctcaagaattgacatgacaatgcaaaaatagttgtaaacaaagtccgtgggaacaaaagccagcgcttgtagagaccgcaaagatgttctgacaagttcatcgtcccgatatcgcgtgagcaaatttggcaatcgctgaattctccgccaaattgcttgtccaaagtgaaacaagcatccggttcttatggaatttggaaagacgttcccggccgcagcgatcgctcccgactcaaaatcgctcataatacgatacgggaaccaattattgccaacagactgacgaattgtttcgaagaatcttgtgtatgtggcaagagttttgctgggcagtaaaccataaactgccggaactgcacaatgatcgatgacaactgccattgtgtagacttgagtaaatccccgtgggcatgtctttaagatataattgtaattacaattttacttaactttgtggtgcataggtagcggcatattttatatggctctcgcaatacccgcgaaaagagccttttaagcattcacgtcaaaagtgccatcgattggcacttcattctgataattcaccaaaagatcgaggtcaaaacgagaacaaaaaatgatcatttgttccccattaactgtttgatcataaattgtacgatcacgcaatctgtccggtatgatgtgatttgcgatgcgggtagacatccaatccaacatcgccgacctaaccaattatttttaaatattattttgttttaatttattttttaaattatcattttgcctcttcctgatgcttccgtttctgataattatatgttcgcctcatgtcggctgcagatggtgcactgattgcccgaacctcatcactaaggttcgaccgaacttctctgatgatgttacggcttgttgtcggaaattcgcttttcgcctcttgtcggagacgttcagatgcttctctcacctaattagctacttaacgcactttacattttaaatttctaccatatgaccacccaaaacgggtggatgattatgctgcccggtaattcgtccaattttatattgcgacccatcgtcatcgacttcccagcggcattgtacacaagcacgccctgggcaataaggtggacggttagggcaacgccaatactccattccgtcttcagtttttgaaaccgcctttagaacttgccgtttaacattttcaccaaattaaattagctttttaacctcaaaagtgtagtcatatccaccacgagatagaagaattttcccgcgatttgttttagtctctgcgaatcggagaagagccatgaaccaatgaatttggaaaaggaatagagggaaaaacagcaaatgatgaacaccagcaattacaactcgagaatgaccatcagcattcgggaatgccaaaacaattcctctccaaattctcttatcaaaatgacctcccaagaaaattgaccacccgagatgaactgaacgaccggccttatcactatccaacggccaaagtaccactgaattttaccacattgaaaataagagaaagatgcgttatttttactacacacatatatcaattttcattaagcagtgattttttaaataaaaatgactnttttgggtcagtttgaccctgaggcagtttgcttcgggcaaaccgtggattccggctggttcatgtgaatacataataataataaaataataatttaattctctgtcgaaatcagccactgtcgggaatgtcggaaaacagtaaaataaatgaaaatagttcactgtcgaaatcagtcactgtcgaaatcagccattgtcgaaatcagcgactgtcgaaatgttacagcacc

SEQ ID NO: 19910 - DNA, 988 bp, Heterodera glycines
  unsure (1)..(988): unsure at all n locations
ttgcatnngcctgcannggtctgctcgagaaatgggctgcgcgcaaatttatattgaatcggcaggacgagagacgagagaattgataaaaaatcataaaaataaaattaatttgtattggtattaattaattttgttttttttaaattttataatcaatatgcaaaaaatgaaaacttgaaatatacaagaaaattgacgatggatgttagttttaattaaagcagaagatgaaagcgaattaatgagaagaaatgaaagtgcgatctgtgatggaattttgaggccacataaaccggattaaaatttgaaaattcatcccagccataacttgagcttggcattctgtcttacactgtgatgcttattatgtagcaagaattaagcatcgggtctcgctcgactcaacaacaaaaatcataggggttggaaggtgttcgttgaaaaaatgaaaatttttaaaaataattactcattaaaaaaaattagttttttgttgtggaaaatattttaatttgtctttttctctttattggtaaataataaattttggtttgatttttaatccaataaactagaacggctcagagggtatcgtgccgagtttagtttgccgggcctagccggcagagggaataggtaaaccgacacggcacacgtacaaacaatcaaaaatactcagcagcacgtcgaacagttcagcgcttacacacaattaaattttgatagaaaattggggaaatggacaaatgacataattaaaaaaagatatgaaaataattaaattaatattgaaaagcttgagaagaaaatatataaaaaatatcattaatttaaagtaactttgagggggaggaaggcgagattaaaatggaaaaatctggcaatttgaattataaaataaaaaatgtcttcgaaaattttcaatttattgccaggcctgccatcgtcccagggtcggcttccaaggaggaggagggggggggga

SEQ ID NO: 19911 - DNA, 1227 bp, Heterodera glycines
  unsure (1)..(1227): unsure at all n locations
atgcttaaaagctttttctaatttctaagctattagttagtgataaacctaactttgaaatgctgaaatttctgaatagttttcttactgattttttatatattggcgaatttttgaacttctgtggtctaatagaacctttgaaacttttgaacactaatatttgttgaatttattcgagtttaaaataattgtgtcttaaaattgactgggactgagctcaaaggttccaatccaccgttgtttttgctttgttaaaaagaagagatagtacataaaattaggagaaattagagttgctcgtgaccggaacgggaatttccggttttttcatgtcccggtcctgatttttggaaaaattgaaatccccgtccaggttatgccagtcccagtcctggcgggactaaataagcactggtaagtatggggtcagggtgagaaaagagaagagaattgttgaaggagaatttttgagaaaaaatttaatatatttcatttatagcatttagcatttgttcttattcaaatgtagtcaagtgtctaaaccttcctattcattatgtttcgcttgggttcaattccccactgggatttatcatattttttttcagttttttactgtaccgtaattaaaattttaattaaaaaaatattatttggtaattttttgtttttgctaattctgttaacaaatctcactcgaaatttcaaaatttttacggctgcgcctatcggcaccggcggacatttaaaaaatttaagagattgttaatttattaaaaaaaggaaaattttgggactcagaaaattccaaggtcccccccccccccccggaacgggccaactgcgtctggccaactgcgtctcgccaactgcgtctggccaactgcgtcttggggccaactgcgtctgagccaagtgcgtctcgccaactgcgtctgatccaactgcgtctcgccaactacgtctggccaactgcgtctggccaactgcgtctaagccaactgcgtcttggggccaactgcgtctgagccaactgcgtctcgccaactgcgtctggccaactgcgtctgagccaactgcgtcttggggccaactgcttctgagctaaatgcgtcttggggccaactgcgtctgagccaactgcgtctcgccaactgcgtctggccaactgcgtctgagccaactgcgtcttgnggccaactgcgtctgagccaactgcgtctc

SEQ ID NO: 19912 - DNA, 2757 bp, Heterodera glycines
  unsure (1)..(2757): unsure at all n locations
gaaccctttttgttgtgcctttgagtaactgcctttttaccccctaatttcaattgtatttctcctttaggcaatggagaaccattggagcctccgcaggcatttgccaccgcgtcgaccagcgaagattcatttgaggaggaccaggagtttttggagctgcaagagagggaacaaattgtggacaaatacgaaagggtcagaaaaatgaaatgaaaagtgtgagaaagagaaaataatatagtacataggttggaggaaataacaaaacgagttccgtcggtgacgtcccagggttttgtggtgtcattcattacccattttttattttatgtagaaaagggcatattgagttgtgggtttttgaatatgcatttaccatcaaaaaagtcccatttttaaattaaaatttcattcagcataaagtgatgaaggtttccgataacttcttttttttgtgctcgtcggtgataaaaaaaaagtgcagtgcaatgcttcttttttgacaaatgaatccggccatttcggaggggggggggggtgggtgattccgangatctttttttctgctcttcggattgccagtcttaatttttaaaatcttcagcgcgggaactggaaataatattgtacactatgcttttctgcattttcagggaccagatcaaaatgacgtggacccgtgggagaacccggactttgagctgtacaaaatcacggaccgatatggctttatgcagttaattgactgtctataatataagccaatttcccaataattctcacaatcagtaaaaaaacaccagagcaaacagaagagcagaagagggtacaaaaagagttgaagcgagagcagaaatggttaaggatgctcaaggaatgggagcagcggtaagtgcaaattgatggacaattctgctagatgcaaacatttttgaaaataagtaactgattatacaggcatccaactaaacttgctgagcgaatgtggaagggtgtgccggataggcttcgattggtggtgagccattgatacttacaattaggaattcgttttaaattgattatacaaactcaatactagtacatttacctaaacaaaacttaatatcgtgtctcttttataggattcaaaaacgaattttagattttattatttgttatataatctttcagatatggaagcgtttgactggtgctgacacaatgaaggccaattcgagagaaaaactttacaaggaattgttagcacgggctcgacttgtctccagggacatcaaacaaatcgatttggacattaaccgtacataccgggacaacttggcattccggaggcgctatgatgtgaagttggtgatttatttaaaagatttattgtgtgtatgttttcagattgttttaatacctacctattcttacatttaatttaatagttaaccttcttcttatctttgttgcaacttcatgggcttttccaattttcttttcattttctttctttcaattcgtcttttttccaaatacttacaacatgaaaccgcaaaaaaatttctgattttttgcagttccgttcttattttaataaattctgttaagagctttcggttaatattttggtcacaaaaaagttattacgctctaaacttgggtgggacggaactgtcggagggaacttattgttagtcttgagggtggttgattcgctccaaatattttcccgctaaaaatttaccaattttaagatgctccaatatggaatatttttagcttaatcaattcatttttagacaacagtcccttttcaatgtgctgactgcctacgcgatgcttaacacggaagtgggttattgtcaaggtaaaatgggtttttaaacgatttaatatcataagacaattactgtgatttcaggaatgagtcagattgccgcactttttctgatgtacatggatgaggaggaggcattttggtctttacacggactattggttaatcgaaaatacggaatgcatggtacatttacttctttctttcttttcaaattttattaaaatattttaggatttttcgtgcccggcttcccaaaactccatcgttttcagaatcattacgataaagtgcttctcaaatatttgccacgagtgaagagccatttggtaataagagcagaccgaataagatttaggaattgggcagggtgtgccttattttaattaaacaaaagggggagttactttcgtttttcaaaattttcttaaaccaacacaaactttgagttttattatttaggacaacattggcatcccaccgatttacctaaccaaatggtaagagtgatttatataatttaattccttaattaatttcttgcgattgcttttggagctcctatctatgaatgatacaaaatgaacatttcataatttatcttatgatgaattaaagcccaagtcaataagaaatttctttaaaaacttactgaatttgcaaatattaaatatttaaacggtcttttccgaattttttgttttccatttataaatctgaattatgagccaaatgtattggttgacctcttgcctgaaaatattcgaaaaattatgtcgtttgtttttgcctccgagtgtccattgcttaaattaggtggttcggctgctttctcgaccgggtgccctttacactggcacttcgtctttgggatgcttttctctattcgggtgggaggcattctcatcgcgatggcatacaatatcatgaaa

SEQ ID NO: 19913 - DNA, 1891 bp, Heterodera glycines
atttccttttcttaccatgtaacagttaccatgtattaccatcatggaaagcaatgaatttttgaaaagaatttaaggggttgtaggcagctttacgccctaagatgggcgcttcgctcccatttctaaatttgtggggctcgtaagaacacttcgtggcctcggcgcttcgcgcccgcttcaaaatatgttacatgttacatgaaaacggagggagttcatgaatttcctctcttagcatgtaacatgtaacatgtattaacataatgaaagcaatgaatttttgaaaaagttattaaggttgtaggcagctttacgccctaagatgggcgcttcgcgcccatttctaaatttgtggggctcgtaagaacacttcgtagcctcagtgcttcgcgcccgcttcaaaatatgttacatgttacatgaaaacggagggagttcatgaatttcctctattagcatgtaacatgtaacatgtattaacataatgaaagcaatgaatttttgaaaagttattaaggggttgtaggcagctttacgccctaagatgggcgcttcgcgcccatttctaaatttgtggggctagtaagaacacttcgtggcctcggtgcttcgcgccctcttcaaaatatgttacatgttacatgaaaacggagggagtttatgaatttcctctcttagcatgtaacatatagtgaaatatgtttcatcatattgaaaatttaaaggaattttgaaaaattaattcttcaaaaagttttttattttaaaagataataattttttattattaactgtaattttttaaacatgtaaaaataagcaaaaaatacataaaaaataatgtataccgcccggattcgaacttcccccctcccccaaaaaatgatggctcagaatcaccaagcacacagggattctgaggccttaacgatgtctaaagtaaaacctgatcacgtattcgtgatcagcggcccaaataagccctaatgacatgtttttgaaagatttttaatgaaaaaaatttttcactcaaaaatcatgtgcacccacccccctttgatctggaatcccaaaatcacttttatttttataacttttttctaataaattataaaaatgccaaataaaatttataaaatagagaaaaaaactgcggaaaataatacgtaaaatttccttaagtttaacatataacacatttaaatattaaaataattgaaattttaaaaaaagtggtagagtaattattgggaggaagcggtggttgttgcaaccttagatgtaacataacatgtaacatgtaacatattaaattagaaaataaataaacaataaataaaaatttgtgggttatttatattgaggggacagttgaagtaacatgtaacatataataaaacataaaaagcattaacttcatcttatttttctctatttttgttgttttattgcatataaaatgaccaattctattatgagttatgaattttcaaatttaaacccaaatacccaagggcaaaaaatagcaaatttttgcaaaatttttttaaaaattccaaaaattctgagacgcaaaacaaacatcgtattcgtgctcaaaatactccagaaaaatatttttcaccccccttgtggcccaaaaaaaaattccgaaaattttgggtgttaaaagaatgactttcacacataaaaataatttatttaaaatattaatttttttagttaataatttaaatgtattaattttttattattaacttgaaattattaaaaacgtaaaaataagcaaaaaaatacataaaaaataagtataccgcccggattcgacttcccccccctcaaaatgatgccccagaatccccaatcacacggggattctgaggtctta

SEQ ID NO: 19914 - DNA, 1671 bp, Heterodera glycines
attttaataatttgaaattttagtcgccatccgattttgcaaagggatgccctgcgaattttgtccgaaattttcaaggcattttccatgaaaattccacttgtccaacgcattggtgacacagaaggccaaaaaatcggacgaattgacgggaaaagggtgcaggaaaagaaaatgaatgaaatggacaattattttgaaatgttgacgaagcaatggtgaagcataaaaaagacgaaaagcacccaaaaatttattaatttttattgtatttgaactgatccaaaacaaattgcatttaactgcaaaatgttgtaaaatttatgaaaaataaaaaattatagaatttttaaaattggcatggttattttcttccaattttattttgcaaaaagaacacagtgagccctttccctcataaattcactcattagtctgtacaaatatggacacttttgaccattataaaaaaaactcaattagcgaacatcgcccaaaattgtgccagggcaaagcatgaaaaaagaagaaagaactcatcgtcagtgggaagcacctgctgctattatgccactgttttgggattgggagaaggatttggcaccaaaaaagttgcgacgaatgccaatgccaactgacacacatttaagctgctaataagcatattaccgagtcaattgtgctgaggaaagggacggacgaagagaaaatgttcatctgccaatgaaatgccatttaaacgtggacttttttgttcaaaaatttgaatttatattcaatataattaaatttatatatttttcttaaatttcaattttatatttcttcagaaataaatgcaaataaattattttatgacagcgcagtacattttacattttaataacccacccccgttataatgagggttttcttgccccccccccctcctcttttcttccgttctcatttcaattttaattatttttcctttcctcgtcatttctttctttatatttgcgctctattaattattataatttttttttgatttttaaaaattatattaatttacccatcaaatttttaatttgcatttcctccgccgaaacaattttcccataaaagaatttatttgctttggtctgaagaatccgtcttttctgctgctcctcagctgactgatgtgaatttgagtgtggagttccttctgcttacaattaactgttttctgctgctggttgcttttccgcgtttattcaaatttgcccaatggctttggcggaagggaattaatttgggggaagtgcccacctctcccaaagtgctcaaatttacggggaatttgacggggagtttgtccccgcttggcctcaatccccggtctgatgagaggacatggcaaaggcaattaatgggccgaagaacacacgcagaacaacaacaacaacaaaaacaaaagagatgagtttgtctaattccccgttttttgcccccgttcgctagccgtgcagcgtttttttgacggtccccttgtccccccgcttatctgcttgctgtcaatcagtcattccccgtttaaaataatcactccttcccccgtttgctcacccaaatcctgtcctttttaagtaagtttattttccagattccccgttactttttgactggtcatccccgtctccgtccccg

SEQ ID NO: 19915 - DNA, 1872 bp, Heterodera glycines
ttcgtgttgggacgcctcttaaatccgccaagtaaaataataaaagttagccaaattaacatcttcgtatcatttgggtagttttaaatattgagttattagaagttgttgcccattagttatctaatttaatagcatctgctgatttttttctgtaaaatgttgaaaacgtcctttttggactgggaaatgattgaagggcacaaattgcaataaaattgagcattgccatttgagtcctgctgaccaattagtgcactcggaactcttttcgctttcatttgacttcgatttcgtactcaattgtccgttcttctccgtctccaatgtaaactttggaactgtgaatgccgcggtcccttcggctgactttttctttctgaatttatgcgataataaataatgcttaagtttaaatacagtgctgattttcaagtactattttcttatattcaaaagacaattttgatttgtccttgggcataacagattttcctgtccttgaaactcgcttaatcactccttgaaaatagaggtcgaccgaaaattacaattaaatttaaattcggtggtccttttttaaatcattttgttttgcacatttttgtttaataatgaaccgctttatcacctctcttttgttgtgccatttccaaattgtgatgtcaaactcgctgttcaaacagctttcattttgcgagaaaaccatcgtcgagcattttaaatcgcaaaacatttcgccataataaaaacgcaccgaattttcgtggcaaatgacgtcgacctcgtaaaatgcttcgtcctcttcaagcattggatcgacttggaggacgaagtatttgccaaagtcaattgggagatcggcgttatgcgattggtcggcgtcgattagcccatcgtaaattaatggcttaatttgtacttattaatctccccttttaattttataaaggcaattacgagcgttaattggtctattaattccaaatcgtaggacaacgttccctttgctttgacattccattttagagtttttattgaaacgacaaagtgacggcattttgtgtgattgaattcaaaaatgactctttccgtcacttttttgctggcattgtcaatgaattcgtgcgatttcaaattgccccaaattgaactgtacaaaaggctaccgccgatgaggccatctccgttttcaatacattggacagagacaaaataactgcgaattttaaatggcaattaaccacttgttctttaattgttgtcggatagcattaattaatttacataatttaaattataagattttgcctgaatgagtgatggccaaccaaagtcggcgctatttgaagtgtcaatttgcttccattgctaattgaaaggttgaaaatgaaaaagaatgtaaataaataggacattttaacaacaaattttaaaatcatttcattaatgaatggtcgcacaaattaaaaaagttaattagcaaaaatttacatttggcagcggcagaaataaataggaaaagccattttaattatttatatgattacataattccacccaattatttttataaagtcaataatatccacgtaaaatcgaataagctgtgaaacggcggcatcaattcgttaatttttttttttcttgaagtgatttatttgtcctttattatcatatttaatggacatttcaagtaaaatttaatttttaacgaatctatttcaaagaccagtctttttaaaattttctgtcgacggcgcccatcggcattctgcggcgcctgtcgacaacatcgaaaccctcttcaaccaatattttaggaaaacctcacccaaatacaaaatatactcttaacctttggtaaaatct

SEQ ID NO: 19916 - DNA, 1170 bp, Heterodera glycines
  unsure (1)..(1170): unsure at all n locations
ctcacngggtgccacgcatgcccattcgccaagccctcgcctttccaactgttcacgggtgccacgcatgcccattcgccaagcctcgggttccaactgttcacgggtgcacgcatgcccattccaactgctcacgggtgccacgcatgcccattccaactgctcacgggtgccacgcatgcccattcgccaagccctcgggttccaactgttcacgggtgccacgcatgccattcgccaagcctcgggttccaactgttcacgggtgccacgcatgcccattcgccaagccctcgggttccaactgttcacgggtgcacgcatgcccattccaactgctcacgggtgccacgcatgcccattccaactgagcacgggtgccacgcatgcccattccaactgctcacgggtgccacgcatgcccataagccaagccctcgggttccaactgctcacgggtgccacgcatgcccattccaactgctcacgggtgccacgcatgcccattccaactgagcacgggtgccacgcatgcccattcgccaagccctcgggttccaactgagcacgggtgccacgcatgcccattccaactgagcacgggtgccacgcatgcccattccaactgctcacgggtgccacgcatgcccataaaccaagccctcgggttccaactgctcacaggtgccacgcatgcccattccaactgctcacgggtgccacgcatgcccattcgccaagccctcgggttccaactgttcacgggtgccacgcatgcccattcgccaagcctcgggttccaactgttcacgggtgccacgcatgcccattccaactgctcacgggtgccacgcatgcccataagccaagccctcgggttccaactgctcacgggtgccacgcatgcccattccaactgctcacgggtgccacgcatgcccattcgccaagccctcgggttccaactgagcacgggtgccacgcatgcccattccaactgagcacgggtgccacgcatgcccattcgccaagccctcgggttccaactgttcacgggtgccacgcatgccattcgccaatcctcgagttccaactgtacacggatgccacgaatgcccattcgacaagccctcgagttccaactgttcacgggtgcacgcatgcccattc

SEQ ID NO: 19917 - DNA, 2437 bp, Heterodera glycines
ctacgtccctcgtgaagttatgcctcggaggacaacatctacacgaaactatgaacactagacaagcctcagagggtcattgtctaggctctctaatttgcttttcccttcacctgtgtcaccgggattcgttgagttaatccgtggttcacagatccacccaggagcgccaatttgtcccgattgcgttcgagccaaaggccgggcactggggtcggggcaagtagggacgagacacagaataaataaaaaatttattccgggaaggacctcaaacttgggtaattaaacaaaatatttgaaatggtgaaaaatatcttcgtcctgtgcgtttggtgacgcacaatcaattgcaaacgaaaacctgtcaaaccattcggaaattctgctcttttcttcatatggttcgaagattccgatgtccggcaaatgcggaattgtcgcatttgcttgcttgttttgtcgtggttgtcactgtcctccgacgaattgagcatgatcacaattgggggccatcacagttaaaggcaaatggagggcggaagagaaacggcaaaattgccaaatgaatttgggttgtgaattttgggggcatttggccgtttaaataacaataaaattagataaaaagtggcaaaaatgagcagaacgaaatggggccgaaaattgtgcatgaaatgaaaaacagtgcacaaaatgaacgaatgaacaaaattggcgataaacgggaaatttgggcgttcatcgttctttggagtcgcattcgccaaattggggacgggggcgaaaagttgcggtttaattaattgttgattaatttgtgcgcggggcggaggaggaacacagaaaaacaattaacaatttgaagggaagagggacagagggatggaacggttaaaacccgtcgcgcggcggggggagttggtgaaggggcgccctccctcttaattcgccgatcattgattggcgatcggaatggaaattccgacaatattattcgataagctaatgtcattatttaatttattgatgatttcatttttattaaatctttttataattaattaaaatacctttcgaaaagacacaaattttgctctttttgccgtaaaatgccaaaccggcccagtgaataaatattcaacttaatacaaataaaattttgttggaaggggacgaactgctgatattcggttattggccaaaattttgtagattgatttcattttatatgtgtattttttttaaatttaggagcgatacttagggatatttttttgaaaaatttttagtcgattctttggggtgtattgtgggaattttatagctattggttgaaaataaactgaattagaaaatgtttgtacttgtagtttttagcattgattcattttggctttatttgagttctacaacaaatattatcttcgatttttttaaattagcttattaagacttgttaaaaaataatttatatgattttcttttaagtttttgtttaggtgtttgcttaaattattcatttaatttgttttataataagttactataattcttgaatataattctttttattgtctgatatccaatagatttaattttaaattcgttcatttatttaaatggctttttatgtgactaaatatgtaaaaatttctttattaattaaatttacctttgttaattaaatatttttttaatttttaaatttcaatatccttacaaatcggtcactgcggtaaataagtatgctcattatattctcaacgcctgttcggttttttattgtatcttaatcttattatttaattgattctttatggaacactttgtttttaagagttcaactaaataaatgttaatattgagttaattatttaaatttcataaattaaatacagcaaataatatcaaaatatttaattagatgagcttattgagatttcttccaataataacaaaatattatttatttatttaattatatttttacaaaaaacaatattttatttttgtatttattatttttcggcttaggttttccgtttttgaatatagctaattaaaatatacaaaattagtagattaaaataaattaaacatatttatttaagtatcaccttgataatggggtaacaattatttttgaataaaagtgaaaaatcatatacaaaattataaataatattttatgtaaattaattttccgaaaattatgataaaattttttattcatactaatttgatgaatgtaaatttattcaatttataaattgaggaaatcataaatactgaaaattttcctgttggcctctttcggtatctttagcacgtgagatttaaaaataaatacagttagtcaaactaatcattaattttaattatcgaatcataatcgtctctgatgctacatatttgactttttcttaatcttcat

SEQ ID NO: 19918 - DNA, 2075 bp, Heterodera glycines
  unsure (1)..(2075): unsure at all n locations
aaaatttccccctgggcgcctccggcatcgcctgaacatttatttattaggatattctatattttttttttaagtgaaattgattttaattcgttttaattaagctcaagtttcgggattgaagtcttaaggagccaaaagtcgagaaaattacacgaaaaattgggcattttttaagtattcaaaaaaataatttttgataatttttttcgagggtcttaaggtgccaaatttcgagaaaatatcacgaaaattcggattttttgtcataggcatgactatgtgccaggcaatcgttgtgagaaggagcagaccatcacggaagacattctgactgtgttggcaatgttcgacaaggaattggaatcgcacgggacgggcaacaaaagcggcacgaaacatttggccaagttgttgccggaggcaacaactgtcagagacgagaccttacccagaatcggattaccaagcttggtaaaccggccaaataaggtgttcattgccaggcttagtaaaacaaaaacatgttaaaaccgaggattggtataaaatggtatccggacaatcatcagtgtgaaggacaattcaacaataaattgtttttttttgggcaatgattaaatttggcgatagtatttgttagaataaaattcgatttcacaatatttatatgaaatttcgcgtttcaaaagtcctgtttttacagtaacccgggtcttgttggatacaaaaacttacagtaggaccctggaaagcctgtacaggaaagattgacctctctctaatcaattcataattgttacttaattggtgctttaaggatgcaaattcgattccaagggggcctttgcgttcgctttttgtcaatgattcgcttacaaatgaccatgaagcatcatcagtccaagaatcaccaaccaaagatgaacttaatacccaaatgtgtggcatttggtggcttaccgtatttcttctaatagggcctcggggttatttttaggtatttttgccgactccccccctccccccncccccctcactcaaaggggactttatttttcaactttccacgggatgggcttttattagagggggtgttttaaggggtttttcaaccccctagaaggggggagagaggattgtaatagaagaaatacaaattcaaattaaatatatttttataaattaaatttaaattttgtaattttttaaagttcattctccgatgataagccacaacgattgcggaaatatccttcattgcattctgttgattatgactatgaatatttggaagaggcaaaaattcccgaaaaatttcggtttgtcctgaaaattttttcaaaaaaaaaaaaactaatttaaggtctaatattgatgatgtacaaaatgatcagaaacataaaattgtaaaagattatgaggccagcagcatagaacaaggtcatcaacaaactcaaggaaaggtgtgggggcgaaaatttgaagattgaccccttaaaggcgaaaacttaaatttttcaattaaaattggcaaaaaaaaattttcaattttccatttaaaacaggcaaaagatgccggcggccaaattgaatttgtcaaacggcttccttttcttcaagaatcgagcccagaagttgtggaggtgggtcggaaaataaaaattttaaaatttacgattctctcaaaaaatctcattgtttcacagaaagtgctaacttaacaaattttaaagaaaatttcaagtaaactgaaattttttttgaataaaataacaattcatttagaaaaaaaaactcaaaaattcttgaaattttctagtaaaaaggcgggggggggggggattgtgcatccgttaatcacacgctataatcattatttgacatgataaaggtgttcatggaagtgatggatgacccggacattcccagcgagggcagacgcatggaagaagtgagggagggacagcgaaatttaaaattaagtaattattaattaattagctccatctgttagctgtctcatatttgaatgcccgccaattggacgcatttaatcgatggtcaacaattcg

SEQ ID NO: 19919 - DNA, 2361 bp, Heterodera glycines
cgacgccagccaagataccgcgtgggagacagggtgcgcattgaaaagtacaagcacgtgttccaaaagggctatctcccacgcttcaccaatgaactcttcacggtggcagaggtacactcggagcgttcgtctgttgtttatcggttgcgtgatgaccataatgaaataattagtggttggttttacgcaaatgatttatgcaaatcactagaagacaaacaacaaaaaatgtataaaaagaaaagattttgaagaaaaagaggcagaatggtgtggattatgcacttgtgaaatggaaagggtatagcgctcgcttcaatagttggattcccgcaaagtcaattaccgataaagatatataaaaaacactatttgtcaaaatttaacaaaaatgccttcaaattctttttatgttgtcgttccgtcgaacaccaatattgaaggaaataggacaaattcgttcctagtgcgtttaccgcgcaaactacaattcaattcggaatgggaggtgggtttggcggtgattgtgtatcccccccccattcatggccttccataggcaccgtggagcaacaatttgttcagattgagtggcagacggggaataaggtgcggattgagcttccaccatcaaatgtcaccaacccccatgagcttagcaaaaatttgtacagactcctgggagatggaagtgatccgttggcaaaaaaggtacgctcaacacagaattctttcatgcttacgataaacaaggctcgccgctgggccagagaagagtacattaagcgaaagaccaaagaaaaacggggtgttcgtgacgaagagctgctcctacaggccctgttgacagatactggaacattggttgaactcaacacccgcaaggacttctggcacgcgaaaagcatgctgaaacgagcaatatcgcgttgagaatcccagctgacgataacgagtcgtatcagcataaattggatgaatacttttcaaaattaagtgacaaaaatttgagtattattgatgaattgggcatgacaaaattgaacgccgaaatcaaaaatttgacaaaagaggaacgtgcaatccttaatgccacaaaggaaatggggacggaagcatggattcaggcctatcgtgaaatacgtcttgtctgccaattcaactatgacatccatagaaatcgttttgtcctgaacaccgacccacggtacgttaaaaaggttgaagtctcgcctacattcttggtttcaacaacacggaatttatgcaggccgaaaacgaggcgaggtttatgccggacatgagtgggggtgtgtcatcattccatgtttacacgccagatcttattgaaccaatgataattggcgatgtcacggccccagtgttgcgtattgtgaccatacgcggaaaccccgaccaagtgattgaagaacaattttttgccatacaatatcacaaaattttattaaaggaagtttctgaaattttgattgagatccgtacgaatagcggcatcttgatgccattccaatacggaacatgtacattaacattacactttagaaaaatgtcctatttttaaataatgaacacgttggaaattgacaaaacattgtcatgaaacagcgtgactcgccactactatattggttgttttgcggcagaccaaataccagccgtggcaattgccaaatttccacatgtatggtggtgaatcttgaccccagcacatctcatggttctcattgggtgtgcatttattgcgcttctcctttgcatttggagtattatgactcattggggatgtggccaccgcccagtgctcacattgttgaccatttgtcacactacaaacaaattcaatatagtactcttccacttcagtctcccaactcaagtgcgtgtggtcgacatgtcattttctttttgtactgtcgatgtgttggaatgacctttgaaaaaattgtcagctttttgcactttggaaagcagcaacgtgatacgctcgtaaacaactttgtaaaaagcataattttcaaagaatataaataatgcaaaaacgtcaaatttcaaaaaaaatgcatgttgattttgatcctctacaagtggattggtccgcattctcgtccgagtgtgtgcaagtcagggaatggagagcggaaatcgagtactcaccaatgtgctggagggaaaagacctcaaagagtcgctcgttagtgagagtaaggcgggactaaagaatcttcttgaaaaagcagccaacaacataaacactcagaagggtcaaggatttgattttaagcgatacaaaaaagactcagctcccaaaatggaaaaattcggcgaaaaaatataaat

SEQ ID NO: 19920 - DNA, 2391 bp, Heterodera glycines
gttgtgtgcttttgatagaccaaagttatcaacaaaatgtgccaacaatgtcgcccagcggttaaattgcaaaaacattattatataatcggtttatttgatttcaaaaattctgtttatagcataatcaaataaattctttaaaaacattttttgaattaattcctttagattcgatcaaaatggcaaatcagctgttggtttcggcaccaagagtaatcgatggcataaaaagcgggacctttgaccaccgatggttccatcagaatgtgtccgtcattttatgcaataccagttttggggttgaaaaatgcgaaaaaaataaaatccgtaaatttttatgtgaaaaattaaaatcggaaaattgggaggatttttcggatgtggaagcagaaaaaatgcgagaaacaggaatgagtttaagagcaagcagtgactggaagaaaatgagagaaatcctagagaaaaagaaaaaaatgggagaaaaaggagaaaaagaaaagctttttgaaaatatgcttttgactttttgttcattgtttgctgtacaaaaggtgagaaaaggagcacagagattgactttaaattaaatgaatggctacaacttctaagcttttcctaaggacggggatttaaattatgagaaattccaaattttaaatgcttttaggaaaaaaagtcaaaatatttgcgaaaatattaacaaaatgaaaatttgcagtacaaaaacaatacagtagcaaaagaccacacatttttcgaagtttttgaatgtatttttctaaaaggaggtaaaattttaaaactcaaaaatttggccaagaaataataaaattaatggaatttttcggtgaaaatatttaccaaaagttttatttatggatattacgtgaaatcgaagaaagactattaaaaaaaaattaaaaccctcactgttttatcatatcattaagttagtattcgttttcgtttctcaatttttttttaatttaaaaaaattctctgtgtttttttattttttttgggctttctctcggttctctcaaccccttaaacgctgctctatttttaatattttcagcatttggatgcttattttgctgcccgttcaacccgcatacgcccaaaacgcatggcccctccgccgccggagggaagacgcggtggcactgacagtgaaagtgccgatgacattggcactttcgatgtcgaaagtcaggcggcacggagcagcacatccgcggggaatggtggtgataggtttaaacaattaggccgttccctatttgtggtagaaattgcggtctttttgatgattggctcctgttttttcgcgcttattacccctaatttaaatcctacagcggtcatcccttttattgtcatcaatagcatttttatactcattatcattagtcattcattatgtattttttttaaacgaagacattaatttttcggggaaaacagtaatttaagtaaaaaagaaaccctctggcgactcctctgatcagctctataagaccaaaattgtttgttgctctattattccttatctgttcatctgtcttacacattctgaacaccccccactgaagcagatactgtttaggtacggtagccaatgcgaaccaaattttaaaaattgttctttcaagcttcgtatttatgcataaattgattggccctagatttgttcaatttatgatattttatgactatttttggtgatcatttttacttgcgggactaattacataagcgtcagcaacatttgctgaaaagaaactcgaaatcagaaaatgcatttgttattccaaaagggtttttttgaatattcctaacaaaattaaatcagagaccttaattttgaaatggcagagaccgggacttggaaaaaggagttctttgtccagtctgcatattttttaataattattatatcttcaattcccagtaaaaaactgacccacggactccgtcagttgggccctcacgtttgggctccagcatgtttttggttaaacttttttatttatcatccaaatccaacaaacgttttctatgggttctattttttctagactaatctactcaacacggttcagaattctataaaaataacattcacggtgcgaaaaatggggtttgaaaagtttattggggaaaaaaagactttacaaaataatacccctgggagaagggagtgggaaacatgatttcaaaattttcaattttttctagtctaatctactcaaaacggttcagaattcgataaaaataacattcacggtgcgaaaaatggggtttgaaaagtttattggggaaaaaaagactttacaaaataatacccctgggagaaagggagtgggaaacatgatttcaaaattt

SEQ ID NO: 19921 - DNA, 2215 bp, Heterodera glycines
  unsure (1)..(2215): unsure at all n locations
cttgctggatttgctgagctttgctcaccagctggaaaaacctatacccacaatggctgtgattgcaaaatgaatgctcaatntgacaactggtggcgaagccgaacanatgctatgagttaacaactgcataaagctccgtagcaccacggaagttcattttggcatactgagctggctcatcgattccgattttgttgcctgactcttctttgcactcgacataacaatgtccaggccctttgaaagggtacttaagcgcatattttatatttgctttgttaccatacgcaaatagtacattgtggtgtactcggtaacgcagcaaaatataagggttgtacggcacgacttgcgagttgtcatatattaagccgttaaccactatattggcaccaccatccactgatgaaggccggtaatacaacgcaggcctgtcgggccgcaaaatcgtacattttgagtacagggctgggaagccctttttgcatcgcccatatgggtcacgtgggccacaccaactgtcactgcatctgtgcagttggaaatgcattaattcgcgcacttcgcgatgcatttgcgcaattggtgtgccatcgcctttgtctggcaaaggtggaatatgagcccaaatgtattgctgaataacatctggaattgcgtccaggtcagtctgggctacaatgtgggcatgcggacctccacggccttggaactccatggactctcctgatccaaggattgttccaaagaacttcttttcataaagctcttcgtggaactcagcaattttgctggaccacacacgcatccacaaatcaaaccggtcagtgaatacttgaccgttgttgtacatgttctctttgaactcaggccattccctgttgttcgtgaatgtgatgaagaggcgcgctttcttagcgtcatgatgccgtgcaaatatggtattgcaatcttcatacattttcttccaatactggagagaattgacattgtgctcggaaaatcgaactacactaccaatgtcatcaacagttttctgttgagcattggggttctgccgtgcctgctgtttattgtattggttgaccaaatactgcagcaaattttttggagtgctgatccgcagattcatgtcaggtctgcgcaaaaatgtggctacttgccaatcgattttagcagcctgatcaagtatccagcgctgaccaagaccacctccacacgaaagaatgtggtggtattgcaactccacattttcgtcccttatggcgagataatacttacagtaatcccgcagggagacaaatcttttcgatttgtcaatgcggccataaagtgaagaaagtggaagcgaccgacccgggcatcagaagatgcaacagactgagtctcgcacgagccattgtcggactcggcctcagagtcgaataggccagccacatcttgatcactttttcgcttacgcgaagacggctttgcatatttaatgccggttatatacccatcatcacccattggctttattaatgggtatgtcaggctgtcagtccaaggactgaaagcggcaatttcattcaattgaccttgcttgttttcaacccatatcccccttggcgggggtgctccactgggatccgcgtgaatagcgaacatcccctcacccgttgaaggggtgattatttggtgaggatggagctttggatcttttagagcagcaggagtcatgcgctcattcaacaaagtcatgcggaaaaagcgaagctcttctggcttttgttttttgaggagctcctggagctgctcacgcgcttgcttatacgcttgcgcagcggggtgatgctcttgaatcattttttccaagagctcgagggtcgcttcattaagctcatgaccctgcacaaactcatcttcgtttgtgattttttccccagtaaatgtggggttgtttcgacgctgttccatagcctggactgggtccagaatgtacagctggccaaagccaggaatctgggttgtcccagcctgcatgctgcttatgcggcgatggaattctccgttaaggataacggccatcggtccgtcgagtctctgcatctgtaactttgctgcactctgaggcccaatgctggccggggcagaacaggcaagacggaacatgtttttcgccagaatttatgacggactgagcaacggagaaaactcgcgcattttcgtg

SEQ ID NO: 19922 - DNA, 2104 bp, Heterodera glycines
ttcgtccgtcgttgcgcgccccttcctggacgccgtcgatgatgaagttcttctcgtggttgctgaccaacacgtccatttggttgttgtcgcaacaattaaaccaccaaatgatagaaaacggcgattgtgagaatgtgaatctattgaatttttatattaattaggtgggtaattaacccaaatgatcatacacactcttttttagtttcaagtttattaaaaaaaaatttaaaaaccaaaaaataaatttccaaatgaaaatatttaaaaaggaacgtggacattgcctaaaggtcattaaaagtgaaacggaatcccaaaacgtatcgaattaagcatttaaataattgattaataagcagaatcaattgaatatattcatattgagcaatcaaaaataattaaatgcaattagggaaaagtaaaagccggaaaattaggcacactcaaaaataaatacacaaaaaaattcgaaataatttatttaattggtgatttctgttgctgctgctcttcactgttttgctgctgcggctgccctttttcaccattttcctccaatttggtcattttttcgctcatttgccacaatttttcggcctcttcattggtgaccatctcatttttgtacggcaccacgcgtccctcgtaatacagcgcaccattttggagttgggccaagtcgcactgggcacagtgcaacatggacgaaatgccctggaaagtgccgtggcaaacaatttgattattttttcttaatttctggagtaagtggcagggttgaggcgcggatagaaaaaatacccgcggatcgggtcgcgcatctggatttaaatgcaagaaacagaaaatttgttttcttgcttttcgaaattttattttgaattactaagttttttcaaaagtcgctgaaaaatttttcaataaatttttaacttgaatttttttataaaagaaatttcctagatttttttaaaaaacttttaattgttaatttgtaaaaaaaaaattgcggggaggaaaacgacggggacgggacataatttcggctggcgaaatttcgccaccgaaattacgccgccgtaatttcgccgggacaaaatttcgccgcaaaaattaaaaaaaaaatttagaaaaaaatttcgccgatttttttgaaatttatgataaattagttagtaagttttttcgaaaatttttccaaaaaatcgctaaaaaattttttcaaaaatttttccttggaatttccatataaaacatttccaaggaatttttttcttgaaaatttccaaataatgaagtgcacccggaaaaaacgccgtgattcgcaaaattgactatgacctggtccaaatccttggcaaccatccaaatcagcgggtaggcgagcattctgagcaaaaaattcgtgtgccgtccaagctcagtgccgcgtacaaagccaggcctattcaaaaaaaacaacaacatcaaataattgagaaaaaaaacactttaataaaacgcacaaatttgtacaaccaaaataataaatttcgtatcgaaaaattgacaaattttattgaccttgctaatttaaaatccatattttttgtaaacataacataaataagagtttgatagctcattttaaagcacaaagttttggttcgtgaatttatggtttcaaaaattttgtaagccgatgtctgtctcaaaaaaaaaaattccgacttttcgttcgagatctgtcagtttcgtggtaagcgaccccgaaaaccttttaagaagctatcaatgatttattatgaaaaaaaaatttgcaaacaaacttttttttatgaaaattcaaattgaccaattttgcaggtatcgcaaaaattaaaatgaattaaacaattaaaaaagcttgtgagatagaggaaattcctggactcacctgatcgcgaccactttgacgtcacggaacgagcacgcgacggcgggggaggcgagccgattggccaacccaacggcatgcaaacagttggccaacttgctgaacgcgtaatattcggcgggcgaacgctttttagcgactgccattggtggtcaacacggccagcagtcagccatggaatga

SEQ ID NO: 19923 - DNA, 2398 bp, Heterodera glycines
ttctctgctgctcttctcgttgttttctctgttgttcttcctgctgctttctctgctgctcttctcgttgttttctctgttgttcttcctgctgctttctctgctgctcttctcgttgttttctctgctgttcttcctgctgctttctctgttgctcctctcgctgttttctcagctgctcctctcgctgttttctcagctgctcttctcgctgctgtcgccgtttatcctcctcctccctctcttttttgtctcgctcatgcttaaagctaagttgagcgagttttgtgcgatttttcaacggatttattggcgcttcttctgtttcttcctcctcaacgatttctatgtcaagaatttctccctcatccgggtactgtattgacctttttcgggtcaggtgtctttccatttccgatatcatgccatggtgcattccgcgttcgagctgctgaggcgaaaggaagctaccccttggcactctgaaccggaacttgcgaccatcgcgcaggtgaaccactacgtattgcctctccagggtccctacagtcgcccaactaaaccgtacaattgcaacgaaaactgtgcaagacaactcacctgttgggatatattatgccagacatgtccaccatccacccgggcccatcaaacactaatttctttggcaagtgcactttgaatttattcgttttatttccgacaaagcccggcgtattgctgggcaaaattacaaagaaagagttgctcattttaacgaaaaatcaaagaatgaatgattagagatcacttttccatcttgaaataggtgttccgtcccccgttcttctgtggcacgtcatccttcttttggtgtttcatgatcaggtcggtgcagtcaaagttcaacttggcacagtcttggcagaatgtttgggtgaactcgagcttctcttggccactgccggtgtttaggaggaagcgcttgtcgcctcgcttgaagttctcgttacggcactccccacataaaggtgaacaccccatactgcaacggaaaaggaatattgcagtgatgactccaattccaacagtacctttatcgggaggaaatgatgagccggagtgggatgatgtcttagttggcacgttatgcataatttgacccacaaaattatgtctgagtgcatttttggccaataatacctgcggcatttggctaaagtcttacggtaattcaaatgaccaccaccaagaagggaagagtggaaggattcaaaaattaagcctctcaacgaaattgggacataaattcgtggttggcatcccgattctttgaaataaaggatgccagagtccaattggaaattaactgtggctacggcaaattcgtccttttctttctcatccaaaccatcagggaatttgccagttttcagaaaatcaatgtaagccgtcgcctcgggatcattcttgagttctttttccaaatttacctcataagagttaccgtccttgtttcgtattgtcagcgtgttgacaaaatggtccaaaaccactcagtcgtattgcgagatggctaaacataccggaaattcgacaatgtcatccaattccggcaagttgcgcaattcagacagaggcttatcttaaacggcgcgagaaagagcatcggccagtgaattttgactcccggcgatgtgcacaattttgattcgataattttgtaactcaattagtcagcgcgccaaatgtggactgttgtccgcttttttgagcagaaaagcgagcggtttgtggtcagtgtgcagttcaatgtctgacataaagataaatggtctgaattcgcgcaatgcatagatgatggcgcccatttccacttcaacagctggccatttgcgttcagcggcagataatgtccggctacagtatgcaatcgctgagaatgtgccagtgatttcattcttttgcatcaaaactccgccgtgtccaactgttgaggcgtctgtgaaatgtgaaatgatttggaataatcaggaaagatgagattcggtgcttcagccaacaattccttaattttgttgaaagctttttgttggtcacatgcccactcaaatttgattccttgtctggtgaggcaaagcaatggttcgacaaccatggcaaaattggcaatgtgacgtcgataaaatccggctttgcctaagacgcgtttgacttccttgatattggtgggaatgggcatgtccttgattatttcaattcgactgagagatggcttaaaacctgaagaagtaagggtaaagcctagaaaattcatttctttcgtcgcaaaagcgcactttttggggcttaattttaagttgtaaagtctgaatcggtatggaacactttcgattgaagacatatggtcatcaaaagt

SEQ ID NO: 19924 - DNA, 2145 bp, Heterodera glycines
ttttttccattacttgggttcagtcctttcgggacgtgaaccgtacagttccatccttttaggacgagaactgtacggttccgtccttttaggacgagaacccatggaacatttttttttgttatccatgaatcaagtggactgcttctgcttggagcctttgtacccagcggcaaatgcagtgccagatgaacggtttcaagccgttcggtttccatgttgcactggcgagtctcattttgcatgcatagctcgccagctccgtgaaaccagtttgaaaaaaatttaaaaaaataattaaaaataataattaaaataacggatcccctatagatataattaatgcaccaaggactccatcgccgccacaaccaccagcagcacatcatcatcatcatcaccatcaacaagttcaagcagtacaacagcagcagtaagttcaaggagtgcaacagcaacaacaagttcaagcagtacagcaaccgagacgacggacggtcagggacgaccgcctttatgaaatcgcagcgatcgtttgttcgcgccgggcggaggatggtcaaacgcgggaattgaggatccattggcagtcttttccttatcgcgatgacacttatgaattggcagtggatatagcaagggtaacatttttttaaatttttgcacaaaaaaataaagcattgaataaaaaataattcagcaagcgcctcaatccacgcggcatggcttcaagtgcacgaccatgggaacacgccaccgcatgacgtcgagatgccaattcggcctgcgacttggatgagcactgttcgcagtggtcggcatctgccagtggtggagtcagtctacccagggcgaaaccctgcgcgccgtcgacttttcggtaaattaattaatcaattaaacattcctttgtaataattaattaattaaagatgcgcaaccagcagcagaaggaaaagaagcacaaaatttgctgagggcaccagcagcagcagaagaagaagaagcagccttaatcgtcgatcaaatgcagccgcaggctgcagcagcagcaatgatggaagatgaggacgacgacgacgacgaaattgtctttatcaatgaagtgcaaagagaagcacgccgccgccaccaccagcagcagcagcagcagatgaagtgattgtggacctgcatgaagcacagatggaaaatggaattcaaggggaagcgccaccacctgtagcaatgcctgtgattgaggacgaaaatttggcggaagcaccacctccagcagcagataatgagatgggcgataatggagatggaggcggtggtggtgatggaccttcggacgccattttgggtaataaggaaataattaagtgctattgaattttattattatatattcatttccagatttggacgatggacacacggacagcctgaacaacccggtcagcctggacaacctggtcagcctggacagcccggacagccgcagtataagaagcataagaggggcaaagtgagtacccatttttccctttgtacaaatataatttatacccattatagaatgtggcaggatctgagcgacgccgaaggcgcatggccaagcaggctcaagatcaataatctttgaaatttttatatgggacttggcaagtcagacacttgcacatgtcatccccaacccacacaattgaacaatcggcgcacacatttggcgtgtgcgcactctttcctcccaaacattgcctcgctgccaaggctgcgaattccgcgcagaccttcgcctcctccaacttctcttccatgaattttttgagtttgacctcaaaaaattcttcttgaaagcattgttgatgtccacctaaaatgaggataatatcagaaatgctaattgataaacaatcaacaacaacaaaaaaaagttaccggaagcagcattgatgttgccggcctttcattctctggtgaatcgtccaataacgctcgtttgcgtgtgtcgggacgcacaaatttcgtttccttgttctaaaacatactgtaatgatttttaaaaaatggtgcgaacagcttacgtcaacagcccatgcctccagctgatctagcctggagagaaagttgacaaaacggtgccgcatgtccttcattttc

SEQ ID NO: 19925 - DNA, 2118 bp, Heterodera glycines
ttttattgttaaaatccaggaacttatggacacaagcaaagggttgtataacaaaaaagaggacaaagtcactttgaccattgatgtcattgtggagggaatgaaaacggacatcgccgacccaccaaaatctaaggggaaaattttgtggacaatccaaaaattgtcggaatttgcgcgagaggttttaatgagtgaacggaacagcgaaacggtgcacttcaaagggattgagtggaaaatttgcgctgaagtggtgaaaaatggcagcaatgaaaaggctttggacatttcacttgcgtgtgtccccaccaaaggtgtgaaattataaaaatagctcttaaaataatacaatatttacaattagacaccatttgtaccggcgaatgtacggcgatacttcgatttgtttcacaaaagaacgaaacgttacaatttgcaacaaaaactgttgaaaaaagtggttttagcactgaatatgactgcgtggcgcttttcccctcgattacttttacggtgagcggaggcaaccaaagcgtaacaattcttacatcggcttaagctaggcctaatatttaatgcttatattaagctttataattttttatgtacgagttgccactgacttatcagaagaacgtctttctttgcttaattaaatggttttaaaacaaaggaattgatggacgccgacaaaggattttacgatgaaaaggatgacaatgtgagtttggccattgattttaacgtgaaagtacagaaagggacgaagtgcaataagttgactgtggaatgagcaaagcaacattttgttatcattattattcgattatcctttacaattttacactttttacttttatttattttttattgaaaatgatgatcaattgttatcactcgttatctcacctttacaaaataaaaaaatcgaaaaaaatttatctgacctcgcaaacaattaaaagagggattataattggcagccttagtgatcacgaatataatattcattttaccaaaacgaggggaaaaagcgtttttttcaagaaagttcgggaattgaccaaaatacagttaaagattggtgaaagcttcccaggttggaatagactagtcttttaaatttaatcaaatttaaattttttggcgctttttttaaatttgaatttaattgactttccttttttgcttgctcccttttaatcttcggttcgcaatagtacacccaagatctacttccagatttattgtgcacatctttgtttttcttcatttaaatgattcgtcgatcaaaatagcgataatatagatcatattttgctttccatttcttattgatttatttgttcgtttaattcgatgttttctttccaatttttgtattaaattatttctatttttttagaatcaaaaaacaataaaaactcacgaatcctcaacaaaatgagcaatcaatccgcggctgaacttgctgacgaatatgagaggtgcgtttttagagaaaaatctctgttggaatttaaaaatgccatattttgtggttggtggcacttatttcgttgttgttattgtaataaatattttagggttgacggtgaagccatcaaaagcaacgaggacagacgcaccgaggccgagcaggtcgggttgttgaacacctttttcagtaatagtttggaaaataggagaatgacaacggacagttcgttgtcagtacgccgtccaaaatggacgaatcggaggacagcggcggagaagtgaccccggagaaggaattggtcgggaatatgaagaaataattctattcttttgtggcatttcccattttcagaatgtcaatgccggtgtcaccccggcaattatcaaactcagacagtcgcgcacggaatttaaggtttttctttttgataaatatgctaatttgtaagcgaaaagccagacctctgggcttatgtgtagacagatcctttttttatttatttgattgttaatggaaaggttacaatgttttttcaatttttcttccggcggcgcctatcggcaccgccggactcaaaaaaaaacctattttttcttaacaaaattagcccaaaatctcaaaatttggtcattttt

SEQ ID NO: 19926 - DNA, 2161 bp, Heterodera glycines
actttgtttattttcgcccgattggctgcggaatcctcggcggatgagctcactgaagaaggaatgtctgaagaggtcggaccccccgggcaatgaattggggaaaggaaatcgaaacgaaaaagaaatgccgaaatgaagagaaaaattggcatttaatgaaatggacaaatggaaaaaggccaaaaaaagaaagaaaatttgaaaagagacgaattattattaataatttatggaaagaaatcatcgatgaaaagggatttgtgtagaataattaattcattgccagcggcggattattcggcgttaattgcttttgtttactgagaaatggaacaaaatgcgcagcaaaattaaatccaaaaaaataattaatgaaaatgaaaacgaagttgaaaaagaaattaaataagtattggctttaaattatttatttaaaaaaattttgtttgtttgtcagacggacaaaaaagcaaaggaaaagcaaaggaaaagcaaaggaaaagcaaaggaaaagcaaaggaaaagtttggattggttttaattttttaaatttgttattttaatggattatccaaaatgttcttcaattttctattttccttctaacaattgacaaaagttaaaagttgacattttttgattcttttaattggcattggacagaaaagggcctttcagtcgccgcttttctcggaagaattcccccccccccctgggggtccgtccgtccatccgttctcctccgtaatcaatccctgcggcgttttgtcccccccgcggcgcaatggacggcaaaagagacggggcaaggcaatttgtctcaagttcagcaactgttttttcaaatgaattttatggaaatgtttattttcccaatgatttgtgttttaatttaaaatttggaaatttttataccaaaaaataataaatattttagttcttttttccatttcaatgtattgccatttgatttattactttttttaacattaaaaggttcaaaataaaaaatgtgagagggacaaaaagccgacaaaaagtcaaagggaaaaagcaaacaatgctaattctaaatcattagtgaattctgaattcaaaattgaaattaaaatactaaaagtaacagtccattttatacaaaaaggccaaaaatatgccaaaacgaccccccagggggaggtgggggtggggtgcaattgcagcgggtgaagtgccctcggcttcaccttgcccccccccttcgcttgttttttgcctttccgtccctttggcttccttttttcggcggaatgccaatgcgaatcccccgaggagtttgtcctccaccactggccaacccaaccaaaaagccacacaaatgttccacatttggacatttggacaacattttgaatgcttataaatagccgccatttaacgccaattaaataaacgatttggaaaaatgaaaaacgcattaacaaaacgccgatggagaagaaagaggtcacaaattatcagttaaataatttggcaaaatataaataattagggaaatttggacaaaggccaattaatagctaataaaaattactgaaacggcaaataagccccgcccctccccaaatagaaatgctgaagagagagagagagagagcatcgaccaattgggaccgaccggctgagtttcctttcggccaaattcatcttccgtcgcccctccacaattttgacggataagccgagcggtacaacaaagggcctttggcggcttcttcgatgtgacagttgctcatctctccccacccccgggcaaattttcttcagaaccctcggccagttcaaaatgcgcttttcatgcgttggcattccgtccctttcgccttttctgctgactgaacgttttcaccgcttctgagttcgtcccgtcattcatcctcaaaacaaaacttcaaattgtttcaggcaaaaaccaaagtcggcaggcggcaatcggacaccccggcggagatgatggagaaggtccggggggattaaagcctcgtacgaaacggaataataatctcttcaccgccccgaggggtggagacggacggacggacagccatcgccggcggcggagccttcgctttgctccctttgatcgtttccgctccgccagtccaaagtcagtggggaa

SEQ ID NO: 19927 - DNA, 1909 bp, Heterodera glycines
  unsure (1)..(1909): unsure at all n locations
tctgctgtacaatagagaagttcggtattcggcagaattgagcggattgtgtagaagtaaatgtcgttgtccacttggcatgccaccatattctgcgactcgcgaccctccgccattcgcacgtttcgcatccaattggcttttcgcgagttcgtgtcgatcagtcggatcagttggcctccgctggacgagaaaatctatgggagaaattgacaacaaatgaatgaaaagcatcagaggaaaagcaaaaaaggaaacgaataattaatggaagaaagcctttcgaaattccattcccaaaaatttctcgaatttattttcgtttcattgggagaaagcggagggcggttgaatgaaactgaaacagttaattccgctgggaacgggaaaagccgcttttcgtgttggccaaaagggcgccctttctcccacgacggccaaatttgggccgcaccttccactggctgtgattggccctccgcctcggcgtcgcccggggctctgtcccaatcaccgcccctcccccgcgggctgactcagtcttctcgccgggagtggcgcccgccaccggcattacggtcgcctcctccacggacggagttcgggactcaccgcacaacggaccgaagcgggcgaagcggggaatgaagtcggccgtaaaaatgccaaagtcctgaaaagaaaacgcatggccgcttttcccctgctgggagcagcttctgcttacatcattcgctcctccggcgaccgttttaacgaccaaattcaatggaagtgagctcaatgaccgattgtttggatcctttcaaagaaataaaaaaataattgaaaatattcggccgattttgccacttgcaaatggagaggcttatccggcacatggaacacgcatagattggccaactcgacgtcgttgagccgttcaatttcatcggcggcatcggcgtgcggcgggggaagcgccggcggcgacgaaagtgacggagagacggcgccagcgaaaacactctgctgatgatgatgaccgatcgcatctgttgaagcgagtgattcaattcccaattaatccctgccaattcattttcatttggctttgttttcatttccaattatttggtgaaaatcacacaatttgtaagcccatccattcaccagcaaaggcttatgaggaagggtaaaggtgaaagacattaaatggaaattaaatgtcactttttgctgatgaatcatttattgcggggcattgacagagggagaaaagcgtgggaggggacagaaggaaaaagggggggggcaaagggcggggggaagggagggaacgccaacgggggagggaatgggggggggagaaggtgcttctccgatgaattgcaaaacccaaaatttactttggcctcctaaccaaagggcaccaaaacgacagtcaaaaaacactttctccggccaaagaccatcaaaaggtgcagcagggccatatttagtgatttcggtagtaaaaaaagggggggggaaagagcataaaaagccataattgggattgttatggatgcaaattcactttggctctcttccgcttcacctttggctgccatttgctgctgctgtgccgttttctccgcttctccgcccgtcattccccgcggcgtttcttccattggccttttcctctgctgctcgctgctcgcgacggccatcttccgaagcgcctgagaagctgcagaagcgatgaatccgtgggaagacgaatcgccaagggacgagtcgaggcccatttttggggagacgaaggatcagtgaaatcagacaaagtcgctaatggcttaacgaacaaaagtgaaaatggctgcgaaggggagaggaggatagaagagcgcaaaacngggggagggggagtggggggcatgggcta

SEQ ID NO: 19928 - DNA, 1358 bp, Heterodera glycines
aaagactttacaaaataataccccttctctccacgggagtgggaaattgatttaaaattttaatttttttagtctaatctactcaaaacggttcagaattcaataaaaataacattcacggtgcgaaaaatggggtttgacaagtttattggggaaaaaaagactttacaaaataatacccctgggagaagggagtgggaaacatgatttcaaaattttcaattttttctagtctaatctactcaaaccggttcagaattcaataaaaataacattcacggtgcgaaaaatggggtttgaaaagtttattggggaaaaaagactttacaaaataatacccctgggagaagggagtgggaaacatgatttcaaaattttcaattttttctagtctaatctactcaaaacggttcagaattcaataaaaataacattcacggtgcgaaaaatggggtttgacaagtttattggggaaaaaaagactttacaaaataatacccctgggagaagggagtgggaaacatgatttcaaaattttcaattttttctagtctaatctactcaaaccggttcagaattcaataaaaataacattcacggtgcgaaaaatggggtttgaaaagtttattggggaaaaaagattttacaaaataatacccctgggagaagggagtgggaaacatgatttcaaaattttcatttttttatagtctaatctactcaaaacggttcagaattcaataaaaataacattcacggggggaaaaatggggtttgaaaagtttattggggaaaaaaaaattttaaaaaataatacccctgggaaaagggagggggaaacatgattttcaaatttttaattttttttagcctaatctactcaaaaaggttaaaaaatttaataaaaataaaattcccggggggcgaaaaaaaggggtttgaaaagttttattttggggaaaaaaaaaattttaaaaaaaaaaaaacccctgggaagaagggagggggaaaaattgattttaaaattttcaatttttttcaatcttatctactcaaaccggttcaaaattcaaataaaaaaaatttcccggggggaaaaaagggggtttgaaaaagttttggggaaaaaaaaaatttaaaaaaaaaacccccggggagaaaggggggggggaaaaatgattttaaaaatttttttattttttttttgtctttttcacccaaaaccgggtttaaaaatttaaaaaaaaaaaaaattctcgggggggaaaaaaggggggtttgtaaaaaatttttgtgggaaaaaaaaaaaattttcaaaaaataaaccccccgggggggaaagggggggggggaaaaaa

SEQ ID NO: 19929 - DNA, 2465 bp, Heterodera glycines
aaattgaccatttcaatggttttttcctctttaattttttataagaaattctgagctgatttcaataattttaatcagttttgctaagccaattcaattccagcgaaaattgtcttaataaattgccttatcaaatgtcagaccgccgtaaagaagcggaggagaaaatggcaaaagcaatgtaaaaaatttaattaaaatgccaattttcaatttcaattttaaatattttctttccttttttttcagtttcatttccgccgactgttggctttgtgtgttcgatttgcttgagccttctcaacttggccttggaatttcaatgatcagccaccgttttgacttttacgtggacgaacattttaaaacccgcaaatgggcgctaaaaattattggaattcgcatcaaaaatggagaaaatggcaccaaggaaatggaaattgtcaatttcagtggaaaacaaataccaattccgcaaaaaccgctgccacgcggagtcatcgggttcgaacgcgtcgatttcgtgtaagattggcgattatgcaaagatttagacaaacttcccatgtttagttatatcgaccacaatgtgatcacttttctcggctattttcgcccacttttcgccgcctgtcaaatcaatttgttcatccacacggacagtgatcgagttttggagttgattttgcgcaacatttggccaatgatcgcgaccaacatttgtgccattcaattgtccaccgaaatttttcgctgtttgcgacaaatggcgccatcaattctcgacgactgtccatcgcttcgcgttgtcaatgcctattctggtcgtttcttcgctgaatttccggccgatgactggcttttcactccgcttcaaaacggtgtgccaaaagtgttcagatgctggatgggcaacgatgaagggacttatccgtcgatcattgaagcccttaaaacggtgcttactaatccatgtatttagattttttgggcatttctataatcagacaaaaagggcgttagtacggacaaaaatggtattttccttcgatttttcattaggcaccaaaaatggaccatctaaaccgaaaaagtgcctgccaatctctggatttttgtcccatccccaatcgtaaaaatgtcattcatttcgtttttcttaaaccacccgcattttagacttttgcctcggtttcttcccccgtcaattttattgtcgtcatttggtttccgtcgtcttttgcttcctccgtcgtgctcttcaatttgaccaacgaattgactcgtgaacaattggcattgaaaagaactgacaatagcgatcgttttctgttggtccgttgtccaattgcgcgagacgaaaacaaatggacaaaatgggaagaagaagcgattgattggcgaatttataatcagtggaatcaaattctcatgctaattaatgagaatgatatcggagatgggtcagtgtgaatgttttttccatgagtcaaatttatttgcgtttatatttttaggcttctcgacgcaacgcccggcccaagtgatcagcagcagaatgaatgaatcaattgttgagaagtgattgatcaatttaattattgaaatcgaaaatgaattgaggctattttaaaatgctcgtaaaattgtttttttgttttgttggaatgatcaatttatttattttctgcttaaattggtatgttcatgcttaatgatgagcattgtgttgaatttagcattttatgcttaattggcatgttttcgaaacttttgactaaaacaccgtcttccagcaataaaaagcaaaaatacaaccctaagaaattggaaaattttttcaaaaattcatctttttttttttgtaaaattttgaaatttattcaattttacttttaatttttggcttggcaccaaacgaccctaccccaaaaaataggcactaagcctcaaaatttattgatttatgaatgaagaaaaatgacatacaacacaccatttcaatagcaaaagtccaacatttagatcacttaattgcatcaatcaaccaatcaattttcatttcttctgctgtttctgatcaccactcggccccggcaaatcgtcgagaagactgaataaaaaaacaaaatgaaaatgagaaaattagcaataaattttttttttaaataagttttgagaaacttattttcaagggaatccaaatgaacattttaattttcgaaaaatgttcgaaatccggatttgggattcgaaattgagttaaataggaccagattcgtgctaagcgcctcgggattacccctgaaaataacttcctagtaattaattaaaaaaaaaaattttccggactaacaatctttacaattgccgatttttgacattgttcacccattgtcgtctccgatgaaaatgccaaatttgttgtccttttgtcctctcttcaattcattcatcatttccct

SEQ ID NO: 19930 - DNA, 2171 bp, Heterodera glycines
tatttttttgttttatttttttgaataaatttgtcaatttgcgcatccctatgaaagtttttagcaactgttttgggggtttttagaaactaaaactaattattttggcagtttttagcaactacatacttatataaataccatccctagatatcacataatctcaaatccatctatttaaattcataaacactaaggatgggtaacaatgctcagattctttgctactaaacctgtaaagattagtctggcaaattctaatggtggacaaaaaatttctcaaaatttgttcgtttttgaaaaaaacaccataaattttagaacactgtccataaaaaatacctatagattcaaaaaaggtcggggaccccgatcgggtagtgatcaacgaaatttatttacgaaaaacccaatctttatttttaaatgctcgtaaatcttcctttttctcactttaatcatctgatttcgttagcgccagcaagagtgagtccaatctggcctttaaaccaggggcttccatttgttcttatttataagaatttctaattttggggtagcgacaaaaattgttctgattttttaaatatatttataatctcggtcagggacgttttcgtaccgccattttcgtaccgccgttttcgtaccgccgttttcgtacgggggacgttttcgtaccgccgttttcgtacgggggacgttttcgtaccgccgttttcgtaccgccgttttcgtacgggggacgttttcgtaccgccgttttcgtacgggggacgttttcgtacgagttcttgtacaagcgtcagattcaattagaaaaacttatgactaactaatcgaaccaaaattttatcattttttaatttcccattcataaatttaatgtaaaaaatgcataaatttaacaataacaaaatgggacaaactagggtcgcatctcatagtttcgggaaataccggcgagaaaattgttaatgttttcgggattcacattgggattggcataattgtgatcattttgggggacaatattgacatcgttataacgttggacgagacgaagaatccgtgaatcggcatcgcgatacttccttttcttttggggtgcggcttctcccatcatgcaacgtgccatatcagcatcaagcgccttctgctcacatctgatcgtgtcaatgaatcgccaaattgttggatgagtgcagctaaattgccgctgaagtttccgatggaatgcctcggcgaagttgttcgtccgatcagcaccatccaaggtgcgctgatgaacactccattcgtgtgggtcaaatagaggcgccgtcattggaacattgaagcgcattctgcccgtgtagttgtccagaaacctagaaaaaaaaattcataaaattcgtcttcggacttaaccaattgaaaacgccattaagttgtggcggaatttgtgcttgaagagcattaagggcattttgaaggtggtgcacaggcaggaaggccaatgatgtgatcatcttagacttctcagcgaaggcaggatcagtgttgtaaaccttaatgagtttgaatgggaatggaataataaaaaattctaaaattacacgagtgaggcccagggcccttatttgcttcttcatgttgcggaccaagtgaaaaaaacgcaagaaaatcgaacaccaaaagccagcaatcgccgcagacaaagttgaaaaacttaagaatttttatgaaaattcaatagttgtttatcactattttcggccaaagtattttatcggagtaaactattaatcgttattattatggcaataaaatctgggcaaaaatataattacagtaaggaatgcaaatagtttttttatcaataattattttaacttgaataacaatttaccccacccatattctggcacacaattaatattaaattaaacatactctgtttagcgtttctctttttctataaagagccgtgtttagcattttaattttcaaaatttccgagacatatatgtaccattaaagttttttaaaagcaaaattttactgtcaaaatcaattttgtcggaatcacaactgtcgaaaagtaacagaatcaagtagttactcaccaagattttgggggttgcatttcagccccgccatttcagtcccactggaaagggacatttcag

SEQ ID NO: 19931 - DNA, 1278 bp, Heterodera glycines
ttaatttgctcgagacaattgccctgggcaaaagtgtggtcactccgctgtgggttgaagcgagcttccgtcaattgggctttttacgtgagttgatttttgtttttcgcctaatattttgttgcattaaaattgcagcggatctcaattttttcgtaagagatagtgagaatgagaagaagtacggttttaacctcaaagcaacaatattacgaacgcgaacccgaagagtatttaaagtatttatttttgttttttgtttattttccaatggatggatttttagggcgtagaatttcatttaagtagcgaagtgcaaccaaaatatgaaattatccgaaggttagttgaagcagccggtggcacagtgcagaaggataagccaaagaaggaataccttttaaagtgtattcaggtgagtaggagcaaaaccagcctagggggaggaaagtgaaaatgaccgttccatgcttatttttggagcttattcttgtgggggtagccgctggaaaatctcacaataagctattttttatcggaaatttttttttacaactttcccctcgttcagaaaaatgtgccattcttcattatttgtgataaaaacacactttgttcctaccaatttcttatggattcgaactttcgtaagtcttccttttgaaaagattaaataaaaaataatttagctattttcaacgaggatttcattctggtggctatccttcgacacaaaatcgacgtttctgaagaatttcatgcgttttcattaaattcaactcaaacttctaaacctaaaaaagccgatgaataaatttttgttttatttttatggataaattttaaataattagcgttagactaaaataactcaaagcgaagttttatcgctttgatatatttaaatcacagatgtattaacaattaaattaattttcatgattaaatgaaccgacaaaagcgccaaaatttaaattcaattttcaaaaagaaggcaattgacttggccctcaatcagtcccctctctcggtacgcttatcattgagctgtttccatctctttctcacagtttgttgttcatatttattccaaccttaaaaaggaatttaggcagaaaaaattaatgagcggaacaaagtgaaagtcactcttttgtcaaaacctcagtgtgatgcgaatggttatgagataattgtggactataagctaattgtgggaaattggaccaaattggtaataaatgtgtggaatggaacaaatgagtttcgtttattaat

SEQ ID NO: 19932 - DNA, 1687 bp, Heterodera glycines
  unsure (1)..(1687): unsure at all n locations
catggagcacgactcgtgttacattgacacttggaagtgctggccnaatgtgagggaaactttggccncacaaggttggcagggaataaactaacagtaaaaaaacattcatttatactatttgcattcttgggtgtcaaaattctatttaataaaatacgaattttaagacccataaatattaaacttgcaatggttcatttttacagacatcaaaacttcaacaggatttcgcagttttaatatcttggcaagtgtaatagccgacctattgttagaatttgattgaattaagtgttccgacagaagtttttacgtcaacacgacacatttgaatttgttgggtggccgaatgttcaaggaatggtatgaaagagaatgtcaaggtaattaacgaattctaattgagaagggtttataagacaatgcgactattttaggggagaaaaacgctgtcatccaatcgattgacgccaatgaattagaagagttgctccaaacttgttgtgcttacgggtcaactccaacgatacacaggtgaaccattctgtccatttctgtgaaattaccatttggtttaggaaaaactttcggaaaattttggaaatagcggacaaagagaaaatttcagggtttgtgagtttttgtctttttcgttaattgttaaccaaattaagccttttgcgcattgtcgagtcttttatcattgattccgaatgcatccacccaattaggaagcttgaatatgcagcaggtcaaaactgaatctgcagggtccgacaaataactcaaatgttctttcaaaaacagaatatcggatgagccgactcgctgacacagtgcttcgattatttcctactcaaattgaccggctcgattcattattcttatatttagcagaaaatggagagacattggccgatgttcacttggatgtacttaaaatgcttgacattcatgattcatacattgttatgtaaaacaaattcttgctcttgacaagattttatctcttataattcagttttgcttttattttgggacgttttttgttttttcattccaatgtcttctccttcgtcctttctatttgagcagtttttcccatggttggtctccttaattgctctgttctctataattatttggttgcgaagcaaaacaaatcgaactttgtttgtgaatcacgaaaaaggtaaggtttaaagaggaggagaatgttaattaagttgtaacaaaagggagaagactaatggccgtgcttggttctggcggacatacgaccgaaatgctcaaattgcttgctgcccaggacgaccttttccctggaaggctgtacgtaattgccaaatcagataacttgagcatagtaaaggttctaatttgaactgtcattcatttggttggtttatgataatatttgaggttgaggagtttgagcgaacacatggcaataaattctgtgtcagaatcgtcccaagggcacgtgaagttgggcaaaatttgctttcgtaagccatgttccaatgtttttgtcggttcgagtcccaaatctcattttttgctaaatcgtgaataagttgtaactacggctaggcttttaggttctaaaaactgcccaatccnaatttaggngtgtaaaatcgtaaataattgcgaataactcgaaaaacatgtttttcatgca

SEQ ID NO: 19933 - DNA, 1802 bp, Heterodera glycines
  unsure (1)..(1802): unsure at all n locations
ggtttgatgacaaatgaaaaaaacaatagtcaaaaaacatggactggctccgaacgactccgaccgctgtcaacaccgtcggacccccctactttcccaaaacattgttgaaacaccgcaaaaaagtgggtttgaaaagcaataaaaaaaaactcgtcgattcatgctcaaatttctcaccgacgtattgttctcaggatgacgaatctgttggacggcatttgttagctaaaattttaaaaccaattaattgtattatattatgtttctgtaaatggactgacgtgaacgagctgttcatgaagtttttgttgctgttcatgaagtttctgttccgcgtgaacgagttgtttatgaagtttttgttccgaagcgtacatttccactcgtagagctttaatttcccttttcaatttgatatcgaccaatgtttgctgcgctttgttttgctcgtactccaattttgcaaattgctccgcatcgctcgctgtcaaaacattcgccaaaattgcctgttaaaggggtttattttggaaaatttccactttggcatgggccattcctcccatataaaacgggtttttgacgccaatgcttaaaagtagtaaaaatttcagtcaatttttttcatagccaaagtgaccccgaaccattcttttgtgttttttgtcaattcgttcacctttctttgctggtataatatagcagtcgcccttggcataccggtaactgtctccacatcaatagaagctagaataaacaataattagtagggcacggagcgggacggatcccgcgaaggattttgcgagatcccagtttgcatccagcattgtatgtatgcgcattgctcaaactagggttgggcccccgacccttgtaactggcttcacccacgagttgaacagtgtgaaccgccatagagcatttggactattttattgaattctgtgcgcgatggcggcggcatggattcagtgcgcgatggcggcggcatgaattctgtgcgcgatggcggcggcatgaattctgtgcgcgattgcagcaccggcaatggcacttcagcgacaatctgttttaaatgcattcaaataaaacttttactttttgtttcaacccacattttcaagcttttttgtaattttttctaagtcagctattactgcccttatttgcaattgatccacgctcatctgatgtatgtacacaaaaattaggaaaaaaggctcaaaacaaatagaattgatttaaaagaacctaaaaacaaagagaaaaatgcaaattaattgagcgtttttttcatgaaaaatcggtttgaaatgtccactttcaatagggaccaaatcaaacagtccgaaaattgaataacacacgaaacagatttaggtttagattagtttagttgtaatttgtgcttatttagtaccggcaccttgttttttgtgcttagttttccgactttatataaaaattacaaaaaattgtaatttataatttacttatttttagttaaaatctgataacttgggctaggatatttacgtgctaaaaatcgagaaataggtacctaaataggtgctaaaaatgtttgtaaagcattttccaaaaatgcgggattgcggactgggatcccgcaaaacaggaccccgtcccgcaccgggctctagttcttacaacagtttattttaaataaaataaatggcgaaatgaagtttgggcaccatagagaggaattcgaaaaaataanatattatgtagaaatgttagatctaattanaatatagtanattataacaattgct

SEQ ID NO: 19934 - DNA, 3296 bp, Heterodera glycines
taagaaatgggaaatggaaagagaaaaagccaagtgaaaacagcgaggtagcccagagaaagtaaggagagagagaatttagacaaaatggagagcaaaaagagagagagagagagagagaggagagagaaaagaaagaaagaaagaaagagagagagagagcgagagagagagtgagagaggacgtgaaatggggccgcaaaattggcaaatgccctgcgggggaaagcaatcgatgaatatatgtatatttaaaaacgtaaaaatacccgttcttgtttattaaattcggtgaaccagtgatcattaagcactgaaatgaaaagcattttaaaatggtcagtgatcaatgatcaaagcgcatgaattcgagagaggcgaacatggaagaaaggggtgaaaaggaaaggcaatttgcacttttctcctttttagtcattacgaaaaacgaaatgattttggtttcgatttttaaaaaccctaattttaggcttttggttcgttcggttcgcattcctccgaaattttcttcctcctaaagcaccaccaaacatcccccaattctcattcttctgtcccgctttttctttccacgtttcccaaccgccgattcacttgttatttgtttactccataaaacgcaaataaataaggcaccaaacatcgcttacgcctttcatttcgccgtaaacaaaaacataaaaacattgggggggggggggggggggtggagcccccgacttaggccacataaaaagggcagatccgacctcattcactccatctttaactaaaagcatgcattggcttttcctgactgttgtggtgaattcacttttcctgcctacccaattttagcttccctaaaacactgttttccgaataaaagcgctaaggtttgggactgtttagtttggatttcgggtaaaccattaataattgcaaggaaatagataaccagttgattacaaaactaaaaataatttaattcgttgtggcatttcaaaagttgcctttacatttgaatttaggaaataaaacaaaattccggcatttatctcacgatttcataaatatgcttcccaaaatcgtacgggctgatcgcatgctcactgggggtaaggccccagaggatcctcatttaacttagatcagtgaatgccgtggcatttccccttaacacttgggtttttcatttttgggtgttatccgaaagttcatttatcattcgaattttcattttatccttaatatctcttcattgcttcgattaaattttagctaaacaattccgattgattccaacaaacaaagcgagcagaatgactactgaacagggaaagaacgaacaacagcagggaaagggcatttacgagagcaccaaggaaagtctgtcgaacgtggcggaggggacgaaggaatggctgacgagtgccaaggacaaagtgggattttgggataatggagagagagagtgagagagagagagcgagtgaggagagagagtgagagagagagggaggggtgatagagaatgaaatgaaaaaaagttgtgggagtatatgcagatggtcagtggataattgcacttcctgtttatttgttaggtggccgattcgctgacttctacgaaggacactgtgaccggcaagtcggcggagatgcgcgacagggcgtccgacagttacgaggatgctaagcagggggcgcaggaccgttacgagcgtgccaaggagtacggcagtgagaagacggagcaactgaaggactatgccaccgacaagaaggtaaagcccatcggaattggaaatgacaaagcggagaaaaccaaccatgaccaacccaattcaggaggaagcgggcgagaagatggagcagaacagggagaaggctgctgagaagtgggacgagacgaaggaggctggaggtgggggcgaaagggatagcaaacgggaagcatttggggagagggcaaattggcaatcaatgggtttgaaagttaggggcgttaagtagttgaacaatttttcggctaagggcacactgcggtttaagaatgtgggtgatcatgataagaatgaaagtgggtgtaaaaataaaccgaattatttaactagctaattaattctttataggcgagcgtatgcagcgcgccggtgacaaaatcaggggcaaatagaaaggatgtccaacagaatgaagagcaaatttatctgatctgatcggactctgtgagcccaatttaactgctctttttattggaatatttgttgtccatcttctcatataaaattttcgtgaatgaaaacaattcactataatttgtgtcaatgcgttaaatcaagcaaccgggaagaaaaaaacagcttagatgggtaaacagaatctatgaaattaaaaacggggagtttcgaatgcgttagggccaaggcaaagtttgtctaattagacgatttgctcattttatgttcagtttggccaatacgtctttgtccgaattgttcaggagaatgaaggtggcgaatgcattgagcaaatccttttccttttcgaagagacgagaaaccttcagatagacctcgtcgagagtcgatttctgttggaaatgattggcacttaatcagtcaaaaagcagttaagaagctaataaatgggaggatcaaataattatttgcacttaattctttgaaattactattcctccaagggtttcgatctaattgcttcttaatatttgagaattgacccattgatatacatatggtcttatcaagttgctgaattgtctttaccgtactacaattgaacattaaacactacttttgttttgtagtcttttaggtgatgcaaaaactgtgtgtacaaattgggctcactcgcaaatctttccttaaaagaatttatttatggaaatgccttggtatgttaacgagatattttaatcaacgaatggtccgttttatcaattatagaaaaggtaaaaagtaattagcgctcaaatgaactcgcctttactctcttcacaaatctgactgcatcttcctgtgtttgatcagcttttggtatttcataatcggggccctgtttgaattattatttgttttttaatttaacgattcaaaatcaatctaaaaaataaataacatgagtcaagaattctaaaacttattgaaaatatgaaaccgaaaataacctaaattttgttggatttaaaagaataaaattggatttgaaagtaaagtttgaaactcacaagaacattagtgtaaaattaaagttttgtaaatgttaaattt

SEQ ID NO: 19935 - DNA, 585 bp, Heterodera glycines
ttcccgcactaattaatttttcgaagatcaaaagagaaccgagggggtttattccgatcatttttcttaagtttttttcaattcataattctgtgttttaaaaattgttgcgttcacaaatcgataatttccgttgatatcgattaattgggggggggcacaaaaaaatcggctgaacaatcacggggactcaacccactaacatttcaatcaccaggactcaacccaccagcatttcaatcactgggacaacccaccaacatttcaatcactgggactcaacccaacagcattctaatcactgggactcaacccaccagcatttcaatcacggggactcaacccactaacatttcaatcaccaggactcaacccaccagcatttcaatcaccaggactcaacccaccagcatttcaatcactgggactcaacctcagcaaatttctttagcatttttaacattttgtgtgccttgggatgttgaacagttggggagggctcggccgcttcgcggcctcgtacgggggcgttagtccccccataacaattattctgcgccaaaggaactcgctcgcgcgattcaa

SEQ ID NO: 19936 - DNA, 1588 bp, Heterodera glycines
aaaaaaaggggaaacagagataaaagtcaaattttagagggtctcaaagaaaagcgtgatttttcaggtacataacggaccgccgcatgacagcaattttggttattcgtacgccagacgaatgatcggtgggttggcaatgatcagctaaataaattcaaatttccaataaacaaacagatgtactcaaccgcggatatgctcaggagcacaatcgaaagtatcgagaaaaaataaatattttatttttgattaaatattttaaactttctctctccacctctctctctctctccacctctctctctctctccacctctctctctctccacctctctctctgtatttctttattttttttctctctctctccccgatctctctctaataattaatgcgtgagattgccgacatttttgaacgagtgttccaaaggtacacttcggcagtgccgtgcaatgtatttggaccgcgtgacaattacaatttggagaacggtaagagaaaacgcaatggacagaagagcacagacaaatctttacggagagggaaaaactgggcaatgcacgaaaatatgaaaataataataaacccccacaacaattttttgcgccaaaggtactcgctcggccgcttcgcggcctcgtactggggccttcggccccccacaattttctgcgccaatccaccatcatttaatcactgggactcaacccaccagcattccaatcactgggactcaattctcctgcatttcaatcactggcactcaacccaacagcatttaaatcaacaggactcaaccctccagcattcaatcactgggactcaacccaccaacattccaatcaacaggactcaaccctccagcattcaatcactgggactcaacccaccaacattccaatcgccgggactcaacccaacagcattccaatcactgggactcaattctcctgcatttcaatcactggcactcaattctcctgcatttcaatcactggcactcaacccaacagcatttaaatcactggcactcaacccaacagcatttaaatcaacaggactcaaccctccagcattcaatcactgggactcaacccaccaacattccaatcaacaggactcaaccctccagcattcaatcactgggactcaacccaccaacattccaatcgccgggactcaacccaacagcattccaatcactgggactcaattctcctgcatttcaatcactggcactcaattctcctgcatttcaatcactggcactcaacccaacagcatttaaatcactgggacttaacccaacagcattccaatcactgggactcaattctcctgcatttcaattactgggactcaattctcctgcatttcaatcactggcactcaattctcctgcatttcaatcactgggactcaacccaacagcatttcaatcactgggactcaacccaacagcattccaatcactgggactcaacctcagcaaatttctttagcatttttaacattttgtgtgccttgggatgttgaacagttggggagggctcggccgcttcgcggcctcgtacgggggcct

SEQ ID NO: 19937 - DNA, 1368 bp, Heterodera glycines
  unsure (1)..(1368): unsure at all n locations
caggacggtcgcttcgcgcttaaaagtcgaatgccttttagtttaaattttttttataataaaatactcgttttattaattaaaaacaacgtcgaaaattaataattgaatatttgtttaatttgaaatgaaattaatttttttgcaaattcaaaaaataaataatgaaaatttttaattaaaaaaaattaatttaaataatttacaacaaaactattttaatttattaaatgcagtgaaaattacccaaaaaatgaacagaaaaataatgtacaccgaccggatccgaacttgccccccgccccctcaaaatgatgcctcagaatccccaatcacacagggattctgaggtcttaacgatgtcaaaagtaaaatctgattgcgtattcgtgatcagcggcccaaataacccataaagacatatttttggatgatttttgattttcaattaataaaaatatgtaaaaacagcaaaaaatacaaagaaaataatttacacagtccggactcgaacttcgccccccccccaaaaaaagatgcctcagaatccccaatcacacagggattctgaggtcttaacgatatcagaagtgaaatctgattacgcattcgtgatcagcggcccaaataacccataaagacatcttttttgaaggtttttgtgagaaaaatttttccactcaaaaatcctggtcacccaacatgatttaaaatttaataaataaggaaattttttttattaaatattaaaaataaaatgcattttaattttaaattattaataaaaaacaacgttgaaaattaataatatttattttatttaaaatgaaattaatttttttacaaattcagaaaaatattaattgaagcaaaatattcgatattttataaactttaattttgaccagaagcagtttcaagcaaatatgaaaagatgtttatcttattatttgttacatgaatttataaaatgaatggtatttttaatattaaaaaaaatgagtacagcagttgattcataaaaaaagtattaattaaaataaaaaatgttttaattattactaaaaaatttaaattaattaaaatcattgaaaataacacaaaaataaatagaaaaataatgtacaccgatcggatccgaacttcgccccccccaaaaaaatgatgcctcagaatccccaatcacacagggattctgaggtcttgacgatgtcaaaagtaaaatctgatcacgtattcgtgatcagcggcccaaataacgactaaagacatgtttttggaagattttgggtgaaaaaatttttacactcaaaaatcctgtccaccaccgttggtcccgnaagcacaaaatccacttttatttttata

SEQ ID NO: 19938 - DNA, 825 bp, Heterodera glycines
tttttaactgatgaatgagcgagcggcggtccatttccgagaatgaaaaagtcgcaaaaaggattgtttgtttgtgccagatcaaaagtgccaaaatcggcacaattcccatgacaatgactaaacatccatcgaatgagtgggaaaatcacaaaatgggaaaggaaaaaaactgttggcctcacttcgaagacaacaaatgaacaagcagatattctgatcataaattaatcttaacaatttttagattggattttttaaatttaaaaattttttaaattaaaaatttttttgaaaattacggattacgccaaattacggcctttttggatctccgtaatgacggatggccgtaactgaaaaaattgccgtaatacggatttccgtaattgaaaatcagttacgtccagccctgccccccccccccccccgcttctgttacattttttgtttgttcctaattttggcgaatgcacgtgaactctctctttatttgaaatgagaaatggagcgaaagatctttgttttggatgcctttggttggcacaaatttattttgagttgtagtgaattggtttcggctgtcagtgaaccacataatttgtcggtacttgtgtggtttaccggagaaattccacatagattcttaaatgcctataaatgtattcattttacattgtttttttaagtatggaaattttaagactgtattcgtgacttattttctctcctgcaaaaacctttactattttttaggtgagttggcgaaatgtccgaatttggcttatttggcgaaatgtccagttggcgaaatgtcgtcgtgcc

SEQ ID NO: 19939 - DNA, 2594 bp, Heterodera glycines
  unsure (1)..(2594): unsure at all n locations
aattttagttcaaacaaatttattagcataaggttcaacaaaagattgatcattgattctgacagtttgtgattgatctgagcttcattaaaatactgatcgatcgctttttggattattaataattgttggggtagcggaaactttcgatcattttacctggtcaattttgatcacttactgatcaacaggggtcgatgaatgtttgctggggctgcacgactgtcatccgcttgcgacttgcgtggatttgacggacggatttcgttgcgaatgtttggacggactgatcgacgctgcgtcgtctgctgctggtggtgatcggccgggacgaaattgcacagcaaaaaacacatctgcactttttgaaacgcaaggtaacaaagtgttcagacagtgatggataatgttgtttaaagggagtaagcttatcagtgattgatcgctacaactgatcagacgtaaccgggggaggggggggggacaaaagcccataaagtcgtaaatttaaaaattgtaaaagaaacacttgaggcgataaagtatacaacaactcaggttttcaaatatttttggccataaattttttgaagcttaacgaagaatgatatcaaaattaaaattttagttcgattcgagcaaagttatgggtagttttttgttgaaatttttcattttatgatttttgctcacattcacaagcttaagctgatcagtgcttatcaatgctgatcagccaactaaagaggtcaatggggtgacactgattagccccgctgcgcgggtggcatgccccaattccaattgatcttcaaatttaggttgattggattgaaatattttgtaaaaaatgtacgtaaaaagaaatagaaattctgctgatagaaattgttgaggaataattgataaattaaatgttttttttgccgtatgcttaattaaagtcgaagaaattctttttatgtgcgaattttttctgaaaaattccttcttttaattttcgttaaaagattttttggaattctcaattaatagatgttttgtcataattttaactaacaaataagaaaaatgccttttttcgatattttcgcgactttttttaaactttagcgctaaaaaatgtgttggcattatttttggcttaagtttgtttttcagcggacattggtccctcctccgtcgatcgcttcttccgctgcgactcgtccaactgcgacccgtcctcggcccaatgtgtgccaatctcttcgagccaaccgtcgtcctctgtttgccggtgccgtgccggactcgtgcctttgtcggccaccgacgaccgttcattcccattccgatgcggacgaccgcccaacaaaggcgcgtttgtgagctttatgtaccaaccagggggctgatttttgggtggcattagtttctgttcggattcctcaccgatcaaactcagtcgaacatttgagttgtgccgaattgcgaattgtttagaccaaaattaaaactgaactcttgagatgcctgtttttatcccgaccaatccaattactttctcgagtgagaaatgatcccgatcaaatgttgtcggatttcaaattgattatcaaatagactccaaacactcaaagggttcaattgaaagtgtcggtcaatccagaaacagatattacttcaataatcgaattaagtcgctgtttgcttcactgatcactcactgatcactcactgatcatgtgctctaatgcttccattccaattccgatcagtcccgtctatcgatcagcagaaccatccgtcaatcattatttntaatgataatcatatatcccgttgtggccttgcttcttgtttctgtttccaaatgcaaaagtgcgctccgatcatggctgatcattcaaatgactgggaatgcttaacaccaatcaatcaattcattcattctttgccgacccgacaggtccgatcctgatcatgtccgatcagtagcagcatttcctctttgttcgtcggcttctcctttccgttcatggcagggaacacttcttattttacagccaataaataagaagccgccgcttgcgcctcacacaaagggtcccccgctgctgtgcggcttttcctcccccgcgggcgacgacaataatttatacaaaataattactcactcacacccgccggcggcggtgttgttcttgttgttgctgttgttgttgttgttgttgttgttgttgcacatgcacaccttttccgtgtgaatttccatctgttgctgacgggcggacccgttgcttcttgctgctctgctcattgtcattcattccgtttcgctttaataaatatgcaaagcgcgagagagagtggacaatggggagagtgggtaaagaaggaggggagttgggacaaacaaatagtgagacaggggagagatacgagggatattagagataatagaggaataagatagggaaaccagagaaacaaagaaaagcgagagagatatagaaatatataaattctagagaagactgattgtgagagaagaaaagtgatcagagaatgaaatgaaaaagcgaaaggaatgggcggcggggagaataggg

SEQ ID NO: 19940 - DNA, 1294 bp, Heterodera glycines
aaaaataaattcccatttaggcaatatgaaaaattggttagaaaatatgcaaaaaatattgtggaaaaacaatgaaaagcaatgcagttcacacaaactccgaaatttttgaaaaatttaaaataaaaaataaattatttttaatatttttcgggaaggaaataaactgttcctataaataggtgtctaaaaatcggtgcactacgtttcccgcgccgagaaattgaaaaaattttttactatcttagaaattttcaagaaaaaatcttattgttagaaagttttttttataaaaaacctctaaaaaatgaatttcgaaaatttttttttcttagttttcttaagatttttcttgtcttcgaggggatgccaaatgtgaaaaaacaacacgaagacttacccccgaatagcaaactgttcaagggaagagggactgtaagaagaaaatggaaaagaatttcaaaataaatcgggcagaaatgagaacaccgactttaattgtttgagttttttatattcatgaaaaacttcctaaaaggaaaaaattttttttcaaaaaagcctttaaatttttgagtttttctgtgttcaaagcgtggcttatgcacctccaatttttgcagattttcggtcggctcagccaacaattgggccaatcgttcgtccgttgcgtcaattcgctgctgacgcgccgcaatttggtcggccaacagaacattcgcatgacgaagctgaacatgaagcagaaatgattgacagcctcttaaattggaacagacccacaaaaaaaacgctataaaaatctaacaaatttttcagaaaaaagcatataatttacccatctaattgtaagccaagaaaaaaaaagaattttaatgaagaaaaattctcagaaaattgataaaaacaaaaaattctggaaattctatgaaattcagcgcctttcgggttaggttttgtgaatttttaaagttattttcttgggggacgacagaaagaggggaaatgaagtgaacccctcttaaattgactgacaaagaaaaaagtttattgtttctgtcgtcgaaatgattccggccttatcccgccccgttccccctccaattttctttccaatttttgcattttccaatttaaacattttacttttgccagcattcgccgcttttccaccatttcactgcgttttttggccattttttgtcgtgcccttattgccaatctctttgcttcgtcctcctttttggtttgtgttgcgattgtttcgtccgacggagcattcgatgcatttttt

SEQ ID NO: 19941 - DNA, 1932 bp, Heterodera glycines
cttttggccataaatttgttcaaaattgacgaaattttttggaattatgcaagataatagagcatctgaaggacactcgaatgataccaacaatgttagattttgttgacaaaaaaaaagttatagtccaaagttccttcaaaattgtcattccttcaaaattgtcattacaaatgtgcccgaaagcaaatcggacaaagcgacggagagagcccgggaggaccgtgccgttgtggacgaaattttgaatgccacggacgttgatcaggcaccaattgtcttccgtgtcggcaaacgaatggatggtcgaccgcgccccctcaaaatggaattcccgagcaaacacgcagcgcggcacgtcatccgcatgcgcggaaaggtgcaagcgttgaatggtctacacactgtacgcatccgcgaaagcatgaccaaggaccaactgtcggagaggcggaaactgatcgaagaatgcgggaagaaaaggcagacggacaacggtgattgggtgatttatgccaatcaggttgtgctgagacaggacattgaccatattcgaaaaaatttttaaattgtccaaccaaatcactgcaaattacctataattattacccaaaagtacaaaaatttttccggtctgtaaaaaatttctaccaaaaaattactcatccaaactttttaataaaaaataaagggaatgttaaatgctgcctaataaacattaggtcaataatgaataaaatcgatgaaatagcacttattttagaaactgaaaaaatagacattcttttaattaccgagacctggaccaaagacggggaagaaatcgatttttgcccttgggtaaaagagaattacaactatattttttcatcaaggaaatcgaaaactagtggaggtggttgtggtattctaatcagaaaagaaattggattttttacaaaattttcggattcaaaatttaattctgaaattttagttattcaacttcaaaatttacaatgcatcagatttgttttggtgtatcgaccacccaaaacaacactcaagcaaacagaaaatttgttcaaatttttacaaaaattttttaatgaaaattcagtgactttaggagattttaatttaccgaataaggatttggtatggaaaaatgggcatccctattcaatgagtaaatatggtgaaatattttgtgactttttcaatagattttcttacgttttggccacaaatgagccaacacggattaattcctggctagatttgatttttacggccaatgaaaaaattattactgattgtactgttaaaggaggcatattttcatcggatcatttaacacaatttttcacattaattactcctaaaacaaaaccgaaaacaaagatcgtaaactttcgttggttttgtccatcgaatgtgttacattttaatatagtcatagcatcaaggctaaatgccttgtcatatgaatgctttagcataaatcaaaaatattccgcctttaacagtatgttgttagaaattttaaatgagtgtattccaataaagcgtttaacaaagaaagatttgactcctaaatacccacaacatttattagcatccatcaaagaaaaggctaaattattcaggcaagctaaaactgacccatccaaaaaagcactatacgatagcatttctttacatataaaaatacaaacaaataaataccatagccaaattgagaaaaaggctatttcaaagggaagaaattcaatttataaatatatacaaaaattcaatgtcaatccctttgaaatacctaatctaatctatgaaaataaatgctatcataatagtgctgagaaatctgaattatttgccaccattatttgccaattcatttaataatagtgaaaccgacccaagctatccatgcttgggtaatattataga

SEQ ID NO: 19942 - DNA, 284 bp, Heterodera glycines
ataaaaaaaaccgggaaaaactatagaattgggcccgcaaaaaaaccgcccaaaaagggttccaatcaatctctaatgacctctaatcatcgtaaaaaatattcccgaggtgcggaaaaatcaaaaaacaggtttttgagccggtttaaatcacgaaaaattgcaccaaaaatcagccaaaaccccatttaaattaaaaatttccaaacaaatttagtatcatccgaaagctcttgatgaagtacatctaaaattcaaggaatgaagttgaacggatgccatct

SEQ ID NO: 19943 - DNA, 1240 bp, Heterodera glycines
cgtcatagcccaatggggtccgcctgtacatttcggacatcgttgagcgtgtgacccaacccgtaatagcgctccttcatgtcctccatgctttttcgattccggcacaattcttgatcaaatcggtcctcaatgattggccatcttaaatttggctatgattaaacagtgaaaatttggcaaaattttttaaagaagtggtaaaaacctcaaatcaaactgcttgcaaagctccaacaagtgctgtgtctgttcacgagtccaacgcgggtccaccaaatgttcttcatattcctcatccgtaaaagaaggcacatcaagttgctgaaaatggggaagtgaaatcattttggaaagtattattctccatttttttgggttaaaaatcggattttttttgaaacaaaacctcagattttatttataattacaaatatgagatttttcatatttttgtttataattttcaaaaaaactaaaaatccagattcgtctaaaaattcaaattaatttgagacatagtgcatccaaaaaaattttctccggaatttggtccgacccatgttctaattgataacaatataaacaccttattgaactgcacaaaggagtagggcgttgaatgtttgtcctcacgttcccaatgcttaagcgcaagtccatcctttctcgcctcgttttcaaatggacaccaaagccattttctgacaggacgtttacccagctaaaaaaacgaataacaaatacaattttcaatcaatttaattaatcagaaaatttaaaaagtccctaatttgtttaaaatgaatgaattagattgaaattatttaattttcgccgttgtgggaaaatgggcgctagccagatttttggagtatcttacccgaaatttaacaattttttttgacattttgcaggaaaatagagaaagggctatcgaattattgatatatcaaatctcttcaattcattcggattatactccaaaaagcgagctggcgccaatttgtaccaatccgtttttcataaaatgtataaatcgaaaaattagacaaattcatgtttaaaaatgtcaatttaatgcaaaaaacctgcgcttttgcgagagaaaatcccttcttcgtctgtgttggcatcaacgattcgatcttttctaaaatccaattaaatgttgtgtggatttttttagactgttagttattgctgcacttgcctttgttattgtccttgccctggtgaa

SEQ ID NO: 19944 - DNA, 525 bp, Heterodera glycines
acccgtcatcgaccatgcttcttcacaacaacggcagatccagcagcagcgtaatgccatgccaacttcctccacttccccagcatcggctcgtgtccttcaccaacagcagcagcagtcccaataccaaaatgtgcaaaggcatttgtcggtgatggcttctccgtcgcccactcagcagcaactgttgttgaaccgtcaacaacagtacaacaaccactatctgcatcaggcatacggtggtgcatcactcgcctaccgaaccaaccatcatccgtctttcttggcctcatcctccacttcttccgcttctgtccatccgttttacatggccaaaatgtcggctgccacttccgttgcttatcccatcatttcctatccgtcttcgtcagtttcttgcgcactttcttccattaatagttgctcatcatcacaattatcatcagccaatcattatggtcattaattgaaaatcacttaaaaataaaaaatgaaaatgttgtgccattgaaaatggtttactaa

SEQ ID NO: 19945 - DNA, 790 bp, Heterodera glycines
cagcaaaagacggaggacggagccaagccgacgagggtttgtattttgagaatgaaattggcattggcactcaaatttggattcaaacgcaaaatcttctggcatttcattcgcttttcttatctcaacacagaatgccgcgcctcgccgtgtccgtctgtttttccatcgtgccgacgatgacgatgacgaccattctggcggcggcagtggtggttgttcgcattgcctcaatcgatggcacaccgacaacagaaacagcgtccgctcctgtcgctgtaccggcaccgaccaccacttctctctgctcaaccgtcccgttgggctgcaggacgcacacgcggacgagcgaatggccgcgctggtggagcagtgcctggcgttggccaacattttgcgcggctacgcctttctgccgggccacgagcgaacattggccgcccacggcggactgttgcgtctgctgtccgcactgatgatgctgatggttgacaagaaacaacagaagcgggcaaagccgacaacgaagcgtacggcagaaacggcagcgaagagtggcagggacaacgacgagatcgggacggacacccccgtcccgggggatcaccaccagcagggcatcaagttgaacaccaattgcaatgatacaagcatagcaaccacgttggaggagggagtggagcaggtgaactgctagcgcttgagggaatggtacacgggcaattttgtttcctaatcgaattggccaaaaacaaaaaattttataggtatttttgtcaaatttcaaaaa

SEQ ID NO: 19946 - DNA, 1901 bp, Heterodera glycines
ccaaattaattcggttcattttttaaaattaatttttatattaatgaaatattctaatcttcaataattctattcaattaaatcgtttcttttggtaaatttttgttcgctgttttatctcaaattcaaaataacttcattttccaatgttaatgtaaatcataaatttaatttattgtaactaaatttcaggaaaaaaaactaaatgaggataaataatgtccaaaacaatatttatttttaacataaaagcatgtttttttaggctagccacattcaacacagctgaatttaaaaccttaaaaataaaattcgactgaataaaaaatattgatatgataattatttaaagaaatcattttttatttaaaaataaaaaatgtacgaaacacagctatttttcaaatgtatgtttcttcgtttaattcttggtttgactttttattcttttaaaggattgttattttattctcaaacaaattaaccaaatttttatttttcgtgtaaatttgaaattattatgcaatggtgaatttcaatattaaaattaatttacttttaaacgaagaatataaatcgatttgttcaagcacataattattttaatgagagcgcaaatgtcttttttgttaggcggcgcaaatgtccgcggcgcaaaagtctatttttactggccggcgcaaatctcgcggacgcaagtgtcgaaaaaaatcattttaaatattaatgttaacaaaaaaacaaatagaaaattcgaataaaatcataattttattacctaaccataatgaatttttcattgatgaaaataaaaacaaaaccaatttccaacagaaatgataatttaaaaaagcaagttatatcttctaattaaaatttaaaaatatctttattttagcaagtatattttgtcaattaacaaataaattttaaatccaattttatagtcttgatttaccgccgttgcaattcaagagcagcgacagatgaaagaatattaatttatatttaatttaccaaaatttaaatacaaaaccaagtatatatttatatttttaaatgatttaaaaaatatataaatctcaatccgaaattttagattaataaaaattaaatgaagttataaattattttatttgcattaataaaatattttcactcctaattctaatcttgtgaaaaaataattcaacacatttaaaatagaaaaactgatatccatccatctaaagtacaaattagcaataaacaaaaaagattaaagccaaaaaaacctgcaccaaaaattcgacttgaaagaaaaattggcagaataatgctgcaattagtaaacaaatatgcaaaaaatcagcttatcatatacaaaaaaagttatattttaagtaatataatttaattaaagtataaaaacatataaaattattatgataaccaattttaacgaacggcagaaaacatgaagccgttaaacaacaaaaattatttcgacacatttataaataagttagacataatgttgttaagaaatggattgaagactttcaattaaatataatttatttaaacaacagaaactatataaatataatttatatctaatatgataaatttacaattccacttaaaaataatattaaaaagattaatatttcgttaactgacgggtcagccgcaaaaaaacgcggaagcacgaccatatgacatgaaaataaaaaaaagtttaactttttcatttgcagttcagttccttaagattaagtatataataattaagaaattgatgaaatggataattaacttttaataattgaaaataaatattattatcttttaactcttctcgagaacgaatgaatataaggtaaaaaattttttgaaatttaatttttattaaattaatt

SEQ ID NO: 19947 - DNA, 1405 bp, Heterodera glycines
  unsure (1)..(1405): unsure at all n locations
gggggggggggggatccggaaagtgcgaacaggccccgccgaagaaaattttgaaaagcaatttgttaacggatttttgtctcaaaaaagtaaatttattcgaaaattaaaatttttactcttttcccctttcgccggattatcaaaaatatcaaaaaatttggattattctttttttttgatttttataacttactaaaaaattctttttaaagttatcagttttttgaaatatttttggtttgtttcggaaatgactcgctggggggtttcggattaaaattggcaaataatgatataatcacacaaacaaatatgccactcgtaggtgattgtgcacagtgaggaggaggaggggcccgactacttcctgcactccagcgcctatctgttggagagcacgcggtcgctcacctatttggaatgggtccacgagcggcagacgcggcgcatgaagacgcgctccgagtggttcctgtcgccgccctcctccgtgtcgccgtgttcgaccaccgcagcgatgccatgcggcggcggaggcggatgtcccaaaaagcagcagtgctccgggacaggagggggagtaggacgaaagggggtacgattttgccatgcgaccggcatttttgaactatggtaaatgggatgggaccgaaattgtcccattggggacaaaatttgacggggatggggcggaattggctggccgggcccccgccccgcccgccctcccctcgtcataagaggcctggctttcccggcgacgcttataggcatcgtcggcccccaaaattcctgtaagctttttaatttgattcaattatcagtctttggacaaaatctattcctgcaccccttgtgcatgttggtctgaaaccgagacagatcggattgtaacttaaattcacagtccgactttatcgccgacaatttttgtctattttcgttacatccacgcttccccttggccccgtctgcctgctgtctctcagttgtccctttggcccgttttgccttccccggccccttccgccgcgggcggtggctcgggctgtggcggcggtggctgctgctcgcggtccgcggggttgctgcttccgnggctgcggcgtgncgccgcgtcctctggccttggcccccgnttcgggcgcctccgttgccctcctggcgggcggcagccgcagtgcccgtgccgtcgttgttcttctctccgtccgctcgggcttcgtcggcttttgttgcctggccggtccgtggccgcggcggccgcgccgctgctggtggtctgctgttcgggcgcggcggcggtgtgctgctgtggcaggtgttgcacgtcggccgntgccgtgggctgttgcaccagaagcgggtcagttcggccctatcaagttgaaggcattaatta

SEQ ID NO: 19948 - DNA, 1870 bp, Heterodera glycines
aacaaatacatttacatatttgccaatagctaaccaattatgccttatttttgtttgtaattaaaggccacgtgtgtgtcacatccatttttggtgtgttgttaattagcccatttataaaattctctaaatgacaaattaactactggacacccttttaccaattggcactttctcttttcctaatttcattcttttttgttttgtttttgccctttctttcccctttcatttttgcctttttctgatcggcggccgttcgtttattctttgataaatcgcaaaacgacgacgacaaacatttcgccaaatgatgtgctccttttttcacctttgttctattgtggtgccttcgcttaacaaactttgaactttgctcttttgagtgattgaattttttcaaaatttttttcactttttaaaattactttttaaaactgaaaatgattccgcttttgtcttttccccgccgcccccacaataattaaacaaattgacgacagtccgctgatgccccagcccaacccacgcacattatttacaaacatatgcataataaataatacaataaacgacaacaattcatacatatttcaaaaccgcaatcccactcccacccaaccccaaaaattgtgccatgggctgatcaaaccaagcaatttcgaagagggcaccaccagtgggggggggggggggtggcgagtgtgccctcctcctctccccttttttttgtccccgtgcctttgtctttgtccatctgtgtttgcctttgtcatgaaatgtgaaatttcgtgagtaaaaaatcgcaacaaacacttttattatttccatttttctgaaattctgtcgtttgtctgcattccctgatgccctctcacgtttgcctgttccctccccacccctgtcgtcccgttcgagtgctctctcatcccccccccacccccgagttttgcactccctccgtcaaacaacacaattctttgctgtctttggtccggctgtcaaaacagcagccccttcctcccccttttccccctcttcccccagcgttccttccttctcccacccattctttgtttgtcggatttttgccctttccccacccattttccattttaccgcttttcttctgctgtttgcccgcccccattcatcatttggcccgtgagctgcatttttgtttcacttttttttttcttctattttcttctcgagacagtcgccgccacttcgagagtctcgagggaggaagagcgaagcgagagacaacgcgcactgaggagaacacacgccgaggcgagaccaccatgccaaattccgctgcactctctcgccattgtcctctgcgattctctctctctctctctctcaccctctgaaacacttttctcttctttgttcattctatttttagttaattttcagcacttttttaacgtccacttcctcctccttctcttctcttctcttcaccactctctcactctccctctctttatcttccctctgtactatttcttttttcttatttctctcctcagctgaatcttcgccaacttttttgctcttcacattatcatcttcaccatcactcattctcgttttttgtccatccgatttttcttccctctcttttttcccactttttctctgtccattctcgtcgtttttctagccctctccctttcccttttctcttcttccctctcgtcgacccgaccaatctgccagccgtcatttgtgtcccggctgtcatcggcggcggtggaaggaattgggggaagggacttttcccctcaatgggtggagaggaaacctttgtcgtcgtcgcgtattcgtcctttttactatttttaccgccccgattatg

SEQ ID NO: 19949 - DNA, 2006 bp, Heterodera glycines
acaccaaaatcccaatttttcttaaaaaaattagtttaaaatctcgaaatttggtcttttttatacaaaatctgttaacaaatcacatacaaaatttcaaaaattttcccggcggcgcctatcggcaccgccggccccccaattcccaaaagttttttggaaaaagcacgccgcaaaaacattattaatttttaaattttgaataaaatttttcaaaatgctgatttacaaaattttcagttgacaggccttcgtttttatgctaataaaatgttgttttaagtcgttttttcatgtttttattatccttcgcgctactatcagttttagaaaaaatcttatttttggggtccgaatcttagttttagcctcatctgtccttattttgaaaataaaaacttggccgccctgataatgactgaaattaaatttttctcacaaagcagtgccggattaattctccccgatataatcaagttttttgttatttagcaaaaatgtcaaagtctttgaagggttgttaatggtgtcagttaaagaacatggcagccaattcacctatttttgaatcccggacccgaattcgaaccaaaagtcgaaattttgaagaaaaaatttgttgggacattaaagcagaaaagaaccatgaatgaattattactaagttgcaattttcctatcaggtgcgttggtcatctaccttccaaatgcttgatcgtttttgcaaaacaaaacagttgttgggcttctgtatgcagaagacatttcgtttccgaatctaagctatcaaaaaaatatttctcagccccagctacatcgactgaaagcgaacggcttttctccaccgctgggttgattgtgacagatctgagaaaacgcctcagaatgtggacaaacttttatttttgcatcacaatcttaaaatttatgattttgattatgaataaaatttttgggaaaaattattttaaaaaaatcggaatcgtaatcggattttgggccataatcgtaatcggttttaaaaccgtatcggatttttggccataatcggaatcggcgatttaatcggaatcggattttgtctggctcggcacatccctggtggatatgttcacatatattttgggcattccaaagataaaaatttttcggggaactcacatttgtcggcattggattgttaccagtcgaagtgctaaaaattgaatgggtgaaaaaagtcaaagaacaaaaaacgcacgcgacagcggcggtgaaataaaagcagcgaatgtaagcattgccttgggagagggggggggggggaaagaagaagcatttggggaaaaatgaaaaatcgacggaatcatttggcaattagccctaatatgttgcttaattgctcattaataaatttcacctctctccctctctttctcttctatctcgtctctcttaatctctctctccccttctcgttttctgcttaccttcgttgttataaacccatttgttcagataccatttgcctttgtaaaaatagggaatttgtcttaaaattttccatttaaaaaagcaataaaatgtaaaaatggcacccaaaggcttgccacgcactgagcacataataaacgcaactgttgcagtggataatgtagatcatgtagcagaaggtctttgcaattctttgaatgggcattattttatcgcattaattcgtttatttattttttgctccattaattagtgctaattgccattgcccctccgtcgcctaattgcgtggtttctttctctcatttgatcacctgacagcgtatgggttggagaaggcgctgtccaacaggtcgaagaactcccagaaggagtgcaatttaaaaagacggcaaaatcgccacgcggagacggggccggtgaagaagtacagggcatcaagggggagcagggacagcaagtccaacttgaacacgccgctttggaggtaatgggagagcatgtcggacgacgccttctgcaaaagcgacggg

SEQ ID NO: 19950 - DNA, 1388 bp, Heterodera glycines
tgcaattaaatgcaattattaaagaaaattccttcaccattttcaaaaaaaatttgcccaatttcttggtggaaagattgggtcggcagcggtgcgcaaaatgaggccttaaaattttttgaaattttaaaattggggaacccattgtttgggttggtatgtatgcgcatacggcacctgctttaaaaaaaatcaaaattatcagctcacttctcgtgccgccattctgtgccgacctttctacaagtcgacactgtacgaccggctcagcacgcggccctatttgacgggcattgagaagcgatggatcgcatttcaactgctcaaggcattgggtagcaaaactttgcttatgagttctttttacctttttcaaaaaattttttttttgaagctcaattacgcattgcaatggtacgccatggagacataaagtcggtaacaaagactttttttgggtatttttagattttaaattattttacgacataaattgggttgatcgatgtaattaataaatattgattgcctcatatcggatcatttaattttccccctttccgtttttttttaatttcaaaatttgaaattgaaaaacctaaactaagagcaagatgaaaaaacaataatatttttatttattgcgattttcagcgtttttaatgagaaataaggattttaggcaccgtcggagaagtttttagaatttttaatgatatcattaataaatttgtttaaattttaaatcttcccttttcccttcccgattttttaatttcaaaattgcaattaaaaaagccgacgttttttggttttatttgatttttaataaaaaaatttgttttttgaattttaactttttttgccgataaattagctttccgcatcgttttccccagtcaactatttttgtaccatttatcctcccccctctcatttaagacctcaaaatgtgctcgtgtcctcttccctgtggattcagctcaccgattttgcgcccttcaagcccgccctgctcccatttgttgggcaaaaaaatatatatgtttttgttttaattgaacaaaataaatttcaggacaatccgtcggactttacctttttcttcgacaccaaccgacgacggcactgttatttggcgccggaacgcttccgcgacagtgaggagttggaggcgcgggcggcggtggcggccggcatggaattccccaatttctatgaaggtcggtccattttttgtacacattccgcgctgttttttctttttcataaatcattttgcgtatgtttttttacatttatttctttatggttacgattgctttttcccatttggtcattatacggattttttgtcctaattgctttatatggcttgaccttccgca

SEQ ID NO: 19951 - DNA, 1482 bp, Heterodera glycines
  unsure (1)..(1482): unsure at all n locations
aattttttatttcattttcgcaatttttaggcctaaccgaggcgatggacattttcgcgatgggctgtctgttggtggagttgctcagcgacggacgccaaattgcattcaatttgccncaggtttctgccggaaaaaacgaagaatttaccaaaaaaaaatttaaaacaatttccagaaacgaaatttggaattctttcaatttttagagtcatttataactctgttaattccgggcagggatggtctcggaatatgtacttttccaaaaaaacacattccttcccttaggccatcgactacaaaaatgccgacgaacactcggccaaattcttcctgaagcgtttgctcaacgcagtgccggacaccgaatttcggccactgattgccgtcatgttggacagagacccgaagcgccggagggacgaatttctcaaggttaataaaccgggcggggcagcagttgtacagagagtaaattgtgggttttcaaaatttgccgtaaaaaaccctacgaaaaattgcccattatttttagtgacaaaaattggcaaattttttctttcaaaaatgcaattcgcgctattttacggtgcaagtttttaagaagccatcatttcaagcctggtattattcgtatgctctacattttgagattatagaattagtaaaaaaaattgcgacctgaaacctgtaaattttcgagtttgattttagttttctaaaattttcaattattttgaatttatttttcccccattcatttttcagttgtccccctgttcgtccactgtgctgttcccgcagatttttgagcgctatttgtacaactatttcaaggagttgcaaagcttgcgctcggccgacgccctaatcacaaagcaaacacataaattacctaattaaattcaattttaaattttttaattgtatgtttttccacaatttttacgcctcatttgccaggctttttgtggagcgtgacaattacatggcgctgttgcgggacgacgacgccgccagcgcctccgtgctgttcatcaacatcgtttgtgccgcattgcgctcgtgtcgttcactgacggccaaaatggtatttttgtaaatgttgggccaatcaaaatttttaacaatactcttaaggtgttgtttggcaaaaaaaacacgaaaattaattggtttttgtggacaaaaccccaaaatgcgcaacatttttcaggccctggtgatatataatttttcaacaataaaaaatccttgacaaaatcacaaatttcactataatttcaaccaaatgctggacaatctggttgccgaaacggcaaaaatactaatatatttaaaaaaaagacgaaaaaaattcgcttttttaaaggatgctctctcgctgctgcatcagatcagcaaaatttccactccgaccatcatttttgagcgcattgtgccctatttggtgaggaggaattttcagcaaaattaatg

SEQ ID NO: 19952 - DNA, 2393 bp, Heterodera glycines
  unsure (1)..(2393): unsure at all n locations
aataatgcacgaaanatcgtttagcctctgaatantcgagtctttgcgctaaaaaaccgccgcacactcgactttttttgaggtttgaaccggttcaaaaaccggttttttggtatttccgcaactcgagacatattttccatgcttagctccttgagacgaatcgattggtgtatcatttaagtgaccagaaaatattgaccaaatgaaataatttagcaaaaatgactttaatttactgcgtttttcgctcctacattttaatgcccattttttttgtcatgggttcggaaccgctcgacagatgatgaattatttaattttttaaaatgtactatattatttcatctatcgtcttttatttattttttttttatcaatttttctttttttcaaaattttttttaacctttcaacgtgaaaatcttttgaatacatagttttttttggaaaaattcttagggtttgcatcaaactcccatcccgatttaaaaaaaaataatagttttgcaaatttttctttcaaatttttttttaatttcaaacaacaaaattcgggttttctttcagcctctccacctttgaacgcaacgaaaaagcgaaggcggagcgcgcgtccgcgcacaactcgttggagtcggccgtgtacgactacagtgccaagctggaggaggaggcgttctcgcgttttggcaccgaggaagagctgttgttgatccagcagaagttgaaggagatgcgggactggctggaggatgtgccggataacaccaccgttgaccaactgaagcagaagcggcgcgaattggtggcaccgctgcgcaagttgaagagccgaaagcgacagaaggaggtgtgctgcagctagaattgcgtttttgttcaacaaatgcttgtattattacactcatttttgtcaaggaacgccctgcgctgatggacaaattggccaccacgttggaggaggcggacaagaagtggcagctgttcaacctttccaaggagttcttcgcggacggcgaactcagcgcattccaacggaccattgagacagtgaaaaattggtttgagggggccaagaaggaggcggaacagctgaaggacaaccaggacgccacgttcagcacggacgacctgaagacgaaggtgggagagtttggaatgggaaacaagaattttgttttatttttccgaaaatttccactcactagttagtcattccttcctctaattgaaaaaaatggaagaatccagagactttttttttgctaatttatgatttatgccataaaaattactgattttaacagatagcggattgttttatgtcatttttaaacatattttctgtggatttcaatcagctcgtctctccctctctcgaaaaaattttttttcatcttttttaagtacttcgaaagtgtaataattttttttctttttaaaaactctctatgaaatttgagaaaggatttttattttaagatttatgtttttttcgaccggattcgaaggtgctgcctatgaacacttcgaaattaatttttctcaaaaattctcaaaatcccatgacagcaaaatgttttcattgtgtgaaccatttttcgaaaatgtttttaatttaattaataaaaaaacaaattttaaaattttcagacaaattcgatcattggcgaagtgcgtttcctaacgtccaaatattacgcggccgcgctcaaacagcgcgaggaggcggaagcggcagccaaaaaggccaaggaggaggcggaagcggaggcaaagaaggccgaggcggaagcaaaggaagcagaggcggaagcggtggaaaagaaggaagaggaaggagaggtgaaaaaggaggaagtggaggcaaagaaggaggcggacgaggacaaaaaggaagcggaagaggtcaaaaaggaggaagcagcggaagtgaagaaggaggcggaagaggacaaaaaggaagcggaagaggtcaaaaaggaggaagcagcggaagtgaagaaggaggcggaagaggacaaaaaggaagcggaagaggtcaaaaaggaggaagcagcggaagtgaagaaggaggcggaagaggacaaaaaggaagcggaagaggtcaaaaaggaggaagcagcggaagtgaagaaggaggcggaagaggacaaaaaagaggtggaacaagacaaaaaggaggcggagaaagacgaagctgtaaagagtgaactgtaaacagttctgatggatattgtgatgtctagggagggagccatcattagcccctaaatttgtttgttttccgaaactttcttttctgtcttctctcttttttttctggcgctaaaatggctcatggacaatgggggatttgttgcaaattcagtcacagtacggtgcatgca

SEQ ID NO: 19953 - DNA, 2698 bp, Heterodera glycines
cgctttcttctctccgagatgaatgcgcctctcgccaatctttacgatgcttcaacggacaatttcgtcactttgaatgatcatggatttgtcaacaaaatggccaaaaacaacaaaaatttgacaacgcagggcaggccaaatttgcgtgaagaaatcattgaatttgaaagttttgacgatttgaaagaacgcacaaaaatattgggccttgatcagaaagttgctaatacaattttaacaaaaaatttttttgcttttgttatagttgagtgtgatcagccaacttgcgcattttgacgatgtcagtccccttggtcagtttctgaagaaagcggcagctcaaaccgaacgtggcaactcatttggcttcattaaaattgtgccaaaaacggtagaaatcggcactcactttttactctcatgaaacttgtctatgttttgcagacattttcattgaaattgggccaccaaaaagtgcgtgccatcattctgcagcagttgtctatgaacactgccacacattttgtcatgtcggcatgctatgggtcaattgtggcagcgatcgtgactcttaatgagcgcagtgccatcgacaaaaccgacatttcaaacgcgaaaagggtctgttgaaaaaggcatagtatttttaaagctgtaaatttgttcaagattgctcgtaagtttctggctgtgcctggactgagtccttcggacaactcattcatctctcatttgaataaatccatttcgtgcagtgttttcgttggcccttcgattggaaattgcgcgactgatttggttcgttttaagcgaattgtctattttaaaaaaatttcaatcggatttcgttcaggattttgtcaaaggactcaattcttttgccgataagtgggcggctgctaaagacacaaaacatccaactccgatcagtttttcgttggtcccactgtcttctattatcgacaaaacccgcttcaatcccgtctctactcatatgatcggtgatttatttattgttttcggtcaaaattgattatcccaatgatcaaaaggtggacgacagtttgattggttttgtggccatgtgcaaactgtgaatgattgtgaatggcagttgcggaaagtccgtcaatcattcaatgaatgttctcccatgttaacgttagattttgatgctttttcagtttaattccaatttcaaagtttattacaggaatgaccaactggacaacgcccaaaaattttttgaacaatcggagaagggaaaagagattttttacgattcgttgaaagacttcatagtggatttgcgaatgtgcaaagctgatcctcaaaaggagaatatggtgcgaagtgcaggcgagaattacgtgcagttctgccaatgcgtagttggtcattatgaagagctggtgaatgaaaagaaggaaatggtcaacgaattaaagcaaaaaggcaagttttatgggatattctcataaacaattgtttaaggcgtcacttacattggtcgttccactcgccaacaattggactcgcgttttgctcttgatgactccaattcttccgtttttcattttgttctgttgagaaattcgtccgttccgccggttcaaaaccaacaagattttttgttatgccttggcaaactttacgagttagtgtcacgtggaaaatgtacttttgtcgatttggatgttcttcgggatggcgaagaagcgcaggcggacgaaggactgccggagaacattcgctcattggacggatacccaaactttggaatgcgcctgatcaaaatgcgtgggaacaaattgttgtcgaatgattatatggcagaagagggacgaaaaatgcaatttccaattgctcgggttggtttaaatagagtttgcgggggcggcattggctcatggtctaaaattaaaaccaaagagaattcggataatttaatattttcttgtatatggaggaggaaacgattcattctcgtctccataatttttggtttaaaacctgaaatctattaaggaattaaattataaaattcacgttttttaactattttttaaattgaatttcaaaacaaaaatatttaaatgtttttattggtttcatttgcgcagattgagaacattcgacgaacagaagttggagcagtgcctgaagctgattccaaagacatgcaggcctgcagtttgccgtgccctttatgtgaaggctatggtggaaattgcccgaacactgaccatatgtggatgtgcgatgattgttgcgaagcattgacttttgtgcaaatagaaaaagtaattgttgtttggtaatattagaaaaaaataattactcacaggaacaagcacaaattacgcatttcttttgcgcatgtggaaaaacgccggtcgatggattttcttttcgctgttccgaggtggcaaagcatggaactgagttcaagcatttttgctcaaaagtgtcgctggaaaaggaaattggatcggttgaacaacaaaggcatgctgacctttttgctgcttggtgagacgggcgttggcaaatcgactctgatcaacgcactcatcgcttacctgaacatgcgactttgaaagaagcgcttgaggtgactgagttattaaatattgtgtttgtaattggcattatctaaatccaaataggcgaatgaaattgactgggtgatccc

SEQ ID NO: 19954 - DNA, 1451 bp, Heterodera glycines
attaattaatccttttttcattcgacaaaactgatcatcttggggaggagagtgctaccagctaatgattgatatttgaatttgaaaattagcaaaaaatttttttgaaaaattaattttttatttctaaattagtaaattcagtcatttttatgattattcactgcttgcaattgagatgccatgtttcaagtggttgagcaacaactgctgctgggcaatgccgacacaactctggcaacagaaactgctgaactgatgttgctgaaccgaacgctctgatcaatgaaaggattactcattgaattgcgatcattttaaaataattatttacggggggcggcccggagcaatacgggttgttttaaacgggcccaccattaattaacccattaaccgtgttgtagaccaaaaactttttgattggatgcatttttatcaaatttctcgcaaatgttgtcattattttaatggctatctttattttcgagagttagacaattttgttttatcaattcatttatcgcttgtttgtatgccattaatgtatggcatttttatcttaacagattcaacattctaatgtaggggtcgagccccgcccccgtccccggggacgggataggttttttggcctcacccccgcccccgtgactcagacccccgcaaaccccgcccccgtgaccttcgtccccgcggggacgaaaatacacctctaagaatggcatattaatgggataaaagcaaaaatttatacaattttgtaattttttaaccatctttgacaaacttttatgaaataaagtaaatatttgtttttttaatatatttgtggattagttagtggttagtgcttaaattctttttttatttttacgtaaaacttaaaacgcatagcaaaaacattggcaaaaaaagaagtaaattttggataaagatttaatgagaattttggccgaatgcaacttctgccctaaggcaccaccgcttttcgccattaatgtgataaattctagggttgagcggtaccggtaccggtactggccggtaattaccggtttttttggtaccggtaccggtaccggttttttcaaaaatgaaagtaccgttaccggtttgtctagtaccggtaccgccggtaaaaatttgcactggtaggaataggagtttagcacaaaattgatgatgcaaaatttagggaaactggaaattttataaaaatacaacatttcgccaaattttggcattttaaaaacaatctttttttatttcgtcatattaattattggagattaatgatatttggttttaaatttcatattcctaattaatttattgtacaagagaatcatgattttagttttggtaatcaaaatccaataaatgtctgacatttggaaatatttcgacaaatcatcgaatgataaagcattatgtaatgtttgcgggaa

SEQ ID NO: 19955 - DNA, 1992 bp, Heterodera glycines
tttcctttaaatatctctttggcataatgtctttaacctttaatggtcaaaatttctaaattttcacgcggcggcgcctttcggcacagctggacgtccagaacttattttttcttaaaaattggctcaaaattgcaatctggctggcagccagcctttgacagatttctcttactcgaacagaaagtcgaaaattcaaattttttcaatcacctagcctaattcaaaagagcttaatcaagaaaattttaagaaaataaaaaaagacttatttttctttgtttttttggtggaaattcagcaaattttgttttcaataaaacataggttttcagaaataaaaaactctaaaataaacttttttaaatttttcttgaaaatttgtaaaatcttatttttttcggcgacattgtattttcgacggcgacattttctggtgcaccgaatttctacatataatagatgaaattttgcggatttttttcccaaattaacatgtgaaaatttaaatttttaccaatcaggttctggatccggaaatttgaaaaatagggattgaccggattacatagattgaccggattttgagagactggatccggaatccggtcgtttttgaaaataccagcccggtccggcagattcggaaaatccgtctaatattttttacagctggaatataattaattaattgttgttttatgattgcaatattttgaaattgaactgggtcatctttatttttaagatcttcgcttttttggaaattaaacgacaaaaatggttattttttgcaccaaatctgtcagaacaaattctctccacgaaaatttccaatttattctccggttcccatcggcatcgtgccggccctgagaaaattttctcaaaaattgcagaaaaatttaaaaaagcattgaaaaaagacataccaaaaaattcaataattttctcatattctctcgaattttttaaaatttttgaggattttagcaggtgaaatttctttttaaataaatttttgtatgttttcaattttaccttttgccatgaccttccgcagttgtaagaatacaatacaacgaaagtaaattggcacatcgtttgttggatgggaaacgcggcattgaaattggcgcttccatgcacaacccattcggactggacacgctgaacattgattacagcgatgacccattaggacattttcaaatacaccaagtcaatgtttcgggtaaataaattaattaagctaataacttattgatttttagaggtaaaaattcaaaatattttaactaaaaaatgacaaaaaacggtgctacatatgacgttagtcaaaaaccatcaaaaagggcgttagtcaaaaaaccatcaaatcagacatttgacattttcatgtcttttaccgattacttttataaaatggattaagtaataagtttaaatattattaaacaaacttttcagtataataatattttaattagaaaattcatttggttaatataaaacccatatattgattaattataaatttttcctccttttctcatttatattttaaattttattttgtttttgttttataaatttttgtagaaaatttttactaacctctaggaatttttttcgaaaatttccccaattttcagtgtgttttagggtctcagatcaccatgaaggagtgatctgatcaagtaggtgtaaaagacttttttgattagcatcaaaagtaatgttaccatgaattatttcagaatttttggcccataaaatattgactttttcgttgatgaatttaatgggacaacacttatgaccacccaaaaatgatgtatggctcataaaatcgaatagaattctagcaccaaatcttatcttggctaatgatcggtatcgttgaccataaaaagggctatcagaaattttcttataataactttcaagctatagaaggggcacgcatttttgaccatgcctgtatatagt

SEQ ID NO: 19956 - DNA, 1292 bp, Heterodera glycines
  unsure (1)..(1292): unsure at all n locations
ctatcgaccaagcacatgaaccaaatgtctgaacctgcggttcctctcgtactaagcaggattactatcatagcaacaggtctntagtagggtaaaactaacctgtctcacgacggtctaaacccagctcacgttccctattggtgggtgaacaatccaacgcttggcgaattctgcttcgcaatgataggaagagccgacatcgaaggaacaaaaagcgacgtcgctaatgacgcttggccgccacaagccagttatccctgtggtaacttttctgacacctcttgctggaaactttacacattcaaaaggatcgataagccacgctttcgcggtccgtattcgtactgaaaatcaggatcaagtaagcatttgcctttttgctctacgagaggtttccgtcctctctgagctcgccttaggacacctgcgttacgctttgacagatgtaccgccccagtcaaactccccgcctgacactgtcatcggcgcgggtcgccgggccaccgggtggcccgacttaacaccaaaatggacaccctttcgggcgcactcccgttttaccgattaagtaaggaatcgatgaaagtagtggtatttcactggcgccttgcggctcccacttatgctacacctctcatgattcttcacaaagtcagactagagtcaagctcaacagggtcttctttccccgctaaatttgccaagcccgttcccttggctgtggtttcgctagatagtagatagggacagtgggaatctcgttgatccattcgtgcgcgtcggtagttagccgacgaggcatttggctaccttaagagagtcatagttactcccgccgtttacccgcgcttaatcaagtttccttggcttaacattcagagcactgggcagaaatcagacacggtcaacgtccacaaggaccatccgtctcctctgttttaattagacagtcggattccccgagttcgtgccagttctaaactggtcgttcagcgccaaccgaagtgcataccctgacgagcatacacgcagctgaagcgctccacaagcagctctcaccactagtccacgcaccatccccgaaagaacagcacgcagccacgggcaaaagccgcctgtttcacgcaacagcccggctgacccgacctttagagccaattcttttcccgaaggtacgaatctaatttgccgacttccttacctacattattctatcgactagaggctggtcaccttggagacctgctgcggatatcggtacgatcaggcaggagattcaaatagcttcc

SEQ ID NO: 19957 - DNA, 2174 bp, Heterodera glycines
aattcgaaaaggtttgttgtttgtcatttttcgtgctttttgattcaatttttaaaaacgcagccgggggaaatttggaaatgtttgcctgatatttttcactttgaaaattcgtttttaggggtgccttttgagaaagattttgggagtgttcttctttcgaagtcgctttttaattattttttctcacaatcgctttctctcccaactcattaattaattaattaaataattcatttggcaggtacatttggcgtattggcggctgcatttccaccacaattaaattcgccctccgttgcggatttccgagcgacccgcgagtgttttacgcaaagcataagcatctttttgaatacgaagaatttaatgcaaatgcgacaacgacaaacaaaaggcagcgaagaaagcgatgataaaaggaaaggaaacgaattgatcactgagggaaaagagtgacgaatagagaaagaaaagtgagtgatcaatgaggtaaaagaagtgatcagaaaaagtaaaaatggaaagaataggcgtgatcgaattgcgatagaaaagtgaaaaagagggagaagaaaaaccaaaagccgaccagagaattgagaaaaaaattaatattttatcattttcaaacgtaaacaaaaagatttgtctcaaaaggtcagagactgacaataaaaaaagtgaaataaatgcttattttggacaaataagcaaaaatcaaattcaaaatggacagaaaaagcataaataaaaagggaaaaggcgatggattgccaatcatttgaaaattcaaaaggcgcaatatcaaaaaatgaaaagaatggacaatgcgacgccctttttggactagatgaggaggtaaacaaacactcaatcaatcaccactaattaatttgacttattcgctcgttcaatcggccgttgatctttttctttgccttacgccgccagcaccggcgcctctccgcgccgccctttgcccgtctccgcgtccctttccgcttccgttgcgccattttccgctgggtaaaccctcgcggcattttgccgcgttccgtttgccgtcccattccgtttttccatccgttcattgaaatgcttaaacccattttgaatttacgaattcagttccattcatttgcacctgaattgttgcccatggctgcagctccgctttggcgaaacaaacgtagaaaatattacacgcgacgataatggcggcgttcacataaaatgccaatgcccattcttcgcgggtgttatttatggtcaacggattgacaatcaccggcacagtcagcctaaacgaagaagggattgggaaaggtaaagctgaaaggaggacacaaacattgtgacggtcattgcggtggaaatttggcccattacaaaaggcgaatagggcccggcaatcatcgagcctaaattggcacataaattaatggaaagataggcattctcccagaggggaaggaaaggataattttttaaaatttgattccctaccgcttttgtaaaatccgccaatgttaaagccgagagtgaatgccgagaaagtgagcagaaacagcgcgagattgccatagccggaaggcacgaaagagacggccacaatgacagcggacatactcatgaaggcgatggaattgaacagtttggttttgacagtttcgctcattatccgcgcggggattctatcattgatcagcccggcacattctttcatcaccgcctggccaagcggcggaagggcggccataaacccggtcttgaccacttcaaagccttgtacctaaacagagccaaattcatttaataatggatcggaatgggataaagtgatatagtgagaggggagaggagagagaaagggagagagagggacacacacacaaagaggagagagagacagaggaggagagagggaaagagagagagagagagagagagagaggggggagagacacagaggaggagagaggatatgggtaaggggagcagaaacagaagagagaaaccagtttgggtggagagtggggcgacaatgggagaaaaaatgggaaaagaaacacaaacccacaaaacaaaacaattaagtgcatacgacaacaaaacaacttttgtttttttaagatttaataaataaaaggacatatttcaacttttgtttg

SEQ ID NO: 19958 - DNA, 1316 bp, Heterodera glycines
cgcagcaacgatcaggtagaagaagctcatcttggttgatccggagaacaagcgcggtcgaagttgacgtgtgtggaagacgtgtgggttgaaggtgtcgcgcaattatcgtcgttgagattattttattattgggaagtgagcgaaatgcgaatgtccgttccttttatacaatgtcagccacgacaattcttaaacccaacattttgccaaatttcatttgatatataaggggatgcgttttcatccttttcaccttcgctactaccatttacccatttcgaagtgcacccgctgcaacacttttgtgagttttttctttctttttttcgtgttgtttttgtattcattttatatcccctccatttgttcagaaacggcctcgacaaaacaagcaaattcttcaccaacacaccgatgaatagcggcgtcagcccaactccgttcctctcgctccgctgtgtgtgctcagtgctggtgctgctcatctgtgcgttcgatgtgtcactggcagcaaaagacaaggagaagaatggcaaagaagaaccaggaggccaatttaatacgctcagcatcattttgctgattccgctggtcatcgtcaccggcgcgttcgtctacctgctgtttatgaagccaaagagcgaaggaaccggcgatgacgacggagaaggcgaaggggacgcggacgtggagaagggaccaaccgaagagacgaagtaaaacacgggcagagccgatttggctaaacaaccaacaatatttttcgcatttcagaacggagcctcgaattgaatctccagcaactcttttgggcgtgacagtgccgttggagcaagacgaagaagagcagaaaaaggacgacgaggggtaagtgcaaaggcggcggatcattttttactcattaaaatttaccatttttagtggcgaccaaaccgcggagaagaaggaagaggacgcggcggcagcggacgaacaaccgaaagaaggcgctgcggaggcagcggaagcggagaaaagtgcgacaaaggaggagacgaccgaggacacggaggagaccacggaaacgacggaaggatcgaccacagagacttccgacagcggctccgggtcgtcttcagcatcgggctctgactctgaggggagttctgggacttcggacgccacttctgaagccacagaggacgcatcatcttcatcggagggttcttaagtgaattgatgtcgcgaattatgccgtttaatgacaagaaactccaatatgtatttcccatgcacatatattgctgtatttttttttcaactttcaaaaaatc

SEQ ID NO: 19959 - DNA, 1647 bp, Heterodera glycines
aaatgattaattgtttgaaataattgaagaaaatttgtttgaaaattttcattaatttaatttattaaataaaaaaccaaataattttgtattattttcacttgatataaattaaaatttgaatttttttaaatttttaaaatttttttgaatttttaaaatttcccggttggtcccggttcccggtttttcttgcggtcccggtcccggtcccgaaaaaaaatcgaggtcccggtcccggcttctcaggtcccggtcccggttttggcaaaaattcccggtcccgtggcactctacttaacacaatgaaagatcggccccacttcagcacgttttatgcccgagcacgcgagtttatgttgagggacaggcggggcaacaacatcacgcctttaactacattgtgttagtccatgtgaagataaatgtttgtaattttttgttttttaagcatgtcactcgtctgcccgaacattgcgagactgatgtaaagagcaggcggacatttcacaccgggcactgccattcgcgaagcagctcaatgcgcttcattctgctggtttgcgcattgcgatttgattgccgcaaacacggcaatcggttaccaaggaacagaagagcggaaaatatttgtgatcgatttcggctcggcactaaaaatttcacaaaatcaaacaacacacaagaaggatctgacgatgtggtttgaattgatggcaaagatgtacgccgaaagaattccgacggaggtgagttgaaacattttggaaaactcaaaattacgcgataaaaaggaaaacacatttcgcttgaagctgaaaaacattttttgaaaaaaataaatttgactgattttcatagtatgtgtggcaaaaactctcccgatttggcagggagtttctcccttcccgtggctccaattcactcctcaaaacttggtctctctctctctctccgctgccgtttggtccttcccaagggggtggaatggaggaaaggggtgggaggcaaacaagagattgggctgtttatgattaacggcaccaccgatcaaatttgggagagaccggtgctcccaagctcaatcccaagtccgagcccttctgtcagcacttccggcgtgccgacttgttcaatcgttgcgttcgggagttttgctcccgttttcactcttcgttcgagtcgctgtccaatcgccggggggaggggattgggaaggagatgggggttgagttgggcacttctggggtggtaggagtcccgtttgacttgccgcaacactccgcaaatgcccaggcaaaggggccggagaaaacgattcgctacaagggagacggctccctttgatcactgatccgcccgaaaaatgccgaacacaaaatgacagaaaatagtttattgaagaagagctcaaacctgggtaattaaacccttatcgaggggggtggacaaaaatgtgacaaacggcaaaaatggggttaaacatgaatgccgcgattgagtggtgtggtgagattaaggcaaaagaacaattttttctccctggaggggagttaggaataaaagtgaacgaatgaatgatgtgacggacaaaattagtgatgaaaataaggtgggaaaattggtgattggtaaatactttcccag

SEQ ID NO: 19960 - DNA, 1071 bp, Heterodera glycines
caaaggcaaattcaaaattaaatgcaaaagcggggggggcaaaaggggaagaccggacgcagaatggaaaaaaggggggaaaaaggggcaaaattgaaattacggcaaaattggaataaaattccgaatagcaaaatgttgagaaaaaatgggaggaaaaaaggtgaaaaatagagaaaatggggagaaaaaagggcacgttccgatcattttctcgccgcttctcgctcttgtcccccaattgcgacgggagttgctcccgttcgaccacttctttcttttccctctcttctcccggcgggggagtgccaccggatgatcgagcgcaccccctccgaaatagtcctcttcctcccgcgacagctcccggggtttgccatcgtcaactccgaacaccagaaaaccctcccacaaattgctgccccctttggcgggagcagaactcccgctcgttttgggcatctcgtcgcttttagcgacactgcccgggccggccgccattcgtaatcagcgtccctaaaagccccttaaaacatattttcattaatttcaaaaacacatttattggcatctgaaaatgtatgtggagttgttcctctaaacttaaagagtaccttttcatcactatggccgaatttttcccgttccctcattttaagttaaatatttttggtaaatcttacccgggctggcctacatgtccgcccatggcttccaccttgattcaaaatattattggttttattgctggtatttcaaataattatgcgatgagattcgtgaacttaactatttcggtttttgttaattttacataatgtaagaataatagttcgaacagatgtcgaaaaaggctatttaattatattaattcgacaatataattaaaacactatggcattgaaaccgcggcaatgaacccccccccccccaccggtttatccatttattgccaaaaattcttcattttcgtacatttccctttgaaaatatgcctttggcataatgtacggttgaattttttaattccaaggtttgctactttatcgaaatgataagttatggcttttt

SEQ ID NO: 19961 - DNA, 1941 bp, Heterodera glycines
aatcaaactatatgtacatataatacacaattaagacctatatacgtagcaatacgccaccgaaatatgatcgattttcattctacgcgtcagcagcgaaatccaacagcttccacgcgttcaaaacctcccgaatcaactgaagatcagcatccgtttccccggccacttcgtttgtgccaatttcagccatcgcttcgtcgagtgcctaaaattttgcaaacgaattccaaaaaaaaagtcaaaaacaatgactttctgcgcaagctgacgggcttccgccggcaactttaagacttcaaagtggaacacagcgaagttgtgcgccaggcccaggcgagtcggattggacggtttcatctccttggtggcgatttcaaggccatcttggtaggcatgttttgagaggtccatgacagctaaaaaaagcgaatttgtgggagaaaagagagcaaaaaaaccattaccagggcgctcctcccccggcgccacttcgatcatgtagcggtagtaatcgcccttcatcttcaagtagaaagccttcgcctcagcgtcgctcgccttcggaagaagcgtttcattgatggcttcctaaacgggggtaaatgggaaaatggtcaaaatccaagggaaaaaaaacaacaaaaactgaccaaaatatcgtggcaaatggtgagcagttctgactccatcttcatccggtactcttccgccacctgtaaaaaggggaaacgtcaaaaaggaactcgctgctgacacttgtgcccaaactccgcctgtatttgctggtccgtaaggtccaaagcgacgcgttgttccgcgtaacagagcgaacgccacgacgcacgacgcgcattaatcgcacctttgtaggcggtgccgagcaactcgcgctcctcgctgttcaaattggcgtccgcttggatcatctgaaaataaaaaatgaaaacaaatcaaatgcaatgctttcaatcatcgaccacaccttcttcattgcctcggtcatgtcatcgtagcgtcgcgccttcttacacactctggcaaagaacacaatgtcctctttggaatcagtgaccattgcgcaattcgaagaagccaaatattagctgcttgattattccgtaccgcttaaagaacagttttaattaaatgtaaggaatttgaagacaatttagactacataagaatatcaattagattaaatcaaatgctaatttggtacagaacagagtcgatgtgatgaattcagtttgttttcgtgtatttaagccggttttgaactaaaaatgcgatattcgagaatttgaagtttaaactttttgttcgaattgggatccggggtactgaattgttgaaaagttgtcaaattcttgatcactgatcagaaactttgacatccctactaattttaatggaaaaaaatattcaaattttatttatttatttttcagttccgtcatttgagtctaatggtataagaaatttcagttccgtctcgaagattgacttattttttggaattttcatcacaaaaagttaaattttgccttaaaaagtgtaaaaaggctttcgactttttgtttgaatcctggttcgggatccgaattggacaaaaatctttttctcttcctcttcgccttcctctttctctccgtctttttctcttcttttttcacgttcctctttttcttcctccatcatattgttgttcagtttgccacaccccctaaaaacatgttttaagacttgaaaaaaaaagtattagacctaggaaaacaaggcctgaatccacttttatcaattttagcacatgacttttattgttccaactgcaattcgagatgaacttttattcattggcaggcaaatcgatgtgctgttgcgcagattggcgagtggaaacgtggcgaacgaggaacgtcagcgcattaacgaccaaat

SEQ ID NO: 19962 - DNA, 1106 bp, Heterodera glycines
  unsure (1)..(1106): unsure at all n locations
agtcagcaatcgttgcttacttgccagatcggacgggtgcgcatgattccactgttccaagcaccccaccaaaagcaaaacgatataaccaaaatataaggaaaaatttttttaaaaaaatttttctccatctccctttttgatagaaaaagcatcagagtgcctaaactaacatgtaaataaaatttggtgcgctttagagcactttctgaaaaaatatttatgaaataaaaaaatcgatttattcaagtgtccgtttggggtactcaaacaattatggggagcaaaaatccaacgcagaattaaagtacagactatagggaagctaatcccgaaggattcggtctccccataaatctgggcgcatcggttcggggggactgccccgaaaacaaaaaaatcgattttttcaagtgtccgtttggggtactcaaacaattatggggagcaaaaatccaacgcagaatcaaagtacaggctatagggaagctattcccgaaggattcggtctccacataaatctgggcgcatcggttcggggggactgccccgaaaacaaaaaaatcgattttttcaagtgtccgtttggggtactcaaacatttatggggagcaaaactccaacgcagaattaaagtacagactatagggaagctattcccgaaggattcggtctccccataaatctgggcgcatcggttcagggtactgccccgaaatccaaaaaaaaattttttttggataaaaattatttaaatgaactgactagataatatttaaaataggttatttctcttcctttcagtatccctgctaagtttggtgcgcttctgatcagtttctgaaaaaaaagttaagcctaaactttttggcctgtttaaaaaggaattaaaaattttttaaaattattcatctccctttttgatagaaaaagcatcagagtgcctaaactaacatgtaaataaaatttggtgcgtttcagagcattttctgaaaaaaaatatttatgaattaataccacacaagtattattttttttaaattatttttttcatttatcacccnaacgttctagactgatcagaagctcaccaaattttgcaggga

SEQ ID NO: 19963 - DNA, 2713 bp, Heterodera glycines
taattgttgcgcgttttggtgtccggcatcaccatttccgtgcgttcctggtagaccaggcgctccaggttcgccaggcgctccaggtagtccttggtggccttcgtggtgctggtgctgtcctggttggccaggctttcctggttggccaggttttccaggttggccaggctttccaggtggtccttgcttgctttcgtggtgctgtccaggttcgccaggcgctccaggttcgccaggcgctccaggtagtccttggtggccttcgtggtgctggtgctgtcctggttggccaggctttcctggttggccaggctttccaggttggccaggctttccaggtggtccttgcttgctttcgtggtgctgtccaggttcgccaggttgtcctggtttgccaggctttccgggtggtccttcctttccttcgtggttctttcctggtcgaccaggcggccctcgcggtccgcgtttgcctgacttgttcgactccttatcctctttttttgcgtgctttttctctccgctctcgttactgtccttgtcctttttccgacgccgataacaaccatcaatttccagaataagcaatgcaaaaatgaagacaaaaacggcaaaacgagtgctgagcattcttctcctaaaggttttttaatttaataatttataattaaaatgattgaataaattgttgaattctgcggacttcttccgctttttatattgctgctcaattaattagtctcattaatttcgccattataatgaattgtgaaaacataaaactgctcgaaaaggattttatgaatgttatttattggaataattatttaattatttatgcttagaaaaaataatcaaacaaaacgaagacggtccaaatcgtgaaaatgattatttgtttgtttaaatattttacaaacgaatgactcaatcgctttaataatgatttaaataatttaaaagattttttgtacatgcaaataaataatatattagctaaaaattgaaattattatttttttaaaagcgccattttttggtcgaaaactacttgaaaattttgcatgaatttgtgccaatgaaatctaaatgaatggaaaaaaccattaataaatcagaattaattattaattaatctgctcgggtttttcgtttcatgcttagtcaagtgctcaattattaacatataaatattaccgaagaaaatggcgaagcatgtttagtcatttgggaaagcacttccggaaagaatcacaaagaatgaaatgccgaaaaacttttgcagcggattaagcctaaaatcaacacagcttttttgaaatgattcttagtgtgttgattcgtttttttcatttcggcatagtgacacgaaaatatgccaaaggatatttagcaacccaatttggtttcccaaaaaaagaaatattaaaaaagaaatatttttactcatttacatttttttcttataaaaaattcaaaatgattataattgctaaaaactttttcttttttttttgctaattttaattttcaaaacatttcacaaaaaccctatcgacatttttttaaatttctccagccattttcgacaaataatttcaatttatcaatttattcaataaattctttaattactttttttgaataattgaaaacattgcaataaatatggaattaaagctgagaattcacacataaattatcagacgagagataaaacagagaaagacagagaaatgttgcagaatgagcgtatcaaataaatttaaattggaaaattaaaaattgttatgtccttataacgtcatccgaaccgtggctttactactgagtccatttgccgaaggatttcgtccaaatttagccgatggattttcacatgtctaaatggtaaaattggatgaatatttacatacaattaaaattttaaattttggaatgccgtacctccgatgtttgtgcccgattttctggtgcactcttcgccattcgtgaagacttctccgatggtgccggtaaagtcggcttccttttctgagggaatagctaaaaagtcattttcatttcatttccatattccttttttggcacctttttctccgatgcggcgctgccaaagtgaattggtcaggtgctatgagagtcagcagaagcaaagttatgacggcgaatttgaagagcaatttcaaattgaagttgccaaatgttgggccaatttccatttttaaaatctatttaattttaaagaaaattttgccaaggctttaatgaaatagacaataatttaatggaggaatactactgactatataattttattttgaaaattgttaaattggtttacaaatgttttaaaaatgcgcgactaattagaccaattaatttgcttttttctctcttcttccaaaaattgaacatgttttatttgaaaatcatgaccagtttattgttcatttttagcctccattttgccatatttgttcggcgttaaaccgcaataaatttcacttaaaagtgaatgccgcccaccataaaaagtgtcattgtaaattggaacaaggaagggaatgaatgaatgagtgagtgactaatgataatgaatgaacgatcgaacgctttgagaaagtgcgcgggtccctttttgggttttgcttcagcttgatttcgtgtagatgacgaaggataaacggacgacgaccaaatgaaagag

SEQ ID NO: 19964 - DNA, 2254 bp, Heterodera glycines
gtccttgactatttgtatggtccttatttatagaaaaaaatatataatttgcggaccaaaagaagtcgtagcccagcggtggctcttcgttgtccacggcaaactcaaagcgtacaacaaacactgtgtaggaggccattgtggcgatgtcgcacaatgcgatgatggccaacagtcggttgaccgcacacttttgcatggcgggccgggacagcacaaaaatgtgcacacagttggccaacgagccgaacacgcagatgaacaggccaagccaacagtgcactttgttgtacaggctgaaaagggcgggcgcaatgaatggcatggcaccaattaaattaaatttagtcggccttttgcattttcatgaaaaatttggagcttttctccctgatcgttcaaggatcagattcaggaaatgggtcaaacatttagggaatcggaccgataattctaatctattatgaattaattaaaaagcgaagaatggcatggcatcaattaaatttagccggcattttacatttttcaaacttagaaaatattatttatatttttcatgaaaaaattgagctttttctccctgctgatcgttcaaggatcaggttcagtaaaggggtcaaaaatttagggaaacgggaccgaacaatgctaatctatcattaaataattaaaaaaactgacttagtaattaattgtctattaattttaaacgtacttcgaaatgccccacaatgcttccaagaatgcaacagttgtattgctgtttaaatcaaacaagctcagttcctcgtcacagatcattaagcgcatttttagttataatgcaaagaatctgcaaaaaaaaattaatcaaaaaaaggtaatagcatttttacataattaaattttcataattgaatttcttcgataaaacttgcggaaagcattcaaaataattttcccccttatgctaatggctttatcatggcaaaaatggtggccggaaaggggcagaagcatgacatataataatatatatgtccatatattgttgatgaaaaaagcctttttggagcgcggcggcggctacaaagacgcgtcaatggcaccggggggcacacacacacggcccaacaaaagcagcagccttaggcgccataatcttggttggatgccatggagttggaatgagtgcgcgagcagttggcctcccccttgggtagagtggaggggcgggggagataaccacaatccgccccgggggcacccctataatccggccataattatcccatacagtggccgagcggcgggtctccccgagggccaattttcatatggctctaatgaggatgatgatgatgatgctgatgaagattggagaagttgtgaggcgcgtaataagtgagtgtcaatggccaaaactaatcagaagccagcgccggcgggggcgggggggggcgcccagcggagtgacagcgccagcccagcgacgaaaatggacagaataaagaaaaagcaaatcccgcccccttcccctggggcacggacgtacaaaagcttgctgtgccgccaaacaatggaaatgcgcgaaaaaggatttattaataaattaataatatcggaactggcgattgaaagctaacaaaataaaagggcggagagcggcggaaggaaattattacaaatgtacaatataataataattgtgcatttattgaatttagcatttttgtcatttattgtaaaatttgctctttagaaatgcatgggattgcattgcatttatatatgccatcggaaaattaattaatgggttattaatttccgagtgcaataaatttttgagtgtcacacattccgattatcaattttgacgacttttaatacaaataattccaaaaacgaaattttttttagcctagtttcagtgtttcggagaatggaaatctacgcatgttttcggttttataatataggtaattaataaattattaatttccgagtgcaataaatttttgagtgtcacccattccgattatcaattatgactgctgtttatacaaataattccaataaaaaaaatttttaactaagtttcagtgtttcggagaatggaagtctacgcatttttttttaatttttaaaatttttgaagcctggaataattttaatttcattttttttattgaaattcgagtttgaatttgcatttgactaggtgccgttttttagcatttatctttttttctgaaactggcgcctgaaaata

SEQ ID NO: 19965 - DNA, 2433 bp, Heterodera glycines
ccataacattttcgcttaagctatgcgccacactcggatcatgttgtcggtgtaaccggcaaacagcgtctgtccgtccgtggaccatgccaatgaaatgcattggggacacgattttttggatacacgcatcggatttgcggcgctggtgctggcaatgtccaacttcagctcgtccaccaccgtcttgttctccaagtcccaaattttcaccaccgggccaaccgcggcgcacagccaatagcgattaggcgaaaacgccaaagcgttgatcacgtcattgccgcccaatgtgtacaagtgtttgccgtcgtttaagtcccacaacattgccgagccgtcctgaaaggcgaaaagaatgcaagtgctgtttagttttagcaagtagaagcaggatccttataagtatgaagaaagtttggtcgaatgtttgtcctgatactttgctgattgtataggtgctcagaaaatcaacaatttgcttatccaacctttcctccggaagcacaaagtgagccgtcgggtgatacggtgaccgagttgatgtagccggtgtgtccgaagtggttggtcttcagtcggcaagtggccaagttccacaccttgacaattttgtcccagccggcggacacaatcactgggttcgcatgagaaggcgaaaagcgcacggtggacacccaatcggaatggcactcctcctaaagcaatttattttgtcacaaaagcccttacccctaatctgggccataaagaatccttgaattcttaccacgattgtgtgtttgcactgggcaagtgtattccacagtttgatcttcttgtcgcgcgagccagacacaatctgacggttgtcggcggagaaagcaacggacagcacatcctgggtgtgggagacgaactgacgagtcgtttgtcctctgaatttatgagtgctttctaacgattaatctcgtcttcagttatcatttttgtcctacgaaatagtaggatataccccagacgaaattccgttaatccaatttttggtatcgccacttttcattatatcatcaaaacggacgtgttcaagtcccacagtcgtaatgttttgtcccaggagccggacagtgcgtactgtccatccgaggacatgacaacatcggagacaaagtgtccatgtccgtgcaatgatttgatcggtttgccgtttagcaccgacccactctcatcaagcatccaaacgatgatggttttgtcttcaaaggaaacagagaaaccattaaatttgcttgtggaaaaaattaacctcttgaggccgacaccaacatattcttatacaatgggttggtggcaatttgcgtgacccatccgttgtggccacggagtgaaccctccaatttcatttgttcgcccatccttcaattattaaatggctaattggctatttccagacaatttgcgctaaattattgaaacaataacaaaaaataaatttttttaatgtgaaaagataattaactaacgatttttcgacattcgaaaaaatcctggacctggatacaggaaaaagctagctacaaaactgcattcttaaaatgcctgtttctcgttttcagcaaaaaatatttttaatttacaacagaacgccaaataataatttaaaaatattttctataacttggtcaaacttctgctgctaattcaatttgcttgcagcttttgttttaaacctttcttcaattttagcactgtgtttttgtaacaatggcaatggctgatgttaagcccaaccatactttgtacatcaacaatttgaatgaaaaagtgaagaaagaaggtgactcactgcttttctaattagtttttcttttttaaccattatttcaaatttgcagagctaaagaaggcactgtacgcaattttctcacagtttggacaaatcatcgacattttggccttcaaacacttaaaaatgcgtggacagtcccatgtcattttcaaggagataaattcggccgccactgccctccgttccatgcagggcttccccttctacgacaagccgatgcgcatccaattctccagggaggactctgatgtgatctccaaagcgaaaggcacttttgtcgaacggttgcgcatttcatattacaattttttctttcaaaaaaatccttgtaaagaaccatagtttgtcgttttcttttttgcaatagcatattgcaatccaaaacggttgctgtctgttttcattgtagctcatttccttgccacttcgcaaaatcggatagtgtgttacaatttaatttctttgagccatttttcaaattcttcgtcagagagtgccaataccaacacttttgaataaatcattaagagtcgattttccggcattctaatgaatcataagatattaccgataattaaaatggaaaaagtttgaaaaatgactca

SEQ ID NO: 19966 - DNA, 2447 bp, Heterodera glycines
acaatggtgaaattgccgacctaaaatcatggaactaaatttgtaaaaaaataaataaaaattgcgctcggcgtacgtacggcggtcaatggaaagtgcaccacggaatgactgagcagtcgtggccaaacctgaaaagcaaagtttcgttttagaacgcctggaaattggttttaaaagttggccataatttgcaaaaaactctcaccaaatgcccttcgaccggcacctccaaatttttgacccggtccgtgtccaggcgcagctgcgttctcaccacccttttctgggcgcccagcgccagccatttctggcgcagccgtgcgtaaaggtagtggtcaatttcggccaaattctgtggcaatttcatgccgtaggcaaaccattggccgtcgctggtgtccaagggaatccctgcaaaacagcgggagggagagacaaattaatgaataataaacatgggagagaaaaattggcattttggggtgaaaattgcatgccccgacaaattgcgccaggacatttcaaccgaacaataagtccaaaatcaggtttcaattatgttcttcatttaaatagcattaaatagatggtatttggtgattttagccgggaatttcattcttacaactagtggatttttgcagacccgtaaacagaaaaaaaattcgaatgaggaatctgaggacatttttttgacttcgtcaaatttttttcaccaccggggagaagaagcatgcgtttgtagacattttcgccaaaacaatgactaattttggcgattttgggcttaaatttcaaaaattttggtaaaatggggtccagcagtgcagatgggcgccgccgagaaaattttggaggttgaatttgttaaaaattgcttaaattttcaataattacccatttttcaaaataaggccccagcaaaaagaacaattccctccccacccacccaaataacagtcgttgtcggcggagggacattttgtgccgggcacaaacgcaacatttgccacagtgagcagtgattttggcggaataatttggtgtattttagcagacgaattcgacttttcggcgttgtgatggtcatggtggaagagctgaaagcgcgggtcgtcgtccgcgtcggcgatggacaaccgatggacgcgcaaatcgtgcggaaatgtgttgaaaaactggccaaaaatataaattcattattttgttaaaggcatcccgctacaacaaaaaaatcaaagaatcgaaaaactctgcgtaaaaaactaatttttcacatactatccattcccaaacccatactttgatcggctgtgtgtggacagtgccaatgaaagtttcgtgaaacacaattttggccggcacactctccagacggaagtcgaccagatcgaacttgagcggaaattcgtaggcgccaaactgtgtctgcagccggaaagtgccggcaccgttgtggggcaccacgttgcgatgctccgactgggcgaacagcgacaggttgaaaagcgcgaaagtgtgcggaggaagcgcaaagtcgagacccttaaaaaacaaaattcaaaatgtgagtcgtccaaatccgcatagcaatttggccaaaatgtccgatttataggaatttaaagtcaacagaaaagtatcgagttatggtcaggtccggtggtagtggtggaagaaagcaaaggtgggaaaattttgataaaataaaatttaagctgtttattttttttggaaattttatcattttaaacaataatagtctttgtattaaaaaatgggatcaggtagaggtagataaaatttctattttgacttcaaatgggagacagaatttttttcgctaaattcgggaagcggaaaaaaactaagaaaatggtcgattgattttaatataaacagaattccgtccacccctgggcaccaatatcggatcagatgataacatcccgacaaaattttataggttatattcgtagagaattgttttgaccgactcgagactctcgaacacagtccccgtaaagcgtcactcacttcactccagccggccgcatcagcagaagctgctgcagaatttgttgaaaatttgtcgaccaattgtccgacatttgcgctccgtgggcggttgtcgtcctcctgctgatgcttctgttgctgctccaacctttgcatacccaaaaaggaaagcgacaaaacggtgggagggaacggcacgcggaggcgaatgagacgcaaagtgaccgggttcgggttggacagggagaactgtgcatttgaattaattatggaaagtgatggacgaaacgattcaaaatttaaatccgatagttgaaaaactttgaaaatttcctattaaaaatagtttaaatttaattaaaaattttaaaaattaaaaaattgaaactatagttttcatcggagattctttatatattttttag

SEQ ID NO: 19967 - DNA, 1054 bp, Heterodera glycines
aaaaccggaaccgttgttacctctatgtgataaaggaaccgatgtcttttaaaaaccggaaccgttgttacctatggttgataacggaaccgatgtcttatttaaaaaccggaactgttgttacctctatgtgataaaggaaccgatgtcttatttaaaaaccggaactgttgttacctgtatgtgataaaggaaccgatgttttatgtaaaaaccggaactgttgttacctctatgtgataaaggaaccgatgtcttatttaaaaaccggaaccgttgttacctatggttgataacgaaaccgaccgttgttacctctgggtgataacggaaccgatgtcttatttaaaaaccggaaccgttgttacctatggttgataacgaaaccgaccgttgttacctctgggtgataacggaaccgatgttttatttaaaaaccggaaccgttgttacctatggttgataacgaaaccgaccgttgttacctctgggtgataacggaagcgatgtttttttaaaaaccggaaccgttgttacctatggttgataacggaaccgatgtcttatttaaaaaccggaaccgttgttacctatggttgataacggaaccgatgtcttatttaaaaaccggaactgttgttacctctatgtgataaaggaaccgatgtcttatttaaaaaccggaaccgttgttacctatgtttgataacggaaccgatgtcttatttaaaaaccggaactgttgttacctctatgtgataaaggaaccgatgtcttatgtaaaaaccggaaccgttgttacctctatttgataacggaaccgatgtcttatttaaaaaccggaaccgttgttacctatggttgataacgaaaccgaccgttgatacctctgggtgataacggaaccgatgtcttatttaaaaaccggaaccgttgttacctatggttgataacgaaaccgaccgttgttacctctgggggaaaacggaacccatgttttatttaaaaaacggaaccgttgttacctatggttgataacgaaaccgagcgttgt

SEQ ID NO: 19968 - DNA, 1354 bp, Heterodera glycines
tgataacggaaccgatgtcttattaaaaaccggaactgttgttacctctatgtgataaaggaaccgatgtcttattaaaaaccggaaccgttgttacctatggttgataacgaaaccgaccgttgttacctctgggtgataacggaaccgatgttttatttaaaaaccggaaccgttgttacctatggttgataacggaaccgatgtcttatttaaaaaccggaaccgttgttacctatgcttgataacggaaccgaccgttgttacctctgggtgataacggaacgatgttttatttaaaaaccggaaccgttgttacctctatgtgataaaggaaccgatgtcttatataaaaaccggaaccgttgttacctatggttgataacggaaccgatgtcttatttaaaaaccggaactgttgttacctctatgtgataaaggaaccgatgtcttatttaaaaaccggaaccgttgttacctatggttgataacggaaccgatgttttatttaaaaaccggaaccgttgttacctctatgtgataaaggaaccgatgtcttatataaaaaccggaaccgttgttacctatgggtgataacggaagcgatgttttatttaaaaaccgatgactttttttaaaaccggaaccgttgttatgtccacaaaaaaaattaaattttgagttgattcacccacactcaattttttgtctgaatacagaattacttactgtatatagcagggctggacgcaattgcggattgcggattacggaaattgcggggtttttggacccccgtaattgcggattgcgggttgcggatttttgggatttatccgcaattttgatccgtaatttgactattggattatttttcgcgacgatttcttgtaagattattttttataaaatgaatttttttctattgttatgtaaacaagaatatatgcgaaagtctgattcatcttcctccataacagtctcctttgagtcactcattagcctttcacctgcgcgcagggcgcgcagcagacttattgtagagctttaaaagctcgatttttcccgattttaaaatttcgaaaattttcaaaatttttcgagctaggcctaaaaaacggttttcgggtttttgaattttaggattttttaacgaattttcccagaaaaacggagaccactttcaagcaaccgtttttcgagctctatcgattggtgatatttttgaaaaaatatcgattttttcccggaaatagaaaaaaattttagcctgagcgggacatttgagtcccgggcccataactcgtcagaagttgataaaatttttttctggggtattttggggtgctgagca

SEQ ID NO: 19969 - DNA, 2311 bp, Heterodera glycines
tactctctttcatcgctctctttctccttcgttctactctttatctattttattctctccctttcctttccccctacccatcgcttctctcgctctctctcgctctctctttctctctttttcactctctactctctctttcttactctcttttatttaaaaaaatcttcaaataaaaccaaccaaaaataatggaaatttttaaccttcaaaaatttttttcagtcaatgatggtggcgtccaggacgaggcaattgtggaaggacagcaacttgtggacttagggaacatcgacgagcttttggccggtaatttgtttttttctctttattgctacagttttttgttagtttgtagcaagtgaaatctctctccgctgttttttctccccccccccgccccacctcctctccctctccttcgctctctttcttttactttcttctgtttttctctctctctcccttattcttctctctctctccctctctccaccttcgttctctttctttagcttaaaatcgcaaaaattggccatatattgtgaaaatctggtaacaaatcacaaccaaagcttcaagaaaattttcccggggacgcctattggcaccgccttattcccgcatttttttggaaaaccgcgccgaaaaaaactatttgggtctttaaaaagcaaaaaaatgtcatcggtggccgacccccccccccccccacttttttaatgtatgattcttttaccactttgcttttttgtctctcattttctctctctcaaacgcggggggtctgttagtgccgttaggcgccgccgggaaggaatttacctttgatttgttaactgattttggggagagtggggggggggcgggacaaaatttcgccgccaaaaatttagaaatttatgttttttgattttaattttttttttgtattcaggaattcgacatactcttgtgaacttacgtgatagcgccaatgcggaaattgaccgaattgatggccgtcttcaaggtgggtatgctgcttctggggtttttgtcgggattcgagaatatggcatccccttttattaatttctggttccggacctggtttgtagtaaattccaatctttaaattacacatttatttgtgtttgaactaataagggaacctcgcgaacttacagttaaaatgggtataaatgtggtataattgaacagagtcgacttgaatattagcgatatgtgaaggaaaataaaaaaatttaggcatcaaaaattgaaattgtgagtgtattttcacttcagcgatggtggcgaagtggggaaattgagcaaaattggtggttcaattggttaaattcgcttttttgcagggtccgggttcaaacccaacatgaaaagaaataaattttattaataaacgatttaaaaaactattgactaagggattaaaattccgatttttgaagccccaaacttttttattgttcttcacacaacggtaatattaaaaattcacaatagaaatctcgaccctgctctatccaattattccacatttatatcccacttttgtaatgattcgcacattttatttgccctaatttttttggttatcattgctcattctttgacgcaagcatgtcaataatcccattcatatgtataaaatgatactgtcgtgcttcttctccctggttcaatcaattcccacttgtttttttttaaatcttcgaaatggatgacatttttctgaaatttttatgaccaattacaaaaaatctttaaaataataaacttattctttacgcctaggacgctttgctgttttggggcgattaattcgccaatgtgatgactacattaactatctcggagtgctcgccaacttgatggacgaattgcgcaggcagggagcaaattcggtgccgggcgcgtccgatgttctgctcatcccgctgaattgcgtgacgatgatccgaatgtgcctcattgttttccgtgcaacgcttagtttggtgatggagccggtgacatttgcgatgctctctttcacctctgtatatgtgtcttattcgtgttttggcatgtgtcaccagatcactatttatttctttatcgtatttttttgtatttcattcttccatctcatgccattgtactatcacttttttggctaatttgtaatgtttgtttgtttttgtgctaggtcaaacctaaattatcaatggagcgaaataaaaaaaagtatcaatggtaataatatttaaattattaatatttaaatataattattattttaattttatttacatattgagctgga

SEQ ID NO: 19970 - DNA, 1993 bp, Heterodera glycines
tttttatatacttaagtaaaaaatttaataaaattatacttctatagaaacacctagagctattgaattataccaagaattattaatttggttgaaaatggaccaagttatgaatttatatgtcttacatttttttgttttcctaccacatggcggtttttaggaaacgacccagcacgtcttagaagcatcaaatgctaaagacacttttacgtgaaaatgtcaaaccaatctaaaaatactatttacataaaatgttcctagtcttcaacgtaatactttgcaattctttgcttctcctgtcaattaatattttttcacatattaaattgaaattaaggcattaaaatcaattaattaagaattatataaaatagttgtggtcttttgtctgtgggtattttttgagtggtttttttgactgtggatcttctgtcattatgcctaatattttgagcccaagaattcccgagtcagtctctttatgtggtattaattgcttaacttcttccctatcgcattcctacaaaattatagagaaaatgaaacaagcaaaaacttcgcccaaaaagataacaacatttcatcgcattatctgagcaagtccatccgtttgatgcctcaaatttgcaatacttttaaatattttctgatcatttttcgatataaaatttgttcatttctcagcttggcttcggctggactaatggcgctgtgttggaccttttggtcaaatatggcgacaaaatgacgctgacacagatgccggatgttaactgcagcaaaatgacgaaggatcccgagcccgaagtattcccaccggaataaatagaatggaagtgatcagagcgaaagtgatcggaattttaaacttggctcccccgccacagaaatatgtccatttattaatccttcattttataaattaaattattttatttttgggataaattcacaaaaactctaatgatttataaatttgactagtttgtgcagaataagtccagaagatgaaaaacggacattaaaattaatttaaaattgagctttttatcaatttattttttaattcactatagaattgaaaagcgtggtcttagcaagttttttcaaaaattctacattacccaatttgactaccgtagtttatcagttgatatgagatgacacggtgcaaaattataattaaacaaaaaatgtacgaattggtgtcgaagtgcagcgctaaaaattttggaatttcctatcaaaattgttaccaaacatagctcatcacgcaagtttcctataacaaaccattgtaggttgaagaagctcttttcaatcaattcatgccataggttcgcgaaaaattttcaatagaaaaacattaattataaaaagtttagtaaaattttgaaaaattacaaaaacgaaagtactgtaatttgattcttgttagtttgtttccatatcaatgacgcttaaaatttttaatcgtcatactatcttctaatatcccaggggtgcgatcaaaaaattttcaaaatcagaacatcgggcgcaaaaaatctgattttggggtcgaaaatcaggacattttgcaaaattgcttcaaatcagttattttactcgtacccgcttcatttcactgttttttatttaatttctactgacaatgagtgtaatttttttttatttaaaatcatacgaacgatggaacagatgaagcatttgttgagcacgggtgagcattcgggtgtacacttttcggtggggaacggaaaagaggcgagtttaatttaaaatttaaaattaatttatttcaattatgtaattaccccatttcacaaatgcatacttcattaccgtaatgtttttccattgagatgagatcttactgtttaaaatgaaaattatatatttaaataaatgttttttcttcatttgaaagctgtattcgtcttgtgtggctaagccattccaattccaattttgtagccacgagaaatgc

SEQ ID NO: 19971 - DNA, 2159 bp, Heterodera glycines
  unsure (1)..(2159): unsure at all n locations
tttcgggattttttcaccaatgaatgccaggcacccctccttatttgaacgtcgccaaaccatgggccgtccaacggcctttgaaaagcacaacgagcagaacggagaccaccatgacaataacagacagaaagttgagggtacggtggatctgaaggaatacacttaatgtgtactgtataaactttttttgtcagacaaccaaatttataaactttgcatcattcgaaatagataaaattaaaaaagaaattccttaagggtaaaaatatattttttgattttgacatttaaatgtggaacatatctacattttagcaaatgatggcaattttattaaattgaaaaaagtagttcaacgtttaaaaaatggcggcgccgaaactgtccgcgcccaattgaccccgacccaaaaaacccttacatggaaccaaattttcagtcccattattgttgtgtggggccacgcgctgcgcatgaagcgggccgagtacagcgcaacggaagtgaggcaaagccacgcgatcaccatcattatgcctaaaaaattggaaaaatgatgcaaagattaggtaacttaaatttggaaaaatacgaaaaatttatccaaacgtaatccaatcagcaggttgtatagaatttttcaaatttaattgtggaaaactaaaaatttcgcaaaatttaaatagaagttttttttcaattctatatattctgttgcatagaatttaaaaattattgtgctgaagaaagaaataaaatttaattgaaaataaacttgagaacattttttttcaattaatcaattcaggttcaagaaagaaattaaaaaataggtaattataaaaataaaatttaagataatttatttacaaagaattaaaaaataaatttaatataaaattaaaaaattccgaaatttattttttttaatgtattaattttttcaattcaacattattgaaagtgcaaaatcctattttcaaaatctttttcgtgtagattccaaatttttttttggcctagaaattccatccctctcaccatgtacatcgatcagtgtcagaccaccgccatgtccatgattttgtggtggtgctggttgttgttgctgttgttgtttcggctgcttagtcagcgatgaagcgtccaatggcacaattggacgggcggaaatgtgtgggaacaccgcgtgatcatcgctgtccaacgagtgaattccgatcgctgtaaaacaactattttttatgttcaagtgattaatgatcattcaagccaatcaaaaaaattttatctgaatttttcgcgctcagaattcagcagaataaagagtaaaaactcgcatcactaatgatcggaagcattcttgcgaaaatgattttattttcttttttttttgtaaaaatatataaaaataataaaatattttgagtcataaaattttcgaaattttttaaaaataacataactttcatatttataaaagttttagactcaaaggaaaaggacggtttgcgattgttgacacattactcactgtgtggttcttctgccggtcccttggccaagaacagatagtacgccttgtgcaggttcggccgtgccaaatctttgcccggcccattgtttgagtgttgccgaaactgagaaacgcaaatttatttttaattggcaaaatgccagcaaatatatagacatttcagaaaactctctcactttacagtaaatgccgttgtcatccgcttttccttccaacagctcgagaaagccattctccgcccccttaagcatttttatataccaaaacacaagtgattgacatcccaattaggtatttgtattttaaaattccggttttagttcacaagatcccactcttagtctcgttaacgcgattcttgcaaaataattaccaacatggtaaagaattggtgcctaattatgcttaatttaccaggaattccttttaggcttaccgcaggcgccggcacattgttctttgtgttggccgggttcaccgaaaggcgcgcctccacccgtccgttgccagtcaaaacacagtatgttaccgcatcgtcaccctgtgtacagtatatttagcaacatgattactgtgctaggtcatcatgtatttcgcctattggncttttttctgtcat

SEQ ID NO: 19972 - DNA, 1809 bp, Heterodera glycines
tcggtttgatcccactttacaaattatacggctactcatttgacttttttcatctgaagagagagctgtttatttcgaaaatattttggtactcgtaatttagtcaaatttccttttaaatcaaaaacttcgcagaatttcaaattttgacataaataattgtactatgttaattagttttaatgaaattcctctgacattgattttagttgcatatataaatattcattttgtggcaataattttttttttatacttttgtaaaaaatttactttattattctggtagacaacacttaaagctatttaatgataccattaaattttaatttaggtgagaacaataaaattttgttgagagacggttttaccgttcacaaattcggtcgcgataatcgactgtcaacaaacgaagcgattcgcgattaaatttattttcattaacttttcaatttatttattcaagaaaaattaattgtattattcgggaccagctaaatttttcacaatttttgtattttatgtgacatttgtttttgttaaattaactaacgcattttatttttaattaaaaatctgtttaattgggtttatgtttcggaattctcatatgtataagatacaaatgttataatttttttatttaataaaaaataaaaaagcacttatttattaggtctatcgcatgatataaagaatcataattcggctcctttgagcaaggcatatataataaaaaatttctaaatattttaataggctaaattgtttaattcttaaccaaataaatagtgatttcaaaaatgtttttcgttatttgaatattttgcttgaaaaattattcaaagaaattacaaaattttgcgatttttgagcaaattttgcaagaaaaagtttttttagggtccggggtgccgataggcgccgccgggaaattttaaaaaatttcagttaaatttattaacagaaattgtacaaaaattactaattttttgaaaaaatttttttttaaatttccgaaatttccgacttttaatcaaaaatgtcggaaatcggaagtcggaaattttattcatttttaattttagatcaaataaatttttttcgtaaatatgaattaattgacttcaatttgtactcttcacttgagttgtaaagtaagtaattaattatcaataatttatttaatatatttaaaatatttaagttggtttataatattttatttataaagcaattttactttaattaaataattatttttatttattttttatatttttctttgctttaaatttttcaaaaaactttaaaaattaattatttccttatttattttaatgattctattaatgtttttttaaatattattaaaatctttaattttaattatttagaaataaagcattaaaaattatgtttttttcaatattttatttattgaaaaattaaacaaaattgatatttctttttcagggtatagtaaaaactcagcaaaaaataagcaagtatctctaataaatatttctaatgaataaaaaaatttcgaaataaaaattaaattaataaaaaatataacttcagatttgaatttaaaaaaaattctttattgaaataaaaaactgtaatttttaactaaataaaaataaaataaaaacacacttttacactgtttgaactaaaattaaaaaataaataaactgagtgaccgcaaccaactggctgaaaaatactattttttctgccaataaagaaataatattcactcgatagcccgttatttcatcaatgtaaaataagatgaagtga

SEQ ID NO: 19973 - DNA, 925 bp, Heterodera glycines
tccgtcctgaggccgcgaagcggccgaattccccccacctccaaagacgggcgcgaagcgccagtctgaggccgcgaacctgccgaacgtctcccaaaaaattaaagaacggacgcgaagcgcccgtcctgaggccgcgaagcgcccgtcctgaggccgcgaagcggtcgaacgttcctcacaaaattaaaaaacgggtgcgaagcgctcgtcctgaggccgcgaagcggccgaatgtcccacaaaaaaattacaaaacgggcgcgaagcgcccatcctgagtccgtaaaacggacgaatgttctcaacaaaattaaaagacgggcgcgaagcgcccgtcctgaggccgcgaagcggccgaatgccccccaaaaaattaaaaaacgggcgcgaagcatccgtcctgaggccgcgaagcggccgaattccccccaaaattaaaaaacgggcgcgaagcatccgtcctgaggccgcgaagcggccgaattccccccaaaattaaaaaacgggtgcgaagcgcccgtcttgaggccgcgaagcggccgaattccccccaaaaaattaaaaaacgggtgcgaagcgcccgtcctgaggccgcgaagcggccgaattccccccaaaaaattaaaaaacgggtgcgaagcgcccgtcctgaggccgcgaagcggccgaattccccccaaaattaaaaaacgggcgcgaagcatccgtcctgaggccgcgaagcgggcgaatgttatcaacaaaattaaaaaacgggcgcgaagcatccgtcctgaggccgcgaagcgggcgaatgttatcaacaaaattaaaaaacgggcgcgaagcgcccgtcctgaggccgcgaagcggccgaatgtcccccaaaaaatttaaaaaacgggcgcgaagcatccgtcctgaggccgcgaagcgggcgaat

SEQ ID NO: 19974 - DNA, 751 bp, Heterodera glycines
ggggaagggtgggggtgccatgcattttcccatacacgcatcgattaaggcagccgcgcatgcactagcaacgaagtcttttgcgcgaagcgctcatgtcagcgcccgcccatatctaccaaaagtatactgcccacaacatcccccactgtgcaacacgctagttactatatatgttatattgacaaggagtttcgtttgcaaaaacaaaatctcccggccgaaggccgggagcgccctgaaagtagtggaagggtcttacaactttttgaggcgcatccgggaaaactatagagaaaaattctgcgcggacgactgagtcccagggacggatttctcaatttttcgtgcgtttgacggcccataactttttttctgaaactcggatcaaaaaattcccgctgtgagggcactccgcagaagtgtcctctataatccagtattttttattttttgatcagaccaaatcccggacctgtacagacacggagactcagttaatttttttttcccacttcagtaccaggtgaataccacgtcagggtttggtctgagcgagggggtgccagcagacttattgtagagtttttaaagctgcatttttccaaattttaaaatttcgaaaattttcaaaatttttcgagctaggcctaaaaaacggtttttgggtttttgaattttaggattttttaacgaattttcccagaaaaacggagaccacttccaaaacatagtttttcgagctctatcg

SEQ ID NO: 19975 - DNA, 2063 bp, Heterodera glycines
tgaaaaatgacattttggtaaagcggggacggtccaagccttatttctgcttggaatgggtgccatccccggacgacatttttttttgctcttcagagcagccaaaaattttttgctctattttccatcaaaattttgaggaagagggggtcccgcagtgccaataggctgcagtgagagaattttttgaaaatttggtgttgcgttttgttaaaaaaattttcaaaaatcaatttttcataaaattaattaaagtgtgtcttgtcttgaaggggctaccatcatgaaaaagtcaaaattttcaatacgaatgccttttttcattaaataaatttttattttatgcggtgtctaagcaaaagaaaatgaaattttgtataacttttattatcattattttgatttacttattttcattttcttatctgatcaggttggaaagtctgcacttgtcaaccaatttctgtgggagggctttctgcacgactaccgtcctacggtggaggagttcaactgggtggagtacggtagcgacgagccgaacagtccgcaactgttacttcaactgatcgattcgtcagggagccgagactttttggccatgcgccacctctattaccgtataggcgatgcgtttatggtaatttgttgattaaataggtatttggttaatggatttaaataatttcatttttaggtcgtttattcggtcaatgacccgaacagttttgccgaggcacagataatgcttcgcgaaattgagcaattaaattccaaaaaagtgggatcaattttgttaattaattaattatttttgcaaaattaattattaggctccggttttgctggtggccaacaagagtgacttagtgccggtcacccattcgacgtcaaatttgtctgattcaaacggcgccgtttccgccggtgcctgtgaagcggcgacgcccaaatcggtggcattggcgacgagcattggccaaacagaggcagaagcggagcagcacaggttgttgaacagtgtacgacggatgcgaatttcggcaaaaaaccttgaccaggtaaaagaaggagaaggcactgggaaaacagaaaaaatgtgccaggttcatagcttatttctaataaatgcaagcacattgagcagttcgatctgagttgccttttttaaccgacttcgtttttaagtattttttcggcattttattgattggtcttatttttttaaatttaattgacgattgtttaatttactttttgttttgattgaaaatttcttatttttttctatttaattttaaatgccctcctctttttaggtaaaaggggccttcacttggctgatcgatgcccttgtccgtcgctcccaaatcactttattgccgcttcgcgatggtcgctcatcggacagcaatttgtgctcggccgccgcattgcgtaaggcgctgacgcgtcggcgccaatcgcttccgtcgcgacgcacggcgaggtgaataaattgaacaaaattaattacttttttttattattcaactttttcaagtgaacttggcattgacgaggagacgctgcgccgattggtgcgccggcatgacaagcggcaacggcacgccgcttgcgtaatacaatgaaaggcgacagcgggcgaaaggggggcggaaaactcgtgccaaaaaccttttaaattttaattttcattgtcatttttttattgggccaacgtttatgtaaaaactcagcaaaaataagtaaaaaaaaaacatgcaaaatgttggcccaattcaattcaaatatacactcccagacaaatatattactgaattcaaaaatatttttaaagaattttagttttaaaatatgatttagtaatatctttcaaaaatatttagagagtcattagctcattcgtcactcattaattacgacgagactcgtttttgagtacatactataatgttcaataaatattttataattatttgcaagttttgaataaatcactttcaaagttcatatgtaatcaaatgcccataaaattattttttagaaaaataaaagaatta

SEQ ID NO: 19976 - DNA, 926 bp, Heterodera glycines
cgaacatcgttcagcatggccgatgatgatgggcttgacagcagtgggcattcctgcgcgagtgccggcttcacaccgaaggtccaacatggcggcggtggtggcaccgtcggcactgctgccgctgctgcacaggcgtcggcctcgtccaccggggtggcaccggtccatcggctgaccatcaccgacctgaaagcgccgtggactattgaaaaccgccggtgggtgtgaatgtggaattggaattgcaaaaatataggcatttcatcccctcgtgtcatccccatttcgttaaaaattcttcaattttttaatttttatctttaaacagtttttttcctaattccaattttttttaaataaaaaatttttgcgcggggggaaatatagtgtaccccggaaaatgaatatattttttgtttcagtgacaattgtttggtgattgcgaaaggtgttcaaaaggcgcacattggcttttcatcgtccacatgcatgagcctgttggcgtacatcgtcggtgcgtttagcctttttcttttgctgaatttctagaaaaaaggccaaaaaactcgaagatttttttgtttcttgaattaaaatttttttgaattagatcaggaaagattttgttgtttttttttctaaaatagattaaaaaaatttgcctaacgttttggccagcggcgttttgtcctaccccttatttgcgggtgcacttcgtttccccccccccacgtcatttcccccccgaaaaattttttaaaaaaaattttcaaacctagaaatttttcataaaaaaattcttaggaacttacttagttcgaaaatttcaaggaaaaaatttttgagaaatttttcagcgattttttagaaatcttagttttgatcaccaacaaattttctgatttaaatgcccaatttcaaaa

SEQ ID NO: 19977 - DNA, 3251 bp, Heterodera glycines
tagggtttgtcacgacgtctctttggcacatacgctcctccgtacagttgtggcggcattccctgctcaaaaagcgcgtgcggtggtggctgtaaataatgtgtctcataaggaaagttatgttactacaacctgccaccaactccctccttcaaacattttgaacttctccagccgccatttttgacggtcatcgccttgtaaaattgtgtaaagacgccatcggtagtagacatgagtagggtgatgattatcgaacagaaaactaaagaagcgacaattgttttttgccatctttttggtaaaaaaaaaaaagacattaccgatacattgggttttgacgttctctggccatcaaaattgcctcaaaaagagggccactccgtacaagaaattccacaacacggtgaataagtgtcaataaaggcctgaatcagaaagagggctgaatttaaaaatggccgcatgttccctaaacctctctgtgggaatgacaacgcgcacagtggcattctcaatcatctgctagttgaacgtgacgaattaatcggatcagatcagatttggtggagtgaaaaggcgccagaaaaggtgtggccccaacctttttgtagtcctccagcatttgtgtgtctctttcgccctcttcctcagttagcggtactcccaactttggcaaatctccatagttctgcagaaatgaacgcagctcctccgtcacaggtcgagcgttgaacggcaaacccgaaggtgggtcgggcatggcaagctcacgaagaggcagcgggacgaaaaagggctataattggccgattgcttttgctttcagggtttttgattatctgaccagcggtggcatgttcacggaacgagcccaagacacacgaagttcacaatttcggattgtttcttggtgcattgcacatttagaacgttcagcatccgtccggctctgagtgtgtcaaaatacaaattttttttttaaatgcctttcaccataaaagcaacaaatccgctgagcgtttcacgataacggcgttcgtcttctggacgtgggtagagaattcgtgcggatgctaatggtccaaaggtgccaaatgtgtcgaaaaaatcttccaattttgcctgacaataagccagagttgtaatgaacatttgttagtgttttacatctgctggaaggttgcagacgtacaaattggtcgtgttcgggtcatcctccccgtaggggtcggagatgctcggcccgtatggttggtctaaagatggtgcgattcggtccaattcctcttctggcatattcaaccgctccttcaaatgctgtctcagtcctttgcgctcatctctcatcgcctgcatcctaaaaagcttttcgaataataccctttacaaataacaaaaggcctctatgaataaacttcatttttcacgtactgtttcaattcttccttgaacatctccaaattgctcagacggggcttttctaccacctttttaatgcccaattttggcggtttgccaattgatggaacagtcgcatccggcaccggtgtttgaagtattagtgggtcaggcttttggctatttttatcggcagcttccttaaatcgaattgctctctgaatagaaaggtggtattcattcctttttgtcttaccatcattattttcttggcagtttcttctgcaatttttttcgcagcttctaacggtgggggtttcgacagcgttttgagattaatgggcgatggcttataaacaacggaggaggaagaaactaaaccaatgtattaaacacaagtttttttttgctttttaacctgatttgtggcattaacaacgtctcctctgatgaaagtctttacaatttttttggtcccactggtctcctcaaatgtttcacgaaattcttcaaacgcttcttcaagtcgctctttctcttccttttcctaaaaatcgactaaatacaataataaaagaaaatgaaaaacacacccttttccttttcagcttaggatccatcgttgaaagcattagagaagcttaataacttttaatgatcagttgccaaaagtattggacctataaagaatagggatgttttttgttgcgctaattgtacataattttaacttaaacagaattaaaattagagaccggaaatttcaaatttgcgggtcctgttgcacacggcgagtcaattttgggctcccagtgcaaataagtttattatttatttagtaatcagaacgccaaaactttgcaaaacttaaaatttattggggattttcccttgtaaaaatggaagagccgatctcgagatagaaaagaaacttttaaaaaacaaaagagaattcgatagagggggtcgaaatatgggcctatgcaaaatttgaagaaattttaaaagctagaaattttttttgaaagggacgaacatttcaataattttaattcttttttagccaagtccacaatttaaggccaaaccaaataaaatttacaatattctccagaattttcccttcaaaatgagcataaaatggttttatttgctctagtattcaccaagttataagctaaaaaaatttcataaaattgtcgatgttatgacacgaaaacttttattaatgaaaaaataattctgccttcttctttaaaagaagaaattgaaattaacacacaacataaggaggacttgaacctgagacccctttttgttgactaactcacagaccactaagacgaaaaaaccaacttaattgtacttggagcccaaaattgattcgccgtgtgcaggattggaattcaaaatttttacaggacaggatccggcaggattaatcttgcaaatcctgtattttccaaaatatgcaggattgcggactgggatcctgcaaaatcctgcgcaggatcctgtcctgcgccgttctctaattaaaatcattccataatacacagcggcccaattttgggctctcatttgtcagtgcaaataggtttattatttcactataggtacgccccactgtgcagagaaaagcctagtactatctcgtcgtttctctttttctttgtaatttctctcactttggtgtactatcttttcattttaatgatgtaaaaagcaacattcacttcgctacgtttaactttttttctatacgttaaatctataccaaattttgcatatcgatagagaaaaaaattctgcattattctatgctcaattattattgtctgtgctcaaac

SEQ ID NO: 19978 - DNA, 1552 bp, Heterodera glycines
  unsure (1)..(1552): unsure at all n locations
aaaacatcccagataatttccaaaccataaatgttttttccgaccattggccaaatgttgcgcaaaaatggcttccaaaatgcggtccatttgtagtacgggtcgaatggtcaaaattaattggacaatgggtgaaaagctggcaaaaaacggcggagaaaagtgatggcatttcgggtcaatgaaactgaaaataaatagggaaaatttgtataattttttagcatattcgccaattttacaagatgctgatccgttgaaatccgacgactttcttttggcagcggattttgcggaattggcaacgcttttccaccgtaattgacaatatccatttccttggtgccattctttccaattttgctgtgaatttgaataaatttcagcgcccatttgcgagttttgaagtgttcgtccacgtaaatgtcaaaacggtgactgatcatcgcaattccgtggccaagttgtgaaggcgtaagcaaatcgaacacacaaagccaacagtcggcggagatgaaactgaaaaattaaatctgacgttttgaaatttgtttatttttttacattttcttttttagttttttgaagcggtcccaataaagccaaagaatggcacaacatccgacaaacccgacaaacaatggcacaacgaacagactaaaacaaaaaagagaaggaaaaggataaatgttgagaagaaatgtgaaaaacgtacagaatcatttttgaaggaactttgaaggtattgtcagagagaaacagtcgaagagagagagagacgaaaacaaataaatggcgaatgaataataatggaaggtggaggatgaggagcaaccacttttatactaatttttatgttcatttgtacgcttttgcattttccaattttttctcgactataaaagccctccctccctcccccatttttttcattcactcactttttttaacagtgtatgaagacaactttaataaagcataatttttttgttcgtaaaaagcaaaataacctttgtgtctccgaatactctaaagtttcaaagatatttaataggtatgtcttttttctaagcacctaattaacccataaagatgggcttgaaaactgcagaaaagtcagaatttagccttttttggctctattgcactttatgagtccaatcaaatatttaggagtccaatggcactccatgagtccaatcattcaaaaaaggaaaaggagtgatcaaatgaggaaaatgaatggagtttaatggcattctgagtaaaatgacattctgatcgggggggggggggggggagatatcacactaattattgatcagaaatgatcaggctaaacaagaaaggaattccaactttgtgtcaaaaatgacacaattttttttcaatttttggtgtctaatttccgtaaagccgaaaaataatggtaaaatggagtccgactgtgccgacgcttaaataacaaatttaatcatttatccttaagacatacaaaacacaaatatacgatgattagtgttcganagttgtatgcactaaaaaatgccaa

SEQ ID NO: 19979 - DNA, 1237 bp, Heterodera glycines
  unsure (1)..(1237): unsure at all n locations
gagcccatccgttgggagtgctttcgattagctttctctcctgaggcacatcctaaaatattatttataaatattactcttttaagaatttgnaaataaatggttanatgaagaagnatgnagntnantgggntaaagtaanagttnngtggtnnatttnntnngaatttgttnagtannnnngtggnagnngnntttttggngatgggtgnaaaanggggaaagtnggnatttnnttnngnaanntnttttgaagnnnaatttggntgagtgttnaananattttgnatgtnttnaagttgtnttnngtttagnatgatgaanntganaaaaaggnaanggtantnaaagaaaggtgnggaaatggtggganaatgataataaatanagtatgtaanaaaattatagngnnagggtttttttgggttgtttttnagttattnnnatggnnntataaagntgaaaattttannaagnatannntctcttaacaaatattaagaattgtacaaaaattcaagaaaattttatgaatttaaatttaaaacacacccttccgcacaatttgaagcaaaaaaaatgcttaaaattgttgtgcacaaaaatgtcatccagcagcaacggcacccggcggatttacacgaaagccgaaaattgttgccgttgaaaagcactgccattttagccacaacaaatgaaaaaaaaattaaaatgctttcctaaaataataatataaaaaaatataaaaataatctctgttaaaataaatacagtagccaaaagcgaattagttgcattatatagaaaatggacaattttcttaagtacatatttggattgcaaactgaagattgcctaaaaatcattgaaatgaaatttgttttgcaattctgctagtgaatggataaagatcagttaaaggtttttttggcatttttacagtcgcgaacaaaagaaaaaacgcatttaaaattacaatatttacttgtgcccaaaatagggacaataggggcggtggggggcggcaaaggtcggcggtggattcggttacatttattcgtcacaaactttgcacggtgccgttcggagagggggggggggaagggtggtggcacatgacgacactaatctttttttgcattactgggcacttttataaccaaaaaaagatgcttcaattattttgaacggatgctaattttatatcgatgaatttctcaccaaaaaatcatgggaa

SEQ ID NO: 19980 - DNA, 1934 bp, Heterodera glycines
  unsure (1)..(1934): unsure at all n locations
aacaaaacagaaaaaaaataaattaaaaaatgtgtgccttcgggttcatttcgctccgttttaagagagaaaaaacgatgataaatgctaataagaattgcattatgagtgggtgggacgagctgaatagggcaaaattaattattttcgagcaattgttccatgaagagaatgtcggtcgatgcgccattgtttttgttgtatgcaagcaagcccatattaggcattattaaattaatagtctcattcatcgatgccattgtcggctgacgacaaaggcgcgacttttaatggctgcccaatttgtcggcattaattcaattagccaaatgttttttttgctgcaaattatgcgcagaaaaacacaatgagataatagacaaaaaacttaaatagtcactcattcaaatatcttttcatttatttgggttgttcaataaagaaaaaataaaaaataatttttaaattttaaattttccttataaataagagttgatctatcaaaagtttccaatggatgaatttgtcaactctgtaatttacattgtttgtcttaaattttcataattttgactaattatactaattaactcctattggttgctctcatattctgcattggatgttaccaaatacttgaatatattttaatttttcacatttgttcaatttatgtaatagagttgtatgatatcacactaataaaagcaatggtatctgttttgaacgatttaattaaccaatttacattttattttatttctttcgcgtttagtttttgcaattcctagtggaataaatatttcttaaaatcgaaacttctcaccatttcagttaatagaatttttttgccttataaatgaattcaaatgctttgacattatgttaatgagttatttcttgaagaaaagtattaaaatgacactgaaaagtatgacggatttgttaaactaaggaaattattcttagaatgaataacattatatgcactttatcttatcgactattatagcaccttcacctatcttctacgctttacatatttattgaatattatgagcaatcaataaaatatttctaagattttcaaaaattatataaatcagtttggccgtgttaaataagaaagaaaatcattgaaaattaagaagcaaatagtttttcttggtcaaaaaaaacaagcaacaaatgccatcccgaacaaagcaaaatgaatgaatgatcagagaaaaacaaacaaaaaatgaacaaactcagaaatcacacattttcatcgccaacaatttctgagttcaaatttgcgtttggtttcgctaaattaattaaataaatggtaaaaaattactgtattttcaaattaaaataactaaaccgttttttaatgaaattatgaatgtttttgcgccacaaatcggacaattgttgttctgtttaaccctaaatttgtaaatgtcaaagttaaagaaattaattttcctttcatttaccaaaaaccaatgttattttatgtgaaaatttcataaaaattttttaaattaataatttatgtttttattgttatacttgtgcatttttatttttctaaaaataagaaaattgaccttttctgtcagtccagcagcaaaatttgaatttctaggccatttggacagaaagccaacaacggcactttgtttttcttcaaaagtttcaaaataattcaaaatgcatcggttcgtttcttcgtctcgaaaatggcataaactgtcgagcgcaacattctttgccaaggaatacaatttttggggcgcgtaaggattttcaatgtcggaaatagccatcgcctctcggctcagcggaatgatgtgcacattgaaggacggcccattgactttcagcattttcgatgccaatcccccatttttaattgtgccatttgtctgcaccanaaaatt

SEQ ID NO: 19981 - DNA, 1902 bp, Heterodera glycines
aaaaatgcatttttgggctaattttaggaagcaaaaaaattttttcaagaaaatccaaaacccagggggtccccccttatgttttttatttttcaaaatcacaattaatttcataactttttttaaactcatggttaaaacatgagataaagcacattagattgggcttaaaattctctacaaaaaagctcttagacgattttttgataaaatcaactcctgacgagttattgagccagaactgaaattgaggcctagcaaccaaaattttctatttccaaaaaaattttaaaaattttttctgaaaatgactcccagcaagcattttttgatcaaagcaaaagaaaaaaatttcgtaacagtgagactgaaacgaatattcgtgatcagcggcgctaacccctaaagacatgtttttggaagatttttggtgaaaaaatttttcctctcaaaaatcatggtcacacccctgtggtcccaaattccaaaatcacttttatttctataacttttttcaaaaaagtgataaaaagctaaaataaaatttataaaatagagcaaaaaattgcggattttttgagtatattatttttataaaatacttttttagaagggagttctgaatttttttctgaaaaatcgaatttttccagaaattctggaataacttttttattttggaagttagaaattccaaataaatttcataaaattctcctaattttttgctatttttcaaactttattccactaaatttgaccaaaaacgaagagagttatgaattttcaaaatttcactggattttccggggctcaaattttgacgatttttcaaaaatttataaccaccttccaaaaagtctgaaaccaaaaataaagtatatattcgagttcagcaccttaaattaggccataaaaatgcattttggctaatttaggagcaaaaaaatttttcatgaaatgcaaaaccatggggtcccccctatggtttttaatttcaaaatcacaattaatttcataactttttttaaactcatggttaaaacatgagataaagcacattagattgggcttaaaattctctacaaaaaagctcttagacgattttttgataaaatcaactcctgacgagttattgagccagaactgaaattgaggcctagcaaccaaaattttctatttccaaaaaaattttaaaaattttttctgaaaatgactcccagcaagcattttttgatcaaagcaaaagaaaaaaatttcgtaacagtgagactgaaacgaaaagccgtttcagcgccgccggcgctgacatgtttttggaagatttttggtgaaaaaatttttcctctcaaaaatcatggtcacacccctgtggtcccaaattccaaaatcacttttatttctataacttttttcaaaaaagtgataaaaagctaaaataaaatttataaaatagagcaaaaaattgcggattttttgagtatattatttttataaaatacttttttagaagggagttctgaatttttttctgaaaaatcgaatttttccagaaattctggaataacttttttattttggaagttagaaattccaaataaatttcataaaattctcctaattttttgctatttttcaaactttattccactaaatttgaccaaaaacgaagagagttatgaattttcaaaatttcactggattttccggggctcaaattttgacgatttttcaaaaatttataaccaccttccaaaaagtctgaaaccaaaaataaagtatatattcgagttcagcaccttaaattaggccataaaaatgcattttggctaatttaggagcaaaaaaatttttcatgaaataaagaaccatggggtccccccctatggtttttaatttcaa

SEQ ID NO: 19982 - DNA, 2408 bp, Heterodera glycines
  unsure (1)..(2408): unsure at all n locations
tgtgaacctttgccatcgaccagcgccggaatatttctctccctagcgaggtaaaatgaataacaataaacagatgaatttatcctttcgttaaggcaaagtccaagtaacgaaacggagcgacaaattatattcgaagaaaatgaaagtgatcaccaagacgaggcaaaagatcaaagaaattttagttgaaaaaatgctatttcaggaatttagcagagaattcactgattatggcgatgaagacacgacacgcgacacatcggaattacaggacgaggaagtaagcctaattgcgctaaatgctgcttttggaaatgttactatttttcctcatcgggaagacaattctatccttgccgcttcaatctttttaatacggaacaaaataattttaaaaagttaaggatgatttgtacgacgaactggcagacgaccttgaagaagaaatgcagggaggaaaaagaaaggattattttgacgaagatggatagtagcagaatatgatgtgcatttacacgctgttggttttatttttatttttctggaagcgtttagcttaaacaacaataacaagtacaaatagcctgtccatttcaattgtcttttcttctgcgtctgtccgttttcactgtcgctttttgatgctttcgcgctggttccaattcgtctccttcgtccccaattcctcttttatacccttttctttcaaacatttctttataccgctaaacaaactcaaatacgatgaatatttaaatttaaatactctcacatttgcagcaattctgccagcttcggagactctttccacctaaaaacaacttttaaaattagttgattaatgtttctcgtttcttgccagttgcatcacatcttcgtgggttatctcgaaaacatcaagtcgtttcccaatcgaattttcaaccttttggtacacctccacgtcgtactgagttactatagtgagcgcaattccggacttaagagatgcagaataatttacgaagtccgggcagtttccactcatttatttcttgcggtacctttcccgctctcgcagttcgtccgactctgtgaacgtagtctttcgagctttgaggaacgtcgtaattgatgaccatgtcaacatttggtatgtcaagccctgcaagcaaattttccactaattgcccacttctaattgtaagtaaaacacctcgtgatgccacgtccgtacaaacgaggattggtctgtcctttttcttaaacttatgcaaagcccccaaacgcttcggctgtgacatctgtccgtgaagggaaatcgcaccaaagcccaaatgtcgcagcagcaacgacaatttgaccgcacttgcgcacgtactgacgaacacaatggcagtattgcccgccttttcgttgagtaaataaaccaaataagcctcctaaagtggaaaaagtaagcacataatttgaatctcattgccattagagtattaattgaaatcccaacctgtacttgaacgggatgaacagcatattttggatgagagtgctcaccgtttggtacttcgtcgaaagttcaattctctctggttttttgagatgcgctctttctaatttggacacctataaatgccaaaaacaatttttatagaggtacacaagtgagtaagaggaaaaacatcttgccgaaattagattctaaaaattcacccctttgtttcaatagattcaattttccattttgatttatgacttataatagcagtcaaacaaaatccaacaccttttgggtcattgtcgccgagaaaagataagttttacgagcctttggcaatactttcaaaattttgtcaagttccacttcaaaatccatgtttaagattcgatcagcttcatccaatacaagaaatttgacagtgcgcagatcgaaccctttggtattttccaaatgatcgacgagacggccgggagttgcttaaaatagacgattaattaaaattaaaagaaaaagataatgcagtcgatgggttactcctacaccaaaaaaatgatgaggaccaccactgacgggtgtactacgccccccacgccggaaatttttttagggaggggggggaggggaactgctttcaccaccgacagaattatcaagtaaaatacttaccaacgataatgtgaggacgttttgccaaagaaagtgtctgtgatgtcatatcgatgccgccaacaattgtacctcaaagcaagagatttgaagaatataacaaacttacaaagaaacgtattgaaatgtgtatcacattagaacctttttatcctgttagcatggtggattaagattgaaccataaacttttttaaaataacagaaaaaatcgattaaaatttttaaaaatcnaaaaatctcagaaagatagattgagc

SEQ ID NO: 19983 - DNA, 1999 bp, Heterodera glycines
tcgttgaaagcattactattaatttgacgtgatcttcctagagaatgtgctgctcttttgtgctcttcacctgtctgtcgcctttggcatttccctcccccgtggcattttaagaacttttttttgtttgcttattcattaagcactgccccctccctctccataatttgattcgttctgttcagtttgtccgcgttcgtttggccgtgccattggcaaattcctcgacttcgttatgggttccgcgcactcttccgccaacccttcgtcttccgtctcttcttgctcatcgcccaccaattttcgggaaaagcacacgcccgactcgttggaggacaaaattgagctgatctttgaactgttggagaaaaagcccacccgattgggctacagcatccagtgggcagtgcaggtgagggagggggagggaacggccggcacaatgccatggagcatggcacccaactgatcatttaaatcatcaaactcattaggaaagggaaggaatgcgagggaaatggcacggcgcaatgccattgcatccacccaaagtcccaacatccatttcttaccatttcattttgtaagttgttggccaatgcaacagaagaagagaagttggagatgttgcggtgtcgtgtgctcagccgaatctgtgccttaatcacccgctacagtaacgtcgaagttgcggcgcccccgggcacaccgaaggcgcggagtttgagtgtgtcgagagcggacttggaaaacgtcgggagtgaggcggaaaggaacacggaagagggagatgatcagcagcagaagagtgggagtgatcggagggcacgaaagacggaggacggatcaatgaaaagggcggacagcgcgggttcgacgcggaaaaaggagggcatcggctacggcacgggttcgacaaggtcgcgatggaagtaagtagcaatggcatcaattgcattgtgccatccgatgaaacgcggacaaattcagaccaataaaatgggtggttggaagcttttagctaatttaattgcttacatttatccccctccccctaaaaagctaagtttcgaaacgaattcatccgttgtccgtttagcattgcgcgtacagttgaggagcgttctctgcacgagcagcatctgatcagtcttctgtccgcgctggtcgcctttctttggggtggtcaactgtccgatcggctgacagattgggaaatggcacaagcgcacaaagggggcgaccggcgccgctcaaacaccgcacttctgctggagaaaatgcctgcccatttgctggacgaggcggtcgctcgacagatcagcgcgtcggcagtgtttccactgatcaacgcccatttgagtgagttggccaaattaaggcatcgatcactgatcggttgccatcaatgggaataattttgtgatctttaaaatgccgtcgctctcttaggcaatgattcggtgttggacgtctcccaacacatgccctttttccaaattctgttggaattgtgcgccgcgttggcttccgtcccggcactgctcccaaagattgttttgccgcaagacgcacacggaaaatcaatcgcgaaacagctgatcccgcagtttcggaacaacctgaacaattaccccacactgatgagtggaatcagcgaagctgacttatcattcatggactttattcgcaaagtcaacgattattcggaggttggggaagacaaaaaaatgatttccaatttaaattttaacttttcaggtcatcattcgtttggcacggcaatttgaacgtcaaattccagcggaaaagcgcgtcaaaacgtcccattcccatcgctatttcacccgcattggcgccgaccgcgtgcgacgactgcgtaacgcgtcggcgactgtgccatcgtcgacgggtccgagttcggcggttggcagtgccattgcgtcaccgcaagccgaccagcttcggctcgcagttgtcgtctccttcagcccaatcg

SEQ ID NO: 19984 - DNA, 2503 bp, Heterodera glycines
acaaatattcgtggatccgctggttgttgtgctgaacggcacggaacacaaaccaattggtggtgaccatctccgcttcgaattggtacccttttgagaagaaccgaaaaaagcaattactctgaaaaatactcagatagcggaggatgaaagcgcatttgaaattcagcaaaactctcgagtttcaatttggcccaaggaaatgggcagacaaatcaaagaaagcgacaaaattgcgggaattgtgtacgcaaaaaggtgggcaaaatttcttttgcgctttaaagaattttagagacttataaatagtacatcatccaattaatccttaaataatttgcttttttaatccgttgaaatattttttaattattcagcaatgctttgttggaagtgcgtctgaacaatgacctttcgtctgctacggcgttgcgtcagtttacacttcacgagcacagcgaatggcttctgaagccggtcatttggaagttcgaaatcgaattatgcaattcatttcagaatcccgtgaacccttaccaatatttggtcaatttgttgtgcaaccctcgcgaaatgcaaagactccccggcttcgacactttgctttatgcctatggcattttgcgaagcgaaaaactgaagaaaaccaagcgggataagaaaatgtggaatttgttggccaaagtaacggattggcactaaactttcatttgaattgacactttgtcagaaattcaacagctcccaaatctccgccatcgcttcggcaattaacagaagtcgtccctttgtcgcaatccatgggccaccggggacaggcaaaaccaaagtcattgccgaaatcgttttgcaggtccaattcactcataagcgaatgctatctgaaataaatttagcatgtcaaaaagggcaaaaatgtgttggtctgtgccccgtcgcataaggcagtcgatgtaataatttgcgctgaatgtccttttcaatccctccgtttcagaatgcaatggaggcgtgcaaaatgaatgggttggacaattttgtacgtttgggggaagaggcggacgacggcgcactgagcgaatatcgaattgggaaattggcacaaaaccacgccgaatacgaacgcattgagaaggacattcggaactcacgagaaatcaaaagccaaagggactttctggacaagtcgcggctttgtaattccatttgaaactttcgccttcagtgaccgacacattcgccgttttcattcgcttttgaggaaaatgggcaaaaggaagaacaaaatctgcgaaagcatcggaaagggcacaagtgtggtcagtccggcgcaatggtgccaaaagtgtcggcctttcccacagattttctgcacgtgcacctcgggacaggcactgcgctttctactcaagcgttggttctgccccgacttggtcgtgatggacgaggcgtcccaaatggtcgaatgcgccagttggattatgctgcttcacgtcctcccccccccttttcacgttcttgccaaatgcctccttttaaggctccccgtttcgtaattgttggagaccaccagcaattgcccccttttttgctttctgctcggaactctccggtgaactcagctgaaagactgcacatttcgctgttagaatatatcaacgaaaccttcaaaaatgaggtgctgcatggaaagagtgtttaaaactgtgtagaacatcacttttaaggatttctaccattttctttctgtccaatatcggtcaaatgaactaattcaaaaatggtccaacaaaatattctacgacaacaaattggtcacttatcagttgacgaaaaacattcacttgcgccaaataataaaccaacaaaatggtaagaaaacgaacagacatttccgtccctaataataatgtacgaatttcggctgatctctcctctggtcctttgtcctcaaaacaaaaatttctgatcgatggtccgcttgtgctcatcgatacggtgagctatcgccgagacatttcgggatatttcgaaattggaaaggccacttttcgcattgagttgaagcattttcgcataatttgtaaattctctcagcaattttataaagtagaatcattcccgattaaggacaaaggcatttctgacagtaaatggcagaaagtctacagcttgttcaagttgtggtatcccctctctttccgcgagggtcagaatgagcacacgcactcctaccacaacattggttggtttcccattcttttcaatttaactttttgcttaaggcgaggctttctgtgccgtccttcacctccacgcgttgaatttattcggcggtttggatttgtcgaaaatcggttgtattacgccgtactcggcacaggcggaaaagattcaaaagctaatggccatgggaagggacgagggaccacgcttcgaagtcagctctgtcgacgcccttccagggcagcagcgagaagccattgtgatgtcattggtgcgc

SEQ ID NO: 19985 - DNA, 2533 bp, Heterodera glycines
atgcccaaatatgcactaaaatatgccttaaaactgccaaaaatagcttttaaccctcaaaaaaattccaaaaattgtgtaaaaattcagaattgacttttaaaactccaaaacataggttaaggagcgttttttagacaattgtaaaacattttggttttcaaatttataaatttttcttatatgctaaaacaaaattatgtttttatataaattaatttttttcaaaaaagcttacaaagtttaaaaatttctcgatttttaagggtgtatttttaaaaaaattccaaaaaagtcgatccgtagggggtgtatttttcgtttttattgcattttcttatgaattttgccaaaaatgaccgaaatatgctctaaaaacgcaaaaatggccaaatatgcatttattctcaaaaacccccaaaatatgtttatatatgcactaaaaaccttcaccaaatcaaaaattttaatgcagaaatgctattttgagcccctttcttcatagcatatgcgcagaaaaaataagcaaaatcatacaaattataaccctattcataactagggcatccaaaaatatggatataaaatcgcgaaaaagaaaaaaacacgatacagcttaaaatttactcattttagcgaaaaatcaacctgaaaagcgaaattttcgcttttttgcttatttttaatataaattacgcaatttttaagaaaatttaaatttaatcaatattttcgacaaaattttgctaaaaatgtctttttctgaaattttttaggggtcaaaaatgccaatttacctgatggggccgttatgatagaggttttttggaaaaaatttaaaatatggacataaaatatggataaaaatgccaaaatatggaaaaatatggaaatatggacataaatcgtgaaatatggaaaaatatggatatggaaagtcatcctagaagcttcaaaccaagcttaaaacatgtttttcgtgcgtttcaggcctcccacagtccaggaaaaaaaatatggatttccatataattggatgccctattattcataacaattgaaaaaaaaaaaaagtttttcactagaaatcggtaccctattaattaaatatattgcactcaaaatatggccccctgttcacaaagttttttttagaaaaagctcgccgcaaaatttgtttttatttattttagtatttggaataaattttccaaattagcaaattaacactggccctaactgatatttttaatttcccttctttaatggactttttttaaacaaacaaacacaacaaaaacaacggtgaaaatgatttatgaaatcaattattttcgcattgattagagaatgggctcgcaatttgctgtgctatttatttgtcattcgtccagcagcaaaattggtttttcgcgagcaaagaattttctcactttttgttgtaaaaaaatttacaatttcgattttcaaatttttccagggcctcggaaaaccattcttgtgtacattaactctctgaggattgaatatttaggcaaatgtcttctggttcctattttcaggaatttggggaaaaatctttaacaaaaatgcaataaaaatgtccgaaaaaaagtttcaggaatacaaccccctataaatttgaaagtaaaaatgtcttcattgggcataatttgcaacaaaaaaaaatggtcgaacgtagaaaaattgggggggggggggtcaaattcaaacgtaacttcattgaccctcctccccttgcacacgaatgatgcccttaaaatgcacttcctaattgtctcattgtcaaagatacttaaatttaaaatttgcatttcaaatggcaacaaaaccgctcctctactgctactggcgcaggcgagtaaaacatatttaaatattaattttgttaaaaaaactttttagttatttttttatttttttctctgtgattaactcaatttcattttagctcatgctcctggcgagttcgaatcgcattgcatttgaagggcattgaatttgatcagcgcattgtcaatttgttgaacggtgatcaggtgtggtttgaacaaaaaaaatcatgataaatggaatttgtgagtgatctgttggggagcaggtctcccccccccccccgaaaaatttttgttaaaaaactttttcaaacatgaattttccaaaaaaaaaaaaaatttttcttaggaaattcttagtaagaaaatttcaagaaaaaaaatttgaaaaacttttcagcgatttttttgaggaactattttcaaaaatttttccaaaaacccctgaaatattttcaaaaaatgttttcatgaaattttcttactaaaaaatttcttaaatttttttttaataacatttcggtactagtaaagtttgtatccccattttgggtcaaatttttttttcttttttattgtcgcaattgctttttagattaatggacaagcttaaaaatttcactcttgccgatttattcaaagtattggctctaccagacaaagaattctaagaatgg

SEQ ID NO: 19986 - DNA, 341 bp, Heterodera glycines
  unsure (1)..(341): unsure at all n locations
taatttanncgctatttcgaaancacgagaaaaaaattttcatgtcacaaaatgagaaaaattgtcaaaaaagaggaagcgaaatttgaattttatcgaaagagagcaaaaacgctggagaagataatgaaaggtataatttctttactaaaatgtgccaaaaagacgggttggaggcgaaaagggaaaaaagagggacactttttttggagggggcgggggcaaagagaaagggaggggaggggaaaatgggagggagggggagggggcgtggtcagcaaagtccgtccttcggtcggtccatccgccttcccgcgtttgcccctcggccacaattcccc

SEQ ID NO: 19987 - DNA, 2162 bp, Heterodera glycines
caacgaccctcccgtgccgattaaaaacggcatttccaagtgtcagacggactgcgacggcaacaacagcccccggtaaaaggcgaaggtcttcctcggagagcttacttcgaccgtgccgttccgtgcacgctccgtccgccgtcgttctgttagcttttgttttgttactaataattggcacaaaggacgggaccaacgcaatgccaaacgaatgggaggagcagcgaatgtgcggacgactgctgatccaagcattaaaaatggtgtgcaaccaccaatacgcgcagccgaacagaggtgggaacagacaaagggagacgattaattagtgcaattcattagccccaaattagcaaaatgattggtcgtcctttggttcccatcgaatgccctttcctctcaaatttccataagtctaacacctctaattgtcagccgaaagctcctcctgaccatttttgagcttgccatgcaattccattagctcattttcaaaatgagattatccgcccccttttaccatttcttttctcaataaaaccttttgtctttttatcatttattctttcaaaattcttaaaatgccaacaaacataacacccgccctctccattttaaatactttcaaaataatgttttttcctttcttacgatttactcaacataatcctctgttttgcccgacggggcgaaatgagacaaatatagccttcttctgccaacgcaaaatattttgcttttttcaaccgccggcaaaaggcgccggggaaattagcctcgtctgctgaccattttactaattatggctcaaaggcacaaaaatgggaagggcttaatgaggaggaaaatggatgacaaagaagagagagaaaaggaatgaccaaattgagggaaaggccaaagaagcgcaatttcaaattagcaccttttgcagataatttctacgaaaccaccggcgttttgttgcgcgtccgccgttcgtccgcctcccgcgcttatgtggtgaagcggcaacggtcgccgacagacgacggcgccgcgccaatggccgcgccacacggagcgatgggacggaacagacgcggcatcatctgggagtgctgcaccaacaaatgctcgctgaattacattcgcaacaattactgtgccgcaccgccgcaccaaagcgaacagacagaggaaaacgccgcattccaattggaggacgagcggaggcggcggaaatgatacactcagcaacggtggggaataaggacgagggaaaagcatacgggaaaagaaaacggggaaaagaaagagggaaaaagagaggggaaaagaaaacggggaaaagaaagaggggaaaagaaagagggaaaaagagagagggaaaaataaagaggggaaaagaaagaggggaaaagagagagggaaaaataaagaggggaaaagaaagaggggaaaagagagaggggaaaagaaagcggggaaaagaaagaggggaaaagagagagggaaaaataaagaggggaaaagaaagaggggaaaagaaaatggggaagggacggacgaccaaggggaacttgatcaagaagcaattgcaacaataatactaattaaactgatcaaaaacccaacactgggtaccgcctccaagccaaaagcctctgggaagaagtggggtaacaacgcatgtcaaaggcggggggggggggaagaaaaacactcggaatgcaaatgacagcaaatggtttagcattatccaattaattagtcggctttaagcatccccttctgcaatctcactgcgatctctcatcatttcccccttcgtccaatgaatgaatgaatttgtcctcctttggtacgacagtctgtgctgcgagtgaccaaacaccgaaacgaacgaaagcgacggacgacaaaaccaaacaaagccaaggaccattcccaaagcatcccaaaatgatcggcaatgatttgcgttcattgttagtgttatcaatgaattgaaaaatgatgcaaaagtgcacttcgaaaagagtgcatttgcactcttttcggtaatggagagacgccaaaacaggcgccagacaataatattaatatccaaaacaaacagtccaactccccaatttcccccttctcattttttgtttgtttttgtcagcgaggtgact

SEQ ID NO: 19988 - DNA, 1618 bp, Heterodera glycines
  unsure (1)..(1618): unsure at all n locations
aagcagcagcaaggtcatattntatnntattcttccctctcgccataaaaaggttttttgtgaaattcgcagctgattcgcccgtgtcccattgccttaagcactgtctcgagccgatgacacaactcgagaaaactgtctcttttatgtaccgccattacgaagccgtaagtttggctgattggggcgagtgaagccggccacaatggcactttaggtctgtgagaagctcgaatggtcagccaattgtgctcagagctgtaaggtactgggaagaggagctgaagaatgaaccattagctcatttgtaatgggtccccttctgatcagagcgaagaccgtggtgctttcttccaatttacgactttttaccgaatgcattgcgtcgactttgaagaaggcatttccaattcggtatttcaaaggccaataagctcatcccccaattttagaactcgaagagcatttgccgtgtcttaaggaagccgcttttaaggctgacgttggtaagcgaagggacaacgaaagtggcgattaattaagtgaatttttgaagtttgtcgcgagcgatgcgcaccaaaagaaacggcggaaaagcaaaacgccaaagaagaacggcagaaaatgctgtgcaagtgggagaatttgggggggggggacgaaaataagcaaaattcggtaggaatgttgaatgctcgacgctttgttatgtgcagcaattggccaacggatgtccaaaggcaaaggacacaataattgtaaggaaaatggggaaaaggggcggtggacggaagaagggctttttgggactcaaattggaactcattagcttaaaaatcagaatttcagtcttagcactacttatgcccatcaattatttgggggggggggtaatgccgaattaatgatgatgaattatcgtcgggtttatgtctcaaagtgatgaattgtctttgtcagcgtctgaacattcgaattgcggatgaaatgcgtcgactgacccgtgattccgatttcgacaaactctccatccattgtcagagagtgcacgacgctaattacatgcgaaagcgactggatgaagtgacgaagaaaaataacactgtgtaattgtcatttatttgaacggcgtgccaatatttgccttattttaaattattttctcccaacaaaaatcatacatgaaaaaggggggtgagtcaaccgaaatttttgtgaaagggtcccatgtaaatcgacgcacttttttttgcggcgcgctcttttaaaaactttttggtcgacagggggcccggcgtagccgataggcgccgccgggaaaattttttgtaattttaatgctattgttagcagattttgtctaaaaaatgacctaattttgagatggctaattttttaagaaaaaaaactaggcttttggggcccggcggtgccgataggcgccgccggggaaaaattttaagaatttttaatgaattttgttaagaaaatagccaatttttaagaaattacacctctttaccccttcgccaacgacccccccccccccacctcttttacaccggccccccttcgatgcgaaggggtcccccattttgggaccctttgcgggcgaagg

SEQ ID NO: 19989 - DNA, 2283 bp, Heterodera glycines
aaacgggcgcgaagcgcccgtcttgaggccgcgaagcgtcccaatgtcctcaacaaaattaaaaaacgggcgcaaagcgcccgtcttgaggccgcgaagcgtcccaatgtcctcaacaaaattaaaaacgggcgcgaagcgcccgtcctgaggccgcgaagcggccgaatgtttccacaaaattaaaaaacgggcacgaagcgcccgtcctgaggccgcgaagcggcccaatgtcctcaacaaaattaaaaaacgggcgcgaagcgcccgtcttgaggccgcgaagcgtcccaatgtcctccacaaattagaaaacgggtgcgaaacgcccgtattgaagacgcgatgagtcccaatgacctcaacgagattaaggaaaagattgatcgacgacaaggatcaagaaataaaagaaatttcaaggaaatttgtgtcgctttggcgacatactccgggcctctaggatggcggcatctgttgccgtctcttcgccaaaattcttttcatcgtcggtttggaagtcgacgagccaccctaggaggacgattctccaaacgtccatctggtagctgtgcttggtcacgtggaggagggtgaggttcctccaaaactgctggcgctctccaagcaactccgattctggatcggatgttgaccagttcgatcggataaatgtcgacaagcatcccttgctcgcgagggctaaaccctacatattcttgtatgcacggttttactgggtctacttgaagacccaaccgtacaaaatggtcaatgttatgcccggagagatgaaaagaccctccggaccataacaggtgaatccatcaaaatggatcgaagcaattctgccaaaatgttctcctaagagattggccccttcgcgaagttctccgcgaaggcggacttcgacagcacggcgctcccgtgctgtttcataccaatgcggtccataagaccgctcaatccatgagctcaatggctcaatttggcgaggaacaggaggttcctgccagcgaggaactctctcctcctcttcaaatcgtggatcgccaagtccgtaaaggcgatcattgaagacctcggcattttcgggtatgaccacccggcgggccgagaaataaggcccttctcgtatgggaataggcattccgtggaaggatgatttgaagagtgtggtttggtggcacacccttttataccaccattcaatggaagcgatgaatcattcccctgaacgaggagtgactcacaaaattttttgaatgccgaggggataggacgtgattcaacaccacatccgaaggatcctcccccggccaagtacagtattgccaatactgtaggcacattaccataaccctttctcgttaaagaccaggaaattaatttccaaagtctatagaaaggagaaagtttaatgaaaactgttaggcaaacaatgcctacacaaataatcattatgaaggcaagtgatgattggaggccaatcaaagaccaaagggtcgccttccaatcaaaattccagttcggccaactggattggctgtttatcactctttcggagtgatttggaccgtaatcttctatttgttcgggttggacatagtgtaatgtccccctgagaacaaaagaagtgtttccagccaaacactttgtttggcaatttgtctcaattctggctttatcaaaagccaaaattgtttggtaaattgatgcattggaatcacattttgttgaaaaatgtgttccatcgtcgcaattaatttcggcaagagaattgccaaaatttgtcgagcacacataacggaattgtgctcccgttgaacatctgtaacacccagatatgttcaacggcaaaattgtgcaaaggctttggtgaagttccaaagctatttggagaccttcgatttgaaggtttaattggacaggactaaatcctgtcaaggcaattacctttctcccagtatttctgagttggtaatttttgatgtttaatggaagtctcctctcaggactttccattaacttttcaaggttatgtgaacggcaattgcagttcactaaacctgatgaatggtcaggtatgcaatcagtgcatgcctgaacgccaagactgcaattgaaatcaattgcttcttgtcgacttttacagttaaagtcaattgttaatggctctctggttagagctatgttgctcccgtcaaaaacaaaatctgagtttaagacgggggcgggcggaaaagttactccgatcggagtaaggctgatgttgttccatct

SEQ ID NO: 19990 - DNA, 1956 bp, Heterodera glycines
agccaagtttatccgttctcaatgagattcattgcaatctgtctttaagtacaaaatattatcctttcgaattttgaatactttactggttcgatcccaattagaatctgtaggttttataaattttgtgcgactaaccaaaagggcttcccccggaatcccgtattttttattggattatagtttctaaaatatatgctctaaatagtaggaaaaaactcatcttttgcatccaaaagttggaatttttatttgctttttgtatatttccgtatttattagtgcaggaatcaattccctcggcccaaaatcatttttaacaggttttgccaaaaataacttaattttgagcaaattatttaaagaaaattgatgagttttattatttttcaatccatgaaatttgattttttttttgttgcttttgacccgacatttgggaacaaaacgacatttgacgacaaaacaacatttggggatccgacttttgggattttaatgaaaaattaaaaaataaatgaataattaagtatttaaccctaaatacaacaaaactatgtctgcttttgcccatacagtcccaaaaaaccagaggtgaaccattaaatagaaagtgcagagaaaaatgcatctcttatttataattctggcacaaagagtccggaaaatgagctcctgttaggaaaaaaattagcatctgtaactcagttgggcaaaacgggtggaggttcgaaccagggatggacgaaatttcgtttcgttttcgtttcgtcctacattttcggcactttttgagtttcgttttcgtctaccaaagttttttcgtttcgttttcggtttcggttttcaaaattttgtttttcattcgtgtttcgttttcggtttttaaattttggattttcgtttcgttttcgttttcgtcagagcaaaattggacgaaaaagacgaaaatatttacacccttaagaatgacttttttggtaagaaaaaataagatatttattgaagtattgtattaaatctgctaagaaattgtatgtaaagtttttaaaaattttcctgtcggagcctatcggcgccaccggacccacctcccattccccaactttttttgaaaaaatcatcccgatttcactgaaatggatttgatagttttccccaaaattgttaaatccataatgggatctgaaaacggacgacacccaactcgtactaggccatctcgcactgccccaactcttagtttttcgacaaaaaaatcgtcataacttttgtaatagtcgaccaaattatacattcttggtatctttctatagcccttaaagctctctatctcctggtaattgcaagaaaattttttgttttcaaaaaagttatgaccaaaaatcgtaaaaaaatttcgtccataactttttcaaattagataaaattttttgaaacttggtatatttagagagaattataaaggatatcgaataataccaagaatgtttaatttggtaactttgacaaaagttatgacgattttttttttgggaaaacggtacgagttggatttttaccgtaaaagacataaaatttgatgcctttttatcgaatatttgttaaaataactgttcgaatgcaaaatgccttttttgaccctaaatcttattttttggccttgatgttcttattttgaaaatttttcggtcacacccatgtcctagagccacatccgcttttccacctactaggatctcaattccctgttagaggatacaattgtaaagttcttaattaaaattgaatatgtttaaaaaattttcggttttttcgtttcgtttcgtacgaaaatggttattttttcgtttttgtgtttcgttttcgtccgtcaaaattttttcatttcgtgtttcgttttcggttttcaaaatttcattgttcgtttcgtgtttcgttttcgtgtcgagtgcc

SEQ ID NO: 19991 - DNA, 2689 bp, Heterodera glycines
  unsure (1)..(2689): unsure at all n locations
caccaatttcccctcgacccatgcgaattgcattaaaatgcgtagcgcatttcctttctcgctcgacttccgattggacaaaacgaacacccgcgtgttctgatcagtttccaccgtcacatagccggtcaaaccttaagcaaatgctttcaaaattcggctttcttttgcatttcttgcccatgaatggctttctgttgttccgtgccaacagagtgccgtttcggtacacttcgggccgaatgccaaattggcggaaagattcgttcagtgccattccgtaattgtaaattgcgtcgtacaacagaagcgaatagatggatgcctaaagagtgattggatgtagcgaataatcaaaaaataatccattcacattgatcactttgctgcaattggattcatcgcaataaaagggccaatcgcccgttctgtcgatcactcttttgaaaaagccgtagtaattttgattggacaacgcggacaaagtgatgtcgtagtgccactgcaagcatcaattgaaaattaacctatcaaaatgtgccaatttctacccataaggccaatcggccaatcacttcggcgtccgcgtttcttccgtcgagcgtatttgaattgttactgtaatggataaagaattaccataggatttttttatgcaatattataagtaaaatgggccacatcattgttaaattcaaatttgtttttaatgtataaatattttaatatgaagcaatggcttggcttttgagatgattcttatttttctaatttttgaaaccataaattacctcgattgtacccaaaaaggtaatctcgtcaaattgactaaattgtggaaaaaatcattcagattcctcaattaaactcacaagataaatacatgtcattatccaccattatgtaaacataatcctaaaaatatttacaattaacaaaaaatgaataaaataaataaagacgacttttgtgtttagtcctccatcgaacaattgaagtgcgaaagttcgcatctgcttcaaatcgtcaaagcaaagcaaaacgactaaatttaaaaaagaaataaataatttaattttactttccctaattataaattattattttaaaatgcgtactcctcgcccgttctcgaattgcattgacaattgtgcttgtgtcggatgattgaatgttgaaaatgcgtgttttataattaattgtgattttcgactgttcgctaagcgaattctaaaataatttttaaaacatttaaaaatgcaataaaatgactcacgtcaatgtcagtgccaaaataatcacaaccgaaaaagaaaatggaaatgtttaaatttaattttgcgatttcttaattattacctccacttgctgatatgatatcactttggattataatgccgatttgtgtccaattaaaatactgaagaagacttataagcccggaagccatgctaatggtaaagtcaggcaattaaataatatacaaatcaaaatgagtgtactatttgtaatttggcacaatgttcaacagagttggataggtggcattgtttgaggaggcaagactgatgagaattcgaagattaattagtcaaattaattgaacgaactcactttgaagacatgctttgtccccagacaagcatcggaatgttagaattggcagccaaatggcccagcattggcggcacttcaaagaatttgcaacaaattaattattctaattaattatacatacaattatactaatttattcgcattaccgtcaatgcacgaagtcgcaatgattgcgtctgctcccaatttgctaatataattgtaagtttggccaaaatcgtttgcttcattacattgagaataagtccaatgaattctgtggcgacaaatttaaaattgccgtttaaagtgttagtaaactgacgaaaaattgacgctttttggaaggatttcgtccgcccacaactgttccaatgccattggaattgcgccgcccgaattgggcaacgcggcgttctttcgtgccaagccaaagtccgtgtcattttgggccaccaagatggccactttgatcagcgtctgattggccatgggagtggacggggtgctgaagccggccattacgctgtcgggaatcgtctgctgctcctcttggcactgaaaaaattgatcaaaagtcttccaagcatcatcatctcttattactaaaaattaaagtcaataataaatgttaattaggtgacaattattgtaattggacttcactttgattggcatggataagccgatgaaaaacattaatagcaaaaagaaacatttggtagcgttcaagaacatactacggtatgtgtacgaccaatttatgttattcaaatttaatgacaagcaaatgcttttttgctctttatgccggtttttgtgccatttttgggggaggaatcacctcaaggcaataaaagcccattattattaacaattnnctttttnntcattnaaaaantnaacaaantttaataaacacacattaatccnttcttatattcaaattatnnataatnatncttcttttactctanacacctttttcacaaatctaccataaggcattcataggcactttcaatttnatattttaaancatttttatctatgtgagttaaatacgagtttccattctttttataatattaaa

SEQ ID NO: 19992 - DNA, 1847 bp, Heterodera glycines
ttaccgcttccatcgcctttgtaatgcactttcaaagattccgagccaaagatttcgagatcattgtgaatggcattggcgtcccaacagttttgttttgggttcgaaaagttctaaaataatttccgtttttatgtatttttaaatctattccttctttttcacctcagcaatgttcttgcgaatgtccggatggacagcttttaaaagttctgaaaaattaataaattaaaatattaaaaattattttattttttcatttttaccatttccaaatcggtctttcaaaacgccaataaaggtttcttctttcttttgatgttcctccaatgcgatgacttttgttttgatggatttgaccacaaatgaaaattaattaacaaatatattttgaacaacacattttaatccaaatattgatgcccgagagtcacaactttgagtctcagggtcaattacagtctcgcgaaattttcgaatttaccccttttttataaatacctaaccccccataagaattaattgggaataaatatttaatataaatatgaatttagacttttgatttatgcagttccaaccttttccatgttgttccaattttccaacagagttcttcaaaatttccaactcagcattggtccgcccattctcaatctgataattgaatataactgtatatttgaagaaaaaacttttatattattttaaattaaaccaccgtaatgaagccgagcagtcccactgttaccgtaatgttcactacagtcaaaattatgaacttcgtcatttttctctgcattcctctgtctggaaattgaaaaaataagtctaattttataaaaatcagaaaatgttttcttttcctttacagggtcatgttgtctttttacccaaaaagctatattttaataaaagtggataaaaagcaacaaaaatgcttaaattattttttgtgtattgggtagagccggcgcgggacgggattttgcgggatctcagtcgaaaaatgcggtattatacatgcggaatcccgtctcgcaaaattttgagcacaaatcccgcagcaggatccgcaaatttgaaatttctgggctctctagtattgggcaacttccaaaataaaaacaaaaacaacaaaaattatgtttgaattaccatttgatagtatttatttttttattattaaaattattttttacattgtccaactcgtgccattggcggggattcatttgagataattggatcagtcatttccatcggttcgacagatcgaaataaatttgatgacatattttaaaagcgtaattataattattcacctaatttagtgttaaataattaaatgtaattaactaattataggctttttaggttattagtcaatttgtcttttgaataaatggaatttggactaaatagtaaaaaatgtaaggccaaatcaattggacggaataaatcattggacaatgagatgagaaaatgtgataaatgcagcaaaagcaaaatgaatgaatgcataaataaatgaataaattaacaaatgacagacaaaaaaaacttttaaatgacaaaatgaattaatgaaagcgaccgaattagagcggacggacaaacaaacaaatcgacggtgtcttaaaaaaatgcatttccatcaccaaaaatttaaatttaatttattatttttgccaacccaacggttgcccattctttgttaaaatgaagagagagagaggagataaaggagaagagaagtaatagagaagagaggaaacgatagagagagattgaggagaggagagattagaggatagagagcgaggagggagagagaaaagatgagg

SEQ ID NO: 19993 - DNA, 2339 bp, Heterodera glycines
  unsure (1)..(2339): unsure at all n locations
aaancatttttattctgttaaaagcacatttaattacacatccccccgcagatcagaagtaattagggttaatgaaccgttaattctttcatcgcctaatgcgacctaatttgagctaatgaaacgttaattaaaccaccataattgctggggtaattagggctaataattctctcttttttccctccagggcggtgttcggtgcctgcggcgttgcatgtgcgctgatggcgctcggactgtttctgattcggagtcgaacccggcgcagcggcgccggcttagtcggcgccggattcaaaaaacagcagcaccaccaagcaataccatcatcttcaatgatgtccagcagccgacggcattggaaggagagcagtcagttcggcaaaggtgccaaaattggcgatgctttcgagaattgggttttgaggaaatttgggcactttgggtccccttttgttcggtattccctggcctggaattctcttggcccaagcgaacattttgacattttattgtcttcaagactcgactaaaccgcagcgccattagtatcatgagatttaccgagttctttattgaagcaaaactttcttgaattttaaccccattttttgcctggaattttttcaaacgttttttttaccgccgaaaatgttttcgtttcaataaattttcttattcaaaagatgatcagccgccctccaccacttatgtgaatttggtgcaattgctgatgccacatccgaagccgccacctgtgaacatgccacaacaagtgtaggagaaaaacaaagtgccatttcatttttcacattttttattcacaccattttcaaatgcgtacattaataatgaaattaaatttatttatggcaaaaataataatatttaatattaattacagtaattaattaattaatattttttatttatcaaatattgtttataaatgaaaagaaaaacaaatatatctttgccaagaactgtgtttaaatatattttacgacaataataccgtaatactttaagcaacgtaaaattgtaacaaattttgccgtttttgtacacagtcccgggcacattgatctggccaaccattaaaaggctgttttgaaaggggcaaataaagtgagtgatcactgattgatgaaccctgatcgatcacttattaacccccccccctgatcagagttcccccgggggctaaacatttcttgtccgattgccaaagcgtcgacagctgaagcagcagcgggcacgaacatgcggctgatcacacctaaaaacaacaatttcaataatcgaattctttgttattagcagttcttaattttgtgttggcataatgttttgaacggaaaactgtcccatacgaatactgtattgggtgggacggggggtgctacggtagtttcggtgcgggagagagtgggcgggtgctgtgccggatttttgggcggcttcgccccatgccaaaatgacacatttaaataaaattaataaaaaataagtgaaaatgccaaaaaatgcgcgtcaattttaaaactgacgtgtgaaaaaggcgcaaaatatcgcagaagcgactttggtcctcgcacagttggcgaagtgccgcggaaggaggcaaattttggagcactgaaaaacaatttttgttttttgaaatttttgagaaaattttttaatttaaagttttttttgagtttaaaaaattgtaatggatttttataattaaattggatataattaggaaaactaaagaacaaaacaattttattaattaggttagcacaaacaaaagtaattacaaataaaaattaaaataaaacaaaattacttgtgcaaaaatatgaaacaaattaaaatgaaatgaaagcaaaatttgaaaaggcgtgaaaatatttaaatggttaaattgggaccgaatttttgggttaattataattcgttttccccgttaaaattgtgaaagacaaaaaaaaaattaaaattaaatttaaaaacggcgccgaatttgtccattttcagcggcggcgccaaagtgtgccgacgggcgccatccgtagaggcgccggcgctgctgccatccggcgccggcgggcgacggcttcaccaaaccgccaacgtcacgaaggcgtcgtccgttgtcataagtcagcttttcctcgctcagaagcggcttttcctctgtccacacggtcgggaacggcttttcctcccatggaacatttttaatcggcttttccttttgaaaaagatcctggagcaacttttgctcttcggtagtcgccggggaggctctccaaatgctcgagactggcttttcccccatataa

SEQ ID NO: 19994 - DNA, 1460 bp, Heterodera glycines
  unsure (1)..(1460): unsure at all n locations
ttatctcaatatntggcctaattttttttttactttttttgatacattttgtcattttacacccctaaatttcaggattttagtgcctattttccattttttagtgcctatttttggggttttttagagcctaaagcttttgaatcaaacagataaatcaaatctttaaagtcagtgattaaagatatcatggaatgaagtgaaattatgctataaaattgttaattgactttaatatttcatggttattaaaaaattgcccataaaatcagggttaccctttgtccttatttgtaagatttgtccttatttaagctctttgtccttattttcatcttattttttggattcagggagaaatttagatttttaatgataatttttgaaagaaatgtttttgaagcgaattaatatgcaaaatcttaacaagatttagttaaatattcaaatttttcttcggcggtttcttattctcttaaaaaaattagctcaaaatcgtaattttgtcatttttgaacaaaatcgttaagaaatcgcattaaaattacaaaaatttttccggcggcgcctattagagcaggggtgtatctgttcttatttctaagaaatgttctgatttggggtagtaccttattttcatttaaaagaggaaatttctgaaaaatttggctaattcctaacaaaattcattaaaaattcataaaaatttccctcggcggcgcctatcggcaccgccgaactctcttccctcacccatacccaaaaatttttcggaaaaatgcgccgaaaaaattgttaaaaatctgttttttttgattcaaaatgcactgaaatttaccaattgcttatgtttcgacaaaattgttaaaatcttaaaattgattttcggaaatgtataaatttctcatttctaagtcgaaattgctcagaaaatagttggcggtgagtaatgcttgattttgttgaataaaaaagcgattcaaatggataaaatatgttatacataattagggacggaaaggtttaaacgctttttgcaatgatttaacggattattgtcctttttgagggaatcgcaaattggacacttttgggccaatcttcttaaatctatgataattatatattgcaaattgtacaatattcaaaaaatcaaaacaaacacaaaattttagtgattttgtcgcaattttcaattttaaaatctaattttgccattatttataatatctgctttatttttgccgattgtcacaatattcgccgtataaattgtcgccaaggcaaagacacgtgaattttgtccgtggccatggctcattgctgtgccatggcactcgttggcggcgtcggtcgcgcaaaacgcaacggccatgggaatggcacaatcggctggcacaactgaaaaggaggaaaatgtgtgcttatagagccaatattaattaatagcccggttaatt

SEQ ID NO: 19995 - DNA, 2225 bp, Heterodera glycines
caaaatggacattttaaatggtccattttagtgaattacctaaaataaaataaaattaatctttatttaattcagaaatagaaataaaatattcgttttatgaaatagaaagttatgctcttggatattattaaattaaataatttgatggattaaaggcctagagctaatttcaggggagcttattaatagaatttagaaaatggccaaattggaagaataatttgctttttctacgcccaaaaattattcctttgtattcaaacaatgacgcattcgaattgatttattgaattttctatggtatctattaaatgcaatttaaggacggactctgtgagtcgagtgagagggcttctttttatttttagaaaaaaaacctatgattttttcgttttttttttaatttgccgaataggattttctccagatatttttacatcaaatctttgattccattttttcaaaaaaaaatttttataattttttaagaattttttttttattgaatttgtccgcaaaatgtccgtccttaaatttcatttacacatcatagaaaattcaataaatcaattcgaatgcgtctttgtttgaatacaattaaataatttttcgtgcagaaaaagcaaataattcttacaatttggtcatttttctaaattctattaataatctcccctctaaaattgaaaaatgagcatttaatgcctttaatctccaccattttctttatttaataatatccaaaataaaattttgcatttcatataccgtacttcttcgaataaagccccagtggctctattgttcagtcccttcaaaaatggggctatattcgagggtgggaaagttttgttcagtcccttcaaaaattggactatattcgagggtgggactgttttgttcagtcccttcaaaaatggggctatattcgagggtggcgttctattcgaggggggggggctctaatcgaagaagtacggtattaataatatttttaaagaattcacaaaatgatggcatttaaatgtcattttgttctttctctgttgctgttcttctgcgcctcatcatttttggtttatgggggagggaaaggtaaaaatataaaaaaatatttgttttaattagggtagggtttcagatttaatcaaaacttgtaaaatattcacgtaaaaaactttttcaaataattacaaattaaagtgaatgagtttttcgtgctcattagcctattttgcctattcccttgtaattttattcctaatttgcattttttaatcctttttacagatgcgtcttcgggatccaataacagtgaaaaaaagtcgttggccgatctgatggtagaagaaagattggccgaccgggacggaaaaccattgaatgaattgttaaaatttgacaaaattgacaaaaaagaattggatgcatttttgaaagaaaatggggaattgcttgacatctcatttgatgattacaatccgcaaaatgtgcagcttggtgaccatgaccaagtcagtgttctttttagtccaccaagtgcggcatcgccagcagaagtgggaagcgaatgccatccgatatttgtgccattttagtggaccaattccatctgagtcaatgtattttttaagtgtcgttcaaatccaacaaactttgtatcattcaaaggctctttgcagacttttttagcctaggaatttcacacagaaaaaaaatttgcaaaaaaacaataaaaattctgacttttttgcggttttcaagcgattatttttttgtgagttgtttaattgcttacaattagcattagcttaaaaatatcttctaaacacaagagctttcgaatatacaaaatgtcttacataggttttatcaattaagaaaaaatatatggcttcttaaccttggctgagacggagttggcccgacggagtttttaaataaaaattaaatagttttagtttatttattttaattcttattttcatattgattaaataattgtttaacattgcattttttaaaaaattgtatctttccttatttattaaattttttcacaatttttttagtctgaaactccttcaaagtcaaaataaaaagaaagcatcgaggggagaaccaatgttgaaaaaactgaaagaaaaaactgattcaattattcgcagtgaaaaaagaatgatcccgtaatggcacagataatggaaaatttattttctttt

SEQ ID NO: 19996 - DNA, 1630 bp, Heterodera glycines
gaatgatcagcagagagagaaaaataggagggagaaacagttacagaacagaaatgtaaattacagcaaagtgctggtgagagaaaagtcagcgatgggacggaagcctggcatgaataatccgcggtagtcaatgttttggatcaaagtgtgggcaatggacccggcggaaccggcaatttttgcgacaaacaaacagccattttgatcagtggtcatttgcttaggtgccaataattccagtccattttcttggagggtctgaaaaaagatttggcaattaattaatactcactaattagtgttaatggcctaccgcaagaacggcgtccaaattgtcaacttcgtaagactgaaagggacaaaagataaatggcacagaaaagggaattaattagtggcgaattgactgaccacgtccttgacaaaatctccgcgttttcccacttcagcgccaattccctccgaatcgtccggcgaaatgctacatttgaagacaaaaataatctgtgaaatcgcagaaactcttgaatttagccaattacaatacaataattaccggtccctttctaatggcaatttcggaggcattttccgtctgacgctgcgcaaaacgacgaaaatcgaaatggaaacaatgccaaaaagaagcctaattaaaggaaagaaaagggacaaataattaatgaatggaatagcaaatattcagcagcgcaataattagtttaaatggggcaattaattaattaattacctgtttagcattggacacaaaaaattcgatgtgatggaagcattggacgggcggaatttccggtgccgaagagggcattttgggtgaacaatcgaagaaaatgcgtaaaatcaaaaataattggaaaaaggcgtaaaataattttcatttaaattatacaattaataaattgtcatatttaattaataactgaatctccgcttcttttttgcgtccatttggtcattcccttcacacttttgtttatttcggtgggaattgcacgaaaaatggaggaattatcacaaaaatatgtaaaataaatcaattttttgtgcagcttttatttggtcttaggaaaaaagtgccgaaaattcaaaaatatttaattcagattttatgagtttggctttgaatcgaaaccgcttaaattacgtttaaattaaaaggagatggaaagcataaagtggacatttgccaatgagcaaaattatatttaataagtaaacaaaacgagctgatcaacaaatattcgtaattaattcgttaattagctaatttgttcattaattaattaattaattcgttaattaattccttaattggcttgtgccgttgcgctgtctctaaacgggaatgcttctcgaggcaatcgtttgccgttgcgcccccctttccgcccctccgttcgctccgtttccgcttctcctcatcccattgcccccatttgcgccattgaacgagttcagaacgatggtttgcccacctcttaagaaacaaatttgtaaaaaaatggaaaaatcacgcgatgtagacagattgacaggtgaaaatgggcaattatcatcagttggaagagcaaaaggggcggagaacagcgaaagtaaaaaagttaaa

SEQ ID NO: 19997 - DNA, 1252 bp, Heterodera glycines
ccccccccccccgctccctttttcaggattcattatgccaaacaatttgttgggcccgtgcgcgatttttccggtcaattgcccttctttttttggccaataattatttttgtgcgcttttaaggcctcactttgcatttgtcgtcggtgaagccccgctttttggccggcgtttaccttttcctcagcggcaaatttttccgctttcatcctctgttcgttgctgggccaaattgaaaaataaaaagcgaaatttgcgaaactgaaaaatgcgaaacgccaaaaaatgcgaataatgcgaaaggcgaaatgcgaaaagcgaaacctcggcccatccctgatacctacctaagtattttttaaatatgtaaagatttctatcctttttgaggacctgacaatttgcgccaaaaatttgggaatgaaattgttttgaggcctaaaactatggttttttacgaggcaatgagtgtcgggtccctattttaatagactcgggcaattaacaaaaaacaaacaaattaattttgcctataatctaaacacttttttctctcaaaaaggccgtcaaattctctgccgaacgctttgaagtgagccgggccgaccttttccccagcgtttactcggcacattaccagcagggtaaaacgggcatttaaatattaattgtaggaaaaagctgacacttaattttggcacccagcgattttctggattttcgactcgtttttgataaacattttcttgtattttgtaaaatttaaaaattttgctttttaattaaacattaaaatttgtagatttctcattatcaaaatgaagagttgtccctttcatattgcaatttccatatttttttccctaaaggcgtcggtctgatgtttgtgcccggcactccgttgtacactcaatacggccaggcacaggaaattgcgatttttgtggtgctgcaggccgactcggacaatgccacgcagcccaaaattcaatacgctttccgtggccaattcgcgccctttcgactgccccacgttttgcgctgttgggccaatcaggtgacggaaattggcaatcagaaaaaaggggggaattcggcaaaaacccaaaaaatgccaaaacaaacaaacaaaatttttactaattgacacaggtttatgtcggagagattgccaacggggaaggagtgttgtggtcattggaaatccaaccggaagcggccaaagaaaaacaaaatttttatgtgaattta

SEQ ID NO: 19998 - DNA, 2241 bp, Heterodera glycines
gcattttatagcaaaaacaataaatcttttagcagtttgaatgacttctgcggttaatccattaaaggcatttggacaaattggtgcgcggctcgggattcgcgagaagagaagccaatttgtgcagaaggcgtggccatacattgaccccggcacgcattttggttcgttgtttcgtaaacatatttgagatatgtattcattttttgacttaggcaagaagaatttcggctatttggtcagtgctgtttcgtttttggttttctacaaagtctccagcaatatcaagttgaagaaggcaatagaagcggttagtttttacgattgtttgcttatgcttttgtaaatgttgcattttagaaacagaaattggaaatgaagccgtacgttgttcaggacgcgatgacacgcagcggaatttaaagaaacaacgcattctaataggtgggaggcaaagtatcttcggattcattagttttaaactcagaatggcgtatttgttgtaactgttcacaagagtaaattaattctatgactaatattgaaactttcgtttttgtgaatttcaataattggttttgacaagttacctacctatattggttgattcgggaaaaaatagtaaaatttgattgaatgttaaagtacgggtaatttttcagaattgcggtcccgacgaaaagttaatttaaaaattttattttggttttttcagggtgaaaaatgtgctaattacgaatctgagctcagattttgcaaaatcattgattttatctatgatttttcatcaagtacttgattttttccaaaattttaaaaaaattaaacgagcgaaaaactcatgcatagatgttgtagagtttaaaaatagcttttgaatgaactattaaatttatgaagaaggcaaatttaaagttttatatgattttttgaaatttaattactggcccttaggggtctatgaaacgggtctggggttcaaatccgcttggctgcggattattttttatgacagccaatgaccgttcatgcctttcatataaaaataaaaggtaaacaaatggtgatgaaatttgagcaatgttttttgttgatcatgtgtgtggttatgtgcttccattgagtactttatttattgtcaaatgaacccaaaaactttcttcaaaacttactgattttctacgaactaaatgcatcttattgaccttattaaaattcatctcaattcgagtgaagcggccattcaatttctccgtgagcatgaaattcttcgatctttgccacctcgatgtccgttgattgcgtgccgaagagaaatgactgagattaagactggaagaagccgacggagtgggggtgatgacaaaatgtggcgttgcccatcccacaaaaataagaaagagtcaattcgtaaaggtgtatatgtagtgattagcagagatattttgttgtttaatttaggatcttttttggaaaatagcaacttgccaccacaaaaatttatactttttgtgtacttatgggcacatggtgtctcttcttcttgtcaagaatctctttgcgagatgtcatcaagcacagtgtgcgactggtcaagtttcatgcgcgatatttgttcgcgatggctcgttgaacatccaattaaattgggtggactgggaagagtggtccaaattggtaatttatcaattaaatgggctttcccatgatttttttgtagacgagtctcatgtgtaagagaaagtataatcgaggacgaattgtgcccgagagatgggtatttgggatgtatgacattgaacaaaaagttggtgtccttcggtttgtccacaacagaacccaggcaaccctgttcccaataattcgccaatacgttcgtggcggaacaatcattcattcggactctgctgcgatgtacgtagacaatgcacggcaacgcagccatatagtgaacatccccaccatcccgatgccggcataccagcatttgtgggttaatcacacagagaattttgtggacccaaatactggtgcatgtacgaatgccgtggaattattttggaatgctaagaaaaagaataaagaaatgagtgccacaacagccgaattgttggaaactcatcttgatgaattccaatggagacagattcacgggccaaagacaattgaagcgtacaataatatcttggcgcatattgcatattattatccgggaaacaattgccctcgcgtgacattacc

SEQ ID NO: 19999 - DNA, 1943 bp, Heterodera glycines
  unsure (1)..(1943): unsure at all n locations
tttgttaagaaaaaataggtttttttgagtccggcggtgctccaaggtttcacaaaaaaaaaacagnaaaatanccgcgccagggatggatgagtgaatggacaagttgagagtggaggcccaaagtgacggaggaggacagattagcacagaaaacggggcaaaagcgtggcggtggtgctgctctctctgttggcccaacatcagcgccaacagtcgttggaagagcggcgcgtcggcacgctcccaacaccttttggggaagaaaatggtcaaaatcaattttaaatgagcagaaatggaaaagtggtgatccaaaaaagaaaaatagatcaagaatgcacccgaaaaattagaccgaattccgaatttaaaacttactgacgaaatttgtcggttttttaatccccagaaatcttatgaaaggtttggtttgaaagtgttgctataatgcaacaatctaaccaaatgtccaaatgtttaaaacccaaaaaataacaatttaaaatggccaaacaataaaaccgcgtaccaacagtgcgagcgcgttcagacacaggacgagagaatgggtgtcaatttgaaattggcgctgttcaagcagttgcagcagaatctgttgaattaaacggttataaaatgcttggtttcgctctgtctgcaccttttccgcgtccggatggttcaacgacagcagcgaggcgacacgaattgcacgggaggagaactcgtggttgcgcaccaacttttgcagggtcgcaattgtgtccgtggaaatgaccgccatgtctgtgcaggggaagggacaaaatggaaaacagaaaaacggaaatgcaaagaaaatcacgttccaaatggacaagaaaagcgatagtgccaagtgcgttaccataaaataatcattcaaatcatagaatcccaagtggcaaaacactaaataaaaatcaaaaactgttttatagcatttaaaagaattttttatgtgtaaaatcttaggctaattacgcgcctaattactaaaacatttacaacaattattaatttaatttgctataatgtccaattttcgagagacgttccgtattcccccccccctcctctccttcgtccgaatacgtctcggtcagctgctacctgaaacgggtcaatcggggcaccgaaggaggacgacttttgccgaacgctggccgccttcgcttggtgaagcgacggagcggcgccgccattctgccggggacaggccaacgaattgagccattcttcgctgcaaaaaaaaaaataaatttaattttagcaaaaagaattaatgttttacacgggcgactccgtctcctcctccatgcaaattggctgcatacggtaacagtgtcggccgacatgggtacgcgaccaaagactgttgctgtccttgtccaaactgaaaaattgtgtaacaacaattaattaacgaatgcaattgggtgggcattttcccaattaaagcctttgccgaaaaaattgttttaaatttcgaaagaaaacctcatctacaaaattttaattttcttttgtctcttacactttcctttaaaaaattgaattttaaacttttacgtaaaaaacaaagtatttttataaaattttatgaaacaacagggtggggaaacacgaattactccagtttcaaaactcctcaaatttgattggtgttcaattcaataaatacgcctgtgccatttgctgcccgatttgccagcgtttctgcccccactcacttcagcacggcaccctccgtctccatgaaggtgaccatttgttgctgctgcagttggtcgccgccaacaccgtccccaacatttgcctgctgctgttgttgttgctggtggtcatgtggtgccgttgtcgctgttgcggttgttgagggtggcaacgaattccattgggtgaccgggaatccgggcaat

SEQ ID NO: 20000 - DNA, 1271 bp, Heterodera glycines
ttcagaaaaatcccttgtgtgcaaacatatttcacatttcacttcataacttttgagtttctgcacggatcgagaccgggataagaccattggaaagagcagctcgagctctacaagaagctatggaaagaaaaaatcgacatttcagggacttttcagaaatcatgtttaattccccaatggggccccattttgggtcctcagctacagccccatgcttctcccaattgtggcgaaaacaatatttcacatttcacttcataactttttgagttctgcacggatcgagaccgggataagaccattggaaagagcagctcgagctctacaagaagctatagaaagaaaaaatcgacatttcagggacttttcagaaatcatgtttaattccccaatggggccccattttgggtcctcagctacagccccatgcttctcccaattttaagtcttggatttgtcaaataaattaaagatttcgaattaataataaaaaattctattataaatttttttttgtagagggaaaaattctgaaccaaactactattttaaaacccaatcaaaactgggaaaaaatttgaagtcaaaaaattattcgaatttctccaattttgtttccataatttccgaatgttattcggtatcataatgccaaaccaaaacgaattcgttttaagatattcttttctggacttgacttggtttctcaatatcgaagcttttttctccgcaatttctaaaacgcttataccaaaccctagatttttggttccgatgggtttcagaaaaaatcccttgtggtgcaaacatatttcacatttcacttcataactttttgagttctgcacggatcgagaccgggataagaccattggaaagagcagctcgagctctacaagaagctatggaaagaaaaaatcgacatttcagggacttttcagaaatcatgtttaattccccaatggggccccattttgggtcctcagctacagccccatgcttctcccaattgtggcgaaaacaatatttcacatttcacttcataactttttgagttctgcacggatcgagaccgggataagaccattggaaagagcagctcgagctctacaagaagctatggaaagaaaaaatcgacatttcagggactttttcagaaatcatatttaattccccaatggggccccattttgggtccccagccacagccccatgcttctcccaattagtggcgaaaacaatatttcacatttcacttcataactttt

SEQ ID NO: 20001 - DNA, 2260 bp, Heterodera glycines
gctcgcggcatagatcggaatgccctttttggagccaaaaatgcccaataaaggcttgtggtccgtttgcaaaataaattttctgccgtataccatgcggtaaaatttctgaacggcgaacacaatggccaatgcctctttttcaatttggctgtaattttgctgcgctgctgtcagtgtgcatgcggcgtgttcgaccactttttcctttttgtccgggaatgtgtggcttaatgtggcgccgattccatctttggacgcgtctgctgatacgacgattggtcgtgccgggtcgtagtgggtcagcaataaatcggatgtcatcatttcttttgctttttcaaaagcattttgctgttcagaagtccaattccaagctacgtttttttggaggagtcggtcgagcggtgcacgcaactcacgcatgcatttgacaaatctgccataataattcaaagctcccaagaatgatcggagcgtgcttttgtcgatcggtgcgggcattttccgaattgcgtctgaacgcgatgggtctggacgaatgccatttgctgacacaatatgcccaaggaacaaaagttcgggctgcaaaaatttgcatttgtccagttggatgcgaagaccgtactcttttatgcgcccaaaaagagtgtaaagtgccgtgatgtgttgctccagggttttcgttgcgatcaatccatcgtcaagatacgcgaaaacaccagggatgccagcacaaatttggtccatcagatgctgaaatattgccggtgccgatttgactccgaatggcaggcgttggcattggaagagtccacgatgcgtgttgatggcgcacaattgcttggatttgtcatccatttccatttgcaaatatgcatcgcgcaaatccaaatttgagaaaaatttcgcgccattcagtgaagcgtagatgtcgtccggccttggcagtgggtgccagttcaattccaatgcattgttgaggccagttgagaagtcgatgcagactctcgtcttgccgtttttcttttttacggccaagatcggtgcggcccaatgactgaaatcgattggcttaattgcgccaatttgaagaagacggtccaattcggcattcacagcttccatggcgccatgtggaattgggcgggctcggcaaaatataggctttgcatcagaccgcaaaatgagatgcgcctttgcctttgagcagtgccccaatccatcttcaaaaacttccggaaaatccttttggagtgccgttgtgagcgttgtcacatcactgatcgatttgtttggcggcttcactgtcgaaaaattttcaatcatttttgtcgcctgagccaatttgctggtcgggaataaaatttggcgtgggatgatctccaaagcttcaatccatggtagtcccaataaattgtgtccgacttcgccgctgacataggcgatcagagtttgcggtggtttgtcggcaaattggacggtgcattggaatttgccaagcaaagctaatggctggtcattgcagtttttggcatcgatgtcggatggagtcaaattcggttctcccaactctcgccatgtttgcaaagaaataattgtggcttgagcgccggtgtcgccattcatggaagtttgccttccatttatcaaaatgatcaatttccaccatcggccttgagttgtgccaacatgtaggcaatgtgtgtcaactttgactgtgtggaatgaccggtggctgttcggtggggcctttgtcttgttttgtcggcagactgtcgaaatgtgcccttttttgttgcacttgaggcaaatggcgtccttgaatgagcaatcggagcgccaatggtcggatttgccacatgatgcacacggaagcgttgggcgaccacgtgtttgctttccatttgaatttgcattgtgatgttgtcgttgattggagccactttgtctttgcgctgggtcggtccattgccgcggtcttgtgttaatggcgttggtggcaattggcgggttgaccagcgaaagtgcgctctctttgacaagttgaattgcccttaactcctcctcaattttcttgagtgaaatgttggtgccatttttctgagcgtcctccaacattttcagtgccttttgtcgcaaatcgtgatgttcatcgttgagcgcgatgatcaaaataatgcacttgagttgttcctttgtcagactcagatcggcatttcacatgatgcgttgatctgcgcaatagtgatgaaacatc

SEQ ID NO: 20002 - DNA, 2417 bp, Heterodera glycines
tcaaaattaaacctgcttgatatcgttcggtaactttaagtattcaatgttagcttatacaatttcaaaaaatttctttgctttcataaaatatgacggaaaaagttaaaaacttttatcacatttttcgctgctattagataaagttataagcattaaagttatcaatttattttatggccgtgtaaactacaatgtagctgatttcatggctttttacttaatatgggcttggatactttgtgggtccgtcgacattaagtttgggcactcactatatggaggaatttcgaaaaaaaatataattttgtaaaatcttattaaaatttaaaattaaatttagtaatttaacaaaagatgtgcttacaaatttatattttcttgaaaataaaaaactttaattgtggaaacctcttgaacagactgagccttgtaatgattacaaataatacatatgtatgaaattgatatataatgaattataatgagcctagcaaaataagcatggttaattgagaggacatgcgttaaaaaactttcgattcctaaacttgattaaaattactatgcttttaaattagatgattgtaatttttaggcaattaaaacatttttaaatttgaaatccttaatttggtgcccaaacttcccggtgcctaaatttctggtgcccaaaacccccgcggtgggggcgccggaatgaatgttaccgatttgaattctacaaattttacagtttggcgttgtgttgtcgttgattgtattggcaccaaaactgtgaatgaaatgatcgaaatgacttttcgtatcacagaagactatgaaccgcagacagatgatgaagaaataatggtcaaagtgttgaagcaatgccatgaatattttcttaaagaaagatttatggtcaattttaaagagatcatggacaattttgttggagtaattgttcggattggctttacgaatgtgcacaaatttttggaaagtgaattcgagacgaagccgaatgatttctgggattcaataaagaagggcattgacgaaataaggtttttttttaaatatttatttatattcaaccaattttagtaagataaacacatcaatgcctttcatttttgttttgatgctgttcaaaattgaatgcgtttactgtatttttcactcctcattattccaggatttttcagttgttatgttttaaaatataaatttaaattttgtattcacttaatgtacctttttttaaaaaaagtacacttataagtaaaatatatgacaatatttattaaaatatatagatatatataactggcgctcaatattctccttttagttcatgttttgaatcggatgtaaagtcagaaatttgggaaccagtcaatgaaaaaagtggcaaacagaaaatgaagcaattatcatcatcctcttcatcatcatcatggtacgagaagcaaaatcagcaagaatttcttgcattagaaaagcatgacatcctgaaggaaaagccattgcgcggggaactgatgctccaagcggagcgggtcagtgctgcactactgtacacactgatacacatgaaaatgcggttgttgttcgaccgcaagcaggtcaaaaaaggaatcaacatatcgaaaaccaacatatcgaagacatccgcaaaggtcaaatcaaaaatgcggaaacagttaaagcgtctgcaaaaaacagtggtggaacgaatcaattcggtaccgtaattcgtcagtgtatgcatattttgggttggggtcagtcccaaaaaaccgattttttggggtacattttcaaaataaatttttaaattttgaacaagcaatttctataatactcaaaaaccttcaattatgtaaaagataaacgcgattatgtgtgaaaattgcgatatgtataaaaatcccgaattataaaaatatgtaagtaaatgtccaaaacttttattcgcataatacaaaaaagaaaatggttttgctactatttaaagctttgagaatccaggaaaaaagttgtatttacataaaattggcagccctaatcattagctataaaaataaagttatagtacaaaataaatttaatttttaaaaattcattatggattctctcttcgaatatttaatttttggaatatttttgataatttttaaatctaatgagataagcttggggtttcttagtttaaaattttgcatagcttaagaatattggggtcttatataagtttttataatagtttagaacttatttatttgcgaaatttttaaactgtctccgaatattcattgccaaataaaaataacaaataaatataccatccgaaatataaatttttgggcactttaattaaaaaaaatttttaacttttttaattcttctgccaaaaaggctaattctttctc

SEQ ID NO: 20003 - DNA, 1294 bp, Heterodera glycines
  unsure (1)..(1294): unsure at all n locations
aaaccggtccggcgattttagggaaaattccggtttgacctgtttttgagaagccgggcccggaaaccggtcattttgaaaatgccaaaccggtccggaatattcattaaaaattttctaactaaactgaatgccaattattaacgaagacaagattaaatgcttttctctttcccctttaaaactaacaatcatttatttcatcctcacttgttaactcagcaaaaatttgttctttttatttaattctacaatgagtgggaagcagcggttggatggcgcagtcggtagggactttgtttcccccgcgccacagagtttgtgaacccacctttccacggctattttttcctttttcatttaattaagactagggctggccgggcaccgggtatttgggcaaaaaccggcacgggtattaccgggtattgaaaagccgggtaccgggtcgggtgccaatttttaaaccgggtcgggtacccggtaaaaaatcggggtattgaaaattttcataattttcatttttttcaaataataattttaccaaaatacctttactaaaataaaaacaaaaaaaaatatttccaaaggtcaggggcggtctcattttgtcttggagtgagtaccaccgcccggtagacnctttttttggttttcacataactttttcggcacgctttgttcaaaaaacttttgggaaagaagggggttccggcggtgccgataggcgccgccgggaaaattttttgtaatttttaatgggatttattaacagatttatccacaaaaagagtgatttttgggattactatgttaaatttgttaaccgatttttttttaaatggcaaaatatatgttagttaaaaaacatacgataaattatattttgtcgataggaaacccatgagtatatcaaaaaagtttcaaaatattttacttcctgtagaggaaatgaaccaaggaaaagtaatagaaaacaaagaagattacccactaggctattttcacagttggtggtgtcacttttatataatatattaattttttttaatttttacctttaacaacaattttcttcactaattttcactcaaacccgcatgcattttttgaaaaaatgttggtaatactttggtttgtcccctctatttttcaaaaaaaataaaaaaattttaaaatcgcttaaaacatctctcctggggtttttggggccactgatcacgaatccggcatccttttcgacccatttcgaacccctgacccaaattcgaacaaaaatctaaaaattattttt

SEQ ID NO: 20004 - DNA, 950 bp, Heterodera glycines
cggggttcggaaatggtttggtaaacatattttaaatttaaagcatctcaaactgaatcaattcggatgcgtttttgggtaaataaatatccatcataggttcccagactcaaaattgcataaaaaatataagttttcttaggtacttaaaaagattaaagcatcaaaaaaaaactacgcggcaaagcgtttaaaccggtttttgaactggttaaaccacgaaaaatggaaaaaattgggaccaattataaccttttcaaaaaagtaaaactggataaattaaggtatagttgaattttgtgattttgagtaaatttttaagaaataaagaatttttatggttcggcggtgccgatggcgccgccgcgaagaattttgaaaatttaaatgcgatttgttaacagatttttgcccaagaaatgaccaaaattgttatcaaatttaaaatttctagataaaatattgactaattatgcaataaaatttcaaaattatgagtatgtttaagaaatcagaacgaaattgtgccaccaccccaaatcagaaaatttctttgaaataagaacatattaaacccatgatttattgggtttcaaagaacatttttttaaaaaggatgcttcaaattttcaaaggatggaagctaaaaagggaagtatttttaagcaaagaaagaaaggatgggaggcgagtggaggggagcatgcgatattggcaaaatgcccgtgaaatactcaaaaaaagaaagtttaattaacaaaattatgacaaaatcaaaaacaaatggaacagtattccattttcataacaagacaatgccgtattgtttaagaacaatttacgattcctctgaattatttacttcttccacactaaaatctatggccaatttcactttgtccgcttctctgtcgtaaagtcctttgctcggatccatcaattccttaatt

SEQ ID NO: 20005 - DNA, 2459 bp, Heterodera glycines
tgcttttccagtgcccgtgccgtctttctgttgctgtcgtcccaatgtttttgggggagttcggtgcgtttctttcagcactgtaacccatagagtcgtttaggctttttgtgtacatttgcacactaaatgccaaggatgatgccaatgagtgcaagtaaacggccaccacggggaattcctttgatggtttgggtgagatttgatggatgtcaacggcaaacttggaatttgcatccgacagaggacacaaagggcgcgcaaggggagccggcggaaagggcggaaaagagccaaaaagactttttggccagcaaaatggcggccagaaaagcatagctgaccgaagtgagagacttggaaatgggcacaaattaattttgaaaagaatcagtgagaggtaagacaatttgaaacgaacgaaagaacgacgaacggagaggggcaaaggacgggcgattacggttgacgcggtcagcaaggagttcagagacagtgccaagagggcaagaaggatgtccatggaggagatgagcctttttgtggatggaatgaatgaataaatgagttaattaattaattgggggagagacgcggaaaaacgaatgaattggatgggaggacaaaccaaagggaaaggtgaaggattcgagaggagcaaatgcgagtgggggaggacgaattgggcaggagaagcaaaagactcgggtcgaaaaattgcaattcctcaaattcatcggcagaaactgagggccgaacagaaatatacgaagaaaaatttatccgaggcatttttgacgattcgcttaaatgtcgtccttttcttcgcctttttctctgctttttgcaagcactgctaaaatatttttgctttacacaacaacaaacaatgggcataaataagattcagtagagaatatttgctaaaggagacaaatgccgtgccatttcaaactttccgtccctaaatggcatcaaaacaaaaattgacgaaaagactttgctgcaaaatatgtaacgaagtttatttgtttcgttggaagaatgaaaaagaaaaaaatgaaaagggacaacaaaatgaaaaataaacaaaaacatttaaaatattattttttaattctatttccacagtatttatatttattcgtctactgtatttgcatgacttctgttgagttaactcttttattccgacttgatcagaccacttctgcaactaaattagaaaagttcaaatccatcgggctgtgactataccgctgaaccctaaataaaaaaatttagaatttgaccacaaatattaataaatattttcatttaataaattatattttgcaagttctttcctgaaaatatatttattgaaaattttgaatttctggacctggcccagcatagtcttaaataggaatgtccatcactttcgtatttaaataacaaattctccaatttccctcattttttttgtacgccaacttttttttcctttcagtcattcgctgctgtgtctctgccaatggcattctttccaattccttttcatttggcactttgcgttgtcgtcgcttccgttctgttgatcctcactcaatgttgttgttgtaaaaaggtgaggtcgaatttcacttggcgtaataaaatcaaatccattgcaattttaagaaagcagcgccggcgtatcccgtggcaggtaaaggaaagagaaagggagcgaaatgcgcacttttcagttgcaccgattccaatcccaacgccgccgagtgcgccgcgacagcctcccgtagcaggtgaaaacgaatcgaataaacacacgcagcacatccctttttgttggtttagcaaatgacccgaattacgctacccttgccaatttggacaagaatatgttcctcaacaaagccctcggtgattcgaaatgaaagcggaacggaacgaattttaatgtcaaacacggaaacgatgttaatggagaagaacgaagtgctaaattaataccaatgctgtaattatacgaacttatgtatgtaaatgcaaatgtctttctcattagtaaattgtaactgatttatggacggaaaaccccattttaattcattcggacgaactgacaaatggggggggggataagtaacaaaaggataaactgtagtgaacgccccgtgaaaaaatgggtcaaattatataccaatcgattcgtctcaaggagctaagcatggaaaaatatgtctcgagttgcggaaatgccaaaaaaccggtttttgaaccggttcaaaacttgaaaaattgagtgaaaaggggggcggctcctgactctaaaatgatcaaatttggacaaatttggtaccattcgaaagctcttgatgagctaagtctaaaaaacaaggtataaactcgaaccaatgccatctaagcactgggacaactgagccccagagaaaatggacacttcagtaccaaaa

SEQ ID NO: 20006 - DNA, 2564 bp, Heterodera glycines
tttacaaggcaaagtatggggttcttcaaaactaggaaccaataatggattatttgatttctgaacgccttccaatagctgcacgtaagtagtgtatggcaccttaatccggtgtaaaattccccccccccctgccctccacccttccacatcctttctttctgccttttcacattccatttcaatttcctcctcgcaccacttttcacccttttcttccgcgcagtttgttagttgttgccccccaatttcaacgcctaattgcgcacaaatcgattgctgtccttcgcaacaccccccccccccccgacgaatatccttcacaaatacaataagttgcggagatgattctccttttacattttacgttttgtaggacgtttaatctatgtattataatttttttattttagcatcagaaatgttttaaactctccaattgtcttcaacatgtctggacaaggaaacggaggaaagggacgcggaaaaagaggggcaaaaggttaccgtaaagtgagtaaaaaataatttgcaaaaaataataactatcgaaatttaattagtttttaccaagccacttcatttaaagctatttatgagaaaattattttaaatttgacaaattttctagggcaactaatacttttaaataaaatttaattgattaaatgtgaagtttttgttaagtttttccaaatgggacattgttaactattcttattttagaccaatcttgacaacatccaaggcatcaccaaacaggtcatccgtcgtttggcacgctgtggggggctaaaacgcattcccggcctgaactacagagaaattccggtatcaaaaaatggacgaagggttttttcatttgttaacaaaaatgaaaatttttgacagtatctggtattattatttttaactcaatttctggtaaaaaaatcattttgagtcaatttttttttgttgtttgtgcgtttcattgcactgggagctcaggaaaaaaatagggcaaaaacctaaaaatataagccctattttcaatacgattgtttgaaatttgccgaaattccctgagaaattcaatgatttttttcaaaaatcattgttgggctgggaattatatggaaatccatattttttttcctggacagtgggatgcctgaaacggacgacacccaactcatactgctccaactcgtactgctccaactcgtactgctccaactcatactgctccaactcgtactgctccaactcgtactgctccaactcgtactgtttttcgacaaaaaaaaatgtcataacttttgttaaggtcgaccaaattaaaaacattcttggtatcattcaatagcctttaaaattctctataaaatgagtattagctgcgttttgtttttttcctctaaaataatttttaacaccatatttagccaacttttgaaacaaaaattttcttcataaaatacatttgatcactgatttgaattatgctcggtcattttcaattaatattcatttcttctgcgtctgatcattgattttgttcgtttgtccgtcactcatttgtcagcagaagacgtcccttttgtgatgctttgtcccgcttcatcttcttctgctggtggtggaggagataatggcctaaattaagcgcaaaattcaaattcggataaaaattaaatgccttttttttattgctcacccaatgcaattagtgccagcaaaaagccaaatgaacacattgtcccaattttcatctttcttctgctgctgaaccgacgaggtctcgtcaattttgcatcgtttcattatccaatcgatgtcccattcatttgctttggcgaatgtcagcttttcctttgtcgattcgttcaccaattcaaacggcaccattggcattgacggcacaagaaaagaaaaatgaatttcgtaactgacggaagaaatggcattggcacggagaaattgctaaacaatttggaaaacaaaaatcagtgatttgtcgaattatggccacacctccttgaaattgttgacccaatcgaagtccgtttgtctgaagaaatatgcgcaacgcaaccgcttgggttggccatcttttctcggcgtgtgcaaccatttgtacaatgcttggccagcagaaattgttgagacgacgcaaattgtccaaatgatcaccatcggtaaagcgcaaacggtgaatgtttgtcgaaaaaatgggccaaatttcacgaacaaaaatgtcccaaattagttggccattcgtggtagttgaagaaggaagccacaactgcaaatcggtgcctcttttgtcgaaaatttggtgatttgaacgaagaaaagcgatgacggagtgatcgatgtaactgtgaaaatgggataaatgcttttattgccataaatctctgattccgaattactcaatccgaagccatttaaaacggattttgctggacagcggacggtccggcaatggaaatggcacaaatttgtaatcgaaccgtacagacagcttcgtttctggtcctttgtccttgctaattccgatttgtctccaaattgtcaat

SEQ ID NO: 20007 - DNA, 2303 bp, Heterodera glycines
  unsure (1)..(2303): unsure at all n locations
tttacagtagaccaatttccttggttgttgcatattgggactgacttaaacaaccaaaaaaatgggcaacgcgtttgggaagttttgcctaatttaacttttcattcattaaaatttcaaaaaaaatttcaggcggatcctccggcaccacgggaccccattataccatttttgttgaaattttaactccaaaatagcaaaatttgtctttttttgaaaaaccgctacaaattcctgcttttgcgccccggcggtgaaaattttgaaaaataaccgttgagaaaacaatttttttgcccattcgagtgccttccctgaaatttttgaaatttttttctggatacaggccggaatgaagaagccctttgtaataattcagcttaaatattttttcatttaaataccgcgccactttttcgctgctccttccccacttttctgtcatttccacccatttatcccacaaattccttgaattattagttaactaaatgggcgccacaacaaacaaaaaaatccattaaacaaaatgccgctttttcggcaccagtggtgcgcccccccccctcgtcatttgataattgattcctaaacattttcattaaaagataaattgccacgcttttttagtgtgagacagacgacgggaagatgaaaatcactttagggcaaataattaatttcattctttcattaggcattccttttgtggatttgttggaaaaaagaccaaaccaagtcaataataaaaataaaaaatggcgccgcaaaatttgggattgattaatatgctaaatctctttaaattatacaaacaaaaaactcatgaaaatggactttgttaagtcgatttcgctttctccatccaaaaatattttttggggtccggacattccgtcaatggacaattcgtcagcaaattttatttttttgagcattgctcacaaatcttaactttattttaaaatgatttttttatatcaaaattcaaatatttcaaacagtttgttgcactttctctcttttctctcatgatttgctcactctacatattttgcttcttcctcctgctcctcactatttatgtgctctaaacgggacaggaaatcgcattccctcttcgcttcgcttcacttcactctcatatgccagcgtgtcggggggctttgcgaccatgacacagtgccggtctgcttcgcgaccatggcacccatatcggtctgctttgcgaccatgatatggaaagcaagcccagacttgctctcgcatagagatgcatgtggctgggccgctcaatggtggcgccatgaattccttatcgttactggccaacatccggtgcgaagctggtcccgcactttgtcaagaccagtggactggtgagaagtaacgtaggaaatctgagttcatcaaaataaatgtggactgcctttttaggattgtggttcaatggccagtcccttaaaggattgtagttcgcactatgctgatctttcccctacttgggaaagattcggcaaaaaatgcataatttttatctgcattcttaatgggatgtgtgagcgatcaatttctgcattcaatgacctttgtgcgaaattggacatgtttgattcgcagcggcatcactgtggcaaacaaggaaaatgcaccttaatttttcacatttcaatgtttttgataaatatttgattaatgtggtttaatggttgttttcccaaatattttgccgcatgtacacatcattgcttcatttttgttttcagatgccttcaaagcaaaagaatttaagagcgaagagacaagagcgtcatgaacagcggacagaggaatctgtcagccaaggtcgctcacccgtcccagacgggagtgcagatgagaatggggtggcatcgccccggggcttcaacaccccaaatttaagtgctttgcaattaagcaccccggcttcttcaattggaagtaaaagaaggggaagacccccgaaagccggagcggagtcaatcacgccttcgcaaaataatgtgtcttcagttgacacacaatttacatcggccactcaaaatattgaaacgccgtgcagcaaaaaatggaaggtcgacgatgttaaccgacccagctctgctattgaagaaattgctttcacgcctatttccacgncaagaagccgtggagggcggccggcccagaaaagacgncgcttangcaggagncaagctaatgattccatgagcgagagatcgtcaatgaaccagagctctgaagctaccacatctgtggccctttttgccactgtgcctgaa

SEQ ID NO: 20008 - DNA, 2043 bp, Heterodera glycines
  unsure (1)..(2043): unsure at all n locations
ttgttgtgccatggcatttattgggttgtgccgcgaatatgccaagcttttaccgtttttattattagccatttatcaacgattaattactcacaacgaatttcacatatatgtttacataaaatacaatggaaatggacgcatttccaagcaagcaaaggtcaaatacaaacaaacaaacaattaggcaatatttaaatggcaaagtgccaacatcatttttgctcatcataatcgcatcaattaatgattaattcattcatttctgctgctgatcactcggtccaggagaagcggcatcgagaagactgaaaaaacgatgattaactccatttcaaattataagtcaatggcattttatgagtcaaatcaactaactattcttgattttttgtaccaaaagtctgtccatttcaaaacaaaactgtacatttttggatacgaatacaaagtctaagcaaaattgtcgacgattggactcagaaaacaccaacaaaaaaaagattaagcattttaaattgttcacccgtcgtcgtatctgccatcttcaatcaaaaaatcaattgggttctgtgaatcaatcatttcatccaccacattattccattttctctcatcccacgcaattggacaacggctgagccaaaagtcatttgctgattgcagaagatacaatttctctccagtcacttcgttgatccgatcaaatggcacaacggagtcaagcggagaaggcggaaagtgaaaacaaatgcgaaaagtaaccggagaagaagcattggaaaatgcctgaaaatgggacaaaaaaatcatagaaaatccaattaaatcgggataatcaccgctttaaactgttccatcgttgacgaccattgattcaccggtgaattcacagagtatctgagccacttgggcagaccatccggacgaggcgtgaacaaccatttggtcaccgcttgtccatccgacgcattggcactttcatcgggcggaaattcggggagaatgacgtcaccgaaagaaacatagtgaagggatggacaatcgttgagaagtgacggggccaattggcgcaaacggcgaaaagcgatggtattcaaaaacatcatcagatgcatagaatggcgaagcattggccaaatgttgagcaaaataaattccaaaatgcggtcattgccagtggtaatgtacaaatccgttgaacaaatggcgaaaaaatggtgaaaacggcgaagaaatgcgatgacattttgatcgatgtagctgaaaagcagaaaatttagacgaaaaattacaaattaatcagttttttacttgatctgaatgtatctgaatccgatgactttgttcgacaacggattttgcaggattggcaatggatttccatcggaattgacaatttgcattttcttcgtgccattctctccaattttgtggcaaattcgcattttgcccaatttccatttgcgtgttttgaagtgttcatccacgtaaacgtcaaagcgacggctaatcaatgcaattccaaggccaagctgagaaggcgcaagaaaatcgaacaccaaaagccaacaatcggcgcagataaagctgaaaattgaatttttatgaaatttcaaattttttgattaattatttacatttctttgtgaggacttcgtcgttttttgacatggccaaaaaagaaccaaagaatggtggcaaagccgaccaacagaagaaacacggtagaccaactgtgaaggggaatgaaaatccaatgaaaggatcaaaggctaaagacgaagaaataaattgtgaattttagtgtccgatgcaagctaatctttcgaaattgattttgaatttttcatctcccaattctggtcaaaagtcaagcaaaagaaatgcgaaatgtttcaaaaagaaataataaacgtacataattcctgaagacatttgcagcagcaaaatcaccgggaaatagattgaaaataatgagagaatggaatgaggaggaggaggagaaaaatgggcatttttataataanatatttgcgtagc

SEQ ID NO: 20009 - DNA, 2646 bp, Heterodera glycines
tttgccaagttgggctggacttggccggcccctttccatttcactcaaaaagggaacaaacacattttaaatatcgtttgttggttcaccaaatacgtaatttctgtcccagtccccgacacaaaagcacaaacaattgcccacacttttctcaccaattgttacttaaaatacggcggttgtgttgaattgatcaccgataatgcctctgccttcacttccgaatttttcagagaattttgctccatgctttacatcgacaaaagtatgcctgtcctcattggagtcaaggcaatgcgtcaactgaacgcacttttcggacatttcacaacatcttggccaaatacatttcgaagactcagcccgacttcgatgaatttttggatgctgctaatttttgctacaacacgtcagtgcatgcttcaacaggtgagactccattttttcttatgtttgggcgtgacccaattttttgtgttgaccaaataattgacccaaaggttcgtgatccgatagcaatttcggatcgaaatgaatttaaacagaagttagtcgttgccataagacacgcgtggcacgccgcagctgatgaatatgcaaaagctcagcgaaaaatgaaggaacaatatgacagaaaggcaaggccacagcaaatcacaattggtgatcgagtgctgatcagaaactacgacggacgggtaggcacatccaaaaaattccaattaccgtggcgaggaatttttcgggtcatcaaaattgagggcatttatgttactgtgatcagttgcacttcgccaaattcgaacccaaaaagacttcacttaaatcaaatcaaaaagtgcttcgaaattttgggccctccctgcactatgccaacccaaccgattgaagaggaaaagtgccttgaaaataccgaaaatgccgataaagcaatttcgaaagggtctgaaattcaaaatgaaatggaccccgaatcccgggaaggcgaaaatttggagcaaatccacccccgagggccggaaacaagaccagaacttgaagcagatgaggagaaaaatgagcataaaaaaacagatacggaaccaaggaaatatgaccttaggaagaggacgagaacttggaaagatcttgtaaattattagcacagtaatcagcaacgtcaaaatttattttaacaaaatcaatgaaattattcgagatcgatctcgtctaaaacgaagtcagttcggaaaggtccgaaactaggaataaaatggaccccaagtcccaagaagatgtgaacttgaaccaaacccaagcccgagggctggaaacaagaccagacattggaacgaaaaaatgaaatgacgacggaaccgagaaaatataaccttagatcgagaacgaagacttggaatgcccaagtcaattaataaaatgagtatcaaatcacaatttatgattcaagtgggacaaatttaactgatttaaatcggaaaaacgaattaaataaaattattaaacaaaagatcgaaaggattttttttatcccccttagggtttacaaatcaagagagggaacacctccttcaaaataattgacatcgtatgactcagccgccagttcaaacagctgctgttgattcggttgaaaagtcgactcatgagaatgctcctttccctgtttgccccattcgtacttcgctccctccttccgcaactgaagtgaaacccggcaactacttttttggcaacatttatatgagaatgttgattccgtctcctttgcgttcttataccaataatcattgacctgaacagtaaacagcttagaatctgatcaaaaaaaattcctatattacttttatgtattttaaaggacggggcgtacgtgtcctccgccccatcgcctccggaaatggttcaccatcccggaaccaatacaaagaacaaccacgaccagcgttgtagtcggaccaaatgtctctcacttccgcatcacccctctcaatgccatccagcataaaatgacgacaaatctcctcaacatttactcgaaccgttgtcggcagacacgcacaatatccggccaagcgaccatatttcaaccaattacgtgtggcggcgttccacgccatggccacagaaggtccaaagttggcgattcagcccacgctccaacgcggcccaacttttggacgaaaaggtgtacctcaatacaattgcccttattgatccgcctagtcaaacgctcaagttcaaagtaccatattttcacaccgccactataattcacattcaaggaacgcagattagcatcttcaagatgtaaaggagcgaagctaccactgcgtccgaaataccagaatggactggtgataccaggaatgttgcggaggtcaggtgccaaaattttcggcaaacagctgaggcattcacccagcggcactttcccacgtgttgtgatgcttatctcctggtgatagagcattcgagttggcaaattggcccaaacgctttctttcgtcgatgttgttactgcccaaaagggcaggttgctgcccgaaatattcctccaaactcatccgcacaccagcagaatgaattggcaggatttcgtaaagtccttcttttcactcggtcaattggtactcactaagacattta

SEQ ID NO: 20010 - DNA, 2001 bp, Heterodera glycines
attttttaatgggtgaaattgaatctaaggaacttttaatttcctctttttttctaaatttcgtcccacattttactgcaaattcgcacaacctgacagcgaagcaaggatcaatgagaagatcagaaatgcaatgggataagtgccgacaaaacggacaaaaatgcggaacattgtgcacagtgtgaactgctccaaaaagctgagaaatttggccgtctttgggcctaaagaaatgaaatttgagccaaatatttgggaatagaaagagccctcagacttaaatttaaaagaaaaggaaactaaaattttaaggcattttctttagcgaattttgtagatttcggcctgaatctaggcctggattttcctggacaagttccaggtccaggccatttttgccaacctggattttatatctattctaggattttaaaaattttaaaaaatgtttgaaaaaatcaataaattgcttgggaacatctaaaaatatctaaaaaatccaggcctggatccaggtctaggtcgagctctaattttaggctaaaaattccattgccaaaaattgacaataaaaagtcgctaaaatccaaaccggatgagccaagaaattcgctgagtacgtccgttttgtagcgtgacatggacgtggtcggcgtgtacccgtcccgaactcggtccctcaattccaactggaaaggggaggaaatggggggttcgaaaatgcgaatttcgtagagttcgacccggacctggatccaggtctgggttttcctgggtccaggtccagtccctggctattccggcaaccttggcttttcctggaaatggatttttgtcaggaaatccaggtccagctcaaacatggaacccaggtccaggcttttagaatgttgaactctagaactttttataaaaaataattttttaattaatttgatcggatttttaaaaaaacttcctttaaaaattgaaaatttgttcgtataatattcgaggaaatttgaaatgttttttttagaaattgaatgtaattttctcaaagttttcaattttttaatgggtgaaattgaatctaaggaaattgtaatttcctctttttttctaaatttcgtcccacattttactgcaaattcgcacaacctgacagcgaagcaaggatcaatgagaagatcagaaatgcaatgggataagtgccgacaaaacggacaaaaatgcggaacattgtgcacagtgtgaactgctccaaaaagctgagaaatttggcctcctttggccctaaagaaatgaaatttgagccaaatatttcgcaaaaatggattttatgatttattttaacaaaagattttggaaaaatctaaagtattggaaagggctcttttataaaatttagcatttttttttctaaatttcactcaaatttccaaaaattcccaggtaagcattaatttccacaggcattttttcaatctttgccctcaaaatccacaaattggccatttcggcaaaaagcgaaccccgctcaacgactgccgaagttgaggacgatgttgatgaactgctgctggcaccatctgcttttatgagggggattagattttttaatggccgggaatagcctctttctctttctttctcttcctcttcatcttttttcttctattctcctcctgtttctcattctgttcctcttcccttctcttcctcttcgccttttgttcctcatctcttcctctttttccctctattcccctcctgtttctctttctgttcgtcttttgctcctcttcatcttctgttcctcttttcctttcccttctgttcttccccttctcttcctcttcgcctcccttcctcctatcttctcctcctgttcctctttccctttctcttcttctttgccttctattcctcttcgtctgctgtcttctccttctgttcctcttccccttctccttagaagagcctttcccttctgttcctctccccctttctcttccc

SEQ ID NO: 20011 - DNA, 2509 bp, Heterodera glycines
tgcaaaattaaaattcaaatttaaattaatttttaatttcataaattaaaaaaataattaatttgccttcaactcgcagtcgaaaattcatccacacagtgccattgggataaatcaacacaaaagtatttgccgaaggtgaaatgtgcagctccgattttttgctgttctatttttaaacaattttaattttttatttatggaaatatttaaattctttaactaggcggctaatttttttatgcaaataaaaacattttattttcaaaaaataagaagaaattaaaaattttgaaaatttttatttaataaattataaataatttttgaaatttacaaagtatttaaggaaaatttttaatcaactaatttatataaaatcaattaatcaatctaaagaaattcgttacattttacccattcattttttttcatttggcttgttttttccaaatttttaacggatatatagtttctaggttttatggcactcgtacaatggcttaggctaggccaaagttttaggcttatgcttaagcctattttgtacaatttacgagtttgccttttgtatgagtcgcctttgtacgagttgccattaaccatttttacgagttttttcagttcattatacttttcatacaaaaaatacgacttcactaactatttggcacttaataaacaaaaaaaataaaaaataaattaccacaaaacaaacgaatggttgccataaacggtcaacaattgctgaacttaaagttaaattttgatgacaattgctcatgtgtgaatagcgcaagcgacggtcgtgccaaatttggctcattagcacatcggctgtaaagctggcactaaaatgattttttaatttgaaaacccagtcctttttattgccacgagtcggcagacaattaagtaattaatgcaaaaattaaattatggcaaatgtttaaaaaatttcgaacgaaattttttaaaattttgcagaataaatagaaaaaatttaatgctttcaaattatatcaagaattaaaatttgattacttttgagcaaaattatgaatagcttcttggccaaaaatttcccatttgatgcttttttgagttaaagaccaaacccctagcgaaagactaaaggtaaagaaatgagagtaaatgaaaatagcacaggcaaatgctctgtttctcttccctttatataaactcatataaaaatgtaaaacgaaaaaatgaaaaaggtgaaagtaaagtaactgcttcacttgacttgcacactacgtgaaggaatttttggaccggggccatcaggggatggccctaaaaatttgtgtttcgtcgttaaacacaatttttccataccgaaaaatggtgcaaaaaatctatcgattttttttacagaaatttcgattttttaaaaaggttttgcacatccaattccaaaaacaagagaggaaccaataaatagagagtgtgcagagaaaaaaatgtcccccttttttttgtggagaatacatgatacttaaattataataaagcaggtgataacttcagagaaacaaatattttttgttcaatttatgaaaagaattaatttattgaaacaaatatttggcgtatttgaaacaatgaataaaaagtttggcttatttgttttttttatttttaaggctattcaaatgcaattaatgatgacccaagcggcggtgctgttgatcatcccttgtacagcggaattgattccgtttattcaacagccggtggattgtcggtgttggcacttgtcgttttggttggcacgctattcggctttttggtaacaaatttaaaaaatatatttatttttttcttaaaaacgaataattaaaataataattttttttataggttggctggcgaatttcgagatggcgaatgctcagcgagctggcacgtcatacatcatcaggcatgtgtaaaataatattcaggggtcaagctaatagtcccaaaaaatacttcagatggagaaagcaccttttgtttttattttctgttacttaaaaaaatttcgacaaaaattataataacttttttttcaaaagcaaactaaacttatattttttggtattttgatagacctatttttttttattagacagaaaaatttaaaaaatttggcaaccttattaaggcctgaaaaattaaaaattctcgcttttctagaattttttggcgccacaagttctttgtattttgtccaaatttgaaattttgcttgctaaaaaactaatcatttcatgctatcgaatgatactaattatataagatttggcagaattctaaacaaaatcattatatgaaaagaatacatcttctttttatgcgaggaaaatggaagtaattattgatgataaaatttttccccttttttctcactgtgttaatatttttttatgttggagtgatttctgtttaaattttattttcatacggtatcaccaccgtatcagacttaaaaatggaacaaatg

SEQ ID NO: 20012 - DNA, 973 bp, Heterodera glycines
tacgccacaaatttctgaacaactcttgtcggaatgtgctaatctccggctgttgcttctgatagccaagcttgttctgcatttgtcgttgttttctgttcaaaaattgtgcaatttggcgttccgtcctttgtttcatttgtcggtggccaaaattggcactgtgatcatttggcgacaccacaaattcggacaatttgtcaccaccgatgtgcgtttcaaatgagcgctgttggccaggactgcgcaacaaacattggacaggcgaaaagtagcagggcctatttttgggagaaataaaaaatttaattttggcgcagagacaaatcgccaattaatcaaatcatagggccacaatttatattttttagtgggccattttaaccaattattatgcaattgctcaactaatttgacattttcttgcaaaatttcactacggtaaaaacaagttatagtgaaaacttaaaaattggctgttcgtaaattctattaaataattagcagcgctgtcaaaaatatgcaaatgcatttttttcctgaatttgtagtctaattaataggaaaatcatcttctttttggtatttgcgtataaaagtcgagacttttatttgcatatttttgcatgttttgggtttttctgcatatttcatgcatattttgccattttttgtaaatattttcagattttttgcatattttgccatttttcgtcaaatatttttcgatttgaatatcccttaggaaaaaaatttgattatgcctaaaattaaatccaaatctgaatgggtgcgcgagtgggtcaacagtgagttcactgccgaaaatcttgagaaatttttgatttgcaattacaaaaactaccgatataatttatgaggaataaaattttttaaattattttgcacccctaattttcaagtttttttgtgcatatttggtgcatatttcacgattttatttgcatattta

SEQ ID NO: 20013 - DNA, 2263 bp, Heterodera glycines
cttctattaatggcattgacgtcaatggcaaaagatgaggcaattttgtatttcaaacaaagaaatgaacttcgcaattgatgaatgaaataaaaagggcattcattcgcatgtccatatttgggcatgacaatgaaaatgccaacagaaagtatcatcaggtaaatgccacgggtgagggggcgagaggagggggaaggtgccgcttggagcgtgccgttttaaagcggagaatcagccaccaatccatgcgcatcactcacaatttttttcatatctcctccattatcgctggaataaagaaaactaaaaaaaattcaaaaatgactgtcgtcgtattttttttatttctgctcgcaccgatatgcgaaattgctttagctgataacaaaggaaatgctcttcatctgaataatcatccgaaggatgtcaaaactaacactaaaaaggcacctcctaaaaattccattaaaaccaatggaatttctcaaaaagcaccgcttcatgaaaatgccaacgttttaactggaaggaatgagaagcatcataaagacaagaaacttccggtgcataaaaatggaaatgctttaccaaaaaacaatgattcttcggagttcgaagatgacttactgagtcaggcactaactcatcttcgtaaaatgaatggtaattattttttttaaattataattttgtttctccctcattttagaacaactaaagaatagaaactggccacaaaattcggagtaagcattttcgaagtttcattttttgaaaaatggaggccaaaatggtaaaaataataatttttttggcgaaaaattttgtaaaaatacaccccctaattcgagatttcaaaaaagcaaaaatacacccctaaaaatcaactaaaaatgaaaaatacacccctaaaaatcaattttttgacttcagccccccccccccccaaagccaagggtctggctacgtctggctacgcccttgtatgaatacaaaaccggagtttggcgatgtgtttttttgcacgatttaatgcatttaaaaaaattcaaattctttacctcaaaatgtctttggcgctggacggcactttttcaatttcggcactttgccctttgtcaataatgttcgcatgttttatctgctgttccgcgtcaagaatcgttgccatttgttcacgctcaatttttcggatcataaattggggcaacaaaagtgacttccacggcagcggcaaatttaaattttgatttggcaaatggcgacagtttgccaagaatgacagtgaagagaaaatgccaaatattgccaatgtaacggaaaattgcatcttttaaaaaattaaaatttttagaggataaatagaaaatttcactttttgtaaggattaatttaaagaagggaattaaaattaaaattaaatttatttttaagtattactttttttttatattttgcaaacaaatttatttgcgaaaagtcaaattcattattattttttgacaccaaaaataaaaatgccgaactaaaagccaattatttaattgggtgtcgcaatgagagtaatgtgttataaattttgatggattacaatatcaaatgggtaataattgaagtggagaagcaaattaaatatgtggcaaaacttttgagtaatattaaatatgtatttagttaaaaaatgataaattattttttaaaactaaaaatgatatcatttttagttttaaaaaataatttaattaagtaagaatttattaaataattagcaatttcagttcataataatgttaactttaaggtgggtcattgccatttttgaattggtagctatgttcgagactctcggtgtcaaactttaaaagttttgtttatttttatttttttgagggggtggtcgttctcgagtctcgaacgcagcattttcggtctagagaacagcatcaatttagggcagggcagaaggaggccttataattaataattgtaatccataaaaagcgaattattttcaacaaaattttcttgcgaatttcagcgttaattaattaccatggtgaacactaattaacatcattattttacgacattaggcaaaattattatggtaaattttatcgcgcaaatcacaacaatcgtaagtgattttatataacactttttaaccgtgagaaatttccatttttattttattttgtgaatttttttcctaaaagagtcaaacacgtaatattgttaaaacaaaaatagaattacgccc

SEQ ID NO: 20014 - DNA, 2024 bp, Heterodera glycines
aagagcagcagggcgttcattcaagctgtcccatcaccgacgccccaagctgttcgaccgccgacgccacaacgccgctaccctgatcgccgacggcaaccacctgtgcgatactcgccccgttgagatcttttaaaaggggaggtgttcgggtggtcaaccccgagagatgaaagaacacatttgcattatttccctttgcatttgtatttttcttttcctctccattttccccactctctaattattgtgtcttcctttatttatgtaagacactattgatttattatgtccattgcatgtcctttcccctcattcattcagttgctttttatgcacttatttcacttcgcctaaatatttgttctcctccaatttatttattcacgccaccgacttcgcccatttttatttaaattgtttaatttatttgttcatcaaataaacattttattgtgtcggttcaaagaccgaacaattggcgacgcccgtcttaaataaagactcaacgacggatattttggcaatttcggacagattccgaattgctattcaactttcttcaaaaaagcaatagacccaataagggtgagcttccgccaggtgcggtttattcatcgaaaaaaaccaagatacccaggtggttgcggtttccgccaggtgcggtttactcaacaaagacaaggaaattcccaaaaagttgatcaacaaaaatggcgttaaatccgacaattgaccagctcgtgaaaatgctggcggatcaacagaaaatggtgcaggaccaatcacagcaaattgctcaactgattgcgatcggacaaaacgcaccaaatgcggcggcacagcccaatcaaggagcaaattcagtaccaatattgccggacatttcaccattcgagccaacggacgacaagagccgaatttcggaatggattgagcgattcaaattcgcgttggattgcacagcaccaacggcggacgacgaagtcaaggttaaatgcctgatgaataagctgagcgaatcggcattcagtgaatacagcagatcagttctgccgtcgtcggtcacagatttcagttttaaagtgacgaccgaaaagcttgagaagctatttgccaaggctcagtccatattcatcgaccgctacgagtgtttaaaagcggtgagaggagaaggcgaacaattcaggcagttcataaatcggcacagaaaattgctgaccgattttaaattcgatgagctgacaaaagagcaatttaattgcctcatgttattgatggcactcaaagcgcccaacgaagctgcattgcgacagcgaattctgacaaaattgtcagcagatggcgccaacatcagctatgatggagtggtggaagacttaatcagcttccaatccacaatttcagaagcaaaggcaatcgaagcgacaagttcttcgaggccagtgaattcgattcgacaaaattcaaagccgaacaattcaacgaacaaatacgtcaaggaaagtccaaagccaaataatttgccgaacaaattcaaagaaaggaccaacactgaggcaactacaatatgttggcgatgtggcttcggcgtgcatcgacctgacgaatgccgttacaaaacgagcaaatgccgcaagtgtgagtttgtcggccatttggacaaacaatgcgagcgtgtccaagagtggcgcaaacgccaaaatgccaaaaagaaaggcaacaaccgcgttggccaccttcgtattggaatgaccacgcatgccgtaaattccatttcgctgctaaaaacagcggttctgttcaacatgaagccagtcgaattccatctcgacacggggtcggacattgttgtcattgatcaattgacgcacgaatatgttggacgacaccgatcgaaaaatgcaacgaaattggcaaggctttcgacggcacaaaaatttcctttattggaaaaggattcggtacattcaaatttggtaaaaataaagtcgagcaaacattttatgttgcaaaagcaggct

SEQ ID NO: 20015 - DNA, 1613 bp, Heterodera glycines
ttccccttcggctgattctttcttatcgactgatccatctttcccccccccattttctgtcctcccgcctcatttattttgcatcggtgcgcgaaagacatgtaaattgtcttgaaaatgaggggaagggcagggaaatgcccatccatcgcaatcgcccgtcagcagtcacttcgaactcgcaaaagtccttcgagggacactttttgggtcatcacactttaaaccaaaaagccctgggcatcactcattaccaaaaattaactcaaaagcatttcattctctttgcacttttttagcttcgacgcccgcggcggtgcactcgcaaaattacgccgaagaaaatgcacaccaacagcagcagcaacaaattcaacagcagcaacaaattcaacagcagcaacaacagcatttggacggactgaacagaacggacaaagggccgatggacgacgactgctgggccgaaatgaacgcaatgggcggcaccggcacagcggtgccgacgacggtggtcagagacgcattcctcggcgggggattcgtaccgcacacttcggcagcatcgccgccttcgacgacactgaacacttcggagttttatgagacgaactcatcagccaccaacccaatcctcgagggtgagacaaatagcaaaaaagaaagacattgaaatgttaacggaatcccttcgtcttccatcacaacaaaacgtcgccgtacgaatttttggaccataactttttctttctcaaccaaattaaaaatgttcgaaagtgcttggcaaactctattaatttaaaaaattccaaaatatttatacaaaaaaatcatggcattgaattcttatggccataactgtttttaaacttaaccaaattttttcgctttggcataattaaatactataaacacatagagctaccgaacaataccaagaatgcttaatttagttaaacgaaaaatttatggtccaaaaaatgttccagcgacgttttgggataccacactctcgcccctcactctctctctcgcccctcactctctctctcgcccctcactctctctctcgcccctcactctctctctcgcccctcactctctctctcgcccctcactctctctctcgcccctcactctctctctcgcccctcactctctctctcgcccctcactctctctctcgcccctcactctctctctcgcccctcactctctctcgcccctcactctctctctcgcccctcactctctctctcgcccctcactctctctctcgcccctcactctctctctcgcccctcactctctctctctctctctctctctcttcatctcccttgctgatcattgctctccctctcccacagatgcctttctgtccatggctccaagttcgctgttggatgtccggtgcggccctttcaccactaccgcttcgtccgtcgatgcggcccctcatcaccattttcgggacgcgggctccgtcggcatttcgccctgttcttcctccacccaaatttcatccatttcgtcttccgatgactccacaatccattctctccaacaacatcaaaagtgccactcccattatgctttccagcaacatccct

SEQ ID NO: 20016 - DNA, 2167 bp, Heterodera glycines
attatatttattaaaaggaatatgttttaattgattgaaaatggttgcttcatcgattgatagtgatcaatcaataattaattagtgatgtattaaacattggtgctcgataagcttgccgattcgctagcttattatcgattgatcagtaacgcgatcaataattgattgacaaactaattggattggtcggttgatcgtttttgatcaataggttaaaaaatgcttatccttttttttgtgtctgtctgtctgtctgtgtatgtctgtgcttttctctctctcacactgtttttttttcttttaccgcttttgctattttcgcactttctttttccacgcttttccgcactgtaatctctttcaatgtttaaagtttttttttaacatttcgccaagaaattatatttttaaaatttattctctcgcatcttcagggcaagcacaatgctgttggaaatgtcaatgcgcatgggatcgaaggtagaaaaaattcagtgggaaaatttcggcccacttttacgcgaaaattttttgcaattttttgaaaatttcaaattttcggaaccattttggaatcaaaatttaaaaaaaggcggtaataaaaataattgcgttaagcatgtcagcacggaggtgaacgaagtggcgacacgacgagcaaatcggcaacagcagcgaattctttttcaggtaaaaacaaaattgaacggcacttttaattatttattttttgacacgtaatttgttttgaaaaaatcttttttcaaattttttcacctttttaattactcaaaacagcgaaagtttgccatttttgaacaaattttcacatccaaaattttatttttacctcaaaatctttgacttttcctatgaatattttgaaaattatcaaaaggaatttctgggtcatttggatgctttaaattttaatgttttaaaatgtgtttaaatttttgaaacgaaaacttatttagaaacgatactgtatttttaaaaaagatacaatcaattttaaattatgccaatttttttcattttttcgaaataaatttatttgtttagatttctgttgtggccatcatcttctacctgtacatgtctggtaaaatattaaaaaaacattttttctaatttttaaatttttccctcacccattttatttagcctattatttgctttaccatgtgttcaatgtgtccaataaatggctggtgttgttcaactcgttcttttattccaccacacacatgatcaatcccgtaaaatggagaataatttcacatttaaatgaaaaaaacgatttatttttggcatttttatgccaattttaaacaaattttggcacatttttttttgattttcttactaaattttgggtgatttgaaaatttttgacattttcatcaggtcaaaaaaataatatgagaattttttaaatcaaatttttcaaaatttaatttattttttcaaattttttcgttctacaggtgatctacttttcgttgaacaaggacatgcgagcgcagctgatccgtgccattgccgactgtttgaattgggcttgttgtgtcggtgacgcggccggcctcagtcggttcggcggcattcactcgtccatctacggccgggccagccggcggacacagcccggcgctgagtcgtcttccggcggcagtgtgctgctgcacaagtcctcgtacggcgccggttgcatgacagaggcgaacaggtggagaatgaatgcatggcaggcacggcatggcaggcacggcatggcatacaaaattggtgcaggatggcttagtgccagccggcggttcggttctggcactttttgtgattaaactagacgttttttgatcacttatcggatgcgagatccaggtcacggccgacacgggtacggctatttgagaatctcgggttcattttctcgaatcgaatttttgaaatgggtgccaattaattggtaattcaaccatttgttttctttcagttccgtgcaaaccgaaaatgccaaaccaggatggacgcttaggtgagagatggtgaaataatatataaatgtcatggtcccagaatttaaatttgacattgatcatggcatatgcctacaacggatatctgatcgtaaattatttaccagttgatcaaatccgct

SEQ ID NO: 20017 - DNA, 1047 bp, Heterodera glycines
  unsure (1)..(1047): unsure at all n locations
atcanngcggcagtcggtcgaccaataacagcgaaaatggtcaatttggccaaattaattactgtcataatttaagtctttttttgagtttaccataatagttttaacagtgctcatttagcttataaatgactttatctttttcaataatttttatatttttctttaatttaatgctattattgacgtctttatgtgcggtgtgctcagtttccttttttcgtcttaactttttctaaaaattgcgatgggcgcactttcatcgatgacgcaaatgtggcggaaagagaagaaaggggacaaaaacgaactttttaaaatgacaaataccatcagtttattaagcctaaaacaaaatttattatttttgataccttaacataaaatggcgagtaattaacaaaaagaaaaaatatatattattaaactttgacataaataattaggcttttgtattgcgtcattcacttcttttcatgctgcttacctacctcatttttatttttctgttccaatgcttcttgtctcatcatttgcgtcatccgacgttctcccttttgttgatttttgcttgtgcaaatattttacgatggtcgagagtctctaaaagcggcgatgcgagatgctttacgcggatgggggggtggggagaccaatcaacattgatcagtgagtgttggccacaacaagttgatcagaaggaaagacaaaaaacgattgatcagcaagtagttaattgtttagatagtttttgtatttataataattgaaaaaaacagcaattgatttgccaccgacttccgtccggcaacaattggaccaagcagtagttgggcgcttcagttgggtccatcaaatgtttgtccaacgcacgctcgatcagctgcggcattcgatcgccattctccacttttatgcactgaagttttaaaagtaaaaattaaacatccttttgacaattttcaggcttttttcatattttatgagaaaaaactagttttccaaaaaatcgcttaaaattttttaccctaaattccttaaaatttt

SEQ ID NO: 20018 - DNA, 1658 bp, Heterodera glycines
aatggttttaatggcctttagtgacaatgccatcggcgatccatcgttaccattccccaccggacaattgggcaaacggaaccgagcagtacatgaaattcacatgtaattgtttcataatgatatgaacttgctcaaccattataatccctcccttttaattttcttagtccctctggctcgggtggtgctccgctgctccattcccaactgcgaaaaatgcggatttcaactggtgcatcggttccatcgacaccaaacccaacaacgagtgaccaaaacagtccgggtccgaccgaaaagagggtcggcggagttggcactgttttgggaatgtcgaaacgaatttcgctaccggaaaatttggaattccaaccgcaaatgctgctcaatttgaagcaatcaattcatgtggaaaaacagttgacgaggtggagaaaacgaacctgaaatggagaaacaactgatcaaaataattttagcaactctgacacgagtgattccgcctcagaaatgagtgtatttgagaagccagttttgaaggcatcacgactgcaacattatcaacaccagcaacaacagaagaggaaagcggcacgtttgcaattgctgcgccaacaggcaaaatcattaaattaaaatacaataaaaagcataaaattgcatagggaggcaatgttatttttaatttaacaaatgaaatatttattaaatcaaacggtttaaaataactaattattaagagttatcaactggcacagaaacagagcatgctaagctacaatcagcaacagctttcgctcaactcaccagttggtggcactgtgacaattccggcacaattaggccaatcatttcatcagggccttcagttgcaaacatcgaaggtacaatgaggggaatggttgtaattaataatgcttaaattgagcatatccaacgacagattgaaccgcaaaccatggaggagaccgactcggatgttgaggtccaatcgccatcatcctccggcgatcgagtgccactttcaccaattgaggatttgaaaattgaagaagtgatggacacaagttgaacaatgctcctcattatgcaacgcataattagcattggtagtctctattaattaagttttactagcacgtaaaaaatgagaacatcatgaatattaagcagaatctgaaatttttaaattgttgtaaaaggatattgaactaaatgatattctcttatacattacgatagattctcccatcccagacttccatttttcacgttttgtacaatttggcaatttaaagcgtctttttaaatttaaatataattttgctcattctcgaatatttattttttatttcattaattattcgtctgtcatagataatattttgtgcataaatattgataggaagtatgcattatacaattattagtaataaagcaaaggaaaaagtcatagtgcaagactttagccagatacatccatacatatagcgtgctgcctccgttcaactaatgcctagtgctaagtggtgaatgctttgaaattcgatgatctttcactgatttaaaaataaaatttttaatttcgttgttagtatcatgacaactcatacacaggcaactcgaacaatggcttagactaggcttaggctttt

SEQ ID NO: 20019 - DNA, 2179 bp, Heterodera glycines
atattttgattgatgtcaatttcttggcccatcctccccccctattataattgagaccaaatatttgtttaatttttgctctaaattcttcccattctttccgtgaatgtttcccaatttgcataaattcattttttgttttaaaatatttttcaacaatttctcttttttgctcaaaaattctttgatttttcatagttttcccattttttaattctttcttccattgataaatgcttctgatatttatgcccaaatgtgttgctattattttttggcattttgtacttttttatgcaattttccatttaatttcatttttaatttgccatatatttgatcaaattgattcaatattttaagtttttcatcatccgagtaactgtctttaattataagtccaaattctctcttccatttgtaaattttcatttgatttgcacctaatttttttgcaatttttctttcaattttatgccattcttttcttgtgaatttctttcccatttgcttaattttctcttttattttatggaatttttcaacaatttctctcttttgtttatcatttaaaattggaatttgatcataaatttgtccactattttctgtcatttgttccaattgatcacaatttgtggacatttcttcacttttctcatctttcatttccaaattttcatcaaaaatttgattagattcttctacaaataatctttgcacaaaattttcaatatttgttggtccattttgatcatttgtttgtccatttattccattttgatcagtttcaatttctccattttcctcctctttttcgtcccatctttggccaaatatttcgtcaaagtttttttcttcttttattccaccagcataaattgtatttaaatttttgagcattaataaaaataataaaactattttaaactccatttttcataaaataaaaatgattagaaattcattttattaattgcttttattctcattgattttatgaaaattcatttttcctactcatattaattaaatattgatgaaatatgttatgcatattttttttttgcttattattattattaatattttatctaaataaaatttaaaatttattaatgataattatatttttacaaaatttaaattttgatttttgccaaattttcattttacttttctttttaaattgccattctttagttgaacattttttcccaaatgaattaaaaaattttctattttatgaaatttttcaacaattttttcgaattctaaaaaaaggaaaataaaatatttttaaataaattacctttttaaatttgttgcttgaactcaattttcttggcccatgcatgcccagaggggatatgtttttggatttgttcgatttttgataattttataacattttttgaaattttttctcgaatccgttaaaaaattgattagaagcgcaccaaatttgaatatgaattcaatttaaagccaaactgtcaattaacaataattttatttggtctttccttcacaaatgcaaataaaattataaaaaagaaaagttttgttcttttgtatcaaaaaaaataatttaatatgtaaatctaatttattatgagcataaaaaaatgattaaatgaattcgcgtaatttgataaaatcaaaagcatttatttatttaattttgaaatgaatttgcaattaagagttggttcatttaaaatttttcccctaaaatttgttttcatccattcaccatttataaagatttttttttatccaaaataataacaattttaaaaatttatttacatatttggtaaatattttggtgctatgtcgttataaaaaagccatcaaaaagggcgttataaaaaacaatcaaatggaaatttccaacaaaaaaactacccataactttgctcaatagcaaccaaatttttaattcttgataaggttcgatagccctaacaattctatattagtcaaactaaataccaaaaaatttggtcaacttccagcaaagttagggccaaaagtacccaaggaaccgggttttcgagcctttttggccataacttttttgaaacctaatgaaattttttgaaattttgcaagctaatagaggacacatagagctatcgaattatagcaagaaaatgaaaataaaaataatttc

SEQ ID NO: 20020 - DNA, 1675 bp, Heterodera glycines
aaaagcattgacgaataacggcgacacttttttaaggcgagatccaattgagcatacatttgcgtctcttttttcaactcgctcatgggctttctcgagtggtctatctcagcgcgggactcttttctctacttggccatttgtctgagcatcccttcggcgctgctttacgtggccgaaattgtcaccattctgcggcataaacaattccaccattgaaaaactcaccattgataatcaatattaataatataacttcctttaaaataatgtaaaaaaacttaaataaaatttttaaatattttttgatgtggatggcagttgtaagctgggcagcagcctacggggtttttgtacctgtaattaatagattacggaattccttaattgaaaaaatcgccataattaggggttacgggtttctataattgaaaaatcgccataataggggttacgggtttccgtaattgaaaacccggttaggtgcagcctgtttctcatgcttgctcgaccaaaatcgttctcaatcgctctaagaattcttattatcaaaatttttcataaactttaaaaaaatatattaatatatataactatatatttttttttcatttttctaaatcttctcttaatttctttgaatatatttcaaaatttttccggaatttttaagtgagaagggcgggaccataaagcaattaacaaaaatattatctgacatgacttgaacaatgttataatggtaaaatgccgtcatttcaccgtaaaaagtaacaaattttatggaaaatgtccaaattttaactgtcgcgtatagcttttaatgcaaatattttctcgctttaatatttaatctcaaaatttatcatccaatcaagagaattacgatacaataatgacaaaagctttaggaaaattgacaaattttatagaagcaattacagatcgaagaaataaggacaagcaaaagaaaaatgattgttttcaatgaaaattacgaaaaaaaaaccaacggttgttgttgctgctaatttcgtcgcaccaatttgcccccacatttgtggggcaattaaaattttatcgtcgccatgtacaaaactacacattcacatacaatgtacaacaataacacaacaaaaataattatgacgacctcgacgaaagatttgtacattgtgtgcaccacaaattttgcgggaatataaaatggtgacagccgacgaagcgacagaattactgctgccagccgactgctgatgactgacaaactattccttcttcatcatttctcttcattcatgtacaacaacagcagcgaaacgggccagttgcgtctgagccaagtttagaccaccataacttgtttctttgttgaccaaatccaacaatgttggtatcattcgaaatctcttaacaagctctatcggctttttccctccaaaaatcacaaagacataccgacataaaaaaaagttataaattaaaatatgcaaaaattctgactttttggtagtgttcatgttgcaacttttttataagttgctcaatcgcttagccatatcttatcaaaagcttctaaacatgtagagctttcgaatgatgccaaatttataaaatttgacaaacaaagaaaaaagttatggtgctttatgcttggctcagacgcaactggccc

SEQ ID NO: 20021 - DNA, 986 bp, Heterodera glycines
tttttgccgaattccggccaaaaaattgttgtgtcaatggcatactcttttttttccgtaacttttttccaaatttccaactgcttctttaatgcttttcccctttttcaattggctgcaaaaagtttcatataattgttgaaaatttttgctgaagtttatttgaattttttctttgcacaaaacgccaattgcatgcttattaagcaaattgaacactttgttcatgaatccatccttatcaatttttgtagtatcttttggaattaattctttagatgcagaatccacgagttcatttgatgatttaaacagatcaccttaagagaaaaataaaaataatttgaaagattttaaggaattttttttttgatttttgatgtatttagacttatatacgaaaaacatacccaatttttaaatcttgcgacttttaatcctataattaataatacgaggatttttagtcgagacccaaagcaccggaaccggtactggtgaattttatgttaatcaaaaaattgaaaaaaggggctctttctctactctaggataaatttatcaagttttcagggtctcgatctcgactctctctcttaagtaaattcagggtaaattttgattgtcgagcaaccctgatgcatattaatacaaaatactttttttttaaattaattttattttaccatttttgtcgtgaaaatgcagtgtcgtatttgttttgtttttccttactaaaagcatgacaatcgcaaataaaaacaattttggtggcaaatgcaatgaaaacattttttaaattttatattaaatttgcttaaatatttgattttttagattttttggcaacaagtaattaatttgaataaaatttgaaaacacaaaaaatgattgattccttcctaaaataaattaggaattcgcttaaaatattaatatttggctttgccttttatttcaatttttctactttctgtaacgatcaa

SEQ ID NO: 20022 - DNA, 2352 bp, Heterodera glycines
taaatcttagctttatcgtgtttttttcttctaaaatgatttttaataacatatttagccatttttgaacgttttactttacatttagcgaatttgaagaaattttgagaaatatacatttaatttcgaaaaatttatgtccatatttttgccattttatgtccatatttcgcgatttgttgtccatattttatggccatatttcgcgatttcttctcgtttttttgaaatgtcggggaaagttttaatgatttgttaggaaaattggtataattctaaaaaaaagttccgtttttcatttttaaaaaattattattttttcggtttcgagtatggggagaagggatacgacgactctaaatgtcgcagtaaaaaaaacaattttcaaaaaatcggttttaaaaacgaacctgcctcccccggctacgcaaacttgggaaaatcttgatacaatttctgattagtgaatttgtctgtgttttattccctcccattccccacccaccaacaaatcgtcatggtctgctgtaggtgtgccatgttgttgctgttgattgtttgttggtgccatgacagcgccgctgtgccgtctcatcgccaccatcgccctctgctggttgtccaactttttctgctcatattgctcaacactgggcaaatcggggccaacactgaccacatcctgaaggaaaaaatttggaattaaaatttaaaaatttctaacaaaaatgcattaaaaagccacaaatggcatcacaatcccaataatttggcatttattggtcacttaactttgatacactacgttcccggcgcccaatttttttcccaaaattttatgacgattacaaaaaaaattttacaaaaaaatcgctgactgtccccttacatggagtgtgtgtagggcaagcattttgatgtttttttgaagttgcatttgccgaagtgatggtgcttctccaacagtttcagcgggtgaaccgttgttgttctgttgacttggagaggaagaccaaacttcgatggaattacttaaaaaatcgcacaaaactacacatttttaagggcggaattcttatttttatatattttttggtgatctttttggattttttctttttgattatacaaaataataaattggttgtgtttttcccaattctctgaacctcagtcgaatgatttgctcttggagctctttgagtttgagtcggactgaagcggccgatgaaagggagtacaatgtttcgccattgctttaaaaattgtaaaaataaaataaagcaaaattcattaaaagcaaaataaatttcacttcaaagagtcggccatatttttgtaggacgaggccaaatgggagatttgtgacagcaaattgcatctgacaaaacaaaggcattaaaagccaattaggtaaatagcgaaatgaatgaaaaataagtgtttttatttgcgattgtttgtatttcaaaaacaaaaggaggacacgaaaaattgaggtaaattaagaaaaaaaaacaattaattttttttttgccgtgacaatttttacagataaaattgtccttcgtttttttttttttggtgtaaaaatgggaataaaaacgaacaatttttggtaggcgtccaccagcgagtcgttggcattctcccacctcagttccatggctcgttctcgcctgtccaacaactttttacattttgcacaaattcgtaacgaataggcggaggaagtcgccgaggcaaccgacggaacggcactcttttcgctacaatctgagcgaaatatttaaaaaattccaccacattaaggcacttattcgtggggatttagatatttctccgttttgtcctacacttcaaaattttaaaaaggcaataaagatgctcgactctcattgtgcgcgaatacatttgaccgcaaggactggaagagacgcaatgttaacccatgttaaaattttggcgtcaattgtgcgtttttggcctccaaaaagagaagcgttcgtttttgcacgccttttttaaattttgaggtgtaggcacaaaatggaaaagtatcgtgacttatttttgagttttacaaaatttaaaattttttttacgaatggctcggctctcctctcccgtttttttgaaatgaacacacctccaattccaccgccactactaatggaccgaccgacgacggaacccagtttgtttttcaccagcgcaaatgaattgcccaaattgtgcaaagtccgatcaaccgcaaaggtttggccctgaaaaaatgtccaaaggatcatatgtatttgagtcaatttgagttcggaaaagcgtgacaactaaccattggttttgtccatg

SEQ ID NO: 20023 - DNA, 1939 bp, Heterodera glycines
tgatttgtgcatttaaatcaaaaaatccggcattatttgtctctattctcaaattttcaaaagaatttcaatgaatttatccagtctttcacccggttaatttcgctgcatttaaaccaagtgattccgatattagagaagaaaataaaatggacacgaatttgttgagcctaaaaaccgtattatgacggtttttgacaaaaatttctgaaaatttacttttgaatatttaggtatcataaatcctctttgcgattcctttcgattaatttgaaaaatattctctaaactggatacacaaatttcattctacaggtttaggttagcctggtaaaaactggagaaattcagaaatgttttggaaaattacaaaatgcatccgaaattgacttaattggatgaattgccattttaattaatgggttcattattctctgtaattgaccgggatcgcggcgcacctttctgttgaaagtttcaaaacaacaattggaaattttataaatctgagtttcaaaaatataaattaatacactgttttttacatacattagccggtaattttgaattaactcaattaagtgtccctgtcattagtgtgttaagtgttctttgtaaatgatcgggattggtggctgaaatgagcagagattcccacaaaagaaaaataaaaaaatatactaataaaagatcacgggacaattttaaattccatgccaatttggcaattttttcagggcttttttattccttttatagtgaatgggatttgggtggaaaggttctaaaaccctaccatatttttaataaattttgagtttattttcaaaacaggccttgggcaaatgaaaatttcatgctcaaactaacacttaatgtcggcacatttttattacttctaatcgctcggtgcctttgtgtagaaattcatagaaaaaatttttttctaataatttatgtggaatttaccccgtttttcctgagcttatcccaacccatttagaaagtaaaatttacacaccctgacaatgccctatactctggggtctgttgggactcggggacacccaaaatggggcccctcgtcgcagccccgggctggccaaattggcccaaaacaccaaatccccaaattcgctgttcgatgtcccctttatttgttgagtaaaaaccaagccaagcgaacaaaattggataattaatagaatgaatgaacgaacgggccaggggaattgagggtggcagaaaggggaggggcagttggtcaattgaggagagaaaaagtgatgagaggggctgacacaaaggaagggggaagaactccaagccaaaggggaaccccggtcaatgaccatcttttcatcacattccccaccgacgacattgccgcgccctcgcggcaaaaataacaaagcgatgtggaaaaggggaaaaagcagagagaaggaagaaaaatgacgttaaagagagagagagaaaatggagaaaatgaaatgattttgagacaaagagatgcagccccctgccccaaccgacgaccgatcgctccagcgttgttgtggtcgggtagcagaaaaagttagatgtgaaaagatgataattcgacatccaaaagtgttggtcatttgcaaaatatcttctggtggtgttcatttcaaacccctcttctcttttcatttcccctcagttttgtagctattccatttttagtgaattatttcggcgtaaaattttcaaatgcgtttggccttgttcaccgtcgtttcggctcttcttttgatggctctgatttggccctctgttttggcttcagccggaaattggtcggttgagtggatttccgatcggtggggcggggggagaaagagagagagagaatgagaggagtgagggctgagaggggagtgcgccaaattggaatggaaaaatggccataagg

SEQ ID NO: 20024 - DNA, 1042 bp, Heterodera glycines
  unsure (1)..(1042): unsure at all n locations
attgtttaacattctgggaaaacaaataagaggcccctcccccgcagagagagaacaaaaattaaaaaatttcaaggaaaagccgccgcatttttgaaaattttataatttcaaattgcaaagtatcccaagcttaggattgttatggtaaacaatcaaacgcctaaatggacgggggcagtgtaccgcacaattgcacaatttgtgttgtggtaaaatgtcgtgttgatcacttttttcaccctctcttctctttccccttcttaatcgctttatttaatcgctttctcgcaacgcgcaaccgaaaattctcgagagtaacaatcaccatcatcacgttttaatttttttgcatttttctcctccgcgccttgcctctaaataagcaccaaaaaccccgtccgatctattgcccattactcctcctcctcctctttgtgtgttaaccccaaaaactcgtttagcaaatatttatgtatgtgctccctcctcctcacaatatacgacgcacacacaaatatagaatagcattttcatttcatttttattcccattgttacaaaaactgaaaattgatcagctggcgctggttgagcaagcataattttgtattgttgaataatatatttttaaatattaaaatgagaattgttttttttaaattaattttgaaagagaataagaggatgatggaaaacgttggtttgttttttttattaacataaaacaagatatgtacaacaaaaaagaatgtacaaaatgaaatgaatcatatacgaaaatatcgttacaaatgcaaacattataatgcgtagacaaaaaaaaagctaaattttgctctaaaaaattcgagatttataagacaaaatgaggatgtttattggcatgagcataatgtattggttgttggaatctcacagcgcaactgtcatgtagcaatttgataaaaaaaaacacttgaaaattgagatttatttacaataattacagcgncaatgctccttttatataattgctagatttgtgatggattaactcccac

SEQ ID NO: 20025 - DNA, 1894 bp, Heterodera glycines
cgcggcattttcgctgacagctcgtctcaatgtgttgtttgacatcagcaaatgtttaagttcgtcgtccaccaaccccaacaagcagttcagctgttgttgaagctgcgctcgttgcctgatcagaacacgttgctgcttcaaaacaattttatttttgaaaatttattaatttatttttccaattttaatcactttcatcggagttgaggagaagctccagttttcgcgctgttcactgccccgatgcttcatctccaattcggccaaatgatcccggaattttaataccaggtccacaatttcaacctaaaattacagaaataataaaaatgaaaaagggtgcaaaaaaaaatttagtgtatgtctctggtgtcttcctgacctggtttctatgacataaaacctcagtggacaaatttgcactgcacaataattccaggtactcctccttcagttgcttttcaatatgttttcgtcgttgttgcaaccagccgataaagttgggcgaccgagtcacaaattgccggtagaggccttaatgtaattaattaataattaaaatttttttttttttggaattcattttctgagtctgtgagttaattgtaaacgcaatttattttgaaattttggtcttatttatttaacagattatccattttaatcaaaagtttttaaaaaattaagattttatgtgaacttttctactaaaaaactttatagttagaaaaatccaaaaatttcaattttctaaatttccgtcctggtaaacatttttgggaatttttaatgaaatggttaaaaaaattttcagaaaattcaccctgccaatcgcctctgacacccggatgcccaaaatgttgtaatttagtcaggaattgatccaatgaaaatgggcgcattgatggcacaggttgaaaggggcataaatgacgtcgcagaggcagcaatgaagcgatgtacctaattgggtaatatatttgaaattgtgcagaaaaaagtcaaaaagtgtttttacaccacaccgttcaagcggattgatgaagctctgagtgagctccatgaaatgccgttccaatgtgtgcctttttaaagccgagtcgccggactaaaacttggcacactttaattaaaatgctgattttttttggcacccgtttgagcaacttttgcgccagcaacttgtcatccgagaggaactgacgatgcgtggacaaaaaaccgcccatggcctggttgtcaagctgtgcatggccagagagtcgtctaaaaaaggcatttttgtttggaggctgacttgtgatggtcaattttcgaacactttattgtttttgcgtttctgagtacgcgtccaacttcccagcgtccgttgaagaacgacgccgccgcctctcttccgttgccttttgctgcaattgtttcttttggtgttgtttccggtggtcccgcccttgaggcgctgtcattgtgacgctgctgcgggttgtttttgttgttgcaatgttggccaattttaagaatgtggggccaatgcgcaaaagccttcaagaaaaacggattggtgacgccgagcacaaaattgttaacacagctaaaagaaaaaataaataaaattttagaattgatattaggtgaattatgaattatatttggagtttgaatttcggaaataagcgtaggctccatgttgtacctctttcggacaaaaattcaggtccatgagaaaaatcgatggctggaaattattggttagatggaataacaaatttgaaaaattttatacgaaaatacatctttttcatacctaatctggacctgaatttctggacaagatcccgggtctgtcgattaaaggccgaaaaaactctaatgatattttcgtttggtataa

SEQ ID NO: 20026 - DNA, 1179 bp, Heterodera glycines
taatatatttaaaaccaattattttttgtcagtttctttcaaaactcacttcatttttccacatcgaatgtcggacatttttcgctgcttgccaaagtgatcttgcaaaaacttctcaaggcattccggcttgtatccgccaaaacggcttgctttcgcctccgggccgaagacgtcgtctttgagacgcaaataaagccgaagacagtcgatcaaagaagtgccatccgcgagggcaagtgccaaaatctgagaaattcagcttaatctattatccaagactattataatcggatgagaattcgataatggacaaatgattttaaattaaatttctttttaacttaccgcccctgtgcttgtcccggcgacccaatcgaaatggcgctgaacaaaattgtccttttttctctgccctttcttttgtgtgtcgccgccgtccaccaaacgctcaatttcaagcaaaatctgaaaaaagtatataaaattaataatatttacaaaccataaatgccaatgtgatcaacaagaaggcattgattggtccgaatggagatttgcagggaaagggactgacccggcaagaaaatcgaaaacggactgatggaggtgaattcccaaacgcgcgcccccattcaaaacccccaaaaacgatgctaaatcctgaaacatcctgatttgtgagggcctcgaaaaactgattcccgctggtttcgtccttgagggactcttccccccccccccccccgcgtccttaaatcgtctccagccgttggtttcgtccgtgtccttcccgatcagttccgaacgtctgtgcaccacctgaatgagcaccaatcctctgatgccgcctccgtccaatgagagcagtcgcaatgcgtcgccgttgtccttcgccgcccttcgctcgcgctgatggcccattgcgcgtcgctgctgctcgcgcgtcactttggacagcgcctcctcgcgcccatttttgaactttgtcttggaattgcactgaaaggaaagcacccattaatacctaattaattacccattaatgaccttaattcctgttaaaataataatttatatcaaatggaattgtactcgctttgcgtaatttttagttccatttacaaattcttaaatgagtagtttttttttgagtatgacttggacttttaaacattt

SEQ ID NO: 20027 - DNA, 869 bp, Heterodera glycines
tgcagtcttcttatttaatggcttttttggctccacgaacttcggtggcgcaaattccatattgtgaccaggtccgggcacggctcagaacctcgacgagccgttcattccttgaaaaatgccatttaattttgtggattgaaaaaaattggctcttgtggagtttaggccccattcgaatcttctatacactctatatcgtcatccatactcaaccttttatctttattgggtttttttctttttctaaaagttttatgtttttcgatgattgatattgtgaatagaatttcttaaaaaagaatgtatgagccaaaatttggaaagaataggaagagaaataatgagcacaaaattatgaagacacacgtgattcgcatgccattcgcagtttgtcccaatttgttcggcacgtccaaatcggcaccgaaacaaagcagcagttttacgattggcacagaaccggcctaaatagtgctgcgataagggagcttaccaaaaataccaacccgaaaatgagctcctgtagaaaaaaagtttgcatatgtggctcagtggtttttgtaaggtagtcaatggaaaaaggatggaggttcgaagccgctccatgacaccaatattttttaaatttattttcttccgaaaaattgaaaaatagttatttaaaaaaatatttttgaagatttttttcaaccaaattggacattcttggtatcattcgaaagctcttgaatagggaaagcttttcctaagcaaaagctaagcgtgataagttagaaaaagacataggcgtttaaaaaaaacgaagtaaatttaacataggagaaagcatagagaaaagcaaattctgcttttctctattagcagag

SEQ ID NO: 20028 - DNA, 2587 bp, Heterodera glycines
cagtgccatctaaatgccgcacatttaccagcgccatgtccttaccatagacatggtcatacagatcatgcgacgcaatcagcactacgcaactgaaaattattcaacatttaatttcagtaccggtaaattaaaaatatgataaaatttaactaatttatttgacaatttgttagctttttattcctaatttaatgagcttcccatttatttatagcatagaatttttgtcacctgtctgctgcggcatggtgtttactgtactcggcaaatcgttgaaccactttgatcattcccttaatttttttaatttaaataaataaaaattcattatttgaattactcacatccgcagtcaaattttggtttacaaacaagctgtatcccagctcgaccatcagcgaatggaacatcctggcatcgcattggagccgtgccggtttttctgcgagtcgtcgaacaactcattgtttattatgagtgccaatcctcgaggcgctgacgcattttgatatgcctaaaatcctttgtactaaaaaattcttgacaaaaaaatttaacataacagtaggtttaatttccgcggtttcatctttttaaatttttgtaaaatgacacggcaaaatataatgccttaattgttttgattttgttaaattgaaatcaattctaaattaattttattattttttgtccaatttcattatttttaaacggccacggctaatcagcaggacaatggccaaaaatgcatttgaaaatgacacttttggctcataaaataattaggagaatttcgttacaatggtactcattgttcgaataaataattccatatttgaatatgatgcccaaaacgaatttatttaattattaattaatagtgttcagttactcaaaaaactttcgttttaattacaatcatcatcagaaggtaaatttttggttttattccatataaatccataatatgggggggggggggggggttaggggaataaatcccatatttcggtcattttaggaaattttgacaataaaaatgcaaaaaagcgaaaaaatacatcaagaaggatcaaccttatggaattttttttaaacacacccccataaacaagaaaaacttgcgtcttttttggctttttaatcaatattttaactattttttgttattttatctttttttgaaatgagaatttttttcgaacttttgcaaatttggacaaatcgcttctgaaatgccaaaatttcaaaatcgtgttaagccttaattcgaattccctggaggagtttatacatcggacaaccaaaaaataagtttaaatttttttttaaatttatttaagcaaatattgaataaatattaatattttagaatttttggaggttttaaacttatattctggtagtttttagtctatattttaatccatatttgtcctttttcagctttttagtccatattttatgttcacgtaagaaatggttttgctttaaaaatgctaatttttaattgccctctgttgtataaactccttcatggcattttgtgatctattggcgaattaagtagcatatgctcataaaaacgtaaaccatacgatttatagccctacaaattaacaatatgttactgaaacatattggcaattaaccgcggaagcaaattttctccaatgatatcccaaatccaaaattttaaatgttcaaacctaacaaattgctgccaagatttgggcgcctctcaattcgaagagcgctccaaacatgcactttcagctttctgacgaggccggagaggatgacacactcgtccttttgcatctcggagtcagtgctttcatcctcatcacttgacgacgcttcatcagcgggagaagaagaagaatctgattcttcataaaataattttttttactgcaaaaattataaaaaatttactaaaaccaaaacatacatgaactcgttcacatgcagcttcagtgttcctttttcagtctgcttttgaagagtggttggaacactggctcattttaaacttttattaatagttgtttgagctagaaaaatgtattaaaaaattaaaataataaaattttcttaaaattttgaatgctagtgatttcatatatgaaagaactgggaaagcaaagccttttttgtttccttattcaagctttaattttgacctaaatatcttgtggaaacgatatgaagaggtgagaatcatttttgctgaaataaaaatacaataaaaattaaaataccaaaaattaaaaaatttgtatgaaagatttttggaaaattatgtatttagtgtacaagcgaagccatttttcgtaggaaatttaatttattaaaaaaatttggatagcataataagggcggaaaaatagtaattgttacatccgatggggcacacaaaaggcaagggttaaaattacatacaatttaatgccggtcaatgtgtgctaatttcaatgacacatttgaaatatttttaatctataaatattatatatttatgccattgcatcccgcctcccgcaatttgccttttttttagtaggtcattcctttcgctcgc

SEQ ID NO: 20029 - DNA, 1833 bp, Heterodera glycines
ttaaaatttctttcatttctctccccttgttttgttcattatcagtgatcacaacaacattcactcacccgcttgcttcgggtggaaaacgcaccaccacctttcccatctcggcaccatccaactcaacgaactttccctcgtcgcgcgtctgtttagccatctccaaattcaagagcaactatggtgtaattctaaatgttcaaaaattaaattcatgagtcaaatcagcatgtgagttgggatctctcgggaatggtccgtttcagcttcaaaaaaataagcgttgaaaatttgaatttgaattcaacactatgggtacgccccagtgcggtaggggacggttcggtgcccgccgtttcggtgccagcccaagttttggactacaacttttttcattgttgaccaaatctaataatttggtatcattcgaaagctttatatgtttagaagctttttctaacctattgcttagcgattagtcaattaccaaaaaatttataacatgaaataacaaaaaaaccaaaatttggaagttttttcttaataacttttttacaagctaaaattttttgttttttgtaaggctaatagagcttttgaagggctttctcatgatgggtccacctcgtttcggcgccgctcgtttcgacgccagcccagtttttggactataacttttttctttttccaccaaatctaacattgttggtacagtggcggaaaaaagtcttgactcaagatgataaaatttgttgaattttaaatttcgactggaaatttagctgattattttttgtttatgtatatttatttaccccgatatatgggcctttcatataccacaaaataatttcattccgctttatcattctcgtgaataattcttctagtcataatttttttgagcatcaacgaaattttttgaaacttagcaggctaatagagaacacttagagctttcgaatgataccaataatgttagatttggttgacaaagaaaaagttatagtccaaaaactgggctggcgccgaaacgagcggcgccgaaacgagggtgtcccctcatgataccaagattttagatttggtcaacaatgaaaaaagttgtagtccaaaacttgggctggcaccgaaactgctggcaccgaaccgtcctgttccggccccagtgttagacgggtcggggtcggtttagtacgggccgttttagtacgagcgcaagtttttggctataacttttttctttgccaacaaaatccaacatttttagtatcgttcgatagccctaagtgttctctattaatctgcaaaattgcgaaaaatctcgttaagcttcaaaaaagttatggccagaagaattcaaaaaaccagatttttcaacttttttggctcgaactttttttaaactaaacaaaattttttgaaattttgcaggctaatagagcatccgaagggctctcgtatgatattaatagtgttggatttggatgtctaagcaataagggtagggatatgtgagcgttagatctaatggtggggttctcatttagtgaaatgataaaaatagatgaattttataaaaaactatgaggaatcatattttgtttatagtaaacccacgagaatacaaaacgaaaaattgaagataatctaatttctgaatagtgattgaaccaggggaaagaataaggaaatgtcaaggagactaggcattaggacatttgcaccctcgagaatctgtgacttatagagaatatagaaattattatggtattagttttccctttgacgccagttttcgtcactaattattcactcagaccccattct

SEQ ID NO: 20030 - DNA, 2117 bp, Heterodera glycines
tttactttaacttctcaatcgacctttccttggcccctctactcccttttaatttcccttcttaaaacagtgccaactcagcatcaaccactgaggaagtccttctgctgatcaattccccatcggcggaagacaacaaagtgccaaaaagcgaacagaggaggacaaaggacgaagaaaggagaagcaaagcgagaaggacggtggaaatacgcgtggacatgggacaggacgaattggaaaaactaatggaacgggcgagcggcaccaccacaaccatcgaatgggagagacggacgaatggacaaaagtgatcaacggagaggaaaatgatcaaataggggacgaagcaatgaacgggcagaaaatgatctctcggaggacggagtgatcaattggaggaaagtgggaaaatagtcatcggaggatggaattgaccaaaggggtgaaaacgatatttatataaataaattaattaaaatagacaaaagacacgactgacaaaagtgaagttggccaaataaagcatttgggtagaagctcagtcagtgggaaatgggaaaacgaaatgtgccattgaaaatgggaatgaatgatttattgtccgtcctctgatcagtttcccccttttgtgccattgttttttcttcccttcaaatgtgttggcactttggtcagttgagttcgcttaatatttcgcaatttccttttaattttcgattgtccaaacttcgcttttaactgtccgctgcagaaaagcctcaacagaaagtgtccctcctcgtcgggttcgaaagtcgaagggacaacaacgtattggccgggggccaatcggaaacgagcagtcacctaagggaggggggagggggcagctgatcagacctgtcacatctgatcactccttttttctgatcacctctctcaaattgatgaatgacgcacttttggccactgatttggccccttccaaaaactgttggccaattcgttttgggtttgtctgatattggcaattttgctgtttgggcaaatgcgtttcatacgtttggccgtacaaaatgcttaaacttaaccaattaaaatcagtttgttatgatcacattattatcactttatctgtctctcactttcctttttggcattgcatttgcgggagactttgataataatttgggacgaggggttgaagctgttgctgaacatgatgttgttgctgttgcacatatgcgctaccgtacgaatttggctgtccatagcccggcccaaatcccctaaggcaattaattaattggccaaatgagtccaaatcacccaatggcaccaaatcatctaatgaccaataaaccaaatgtccaaatcctctaagataaattaattcccaaaatgaatgtccaaattgccacgatgggccaacccactgacaagctccttccactcgccggtgcttctgcgttctgtcgctgaacgtggctaacttgtgctgtgtgcttttgctgctgctggtgcttctgtccctcctccgtcccttcgtccgtcgcataaatggcgaatccaatggccaattcgtccaatccgaccgcgcgcaattctctccggtatttctgcagcactgcgcaaatcaccgtgcattttccgtcatcctccgttccattgtttggtgaaatgctgaacgaaatggtcgtcccaaactgaggattattcgcaaaagtggctgaaaagagagaaaatgaaacgaaatgccaaattcaaatgccatacgaaagttgcgacatccgccggcggtgcctttctgtcgcgaccattcgccgtccgacgcaaactgcgcccattgtgcgctcgaccgaaggcacgaagggacgtccgaagtgcgcaagtccatcatgctacagatttcgtccaacacctcagggcccaagttgcagcattccattcgctggcaataagcaacggattggagaaagtggcgaaaagggggtgccttcccccccaaaatccccccccccccgccactttattggatctctccaatttgacagcagatcacctaccttccacactatccggagacccatttgttgaccagttcctctcctcacccccccccccccccctgcctc

SEQ ID NO: 20031 - DNA, 1893 bp, Heterodera glycines
ctccttcggtccgaattccttgtccttttacaccttttttccttttcatcaaactctttccgactaacaataaggttgataaaggcgcttacttcttgtagggatggatttgtcgttttactgagaatgagttcgtttattgtctcttctttcagttgcactcaatggacagtcattcggatgaaaaggttcaagtgcgtcgaatgtcgttgaaggaattcacggtgggacaaaaggacggcaaaaggggcgaaagggacactttgcttttagggattggacgtggaggagcagcgtcagctgaagtgcatgcccaataataagtgagtcatggcataacccaaacaatcaaattaaaaattggtgttcgactggtctcgtgccaccgtttctttctctttttttttctaagtgccgaggtcggaggcgcccatttgccctttgggtcgcctttgctgcacccgtggaagggcggctcgcaagcattgggcagtttgatcgacaagttcagcactcggcgccgctcctcttcctctgccgcaacaaaattggcagttgggggaaggctcggcacgacgcccgaagcggcggtcggacaatgggaggagggcacgtcgaccaatgcatttgacagagcgatcgaatgcatttgcgaagcgatgcaggaaatggcgggggacaatcagaaactgacggagcaaacgctgcagcaaagggacgaggacggaggcggaaaggagacgggcagaggcggattcggacaaacctaccaaaggtacgaccgatcagtgcccaacagagcggacagtacatcccaggctaacaaacatccgaaaccgattgaactccacgctccaatctgtgcccaatgtgagtccgcgaaaagtgccaccggtggagaaggaaaagctgattttgttgagcgaatgtcgactgttcgttggcatgtacgtttttttgttcttttccccggccttactcattattaaccgtttcgttaagctgtaaagagatggtccgttgtccttccgcctcggtttgttcagcttcatcctccgtctcttctgctgatgattcttccatttcgtcaaattcgcttcgaattactcaaaatgcggtggaaagtgtcgatcggctgacccaaagcgtggaaatactcatccgcaagagcagctccatattccaagcccaacagctgactaccaatgccgaccaggtcagaagaagagtgccctcggcggatggccaaacaatcgcaaattttagcttttaaaaacactgacggacactttgaaagaagttgaaaagtgccagaaaggtggccaatcgcgcggctttgatcagacgagggaagtgattagatgcagcacatctttggccgtcacgcttgtccaatttacgcagttaattcacggcctctgagtcggcatttcggttgaatggaattggccataagcaccggttctttggaattttactttgttccctcactgatttcacaatttccaattctatcgaaaataaatttcctttcaacaaccttagtgcttttcttttgcgaaatcacgtgcccgaactccgaacgaactgagaaaacgccgatcattcactcactgcccattgctcacgtcgttttgtctctttcccccaggcactgatcgattgattaatcattccgggggcaaatgctcttcgaaagcatccgccaaagggcagtcactcgttcaatatttggtcctttctatcaaattttgagaatttcgtgtcaacatcagcaggcggaaattggctggcaaaatggtggatattagctttagtcatacatttgaaaaacagacataatttgtttggaattctttcttggcttttttccatgtcatccaaacccaacgc

SEQ ID NO: 20032 - DNA, 2270 bp, Heterodera glycines
aaaacaaataaatgaaaaagcaagccgattcacgaccgatttggccagccctgaaaacccccgatcccggggtcggggttctattgcactttatgagtccaaacgcatattttttaagagtccaatttgagtttattagtccaatcaattaaccatactgctggtttaataactttgttcatgttcgaataaaccctaaattcttggtatcattcgaaagtattaagtctgaagaaagtaataatacgagaaaacaagaaataaatgctgagtttttacatattttagcttttttataacgccataggactcataaaagtcgatttgactaataaatctgggtgccaaccctattttaattcttagctagtgaaaataataatgttgatgatttaactgttatgtgaacaaacttcaccttatttttcaaaagtttccctggcttactcccggctcaaactagccaaagtgtacttcataaagcaaaaaagggtctttgcaatctcaagttcctcaatttccgtacatttttgatgaaaaacaatgcgaataatttagttaaatcataaaagcggtatggttttcagacttcgtttggcgctcaaacggcacaatcgcatgaattcatggccgacactgcacaaaccgaacggtccatcatcaacatgatactttccggtgctgccttatattcggggtgcaattttctctgatgattaatccggtggatttgccgagtcttgtgaatcatgccgggtttttggcttatgggagtttatttttgctcttaaatttggagctatttgtagaagcaaatgacatttgaatgctttcctgttctctctggcaacacttgtcagggcggcctctaccaatttgaaacccccgcttggctttgagaaatataagtttatttaaagaaaaaaggtttaaacaaaaaaacaaatatttaaaaatgatttttaagtaaaaaattgaatttacgcaagaattggagagcagaggaaaagaaaacaaggattgtgagcggggtgggggggggggggaagagaaaactcctaattgtggtcaaatataaatcactttaaatactggtcgcgagcggcggatagagaactactggtttaaagcgcactgggacatttgcggacaatttcgagtttcgagaaataataaaaaatatttcttgaattttcggcacatcaaagaagaggcagagagagtacaatgcttggacaaaacgccagaggcgatggggacagggtttatctgcacaaatccagtccagaatttccacagttcttttacaaagaggttcttgacaaaaaggctctctgcccaatggcacaataaaaattttgccaatttcctcttagacttgtcactcgcccccgctttccagacagacaattgccgttggattcgctgcggcgcattgaggaaaagctgcgccaaaagcgtgccgaaatggagctgaacgacacgcggatgagcgcactgctgttgcacaactttttggagttgatgatcgagaagcgtgaccaaacgctcaaacaagtgcaaggcaatgatgattgtgatgttttctgtttttttgcatcaaaaccaacccaacttgggaaaggggcaggcctgcagcagcgagggggagagtaggatccccaccccgcccgaactgaaaattcaaaattttttaataattttcctaaaattttccccgacgcctcctattgggaccaccagattttcattgaaattttagcccgaatagcaaaaaaaaaaagaaaaaagatcttcggattccacccaccgacattttttctggatgcattctgttaccaaatttttctaacgcctcatttggctggcaaaaaggggagggaggggcagcgcttttttctctctctctctctttttctgttgtactttttttccgcaatattttttaatatggtaattttttttacataatttgcagcaatcgtaaggatgcattgattcaattttgccaattttttgtagctgagcttgagcttctaaagcaggacagacagcgcgtgttcgcctcgctgatcagtgacgacgaccaacagcagcagctgatcagtgctccgtccttgcagcagttggtgcccgatttgtccgcaaatattgccgtcgctgctgctgcttctgctgctaaacacccatcggcttcaactccggttgctgctgctgctgcaggtggtgcttatagaggagcagctccgtcggatcttccctacccctcc

SEQ ID NO: 20033 - DNA, 2713 bp, Heterodera glycines
ccggaaaaaaaccgaaatttttccgacattataccagtcgatagagcttgaaaaactatgttttggaagtggtctccgtttctctgggaaaaatcgttaaaaaatcctaaaattcaaaaacccgaaaaccgttttttaggcctaactcgaaaaattttgaaaattttcgaaatttttaaatttcaaaaaatcgagctttcaaagctctacaataagttcgctggccaccccccgctcagatcaaaccctggcgcggtattcacctggtactgaagtgtactttttgagcacgcttcagttgccattttttgcaggccaggggtttgctcaaaaaaaattttaaaaaatacctctttgtagaggacccttaggcggagacagtgatcagaagaggtacaactgtgattaatttgaaatgtacatgaattatatatacatttaaattgaaattaattttttgacaaattctaattaaaaaacaaatgaattctttaatttaaaaagaaataaataatcaattttaaatgtcaaacatttattcatcacaaaaaaaaatttaaattcaaaatttaaaaatttttgtattattaataaaacaaaaaactattttcaattaattaaaagcatttaactactcacttttacaaaaaaaaaagtcaaaaaaacttgccgaaattggaattgtcatcaaaatgtttgtccaccagagctcattgaaacggtgcaaaagcagtgccaatttgaggccgagttgagaacattcaaaaaaggggaaaaataatggacgatttggacggagaagcatttaatgtcatttgttagcgcacccacagaatttgccatttaataaattaaatagagcctttaaaaacttttagagataaaggttggcttgagattaaaaatgttataaaaataatttaaaaatagcaattactgatttttaataatgaatattgcaagaataaagtgaaggatgtcaaaacaaaaatcaataatgaactttttattttttaagaaatttgtcttaaaaacaaaattagaatcataaaaaaatttgtgaatgatcttataagataaataatacagttctttttttaataggaaattttatttgtatgtcattactaaatttgacaaagtgaattacaaattttaagcaaaaataactctaaggaagcaattatatatttattttttcattcaacaaaacttcttcgacgaatgcaaaaaaagacgaaataatcaatagcacaccgtgtcccaaacacgagatgtgtcaataaaagagggtgtagagaaaaatgcaaattttaactctatcgaatattacgccgactatgaaatattaatgacaaaaaatgggtaattaaaaaaaataaaaagtttattttagtgattaaaagaggtacaaaaatgatttgaagaggtacaatattgattagaagaggtacaataaatggtagaagaggtaaaatagtgattagaagaggtacaatattgattagaagaggtacaataaatggtagaagaggtaaaatagtgattagaagaggtacaactgtgattaaaagaggtaaacattgattaggagagatattagatgcattataatttataaaaaattttagaacaaattctacttttatttaaaaaataaacttgaattgtttaattatagaatatttattaattaaattttatttttttacaaattcaatttaaattgaaacatgatattctttaattttttaattcaaaatttaaaaattatttttaaataaaattttcaccaaaaaataatctaattcaaatgaaaattttttatttattattaataaattaaaaaatattttaaatgaataaaaattgaaaaacacaaaataaatggtagaaaattaatgtacaccgtccggatccgaacttgccccccccccccccctcaaaatgatgccccagaatccccaatcacacagggattctgaggcctaaacgatgtcaaaagtaaaatctgattacgtattcgtgatcagcggcccaaataaccactaaagacatgtttttggaagatttttgtgaaaaaaaatttctcaactcaaaaatcctgtccaccccctttggtcccgaatcccaaaatcacttttatttttgtatctttttttaaaaatgtgataaaaataccaaataaaatttatataatagaggaaaaaactacggatttttgtagtattttatttttccagaatatcttttcagaaccgagttatgaatttttttctgaaaattcgaatttttccagaaattctggaataacttttttccttttttagatagaaattccaaataaagtccataaaattctcctgatttttctctatttttaagactttatacctgtaaaattgatcaaccctttgatttgttatgaattttcaaatattaggccaaaatcccgtgggccaaaaaattgccaaaaaataaagaatttttaaaaaattccaaaaattatgaaacttaaaatagacattatattcgtactcagcaccttattttaccccagaaaaatatttttcaccaccattttcgtccgaaaaaaaatttccgaaaatttctagggggcctagctcgaaaattttttgaaattttctcgacctatcctacaccattcgatagagcttcaaaagctctacaaaaatgttctaagacaattttt

SEQ ID NO: 20034 - DNA, 750 bp, Heterodera glycines
acgaaataatcaatagcacaccgtgtcccaaacacgagatgtgtcaataaaagagggtgtagagaaaaatgcaaattttaactctctcgaatattacgccgactatgaaatattaatgacaaaaaatgggtaattaaaaaaaataaaaagtttattttagtgattaaaagaggtacaaaaatgatttgaagaggtacaatattgattagaagaggtacaataaatggtagaagaggtaaaatagtgattagaagaggtacaactgtgattaaaagaggtacaacattgattaggagagatattagatgcattataatttataaaaaattttagaacaaattctacttttatttataaaaataaacttgaattgtttaattatagaatatttattaattaaattttatttttttacaaattcaatttaaattgaaacatgatattctttaattttttaattcaaaatttaaaaattatttttaaataaaattttcaccaaaaaataatttaattcaaatgaaaattttttatttattattaataaattaaaaaatattttaaatgaataaaaattgaaaaacacaaaataaatggtagaaaattaatgtacaccgcccggattcgaacttgcccccccccctcaaaatgatgccccagaatccccaatcacacagggattctgaggctttatcgaaatccaaacggaaatttgatcacgtattcgtgatcagcggcccaaataacccctaa

SEQ ID NO: 20035 - DNA, 1255 bp, Heterodera glycines
ccccattttgtctaattgggtctttggattaaatcaaggttcctcttagtatttcggaggtactggataactccgtgattccgtcgtttccattggccaataaatcattggcggaagtcaaattcaggcgtgccttggggactgaggtggtcagtacactacgaattgttgaggacatttttatgagatgaaaaaggttttttttttttttttttttttttagttttaaatgtttttttttatgaggaaaattagggatggggttctgtgtggctcagtcggtagagcaccaccagactcttaatctttttctatcgccgccgttttcggagtgggaacggcggttcagaaagtatgggaaaagggatggaaaattgcgtttaaattttgggtggaaaagaataaattggagaatgtgatggcttatggtttgggatggaagctccaaattcctataggaggaatgagggcaattggttggaaaaaggggtttccttatgggaaggaaaagtgaaaggttttctggataaaacctttattcaaaaacgcaatgaataatgtgaaaaattgaaatgtgtgaagaaaattggatcgtttgatcgtttggaaaaagatcgtttgataactgttggatagcagttaaaaaatgggaaattgaattcggtctagtggctcttccttcgttcttttatacgggttcttcttgggcttgggcgtggatccaaaaaggggcggtcgcacagatgagcatgttgaaaagcgcatggggcaaatggtggacatcaatgacaagaaaaaatggggaaaaacggattaaggggccagggaaagaaccatggatgaccacttttaagggatttctcagattaatttcaaaaagtggctctcattaagacaaaaatttatgaatacggcaaaaagtaaagttaacaaagttggtgatcaatgatcaccgccaattttttctgtcggcgacagaaaactccccccgggcttaatcctcttcagccggctccggttgcttttccccctcttccgctttcttcgcctgtttttctttcccatcttccgcttttctcgcctgtctctccttctcatcttcttgttcaccaatttgggcctgtttcacgatgaattggaagaaacgagaaaattcggccgcgtgcttgttcaacgcatcgctaagggtattgatctcagaaagcacctccgtgaggagtttcttgacccccaggagccgggaacttttttggga

SEQ ID NO: 20036 - DNA, 971 bp, Heterodera glycines
aaaacgtgcttaggaaaagtcttcttatttaggatatttccactgacaacgatagcgtagattctagcaataaatttaataactaccaaagtgaaacaaaggctaaaatgtgagtgatttttttaaaaaaggccgcacagctttctggcggaagcatttttctgaacctttttctcagaaaaaaatagtcgcattataaaattaattttcacccattatattggttgttagacaatattaatatcttacgcgctaggtaaagcgctggcaatttcgcttttttaaattggcgttacaacaagaaccttaaacgatatgtagcggcaccgaataataaaaataaatcttttatcgtgttcacattgttaaaaaattgaaaatgatgccatcttgcatggattcaacaaaagtatgttggcttatagaagtgaaacggaaaaatgttcgaatatgagcagaacattaaagacttggtgaatcccggtaacaaaatctcaatttagctaggcaagcactcacagaagtgattccttgaaaacaggatgcataaccttggcaacttattaggagattctggcaataaattaagaaacaacaaaacagaaagaaatattcaaaagtgagcaatttttttcgaatgggccggattcttctgaacattttatttttcttaattttctttgctagaaattatgacattattgcaaaactaattcacggcccttttttgattagagacaattgaatatatgcgaaattttttaaaaacgtgcttcggaaaagtcttcttatttaggatatttccttgacaacgatagcgtagattctagcaataaatttaataactaccaaagtgaaacaaaggctaaaatgtgagtgattttttttaaaaaggccgcacagctttctggcggaagcatttttctgaacctttttctcagaaaaaaatagtcgcattataaaattaattt

SEQ ID NO: 20037 - DNA, 2362 bp, Heterodera glycines
  unsure (1)..(2362): unsure at all n locations
ggaaatagaaaaaaattntggcctgagcgggacatttgagtcccgggcccatacntcgtcaggagttgtttttagccaaaaatgaccttagagcaaaattgtagagctttcgaaactctatcgaatggtgtactacatgtttggaaattttcaaaaattttcgagctaggccccctagaaattttcggaatttttttttgggttgaaaaagagggtgaaaaatatatttctggggtattttggggtcctgagcacaaatatgatgtttgtttttcgtttcagattttttggaattttttaaaaattctttattttttggcaattttttggccctcgggattttggcctaatatttgaaaattcataacaaatcgaagggttgaccaattttgattaaataaagcattaaaaatggagaaaaatcaggagaattttatgggttttatttggcttttgtatcataaatatgaaaaaagttattccagaatttctggaaattttcgatttttcagaaaaaaattcgtagctgccttctgaaaatctattcgggaaaagtaaaatactacaaaaatccgcaatttttttctctataatataaattttattttacatttttatcacatttttaaaaaaagatatagaaatagaagtgattttggaatttgggaccaaaggggtgtgtaaccaggatttttgattgaaaaaattttttcacaaaaatcttccaaaaacatgtcattaggggtaatttgggccgctgatcatgaatacataatcagtttttacttttgacatcgttaagccctcagaatccctgtgtgattggggattctgaggcatcattttgagggggggggggcgaagttcggatccgatcggtgtacattatttttctgtgcatttttgattacttttacatgttttattaatttcaaatattttttataaattatttaaatttatttattttttttaattaaagaatttcattatttattttttgaatttgtaaaaaaattaatttaatttcaaattaaatgaataaatttccaacgttgtttttaattaataactaccattttttcctgttttcattgtgttattcatttaaaatattttttattttattaataataaattacattttttatttgaattaaatttttttttataaataaatgttttgttttaaaattaattatttatttattttaattaatttaatattgtttgtttaattaaatgttttaatataaaattaatttcttatttatttttaaataaaagaaggaatttattttataatttttaaaaaattattaacacatttgttttgcctcttctgatcactgttgtacctcttctgatcacagtgtacctcttctaatcactgtttacctcttttagttattgttgtacctcttttaatcatttttgtacctcttttaatcactgttatacctcttttaatcatttttgtacctcttctaatcactgttgtacctcttctatttactgttgtacctcttctaatcactgttgtacctcttctaatcactgttgaacctcttctaatcactcttctaatcactgttgtaccacttctaatcaccgttgtacctcttttaatcactgttgtacctcttttaatcatttttgtacctcttttaatcacttttgtacctcttttaatcactgttgtacctcttttaatcatttttgtacctcttttaatcacttttgtacctcttttaatcacttttgtacctcttttaatcactgttgtacctcttctatttactgttgtacctcttctaatcacttttgtacctcttctcatcacttttgtacctcaaaatttaaataacgggcgctacgcgcccgtccaaggccgcgaagcggcctaacaagctaaaaaacgggcgcgaagcgcccgtatgagttcaacgaatttaaaaaacgggcgcgaagcgcccgttcgaggccgcgaagcggcctaaaaatcactgaaattctttaaaaattcaaaatctcttcacaaccagatagctaatctaggtagcgaagctcgagaagcgcgaagcgctttccccagcgccaccctcgcatgcaacacccgctagttatatatacgttatattgacaaggagtttcgtttcaaaaactaatttgagcttaacggctaatgggacgggtctgaaagtagtggaagggtcttacaactttttgaggagaattcgggaaaactatagagaaaaattctgcgcggacgactgagtcccggggaccgatttctcactttttcttgcgtttgacggcccataactttttttctgaaacccgaatcaaaaagtgcccgctg

SEQ ID NO: 20038 - DNA, 2400 bp, Heterodera glycines
  unsure (1)..(2400): unsure at all n locations
gctattgntctatcatttcgccagcacacaattagaagtcttttcagcgcaattctcgaatgccacgatcacgctcaaattcatcgtcctctgatccgatccatggcttatatacattttccctttatcttttgtagtgnaagagaaaagcgccggagggaattgattattgggccgagatgaagctggcgcccgaatagttttgttttgttattattattatttattgttcttttgcttcgttttttctttggtaaatttgattgttttttttgtgtcttgaatttcgcctttttctgtcatatacgaaagagcagaccaagtttaaaaaatttgtagtgaaaaaagttatttgactctacgcccatatccaagaatatcaaaaatattaaattttccaactttttgccactttcttcattaaaaatttgggtgaaagggactttgaaatttttgttggcctaattaataatttacttaaatttaaaacgttttgcattcgtttttctgtctgggttcattgccacctgtgtagaagaaaattaaattacctgtccatcactttctttatatttagtaaattttgaaaaaaatatttattttccctcgccaaatgaggtggaggaaatgtaaaggatttcgttatttcggatcacgcgcggacttcttccgtagcccgtagtctctccccacctactggccgccgtagtcgagtgtgcggcggttttttagcgcaataagctaaattcaatcttttatatttgacgttcttttaccattttctgactactagtttaaaatagttttaacaattttgaggacccataacacgcgtcggttcgacttcattccctgatttttagacttagctcgttaagagctttcgaatgatacaaatttgttcaaaaatttttatttaaaatttcgaatttttgttcgaattcggtcaatatttaccaatataaggcataaattacccgtttaaatcccaaatttcttacgaagcttctgtatgcgtaatcaaaacgctggtgccacccctgttttttacataaataggtaacataataattttctttccctccgctgtttctctagaagttctaattgacatagtcatagaacacaaaattcaatagaatattggagagtgggcaattctttgatgtctgcatttgttgctccaaccaccacacatcgccgcttctcccatttcattagttttcctcgctttgcgggggagcaagtgtttgtgttttgaaatgagagaaagaagtggagaaatgtgtgggtgtgctaatctgagatgtgtgtacatgcacccctgtgaaattctgttgctggctgggaaagtttagaaataaaatgggattaggtgaaagagaagcgaaaaatgcgtggtaatacacacagagggaagttgcagcaccagcggcccgctttatactcccaccggctggtcgtacgcgcctttccccacctttctcttcatctcttaaatctctatgcaaacaattttcacttgggctcgattcaatttactctttctcgcattgcttcagatgacaacattattatatccaactgacttatagatcggggaactagagaccgcgctttgtagattaaaaaacaccaaatatgatagccattgtctaattgaccaaaatactacaagaaatggatcaaaaaatggcaaaataatctcatatactatgtgtatgtattgccaaaacattactgtaattaaattttatttttttcacgccatttggattttaagactcactccaaactggctagtagaatgaatttttaaattttccacgtaaagtattaactaattctacataagacagatttaaaagacgacaacaattaatacataatctcactatcgttaacaacttcatcggttctgctagcatttattttcatcgtcttccacacacagtgctacaggctttctcaacaacaaacgactgtaatcgttccttcgacttctcatagtcaggataatctttagctagttaaataatctcgcttccgcagatatcctcctaaaacattgttctcagaacattattccaaaaaaacaaccacggacaaatcacagcaacttgatcatcgtccgcaacacgaaacgcggaagttttcaactttgggtcgaagcagcgctgcaaacgcttcaactacgcctctggctggacttagttaaaacatttatttgatttcgatcatctcaacttttaggttcaccgagtaacacaatggctaatgctagagggccgagttcatcgacctcaacctcaactaatgcatcggttggcgttcttatggtcgggccaaatttcaaggtttgttttattatttagttttttctttctcccactaatacta

SEQ ID NO: 20039 - DNA, 2460 bp, Heterodera glycines
acaacaattatgctcagctttttgcaaactggtgcattgcgatgcgtggaagggtccaagaaatccttgataagccagtttacaaatgggaccattcggaatacagctgcgttaaactgtaatgcacaaaaatggaaaaagaaatttggtgaaaacattttttaggcacacaggtctctacattatctgttcttctgcacagcgtggagaggtgctaaaatttgttaccaaaaatgcaattttgtgtggcaaagacaaagtcgtgcaaacagcagttgggaacacgcagaagtaaaagcaaaagcaaaactaataggtttttaattttgtccattatttattgagatttgtactcattcctgtgcatggtggtaaaacaaaacgcagtcgttttttgtgcttagaggccggcgttgttaatgcttttaaatgcttgtattattacaatacgcttaaacaaggagcaacaaacgcgacaaacactttagccgagggccttttgcatgcaaatgtatcgcactgtagcagcttgaatgatcaagcattgttgaaagacaaaaacattaaccggtataaagtgaataaaataaaaaaacaatgctaacaacaacattgtaatcatcgtctttagcacaatgagaagacaccacagtgccttgaatggcaatgtgtcgcaacagtgtttgaccgtgcataaaattcgtcatgctgctgcaacagatgcaaaatgtttttgcttatcaaagcaacgttagtagtatagggatcactttcttggccttttttttgccccccccccctccctcgcgcactcaacccatattcaaatgaaagccaaaaaaattgatgaaaacatgtaacaagtgatcagatatattattagtcggatgtgaatttgtcgattaaggcaacaaaaattagaaatgaatgtaatatcgattcatacgattttcaggcccccaaccacctcataaaagattaacatagatgatttaagaaaaatgcagaacgaattgattgaagacaaatgcagaatgatctgataaaaaataattgaaataaaaatgacggagtaatctaacaactaaaataacaaatgaaataaattaagcataatgattattagttacataaatccccaccaccaaaaaaaaaaaaatgcaggaatattttggagttttaaaaaaaaagcaattaatcatgcaaaattttctctctcaccaatttggtcgcccatttttttttgtgttaaaaaaataaagtggatggaacgaaatgggacggaacgtaaacaaaagtttttttttgatggcattaaaagtgagtttggagattgaaatgtaattaatcatacaaatttttggctttcatcgccgttcggtcgactattattggcaataattccaaaaaaagagggatggaacggaatgggtgaaaagggaaaggaattaggtgcgcatttagtgaattttgcggagccaaggacattttttattagtagaagctgtcaatcgtccgcgttccatttgcaatcttgatgtggcatccattgggcggacgactgctatttaaacgcgtagaaaagccattgccgttcattatttctcaatgttttcgcttttcttatggttatttaaatgcgtttatttaaaattgcgtatttttaattgtttattttgagatgccattttcatttgacccaaaaaaatttatatcattccctttgatagggatagaaccagttttggtacatcctaactccgaaatgaattcgcttcctgccaaccgtccaaccgctcctctcccacttttccaagctattccaccccgaattgctttaccaattcctcccccaaattttccaatcaattctgcccatcaaccaattcctctcttctgtcctcctccgccaagtttcccaaattgtctgcccaatcatcaaccaatcccgatcagcgctccccaaaattttccaatcaattctgcccttcaacaaattttccgttcgtctgtcctccacacccaagtttcccaaaccattcgccccatcaccaacacatcccaatctgctgttctccctcccttttgccgttcaattcgcctcgtcatctcgtcccaatgccgcttcacgttcctgcttcctttccgcgcccacctctccaaacattttttccacgtccacccccacattaccatgtcctcagccgttctccacgtcaaatcagcaattttcaaatgtttgtccgacgccattaatcagccatactttagcgccgataagttcacgtaatttcaatgattcacatattttttagaatataattatttcaatttaagcaccatcaaaaaaacgacaaataattgaggacagagcgggtaatctattaatggaaagaaattgttaacaaataattgtgataaaaaagcaaactaattccttatatttagaacgctggcgct

SEQ ID NO: 20040 - DNA, 2799 bp, Heterodera glycines
  unsure (1)..(2799): unsure at all n locations
ctttgcagggatactgaaaggaagagaaataacctatttcatatattatctagtcagttcatttaaataatttttatccaaaaaattttttttntgggttttcggggcagtccccctgaaccgatgcgcccagatttatggggagaccgaatccttccggaatagcttcactatagcctgtactttaattctgcgttggatttttgctccccataattgtttgagtaccccaaacggacacttgaaaaaatcgatttatttttgttttcggggcagtccccccgaaccgatgcgcccagatttatggggagaccgaatccttcgggaatagcttccctatagcctgtactttaattctgcgttggatttttgctccccataattgtttgagtaccccaaacggacacttgaaaaaatcgatttttttgttttcggggcagtccccccgaaccgatgcgcccagatttatggggagaccgaatccttcgggaatagcttccctatagcctgtactttaattctgcgttggatttttgctccccataattgtttgagtaccccaaacggacacttgaaaaaatcgatttttttgttttcggggcagtccccccgaaccgatgcgcccagatttatggggagaccgaatccttccggaatagcttccctatagcctgtactttaattctgcgttggatttttgctccccataattgtttgagtaccccaaacggacacttgaaaaaatcgatttttttgttttcggggcagtccccccgaaccgatgcgcccagatttatggggagaccgaatccttcgggaatagcttccctatagcctgtactttaattctgcgttggatttttgctccccataaatgtttgagtaccccaacggacacttgaaaaatcgattgtttgttcataatatttttttcagaagtcatgcgcacccgtccgatctggcagttaagcaacgattgctgactaccaaaagggtccgtgccgtgatgaaacgaccagcactgcctacccccgcgcacccggccacggtcccccaaggaatggaattaattaattttctccttccggggatttttttcctttaggtcgtccggtagcgttcgattggttctaccaatttttcaaaattttttttaaaatttgccggtctagggggggggggggggggggggggggggggggggggggggggggcggcgcccccccccccccccccccccccaaaaaaaaaaaatatttttttttttttttttttttttccccccccccccttttttgtttttttttaaaagaaaaaagaagggggggggggggtttttttttttttttgaaaaaaaaattttttttttttttattttcacacccccccccccccagggggggggggggggggggggggggaaaaaaaaaaaaccaccccccccccccccccccccggaaaaattttttttttttttttttttttttttttttttgggggggggggggggggggggggggggggggggggggggtgttttttttttttttttttttttttttttttttttgttgggggggaaaaaaaaaaaaaaaaaaaaaaaaagaagggaggggggtgtcttcctgggggtgggagaaaaaaaaaaaaaaaaaaaaaaaaaaaatttttttgtttgcttcttttttagagagggcgcctgatttttcctccctccccccccctctcccccccccccccccttttggtgtggttgggggggggggggccgaaaaaaaaaaaaaaaaaaaaggggagaaaaaaaaacaaaacttttctctttttttttctcctgctggggaaaaaaaaaaacccacaaaaaagtggggggggaatttggggttgccccccaaattttttttttttcaaaaagggggggggggcaaaaaaaaaggggcccaaaaaagggggtaaatccccttgggaaagttttaaaaaaaaaaaaaaaatttttttggcacatttttaaaaaactccatttaaatttccaattccccctttttttcccccccccgtgtttgtggtttagggttgggaagcggcaataaaaaaagccaaaaagggggaaaaagaaacccaattcccgggtttgcctttccggtgtggggaaacgcaatgcccagaataaactgggaagactttggggtaaggcattcaatttatttttttcaaggatgggatcggggtacaaaaaaatacgggtccaaaaaatgggtgtaatcccgcttggagatgcgttagaaaagaaagaaaatattgttcggacagcttttgaagagctgcattgaatgctgcagtcgccgctgctgtacgcccacgcgttgctgagttagggtcgagagcggcatgaaaaaagacaaaaaggaggaaaatgaaacaaattcgcggctttgctctcgcgttggagaaagcaatgcgcagaataactggggagacttagggttagcgcatcaattatttttttcagaatgtgttcggggtacaaaaaatacgggtccaaaaatgggtgtaaatccgcttggagatgcgttagaaaagaaagaaaaatatgttcggacagcttttgaagagctgcattgaatgctgcagtcgccgctgctgtacgcccacgcgttgctgagttagggtcgagagcggcatgaaaaaagacaaaaaggaggaaaatgaaacaaattcgcggctttgctctcgcgttggagaaagcaatgcgcagaataactgaggagacttagggttagcgcatcaattatttttttcaga

SEQ ID NO: 20041 - DNA, 1559 bp, Heterodera glycines
atttgtctcctctccgccgcttttcttctttttctccctttccatcggtgcgttcggcttttccctttttgcttaagccgagggcacatcagacgcctccgcttaaaaaggggtacttgttttgttatgccaaaaagggactgattgtgggactcacccggcgcgccttccgccgggggcgcctcttcagctgcgggcggttgttctgctgcaggctctgccattgtttatgctttttggttttttcttttgttttatacttaccggctgcttccggcgcgggggaaacgccgtccgccggcgtttcctcgggggcagcgggcgcttccgctggcgttgcttcggatgctggtggagcgcattcagccgctggaacctcggctgggggcggcactgcttcttcgacagggacagcggcgggcgcctcttccgcgaccggtgcttccgcagctggcgcttgttcctccaaactcagctgggcgacctcagcagccggcgcttcttcggctggtactgcttcagctggcggggcagagacgggctctgcctctgcgggcgcgacttcaatgggggcagcaacagcttcttccactggcgcttctgccgctggaacagcttccgaaacgggtgcctaaaattgcgcgttattccaacttttcccacaaaattcacctcaggctctgctgcctttggctcttccactggtggtgccggttcaacgggcgcctcagcaggcggtgccgcctcctctaccggttgcgctgcttccgctggtgccgcttcaacgggcgcctcagcaggcggtgccgcctcctctatcggtggcgctgcttccgctggtgccgcttcaacgggcgcctcagcaggcggtgccgcctcctctaccggttgcgctgcttccgctggtgcagtttcggccgccgcttctactggcggtgccgccgcctcctggacagggaccgcttcagctggtgctgcttcggctggtggcggttgctctgcggctggcggtgcgtcgtttccttcggcagacattgcggcaccttctttttgttgctggggcggaattgtgtcttctgcgacgggggaagactgctgctgttccggctgttgtttggagaaggggcagagtttagtccagaaaggaattttcgaggataaggagactaaaagtggaaaaaaagtgggaaagtgagttgatcatttgtccattttgaataaatggcacgacaaatgcaattgtcttgggtaaggtgttttgtcgcgggttacgcgttgccaatgggtcactctgtcccccgagggttcggatgatttgtcctttccttttgccattgcccaaagcgttttcttaaagagcgagcagagaatgagtctcatcagccttctatgcactgaacatcatcagaatggatgggccaaccgtttgaaatcggacattttattttgttcatgcttgtcagcctttccagcccgcccactcggtccattctcaaatgaaatgaaatgaacatttgtccgttcgttttccgtcatttcgtaccgggggaggggcaatg

SEQ ID NO: 20042 - DNA, 73 bp, Heterodera glycines
ggaagagagaaagggaaaaagaggggaaggggaaaagagaggggggaaagagagaaaggggaaaagaggggaa

SEQ ID NO: 20043 - DNA, 2456 bp, Heterodera glycines
  unsure (1)..(2456): unsure at all n locations
tgataatgaatgaattaatcaattgactgattggtcggcccttccttttcaactttcgtatattttgtaaccttttgaaattaatttccattttatgttattttattaaaaattttattatttttttttctttcattttaatggctgccttttaatttttattttctccatattttcttctcacactttttcaaattaatgcaaattttgtgggagagtggcgagtggccaggggccagcattgagcaggccatcaccactttgagttggactccggcggccaaggagggccggggactgctcggcgtcggatgcgacacgggcgcagttggcgtaacgtacaccgatttgggccctgaccacaactgctgtaaaaggtgaaaacattttaaaacagtgtgaaaatgttggatttttcccccaattttcttcctttgtaaatatttgtcattttctccttcctcagacacaatttcaacttacgcgggcatcaggcggcgattgctttggtggcgtggaacaaagcacagaccaaattgctttcctacgacatcaatggcgtcatttacttttgggtgccaaacgaagagcgatggacagtggagctgatcaatgatcggggattcaaagtccgtcaatttttatcccttttgacgaaaattgaaatgccatgtttaaggtccgtgacttcgattggagtccgagtggggcgtcagcattaatttgttatgaagacaattttgtgctaatcggtttgaatttggcagtttttgtatttttggttcctttttcagtttcgtcctccggccaacgcatttggtccaacactttccttttctccattctctgcggcgcgtgggcccccaattcgcaagaattggtcatcggcctcagcagcggcgttgtccatgtgctgaacgaccagggcactttgatcactgaacgcactctcttccaagtgggcgtccaacgggcggccttttccccgctgcgaagtgccgaggcgcacggagatggcaaatggactttggcgtgttgttcggtcggtctctttttcatttacgaataattgtaataaccaatgataacatttgatttctgctggtaaaattggggtttcaatgccaaaaattaatcaataattgcttggttcggcttctaaaattttatatgaacaaatttcttatttcatacagaaaaataataagtcgatttctgacacattaaatagcattcacaattctatcaccgattcacataatattttggacttttccgtttgggggccgcacattcaaatttaaaaaaataacaacgaatgctttgaacattcgtacgtttcccatattatattaggaaaagtaccaatattttgtttgacatgctaaattctcccaaggaaaggaatttttttgtttttaatttccattttttctcctcaggccaccgatcagattctcttcctgaacaccttctacgaggttgagctgtgctcttggcaagcgccggacccggtgatttcgatgcgttggagcagtgacggcacaatgctcgcggtcgtgtgcagtccgaatcgcattgtcattttggactacaacggccgtggcattcactctttctcggcacccatccccggcggcactctctccgcattcacttgggcgcacagcgatcaggccattgtcgtgacggcaaagggcaaaatcgccacgggccgtttggtgcgccgagtgccgtcgctgtcccaattggtgtcctattcgctgtgggaacagttgggccgctcctccaaaggggtggaccatcttccgattccgaagagagagcgcaaacagatcgcccagtttgaccatcacatcatccgagtgccaattcacacctttgacttcattcaaaaaacgctgtttagtgccgtgtccccgttgctgaacgtctctacgacgtggtgtgtcagccgagcatttggcgttggtattgcaccattgtgccggtgacccgtaaaaatctctacatgctttgcgtcgaggtttattcctcagtttgccctcctccatccttttgcgctctcttcagcacatgggcggtttcgtgccgattctcctcggtcgacagaccaaccgaattattccccaatttgttatttcgcttcctgctcatttgctggcaaagtgccgtcgttcctccgacatttcgcctcaattcgtcgccttttcccctcgtccgtccgattcgtccgctgttcatccagcagcagcagcaacagactttcatcagttgacttctgatcattcgttgccattcgttagtggtggttcttcggcacaagttggtcagtgcatttttatggcattttgtaatttttcggattttttttttgctgattttcgagatatagtccaatattctctacgcatttacttttgtttttgcttcagaccnntgcaggcanntgcaag

SEQ ID NO: 20044 - DNA, 2564 bp, Heterodera glycines
  unsure (1)..(2564): unsure at all n locations
gaatgtcagtgaattggcctccaatttttcccataatttgtccgaatacttggttcgatgaagtcagtcaggtcaaccacattttaaacaacatggacgaagcagaattcatgcgactgacaacagagcaaaaatggcagaaaattttcagcgttcattttcccagtctgtacaggctcgtaagcaaattcatgtcaattcccgtctcaaatgcatttgtggagagagtgttttcgctttgttcggctcaatggacagatgtgcgaaatttgttaaaggtcgacacagtgaagtcattggcccaaatgaaagtcaacttcggtttttcgtgctcagaatttcacaaaattcttatttctaacaaaaaaaattactcaaatcgatcatggacaatcaaaaatataacatatgaacattttatacgtgttttgaataaattttgcaaaatgaggctttttgacgcacaatgagtcttttttgcctgtcaaatgaggctttttaaaattttcatctggcaaccctgttttagaatgatattatttgatttcacaatttagttaataggtaaattttcaaaaagtctccttaatttaaataaataaagatgactaaaaatagaaaatcgagattttgatttattgggcataattctttttttttgaatcttcaaaattttctttattatagcacaacatctctttgttccgtttttaattgtaaaatattgccattttcatgcataaaaattgcgtgccgatgtcgtcgaatgtgagcaattcgccatcaacaccaccaacaaactccgtgccacaaatacttctccaacagttcggcaaggattttgttgcgggcgctgtggccgcttgtgttgccaaaactgtcattgctccggtggagcgcgtcaaactgattttacaagtgaatatgcaaaaactgtgctcaaagagagaatccaatgctaatagtggataaaattaccataaattaaatatttaaaagagattttcaggccaattttcaatgatccctttttttaaacggtaaccgcaggcaaaaccatgttaacgcttaaaaaaaggcaaatttttgtatggacaaaattcgaaaaattccattgaaattggtggccgacgtgccatgccgacaggcgccatcaaaaaaaactatttttttgaacgtttcctcccgcatttagctccaaactgcccagcggaccatcgcggccgcgtcccgctactccggcatggtcgactgtttcgtgcggttgcctcgagagcagggcttcctctctttttggcgtggcaatctgtccaacatcgcccgggcggcgagtcaggcaggtgcgaagagggccaactgtgtcccggggcaagtttaagaagccaccaaatttcatcatttggcatcatgcgaaagtctccttaacaagccttatatctctcaagaaatcacaaggatttgtcgccatacaaaaaagatatgcataaaatgagcaaaatttcttgaatttttacggaatttcatgttacaattttttaaaaagttttttattcgcttaaaatagccttcggacctccattttaccttattttttgaaaatttaaccacaaaatctaaaaataggtcccttttttgacgaaaggcggctacatattcctgttttttgctctccggcgccggcaattttaaaattatgcgggaaaaattttttggttacggacctgatgtcaagatgataaaaaaaaagatcaactgtcttgagaaaaaaaagtcatggcttcttcaaattgcctgggcttggttggcggtacagagttgccatcgagcagaagacaaaccatttctgaacaataccaactcacngttttgacaatttataaagtgccaataattttgggctaaaaccaaattttaatttttccctttttttgcataaaatttgggctcctggaaaatgtctcctgtttcgtaacaagtcctattaatagaaatattaatttttaaggactttttccgagtccgttctcttcgaaaaacttccatttatcccttttttcataatcattttgtgcttttattaatattccatttcgctttttaggagtcgcttggcatggcttttaaggagttgttcaagcgttggtgtgtcactgagtctgatcgctctgtaaattatcgtcgttttgttgccggttggtcgggcaaaaaatatttccgaatgtctcaatgccttaggcaatttgttggccggcggtttggccggaagcgtcacctttttcttcatttacccgttggacttcgcgcgcactcggctcgctgttgacatgggcaaaggttgacccccagctccattctcacaatcagatggcactttttattacgggacataattttgcagaaatcccggtcttatgcccgattttggagaaattgaatgacccatggagtccagcaaaacgggactttttaccgctggtttcttgttcacaaacagcaccattttcgaaacctattcctccgtttctgcgttaaacgaaattccggcctaagttggttaatttctc

SEQ ID NO: 20045 - DNA, 691 bp, Heterodera glycines
ttcctatttttgcatattgttgaaaaaatattatccgcattcaattcaacatttcaaaggcataaaaataaaaaaaataaaaaatcttaactcctttttcaaaaaaaaatgaaaccttttttttatgaaaaactttaataattttttttatcaaatcgattttttaaagtttatcttatttttttatttttttttttaaattttgtacgctttgcaaattctccactttgcctatacataattaaaacccatcacaacgaaccatggttcaaaactgatttttcccatttgcacgcaattttttgtcatctaattaatgaagaaattattttttgtttcattttgtcttcattttcaaattcttagaaatgaagtatgaagccacgggcaaaaattaaagtgtaaaagccaaaaaataaatgaaaaatatgactttcggctaatccaacaattttgttagaattcgttgcaggtgctagtgctgtccgagaccaaaaatttccagagactcgagactgagactcgaccccgagactcgagaccgagacccaaaaacccgagaccgagacccaaaaccccgagaccgagaccaaaaaaagccgagacccgagacttttttcaaaaaaatttcttattcgcttaaaaattgttaaaaatatttttttgcgtatttcttaataaatttttgttt

SEQ ID NO: 20046 - DNA, 1631 bp, Heterodera glycines
  unsure (1)..(1631): unsure at all n locations
cccgagacttttctcgagtcgagactcgagaccgagactctcggacagcactagcaggtgctaatagaggaggacacggacaagggcgtagctcccagacccttggctttgtggggggggggggactgaagtcaaaaatttggtttctaggagtgtatttttcttttttcagtcaattttaggggtctattttacaaaatttttagccatttttcgccaaaaaattactcacctttttcaaaaatatggtaaaatgggggtccggcggtgccgataggtgccgccggcgcaaatttttgagtattttaatgcaattttgttaagaaattttatatggatttcactttttgcaagaattttttatggtttgctttggtgtctaaatgcaattattggcggcattttcacaaaaaatattgaaatttggaattttcaaaattttgttcttcaagagaatttaagtgtcttttgattttttgttaaaaaattataattcgaaatattaaccctgtatttggagtaactcaatgtaagtaaaaaatataaatattgtaataaattaaatttcaagattttgtcatttcttttctccatgttttaccaattaattaggaaagatcatttaaataaccaaattaaaaaaaattaaaagggaattttatttaaaaaaatttttcgtatataaatctaatagtttaatttaataattacattcttttcaaaatatatgggcttttattttttgttaatttttttttttgttattttaattgaatcattcaatcaaaaaaggatttttatgataaaatagaaagactcaaaaatatataaatttataatttatgaaagtaattgcatgagaaaagtgttaattgaatcgttttttaacaattttttaaaagtcatacgaataaaaatggagggatataacatacaataattagaaatatatgatttttactaatttttttcaattttccatttatttagggtggacggagagattttcaaaaatgtagcaatttgtctgtcacttaaatacggatttttattcttcattttataataatctttcattttgctgattttctctttattcgaataaactcctaaaaatgataaaatatttaattaataaaattaaataatatttacttttgctaatttcaatgccaaattcctttttccaagtgcttaatgttgttttgccaatgcccaacgctttcgcaaattgcttctgttttcctctttttgacattcttttaaactcatcaattctttcaacaaattccctctttttcttttcataataattcttttggcttctttcattttttctgcttaatcctaattgttttttccatttgtaaattttcattcgtgaaagtcccaatttttctgctattttttgctcaattttaccacggccttttgccgaatattttcctcttttcttaattccttcttttattgcgtggaatttacaaatgctttcatatttttgctgatcattgaattgttcgttgttctgatcattgccaattgaatcctccgaatttaattcattttcatcattttgccaatttgaattttgaatatttntccatccttggccaaatatttcagcaaaa

SEQ ID NO: 20047 - DNA, 1809 bp, Heterodera glycines
ttcaaatttcaaaaatttctaaaatcggaaatttctgtgaaattttttgggggggggggtggaaatttagaaaatatgaatgaatttaatacctcttcagctttagaaaaaattttttcagttttttgcctttcgtaattatcgaaatttacaattccctcctgcgtttaaaaatctcagaaataaaatttttcaaaatttctaactgttcttcattcctctaaaatttttgagctttctttttttcccataattttcggaatttctaatccccccctggaatttaatttttctccaccctttctaaattttttcggaaatttcagtttttcactacctctctttgtcccctcttcaggatgcccattttcccgtccttttgctccgcctttgcaccctccggcgtcgttttgtttcctccgccgcagcgacggatgacaaaatgccgacaaacaatgtgctggtcgggttggcatcggtgcccaactttttgctggtgccgtcctcttcgcctcaaaatgggccccttgtggaacgaatcatcgaatttgttcaccgaatacggtaagccaattgggatacactgtcacgggttacggtgtgtatgttcctatccgatagtgttggattactataaattggattactgtattttatttttattttttaatttcagcgaagcccaaccgcccgttgagttgtgccccactgatcgtcagctgtgagttttttcaatttgtataatgtccgttttatcggtggtatacgataatatcgtgcagtttcgcccttttctaattcgatctctactattattaataaagtttcaccataatatttcaatgagttccaccccctttttgcttcctttcttttaccgtatgcctttctcttactgtggttcattactatagctcatgtaatacatgtattacaaataaatcaattattgagtgcctttaacagatcgctcatcgccgcgctgtgtttgtgccgttccgacggtgccggtgagcatgccgccggtgcgatgatgagcgcctcagtgccgaccgcaacgagcgatgacggcaccggccatgcccagctgcagttggccatcgcacgtcgcattcacgaacgactttggcaggtgtgcaaactgagcatggcatttttggatttttaatttttttggaattgaaatttttaattggatttggaatattttttaaatttaatttttaatatttaattcataatttaaatttttaaagttggatttacaaattataactttttaaattaaatgttaatttttaaaatttgattgatatttaaatattttaaaatttgattgaaaaattaaatgttttattttacaaatttaaatttttaataattcgttttaattagtttactaataaacatttccgaggttttaattattttttcattttaagggtttttaaattgtgctttacactaatcattctaatgacattcttaccgtaatcggaattgtaccgtaataataatttgccctccgtacagtcgctcaacgccaccttggccaccgatctgctcccatttggcccctcgttgcttcgccgtgattccatggaacgccaacatttggccgccatgttggaggcgttgcgccaactgcgcttggcacatcgccaatgcttggcacacacaaattgttacaatgtgccggccgaactgttcacggcacaacgacgaggcgagcaaaaaaagagcaattaattttaaaatttcaataattatcattttatattttaaaaaattttggaataaaaaaaatta

SEQ ID NO: 20048 - DNA, 2526 bp, Heterodera glycines
aatcattaaaatttagtaaatttaacaactctcgtgcttaaaaatttatattttctttaaatttaaaaacctggcaatgttattatttcgtcaattcttagtgggtttaacgtagagttaaacatgtatttgtttctgtttggacttagtcctgaatacccagcttagttgggcccgaagtatcaagagtcccgtctaattctgtttaactcataaaatttcaagtctttgaacagaccgagcattgtaatgatagacaatacaaatgtatgacattgacaaagaatgaattgtaatgagtttagcaaaataagcatggttaaaattgaatcgattcataacttgtttcaatttaatatgctttaaattagatgtttgcaatttatagacaattaagaatatttttaattttagtccttaatttggtgcccaaacttccgcctcccttttcagccccccccctccccttattttttaataatttctatatatgcgtctttgaaacgagcgcaaattattaacaatgtaacttaaaacaattttcaaactaaagcaggaggacaaaggacaatcgacgcttaaaagccttccgactcgtcaatatttggacatgaccattgtgccaattttacttcaagctttgagtggttcgtttcccatttattttgggttaaatttttagtctgacaatgagtagaagggtatctgattcatttacaattttgcttctcctgaatactttacacaaataaaagctctattccctggtgggtttttatctttcaattctcactttttcaaaaattttttataatcctgtaaaattatggcaaaaaataatttatttattatttaaaatttctcctctcacaatcagcggcttctattacttttttttgaacctccccctgagaaatataaaacctttttacaacgtacaaagtcgattttaactttttttgatttcagcacttgcaaaagaacgaccatcggacccaatcgaatttgtcgcgaattatcttttgaaggaaaagccacgttttaacggtgcagctaatgcatcagcaaccaatgaacattgattttatttgattgtttaacagtttagccacttgtctcttgaaataggtacttttacatttatgtgacaaaaagcgattttgcccctgattttcgaacagtttcagagcagatcaagaaaacttgacttgctctgaaaattattgctcaatatttgaaaaaaaaagaatctgaacctggttccatattgtacctggatttcctgacaaaaacacagctctaggaaacatccaggcttgtcatggcttgaatccgtgcatggactggattttttgaaattggttatcagaattaaaatttctggggaccagggggttcggtagtgccgaagggagagggggtgtccgaggcctcttactattgttcgtaaccttaactgtaaaagtatcttggaacaaagtaatcaaatcgtgagtaaattgtttatactaataatgcggttactggggaaattctttgaaacaataaataactaacgttttagtgcataatttaaaaaaaaaagtttatgtacatctttttgtaattcgccaatggataaataatccgcttttttgttcgaaaatttaaatgagaaagtaccaatgttacaaaaaattacgatgatactgtagtagccagccacctttttaaaaataatttaatgctatttgaaactgtttaggtggatttgattcttttttttcaaaaagggggaacaaactacagtcttatccaatagacgttttatcttgattctcaattacttttgactgtgttggggtcagagcaatatgacaaacagaaccgtcattcccattctgaacaggtataaagtattgtccattggctccatcatataacaattgcacgggttggtggcttgaggtgatcatcagcgtttgctcttgctaaatacaaaatgtgttttccggtagcaataaaaattgttgatgaattactgtggtaattcacaaaattatgtgagggaaattataaagaatatgcaaatattaccaaatatatgtcagcggacctttcatcgccacgattcattgtttgaatcaaatggttgtctgaattcatgatcgacgttgttgtctgacagctttgtaacttgtttgctataaaaaatgaattagatacgggtaattaaaaagagatatagtggtgcagctgcacaccatcctgaatttctaaaatcacgcttataaaatctcttcccggatctttccatgttttttttctgagcttggagtctgtaggttagcagatgttttcaaattacggtaaacaatccacagccaagcggatttgaaccccagacgctcgcctcgtattgaccccctaacaaatataggatcaaaataaatttcaagatcgtaaaactaaaatgtgacttctccgtataaatatttatagatgcctatctgtttatataccttcttctatattttttcaggacct

SEQ ID NO: 20049 - DNA, 929 bp, Heterodera glycines
  unsure (1)..(929): unsure at all n locations
tatacaaacgatagcattgtccaggttgggtccgcccatcacgacctgctctttgcattgctgaggcttgtgaaattggcgtaaccagaaggctctgtgatataaaaaattaatatacaaccaaattcatgttatacaaacacaccaaacaacctacttacatcaacacgaatttgtggattgtaaattttttgtttgcaaaagccagtgtcaacaaaaaaaggcaataccatcaatagtaattgacgtttcggcaacattggtagcgacaatgcatttacgatctaataaaaaaagttgcgaaaattttattaagactatttattgcttattactgatcaatgtgttatttttgtttggaatgcattgttggaaaacacgttgttgtttgtccaatggcattgaggcatacaaaggaaaacaatactgtaattaaacaaaagggaaaataaataaattatatatatatatatatatatgatatttaaaattatttattactaattgtccatattgtgaaactgtctcatcggtcatgtccttgcgaattagccgacaaacctttcagtctccttaaaattttaattaaatattctattcaactttcaggtataaaatgattattactttttgaccagtcacaaaaattaaaatatccccaggacgcctttcagtcaaatggatttgcaatgctgtttccaccgcagcatgtgtgtagctaattactggtgttggagaatactgaattanaatgcttttattgtgtgaaattgttgttgaagaattttacacgcaaacaaatttaccaaaatgtcaactggaaatgtgcgccatcgaattatcagcatttcacaatattttaaataatttttggaatcgggcagaatccaacgtggcactcattaaaaatcagcttaagctttggacat

SEQ ID NO: 20050 - DNA, 1730 bp, Heterodera glycines
  unsure (1)..(1730): unsure at all n locations
caacttttgggcncaactgaagatatgaacaaattattataatgattatttaaatggttctatagagtgcggcaaaagttcttctacaatccacttttgtaagcaaaatttaagtttaaaataattaaaccatatggcaattccattttataaaaaaattacataaaaagacaaagtagccattaatttttggaagcgtttggacgcatgtattttcgcctatgtggtaactacaatactttgaacttatgatgtaatttctagtaactaacttcttattgaatgatattgctatgcatttgcggttttctttttgttttgagctttaatttttaatggaaaaacggattgcaaaactttggccacattctgtatatgctttttaacgtacagaaacatccatttcctctgcaacacggtttgccacgcacgtcgcagccagccttcgtggctgcgtgcaaatcactttttgtgctgtgccgtgaacaaaatccattgcccattgtggaatttgagtggttttgccactaccagtttctccaacaattagcagacattggttttgtgattgtaaatgttgaacaaattgctgttgatatctaactacaggaagttgccttcgggtttcaagcactcaaaatatttgctggagtatggacggttatttaagggattaatgtgggacatttttgctaaagtttttaaaaaatcgttaaattcgatattaagttatttagaataagaaattgtttactctattctacgggccgttagcttctccaataaatgcatacttgatatgtatttattgggtactggacttgcacaccgcgatgaggtggcccttttgtgcaagacctacctatctaactaacagtatataattgtgctgtacaaatttgagaaattttattaaaaaaatttattgaaacacaccactggggagtaaggactccgaccaagtggtgtgaacaaatagaaaccacacaattaaataataaaattaaaatttgaaagaaaaacactacatatataattaaccatattctaaaaagtatggtcctgattctttttccttttacgccgttcaagcgttttcaaattacgtttacgatgttgctcctcaagacgcgctttttttgcttcttccggatattctaaattatatttctaataaataaatgtgtttgctagataattattttagctttaaccataatggtccaaaaattctttttgctgctgttgttgttgtggttgtgactgctgctgctgctggtgctgctgcacaagttcctcatcatcatatgaatgtaaattgatgtagaacctatattttgtacattgttcataaaaacttaaatgcttattttggctacccgacatttaatgacctgacatttgagtacatacacaattttataaaataaacttcatcacataaattcattcattctttggacttaaagtcctaataagttccatgtgtgcatagaaaaggggcaatcttctagcattaccatgaacacatacatgttcaaggggaattagagcaggacggggactagtactgaaaaaagcgaacaactgagtacctaagtcccggttttgatcagttttgaccaggaccggactattcgcggttttttcccggttttgacagccaaaaaatcccggtttttcaacacgataattcccgctaccggtttttctcaaaattcacggtcccg

SEQ ID NO: 20051 - DNA, 1851 bp, Heterodera glycines
caaatttagggacaaagtggggtcaccaattgatcggatcaaatattggatgagaaatcgtctgacaattgaaagaaagaccagggtaggctctcttcaccaaccccgaaattcgacatgccaaatcatcaatcgattcgttgggttttcgtcggacccctaacatcagctcatcaaaagcattcaagttttttgagtccgtttcctccaactgtcgcatcatttcaccccgaagcagttcatactttatcggaatgactgctttcgccacttcaaaagctctttcagctcggccatacactttgctttctagtcccttaattcttttttcatccggccaactgtcggtgtaagcgtcgaattttttgaaaaaacgcttaacttcgtccgtcccttcctttccgttgaggtctgggatcctttcaaggaccatattgtactccagactacttaaaaccgctaaattttggctttggggtggcagcatttggttttcgtaattcggaaaattttgctgttgtcgcgccaccggacggtacaaaacactggtttgttgctgccatccacgctcttctcttggcggttgttgatgcatttgcctcggcatctccgttgggtgcatcatccgacgcccaccctcaaaaatatgtcgtccgacgaattcgttgtgttgccgttcgcatggcaaaaagccgaagtttgcgttttgttgttgccgcgctaacgcaggttgttggcgaatttgaatttggctggagcgaaaattttcatgctcccggtaagggccaaaatcctcataaatttctcggtgccggatttggttgtttacaattggaaagttgtgcaattcgccattaaaatttattggcgtcgatgtacgcccaatgagttcgctttgcgaaacatgacgcgaatttggcgccgtttcccgaaccaaatttctgttaatttgctcgaaacgcctattttcggtgccactctcaacgaatctcatccttactccttcttcacgcaccaaaaagcttccaaaatttggtcgcaaaccttcaacaaagtcctcgtgaccaacattttcattgcgaatttgctgctgctcggcgccattgttgccaccaccgtttgctcgcggcggcaaattcgattggatggacacatgcaaaaggcgccgccgaatttcatcgtcatttgctgctgctgctgccatttcactaaaatggtgttcgttttcctccgccgacaaactcaaatttcggttaagtcctggcgagatcggagcgttaaacaatggttcattttcaccatgaactccttcaacctgttgttgttgctgctgctcttcaaccgctgcgttttggttttgcgcaaaggttcgcaaattcaacgctctttgtcgtgtcaatggcggcgaacgaattatcatttttgcacctggctcaggtttagcaaaaacaaaacaaaattttgctgtcggcagtttttcactttttcgtttgatggcgtggcgattaggacggtgaatagtacggcgaatgcgaaagttcggctcgaatttgttgcaatttgaaaacgttcgactcgaatcgttttgttgccctttttcctggctcaggacttttcaactccactttcttcttttcttcaaattcaactccaacttcttttcctccaacttcactccaacttcttttcttccaacttcactccaacttcttttcttcaaattttgaaatttgccctggctcagggtcaattcaaattccgttgattttgttgtccggttcggacttcaaacaaaactacctaattccgatctcgcctttccccgttttacctgctgttcctcaggagcgc

SEQ ID NO: 20052 - DNA, 2898 bp, Heterodera glycines
  unsure (1)..(2898): unsure at all n locations
ggggatctctagagtcttaaatttaattattatttaatttttntggaagataacctttacgtatcctctatattatattataattttaaaaaaatcttgcaaaaatttacaaaaaattataaacaaaaacttccataaaatctatactcaataatctaaccctaaatttttaaaactcgataaattttttttaatttaaaagaaatttagagacatttttaagctatctaattatatcaaaattgatatgaaataattaaagtttgaacaattttcatgcatttaaacgacctcatattttttatttttcttgaaagtaaaaaatgctggtttttcggaaaatttaatcattctccgaccggtccggtccccaacttttgccccagaggagcggggcgcaatcctagtccgaaggatcgaagtcggaaattaaatacaaaatttcctacaatatttcaaaaaaaaatcattcattgagaaatgcgaagattttgcaaaactcgctaattttctttatttttttttatttggtatttactttaaattgaatttttgactgcttttgctttanatgtgaaaatttgtcatcaatttgtagattttttttcatcataaaagctaaaacctaattgttaaaatttgagacaatttcacctcaaaatcacatatttatgcgcatatttcttcagtttttgcgtttataaatcgtctgcctaacatcattaattttcaatctatgatcaatactactcacagttcaattgtttcacgagttaatgaatttgtccagcgcctcgcttacattcattcgcctataaaattggaaatattagtatattcaaatgtgatatccaatgttgtcagataaaaattttcaaaatcatcatttttcaaacaaaaaatcatcatttgggggtccaaaataagcattttggaaaattttttcaaatgaagaaaaatcaataaaaaggttttttacggcgcgtttttttccaaaaactttttgagaacaagggtccggcgatgtcgttaggcgccgccggggagaattttgaaaatttgagtgcaatttgctaaaagactgatatctctggtttttgtcattttataattttaaaaaatcgttattttttcagaatttctccgtcaaggccaagtaaaatagaagaaaatcgtaaaaatgatatttttgtcagttttttaaaataatatacacaaaataatcattcaagaattttccctgaccgcgtctcaattacgactaccgaaattttttggaacctcggaacttcattcctggaaaccgcctgacccttaaaccctttcatttttttaaatcatttaaatattttatcggtttgctgcgctttttttcgcttacccctttgatgtccagctcaattttgaccttcacattctgttgatcaattacacattcaaatttctggttgttttctctcctcctcctcccgccgtttgtccaaactcattaacctttaaatggagttgctcattttccgccgtaattttttgaatgatttcgtccttaatttatatgcaaatatagatatttaattgatgctaatttaatgggggaaaaatatttcactcaacatttggtttaatatttttatttgctatattatttttatcacacctgtaaaatgatttgcaatgtcaaagacactgtgaaagactcccagaaaatacgcaagtgatacagaattttaaaaaagaaaatcctctaacacaatatattgaaaacataaatggtcaanatataggggaaaaagtatctttttataataaattattagcactttggcaatattctgtaaatggagctgttcgttttgagatgacattttttgcatttgcattcgcatttccgttttttcgtcgtcatttcgcgcattcatttcatcctaaattaatttgttttgggttactttttattttttttatcaaaatttgcaaaagttttgcacattttgctgtcgacttgcaaaaagcgtttcatcgtatttcattatcagacgtttgttggcatcgcatttaatcccattttcggtacacaaaactttttcacaatgaaaagcacgttttgcccattctttgctctgaactcaaagaagtttggaaaaaagaaaaataattttattgtatttttacttttggtgttggcgatttaatgtcaacacattttctttggcactcatcggcaaaaattttgacctaaattaaggaaattggaattttatttaattaagcgggtcacaaccctagtcggcaccaccgtttgtaccacaaaattctatatttttaaataattttgaattctctttatatgaaaatctgcaaaaaatttttgaaaaagtgtttttcattctttcctcattccccgttcaccgacatataccgaattccccttcctgacgacgggcaagtaaatttttttttgatttttatttaaccttttccggcttttcacaaattggatgaattggtgcaaaattcggagccccatgcttttgctgtgaaaatataatgaataattagctattttattaattatctcatataaaaatcaccttttgtgttgtttttttgttggtaagaacatttttaaggattggtttggacataacactgcttaaagcatgaaaaatcattaaaatttaaaacaatttaatataattaatgtctgattacaccttaacagaaaataatgagttggaacatttttaattagccaaaattcgcgaattaaattcaatgcaattttgataaattgtacatcatgtcatcacatcctttgcattatcacagattattattgataaattaaatttgtaatccgatttaattgattaaattaattgttttattttgaatttg

SEQ ID NO: 20053 - DNA, 1207 bp, Heterodera glycines
gagtaccgcaaacggaaaaaatcgattttttttgcttttcgggcagtccccccaaaccgatccgcccagatttatgggagaccgaatccttcgggaatagcttccctatagcctgtactttaattctgcgttggatttttgctccccataattgtttgagtaccccaaacggaaaaaatcgattttttttgcttttcgggccgtccccctaccgatgcgctcagatttatggggagaccgaatcctccgggaatagcttccctatagcctgtactttaattctgcgttggatttttgctccccataattgtttgagtaccccaaacggacacttgaaaaaatcgatttttttgttttcggtgcagtccccccgaaccgatgcgcccagatttatggggagaccgaatccttcgggaatagcttccccatagcctgtactttaattctgcgttggatttttgctccccataattgtttgagtaccccaaacggaaaaaatcgattttttttgcttttcgggcagtccccccaaaccgatgcgcccagatttatgggagaccgaatccttcgggaatagcttccctatagcctgtactttaattctgcgttggatttttgctccccataattgtttgagtaccccaaacggaaaaaatcgattttttttgcttttcgggccgtccccctaccgatgcgctcagatttatggggagaccgaatccttcgggaatagcttccctatagcctgtactttaatttctgcgttggatttttgctccccataattgtttgagtaccccaaacggacacttgaaaaaatcgatttttttgtttttgggcagtccccccaaaccgatgcgcccagatttatggggagaccgaatcctccgggaatagcttccctatagcctgtactttaattctgcgttggatttttgctccccataattgtttgagtaccccaaacggacacttgaaaaaatcgattttttttgttttcggggcagtccccccgaaccgatgcgcccagatttatggggagaacgaatacttcggggaatagcttccccatagcctgaacttttattctgcggtggatttttgctccccataattggttgagaaccccaaacggaaaaaatcgatttttttttgtttttccggccgcccccctcccaatgggctcaaatttattggggaaaacgaa

SEQ ID NO: 20054 - DNA, 1683 bp, Heterodera glycines
atttttatagaattattagggcacattaaacgatcgtaccttcctagctactgacagggatggagctcgtctgaaaaaaggaaacataattatattagcaaagcattagtgtgattaatttctttgggaaatacaaatgcttatttcattattttttataaagagtaatttcactcagatttgtcattttaaaataaaaaataaatgttagtttgcttttgattttttttataaattcaaaggaataatagtatatacatttcagtcacaacagaaacctggattttaggcagtgttagttgagttttccaaaatgcattacatccccagtttttgtcgataaaaaatctgaaaaatcggggtagttcgaaagaaaaatttattggggttagaaaatattttccatgaaaaacaattgggctcatcaaaatacaaatgacattaggatgattgctatactgcgattctcctctgaggagtgctttgtgaaacacgaatgacaaaaatatggaaaaattattaggtagatgtattttaggaaacaaataaataattaaaataatttaagtaaaatattaataattattgtattactaccattaaaacctataaaaattgctacttacctctccactcagttggaaaagatgaaattcttcgctctggggttgtcttataagcaattccttgattaacagaacatcgcgaaaagtttcattcatttctagaaaatttttcattatatttcctttaaaagttgaattttaaaaatgttcttaatttcttaaatatttttaagtcttcaatatttttcttgaaaatttctgcctgagcaattgcttttatagggagcttaagctggccagcagcttggtggtctcatatttttgtcctcttaccttacctctttattctgtcgatttctctttttatttattcagctcttttcacgttttcgcacattatttctcattgaatctgcttcgcaccattctcttttcccctattaatttaaaattctgaaatattaatcttaaaattatcaattaatcagctcaagtaatgataattgttgcttattagttttccagaaaatcagctttacctaccattattggaatgcttattgggctgtgagtgatgcttcaaaatattagtttcattaaatacttttggtaaaactgggctgctgaaaacacattgacatattttgatcatcaaaattacttgtttaataaacaagaaaaaaatacaaatgaattttacacccaaaatatttctatattacttaatattaatcaattatattaacatatttaaccaaaagatttacaaaaaaaaaattaattatataaattatataattcattaatttgatcaaaattattaaaaaagccgattaatacaaataaattaaagaacattaaatttttatttatatttttattttgagaaagattttttatgaagaaagttttataatatatatttatcttttaggcttaattatacacgtgctgaatgtccttgaagttttcaaggaaattttttatttcataggggtattttttttcattgctgggcgacgatgttttagtcaaattaaaaaaataatgtcaataagcacaaaaaagcataagattttatgcttgaattacataacaaaataataaaatcaaaaaa

SEQ ID NO: 20055 - DNA, 2185 bp, Heterodera glycines
aaaagtaattcgagtaaatgtaaattggacgtcaccccggccccgctagtggtttgtaatcgcgggcgaaacgtccccaccattccctgactccaccccccgttgcacagacaagggccatctgttttccacatatcgtgttgatgctgattccactttgttgattctttttaatttttaaatctttttatgtataaatttttttaaatatgtatgtgaagattggcttttaaaaagtgagacaaagctaaaggatgagataaaaataaatccggactatgacgctgctgtactcttgtttatcattttattgggtctttaattttgtaattaataaaaaattattgtaaaatttgttatgttttgccgtttttgtttaattaatgttaaaatactggcaaaaactttaagctaattaaattagtcgagaattttctgaaaacccaaaaaaaaagacgagaaaaaaggtgaagaacactttttccaattccggaatttactgacgatcaaattattggtgtgactatgatatccatcccaaaggcacccaaaagccagaattctaggatcatccatggccgcaattattttctcaaccaaaatgcaaagtccaaagcgcatgatgaatgaattttggcatatattcgtaaataatccaatggatattaggatctgacagatgtttcattattagggccgcaatttttagtgaaaaaacttttttgttgctcaattgttttgaagaaaggagctcaaaatacgcatttctgcattaaaattttttgattctgatgtcactatctgtcactagaaatcactattttggcgacttcgtcactaaaatagttaaaaatcactattttggcgttttgtcattattttttgctatttcggcatttttaggaaaatttattaacaaaaatccaataaaaacgaaaaatgcacccctaagaatcgaacaaaaaattttcaaaaaataaacccctaagaatcgacccaaaaattttcaaaaatacactcctaagaaatgaaaaaattttcattttcctggcaagaattttaatttaaaaaattattttttcggtactaattttgggttttttgcccttcaaaatctctgtcctactcatttgtaactgcaaccagtgaataaaaattatttttgctcaatttttggctgaaaattatgtcactattttggactttttgacactattttttcactattttggcatttttactcactattttagttaactatttcgagatttttagtcactaaaagtggcggccctaatactcccacaacactttttattggcttttttaaactttgagatgtatgaacaaaacggaaagtacccaaaaaattgtgtgcacatcgtttataggtatatatacatacaattagacaacagaatagggagaatacggtctccaaacaagacacatggatataaaagatcacgatgaacaggccacacagattatttggtatcgagcaattgtttacaccagcggtaggtcggctcttccttccttcttccttcagttcttcctacttcttacacttgaccacagccaggacgatgtcgacaagaagaatcctgtaaacaatgaattagaatggacatacaataaatacacggaaaaaaggaagaatttgacccgtgcacataaggataactgtttttgcatagctaaaaagcgtgaaagtcccctatgatcatctgttagactccgtacacacttacacggcgataagtcccattaagacgatattgaggatcgtcatttggaagctgctggtcgagggcggagcaggctttgcggtcgtcttgatagttgggccttcggtcgtctcgccagtcacctcggaggtagtcatcgtcgcgttcgtatcaggcgtctccgtagcgttgatggacggcgtcggcgtaggggtgacattttcgggtgtgttctcttccgcatgcttgagtttctcgttgaatgccagagcgcgttcctgatgacctttgaaggggttcacatcattggcatcgttccaactagaaatttgttaaaattaatgatttacaattagacagaaagtgcagaagcgaatcacttacgctgcatcgccgtttgtgagttgcgccacgaagagaagaacgcagagaatgcccagcagacggaaagacat

SEQ ID NO: 20056 - DNA, 2610 bp, Heterodera glycines
  unsure (1)..(2610): unsure at all n locations
tggtgcattgttaacattattcgcattgctcggggctcttcattcgccgctacgaatccgccatttgacaaacagtcacttgagtgaatgtaacggccgagctgaaaaaggggtgggacacaatgggcaatgaatggcacggattggcacgggcgaacattgcgatggtgccgttggaacacttccaagttgtcaaggatcaggcaaacctttgcaaacaatggagcaaagcattggcgagagcggcagaacggacttaccaagttgattttgtcagtgttcaaaaggccgccgactccgattttggacgaaaagtgatcttcaccattgagatcatgcaaaaactgaacagggaaccaatgaacggccaaagaatcgtcggatggtcaccttaagcttctcagtctctccgtcgtggccaatgatcagaaggcttggcaaatcattgacaattgcgtacaaatcgtaaagaaaagagccgaaaaagggaatgacgcgacattggggcatccgaagggcgcgttgcattgcctaaggcaccatttgcacatttcaaaattggacataacggcccaatcaattttggtctcccggttaaagttttgatgaattgcccactcccttggccacctcaatgtacgccgggtggggcgtccaatgtgcggttcctccgccattcatttgctgatatgcgcaaccattcgttggtatttgattttgctgcttttgattcgtcggtggcaccaaaatggccgcaaattcgtcgaagcgttggcgctcctcctgcttcaacgaaagccaaaaggggcgcaggcggggactcttcaggcccagcagaatttcaatggtagcattgaaattgccaatgttccaactgaaagaacatgggtttattaaaccggcttctctagcacttcggaccaatgttttgccgttgaactaaccgtcatttgccagccccccaaggcaaacattagctaattgaccaaccacgtgtccatcactcgcataatcgccgccagacagctcttccgctcttcgtgcgtcggctggctgatgatgatgtgagtgatccatgagctaacttctgacagtcgcttcaccaaattcttcaccggacttgggttgtcctgggcactgatgttggccaagtcgcaaccgacgaaacngaacaaaatccaaagctgcaaatgttgtagaacaactggtactccgtggaggagagctgaatgaatgcaaatgaacagcgaacaaaagtatggtgttttaagtgatcggagtgtgatcagacagagatcactaatcaaccctcagagaggtataatcatcattataatgcgattgatcaaaggcattttggtcggaatatgtgttggtgtgagcatggcaacaactcctgcttctgttgggaatgcgttcgggtcgcttgcctgaaaggcgacttcctccgggaagtgcaggatgtactgcagccgttccagttccagcctgaacaaagtgatcggctcagctccgcagagaattccgcctgcactgttgcggatggatgagcaagtggtggaggaagagtaagaagtgttgcgtgaggaacgggaggcgtcgttgccggggatggcggactgatcgaacagagactgactgggccgagctgatcggttgaagatcttgtgcacaaacagtgtggatcgagcttgcatgatctcccacagggtcatggagattgatttaagcgtggtgtaagagagtgctgaacggaggaagggacattctctgggtggaggaggagggaagagaagggcactccctgggggaggagggaagagaagggcactccctgggggatttataggaggggttcttcataattgatttaactgccgctgaaattatccaattttactaaccgatcaattgccatttagtgccacggaattcaagcagaagctaaaaaatgaaatgtacccaatgcaaactcaacagttgccagtccctcccatttcggcggggggagaaggaacaaatcccaaaaactttcgcttatcaaaattcaaattttgctattttttaaaatttgttttttgtattcgggggggggggagtgaaaagcttttacctagcgtagtcattcctcactttacccataatgaatctgttacaatgagttcgccatcccctgaaaattgcctggtgcttcgacactcctccgcccactcgccactgctgcagtgtcgcggcgtgctgtcgccgaagtgccaatttggtggtgccgtccaacagacaaatggtcgaactgctcagacaaagcaaacgcacagtctgaagaacagcgaattggccaatgttttgcaatttgtgcttctcctcgccctacctttcgcaatgtgtgcccatgcaaaagctctttcacttggaacactttgcagccgaatgccggcaatttctttgccgtcttanaaccgaacgtccaattgtttgttctcccgtgngttcgcttcacctgaatgtaaagtcgcttcatcgcctgttcactttcgtagagttgactgtggaaaagctttcgcttcccgtcctaaaatttgacaccaaaatatcgcttggctcttttgctca

SEQ ID NO: 20057 - DNA, 3065 bp, Heterodera glycines
ttaaatccacaaaaaatgaaataaaaacatttttagccctttaggtgagaaaaaagaaacgagaatttatttacttatccatattgtttttgtttattttttttaattgaaaataactggctctgttcaaagaatgcaaatatttccgagttcagacattatggcgatcggaattcaaacatcctaaatctactctgatgatttggtggtgcctgttaatttagaaatcacaccaaaaatccacataaatgacaatttttgtgcaaatctgttgacgaaacctacaaaatttcttaattcccccttcttttttttttacaaaaatcgttacaaataattcttaatgcccaaaaaatacatttagcataacttgtgtctttctaggttttgattgataaaaagtttagctgattgacaaagtccaaatttttttgtagcattttttgtgggctttcaagtaccagtcgtaggacaaagtaatgtttggaaactgagtgcattaagaaaccaaactttacccattttcaagtggtcatatgtttagctaaacaatttgttttttaaaaatatcaatattttgtgtgccaaaaattttgaaaaaattcctgttaaagtatctagcacacaaaatgttctaccgattgctctttgaattaaaaatttataaatccaaaatttttttttttcgaatttgctttttagcatcaatgccgcggccacgtcaaaatttcaaactttacatgtcttcttacttcgcgggtacgatggccgaccaaaaggaattccgtcagtgaagcattcatcacctgaataggaaatcgctttatgaacacactttctcttttatgttttcgaatagtgtaaaattattttggtagtctgctgatggtaccaataggcaacaccagagaaatagtttaatttatgaaatgttcagaaatttaaagaccagcaaattatcagggatttcccaaaatccaattaattaggtctatactctaaaattggaatattttattttaaaccatgaattaagacatcaatgtatttggcatatgaatttccaaagccaaaattcattcaataatatttctttgtcaattccgtgaattgaatttgttaaggcgctagagagtcaaatttgtatgaccaactccttattagccaagtttaagaagccatttattatttgcgttttctgccgaaatttatcaattccatttcactttatgagtccaatcgattttctgagtccaatctgcagattttttcgagtatattcatgaataatttttatctgttgcttttattcttgaatttaaatctacaaaaaattctaaagactttaaactttcgtttgatatcaagaatgtaggtattgaccaagtaagaaaaaaagttatggccaagaaactgtagatcataaaaattgattcgcctaaaaagtgaaatagaactatttgggttttgtcatcgtgctgggtcgtttcgtaaaatccactagaaaaaacaaaatcatacattggttaaaatttccctaattattagggattccttttttagtcaaaaaataataatcgcaaaatagacattaaataggcacaaaaaaaggcaaataaaatttttaaaccaaaaaatttaccaagaaaaaaaaatttttagggaatcaatttttgggaaaatgtttcaattcttaggggtgtatttctggattttttgagtcatttcttaggatgtattttttataagtcatcatagaaatcgcaaatcaaacagaaaccgcatttttcgtccttatctgtgcgttttaagtgcgaagaaattttagacgcatttgcctaaaaaggaatcctactaattatatatattgttttcaaaatttctattgaatgatgccaagaaagttacaagtctttaaaaatttaaaaaatcatcaaatgtttgcatttggatataaaaaacatgataatttaagtgcttcataactacttcatatgcaatcaaagaaaaatgcccttagtcccatttaatctaggcttcttcaataatgcattaaaaaattccattaattttcaaaaaattaatttaataaaatccgaaagtccgatttttcgcatttgattttaatagcactggcgggtctttatgaacgacttcgcagttttatcctctgctggaattaggattttgtcgcttacaagcgtcagagaaaaatgacaaatgataattgtcgttagactatctaaaaataggcatttgtcgtttctcatttttttcgactaacgccaaatttcagacgacaaatatttgtgcgggggtggggtggggcgccaacaccacccttcaaatttgtcgtaaatgaaatgacccaaaaataaatcaaattattttcacccaataattttgtttcatgttaaaaacatgttccagtcgataattcgctgatcatgaattcgctctcagattttcatcatctatgctttggtctatgatttttcatcaagttatctaagtctatcgaattatatttaagaatggaattagagctaaataaagttaaattcgtaatatgtgcctcaaaaacccacagagacacttttaccatttttcatattttttgtattttatgaaatttttcgttaactcaaaagaaatttagtttgttaattctaattagacgatatttggacgaaagagacaaagatgaatgccaacccctgtcttccctaccgttgtgtcgagcactgtccccggtggacagttttcttcagggggagtagcgctcataaatccacttcctccagatttaacaatgcggtaatttgcgttgcgctgacacacgatgattgtcagtgcaggttgttttggagcagaaaatccaagaggcttcatcatttcactcgacacttcggcaaaggcagtgtcgaatgcttgccgttcccaatatgctatcttcaaaaagtggcgcgttttaaaaatgcgacttccctcactcccgaaaaatacaagaaaaaaggtacttatttattatctggtgcaaagttcaaaaaatttttttatgaatt

SEQ ID NO: 20058 - DNA, 1441 bp, Heterodera glycines
ccccccccccctagataatacgcccttgtcgggcggcctaaatgccatacaaattatttgaactcaatgaagaaaatagcatctttcttcatcatcttttgtttgcttgattttcaaacgttatttcccaaaagtttttcgaatgttttttttttaaattttttgcttatttgtaaaaaaaaatgtaccctaagcatcagagtgaggtcacttgcgtatcttgtctggaaaaaatgattgtttattaaaaaaatttatgaaaaaaactgtccaaccattggaccggcagtggccatttgaatcagataaccgccgtggacgcgcggcaaaatgccggatgatggcacaacgcctggcagttggaaaaaggttaaaattcctttacaaattgagcaaaatgtaagacattcattccattgcataattattaaattgtgttcaaaaccctcaaaaaatggccatttttcacttaaatttttatattttatcaaaaatactacacattttctcaagctccaaggttggtcatttttagaataggttttaaaaaattgaggcctaaaatttcgaaaagcagtgtcttaattgtttggccataacttttttgaaaaataaccattaatcttttgagattttacagactgatagagagagaacgatggcttttaattattacctggacccggcttcaggccgaacacgccgcaaaacagtgccggcacgcgcaacgagccgcccacgtcgttgccgagtccgatcactgagccggccgctgccaacagagcgccctcgccgcccgaactgccgccgggcgtccggcgcaaatcgtaggctaacaaaaaaggattacactcaaaaattgtggggctaaagcctccccccccgccccgaaatgcaaaaaataaattttaaaaaattgggatggcttcggcttacggttgttggtgaccccgtagacggtgttgttcgtctcccaccacagggccaactcgggcacattggtgatgcccaacagaatggcaccggcctccttcagcctgtcagtcagttgaacaaattataatggtaacatcaattcaaattcgaaaaaaaaaattctcgaacttcgtgtcccaattttaaaaaatttggcaaaaaaaactatcaaaaatcgcaccaaatttttaaaagtgttgcctttttcaaaattcaaaaaagaaaataaattaccaaccagaatcattttcatactgaacccagaggggtgcggccggcgcaccagcctcctcgttcgtcgtattggggggcggctgtagaggatgcggggcagaggtatgctacggatactatacgtgtgcaaaaaagtggaaattgcggactgttacctgcacacaacagtaattgttttagaataattatgaaatttaaataaagactgctaattagataatgaataattact

SEQ ID NO: 20059 - DNA, 1717 bp, Heterodera glycines
tctatccaatgggtatataatacatatgcattttccgagctttgctcggaatgttcccttgtcagaataaacatgaaaaagggctgcacagattggcactttgaggagggccaaggaggggaaagaaacggcactctcaaatcataaccaaaaatggacctttttgcacagtttgcgttcctcgtcgttcagaatgactttcttgcattttgtaacggccattgcgccactcattggcatttgagtttcggtcaccaacgacggctcgactaaaatactgtttttgaccgtaaggtttccgctgctcacagaattggatgggactcgccgaagccgacccaacgacattcattttgcgctgtgtcatcgttgcgcctggtgaaagacggcgaaattgttgagggccgttcaaatggaaattcccatcttgtcgaaatgaatccaaaggacttatccctaaattaaaaaaaggatttgcgatttcattaacaaaactatgccataacgaatttagccattctcttagcatttaactagtttctaataaataattttagttttttgtgtaaataggcccacagtttctaccgttttcaaaaagttctctcaaaatgaataaacttgtcacttaccatttgtatctgccattgtgacattctgtctgaattggatgttcgttttggtctctacggattgatccaattgtcccatttcattcacaaatccctgaaaagggttccttccatttagtttcagcattttctaaaactaccaacttggcaatcgattgtttccgctgacatttgaaggcccgtctctctgtgtttgggcggcgttggcggggccgtcgttgtgacactgtccgtctcgtcgctatgcaatggccaaatgccttcgctggaatttgcacaataaatattgtgattgattaagttactataatttgaccgttaaaaaatgtcgaatgctttttggtttacctttctccactgtgttcgttaccattttcgaccattgccatgtcattttgtccgatggagacgctgctctgcgttgccgagaacattcccgagtcgggggacgcgcaggggacagagccatagtcatggtcatgcaaaactgccgtgtgctgctgaaaatgtttacaattgaaatacaaacatttattgtaaaatgtgcttgccaaattctcttcttcagcgacttgggcaaaaagttcttcagtgtcaagaaacgactcaaaacgttctgcttgaaggcaaccgctttcaacttcctcttttctctaaatacatttcttaggaatgaagaaaacattcaactgaccaacacgggcaatttgctatccatcccattgttaattaaatgcctatcagcatcagaagcatattcgaagtaaatatcactcccctgctgatcaaaatcggaagtattcatcgccgaataagaaaagaaaaaggagtcggccaaacagaccgctgaaagaaaagaaatccgaattaaaaaactttatgtacatatgttgaggaaaagcaattcggtaatagtacggatggtaccccccttttcgaaaaacaaaatgtttgaaattttttttcgtgaaaagaccatattaagggttttaagggtcggagaatccgaatctgacattaattttgacctatgtcgaaccccgaacctgaattcgagtaaaagtcgaaaatttcaattttccaat

SEQ ID NO: 20060 - DNA, 1174 bp, Heterodera glycines
gggtaatcctgtattttattggtcccataaaaaaaaagagattaaagttgtttttatgcaattcagagtagtacccgtggggttttcgggggctctgatcacgaatgtgacattaattttaacctatttcgaatcccgaacccgaattcgaacatttttttataaaaaattgttgaaacgcatttcctagggtttttcggggtcgctaatcacgaatctaacttcagttttatctatgccgaactccggacccgaaatcgaacaaaaggagaaaattaatttttcaccaagaatcacatttattgtcccaaacttattcaaatgaacggaatataatagaaaataaagattcaaggccatttagtgaatttgaatcgattttggacaatacatgtgaattttggtgaaaaattaacttccgacttgtgttcgaattcgggttcgggattcgaaataggtcaaaattgatatcatattcgtgatcagcgcccccgaaaacccccgagtattactccgaaatgcataaaaacaactttttaatctctttttttttatgggaccaataaaatacaggattaccggaaacaccttgaaaatttgacggataagaaattccttttcttcgagcgtattcgagtccaaatggtacacattgttacgaattgtcagaataatatcagttacgggctgaattattcttagttttgaaattttctgcttaaaacttttcgtgggtgaactccgtcgaccacgcgcaattccctcaacgcaaattgctccttcttcgcaaaagtgtcgtccttttccaatttgacaatataaaaccttaccgccacgggttgacttattgtaactaaaaagcaatgcataggttatgatgaattacaaaatccttttgttttcatttcgccctaatccaagccaaaccgaccagcaaggcaccaaaacgtctctttcttccgtttggagtcttttttaacatttgccagtcccaataacctttcgccgtcttgttggaaaagtgatttttgtagattcaacctaaatgcagccattgctataagaaacctacggaattttcaaattttaaagcaactaaatattttatggcataatgtttataatttaatcttcttatcacttaccgctcaggcccaccgaaaaacagtactca

SEQ ID NO: 20061 - DNA, 816 bp, Heterodera glycines
aaaaaacaggcgaaaaaaatcattaaaaatgaggaaattttgcacatttctcggccttctaaaagttagattttttttttaatattatattaaagcaattataaatttaacctaaacccctcattatttgttagcccaatctatggttatcatcttttcataaataaatgggaatttgtcgtttaataattttttgctattaatagaaattatagaacaaaaaattttttagagaaatattttaataaaaataaattttgaaaccataaaaatataatataaatgaaatgcatttgaataaatgcgcttatgaatatattagcgtgacctcaatcaaataatactactacaacatattcgtttattgaaatctctttgtttaatataacatatgaatagccttttgtatataataaaaatggcaatattagccgaatttttattaaaacaatcaatataactaactattcaacaggtttattttttcagctttacgaaaaattttatccctcgacattttttaaaaattatacagctatcctcaccgaatttgctagcgaattaaaatggtaaatggattaatttaattataaaaacttattatattaaattgagttaccatttaataaacagaatcagctgcattctttcaatttgctgctggtctgtggtcttataaaacaaaatgtttttacttacatataaacgattttatgtttcttaattgtaagcactttaacgaaaacggataattagagtcgattcacataaaaatttgaaatactagggccgcgattttagtgaaaactttttttt

SEQ ID NO: 20062 - DNA, 1552 bp, Heterodera glycines
agaaatcactattttggcgcttcggcactaaaatagttaaaattcactattttggcattttttcactatttcgacattttttagataatttttcaataaaaatgtaataaaaacgaaaatacacccctaagaaacgacttaaaaatttcagaaaaatacacccttaaaatcgatccaaaaattttcaaaaatagactcataagaaaagaaaatttttttcttattattagcttaaagccaatggtcgtagcagttaaaaaaggaagtaaaacattaaaaaatatttatccattaaatttaatttttgaatacattcatttaatccattattgtattggattggaacaaaaggatgtagtttttgatttaacagatgctttttgattgcccttttaagtagatatcggcgcgaacgggattcccgcgggaaaagatgggaatcccattctaagattttgttatttttgtgcattaaaaaaactcatttacttagatacaattttaaatgtttaaattataaattttcacttgaaaaataattaaagtaaaaattttagaaaaaatcaaaattttttcgcaaaaataaaaatttttcccgtcccaggcgggattaccattaaaattgacgagatttttttatgggaacgggagaaaatcgggaatcccgtttgggaatccccgtcccgttcattttcgttttcccattcccgttccaaaaattttcaaccaaggagattggattttctcggataagtttatacaaattttgaggtttcccctgagcataataatggtttaggtgggctgctgataggccaaaaatacgttaaaaacggataaatttattagctgaagaaaaattcgaagggattgaaaaatttctcattaaaaattatttagaaatttttcataaaaattttttattaatgaaaatgattgatttaaatttttaccattttaattatgttactgtttcgttcaaaaaagcttttcaaaataattgattgttttgattattagtttgatcgtttctaatcaaaattacaaattttcccactgaaaagaaaattgaataatgtttaaattcgtaaaaaatgtgtgatctcctaaaaatattaaataatttaatgaaaaatgacgctaaaaaattgcaaatatatttttttaaaagagacataaaaaatatgtattaaaaaaagcttggaaataaattttggattagctagctttcttcacacttttcaaattgagataccaaattaatttattaattatctaaatttagaaaaactgaaaacttcaattctttatcaaatcattttttgtgccattaagcagttttgtgttgcttttgttcataaatttgtgattaattttataaaaagtcatttttgaatttttatagaacatttctaccttttaataagttatttaatttaactgattttcaggaaaaatataaagctgatgaaaatgatttttaagccacttttacaattaattgtttagcttttattaaattatttatttcatttttttattaaatccggca

SEQ ID NO: 20063 - DNA, 1940 bp, Heterodera glycines
  unsure (1)..(1940): unsure at all n locations
accattgccgaaataatcgcctaataatacatatagtcgagttgcagaaaaatatgactatttttgtataaaaattgactcgtagtgtattaccaattcttactgtcttttcttgacaaggcattcgtttccgatattttcagttaattgataagtttcggaattgccaattttctttgcgtcctattaccatggctttctcagctcgcgctttgcattacgttttccgtgtggcggacagacgcgcgtctcacaaattttacacacaaacgcttgggatgaaagtgttgcgtcacgaggaatttcgggaaacatgcaaagcgaattgtaatgggtacgcattgagatgagaaacagtaatcaggtcaattaacccttgaatttatttagcccttttgatggaatgtggagcaaaacgatggttggctacggaagtgaggacgaacactttgtgttggagtgagtgggggtgggggggggagaggtgaagaatgggcaaaaaggcattggttgggctgacccctacatgaaatcaaggttgttttgaactgcttgaaattgtgctttcctcattaaggctcacttacaattacggtgtccattcttacgaactcggcaatgatttcagtgtacgaatttaacccagggatttgcttccattttttagttcattttcaggccattctcattgaatctgacgacgttttggcgcgcgtggaaagtgtgggagagcggacagcagaagggactcttttgctgaaagaccccgacggacattcttttttcgtcgagggcggaagcgctgcgcatccgttgaccaaagtgtcactgaatatcaccgatttacacgaatcacgcggtcctttccgctaattcggttagcttttagtcccgtttcaatgattttcagaattttggtgccaactcctcgggatgaaattggtcgaagggacggacaacggaagtaaaaaatgccaactcgcatatgaccaaaatcaggttgaccaaacaatctttatttccatatttgctgacttttaagtgtcacctcgagctcatttcgttagcaaatggagaacctttggaccgaaagacggcattcggtcgaattgcttttgccacggcgacggaaaatgttttatttaaagttattaaaacaacacgcaattgccgctcctttcagttgaggccactcgaagagaaagtcggcacaaagcgcattcattcgccactcatttctttgggcacacccggcaaagcgaccgtttgggtggtcattttgaaagacccggttacttaacctcataaacgaatctaattacttgctttttaggatgagcatgaaatttgttttgtgggcgacgaaggtttccaagaattatcgaaagtcgacactgaagcggagaaactgttgctgagtgcgattgagaaagacgacagttgaagcagagtgataataatttatttaaaattgtgcttgtattttatataaatatatatgggtgagataataaaatgtctttaattacactcatcactcatagtcaacaacaaaacaaacaaaaagctcagtcaacataaaaaagtcatcgaatgtttattggcactcccatttcgtcactagtttttctgctccaacctgcacaaagggtttctgtagatcatttcgagatcaatctgaaaatataaaaaatttatctgttagtgagcaaatggtgaatgccttatggccaaaaagctctcttatgttggaaatgccgtatctgatcatggttggcctgaaaagggggcttagagactgatttaagccgaaccaaactccccaccgctcgagggagagaccgaacccagccacggcaacgtcttccggaagtcccatcggaagcaacatctcaggcctaaatgcaaaattagccataganntaaatgaatgatttctt

SEQ ID NO: 20064 - DNA, 968 bp, Heterodera glycines
cgtctccgagtcgcaagtccatttgtggtacacctgtctttaatggtggcaaactgaagggaataaaaagcaattagaaaagggtttttcattttaataatggtaataaattttgatagatctaacactcgcaaatgttgattaatttataggtaattaaatctgttttttgactataactgcccaatttcaacatgacaatggctttattgcccctcgccttggctgacctgaaccggctgaccatgtgggccgccttcgaggatctgaaccgggtcgaactgaccagtcatttggcgaaccccaaccagtgagtactcacctcgtacctgcacaccggcatcggcaccacttgcgtttggaattgggtggtgatctcggacacctccaactgggaggagacggtcttgtccgcctccatgtagaagcattggatgcgataggcgcggtcaactttggtgacgaattgcgggtggaaggagatgaccacggtggtggacacgaacacgcctttcgggttcagcgaacgggtgcgtgccacgttgcacgtgtcgaatggcaactcaatgccggcaacctgaacagggggggggggggaaagtcagaacaaaataaattatggccagaaaattaggaaataagaaaaagcgaaaagggaaaccatatttgaatttggaattattataattatttttgaattaatttttataatcaatttgaactcaaaattggctgattttttgtctattggtctccgatcatttttaattgttaaataaatttgataaaattattatttttttaatttataaatttgacataattttttttgttctgaaaaatctctattccccaaaagaaccgaaaaccttgcaaatttcatagaaaaataatatgcttaatggtgtgtttgtttgcccacttgtcgtccgtgctcatccgatcggcacccgccctggtcgaacagt

SEQ ID NO: 20065 - DNA, 1868 bp, Heterodera glycines
ttgctttctctcccggcgctgctttgatgatacggaaaaagtaatcactcatcatcatcatctgctgttattatgcctaacaaaaagtcggacgaaacaaattcagtaagagagagagagggaggaagaaacagaaacagaaatagaagttggacaccgctgccacccggacaacgaacgaccaagacgacggagatggtcattagcatcatcatcatcatcattaagtgatgagcatgatcaactgcagcagctgattgccatcacaagcggacaccggcggtggaatgagaaggcctcgcgatggcaatcatttatggaatgcaagtgtttttgacgcacgccgaggtcgacccgtctccgtcattattacttttgttaatgaaaaagtgaaaaaaaggaagcggcaaaaagcgacaaggcaacaagattttaaaataaaactgtattaaattatttaaagaataatgctgggcaaatggttgacctgggagggaatcgaaccctcgacctacgccggtgcagaatcggttaccccacatttgcgcctcagacattcgcgcctatgtccaaaaccgagttcaaaaatcatcaattattcaaaaagcagaattaatgctccaaataactagaagacttggatttcttctttctgtctatacatataaaaaaggaatactaatcacttgggtgaggattaatttacaacaaaatcccaaatatttaagaaaaagtgccaaaatacttaagaataaaaatatatcgacaaaaaaattcaaaatctcttctaaaatgcaaaaaaaaaaaaaaatttaaaatttatccgctgttgcagttgctacttaagtattttccgaggtaaaatttatacggttttcgacatgaatatttttgttaaaagaaaatgctcgtcaaaaataagcacattttaaagcgccattaaagcctaaatttgcatgttactgaacaaaaacaaatgttattaaaagaatgttcttcatatttttcaataatttaattatttcaatatttttgggtgaaaacattttacagatttagtccaaaaattggtcattttcgagatgtaacaacctaaataaaaaaaaattggtcaggcggtgccgacaggcgtagccgaggaaatttcgtgggttttagcctgttttgagaacagattttgcacccaaaaataagtaaaaaaaattcaaaatgccaaaatatttaccaaaatattataaaatgccaaatatttaacaaaatattttatttacgaaagccttaaaaatatattttttatatttactagcggggtcagcgccttcggcgcatcccccgctaggcagtacgattgtgttatagaattatgaatgataaaatcgactggctcggccgcttcgcgccctcgcatcattttcttggcttttctccaatctctgggactaaacccaccagcaattcaatcactgggactcaacccaccaacatttcaatcactgggactcaacccaccagcattccaatcactgggactcaacccaccagcatttcaatcactgggactcaacccaccagcatttcaatcactgggactcaacccaccaacatttcaatcactgggactcaacccaccagcattccaatcactgggactcaacccaccagcatttcaatcactgggactcaacccaccagcatttcaatcactgggactcaacccaccagcattccaatcactgggactcaacccaccagcattccaatcactgggactcaacccaacatcatttcaatcactgggactcaacccaccagcatttcaatcactgggactcaacccaccaacatttcaatgactgggactcaaccca

SEQ ID NO: 20066 - DNA, 1912 bp, Heterodera glycines
  unsure (1)..(1912): unsure at all n locations
aaaaaagacatgaccataaatattgacnnnacttnaatgcaccatacngtacagaaaacaaatgtgttgttttattactttttntgaaacatatcgaaattctttgaaattttgcaggctcatacagaactcttatttgttagagctattgaatttatggagaattttaatttgggtgtttttagaaaaagttatggtgcattaaagttgcaaattttttatggtcatgttcgtgtcttttttatggtcttgtgaactgcaatagagccagattttgccctcgtttttttctttgtagttcagtttatctctgaatttttaggataacattcgaatccaacgaaagataaaatgtcattttattgctctattcgagtgaatcggtcgcgggttttttacccagaaatatgtagagaaaaccgcaacaaacgaaaaacacactcctataaatcgaaacaatttcagtaaatttactcctaggaattgaaacattttcttaaaaattcaaccctaaaatttgtttttctcttgggaaaatttttttcgattttaaaaatcttcgaaataggtatttaattagttataactggaataatccctactattgattatgttttttgtttattaatacagaaagaacaaaattccacttaaaagaatctgtcaccccaccaaatttggctgggtttgtggtggaaggcgtccgtccgtccctcactcctttcgtttgaaaatgcgcagatttatgttttgctaattttctgttcataaaaaacgggccaagaatttgactttgctgagcgaatagcgcaccattccgttcattccgttttgtaatcggtggaacgtttttcactttgttaaattactacacatactttacctttaaattttccaacgctggagagaccgcagaaatcacaaaaattctcattaaactaaaacctatcaaataaaacggggattggataattaaagaatatttccgatttcctcaattttttttcattagaacaaaggaaaaacctaaaaacattgggggagggaccctcttgatttacaaatgttttaattatatttttcgcaaataggatttttgggggttgctgaacacgagcttgatatttttcgatgaattctcgattttttgttcgagttcaagtttggagttcgaatttagtcgaaataaatatcaaactcgtgttcagcgatccctaaacccctagtaactaataaagaaccctgaaaaatagttgcttttctgtttaaaaatcgtcccacctaaactacatataaaagtaccgctatacttattgtcatttttaccaaaaaattacagaggtcctaaatatttataaagattttttttaacattggccactaatggaggaccgacaaggccaattgagatcacgaagggcacaaacacaacagacagaaacaacggtggaaggaccaactgacaacagaaatgggaggactgggggagaagaaacgacggcgaggactcatcgaaatgggggaccgaatgaggcgagttttcatggatatgtgaccagttttagaatttatgtccagaatttcaaaattcgcttttttgagtattattaaaaattaaaggagaattgaggaccgaaagaatgtaggcattgaccaagtaagaaaataaagttatgggccaaagaaacttaacattggatgcctaaaattagctatccaaaactccaactttagggatataaatttttatcgtttttaatgaaaattaggaattttaaaggaaattgtgaaacggaaataggccactttaactgaatccgcctagccctgttaacgaggctgcccgtttagcttggctttcttcactggcttctcgtcttctgtctcgtgggcactctctacggaatgagta

SEQ ID NO: 20067 - DNA, 2027 bp, Heterodera glycines
  unsure (1)..(2027): unsure at all n locations
ccgccggaccnccctgtcccccaaaaaatttttttggaaaaaccgcgccaacaaaaaaaacgggtgtgaaaagcaaaaaaaaaaaaaaaaaaaggtcgtcgcacggggggaggtgccccccccaagccaaaatcctgggaccgtccctgtaaacaaggttatttttaatttgattttaaaatttttgcaatatcttaattaatacatatttgcattacatttatacatttggtttttatatctgtttatttttcgatttaaaaattaattatatcaaaattaatcattgggattattatgcattatctttttaaattttttccaaattattatgaagcgactataatatgcaaaaatgatatttttaatgcttggtttcaataaaattaataatgtcgggaataataattgtttttttagaaaaagcctcatatgctgcaataatgtggttttatttgttatattgttttatattgattctatcaattaatgttaaattgacaatataactttaaaacaaaatttgctcttcgaattttttatttcatcatttaaggcatgaataatttaaaacattttcacatggcacaaaagtgtaaagccattaggtcatcatttgctgcccttcaaaattttcattttattatataaatgctgtttacgtgaataattaaatgaactaatttttgctgtttatatattacaaaatttttaattttttaaacaatgcataatttcttattatacaattagattataattaaatttcttcttcttcaaatattttcattaaaaattcattctatcgctgatcgattttagcccttatttctggtttcattcggcgacaaaaaaaatcatgctttgttgttatgaatcagcatttttacttattttatttatttttgataattaaatgagttataaatttgcgtttacgtttcatcaaataaacattttcgctcattgtgtagtttgtgttgcggcacatgaggaaaaagtgttgatgttggatttggatttggatacattagtcaagctcgacattttgaaaaaagtctggacctggacctgaacctggattccatgttggacctggagctggatttcctggacaaaaatccaggaaaatccaggtccaggaaaaatccaggctcctcgagacctggatccaggcctggacctggattttttgaaatttgttttaaaaaggcaaaaaaatctttgaaaaaattaattaattgcttgagaatgtctaaaaatatcaatttcgtaataataatgtgtttttaaatctatttatcattttttgataaacttgaaaaaaaatcagtcaattgaaataataaattccaaaaaacataacatttggaaaaaaagtccaaaaaattttgaagggggttttcatttttttttatttgaattaataagtttttcaaaaatttttacaacatgtaattttggaattttttcataaaaaattttctgatttttttctaagtttataggtcaatcgatttaaacaattttgtgggaaacataaacaatttgaaaatttcagtgcattcagaatcaaaaaaccagatttctaacaatttttcggcacattttttcaaaaaaatttttaggatgtgtgagggaagagagcccggcggtgccgataggcgccgctggaaaattttgtatttttaatgcgatttgttaacgagtttgttcaaaaaatgacaaattttttcgattttgagccaattttttaagaggataagaatttttagggggcggagtgaaaattttggcacattttataccaattttaatacatttcgccataaaaaaccgaaaaaaaatttatccaggaaatccaggttttttgtgcttggacctggacctggattttcaaattgacctggacctggatttcctggacaaaaatccaggaaaaatccaggttgtcgaaaaatgacctggacctggacctggatccaggaaaaatccaggcctggatccaggtccaggtcgagctctat

SEQ ID NO: 20068 - DNA, 1626 bp, Heterodera glycines
cccgccccggtcaattttcgaagcccggtcccggtactttcaaaattccggtctctactaaatttttatgcattcatatatcatcattttgacaaaaattgcctaacattataaaaaaaaatgagtattgaaacgagggcgccaaattcaaaaatctttttattcccaactgatcaaatctaagcaaacataattcttagtcgataattggtgtttgaaaggtttatctgatcaaaatattaacgtgaacagtattttaacaaaaccggataataaaattaacgattcctaacaattgttgatcaaaggaaaccgttttgtctgtcgaaaatagaattgagcaatgtctgatgttctccgatcttcagcagcagttcgtcgcccttgtaccgcatgaagcgctcagactaaaacaaaaaataggtttttgaactatgaaattgagtctgtccaacctgcttgttcaaaacgtggtgaaggtgttcgatgccctgttcactgatccatgcgaaccacccccagcgcttggcaaagtctggcccatgggcgagaagccagtgtaattttggggtgaatccagcggcattgtttgtgtcgaattttgatcacctaaaattaattagaaaaaaggaaagaggtgaatgtcaggaccagtatactcttgcgtcttggcatgccgaattgctcccgatttaaaaattgtgcaaaagaatgaaaaaattataagaccattcaatcgtcaaatttcgatcaaatgacaaatcagcgatttgctcaagctgttccaagaccggacctagtcgcgcttccatttccgagcgggtttcgggtccctcccaaaacgcaagtaaagtcacttggcaaaatttgatttttaaatgaaatgaaatttttggtcaaaatttcactactttttggtgttgaaccgccttttcttccactttccatgcgccattctttccgctttcgctttgcttcattaccagaattgcttagtttcattaatttatcagtttttttacgtgtaaaaaccatctaaagcataaaaaaaagttgtgaatttatttaaatttttgtccttggaaaaattttttcctgttggccaattttcttgaaatttgctatagtctcatattttaataaaacttataggatgatgctttattttttgtcaaaatgctttttaactcgagatcgactcttcagtttttacaagggaaaatatcggcaaaatttttaaattagtggggtttttggcggtttgtccttaggcaatttttgtcaaaatgataatatatgatacatgaatttctgataacagttctgcgaataacgaaaatggagtaacaaaacaatgacagaatggacacaaagcaataatctcgaatcacgtttattggtccgctttccctctttccgcaacggtttgactggtcaaaactttacgaggaagtgactttttcctgcagggccaactgagtcttggctcaattggccagcagagagaccataagataatctcggagcgaatgctccaccacacacttcatcttctcggcaggcaattgcgtgttcgccagtgaaacaatctaaaatcgtggcaatatcaatcgcgttaatttctgg

SEQ ID NO: 20069 - DNA, 2278 bp, Heterodera glycines
aatacccgagaaaagcttgcaattccccaccaaattcaaaaaccaccaaaatgtttcccttgaaaattgcatttctgcttgttcttatatgcacccctaattttggggaaaattcttcaacggaaagcagcaaaaaatcgcgaaaagagcgcggaattatttcaattccgctggcaattggggccgtgacagcttttctgacgccgatcatcatcggtgcaacggtcgcgggctactacatcggcaccaaatcgactattgacagcaatgatcgtgcgaaaaaataattaaaataaaataaaaattagagttgagcgggttcaggggcgaaatttttgagttttttgatcaaaatggtttaaaaaaatattttcattttttagtcaatctaaagaatgaatttaacactgaagggaaatatatttttaaattaaaaatttgttattatatggcaaaaaaatattgacatacattgattatcgtttccgacgtaataatattttatgtagaaaacaatttttattacttgcaaaatatttgtttcattgaataataattattttaattaattttatcattgatattattttaggatcgcccacattgatacttttttaggatcgcccacattgatactattttaggaacgcccacattgatactattttaggaacgccccattgatactattttaggatcgtctcagcacgtaaaaaactattgaaaaagaggataataaaaaattaatctatttaaaattaaaaaaatcaaagtaaaatttataatgaaaaatcaacaaaagaaaaatggggacaaaagaaatttaatgaaaatgagaataataggaaaaaaaagtaagaaaggttcgatgaacacaataaggtacagtaaatgctctatttgaatgcccgggcattgtattgttcaacccgtcccaaaaggggcatttaagtggagggaggcattcaaatagagcattttttgatcagcaccaaaagttatgttaacatgaattatttcagatattttggcccataaaatattgactttttcttcgataaatttaatgggacgacaacacttttgaccacctaaaaatggggttggcacataaaatcgaatagaattcgggcaccaaattttatcttgactaatgattggtttcattgaaaagcccataaaaaatcttatcagaaagtgtgcttctttttttattgaaagcaaaaaaataacatttttacttcctataatatttctcaaaaaaagatgagacaacacttttgaccacgactgtaattgatttgataatattttatttttatttgtctctttttcggaatttttacaacttttttctaaattttcagatgtcttcagaaattttttgttcgcctcggcgaaagcccaacgacatgtccaaagtgtcggtcgcacacttcgctgatggaaaacatttcactgtcctcttccaacgcgcaaacaccagcaaatgaaacggattcaaacagtaagtgatgagagacgaggagaaatgccgaattaagtgcaaaattaccgacaaaaatggcatttttgggtcaaaatacggcattttcagttgccgagttcgccgtctgtcctcttccgaccgatccatgcacttccgctgcttcaacttcgtcacaaattcagcagccgccgcccattcccgcggctgtactttgtgaacgcaattttgtacggcctcaattaccaaaactgattagaataattggcattttcttaaaggatgactcgcgatggaaggcgaattcgcattttggcgccgtccctttgccctcctccgccaccactgaaatggcatcggcagagcgtcggatttgtctgtcaacttccaccgtttcttccacctgttcaatttcaatgcgacaaaaggggggaaaagagagcgatgacggaacgccaaaaaatggacaaaatgggaggggacaaaagaggcgggaggagaaacaacgaaggacggcacagccaatcacaacactttcgacattcgcaacccaaaaaggtgagagaaacggacgaagaccgatcgatggtgaccactgatcagcagaagtgatcagcgcaaattcaattgatcagaaaaggggaggaagaggaaagagactgatcagaaataatcacaagagagagacactgatcatcaatcttttcgaaaaataataaatcagggaaagcgatcagcgcaaagcaattgattataaagggggaggaggaaacaggctgatcagaatttctt

SEQ ID NO: 20070 - DNA, 2475 bp, Heterodera glycines
taattaatttttaccgttcgcagtaattagacataattaattaattactctataattgcagtcaaagaaaaagctggaaaccgacatcaatgatttggagttgggcttggacatggccaataaaacaaacatggaagcgcagaaaacgatcaaaaaattgattggccaagtgcaggatcttcagctgcaggcaagtgaaccacaaaatttggttttttttgtcgtgttaaaatttgttgccactagtgattaagttgtccaggcatgttttgtgctctttctgattttgggtgtctcgattatcatggagtggtctgatcaaaatggttttctagtattcccgttgatcactcactgatcaccggcatttttacttgaattacatttttggcggagaacggaaaaatttgctagttttttttcataattttttttttcaaaatggttcattcaggttgaggaggagcagcgtcggcgtgaggaacagcgagagaactttttgatgagtgaaaagtgagagaacaattaaaaatataattaatattttaatttataaattattcaacaaaaaaaaatcttccaaaatttaaattatttaataaaattaaaaatatttgtttcaggaaattgaacattgtgctgtccgaacgcgatgaacttgttgtgcgccgagagcaaatggaacgggataaacaacgggtggaagccgaagtgcaggaggaacgggcgcgcaagacggagctgcaaatggacaactcacagctgagcgccgcacgacgccaagtggacaatgacctacaattgacgaaggcaaaaaatataaaaataaaatttgaataaaatatatttcaaaattgaaaaaatgacaattttaaaaggctataaaatgaaatgaataaattttttttattaattttaatttttagatcagattatgtttcttaactttagcctgcaaacaaaaaaaaaaaataaatttaattttaaataattatatttattaaaaaaggttttttttattaattatatatttttttattaaattatgtttctttacaatagcctgcaattaaacaaaagaaatttaattttgaatttttgttaaataaataatagtaaatttatgtgaaaatttgtgaaatgttgaaatgtttaaaaaaaatattttgaaattaatttaataaattatttaaaaaatgaataaatatgcatttgaaataaacaatttttagactgagttggacaaaacgctaaacgaactgaaaatggcggaagaatcgtccaaaaaagtgagcgccgatgtgacacgacttcaagaagaatatcgcaatgagcaacaccacaatgaccatgtggagaggcaaaagcgaggattggacgcgcaattaaaggtcaaattaatgaaaatgaaaacaaatttgtttaaaaaaatatgtaattaatacaataatatttattgttttttatttcatttaaatttttatttatatcggttcataaaaaataaatgctttatcatttctttttaattctaatttaattttaattcgtttattttttatttaaattatttttatttagtcatttcattaaaaaatggatttatcagttattttaaattttaattaattttaaacttcattccttttttatttttttctttagtcggttcattaaaaataattgaattgttttttgttttaatttcttatttttttaatattttaaatgatttattcgaattatatttgttcaatctgaaattagaattttgttaaaattatttttataaaataatccttttaaatacaattaatataaggaattgcaactgcgtcttgaccaagcggaagcgaccgcgcaacgcattggccaacggacggttgaccaactacaacaactgatcatggcccgtaaccacgagttggacctggagcagaaacgtcacaaggaattgatacgccaattaaacaaggtggttaattaataatgcacagtcagtcagtcattgatctgctctcaaatctcttttaattaccaataatttggacattttttttttgcaaattgattaattgtttaaatttcacataagcctagcaattaatataaaaatttttaagtctcgagcaaaaaaataattctgctttataaaattttgaaaaatcttgaaaagtttttagaaaaaaaattttcttgaacattttcgtaaaaaaattttataatattttttattgtcctaaatctttttggtttccaacaatgatttcgttctgctggtctctgaaataaaaaaattgtcaaacatttatttgtttgtattatgaattttattatataaattaaataatgtttttttttattattttttaattcaattttgccaatgctttcagtccgaccgcgagtgccgtgagttccaattccaagtggaggagcagaaaagggcacggccaaatacaatcgttgatcgaa

SEQ ID NO: 20071 - DNA, 2433 bp, Heterodera glycines
ctattcctgagcaggatgaagccagaggaaactctggtggaagtccgaagcgattctgacgtgcaaatcgatcgtctgacttgggtataggggcgaaagactaatcgaaccatctagtagctggttccctccgaagtttcccccaggatagctggagctcgttaagcagttatactcggtaaagcgaatgattagaggacttggggacgaaatgtccttaacctattctcaaactctaaatgggtatgaagccagggttgcttgactctgaacccaggcgttgaatgtttgagctccaagtgggccatttttggtaagcagaactggcgatgtgggatgaaccaaacgtggagttaaggtgccaaagtgcccgctcattagacctcataaaaggtgttggttgatatagacagcaggacggtggccatggaagtcggaatccgctaaggagtgtgtaacaactcacctgccgaatcaactagccctgaaaatggatggcgctggagcgggccacctatactccaccgtcattggcttgtacacgtgcttgtcgcgtagtctggccatgacgtgtaggagggtcgtggtggttgcgttgaaggctttgggcgtgggcccggccggagcttccaccagtgcagatcttggtggtagtagcaaatattcaagtgagatccttgaagactgaagtggagaagggttccacgtgaacagcagttgaatgtgggtcagccgatcctaaggcaccggctaacgccgtaacacactacggatgacgacttttctgtgcttgcgcagttggtccatccggtgccggaagggaagtgggttaacattcccacgccaggctagggaaatgacggttcgcaagagctgttttgcgcggtaacgcaaatgaactcgcagacgtcgtgtggagtccgagccagagttctcttttctggtttagggtgtgcgtgcctggaagtggctcagcctgagatagggatgttgcgcccgtaaagcaccgcggttcctgtggtgtctcgtgcgctccacacggcccttgaaaatgcgagggaagctatttgaatctcctgcctgatcgtaccgatatccgcagcaggtctccaaggtgaacagcctctagtcgatagaataatgtaggtaagggaagtcggcaaattagattcgtaacttcgggaaaagaattggctctaaaggtcgggtcagccgggctgttgcgtgaaacaggcggcttttgcccgtggctgcgtgctgttctttcggggatggtgcgtggactagtggtgagagctgcttgtggagcgcttcagctgcgtgtatgctcgtcagggtatgcacttcggttggcgctgaacgaccagtttagaactggcacgaactcggggaatccgactgtctaattaaaacagaggagacggatggtccttgtggacgttgaccgtgtctgatttctgcccagtgctctgaatgttaagccaaggaaacttgattaagcgcgggtaaacggcgggagtaactatgactctcttaaggtagccaaatgcctcgtcggctaactaccgacgcgcacgaatggatcaacgagattcccactgtccctatctactatctagcgaaaccacagccaagggaacgggcttggcaaatttagcggggaaagaagaccctgttgagcttgactctagtctgactttgtgaagaatcatgagaggtgtagcataagtgggagccgcaaggcgccagtgaaataccactactttcatcgattccttacttaatcggtaaaacgggagtgcgcccgaaagggtgtccattttggtgttaagtcgggccacccggtggcccggcgacccgcgccgatgacagtgtcaggcggggagtttgactggggcggtacatctgtcaaagcgtaacgcaggtgtcctaaggcgagctcagagaggacggaaacctctcgtagagcaaaaaggcaaatgcttacttgatcctgattttcagtacgaatacggaccgcgaaagcgtggcttatcgatccttttgaatgtgtaaagtttccagcaagaggtgtcagaaaagttaccacagggataactggcttgtggcggccaagcgtccatagcgacgtcgctttttgatccttcgatgtcggctcttcctatcattgcgaagcagaattcgccaagcgttggattgttcacccaccaatagggaacgtgagctgggtttagaccgtcgtgagacaggttagttttaccctactaaagacctgttgctatgatagtaatcctgcttagtacgagaggaaccgcaggttcagacatttggttcatgtgcttggtcgatagaccaatggtgcgaagctaccatctgagggattatgactgaacgcctctaagtcagaatcccgcctaggcaagatagcaatat

SEQ ID NO: 20072 - DNA, 4018 bp, Heterodera glycines
ttcatcttggatttctccatagttcttaattcgttgtgtgcctgtgaattttgtttttttataaaatccatcatggctatgcaaacagaaattatcaacagttgtttaaaatctctagattatgaaatattaattttatgataacttattttaacatgtttgtgttatctatgaaaactcattatcatccgagatttatttttgtcaattatttcataaatttgaaattgttttgttaattattgttaataaacttctatatcccattgtctgtacttgtctctattccaatttttctaatttttctaacaattcttctcttgtttatttattttgcaagttattggtcaattaaataattagctccattatgtttcacgaatgcatcaaaattatttataatataattatttccaaattaaatatttttgtttttcatttttttaccacgtgaattaatttatttttatatcattgaaaactaaagataaaacaaaaaatattaaatttaaattttttattaaagaaatataatcagtaaaagaagcatttcaaaaaattgtttgcctatattaatgcagtaattaataacatttatatcattgctataatataaatttaaatatttattctagcattaaataaatagaaataaatattacttaaataatatttttttattatattctaatcatttaattatatttttgtttaattattcttgatgtcttttaaataataattctctttttcatgccttttacacgtttatatgcattactttattttataagaaaaaataaattcaagtaaccattatttttttttgttacagtactttaagaaaaaatatcattttaaattatgtgttttgaattttatatttaaatttatttatttatttatttacgctatttccaaaatgtatattttttaaagttagcataaaatgcccgaaaattacaaaaaaatgtcaaagaaaggcattgttatttaagtatcgtaatccgaataaagggaaattggaaatttcgtccgtaattataaaatttataaatttattaaattatttttactttaatatttaaataattaattgacaaagatgacttttatttttattataaaatggttaacaaatttaaaaaatgttgattttttaatgttaaaatttataaaaattatttaaatataaaaatacaaaaaaatgcatttaatgaagtataaatattattttttaattaaacaaaaacagaataaatcataataatttttttgaacaatttaaatatttatgaaaagaaatagaatttaaaacttaaacctctgaataaaagcatatttttcaaaaataatttcattaatcattattcttaattaaatggctgcgtgcaaaaattaataaataatagataacaaaattaaatgtttctttaaaatattaatatataaaaaaaaataataattaactttatgctattaattttcggcgtgagtttgtcgttcggcgccgatttggctgtaatttttttcgttgtcaaattaatccatctattgtaacattcgaaaaccttcacacaagcatatattattggcaccatgaaagaagagatctcatacacccatagagaagcaatgaaaaactttattcttataatagaaatattgtaaaaataaatatcattttggacacttaattgaaatcaattaaaaatattaattaaaaaatttcaacaaataataataataaattccataattaaaattatgatttaaattaaagacaatttgtattattatttacaaaatcctaaattaaattaacaactaatttaataataattattaagattattcgtgtccgagtctgttgctagatctatggaaaaaaactcagtgattgaaaaataattaaatttatttatgcgattcgctaaatttatataaaaactagtataaaacttaatatagaaaaaaatttcattgactagcagaatggatccgccaacagaagactcggggtgggattttcttttaacgcatttttaaaatttcaattgagttaaatcaaatcttattaaagaatgttctgatatttctatataattaaattacattatctcatctatttgttcaaatggttaaaaatcattttgccataaaaaataatttaataaacaaaaattatgaaacttagtggaatttcatcaaaaaatttatctttatctaagttttattttaatgtatatttaaaaataaaattatttataaaaataagtattggtggttttagaacaaaaatattaaaaggataaatttattccaaataaatttatatgtatttttttatttattaatctcttcaatttaaatgttatttaaaaacagaatataaaagatttaattcgaaaatattacaaaatctaagaagtaatgcttaaattcaagaaacataaataaattattataaataatctattttagttttaaaatcatatattttttaaatcttacataaattaaattattgattgaattaaaattggttttaaaaaatagcataaaaagtcaaagtggcgccctgtcacaaggatggaattgagattaaaacatttttaatatttatttggtaattttttatataaatattcttatttataaatctttttgctctgagtttacattcaaaatccaataaagcttttattataataattttttggtaattaatttttttagttcttcaaattagcattttttcaatattttattttatttatttcctttataaatttgtagactaattacatgaaccttaatgactttttcaatttttactcagaaatttattttataattatatatttaaaaaggttgcatttaaaaaaaaattttgacagttttaaacataagttttcctatatcgaagaatgcatgaaggattttgtaaattgtccaaatattttttagcaatttaacacatttttgcttctttttttggtttatgttaaattaaaaaataaatcataaattattaatcaaaatgattttataatttatttttagtgaaacatttgaaattttttaaataaatttttgtttcatttttctatattatttagtagaattgaataaaatatttgtttgttaattgtttattttattttttttgaaatttatatatatttaatcaacaagtcatcagggaccctatcaaccttgtaaaaaaattaatttacgagatagaatctaagttagatttccaatttctagtgatttaaaaaaattcaggacgatttagaggcaggccggtagccagaaaaatgtcaatgtaatttgtttattcggtattttcgataatttttatttattttttgaattccaggtttaattgacaaaaaacaaataaattttgttttataaaatattttttggaaattatttctttaggtattttattaaaatttaatttaaaaataaaaatctatgctagatttcggtattttcattttctattgaattatattaaaaaatgaaatgatatttaattatagcttcttaatttgaagatttaaaattattttctatttgataagaatataacaattaacattaaaaatctttaaaaaaaattgaatgtaattaaaataattaaattagatttattgaaattttttaacttatttattattagttttttaataatttatcacattccttttttcggtaatttctttgctttatttttatgcatttattttgtaaatatttcaatcttgggctctttcctagagtcactgacgtggtgaagctaatattagtttttttttgtctttttatgctatttttaacaatcagtttcaatccaattcaaacaataaaaatatggttttaagttattaattttttttttttgctattctataaatatttaaattattcaaaaaatgataatgacttatttcgtaattttgtttagtgaataaaatatttacatttcattaattgcataatttat

SEQ ID NO: 20073 - DNA, 3103 bp, Heterodera glycines
atcattttttcatttaatatttacatttatataaacattattaattcatttttaagcagtttgattagtccataaattaatataattaataaaggtaaaatgtaaaatagtcatataattctaactttgttcaatattaatataaattggccatttatgaccggtaaaaaatgttttaaagaattcttcatcatggtgtattaaatgcgacataaaaaattgcgtttgataaatgaacaaaatgaatacctttgaatgcaagttcgagaagtgaacctaattttacaacatttacaacaaaatttgagtcataaattccttttaacaaatattttttagaaaaataattttaaaaattttattgtgatgacatcaattaaataattgaattggatttaatgtgagttaaaatgacttaataatttctaatgtttttactaattttataacaactcacaatccaaaataaatgtagaaatgtgaaaaaatctaataaataatttaataattaatggtttaaaaaagtaaaatgtcttcatgaattacaaagcgaaagaatttgcatcaaaaacacgagaaaaaggtggatatatctattctataataaaggtgataaagcatataatattcaatgacatttataaccgctgaagaacaagtcgcgtgtgttcaagcttccatacggcgacctgccctttgagtccgtattggcgcgcttctcttccgtgcgcttccaatttatattttaaatttacaatatatatatatatataatccatttaaaaaacacaaagaaaattcaaggagcaaaacaaagtaaattttataatcagtgtattttctcttacaaataaaaataagtataatattttaaattcctatagcaaaattttttcaaaattaaaacttctatttaacaagtaagaacatcaacatttcgtcacatatttttccataataattaactgaaaaatattttgtgtcaatacaattggaacaaataaatttataataattcttattaaacataaaagaaattgattttgcaacatgaaagtttgggtgcgaaaaaagagtttgatctaagcattttcaaaaatgaaaaaacattttttctaaatttttgctcaaattcaagccggagattgtcatcaaattggtttgatttatcctcctcgttaatttcatcaatcttatttttcaaaatcagaccattggtacctttaatactcaatgtgttttcgcctatgccgaaaaacatttaatttttcatttagggattcgacgacgaaaattaaatgctgtagaagatctcggtaataatttaaaatataagctgaacttctaaaaatttatggggccaattcattgcttttactttaaatattataaaaaaaatttaaaatgcttaatttaaaatagatgattgcatattatacctccaacataaagtcggaataaatatttgtacaaaatgttcaaatatttgcgcttcgtttttcattctgtcattttattttctccaattctttcccaagtttggaacattgccaattctttcgcagcaaatacacaacgccaagatggtcttaaaatttagttgcaaatgctcttgcattttctaaatttcttatgtacgatttgtaaataattttgaagccattttagcaagtaccattcgttttcattctttctcattcgcaatcatttggaataaattataaatctttcctttcaaaaactttttaaattaaatttatactggaaataataagattattttaaaataagtaaaaattgttaaataaaaatgctacaataatatattgttgggatcggtactcttgtccgcccatattattttatttctttatttctctcccctttatctctcctctctctctctcttccctgttgtcccccataaataccccgcgtcctctgacctcccctcattcagttgtcaaccatttattttgcttatattgtttcaatcaatattcgccctttgtcctccgtccctcttctcttcatttatttatttgtgttttcccaacttgaataaaataattgtttattcacttcgccggtttggggtttgacggcacaacatatattataaaactttttaaatgcccgagtgcttatagaaaataatctacaaaatatatgttgttttacttatcatagaatataaaaagttaaaaggaaatagttttttatattagattttttgaataaagttaaatttatcataaagtaaataaatcttctcgagcaggaatcaaaaaagaaatactagatttcagggtgatatcaatatttttaatcaaaaattagatatcaaaatttaaaaaattaacaaacactaaactactagatacaaacgatgagtacaatggaaaaataacacaatagagttaaatcaatcatttaattattaaatatatttaattaaaaaactacagaaaacacatatatttttcaacataaactaatatatgctatacataatttaaatatgggagctattgggaaataaaaaacaaaattttattaataaaaagaaaaattgaattaccatgctaaattatatccatactctaattgaaaaaaagataattaatagtgttcattataaaaattttctaagttttatatcgaatataaaaattttctctcactatacattataagatagcatttaaataatgaataaactaaataattaaattacttttaaataaaacatctaaacatatttaaatgtattttatgtatataaatgcaatattaacataataaatttgtaaacaataaataaaaattcgttttacctaatgatgacatgcactacataattttgatggaatacctaacaaatatttgcaaatctttatgcgcatattcgacaaaaaaagatatccctgtttgtcggccacggaatttaaaggcgatagactaaattagataacaattaaattaaaaaatcaaaaatttaatgaaaatcatattatttttagtaatttagcaaactatttgaattaaaaaactaatcataaaagatataaacaattttaatatttctataatatattgagat

SEQ ID NO: 20074 - DNA, 2110 bp, Heterodera glycines
cttttcttccggtgcagcaccaccagcagcagaagaagttggagcagtcgcggcactaacggtggaaaatcgggccgccggacggggccgacgggcggtgcagcaggaaaaattcaaattccattcatacggcgttacgttggctacaagatacctaatttttgaaaaatcgtggaggggtgagaattttttgaaaattttcccttcccgaataattccacacacattccaaaagtgatgccacaaattgacagcaaaatgcacagccaaatttccaaggacaacgggttcaggaaggaaaaaatgtcctggaaaataattggatttacagcagaggggagaaggaatggctggcatactgtaccggttggtagtcttccgggatacggtacagaatactgatgcccagcgacaggaagggtttggtgaagtcgaccacttcggcacgccgaaaattggcctgaaatgccgtagcagttcgttcatctactttcacacagtcaaaaatttatttacttatttatttttattataataaaatttaaattaatagatttcaaatttcataatgaataatcgcaaatattttcttagaaccagaatttttagattaaaaaatatgctgcatgcctttaggaggataaatcttactataatagctccccttttagttcattccttctcccagagtcaaaatttaattttttatttttaaaaatttttaaatcccaaaataaaatttgaaaaattttaattttcaaattcctttaattagtgtggtgtacggacgcatataattcagtcattgtccaaaacctatgccggatattttcgtcacagcacacaccgtgaacggtgccatcaccatgtccgcctcgcctctcaacagttcaccaatcattccgtcccaactgttgttaccgttgtctttaccgtatttgttgtcccgtacaacgtggatcttcaattcacagaaatttgttttttgaaaatgccaaaaaaaaatttatttttgacatgccgtgtaggtaaagccaagatcttgggccaactcagacaacaaatcaatgcaaaagccttaaacaaaaatgaaatattggcttacaaattagcaaaacaattaaatgatttatataaattattatttttaagaattaattatttccaatattttacaaaaaatgccaaaaacgagtgccaccttcgaattttgcattttgttgttcatgtgcgtcttggtggttgtcattgtggtcaatgtttgtcctcaacatcacataaggccgttccaaaatagttgtgacacggaaacggggcttcaactcatttgacacctttttgaatgtaattatttattattaattttttatttcgaaaataatttaaaatctttttaattaattaaattttatttaaatatttttaattatttacgtggttcaatttattttagagtgccacgggaccgggaatttttgccaaaaccgggaccgggacttgccgggacctgagaagccggaaccgggacctcgattttttttcggaaccgggacctcgattttttttcgggaccgggaccgggaccgcaagaaaaaccgggaaccgggaccaaccgggaaattttaaaaattcaaaaaaaatttaaaaatttaaaaaaaaattcaaattttaatttatatcaagtgaaaataatacaaaattatttggttttttatttaataaattaaattaatgaaaattttcaaacaaattttcttcaattatttcaaacaattaatcatttttggactaaatcatcgaatattaatagaaattcagatttgattttcacatcactttttttcggagcgctttttcaaaaaacttttgggaaagaagtcccccctccggcggtgccgataggcgccgccgggggaaattttaaaaatttgggtgcaatttgttaacagattttcaacaaaaaaaggttggtttttgcgattattaagctcaaattggtaggattttcatttaaaaaatgataaaatatgtatcaattaaaaaaaaactatgaggaatcatattttctttataggaaaccctaccgggaccgggaccgggactgactttt

SEQ ID NO: 20075 - DNA, 860 bp, Heterodera glycines
atttattacatctttttatgtaattatttcaattattaatcaatctaaaatatttttacaaaaacgttaatgggccaaataatgaaaaaattataaaagaatggataagctctgcaaattaatttttaattaaaaatatatcaattgtattttaaattacttttccaaaattaaaaaaattaattttattttaaattatttttaattcacactttcacattgcgacgcagttgagctcgcgaattgtcggacatgttaagaatcggcgcaaccgcggagctctcccaataaccaatctgaaaatatataaaagcaaattagacccaaaaacctgacaaaacaaaatactttaattcaaaactgtgcccccataaatagcggcgttaataatcgaaagaatcgaaacaaaaaaattatgattttcgacctcctcattgcccttaactagaatttatttacgtcaaattagctagtgtgattttggcctattaaatattgtttctcaagcactcattaaaacgctaattacccccctcatccccccagaaaagttaggcataaaaacgacatcgtcaatgttgcccgtgtagccaagcaagttgatgcggaatgtgaaatttgtgctgctagctctattgttgttgttgttgttgttcagtctgtccaagtgaccgctaatgccatggatgttggcattctgtcgaaattggcgcgcaatttgaaccccaaatttggacggacgatgcgcgtgctgaccgctggcgcaccgtgccgccgccgccccagttgagccggaaatgttgttgttgttgggcatggaccactgacgcgccatcaaataaaccgcatcaaagagaaaa

SEQ ID NO: 20076 - DNA, 2582 bp, Heterodera glycines
ttgctgatgtaccgcaatcccggattcttcttcactttagtcaactcaatttcgattccatatttttctttatattcttctctccaaatattcttctgctcatccgtctcaactcccttcggaaaaccgctcgcctcctccttcagtttcaaaaataatctcacatatcccttgaataaatcgtccgcctcctcttcgtaatgccacgctctataaaatctgtccacagtataaccgcattccaacgcctttgcctgaaaaatgtcaaaattttctttaaaattttttcttggaaattcttaccaattcgacgctggtgtatgttgccacgtatcgccgctgtgcctcatcatgtgggcacttgtagttacatctcgtagtctccttcttaaattttgacgcacatctccaacatagcggaaacaataatctctcatcgcacttcaactaaagaaccggaatccgcaaccccttcggcggggtgaccctcactttatacaatcccttatacttcaaatcctccggtctcatccaattaacattaatttcatcagtcttcggtataataatttcaggtaatccaatcgggtaagctgtaccgtaattcaccgacggatacagactcacaatgtcataaacactaatctttttcttctcatccgatttcgcatacaatttcatcggtccggtcctccctcccgcataagccatccgcggatcaataggccccttctcgttccctctgtcgtcgaagaagtcccgcatctcttcatcctttttcaactccttctcaatttgacagccctaaaaattcacaataaaaatgtaaatgtcaaataaacttacacaaacttcttcgacgtccaaagtcttccgcagctccgccaatctctcctgcgtctcatcattcaattcctgggccgtccttcctccaatcagttccgccgccgggtcataacagttcatacatccatgtatatagcatcccataacttcaatgcatttgtcgcgccctcccacattcgcaataaaaatccatccaatttatatttcccaactttgacctcccgtccgttccccgcgtgccgtatctcaattccatcccgcttgctccgccactccaaatactttattgccatcacgctggcccggtcacaccgctcatagcctttctccggcacaatcgataactgctccgtcaacaaaaacattgccttaaaaatattcatcgcaacccccgcatttgtacagctcctcggcaaggggtcaaatcctttcgtaatatcgttaatcaatatcctcctgaactcaataatcgataacagcaatatctccgtgtcgtttctgctataatttctcaattcttcatccaaataaaagggcgtccccttgttctcgttgtacctgaaaaagaatttttattatgatttgtccttcttttcttaccatttttcaaattttgcaaatttctccttgttcatagaccccggtgaatagtcctccattggtggcagatgttccaaacaaactccataattttctttcttattgtagtaatacgggaaaaagggcttgtcctcacagcccaaattgaaggtcgccttaagcgactcgagtttcaccggcattaataagcatgagtctctccatatcagcattgaatgtttcttcgagtttcgcactttgaattcataaattttgagtccattgataagcggtatcgggttcttcccggtacggcagagatagttaaatacaaaatgtcctgaaattttcaaaataaaaaacatttttaaaagataatttaccgtcaaatcgtccggcgttgtgcgcaaaaatgtacgtatcgtaattggtaaatgccgttaatatccactctacaaaatccttcgttgggtcatgtccctccgcctcactccaatccttggtcctctcctccccacaaattttacaattcgtcctatgtttgtcgtcacagcattccgtacacgtaactctcaccgaaatataattgattacatgctccttctgatcccccgtgtaaattgtatcctgcgatgtttccgaatcctgaaaatcaatatctattttgttaacgtgttgttttattaaatcttacccaaactacaattctgtagacatccttgtcctcattttcctcgatcggcataatataacaactccgcttggggtcatggctcacactacaaagttggcaataagtctctccgcattcatgatccttcttcgggttaaatcgatacgttttttcacaaatcatgcaacgtctccataatctgcaagtctgatgtccctgatgataattgtagcactcccaattgtaaaaatagcgatggcacttcgggcactcaattttaactccattctccttttcacatggcactcctcccactttgttacaataataacatctcgcccggcactccaaggtgtggtaaacatcctgatcgtaaaagcactcacagtcaatacaaaacttcctccctcgattaaaaaagcagacgtatttcttaagaccataacgagtgattattctccgaaaaaaattcggcactacattt

SEQ ID NO: 20077 - DNA, 2344 bp, Heterodera glycines
ctacttctttgactcttatggagagatgcctatcagcttgttcaaaaaatatttatccgataattttaaaaagatttactataataagaggcggtttcaatcggtgttgtccaatgtttgtggtcactatgtaattactttcgtttattttatgtccgtcggattgggtttcgaaaatattatgcaaattttgaatcgttcaaataaccctgatggatttgtttatcggtttgtaacaaagagcatagaataaatattaacgaaattagtcttcatcagatgtgtcatcatcatcaaaggcatggaaacagaaaaaagtaaaggcccaattccgaataaattcagcaaatccatttagtccatcatatttttcataatattcgttgaccactttttggctcgtgccgtcctcttgccttaagaaacccttcacctaaaatagcaataaaatatgaaacatattttccattttcttgcagatttaaagccatccattgcctgccggttctcggcacagcaaagcactaatagggtgtttgactcacttcaaaaaataattgcatacccaaaagttttttacaaccacatattgccaatctaatttcttgcagattgaaagccatccattgcctgccggttctcggcacagcaaagcactaatagggtgtttgactcacttcaaaaaataattccatacccaaaagttttttacaaccacatattgccaatctaatttcttgcagattgaaagccatccattgcctgccggttctcggcacagcaaagcactaatacggtgtttgactcacttcaaaaaataattcattacccaaaagttttttacaaccacatattgccgatctaatttcttgcagattgaaaccatcagtagttagtgcacacaaaaggtccggattacggtagcctcccatacctatgggaggggtgcacggccaactgagcgccagccaggtgagcgccgccaggtgagcgcgggccatctgagcgccaaaatttttcagtactgaagccaaaacctattgcgcgacttttttttgaaaacccaaacctattgcaggggtgcgcgactttttttgaaacccaaacctattgcaggggtgcgcgactttttttgaaacccaaaactattgcaggggtgcgcgactttttttgtaaaattttttctgaaaattattttttattatttttatttttaaataatattttttatttttttcaaattttttattcgaaaaattctgccgcagactagtggactcgaactttcgctctgccaccaaacccaacacactaccactctgccacgagaccacttgccagaaaaaggataattgtccactatatgctgcaaagatgatgacgtcaccactgcgaggggtacggtagtccggtgaaaattcgcaataaataagtcgcaggcaagcggattcgaacttttgctctgccaccaaacccaacacactaccactctgccacgagaccacttgccagaaaaaggataattgtccactatatgctgcaaagatgatgacgtcaccactgcgaggggtacggtagtccggtgaaaattcgcaataaataagtcgcaggcaagcggattcgaacttttgctctgccaccaaacccaacacactaccactcggccatgagaccagttgccagaaaaaggataattgtccactatatgctgcaaagatgatgacgtcaccactgagaggggtactgtagtccggtgaataattccaataaattagccacaggcaagcggactcgaacttttggtctgccaccaacccaacacactaccactctgccacgaaaccacttgccaaaaaaaggataattatcaactatatgcagcaaagatgatgacgtcatcactgcgaggggtactgtagtccggtgaaaaaactttgaaaatacgcaaaacaagacaaaacgccacaatatatacataacgccataatttattgagacgaaaacctttcgcattagattcaaattcaaaatttggcgggaaaagtggcttggcgtcgtttttttttgtttctatccttaatcctacccttttttcaaaatcattcttatcttttttcattatttattaacatgaatattttctgtttctgtcttttacaatgctgtttagccaaaccaactatgaatttcaacaatttgactacgccaattgatgaacaaacaatgattgaaagcctgtctttggatgaacatcaaacgagctacgatctggtgaggttaacctttataatatcatcaaatagaaataatattttagaaaatggacgaagaactgacaaaaagg

SEQ ID NO: 20078 - DNA, 700 bp, Heterodera glycines
atttggcacaacaaacagaaaaaataaaaaataaataaaacttttccccttttttcaggtgttattcggacatgaacacagcaattgggacaatcaatccggagaaggacacggtggcggttgttgaacagaccaaaaccggctttgcccatccgttggacttcgaatttgaggatttgggtcagtccgaaaagcatcgaaaaatttttgtttactcaaaatttccaccgcaaaaaagacatttctcggtttttcctcctatgggacacggcatttttatatttaaaatatattttttcaagtttatagatccaaattaggcattttgtattccccccccaccctcccgaactgtttcaggtgacccggctgatgttctccaggacggcgccgaatcatatgacggcgccacaatgaaacgcccgtcggacaaaggcaaaggtgccaatgggaagagcggcatgccgaggaaacagtcgttgaaattgttcggcacgtccaacagcaacggcaaggtgtcgttattatggtgctatgacgttagtcaaaaaccatcaaatgaaaatattttttgatataactttgctcaaaagaaactaaatttttaattcttgatataattagataggcctaagtgttttctattagcctacaaaatttcaaaaagtttcgttaagtttcaagaaaagttatgactgaa

SEQ ID NO: 20079 - DNA, 1435 bp, Heterodera glycines
atgtatatgttatgaaatacataattgccttagcatttactctagaacatatttcttataatggcctttttacgaaacgccctggcacttttacgaaacgcccaaaatggcctttttacgaaacgccctggcacttttacgaaactacaaaaatggcccttttacgaaacgccctggcacttttacgaaacgcccaaagtggcactttttacgaaacgacctagcaccactttttgctagtattcatgttgcaacttttttataagttgttcaatcgcagagaaataccttatcaaaagcttccaaaggtgtaggtagagctttcgaatgatgccaaccaaatatataaaatttggccaactgaaaaaaaagttatgatgttttaaacaagtctgggacggaactgaccccctaccgcctgctgctgctggtgatcaaatgtctggccctcaaatataaagcaaaaataaaaaataaataaaataaaataaaaaaatgattcgcgaaagcaaaaaaaaaaattagattgcttttcttcttacagcctctaaatcttatattttaagatgatgaacgaaaaatggaatgttgggatggctatgctcttaatgataaggcgggagagggttgggaactcgctattaaggattgcggaactcctcaaaaagacatgcaaaatcagatttgtgcatattttcactgtacgacggcgggtaaatgttttttttttggcttaaaattgcgctcaggtttcgaaaaaattctttatcaaatatttttcggaatcggaattgctaggcccaaaaatatgtgcaattggaattcctatgccaaaatttttttcggaaaccggaattcctaggcccaaatttttttcggaaaccggaattcctaggcccaaattttttggtgttacaattaattaataattatgtatatgtgtagaaggtgacgaccatttggatatgtggtcatgtttcgctaatattaatgcgggaggaggatgtgccagcgatgcttttgctccacgcatcacacagcctgagtaggaaaaaaaagaccaaaaatttagtataattttggtaaacacactgttaggactagggatgatatttgggtgggggggacccacgcgtttcggcgctcgcgtttcggcgctcccgtttcagcgctcgcgtttcggcgctcccgtttcggcgccagctcgtttttccacttaagcttttttctttggcatccaaatccaacaatcttggtatcattcgaaagctcttatcatgctccattagccttacaaaaagcggatagattttcaagcctggaaaaaattttattaagaaaaaacttcaaaaatttcaacttttcgcaattttcatgcatcacttttttgatatttgtctaatcatgaagcaatagcttagaaaaagcttctaaa

SEQ ID NO: 20080 - DNA, 530 bp, Heterodera glycines
ccatttttgagggtttttttccaaaaatcagcataaatcagcagattttgaaaatcttgcgctttgaattcataaatgtaatgaaaaatggatgaattaattaattaataaacaacataaacagtaaaatttaaaaagaataaaaagtcacacatagaaaaatcaacatattgccataaatttgaaagtttttggtagcagttttacacaaaaatggccatttttgaggattttttccaaaaaatcagtataaatcagcaaaatttctcaaaaagcagcaaaaatcagcatctcaaaaaataactcagctttgaccccttgaaataagcaaaatgctgataaaacagcacatctggtggctaccctgaataaaattattatggaattacaaaaaaaaaaaaaaagaaataaataaaaattattaattattaaaattaaaaaaaaaaacttacaattaaaagtaaaaataattgcttaattaattataaattaattaaacggatcaaacattaatttaaaaaaatatcggt

SEQ ID NO: 20081 - DNA, 876 bp, Heterodera glycines
gaaaaaaacataaaaatttggtgatttttaggcaaaaagttttatcagttaacaataaattttcaattttcttttcacactataattaatattttcttaacaaaaacagaaattttggatcaatttttcatgaaagaaaaaatgagtatggatttttaagaaaattttgtattttaggggtatgtatgttttttgaaaattttttaggtcgattcttaagggtgaatttttcgttgttattgctggaaacaatgttttagtgaaaattttacaaaaaatgcaaactaagcacaaaaatgctaaattcagcaaaaaattacaagctctcaatcagcattaagcacaaagcatgaaaaagttgggccaaggaacctcaaaccaagttataaatgcgtttttcatcaattgggggcctaaacggcacaaaagccatagagaaaagcataaaaatgaaaaaaaatttaaatttaaatggaaaaattgctcttccacagaccatgcagctgattggcactcggccgttgctcaaacattggccaatgtgctgtcgccagcagtcgtcgcagaaagtgtgtgtcgcgccaagcggttcatatcagggttgttccgggtcgagaaaaatatcgggtcgggtttcgggtcgagaaaaaggccgggtttcgggtatcgggtttcgggtaacccggaacaaccctggtgccattgtaataaattctttcttaaacatttatataaatggcgaagaacattttcccacttttttgttgaacttttgctgtttttggagcagtacacgcaacacaacaaaaatcaaaaatatataaagtgactagcgaatgcaaagtcttcaaatgttaattttttcttattcttcaa

SEQ ID NO: 20082 - DNA, 1101 bp, Heterodera glycines
cctattgttccttgcccgccaatcgattcactgatgccctaaagcgcacagaaaattggcgacaacactgaagatcattttgacagtatttgcagagcgtggaaatttttggccaaaattgacttgggccaatgcgaaaagtacggggagcggacacagctgcgcaacttttgccgcgaggtcgaattagtgaaagcaaaatgccaagtgtacaatttaaaaataaaaacggcaaaaaaacaattctgtttttgctgcgagtgatattcggcatcaaatcatagaattaaacacttttcagcacaacgaaattatgttcaaaagtccacataaaatggcttttcaaatggaaattaattagagtcatttgaataatttgcttaagcatggcctttgtcgcagaaccatgaaacggtacggggacggcactttgcgtgtacattcactcgcatgcagagaatggcattctatgtatgtgtgccgttagttgttttctactgttaataattgtttgtgtttgtgttggtccataaggacgagagagtgccaaatataaaccggaatttgcggatccctttttacgggacggaacccgcgccggtgttggactttcgtgcatatttcgacattgtcggttctgctcatgagatatttagttccgagtccataactccgccgaacaaagacttccacctcaattcattcattcctttagttataaatgtccgtaccgtgccatttacgtggtggatcgccgtgccattttcgaccggaatatgcataaccacgcatctttgccgccaactgggaaaacggaatcactgccgaagaaaataagagttttgccatccccgctgggcattttcgacaaagccatgccatataaaaggtgtcatagccctatactcacccaggatttgccatggcatttttgactaattttttgtccatcaaatcgcgcgcctttttcacagtccgttcacttctcatccgccgacattggaccattttctgctgaacctttctgagcattctcatcaatggcaaacatcaaaagcgacgccgccaattgcactgagcaaaacggggaaaatccttttg

SEQ ID NO: 20083 - DNA, 1676 bp, Heterodera glycines
ttgatcttatatgatcgagcaagtggggagctggagagggcagggtcggtagttcagctggtagaacactgtccggaaagccagagacgccggttcaaagccggcccgccccatagtttttccctcaaaggcttccccgctcgttcatatatttcatggcgacccttggcggcttccagttcacccagcagcagcagagaagcgaaaatgaagagagaggataaagctggcactggaagtgatcgaatctgcaaccttcagccgagcagcagctgacgcagagaagaagaagaatggacgaggacgtccataagagaggcccggaatgagatagagaagaagaagcttccccgagaggaagattaatggatcaattgaggcaacaattgatcctatatgatcgagcaaagtggggagctggagagggcagggtcggtagttcagctggtagaacactggtccggaaagccagagacgccggttcaaagccggcccgccccatagtttttccctcaaaggcttccccgctcgttcatatatttcagatataatgggcaaaagctggataatttatttatttttaaaattggcggatttttggccaatcaattagtcagcaattagttgcagcgaaacaataggcatttcaccgccagaaatttttggcgttgcatcccaaaacgcggcgcgggacaaaacatcgtattgaaataactgtagtctcagaaaaaataaaaaaattttaagaaagaaagttttggttagaatgaaattttgttgtggtgttttgaaaaaccactatgttctgaaaatcaaattttgcttaatttcaagaaaaaacggaaaaattccttgaaaatgttttttttcagggaaacgaaatttttttaaaattattttttgtattttttcgaatatatttttattttttcacggtgacgttaagttccggcgacgtctcgtcctgccctgatttttgggaggccataacttctttttcagtatgggcttagcgttttgtaggtttttggccaaacttttttgtatctcaactagattttttgaaattttgcaggctattagcgactatcaagcgctttaaaatcacatcaaaattttttaattcgaatgataaataaaaatgttatagcgtttggcgccaaagtgggtactctttaagtttgggtccacattcaaaatttttttttaataagcacgtaaaaaatgtgatgaatttatttctgtttcaaaattgtttttgcgttctttttgctctctcatttttcccaactctctctttttaagttacataacaacagagttttgccttgccttctttgacacaccaatcaattggaaaaagggaaaattgagccacaaaaatgaatcgacggtaaggaattttttttaaattacaaaattttcatttacccatacatttttttacgaatctcagttggctttgtaacgacgtgtggatggacaattctcccatcttttaactatgccaaactcggcctcaaaatggcattgctttccgaccgtttcgatgttttggtggacacgcattttgatggcaaaagcgaattcacaatttggagagcaatcgaaattgaaaaggaggaagggccaaaaccgaaaatgtttatacgaatcgatggcagttttgtggattt

SEQ ID NO: 20084 - DNA, 941 bp, Heterodera glycines
tggataaatttaatacattaacgaattggtaggaaagatttaatgattttttaattttttggaacaagaggggtccgacggtgccgaaggcgtgccgggaaattagaaattaattaggtttcctaagactttctgctaaaatttttgaaaattataaaatgatgtcattcagttcatgagcccgtcattagagtgtattttccccgaaattttgagtagttaacacgaagctcgaaacccgaagcacaaaaaaaaaacgtgaaattttcgaagccaaagtttcgtccaagatgctttggaagttctgatccgtcgggctctctttaattatttccagaattaatttattaatgttgctttataattttatttgtttttttggagctgtgttactttaagttcgatatttatcgaatttacaacaaaaaaattaaacttgtttatttcaaagctattccgtaattccaaaaatcaaattaatatttgggaatgagaaaaataaaagagtaaggggcggtgaagcaaaaaaatgtttattaaaaaaatttatattcataattttctatttgggaacagagggggtcttataaaactttgcaaaggggttaaatgatgccataagaaggagtctgtatcgttttggcgccgccgttttggcgccagcccaagtttttgggttataactttttttcttgttgaccaaatctaacaatcttggtatcattcgaaagcttaacatgtttagaagatatttgtaagctattgcttcgcgattagacaattaccaaaaaagttataacatgaaaatgcaaaaaagtcgaaaattttgaggtttttcctaataacttttttagaagctaaaatttttgtttgttttttgcaaggctaatagagcttgtgaatggctttcgaatgataccaagattgttagatttggtcaa

SEQ ID NO: 20085 - DNA, 1351 bp, Heterodera glycines
ctttttccgtgaatatttttatagtttattttaatgtagccataaaaggtaatattttcgacaaaaaaaaataaaaaataaatctcgtcaatgcttttatttattacaatttaataaaataaaaatatttagttttttttcttgaaaaaatcttagtttttagtccgattcaaaagtgcaagttcagatctgaatttttagtaatataagatataaatatattttaaaaaatatgataattgtataatttattatttattttgttcttttattttttaattgtaaaataagtttatttagtttttataatctttttttgctctacaaaagataattaatgcataaaaaatattatgttttaataattaaaatattacaaaaagcgtttataattatattaatatttatattcaacattagatatctcatataagataattgcataattaactttatttttttttgcatttaattataaatattttcaaattaagattaattctcctatattttatttcttttcattttcattctcagggtttgtttcagatattccatggttgagcgatgatggtttaattaagattaataagtgtatattattaaagtttatatattcgtattttgtttaatgttatatatttttcatcaatgttatttcaaatatgctattgaagatttatttggtttaaaaaaattttaaaaatttctgacttttgttgaactgtagtgcgccttaccgtattttacactccgttttgtaaacccatttatttaatttatcaatttctgggctaattttttaagtttgctttattgaatgaattctttttgaaatttaaaaactgtatatcacaaaactttttaattaataaattatttaatgttgctcttttttacctcttgttatttgttgtggtcctttccggttcgttgtaatcagattgaattttaaaaatgttttatttattggttatatataatataagtttctaattttaattgaaataattttcatttgatgaatttatttgttgtttatttaatattttaaattgcattaaaatgttttttattatcttggcttgtgataaataaattattattttattttttaatgaataataagaaatttaacataatttattttagtgcaaaaattcgacatcaaattttaaaaaacattctaaaatattgtaatatgttttgattatgattaatttaaatttaggtttttgcagtacatttagaatttgtctatgtatatttttcatttaaaggatttaatctattaataatcaatattaatagaagggatttaacccttaattatttttttcatgactctaga

SEQ ID NO: 20086 - DNA, 1363 bp, Heterodera glycines
  unsure (1)..(1363): unsure at all n locations
actgatatttttaattttagcacgaatatcgcaagcattcggatgaatttctaatgatattaagcaaattannnttnnaatcaagtttctccacagcaaaatggaagctgattcgctctaaccacagggcattatcccaatgtattcctttttaggtatgtgtcatattttaatcattttctaaatattcgcaattattatcagtaaacagttaacttcattgaaaaaactctgaaatttaattgcagttagagaccgaaaatttcccgagaccgaaattgaaagtcccaagaccgagacccaaaaaaccctagattcgagaccacgccgaaaaaattattttaaaaaaactggtggaaagaaaaaataataaatacgtcacagttagagcactttgctattaataagaattcattaatttaaccaattatgcattaagtgtttaatatgttattgtctttggtattagtaaactgttgaaataatgacagatttgagcaatttaacggtaaatgcattcaaattaattatgcatttaataatttcataaaaattggcaattgaattttattcagtgttgaacaatcagtttaaaatctatgcaatgattatatctaaacaatggcacagtaagccaaaagaaaaaaattatgaattatttttccattttgaaagtataaaaaaatttatttataattggaatatgaacgacctaaaaaatatattatgcctaaaatcaaaaaattaattctgtattaaagtggtgataaatgtactgaaaatttaacgaaaaaatatttttatatttattaattagagccctcaatttgtttgtgtgaaattttacattcttttttttgagaaaaaaatctaagcacatgaaaattggagtttacgaatttaaagattacacaatactaaaaatgtttcaatttaaacggcgaaaataatttttatctttatagcgttgaaaatcatttgtttgcagcgaatgtggttccattttgctgcggagaaacttgaattacatttaaatttcgtttgaatattattggaaattcttcccgaaatgcttgacgatattccgtgctaaaatttgaaaaaaatatataaccttttaaatttaatttaaattattcaaaaaacacctcataatgtatagaatgggtccatttgatgccgcgccaatgttcaataaaattgcggtgatctcatgaacaaaccaagcagtgatcggagacggaatgaaatgcttgatcagcgcaataaaaaaaacacagatcaaatagcctccaatattcactgtgatgatacaaaaaagtgaacgaaaaacgcgatggttgatcgaatcagctgagggtaa

SEQ ID NO: 20087 - DNA, 1086 bp, Heterodera glycines
tcaattaaatttgtccagaaaatgcggtataaacaaacaaaaaatgaccagattggtgaataatttcaaaaaatgagcaaagtatcaaaaggtaattaacggtgccattgagtgacctaaaataataaatattaatattaattaaaaaggtatttaattactttgtcctgatggtgacataaatgactgaaaaattgaggacaattcccatggtcgcgatgatacccaatatggcagcacagctgatcaatttccagtttggagtttcatttgcgaattccaataaaaactaaattaataaaaataatacttataattaacagatttaattaccgttaaattgctcaaatcagccattattcaacagtttaccaatgacctaaaataataaaagaataatattaatatacaataggccaaatcattgaattcttgtgaagccttattgtgataagttttgtgattttcctaacaaaaaactattattatttaacgaagcgtctaaagataattggaaatatatttggttgagttacagcttttcctccctttaagtttcgaaagtttttgcaatggccgggctccttttttccaatttggagtttgattttgtgagtgccaatcggagggtgtgagaatggcaccggacttaaaaccgagcccatggcaactatggcgtgaaaaagtggtgaaaaaatttaataattattcactccaattattatgtcatttattaaaaaataaattgctaattggtggtagaacaatgaattcattttgaaaaaaggcgatttaaattaggaaaaattcatacagaattataaaaaaatttgagaccctcgattttcggtgcgacaataggcttctcaagtgctcttacaatagttacccaacccggggctgttggggttgatgttaatttgatataacagcttggatattttgggacacagattggtgagccaaacctagtggggtgttaattagccaagtaatataattttatcggtcacataagtcttaattggttttaaccggtactgctattctcttcatatcttttcctgaattacgaaataataaaaa

SEQ ID NO: 20088 - DNA, 1078 bp, Heterodera glycines
gaattacaaaataagtcctcatttgcgcttaaaagggcgagaaatgtcaattggagcaatattttcggcatgtagtgctggaatttcagaattctcgaaaactggcatctttgtgagaattgaaaacggtacgggagaattacaaaataagtccccatttgcgcttaaaagggcgagaaatgtcaattggagcaatattttcggcatgtagtgctggaatttcaaaattctcgaaaactggcatctttgtgagaattgaaaacggtacgggagaattacaaaataagtccccatttgcgcttaaaagggcgagaaatgtcaattggagcaatattttcggcatgtagtgctggaatttcaaaattctcgaaaactggcattttgtgagaattgaaaacggtacgggagaattacaaaataagtccccatttgcgcttaaaagggcgagaaatgtcaattggagcaatattttcggcatgtagtgctggaatttcaaaattctcgaaaactggcatctttgtgagaattgaaaacggtacgggagaattacaaaataagtccccatttgcgcttaaaagggcgagaaatgtcaattggagcaatattttcggcatgtagtgctggaatttcagaattctcgaaaactggcatcttagtgagaactgaaaacggtacgggagaattacaaaataagtccccatttgcgcttaaaagggcgagaaatgtcaaatggagcaatattttcggcatgtagtgctggaatttcaaaattctcgaaaactggcatctttgtgagaattgaaaacggtacgggagaattacaaaataagtccccatttgcgcttaaaagggcgagaaatgtcaattggagcaatattttcggcatgtagtgctggaatttcaaaattctcgaaaactggcattttgtgagaattgaaaacggtacgggagaattacaaaataagtccccatttgcgcttaaaagggcgagaaatgtcaattggagcaatattttcggcatgtagtgctggaatttcaaaattctcgaaaactggcatcttagtgagaattgaaaacg

SEQ ID NO: 20089 - DNA, 2618 bp, Heterodera glycines
  unsure (1)..(2618): unsure at all n locations
ggacttttctatgatgtgcacctatcttctctgagttttttttaataccctatgattttggattgatttaagatggaatttagatttaaattttaatctattggttcgcacgccgtccgaccgacgaaaatctttcttatttcccaaagttgaatctgccccccccatttcttaggtctcatggaatattttccatatgaatgaacaaacgcacacacaaaattggcgccagggcggcggcacaaacattggacgaaacgacgacgacccctcgggggagaggtggggggacggcaaaaggggcactgaatgggaaatgatggagcattgagaagatgggaatttggggaaaaattggaacattttaggaaatttggacaggttgaggagacacactttacatacacctctctttactaaacaatgataaattttagaaaattgaaagggaggtgaaatttttctgagaaatttatagattttattcccattcatttggaatcgaaatgagcaaatttaaatgctcttgtctttttaagggagaaatgaaatttgaaaaaagaacatttaaacagcaaatatgatctcgcggttgcgagtcgctcattgcggattcaaatgatctaattgcgggtctcgagtaaacaaaatagcaaaattgtgtttaacgcattaaaaaagcaaaaattctcagcgaattttcaaaaattttcgtcctcatacttttcaaaaaaagacaatatgcttacaatcgcttagctacgttaaaattattgtctgttgatgttgaaaagggccaaaaaacaataattagaaaaatttaaataatttttttctttcttgcttatgaaaaacaatttcattaaaaaaatatgtcggaaaattggccaaaatggcacgacaaaaataaaatgccaattttacataaattctcactcaacgacgagagtcttgaataggcacttaaatgatggcacatgataatgccgagaattcggaggggagggatgcaaatttgccgagtgccgtcctcaagagggccatgtaaaaattcaattttgtcacctttcacaaaatttagtggcacataaacacttgatgagatttaaaattatcaaatttataaaaaaagagaaaaaaatctgaatcttcgagaaagacactaaaagcaagaaaagggtttttaaagtatgagttatcataaatctgtgatgatggcattggatagtgccgatgggcgatgccgaattggccgcgggtccttccgctggtgccgcccataatccgggaaaatgagacctcccccgtttaggtgagagggcgggggcggcgtttgtatcaattttcaacctccagtgcccgccgcacttctccgcttggtgggacgacctttttaaattggccattgtgtggtgccaatcggagaaaattgggcacatttttgtgaaaaaatgagtttttgaaattgagaagcatgaaaaaatggcaaggagaatgaaaagcatccatttacacctcaaagtggtgacatcattggctgataagatattagcatattatacaaagttttgagggaaataaatatttattaaaaattctttaatttaaattttcgttaaaagaattttaccgaaaaaagcattttcagagcagagaatttttaaaaaatggaagagcaaagaaaaaaaaccgaagtaaaacggcggaaaggacgaagaaatgaacgacacaagcagccaacttcaagtgttcttgccggaattcttgaggaggacgaagcaagattatggggagaagaaggaagcaccgcttctctcgaaggaggaaaagttagcattttgttggtgctattggagagcttttcctctcatcaaagtaatttgttagggaggggacaaggaaatttgcaaaaacatggaattttaatttgtaaatttatttatgatttaataaaaataaattcgtaggttttgaaacataacattaggtgcattttgggtttttaaaatttaaagttgctgaaataatcaataaatttgaaattcaagtcactggcttcgggaaacaatgtgcttcaggttaaggggatttttaaaaaaatttactaattaatacatacagtctgttcaaaaattattgaattttttataatttttgggatttttatgactttttttttcactttttaaggcaaaatttgaatttcagcaaagattgctgaaaaataaagatatgaccggtaaaaaggcaataaaatccggcagaataaattgttaaaaaatttgattttttttaacttttggctaattaatatttaagaacttttttgcttgtttctgacttttttgcgattttttatggcttttttagtcgacttcttggagatttttcgtaatttaaatttccagccctaatcatggtagaataggtcaaagtcccctgtggtgctaaattttgatcattgcagatcaccctgatggagtgatctggtcacggtggtgcaagtgccttttttgatcagcacaaaaatttataaggcatgaattttcccangattttatcaagtgcagaaaaaagaagatacatgtcttcaanatatttgtttatgtatttatttt

SEQ ID NO: 20090 - DNA, 1112 bp, Heterodera glycines
tttttgttttttatggatacacacgtcgaaagatgatcaccacctgagatttaattgctctactacaaaactattacatactaacatttaagagtttaatcacaaatagccattaaattccatcaataatcgttcgtcactttcgtccccacaaattgtcgaaaattgtgccgcgattgttggccaaggacagcgagtcggcataatacgactggggacgagcatttgtcagagaaactgtgagcagaagaagaaacagcagcaaacgggcgaaaaacattttaaagtttaatcaaattaattaattattatttggagaaaataaaagtaaatatttttgttgtcgcgcgatggaaatgatttttgatgggcaatttggaatttgccgccacggcctttccttttataggcatgcgaatggaaaggcacaaaacagaagcacaaaatagtgcccaatttttcatattttgtgttatctaaatataacattgggtcagtaattaattatcaaaaacaaacctaattaaaatatactcttatttatggagtcattaaaatggaaacaataataataataaatgattattatatgttttattttgcatcaatgccttaattgagcaattgaaggaatttctttgaataaacagtttttaaaaattacttgttagaccttcattgtctttataaaagtttgcttatcactaaactatttgtttgtctcccatccgctgcttttgcttattattgtcaagcatttgcgtcaccaattctttgttattaatattttttaaattaaaaatgataatgataatcgaatgttttgattggtccattaattaattaattgttaagcctttcgttgctcatcggtcggtctttcattcattccatcgcttttgtttcctcattggctccgcttgttcttcacaaatccgctaagtgacatctgcattttccggcgtagcaattcatgccaaagcacgtgtcctggtgattatgccattgtcatcattccattcccccccccctccctttgcccacctttttctccccctttttttctattatcacctttttgccctcccatttctgcttgttacacactttct

SEQ ID NO: 20091 - DNA, 1477 bp, Heterodera glycines
  unsure (1)..(1477): unsure at all n locations
tttctgtttgtgcacactttcctctgtcatcccctcagattctttaaagcccgctttttggaagcccacttcgcagtcgcactttttggatttgctgcncacgaataatggcttttcgacacaagcatctttcagtccggcacactcccgcggcacaatgtttttgtcaagggaaagggcgccactgttgagaccgccttaagcaaaacaaaagtcaaaaagtgatccataggatcgaccttttcgctgattgaatagaaatgacaaaacaaaaaacgcagtaatttcataaatcattatttaatgtattttcattaattagcccaactcacacagcaataacagttggaatcccccgcacacgccgcagtcgcacgtgcccaccttcttcttcctgtccagcgtcgccggttcgcatttgctccttgcgccacactccgagtgtgcgtagcatttcctctcctcctgacactttatcggcttccgcttgtcttctttgctgtcctcctccgtctccgtgtcgtcctgttgcggccccggcttttcttgaggctgcttctgctggggcggctgttcagcaaaagagcgaataagtcaattagtgaattaattaattagtggatcaaccccctaattaacgcggtctttaatttaaaattgaaattgtcctccgttttaccaaactcatctcatttcgcatgtcttcttcaccttttcagtttcatttttttgcgatttcggccctttttccttttcctctgcgcgtaacaatttttgcgatgctgcccatgaagcacgcatctggccatcatcgccgtccatgccgcgcatttgtgccatatccatttctgatttttgtgttatgaccatgccgggcttttggcccctttccatcccgcgcatttggcccatttccattccgctcatttggcccatttccatgccacgcatttggcccatttccatgccacgcatttggcccatttccatgccgcgcatttggcccatttccatgccgcgcttttgatccccttccattcgacccatttgtgccatctgttgatgcgaggagaggacaagcccaacgaacaaccaacgcaacataatgatcggcgtcaattggtaagccatttggaagagtttggctgaaatattaatttttaatcatacataaaaatgttttaaatgaatttttaaatgcaacaaaagaaatgcccatttctgcaccttttcgcttataaatagctccaaatttgtccgccattgctcagaccgttgccatttgccgggagcgacaaaaaaatgcttttgaatattactcattggtttccgagtgaattttatggcttattcattcaattccgacaaattaaaagattatgtttgaacataagtaaatgattaagcaagtgacattttaggccaattaaatttaaaggccattttaaaagagtaaaaatcagtgttattaacgaaa

SEQ ID NO: 20092 - DNA, 2795 bp, Heterodera glycines
  unsure (1)..(2795): unsure at all n locations
aatttaaaacttcacaaatcaaaaataaattttntggatcttcctgataagtaaaaattaaaggtttgacacaatttaaacgtgaattatataaagcattggttaattagcattagaaatgcaacaaattaacggaattattatgaaagtgtttcctttttaaagaatggccaacatttttgagacattccatcatataaaactcagatttccgtttcaatttaccgtagtatttcctaaaattatgcccatggctcacaaactctacaaagagggccttcaataattcacaatttttgaaaacccaaaacccttttcagcctcctcccgccagtgagtacgaaattcggtgttacgcctccgcgccaaccgacgaaagcggcgaatcgtcgccggcggctgccaacccaaagccaaaagcgatgcaaaagttggaggaggagcagcgcaacgaattcctcggcgagtacggcctctaccgcagttcggcacttcaaattgcgaagaatgtgatgtccaaactgttgcaggcgcacctagtggtaagcagccacagtttctgtgttcttggatgggttttggcatttaattttgaaaaatgatggaatggttaaaaattaatttaaattgaccattccgtgcattgcgatggggggggggggagtcggggtgtcatgacaattcgtacacagacaatcgtacaagcttaaggcttaagcctaagctttaggcctaggcttaagcttatgctttattttgcaaaaatttttattgtatgcgttgcaattgacccgaggagtcgacggacgactaaccataattatgttttccgatagtggaacctatgtttttcctccactaacatttgtcattatttgccaaaatctattccgcaacaaatgtgtttaggacgacgattctctggagacgagtctgaaccaatgggacgccatttttgaggccatgaaaaaggcgggtgccgcggcacaacaaagaggcgcacagccaccggcgggtgaagaacgggcgacggagccgaggggaggcggcggaggggaccaagggtcgtcgacgcccccgcattcggtgatttaactgtcataattcaaattgcataatttttcctccctttttaagcctccgacaaactctgacgctggtccaatgtcgcaggcgttggtcgaccgtttctggcgcggggacgtgtgcctgcagggcggcacggggtggtggaagcacgaggtgtgcctgggccgtacggtcagccaataccacgaggagacggcggaggacggcaccaaacagcgacggcagaccattctgctcggcaaatttgacgaagcggtgcacaaagtggggattctttgcggtttcgaaacttttttttgttggaaaaacccaaatttagtggcaaaattctaaaaaaaaatttttaaaggcatgggccacagaacatcctggcaaagccgtggagcgcaaggtggacggatcggtggttcaagtggcacacatgtacacacagggcgatgtgtgcacggagacgggtgcccatcggtgagaaattttcaggagggaagagaagagcacggttttggtgcatttgagaaactttagatgttaaactgttcatgtttgttttttgaattttaggctgggaagaaatgctcattcttaatcattcccattttttatatttcctctatttttctccagggactgtcaggtgcgcatgaaatgccgagaggacatcaatgcccagaaggtgttcatctacatgttggaggttggtttctttacttgtatcattaaaaataaataaacgaaaagcggttttaaaagtgctttttttgtacgttttgctattttgatttcctcacgttcacggtgttcatttcaaaaccaacaatacgtttttacattttgcctttttttgtcgttgtacgttttgccatccccccccccgccctcaaattcttttgcttttttccgtttttcaatcacttttttttcgctactaaatttagcccagcacttgctcctacgtggtggtgctcgagtcgtccctgttctgctccaaactgcagcgtgtggacgagttcggactgttgtcagtggacgaagcggcgaaagcgagcgttgccgaaaaggaaacggcgcccgaacagcaaaccgacgaccggttgatgaagaaacgcacttttggcgagaacacggtggtgttggacctggcaaatcaggtgggccgagccaaacggcagtttattttggtgttatcagaccaatgttcacaaatgggttgccagagggacggtccccatggaatttagggcttccagtagggaattgagtggaggtaccatggcgagtgttttccaggcctgggtttttttctgggtccgggtccagttcattttacggcaacctacattttcctggttttttatccaggtccaggctttttaaatgtcgattagtcaaaaatgatgtgatgccattttcaggaggaaataatgcgcgtggtgcgacaactgctcgaaggggccggcgatggccaagtgtttgtcagtgcggccaaactgaaaattggcaaaggcgaagacagtgaagaggacgaagaagcggaacaacaacagcagcaagagggaaagagcagagaaacggcggaagccgaagcagaacatggccaagggagtgaggcggaaaaaggcattggacgagaagagcaacagggacagacacaggtgacgacagacaacgagactgaccgcgagagagtgcgcagcggagcggagaca

SEQ ID NO: 20093 - DNA, 504 bp, Heterodera glycines
aatgtgacaaaaggccaaaaataacatggcaaaggccaatgtgacaaaaggccaaaaataacatggcaaaggccaatggaacaaaaggccaaaatgcaatggatcaacgggcaatgggacaaaaggccaaaatgcaatggatcaacggccaatgggacaaaatacaatggaaacggccaatggaacaaaaggccaaaatgaaatggatcaacggccaataggacaaaaggccaaaatgcaatggatcaatgggcaatgggacaaaaggccaaaatgcaatggatcaacggccaatgggacaaaatacaatggaaacggccaatgggacaaaaggccaaaatgaaatggatcaacggccaataggacaaaaggccaaaatgcaatggatcaacgggcaatgggacaaaaggccaaaatgaaattgatcaacgaccaatgggacaaaaggccaaaatgaaatagatcaacggacaatgagacaaaaaggcaaaatgcaatgaatca

SEQ ID NO: 20094 - DNA, 769 bp, Heterodera glycines
  unsure (1)..(769): unsure at all n locations
acaaaaanagtaatttttaatggcgaaaaaatagaaattggaagggggaaaagtaagaaattgcaaaattaaatcagaaatgtgatggaaaataaatggtataattgcaagggaaaattgaataatttttaattaaatttaattaattaataatgaagggggagataaaaagaaaagcgccgctttgagaagtttaaactccccacaaggtccaccataaaatgggtgcgcgcatgaatccgttgggccctgggccaatgccaggggcattggcccaaagcgcggattccccaattgaaagctccgattaattcaacaatcggtttatttagcgatgagtatatgtggaaaagcaaaaaggaaaagttcgcaacaaaccgatcaaagtccccgatcacactgatcaatccgatctctcccccaaacttttatattggcaacaggtgggcgggtcgggcgccccgtggaagaaaaggccaaaagcaagagaaattgggatgactagcgacagggaaaaagaaattgtgagagacaacaggggaaaggaagtcaagataggcggtcagacataacattcccccgcacctgggaaagccgtgccctcacggcttaagctggccccgggcagaaggaaggggtgcgaaggagaacatagattagagagaagatgagatagagagagaaagaaaaagattatttgaatatgagagggaaaagagatacgaagagagtgaacagtgagaggagtgttgtcgttgcttttgtgtac

SEQ ID NO: 20095 - DNA, 1952 bp, Heterodera glycines
  unsure (1)..(1952): unsure at all n locations
agaatttagtnntggaatcggaagacttgggaggacattgtgagtcaaaaagctgggccacataaagcgcatttgcttggcactgaagaagctcagagtgagttggtgcctcccgcgcgatggcatttggccgtgcgatcgcttcttcccccccatcccccatgtccgttccgttcagaattaccgtgccgaattggtcgacccacccttggccgtatgtccgctgctctgtcctccctcttcgtcttcctccgtttgccctttgtcttccgtcgttggcattcctttggacattcactcgtcggcattttcatcagaaaatctgtttgtacagtccctcagcagcaaacgacgcaattcgcaagcgcaacaatcgaacagtcagctgacggcggtggaaattaacgagaaaaattgtcagcgaatttcctttaccaatggcatttcgacggatggcacgcgattaatgagcaaatggacagaagtgagagggacaaatgccaaagttattaacgcaattaccgaattataaaacatttgcaggatggcggccaacgagttcaaatgcgaaatgacgaaaggacggcgacagacaaaggaccgccacggctaaatttgtacagaaccagccaaatcattgcgcagttgcccagggatcctccgcccgaattagacgaggccgacgaatgggaagacgaacggggcacaaatggactgcacggagatgggcaccatgggcagcctcctcctccgccgggtgagtcacccactttttacaattcctggccaattacacttgagtcctttttcatgtccagttcgtccccttccccctaaatgcctcgggctttagccaattagcaactcgctaatatccattccatctctgtccatttcagcaccggcccctttcgctccgttggaagtgtttccgcttgcgcttccctcctcctcccgctccgccccgtcctcctcttacctccgcttgttctcctcccagccgaccactcctcgccacgctcctcccaatcatccgacattcgctcaaccgtttatggacgacgaccaatactatcagaggcatttgcgacaacggcaacttctgaacgcgctggaggggtcgattaatacgccgacagtgcgcacggaacagagacggattattatggagacagaaatgacaaatttggtctcaaaaagataacaaaatgaaattgaagaataaattgtcaaagaaatgccattcaacacaaattcactgctaattcaatggggtgacgaagtctaaaacattctcaaagttacgcgtaataattgacatttcatgtttgagtaaaagctaatttagccaaaataataatatttttttgtcatttttaattgatttgcagctgattaagcatagaattaatgcattgcctttcactttcggttcgatttgtgaatgttccatttccaaaatatgttaattaatcatttttatttcttttattcaaattcacttttatttttattttcctttttctcaattgttttattcgctttctctccccatttctttatttctctgctgctttccatgaatccctttgctcttggtctcggcagtgccttttcttcttccattcgttgtcccttaattctcgacggagctttcggcacacttttgggacaattgggatggaatttggaggcattttgcagcatatcttaataattatcggcactttaattgcagaaagatgacctttggagtggtggtgcactgatcagcgcgcctcaattagtggcaaaagcgcatcggatgtgagtggaaagaatgggatgatggcaccggtggggcgggcttgatcactccctctacgcggttagggtgctgatttgatcaataactgatcagttcttcatttgatgagcagtcctacttttactttcttcttcgtttgcttttc

SEQ ID NO: 20096 - DNA, 729 bp, Heterodera glycines
ttaaaaactttactgaatacctgacaaaaaaaagtttttctcttagttattaggacaactattataccatgagaccagggatggcacggaattccgatttccgaaaatttttggggcctcggaatgccatccccgccatggacacaaaatgtcatgggacgcgtaaagtgttgttgggacgcgtaaaatgtgatgggacgcgtaaaatgtcatgggacgcgtaaaatgtcatgggacgcgtaaaatgccatgggacgcgtaaaatgtcatgggacgcgtaaaatgccatgggacgcgtaaaatgtcatgggacgcgtaaaatgccatgggacgcgtaaaaccgactagaaccaacttttttcttatattagttgaatttctgttgacatcagtaagtgtgcttagagttgcttttgcacatttcgatgatcaaagtatacaaacaagaacaattagactattcggaaggtataaagtttccgattgacggttcgaaaaacattttttgacgcgtaaaatatgatgggacgcgtaaagtgttgttgggacgcgtaaaatgtgatgggacgcgtaaagtgttgttgggacgcgtaaaatgtgatgggacgcgtaaaatgtcatgggacgcgtaaagtgtcatgggacgcgtaaagtgttgttgggacgcgtaaaatgtgatgggacgcgtaaaatgtcatgggacgcgtaaagtgtcatgggacgcgtaaa

SEQ ID NO: 20097 - DNA, 1087 bp, Heterodera glycines
agattttgcaaaatcactgattttatctttgatttttcatcaagtacttgattttttgggaaaactttatgaaaattaatctggcataaaaaacttatatacagaatttgtagagctcaaaaagagctttcgaatgagctattgaatgtttggagaagttatgtttttcgttttttacgattttttgaaatttaattactggcctttacgggtcatgtgagacgggcgaggtcttgggttcgagcctgcttggcagcagtttattcttttatgaaaattgatgaaaaatcatagacaaaatgatggcttttgtaaaatctgagctcgcccagcagcacgccgtacgagcccaacaattggcccgtcgaattcgcgccgtcgctgaggcggcgccgtcgtcgcttcgactcgccagcggcgccgtcgaacttcaacagttagaccaccgcattgcacaccttttcgcacagcgggtgaatttgccgatttcgccggttctgtgggtgaaaatgaatgaatgcgcggaatggaaaaaagtgccaaaaagagaagataacaaaaaaatgccgaaaaagagggagaaagtagggccagtttctagataaaacattgtctttgaggcttttcctaacaaatttttgcttttatgattttggagtttgggccttatttattaaaagatttatgcgcaattttcagaatattgcctatactttgtttatgtaaaagtttgattttgatttcaactgagaaaattctaacggaattattaaatttgtagtgaattgccatagagaaaggaataatttaaaaattagaagaaaacaactacttggagggggggggactgctcgatctttaaaggtgtatttttcccaaaatttcgggtaaattacccgaggttcgaagcccaaaaaacgcgaagttttctaagctcgaattcgcccagcgctgagacaatattttttaatttaaaattcaagatcttaattaaaattggaatttttcgaaaagttatcgtgacatcaatcccgcgggatcccgcgggattggtaaaatagtcggtagagatcccgatgaaatcccg

SEQ ID NO: 20098 - DNA, 1915 bp, Heterodera glycines
agattggcaattgcaatttcattttgggttgatgaatttgttttctccacttttcccctctttattcaaattgttatcgaaataatcaaattcattttcaatttctttccaaaaatacttcgacttatcattcaatgtttcaacaacatcaattaaattcttcggagaatataattcaataaatattggcttgatcagtggtggcaattgtttcggcaccttcggacttttagcttaataaattattttattattgtcattattatttcaaaaattgaaaatttcaaacaaaccttcagcatgtaattggaataaatatttatattaaatgcccaattaattacgatatttttggcactctgcccaataagagtcttaataaaatccaaaaactcaacaacaaaaaaaagtttatcctgattttattgaataaattttttaatttgatgagtttaagtcacattatttatggagtacaataattataatttggtacatttattttgacattgatctaccatcttggaaattttttaaatttttattcttgtaatttttttttaattcggacttttttttgtaaaatttaaacgccgaattttcaatttttcataagttatgaaatatgaatgctcattttcgggcttaaaaaatctctcaaaattttaaaaaaaggtctaactttggcaatctccgattttgaaacaatttttcattaaaattaatcatttttttacaattcgaatttggtaaagcttcattattctttgctccaattcctttcgcttgtctttcgcttgtcttaagttttgggctcagttacttatataggtatttaagaaatattttttatttatttttttcattaaaatccccaaaagttggctcggtaaatatcggtcatagggcccggagcctaaaatggccaaattatatatcaatcgatagctctcggtctgtaatgaaagaatccgaaagaatttttttgcggcaaccaatccctgaagagttacagacccgggactgaaatggccaaatgcctttgggactgaaccgtccaactagtaaaaacgcatggaattgcgacaaaataaataccaatcgattcctctctgcaggtaacccacgaatccgaaagaactttttggaaaaaaagaaatttacaaaagttatctaagaaaatgacataaaaaatattagataagccaaatcacaaaaatactttaggtgcttccggagcccgtagtctcgccccacctactggccgccgtagtcgagtgtgcggcggttttttagcgcaataaacaaaattcaaacttaaattttattatggtattttaccctttcttcgggctgcacgttttaaaacagttaatgtttttgaggacccatttttgtaaatttacttttttccaaagaatatcagtgaaaatggaaaagaaaattccaaaataaatcgaaaaattggaaaaaatgggagaagaagacagaaacatgatcaatgaaaaatgggacatttgtatagaaatgccaaaaataaacaggaactttttacttcaatctcaattgctttttccaattttgccttttcttctttggcatttttgcatatattttccattaatccgtcaaattcttttcggagattggaaatatttttttccgtttcattttttgatggattttcctcacttttttcctctttcattttgtaattcaattcctcttcatttaacaaattggtttccaaaaaattatagatattcctcatttctttttcacctttttgccaccaaaaacttttcgaaatttcgttaagatttttgataacttcaattaaactgttcggcaatgctaatgtaataaatattggctacagccaatggtggcatttgttccgacaccttcggatttt

SEQ ID NO: 20099 - DNA, 2870 bp, Heterodera glycines
ttcagattctctattaacatgtaaaatttcaaaaaatttcgtcagtttacaaaaaagttatggccaaaaaacctcaaaaattaactttttcttggctttttcggcgccgcgtggcataacttttttatttttgaatcattcatttctatttttacatgtaaatatagagcacacatagagctttcaaatgatgccagattggctaaagctaactgacaaataaaaaagttatagcatttcaaaatttgcggctccgaaatggtccgcgccgaagtgaccccgaccctgatcaaaatgggcaaaatgggtttgccaaatgtgcgcaaatccatgagtttgctaggagcttattcctctgatcaaactccagcagcagttcatcttccctgcccttatttgttagggggggggggtgatcaatttggggaggaccatcttcccccgtgggaatgggagggatgcttccaagcggaccttgcgctggggatcaataaaaaaaattccatctcacgacggtgggattaatgggcaaccgatggacgacgacgattggtgctgaatggaatttcaaacataatattttcaaatattagcaatttagtgagccaatcaaaaccatagagggttcctaactaatttgttagcaattttttcgactttttttgccaaaaactatcatttattttccaaatgtgaacaattcgtgtcaatgttccatcaaaaatatatatgggtcaaattgtgccttctgttctctccaaataaatttcacttttacgtgcacatgtacataagaaaacgtgaaattacaaattacaattttgtgggtctaaaacgatttaacttttacgtacacttttacacaagaaaaacgtgaaatacaaattacaattcatttttgggtacatttcacttttacgtgcacatgttcactaaaaacgtgaaatacaattcattttttggtttttacacaataaaacgtgaagttgcgattaggcaattttctgtgtttttgtacactaaaaacgtgaaattacaattttgtgggtctaaaacgatttaacttttacgtgtatttgtacacgagaaaacatgaaatttaaaattacaattcatttttgggtacaatttcacttttacgtgcacatgttcactaaaaacgtgaaatacaattcattttacgggattttgcacaaagttttgcaggtaaagaatgaaaaaaataaataaactaaaaaaataaatatgtctatttagctccaaatatcatgaaataatgaaaaatgaatttccttgtgtcaaatttttgctgtgctcaaataatcataaaccgccggtcgttgttgtatccgtgtcatattattatgaattaagaatttagttttttagcaaaattatgaataaaattgtttacactttttcattttgtttctaatattaacgattaagcatttctttctgtttcatgaaaaagcacaaatgatttttgttttggtcaaaaattatttttctgtcatcctaaaatctatgagggtttctatcactttcacagttcattgataaaaattaaaataatttatctcctacaaataaatttttaagtatgttgagaggaattgaaaaaatttaaaaattttgtagtaataaatattgaaaagaccatcgcaattgggtgatgtcgaaattttttgaaaatcattaacgcaattcattgtacttgacgttttgtcaatcaatttgtgtaatttttttcaatataaagaagcctttggagtagcccaaattattattctctatttagctggtaaattataaaaaattatttttcctgcaataccttgtttttattccgatcaaataaataaattaaaaaataaaaaagcattcggaatttttgtcgaccatcaaaaccacagcaaaaatttgtcatcgctcatttttctgaagcacttcaacactgtttgttgttgtacttttctgcatctgattgtgggaagtgattgttgttgaacgggttgggggcgcaaggagtagcagcgacggagttgggcttccgattgtattgcgggaaatgacaaagaagtcttgaaaaaaaaaatttttttttaattaaaaataaaaatttatatttatttaaaaataaaacttctattgaaaaggtgttgagtaatctttaaataaataaaaacattgaaaaaattagtggaaaaaccatcaaaagaaatcaatcaatcattagatagggttagtaaatgaaaaagtaaatttgaaggaaaccatgtaatttctgaattaattttaattaagaatttttgtaaaattaaaattttttgacggccataggaattcgaattttcaagacccaggatgttgttgatcagcgcaaacaaaggtgttaatgggaaagcggcaacaaacaaggtgacaaagccaagttgtattaccaaacatttaaaatgagtcatatggaatataaattaaaccccccagggcttctaattttaggaacatgaaaacatgtaattttttaggcaaatttaatataaaaaataaaaataatttaagttttattaaaaaattctcttccaccacccacccagctgctcatataatttgagtttgatgttcggattgatacatttaattgtttgacgctgttctttgcaaatccgttcgcatttttgtttctttgtcgctggaatttttaaagcaccatcgtcgaacccaataggaaagcattctttaaaattaaaaaaatttaaattttaaataaacataaaaatttatataattcattaatttttgatttatcgggatgtaaataaaatattcccgaattgaaattcagggcaggaatttgtggaagatgg

SEQ ID NO: 20100 - DNA, 1536 bp, Heterodera glycines
ctgacaaccaaattattgaaaagttttggtatttaattgaaacaaaaaaaaacattaaaattgctaaataataggtcaataaaaaaatataacagcagaaaatttcataaattaaaaaaaaagcttataaaagaaaaaaggaaacgatcgtttcattccaaaggcaattccttttattttgcaaatttcttttgtcaattgggggttttcggggtcataatcacaatctgacatctatttaaaccttcaaatccctacaaaagggtcccccgttggaattcttcgggggtccccaacagcaaaagtgcacatggcttatactgtacatgcataaatcattacggtaaattatggcactttgtttcttaatgattcattcatccatttgcatttcttctctttggtctcctttccttcacttcctttcccaatcgcagtttggtctccattgcgggtcgaacttcggtttgccgtccaaattctccatttggcattcaagaatttttttaaggttcattaggcacggctataaattcagaaaccaaatgatgtcaaacatttttctttcctcttcacctgataagaaaagatgctttgtacgtcgcaggtcgggctgaaaattgaagggattaagcttaattaggcacccaattgttttttacacgtcgcccttgcaaaagctcaaacatttgtcctcaactcctaaaagtacagtgttttctgattgccaataattgtcgacctttccccctgcaacactttgtgttgtcattggcatcttaagcagcgaatgtttcttgggcttaaaaggttggccaacccccggcgcaatatgcccatgttgtcagttgcgaaacgcacttcaggccaagggcactccccagctgacaatgagcacaatggcattgagtaatttaataagggcaattaggaaaagaacctcattaacggtggtgttatagccgcagagggggaggcaaaagttcatgtcgtggtctccgaccttcaaagcaccgttttttgaaaaatatccgacgactttcaccactcaccgttctgcaacagttctgaatgcgtctgtgctgtgcactttcacaagaacatttgcactgtttggccagcaattttgcctaattttggcactttctgataaaataaaatttccgagttttgccttcactgatttcccaaaacaattgcccaacagtgccgttttgtaacagaactctttttcgtctgggcaaagcacggccaattcatcgaaagtcagctgacgactgactccaaatgccatttgaacgttggcacaaataatcagcaaaagaaaaaccgtagccaaaacgccaagagcaaaaagccttaagaacaaacggcgaaacataacgaaatccgagtgcaatttgccgattgacctgtacgaattgtgccgtgtcggcttcctcacttggctttggtcatgccataaatatgcgttttcgcttcgcttttcgcaatgtttcactttcagtttcctcggctcgacgtcacatcatttgc

SEQ ID NO: 20101 - DNA, 1221 bp, Heterodera glycines
caaaatgatacatcgaaagagaaacgaagcgaatgaattggcggatgagtgattggatgggcagggatatcagcacaatctccgcgtcaatctttagccttcgccaagacgaaacgcatcccggaaaaggaacaaacaaaggacagcagcgaagcggaagaacaaattgggggtggggaaagcgcaagttgagaaatgtttcaaagagaacatttggaagtgatctgacagaattggcaaaggcgggagaaagtggcaaacggagcgatcggaatttgccagaaaacgctgaaagaaaggcaagcgaatcgaattgaatggataaatccaacggaagggacactcaaaaggacgagggagggcacaatgctcacagccttaaattgaactttttggaaagggaaaggccggcacatccgccgatttgtcccttgaaaaggccgtggatttaaatgtttttgtttttctccccccccccctcctcctcaatttccccttaatttccctctctttcaaaatttgcccttatcagtggcttatcattaatcatttcttcttctgctgatcgcccagcccctacttcctccgccttttttcttctctttgccttttttgcacaccaaacgccaaagtcatcaccaaaaatcgtttcccttcgctccgtttactccgatggattattttacacaatttatcggccattttccttcccttggcactcttttaactaaacattcttcggaatccgagaaggaacagcaacttcagcaacacaacataaaaaaggacgaaacaaacggcggaggggacgaaatggcaactgaaaaagccgaattagtggccaaaagagcgaaaatgataaggcaatgatgagagttcaaacgcctaacgattgtttgccgacatttcagcagcaaatgccaaacattttacgccgatgagcccattttggtcactcgcgcgtcgatgcaattccttttcgatgagaatgggagacgtttcctggactgtatttcgaatgtgcaacgtaattttcgtacctcaccttacaccctcttcaacccccccccaatttcctctcctttaaaccctttcccttccttcccccctttgcccttcacagatgttggccattgccatccgcgcgtcgttgaggctgtccactgccaaatgcgactgaccacttgcaacattcggtaagccctcccactaatttatttg

SEQ ID NO: 20102 - DNA, 1044 bp, Heterodera glycines
  unsure (1)..(1044): unsure at all n locations
atgtagaaattcggtgcaccnagaaaatgggtcgccgttcaatagacaantttcgccaaaaaaatataatttttcaaattttcaagaaaaaatttaaaaaaaaaacaattttagtttttatttttgaaaacctatgtttgtgggtaatcctggagtagggttaagccccgagccccccgacccgagacgtttatgggacctattcctattccctgacccccgaatcattttgctaacaaaaatcatcatttgtggtcaaaaatcagcattttgaaaaattttcttattccaactgaaaaaaaaattataatgtttttttgcggcgctcttttcctaaaagattgggaaaggggcccggcggtgccgacagtcgccgccgggggaaaaattttaaattttgaccatttaaagttaaaaacattatgccagagatatttttcaaaggaaaatgaaaaaaagttatggttttttggtagagaccgagtcggaccggatccggtcaaaaattcgccggaccggactggattggcattttcaaaaatgaccggattccggatccggtctcttataatccggtaatccggatttttcccaaaatcgctggaccggattgccggatccagaaaaatccggtaccggatccggtccggctcggtctctagtaaaaaatatgtgaaaattgggcgaaataaacgactaatgaaaattgggcatagaccccttggtattttacggcacaaaattttttttgtgacggcacctttttgtggttggttcacaatttacaaaagaaaaaaatttaaaacatgaagttgtaagtccgtacagaaagatagaaatcacattcagagagtgctaatgtcaagaggtgttccccgcgccccgtttttgtaaaattaaaaaaaaattttaatttttgagcgattttttanattttttgacgaatcacaaagttttacaactattttgactaaaaagttgctggaagttcaattaggaaaatttttcatttttttaaaagaaattttgtttaaaaatctttcg

SEQ ID NO: 20103 - DNA, 1935 bp, Heterodera glycines
cttcgttcccgccgcccttcaaaatttttttttaatttgaaattttcaagaaaaaatatttttcaaaaagttttctagcgtttttcaaaatttttatgatcaatattaattgtacgttttcttcaaaaaaaatttacaaaaaatcgctgaaacaactttaatttttttttcttgaaatttccttaaaaaaaattcgggtgggggggggggggggacgagctgccacttgtaattttaataagaaaacagatatgaaaaacaaggggggggggaacatttccaatccaaaaatccgaattctaacaaatgttttgaaacaaacaatttttcgatttaggtttttttttagaaatttaggttaggaaagtcgaagtgtggcaaacctcattgatgtccaattttttgagcgcaaacagtgtgtgcgacaggtcgtagtacagcatgttgcctttcgtctcaattcgccgctcaaattccctgaagacgtcgcggcacaaatatcggcggtccacattcagaaagcttaacaagcaattaaaatataaatggaatttccgaatgcatgcgatgaaacacacactcgaatttggttgtctcggtaatgtcgacgagcaaacattctccactttggcggacaatttgtccattgattttcacttcgtaacggaacacggtcgccggttgtttcatgtctatgccgaacagctaaaatggggaaaaaattggtataaaactatgttcatcatgtcacagtcattttgtcaggttacatgacatttgcgcctatgtcaaaaatcgggttcaaacttaaaattttcaatcccatatgatctagagcttaaaattttgcatccgatagttattgatcgttagcaaaattttgaaaaaaaatgtttcaaacaacggattattgtttctattgaaccaaaagacaatattttcttagctttaatgttgctatgagctctaatgaaaaaaaaacttaaaatccgattttggacaaaaggcgtgtccgtcgtacacgctttgtcatgttcccacttacattggtgacgacatttgtcgcaattgttgatccgtgtccttttcctggttccttttttacagccattacagtgctgcccttttcaatctgaaaaaatgagtcatgccaattacactgggaaagttaaagaccaaagaggctctactgcactttagacgtccaaccaatgagcaaccacgctcatcgtttcttaggtcataactttttttatttgatcaatggctatatttgtggtatcaaacggaagcctaaaagtcgaatggacgcctaaagtgcaatagagcggctaaagaaagaaaacttacgccccgcttcagcaagtatttctccgcttctctgttggtcgtagtttgtggtctgaggaccgtctccattttcaaattgtttttgagtaagtgttaattctagtctataagcgagggagtaatacattgtaaattggaaagcaatgagcatatgattaatgatactggcaatttccggggattactagacataagaaggtatcgtgtaaccatagcagtattctacgtgcacatttgaataattgaaatttaattttgattaattttggtccgcaattgtcaaaaaaatggggagggacacaacggcagttttatttcagaagtacgaatcatctttcgtaatgcgagatggtgttttttctcgcgtcattttttaacaaaaaattatgaaatcaaattcaaataaattttcttggcaatctgttttaaaaaaaaataaattgcggaccatcagttggttggccctcacgtttgggcccaacatgttttcggcatcaaccccaacaatcttggtatcattcgaaagctctttacatgcttctattagccttgcaaatgcgtaaaaattttcaagcctggaaaaaa

SEQ ID NO: 20104 - DNA, 2527 bp, Heterodera glycines
gattcggtatttcaaaataactaaccaccagataaattcaatttgattttctaatattgtttataaaacatgaaaatgccgataagcgcagtgatagcagatgcacaaaaaatcgcgaaatatgcacctaaaaaggcataaaaatgcaaaataggcaatcgaaataatgatgtttttatcttttcttagtagatttgaatttgatttacatcattaaaatataaaagagaataaactattatggtgcattgtttattgattaatttattatttatttttagctttttgttaaattgtctttttatgattttcagattaaattttgatttagtttttgccgacgcttatttgggcatttttttaaaaagtagttttcttttccagttttttaattattttaactaattttatattttatttatatgcttattttatttcctgaacttcattatctttttgttagggatgcgatttttagggacaaaaaatcgcgaaataggcactaaaaataacaaaataggcattaaataggcataaaaatcctcaagaaaaaacatttaaatattggggatcaatttttgtgaaaattttttcgattcttaatggtttattttctgaattttttcagatcgattattaggggtgtatttttcttttttattgcatttttgttaaggatttttccgaaaatcctgaaaaagactcaaaaaatgccaaaataggcacaaaactaggcatttcggcattaagcacaaaacgtattaagtgcgcagaaattttaggcatttccctaaaaaatggagtcaatatttttttatcaattttaatatttaaaattattttttaatgttaattatttattttttctaaattttaggcatttccctaaaaaatggagtcaatatttttttatcaattttaatatttaaaattattttttaatgttaattatttattttttctaaattttaggcatttgcctaaaaatggagtccctaaactttaccaatgcgcaaaacataaggatacatttcctccaacaaaaacaaatcaaacgaccccaataaataataaagccaatctttataattgtttatgtttttattgtagcacagataatgctgaaactccgtcgattccataattagtcgctcgaggcattttcttaattgatcatacaattatttatttgtttttaaattcagccgattacttataaaacagttgtttgcatttttggtacatcaatttgttcgcaattttgtttgaatattccaattcatcacactttttttcatgctccgcatattcggcttcagttagcgttttgaatgagtacttaatttggtgatttaattttagaaaagaggttttaggcggaactttttcgaattttatacgatttttaaaagattttgtccaaaaaaaaaagtttttttttctggtttttcttaatctcactaaaaactcgaatacattttaaaatatttaaatacccaatgaccctccaaaaacaaaattaatataatactcagacactcaactattagccgggatcaatgaattaattattttaatttttgggccattaatatcacttaagtaaaaaaaaataaaaaaagcaaaaaaaaaaaactaaaaaaagaggacaatttatctattatgtaaaacgtttctaaattaaaagagtttaattggtttttaaatttattttcaatagttctcccaatttccgtgccgtttttctttctctttatttatttattattttttgctcacttggctgaattttgggccaacatcgatgttgaaaatgacaaatagccactttcctcccaaatagtcgcccatttttcgtttttgtttaaattttcgtttcgaattattcggtgcgcgaacccttgcaacagacaaacgtctttgttgacgttattttttccaattttttgaactaaattttcccattccttcacaaatttcttttgcgtatcggatgtactgctgttgcattcatttgccttaagcatacaaaagattattattttttattaattggatattcgcgattaaaatatcttttttattttctataattttaacttttagctttttcatcatttttaatgtttcttcattgaattgaatgaagtgccaaatcgccacttttgcatttaattgcttgatcctgtccgagtccatgaaattgcttttaaaagttggttccgattcgatggaaaaaagtgatttgaattcgttttgcatttcgattaatattttttgctcttaaaaaataaaaattaaatgaattttaaacggctgggtcgtttcataaaacccgccattttagcgaatttttcgacaaaaactggcataactttgcttaaaatcaatcaaattttatacattcttggtaccatttgatagcccagctttttctctattagcctggaaaacttcaaataaaattatcaaatttaacataagttgtggcagaaatagtaattattttcatacaactttttgtaaa

SEQ ID NO: 20105 - DNA, 1606 bp, Heterodera glycines
  unsure (1)..(1606): unsure at all n locations
actgattttcagattttgattttttacaacttttttggcttttccttcatttgagttttgaacacatattgaacaaatcaaaattatacaaaaaattattgccaatttaaaatcctttttgatttccattttaacaaaccttaaataaaaaagaagctgcttcattttttcatattattataattaaaataaaatggaaataagaaaaaaattctctaaatggaaattggaatatcaataaaattgatttgcataaatttctttttttatataatatgattattaaataatatttttaatgtcttgtaattatcaggcatggaattattacgcaaatgcctattttagccaattgtttcatcgagagaagcatcattttgtgccaatttttgccaagtgcacctttttgtgcttttcacaaatgcctcaacaaatgaaattttttcgcactaaatttttttttaaatactcttatatttttacagacagaaaatgttttttatttattttattttgaatacaattgaccaattttttgaccgttcttaaattgctgattttgaaatacattattgaattcaaccattttttgtataatattgccattaaaacatggcatttaattcatttatatttaattattggtaattaccataaaaactatgccaattaacgaattatggataattaatggcttttttgcttttcttctcgtttagactttacacctgaacaaacattatgcattccattatttggttttcggagcgattatttgccaacaaaaataataaaaaacgattttttcgctccctccagcagctgccttcaattcatagcagaaacagctaaaaaatcaaacgtacagcagtggccaaaatggtttattaggaaaataattaacacgcgaaaacgtaaaaaaatacaaaaattattttagataaatatttttatttaaattaattttgatttaaaaattgctctaaaacatatggcattgattgcgctttcattttattgcattggcattttgttgttgcctgcaacaattttttcacaaaaccgacgtggaaattcagagtttgcgcatatttgtggcaaatttcctaatcgatatttttcttatgaacgtaatttattataaaaaaatatataaaaaatagttttttaaatattaaattttaaaaaatttcagcatgccctgaggatgagcggcaatcttcacagaatcaacgaaaccgaaatgatcaaccgccaagacgtgatcagcagcaacaacaacaagtttgcacaagacaaggatggcaaccgattggaattaaatgccaaaatgttaatgattgctatcaacaccgagaaagtattttaataacatttcaataatttatatttattaattttataatacattctattaaaaatagaaaatgcacttgccaaattcattttggaatcactggaaattaatatcgaataaacaaataaatattctaattacaaaataaataataatatatttattttgtaaaaattacttattcaatgagaaaaacctttatataaaaataatntttttagatttttttaattatttatttatattttt

SEQ ID NO: 20106 - DNA, 1020 bp, Heterodera glycines
aagatgttgcgatgatgtgcgaaaagggccaatgttgttcgccggttgttcctcctacaactgctggccaaggtgaacgtgccggtgccagcggccgtgacggtcaaacacgaccaacaaatgctgacacttatgtgtggtggcaaacatgcgaaaatggtggctattttactggccaaagatgtcgtacaacatcagaatgtcgtcaaggctatggccctggtatgataaaatgctaatgatagcattccgatgcttaaagtgtgtgtatggcgttttggcacggtgtcgggaaacaaatgccacaaaaaaacgaagatagggaaggcaaaagacagagacatttgctcaattcgtggtgcttctaataagttttatgctcataaattcgtaaaaatatgcacatgaaaatgaaaatatgcatatacatttttctaaattaaagactaattttaacgaaaaaaattggtgtaaattatgtaaaaaaaaattccatttttgcactttttggtggaatttttcaagaggccaaaagggccgctttaatagaggttgacgctttcgtgcatataattggaagccctattagcttaatgatctaaatatgcttcataaaaaatagtttacaaaatatgtttaaaaatgaaatttaaaagaataaataaataaacaaaaaatattaataaatatttcttttattttttttcgacaaaatgtggaaaattttgttcaggaggacgcttggaacagaatctggcaaaatatgagcaaatttgcctgcaaggcgagtgctgcaccacaaatcgggaattggacatagagaacggcatcgctaatccgaatgtcaatccaaatcagaggataaatacgaacacaaacccaaatccgaggcctggccctgcggtgcaaaatccaagaataaatccaaatgtgccggccaatcaacccaatgctcatgggcaagaaaaaaaaaaattttaaatgatacaattaaaaatgaggaggaataatcatttaaat

SEQ ID NO: 20107 - DNA, 1030 bp, Heterodera glycines
attattttttataatttattctaacaaaaaatttaataactttatattttattttcggctccctttatttatttgagtaactcaaaaataaccatttttttttgcaaatttcagccattttttaagaaaattaaggattttaagtagatagtagagaccggaaatttcaaatttgcggatcctgttgcaggattggaattcaaaattttttacaggacaggatccggcaggattaatcctgcaaatcctgcaatcctgcaaatcctgcatttaaaatctgcaggatcctgcgcaggattgcggattttaggaaatttcaaaaaattctgtattaataaaaaagtctttcaaagtataaaaaagtattcaaatatatttttaaactaaaaaatgatgaagatgaaaaattaataacgtatttttgcttacactccaagcaatcggctgattcttctttaatgcgtttaaaaagaccgatttgccaaattgggtggctcataataatagcttaaattaaagtaaaataatttttatttaaatttctttgcaaaaaagtcataatccattatgtatagggatgggatttttaggcacaaaaaatcgcgaaataggcacttaaaaaggcagaaaaatcctaaaataggcacgaaaatagtaaaaaaaatttttattaacgctttttaggtagcaaaacacataaaaaattcaattgtataaacttttttcgaataaggataagtttttaaacgaaaaatttttattagaaaaaaatttttgaaaaaagaaagtttctgaatatttggcattctttttttttaaattttcaaaaaatcaatgcaggatcctgctgaatcctgcataaaaatcaaatttgcgggtcctgttgcaggattggaattcaaaattttttacaggacaggatccggcaggattaatcctgcaaatcctgtaaatcctgtattttccaaaatatgcaggattgcggactgagatcctgcaaaatcctgcgcaggatcctgtcctgcgccgg

SEQ ID NO: 20108 - DNA, 990 bp, Heterodera glycines
tggggataattggagactgcgggattaatagagactgggcgataattagagcatttacggtaattgtgtaattatttttgtttcctcaccccttggcggatttaagaaacgtccatagttgagaaatttctctatttttgattctcgaccaatattaatcacagggttgctattggaaaaacccgcttccaaggaagggtatactgatttccaaggacataatggcaaaaattagtgaaatccacatacacttaattattatatgcaatgaaaaattattaatttttattcgattttttcgggatcattttcctcatttcaccgtatgtgcacttttattaaaagattttgtacaaaattgttcaaagtttacgctttttgggtgagcttttgaaccaaattaaaaagaaagaaagagagattccggcagcgccgccgggaaaaaagaatgccataattttaaactttcataaaatggacctttttttacattcatatgcaaaaataccgctttttccaagcataatcttggaaataagtaccgttaaaattttccaagcatgaacgccgaaatccaagcacatacttggcatcaaagtacgaatggcagccctgattaattacttttaacttactgtccagcaaaagaagaatgagtgaggacaagatcattgctgcaaacaattggttgctgttgttgttacagtttttcggccacagttactcaaatcttaaaaaaaataaataatataaaattgaaaaattacggtgctttcctgtgttgtacacccctaaaaagtctataaaatgacgcgcaaaattatttttggtgacataaatgaacaatttcagacgaaacctctttaatttgcgggttactgtcaaaatggtagggaaaaagatttttatgaattgtcgcaccattttttgactgtttttaatcgtctaataccagggcttgggcaaatgaaaaacaaaaaggtgattttt

SEQ ID NO: 20109 - DNA, 1556 bp, Heterodera glycines
  unsure (1)..(1556): unsure at all n locations
aaaaagattcattgccatttgtgggggaatgttgtgattgtaaggcaccattcagctgtgtatttatgtgccatttttccatgttggcatttttattatgcttaataaacgccgcgcggcattatttgcactttccaaaaagggaaaagcttggataagtgcatatgcacttaataaattttacaattattattttatataatcacaaaagaaaattattttattaataatcacataaaatatggcatttagtcatatgaatagaaaatgtgacatagacattggataataaaaatttacaagtgcttatgcactttcatccaatgccactacctatgagcatattcactgaatagggaatataatttgtatacattttatgtagcgaataaaatttttctgtcatagaaattttttatgctggttttttagaaaaaaattgtaaaaggaacatttattattcacaattgaacactttcacgatgccattatatatcatttttaatgaaaaaagattttatattggtttttgtttgttttgggaacatcaatattatgagatctcatcagtctcgggtctagaaaatttcaggttccaattttggggattaagtgttgctcggtctttttcctcctggcaaagactcgggctcagcaggccttgaagttagagtgctctgctatctttggggtttagggttttcgccgtttttgagtcctataaaattctcgatccgggaatgtttccgtaagttagagttctttgttgtcttgggtttaagaaaattttcagtcttgggtttggggctcaaggtttttgagtccctgaaaattttcaatccatgtaaatcttcgatgcaaaaaaattttcgacccagagaaattcttggacttgagaaatgacggcactatgaattatgcgcttggacagcagcagaagcagttgatcggttcgtggaaaaagtgatcattgtgaacagttggagcagtgcttccaatgtcaccagcacaaattcgatgccggccccaatttgttcaacaaaagcaacgtacgtttggagcagtgccaaataagcacaaatggccgcctgtgaaaacggattaaatttagggctagacggggttcatgatttttgaaaaaggctcggataacccatatttggaaacttgtaaatccaaacggactttcagttcgaggcgacattttttttttttgaaaaatcggcaattagcggactgactttttttaaatcgtaatcaagagttaacaaagtttgatttagaaaaaaaaatttttttttgccaaccgcggcaatgccaagcagaagagagaagaagagttctgacgatgtttcagtcaaatttccagcgcgagcttaaacaattttctttttaaaatgctagtttttcgataatttttcaaaaattgggctaagaatttagaaaattgaattcacgacaaattcctaggttttagaaattttgaaaaattttattccaggttgattatgggttttatttaacctttaaggngcaaggaaanttngacacaaaat

SEQ ID NO: 20110 - DNA, 2095 bp, Heterodera glycines
ttacctcatgctttcaatgactggtgttcctgatggtcgcaaattgaccaaatattgcatatcatcctaaaaattttaaaaattattgttttcaagttctaaacgaagaaaagttttttttgttaaatattttcttttaggctcaaattcttaagagtcgatttcatttacagaaaaaaaacggggtactgtacatgatccccatatagtacaacgcattatgttaaaacaagactttttgctttaagctgccagtcatggtccttttcggaaatcttgttctggtcgtagtacggctttttgttttcgaaaatcaggtatctcgtccaaaaacattaagtgaccccgaccgaataacttctagtccagaagtgcgaaccattttgtgccaatcccggccattgatcccagaaagtgaggcaactaatttcagtactccgaaaagggcagaaatctcggtttggtttttttttttggtttctcggctgccccttaaaaaaggtccttgaatgattgaattcgaatccaatttttttggggtattttcaaatgtatattaaatttattaaaactgaccagcactgtcgtgtttgccacataaatgtccggtttgtgatatatttcggtgaccgacaacacagtgcgctcggttgggtggaaaatcacacctttaaaattttcaaatatttttttaaaaattattttttccgatttctaccgccaatttgtgctttttgggctgtgtaaagaatttcgttgcgttcaggccgcccaaaatcgtgcacaaccaattggccaaggtcctagtgaaaaatttaatttttataaatagtttaaaatctattttttaatttaacattctaaaacatttaatctttttttatttaaatcccgtttgtaaaatttttaaaaacaccaaaaattggctaatatgaacttaaaaatcaagaaaataattagaaaaaaagaaataattatttttataggagaaatgtttttcattttttattatctaaaaaatattattaattgaatgttaattcatccaaaataaatccaaaaaaaaaaaaaaatccatataaatatttcaaaaaatatttaataaatttctgtgtttactgtatccgcgccccattgccaataaatgcgacggttgtcagcggtgaatgaaattggcctgaaattttacaaaaattaatgcaatattttttttttaatttaaatatttcatgtacagtgtaagcgcacggtcatctggcggcactcgcaaatactccacccaattgtgcggctcagaggtcagtcgactggggtttgcaatgtcggaaagtctgaaaatttttgcgatatcgctttttgaagattattaaatttttctagtgttgataactttttttatataaaacatctatctaaggcatggtttgttatttgcatcaacttcgcgttagatacaaccatcttagtacagtatattatattacagtatcacttttgaaagcatgcaattccattgaagcattctccataatgaaactgactacagtaacacctaattttaggcattcattttatttataatattttaatacttgtaaaagatcagcgacccgtccatggcctcctgtacaaccattcgaattttcaattcattatcaacaacaattttggcgggaaatcgttcattgtggaaaacctttattttggggcacattttaaatttaaaataatttaaatttcaaaattttcttaattcaaaccattcgcatttgattgttgattaagtccagctcgtacacattgtgaaaggctgggttttcatcattcagcccgatcaaaacgcgatggtctcgcaaattattcccgatgatcatcgcctaaaattatatttattttttaaatttattttttttaattaaatttaaatatatttttaagcaatttgtttgtttcagtaattaattttgaactttgccctaaatttgatttaaatcattttttaataccttaatgcctgtcttttcgtttattgtgtacactaggattaaatggtgacggctaaatttaaacttagataaaaataatattttgaatt

SEQ ID NO: 20111 - DNA, 973 bp, Heterodera glycines
  unsure (1)..(973): unsure at all n locations
ctcaaaatttcagctaattatcttctaaatataaactctcacagcgtgcggaaatattgagttaatagctccaataatctccgacttattattttcacgaccatctttgtgaaattttcacattttcagctcattttcctcaaaatgtatctgtataaatttgctcaagtaaattgtaaatcggaaattagtagcgtttatcaactccatacttccgcaacacttatacagtttattttgagggggtaatgagctgaaattgtaagaattatacaagctggccaaaccaaaataataaatggaaattattggcgcttatcgactcgatccttctgcgacgcctatacaatttatatttccatgataatgagctgaaattttgagaatttcaaagtgatcatgaaatgtaaatagagaatctcacaatttcagctacttaatctctaaataaatactgcagcaatattgtagaaggatcgggttaataatattctctgatttattattttcacgaccatccttgtgaaattctcaaaatttcagctaattatcttctaaatataaactctaacagcgttgctgaaatattgagttaatagcgccaataatctccgacttattattttcacgaccatctttgtgaaattttcacattttcagctcattttcctccaaattatctgtataaatttgctcaagtaaattgtaaatcggaaattattagcgtttatcaactccatacagtttattttgagggggtaatgagctgaaattgtaagaattatacaagctggccaaaccaaaataataaatggaaaattattggcgcttatcgactcgatccttctgcgacgcctatacaatttatatttccatgataatgagctngaattttgagaatttcaaagtgataatgaaatgtanatagagaatctcacaaattcagctacttaatctctaaataatactgcag

SEQ ID NO: 20112 - DNA, 2797 bp, Heterodera glycines
  unsure (1)..(2797): unsure at all n locations
tgccctgcttggattgtcgacgacgggattcgccccgtccctacgggtgctccggctggcgggagactgataccgatccgcgagactccggctgcgggagtttgaactgcttgaaattcgctgatgctccgggccaattcccggattctccaatgccaaaaggaaaggaattgggatcgggaggattgggggagaacgacgagggctctgtcgggaaagggaggggtcaagacggggaatgtgcgccttcgtttggccacacacgaaaatttgccgaatgtgatggagtgtggagggtgcttttccctcctttccgagtcctccaagccgtttcagcacgaatttattaaagcaaaacgaataatgaataaaagcgacgaattgatcgaattgggcgatgggacggggggattgtaggaattggtcacaggcagaccgaaaatgaagcggaggggagtggaaggaagagaagaaaaaaagagaacgcgaccccttggtcggggccgcttaaatagacaattttctaagggggcgggcaaaagggaatgcacgtggacaaattgtgagagggacagaaaatgggcagaaaattctagaagcgaaagtgagcacaaaggaaatggcacacaggaacacaaaatgcaaataggcagatgggaaagatagaaaatggtgaaaggaaatctttgtgcaatttgttaagcacaaagttggccagagatgagccagccgatgagaaaagaatttgaattgtgaaagggatgcgattaggcaaaaatgggacaaagaaacgggcaaaacgtgcatggtacgaaatggagcaaaaatgcaaatgagaaattggatgaaaagggggtaaaattaggaatgatcaattttagcggattgatgaatcgggattcgccccgaccgtctccaagtacgtccctcattctttttgcttcggttgagtccagtcccgtccatttcgtgcagtaggcggggattgacccgccttctcgtcgccagggcaagcgcgccctaattctatttttccaacctatttcgaaccttttaacatcgattctgaccgtttttaagcatttttgagtttggggactatgatcaatattttccctattgggtattgcgtacttcgataacagaattaaaaaaatgattttattccaagatagaattttaatgcacaaatcggtttaaatcaaaaaatcattgggtgaactggtatataaagtgaaaattggcagagaactttttgtaaaaatgtcacgcaaaacaacaaaaactcgaggacagtcacaggcggaaagtacgatccccgcccccttcaaatgttggttctcttctccaaaatttctttttgaaaatcaaagcaagaaaaaatgccttcgaccctccggcgaaccctgggaccgtccctaacactgagaacaaaaggcagaatgacaacaaataaaccaaaaactttccacaaaaatgacaaattttcatatccccattttcgcaaatgcataatttcggcttcattttcgttttcggccacgagttttgttggtgttgtcctcctcctccactggtgccgaggtcggtttaaaatcggccgcctcgcgccattccgatagaatccgttccatgcagcgtgccgagacgggcggcacccgtccaaagacattcgaagcggtcagtttcatctgcatctcaaactgctccaggcactgcttcttcagcttttctcgcttggccaccatgtagcaaagattacgcgcctaaaatgggaaaagagcaacaaaaaggacccattaatgtgtgaatttcattgcccccctcccctcgcgttttcccccaccccgcgtcattctatgagactgaaatttaccccacttttggggggtttcaagttcaaaaaaggctttttgttaggtaaaattcttttaaaaaaatctaggcttaaattttgtaattaaataaaatactttaggggaggaatgacggggaaaacgaccgggagcagctcgtccccccccccgcatcgtttcccccccccccgagaaatttaaaaaaaaaatttgctaacttagaaatttttcaagaaaaaaaattttttgagaaattttcagcgatttttcggaaattgttttgaaaaatcttaataattcaccataaaaaaatttttcttagaattttcctatgaaaaatctttctaagatttttttcttgaaaaatttctaagttagcaattttttttttaaatttctcgagggggaaacgatgcgggaggggggggggggaaacggcgggtggaaccgangctgctcccaatgaccagcgagggacatttgtcagcccattgctgaggaatgggaaaatttttaattttaaaaatttaggcagtaaactgtcttatttgtctaataaacatttattttcaaaaaacaaaatttgcgggattaactaacaccttccctccgaaaaccaatgtgtttaatttaatgcttttgaaagactgggacgcgttttttaaaatttctttgtccgccatttttcgtcacttttccccagtttttgccgcccctccacccaaaaaattgagtcgctttcattgccttagcgtcagtttggcgctgcaccgcgcgtacatcagcgacagcgcgtagatgaagcagtagccgaacagcgagaaaattccctctctgttctggtcgagaaagccgtgccgtgactccccgaagtcgggccgtaaaatccattgctcaagcgttgtaagccgaagcgcaatttggtagacgaggccgagcag

SEQ ID NO: 20113 - DNA, 830 bp, Heterodera glycines
accttcgtcattcatcggcaaacatgacgaacagctgatgctgccggtgccgctgcctccgtcacattttgctgtccccccgggggctaattttgttttttcttccctccgccccctcggcttattctatttttggagtgactcattccatccattcattcattttttgtcccatggcattcgttcgtcgttccgtcgacaaaaataaacaaatcgacggacgaaagagcaaaaaaagaggagaagtgttaaggaaacctcaaaaagcagaagcataagccacacaaccaccgccaacagcagctcaacaaacccttcacacctcaccaaatgcgtcattcattcgtttcgtttcgcttttttcgtttcttttgtcccttctttttttgccaacaaatcaaaacaaatggtgggaatggaaaagagatgggacgaaaagaattgtgtgatgtgatgagtaagcgtcattaatgttctttgttaagtgcacttgaattttgatgaatgattttttgagggggggggggagagaaagggagacggaagcattgctttccaacttcgatgagtcataacaatttcgcgtcaaaatgagtcatgtcgatgatgatttgtaagacggcttatcatttcctacatttgttaatcactttgttgttccactcgcttcgtctctttcattggcactttttttcattggcatggctttataaagtcagtttaataagcatttcgcatttaacacttttggcttttcaccctgccagttggtttttgcgtctatttctttagccttttcatcattggcatttaattggttttctttgcat

SEQ ID NO: 20114 - DNA, 1181 bp, Heterodera glycines
aaaatagttaactaaaatagtgagtaaaaatcccaaaatagtgaagaaatagtgacaaaaagtgtgaaatagtgacgaatagtgacatgattacagccaaaaaattgaacaaaacattttttaactagtgagttgccaatgaggtaacatttcctttataaaattctcttagcaaatatttaactttttaaatcaaaaattttgtcaagaaaaaattttgggggaagaatttttgagaaaattttttcatttcgtaggagtgtatttttaaaaaattttcggtcgattcataggggtgtatttttctgaattttttgtagtcgattcttaggggtgtatttttcgtttttattacatttttcttaaggatattttccaaaaaatgtcaaaatagtgaaaaatttaaatttaaaaatagaatatatgagcaatttaagaataatgagcaatttataaattcaaaaaaaaacagcaaaagctatgggtttaaataaaaaaaatacttttaaaaaaataaaaactaaataaccaaataaaaatatatttgaattgcaataaacataactaataaatgccaatttaacagaacagatccaccatcaacgaagaatgtagctgcaaaaaccaccaagtggaagggtttgggacaagaatttaattgtaaaataatttcagataatttaatagaaaataaatcctaaaaaaaataaaatttccgccctttcctccgcaggtccgccgtccttttcgcctggcccttcgtccgtttccgctcgtccgttgtcgcccgccgctcgtccgtcgtcgtccgccgctggtccgtcgtcgtccgccgctcttccgtcgtcgttccgctacgaccagagctcatgggcaacgcccgtctggaccggttgataagaaatgaaattgtaattttgtttctcaaaaagcttttaaacagattaaattttcaaatgataccaacaatgttggatttggttgatagggaaaaagttatagccaaaaatatgctggggccaaaacgtgagggcccaactgaagtaaaccgctttttcgaaacaactaaaaaccgggaaaagcggagaaaatggtggcaagggaaggtaggtggagggaagaggaaaaccatttaatttcattggagaaaaaggacgaagactacgattttagtttttcaa

SEQ ID NO: 20115 - DNA, 1961 bp, Heterodera glycines
cttgactttcttttacatatagaatcaagtttcataagataaaataatttatcattttcgaatatttaagacaaatttagaaaatgtgtaatcttattgaacagaaaatacccaaccaaaaaataaataaataaaatttattaaatatttatactttaataaacaattttaatctaaacatggagacattaatagaaaatttaacaaaaaaactaaaaatttttatattgttttcttaataattgaatgcaacaaattattaacaatcatgaccttatattaataaattactgattaccagaatgcactccaaatgcttgaatggtgtcaagaaaatttaaataaaaatgttttctttttaaaacgttttttgaataatattattaaaactagaaaaattaaatattcaaagcatatgaatatgtctaatttttaaatgatttcgcacaaaaactttcaaataaattacaaatttatgttataacatatatttttctgtaaataaaatatacgtatgtcacgataaataataaataaaaaatttgttaagaaataagtatatattttatgcaatttaaaaaaatttataatctattataaacacatattttttattctgaatgaaagaaacagctgatttagataaaaaataaagaattaacaaaaatttttgaaatatacaaaaattaataaattctcattgtaaattttagaaataatttaataacaaattaaattattaaaagattatataagcgaaaatatattcagagtggccaaaatgtcaccttataaggcatttgttatttaattttttcgcgctttgggagcttcgctacctaggctgtaaagcgattcaaattgatcgaattggttggagtgcttttttgaatttttaaaaaattattaggggtttttagtccacatcgaggctcacgacgggcgcttcgcacccgttatttaaatttgttggccttggacgggcgctttgcgcccgttttttaaatctgttgaacttacacgggcgcttagcgcccgttttttagcttgttaggcgcttcgcgcccgtttttcaatttttgttggcctgacgggcgcttcgcgcccgttttttaactttgttgggctttgacggccgcttcgcggccgttattaaattttgatcgactcagacgggcgcttcacgcccgtttctaatttttgttgttcttttcggccgcttcgcggccgttttttaaattttagaacagatacaaaagtgattagaagaggtacaacagtgatcagaagaggtacaacagtgcttaggagaggtacaacagtgattaaaagaggtaaacagtgattagaagaggtacaactgtgattagaagaggtacaaaagtgatgagaagaggtacaacagtgtgagaagaggtacaaaagtgatgagaagaggtacaacagtgatgagaagaggtacaaaagtgattaaaagaggtacaatagtgattaaaagaggaagaactgtgattaaaagacgtacaaaagtcattaaaagaggtacaacagtgattaaaagatgtacaaaattgttagaagaggtacaacagtgattagaaagtgggcattcaaatagatcatttatggtaattaaggaattatttttaatcaaaatagataaaaaatcgatgtgttatatttctcattttttaaaatataatacactttttattaatgaaaaacaaattatgaaatgtataataattgaatagttatttaaattgaaatgaaaaaaattttacaattaaattttaaaataatagctgaaattctttaattaaatataataaataatttaaatgaaaatcattattcatcaaaaaataatttaattaaactaaaaaaatttattattaataaaaccaaacatttaaatttatttaaagtaatgaaaaataacccaaaaaatacaaagaaaa

SEQ ID NO: 20116 - DNA, 2144 bp, Heterodera glycines
acgggcgcttcccgccctttttttaattttttgggaacattcgggcgcttctcggcctcaggacgggcgcttcgcgcccgtcttttaattttttgggggacattcggccgcttcgcggcctcaggacgggcgcttcgcgcacgttttttaattttgttgataacattcggccgcttcgcgcccgttttttaattttttgggggacattcggccgcttcgcggcctcaggacgggcgcttcgcgcccgttttttaattttttgggggacattcggccgcttcgcggcctcaggacaggcgcttcgcgcccgttttttaattttttgggggacattcggccgcttcgcggcctcaggacgggcgcttcgcgcccgttttttaattttgttgggaacattcggccgcttcgcggcctcaggacgggcgctttgcgcccgttttttaattttttgggggacattcggccgcttcgcggcctcaggacgggcgcttcgcgccatctcaaataaaacatattttgtagagaaaaatattgcggattttatgaatatttaaatattccttagcattttttttggaatgagttatgaactttttaataaaaaaataaatatttccagaaatccaagcctaactttttgaattttcggcatttataaacctaataaaaaatataaaattcagcatatttttctcaatttttacgcttaaattgagatgaattgacggagagttatgaattttcaaaacttcctggatttttcgtggcccaatttttgatgttttttcaaaattttttaccactctccaaaatatccgaaactcaatataaagtgtatattcgtgccctgcacctcaaattaccccagaaaagtattttttggcaattttagaagcaaaaaaattttccatgaatttcgaaaccatggggtcccccctttggttttgcatttaaaaatccgtttttattttataactttttttatactcatgctaaaaacatgcgataaaacatgatggatagagcttaaaattctctacaaaaatgctcttgtaagatttttggctaaaatcaactcccgacgagttataggcccgggactgaaatgtcccggtcagagcaaaaaatttttctatttccggaaaaaaaccaaaatttttctgaaaatgtcaccaatcgatagagctcgaaaaactatgttttggaagtggtctccgtttttcctggaaaattcgttaaaaaatcagaaaattaaaaaaccaaaaaaccgttttttaggcctagctcgaaaatttctgaaaattttaaaaatccaaaaacacggttggatagagctcaaaaaaatacacataatcattttctatgtgcactggatataagcaaatcccgcagagttattcccgaaaaacgaaattccggttttcgagttggcaatttttgctcacttgtacacggaatacggttagtcgtagcaaaaaatgatcaacaccaattttgtagaggacacttgtgcggagtgccctcccagcggacatttttcgatcagaccaaaacccatagttttacaggctcttgaaaaaagcaaaaagccatttcagcgccgctggcgctcagttggccgccggaccggaatgcctatagttttcctgaatgcgccgtcaaaagttacccctgcatgccaaatttcagctccccccgattagcggttccggagatttttgttttagcaacgaaacacgatttgattttatagtatataaactagcgggtgtgtgcatgcgagggtggcgcttggaaagcgctgcgcgcttcttgagcttcgctacctaggcgcgttttagtctgttagggtctttgcgtcagccgacatgcacttggtttcctccaataattggagttgacacatcgcataatgcaatggaaaccggaagtgccctaacgttgcacatcatggccctcctccctcccttagtccaggcgttggcacgttattgggttgagcgctaaatggcaattcacctgtaggccctaaagagggctgaccggtccatgtcccggatccagcttctcaccattttccaccccacatagtgcagatgggaatgggattggcatctctcaaaaaacatgtgcccaactgctct

SEQ ID NO: 20117 - DNA, 1699 bp, Heterodera glycines
  unsure (1)..(1699): unsure at all n locations
ggcgcgaagcgcccgtcctgaggctgcgatgaattgctaaattacatcaatttctagcgacgcggcgaagccgcgtccctgagcgcgaagcgctttccccacagcaccagaaaaaaaactgttcacaccatagccaactgtgcaccctagtttatatactactaaagaaacaaggcaactcatttccaaaaacaaaatctccttacggggcgtcgggaggggttcgaaatttcgaccttggggacaactttttgaggcgcatctgggaaaactataggtttttcgctccgagggccaactgagcgccaacggcgctgaaacggctttttcaaaattttttttgaagttgctcggattcaaaatttttttaaaggcctaaatgaaaaatcggcctcgtaaaggagcttcgtatggatgtttggcacattttttgtttcttgaccgaacccctaggccttaccagtttttctggaaaactgcgcaaaaatgggtcacttttttgggccatttcagcgccggccgaataactcgccagatattgatgataggaggtcggtgtaagcggcttttttgtacagcttgacgagctctatccaaccatgtttttagatttcagaaattttcagaaattttcgagctaggccccctcgaaaattttccgtttttaaattttatgattttttacagatttttccgggaaaaacggagaccactttcaagcaaccgtttttcatgctctatcgattggtgtcattttcagaaaaaattttcaaaatttttttggaaatagaaaattttggttgctaggcctcaatttcagttctggcgcaataactcgtcaggagttgattttatcaaaaaatcgtctaagagcttttttgtagagaattttaagcccaatctaatgtgctttatctcatgtttataccatgagtttaaaaaaagttataaaattaattgtgattttgaaattcaaaaccataggggggaccccatggttttgcatttcatgaaaaatttttttgctcataaattagccaaaatgcatttttatggcctaatttaaggtgctgaactcgaatatatacattattttgggtttcagactttttggaaggtggttacaaatttttgaaaaagcgtcactatttgggccccgggaaatccaaagttattccagaatttctggaaaaattcgatttttcagaaaaaaattcctaactccattctgaaaaagtattttataaaaataatatactcaaaaaatccgcaattttttgctctattttataaattttaatttagctttttatcacttttttgaaaaaagttatagaaataaaagtcattttggaatttgtgaccacaggggtgtgaccatgatttttgagtggaaaatttttttcacgaaaaatcttccaaaaatatgtctttagaggttatttgcgccgctgatcacgaatatgcactttatattgcgttttggattttttggagggtggtaaaaaaattttgaaaaatcaataatttttggcctagaaattcaacctaaattttaaaaattcataactcgcctcnaaatggtccaattcagctcatttaaagcattaaaaattgagaaaaatatggagaattttaagttattttttgagttgccatattttaaaaattcacaaaattaggtcaggatttctcaaaa

SEQ ID NO: 20118 - DNA, 978 bp, Heterodera glycines
taaccccgatggtaatccgttccggagagcctcctcaaaatttttcccattaccgtaagagctgcgaaaatgtgaaataattctcagaaaaatggctatctcttttaggacaattttctatctcgtaaccccgatgctaatccgttccggagagcctcttcaaaattttttccattaccgtaagagctgcggaaattgtgaattaattctcagaaaaatggctatctctttttaggacaattttctatctcgtaaccccgatgctaatccgttccggagagcctcttcaaaattttttccattaccctaagagctgcggaaattgtgaattaattctcagaaaaatggctatctctttttaggacaattttctatctcgtaaccccgatgctaatccgttccggagagcctcttcaaaattttttccattaccgtaagagctgcggaaattgtgaattaattctcagaaaaatggctatctctttttaggacaattttctatctcgtaaccccgatgctaatccgttccggagagcctcttcaaaattttttccattaccctaagagctgcggaaattgtgaattaattctcagaaaaatggctatctctttttaggacaattttctatctcgtaaccccgatgctaatccgttccggagagcctcttcaaaattttttccattaccgtaagagctgcggaaattgtgaattaattctcagaaaaatggctatctctttttaggacaattttctatctcgtaaccccgatgctaatccgttccggagagcctcttcaaaattttttccattaccctaagagctgcggaaattgtgaattaattctcagaaaaatggctatctctttttaggacaattttctatctcgtaaccccgatgctaatccgttccggagagcctcttcaaaattttttccattaccctaagagctgcggaaattgtgaattaattctcagaaa

SEQ ID NO: 20119 - DNA, 2119 bp, Heterodera glycines
tctagagtcaaacaaataatgtcgaataaaaatttttaatttgagcggacatttaaatgaaagggtgcaatgggaataaacaaacaaagcaaacaaaaaagcaaaacaatattagcgggataaatacactgcaaaaggaaatctgattcattgtgcgacgaatcttatacaataatatcactgcgattttcttcacaagcattgagaacaatcaggccgaagggattgggctgtactcctcgaggtaatactgcagcttatgcgactcgtctattttcccaccaatttcactgtcgaccgtttcgaaagggtgcaaatggcggcgactcgcgcgcgagctcaaagcacatttgtggatcatctgcaggcatggcaaatagtccaagcctgtttcatcggtggcgtaaattctgtcagggtacgacctttggagtgcagcacaacaaaccgcaatgtttggctttacgcttcggaaaatacttaagaataaaggtaattgtgaaaacgggtaataaaccaatccaaaatttcacaccaatcgacgtcaacgcgcagcaaactcagcaattctatccgaagttcgtccatttctgcgactttcgttgtccagtctctggttggcttttctctccggtagtccaaatcggtcatttgcttcgcccgccatgaaatttcatttgtcttcccgcatgttgagtcaacagcagaagcccgctttgattggagtacgaattctttaaagtcgatttgtttctggccatttcctgtcggcttttcaatgattgacagcgaatgttggccatccaattgcaacgcgttcaaaatcgcacgaaaatcgccacgtttttgttcaaaaagattgctcaaatacgagttctttctgatttttccagtgaagccaatgagccattgctgaataaagatgacatttctggatgtaaaaagacaaacccgaagataggcattgaaagattggaacgagggcattttatcgacatgaattgtggaaaaagtttcaagagccggctctcggttgagcatatttgttctcacaacttcgtaatcgttgcaggtgagcacaattggtaccagcgaatttgcacaaatttgtttcaaagttgaccaaaaattagtgtccggcaaatagtgaaggtcacactaaaatgagaattaaaaaaattagcaaagcaaacaaagcgacctcgtctattaaaatcaatgtgaatccgatggatattttcctcttcaaatttgtcggcgagttccgtcgtggattgaacaagtcgcgaatgtccggcatttttgttcccgctttcatctaaaagaaattttactggacagacataaattcttcgaacattgtatgtatcggatgcccctaacaatttctgctccaaaaattgcttgtcgcgtttctcataaggtggaatttcgagcagttggaattcatttctttttgaagcacaataaacctaaatggaaaaggataacaaataaatttcttcctttttgtaaatgtccgaccattgccgttttcccacaaccggtcggtccagtcaaaatcacagggttttccggtggctcttcccccaaatcgtccaagtattcttcgtcttcctcctcttccaaatccgtccgccttttcttcccttttcgtccattttctccttcaatttgttgcttcttcctcagcctttccatccatgaaagaagccatgaattgagtttggcataagcatccgttgcgaaaatggcctcctcgtctttaggacaaaagagtgaactccacagctgagaagcggcttttgctttcatcatagccccgtttttgattgcattcaattctttgggacttaacagcgaattgtcctccatcgttttcttaatttttacattttaaaatccaaaatttatttgaagacgaagattatttattacatcatggtttttgtttttgagcgactggtccttaacatctgtattctcgctgtcttcacacttaattaagcataattaaaggggcaacacaaaattaaaaccaaatcaaattttggcattccccgaaacactttggcacgacgggacataggctccgttttttttgatggcggttttgtag

SEQ ID NO: 20120 - DNA, 2100 bp, Heterodera glycines
  unsure (1)..(2100): unsure at all n locations
tgatcgggcgagagattnccggaccgccacttccgtttttccggaactcccggcgccattttttgggccggggcccctccgggaccgggactttttaaaaatttgtggaatcttgattaataaatttaaaaaattggttttctattttagctgggatttaagccaagccatacaaacgaactctttaagttttcaaagttttttacggcacgattttttcaaaagaaattttagggattaaggggggccggcgggtccggtaggcgccgccgtgaaaacttgtaatttttaatgcgatttgtaaacagaaccaaaaaaatgaccaaattttgcgattctgagcagttttttaaagataataaggattttaggagtagacgggaaaatttttgtgaattttacatccattttaagatattttcaacaaaaattgaaactttttaatattttatgtgtattttggggtatttttaacaattggaattgtacaatttccaaaaatcatttaagttgtatacttcaaactttgaactagatatttcgccaatgaattttatattttgactttttgtcagaatacgggttaggggagcagaattggcgggattggatgtcagattcggattcttattttaattacaattcaaagaacaaatagaaaaacaaaaaaaaacgaagcagaaaaaatgtcgactagaaacagggctcggatcgaaaaattttcaaaatcagaacatcgggtccaaaaaatcagattttggggtcgaaaatcagaacattttgcaaaattgcttcaaatcagttatttttacaatttttcgatcaaaaatgtatcaaatattatatttttcgtctcccattatcgattttaacaattttggggagaaaattagcaaatcatcaattttagcgcattcggaatcaaaaaatcagactttttaaaaacgctttttttgcgtcgcattttttcaaaaaattttggaggatggacagggggtccggcggtgccgataggcgccgccggaaaattttttgcgatttttaatcgatttgttaacagatttttattaaaaaaataaccaaattttgtcataaatcttatattttattgataaaatagtgacattatgccataaaatttcaaaattgtaagtttatttaagaaatcaggacaaagttgggtcactccctccaaatcaggacaaatctgataaatcaggacagatccgagccctggcttaattttaaaatttacaattgcagatggtcatgagatctgtagagaatttcatatttacactgtataaatacaaaaggcttattgataaaaataatatttatattattatttggaatcatttttaaataaatatttaaaatcaaattaaactgacaatgaaatcgcccttttggattttaattaatttttgaacttaacaactttttgatgtcctaagtttttgaatttaaaattatttaaataaaagcaccacaaatatgtgaaattcatgctgaacattccccttgatagaccagttttattggtcagatcactttcccctccctaattgcccccgccttttttttgtctcttttgtttgtttatttgtgttgctcatttgtcagtttttcgtgtgcaaaaaggtcacacttttgcacatattttgtatggaaatatacaaaatgaatggacaaacaaacagaaaaatgttttttaatgacacattctcacagcaaacacacactttttatacgcactgtgagattaagcatttgcaaaaaagaccccgggggagaatggggggcggtgaggggaatttttcatagtcaaccaaatccaaaaaattatgatcgatcattcgataacacaaatatttctattcgtgaattaatcgttaacttttaaaaatatttaagagccattatttgttatctaatttattggattttatttaacttggatatttaaaaaattatttttgaaaattttgcattttgcttttatttttcaattttagttcaatagacttcggaatgatagaattttattttccaatctctcccttttttatttgaattatttattttttcattttaaaa

SEQ ID NO: 20121 - DNA, 2346 bp, Heterodera glycines
taacaaatgcaatcaaaacaattgatgtggaatcgacgtatagggagacatagaagtattacaacgcttctacccccaccaaatcaagtctgggctcgatcattatctgttggatatgattcatggattaacatcactgggttttggatcaacatccctgaccacttcataatagcgtcggaaggtaaaaatttgttttatgctaaaccaatgtaccatcaaaatagcctaattcacaatcaacagcattacattggaacatgcattgaaacggcaattcggatgtactcacgcgactgggaccccgtggaggaagcgaatcgtgaatggtttcgttccctccagctcggcccaccaaattccgatcgcgaaacatcatcccgtcacctgcgctagccaatgaacaaccattcaacacagaaagacgaggacgtcttgcgtcggtgattggaggacactggtaaattcggcgcagttcgtggacgtgaaaggtaggtcatttttgagaatgaatagcattaatttttgatcaatttagattaaccacacaaagatttctttcaaaattccatcacttcaataaggtaaaacggtaacaagaaaaactcaaccgaggggaggactcatctaacattcttaatttcaagataccctgcgcggcggtgatcggaggtcaactggacgatgaatgaaggagacatttcgttgaaacggacggatgattcggtggcattggcatttccattcatctcatccccttccttcaattttgtacacgtttgatttcctcatttctcttttccttttgttttgttccttctcaattgtttcttctcaatttcctttttttgtactggaattttcggctgctctttctttaatctacccctcaaaattttgggcaaccaaccctgtacagctcttccaactcggcccttcgtcttttgcaccgttccttcgcaccactctgggacggaatgaactctggttgatttcctccagcccctcaggccaagtctgttcataaattgagcagctggtgcacaggtggttggattgggaaccgaagggcgaaaccgttctcggactggcgcagcatcatcgacaaacttcgaggatcgaggacgatcctatggaaggggggagctgtaagggattggcacaccctcaaaaacaattttcaatttccctcagcagtcggactttccattctttattatcacattttctcatctcgtttatcccattcttccccgccccttttccgttcgcttcacacttttccttcccccagcgatcagttagtcagtcgtcagtcagtcgagtcgttaagcctaaccgatgagtcgttcgtcgatgtatatttcaatcaccatttatccggagagaataaattagtcttataacaccgaggctttttggggaatttcaccatcaatcctgggcccgggattccgttccccaaatcgtcctcccatttattcttcgagcggtgtgtcgactgggggacccaacacgcctccctcactttattgttctgctgatggagaataatattatacctatcgaatgatacaaaaaattaatttggttgaatttaagcaccaaaagtctaaaatttcgcaattttttcactatctttatttttttacatattttgaaatttaagaaatttctttgtgaaaagtttaaaaatttttctttgaaaatgtacccttaaaaattgttttttttcaaaaaagcgatatcaaaaattaatttttaaaactgctaaatgtaattctaagtatatttgggtcattttaatggcattttgtgcctatttcaccctttacgaagaattatttccaaaagaaaataaccatttaaaaatttttatttacatattttgtacattctgcgtttttataaatatttcgggatttttttatacatatttatgcacatattttaccactttttgtaatctttttttccagccctactgatcattcaaaattgaaagcattttggcatttatttatttaatctcgacagatcactgtgtctgctgctcggcttatggcccaatcgccagtgatccatcggatgttcagcacgggaacgcgcgagcagcaacagcagtcactcacttttgacgaattgggcgtcgacatggagcagttcaaggaatttttggaggccatcccgacaatcagtgttcagactcccacttttcccaaccgtaaaagcaaattattattattattattaatttaataataataataatttagtaatttagacagtttttataaaactctctattagaagggccatcttctattaaagtggctggctcgtttg

SEQ ID NO: 20122 - DNA, 2537 bp, Heterodera glycines
  unsure (1)..(2537): unsure at all n locations
cgtttttatagttaaaaaaaattcaggcgggcaatggcatttcctatctgatggaccgcggcttttttcatcgtcggctccacgcccgcgcctgtatcgttgacagtgccggcaaaacgttgcgcatcactgacttttggacgggtacggtctcaacactcctgttttattcaaatttcatttgaacagagaatgaccccggggacattcatttgttccaaagagacgcctatttgcccaacactgtgcttccgtccgctgttatgtaccgggacggatggaggtcatcatcttttatccaattgaatattcacatttaactttggcattttgttaatagtttagatgcagcaaagcatagatgaggacagttttgaactgtctttccatcctttttgctatgtttgcattgggtggagcttatccaaccaatcattgcagtgaatgcaaacttctttgctttaacaaaggcgttaaagcaaagattccaaaagaaatcaataaagttgagctctgctgtgcagagaactgttacattcatgagaatgtaaagaagctcacttacgagctgcccaaggagatcctcctaaatgacttcaaatgcgaaggtcatttctggatggattcgaaacacatgttcaaaaaagacattttatgtccagcagttgatgagtgtgaactcatcgaatgctatttttgcattgaacagttagcgaatccaacctgttatccattgatttcatcaatgttagcagggggactttgcttatcattcataagcataagctttgtggctttttccatattaaaagtcctgttttcaggactttatatggtcatttggctgataattcaatttatcaggccaataatttatttagctggcccaaatcggcctccgaaagataggaggccaagggcaacagcttctcaaaattggacatcacgccgtgtttacagaacaatggcgtttgttgtccttatggttaactctctccagaatttgactggagcagagaccatagcagttatggccaaatcggaaaaatgcattaaaaatgcgacaagcatgagatgcattgtcgaaaactcggcaacacttacgttgctgccagctggccaaacaaacactcttcttctgaaaacagaggaaggtgttctccttggctcaataaatgttgtgcttaaggctttagctttggaatgccaaagctttactaaagcctggctgcgttcatatgcaattaatgtgtggccggcaaaaggtgccctaaaatgggctcctgcgaaggaaagtattgtggagaagttcgccacaatacttcaattcctgagctaaaagatgccaacgattatcctggcaattcattttgcctggacagcacagccttttggggcaacaaatgcctcttaggcggcagtgcctgcctattttatcgttggtttgctcgagaaaaatccaagacactctatgaaatcatgggctgtaattcctgggaatttattgtctatacaataattcgcctagaaacttttgttgaaaaacccaagtcaactcaggtgttttttatccaggaagaaccctgagatggaacaacatcagccttactccgatcggagtaacttttccgcccgcccccgtcttaaactcagattttgtttttgacgggagcaacatggctctaaccagagagccattaacaattgactttaactgtaaaagtcggcaagaagcaattgatttcaattgcagtcttggtgttcaggcatgcaccgattgcatacctgaccattcatcaggtttagtgaactgcaattgacgttcacataaccttgaaaaattaatggaaagtccagagaggagacttccattaaacatcaaaaattaccaactcagaaatactgggagaaaggtaattgccttgacaggatttagtcctgtccaattaaaccttcaaatagaaggtttccaaatggctttggaacttcaccaaagcctttgcacaattttgccgttgaacatatctgggtgttacagatgttcaacgggagcacaattccgttatgtgtgctcaacaaattttggcaattctcttgccgaaattaaatgcgatgatggaacacatttttcgacaaaatgtgattccaacgcatcaatttaccagacaattttggcttttgataaagccagaattgacacaaaatgccaaacaaaatgtttggctgaaaatacttcttttgttctaaaagggacattacactatgtccagcccgaacaaatagaagattacagtccaaatcactccgaaagagtgataaacagccaatccagttggccgaactggaattttggattggaaggcgaccctttggttctttgattggcatccaatcatcagttgccttcataatgattatttgtgtagggcattgtttgcctannaattttcattanactttctcctntctatagactttnggaattaaatttcctggtcttaaccgaaaaaggtttaatggtaatgtgcctacagtat

SEQ ID NO: 20123 - DNA, 1401 bp, Heterodera glycines
ctgcaccgaaggtactcactcggcctcttcgcggcctcgtggtgggccttcgccccccccccccctcccacgcccttcagagcacgacaaatatttcaacaaaaattttgaaaaattgactagagcaatcgaacgctaacggacgacctaatggaaaaaaatccccgaaggagagaatttaattaaatccattccttcgggggaccgtgccgggtgccgcggggtaagcagtgctggttcgtttcatcacggcaccgaaccttttggctagtcagcaatcgttgcttaacttgccagatcggacgggtgcgcatgattccactgttccaagcaccccaccaaaagcaaaacgatataaccaaaatataaggaaaaattttttaaaaaaatttttctccatcttcctttttgatactaaagcatcagagtgctaaaattaagttgtaaataaaatttggtgcgctttagagcactttctgaaaaaaatatttatgaaacaaaaaaatcgattttttcaagtgtccgtttggggtactcaaacatttatggggagcaaaaatccaacgcagaattaaagtacaggctatagggaagctattcccgaaggattcggtctccccataaatctgggcgcatcggttcggggggactgccccgaaaacaaaaaaatcgattttttcaagtgtccgtttggggtactcaaacaattatggggagcaaaaatccaacgcagaattaaagtacaggctatagggaagctattcccgaaggattcggtctccccataaatctgggcgcatcggttcggggggactgccccgaaaacaaaaaaatcgattttttcaagtgtccgtttggggtactcaaacaattatggggagcaaaaatccaacgcagaattaaagtacaggctatagggaagctattcccgaaggattcggtctccccataaatctgggcgcatcggttcggggggactgccccgaaaacaaaaaaaatcgattttttcaagtgtccgtttggggtactcaaacaattatggggagcaaaaatccaacgcagaattaaagtacaggctatagggaagctactcccgaaggattcggtctccccataaatctgggcgcatcggttcggggggactgccccgaaaacaaaaaaatcgattttttcaagtgtccgtttggggtactcaaacaattatggggagcaaaaatccaacgcagaattaaagtacagacaatagggaagctactcccgaaggattcggtctccccataaatctgggcgcatcggttcggggggactgccccgaaaacccaaaaaaaatcgattttttcaagtgtccgtttggggtactaaagcaattatggggagcaaaaatccaacgcagaattaaag

SEQ ID NO: 20124 - DNA, 2159 bp, Heterodera glycines
ttttaaatgggatgccatggaggtgttcggcagccataaatgccggaaggggtaattcgtcccaaaaagctcccggaatgcggtcccaacactgacggtatccggattccggacaatccgtcagtggatgatatctttcggaagacaattctatcagtgacggacaattcatcagtgaaggacaattcgtcagtagactgacgttccgtcaaaggacatttcgtcagagaattaaaaaaaaatttgttgacggattgtccactgacagattgtccataaccgacggcggattgtcttacaacagattatcctgcattcccactggcgcacatccagtagcaactttttccaaaaggcccaccgcttactgtatgccaactagctacagtatattattgttacaaaaacccatcccaagctacagtacccttcccctgctgccgccgccgtcctccattttcgttgttgctgttgttggtgttgttgtgctttcctttttgtgccgcatgaagtcgatcattctgtcctgcaaaatgtccggctcggaagcagcttcatcttcctcatttcgtgactctgtcgaaatggagcgaccaccgccgccgccagcagtgatccatcgctcttaaaaatgcattatcccattttaaaatatttcttttatctccgaatgccgtgccagatcgtttcataaatccgccaattttagcaaatttttcgacaaaacatggcataactttgcttaaagtcaatcaaattttaattcttggtaccattcgatagcccagctttttctctattagcttggaaaatttcaaaaaagttaccaaatttaacataagttatggcagaaatagtacttattttcatacaactttttctaaagttgatcaatttttatttttattttgcgggctaatagagaaaaagctcggctatcgaatgataccaagaatataaaattttattgcatttaagcaaagttatcccatgtttgtcgaaaaattcgatataattggcggatttatgaaagaattggcacctctgaatgctaagactttgcaccactgtttttgaaaagggctgctgctggccagccgcgcattgaggcccagaaaattaggcatggaaaatttgagactcgacaagactcggaccgagattgacctccgaaaattcgagactataaacgggaagggatcgggatcccattaggatttcccgagacgccgatccgttttttttattggaaaacgggaggatcgagatcccgacaaaactgggactcgaatttcggtgtcgggactcaaatcccggcaaaactagttgagggccaagtaaggaaggacaaagcagaaaatctgtgccacaccgttcggtccccatggatatttaggcaaacggcaaaaaatattaaatcggcaattcggatcggcggaacttgaaccctggcaccgtgccaagaaattcttacataaaatcctccaatttaaaacctcgcaccttcggcccaatggcattatgccaaaaaatccaatttcaaccctctctcgtgtccatgtaaaattgtccaattctctaagccagagattcggtggggaaggttcttagttctggcctggtcaatgccagggctcccagatgtgaggctttagcctcattttgtggttttttgataggtcaatgaggctaaattttcaaaatgaggctttgaggcgttttgtggtttttgagaaattttgaggctttttgtggttttttgagaaattttgaagatttttggggaaaattcgtcagattttttaaattttgattaattttgataaaatggcataatgtttttggccatatttgtcgacaaatctgttaacaaatcgcattgaaaattacaaaatttttcccggcggcgcctatctgcaccgccggcccccattattccccaaaagttttttgaaaaaagcgccgcaaaaaaatcaacttcggtttttcatgcttagaatttcacaaaatgtttatttcgaacaaaaaattgctcaaattgatcatggcacatcaaaaatataaaatttgaacattttaggcgtgtttagataccttttataaaaatgaggcttttttgcctgccaatgaggcttttgaaattttgatctgggagccct

SEQ ID NO: 20125 - DNA, 2562 bp, Heterodera glycines
  unsure (1)..(2562): unsure at all n locations
tcccagaaaaatggctatctctttttttgataaatttatacacatacaaatgctctcgagcatgatagggagggcggtgcgcaatagaccttttatttttgagggattttaaaatttatactcaatcccagaaaaatgtctatctctttttttgagaaattttatacctcacaaaagcgcttgcgtagagacggagggctgtgcacaatcgccattttatttcacagaggatttttatatttagaggttatcccagaaaaatggctatctctttttttgataaattttatacacatacaaatgctctcgagcatgatagggagggcggtgcgcaatagaccttttatttttgagggaatttttaaatttatgctctatcccagaaaaatggctatctctttttttgataaattttatacacatacaaatgctctcgagcatgatagggagggcggtgcgcaatagaccttttatttttgagggaatttttaaatttatactcaatcccagaaaaatgtctatctctttttttgagaaattttatacctcacaaaagcgcttgcgtagagacggagggctgtgcacaatcgccattttatttcacagaggcgccgggggaaaaattgagaattttgaccatatttttagcagattttattaattctttatttttggtttttcggaaaaaattggttctattttcattttaatgctctattacaaacccaaattattaaataattgtaaaacattatgccaatttatcaaaatttaaaaagattctgaggattttccccaaaagcctcaaaaatcctcaaaatttctcaaaaagccacaaaaatcctcaaatcctcatattccaaaaaaatcctcattgacctatcaaaaagccacaaaatgaggataaatcctcagatctgggagccctggatatcatagtgattcaaatatgtttcacattgcaaaactttatcttctcaatattttactcagatccccattcttaccggtgcatatttttttgcctatgccgcgggttgagaaaaatttcgggtcgggcactcaaaaaatttcgggttcgggttgagaaaaacctcgggtttcgggttcgggttggcatcactgccgcctacctacttgcaaaattaaagaaacttttttttggattttattgaaaaaattagagtgccacgggaccgggaattttgggcaaacccgggaccgggacctttttgggttgaaaacccgggaatttttggctgggaaaaccgggaccttggtactcagttgtccgctaccaggtcccggtcccgtggcactctagaaaaaatacatacataggtatgtaaaatgaatgtagaaaaactttgttaactgataatatttgtttttacagttttttccacttttctgcaatacaataaacaacaaatgcaagcagtgacgcgtccacccattgttttggagcgtggagtttccgggcgtgtaaaatggttcgatttcagtaaaggtttttcacattttctcgcacgttgattcaccagaacggttatgtttcttgtccaggttatgggttcatcacgcgggatgacggaggtcaagatgtgtttctgcacgcatcatccatcgttcgcaaagtcaatatgtacttcgtgctgattgagggccagcgggtgagtcggactgattttgagctgaccgagggattgggacacggagaatcaggggagtacaacgatcctcgaattcaggtagaattcgacgtcatcgatggtgagaagggcagggaagcggccgctgtgtcggggcccggcggaattcgcgtgggcaccgccatccaatacaacaacactgcgcgcagtcagccgttgccggtcaatgccaacaattccgccggacggatgttcatcgccggcagatttcggcgccccgttggcaaggttttgttcggtgttaaaatgcgcttttttggtcccctcacttttacaccaaacaaatcatttttcgggctatcaaaatggacttctaatggactcgtatgtccgtacaaatgtgtcctgccttcggctgattccccgccaaatttgttttccccatcagccgaacaacaaagccaagtcggccgtcgcttcggtccccgcggtggtcaatggcggcgacgacagtgcaaagtgtccgccgctctctctgtccagcgtcactcgcaaaggccgtcgcatgttcaaagcgaatgatggcgaaaagggcaaaaacagcgacaaaaaggaaagtgccagtgacggcgttggcagagaaaaggacaacggaggacgggagggcgaaaacgacggaaatcgtggggaaaaggagggggacgaacggggcacagaagagtggcagcagcgaggcgtgaacgacgacgacgacaaatgatttacgattgttttattcgaccccgagacattgacaatttccatccgtccacatattgttgatacaaatattccaataaatcaaacgaagacgcngtggactaataagatcagaacctttcataatatttcttttattaaaagtgcaaat

SEQ ID NO: 20126 - DNA, 699 bp, Heterodera glycines
  unsure (1)..(699): unsure at all n locations
cttcgttcaacggaccttccnggggaacatcagcaccctttcagtgagcatgtaaaccatcgaagtccaatcgacggcggaataagaaacaccgtaataggcggagataatgtgggcgatgatactgcagcggttggagaaagggttgtaggacaaaacgcatgtgcgattgttggttgggtctcacctgtattcgatccattgcatggcatttgaggctgaaagcatgacgaacctgtccaaggcatgccaatcactcattttgctccccccccccaaatgcgctcacatccccaaaatggcgtatctcttcgcgtacatccgcgtccgcccttccccgctttgctccgtctgctgctctccgcctcctccgtcttctgtccgcgttgtgccgctgttcccattgtgttgctgtgcctttgtttgatttgcgtccgttagtctccgttttgcgtccgtttccacgtcactgtcttcgtccgcggaaaaggccattccgttgggaaattgagctgaaaaggggaaaatgctgcagaacgaatgtgcaataggattatttgcaaaggttcgtcttttaaatgggtaaaaatgaaattgaaaatagcaaaggatgagtggtcggtcggaggaaaattgaaaagaccaaaaatacacaaaaagcaccgaatctgaacggaaattggcaaaaatggggggggg

SEQ ID NO: 20127 - DNA, 1375 bp, Heterodera glycines
cgtatgaggcgattaagttgttaatgggtcgagttggccagcttcaagcggatcataaagtcattttggagaaaagtggtggaaaagcgatgaaaaggactgacattagacgaaaatctcaaaataaaggcaattaaaaaataaatattcaataaaaagtggggttaaaatccaaatatatttctgttgttaaactatcaaagacgtggctttttgggaacaaacaatgcttttgaatggggggggggtgactgatcagcagaaatctaatggaaaatcaatctgaacgttgtcatattttgtaattaattccccacgccaaaattggaattaatttttgggaaatttcccagcccattgtttatcatctcccattcctccttttataaattcataaataatcaatccacaataattaataatcttttttaaaactcataaataattgacaaatttttctgatatttaccaatgcttcttggaatagaaaagccgggactgggacctgctggattttcaaccgggatcaatcgggaattttcaaggaaaaaagatttttattaattatttttttatgaaaaccaatttcttttgtttttaattcatgaagccaaaagttaaaacaatttttaaatttagtatcaaatttaaatttaaattattttcaaataattcattttttcaatggtttcggttgtttaaataaaaaagaagaaatttattattatttaaattgtttaataaatttcctattctattaggggatagaatacaagcaaaaaagaagaagaagaagcacaaaagacttaaccactaacaacaataagataaattatagtgcttattttcccggttggtccggcaaatgaacttttcgaaaaccgggaccctgggagaacaaagaattccctcccgactcggtcccgagtaaatcgttttaaattgagcaaaaatcatatgttatttgaacaaaacaaaagtaacaatggaatgaacgaaacgcaggcgaaatataaaggaaatcaaagagaaacaattaattaatttattatggaaaaagaaaacccaaattttgtgagccaaaacaaacattctgttggcatttgcactgggagaaaaaaggataaagacaaaaagggataataaacgatcaaaatgaatcgaatcacagcttaatcaacaacagatggaaaagggaaggaccaaatgaagagaagcagcggagaattttaaaaaatgaacataaaatataaatgtcccgagtagggttcggaccccgcccccgctgggggcgggacaggttttttggccgcacccccgtccccgcgactctgaccaccgcaatccccgcgaccttcgcccccgcgggggcacg

SEQ ID NO: 20128 - DNA, 1628 bp, Heterodera glycines
  unsure (1)..(1628): unsure at all n locations
ttttagattgctctttttgtggcgcggttttccaaaaaactttttggaaacattgtgggaggaggtccggccgtgccgatacgctgccggaaaaaatttggaattttgagtgcgatttattaacaaattttgtcaaaaaaatgattttgactgaggatttttcgaaaaaatgtttaagatttgaagaaaaagttcgaacattttgccaaatatacctaatttttaaaaaaatcatgagtttttgtcacttttttaacaaaagaccacaaaaatcctcaaatttctcaaaaggtcacaaaaatacgcaaatcctcatttttcaaaaaaatcctctttgaccctctaaaagaccacaaaatgagtaaaaatactcagatatcgcagctctggtttaataccaagaaacaggcattgaccgagtaagaaaaaagctatggcctaagaaactgggtatggtcattcatgggacgcatacctaatctgccacgggacgcatgaaaccgactaaaaccaaataggcattataaaagtcatcctagacaccccaaaccaagcggaaaatgcttttttcgtgtttatctgtgcgtattaagtgcgcaaaaatttatgcatttgcctaaaaatggaagccctagttatcattaagctttttaaatattttaccagaaaataacaaatttatgtatgagttcgccccatatccaaaaattatataaaaatatctggcaattcaattttaggttcataaacacaccgagtcaaaaaacgagacatgtgtcaataaagagagagtgcagagaaaaaaacatctctctttttggcgtactatttctttatctctgttaatagagaaaaactgaatttacttcatcctgtttaactttttttctgcttgttaaatccgcttcaaattttgcatgtcgatagagaaaaaattctgcatcgaataatatagaagatttttgcaaaaataaggctcattaaaaagttataagaaaaacaaaattttaaagcctcataacttttctcttgtacaccaaatcgcttagcatttgcttagaaaaagcttctccccatcaagggctttcgaatgataccaagattgtccaatttggttggcaaaaaccttcaaaaataattcccaaatatcgtcattttttaatattttggacaaaaataaataaaaatattcatgttgcacaacggactcgaaccaccaccctttgtccctttactatcttacaaaaaccacttcgccacacatgcaaacctttttggaactgagagccaaaattgaaacggtgtgtaaattgtgcgcagttctcaatttcattgtatataaatccactccttcctcaattacatattgcatttttgtgttttgatgtatcgctcaactgcgaataaatctgagctctattgcacgttttttgggaaggttcgattggtccaactgatcctcgtttttgtcattgctctgttttgctcaaatatttgcttgcttcgtcctccctcacctttggctttctctccgtcttctcaaaatgccttctgtttcttttgtggatgtccccgttaattcgccgtttacctttgagaatctcnccgttcgcgtcttctcaacaaat

SEQ ID NO: 20129 - DNA, 1823 bp, Heterodera glycines
agcagttgatacaaaaggcgaagagaacggtcaagccgattactataatagtcgacaaaaatctaaaattcagatttatgagaaaaccacgcaattgggaaacgccgctaagtccacagtgaataaaccaaaagtttattcaaacaaataaaaagggacaggtcgaacaataaattaaatattgattggaagtggggtcacagaggaaaaaggagaaaaatgacaaagtgaacagaagtgagcgaaggagggaagaggaggggtatttaccgtcaaatgaatacaaacaattataaaagagaattggtagagacgggaaaacgatacggtatcatagcggaatacaaaatcaagggattaattgacttcaatttttgttcgttttcgtcagtgtatgctgaagtgccaggacccgaagaagtggatgaagaagcggcagaacaaacgttttggccacgcgcagtcgcctcttttcgctgccactgtcgctgttcagtccccccaaatcggccgactgttccctttcctgctgctgctggccgagttggacactttcagtcgacatttttgcctaaaacaaatattgggggttgacgatttattttctccttttaagcgcatttcctactcaaaatgaattatttgcctttttagacaattcggggctggcactccctccgtcgcatcatcctatgcgaacggttgtgctccgccagagtctttcggcagggaaagaagcagttgatacaaaaggcgaagagaacggacaagccgattactataatagtcgacaaaaatctaaaattcagatttttgcgaaaaccacgcaattgggaaacgccgctaagtccacagtgaataaaccaaaagtttattcaaacaaataaaaagggacagggcgaacaataaattaaatattgattggaagtggggtcacagaggaaaaaggagaaaaatgacaaagtgaacagaagtgagcgaaggagggaagaggaggggtatttatgcaaaaatatatgaggggtcaacagtgaatgtgtggagcactatgggtcacggtaggggtcaactgcgtctggccaactgcgtctgagccaactgcgtctggccaactgcgtctgagccaactgcgtcttggggccaactgcgtctgagccaactgcgtctcagttaaaaaatcaaataacaaagacattagaaaattctaatcaattttgaaccggaaattaatgaaatacatgcattattcttagcaacgtttttgttttaagctggtgaagcgggtccgccatgaaattgaactgccaccgccagtgccgttaacgcttcaagaattggaacttcctgaacagtggcagcccttgaagatcatctgtagggcttcgatttttaggtgctaaaaactgccaaaataagtaggttttaggttctaaaaaacccccaaaataggtgctaaaaatgggaaaataggtgccaaaaagttccgaatttggggtgtaaaatcgaaaattttcttcaaaaagcaaaaatattatgccaaatcattaatgagatagataattttcaaaataaaaaattctcgccaagaaaataaacaaataaattttggagatgatttttgagaaatttttcttttttcataggtatatttttgaaaattttcgagtcgattcttaggggtatattttttgaaaaaaattttcggtcgattcttaggggtctgtttttcctttttattgcatttttgttaacaaattttgggcaaaatgccaaaataggtgaaaataagtttttttaaattttttttaggttttttaggtgct

SEQ ID NO: 20130 - DNA, 978 bp, Heterodera glycines
tatattttaggaaatacggtaatggcaaaatgcggcgctttgttttgctctgctttaagcggcgctgtgtttgttctcttttctttcattccatcatcataatctgacatttttgggtgagcagcagcagaagtcgtcggaaaatgggaacaaaacctttctgtctgctccgccttttttgctcttccctcacacgttctctcccccgttctctctatcttttacaggtcagtcaagtctcgacacctgctgctcctgctcagatcgctactgatcaggcaggagacgtcactgatctgatcacacgcatacacattcttagcctatttatcgcatttaaaatgaccaccattttcacacaattttcgccctctaaattacggtacaaattttaccgattgaacaacaaaatcagtttccaaaatccccaatcacaaaatccagacagagagagatgtgctctctcgagaatttgttttccatctgctgaattcaattaattttcaaattaccccgagtcggagactgaaaattttcacaatttcctcgatttaaaatttgtaaaattcggttgaatttccgagcccctcttttcccgagactctcgactattaataatgattgactgagaaacacttatgggtcgttagatatatttacttgctccccaattagcatttattgagcaaaaaaaatgtcttctgaaaaattggtattcattcaatgctacattgtcgagactccaacaaaacaaaaacattggcattttctgcagggcattctcgagtcagggtccagtgaaaattgaagatcctaatcatttgagacctcctttcaatctcgttctccacccataaacggaacgcatccccccccccccccttcccatacaaatttgtggcattttgctcggcttgttgattggtcgcaattgccaccaatttcggcaccacagcacaattgtgctccttctctccc

SEQ ID NO: 20131 - DNA, 1208 bp, Heterodera glycines
  unsure (1)..(1208): unsure at all n locations
gaatttttttaaaattatttcaaaaaataaaaattttggccatttgtttgcctctaaggcgtgtgaactgttcaattgaaatatttaggaatttgactgagtccagcagctccttttttgcgcncatccaaactgtctgagtgcaatttatttaaataattattttataaagaatatttatttatatttaaataataaatttaaatataaatcattttggtgctgattattattacttcactgataataccggtcattaacctgttgcgcaattagctcacggtttaacattgccacgcgcgtgtaaagccgccgggattcggcacttaacaaaatttgataatcatgccagattatttcgaaaaataataatttctttcttttgaacataaaatttcaatttaatatgcaattcactgttatgaatagagagagccgtgggttaagttttacgtattttgatccctaaaaatccctaataaaaaatgttatatgccttttttcatgccgttttcgggattttcaagccttttttcaatttttggtgcctattatagtgcttttttcgtgtttttggtgccttttttgcggtctcaagttatgaatttagcaaaaatatttaatttataaataatttaatacgaatttaatttaaattttgtccctacaaatttcgaatggccaatgcgtcttcggcacgtatcacacactcacggaccacatttaatcgttcggcaaaatcacttgctaaaagaaacaaaaaacaagtaaacaatgaaaattatggcactttaatcaaacaattatttcaaatttatttactttttttaataaaattgggtttccacttcgtttaattgtttaataattttttaagacttttatttttttggcttttcccacccaatctttcattgacttcatatcggctgtccatctgttaaaattgcataataattaatatttaaattaatgtttaatttaaataattttacattttccaccacattttgggcagcgcccaaaatttgatggaaatgcgcgcgactcgacagctcacgaaccccccaaaaagcacaaagcgactgaaaatgcttttgccaattaatttaaaaattacgatttttattttattaattaaacaatttttatttaaaaaatttacttggagaatatccgctgaattttggatgtcattatggcgtaat

SEQ ID NO: 20132 - DNA, 2262 bp, Heterodera glycines
  unsure (1)..(2262): unsure at all n locations
cacgacagagacgggggcggatggtcgccttttgattaatgcgggaaagcccgactcggacccggaagtcttgntggcagaacatctcacaaatgttcttcagcctcatcaaattggcggtgtcaagtttatgtaaggggttgagagaaaaggcacagaactatgtggcatttaaagcgagtcagcttttgctttcttaaccaataccaaggtttaccaaaaaatcgttactcgattcggcacttttgctgtttagggccccgaaaaaagttcaaaggagcgacccttttgtagagatttggaattggttgaaatagcggtacttatcccttttgtgacaccctctaaatttttttctacgataattataggctctgaaaaggaatctgatgcatgcattttacgtgagaacatgaaaatgcgtgttaatttaaaataaatttcttgttcgttttcagcgcaaaaaattaccctaaaaaattaaaaaaaaaacttttgaaagggattcttgtttttatttttgttcttagaagcaaaggcttttctgaaattggctctcgttaaggtacgacaacatcatcgaatcgcttgaaacgttccacaagtctgcagggttcggatgcattttggcccatagtatgggtcttggcaaatcaatccaagcgatcacttttctcgaaattttgtttgttgaaggacctaaaccttcgatatatttttttttgttttagcattcgaattaccggcaaaaggcacgtgttgcttatttgtccagtgaacgttctgcaaaattggcacaacgaattcaaccgatggatgccagaaactgacgcggagacggcgcggcccattcggcactttgaactgtttgtcattggtgactcagtgaaaacattggaaaacagagcgcaaatgatcggtgcgtaggaaaataaataacattcattttaaaattatttattcagagaattggtatcagtcggggggcgtccttctgctgggctatgaaatgtttcgtcttctcgtccaccaatgtgaacttttgggcgaaaagagtgcgcaacggaaaaaggcatccaaaaagcaaccgttgcggacgatgtacgatttggcggacgatttggccaaaaccaacgagcaggaaaaggcacaaatgacgcagaaggacgaattgcagaggaacatccgccaggctttgttaagcccgggccccgacttggtcatttgcgacgagggacaccgtatcaaaaacctgaacactgaagtgtcatgtgcactctccgcaatcaacacaaagtaccaggaaagggcatttttgaggaatttagaccaaacacaaaaggcgccgcattgtgctgacgggctacccaatccaaaacaatctgacggaatacttttgcatggtcgaattcgtccgtccctcctatttgggaagcaaaaaggactttcaactgatgttcgataagccaattcgtaacggaagctgcacagactcggccaagtcggacgtcaaattggccaagcagcgcatccacgtgctctgtgacatgctcaggggatttgtgcagcggtactttaaggaacgaacatttagtcaattttgttgaataatttgtcaaggcgttctcaacatttgctcaagaaaattttgcccgaaaaccgcgaattcgttgtccttttgcgcaagtccgaactccaacattcgctttacagagcttttcaccactttgcaagtgaacaaatcagtgttggcgaaagttcattcaacccattgaaagcattcgcaatttgtttgaaggtattgctgatgcttttatattttctgtttcttaatttagattgccaatcatccggacatgctttatgccgccttgaaaaagcaccagataaagtgccaaaatcgtacgattggttgtgattcaaataaaacgggtccatgccatgcatcgacttctgtccaattgtcgtccgaccatttcccttcggtaacttcttgaaaaatcatttatcattctaacattaagccttaattcaacaggcgcctattcatcgacagtctaaaaacccttcccctccaattggcgatgttcaccaatcttttgtcaagggctatgcgtcatcctctctgaatggaccaaactttagctcttctgtcgactattggcagccaaattcggaccagtatttccccactcatccgacgccaatccatcagtcgcaacatcgtcctacggatcagcagtctctttattttccccagca

SEQ ID NO: 20133 - DNA, 2129 bp, Heterodera glycines
  unsure (1)..(2129): unsure at all n locations
ggcccctttcttcatagcatatgcgcagaaaaaatacctcctagcatataatttatagccctagttataaatattgagcaacctaaacatcattttcaatttactaaataaataaatatggacaaacaatgaaaaatcaacgattgcaaaaatcattgctttttaaaatcacttaacaaatttctgacggcaaattcggcaattttattattgagtttgggtttgaaaagatgagaaaataatttttttcccaattcccgaatagaaaaaaatcgttaattttttccaaaaatccacaaaaactaacaaattttcacgagatccgttacaaaaaaaacaaaattttttccgcgcaaatctttaattcaaattctttaaattttttaaattttccaggtccgtctctttcatacgcccaaattgtgcggcctcctcaaaagtgcgttgcccgaacggaccaacgaaattcttggcctacagcacatgaaagaggaatggctatcactaacctaaggactgaaggtggtgatcacaatcagttcctttggaatgtacattgttttcctttttcggcattttccagtgcttcatctcgtgccaatttcagtctgatgatgatgactttatcatgccgttcggttttaccaatcaattgactggggagcgattggcgtttaaaagtgccaacattttggtgcgactgggatacaattgacattgcattaatcatgaagaaattggaggcgggtcagtaaattgagaacaaaataaattaaattataattcccatttttgcttttagtcttatcgaggcacttccgacccaagtgatcagtgtgaatgtaactggccagaattcggtaattttcacaaaaatgtaaaatgaaaaaaatgtgtgattttgaaggcgagttcgcgggtgtcaatgtgcgactcgaacatgcttatggcctgcgcatcgaaggccgattcgcgcggatgaccagggtaaaagtatccgctcactttagcaataaattttttatgaaaaattcaagaagttcagcgattttttttaaatttttgaaaggactaccctgtcgcgtgtatgtacctcccccaccaaaacacccctaacccgccgatattttgagaggaaaaggatctttgtcagaaaaaatgtacaattaatcgtgcataacgaattcagagtatatttagaaaatttataaaaagcaaaatatttcaaatttctgtttttcatgaatttttcaagcaataattttcgatgaacaatcttattactcattaaaagtttagataattttttgacctgttatttaaaagtctgttgtctgaaagtttttcttctcagcggtcttcatgactgccttccatcttgtgtgcgattacgccgaagctgaacttggaccggcggaacaaaaattcatgcgaacttaccgctttcgcatttcgataccaccaaaagatgaaaagaagtggggtactagcctcgcttctgccgcctacatcggcatggttgcgttgttgacaggcagagcagtgcgcgccgattggtgtgtcaccggcgcactggatagcgatgaagagtaaatgaagtcgctggaatcccgcaaaaagtggcggcggcaaattttaaacttaagacatacataagaattgaacgggaaatccaagatggatatgttgatgcatgcgataatttaaaacaaaaatagatgaaatgataaactaatgtattgttatttagaataaacttgctttcaatttctgaaattttttgttttaaaagtattgcgagaataatttttaaaggaaaatctaggaatggtatttaaacataaaattattagaaatcaataatatttaattttttatctaattattatatttaattgaatataaatttactttattgtaaaagactatttttgaaaaaatttataacaaaatgataatgaacaaattaatttttgttttttcaaaataatattgtatatcattttaaatatgataatatttgtccgcttaaagaacggaaactaatcaatataaatttagaaaataaataaaataaatttaattaaaaaaagtataaccgaaaacttttgcttttccgancgtttcaa

SEQ ID NO: 20134 - DNA, 2094 bp, Heterodera glycines
atcgagaaatgaaagacggatggcttcgcaacgaatggctcccttcacttggtcttggcaaataccgcaccgagttcatggagtgtctggtgaggtcgctttgtgtgggatttagaagcccaattctaccccgactatgtaaaaattaaggaacccaaatccccccggggacgacatctttttcaatcgtttttttgttgttgttttttactatcaatttttccgtttcaaggttgatgcgcgaatgttggaacatttgagcaaaggagatctcggcgaaatgaaaatgatcgacagtttttaccggtgggaaaataatttgctaatgaaatttgcattcccggttattcattttctgtttggcttaatgtgtttgctctttcaaggacaagcttacactacggcattgtgtgcctgaagaaattgaattatgatcggaagcaattggaagaacggcgaaacgcatcggaaaacgtcaacagaggtgaaaaagagggaattcaatgaaatgcaattaataattggcgatttgcaagcctcgacgcatcctttgatgtgcccgctttggcacacattttacaaattccggacagtgacagcgcacgacggacattggaggcggagttccagaaactggtggccaattaccgtggcagaggcgagacgggagatgaaaacggcaaaggaggaagcggagagaagcagccgcaacagaagaagacgtgatctcacaaatgatctccatgctgtaattaaacttacccaattgatgactcaaatattatttgatgtttaaaatgtacaaaacataaatatattcaccacttcaacacgtcatttattagatttttggaccaggatttccaaggtttaggttcaacaggaataaagttgatacgctaacatttgttattaaaaaaattttccggctattcttttatttggcttattgtgtttgctctttcaagaaggagaaatttatactacgacattgtgagtctgatgaaattgaattatggacggaagcatttggaaagaaccggtttgaccctttttaagggttagtaggagtacccgccccattttgttcattttcagataataaaataggtaatttagggatgcgtttttcacgtaaaaacttaatcaaaaaacttaattttgcttatattttaattgttttaaagttttttcggtaaatattggtcatatggcactgaggccaaaatggccgaaatatttgatagtcctcggtctgtaattgaagaatccgaaaaaatatttttgcggcaaccaatccctgacgaagtgggtcagttccgtctcgccagttccgtctggagccggttccgtctggcagttccgtctttgtactcaaagggccggttccgtctcaaaaattttggacccaattaaatttaatttttatggccgccaattttatgtaaatacatattttttcctggcttctccttgctctaaatagcaggaaaaacactttcttttttgtgtttgcgaacaaaagttgggacctttatttacatatttttacatattttggggtttttataattaattaccagggattctttttttatgtaagaaaaatcgtgaaatatgtaaataaaatatgtataaaaaaatgctaaaatatgtataaaatatgtacaaaaaccccaaaatatgtactaaaatatgtaaataaaattttttaaatggttattttttaggaaaaattcctcgtaaagagtgaaataagcacaaaaagctataaaatgacctaaataggcttagaagcatcttttactatttaaaaatcaagttttgctatatctttttttaaaataattttttggagcattttcaaaaatttttaaatctttcatatgaaatttctataattctcaaaaatcctaaaaatgtgtaaaaaatgaaaatatgtacatgtgtaattttgggttttttgggggcatgttctgaaaatttccttaaaaaatcctcaaaaattgcaaaatatgtacgaaaaaatgcgaaaaagtccagaatatgtataaaaatatgtacatatgtaataagtagaaaaaccccaaaata

SEQ ID NO: 20135 - DNA, 900 bp, Heterodera glycines
atgatgggccaaatttaaatgctggccaagcgttggccaaatggttgcacactccgcgcactgatccgaagcgattgcattatttcgaggatttgaacggacaatcaaatttcgattgggtcaacagtttcaaagaggtggccacattattttaaaataataaaatttttgagtttttctaaggttaaatttttgaaaatttcctatccatatgacccgcggcatttgccttttgatttgcttaggcttttctcagtgccaccaccaccaattctccagtcaattactgtatttgttttgaaatgccaaattcaacgccaactgtgccatttgaattggtgaatgaacggacccaagaaaagctgacattgttgaaagaaagcgatgcttttgctaatgattggctgttgaagcgatgcccaattgttggggaaacggcggcggaggtcaaatggaaggacgaatatttcttctccgcacgtgtcgacatttcacttagtgttgacaaccattgcattgggtaagtaacaaagtttttgaataaacgctattttgattttatgggaaatatttttttttcaaatttaaaaacccggccaaaaatttatttactaaagcccgatgggaggagtggaattcccgcgggagttttgcgagagtcccaatgccgtacttttttggttttatcaagatctaagtcaacaaatggcattttcttttgtaaaaattgtacttaataatttaggccattgtttccaccggcgggtcaaacgtgaaattcatcggaagtgaattgattaattgagtaatgacagcaaatcattttgaatcactaaatgatggatgggaattgatttgatgctctctcttttttctgagtcaatgaaatttttattttcc

SEQ ID NO: 20136 - DNA, 1148 bp, Heterodera glycines
aggaggagtcgaacttgaagttcctttttgtggtgactgagcttgtagaccatttggctaaatggtctacgctcagtcacaaacatgggtctcgagcccgcttgtctgattttttttatgatacttgatgaaaaatcataggcaaaaacactgatggaaagcgcgactccaaattattaggcactagaaaatatggcaccaaattaatcatttgaagttgtaatcaaattattgaatataagttgaagcaatttttattaaaaccaaatcgttagttggatttgaattgaaaggcaagaaaaatttgtcaaatttggaaaattttctataaataaaaagggacactggtgctcaacaatccccaaaaacataaaagacataaatgcataactaagaacacaaattgatctttcgccaaatgtaaattatggcaaattcacaaattattttccgcctcattttggggacaaatacggattatgacaaattgggtacaaatacagattaatttgaaattcattaattattgccacccatttttgggggcaaatacaaaaaatcttttttgttgttttacgtttctttgtccgcgttaacgtcgagcatgtccacagaaaggtcatacgggcggagccgaacagctccgacatggtcacttccttgtcactctgaattttgcggataattaacggattaattgcaaattcattaattattttgcgccccattctggggaaaaatacggattaatggcaaattcatcaaatttagaccaattttggggacaaatacggattatgacaaatccaataaaatatttgccgcccctttaatatggaaattactttgtttctattattttttaaaattattcatagtttttaaatttaaaaagttccaaacttaatttatcattttcatgacttcctgcatatttaataaagttttcgtaatttttctgcattttttacaattttttttttaattttaattaaattttagggtaaaattatttttttttaataaaattattaatggaaccacccgttcaaaaaaatacaaattttctttttccgccgacgaccagcagcagaaatgcctaattctaagtgttcggttagccatgcaaataaataaaacctaataaa

SEQ ID NO: 20137 - DNA, 3643 bp, Heterodera glycines
  unsure (1)..(3643): unsure at all n locations
tcaaaattggcggttggatgagcgccaacttggtgtgggacacggtacgcaataaattggcccgacggggggaacgtttgttttttaatttgtctttaaaatttcgaaattttcaatttttaacaaagaaataacacggaaacactcttctttttttaattttatcgcataattaggcacggggggcttaattttgatgcttaattaggttttttgaaaatttctcgtacacattcattaaaaataaaagaacacacttaagtaacaaccattcaaattttctcaaaaatacaccgctttgaatgtaaaatttaaaaaaaaattaaaatttgtttatcgaataaatttttatgcttatttttttatccctattttgcttttttaggcttactcatacatgaattttgatgctcaattaaataaatttattcattcattaattatactgattttttgtcgaacaagtattttaatggtggatttatcaaagaaatgacctaataatatttaaagaaataaaaaaatgacaattttttgatagcaaatttaaggaatgggaatttgaacaacgaaaaccgtccagcaaattcccacaaatttgaacaaataacaaattattggggatgacgagaatggacggcctgatgagtttaatgaattgcccgacaaccagcttttgcatgtgagtgatgtcccggctgtttaaaaattaaccaagggcgtacttgaaaatttttttacatgaattaatcactaatgttatgccaaattttaattcattaatttatcagcatactcaaaaaaaaaactttaaatcccagccaaaaaaaatattattggtttcatgtccttaaataaaggaatttgatttttggtaatgaaatcacaaaatatgaaaaaatttgattggcctgcatatctcatattcatttttnaaaaagataatatgacaaacagattggttcttaaatatacataccactcacattaaaacggcaaaagataaaatttcctctaataaaaataactaatcgaatattggattaagtttttatttgtagaataatcctcaaaaaaaatatatttaaataaataaaatttggcaaaaaaaaatgtgtcaattgttgaacgtcaaaactttgtttagctcaaacaggacatgaaaggctgcttaattggcacgagggagttgttctgcaacgaactgagggagtatcgcgtgttcgtcggattctggcaaaagcacgagtgcaacaagccagacaacgtgccattgggccagcgctgcaactttgatgcttattttaatggttcggtcttctcatgccaattgaattgcatggattgctctcgagaaaattctcgggttatttgggtgccgtggcacttattccaattgaattgcataatttccgctcgagaaaattctcgggttctttgggctcccgttttcgtatcgaagcgtcagcattcggtgccgccgagactcttgaaattttattgcttaaggaatttaacaaatcagcgcattataaaacgtcggcggaacgtttttttacatagctctttaaattgttaacgaaattagcattctttgttgtgacgatggcaattctttattatgtcaagtttacgaaatgttaaatttaatcgtctggcgccgttttgtccggcaccgctcattaattgcaaatatttccaaattaagtccaaatgggccaatcgatgacgattttttcttttaataatattgaatttttctcaatttcagaaatccatggaatttacattgcctatttctgtgagctcgatgaggaccagcagcaggacgagaatttgctctgtgacgtgtttctgccagaatttgacaatgcgccaactttggttcggcttaatgatctttagtgttcggaaaaatatggatataaaatcgcaaaatatggccataaaatatggaccaaaaatcgcgaaatatggacataaaatggcaaaaatatggacataaatttttccaaattaagcgtgtaatttctcaaaatttcttcaaatttgctatatgtaaagtaaaaccttcaaaaatggctaaatatggtattaaaaatcattttagaagaataaaagatgataaagctaaaatttactcatttttagcgaaaaatcaacccgaaaatcgaaattttgcttttttacgcttatttttgacataaatttaacaatttttaagaaaatttaaatttattcaatatcatctggaaaaattttgtgaaaaactgattttttgaaaaattttccgttttttgaggtcaaaacggccaatttatcttttgggggccgttatattagaggttttttggaaaaatgccaaaatatgggcataaaatatggacataaatgccaaaatatggataaatatggaaataaatcgcgaaatatggaaaaatatggatatggaaatacagcctagaagctccaaaccaagctaaaaatgtaacccacaacccccctcccaatttactcaaaaaccccgggactcaattaggcgaatcttcctcgtcccgctaatacatttctcttttcccaccttatctcccattcaatctccctcatccatttcacatccgttccccttattccgtttccttccgccacttacggacacttttcacgtacaaaaggcactccgatcacaccaatcggagagggagagaggaagagcacataactccataattcactcggcctctccccctccgtccctttcccccagggcttcttccccttcccctcagggcttttctcaccccaaggaattcaatcttcaatccctccagggcatttttcatcaccaatgaccaatggcactcctaaaatccaatcaatctttcccttttcaaatttcaatcaacacggcacttattttaaacaattatatttatatttattttcttattttcgttaataaataataaaactcaattcgacatttggaaataaaagggaaattaaaaagggaaattcggtaataaataaagggactttttcggacattttccctcccggcccggcacgttcccacatttctagtcattatggtgaattcagtggccacacaaagaattgcgatgctccaatttccacagtcataaaccaaactgaacctcttccctcaagatttaataaacaaacattggattaaatacaaatacaataatgaaaaaattcttatttaatattgagaaataaaacagatattattgtagcacctagtttcactgagctcttaggtcaaatttttaaagaaatatataatttattgaaatttaagctaattatgcgtttgatggtgccaattatgactttataagggaattaaatatttattaaaagcctcattttaaccactaatcaagcaatgtttaaatcaatttttaattttttttttttacatggctccaacggtgaaacacaataaatttttaatattacatttaaattttattattttttttatatatttttttcacccttttgcacttaataaaactttaatttcttttaattaagcttaaggctaatagttttgaatgaaatttatttctttagtattcctttcttcattttatatttaatttttggagtttgt

SEQ ID NO: 20138 - DNA, 2670 bp, Heterodera glycines
ggactcaaatttaagttctctaagggttaattaggaaaaattaagaacaaagaaaagacctcccagctcgcgatttgtcaacggagcaagcaaaagcaaattcaagtgaaaaattaaaatgaaaatgaaatgaaaatggaatcacaaaatatggaattagagaacgaatgtccatttgatttacattttttttcaaattctatgaagaaggggagctttatatccttttctatgttcaaatttttaattgataaacttataccaaaaaaatgtatcaatctcgactttcgacttgacagtcaagaacggaacaaaatgttctaacagaaccaaatattctaagttgcgctgtcccccattaccgtcacaaattttacccgctgcacccatacggtaaatgcgtcagtgatacaaacatcttgaaataaagctcttagctttaagtactatagtctaaaagtaaaattctataagaaaatcgttctgaatttaatgccgcttttgaatcaaaaatgttaaattctaaaattcggagtttcggctttttgttcgaattttcgtccggggttcggaatgagattgttatacgattttgaccttttctacgacaatacttaatgctacaaaattttattttaaaaatatttttatctttgacgcattttccactaacgcatttcccgggagcctctgcatctgcccgaacgagggtccttcagaaattgaattttcataaaaatttgccattttcttgataaccgaaggagggggcgagaggagtcgtcggatggttaaaaatcccccgaattttcgactcggctatttttggttaatatttcctccaccatatttttaatgggtttttttggataaatcactttcaaatcggcagaataatccaagcaatcaaaaactaagttttcctttgtgaatatttgtcatttttaaagtcttaaggcgacgcagaaaattctcaaaattttattaacttaaaaattgtctgtccacttttctttttgtttaattttgaaaataattcttttttttttaatttgaaagttctcctaaaattccttaattaaggtgtgatctgttaacaaattttctattttttgcagcattatttttcctagatttttagtggaggaggtccggcggtgccggtaggcgccgtccgggaaaattttgaaaattaaagtgcaatttcaaccagattttttaaaaaaatgagcaatttttgagaatttgaattttttaaatttaggattttagtttcgcgatcgattaattcaataaaatttctattttcttccaatccaaataataattttctctctgattacatcggtgctaggacaaaagagaattttctaaatttaacatagttataaaaaaatttcgaccataatttaatcaatgcgttagcaattggcaaattcattcaaaaccaaccataaattgaaagttgattcagcggcaggtgctccctcccaattgtcactgcccccagggtaagtaccaattttcttcacaatttcgatattttttcaaattaaatcattgtgcattttgtcatgtgtcatgtgtactcagctgcaaattaaaattgaaatttcctaataaatttgccaatgctttcattaaatatttaattcaacttccatttggaaaaaattcaagaatggctcgacttctgcttttagtttttggcttggccttcgttttcgccgttttggcttttggctctgcgcagcccccgccgcccttccaagggagcggttcgttcagagaaggtgaagccatcaatttaaatatttaatttgttatttttggcattttaaggccaattcggcgcccctccgtttggtggctctccgccgtttggtggcaattcggcggacgtttcagtctcggcgagtgattcgtcggaatgcagcggagaaggaggaaatggagtgcaaggaggtgaaacaaatgcgcatttctactctataattcattaattcaggtggggaatacggtaatggcaatggttacggtaatggcaatggttatggcaatggcggctttggcggaggcggtgccgaaggtggccaagggatggacatcgatgtggatgttcagcagtcatccgaggaggggaaacgacgccgtaaaagacatagcggattcggacaattgatcgacaaaatcaaaaactttgttggcggcaaagaatcgatggagaggggtaagccaaattagcaaaggaacaattagtgaacgattaattgacccgggattattatacaatttgcataattgtaaggttgttaagtattttttaaaacttttattttttaaacatttttcatttttttcaaaataaagtcatttttgccccttattttttaagaaaatgataaaaatgggttccgtccaaaacgcaactataaccctttgatgatgggagcaatgggagcatcgcaatatggtcaaattgatcatcaactaattgaaaaatacaaacatttgttcccaatttgcaggttcgatgtacggctcgccttatcagtcgaactcggcttatgggaataatcaacagtttggatatccgaacaatcagcaaaatcaatttgggtactctaatgaccagcaaaactcaaattatcaaatgcgctccaacagcag

SEQ ID NO: 20139 - DNA, 2416 bp, Heterodera glycines
acagctttggcttctcgacctgagaaacaattttctgtcttaagtatttattgagtaaatttatatataattttaattggatttaataaatccaaggtcccatttaccgcattggaaggactgaaaacgctgcgcatcgttgacttggagcggaacaacataaccaagcttggaacccattgggcaggacaattggaagcggaggtggatttgcggctggcacttaatcggatcgaccaattggcggagggagcatttgacgcatttcggcgctttgaaagagtcgatctgagtcataatcaggcaattaaatccaattaaaccgccaattaatgggatgaaaagtcaaatttaattgcagatcaactccatcgatgaaagggccttccgttcggtggtttccctctccgaattggacctcggctcaaacgctctcccccaaatccctcaaaatgcttttctccgcttttcccattcactgcggcgcctgaatttggagcaaaaccgattcagcgaacttccacaagcacttcagcctctgagtagccttcagcagctcaatttgaacggaaatcgaattggggcattggacgagaaagtgttggccgggtttaaggccaatttgagcgaattgtcgctggccaggaatatgctgggcaagcttatgtcatgaataataatttggcatttattatttttaagagcgcatcccatcacatgccattcaggtgcttattcatccattcattggcattttgtctcacttccccccaggggatggtctctctgcgctccttggatctgtccaacaatgccatcgactcggtcggcaaaatggcattcggctctttcgacggtctgtcgaccagcggagtttcgtcccttcagcgactttcactggccggaaaccaaattcgtgagctggtgcgcttcattactgtattatatatcgaatcccaacatttgaccacccattattaaccttttactctccaaaattcgcgaaattttccgcttgaggctttaccctaaaacagcacattaacaaaaatatcactaccatgttgcgaactttttcaaaattccacatattaagaatattataattaatataaaatttttcgagataaaataagaaatgcctaacttttttagaccaattccggcgcgttcatctacctttctaatgtgggctctgattttgtttttgtaacatggcattacataatgactggccattcttcagcttgtccaccttgaccttagccaaaatcgcatcggtcgcctaacaaaagacgtttttgaacgattggactctttggaatggctttcattggacgtaattagcccaattatcatttttacgttaaattttaatccagttcaacaaaatgcttgaatttccccgcaatactctttctccgctgaaccggcttaagcacctctcaatggagtcaaatttgttgcaaatgttgcccaattatgcctttcagtaatattaaattgcttttgctttttaattacccccttttttggtggcttgtccatcttcaatggctttcattggcccgtaatcggtttgtttaatcccggttcatttaattaattgccatttcctaattctcaggttgtcttcaattaatgcgaaaatgttccactcaacaagtgccattcaaattcggtggctcaatttggccaataatcggatcagtcggatggagacagccgcttttcaggccccacttggaaatgttgtccattaaacatgcgtcttttcctgttttagaatttgccgaatttggaacgcctttatttgtccaacaatcggcttacaactttgcccactcaagtcaattgatcatggataattagcaataatacttttctgtcatttcattaaattttgagtttagattctttcgtcactgaagaatttgcgacaattgagcttggctcacaatgacatcaatgaaacgcaggaaagcgcgtcagtccgacgctaatttgctcattaatgcaaatttatgcttattttcagtttcgccaatttgccccaccttgaagagctgacaatggcacacaatcggttgcgcactatcaaagagggtaacacacaaatcattaattatttaaaccgaccgattgatcaccttcacaattattagctttgttacgcttaatcaccccaggcgttttcgacaaagtgccgagtttgagccgacttgacttgtcgcacaatcgcatcgaagcattcgacttggattttcttgggccaactcaagtgtaccaattgcgagtgcttgatttgtctttcaatgtcattcgaaagtaaaataattaatttaaatttattatttaaaaattttcagattggaaattcaatcggccaaacattcgcttcggtcttggacataaa

SEQ ID NO: 20140 - DNA, 2160 bp, Heterodera glycines
  unsure (1)..(2160): unsure at all n locations
gttaggccttcgtgacctttggtttggtgttctccgtgtttgtacaggtgctgctgagacgacttctgcttttggttggacgtagtgatggccatattctcccatcacttcttggatttggacttctttccggactgcttcggttagcacatccaggaatttggttgtcgtccagtttgccggatcctctcctttctttgtgaggatgcttcgtaggaatggtggagtcagcttcttctccagcatgaggaacacttgaggaccttcgatgtcctctccggcattgttcagctcccttgtaagccgctcaagttgaagcataaagtctttggtctcacggaggcttcggcacggcttgagattggccagttcgaagtgaagacttctgatgtgttcctccggagctccgtacgtgtcctttaacagctgaaggaccgtctcgtagtttgcgtcttccagtcggaagcccgctatgagttctcgcgcttctccgcccagtagattgcggagtaagttcagcttctgcgctttactgattgattgactgccgattgccgatttgaaggattcgtagaattcgggccattttcgcttttggccgaaaaatttatccagttgaattggctggaattggtagagcggtgctgtgaatgttggcattgtcattggtgctgccattgctggtggcatgggcggttgttgctgcggattggccaattgatccgcctttgcttccctgtcggctctgcctctgtgcagtttggctgcggcactgagtgttgcttcgagatctcgcaaatcccgaagtttggttgatgctgcgtcgtatcgttcggcgattttctcatttttgtcgaatttgatgtattctttttcgccgttgtctttgtcgtctccggtcaggcgggcgagaagttcaatccaagcgttggataagtctcgtagactgtccatctgcatttccgttgtacggatttccttgacgacgcgatcaaattgagcctccaagttgatggcattttcccagtttgacaggtccgggtcggggtgtagaaggagtgaggtggcgcttttggcattgtccagagctttgagtgcattgatgatccctttttgtattggcccagacattgcgtgcagtttggttgtgcgtgtgtgtgtgttgtggtgcacttgttgttttgtgtctttttccgggatcagtctggccttggtcctggaccttttgtgactaaacacctgcctcggaggacaaggtgtttgccttttgccttatggctaaactaaagcctcggaggactgttagtttgccttttgccttatggctaaactaaagcctcggaggactgttagtttgccttttttccttatttgtcaatggcctagtgcgcgaaaacaccctttttgcacgaagtacttcctcgaagggcaagtactacgtgcactaacactttcacacctctaccctttgctaagacgaagcacttcctcggagggtaagtactaagtctgctatgtccctcgtgaagttaggcctcggaggaccgtaactacacgaaactatgaacactagacaagccttggagggtcttgtctaggctctctaatttgctttttcctttccccctttgtcaccgggattcgtcgatttcagtccgtggttcacagcaatccacccaggagcgccaatttgtcccgacttgctctggggtcgggccaaatgaattccacggtgcgggggtcaggggcaggcagggacgaggaccggccaaatcaaatgccgagaattgattaagcaaaaatttattccggggaaaagcctcaaacttgggtaattaaacaaaaaatttgaaatggtgaacaaattatcacaaattgatcacaaaaatgccatcaccggggaattatcacaaatggaattgggcaccgggatgggacaggaaatggagggcaccggggccacagaacaaaaatcaataaccgggggtcaaagaatgatcacaattggggcaaatcacagcgaaatgggacagaagtgaagagtcaatcactgatcattgaatgagggggaccgggtaaaggacagacatggaccggncaattggnccgggggaactttgtagagaaatgagggggactgagagagggacggaagaggca

SEQ ID NO: 20141 - DNA, 1196 bp, Heterodera glycines
tgattttttatatttgcgttgtgtgatgaaaaataaaaatgttatggggcctcaaaaagaagaaattttgccttttttcactcaaaacaatcatttggttaaattaacatttttttagctcgggttcaaacccaaatataaaaagaaataaatttaattaatttaaatataactaaattatttaaaaaatcgttttttagactaaaaaataataaatgtaaatgttcgacccttctctatccaacgataccaaatttatatccactttttgagtaacaattcgcgatgttcccttgtaaacgcttcgcttttttttttgaaaacctaggtgttactgaaaacaatatttgctgaatttccagaaaaacctgtcaggtgttggaatttgtcaccgccttgtccactgtgaagacggaggagtccgaccggcgcgacatgggcaacagcgacggcgaaatgcacgatgtgcagcaccaggcgggcggtgaacagcttgaacacgttgatggtcgagacaatgaacaggtgctggttgtgttgcaatcgctatcattttactcatttttaaagactttttggttttggacagcgattttttttgaaactatgataaaaatttttcaaagattttttccttcaaatatttctaagattgaaaaaaaacttttaatttctgcgcgagattttggagtccagcctccgttctcattccaaaattacatcaaattatttaatatttatttaaatttaagttcgcaattgaaagtcagaaatcggtgagaaaatggcccttaagaaatgtccggcaaatttggggtaatccaatagcggttttgaaatgcataaaaatgagctcatcagaatcggtgggcgaccccccttttcaaaaaattttttcgaccccccccccccccctccatttttaatgtataattggcactttcgcagggcacttctgacgacggcgaaactggtgagccaccgttggaccaattggtgcacagctggcatgccgggtgcagaacatggccaacaacaatgacaacagcaacaagaacaacgacgaacaattaggggtagaaatcaattgtaggcccatgtacagaaaacaaattttgcgggcaaggggggggggggtacgagggtcggagcaggtcggtagttccccctcccctcgaatttttttttttaatttt

SEQ ID NO: 20142 - DNA, 1054 bp, Heterodera glycines
aacgccgccgaatggagaaagatttattaacaaaaaaatacagtataatgacgaaaaaaatttattaaaaaaattacattataataagaaaaaaagatggtaaaaaataaccccccacacccaccggtttaaaaaaattttttaaaatacagtacccgaaaaaaatgcgcgaaaaaattttgcgcgaaaatgggccccggacacctgccggtaacagctgttttcacaccctcaaaggtgtgaaaacacatgttttcacaccacccccggagcccgtggggtcactgtccataactactgaaatcatttgcgcctcgtacatttgcggtccatttcttcagagcctttttcgcacatttgcggccacatccaaaaacgacacttgcggcccgactttttcgacccgaaccaaaatgggcgctgatttaccgaaaatccttttttgttatcttaaaatttacgcgaactttattcaaccagggcaccgcaactcacatgagtcacgtggtccaccgaaaaaaccaattctgaattcttcaatgatttaccacaaatacaaaaaatgaaataaaatagaaaaaataaaattttttgggttgagaaaatttcgtaattttcgaaccatgtcacgcattgttgttgaaaattgtctttttttgcaggtgattgttgacgaaattgtccaagcggattgtgacaagcttttgttcaaacacacttcgtccgtccctctccatttggataagttggccgacaatgcaataactgacatagtttttcgggattggatcgacaatctcacagaatgggtactgtagttttttaaaccgcttttttcgaaaaatgttttgagaaaaattgggccggcggtaccttcagggaaattttgaaaattcaaatgtgatttgttaactaaattttgcgcttttgagccaattttctaagaaaaattattattagtttttataggcaacgccgcgggaaaattttttgaattttttatgtttagattattcataaatctttaagtcttattggctaagacaaataacat

SEQ ID NO: 20143 - DNA, 2181 bp, Heterodera glycines
ggaaaatttttgacggaagattattaaaaacatcgcccaaaatgaatcaaattttaaaaaccttgatatctttcgatagccctaagtgttttatattatcctgcaaaattacaaaaaaatttattaagtttcaaaaaaagttatgacctgagaaacccaaaaacccaagttttcttgaacatttttcgtcataactttctttaaacttaatgaaactttttgaaagtttgcatgataatggaaaacacttagtgctaccgaatgatattaagaaaaaaaaatttagttgcttttatgcagttatatgaaaattttttttttttgattttgatagttttttgaacgcccattttgatggtttttgagtaacgtcatcatagcaccgttgtgcctcggtagctcagtggtagggctttctacggattgggtggacgagacgcttgggttcaattaccacccgaggcctagcattttaccaatttctcagtgtactgttgtggcttcgttaacctcacctcggtgcagcaggtaaagttgtaccctgcggcgcagcaatggctcgctgcgattccctcttgcggaatgcattttgcccatccgcattccatgcatttttgcattgcatctacacattcggcttcaaactccatttgtttaaggattttcttacaaaaaattaaaattattgaaaaccaatcgactaaatgtgcaaaccggcggcagcgaaggctaaaggtttgtttcatatatatttttttaaataattcgtttttaattattaaatttgtgtccagacatttgcgccccccgacattgcgtctatgtccaaaatcggatttaaacataaatcttttcaagcaatgatagtttaaatggcactaaaagaaatcgtaatcttctagtttattaggggcattaattctgctgtttgattaattaatgcttttttcaaaaattagattatcaaattatcaagcacaatcacttaaataatgctgcttagaggcgatcagggattgaaaaatttaagtttttagcccgatttttgacattgacgcaaatgtatggcaacaataaccagtaaattatcaaaaaacaaaataattttttaactttaggattttctcaaattttttaattctttaaaaacttaagtgccgagtgaaaatccaaaaattcaatttcaattttgcccattacagttcatgaaatacacagtatgccatcaccacctctttgcagcagaccagttcataattttcagaacaacactgcgttcctttggcaccatcttttgcgtgacacctgaaccagccgcactccttgcacacttcatgtgcagtttggttgcaatcgttaatccattgtttttgttccgtggttggcttacaagcaattgatcgttacgaaaatgtttgccaatcaaaccatcaaaaatccctacctctggaggctaaaaaggatttgattgaatttaacctcaaatttttgtatggcagatctgcacccaaagaaagaaacggggaagaagctgcagacgacaaaattttgaaattttatatggaaattaacatctcaaagattctaagaaaatattgaaaaattggacggcaaattttgatgcaattaaaagaaaaagttttggtatgcctaacttaaatctttttctgggtacagggctgatttctgtaaaccattagccaacctccttgcagcagatgaattcatatccatcgccacagcaaatgccgccggcttttccctccgatttccaacactttccccacatgcagcccttcttctggcacatcagcccagaaatggtaacatttttcaagtccgtgtcgggaatgtgaaagatatttttgacaaatgagggcaatttctcgaggttgatgtccccaagttgaagacgacaaatactgtcaagtacaatgggatccgggatggtgacaccaaaaccaggagtctctatactagccgattcaacaacgagccaatgagcttaggagaattgccagagactgaagcactggaaaggggaggcaacaattagctgatcggtgtggccaaatgaggtggaaattgatcactttgtccacttttgccactggcagccgaaaaacggccgaacacaataccaacgaaaagcaagtgaagctggcaatttatgtcgaagct

SEQ ID NO: 20144 - DNA, 2791 bp, Heterodera glycines
  unsure (1)..(2791): unsure at all n locations
caaaggtcaccggaaaccattcgaattggtcgtcaaattgcccattgtaatggcaaacggagtgaccgccgccctcaaagcgcaagacaatacaggcccaattgtcaacacctgaaaaaggggatgaactctgttaatactggtggcgcttatcgccactgctgggctacctcccggtctttttggaaaaagcgcgcaaaaaatgatttggaaagcaaaaaaaaaaaataaggtcgtcgcccgagggggtatcccccgccaagccgaaatactgacaatgagaccgtccctgggaaggagagaacagagggagacacttctttagaacagacaactgccggtgcctttagcttaacggatatctttttttatgaaaaatgcccttcccttttttggttgcatttgtttttttttgttgttaaatgatcaatttccagggtcggtgatcagtggatatttcggctagccactaataattgttgtcaaaaatcttttcaaaaacaaagggcacgccattgtcaggagaatgttacgaaccgtcctcagcagacacatctccgatcactttcacgtcgatcacttttttgccctcaaaaacaaaagtggcgaaatcgacggtgtaacagccgatgtccaccaggggacaaatgccattggaaaggtcgcgccgtttgtcgggctaaccaaaaggggacaaaatgcactaactgaccaataatcaccccatcggtcgactcaccaatttttgactgaaatccaccgagaccaatttggggttgcccatctgtccgtcgcgcaccgtttgtcggattttctgccaactcggaaagaaaccagaccaaaagccctgaaaatggacattttggcctggtttgttggactttgccgtctcggtaatattgcagaattgtactcccgacgaaaaatagcttggctgcggatccgaacccaaggaaaatgaaatttattttttgtcgggaccaaaattcagctgtattaccgccatctttgcattacttccatcacaaagagtttctttccctcccttcgattgatcgttttttgcaccgtttggacaacggaaagttcggcacttgaataaaccattggcttttcgcacagcacacttttgtggtgttcaagtgcggaaattataaggggcaaatgggtgctgttaatggtggcgatgtaaacgacgtctgacgaaaggaaaacggcgaattaattaattattaattaattaattagttaattgccaaccgaccgaaacacggccaaacccaaaccgaactcacccacgtcggcgtcctgcagcaactgctcgtagttgccataagccttgacctgttcgctgttcaggccaaccttttggatgaattgctgcgccctttccacggaattggaagtggccacggcggtcacctcaaaaaaggaattgcaaaagtgccaaatttttgcggcactttgttcgggtgttgacaataagccatcgcaagcacaaaatcattggcgatgttccccaagccgatgataccccagtgcaattcggcacgctttctttgggcggacgaaggcattttgtggacaaaaaacagtgaaaacttcgaaaaaagcgaaagaaagatggaataaaatgtttatttggcaaaatgaaggaagaaatggaaaattgggaaaaataaaaagccgacaaaataacaaataattgcacaaataaaaagaggggaaaaggcaaaaattgtgtanattggtgagagattctattaattgctaatcgcatttattaatcgtcgctaattgttttgattcgatttgatttttcaataaattttgtttaatggatgaaattcgctcaatttattgcttatgctgcgtgttcatttcgcttaatgtttacccatttttaaatgtggacattccccaatcaaattccaaacacagtgatcagcaaaacatttgtcacagaattaattaggtacagcagaatgcccaagggatttaattctntaaaaatgattatcctatcagagatttgtgccattttgcggcgcatttggggcaaaacgacggacaaaagttgcgcgaccaatgtttgcgaacgctttccgaccggacaaaacttctgcacgaactttgcgagtgcgaaccccagctgatgccctatctcattgctgaattcaaaccaattttcaggtctttaattgggcgtggattggtcaactaaagaaaatttaaaattgatgtgtcctgaaaactcggcttttcctttggtgaccccgatattcccaaaaattccggcccattctgtgccattcatccgtgtgtttggcatttcctcagggccatcgtcgatgcctttgcctctcatttcgatggaccacctaatgccgagatggcaatggcctcggttgatcagattttgtgccattttctcgcggtcgtttcttccctgctttgcttcgatttcggcgctttctttgagaacatttgcggcgtcgaccgctttttgtcgctttgtttcgcctcaattggccaaatgaatgcgaattcgatggccatcactttgaattgcctcggtcttccttatttttccattttctcatttattcccccattttcagtccgttttctctcttccctccgttcgtccgtcccttctcttccgccccttccgttcgccgtttcttccgtttctcttcgcgtcatcgcgcaaattattccgccgccaatttctccgattttgctgttttcgtttttgcaaaattcactcaattccgatttgatctgttcg

SEQ ID NO: 20145 - DNA, 443 bp, Heterodera glycines
aaaattcggaatagacaaaattttaaaaaatagattatatgacacattgaaatgtgatcaaaaaaaaaaagatcaacaagaagttcggaaaaatagataaaatgggcgtaaaattttaaaaaattaagattagacaaaagctatgaaatcattttttaaataatcagtgaaaaattctttatacaaaaaggtgaaatgaaacattgttgaagaaaaaaaacccaaaataattcaccatctgtcaagcggtttcgaacccataacaattggtcattaaaatgtgagagaagaaaaaatgccgtttccccttaattttggaggcatgggttcaattcccaatgacgtataaaagaaaaaaattgaaaaattttaagctatttttttgaaaaaattacattaataattatttgaaaaaacaagcaaattttcaaatttttttccat

SEQ ID NO: 20146 - DNA, 1192 bp, Heterodera glycines
ttttgaaaaattatacttataaattcttacaattagaaaattcttttcgagtctgattttttttaatttgaatttttgacggaaaatggcaaaaaaaaaatctttgacaatcggtttttgaatttttacccacccctcgttagatttacagttttgcgcctccccttttttatccatggattatgataaattttataattgaacttgtcaaaaaacatatataaaatatatcacacccgtgttggctctttgttgaacaaatcgttggcttttgggtggtccaactctacaaaaaatggaaaatttaaaaaatttttgtataaatctgaaccaaccgttgtcagccattgagtccatgatggtcatcaacttcttcagtctggacatggactcctgttcgttgccctttgacagaaaatcggtgccaaatccggggatcatactcttaaaaatggaagggggggggattagaaaattttgttgggaattttttttggtttaccataatttgaccaaacgggcccatcttgagaatgttttggaactgttcatacatgtcacggagcgtaaattgacctaaaaatttgtttaatacaaacgataaatgccaaaaaaatatatatgaattttggacgatttttgtgataaaatttcgaaaaaattatagtgaaaataggggcatgtctcaagcaccgaagggaaatgaaatttgaaagaaattaataagtacaaatgaaaaaaaagttgaaattaacactgccaaaatttttttgaaaattaaaaattttttcgcggaattgtccccccgcctggtcataggcctgacaaaattgcatttttgaataaattttattgaaaaaattcggcaatagttgaccctgtttaagccgcttgatcagctcctcgttgtcctccagccccatttcagtgaccttttcaacaaggccttcgatgtcgcccatgccaagctgaacagaaaaaacttttttttttcaaaaaaaatatggcatgggacggattagaaaaactaaccaatttttgcaggaatggtttcactctgaactgctcaaagtcgtcaatgtgttcacccgtgccgataaaaatgattggagaacgagtggcggcgacactaaaaaaaacagccgaaaaattaatcggaaagtggcacacattttcagtttttttataaatg

SEQ ID NO: 20147 - DNA, 1923 bp, Heterodera glycines
gatcttatcgatcgccagctgttttttgtttttcccacgctttttgctagtgatagtccaattaagttttttcctctgtgccccgcccctcacatttttggcctataaaaagggcacccttttcattatatgctcacttccacatttccattcattcatttctgctgctgcttaataaatatatatttgtgaaaggagtccgggggatttggtcgggacggttttcccctcccccttctgctgctcagcgtctgcgtcgtcgtccgccccgcgtcggtcttccccgcaggagtctctcactcctgcgggccttcgcttccaccggctcgtccgtcccttcccccacatttgggaaggcacggccgagaaagggaaagggggaagcaaacagctgattttgcccttggcaaagtcggctctcgcctccctcgctccccacaaaagtttttgtcgcctccttggccgcgacaaaattggagccccgtaggggtcagttgttccttaccgaaaggacctgacctccttcaatcggccgtagccgccgatcaaaaagtcttcgcccgccaaggggtgaagaacatcggctacagtcgccgatttactttctccctaccgaaagggaggaaggctcattcggccaccagtcgccgacttcttcgtcttgcccaagcagtggcaagacactcggccatcagcagccgactcttcgtcttgcccaaccagtggcaagacactcggccatcagcagccgactcatttagcctaacccatcaaagggaaggctcattcggccatcgccgccgactcattcgcctgacccatcaaagggaaggtttattcggccatcgccgccgctcattcgcctaacccatcaaagggtaggcacactcggccatcgccgccgactcattcgcctaacccatcaaagggtaggcacattcggccaccagtcgccgacttcttcgtcttgcccaaccagtggcaagacactcggccatcagcagccgactcgtcgtcttgcccaaccagtggcaagacactcggccatcagcagccgactcatttagcctaacccatcaaagggaaggctcattcggccatcgccgccgactcattcgcctgacccatcaaagggaaggcttattcggccatcagcagcctactcatttagccgaacccatcaaagggtaggcacattcggccaccagtcgccgacttctttgtcttgcccaaccagtggcaagacacattcggccatcgccgccgacccaagtctcacccaacaaggggagacacaaccggccaccagcagccgaatcttcgagtcttcaccaacaagggttaaaggactccggccatcagcagccgaacctcccaaagcaggagaatcaacatgagcgggccaatccgctcaaaaatcgggccttgtgccgcccgtaccaaggcctacattgaggcggccacggtcaatctcggaaaggacacgacagacgtgagcattcaagcagacctcacagcggagcgccgtggactccgccgagcgattcagcttttggaggattgcaatgacaaatggcaatccctcctgctcaaattaaatggagccgaccgccaacaagaggagcaacgctacgatgactttaagccatcgggaaagcacttcatggaatgggcggacaaagcccgaggtgcagtggacacgatcgatggagtgatcggtccagaggatgacgacgaaataactgagagcattatctctcagcccgccaatcctccacaaattcaacatgttcagcctcccccacctcgccatgaagtgaacttacctcccatctctctcccaaaaatcaccgggagagccaagggaagggccaaggttttggaggctcttccgttcctcagtggacaacctttccaatcgac

SEQ ID NO: 20148 - DNA, 1235 bp, Heterodera glycines
  unsure (1)..(1235): unsure at all n locations
tcattgggacgctaaagcaanaggagactgggaaatcacaaactatgaatctacaaaccggaccgggaatcaaggcaaaatcccgacagtgccacaaacatacatttcagatcttttgctgtgtaaagacattttttttttaattttgaattggcataaaaaaaaattttgaatttgaatttaaatttgcttaacggtgtgagagttcggcggaactgtaactgctgattttgcttaccaaattacctactctttgattttgtcaaattttaattttcttaagttatacatataattaggttatttaaaatgatgaatgaaactggcaatgaggactggtttgataacgttgagaatttgcgtccgattcgtggagggagacgggcagatactttgaatgatattgcaactgggaaagcaaaggttttcataacattttttgctttactaaaagcctctgtttcaagatttccattgaaagagctgagcaaaaatttctcactgaattcgcaaatgcatccaaagggtccgacccattggagccgatgtaccgcttcacaatttggttcgaggaacatttcccaagcggaaaacaaaaacatttctgtcaatttctttataaaatttgcacaacttattgcttggtgaatgcctacaaaaatgatgatcgcctgatgaaactgtggctaaaattgacagaaaattttcccgagagtggcttcgctataatggaattcgcattttccaaggggtcttgtcgccaattggccaagttctacatacattggagcaccatgtatcagtccattagtacgttttatggtatttgaaattgaggaattgaactgcatttacaggttggtggaacaaagcacgggagaagttgcagctgggccaaaaaatgtgtgcaatgccattagatttgttgcatcgggcggttgacgaattggaagcgtcagtgatgaaagtgacgcgaagcggggagaacagcgaagagactgaagcggacgaggtggcgaaaaaaagattacaatacgcattgtttcatttggcaataatcaacgaatttgggaaattttaaggcgagagggtggaggaatgggtctttgatcgggttccttttgaattgccagtctcatcagatggttgctgtatctttggagcagtcacgcgaaactctcggcaaactccgtggccttggacggcgccatttcgctccaatcattcgcactgcg

SEQ ID NO: 20149 - DNA, 909 bp, Heterodera glycines
  unsure (1)..(909): unsure at all n locations
atttttgagatatttcgcgaggaaggagacgaagatgacgaacagccgaagaagacgacaaaaaccaagttgaagcttcggaaggagctgatcaaaacaatgtccattgaagaaggatttgcacaaagaatttccaatgacgaagcaaattaaattttgcggaaaatggggaaaccgaaataaattcaatcaaaatgacaatgattttcatatgtaaatattttttgaattttagcattgattgcatattttagaatctccttttttgtatttgaggaaggcccatcagttttgctttatttttttataactaaaggtgaataaaatatcgaaaattttgtaagaaccaagcaaaagaaattgagtttatcctttaggacaaaagaaggaatgaacgaacgacaaaattcgaattagacaatgagatatattagaaggaggattacaatgtaacgggacatatcttaaatttagtaaaaaataggggagtgggagcggaactacactccgaaaatggcaattcttgcgcttgagaattcctccatttcacctgccctgtcctttcattattagggcatccaaaaatatggatataaaatcgcgaaatatggccataaaatatggaccaaaaatcgcaaaatatggacataaaatggcaaaattttcaaaatatggacataaatggcaaaaatgtcaacataaaatggcaaaattttcaaaatatggacataaatggcaaaaatgtcaaaatatggacataaatttttcaaaattgagtttaaaatttcttcaaatttattagttgaccttgcatttatgttttcaaaattccttcaaattcgctaaattaaagtaaaactttcaanaaatggctaaatatggtattaaaaatcattttagaagaaaaaa

SEQ ID NO: 20150 - DNA, 1456 bp, Heterodera glycines
  unsure (1)..(1456): unsure at all n locations
ccgaatttatttaaaaccaaaatttgtaaatatttccaaaataaagatttctgaggatttaacctccccccgtcagaaatttttttgttcagcatttttttaaaccattttacggggggaggggagggtaaaaattctgcgctccgacaaatggtcaagacaatttttagaaccacaattttttatttctcaactaaattaagcattgtatttgaaagcgcttgacaaaatctattattttcaaactaaaaaattttccttatctacaaaaaatacgggcaaaataaaatattcaaaaaaaactaacattttcttgtcttttggccatagatttcttgtaccttattaaaaaaaaacttttagaattttgaagaatacacagaaaacacttagaattatcgaacattaccaagaatatttaatttattggctagcaagtaaaaagtaatggttcaaaaattctcctggccggcgatattttgggttccccgaaaattctgttcccaaatttgctacagatttttaccgattgaaccttcctttctttctttcatccacttattatactgtactgcatccgaaacatgatcaaattgtgatctcttcgaatgtttggcgtacttctacggcattttccacttattgttttggtcccaattgtaatgtttgtgccatgcataatcggcacgtcggccgactcattttcgtcgtcatttcacctccggcgccaacaaattcactctcagatgcaatcagcagaacaacccatcggtagtattaaaagcttagatcaattttcataattaaaccgtcagaaattgccattattttataagcggcttggtcattggggtataaactacgttgaaaatttgtttgtattaaatgtttagagttttttttcttataaaaaaagttaaaaaaaaattttgattatttttttaattgaattctaaaaaatttttattaaagaattgttaaattcttaaaaattttttactagaaaaattgaaaactaaaaaatttcagtttttaaaaactttttccgagggcgggggcggggaactgtgctggatccttggttccaaatttttgacttttccagatctggtccatgattttaaaaaagttaagtcgaaaaggcaatacataattataaaattaatatattcaaactgtttttttaatactctaaaaaattatatcaaatttaggcattgtttctgcatatttttaaaatcaaaagatgcatatgtataaagaaactttacagaacatcgacatttacgacgtcatccgccttcaaccaatggagatgtgttcccatttcttggtgctgttttcttgccagacgatgctgaaattgagaggatttcgggcaaaaatggtcgaaacatttgtatcatatttgcataataaatttanaataggggcttaaattcaaaatttaattttt

SEQ ID NO: 20151 - DNA, 629 bp, Heterodera glycines
caacattgttctgtcgctgaactcgattatggagcatgtggacacctgtgttctgtaagccaacactttcctgacacaccaaaaaaaaatgggaaaaatcctttaaaatcccctatttttgaacattcctatcggaaattttttccactttttttttggttcgacaatgacgcgtttgagcaccagtgcaaggagatgaacccgttacagaagctgcgccgggacggcaccagcgaaaacttggccaacccaagcgacaagaaaaactacgagaagatcaattccatggtacacaacaccatactttaataattttttttatacgttttgttgggaaatcttttgggcctacagaagccggctttttatacgaattaaaaaatatcaaataaaaaaatatccaaattaaaaaaaatgtgtagatggcatacatgaaactcaatttttctcccggcggcgcctatcgtcaccgccggacccccccccccccccaaaaaaaaaacatattttttcttaaaaaattagccaaaatctcaaaatttggttattttttagtcaaaatctgctaacaaatagcactaaaaattacaaaaatttttcccgacggcgcctatcggcgccgccggacc

SEQ ID NO: 20152 - DNA, 860 bp, Heterodera glycines
  unsure (1)..(860): unsure at all n locations
cccccccctagctacgcccttgattttgttcaatttgtttatatatatatatatatatatatattatatatttttttttgccaacagttcaccaatacgaaagtgcgttcaacagcgggggtgcctcggaggcggggaaggacgagtgtgagaaggtcatgggcagcagcaaggagaacatggacaaactgctcgcgctctaccgcgaggcgagcacagacaagtgtgcaaaactaacaaaaaaacgaaataatttttttttaatttaaatttgaaaacccattttcaacaaatcacacatattttagcattcagcaaaattattaaattttaaattgcttacccaatgaatttttgtatacatttttaaagcaatgtctttttaaattgtactgttttcagttttctgtccagttcactggagacactgttcccccgcccggagaaggggccaaaggtgcgcaaggaatgagagacggacggacggagacggaagaggagaatggacacgacggatgacccccggggggacaatggacgacgacaacaaattttttgccatgttttatttgtttggacacatcgaatgctctttttttacgattttctgaccattttttgccttgatttttgattgttttttttcttcctcaaatctcagcccaatttcattcattcattctttgatcacatcgaatccattccaaatcattatttatttatttatccattccttgccaaaatgcgtgtgctgcacttttaactcattcattcattcattggactccgaatgatctctccgcccacaaatttatttatttttaaacatttttgcgctccgntgtgacttccttcactaa

SEQ ID NO: 20153 - DNA, 1741 bp, Heterodera glycines
ttgtggccaaaacatgctcaaattgcaataaagcaaacgagttatagtccagcgtgtgtggcactttacagatgtcgccccgttcccatctgcactttaaaaggaatgcacaaacacaaaagtgctgccacctggactaaagggagggaggagggatgacgtgcgagttagggcacttccggtttccattgcattgaaatatgcaatgtgtctgctcatttcacgagcgaaaccaagtgcatgtcggctgacgcaaagaccctaacacaatttcaagcttaacacgaacacgttacatataagataaaacttataagaaaaatcggtgaaattccgatcaattaattatttccgatcttatgttaactccgattaacttttttttgttcattaagccaattttttacatgttacatgtaaacggagggagttcattgtatatgttacatgttactacacttattagcccatctctattattcgatccaataattattccgaattccatgtaatcaaaaagtccgcgctttattgctcttaaaaatttttcagactattacaagtcatatgtaaatcaaaactccatataatttttttgttcattaatgtaaacggagggagttcattgtatatgttacatgttactacacttattagaccatctctattattcgatcaataattattccgaattccatgtaatcaagcgctttattgctctataaaaaattttatttcatacttttacaagtcatatgtaaatgaaaattccatataatttatttttgttcattaagccaattttttacatgttacatgtaaacggagggagttcatttatatgttacatgttactacacttattttttaatttctcttttgttcattaatgacaaaattagttatttattacatgttacatggaaacataacttcctttggtccaccccaagttacatataagataaaacttataagaaaaatcggtgaaattccgatcaattaattatttcggatcttatgttaattccgattaacttttatgctttctattcaccaaggtatatccaaatcaaggttaattccgattcgctcttatgctttcagtttcctaaagttcatccaaatttttttgttatttcagcgcaaaattgttacatgttacatatcaagtaagaaggtgatgatgattactgttacgtgttacatttaaactcacacaggagcctctctactattctgatccagggcgcgaagcgcccttccaggcccaacggaatttaaaaacgggcgcgaagcgcccgtccaagcacaacaaaaattaaaaacttgcagccgctaaccttcacaagccgaccttatctaggtagcgaagctcccaaagcgcgaagcgcttttcccaagcgccaccctcgcatgcacacacccgctagttatatataactaaagcaacatcgagtttcattgctaaaacaaaaatctcgggaaccgctggggggagggactcgggagtgtggcattgcttaagcaactttttgaggcgcatccaggaaaactatgggcattccggtccggtggccaactgagcgccggcggcgctgaaacggcttttcgtttcagtctcactgttacgaaatttttttcttttgctttgatcaaaaaatgcttgctgggaggattttaagttgaagtgtgccctcagaagacgcttccaatcatttttctctacgacctactgtat

SEQ ID NO: 20154 - DNA, 3669 bp, Heterodera glycines
ttgcgaagccaatagagaatgctaagagctttcgaatgataccaagtttgttgaatttggtcaacaaataaaaaagttatgacgttttaaacttggctcagaagcaactgctggccagacgcaactggtccgctccgctttttgtgatgtcatcatttttgcacttttcgcgcaatgacctagcactctggcggcaccgttggctctccttttctcgagtttatattaagcaaccatcgaaccatctgcgggagagtccatcgaacaacggatggtacacaattcgataattaatcaattgctggcgaccgttttttgagcatcccgaaattctcatgctctttggaccttaagatatctactcaaaacctcctctcttggtatcatgacaactcgtaaaatggcttaggctaggcctaggcttaggcttaaacttgtaaaaaaaaaaaattattgtgttgactttgtcgagttgccgttcactcatcttttttcttttagtacataattagtatagtcttttttattttctatcaaccagggccctgcgggccctgtgaaagcgccggggcgctttcaacgctggttctagtgggagatataatttggggcgtgcaaaaagcatctattggccgctaagcgatcctcatagtttaggaatatgagaatttggaaatgaacaaataattaatttaaaaacgatattgttttaaatttaatttaaatgcgacatttttatttatatgcttgtgatttttatgagattttttgttaaatgttataattctaaaataaataattttcgagttgtcgctcttgctgctctgaacaaactgtgtgaatactcgcctaacagcacttattatggttaaaattaatacaaaaatcctttcgatcttctcttcctctttctgttcgtcttccacttctgtcttcttccactttatcttccactttctgtttctcttccactttctgttcctcttctgtccctcttccactttctcttccactttctattcctcttccactttctcatgctgttcctcttcctctttctgttcctcttcctgttcccctttctgttcctcttccactttctcttccactttctattcctcttccactttctcatgctgttcctcttcctctttctgttcctcttcctgttcctcttccctgtcctctttctgttcctcttatgttcctctttcatattttttagttttaaattttgtttgttttatttaaatttttatcgatttttaattttccgtaagccatgaatcaaaatttattctgttaaattggatcagaaacttttttttgtcaatttttatactgttaattcttggtcatccaaagccaacaatgttacattgttggtattagttgaaatgttaacatgtttaaaagctttgtctaagctattgctttatgattagacaattgctaaagaagttatacatgaaaattgcgaattttaaattaattttcaatttgttacaagttttgtccaaaaaaggatcaaatttttacttttgagttcattcggtatgcataaaaaacatattatttcactctttatgtaaattttttattttatttcctaaacgtaattatcaaaaaaaaaattaaaaagtttgataatcagaattaatgggatcgaactttaacactacaccaacaaagaaaggcataccaaccacttgttcaccggattgcttgtcttgtacttgtaaatacttatttatcttaaatattatttagatttatttattatattatttttttattattatttacctattttatttgattaatattaaattcatttttgaatttgtttttaaataaatcttatttcattaatttaaaataactaatattttatttccataaagttaattaaataaaaaaacaaagcaaaaaatagaattatatataatattttttaagattaccctgaagcagtgggacccgaacccactataaaaggcaggcacactaaccacttgaccactgggccgcttgccaccatgcattttaatgcccttttcccttcctttcttttattgcaaaaagctcgaccaaaagtgcataattttatttttctttataaaatatttagattttattttattttaatgttatttttgtatttatttaatattcaagttattttaaatttaattaaaaaaaattattattttataaattaaaaataaattattattttattttttaattaattaaaaaacaataaataaatctaaaaagaaaaaaagatgaattatttaaaataaatattgaatagaaaacaaacatcagcaatgggactcgaaccccccgccatgacagaaccaaagtcaggcacactaaccacttgaccaccgggtcgcttgcctcttccccgtttaattcccttttccttttccttcttttttggaagaaatcccgaccaaaagtgcttgtcctccctttttagagcacttcccggacccggaccaaaacaaccctggtatcattcgaaagccaagagtttgtagatgtgcacaaacatattaaagttttgatttgaccctttttaagacatgcaaaaagcgttcaaaaatgggacacccaaaaaaagtgcaaattttgactcgtttttcgaacacagttcgaacaatgcttaaccgattgggatgccgatagtttttccttatagccagtacaaaaccctatcgaatgataccactcgcgccccgtaaaactcgctagaaagccttaaattagtttttaagcttggatcatgggtataaatttcttatatacggaataaatttttgataaggcatttaccgctctcatctttgtttttggtatggcattttgccactgggctcatcttcctaatccacataggaatgatgcaacaagtcttaaatttaattgttttaaatcatttttaaatgaacaattaattaatagggatacattttatatttttatcatttttttcctgaaattttgaattttaaaaaattgattgatttttgatgaaattggtgtatgaaaaataaagaagattaattaaagcgctacaaaaaaatttaaacctttaaactcccataaatttgaaatttttagttgacttcataattaagctcattagcaaaaaattttctggataaatcaatatcttttaaaggaatttgcatttgaatttcttaaaaattttaaactccagaatttctgatggccaattttccttaaaatttatcaattttctcgaaaatatttttaaatgcaaaaatatttaaagcctgatcaaaaagtcctcacaatgatcagcaaagcgatcagcaggaggaatagcaaaatgcaccaaaggatggcactgggcacaacgactttagtgccagaaacagccgattccggggacgaattcgatgatggcccatgccctttgagctgtttgaaaaattggcgcaagtgttcatagtcttcgatatccgatcggttggccaaacaaaaatgaaagccgacgacggtgaccaaaagaatggtgatcagaagagtgttggccatttttgattagaaattgtttaaaaatcaatgaaaaaacagactgaaattagcacaaaattagatgaagaaataaatgatcaaattattcttttaaaa

SEQ ID NO: 20155 - DNA, 1832 bp, Heterodera glycines
tgcagcgtgtgcttcttgcagcttgcttttcctatataatatatcgtcattaaattttattatgaaaattttttacttctattttttgtgataataaaatttatggtagtagtgaatggttagcattttatactcaagtctcttaattaattcaatccccttaattacccctaattacacttacccccttaatcacccctattttccaaaccctactccaattcttttttcaatgtttcatctcccaatcgatctttctttctcacctcgatgagttcaacgtaactttttttctattatgcttttcatcccactgcgacgctagtagttagtccagccatttttggcccctaaagttcgagtccgcttggctgcaaatcatttttttggtaattaaaagggttttggctttatttttatttatttatatgatatatgtatactattttgttgttacgacaattttggattatcaatttcagacttggcaattgttaccacaataatattttaaaaattctaaagtataattattcatacaaaatctattgggaaaatatagcgttaattagggttagaagggatcggttatcccgacggcgtgggtcccggaatcccatcccgcttaaccctggtcttaattatccgctttccatcgtgcccagctgtaaatgtcattcaatcagtcttttgatgtcagtagtataaggcacattatacggggcctagttgttcccccccatgctcctgccaaaaccttaagctataaacccacctaggcagatgttataatcactagtttaattgctttttcattttcttttgttgtgaaattttgctgcgcggcgttacacaaaaaatggtgccatccgcgctccaaggtaaaaatagttttttatgttcataatctgtcaatcaaagttctcggtcgagaaaattttgctgcgcggcgtttcattttgcacaaaaaatggtgccatccgcgctcctaggtcgaaaatggtttttaggatcgtaatctgtcaatcaaatatgggcgagaaaatttaaagcgcggcggagatgcaaaaaataattgccgtttaccacagtttttatgttcataacctgtcacaatataaagaagtcggccaccgtagcgtccattaatttcactttggttgaaagggaagcgggagtttgtgcccctcggggcgcttgccctaaaatattcaaatttttccatcgatcatcttgatctgtcaacgcggcacggcagcacggcatggcagtgggaggagtcagcagcggcaccattcgcaagttcacttctcatcatttgcaattttggtccgttttcaatttgtcaacagcggagacgcatcccaaattcacttttcaccagttgtcattttcatccactttcatcatgccttttattgcccccggcactttcgcgtttctttcaaaagactatggggatttttcatctggggagttcgatccaaacagagcataagacccaaattcacttgcagaattttcgtaatgcatttattttgcttccattatctttgattgtttctttgtagtcaatggagaagagtttctggacggccgatacggatccaaacaaccaacccctccttccaacccgcgtgccccatcgcctagcttcccaatcccggtcattgttggtaatttcaatttcagttttttggattttgcaaatatctatcttggcaggaaattgtccacaggatgaaaattgttgggggtttccccaaatatcttgtctgattttttccattttagggcggcagatgttccccggcgacgatgggtacgaatcg

SEQ ID NO: 20156 - DNA, 2126 bp, Heterodera glycines
catttgattagcagataattgattcttatgatcagtcgatgtgtcgttagccagcgacgatttaatcggagttttttgtttggataacaaatccattttgcgtttgttcaaattgtccagaaactgtttggctataaatccattccgcgcattgaccatttttggttccattcccatgattaaacatttgttaagtcgacatcctccacatttccgctctacaaaaagataaaatttcttaatattttcattatctaattagcagtctttatttaaattttttaataataattatatatacttatagcagtccattaattatgttatttatatttcattcatacattttgataatttataatgaaaattattaaaagaattttactgttgtatggagttgacatttcgcaattgccgcgttttttgcacacgtacggtatctgcagcataactgtgcgacgaaaaaactgtttacacgctgaaattactgaaattattaaaccacaaatttaaaataaaattttaaaaatatcgattttttaaataagaatttatttcgttaagaagtgcttgcgccattaccttcgcaactagggatactgtaatatttgaaagaagacaatccgccacagatgagacactttttgggttcattttttgggatcatttcagcttttggcattttgggctttattggaaaaaaaaaatttataatttaatttttttaaaagaaaataataattgtaaagaggcaaatattatatttattcataattgccttaatgaatttttttccaaagtgattggttttttaatattggaattataaattataatataattaaaaattacaaacgcattaccatagtaaaatttttgccatattgatttgatttttcttgtattcccaatttaaattaataattctaaagggaagagcacatcaaaatgattttaattatatgatcaaggtgaaatttttcggtcaattgatttctttttcagatgactatttttatatgatttgaataattgtaaaagaattataaaatacaaagtgaatatatcaatttttataatattgtagtggaaaagtaattacgaaaaaagtgccaaatttggtttttgtgtcagcaccgttttatttttccttctcgagtcaaattttctcatgattatagtcccccaaatttttagccatcggatataaaaatttacggtcaaaaccaaccactgatgaaaatgacttgcattatttttattttttatttttttactaattttccggtcgaaattatgtgagaatttgtatttttacaaaactcaaaaaccgattccaggtccgaaaattcgaaaatgatttaaggattcgttaagcctaaagctgcatcgtgaatcgcgctcacactcatcgtcactgtttacgaccacaggataggtcccggaaattggtgttctttggatcacgttcccagtcatggccaaaatttttccaaaaactcgaatcccgatacagaattatcaatcacggctggatcgggactcaaaagaagaactgttaagaatggatggaacctagccttgaattaatgagggaggttgatgaaaggaattcttattagaaaagttatgtttcaatgaatattgatgaaatttcatttaaaaaaaagagttggatttatagcaaaaacccaaaaagtaacgaaacaacagaacgaacattaaaaaattgtaatctgaaactcgctcataggcatcgccggttatatttgaattttttttttttgaaaaatctgaatgaaaaaggcccagggcatttaagagaaaaaaaaacaatttatttcataaaactcataaccggcgcgctttttccaaaaaactttttagggacaggggtccggcagtgctgaggtgccgtgaggaaaacttttttgaaaatctgaatgcaatttgttaacagattttcacgaaaaatgacattttgagtagccaattttttttgaaaaaaaacaaaacatttttttggaggggtattatgaccattttgaactgattttcactgaatttgctctttgaaaatcatcaatgaaaaagaaaaatcatcattgactccttgaaattatcaa

SEQ ID NO: 20157 - DNA, 1728 bp, Heterodera glycines
agaagaggtacaacggtgatttgaagaggtacaacagtgattagaagaggtgcaacagtgattagaagaggtacaaccactgtcgaaaatgtacaataattgttggagaggtacaaaaattgttggaattgtacaacaatggttaaaaagggtacaatcatggttttaaaattaaataattaaggaaatcgtttataaaaaagtaagattaaaaattgaatgtaattaataaatttttaaaaataaaataaatttccttttatttattaaaaagagagtttgaaatgtacagggattgaatatttatttaaattgaaattaagaaattaatattacaaattctaatttaaaaaatacaggagttctttaataaaagtaaataaattattattttaatttaaaacatttttcacaaaaaaataatttaatttaaattaaaaatttttattttttatggattaaacaaaactatttatatttattaaaatgaaaattaataatattatatttatttaatttgaaatgaaattaaacatgcaaaagtaatcaaaaaatgcacagaaaaataatctacaccggccgggttcgaacctgccgcccccccccccagaagatgactcagaatccccaatcacacagggattctgagggcttaacgatgtaataactgaaatctgatgtcagattagtgatcagcaccctcaaatagccctaatgacatgtttttggaagatttttgtgaaaaaaaattttccactcaaaaatcctggttacccccctttggtcccgaatcccaaaatcacttttatgtttgtatctttttttaaaaatgtgataaaaaggtcaaataaaatttagaaaatagagctaaaaattgcggacttttgtagtattttaattttacagtatgacttttcagaaccgagttatgaatttttttctgaaaaatcgaaaatttccagaatttctggaataactttttttgtttttgtggtataaatttcaaataaatctcataaaattctcccgattttttgctatttttaaagctttaattcacttaaattgaccagtccttcattgagttatgaattttcaaaatttaacccaaatttccaaagaccaaaaaaattaaaaatattttcgaatttttaaaaaattccaaaaattatgaaacttaaaatagacatcatattcgtactcagcacctcaaaataccccagaaaaatatttttcacaccctttttcgaccccaaaaaaatttttgaaaatttctagggggcctagctcgaaaatttttgaaaattttacatcatttagtacaccattcgatagcatttaaaatgctctacaaaaatgttctaagacaatttttcgctaaaatcaacccctgacgagttatgggcccaggactcaaatgtcccgctgaggccaaaaaatttttctatttccgggaaaaaatcgaaatttttccgaaaaaaataccagtcgatagagctcgaaaaactatgttttggaagtggtctccgtttctctgggaaaattcgttaaaaaatcctaaaattcaaaaacccgaaaaccgttttttaggcctaactcgaaaaattttgaaaattttcgaaattttaaaatttggaaaaatcgggcttttaaagctctacaataagtctgctggccaccctgcgctcaggtcaaagcctggcgcggcattcgcctggtactgaagtg

SEQ ID NO: 20158 - DNA, 992 bp, Heterodera glycines
atttttgattatgccggtcttgaccgtggacatttttgattatgccggtccctgaccgtggacatttttgattatgccggtccctgaccgtggacatttttgattatgccggtcttgaccgtggacatttttgattatgccggtccctgaccgtggacatttttgattatgccggtcttgaccgtggacatttttgattatgccggtccctgaccgtggacatttttgattatgccggtcttgaccgtggacatttttgattatgccggtccctgaccgtggacatttttgattatgccggtcttgaccgtggacatttttgattatgccggtcttgaccgtggacatttttgattatgccggtcttgaccgtggacatttttgattatgccggtcttgaccgtggacatttttgattatgccggtcttgaccgtggacatttttgattatgccggtccttgaccgtggacatttttgattatgccggtccttgaccgtggacatttttgattatgccggtcttgaccgtggacatttttgattatgccggtccctgaccgtggacatttttgattatgccggtccctgaccgtggacatttttgattatgccggtccctgaccgtggacatttttgattatgccggtcttgaccgtggacatttttgattatgccggtccctgaccgtggacatttttgattatgccggtccctgaccgtggacatttttgattatgccggtcttgaccgtggacatttttgattatgccggtccctgaccgtggacatttttgattatgccggtccctgaccgtggacatttttgattatgccggtccctgaccgtggacattttttattatgccgttctagaccgtggacatttttgattatgccggtccttgaccgtggacatttttgattatgccggtccctgaccgtggacatttttgattatgccgttccctgaccggggacatttttgattatg

SEQ ID NO: 20159 - DNA, 2112 bp, Heterodera glycines
  unsure (1)..(2112): unsure at all n locations
tttttttgtgatatgaaactgatccnncaaggtttagggttgctgatcccgaagctgacatatatttgaccaattccgactcccgaacttaaactttaactgaaaattttttgcccttttctcaagttcggtcgggttagggtttagaaattggtcaaaatagatgtcagtcattcgagattagggattctaaaaaatattcaaaagatcacgaaaatgtaattgtcatggtcaaatttgaatttaaaaaagctaaatttggaacaaagcgtcttggatttggacgtgtacacacattattccgtccattgttgcgtattccgcctcggttgggttcatccgcacccaatcgtgccgatttgacagttcgctgagcaaagctgcggcacagtgtgccgcgtggtcgtccatgttcttctccacttggcttgtcatgcccaccgtccgttgggcaattttgctcaaaattgggtcgtatttggcgtcccagcccaattctcgcttcagcttttggaaggcctccgattcgttgccattctcccatcggtggtcatccgacaacatttcgttcacctgcttcacttgactctccgacagacgaattgtttccccactaaaatttaaaaataattgtaattaataatttttaaaaatatttcttaaagttaaattgtgttttttttgaaaatgtgtcggtcttcttaacaaagttcgttatgtttgaaaaaaagttttccgacggcaccgtcggcagactaagatcattaaatttcaaaaactgacactaaaatgttaaattggtcatttagatgcgaaaatatgctataaaatattatttaaaaaatttttttttaaatctttaaacttttgaccaaagagcgatttgcggatttttgtggtcttttgatcattccgagtcaatgttgggctcccagtgtaagtttatttttaatttagtaatcataacgccaaaactttgcacttaaatcttttttaggatttaccttgtaaaaatagaagagccgatctttttttggcaaaatctgttaacaaatcgcactcaaaattccaattttttccggcagcgcctaccggcactgccggacccactcctcccaatgttcccaaaaagttttttggaaaaccgtgccacaaaaaagcaatttaaacgcgaaaaatttaagagattgtcaatttatttaaaataatagaaatcgaattttctatttttgaggttttaaatgtgatttgttatagatttttaccaaaattacctattttgtgattttgtgccattttttaagaaaaaataggaattattggggtccggcggcgctgataggcgccatgattgctttaaacgaaaaatatgactcttaattgattttgtttgcaattttttatgttttaaaaaatgaggatttttcatttcaaatgaggattttttttttgagctattttagtggcaaatgatgatttttatgactgaaatgaggattttaaaattttgaaatcaaactgaattaaaaagtaacaatttaaattattcattacccaatttccgttgtcatttcgttcgttaactgttcattcattttttcgttcagcttacacggcaatgcgacaatataatatgcaataaaattctcaatctgaagattaagcttaattcaaaaaagattatttattcaaccattaaccaaggtaagatatacataagcatcccatcgacttaaaattgctttaccttttcaagcaatgacccgaaatcatttgtgtttttgaaattctcattcacccattctcgaatgagttggtcggacgattgtcgaacaaaatgagtgccaaaaagacaggtggccttttgtaaattcatcttaatggaatcggcgcagcattgaatgagctgaacattaagcgtttgatcgattggaactcgggcaaatcaattattaagtttttttgctcgaagacaatttctgtaaaaggatggtaaaggataacatttgtaatatcgtaacatnnaacaccatcggcaaaatttcttgcccatgnaatgtcttctatttgtctgtgccaaaagagtgccgtttcggtacacttcgggccgaa

SEQ ID NO: 20160 - DNA, 2931 bp, Heterodera glycines
  unsure (1)..(2931): unsure at all n locations
attgcgccattccgccacccccacgcattgtgcaccctgtcaccaccattgacgatgccaatgaaaagggtggttgtgatgcaggtggtcggcatgtgccagctgcggctggcacaaattgcggttgctgttggtcgggcagtaattggtgctgctgctgctgttgttgctgtctagtggcggctaatgccaacgcggctgtccataaacgggcctgaattggccagaaaaaaatactatttttgggggattgtcaatttattagacctgatttttttttttttgaaaaaattttgtgattttaggggaggtctatttattaaaatttaattttttgtattcaattttaaattggctgttcggaatatggaagatttcgaagggtgctatttcattctctccttaattctcgggaaattaacccaatttacttaaaaatttattttaacaattaaatgtaaagggacaggaaaaagcatacaaatgcaaaattgattaatcaggaaaaagatgtcgcttcttcttcacccccaattgagtgagcggtgcgccttttatagaggagcacccgcaggggaagggaggggcgggatgaatcatcactagggctggcaaaaatatgcacatgcatatttttttcctggactgtgggaggcctgaaacgcacgaaaaccatgtttttagcgtgttttgaagcttctaggatgactttccatatgcatattttgcatatttgtgcatatttcgcgatttatgtgcatatttgcatatttgtgcatattttggcatttcgtgcatattttatgtgcatattttggcgtttttccaaaaaacctctaatagatcggcccccaacagacaaattggcctttttgacctcaaaaaccggaaaattttccaaaaaaataattttttagcaaaattttcacgaaaaatattgaataaataaattttctcaaaaaatggttaatttatgtcaaaaataagcaaaattttgtttttcaggttgatttttcgctaaaatgagtaaattttaagctgtatcgtgtttttttctcctaaaatgatttttaataccacatttagccatttttgaagattttactttatgtttaacaaatttgaagaaattttgagaaattacaccctcaattggaaaattttatgtgcatattttgcgattttatgtgcatatttttgccagccctaatcatcacatgaatttaaggaaaaatgatttcaaaataaattgatcaaatggatcaatttgggtcgctttggcccatgagataattattaaaatttaattttattttcgtctctttttaaattcacaattcgaaatttggaagattttaaaggccgctattttcctcccccgggcatcaaaattttattacgctaattagggcgcttgcaattttcctgttattaactgactttacctgaactgcttgaaattgttgttgttgaaccgcattctggtgttgttgctgctggcattgttgcgcgtactgttcgtcaacatggtcacggttattgtccactgacgaaccgttggaagcggaggaggaggatgaagttgtagaaaagtcaccgaccacctgagcgattaaaaataaattgaaattaaaaaacaaaaaaaaaattatttgtgtcgccacgctcactttgtccacggcaccggcacaggccccggccaactcagttttcaaaaatcgcgcaaaatagccaaggttgttgtactgtagctttttttcgcgcactgacgcatcatcctcatcaccatcatctttttgaagttgaccatctgctgatgactcctcctcatcagctaaatttgctaatgaatgttgtcaaattaaacggtgaatttttcgagattgataccattttatgcgccaacattgtgaccaaaaactagactctaactcaagattaaatcgagacttaatttttccatatgcttaatactaattaatactcgagactcttctcagagctttaaatttaattcatgccttcaagcgggaacaactgtggtgggaaatgtgtgaacgcattcagcggtgttgtgctgctgaggattgtcatattgttgttgtccataaacaaattcaccttaaaaaaaatattaaaatgaaaaaaaaagtttaaaaaattgaaaaatgattttcttactttgttgttcatttgctgccgattgatcggacccatttgttcatcatccgctccttcttcgccttcgtcatgacgcttgttgaacgctgaattgacaaaatatgatgtctctcttgatctgattacgggctattgatcagaatcagagaaaatgctaattgaattatccctgagttaagtgatcggacaatactgattgccaaagactaacaaacacataaaactacaatgatcagcagcgatttagacggatcagattagcttagggaaataaattagactatctagcagataagataaattgactaatcagtcgctaattaaggctgaatgatcagattaagcggcatacaaatgataatggtttaaattcattaatcaatctaaatttgattatttctctgccccaccttgagaatgttgtttttgttgctgttgttcaacagcagcagttgtttctgctccagctccatgttcttggccatcattttttgtctgcataggctcctctttgattcggaccggattaaagctttttcgacgtgccgacgatgaagcggatgccgaagtggaggaaagtgcccaattgttattgcttttgccaatttttggctgttcgttagcaactacaacaatggcattggcaccaccattcaaaattggcgaaggttggcacgatgccaaagcaattgccatttccttctctaatgaaataataaattcttgtttttgggctaantttaaaataat

SEQ ID NO: 20161 - DNA, 1051 bp, Heterodera glycines
  unsure (1)..(1051): unsure at all n locations
ggagatgaacaacaggaggtagcagcagcggaaggcatgaggacaatgttgagggggaaacgacggaatgcggcgggagacggtcagcaacagttgcacaccgaatggacatggcgactgatgaggtaggtggtcgacagcaggaaggacatggcaagaagggggaggaattaaaaatgccatgctgtttgttgtacagtgccagcactgatgaccaactgcgtgccgtgttcgccgagctacgcgagatgagtctgtccgggatggacctgcacttgcgctgtctgtccaccactgctgaactggcccaatttgtggccatgctggtcgcccagatggagtgccgacgtgactttgatctggcacagagtttgttggccgccttcctcaacatccatcacagcgcattgtggacaacaaaacccgacggtaggcatactgtatttcaatggggtgcttcgaaaatttcagaattttttatcagcttacccccccccccccttcccctccaaaaaaattgagccagttagttccctctggccaattccgtcgtcggatgcatattttttgggccatatcttttctcaaataggccacattttatttacatatttggtggcattattgaaagctctttaaacagctccattagccattaaaaagcattcggaaatcggaattccgaccccaaaaatatcggaaatcgttaagtccgaagtcggaattccgtgacatccgtgcaactggcttaaaattgctgcttttcaagaaaattatggacgtccgaaaaattgtggatggagctgtcccccccccccccctcgcgtttttttaccgtttcatttataattggcattgaaaatgccggagggatgggacgagggacaggagaaatgtccaattcgtaatttactatgttttttttgtctaaattgtaaagacagcatatagaaaagctcagaaataaatgaattgctttctttggcgcctcaacggaacagcaaaaaaaaaaaaaattggtgaaatttttgtttcccaactaaanatttta

SEQ ID NO: 20162 - DNA, 869 bp, Heterodera glycines
  unsure (1)..(869): unsure at all n locations
aatcctcaactccatgactcgatttgttggtgtcaaattgtntaaattggttnttattaattacttgcgccaattaccctccattaacgagaattgtgaagcccagcttcttttgtcgttgttgttgttgttttttgttatttttgttgttttacacatttaaatatttgttgattttttattgaaaagaacagtttcaaataatttccattactaaagagtaaaagtgatcagaatcgcaccaaatttttacatggataataaaaggaagaagattaatcgtttcgtgtatttcattagattttttaaatatttttttcaaaattgccaaaaaataaatatttctctacatttttttcggcattaaaatttgattaagtgagcaatcaatttttcaatacttttcttttcccttttgccatgtgcaatgataccctgaagacgtgcgatcatctcgtccttctggcgtaacagccggtctttttcttccaattgaaggtccttttcttccagcagcacatttttttgtgccagttgaaactctttgtcgacgatttgacggtccttggactcgagctgtttgaccataaggtcggtgatgtcacgtacggcccgggcactctcgcgtgccgccgcagcgttgtcgcgcgccgcctcagagttgttgcgcgctgcctgggcgtacacatgtcccgtctcaattagcatggacttaaaaatgtgaatgtaataataaatcaattttgcggcgttcacctcgccttcgtcgttttcctcatcggaatcagaacattcgtcccgatcaaagattgcaaaagcattaggctcagtcggtggcgaagacattttgtgtgccctcggatggaata

SEQ ID NO: 20163 - DNA, 448 bp, Heterodera glycines
tcccttcccttcccttcccttcccttcccttcccttcccttcccttcccttcccttcccttcccttcccttcccttcccttcccttcccttcccttccccccatccccgtgccccatccccccatccccgtgccccatccccgtgcccccatccccgtgccccgtgccaactttccttcgcctttttaattttcattatgccaatttcacctgttacaacgtcagacttattcatatctttttgtcacttgctttgacgttttatgccttttttggaagatgaggtaaccgaccaaatgaattggggggaggggagggacagatgacactgaccaactaactaatgaactgccgctgcccgccgtttcttccaatctttgctttagtccttccttcgatattactttatgtttgatgggattactgtaacatttcggttttattttga

SEQ ID NO: 20164 - DNA, 2405 bp, Heterodera glycines
tttcgcatctaattgtacattaaattttttcttctccaaattgtttctcatcagttttaaaataatttttcttccattcttttttcgaataccgtatattctttaattatcgccccgggggatttttgttcaacctcctcagaaagggggggggggataattggagacaggggaattaatggagacaggcgataattagggaatatacggtaactcctttttttattttttctaaattttgtagatattcgttatatttgttacattcgatagcgctttaagtgttttctattagtctgcaaaattatgagccattttgacaaaatttattaatatatgtgattaggtgacgaaaataaggaatattaatgtgtttgatattggaaaatgtggtgggggtcggtttagtctggccggtttagtctggccgttttagtctggccgttttagtctggccggtttagtcagagggtcgttttagtctggcaagctgtttttgtcctacattgatccaattctgatttgtttctcgaaaattctttaaaattaacaccataacagatttatcaatgtgttaacaacaaaaaaataacaaaacattgaaaaatgaatacgggcatatttcataatttcgagaaataccaacgagaaaattgatgatattatcgggattaacattggcatggtaattttgatcattttggtgagcagggttaatgttgttgatggtattgtaaccctgtaagagtcgaagaattcgtatcaacggcacgatattttcgcgttttttgaggagggacttcaccagcgatgcatcgtgcgatgtctgcatcaattgacttttctcatatcgaattgtgttgatgaagcggaaaacagttggatataaacaagcaaagcccgttgagtgaaaaaaaaattagggtttactttgcctgaagctataaaaaggcggtgccaaactgaaggtttcgctttgtttttattttctaattgggatattcatttatattgtagctaaacatagatattttaagtttttccttatttataattgacaaaaaacagttgtaagaattatgggcgaaaacggcttgccagactaaaccgaccctctgactaaaccggccagactaaaacgaccctctgactaaaccggccagactaaaacgaccctctgactaaaccggccagactaaaacgaccctctgactaaaccggccagactaaaacgaccctctgactaaaccggccagactaaaacgaccctctgactaaaccggccagactaaaacgaccctctgactaaaccggccagactaaaacgaccctctgactaaaccggcaagactaaaacgaccctctgactaaaccggccagactaaaccgaccctctgactaaaccggccagactaaaccgaccctctgactaaaccggccagactaaaccgaccctctgactaaaccggccagactaaaacgaccctctgactaaaccggccagactaaaacgaccctctgactaaaccggccagactaaaccgaccctctgactaaaccggccagactaaaacggccagactaaactgacccagtccgcactgacccggtccgtatatatcagggttaccctttgtccttatttgtaagatttgtccttattttgagggtccaaatcttacaaatttgaaatgtccttatttgtaagatttgtccttatttaagctctttgtccttattttcatcttattttttggattcagggagaaatttagatttttaatgataatttttgaaagaaatgttttttgaagcgaattaatatgcaaaatgttgacaagattcagttaaatattcaaatttttctctcggcggtttcttattctcttaaaaaaattagctcaaaatcgtaattttgtcattttttgaacaaaatcgttaagaaatcgcattaaaaattacaaaaatatttccggcggcgcctattagagcaggggtgtatctgttcttatttctaagaaatgttctgatttggggtagtgtcttattttcatttaaaagaggaaatttctgaaaaatttggctaattcctaacaaaattcattaaaaattcttaaaattttcccccagcggcgcctatcggcaccgccggccccccaaaactcctattttttcttaaaaattagcccaagatcgcaaattttggtcattttttgacagaacttgttaacaaattgcattaaatttttaaaaaatttccctcggcggcgcctatcggcaccgtcgaactctcttccctcatccatacccaaaaatttttcggaaaaatgcaacgaaaaaattgttaaaaatatgttttctttaatggtaaatgcactgaaatttaccaattgcttatgtttcga

SEQ ID NO: 20165 - DNA, 1436 bp, Heterodera glycines
atcgaattttcactaaaaaagttaagcctacattttttggtatatttaaaaagcaattaaaaaatttttaaaatttaataattttcctgcaccgaaggtactcactcggcctcttcgcggcctcgtggtgggccttcgccccccccccctcccacgcccttcagagcacgacaaatatttcaacaaaaattttgaaaaattgactagagcaatcgaacgctaacggacgacctaatggaaaaaaatccccgaaggagagaatttaattaaatccattccttcgggggaccgtgccgggtgccgcggggtaagcagtgctggttcgtttcatcacggcaccgaaccttttggctagtcagcaatcgttgcttaacttgccagatcggacgggtgcgcatgactttctgaaaaaaatatttatgaaacaaaaaaatcgattttttcaagtgtccgtttggggtactcaaacatttatggggagcaaaaatccaacgcagaattaaagtacaggctatagggaagctattcccgaaggattcggtctccccataaatctgggcgcatcggttcggggggactgccccgaaaacaaaaaaatcgattttttcaagtgtccgtttggggtactcaaacaattatggggagcaaaaatccaacgcagaattaaagtacaggctatagggaagctattcccgaaggattcggtctccccataaatctgggcgcatcggttcggggggactgccccgaaaacaaaaaaatcgattttttcaagtgtccgtttggggtactcaaacaattatggggagcaaaaatccaacgcagaattaaagtacaggctatagggaagctattcccgaaggattcggtctccccataaatctgggcgcatcggttcggggggactgccccgaaaacaaaaaaatcgattttttcaagtgtccgtttggggtactcaaacaattattaaaaatttttagatttttattcatctccctttttgatagtgaaagcatctgagtgcctaaaataacttgtaaataaaatttggtgcgtttcagagcagtttgtgaaaaaatatttatgaattaattttgctaaaaaaataaaatagtgaagctttaaaaattaataaaaaattttaaattcagaattactggagttagcatcatagcagtgcttttccttgtctttttgatgccctcgcaaaatctggttcgcttctgatcagtttataaaaaaaaagttaagcctaaaatttttcgcaaatttaaaaagcaattaaaaatttttagattttttattcatctccctttttgatagtgaaagcatcagagagccttatttaacttttaattaacatttggtgcgtttcagagcacgttctaaaaaatatttatgaattaattttgcaaaataataaataattaatgaaa

SEQ ID NO: 20166 - DNA, 2648 bp, Heterodera glycines
atttaaaaaaattttcaaactgaaaaatttcaacaaaaaatagtacaaaattttaaaaaaaatttgcaattttttaagcgattttttcaaaaaatcttttttcttaaatttctttaagaaaaactttgcctttttttgaaaatttctgtttgaaattaaattagtttctgacccccgttgcgcccggcgacaattttgctggcgcagcagcattactcagttgatcattagaaatcgccggcaaaatgttctgtgcaccggaggatgcctgcttaaagtgtttattattgaattcacattttttatttcagtatttaattgaaataatatttataattataattcatttaaatttaatttaaatattagtaatgtccttttcttattcactttgtttatatttaaaataaataatttaaattttaaaatatatttaaaactttaaattattattttttcttcacttttgcagccgcgactaaaccacgtaatcccccgccaaagagacctccgccaccaatctataaatgacaaaaagttgcttaatttgtacaaaaaaatgaaaaaaaaaatgccaaaacgggtaaaaaaggtggcaaatcaaattaattaatttgaagcagaaaacgggattaatgggaaaatttgaaaataattggggagatttggggtcaggcacattcaaaagaagtttttaaaaaaatttcgacggggggacctcgccaataaggccgccaaatcgggtggtaagttggcgcgccgggcgcaacagcaaattggctgcatagcggcgccttaccatttccaactgtgcacaaaatttgggaaaataaaatgggaaaaaatgattttaaaaaggaaaaaattcaaaattaatgaaaaacatcagtttcggattttttgtcaatgacttttttttctattgacttgggataatttaattaatatgttcgcgcttttttcgcactatttgacatttcattttatactttttggagctttttgtgacctttttaaggttttcggaaaactccgaaaatgcaaaaatttaccaccttatttataaggttttatttttatttgtcgaaatttttggcatttaaaaaatactcttttgaaattttcgaactgccatttattgcgcgtttgtttcgttctaaaaattcgcaaaattatgttgactgatgccctattacttaaatgctgatgtaaatctaaaaagcgacaaaaaatagttaagaattttcttggaatttaaaatgttagcaattaccttccgttgggtaaggggatattagcatttccagtgtacggtagaagaaaattattacggtatgttaattaagtgcaaataaaataaaaaacaaaactccaccacctcaacgcccgactttcgtgctcgccaattctccaaaatcagtaggcctgcataaactttgccaaccgtcaatttttggaagcaaagatctgaaaaaatgaattttttaaattttttaattatttttttacccccatttggcggcaccaccaaatcgatcatatttttctttgctttcaatggccaaattttgcgcaatgtctgtcgcaattcttcatccgcttcatccatttcttcgactataaaaatttttttaaaaaaggtaaatttttcgaaattctttgctttatccacctggcctcattttgatgctcaacgattcgcgaataagcgcaaaaagtgtggtgctgaaatggacagtgccatcatcagaaactggccttaaaatgaataatcaaaaaaaaatttttttaatataaaatgaggatttatttactcattgtcagggtggcgattttgaccgtttttttgtggggggagcatttgtcccaattttggcccacccatgttaaacatttgaaaatttacaaagtgccaattttttgtgcattgtaagcgaatttgtctatcaaaaaatataatatttgatcaatcctatgcgtttttgattgatttacatgacacaaaatgtgaaaaattatatggccccttttgtccccattttaaaaatttttcccccattctgaagcgcacggcacctcccatttaggatttttaagatctccacggtggatttatttaaaaaaaaacacataaaattatattaattgtaatgcaatataaaggctttacatgttcatacgaatcagatgcttgtaagcaagacgatatggacattttcggccaaatcccacgggtggggcgatgttacgcagcatttcgtacatatccgtgtaatgaatgcgaccactgtatgaaaattttttcattagataagcacaaaaaaaaataattttgtcctaattaaatatttgatgattttttttgaataggacagttttgaaaagcaaaaattttttgtttgaaaataaatttttgaaaaaaatggcacaaaaattggcgtcaaggcattagcacaagaatcccgaaatcaatagacaaaaaataattctcgaatatactcgaaaaagttgaatttcgcgttttctcatagtaatttcttttttaatgccaatatttgctcttttcttgcatttataaaatcccgagactttaagctttcgtttgataccaataatataagcattgaccaagtaagaaaaaagttatg

SEQ ID NO: 20167 - DNA, 2025 bp, Heterodera glycines
atgcaagtaactatttttcataaaaaatttatatattttaataattctttttaataatttttttttaaatattttagagaaataaaaattttaaaatattacaattcaaaaaaaaatagacttagttttatatagctaaaatttttaaatgaaaaaaataaaaatttaaataaatttcattttaattttaattttgaacatttaagatttacaaaaaaagtaactatttttcattattataaatttagattttttaaatatttaataaattaaattttcaaataaaaacattttttaactcaaaaaaaaggaacaattgtcgagtggtcatcgaaatgtacacgatgtgcagaagaaaattcgccaattggaactggagaaggaggagctgcaacatgcgctggacgaagctgaggcggcgctggaaattgaggagagcaaagtgcaacggttgcaaattgaggtaaaaaaaataatgaatcaattataattaagtaattaattaataatcctctgttttgtccacttactaaattttttattaaaagaatttatgaatagattttaatttgttttgctcaacgaactcgattttgagaaaaaatagaaaataaaatttaatttacggatatattttaatatattttttgttcgaatccaaccaggttcggggttctgagttggatgaattttaaatattgttgttcaattgaaagtttcgaacattttttgcaaaaaattggccgcactcttttatttttacattttttaaacaaactttcataaatatttttattgaatatgaatacattgtacccctaaatatattttaaaaaagtttaaattatgaataaaatcaaaaatcgaataaatttaaggttatctccataaaatccaattaattaattaatttcaaaatttcaaattgaatcaattaaggttggccaaattcgtgcagaaattgatcgccgagtgcgcgaaaaggaagaggattttgaaaacacaatcaaaaatcatcaacgagcaattgaatccattcgtacatcattggagaatgaacagcgaggaaagcagcgattatgcaggtaattagattaatgatgatattaattaaatagtataatagcactggctaataatatttaattaatttttaatggtcgcagtaattagacataattaattaatactctataattgcagtcaaagaaaaagctggaaaccgacatcaatgatttggagttgggcttggacatggccaataaaacaaatatggaagcgcagaaaacgatcaaaaaattgattggccaagtgcaggatcttcagctgcaggcaagtgaaccacaaaatttttttttgtcgtgttaaaatttgttgccactagtgattaagttgtccaggcatgttttgtgctctttctgattttgggtgtctcgattatcatggagtggtctgatcaaaatggttttctagtattcccgttgatcactcactgatcaccggcatttttacttgaattacatttttggcggagaacggaaaaatttgctagtttttttcataattttttttcaaaatggttcattcaggttgaggaggagcagcgtcggcgtgaggaacagcgagagaactttttgatgagtgaaaagtgagagaagaattaaaaatataattaatattttaatttataaattattcaacaaaaaaaaatcttccaaaatttaaattatttaataaaattaaaaatatttgtttcaggaaattgaacattgtgctgtccgaacgcgatgaacttgttgtgcgccgagagcaaatggaacgggataaacaacgggtggaagccgaagtgcaggaggaacgggcgcgcaagacggagctgcaaatggacaactcacagctgagcgccgcgcgacgccaagtggacaatgacctacaattgacgaaggcaaaaaatataaaaataaaatttgaataaaatatatttcaaaattgaaaaaatgacaattttaaaaggctataaaatga

SEQ ID NO: 20168 - DNA, 966 bp, Heterodera glycines
tataaaatatgtattatcgtaagcttattagaactattatattatatttagtaaataattgcaatgatccaaattgccaaatttctttcatttaaattttaacaaataaccatgatcttcgtactactgttgacataagtgcatatttgacgattttttgcaaatataatccgatcgctgctaacagaaattattaaagtaaaactttataattaattataatcaattaatttaattcattttctaatattcccaaaaaaccaaaaactcaaaaaattgacaaataaatttttataagatttcaataactattcgtgcaaaacattttataatccgaataatttaactacaagaataattcttattcaaaataaaataaattcagaaaattttcaacttgatgtatgcaaataaatagattcattacaaaaaataaattcataaattttattttttatcgaaaataaaattgtaatccattgaaggagagaattaaaatatattctatatttttcaatcaacttagttgaaatgtaaaaaacaaaaaattttgattaatttaaaaaattatagtaattccccattaattatataataataaattattgaatttttaaaaatttaaaataattaaataaactatacataaatatttattatacgctgttagatttcgccagtgattgatttcgccagtgagtgatttcgccagtgagtgatttcgccagttggatttcgccagtgtgtgatttcgccagtgagtgatttcgccagtgaattatttctctttttctcgccgtctgtatttgatttcgccagtaattgaactcgccggtgattgttttccccagataaggcaaaattcaacccatggacaaattttaactatataaaattaagaatttttattattaatttcccggccccctgatcattgatttagttttctttgaaccgagttccatt

SEQ ID NO: 20169 - DNA, 2654 bp, Heterodera glycines
  unsure (1)..(2654): unsure at all n locations
ccaattactcaccatttgatactcatcttggcttctatggcaccgcaaaaggatcgcagccctccgatgaggaggaggacgaccaatatggngggaaaaaacatcggtgttcgccaggttctgggcggactgtgcgcgattgtttttcgcaaaataacattttcaagcaaaattaggatacattttttgactcagttttttgccagtccattttttggtatttttttggccgagttttcttggctttgaattttacaggttttagtgtgttttattcctaaaaatttcggagctttttttaaagtttgtcctttttagacagcattgaaccgcttcctactgtggctccggcgcatgcgaaatgagttgaaggacgactttggctcaatccttctgttactgctcctctatttgctccaggtttgtgaacttaagtgaacacaatgcacgaaatcaaaaacaattctcctttctccatttttgccatgtcaatagtgaaagcctatattatagggcattaaaattaaaaattttgtccattgttaattttccgaattttaactcaaaaatggtcgaaaactcaaacaactattaattttctctttccataatttactgtttttagatgtcaaaaaatatattcattgtttttacatgttttttggatttccagggcgttcccctcggtttgatcgcggccattccgctcattttgcagtccaaggaaatcacctattcccagcaggcggtgttctcatttgcttattggccattcaggttttacttcgaaattatggcaattttcttttttagtttttttaaaaaattaatttggtcctttgtttgccctcgtttttttacatttcccgttttcagtatgaaattgctttgggcaccgattgtcgattccatttactttcggcgcattggacggcggaaatcgtggatggtaataattttgcattgaccgattttgcatatttcgttataataatttaatcctgttctgatgtaatgctgtttcctttttttatttgaaattatttttcataatttctcattcaactagggcgggggttgctaattttcttaattatttcactaaaattacaaaaaaaaaaaaattttcaccttgacgcctattatcgacatcgccctcaaaatcggtgtttgggtcaaaccttcgcaaaatttatgtcgactcccccccccccctttttaatttatgcatatcatcttacaatgtgttcgtctcgactttgtgtcttaaatttgtttttcaaatttcaggtgccttgtcagtatttaatcggtctttttctgctcgtcatctcctaccatgttgaggaaatcctcggcaccgaggacaaaacggggagcagtgagttcatttacaaccttttcaatctcaaattaaattacataccaaaaacttgacctttcttaggaacctaaaaagcaacaaaaaagatttaaaaatttaaatccaatttagtccatcatttagaattgttgcactaatctgttcattatttttagaatttgacctggacctgtatccaggcatgaatttttcctgggcctggatttttgtccaggtccaaaatggaattgtcaaggcttttttcgaactctaattactgctattttatgcaaatttctacacccctaaaacctatttgttttgatgggtatacataaaattgcattttatttcaacagaattgccgcccaacgtgtactttttggtctgcgtgtttttgcccctcaactttttggccgccacgcaagacattgcggtggacggatgggcactgacgatgctctcgcgcaaaaatgtcggatacgcgtcaacgtaaggcgaatttttaattggaaaagaattgctcatcagtactttcattatacaagttttttttggtaacttaaatcaatttgctttattgttagaatcaggcatttttgcgccaggcccattactaagagagaaaaaaatttggatgggaatacgaatacttttttgttatttgtctccgaaaattcttcaaaattttaggcgcattgcgtggataaattagtatttttaccagttttttgccgaaaaatgatcaattttcagcattctgggtcaatttttgaaaactattttgatccaatgatgcttacaggcgccatcaatggaaattttaacggaatttgttaagaaaataataaaaagtttaaaaaattgcattcatttttctaacaataaatcctttttaaatgcctgtccaattttaaatggcttgctccttttttgtgcttgtctgtgttaagtgttttcaaaaaaattcacgaatgtttttgtgaatttttaaaccgttattcgcgatgaattttctctgtaaaatgtgattattaacaaaaaaaaaatcaaatttgtctttttaaaatgtatgaccactttttttatttaattttataattttttgtatcacactttttcagttgcaatgttgttggccaaaccatcggcttcttcctgggcaatgtcgtctttctgaccctgcagtccaaagagtttgccaacaaatggattcgctctgtgcccagtgacaaaggactggttcaaaatgacggtaactttttttttgaaattttaaagctacacttga

SEQ ID NO: 20170 - DNA, 1417 bp, Heterodera glycines
gcctcgacttgctggctgtgacgctataaaccgtggcgataaaatgataacaaatcggcccgctttcgttgcttttggtctcgccgcttctccgccgtttgcccaccgttcgccgttgttaccgtaattctcgctctgttcgctaccgtactcctccccctcaatgtcttcgtcataatttgctatttcatcacttttctcttcattaaattcgtccgattttgagtgttcgattgactttgactttctttgtaaatcagccaatcgcatgccgactttgatgccgtcattgaccaatttggcaatttgctcattcaatttgcccactttgctaccgtacgccgttgtttcatcggcggaattcattgtcatatatttttcatttgtaccaattgttgccgattttgtgggctgaataaagcaaataattattttttttaataacaacaaattaccatttgtttgagcgcataatccctccattttttctcttcctttttcaactgattgtgctccctttttgccttttgtatttttgaaattgttttttgccaacttaaaattaaagaatatttattttgatttactttatgaaattgaatatcgtatatttttcattccaatttccttttccctcttacggtattgtccgtgttttgtttttcttttccaatatgccactcatcaaaaagcgtgcaaatcctccaatgggactgaggccaaatgttcgttttgcttcaagcaaattgtatgaatgacttttcgaaattgcaatattttggcgttttcttgccaaaaatcctttgttcaaatgccgctgatttccggcaaaaattgcttcccttttccgcactttggcaaattcgaattttggcattgcgctgtaataaccggttttacttgaatctaaataatgtcggcaatttaaaaaaaaactcaaattaaagggattaatttacagggaccgagtttgcatatattttttggcattttttagcggctaattaggtagtttaagaatcacactcctaattatacaatagtaaactgagtttcaaaaatttttcattaaaaaattatttcattattcggcattttactgaccattcacactttctttttcccctgaactgctttcgtgtcctttttcatcatgtcctttttctgtccttttctgttgtccgctttcttcgtcactttcgctttcgactcgaatttctcccacccacttttcgcttttcagcatatttttggtgccatcaataattttggcatttttgagcccaatttggaattcgttgttcaacagccgaacgatgcatttggccatccgtggcactgtctgtgcgccaaaataacattcgttgaattggtccggcaccatgcctaattggtctttgttgggatacctttaaaa

SEQ ID NO: 20171 - DNA, 1718 bp, Heterodera glycines
gatgaatttttattttgttgcgctttgttgattaaatttgaaaaaatgtcatattttaagtcaaaaatgagatttacttcaattaaaaaacggcttactttcaatcagtcgaaaaaataataaataaaaaattctcaaaaaaaataacataattcggctggttggactatgaaaattcaaaaaatctcattgaatatttcacttttctaattgatttaagtaaatgagaaaacaaataaacatattatttctcagagcttggtgatttaaataataaatatttgttttaaaattaatttaagtatttgaatatccaattagtcccaattttttaaaatatttttttttaattaaaaaaaacaacatttattaatgcctcacccgaaccgcgtgccgcagcgacagcagcggctgcagcaatttcagcccgtgccctttcattttttggcgatgtttcaccgccgtgttcagcaccaacttcatggatttcacgctcaatccgttcaaattccaacaaacttccattggcggaactaaaaatttacaaaaaaaaaaaaagaattacaataattaaaatttacattaaatttacccagcaatttcctgcgatgttcgatgctgctgacgtttggctggtgaagaagtaactgaaccagccgacacagagcccgaaatcatttcggcaccagattgttcatcggaaatctgaaggacaattaagaaaaattattaaaaaattattaaattaccatatttcctataataaaagcccctgaattagagcacccctgaaataaagccccccttttgaagggagttgaaaaatatcccaggggttctattatatgaaatacgtttaaatctaatccagggctgtcaagttttttaaaatatttatgagcaaattagacctcccgtaaagaagttcttcaaaaaaaatgttttgaagggcatgggtccggcaatgccaaaaagcagtttatggacaaacttttttttgaattttcatgaaaaatgtaaatagtttgtccaaaataactaaattgaggattttaaagatttctttttttttgtttgattcgaatttctttccaatttcaaagatttcagaccatctaaataaggacaaatcaatcttggaaataagggcactaggcagccccctgctaattctgatcataatcacttctactttggagacagatgaaggtgccctttgctgtggcattatttgttggccctccattttttcttcacgctcgaaaatctttatccctctgttgtgctgatactcatcctggtcaaaatcttcttcatcttcaacatcaataatgttcatcggttccgtcgaagtgtctaaatttcatattttttaattacaaattttacattgtagattctattatttaggatttttttaggtcctaaaattctaaaaaatttcgaaaaagttttaaagaacatgcagtaaaacaaaaaccaaaacacccgttaagaactcaaaattttttgaaaatttaattcctaataataatttattcttcaaaaatgttttttctttaaatcccaaaatcggtatattttttcaattgcctatttttaccctcatgaagcaaaaacaattcttcgtcctcctcttcctcagctccatgcactgctcggacacgttgcagttcatgttgctgtttttcgtcgaccatttgtcgctgctttctcca

SEQ ID NO: 20172 - DNA, 2466 bp, Heterodera glycines
tattttatggtcagatgatacaaatacgtctttttcttcgttaaaaatttgtttagacaattgtcataaaataaggaaggaaagggttgaactcatcggacgacaccggcaaaagagtgaagccgactttcacgtgaaaaagaccaaagggacgacgacacttattccgttggtcagaaggccgtcagtgaattggccaccctggagtaatatttggtcggacgaaaaacgccataacttgtcgaagttggcggagcattgtaacgcgtggagtacgagccggtcagcgtggacacggaggaggggcgaccgtaagagcggtgggccgaaatgttggcacggctggtggacccggtggactgcagcctgttcaagaatggccaaatgttatgcctttgccttgaatttgcccctccttttttggcattccctttggcaattaccccccccccccctttttcggcgccgcttttcccccttttacccaccaatatttggacaatgtgctcactgtcatacatcttttcttgaacaaatcaacggcatcctccgttggcatatatcttgacatgtttttgatatgtgttcactgttcggttcaaattgtgctcaactcacttcacatacgaacgaatgggcgccaatggcctttcgatggaccgttctctcgagacggggcgcgagaagatgccggagttgtacgagttcaacttgctgaatgggagtggtgcctaattgggctttcattgccccccccccaacccctccagccatctctttgtgccggtgtcttttatgccgtaataatttggtgacttctgaaatggcaatatgccatttgctttctgttgctttcctttaccatttccgtttgcgttttgatgctaagtcccgtctcaatgttgccgtaactgtagcggacaaaaggatctgcaaaaaggagaagcatttgtcagtttcgaagtgagtctgacatttgtccgtgtaatggggcgtcggccgttggacggcgatgttgtgaaagggcggcgttctgtcgagggcggacgaatggagaccacggccgaacagtgacaaggacgaatctgagggaagtggggaaatgcaatcggaagaaaagcaatgggcaggcacttgatctgctcaacgatcgggccataaatccgccgccatagccttaagagagaattacggtcacaaattagtccatttgattgtttggcgacgaaaaatgaaagtgaaaagccgacagtaatcgccgcgcctaccgtaactgggcagggtgaaaccgcccgcactattcgaagtgaaagaggcggatcgtctgaatgaagcaaacggatttgaatgcaaagcaccaattgacaaacgtccgacggtaaccgacaaaagtgccggcacgagtctcagagcgagaacgagaacggaccaatggcgaaacgtggtgatgggccggcgtggtgatgagatggtccattacgccggggaccttccgcttcaaaaatggcttaagaggaggcgagggaaaagcgacaaagcttggaaagatggaaaatcactggcaaattgacattttgagccaacaaatcgtccaaattaaaggtgggcacagaacatcagcggcggatgcttttgctcggagacttggcaagggaagcttcggacgcctccgtcgatcaaaattccccactctctgctaatttcccgatcaatcgccggcttctcctcccactcattcctcgccattctccgctttcccttcttagttcaaaaagcgcctctttgttcattcattcatttcgattcattgattggttggacggatgaaacaaatgctccttttcctttctttcccttttctctttttcctttcttttcaatttcccttttcgtctcgcttttctcttatacattccttttgcctcaagggcattttggtttcttatgtatgtttaacttataactagggatgtcaaaaatatgtacaaaaattggtcaaaatatgtacataaatatgtaaaaaaaatccccaaatatgtaagaaatatgtataaaaacccaaaatatgtacgaaaatatgtaaataaaaatttttaaatggttattttttgggaaaaaaccttcgtaaagtgttaaataggcacaaaatggcataaaaatgacctaaatatgtttagaatcaccttttaacatttaaaaaattatttttggaggggtacatttaaaaaaagtttttttttaattttttcactagaaatttctaaaaattttcaaaaattctcaaaatatgtataaaaaaataagaaatttgccaaaattttggatttttttttgaggatttccaaaaatttccgtaaaaaacccgcaaattatgtaaaaaaatcaaaatatgtaagaaaaagtccaaaatatgtaccaaatatgtaaggagaccgaaatatgtaaaatatgtataaaaccccgaaa

SEQ ID NO: 20173 - DNA, 1061 bp, Heterodera glycines
aaaacgtgccaggtgatttcgacagtgagtgatttcgacagtaaactatttcgctttttttcactgtctgcgtgtgatttcgacagcgagtgaattcgacaataagtgatttcgacagtattaaaaaaattgtgaattcgacagtgagtgatttcgacagtaacgataattttttttaaacacgagtatttgaaaaattggagtctaaatgaagtgatacagtggtggaaaaaaattttgactcaagaatcttgagtcaagatgattaaaaattcgtaaaaatttaaatttcgactgaaattttgctgattataggaaaagtcttgactcaaacatgaataaccaacttatagatcatttaaaaatctgagattattcacacttgcttatatttttatcctgatcaaaaaattcttttacactaacttgatcagatcactccttcatggtgatcgggagacataaaaacgttgaaaatagtggattcgtaaaaactctgggaggttgggaaaatccccaaggaaaatttcgataagcccattttaacgagcacaatatttactaccgaattttcttaaatggtatggctacgacttgacataaaaaattataaatcagaaaactttcattcaaattaacaatagaatcaggccattaaatcaataaacaaagtcttaaaattagtacataatttcttaccgttcaaaattaatgatattaaaattagaaattacatgaaaaaatatatcgaaaataatcaactcaaacgtctgatttatttatcctataaaagacattttattaaaccaataaaaattcatttataaatagtacaaacaaaaagaaacatcaaaggaagtagcttttgaaccaaaaatgctaaattcgaaaatttggactttcgactttttgttcgagtttgggtccggggtttggaattgaccgaaatggataccgaattcgtggtcagagccctcgaaaacgcaaggaactttatgacaaaaattttcactgacgcattttctactgacgctttttccactgacgcattatccgggcgc

SEQ ID NO: 20174 - DNA, 1147 bp, Heterodera glycines
tagacataaaaatgtactttatttgccaaagaaaattactaaacaattactattgccgaaagtacataattttgatgttatcattgttcggaataaggatgtactaatgtacctagcaagctaaaccaaacctaaaattaattaaactatctctagaattagaattctgatgaatggaaattaaaagatagcctgaagattattttcggtttaaaccttaatagtaacaattgtgtaaatagcaatgtatatataaatgttaatacaacaaaaaactatcaaaattatgtttgaataaaatatgaatttttaatgactaccgcacaaatttttgaagttaatgcagaaggaaaaagcaaatgccgactatttattattgaaaacagaaaagtgtaacaatatctaaagttaaaaataattttaaaattactaaaaatttattttacgatcattagaattttaaattataccaaaaaaaaaatgcaattgtattaattaatcatgaaagcagaataaatttaaaatatatatagtaaaataaatgataaaaaatttgtaaattcacataaataaaatatattaacaaaattatcgcattagataaaataaaaattcttgtgtataatgtcatttcatcgtaattttttgaaaagccccaatttcccgcacccaacgggattggggtagcaattgatgtcaaagtaaaaatatcaaagaaaggaaaaaaatgtaaaaataaattaaaattaataaataatgtgatataaaaattattagaaattgatgtcaaagtaaaaatattaaacaaaggaaaaaaatgtaaaaattaattaaaattaataaataatgtgatttaaaaattatatcttatgcgtcaattatttttacttttttaattaaaataaattcgaattttaagccagcaatttattaaatcaaaaatttattttacagggtgaagtatggatttggtctaatgaattcaataatatacgagaaaagagttcaaaattatcaaaaacaactatcaaaattctagtgataaaaagctattaaatatacaaaaaaaaatcgaagaatttcactgtaaaaaaataaatattttaaaaagaaaacaataaatataaatatgtaattaatataatag

SEQ ID NO: 20175 - DNA, 1137 bp, Heterodera glycines
gaaatttgattataaaagcccccatttattccttttatggcgaatctgaaatttcataaatgtggtaatgacagattggcatttccaattttggcacttttctgccggtggcacctgttaggctgaactgagctaatgcgaaaattatttgtgctctacttatgcttttatctgaacaaaaacagatagagagacttaagatcattttttacaaatttgaattttttttttgtttaaaatgatgtaattaaaattgaaaatccaaaaattcataagtttaaaagtgcaagtcgccgacaaggcattttttggcttcaaaatgccggattaaatgatggtaggataacattttacaagtcatctgaatggtggtattttcaccttatgaggggattctttttaatttttaatttttgaacttcgaatttcactaaaaaattcattaaaaaaataaatatataaataaaacatttgaattaatttcataattattttaattatttaatgaagtttaaattaacagaaatttggtttgaataattattaaaaaagaaataagaaaaatagaaaattttgtgatttaactattttatgtgatttaaataaaaaataaaaattcttaaataataaatacattaaagaaaattattttctttaatttaatattattattttaaattcattttaattggcttttcaagtgaaagaaaaagaaatagaaaaatttattttaaacaataaaaaatttgtactaatatttgttgataactaaaatgaactaaaattccaaattcatgctttacagtttaagccacaaatgggccaggctcattagcaactttttttggtcattatttcgagaattagagaaaatagcggggtattaggtgttaatggctccttaaaaagttaaaatttacggatacatttctcctaattcccataagacagcttctgaaatggtaaaccgaaagattagctgttaaatatgtctaaaaaccttttttaagagccaaaaattgtacacaaacaacatttgagagagaagcgttaattaggtaaatgctaatcatttgattaattgggctaattagtaaaggtcagatttataaagacacaagtgcaaaatttagtctt

SEQ ID NO: 20176 - DNA, 991 bp, Heterodera glycines
  unsure (1)..(991): unsure at all n locations
agctcagcccatcaacacaaaccgcatatattgacaacaaatggtaacaaaattcacaaatttattgtaacccactgtttttaattctatgagatttcagttggcggtcacttaccacacgccgcccgaaatccgacggaagacgaattagtgggaccgaataaacgaaacatntaaattgaaaattaataacggattaccaagcgagaagcacatgtgctacagacgttgttttatttaaacgaataaagaacaaacggcggaaaagagggcggggggatacaattacaacatcggattgcctaggggaatattgtatttctcataagcatgcttttcgaggtgacttatgtcatgtgtggcaccaataaagtcgatttccagacgaaatggcccctcaattctgtccatgagagtgattccaatcgagctcaaaagttttaggctcacagggaagtaaattcagaccgattcgttacctcgccgcccgagggtccaacggatattgaacatcaattgcacgcccttcgactgtgaaaacgaagcgtgaaaagggaatcatttcgaattgccaatgggggccgccgtgggtgtgcagcaaatacgtgtaggaattgccccaagtgatgtccataaactgcggaatgtgcaacatcactttgtaagtgcgaccatcgccacggcacttaaaagaaaaaatattgaaattgcaaggatttgttgcttagaccttgatcagaagatgggcgtaccgccccccccgaggggacaaaaagtgttttttggagccaaattaggaggcttatgaaagcgtcgtgtaaattacatgatgtgcgggaggggacagagcagtaccattaaattatgtaaatatatttgtattgaatttgccgaaattttcccgtggatttgcaaaatgccaaaaaaattttggaattttttttttgaaaaagtgaatttgtaagctgcaaaattttgaaataaatttaat

SEQ ID NO: 20177 - DNA, 1284 bp, Heterodera glycines
cgaatgtcccccgaaaaattaaaaaacgggcgcgaagcgcccgtcctgaggccgcgaagcggccgaatgtcccccgcaaaattaaaaaacgggcgcaaggcccgtctgaggccgcaaagcggccgaatgtcccccgcaaaattaaaaaacgggcgcaaagcgcccgtcctgaggccgcgaagcggccgaatgcacttgcttatcacttatcaaacgcgcatgcactagcaacgaagtcctttgcgcgaagcgctcatgtcagcgcccgcccatatataccaaaagtatactgtctacaccgagcaattactgtgcaaagcatactgtctacaccgagcaattactgcgcgacacgctagtttatattaccatagagaaaagttggctttcgtcttaaaaactaatttgagtcgaacggccgtcgggaggggtctgaaagtggtggaagggtcttacaactttttgaggcgcattcaggaaaactataggttttccgctccggtggccagttgagcgccagcggcgctgaaacggcgtcaaaatttttttgtccgtctttggtggcctgtaactttgcgggaagaagcgggagcggaaaatgcttgctggtaggattttaagttggaatgtttgggaaaacttggcgcttatttggcggggctatctgtaaatgccaatgctgcagaaaatggcaaaatttggcacccaatttcggcattttccgtttttcgggactcgctgggggttaagcggagcgggttggcgccgcttgagcatttgtgtagtttttaaagctgcatccgatggcgttttcagattttgaaaattttcaaaatttttcgagctaggccccctcgaaaatttttcgtttttgaattttattattttttgccgatttttcccaggaaaacggagaccactttcaagcaaccgtttttcgagctctatcgattggtggcatttttgaaaaaatttcaaaattttccggaaatagaaaaattttccggaattgagctccccatttccgttcaaggcttataactcgtcaggcgttgattttagcgaaaatttgtctaagagcatttttgtagagaattttaagctctatctaatgtgctttatctcatgtttttatcatgaatttaaaaaaagttataaaattaattgtgattttgaaactcaaaaccataggggggaccccatggttttgcatttcatgaaaaaattttgtactcataaattacccaaaatgcatttttatgggataatttgaggggctgcata

SEQ ID NO: 20178 - DNA, 1913 bp, Heterodera glycines
cttctaatcctatttccctcttctaatcactgttgtaccttttctaatcactgttgcacctcttctaatcactgttgtaccttttctaatcactgttgtacctcttctaatcactgttgcacctcttctaatcactgttctaccttttctaatcactgttgcacctcttctaatcatttttgtaactcttctaatctctgctgtacctcttctaatcactgttgcacctcttctaatcatttttgtaactcttctaatcactgttgcacctcttctaatcatttttgtaactcttctaatctctgctgtacctcttctatttactgttgtacctcttctaatcacagttgtacctcaaaacgcgttaaaacttgacttaaaatgcaattttaatattccgcatacaaaaaagctaatatttgaatctattcttgcaatttaaacagatttaaataatgttacatttataaagtaaaattgcctattacttttatttattttgtttccgaatttagcaaccagaatttcttgaaataattttatatttatgatattaatcatttttcgtatcaaaaatatgactatcattgtctttggtccaattatttgctgagaaaataatgtatcacttatttatattaaaatgaaaattataaactaataaagaattaaaatttttattattctcaatacataccaaaacttgttggtgcacagctagtaaaataaaaccaattattaattttattaaattaatgcatgcaaaacgcgttaaaacttgacttaaaatgcaattttaatattccgcatacaaaaaaagctaatatttgaatctattcttgcgattttagcagttttaaataatgttagatttataaagtaaaatttcctattacttttatttattttgtttccgaatttagcaaccagaatttcttgaaataattttatatttatgatattaatcatttttcggatcaaaaatatgattatcattgtctttggtccaattatttgctgagaaaataatgtatcacttatttacattaaaatgaaaggtcttataaactaataaagaattaaaatttttattattctcaatgccagagtgcgagtgtgtgatcagaagttgatcagagtgggagtgagtaatcgtaaaataaatgattagagtaagagagaaagatcaaataccgattagtactagtagtaatcagagagacaaaatgaatgagtgagtgtttaaagaaagagtgcgtgacacaaagagataagaatgagcgggtgatcgcagattgatcaaaaaatgatcaatgtaagagtgtgtgatcacagagtgattagtggcatgtgagtgatcaaaaaagagagtgggtgagtaatcaatgattagagtgaaaaggaataaatgagtgctcatattgtaagtagtgatcaaaaaaagtgaccagatgtaagtgaatgcctgagtataggaccagacatgatccgagtgaaacgtaaatgaatgcatgaatgatcgaaaatgctcagaaaggctaatggtactcaatcaaagattaaataaccagagagagagtgagtgatcagaaaatgaccagagtgagactgtgtgatcagaaaatgatcaaagtgagtatatgagtgatcaaagtgaccagcggtagctatatcttaatgatttgtagacagtgtgcatatggggcttgtgagtgagcatctgttgatgtatgagtgaccatgttaatgtacgtatgcgtgcacgtgcgtgtgcgtatgcgcagtgcaaaaaaaaaagaatctgcctggaagtgtaggtgaagttgcatgttaggtgcaaatgtgtgttatgtgtcctgtgttttcggtgacagtggcagactacacagatataggtgaaatgcgttttattt

SEQ ID NO: 20179 - DNA, 2276 bp, Heterodera glycines
  unsure (1)..(2276): unsure at all n locations
aattcgccggtggattcctcccattttgcgtacttcacccaattcgctattgcanttcgattcttccggatgttgtcctcaaattccttgcgacgccttctgtgattctccgccaattcctccgggtcggtgatgcgaacttttggcggtggagggatcgccttaacgggacgaatttgttatggtaattgttgccgaatcaaacttaaaaaagcatgtttaaaagtcggccatacgaaactcctttcctcgccgcccccttcccatccaatgaatttttattggcaaaatcggagggtattttcctgttgagtgagtacaagccaaaaatttaaggaaccatcaaaagaacgtgcaactcacctctcggaggcccaactcaaaaacagacaattgagctcactttgcgttcggcaaaagcacaaaaaaacatacatggaacagatttgtaagtatttctacgtgtgccttgcctttttttgttgattttttataattttagcttgtagtcactaaaaggaaaccaatcggagattgactcatttccatgtctttgattgcctccctttcctccaattacctccaactcgcgctccttcgcttcacgcaaaagttgctcggcagtgatttgaacgacggccgccgccttaagaggaaaaattggaaatgaatggaagtcgggcactgactgaccttgttcttcactttctccgccttttttggcaatcggatttgcttggctttctcctccatttctatccaaaataataattaaaattaattaattaataataatccgccgcatcgtaaaaatattttctgttttgaaaacaacagataaaataaaaagaaaataaattgtcgtctcatttttacagattaactgaaccaatcgcagtaaagccttattaaatggatgtccaatgtgagaggtatttaaacggaaagcatcgcctcattcgccgttggacgttgaagacgattgctgtccaaaagagggggccattttcgggttcatcggaacatccctcaacataggctccaaaaaagaaaattgcggaacgcgagaaacggccattttgctgaaagttgggatttgaaagaacggaagcaaaagtctaaattccactctaactattgtagcaatttctccttctccctttaaaaatttgcttatttgccgcttcttcctttacatgtgcattggagagagcgttttggttgaactgtgttggacactttcggccgctgcgagcaacaatttctccgcaaaaacttccatggcactgccgatagccaccggcacactggccaccattctgccgatgtcttcgtcactttgcattacttttttcactctcgtctaaaaaaaattagggaattaaaatagattattaaattttattaattggataaattaacactaattgtaaaattgtatgaatacctaaacagtaaaaaggtgaaaaatcatcatcaaaaaatgctcatttaaactcgttttaacacaacaaattaatgaatttcgaaaaatttcaacgatatttccttcgaattttgggtcaggcattaaagatgcgaaataatatcatttttatgatcaggatcctgaaaactgtccgaatacatcttttgattactttccaattttctttttatgtcgaaaaatggggatcaattttactattatcgtgaagttttcaattgtttccaaaatgttttttcagtaattacttctttttccacaatattcccgtgccaattaccggctgtattcgtgcctgactgtagcggcgctttcgaatacgactgatttttgaaaattctccgtcctccggcgtcgaagtgctcgccacattttgctgctcatcctcgtcggtgctcaattctttgttgtcagtctgaaacaaagccaagtaaaaatgtcaaaattggttttgctttttgcctttttcgtcgcattttccactgtgccttcatttgtttttctgacagaattcagtgatgaaatgattaattgtgttgtcgggtccgacgcactcgaagacgatgccacttcttgggtgctgaataaactgttgatcgaaaacgaaagacggccgaactgctcagcatcagcagaacttttcatcataatcttatagagtttatacggaaatttctgttaaatgctataaagaagcgaaaaatgccaaaatgcgtgggcaataaacatcaaaaataagggatgaatcaaaaatatcactttttctcacccgtcggacgcgcgtatgtca

SEQ ID NO: 20180 - DNA, 2290 bp, Heterodera glycines
attgagtttcgagtcaaaaatactcgactagagaatctttattattaagctgtaactgtaaatgagtgattaacaactctcataaagaagtcacagctgatagcttcgaaaaagcaaacgatttttatgaattttaataataattgttatccttttattggacctatcccaatggcaattaattaattaatcgatttgcactaattgggcaccattttcgcaatgttttttttgatgctgttgttccatttgttgctgttgtgcagcagcagtttttgttgcttgtacagcttgaacttgttgctgctgttgtcgctcaacctttggcggcacggcagagaaagccgagcgaacggtggggtcatatcgtgtgccgtaaagttgcagcaaattttgcatgaggaactaaaattaagatttttttaacttagtttattttttaatttattttttgccaaattttgcctgcatttgctgctgctgttgggggttgaattgttgaagcattgatacttcaactgctgctgatggttgaacagttttgttgaatgtaggcgaactgtttttttgcttttccgcctttttgtcagccttagggggaaaaaaatttttagttttaaaaatttgtaaattttcatttttttttaatttttaaattttcgttttccatccatcaaagactcctcatgttctgaattttcagatttgttctggcttagaaataaggaaactgaaaaaaattctcaggtctgtcagatttctagggttaggcattagaaaagtattaattttcttggcaaatctctttaaaaaaaattttgaggtcaaattcggaatttccaagacctgtggatactgtaaaaaacaaatttcaaaagagcatgggtttttttgttggcttaactcagcttattgttagctttatcccctcattcttctctttacataaatagcagcacatccatttttaccaacgatttcaaatttatgaattatttattcattcatgtgctctcaccagtgtcattaacatttcaccataagcagcagcagcaaaagcattttgctttgttggcacatcagcagcaaaagcattggtagaggaggaaaagcatggtccagtggaggaagaagatgaagcagtgccgtcggtgtttgtgcaagtgccgactttggcattttcttctgctgctgctgctggtgtttgtttagctgccgctgtttgaattggcactgcttctcctttcatttttggcgttgtgttaccagccgctgaaaacggcggcgcttttggcgctatatacacagcagtttctcgaatttgcgatgcactttttggcgttgtgttgtcagctgacaaggacagctgcggcgtttgaattggcacagcctttggcacaatcggtgccgccggcgcaatgctttccgtcaattgaattggcacaacctttgtggtcagcaagctttgcaacacatgaattggcacaaccattggcgttgtgaccgctgctggtgccggcatcgtttgagtggttggaataatgccgccaacctttggcattatgtgctcaagcatctgctgctgctgcagttgttgcagctgcaactgcatttgttgtgtgttgtaaaggtgatgaaccaattcggacaaattgcccggcccgttcactaccgtacttgttgctgttgtcactggcgacggtggcggcggcgtttgttgttgttgctgcattacagtagtggggaatacggtagaaggtggccgcggcagcagcggcggcggtggtgtttgctgctgctgcttttgttgatggcactttgtcagcaattcaaattggcgcccaaatggcattgccggtggcgtcgtccccgccgccgctgtgcatggcggtgacgatgacgttgtgccaatcgtattggtactgttgatccatggtgtgccgccaatcagtgcggcatatttgggcatcggcgattgggttggcgtgccgccaatgctgtagcatcgcttgatcgcctatacgggataatttgttagcaaattaatccattaaaatcccagtgtctcaattccccgacacttttgtggccgtctttgccccgattttaaactctccgcgttttttccccgaatgttcgggattttggattgattaaaaattatccgatcgctgataaagccggattttcaagtaatccaactctaacaacactgatcaagaagcacacattctgatcagattggacaaccaataggaactcggcaatgatcagaatttaagccctaaaa

SEQ ID NO: 20181 - DNA, 2152 bp, Heterodera glycines
accaataaaaatttcaaacaattttaaggaatgaaaacgcttcgcaaccaagtgggtcgccaaacgatgccaatggtggtgaattttggccgggtgggtaaaaacttttttttttttttttactattttaaattttcaaattatttcagactggggacgggcaaatacctggacaagtcgggggccgccaatcgtcgatgccaccatctgttgtaccggtgaatttgggcagcatgccgccgtaccaggtacaacaacaacaacaacaacaaaaaaatttccttccatttcttacaaccatttatttttgaaaagggcctgcaaacgcagcagcgcgaggtgatttatgatgtgcctgcgaacggtgtgccggaagacgacgatgacgccgacagtttttgaacagcgatgagccgacaaaataatgagctttaattctcataaaatttttataaaatttgggaattttcacaatgctttcacattaaacaatatttggcaaataaatgtaattcaaaatgacaaattgataatttataggagaccattagtagaagaaatttgaaatgtttttctcgtagatcattaggcgagattaaaaaattttgaattttaaccatgtgatataatctttttgaatgattaatgtgtgatatagtggagaaaatctgtcggtacatcaaatgagcaatttgagggtcacatccattatcgggaattcgggatgctttggtgcataataaagctgcctcccatttggagaaaaataaagatgttttgcaaggtcaaaagcgcaccatttaaattcatccctcccgtctcgctctctcatttgctcaatattttcacatttatttattctctacattttgttatatcgcaatagcattcaagtacaccaaatttacttcaaattaaaaaaaaaatgtccgacagcccaaccctgacgcccgaaacagaaataagcattgcatgggacatccttgaaaatgacaaagatgtaatgatttttttttctttcttcaatttgaattcaaatcttattgatcatttttgcagtggtacaactggttcactccaacgaccgtcaaacaagcgtgcgtcgaggcattggcatttgcgagagaaggaggactaaagcacgagaacattctgaaaataatcaagatgattgaggagagagaaaaccacgacaagaaatgaaatgtcgatcgatgaccgatttgttaatggtgatgtggatatatgatcattttttgggacatttaaaaatttgtgctaaaatttgtccaaataaataagtggtggtgaatgttttgaaaggggaaatttaaaattgatttaaataatagttaaatatagctcatgttctgcaattttattgattgaccctaaacactcagtgaggtggggatgagtttaggcctataaaaatgaactgaaattgacttccgcgcattttccgttttcattcttgaaattttccgctaaaatggccattaatatttcggacaccaaatcgcttttcaatcaaatcctcgcccagtccgatatcaccataaccacaagcggcataactgtcagtggtccacgcctatcgaccccccgttttttaccgtttgacgattgtggacgctgccgcgtttgcaaagcaaccgaggccgaggtggacacaatggtgaccaaagagggggtcacattgtggtgcactcgtatcaacaaaccccaatttgtgccgttcgatgtcgtctacgacctgccagggcactgctttttccgcgtgaagaacaaagcgagggtgttcaatgtcccctacggagacctgccctccgggacgtgtgccaaaaacaaaccgactgaccaccaacaacaacaacaacaacaacaacaggacttgaagcgcaaggcaaaggtagcacttgacttggtggaggctggactaatggcagatgctatgcaggacggcgcacggtggaagaaggccaaaaccgctatcaacgtgcttggcaatatcctattggctgaatcgttggacaatacttccgctcctccgctgaaaaatgatgccgtggacatcaaaaaagaagaagaagaagaagcaaatgtggcggaagaacacaaagaagatgaccaacaaaaagaagacctcgga

SEQ ID NO: 20182 - DNA, 2430 bp, Heterodera glycines
atcccagtgtacacatattttctcgtaaatggccaaacatggtgagattttgaaggttttcactgaatttccctccctcaaaggcccttcggtgcctttctctgcgatttgtggctatccatcgattatgtgagtgagcgtttaattttgattgttcggctaataaatacctctctaattgttaggcgtgctgtttagcgtccatttacacagtgttgggcatcaccggcgacaggtcaaaaccataacaaatgcaattcaattaactgacaaccaaatttatttaaacttattaaatgttcgttcattttcaatcctttcaattattctgccattatatttaattaattttaattaatttaatttaatttaatttattgagcaaacaaaaaatgcacattatgtagaagaaaagagaacgaataaaaaatacaaatgaaatatcgtaaaaataaatgcaatgttaaaatcacaggcgattgattatatatatttgtaaatgtggcacaaaaagtcctactcagaaaatcattgcctttagtaaatccctctgaattccttttgaattggccaaaactgaaaaaattgtttctcggtaatggtaaatttttgagttttttatatacgtccttaaattcacttttaattctcgcgtttcgacgtgtaattttatcaaataaaataaattaaactttgagttaattaattaattaaactttggtcatcttacggtatcgctttcaggtatatgtcggtacggtacccggccatctaccgtaattggcgcacaaaacagcgcgtgcttctgatcatcgccggcatttggctggtgcgtggcgtggcattcaaccatttttcaattgcctaattagccctcattagaattgtccctaacgtgttggcatttcctttcgcttttcagtgcccttccgttctcttctccgtgtccatctttggctacggttggttctccggcagagggcgcattttgcgagaagacgaatgttacgtgcagttcatgaccaacgcataccttaacatggtgacacacatttgaagcggattttaattcaattaaaatgcatttcaaaattttaaataattttatttaataaatcagggaatgtacatctcctactattggtcgactttggtaaatatttttgctgatcagtgagcgaattccatgccaaatttaggttctgatgctttacctttactatggcatttacacttcgtgagtttggagattaaaaagaaaataaaatataaaaacgcaaaaatattttaaataatttaatattttttctgtcacagtgccaaacaattggccacaaaaagtgatcagaagcggcgtcggttggcactattggcagaaatgcgggcaacgacaccggcggatggcaccggaggggcggcggatgggcacggcacaagtgacaggaacaacaacagcaaaaacaacatggaggcccaatcagtgatcggcatgtcggaggcgggcggaactgcggatgattctgtggaatcgtaagcatacggaggattaatcagacaaattgggacgagaatcccggggttacgatattttggggactgacatgtcgagaatcaatcagcacatagggaaaaggcccgaaagggtcaggaaaggatacagggaaggattttattcgaaaattttcattggtaatcttttgaacagtcgcccccaacggcgcgtctccgtcactcgattattttcactgcgaaatggccgtcttttttcgttgaaaagcattctgtcggggggcgacgagcgattgaggggaaaaggaagaaaatttaatgggaaaaacggcacaaaaacgcaggaagaaagtgcggaacaacagcagcagcaaaggtaaaacagcagcagaacaaatggaaaataaatattaaaagcgaaattcaactttagtgccggaaaagggaaatgaatgaaattttgagaaaaattttcaagaaaaacaaccggcggaatttaaatttaaaaatgcaaagaaaatattttagattcaaaataagtctcttttctgaactttccattgtttttgtgcttaggtccgtcactctgaccacccccgtggccatcaacggctcttcttcatgtgccgaagctgcggcggacgcattgccaacgccgcagccgcagcaattgcaagcggtgccaacgccgacgccccctccggcggagttttggccaaacggcgcgtgcaaccgcaaaagggaggcggagacggaggacggacagtcggcgaggaccacggcatttacaccggtgatgctgggcgaaagtgaggacttcttcccgttcatcgacgactcggcaggcacatcgttgcaggaggggagcaaagcggaaaaagaggaggtcaccagggtacggtaattgctcaaggcatactg

SEQ ID NO: 20183 - DNA, 1882 bp, Heterodera glycines
aatcctaaaattgcacttttccttctgctgctcatgcggcgctatccctttgttctgctccgtcttcgttttgtcctccatttcctcgttcgattggtgttgtgtcgaaaaattcggctgctgcgcgccatccgccgtcatttggtaacgatttttggtgtcaattaaaagcagcgattcgatgctgctaaaggcatttggcattggcattggcatttatttgtgatgggcacggaaaatcgaaaagaaggcaattaattgagaaaaacaccaaattttggaaatgagaggaagggaagggaagcgaagtgagaaggacgaattatgtgtgtttgggtgggcggacacaaataatcgccggagggcgagggaggggagggggtacggtagaggcggggaacgagagggacggtacggtaggggcgggagtttgtggcgacacgcccaagcaaagggaaaccgagcgaatgcccggggggacagcagaagtaaaacaaaagttatttttgcttttttttcttaatccaaaaaaacaagatattgaatttgcttcctctttttggcgcatatcataaccattaggaaatacggcagaggcaatttggccatgagcgagtggattattgtccatttgcatgtcgagaatcgagtcgagagtggccgaggaatggccataattagtagtgcaccccctgaattcattaaaaaggaaccattcttaattttactagtcaggcgatgaatgaatgagttatgcaattcagcttctcacctccttcagcatcccttcctcctccattaccaattccggcacaatttctgccgttgtccgatgattttggcacatttccctccccccccccccattcatttggcccttttcatccaatttcattcattcactcgcccctctctccgcctgctctcctgcctgacaaattgccttcgaaattgtctttagccccggacggacattcatcagagagtaatttatcgctggaggggaaatatgggattaaccattaagcggaagaatgattaaaatattattgtgaagaatggtggggataatgagaagaagcagcagcaaaaacatggaatcaaatgaaagaattcgcggccctcacaaatgaaaattactaatcgtttcatcgtttcgtgtgcctttctttgtccgtccttcggttgcatttgctcccccccccccccccccccgacaatttgcggcatttacaacccctcggggaaaggtaaaggaattgtcaaaacatttatagatgaattgggtgctgtgggcttttagcgttgattcagtggtgggatgactgacatccgttcaacgcggcgtcgtcggcgccgacagaaagagacgacgacggcaaattggagaagacaatcattttacaatgatccttcgggggtggggaaccgatcaaaggcaaattgggaaggttaagtttatggccctggggaaagttttataattgttgaaaaagggggggggagacaccgcaacccctcgggggaggaggaggaaatcgccagcaattaattggggaccgaaaccacggagattatttgaaaaaataaaaatgaatccatgataagttttttgagaaaaattttcaattcttagggatgtattttctaaaactgctcattttcttaggggtttatttttcgttttttttttacatttttgttaatgatctttccgaaaatcctgaaaatagacgtatataagtttttcgtgcttatctgtgcgtattatgcgcagaaattttaggcatttgtctaaaaaattaagtccgaattgataagacgatgaaaaaaacggagagatgaatggtgagaggaaaagaagatacgagagcgaaagagc

SEQ ID NO: 20184 - DNA, 2432 bp, Heterodera glycines
ataaaattttttaagttggcccactgcgacgtttttgacccattcaaagtgttaccggcagagacaggacatttccaagttgggggagcttttccgttgcatgggcaaaactgtgtgaaattggtgccgtcctccgtccaggacgttgtggcaattcaatgggcattgggtaaatgaaaataattaatattaattttataaaattaagcaatttaagcgcattggaatgagcaaatgccatcctccgtcaacggcgcaaaggaaaaggaaacgacacaattcaaattcggtcggcccaaattgggtctgttcgccggggaatcatgttctcagccaaaagaggcaagaaagtacatggctttttaataacattaattagtaattataggcaatttcacaaactctgcgctttttggacagcgtcggttaccacgagcccagcggatgtgccaacagcgaagaagaagccaaacgcatcgcggaattgccaaaattaatcggtaaaattccttctgaggacaatgaagcacattccatttatttgttaggccttttaatgccaaaggatcgccaatcggctgaaagtgttgcccaaattctccgtcccgccgccctgccaattgccgcatttagcgccgcttctgcacaggcgttggtcgacgcaaatgtgcgccgattcaccacaacagcgccgctgttcacggattacgtcaaaactttggtcgaactgctgaaaatgctcggctcggacttggtaaataaatattatttgttttgtttaacactttcactttactcgtaattaattaatgggtttaatcctttaattatggtgataattaattattgggactgatcagttttgtttttcatctaaggtttcaatcgttgactttggagatgacttcgcttacactccgctgctgcaagagaaactccgagccgaaggcatttcgactgccgaagttggcattcactgatctgatcactctcattaattaattacgcgtattccctttaattgttgtcgtttcaggtcgtgtctcttgaccacccaatgctcccctcaattctttccgcgagtgatgccaaaattgtcgtttcgctcgtccctcaccgcattctgcgcaatgcacgtcttggcgagttgcgagcattgatagaattgcacaaactttgggttggcattgacactgaattggacggaggcactgacgcggcggcgacggacggcgagggaaacgcggcggtcgattttttgccggaagacagcgaatttcgacagaatgccaaattgcaggtgccatgttggccattttaaattgctaatggtttgacaaaattacctcaatttgcattttcacagtttgtgacaatccgtcgccgtgttcgacaattgaaagagttcagcgcatactttctgcgcgtgttgcagtcgaaccacgcccattatacccttttgagggcgtatgccgagcaagtgttcgactgcgacgtgaccgttggcaccggcagaaactgtacagacggattactgtcagccgaaagaatggccaaattgcacaggtgccgacacacactgcatcattagtttgcccggcattttgtttagacaatcgaacaccgccgaggcagcaattttgttgacctatgcattggcgagagcgaccgaatggattcagtcgaaaaaggaattggcccaaaaatggtttcagtttcatgatttctttttgcccatttcccccttctctttcagcacggaacgtggttcatttgccggttgccacgatgccacccgcacggcactgttaagcttttcgccaaatgatcggctgcttagtagcggttccgtgcgaatgccgccgggctttatcaaacaattgagcgaaatgaatttcttcgaaaccccagagggcgttgttcagctgacgggcattggcattgaggcaattttggcggaaagggaggacaaagacggagccaacctttacaggcacggcacaacggaagaggagcgaattgtgcagaaattaatggatgaatgtttaggttgttggaataccgcacaacggacccacagaagcagaaaaatatcgaaaaattcgttgtgccacaaaaattacgccaatttcgttcgcggtgccgacaattcaggtggcaaaatcgaacaaagagttccatttttcccttttttcccataggcccttttgtggcgaccgttgtgagttggccactcgccgatcatccgacaacacttttctgagcatcccccaacaatatcccttttttattgcggcaatgttcgatttgaaagggccaaattgcgggcttagtgctgacgcaaagggagcagcgatgggccaagaaattgcccttcctttggcatttgtgcacgcggaagaaataatttatttattttatttatttatatt

SEQ ID NO: 20185 - DNA, 1953 bp, Heterodera glycines
aaagggaaataattaaaaggccaagggaatgaaaggccaagggaatgaatgaacattgcccacccccccccccccgaattgcccccaggggacaaatgtttttcaatattttcgctttttgttttccatttttcgcttttactttcagtacacccattgttcgttcgctgctgcttacctgcactgaaatacagcttgcgcctctgctggtacagctgctgcgccgccaattccgtgccgcccattccgtcgctttcccctccgtccgtcgtcgtcgttccctcgccgttcgccccattcagaatgccgccgttcgctatgccaatgtgcggttgtgccgtgccatgcgccttttgctgctgaacgccggcggcagctttgaccagcgcttggtaacggagctgacattccgcgatggttttgtccttttcctgtttggcgtagtggagaaattgcaattgcagagaatgaatctgagcaaaaagtgtgtggatgaattacgacgcgtaattaccctaattaatgtttaaaaaattaattaatttttaatttggctaaccaattttcgcttttccatgcgccagcaaacattccacaaaaagatggagctgaacacggagaggaagagcagaatggccaacaggataatggccaccacttcggcccgtcgcgctctgtccaactcggcgccgacgtcgcccattacggtggagtcttcctccctcggggcaaagggactctctgaaaagctcccggaaaatgcatttatggaaaaactgtcagtgaaagagtttctttggaaaccagcgacagtatatttacgtattgtccacctaaaacactgtatttactgaaatagaccccccccccccccgaattagaactccatgaaataaagccccattttgaagggatttgaaaaataaagccctcgggggcggctctatttcagtaaatacgttaggctgatttggggaccaagcgagccgaaggactatttccaaccttggcccctgccctgtcccctgccccttccccgttttccttccctttttttctctcccatattctcatttattcccctccggttttccttcactttaacttccccctcccttttccccctcccatactgaccaatttggccctctacacggaatgccacacaaaagctgccgtttccgctttttcctgctgcacattccaacaccaactgaacaatgcctcccgccaactcttccgcgtccttttcattgcccgtccactgatttatgatttaatgtgttttcctcaatttcttggcctaaatgcttacaatcactcgcccctccccgccggtccatcccaatttgaacaaatcgccatccaacggcctccaaatggcttggttggccaacaaaaaggccgactgaatggcacagcgggggccatggccggcacggactttgacgccattctctgaacggcaaaattgggaagcgatgccgaaaggcggaagagacctctccaggcaatgcgcaagtcattggacaacgcttcgcctttgcgcggaatgcccaaaacgggcgcaaagattggcgtatggccattgtccgacggtcggtcgaaacggaaagtgcggccgggacaatctttgtagggatgttttaattgtataaatggaactctgttctcgaccaccattcccgaatgccattgtccgtttgcaatgcttttccgcttaccgggtgctttcgctgcgcattttccgccgccttcggccgtttggacaaaaatttggtacccggaagggcatcggcaaaggcaccgcacccgcggcattgccaccgcaccgtcgctgcccagcacttcggcgcaatgccgcgagcagtgctcagtgcgtaaaaggaccgcgtcaccgccaaaattatcggcggagaaagggacgcgttcgatggcgagcctaagtgggca

SEQ ID NO: 20186 - DNA, 800 bp, Heterodera glycines
taataactttcctgcggggaaggcccaccacgaggccgcgaagcggccgagtgagtaccttcggtgcaggaaaattattaaggaagagagttcattatttatttgtcttttgcataattaattcataagtatttttacagaaactgcagtttaggcttaactttttagtgaaaattcaatcactcatttttcgagtagtgatcagaagcgcaccagattttgcaggggcctaaaaaggtcaaggaaaggcgtctctgcgttgatttagcagtagtacctatgaatttaaattttctatgaatttttaaagttttttgaaatttttttaagtgcaaaagtggtggtgtctgcaaaaaattttcaccgggtttaaaaaatctaggaaaattagtaagcatttgtagtgttccgatacgtatccctgcaaaatttggtgagcccctgatcaattacaaattatttatggacgatcaaatttttagaaatttttatttatttttgcataattaattcataaatatttttttcagaaaatgctctgaaacgcaccaaattttatttacatgctagtttaggcactctgatgctttttctatcaaaaagggagatgaataaatttttaaaaatttttaattcctttttaaacaggccaaaaagtttaggcttaacttttttttcagaaacttatcagaagcgccccaaactttgcagggatactgaaaggaaaagaattaacctgttttatcacattagcttgtcatcagtttttataaaaaattttcaaaattctgagtctccta

SEQ ID NO: 20187 - DNA, 2974 bp, Heterodera glycines
cataaacgagagtaccattttctgacaatgaaccgaattctccaatttcagcgtttgacttcgcctcgtgtcaatgcaaacacttcggggaaaactgctgccgatccttcagacgaatggcaaaagctgaaggatttgcttttaaaggcttcgcccgtcatcgttttcgttgtgtttggttggcgcgtggataatttttgccatcatttttctcttaagcgctgctctgttggtacgccactccgttggttctttcggctggcgctgcactgttggaaggagtaattcgaattcattttcgcttttcatttttctccagggattcagaatttcatcttctcataaattagggtattttcgactctaattataaaagattcaaaatccttctcaaaatgcttattcattcgggtctctctctctctaaaacgactcttttatttgtatttagggtaatttgttgtttttctccacaggtttcttcgttggtgatgggtttgggtgcctttctgcgcagttttttcccagaactcgtcgcctcggggctcgccttcttttccgcttacgttttgggcaagaaaaaaatggtcgactgaaaataaaccatcgaacggagacggaaaagagatattatgtgcctatgtaaattttactacaccgaattatgttttttttcaatttattttcatgaataaaatggctaattattttatttcgaatttacaattgggtaccgttccaagttttaatctttaatcatttttaattcgtcggttttgccatatttggtttttatttgtctctttttcttttagcttatgtgctcaaattttctgtttgttttccgttttcaaattgtttctcatcagcctttcctccgttctgccttttctttcacttctcatcaattctctgctcagtatttgataattcaaaatacacaaattaaattaaattaaacgaccataaattggaatgtttaatttccaaaatttaattttcacaactaattcaaaattttctttttctaactgccacaaattgtgcactttcagcattcgtcgcaaccactttgtctgctcatcgttctccacaaaaacgaaaaaaatgcagaatccgttggaaatgggcacctatcgcgtcgggtccgagacgtaccggcgcaactgtccgttggaaaaggcgtccaccgctgcgccagccgctggcgccgcttttggcgcgacgacggcggagaacgacgacggttccgcggacgaacagagttgagagagtttaattggcattttctagactcgttcttttttttagaattaaaatggccgcaatgattttttaatttcgaaaaaataggtaatccccgttagtttttttcttcctttgactcttgcatcagcttttcctattataataataatgtttttaatacatttttgtttttacgttttcaataaatgccaatgacattggcaatttgccaatgcgtcgctttgtttgccgatgcctttcctccctaaaagctcacttttctcaattttaccttcaaatcaatttccatcactttcaataacaaattgtttggcatgcatttccccaaaaaacaattttattatttttatggaataaaacattggcatgaatttacataatattttttttattttaaaaaagggttaatttttcaaaaatgcatttgctcttttgccttttcctcctccttttgtttgtcacaattgccaaatgtcctcagccttatcagcacaattttttcaaaccgaatgaaaatataaaaagtaaaaaataattttgttttcaatttttaatttgtttccatgtttagccctgagtccttcttcgtccggccgctgttcgtcctccgaagttcgtcaagcggattttgctgggtcggattatggaagtccgggaaaaagtaaacctaaaaaataacatttaaaacaattttcgacttttttcaggggcatgcatttcaactgagaaaagaaaggcgacgacaattttaacagcgaaagcagcgcaagaaattggcgaagtgtcgtcggccggagaaaatgtgccgttaattgtgcagcgaaaaactgtcgaggtgggaattgggggaggggtggaattaaaatctaaaaaaattattaaatttttggtggtgtcggcacaggacggatgggtgtacacggagcaaatggtggaggacaaatctttggttggaactgtgaaatatgacggggcgaagcagtgcttttacgacaggtgaaacagaaaaaaggccggacggtggtgcaaaaggtggtggaccaattgaattgatcacttcctgcgttttagcagatgatttacctaaaaaatcaccaaaagcgcaaattaccgtttttaaaaatttaatgaccggttcattgtcagtcggggacaaaatttttttttggcaagattgggtaaaaggtttcacattgaaaattgccaagccggaagagtttttgtttttttcatccccaatcatagtaaacattctaggtactgttcaaaagtgcttgacaaacattaatttacaaaaaatttaaacgaacaaaatgttaaggtctaaaacagggatggcacggaattccgatttccgaaaattttttgggcctcggaatgccatccctggtctaaaagcgtcattttgggtgcgcccccattctctttttgatgtttatgtgttccacaatcacattcagtttattggtgccgaccaatttggtgggaatgatacgcggacgaaatagcagcaacatgaagccaattcaagaggaaaatcgatgtgaaattgaatttccgaaaacaccaaaagtgtctggtacggaaactgaaatcagtgagttgggacgggaaagaaaaatcagccaaccaatttttgaattaatgccaatacattatgaaggtttgtgccgaatgtttttttctattggtctttcccgccaat

SEQ ID NO: 20188 - DNA, 3439 bp, Heterodera glycines
  unsure (1)..(3439): unsure at all n locations
gacgaacattatgtctctgggttatgccccgaattgaataggtccatgatttcanagccgtggttgtgccgtggattgattacccgacacatccggcttttttttgtcaatccgactcgacttttctcgccccggtgtaatagcccttgattttaatcccctcaaaatcggattaaaatgagaaaactttttcagttaaatcaaacttttgccccttttggcaaatcattttctttccaaatctgtaggtctcccatcgccacactttcaaatttttttggcggatttatttaaattcagtgaatttttttggctaaatgaccaaacagccgatttcctccaacagccaaaccgtttgtcggcgccgtggtgtgccatcatacattgaagaagcagcggagaatgccaaaacggaagtgccaacaacatcatcgacaaacatggcacggcacaaggcagaagcaaaagtgagaaatggcggcggcagcgctcaaatggcggcgcacagtcagccgacgaagggcccaaggtgtacaacagcagcagaagaagaggaaagcagtgaaattgaacagtgagtagtttaagtactcaccaggatggcattcctaggccccaaaaattttcggaaatcgaaaaccgaccccaaaaatgccggaaatcggaattccgactccaaaaatgccggatgttggaaacagataatcggaattcgaaaaccccaaagaattttgagattttgaccatttcgtcagggactcagttggcccgaactaaaacgcaaattttgtgccaaatttgccgcttaattggctttctacatttaaaataattattttttaaataattattttttttattagcttcgcccatgagtacaagaagcagttgcgccgcatccttccaagcacatatgcaaaacggttgttgcccgcgcaactgtaccggtacggtagcaaagattttggcattttgaattatggcatttttaaaaatttaaattatttaagtacactgatctacatctcttatctgttctggttcgtcgtcggaatgtaaagccattttttccttcaactttaattattttgcttataaatccaaaaattattttttttttttttctaaaaaatattttaatgtttatattttcagaaaaatttttaattttttgtcaaaacaacaatttttcataaaatattgtgtaaataaaatgtttaaattatttaaattccattgatctcatcagaaaagttaaaagcactcgttatgatactgtgcattggcacttggtgaactgctgaaccaaaacatacagtatccttttttaaagcaccgtaccattgaaatttttctgggcgaaaaaaggaattaatggtccgccggtggtgtcgagaggcatttttaatgatttcaaaattttatgatgatttattgcttacattagtgttgcaaaaaaaaaaaaaaaaattttccccaaaaaaatcgttgaaaatttttcaatttttttttgtgaaattttcttttaaaaattttcccaaatttttttttcagtttggtaattcgcaagacgaagtcggctgttgtcgcaatgcgttatgtgcgtgcccattccgccaccgtttcgttggcatccattgaacagtcggcacaatttcagcaactgttacaccaaattgaagacgaccagcgaccacccgcgttgctaatgtgagagtaattaagcattaattaagcaatttaattttgtctttgatttatttggtagtaattagttgggaatgcatgagtcatttttaaaatatgtgctaattgagtgccttattaacttgcaaataaaatttggtgagtttcagagcagtttctgaaaaaatatttatgaattaattttgctaaaaaaataaaatagtgaagctttaaaaattaataaaaaattttaaatcagaattactggagttagcatcatagcagtgcttttccttttctttttgatgctctcgcaaaatctggttcgcttctgatcagtttataaaaaaaaaagttaagcctaaaatttttcgcatatttaaaaagcaatttaaaatttttagatttttattcatctccctttttgatagtgtaagcatctgagtgcctaaaataacttgcaaataaaatttggtgcgtttcagagcagtttctgaaaaaatatttaagtagtgatcagaagcgcaccagattttgcaggggcctaaaaaggtcaaggaaaggcgtctctgcgttgatttagcagtagtacctatgaatttaaattttctatgaatttttaaagttttttgaaatttttttaagtgcaaaagtggtggtgtctgcaaaaaattttcaacgggtttaaaaaatctaggaaaattagtaagcatttgtagtgttccgatacgtatccctgcaaaatttggtgagcccctgatcaattacaaaattatttatggacgatcaaatttttagaaatttttatttatttttgcataattaatccataaatattttttcagaaaatgctctgaaacgccccaaattttattacatgctagtttaggcactctgatgctttttctatcaaaaagggagatgaataaatttttaaaaatttttaattcctttttaaacaggccaaaaaagtttaggcttaacttttttttcagaaacttatcagaagcgcccccaaactttgcagggatactgaaaggaaaagaattaacctgttttatcacattagcttgtcatcagtttttataaaaaattttcaaaattctgagtctcctattattttatttttttttcaaaattttgaagggcggagggggggcgaaggcccaccacgaggccgcgaagcggccgagtgagtacctcggtgcatgaaaattattaaggaagagagttcattatttgtttattttttgcataattaattcataaatattttttccagaaaatgctctgaaacgcaccaaattttatttacatgttagtttaggcactctgatgctttttctatcaaaaagggagatgaataaaatttttaaaaatttttaattcctttttaaacaggccaaaaagtttaggcttaacttttttttcagaaactgatcagaagcgcaccaaactttgcagggatactgaaaggaagagaaataacctattttaaatattatctagtcagttcatttaaataatttttatccaaaaaatttttttttgggttttcggggcagtccccctgaaccgatgcgcccagatttatggggagaccgaatccttcgggaatagcttcccgatagtctgtactttaattctgcgttggatttttgctccccataattgtttgagtaccccaaacggacacttgaaaaaatcgatttttttgttttcggggcagtccccccgaaccgatgcgcccaga

SEQ ID NO: 20189 - DNA, 2448 bp, Heterodera glycines
gattttgggcgaatattgaaaaattcatatctagcctaagggttgatcaattttacaggaataaagccttaaaaatagagaaaaatcgggagaattttatgggctttatttggaatttctatctaaaaaaggaaaaaagttattccagaatttctggaaaaattcgaattttcagaaaaaaattcataactcggttctgaaaagatattctggaaaaataaaatacttcaaaaatccgcaatttttttctctataatataaattttatttggcaattttatctcttttttgagagatgttacaaaaataaaagtgattttgagattcgggaccaaagggggtgaccagtatttttgagtggaaaaatttttcaccaaaaatcttccaaaaacatgtctttaggggttatttgggccgctgatcatgaatacgtaatcagtttttacttttgacatcgttaagacctcagaatccctgtgtgattggggattctgggacatgttctgaggggggggggggggcaggttcgaatccgggcggtgtacattatttttctgtgcattttttgcttacttttacattttttaattaatttgttttgtattattaataataaataaaaatttttaatttaaattaaattattttggttaacaaatgttttaatttaaattatttaattttttatttaatttaatattgttttattaattattttaaattattttctgatgaataaatgttttatttaatttgaattttcgagaaattaattcctttcaatttcaataaatattctatattataaatttctaactttatttttaataagtaaaaggatttttttaatttgataaatttataatacatccaataatacaattttcttatttatttcattttaaaccatgattgtacctcttctaatcacttttgttcaaattttaatcactgttgtacctcttctaatcacagttgtacctcttctaatcactgttgtacctcttttaatcactttttacctcttctatggaaaaattttttcctccaaaattgcttaaaaatgacttttctgggctaatttgggctgctgatcacgaatatgacctttactttaagtttcagaaagtttgggttcgattaaaaatttttttgaaaattcggaattttttggcccctgggaatttggtgccattttcaaaaaatcataactcgggatagggtaggtgaatattcacgatcaaatgctttaaaaatgcgggaaaatacgacaaattttatgctttttatttggtatttaatcaactaatataaaaaaagatattacgaaatttctgaaaattttcgaattttcagaaaataattcataacccccttcagaataggggaggggtactggcaaaattgaattatgaaaaaatccgtaatttttagctcttcaaaaaagttatttacaccatttatctaccttgtacctcttctaatcacttttgtacctcttttaatcagatttgtacctcttttatcattttttacctattttatttacttttgtaccttttttaatcactgttgtaccacttttaatcgctgttgtacgtcttttaatcactgttgtacctcttctaatcacagttgtacctcttctaatcacttttgtacctcttctaatcactgttgtacctcttctaatcacagctgtacctcttccacacatcttccaacaattttgtacctcgtcggagctcaacaacatttaaatacgggggcgaagcgcccgtccaagttcaacaaaatttagaaacgggcgcgaagcgcccgtccaaggccaacaaaaattgaaaaaccggcgaagcgcccgactgaggctgcaaagcggcctaacaagctaaaaaacaggcgcgaagcgcccgtatgagttcaacggatttaaaaaatgggcgcgaagcgcctgtataagcccaacaaaatttaaaaaacgggcgcgaggcgcccgttcgaggccgcgaagcggcctaaaagtcccagataatttaaaaaaaattccaaatctccacaacaagagctaacttctaatcattgttgtacctcttttaatcactttttacctcttttaatcactgttgtacttcttttaatcactttttacctcttttaatcactgttgtacttcttttaatcactttttacctcttttaatcactgttgtatctcttataatctctgtaaggccaacaaaatttgaaaaacgggcgcgaagcgcccgactgaggacgcgaaacggtctaacaagctaaaaaacgggcgtgaagcgcccgtcttgagccctcaatgtggactaaaaaacctcctaataattttttaaaaattcaaaaaaatctctctaaccaaattcgatcaatttgaatccgcttcacagtctaggtagcgaagctccccaagagcgaa

SEQ ID NO: 20190 - DNA, 2069 bp, Heterodera glycines
atttttcaacggatctggttgcagtttttcgttatcattagaatttgcccttttgttaccgaaaaaattctaatttttttttggggggggagggggaaatagaaccttcgaaaataggtcaatttcaatttgtattgacatttgtccgtcttccaggcgacatacctcggcaacatgttgaccatcatgggcaagggcgacgcgtccgtcgaccgtccgttggaaggttttaatttatggaaattttgcgactgaaaccagagttctggtttttgtattcagcgccctcggattagctctagaagtaattttccttaaattacaaaaaaaaatgttaaaggaccaatgttcgttacgattacgactgattttgggcttcgttccccgggacattcatttattgaaattttgccaattttttcctaacctatgacacctgaaattattggtccaaaagccaaaaatattatttaattttttttttccattttcgattcttcggccaaaaaggaggccctttaactttggttaccctttcagaaagtttttaaaagcggctattgatcaccctacgattttgtagcggctttttggatgaattatacacaaatttcaaaaattgcggttgcatttttgccattgtattttatttttacgtctttttcggcgcttttttattaaatattttgtgtgcatatttttcccattttttatgccacaatttttccccttccccctttacagtgattacgcgcgcgtgggcgccaccgtcgccagaggcacggcgccgatttttacttaccagccccaggcgcaatagttggccatgtgcatgtgccgatttggccccatgcatgcggtggtttttttactgccagattttatttgtttgctccgattttaggagaattttaagaaaaaagcctaaaatttaatggcaaatttagttggatttgagttttttcattcaaaacttggaaaaattggggctttggaagggatgtgcccaattttcaacgaatctggttgattttttcatgttatttggttgaattctgccaacatttttaaattttgttaccgaaaaattacaatttttgggagagggtgaagtaattaatccttaaaaaacgtatcaattttgtgttaacatttctgcgtcttccaggtgatatacctcggcaacatgttgaccatcatgggtaaagggcaacacgtccatcgaccgtccgttggaaggttttatttttttgggactgaaacccaccggccaaacaattattttatgccttttctcacttcgattcctcggtttaaaaaggaggcccctacaatttggttgcccttttcaaaaaaagacatcataattgttgtgccattcatgaaaagaacagccttttttaaggaattcgtcgctcggggggtgaggttattctcttccggagccaagtgtttggttacgcccttggataaattccaaaaaaaaatttttttttgtttgcttttttgccattgtattttgttttggcactttttcttcaatttctttgtttgtgttcatatttttcccatttttatgcaacaatttccccttccccctttacagtgattacgcgcgcgtggggcgccaccgtcgccaaaggcgcgacgcgccacggcaccggcgccacttggccagcaacaggcgcaacagttggcgatgcgcttgtgcgtgtgccggtccgtccgggttcagggccgagacgtgcatggggtgagtttttagtgcaattttgataaaaaatttcaaattttcatcggcaacttttttttttgcactgtttcccactcctacttccgttttatttattttgtttgagaaccacgacaaaaaatgccgtgctttacaatgaatgagagagggcggacatattttttatccgaattttttttccggaattttcccaaaaaattttatatgttcatacatgtacaaggggcgcgccagtcagacccccatacgtcggacgtttggcgcagggagggtgcgccaggaccaatttttcttacgttggccccttttttccccc

SEQ ID NO: 20191 - DNA, 1621 bp, Heterodera glycines
  unsure (1)..(1621): unsure at all n locations
tcaaaaaatttggaaatgtatctcatatgcaatttcaaccnaataaatntgaagaaattttgcactcaattttgaaaaatttatgtccatattttgacatttttgccatttatgtccatattttgacatttttgccatttatgtccatatttcgcgatttttgccattttatgtccatattttggcatttttcaaaaaaacctctattagaacggcccccagcagctaaattagcctttttgagcccaaaacccgaaaaatttttcaaaaaatcattttaacgccaaaatttctcgagaatattgaataaatttaaattttcttaaaaattaataaattatgtcaaaaataagcaaaaaagcgaaaatttcgcttttgttgttgattttgcgctaaaaaaattaataaattttagcttttatgtttttttcttttaaaatgattgcacgtaattgccgaaaaaattcgagaccaatttccgaatgttgaccgactaattgcaaaacgaaagccgtctttgtcaaagcgccttaccgagtcaaaaaatttggaaatgtatctcatatgcaatttcaaccaataaatttgaagaaattttgcactcaattttgaaaaatttatgtccattttttgacatttttgccatttatgtccatatttcgcgatttttgccattttatgtccatattttgcgatttttggtccatattttatggccatatttcgcgattttatatccatatttttggactccctacattatatttgaggcatggccaaatctcactaccgtatttgctctaattatccccaaatctccattaatcccccaatatccaattatcccccagtctaggaggggtttgaaaaataatcccaattggaaatgaacttatcgcaccaattgaaaatggatttgatgctctcttttttctaagaaatgctttttgttgattcttacatttatttaattttcttttttgtgagagttttttggtgccaatgtcaatcccgcaaaacattctcagttttcccgaaacaatgaaatgccaattattattattattttttttttctatccgcccaactcaaattcctatttttaatattcatcgccaaaatggtcatcagaacagcaaacaaaattatcatcaaataaaacagtcggacatctctcaaattatcactccttcttccgctgatcactgggcccgggagtcgagaactctttttcatcgctttgatcttgcggagacagcggcctaaataaaccaaatttgaaatgaatgaacatttaaagtactgtacggaggacactactgtaccctcctgtccatgctctattcaaaagtagagtgccacgggaccgggacctggtagcggacaactgagtacaattgagtaccaaggtcccctgggactattcccgggtttcccaggcaaaaattcctgggttctcaacccgaaaaggtcccggtcccgggtttgcccaaaattcccggtcccgcggcactctattcaaaagtaaggcaaatctttttgcttacccaatactatcatgataacgacggaatatcgcttcattctgactgtccaaatcttgctctgtttccattgaacc

SEQ ID NO: 20192 - DNA, 1969 bp, Heterodera glycines
tctagagtcatctgaattaaaaaagtgcttcccacccttttttggtgcgtgggttatttatatttttaaaaaatgtggaatttaattataagtggaaatttaatttcccgcatcaattagggggcgcaataattgccggaaatgccaaaaattattggcggaaattttgtttcaattttgccacataaaaagatgtgatgcaatttgtttggaatttaattaagtgcagaagatttaagatatttttaaactattaattgaattgaaattatcaaatcaaataattatatattaattaaattaattaaataaataaattttgaaaatgtgaaaattgaccgctttttagaagcaaaatcaaattcataagcaatcttataaaacaataataatcgattatatatgtttaaatcctaaaatttgctttaaaaattcgttaaaatatctggtaaaagactaaaaaataaatatttttttgaaaatttttgtcaaaaaattgttgctccggcgaattttttattttcttaatatttagacatttaaaaaaaaattttttttttggtacaagcaaaaatatgtgcaaaacttggaataagttttttatttgctaaaaagtcactaattcttaaatcatgatgaaaaatgtgtttttcgggtctctctcgctaatttttagctaaaaaattatcaatcaatcaatggtaaaaataattaaatttggctgcttattcgagattttttttgatattttggcattaactcaattaatctgacttaccttttggttttgattgcggtttgttcaaataaataaataaataaataaaaatcccgaaattttttattattttaaatgaaaactttttttttaaatagattccatttaaaaaataaatggacacccttttaaaattaaaaataataatttaactaaagaaattcaaaatgtaatggattgttggttgtgactaaaaataaatattatatatattccatctttttaatggtgcaaattattataaaatgtaaattcatacgagcgacaaaagccggaagcgaagggagagggcgggggaggaagaggacatgcccgggggcaagggctttacagctttacctggcaaaaaaatcgccgacgcggtagggggggattagcggaacaaaaccaaacggggaagtgcaaacaaataattacacaaataggcgtgccaatgcccacctgttgatggatcgaatggtgccggatttgtgtcagcagaacaggtgaacagcacagagagaggtaattagcttttgttcagggttcattagagggaggctttagcctcatttggaagcattttgagtggcaatgattttgttgtaaatttttttgcgaggttgagggtggcttttgaaattttgaaaaaaaaatgttttcatgctaatttgctttctgttgggattggaacagattaaaattcgtgaaaaataaaaacaaagaaatgggataaaaacaaaaagcaaaaaatattacaaattttaattttttttttctcattcttaattaattttatgacgcattctctctcaattttttcccaattctccttgactcttctgcctgatctcgtactttttggtttttttatgattttgaaaaaaaaagaaatttttggagcaaatctgttcataaatcaggctaaaatccatcaaatttttcccgcggccgccactggaccaattttttcgggttttgcatcattttttcatgtttttatttaaatgtgaataattttcaattttttttaattttaaatttcccatgtttgatcaatattttttctaaatacaaatctccacgcaacaaataaataaaaatccacaattttttcttaattttgaaatttttacgtaaaattaccttaaattttcaagtttaaaaaaactcaggaatgtttgtcaaaaatagggttgaatgtatcaattt

SEQ ID NO: 20193 - DNA, 951 bp, Heterodera glycines
tataatgaatattcgtttataggaaatataaaattgtaaaaatgattttaaaaacaaatatatttaatgaatatacagtgttaacagatataatcatataattctctcatccgctttgatcagtttcgcccgtttctgttcattctgttgttgaacagtaccgagaatgttggtgatcaagaacaattgaaaacacagctcgtagccattttgatgggccaccatttgtctgatcagttccattgatcgttgttgatgatcaggaaattttgaagaaggaaaaaaaaaattaattgtataaattgcaagtataagaattaaaattaaaaagtcaaattattaatttccttgaatatataaaaattaaataaaagagaaataaaattttttattataattggaaaacaacattatacataaacaagatggataaattttataaaaaaataacaattttaaataggaaaataagaattgataaaaaatcaaaaattaaaatgaattttaatttttcatttatctgagtcagaaaaccctttaaccccgcttatttaaattatgcccacactttaccaagctgtgccaggacggagttcagttcggagcagtacaatgccaaccaatcgtcaaaatgaacttgttaccgtcgacaatcgcccaggccttacagtacctcaatcttggaggaattttcttcagactctttcgatttgtattgcatattttctttatgggaaagagaagaggcaaaaatcgagagatgaaattgaggagggaacctatcccgtggaaaagaaaaccatacaaaacaaagcctcaaaaaatcggaaaaggctaacacgtacgcactcaatcccgctaacggaaagatggccgtctccggaacaaaaaccgaccataccaggaaaaatgggcttaaaagtgagagtgttggcaatcattgaatggaac

SEQ ID NO: 20194 - DNA, 1473 bp, Heterodera glycines
  unsure (1)..(1473): unsure at all n locations
attaatcacaatttaatgagtgtgacgtgtttgcctggggcccggcgntgtcgcaaatgcattcgctgttccgtcggatgtgtcgcgttgcggcatccaacagaccaagagctggcaaaggacaaatcacaaactntaatggcacttttttcgtttgtcaccaaccctcaaaaaattttttattttaaccctttttaaggcaatttgaggcactgattattaattagtatttttacgccaaaaatgtttatgtaaaaattttgtaaaaattaaaaaattaagttccaaaaatcaggtagaaggttgacaaactagaaaaacccgtttttgctaacaattaacccatttcggcttcatttattctgccgattcgctcactcattatggccccatcccctcacattttgccaaggcatcatttgttatttttggttttatttcattcgttaattaaaaaattgactaaaaaataatggtcggctcacagcacagcaaattgtcataaaaccattcgaaacagtcgcgggagcgacccaaatttcgggaacgaccgttcgaataagttcagacggaaggtcaattagtcattgccgacagaagggatcgaacaaaaggaaaaacaagcacacaaccacttggccacacttgggacactaacagtacaattaaagaccattttttaccattttcgacttctgggaacgtcttcgactcaaaaacaataataaacaaaacggggcattattcgagcatgctccaccgtaacattcacaaatggattactgtgtttttaatttacccgaaatccctccgcttgtgtcatcgtaataatcgttgagcagtttgtccgggtcgcacaccaaagtggcatggtcactgccgcattcgaaccattcgcgcaatgagtcgggaaaagtatgaggggaaaatgccgaaaattttagaaatgaaaattattattaatatttttgaatttgaaaaacctttgttggaaatgagggcgaagattggggaagggaaaaaaggaaaaatgataaaattataacagaaaaaattggaaacatttgctaaatgagtcaatttttataattaaaatctttgaattaattttaatgaaaaaagaaatgaaataattattcaaaaaaaaacatttgcgacagaaaactcacctttttttacacttgctaaaagagctgtggaaaaataaatgtttatcttgcaaaaaacaataaatcagttgcaatccctcggggaaaaagtgggggggggggggggggaaataaataatgaaatccgcttgaggcgttgaaggattgtgtaaatttcctatggaaaaaattggaatgcccctaagaatgagagaggtgcagcagacaaagtttaaagtaaaaaaaaatgaaaaattaaatttaaacaaatcattttaacattaaattaattaatttattaattgcggatttgggttttattttt

SEQ ID NO: 20195 - DNA, 1542 bp, Heterodera glycines
  unsure (1)..(1542): unsure at all n locations
tttttgttttgtaaatttactcaaacacaaatttttctcatttctggacaaaatcgttaataaattacactcaaattttcacggcagcgcctttcgcggaccgccnggacaccaccttctccaanagttttttgaaaaagatgagccgcaaaaatttttatgtttgaggcgaggcgaacgaattgatgaatcacttttggcaaacatttagtccaatttatgaggcgcatacgccgaatcaaatgggcaaaccgccgattaatgagcccactctcatcaaaaccatggtgggatgaaccaaaagccaatcattggcctttcaaagcatttaaattcttcaaagcagtgacaagaaaaaaaatttaataattcgcaaatgggaaatttgcacaactgttgagcattgcttttataaatttgtttgtttttgtacacacactcctcaaaaaggcaaaacaacaaatgctaaagggggggggggtaattagggtattaattgcactgataagggcagcacagatcaaaaagttagcagaacaaccgacaacaaacaattaccaaattaggcagtaaattaaggaaggctaatgggttggacagcagaaaatggattggagcaaaacataaaaatgcctaaaatggaatggctaattggggggggggggtgatttagatccaagcaatgcgtggcaattaggaaatatttttaacagagagatcaactgacaaatgaaaatttaagcacgaaaattttttttaatttataaaagtctggtttcggcgatgattacatggtgaaattgtcattttaaaaaataaatttgattattcgattattagacatttaaaatcaaaaagaattcgctgtttgtctcttctgtgtcatacagggataactgattttgcatcaacacggtattttctgatgtccctatcttttcaaatcatacacagagaaagagaagcgaacccacgactttaaaaacggcgattcaaccactgagccaccactcgcagagaaagaacgtattaattgcactaaaaagaccgccttaaccaaccgagccaccttccgtagagaaaaagcgtattaattgccgcaaaacgagaaaaaaataaataaattgtcggctcagaaaccgttcgtctccacgacaccgctcgagacagccgcgggttcagccctattcgggcaacgaccgctcgagacggctcggaatgataaaatatccatcattgccgacaaagggaaacgaacccaagagaaagcaaacgaacgaccacttgaccacccgaataacatccaggcgaaatcagaataaatatgactgaatgcaaatttcgagatgcttacgcttttgcacaaaaatatatgggctgtacaaaaggacatgttaatccgtaacactggacgtattatggacattgaccctttttcttgattgatatcgaagaaaactatttgtaagacgcataaatctattngtccgaacatttagaatataaaattcatcaaagcgaaaaaaaaatcaatttcaaaac

SEQ ID NO: 20196 - DNA, 2420 bp, Heterodera glycines
ttggctttcgaccagggctggccgtgattgaatttccaatcacgaaaatccgtgagccgtgataacggggcttaaaaaaaaatccgtgacccgtgaaccgtgatcacggcaccccaaaatccccgtgatttccgtgatccgtgagccgtgatccgtgattataaaaaaaaattttctaatgattttttatttaaatttatttaaaaaacggaatttaatcgcgggaaaattcccaaaaaatgttttaaagaaaccaaaacatataaaccgctttttttgcggcgaccttttccaaaaaatgactaagtttacgatttttggcaattttttgaggaagattagagctttttgtagaaatctccaaggaaaattttttatttttaactaatttattaagaaaatttttcaaatttttcttaaatttaaccaaaaatctatttatgtagagaaaaaaaattcctctaatttgtaagctaacttttgatgctgaaaaaatcttttggaccaacatgctcagtccttcatgacgatctgaacaccctaaaagatactgaaagtcgggaaaattttagaaaaattcttagagggttgggaaaattttctgaaaattttgattaggcctgtcgttttaaatttaagcgacagagagaaaaaatagggtttttagcagtttatatgccaaaaatggtcatttttctgccattttggggtcaaaatttcaaaaatacggtaaaatggggtccgtctgccggtggtgccgacaggcgccgccgggaaaaattttgaaattttgagtgaatttgttaacagattttgtccaaaatatgtccaatcattggttatttattggtctatggacgttttaaaaaataaagaaaaataattttcaatgttatgaaatttcttgttaattaaatttcaattaaaattatcaaaacaaaatatataaattgtcctatcccaatggggaattgaacccaagggacagacaacgaaagacagaaggtttaaccaccagactacatatatatgtttacttgctaatttgtaagaagaaaagaaattatttatttttctcaaaaatttcttcacaccactttcctattttcgtctcaataaaaattccctatataaaatgccaatcacggatcaaaatcacggaaaatttgaaaaaatccgtgacccgtgatccgagatcacggcacccccaaaaccccgtgatttccgtgagccgtgatccgtgatcacggccagccctgctttcgacccccccccccctcgaccaacaagggatttttaatatttttgggttttatattatttttaaatttctttttttgtcaagaattttttagtttgtaaaacaatttaaacaattttcccttaactaacataaaaaatccaatctctagatataaaagcatatcttggaggtttttgagaataaatgcatatttggccatttttttggcaaattttcataagaaaaatgcgaaaaatacacccctaaggatcgacttttggaattttttaatacccccttaaaatcggaaaatttttaaatttttgtaagagcttttgaaataaaatttttctatataaaaatgtacttttgttttagcatataataaaaatttagaattttgaaattcaatattttttgtaattgtctaaaaaatgctccttagcccattgttttaaaagtcaattcttaatttatacacaatttttggcattgttgagggttaagagccatttttggcaatttttaaggcatattttagtgcatatttgggcatttttcgggtttttaggcatatttgagggatttttagtgcatattttatgcgcatatttggcattttttagtgcatacaacttataaccctaattttttcaacctcctcccacctgctgctgctttcaattcccaatttttttttttgccttgcttttcttcatttccactttcctgttgtttattttgcttattcttccatccctccttttacagtatcttgatcagtgttgccctgcctaataccatctccgtctaccgtaccgtgccgtcctccgtcgcgtgtcatgcctttggtcggcgcctcctccacctgctccttctcctcctccttcaactcctacttctccctccccccgcgtctgttcttcgtccatccccgcgcccgtcggcttttttaatgaaaataaaacctttatttttaattttatttaatttaaaaaaattcattaaagataatagtgcaataaataaaatatcctttcagttaaaaacaaattaattttgtctaaaactttatgagtaacttatttgccaaaatggataaaaaaataagaattttaaatcataaaatttttttgtggtaatgataattgaccttggcataaaaagcaaaataaaa

SEQ ID NO: 20197 - DNA, 2463 bp, Heterodera glycines
  unsure (1)..(2463): unsure at all n locations
tgcgaaggtcgtcatttctcaagatgggagaaagctcgtggcattctacacagcagcatatccattttccaatcacttctcctgccgattgtcattgatggactcgaattttcgtccagtgagcaaatgtacatgtgggccaaagcgagcgttttcggagacgaagaagcggcatctgcaattctgcggacgtcaaatccgaaggaatgcaaacgcattggatcgcgaattcggttgttcaacaccactgcttggagacgaataagcatattcgtcatgacctgtgctaactggcataagtataagcaaaatgaagacctgatgcgccatctcttcaattttggtcccgatgctgaatttgttgaatgtacagcaaatgacgtgtactggggtgcaggagtggcgctttcggatgttgaaaaaatccgcgacataaaccgatggcctggtaaaaatatccttggacggattctctcagccttgatgaagaaattcctgcgtaagaaatctggtgaaatgaacacaaaaaaataaataaaataaaaaataaataaatccaagattttttttaatattacatataataataataataatttaattataattatattaaatcctatatattttttcaaataacaccgcaataacaaataatttattacagaaatgtcggcaccaacagcaccaccaaatgttcgggacctgagcgaattcccgccgttggaaaagttaacattggaggatgtaaggaaaaagaacaaaattgcctcggcaagcccaagtggaaactcaaatatttctaaggaaacctgtaatagtgcaataagtgtggatttagttgcttcggcaagtcatataacttggggaggggaaaaagggaacattgggcaagaaaaaggggaaaagaatcaaaaattaaataaaaatgttgcttcggcaagccaaagagtgtctgaaaattttgcgaatcaaggatttgacaaaaacccggatgaaatggcagaagaaatgatggaagaattttcaagttttaatgtgggagaaaacgaaggaaaaattgttgaatacctggtttgccaagtagaagaaaatatagtgattggaggaaaattgaggacaatgacaacaaaggctggccacattttgtagcaatctcaaatgaggtggctgaaaaagcaagagagtttaaaaagaaattgcaaatgggagacatagttggagtgaaaaaatttgagtggaaaaatgattaccgatacttagcaaaaagagaaactgacaaaagtcatttcaacaaaatgtggtatgtgcaaaaaataaacagtcaagcaacagtcattgacctcggtcatataagatatgcaattctgagggaacatccgggtttggtcttaagaatcagagaaatggtctcaaatggtgtcacgaaaaagctttgtgctatcattatttctcctggtctgcagttgagttcgagatgttatcggcgtcagctttctgagttggaattggagtctctccaagaaggacagttgataaaagtttggactgcttttgttccagagcaaacattagtagaaaattcgttcatacttccacctcaaagccaatttcgactggggactgaaaagcagatagaggaaggcaaaggagttctctccattgtcggaaatcatgcgccgtggccataccaatcgaactctcgcaatgtcttctttccgcttttgccagagatgactttgccggaaattgagttgtcagaacaaatcatgacctcagcgattgcctacagttttgaagatgaggaaaagagaatagttgaaggcaaatttgaaggaagagcagaatggcagaacgacactttttggttgaggtttgctgaaattgacacagaaaaaaatgaaaaaattgaaagaagtttggaccgaagaagcgaatgtcatcttcagaactgcgttggatttgccgcactttgcttcgggctatgtcaagcaaattgacattgagcgaatcagagaggacggaaagccgaaattcaatttttggataatggccaaagtcacaaatgtccaagagagaaagtttcgtgatgttcatgcaaaattggaagcagcagaagaaggtggagtctttgttgtacacccgatcattccgattggagtgaaacacagaagagattgctttgcttctaatttgccatcaaaaattgcaaatttggaaacaaaacaagggaaaatgatgcgtgcggtattaggcagaactgaggagatcattgaggaaaatgtggaccaaaatgcttcggcaatacaaattaatcacgcattgatganaaagtaaatgaaaagcagcagcagacagcnaaacttttggtgagcaaggagtcgcactttgtttttcagcatgctcccaccggngtgtggcaaaacgtatggtgcccgcatttgtgcagcaattcttttgtcg

SEQ ID NO: 20198 - DNA, 1422 bp, Heterodera glycines
gatggatgcgcgtcgttttgtgtggactgttagcaaagaatgcagtgagagagtgataaatgagagtcagagagtgacgatgagcaaatgtaaagagatggggagagagggtttagagagagagagagagagagatagatagagagaattggagaaagagaaagagagtggagagagagagttggagggagggtgagagagagagagagagagagagaagagagatagttggggagagattataagagaaaaagaaagagagtgatattgagaaattttaataatttcccgtcaaaatcggttaagtacataataatttgaatataaatgatacagttttcattttaatggcttttctctttgtgttaattatcttgaaaacaaagaccgaaaatcttgtgcatattatgaaacaaaatccgtattaggtattttaattgctttaatttttcggttaaattttttatttagtccaattttatattttctttcattcaaatttaatcagattgccagtaattggctatttatggtccaaattgagcatttataattgttagtcagcatcgccggaccaaattttcaatttgaaaaatagtcataaaaattatttttatgaagaccaaaaaaacccagaggtctaaaacactcgagaattttcaaaaatttttccttctacagtatattaaaaaccaattaatttgctatattttacaaatcaactttttgtttggggaaggctaccgaaaattgggccttttcttttatcaatgatagcatggttatatgtttttcattatttgacatttgataccgtagggatttacgggaatttgttaaaaaagttttgggttcggattttttttcatgcatattatgacagtttatcatcatttttaatgtgaaatcttcaagggtaaaaggtttgttttacaatttttcaaaatacaatagacattaattaaatttcattgactatgaaaattctaatgaccctttttaagaatacataattaatccatcatcccaaattgttcctccatttgtaaatggtcgatcgatcaattttcaaggtttttgcaattttctgatcactcatttttggattcttcagttttaattcccaataaattttcattttttcattttttttctttctccgttaattttttaataacgccaaattgtttttttttgctatttttccgtcaatttttttccatcctttttttgaatattttcttcctttttcctttattttctcttttattttataatattttctaattatttctcttttattctcttcatttcgttggttttcttccttttcttcccatttttctccaaatttttcatcaaatgatttttgggttaattttttattttccgttttaatttgattgatttcaattttaaaat

SEQ ID NO: 20199 - DNA, 2421 bp, Heterodera glycines
  unsure (1)..(2421): unsure at all n locations
ttttcgggactcacattgacattggcataattatgatcattttgggggacaatgttgttattgacatcattataacgttggaagagtcggagaattcgagcatcagcatcacggtatttctttttcttttgtggagcggattctcccatgacacaccgcgaaatttcctgatcaatcgccttctgctcacatctgatcgtgtcaatgaagcatcaaatagtcggatgagtgcaattaaaaagccgctgaagtttgcgatggaatgcatcggcgaagttgttggtccgatcagcactatccaaggtgcgctgatgaacactccattcgtgtgggtggaacagaggcgccgtaattggaacattgaaacgaattctgcccatgtagttgtccggaaacctaaaaaaaaattcataaaattcgtcttcggacttaaccaattgaaaacgccattaagttgtggcggaatttgtgcttgaagagcattaaggccattttgaaggtggtgcacaggcaggaaggccaatgatgtgatcatcttagacttctcagcgaaggcaggatcagtgttgtaaaccttaatgagtttgaatgggaacggaataataaaaaaattctaaattacatgggtgaggcccagggcccttatttgcttctttgcaaaagtgccgtccgcgtaaatgtctttcatctggtgggtccaatctgccgtagacgctcttccaaaaatgagaatccttaatagtgtaaatgaccatcatttaacggtttaaacgataaatgtcttaccgttggggtccattctgtccgtgaatttgaaaaacgccagtgtccgccaacaggaattgctcctcgtcaatctcagtgcgcttataaacacgataggtattcggaatctccaactgctccaaattgagaggttcggctcgcggtgcattttcatcacggcgcaaacgtttgattacctgaaaaacagaaaaaataacaaaattgttttttttgggtatatccactcgtacgaaacggccgtacgaaaacggcctggcccgtttttaccatacccaaaatggtcaagttaatcagtttcgagagaagacgctcgatttttcgagcttatgggctccatttttatacagcgcttgtcagaaaaaggcagtacaaaaccattgttgcatgccctctagctgtgacaccgttcataaattttgacccatttcgaaacttaactcagattcaaacaaaaagtcgaaaaatctttccatttcatcgaatccctccgtacggccgccattcactttttaaagaaaatagtatttttttggggtcgcttatcacgaaaatggtattcattttggccatgaagtttatggggggggggggacacgcggacgaaccatggccaactgacgacgaccaactgaaccacctcgaccgcactcgtttctccgctgatgcgcagtcgaactgaaatgttccgctatggaagaacccaacagtatttttgtagcggcgctttgcattaaattaacgaatttttgttcgttttttttcatttgatcactttttctgatcagtttgggggccaaaaaagctgaaaatttacaatagagaattgacaattctctacacgataaatgtgattacttatagtttgaaatcttcccttgacagattttgtaaaattattgatttgcctatgatttttcattaagtaaggtacttttccgttttgggcatacacctcaaaatattaaaatacatccaatctaatagatcatgttaagggctttcgaatgataccaagaatattagattttatgacaatgaaaaaagttatggtccaaaacttgggctggcgccgaaacgaccgaaacgccctctcccttatgaggcgagggtctggggttcgaatccggttgactgcggattattttttatgctgtttgatgaaaaaatcatacatacatttattttgcaaaattagaactcaaattcgcaatcagcgcattctttttaaatttttagcattttttactgttattttgtttgtttttggaaaaaattggtgtcatacgattttcttaaaattccatttaggagacagggggattaatagagattgggaaaattagagaaaatacggtatttgtaagttaaatgtgaagctggaccgactctatcaattcatatttgcgttttcgaaaattttcagaaattttcaagctagaccctttcgatttttaattttatctttttaaaccagggttgccatctcacactctcttncccagtacatgcaagtacactatgggtcaagcaagagcccggaaattcaaatttgcggatcctgttgcaggattggaatcaaaaatttttgcagggccggatccggccggattaatctgcaaatctgcatcatgcatt

SEQ ID NO: 20200 - DNA, 2176 bp, Heterodera glycines
  unsure (1)..(2176): unsure at all n locations
ccggataacccccaaaaatatcatttattattttntttttttttctcttattaatatatttcnaaatccaactcatactgtttttcgcattcgatagcccttaaagtttctatatctacaggcaaaaaagtcaagaaaattttattgcttttcaaaaaagttatgaccaaaaatcgtaaaaaaaaaattcgtacatgactttttttcaatcttcatcaaattttttgttatcagtcgaattgattatttatttggggtaaagtaaaactccccgaaatctcatcatttgcaaaatattctcctttgtccaacccctcgagcccattggcaacagttgaagctgaacttgttcaaaattgttttaataaaatgtgattttcgtgtttctttcataaagtactatccgtaaaaaataggaaaaatcaaaaaaaatcagggctctctctattcatatacaaaaaatattcaccaattcccttttcatgactataaaaatcttttgtttaccgctttgactcattaaaaaaataaagtttccaacgcaattaattcttctgctcttttgtgtgacatcattcggaactcggccaaaattgtgctaattgctgccaaaaatgaaccgacggtaaaagaattttaaaagtcacaaattcgtcgtttatttgccctaatttactttcattatttcagttggatttgcaacgacgtttggatggacattttcccatcctttgaccgtcctcaactcggcctcaaaatggcacttctttcgccacgttcgatgcgttggtggacaaacatttcaatggcaaaagcgaattgactatttggagaccaatcgaaattagcaaggacaaaggaccagaaccgaaactatctgtgtggatggatgacaaatctttgccatttccattgcccgaccgtccgttgcccagcaaaatccgttttaagcaccttcagatgtggtaattaaaaatcagagctatcgcaataaaagcattcatcccatttttaggcacatcgatcactccgtcatcgcttttcttcgttcaaatcatcaaattttcgacaaaagaggcaccaatttatatttggcgattccatcatcacactctacgaatggccagccgatttgggatgtttttgttcgtgaaatttggcccattttttctgaaaacattcgccacttgcactttaccggtgatgatcatttggacaatttgcttcgtcgcacttcgccgacaattctcatcgatctcaaccaattgaattcaatccattcatttggtctgtcgcccgctgcgtttggtgatggttttgatgtgccaaattcaacaatttctgctggccaagcattgtccaaatggttgcactctccgagaaaagatggccaacccaagcgatttcgttgtggcagaaatttgaacgcacaagcggacttcgattgggtcaacagtttcaaggaggtgtggtgcggagggaggggggagcagggcaaaatgtcgccgcaaatttttcttttaattttaaaaaattattaaaaatttagttatctagcctaaatcaaaaaaaaaatcataaataaattcgaattttttttttattaaattcaaggaaatgtaaaaaagtttcaagtttttttttctgggaattctgcaattagttttattaacacttagtttctaaaatgagttgaaattttcatgaaaaagcggaaattttttatattgttttccatacattttttaggggggggtcgacccccccccccccccccccccccatcatctgtcacaaagggggctagcgaggggacgagaaatcaggaatcattaaggattgaacgggattacaactacatacaatattgatatcatataatacaggctgccgctcgtgtgagcacttctgattgctattgacactattgacgatgctcttattagtaatgaggacggtactataaaccctgaaatggttgccggtgctttgcttgatcgcgagaagcgagcagcaaccagcaatgtgcctttgcgagaagagagtgatagcgaagaagaatatcaaagaaaattggataacttttttttgaaatgagagattcagatgatcttctacttttcaaaaactaattgccaaacatttggaggcggagctgacaaactgagcaaagatg

SEQ ID NO: 20201 - DNA, 1105 bp, Heterodera glycines
gggataaattttctaaaaattcaacaaaaggactaactattatttcttcccgtgtatccaacaagagaagcatagaatgtcatttacggttcctgatttactcattaaaattccaaaagccgatttgacggatagaatttctaaaaattcaacaaaaggactaactattatttcttcccgtgtatccaacaagagaagcatagaatgtcatttacggttcctgatttactcattaaaattccaaaagccgattggacggatagaatttctaaaaattcaacaaaaggactaactattatttcttcccgtgtatccaacaagagaagcagagaatgtcatttacggttactgatttactcattaaaattccaaaagccgatttgacggataaaatttctaaaaattcaacaaaaggactaactattatttcttcccgtgtatccaacaagagaagcagagaatttcatttacggttactgatttactcattaaaattccaaaagccgatatgacggatagaatttctaaaaattcaacaaaaggactaacaattatttcttcccgtgtatccaacaagagaagcagagaatttcatttacggttcctgatttactcattaaaattccaaaagccgattggacggatagaatttctaaaaattcaacaaaaggactaactattatttcttcccgtgtatccaacaagagaagcatagaatgtcatttacggttactgatttactcattaaaattccaaaagccgatttgatggatagaatttctaaaaattcaacaaaaggactaactattatttcttcccgtgtatccaacaagagaagcatagaatgtcatttgtacgctttcgatggcgcacaaatgggaggggtaggaatttggcgagatgtgggggtgctgatgagttcagtggttggtagagggccggcgctgcttggtggtgctgggctttgagttgtggacgagtagtgcgagtcggcggggtgggggcggctggcgcaatggtgtccaagggagggactggttgtgccgaaattttgggggagcttagtaggatcaatcggggatggtggaattgctgggggtcaagt

SEQ ID NO: 20202 - DNA, 1460 bp, Heterodera glycines
aaattttatttaccgccatcacaaaaattttccacgcgtaacttttcgggtggcgcactcggccagcaaccatttgggaaaaattgaaaatgcgcacttccaattcacagaccaaatccaactcagccttctaatcgtttttaggggtcaatgataattagtaaaaagaattttttctttaaaaattaaaaagcatttttaattgacaattagagaccggacgggatcgggatcccgcgggatttcttcgggatcctgcaggattaaattcgggatcccgaccttggaatccgtcccgaacgattttttaaattcatcgggattgatcgggaccgggatttcatcgggatcccgaatcgagatccctcccgaccattttatcaatcccgcgggatcccgcgggattgaagtcacgataatttttggaaaaactcacattttttaaattaagaccttgaatttaaattaaaaatttgcttatttttctttaaaaatccgttaaaattccaaaaaattttcacggctctcaaaatacttgtgaaaattttcaaaatttgacgcaaaggttggccattttgtgaattaacaaaaattatttttttttaattccttaaagaatattttaaatcttattaggtagtttcatgcacaacaatctaagaattttgtctaaaaaattagattagaaattgttgtctacgtatttttccttcggtgcataacggcaccgccggactctaaaaatccttaattttcctgaaaaatttgctcaaaatcgctaaaaaaattggggtttttgggcaaaatctgttaacaaatcgcatcaaaaattacaaaattttttccgtcggtgcctatcggcaccggcggcctcatcccctaaagtttttgaaaaaattctcagcaaacaaaaattttaaaatgattttttgattcagattcgggatccctccgacccctgtcgtccggtctctattgacaatttgattaattacccattctttattttgtctgacactttccaagtcgtaaaatattattttttgcttgcagccaaatgtttgcttaatgcttgcgattagtacgcgaagtggtccgaaataagcgttgttggcggccgttacaaacacaaatttcgaattttcagggaatttgacctgtaaaatttaaattattattaaaatattaagtaaattatttttttaattattttgcttgaattttgaaaaatcaaaatgaaatattaataaaaaaagattagcaatgatagcagtcgaaatggattattaaataaaataaataaataattaaaacattagcattaggtttaaattatttaaatttaattgttttatttaatttttaatccatgcaccttaatcttttctttgattgcgtatttgtccgacaatttgtaccgttccaaaagccacgcaaatgaacagtcgaactttttgcca

SEQ ID NO: 20203 - DNA, 2303 bp, Heterodera glycines
aagttgtcatataaactaaaaagagaaaataaataaatttaattatttattatgtttaaaaataatgtaatttattatttttcatatgtcgttggtctctattattcttattattagggtatcaattattaggtgtcaaaacgcccaaaaaatccttttttcttctaatagtggcgattctatttttcagacacatcaaagggaagcttaatgggaggggggggggcttctattagaaggacacggtaattagttttagttggtacaaatggttgtgggtatttttgctggttttaatcacttttaaaccaaaagggcgaaattggaaaaatgaatttttgcctttttattagaatttggtttcggtggggaacttgccaatgaatgtcatattcatgatcagtgagtgatagaaaacccccgaaaagatgttaaaaatgaatggcatactgtaatgcaaactaaaaaacagtaatggaaacagaaattaacacgactcattgtcacttttgcagagattccctcattcgtccgtcccttctcacttcccaggacttggattggtttttacattacagaccatcgataagaaatacctaaaatatatgtttaatctactaaattgattgcatcatcctcttttacagaaatttacttctttttttagtagaatattaccacatatgttttggtcattcttttataaccaatggcttcgtttctcccagctaaagtttcatttgcttttgcacgatgaaaggctttttctgtttttggacgattttatgttggcttctgcgctgattacatttgtgactttcacattttttggaatgcgtgcttcttacggaagatatgcagctttgtctttcttttcaaaggtatttatcgctgtttggttttttcagccataaaattattattattttttcaattctaaacttttttctgatgttatttaattcaaatttgtcaggtcagattgctattccggcacggattggttggtttctccaggaaatgccttcttttgttttgccgactttcgctgtctgttggcagttgacaatacgttttcttcctcccgtcaatgccattgttctcctaatgttcattgcacattattttcagaggtagtaattggcaaatattattttcctggtatcttctgtcaaatccgttttaggtcattcgtttacccttttctgattaaaggagggaaagccattcctgcccctctcttctcgctgggcttcattttctgcacttggaacggcttaattcagggcttttatcatgcaaattgtgctgtttattcttccgaccatttttggactcttagcgctttgattggtttttttccattccaatttaaagtcactctccgtttcttcactttatttgtaggtttgccacttttcgctctcggaatgttcattaacattcaatccgaccaaatccttcgagacctcagaaaaccgaatgaaattggctacaaaattccacatggcgcaatgttcgaatttgtttcgtgtgcaaatttttttggtgaaattgtcgaatggtttggctacgcccttttcgcccaatcgcgagtcgcgtgggcattcgctcttttcaccgctgcgaatacaatgccacgagcgaaggaacaccacaggtcggagagaacggacggagctgacattgtaaaccaattctcttttcaggtggtatttcgagcacttttccgattacccgaagaaaagaagcgcagtcattccctttttatattaataaatttcatttgaacatgcaacgaattttaccaagggggggggagtacaaccaatgaattgttcgtaatttcaaaacagactttaattgacataaaaacacacttagttaaataaaatattgtaatcaataattgaattaatttttatttttttatgtcagtgcgttttttaatactttcgtccgttgtttcactcaatcctttttttttaatattaatgtcttaaggaaaaccctccttcgaacagtgtgttccgatgttgccagcaataaatcctgcaaattccgatgggattgttttagccgcgcttccgtaagtaattcttgtccgataaagatattttaacctgaataacataagtttttgggtaatactactgacgataccccctttttcgaaaaatcaaatattgaattctttttcgacaaaagggttttgagggtcggcgaatcagaatctgacattaatttcacctatgtcgaacccctgcacaagaagtcatgcaaaaattcaaattttgacttct

SEQ ID NO: 20204 - DNA, 1463 bp, Heterodera glycines
tgctatattatatttcattttgtctatttcttttcccagtattctctggcctattttagcgcatctcttcttttttataattacctctttttctcaaattttctgctgattccctcgtctctctctctctttctctctcgcgctctctttctctccctagcgctcgctttctctctctcgcgctctctctgtctctccctccctctcttcccctccccatctccaccttttctccccccccccccactatttctctcccttcctttccctctctctctgttttacccactgtctctctcccctgttatgtacccctctaccactccccctttttttcttctgcctcgtccaatgccatttatctcaatttcgtcatgcctacggcattttagcggtgtgtgcgtgccaccgtcggccggggcgaaagtgggagaaaaggtgggaggcggcacatgtgatgagtgatgacttcagcggctctcggtggtcggcaatctcacgaatccggcaaaaaaataaacaattatgccctaaataattgacaaagtggcatttccgcactccccccccccccaacaattagtgtgggtggataatctcctcccattttttgatggaattttaatcaaatttttcattaagaaccaaagattatacagtttttgcgggaaaagaaaattgatgtttgaaagggatttacagtttaataaaatgggattagcttaatgattttgtgagttttgcaaatttaattcaaattatggacaatgaattccatcattgttaaaaagcgtggaaaataacttattattttttattatttaatatattctaaatgattattttattattaaagaattctttttaattattatttttatcaaatattaagaattaataataaattaacgaaattaaaaatattaatttcctcccccgccaaatgaacaacaaaaatttgtttacatacaattcaatttgccattatctaaacctatttaaatattttaatacttttttttcaataattctttcatcaatataaatgtttttttttattaacttatcccatttaatttttttgatttataaaactatgactaattaattcaatttaaaaataaataataattattccacgaattcttatcatttgttgttaatcagcacaaattactacttgtatattcgccaatttccccatgacaaatgacgcaccaaaaaaaaagataatttgctgtttacaattaaatttttgccccaaaataattcgacaaaatcaatttaatttaattaaatttcaaaaatgcatgcatgggtttttcgcggttgttcccgcaatttctctcatccattttccccccaacgatgaacaaaaaatgtaaaaaatgttcataggaaatgggggggggggggggaatcgatcgggagaacacagagaaaccccccgtgggggacgaaaa

SEQ ID NO: 20205 - DNA, 1721 bp, Heterodera glycines
  unsure (1)..(1721): unsure at all n locations
ggacgaaaaataatgtgaaagaaagcgaaagcggcggcggatgtttttgatgattctgctgactaatgactgcgataatgatgatgatgcatcatcatctctcgtctttgtcgtcgtcgtcctgtggtcggtcggttggtcccctcccaaaaatttatttggcgaataaaccaaacncaacaaatttttgtgcttttatacttttttttttgtcgttatgcatttcccgaacttttcgacaaaattatttttttctcatttgtcagtttaattgaccgcaacaaattattttattttttatatttttatttggttaattgactcaatttgcaatttggatattaattttgagtaaaaatggagaaaggttccgcattttttgatataaatttggtttaaatttctcatttttagaatatacaaatattatttactcactttaaaaattataataaaatgaattttcatttgattccatttttggtcccattaaatttttgagatttgcttaactgtcctaattttcttcgcaaataaaatgccaaatttgggtttcgctaatgctaatttttttttttttttgcattttttaatttgggaaattcattttcattgaaagtgaataacgttcaaatttattttcttttagttttttgaaaaaataatgaaaatttccgtaaagatttagaatttcaaaaaaaaatccaaattcaatactttaaaaccaaatatataaaatttaaattaaacaaaaatatataatttgaaattgcaaaataaaattctatcaaatttgaaaaacggtttcaatttttctccattttccccgagggtatcatttttcagtgctatcatttcaaaaaaagaaatcggctattttgaaaaggtccaaagatcgacggaagaagcggctgctgcttttccttttttctgcttttctcttccttttttctttctccgcccgccgcataattttatttttgccaaaattttatttgcctcctttttttattcctcacaaggcattctaaaataacttcttttttcttaaatttagaaaaggtttattttcgattttttattatttcgataaataattttattaaaatacattaatttaatgaaaagaaattgtttaaattaaatttcaattaaaattatataaaatttccattatcactatttgcttttatattataaaaaattattaacatttaattatcaaatttaaaaaatatataatttaatacccttaatttgtttatgatttaaaaatttttttctataattaaattccaaaaaatttaaaaaattttattttaaaaaattttaaatattctcaaaattaattaagttttcctctcttttgcatgtgcattttaaaaatttattgcatcgcatcaaattgcataaatgtttttttctatttttgaaaatggaaaaattccgccattccgtcgtcactttggcattcattgccaattcgttttgtggtgggcctatgacgtgccgtcaaacccaacattatattactctacatcagcatcactatcatctttgttgttcctcctcctcttgttcctcatttgttccatgttggcacacattttttgccggcattcaaatgccaaaagtgactcaattttgaggttgaattttcctttttaattaaaattaaatgtattggagtatataattttttttaaataatatttttggca

SEQ ID NO: 20206 - DNA, 2314 bp, Heterodera glycines
  unsure (1)..(2314): unsure at all n locations
ataataaatntttttaaaaaatatttaataggctaaatttttaaatttttaaccatgtaaaaggtaatttcaaactgtttttagtttatttctatattttttaaaaagatcaaaatattttaagtaattttacattattttggattttttttttgggaaagttacaccctttttttgcggcgcgctttatccaaagagaatttgagaaactgtggggaaggaagggtccggcggtgccgatatgcgccgccgggaaaaattttgtaatttttaatgtaaattgttaacaaattttgtccaaaaaatggaaaatttagcgattttgagcaaattttcaagaaaattaagtttttttttgagtccggcggtgccgataggtgccgtcggaaaaaaaattgaaaatttctatgcaatttattaacataaattgtacaaaaattgctaattttttgaaaaaaaaactcaaaaaaattccgaaaaattccgacttttcatcaaaaatttcggaagtcggaagtcggaattccgaggccccaaaaattttcggaagtcggaattccgaggccccaaaaattttcggaagtcggaattccgaccccaaaaatgtcggaagtcggaattccatgccatccctgattcctttgtttcccaactctctcgcgctctcattcttttttctctgcattccatctctctctctctctcattcttttttctcttgcgttccatctctctctctctctctttctatttttctttctcctctctctctctcattcttttttctctgcattccatctctctctctctttctatcactctctgtctctctctttctttctatctctctttctctctctcattcttttttctcttgcgttccatctctctctctctctctttctatttttctttctcctctctctctctcattcttttttctctgcattccatctctctctctctctttctatcactctctgtctctctctttctttctacctctctttctctctctttttctttctttctctctccatatttatctctctctttatcctgtctctctctttctttctctctcaacaatatctgtccttctctggcgctctctctctctctctcaacgctctctatctccttttctcgccgcagggcctccgtttcccggacgcgtacgagcgcctgttcttcgacctgttcagcgggcgccagtacaattttgtgcgcgcagatgagctggagcacgcgtggcgaatattcacgccgttgctgaagcgcatagagggcgaccgggtcaagccggaacagtacgaatacggaaggtgggaatttgggggtttcagttttacaaatttattatatgccttcttttcccgcttcaaaggtagggtggtgaagtttttcaacgaaaatttaccggtcccgagttttgactccaagcaagcttttcgagaccgaaatttgctctcttgaccgaaactaacaaaaacgacttttctctaggtgacgctcgaattgactctcgactatttagggaaggaggtcttggagagaggaggggggggggggctgccgacacgaaaaatttaaaaaatttggaaaacaatttttttccttaataatttatgatgaccgtccctctcttaggcaatgattaattgagataattagtatttagaatatttactctaaaataatcttttctaattgttttagaattttaattttcaaaaaaaaatttttttttttttttttgatttacccatttcaaaaaaatatcggtccttcataataaggggcatctcataagaaacgacgactttttgcaaaaagccctggattttaatgagtcagtattaaaaattttaaatatatccctcccccccatccccattttgaagtcgtggcccgtcctccagcgatgcgctgatgcaaaagcacggctttgtcttcagcggcacttacaaatggccatcggtgaacccggcggcaaacgggccaaataaactctgatcggttgtgatcaattgaaactgattgattgattgtcttttcatacatttatccaaatgattaatttcacatttttccaacgaatttttttgtttttgttttgagaaaattgttcacacatttatcttctaaagccagtagcacttaactttttgtttttcctttttttgtttgtcatttctgttttattctcatatttttcacacaaaacaacagttcacattaatttgcacacagtttacatgtaataaaagtgatgaaaacgattcattttatatgactgaatttaaaaaattag

SEQ ID NO: 20207 - DNA, 1256 bp, Heterodera glycines
  unsure (1)..(1256): unsure at all n locations
cgtgggggtttccccgcgcaggttcgaatcctgccggctgcgaaatatttttgtgtttttttaacagttttttctcctcaattaacctttcattttcttttgaaaaaattaaaaatgatatatagaaattaatatttatttaaaaaatatttttctttttaatttttagttataattcaatttttttaatttcgttgccttttttcgcgaaattttttatttatattcgtttcaattgtctttttaaaaatgtatttagctaaaagcatgcttttcataacgcagtcgtgtccgagtggttaaggagacggacttgaaatccgttggggtatccccgcgcaggttcgaatcctgtcggctgcgattttttttcttaaattacgactaatattatttaaccttttttaatatataaacatacattaaaattagaggagtcaattaattttttagatgtaaaccgacaaaatttgatgcatttttcgttttcatttatactattttttttgtctatttttcaaaatttcccatagcaattctccctataaatgtacgaataattatttttttagtttatcgaaaaatgtgtctccattgtgaaagcggctgtttcaaagatgagaaggacggggtgcacaagtgttgtgacgatgcgtgtgccgcgggatgcaccggcgaaggcaccgaccaatgcattgtgagaattcattttcatttttgattttatttattggctttttgattttttgattgctcattttctctaatttgtttcagctttatttgtccctcttcttaggcgtgcaaaaagttcgagcaggacggccgctgtgtgacggagtgccgcggcttcgaccgctacgatccggcggagaagcgcatggacccgctgccggaagcggaccgacgcttcgcctacggtcggcactgtgtgccaacatgtccgccgggcgctctgtatgaaggagcgcactgtgtcacgcgctgttcacccggcaaataccgtaacgcgacggaccattgcgtactgtgccagggcgaatgcccaaagggtaagagcattgcgagaaggttattgtagtggaacaaaagataaagctataccatttatgctaattgtcaaattttgtaaaaaaataaaataaataattccgaaaaatttaatcaaaaatactaatgaaaaaattaatcattttatngtctaaatgacaaaaaatgataaagcgcattaaaaaactgacaaaatacttttaaat

SEQ ID NO: 20208 - DNA, 1154 bp, Heterodera glycines
aaataatttttcagtgatagaatctgctatcgaaacgacagaagtaagcccagtgaactgaaaatgaaaaaggaatggtaatcaaaaagatattcagttggatccattggtgatcattagagaccgcattttgaggcatattcctcgcattagttccgatatattaagcataaaaacgcattttccacttggtttgaagcttctacgttgacttttattatgccttttttgccgttttggtgccttttttggcgttttttccaaaaaagttccattaaaaatacaataaatcgggaaaatacacccctaagaaatgagttgaaaacttttcagaaaattcacccctaagaattgaaaaattttctcaaaaattgatcaccaaaatttcattttttttcttgataaaaaaatttttattaaaaattttccttattcgaataactattaaaaacacttagacaaaaactaagttttttgaataagttttacgtgttttgctccctaaaaatccttaataaaaaaattttaaatgctttttttcatgcctttttcgttttcgtgccttttcatgctttttttcaatttttttgttgccttttttctgcggtctctagtgatcatttgttaaattgtttgttttttaaatgaatttttcgtctgaaagatttattaatttgtatgtggcatcgattgttcgcggatgccaatgatcgttatgggaaagaataaaaagtcatggggatggatacgcttgaacagcaaaaacattatacaatatggtcaaaacgaccagaaaagtctttgggagaacaggaaaatattttaaataccattgaaacaataatttttaaaaaatattttccttttcgtcatcactgagttcaaataatttgtgggattaaggaaaacatatttgttcaattctaatcaatgtttattttacatagaatctatcaattaagtgatcaatcaagagttatctctgctgtttaaatgcgtcaattggttgcactttaattgttgccactttgttgttgttgttccttcgtccgttgacaaaatatttactcataaggggtagaaactcacattttttgtgcataattttgcgcaaaaggaggatgcccataacaaaagcctaaaaatgttaattt

SEQ ID NO: 20209 - DNA, 915 bp, Heterodera glycines
  unsure (1)..(915): unsure at all n locations
aaaagtttctcctcataaaggggtttagtaacgataccatgaatatctaatattggacgggaaaaccctaaaagagctcaatgagccgaggcgggcactcctaagtttttaaaagggaaaaaccagataaatctgaaagcattacaaagtccttgatgaattacatttaaaaatccaagacaaaagtcaagaccgaaagcatttgattagaaacagcttcttctcaacatccccataagttgcctttgggatggtaagtctatgacctattcccacagagtaagagttcctgaaacattggacaattcaaaaatgacttatttctaccgtatttcaagcgaaaatgatagaaaattgactaattttatggtactcaattttgaaaccctatgacgctctgcgggtattagttctgtctttttgtatattgtagagaattttatcctctttctgataggcctactctaatttttcataaaaattttcccaaccgcctaggaattgttttcgaaaattttcccgattttcagtgtattttgggactcccgatcaccatcagagagtgatctgatcatgttggtccaaaagacttttttgatcacatcaaaagttagcctagcaggaattttttcagaattcttggcgcccacaaaacattgaactctcattaactaaaaatttgtttccatacttttgcaccgccaaaaattggtcactttggttgagcacccgtgacttttttatgaattaggtgatcggaatgtctttttccatttactagagtaatattaagggcttattctggcactgagaagatttctattcaaacgctcacctcttggaaaaccggtttcagaaaaattcttctttttgnttccatattttgcctgactgtatcacctttcacttttgatt

SEQ ID NO: 20210 - DNA, 2019 bp, Heterodera glycines
ttttctgtaaccgctcagaagattttcgtttatccataagcaataacaataatttaatgtaacaaattgatcaaaaccgtaaataaaataagaaaaagtatcgctaaaaagaaaacattaaataaattcacttcaaatcatcattcattgaaacgaattcttttaattgattaaaaaactgtaatcctttccctctttttacctttggtaaagtttcttcattactttggaaacgccattccatttttacacgtcattcaatttatattatgtatttgattagagaaatgtttaaggaaatttaagcttttgcattcttttcaaatttactttgacttcaataaagaagaaaaatggcttcatctggctttagcgtctatggtaaaagttctttcaaaagttgtagctttgagcacccttagaactgaatccaactgcaataccatttacggaatttcagtctatgtttacgtaggagcttttttgtacatgggtttttctggacataaataatcgacagagcgtcttaaatcgcaaaatcgatggagaaaatgaaagcggcagaaaattatcgatgtgtcggtctaaattatacaccgaaagctaccaccaccaccacaaatcggtgtgaatgatgtgtggttaaagaaagctgcgcagttaattgggaagaaggtaggtgcatgtgtgtacatgtggttggattgattgagacctcaaagtcttgtttagttgcatttaacatgagatttttcatttttatccgatcaatccatcataacgcgcattcactaacggattcgtagcgctttcggtccggctaccacatcaatttgttctctgagtgataggagtctaacaaacgcataaattgaacgtacaaaagtgcaatttatttagttggcaacattccgtacaacgcaaccgaagcggacattggcaatttgtttagtcagtgcggagtggtcaccaatgttcggtaaatattttgagttggttttgatcgtctattattgcattttttaagcattgtgtacgaccgcgagaccaatcgcccaaagggctttggcttctgtgaattccaggtgattgcatctttcaattgttggtcatgttaagccctctattcatttaggaccaacaaggagctcagaatgcggttacaaatctgaacggagccgagctcaatgggcgtgcgctgcgtgtcaattggaccaacaaataagaaggttgtgcttgaactggacggatgatgatggatggattgtcatttttgaggatcgttttgacaattttcatttttctttgttgattggttttttgaaataaaggaatggttcgtttcacttagttttgttatttcctttgttgtagttctaaacaaactatcgaactgaaaagcaagacaaatttacgagctatctgtgtacgggtgcacacatcgagttaaattttaaaaaccatactgtgtgtttaaacaacatttaggttaaattcaattaaaatggtacgtttaatttcatgtaagagagctgtctcgtttagggactgacaaagatactcaaattgtcgatcgcaattaggcatttttctgtgacgttttactccaatattatttttttggatttagagtggttttttggttattcatattttaatcttcttcatcagttttattgggctttcatttagcactgaaagcaatgatacgacgcttgttatcgagtttattcgttttatttctttttgtcaattttgcctcatcatattttattcacattgatgcaaatgaagagcagtgcttctttgaccgtgttacatccggcactaaaatggtaattccaacaaaaaaagatttggcgttgggaatatgagagtctcatttcgttagaattaattctgactgtttatgtgaaagcccaaaattcgaaaaattccactataccaattaacttcactttttagggattgatgttcgaagtttccgagggaggctttttagacatcgatgttaaggtt

SEQ ID NO: 20211 - DNA, 3048 bp, Heterodera glycines
  unsure (1)..(3048): unsure at all n locations
cgcaaaaaaataaaaaattttcaaaatttttaagaaaattagaaattattttagcttttttgaaaatctaaccattaataaaaactaaatttgctgccttttaagaaaaaaatcaagaaaaaacttgaaaaaaaaattttttccatgaatttcttaacaaaaaaattttttttttaaatttttctaggtaactaaaaaatttttgattttttttaaattaaaaaaaattatgcgacgacattatgtccggcgacgttttgtcctgctctctgaatgatcagtcataacaatgtatttgtttcggacagtttcaaacacaaaagatcaaacgcaccacgcaaattggtcgccgacagataaatgaaagcggccagcgatggaagccaacgatggtaactgatccaaatccgctccccaaaaagtcgcaatacgcaatcggacattctgtcatagacccactgaatttgctcatcgtcccgtcgttgggcagtaataagctcagatgcatcagcgtcagcggaaaaatatgacattttttgctactttttgggtaaagttaaaagatagaaaatccgaatttaaataaaaaaaaatttaaaataataaaaatcaccgaatacatttcaattggcgaaagagaggagattcacgaacacgataaaagatgaagcaaaaatcaggggcattgtaaagcgatgaaacaataaaaaagagataaatgagttttagaagaaataccattcaaatataacaaaattcaaagtggtaaaataaataaataaaaatatggcaagctctgaaatggttttgtgtgacttaacgcaacttcatatattgcgactcgcccctttcattttgaatttcgctgcgcgtcgtttgcccgtcgcttccctttaaaagttgggttttaaaaaacaaattcatttgatgctctgatcatgcatttgagtgtgtgttgtcctactttgtactcaatgttccattcgtaccaacacccgtcactgtcaattttgcgatgaatgttgaaagtcacagttgtggtgtcccgaaaatggaaaagtcgacgaagcggaaaaagagcagggaacctaaaatctattcacaatcagtgccatttgggtaataatcaatttttaaagcaaaagacggtcgaaaatgacagactgacggaccaagagtgcatattctccgtaaatcgcaacggatgagtgctcagacaaatgtccttgaaaagattcacttcaaaatgggccgaaaagcccatcagctgaaaaacagaagcgaaatagtaagaaaaaggagacttcctcagtattgctactcacttcacaattgggcggcaactcaaaatgaactttcgattgtcgagaattcgaagacccctggaaatggatagtcacaattagtccaaaaggaattcgaattgtgtcgacctctttattagggtgggtaaagcgaaaacaaggctccacatttccggccaagtaacaaaactgatccatgcacacgacgtaagaacggtcgaacgcacagccaaaaactctaaaaggaaatcaaaacataagcgaatattctgataggtaactgactttttcgatcgtcccacgctttgttcctcacttttgcattggtcgagcgcggcgacactctgatgaaggtgaagcgattggatgggagctgaaattgaaggaaatgcaaattgagagacaaacgaatggtcaaactaatgaaattggtgtatgtttggggaatgcaaatggttcccggcttgagaatgggcgaaacgccgtcgagacattccgggcacaattcattatcaccgaaagagccgagcaattcactgagaaaggacggacgaatgaaaagggagggacgaagagaagaaaaagactgtgcctgatgatcaaatcgggcctttccaggactttggaatcgacaaaagtggacaaagaacgcatgtcactgtgcacaatttggacggagttggcccacctgcccaaaaacagcgtcatctcttgcaattgggtagctaacccacctttcttcgttgcagtatttcaggcttaaaattgcgttgcgatttttttccacagcaatcagtttcattttccaattctaaagtgaatgaatgacacttgaatttcaataccatttcaaatgtacgaggcagcattgttcgctgtgctttttctccctctccaattcgtccctggcgtttatggctgcttggaccaatggacccctcccggcgcccaacacaaaaacgacaatccctccactttccttaacaaaaatcaacaattcgctaattctatcattatgtgatcaccatttgtcgttgacttaattccaataacgcggctttgattgccatctggtaatgttcgtacttggcgttgtcctgttcaaacgtctgataaacggcggagtccaaattgtcagaaagcggttgcaagggcgtctgaaggaaaggttcagaaatttaggaaaggaaaataataatccgaagcacctgtaacaggtcgaaataaccagacatcggattttcacttttgcatatgttttcattcgacaagatgagttgttttgtggagaggaccatctgtttcaactcacaattagcgaagtgatcagactgaacggacgacgagaaaaggacgacactttgacgacagtttgacaaaaggtaattgatcagcatacgatggacactgtttaatgggattaaaattaatgaaattaaaaatcaaatgcaaactttggaagtgttggagacgaagtattttcatcggaaatgaacagcgaatggtccaaaaaaagtgaggaaatctaaagggagaagggatggaaatgatagtgtggataaacggggagagtagagagggcaccggttcagcaagccaccggcgaagggacaaattgttgtgcaagtcgaactccgagtcgaggtcagcggtaagcgaaagtgcgacggacaagcatgacgaattggcacagaagagggcggaaatcgcgccatatcgtccanaatgtcccacgaccagacct

SEQ ID NO: 20212 - DNA, 2205 bp, Heterodera glycines
  unsure (1)..(2205): unsure at all n locations
tttccatttatttcaatcggctagtgctttaaggttttctgttttgactttgcttttttttccatttattccaatcgaccacgttaattcattctctatacatttagtgtcttatttcatgaaattatattaatttaattttaaataaagaggcaaatttttacagaaaataaatagacgctgactaattagctaacatttataaagaaagtagaaatttgattaaatgcatatacaatatacaaaatattacttttttaaatttgtataaagttcctattttgtctttgactttgcttctttttccatttatttcaatcggctagtgctttaaggttttgtctttgactttgcttttttttccatttatttcaatcggctagtgctttaaggttttgtctttgactttgcttttttgtccatttatttcaatcggctagtgctttaaggttttgtgttttgactttgcttttttttccatttatttcaatcggctagtgctttaaggttttgtctttgactttgcttcggctagtgctttaaggttttgtctttgactttgctttttttccatttatttcaatcggctagtgctttaaggtttgtctttgactttgcttttttgtccatttatttcaatcggctagtgctttaaggtttgtctttgactttgctttttttccatttatttcaatcggctagtgctttaaggttttgtgttttgactttgcttttttttccatttattccaatcgaccacgttaattcattctctatacatttagtgtcttatttcatgaaattatattaatttaattttaaataaagaggcaaatttttacagaaaataaatagacgctgactaattagctaacatttataaagaaagtagaaatttgattaaatgcatatacaaaatattacttttttaaatttgtataaagttcctagtcgtatgtgctttgcgttggttaattggcgtgggtgagtgtggtggttgggccgtttttgcgatattgtggctggaaaaaagaagcgatttcgctgtggggagcgcggccgtctgggtttaagtgcttgcttgcgcttgtgctcggcattgaacggtgatggctgctgctggggtgccacctttgtcgtggcctcagtttctccagcgattggcagctgtcgaaatgaataaaacatgcagctcgtctgtgtgttaaagaaatttggcgagttaattgacttgtgtaaatgttgcctaaggcacaaatgctgtggggaactcagcactggggatgctgaacctaaagttggtggtggtgttggtatacgagtgagtggcgtattgccatggttgacaagccctatgagttcgtggatcggaactccttgcctggggaccagtgtgcttgcattcgaaaaaacacgagacataagcgcccgaaggcctttggcctgaggaagtgtcctaaccgggaaatccggagtgctcgtgtgagtgcctgtgcactgccctcggagctgtgtccagcggcgagatggttcttcccaagtccgggaagctcggatgcctggccagcgctgtgtcattaccacttgctcggtcgccttcgccgcccatgcgcacgcttgcgctgaacggagttgtttctgctgaaactatccgtctttacaagacggctgtaatagcggcgcttggcaacgctcgctagcagctatctggttgatcctgcctgaactgatgtgttcatttcaaagattaagccatgcatgtgtaagtttaacctgccagacagggaaactgcgtacggctcattacaccagctataatttacttgaccttgacttcttacttggataactgtggtaattctagagctaatacatgcaccaaagctccaatctccccagagcggagcgcatttgttcgccacaaaaccaagcgccctccgggcgtccagtgttgactcagaacaactaagctgatcgcacggtcttgtaccggcgacgtgtctttcaagtgtctgccttatcaactttcgatggtagtgtatctgactaccatggtgatgacgggtaacggaggataagggttcgactccggagaaggggcctgagaaatggccactacgtctaaggatggcagcaggcgcgcaaattacccactctncacgcgaggaggtagtgacgagaaataacgagaccgatctcttatga

SEQ ID NO: 20213 - DNA, 2125 bp, Heterodera glycines
  unsure (1)..(2125): unsure at all n locations
actaaaatccccccccccnncccgaatgtaaaaaatttccagtaaaatttggcatttttttaaaaaattttaacaaaatgcattaaaatttaaaaaattttcggggcggtggcgcctgtcagcaccgcctggccctcatttgaccttagtttattgaaatgtaaaccccaaaaattgcaaaaactagacctttttggggcgaaaggcgggctacaaatcctattttttccttttaggcgctgtgattttaaaaatcacgctggaaaaatttttttggcccgaagagcaaaaaaaagctcttcggctgctgcccctcccattacgattttattatatttacatattttttcaaatttaaaaaactttataaaataaatttttttttggaaacaatggaatcatgattttctcaaatttatattctcataaaattcttattattctgcataatttcgtttcatacgagctttggaaaaagcgatgaaaacgttgctaagctcttttatgggaattttcacacatgcttcaaccagcgagggcaaattgtattttttggctaaaattataatttaaaaataattattagatttttttgaccggcataaagcacgtcgatggcatttttgccattcactccgctcaaatcatcggtataaatgaagctcaacatcgttttgaatgcttcaacatccacatccgggatctcaacgggattatttccctcttttagagaggctaaaactgttttgtattttaatttaaaaatgtaattttatctaaactctttttgccgggttctggagttgccaaaacgggaaattcttcgtcaaatcggaacattgcgtcgaacacatcggaagcaactctcaaaattggtttatgtgctggcaaaagctttaaatttaaaaagttaaaagaattaattttaaaatggaaagaagactttaaaaaactaaaattattattattaatagattataaaatggcaaaatttaataaagttaaattaaaaatgtaatttaaataaaacccgcctcttgctcatcgccttgtccgaccaaaaagtgcacatccgcatcaacacccgtgctcaacaaacggttcatccggtccgacaatttgtccatattcaaaaaaacaaataattaacggttgaaattttcacgacgaattaaaagagttttttaactttttaataattttttcgaaaattaatctttttctgagccatatattgtacaatatgcaaataaaatcaagctaaaaacattagtgtatttcatgatttttcatatatatttacctgttcggatttatattttttgatgttattttttgcgaatacatatgaaacaccatgaaataaactcaatatattcagagacagtcaaaataatcgatttaaattacgccagttaccgtatatactctttttatatgccagtctccattaatctgccggtctccaattatatacccccttctgagaaggttgaaaaataatctaccagtctccatttatgtgccagggggggggggaaatagaattatttaataatttatttggcacattttccaaaaaaaaattaaactcaattcaacagtaagaggggctaataaataaggaaccgacttttagtgacgaaaaatcccgaaatagttaactaaaatagtgacgaaaaagtgccaaaatagtgacaaaatagtgaaaaaagtccaaaatagtgacgaatagtgacataattttcagccaaaaattgagcaaaaaaaatatttattcactgattgcagttacaaatgaggtgcatccctttcttacattttttagcaaatattgaaatttttaaaccaaaaattttgtaagaaaaaaatttgggggaaaaatttttatgaaaattttccaattctaactggtattttttgaaaaatttttaggtcgattcttaggggtgtatttaaaaaaaattagggcgattcttaggggtgtatttttttgtttttattgcatttttgttaaggattttccaaaaaatgtcgaaaaagtgaaaaaatagtgacaaaacgccaaaataatgaattttcactattttagtgacaaagcgccaaaatagtgatttctagtgac

SEQ ID NO: 20214 - DNA, 1834 bp, Heterodera glycines
attttgcaaaatcattgattttatctatgatttatttttatcaagtacttgttttttttccaaaattttaagtaattagtcgggcgtaaaagacacacgcacagatgttgtagagctcaaaatgagcatctgaatgagctattgaatgtctggaaaagtcaaatttttagttatttacgattttttgaaatgtaattactagctcttgagggtcatatgagatgggggtggagtttgagcccgcttggctgcagttattttttttattaattcaccggaaataaaatttttacgataatttttttttcaaaaaagtcaagtacttgataaaaattacatgaacaaagccaacgtactgtcttttttgacaaggctcaacttttgttaaaggcgacccatttaaactttgtatcattcattcaatagcccgtaggattctctaattgcattcattaattcaagaaaatttgtttttcaattatgacctaaaattaaaattttcatccatcttttttttcaaacttgatgttgtttttacggcaattgtgaagattattggtcccacaaaaaaaaagaaaaaaaaataataaaaaaaccattttaggggttatttgatgcgctgacaaatgagcacgaatatgaaatccatttttgactttgtttcgaaccccaaaccctgattcgaacaattttttaatttatttttttgcttaaaaataaattattttttaaaagtcatctaaataaaagtcttccctgaggttttcaaggtcgctgatcacgaataaggtatccatttcgaaccccggaccagatttcgaacaaagtcgaaaatttaaattttttatttttactttatgtatgttcgaatctacataaaatgacttatttttgctgctaaaattacctgtgatttattttctgctagttttaatcaattttagaataaaagtgcgaaatcgaaaaattgaattatcgactttttgttcgtattcgggtgttcgaaattggtcgaaatggatgtcatattcgtgctcagcgcatcaaataacccctaaaatgtgtttttttggttttttattcttttttttgtgagaccaataatcttaacaattgccgaaatatggggagagagaggcacctgccgatatcgaatccgcaataatgttgcagcggatcactataaatccctaaaaccgaattccgttcttttttgacatcaaaatttgggctgacaatagctgacgcccctctttaactgtcgtgctttttcgccgccagaagcatccgttccaaagggcagcagaaacgacggcactgtgccaattccaaacgaaaggcgacaccgaaggaaaagccaaagacagcgcatttaaatggatcgtatctgctggcggtggatgattgtccttaaatgtgttcattcataagtaaggttggacggacattcacgcgaaaatggcattaaatgcccggggcaatgcctttttatttgccatctctgaaatgcttctcacaaattcattcatttttcgacctaaattttaccgactttcaattttatgtgtaaattatttaaataatttttctttgtttaaaatgaggaaaattcgcgtacaatgacagcgcattcgatggacaaatgataaagaatgaatgaatgaatgactaaagagggggattaatgccccgaggggcgttggcccctaagcctttttcactgctgctgaactcgccttcgcctttcttcaacactcaaaatgcttttccgtcgacgagagaatgtgccaaaaattatttacctttcgaaacgaaaagcaccgaaagtgaattt

SEQ ID NO: 20215 - DNA, 1329 bp, Heterodera glycines
  unsure (1)..(1329): unsure at all n locations
agtcatcgttggcaaagcccccgggttccaactgctccattaagcgacgcatgnnncngnagcngnnacngcacagccaccttaaacaccngccggangccacgcaggcgccnnagcgaaggcancggcggcaaagcccccgggagccaactgctcacgggagccacgcaaggaacggnagccgaaacggcacagccaaccgaaacaccngcaggaagccacgcaggcncccnngcgccggtagctgctagtgcacagccaatagagactcattccccgaatgccacgcatgcgcctttagcgaaacgatcgttggcaaagcccccgggttccaactgctgcacgggtgccacgcatgttccggtagctgctactgcacagccaaccgaaactcctgccggatgccacgcatgcgcctttgcgaagtcatcgttggcaaagcccccgggttccaactgctcacgggtgccacgcatgtttcggtagctggtactgcacagccaaccgaaactcctgccggatgccacgtatgttcctttgcgccggtagctgctagtgcacagccaatagagactcattccccgaatgccacgcatgcgcctttagcgaaacgatcgttggcaaagccaccgggttccaactgctgcacgggtgtgacgcatgttccggtagctgctactgcacagccaaccgaaactcctgccggatgccacgcatgcgcctttgcgaagtcatcgttggcaaagcccccgggttccaactgctcacgggtgccacgcatgtttcggtagctggtactgcacagccaaccgaaactcctgccggatgccacgcatgcgcctttgcgccggtagctgctagtgcacagccaatagagactcatttcccgaatgccacgcatgcgcctttgcgaagccatcgttcgcaaagccctcgggattgccacgcatgcgcctttgcgaagtcatcgttggcaaagcccccgggttccaactgctcacgggtgccacgcatgtttcggtagctggtactgcacagccaacagagcctcattccccgaatgccacgcatgcccattcgcaaagcccccgggttccaacagctgcacgggtgccacgcatgttccggtagctgctgctgcacgagcacgtgttgggtcgaaggacaaaatgacaaaaagtgcaaaatttgctaagttgactaaatccactcataacttttctcagacgcaaccaaattaaaacttaataaaattttttgaaatttgcaggctaatagagaactcttagggctaaagagtgatacccaagatttaaaatttggttgcgt

SEQ ID NO: 20216 - DNA, 898 bp, Heterodera glycines
catcgttggcaaagcccccggggttccaactgctcacgggtgccacgcatgtttcggtagctgttactgcacagccaaccgaaactcctgccggatgccacgtatgttcctttgcgccggtagctgctagtgcacagccaatagagactcattccccgaatgccacgcatgcgcctttagcgaaacgatcgttggcaaagcccccgggttccaactgctgcacgggtgtcacgcatgttccggtagctgctactgcacagccaaccgaaactcctgccggatgccacgcatgcgcctttgcgaagtcatcgttggcaaagcccccgggttccaactgctgcacgggtgccacgcatgttccggtagctgctactgcacagccaaccgaaactcctgccggatgccacgcatgcgcctttgcgaagtcatcgttggcaaagcccccgggttccaactgctcacgggtgccacgcatgtttctgtagctgttactgcacagccaaccgaaactcctgccggatgccacgcatgctcctttgcgccggtagctgctagtgcacagccaatagagactcattccccgaatgccacgcatgcgcctttagcgaaacgatcgttggcaaagcccccgggttccaactgctgcacgggtgccacgcatgttccggtagctgctactgcacgagccaaccgaaactcctgccggatgccacgcgatgcgcctttgcgaactcatcgttggcaaagcccccgggttccaactgctcacgggtgccacgcgatgtttcggtagctgttactgcacggccaaccgaaactcctgcgggatgccacgcgtgctcctttgcgccggtagctgctagtgcacggcccaatagagactcattccccgaatgcc

SEQ ID NO: 20217 - DNA, 2140 bp, Heterodera glycines
tccgttaatcattgaattcactcgccttcgtcaactcgaaaagtggtccactgcaatttgtgggcttccgtcgaatgtcttcgcgcgagtgccatcccttgcctaaatgaatagataatttgtgccacaaaaaagtgccaaagtgcgtaactgtgattcataatggcccacgtgccgtcctctgtccccactttggtgttaggatgtccgtcaaattcaccatggaccccgcgtacaaattgggcactgccctcctccaaatggtccgcctgttcccaacttggcaccaacggccaatcctaaaatgcccttacaaattaggggctttttgatctctgcgatttgcccatccgttcgaattgttctgtccctttttgtcttcccgtgcctgaaacatcgccacgtagtctttttggaagtgcatttgctgctgctcgccatccttcggtagcacaacaaatgcgcccactattccatcgctttggtgccccacggggaaattgccacggtaaaaatgggagccaaccgaatgggcggtgaagcgaagctcgaaactgaattttagaatcagaatctcgtgaatgaaatgcaatttgaattgaagcatcgtttttatgggataaaattcactcggatcggacagcgatcggacattgctggaggggagcaacgccgtcgaggaaccaattgttgttcattgtttgtccatggaaatggatggtcagactttggagaagaaggcggtttttgattcggatcaacacttcagacccatctttgaccaccaaagttgggccagggctaaagcgaaaagcgatgatcgaatcagtaaaaaatgctgatcagatcagtctctgtgccaatcgacagcaaggatcattggctgggccacctctttccgtttacggcattcagccatttgtgccgtccattgaactgaatcaggtctggcattgttcgctccgcactcagtgccaacttgcgcagcactaaagaccgattcgtttggcattggtgcggcgcgggcggagaaacggacaaaagttggcgatgttcgaggcacggacgcaattgactcttctctctctccgtccaaagcatctgaacaaacgcaaaaatggctttttaaatgacaaattgtccaatggcacaaagtttgcccctttttcttttttgtttttcttttgtttttgttaattttctccgacctttttcggctcgtagtcgttcactgacaaatcgccatggtcattctcaacactcatgctcagttttggctcgacactcagctcaaattcgaacaaaccctacgatggattgggcgaaaatgcaaaaaaaaggggggggggaaagcaaacatttggcgaagttggaccaattcggaggggcaattcgtagagggaccaaccaaaggcagaaaaagtgaaaaaagtggcaaaaaggaaaattaaaaaggaagggaaaggcatttgacgaaaaataggcacaatttagaatattagcgaataaaaataaaataattagcaaaataaacgaattaaaaatggggggggggaaatgaacggagaaaaaacggacgaaaatataaacaaataaaagggaatggggaagagggaggggggatactcataacattttcggaattccagcagaatgccgaaaacttaaaaatgagaaaaaaaaataaaaattaaaagaaaataattcaaaaatggaaattcacaaattaaaatgacaatttaaacacttcttttttgggcttagaattcacttaaaagtgagcaaataaaaggcaaaaggcgcacacttaggaggaaagggcgacctgaaaaagtgactttccaaaaagaaaaaaagacattaaaaaacgaacttttcttttataaaatttgattttaattgaccaatggacaaaaaatgagagaatttgataaaatgatgaagtgaatttgaagtgattaattatcgaaaaaggcgaagcgacgagtgatcactcgttgggaacatttgactgatcagagcaaatgccaattgtcgttctgctgaattcgaatgccattgagcgaatttggcgccagaggcgaaaagcgaactccgcagtgtttaacaaaataggaaagtcgtgccatcgatgattatc

SEQ ID NO: 20218 - DNA, 2673 bp, Heterodera glycines
atgtggtgccgagcgggaatagaggaggagggtgcctgtaaagcatgaaacggcggaagaagcagcggcggcggccacgttatgaagcagcgcagcagacgcagcagcagcagacgggaaaagagaagaacaagcggacgaagcgggcagagaagctgacgaagaaacgacggcattggaagaggcggaggaaggacactgaagccgccgggcatgaagcaatgaaagccaggaagacaacagtgctgaaggaacggcaccggaagtgccatcaaatccggcaccaacggaggaagaagaagcggtagcagaagtgccacaaaaactgttgcccgaatgcaacaatgttgacagatggccacatttttgaattgatgtcgacactttgctgcttaatgatgatgcagatgaagatgagggtggggaagaagctgctgctgctgttaaaattaaatttaaaatgggaaaattgttgttgctttttcttgcatcaaaagtccagaatgggttataattttttttaaaatgatttatcctgttcaaaaatgtttgcttgttttctctcccaactgatcaaaaagcaattttttgaataatttccttgatttcgaaccccccaaatgagtccaattgtgttaatttttgaggcagtcgttttgatttttaaaattttcagatggcatccctatattatcgccctcttccccgttttttaattgccatttccccgcccccccccattttctgctgatttccagtttggacggactttcatcccactctctcagcttccatgcaacaaattgccgatctcattcatttgtccgttgaaatgccaaatattttactttgaaaatgctcaatttctagccaggccagaaaaaaatacacatctccggacgagctctccctccggctggttcaattccctcatttatttatttacttttttgaaaacttaacattttaaattatttgagaggcccttgacgtaccgtcaaaaaaataaaataaaacttacccatgaccccacttagaccacagcaggaggaggaggaagcagcggctgaagatgatggctcgccgccgacgactgcaacggcacaattgttgctattgttgttgttgttgttgttgaagatgttgctactgttattcatctcgtgtccaagtcctgtgatcagggattagcttagtcgatcggaccaatgatcagagtaagccaaaaaatagtaaattgaaccaaaagtaaatattccccaccgccgctgatctgtcactgactgatccttttttatcacagacccgaaaaaacacctctctcacccaccaaattctcgaactcgagattttagaggctatcactaatggaattgtggcattaatttattctcaaccattggtttctggatttgttttatcttttttgccattttttgtgttgagtgaacctacccgagtccgggctggacgagctggacacacagtttttcggcaaatacatgctgctacagctgacagcagaagtgttaggcttgttcaaattgttgttattgtttggcaatgcgtacagcagctttctgtccatcaattgctggcacagatacaaatgcgtttccaactttttcaagcagttcacttcaccgggggtggtggtggcaaaggtggtcgaatcaattggagaaaactgaatttgtgtttttctattttttagtgtcataaaaatctttttgcctgatcagtaaaaaaagagagattttaaaattctcaggacaactccgagtcctggaactgatcaacaacacaaaaagcccaaattgtcgcgagcccatcaaattctgatcaatttcttggatagattgatcgattccgatgtctttaagggtatgtaaattcgaaatcttagacaaaatgccgaagtcgggttagcatttattacatccctctaatcgttgcaaaatagtgtgaaattttattaactcgagactcgagatcatagactatggacaaatatctcaattccgctctgccgctggcaaattgtggtgccgtgtccaaacacgcgggtgccgaagtgcgtcgggtggccaactgttcgtccaagcggtgtacaaacagcagttcggtgccatcatctaccgccgatggggaaaacggtggcggcacttcggaagcattggccaaaaatgcctgctttcgtggcactggtcgatgcaaaagttgttgaccatcgtcggcatggcaatggccatggcctgcatcatcatagtctccttgggtatttcccgataccgttttggcaccggaaccgccgccaaatctggcattttcttcaccatcatgctgcacttctgtgttggaattcgtcgtcgtcgccatgccggtggtgccgccatcgtcagcatgccattctccaccgtttttgacatattcttcgtcgtcatcgtcattgccgtctccgtccgaatatgggcgaccatgatggcatgccgtctccaaggtcctcaagctgttcatcaacaagccggagttgtgatggcagtgacgaggacctgctgttggtgttgctacggaagaggtcaattccatagccatttgctttatatatgtttttactcaaaggtttgtaaagattattaaaaaacatattaaacaagagttcgacatttgaaa

SEQ ID NO: 20219 - DNA, 1434 bp, Heterodera glycines
tggacctcggtccgagcttggctttttcctaaatccaaatttaggccattttctgcaaccttgagcaatttttaatccacattttggtccatatttggccatttttgagctatttagtccatgtttcgtgctttttagtccttccaccttttttgtgactataaaaatgtttgttttttcgattttcctctcattacaaaaaaaaaaaaaaacatttccaacgcactaattctgccctttgtgtggcatcattcgaaatacgacaaattgtgctaattgccccaaaaatgaaccggcggtaaggaattttaattaagttacaaaattgatttcatttattcaactaaactgtttccacaattcagttgggtttgcagcgatgtttggttggacacttttccgttttttgaccatgctcaactcggcttcaaattggcacttctttcgccccgtttcaatttgctggtggacacgcattttgatggcaaaagggaattgacaatttggagaacgatcatcattcgcaagcacagtgccacagcggtgccagaattagctgtgcgcatccgtcctggaaaaactgtgccatttccgttgcccaaccgtccgctgcccaacaaaatttgctttaaatccgtttggatttggtaattcaaaagcattcattatgtggcaataaaagcattcattccatttgcagttacatcgacgattccgtcattgcatttctcagcgccaatcagcaaatttggaacaaagtcaccaatttgcgcttgactgttccgtttgcaacagcagatgagcagccagtttggggtgttattatgcgtgaaatttggccaattttttcggcaaacattcgccacttgagcgtttgcaatggcatcctttttgacaaattgcgtcgtctcacttcaccttcaattctcaccgatctcgaccaatgaattcaatctattccggtgatttgttgcccgatgcgactgttgatgattttgatgggccaaatgccacaatttctgctggccaaatgttgtcaaaatggttgcacagtccgagaaaagatggcatgccgaagcaattgcatttctttttgaaggagccaccaaatatggaatgggccaacactctcaaaaaggtgtggccatattttcgttagccaactgattttgattgcatttaattaatgtccgtccgttttcccattgtttagaaatttcacaatgccaccatttcttcggtcagctaccaaattcaatttactgttcagcaaccgtcaacgcaaattgtgccatttgaattagcgaacgaacagaccaaggaaaagcggacactgatcaaagcaagcgcaaatgtttgggaggatcgctgggtaatgaaacggtgccaatatggggagacggcggcggttcaatgggcagcccaaaatttgga

SEQ ID NO: 20220 - DNA, 1711 bp, Heterodera glycines
atggcactgaatttcgatttccgacatttttgggcctcggaatgccatccctggttcatgccggggatggcactgaatttcgatttccgacatttttgggcctcggaatgccatccctggttcatgccggggatggcactgaattccgatttccgacatttttgttccgacattttcgggcctcgtaatgccatccctggttcatgccaggaatggcacggaattccgatttccgacatttttgggtctcggaatgccatccctggttcatgccagggatggcacggaattccgatttccgacatttttgttccgacattttcgggcctcgtaatgccatccctggttcatgccaggaatggcacggaattccgatttccgacatttttgggtctcggaatgccatccctggttcatgccagggcagcaggtctttgatgctgatctcgagcaccactatttggatagtgattaagctttgtgtgattttgcggtgttagctgactaaatatgataaatattttgcgggccgtcctttcgcccattctccgcactttccatggcaccacaaaagcaccgaccttctcagcgtccgatcatttggcgccggccgaacgatcttccaaaagccgagtgacaattttctgctcttaaaatgcgtctccaccaaacagtcgaagcgccgcgagagcagtgccaatttgagtccgagttgtgccggcacgacgaagcggaaaatgtgcagccaaacatcgttgcaaaccttgctgaattaatttgtgattgaactctgacaatcggaggagtacggcatttttacagggaaagaagcaccaggaccggcagaagatttcctgtttaaacagcaggactttcctcctgtcctggtacatctcggaattcctgtgcttctggtccgggttttcccaaattccgcgctttttctggcactgatttttggctttttcgaaaagccgtaaatgccgagccaacccaagaacaatcgaacactcacacttcatttattttgcgcttttttggtccgactttcggccaaaaaacattaaatttgcgcaaaatgaataaatatgggatgatgagaagagaaacgacgaataatgccgtcgttgtcacgagttccaacaacaaatgtttcaccgtaaaaggccacatttgcaacactccgccgaaagtgaggctaaaaaagaggacaattttgttgattattgggccatttttcaaaaattaaaacaatttaaacttttatttgtgatcaatttggaagacatggaacagataaagtgaaacatcgcccggtggggctcgaacccacgacctttccctagtgcagagtgctgtaagccactgagctacgggcatgccgcaacagtctgtataaagtgtaaagtcaccaaaatttccatttctcattctgtagtgctaggcttatcataggccaacattccaaatgctgaagcaaaatttgtgcttttttcactgggcttctcatttaaaattgaaataattcacaaccccctaacatttttttaatttccccctaaataaataataataatataatatattaacgaatatttcacaggaaatgaaatgttgaccacggacagtccaatcaatgaattgaatgaagcggaggagaaggagaaggaaatgcgcagaacgaagaatggcatttggtcaccaccaaacc

SEQ ID NO: 20221 - DNA, 2679 bp, Heterodera glycines
cttcttctcataattgatgttcaaatcacggcagaacaaaagtgcaattgttcataagccaggattcagcatacaggcacacaaagtacccgcagctatttccatcatgttgtaccgtaagatttaccgcattaaaaatcccggtcaacactgctgacggcaaaatgtcagaaatgatctttccaattttatccgtcagttgccaatccaacctgccatagggggtaggcaaagaatcggcaaaatgagtaccccactgaacatcatggacaattagagtccaatgtccagggaaatgcactggcaaaagtatgacttctgccggaacattagggttgtacccaaatgtcatatttttgtaaggcatgactctgtccaagccatttctccataccattgggtcaacaacgaccacttttcgttgtgaaatgctagccaaatatgctaaatatgtggcagcaaaaccgtcattgagaaactgagtcagatcattccaacaggtctcaatgtatcttgggccagagctcggggcaagcgatgtttcgccatcacgttcgtaaaggccaattgctgcccatttccaaattttacaggcaaaattccgcgtggttgcgaaattaatttgcactgtgctgaaatttattttttcaggcacagtgtccgaggttgccggaattggggcatttacaagattgatatccatttcagagcttttgctcatggaatcagtgagtctgcctcggcctgggcctctaatttttttggcaggacgccctccacgactttgagtcgaaacaggcgtcaaagcaatagcttcattggcaaacatgggttggccacactcggcgacctttcccctttttttgcacggcgaaccctggtcactttgagtgaccgcagttcgaggtgtgtcaatgagagacacactttcttgcgtagccaagattggcttcgctccggctttcgagggcctgcctctttttttacttccgatggaagacgccggcgtgcttatttgcaaagcacttaagcttggggtggtggtgccccggagagatgccgatacctctccattcccatctgcactcccgtctgggacgggtgagcgacctggactgacagattgctccgtccgccgctgatgacgctcttgtctcattttttcgcaaatttcgttgcttagaaggcatctgaaacaacaaatcagaaaagtatcgcaagtgtggcaaaaatatgaggtaattaaccaataaatgcacacagacgttaaaactttattaacaaaaatgcacaaataaagatcaaagacatcattcttcgccgtgaagtgtagtcgtcctgtgctgaaatccatcagccagggctcacacatcccattaagaatgcagatccaaaagttggtgcgacacgttccacgaagggatgtcagcgaaccgcttaggtgcgactcatgccacgaagggcctgtctgcgaaccacattggtgcgacaatgctccgaagggcctgtctgcgaaccacattggtgcgacaatgcccgtagggtctgtctgcgaaccacattggtgcgacaatgccccgaagggtctgtctgcgaaccacattggtgcgacaatgccccgaagggcctgtctgcgaaccacattggtgcgactatgccccgaagggcctgtctgcgaaccacattggtgcgactatgccccgaagggcctgtctgcgaaccacattggtgagacaatgccccgaagagccagtcagcgaaccgctttggtgcgacacatgccccgaagagccagtcagcgaaccgctttggtgcgacacatgccccgaaggccagtcagcgaaccacatatattgtcctttgtttgttccattctctgaatagccaggggcagggaactcctaacgacagacgctttgctgttgatcggaggacaatcccaccgtagccaacctcctgtttacaaaatgtgaccttcgaacaattagcattgctaattaatcaaaggacaatccttttcacaaacattcagctgggatacaaggccagaaaaaggcgctcccattgggcagcccagccacatgcatcgctaaggcgagtgcaagtctgcgcttaaatacatatcatggtcgctaagcagaccgatatgtgtgccatggtcgcgaagcagaccggcactgtgtcatggtcgcaaaacagaccgacacggttggctatggtcgcaaagcagaccagcctcgccatggtcgcaaagcagaccggcgtgtgcactacatatcatggtcgctaagcagaccgatatgttgccatggtcgcaaagcagaccggcacgtgcacaaatctcatcatggtcgcaaagcagaccgataagatttgaaaacaaataaaaatgtgattctcaaaagggtataaggacagaaatctttacaattgactcgattgaattttgtaatatttaaaaaataagtttaagtacatattaagtttaagtcaactgtaaagacttcttaaatgcataggggctttatacgtgccaaagtgtacgaaacttatttcctaactaacctcagatttgggttagtaaaactatttgcttagtgtacaccttgtcatgatttttgtatatgtgcatctgaaaatttttttattttattcaatcatagttaaatcgatgaattt

SEQ ID NO: 20222 - DNA, 2033 bp, Heterodera glycines
gggaatgtggcctatgattaacaaatgatatagggcaaaaatgagtgaataaaatttattattaacagtaaatactctctgaaagcgtaaaatcatgaaaaaatttataataattctgtaagctttatgattatttttttaaaaattattattttagaaattaaatgcttgaagcacgcaaaattttgaatttgttagtaattttgcaactctttttgggcataaatgtgctgcttttatcgtcgatttgctccactgaaatagtcaaaccaacagctgaaggtatttaaaatgcttttttctttttggtaaatataaaaaacaatttcttcggcacataaaaaagcttttaaaaataaatttcttcggcacaaaattctttcaaaataaagttttatttattgaaagttttcagagagtttagtgtgcttcggtagcacaatggtagtggtgctgccatgctgcccacggattgggcggacgagtgggttcgagtcgcacccgagccctaacaattttgcgcatttcttatcttacatttttaggttctaaaaactgccaaaattgttagtttttaggttctgaaaaactccaaaataggtgctaaaaatgaaaaaaataaatgccaaaaaatgtcaaatttagtgggtgtaaaatgacaaaattttattcaaaaagcaaaaaattatgccaaatcagtattgagacacactatttttaaaattaaaaattcttatcaagaaaaaaatttaaaaaatttgtagatgaatttttgagaaaatttttcaattaatagggttgcctttttggaaataagccccaatttctaactttgtcaattttccataaaagttgcaaacgcgtcaaattcaaacacaacgccagaaacaagtatcgcaaatgccatttttgaacccaaaaaccaacatcgtcggcgttggcgccgtaaacaatccaagaatcttggcagcaaatcggtgaggagcaaatcgtttcgatccaagtcaggccgacgtgtgtatgaggaaatgatgccagagaaagttgaaaaggaggcgaagaaaacaacaatgcaaaagtcagtttggcattttgtttatgtttttttttaattggcaaaaattcccaaatttcagaatcaaacaaaaatttaaacaaaaatttgtgccaacaacacggcagacattcgacagttccagcagtacagtgagtgtaatatttaaataaaaaggcccgactttttatgttttttacattttttttttgcccatattttcaaaaaaaaaatgtgtctaatttttgactccaaaatattatgtttgtttgtttggacctgatgttcgttttacgaaaattttttttcaaaatgaagattttcatagcgcaaaattgacctaaaaattgcgtacagtgaagatttgttaaagaatggtcaaaatttctaatttttccccggtcttaaaaaattggctctaactcataaaaattggtcatttttggtaaaaatctgttaaaattgccaatcaaattttcaaaaatcttcccggcggcgcctactggcgccaacggttccttcttcccaaaaaaatttttgggaaaataagtgcagcaaaaatagttttattgtttttctttttttttcatttggaataaaatttttcaaaatgctgatttttgaccccaaatgctgattttttgttggttggcaaactgatgattttgaaaattttcacctgccagccctgctgtttaaccataaatttaatcctcgaaaattctggcgccccaagtgtcaaatgccgggatttcattgtaatttaactcggacatatggcaaaattatatgatttaagctggaaaatttcctataattttcctaataattctttaaaatatatttcttttaaaaattaaataggtcaaagagcaacaaatacgacttgcactggaaatggttttggcaaaaaattctgatcaattagtgaaaaaaaaggaattgctcaaagcttatttgtacattgagctagcacttc

SEQ ID NO: 20223 - DNA, 1792 bp, Heterodera glycines
tcatgagttttgataaatttctggagatgaatttttgaaaagtttttcatttcttaggggtatatttttgaaaaatttcgggtcgattcataggggtgttttttcgtttttattgcatttttcttaataattttgggcaaaatgccaaaagcggccaggctcttttaaaaaatttttaggcttttaggcgctaaaaataaaagctagaaaataggcactaataactcgaaaagtagcttacaacagcccaaaaaaacatgtttttcgtgcgtttcacgccattggcctttgcctaaaaattggagccctaatcattaataattaaatcaataattaattattaatatgattgttaatttcagcggtttccccaaatctcagtgttacgaaaaattgtgtgttttgaagggcctaataatggagttggagcaaacggagcagataatggattcgtcaaattcaaattgcatcggagaatccgaacagaatggaaatggttggattttagatccaaaaattaaaaatttttcattcattttctttaccatgtttttaaaattaagtttagaatgtgtattttttaaatgaaaaaaaaaataattttggccatatttttgaataattttaattaaattcaattcaccaaaatgcaaaatgatttttcggaaaggatcagaaaaatggaagaacaacatcgggaagagaaggacaaaaatggtgggcaacaaaatatgaaaaattataaaaatatatttttatttgtaaatttaaaaaagttttttaaattatgtcataagtcacattttggaacggatcagcaccctggcgatatggaaattatcagtgaccagcaaaaggaacagcagcaacaaattgatcagttgagcatcgccattcaggaaaaatgtgccaaaattgccacgactgagaatttttatggtggaaaaatttggcacaatgccacaattaaaaacaaaaaattaaagagatggaaatagacacgagacaacgcatcggaaaaatttatgaaaaattttctttgttggacaattttgttggcctattttgtcgcagttccatgcgatttaagtcagtggacggtttattcccaaaggtatttgacatttcagtcccgggtctgcaactctttagggattggttgccgcaaaaaattctttggattctttcattacagaccaaaaggtaccaattatatatatattggctttttcggctccggacagaccacgggactaaatattcaaatacctagacgcatatttacctttaaaacattaaatttttaattgagttcgccaacaaagatatatttatttatccatcgtttgccctaattacttttcttatgagtaaccatttaattcttgaaatcactctcgttggcaaaaaatttctatttaattctgaattatttcaaaaaatttcattattataacaatgaaatagccaaaaaaattcgatgataatcaacaaagtatatttggtttataatttattaaaaagaataacaaacattctaaaattaatttaaaaaacacaaattttttttctcattttattttcaattttctgattaaattatttaaaaattatgcgaaataaattaaaaattattataaatgaatttatcttattcatgtaacttgctatatatgtattaaaatataatgctgaacaatttttcttaacaaatacaaaaatataaatggcaatttgtatcccccaatttggtgaggcacgcgacgggtcgcgattcgtagtcagcctcaac

SEQ ID NO: 20224 - DNA, 1660 bp, Heterodera glycines
  unsure (1)..(1660): unsure at all n locations
aatgtactctacactccccgtttaaattgaaattgttttaaaaaaaatgggtaggcgaaagtaaaacgatcatgaaatgtaatcataacgtggttttgatgggtctaaatccaattactttgttggacgccgatgacgttctgaacgtcgaacttcgaattgtttgtcggcgacatcggcgatttgttgttgttggtctcgagcaatggtaccattttgatccacttcatcagcgaaacgtacgtggcgcttttgaacaagaccaggagaaccatgctgtgtgccgggtccatttccattttgacttttttggggaattggaaaaaaattacgcatttggttagtgtgcctacgcacaatgacgttaccaaggacggggactttaatttcccaaataacaccagaacctgagacaactttaccctgtagccaagactttttgttgttacggtagttgatgatgagcacatcgtcaccaattgcaaatgttcggtggcgagcaccatgtttgcgatcgaattgcttcgacatgttgtttgtgtagtcattttgattgcgatttgagcaagaaatgtcaggcttgagcagtgaccgttgtgttcgaggagagcggccaagaaaaagttcagctggtgtttgacctttcagtgcggcatttggtgtgttgcggtaggcgaacagggaattggtgatccactttttgtctccgtgtgaacactttttcatttgccttttaaaaatgtcaacaaaacgctcggcttgcccattgctctgtgggtgattcgtcggactaaatctttgcttgatacctttaatcctgcaaaaatgagaaaaatcttttgaatgaaagggtggcccattgtcggtaacgatttcacgtggaaacccgtatcgcgaatagagccactcgagttgaacgatgacattgtccgcagaagtgcttttcacttgaaaagtctcgggccatttactgaatgcgtccacgatgataagatagagattgccatcagaacatggacctgcaaagtccatgtgaatgcgctcatagactttatttgttcgaggccatggagagagtgtcgtttttggtggtgcttttgctgccatcgcgcaatcaacgcagtggcgaacccaacgttcaaggtcaaggtccatgcggggccagtagacatgttgttgtgccaatgccctcatgcgcacgattccaggatgtgtgaaatgaagggcggacaaaattcgctgacgcaaggctgccggaatgacgacgcgttcaccgaaaaggaggcaaccattcacttcggaaagtttgtgcctatgagtgaaaaaggcagataaatcagtaggcgacttcttgggccagccattacggcaaaaatcgaaaactttcctaagcgtagtgtccaattgagtgtgctcggcgacttcatccgcggtgacgggcagctggtcgatgttggccatgaagatgtagtcgacagcggccatttcggattcatcgagcgctgagttatccgaaattggaaagtaaatttgtcgaggctggcaataactcgttcttcccgctctactgtttcgcgttgntttgcccacagccgagagagaacgtctacctgcccaaaacattncgntgagatatatttgatttcaaaatcataattag

SEQ ID NO: 20225 - DNA, 1830 bp, Heterodera glycines
  unsure (1)..(1830): unsure at all n locations
gaaaatttttgttttaaatttttggccaaagtgtttgggtcgtcgcaaactgtgacggcgtgtgcctgtgcgaaattgagtgtcgtagcgattggtcgctgcaatgccatttcgaacgctntgatccatggcaaatccgaacaaattcattgggccgtccggggcgacgtggcatttgagttgaagagggcagccctggtacgtgactgaacacacaaaaaatcccaaaatttcgaaaaagtgaccagaatatgatttggcctttttgatgccacttatgaggttgagtttacccaatttttcccataaaccaatctgaatgaccgacagacgggacccagagtcagccatcaatgacgcatcagtattgttaatcctgcagttgatcattatccattccgataagtcgtcgtccgtaatgttgaagaccgacattgttgtgttgtaccgttgtgaattaggccgggatgaagatgcttagcggcattcggagcggtagtgaccacggcggttgcactttgagcaagttggcgcccgtgaacaatcacgcacccaatgcatttgaccacaaaacctgcacggtgatggcggctttggttggcgctgaaaaggggaagggctgcgatttttgttgctttgtgccttcgccgatgggcgctgcgatatgctgcgctttttgagctgctgttccttcaatttctgcgacttgagagtgatggcgtttgttccagaaacagttgccaaagattgagatgtgttgcgcaatgacaaaaacgcacggcactcttcagtaagcttctcaaaagtgatcatttccggcggtgttttctttttggcttcctccaaaatccgaaaacagcgttccctaagttctctgtcttcatctgagaggccagtgaggaaaatgagggccttgatttcatcttttgtcaagtccattttcgaacgttcacacatggcattcacttggctagcaaaatctaatggtgactggaaaattgatttagctaactgaaaacactcatatcgacgagtgaaaatgcttttggtttccccaaacaaaattttgagcttatcaattgtctgtgccaatgtgaagtcggtcggcagtcttggaagtacacgttctgtatgacgagcgtactcctcctgaccgagctttccaagcagcagtcgcacttgcattgcgtctggaaggtccttgccatccacctgaagaacgggccaaaacggtcgagccatgcttgaaaagtgaaatccaattctggattatatgtgaattggccaagttggctattgatagtcgaataaatagtggaataattgacggaatttggatttgtttgggtattttggagaagggcttgaaaagcctccgtctgatttttaactaattgttgaagaatttgaccaatgtcagcggccattttgatcagttaagtgcttttcagtcggaccaatgtttgtgtgaatgaaaatgagtaaatgagagtgaatgtttatcgccagcaaatattgggagagttcgccacgcacagtcaataaaatcaataaacgacctttgttgatatggaagttgcacaaatgaggtgagcacagcggtcgcagtgacttgtactttcccaaatgtgtctttccttacaaccgtgcgttcagaggctttttatggcttgaacgttgccgcaagtcttctcggtttgcttggcgtcagagggttatgctttcgccgtaacgtttcaaaccgatgtgttacgggggaaggtaggtcggagaaattaaatgctaataaaatgtgcaggcaaattcccaattatagcaataagataataa

SEQ ID NO: 20226 - DNA, 2479 bp, Heterodera glycines
cagaagaaggggatattgatgttgactataatgtgttttcttttggatatcattaaaataattttgtgtttgtgtttattctttagtttgtttatttcattcaatatttacgaaaacttttttatgctaattattttttaagaatgtccaagaaaaatttccaagaaatttcaaaagacgtaaggcgctcgagaaatacccgtaattatttccggaagagcccagacttgggcaagtattacgaagaggtggaaaaacatgtgaaggaaaacaaaaaatttgggattaaagaatatgtccgcacgttttattttaaatgtccaccaaatgaggatcccgaaaacaattttaaaaaaatcctcaaaaaattgatgtccgaagcaataagccaagaagccgagccaggatggaaaatttcgaaaatttctgtcgatctgtactgcagtgccctgtcggaccccgtgatcattccggctcgccccttccaacaatcaaacccagacattgttttcaacgagttcatgcaccgacaacaatcatttggagagctgaatctattggaagagagaatttcgattaattgctacatatgcttttcctgaaaaataaattttttttgatgaaaaaggatgtttttatttaatgttttatacgcttgtattttaaaaattatttagctaattatttttagttttaaatgtactcgttcaaaaaatattttgaaactgctcttgagaaggaagactttttctggcctaagaacagagctgaggttgaagcgatgttgattgaatcatcccaatataaagtggccatacaccgggattatgaaagcccgttttccggctacatagaaatgcacgaacacacgtctgcgttttgttttaccatggttgagcgagatatgcgaattttttatgactcaggggcgggtactcctatgggtagatacacgttggtactacacggcatcgtacaggggaactatttgggaaatgattcgggattgggactccctatttttttcttctggttttactgggagggaaggagccagacaaaccgcaacggtttttttaggagtcgtctttttctggcaaaggtccaaatgctaaaggtcatggcattagcttggggaaaagaactgttgacttccccaattgaagtaaactaaatgttttctttaatcgtatggacaggtctttaacgattaaaaatctatatgtcattattattacagagaattgcttggctcttggtcgttgctctatcgggtccctccaagtctctttgatatttctcgtcgaattgttgcagaaaaaatgatggaagaatttttaaaactgccatcacactttcgaattgctttttataataaatattaattgtgtaattttttttttgccttagttatagtcgaatttatttttaattgtttaattttctaaaatttattttagtctcgaaaaatgaacacaatccgcgacattaagaatattgaattggtttgtggtagtcgaatttttgtggttcgtgctaaaattgcaagtgttgtgtctgcggaatacaatgtaaataaaaccaaatagaaaacatcagacgttttggggggtgttgcttttttcggcgtgaaaaatgtagaaaagggtgacggaatggtatgaaaaatgtttaaacacaaaaatttatttttttaggaaaaggttaaaaacttggttgggaccatttgtactttgaaggttaatgtgagtgtgaaagaatatggtggtaagaagggaatttattatgctttgattgatatttatgaaatttgatttgttttgtctataaatgaaatgttaattttttatttaaataaaaatgttttttctaaaactatttctgttgtctttcttggtaattgggggtcagtgttgttgttgcttgtcgaaagaagaaaagcagcagatggatgcaaccgaagggttgttgaagaagtaattaaagatataattaggttaactaatgaggccaaagacttttcattttctgctcataataccatggttgaagctcaaattattaaggataggaattcgggaaaatctgaaatcatattttggcatgaaaaactattaaatggagtaagaaaaatacattcacaatttgataaaataaaaaatgaggaaaagaatataaaaaatattaaaaaaggcatggaaaaatgtctagacagaaaggacccagatgtgccaagaattagccgaagatgccaaacaatcaatagaaatagctaaaaaatataggcatgaaattggacagacttatcgtaactcttattcacagccagatttaggaattggagatatggctaataaaataaaagaaataatgcgagaaaatcaaataaaatttgaaaagccaagaccctcagcagaatttagagacgaattcattgaatagaaaatataataaaaatatataaaagaaaaacagaaaa

SEQ ID NO: 20227 - DNA, 1956 bp, Heterodera glycines
atcaaaaagtaaacggacagaaagaggccaattttggagtggaatttttttaataaaatttgccaattaaattttaaaaaattaattaattttactgcgtttatttcaaaaagaggaaatcatttgcaaccattgggtaaatcattttttgattagttttccttggagaacagaatttgttttatcactaattagctaattacccaaacaaagaccagaaattgttaaatgttttttctcgagtcataacaagcgattgaatcatcaaaataaaatctgttaagaaattatgggacaatacttgctaaaaagaaaatttttacttatttgtagtcccaataaaatccgattgatatgcatgcataaaagcataattttatgctgaaacaaatagtttggtgctgagtcgttatataaaaaccatcaaaaagggcgtaatataaaaaccatcaaatgaaaatttccaacaataaactgcccataacttttgcaaagccaataaaattaaacattcttggtattattcgatagccctaacatttctctattagctcacctaaattttaaaaaatttggccaagtttgagcaaagttatggtcaatagtagtcaaggaatcagtttttcagacatttttggtcataacttttttgaaacttgacgaaattttttgaaacttaggtaatctaatagataacaattagggctatagaatgatatcaagaaaacaaaaaatcttaacaatttataacataaatttttttatttggcataaaataattttgatgatcaaaaattctgatcaaaacattcttagaacgaacaaaataaattgatctttaccattcgctagccctatgtttcctctattagcctgcaaaattaaaaaaaatttcattaggattcaaaaaagttatgtcaaaaaagtttgaaaaccaggttccttgggtactcttgaccataactttgcccaaacttggccaaattttttgaaatttaggtgagctaatagagaaatgttagggctatcgaataataccaagaatgtttaattttattggctttgcaaaagttatgggcagtttattgttggaaattttcatttgatggtttttatattacgccctttttgatggtttttatataacgactcagcaccaaaagtttcacaacaattcgtccgggtggcggcgaattcctccgtcttgccaaaaaaaagtgacggttggcccacccttaatattttttattgttcattttataaccaaatcaatcgcctattaatttggtaaatattgatcatagacccaagagccaaaaaacacacaaaaccattttataggtttttaaatgcagaaaacgatagaaaaaccaaaaaatcttgggcaaacattttaggtgttatgaccagcctgtttttcttagaccaaaacaattctgtaatattttgcgcatttacataaatcaaaaaatttgaaataaattgtttttgtgtctggacgtctgtcatgagacggacacctgcgagattggaactcaaattttttttgggatgagatcccgcgggattaatcccgcccgcattttgcttcagaatgtccaggcaaatgttcccgtgcgagtcgatgttcgggtggtagatgcgcgtcgtggctttgacaacaggcgctcggaacggataatctctcgggaagacgatggtcaattgaaaggtgccgccttcgtacggcgagtcgggcggtcctttgatggtcgccgtccagttggaaatgttattgtcgtccaccggccgcgcattttgttatgactttttttattggggatttttatgaattttttcactttaaagctccggcaatgcccttgacagaaaaaaacaaattctgagaaaacgaattgatatttaatctatttttttctgttccgttgtccgatttcgcgagattagaacaaatgg

SEQ ID NO: 20228 - DNA, 1507 bp, Heterodera glycines
ttccactccaaaaatgggcctcttttctgtccgttttactttttgtatgcgcaacattcattgatctgcgcaaccgttgaagaaagaacggagggcgaaatgcccaagggaaatgggagggggagaagagattgacgaattccattcgatgaattcgtctttttctgattaactttccctgttttttgtccctctcttttctctgcttctctctctctctccttcctctttttctgtgtccactctctccatccgcacactctctcccctcctctttctctccgtttatttttgccgtttttctcccttattttttttgtgtgaaagggtaaaatttggcgaacatttgacggcgattggccacgccctgcggggaaaagggaagagaaagacgtcgtcgaccaaatttctttcctcatttttcaaactatgcgcacaattcgaccaattaaattaatgtttgatggactcggctggcaattaccgccaaaatcagtctcttcggtcgttgaaaatcactaaattttaaggcatttggcattttattttaaatgcgggcgattgtttgccccaaatttattttcccatttggccttgatcatttctttgggggttatcccaccgatcattcaattcaaataaatccctcgacttcgccgaattccgttcaaaatattctcagattgagcgtattttcgctgtgttttgttagtgccattaatctcatttgtcagctggtggtcccctgaaaaaaactgatgacaatgagttcaatcaaaccagttaataatatcttcaattgaactttttttgtgaagtcaacggacattttgaaaaaagagattttgggacgacgaattttctgtcttttctctcttctttcatcccgcggttaagtcaattttatgaattttccaaaacatattatttatttaattaattaattattaaatcaattttttttattatttattgtctgtatgtgcaaactagagtgcgctgggaccgggaattttgggcaaaaccgggaccgggacttgccgggacctgagaagccgggaccgggacctctgtttttttcgggaccggaaccgggaaccgggaccaaccgggaatttttaaaaattcaaaaaaattcaaaaatttaaaaaaaaaattcaaattttaaaagcctcatttggcaggcaaaaaagcctcattttgggtcgaaaagcctcatttttacaaaatttattcaaaacacgtttaaatgttcaaatgttgtatttttgactgtccatgatcaatttgagcattttttttgttagaaataagcattttttgggattctgaacatgaaaaacgaagcagatttttttgcggcgcttttcacaaaaaacttttggggcgcaaggggggccggcggtgccggaaagattttgtaattttcaatgcgatttgttaacagattttgtccgaaaaatgaccaaattttgcgattttgagcaaattttcgcttgtaaattaa

SEQ ID NO: 20229 - DNA, 1855 bp, Heterodera glycines
  unsure (1)..(1855): unsure at all n locations
gattgggtgatatatgccaatcaggttgtgctgagacaagacattgaccaaattcgaaaaaatttttaattttccaaccaaatcacttcaaattacccataattattacacaaaggtacaaaaatttttccggtcagtaaaaaattaatcatccaaattttttaataaaaaataaagggaatgttaaatgctgcctaataaacattaggtcactaatgaataaaatcgatgaaatagcacttattttagaaaccgaaaaaatagacattcttttaattaccgagacttggaccaaagacggggaagaaatcaatttttgcccttgggtaaaagagaattacaactatattttttcatcaaggaaatcgaaaactagtggaggtggttgtggtattctaatcagtcggattcaaaatttaattctgaaattttagttattcaacttcaaaatttacaatgcatcagatttgttttggtgtatagaccacccaaaacaacactcaagcaaacagaaaatttgttcaaatttttgcaaaaattttttaatgaaaattcagtgactttaggagattttaatttaccgaataaggatttggtatggaaaaatgggcatccctattcaatgagtaaatatggtgaaatattttgtgactttttcaatagattttcttacgttttggccacgaatgagccaacacggattaattcctggctagatttgatttttacggccaatgaaaaaattattactgattgtactgttaaaggaggcatattttcatcggatcatttaacacaattttttacattaattactcctaaaacaaaactgaaaacaaagatcgtaaactttcgttggttttgtccatcgaatgtgttacattttaatatagtcatagcatcaaggctaaatgccttgtcatatgaatgctttagcataaatcaaaaatattccgcctttaacagtatgttgttagaaattttaaatgagtgtattccaataaagcgtttaaccaagaatgatttgactcctaaatacccacaacatttattagcatccatcaaagaaaaggctaaattattcaggcaagctaaaactgacccatccaaaaaagcactatacgatagcatttctttacatataaaaatacaaacaaataaataccatagccaaattgagaaaaaggctatttcaaagggaagaaattcaatttataaatatatacaaaaattcaatgtcaatccctctgaaatacctaatctaatttatgaaaataaatgctatcataacagtgctgagaaatctgaattatttgccaccttatttgccaattcatttaataatagtgaaaccgacccaagcaatccatgcttgggtaatattatagaaattgatcaatgctttatatcggatataaattttaacatcatcgagacccaaaatcttttgaaaaaacttccgaataaaaatggcacttctcccgataatattagttataaaattttaaaaatttgccattcttctctgtcaactgttattactgacttgtttaggatctcattagacactggttcacttccagacatctggaaggaatcaattgtttttccgctttttaagaagggtgacaaaaataatcccgaaaactataggccaatttcattaacctgctcactctgcagggtaatggaaagaattttaagcaaaaatatttacaattttctattaaaaaccaaaaaaatttcggaatttcaatttggttttgttagaaataggtctacaacgagtcaactaataacagttgtggaagataagtacgaggcaataataaatggaaaaaanagttgactgtat

SEQ ID NO: 20230 - DNA, 2004 bp, Heterodera glycines
  unsure (1)..(2004): unsure at all n locations
tttctctctgtggtaaagtgtttcgagattggttttccccccccgagctacaaaatgttgggcatttgttcaacttcttcaattcagtttttctccactttaatcgtccttctgtacacacattacacacgcgcaaagcttcgcctgcggcaacggctgattggccacggcggcggcgcaggcgccgcggggcattcgtcgacactaatgaaggcgcacctccacgaagtgattagtcataaaagtaattaatgacccctctctcctcaatttagttgggtctctacaacatttccatccccgtcactttggtcgctgccattctgctgggctatatgagcatagggtaataagcaaaattgctttttatttttataattttcgattaatcggggttttaaaaaataagaggggaggtaattagctcgagaattaatgtgtcgagaagcgaaacgcacccttaagctaaacattgttttgattttcaataatttgatctgtttttcttttaaagtgccgtccttttggccaagtgggaacgatggcctttgtaagtgaccacttttctgtcgattattaaaaacgggttaagccaattaaaattcgacgtcccaaaaaaggttcgacggcttttactactcattcattacgatgacaaccgtcggatttggcgacattgtgccggccaaacacgagttctttttgttcgatttattctacataantcgttggttggtaaatgaacggtggcacattttggcaaaagtggcgccgcttttcctttccagggttggccatcaccacaatgtgcatcgacttagttggcattgaatacatcgaaaaggtgaccactccgttttttgctaatagcccaatttggtcgggtcgagcaatggcacatcgagagtctcgggaaaagtactcaaagcattggaagaaattaaatggaagcttttgcgggccagcgaaaaacattgggccataatttctcttttggcattttcaaaccaaatgctgcgtttgcttaagattcactattttggccgtgccatttcgggcgctcgcttcgcccttgtcaatgtgggcggaagaatggtacgagtgcccgacttggtgcgctgtgcgcatgttctgcaccaaaagtatgggcaacgaaagccgacacgacaacggcgcaaacgaacggtttcggcatcgtcaacgcaaaacctttttatggcatggaaaggagcgtaagttagcgccaattgggggcggagtaattagggataattttatgctaatgatccttctttctaaaaacatattgaatttggtcagatacgcgcccaaagatttgccgtacattcgcttcatcgatttcggctctttggcaagcttcgagtcgatctcgatctcaagcctcttttctgcaatttttacgagtggtggtcagaagtcgcgtgagccaacattcgtttgagacagacaaatgatcaacggataatttgtatcaaagaaaatgtgcaatcaaagcaaatagtcaaaatacgataaatgaattaaatataaatgagcatatacataaatgaattgaataattaaccatactaatttggtgtgtgactatgtatgtcaaacttcaaatggattatttttcgaagcgaaagtctttgaaaaaaagaaaacaaaaaatgaggtatttatgtaaacaaaaaaacacaggagatagtgttgagaaaaagataaacaaaaagagaaaaagaaagagaactaaaggaaaaaagaaagggagggaagttggggtgaaaggaaggaagcgagagaatttaatgaaaagagagagagaaagagggagagagtagagaaagagagaatggtagagcgaagagatgtttagtaaattatgacatagagacaaaagaaagagacaggaagagaaaaggagacaaagaggagagaaacgagacttggatgaaaatggaatttattgattaaactactatcaaattttatttaaaatta

SEQ ID NO: 20231 - DNA, 2484 bp, Heterodera glycines
ttaaaaatcaatatggattggtaatcatttttacgcagataaagaaattaaactaaaaatgccctttggcatgattattgccggaccatcggggagtgggaaaagcacatttttaataaaatttattgctgagtcctcggagttaattagctagaccagcttcactgctttatgcatttggtgaaatgtcaagtattgttccaacactccaaaaatgcggtgtgaatgtgtacccgggagtgccccctgaggatttgattaaccgtctaccaaaaccattactgtttattcttgacgatctcttgctttcgatcgatgaatcttatcttagtgctctattcaccaaaaagtctcaccatcagaattttgcagttgtttttgtaacacaaaatttgtttgaacgaaggattaaagttgcgagacaaaatgcccaatatttggtgttaatgcgagctccaaattccgcactggcgattcgtaacattggagtgcaactttttccgggaaaactggattatttcctttctgcctatcgtattgcgactaataaaccctatggctatctcgttgttgatatgcacgctgcttcaaaccccctgctgcgattaaggagcggcatatttaaagacgacgaggaagaaggaaaaaagatcattttcattccaaaaatggccttttgtaaaattggagaaattgtacataaaaattttgattttattcgagtacttgccaaaaccaaatcgatgaaaaaaaggagacaaattttaaaacgtgcaaatggcgatcaattgttaacactaattgaaatagctttaaacattctttgttcacactttaaattaacaactcgccaaagaaagcgtttgctaccttacgcaaattttgttcgaagtcttgctcgtcgaaggaccgaaagaggggcacggaaggtcctggttcaaaccggaagtgggctcggaggagtttttgcagctctgctcactcctattcttattgatttagcacgctctgctataaattcaagctcaaagagcgacaattgatcattttatcatggcttcaaagtttattctcgtacccgaagaaatttatcatggtttaacaagcagtgattcgggaaacataaacttggattttactaagcatgcgctggaaagaacaaaaagaaagagggagaatgtgacagcaaaaaatattcattataaccaagaattgtctcgttatctccacctgaaagatgaacaccaaaatcaaccatcaaaagtagaaattaccaaaggggttgaaggactaatcaaaaagggagatgagagtgatgaagacgaacaaatgtttaatttgggaccagaaagatcacgacccctctgcttcactaattcgcggacagcgccgcgtctcatcaccattaccacgacgatgaggaaatgccattactaccagactctccacccttccaagctggaaataggggtcaaaaaaggaaagcaaatgagtactattcctcatgggaagagggagctaagcggcaactcatacagcaatatgagccggcttcttcctctaaaatagctaaaagacaaaggagaaaactgccgccagtctcatggcgaagagaagaaaaaattccagcagaagttcaacaggaagaaccatttcaaccagccccccaaccgtctatccccatacaccctcaagttaacagaaaacgaaaagcacagcaaaatttaaatgatgttcgagaagcaaaaaagagccttattgattcggaagagttaagacatcctcctcttcaacaagaggcttctcttcgttttaaacagaaaacgacaaacaaaccccgagtaacacaacccccgcattccacttcttcggccttggcaacaagaagtaatcctccgagggatttactggccgaggcagccgctgccccattaccggacgatgatggcgatgatttgcaattctcacaacaacccgggacctcggcgcagatccatcctctcccacctggacctccattaccaagtaaaaccaaaaaacggaaaaacagtaaaaatgaagaagaaaccgaaagaaaaaaatcagagttggctctagaaaaagatggtcttcgcaaactgatgccacaaatccgccaaaaaggcaaaagaatttgcctgatgatggccatgatttggaactctcaaaacaacctgagacctcggctcagaaccagccactcccacctgaacctccattgcctagtaaaacaaaaaagcggaaaagcagtaaagatgaagatactaaaagaaaaaaattccgaattggctcccgaaagaggttatcttcgccaactgttaccacaaatcagccaaaaagacaaaagaatccagttaacgaagtactctccgaagagcagcgtcgtcagttcgtggaggatcaacgtcttttcaccattccacattcacaacttaccaatgagcaaaaaaagacgacggctgcagt

SEQ ID NO: 20232 - DNA, 948 bp, Heterodera glycines
  unsure (1)..(948): unsure at all n locations
aaagatttaaaaatggattcggtccaattaatcagtaatcttgttaagtttaagcaaggtcagatccaaatttattaattactaacagtgacttgttatcaatgatctctgatcgatcaaaattttaaattttattcccatttgtatttatttgatcagtacgtcctgcctataaagtcgagccctcccccgcccccgttttctaattacaaatcctggacattttcggacgaatttttgcggaagttaaatttagttagcagcaggccttaaagtacagccaccaggcaagcacaaattgttttcaaaatttttattgtatcaaaaaattgtttttttccatgaaaaatctgttgctttagggtaggcttaatgttgctgttgttctttctgtttttcacctgcttatcaccaattttcacggtcaaatcgtcgtcgggtgagctgctggaaggtgccgggaacgcacttaaaaaaatgggaaaaaaacggaagccaaatcaattagtgatcaacctcggatcttttttccaacctaatttttcatgctaatagagagcaattagacgagcatttttactgataaaatcgggaatatcacatttacctactttttttcatcggactttttctcgcgctttttgagaattcggattacaaatgatgaatcattattgctgcggtaattaagctcactgcccttgttgagtgtatttgtctaaacaatttaattgattaattcattttttatctgatcatttctttatattttattacttgaatgatttgttgtgccccatttttgtcccaattccaattgacaatttgtgccaatggctcagaattcgatggattggaagaagaagcattgccaatgtccttgattttcaatgcgatatacaagcttgtcataaattcactanaattatatatgtgattgatttatat

SEQ ID NO: 20233 - DNA, 1797 bp, Heterodera glycines
aaagaatgcaaaataaaaaaataatttatttttgccaatgtaaaaatgtaaaaaaatattcataaatgaagaaaacatttttgacacgccccctgaaattgaaattacagtgcagcaaattggtaataaattcgtcaaacatttccattatatgtgctttaatctttaatacaaattttattaattcaattttttcgtgtttcgaactttaaatataaaaaaaaatgtttttttcccttaaaaacaatacaaatttcaaaaataattttgtaataaaaatggaaaaatcttcaaaaagtgaaaactttttagaaaatgcaaatgctgcgacctttgtgatcaatatcttaaggacagaattgtttttgtctattcagttgaatgaatatggagttaaagaacaaaggcaaaaaggggaaaagaaaaatttatacagaaaaaaagagtaaaatatttaccgaaaattatcgataatattaagaagaaaaaataataattttattaagtagtaaataaattaaatatataaaagaatttttcttctttttcggggtttaaaaaatttagtttaaaatttaaaaatgcttatttttaatggtgcggagttgttccatataaagaaggttatattttgacaaaaaattaatcataaaacttgctctaaagcaatttctttttaaatttttcataatatttaatagcactaaaatgttctctattaataagtaaaattccaaaaaattttcgttaactttcaaaaaaagttatgactaaaattagggttgcaaccccgaccccgccccgaccccgaaccccgacatttttggccattttcggggaaaaccccgaccccgaaccccgacgcttcataccccgacaaccccgaaccccgacccttaaccccgatcggggtcggggttaaatatacacccctaagaatggcattttcgtgggagaaaatgcaaaaaagttagacgaaatttgaatttttttaaccatttgccaaatttttattaaataaagaagatttgctcaattttggacattttgaatgtggtgtagaggttagtgccattgacattactttctgtcgtgagttcgataccgtttgacgttttcttctttaattattttctttgtgacaaattgtttttttttaattaaatactcatagaaatcgaccaatcttggcatattttgacaatacatatcgaagaaaaacaaaaatttaccgaaattcataaatttttttggtgaaaaatcttagaaaatagagcttaattccaaaatttagcgctgcctatcggcatcacagggcccaaaaagtcataaaccttattaaaaaaatttctcaaaatcgcaaaaatttagcatattttggacaaaatctgttagcagatctaaccaaattttcaaaattttcccggcggcgcctatcggcaccgccggacgccgtaccctttctccttaagtctttagaaaagagcgacgtgaaaaaagatgttttggaaaacaaaaaagtaataaaaaattttaaaatttcaagaaaaaaaaaattaattctatacaaaatttctgataaaaaagaaataaaaaaatataaaaacaatacaaatattattatggaaattaataaatattatttccgaaaaaatatttaaaaaattttgactatttggcgtaaggcaaaaattgaaaaaccccgaccccgaccccgaaccccgacacttccaaccccgacaaccccgaaccccgaattttccaaccccgacgtcggggttgcaaccaaagaattaa

SEQ ID NO: 20234 - DNA, 1601 bp, Heterodera glycines
  unsure (1)..(1601): unsure at all n locations
tcagaaacaaaaaatnttagagaaattaaatatgcatacatttaaaaaattgtacccgtttttattaataatttttaaaaactcgaaatctttttcagggggggttgttgatggtgaaccgctagaactcaaatttccatttattttttttaattatccgagattttaaattttttttttggaaaaatatgtttaaatcgtgtaacattttcaaaaattccaagagggttacgattggcccagttgacgctcatttaatttttttttttttaaatgcacagaaattttttttgctattaataagcaaaaaatttgcgcctaaatcctttttttatctcaacagcagctgatcaagccattgcttatggagcaatacaatttgctcaagtgtaataaaactatggcacattcgctacaaaatttacgcaatgccatcggcacaatgaaaaacgcaatttttgagggtttgaaaattaaaacaaatatattaattaataatttaatttttttaaaaggaaaagcaattgcaaattctaaaattaatgagctaaaaactgtgttacaacaatcgcttctttcgttggtcgaccgaatgcaaattctgcaaaatgagattatgcggggaaaagtcgaaaagtttggccaagacaaattgctcatggaattggccaaaagttgggccgaatacaagcgccaaaacggaaaaaaatgtaattcattaatatttcaatttgaaaaattatttttaaaatttaagcgcatggaaaaggcaaaaataatgagaagggcagaaaaaatgaaaagcgaatccttcagctgttgtacaatttgttaaatgatggcaccaatggattagcatctgctgatctgaaaagtggtgcaaaaagtaaataaattaaatatttgatgggtgattttggatattcgtgatagaaaaatccggggattggcatcaaagtgaaaattgtaaggagttgttatttaaaattaaaaaccattaatttgaaaattttcgacgaaaaattatttataactttgcgcaaaagcaattaaatttttaaaagtttcaaaaaagttatggctagaagaaaacttaaaaaaaaccttgtttgtcgaacattttatgaaaaagcactactaaaaaatttacctaaaaaaatttgcaataaaaagcttgaatgtgaaaattttcgaatttttcctgacataaattttaattttttaaatttttttaatgacagatcgtcaacgcagaagaaaaggccgtggcattatcacggaaagacacattgtcatcttttgtgtgattggcatcatcatttgcattttcaatatttcactattttgttattgccaatgtttcgaccatcgatcagccgccgatgacatagaagcaacagatagtcaaaccacagtcgaaaccgatcaccaaggtgagagtgccaaaggtagtaaaaatgtatcaaatctgatcagccaagattttcaaaggtaaaaactgtagaantgaaatatttgatngggtttgatcataaaagatggccagagtgaggatgggtgcgaagggcttataaaattgtttcttgtctaaacatagccga

SEQ ID NO: 20235 - DNA, 2446 bp, Heterodera glycines
  unsure (1)..(2446): unsure at all n locations
tatgttttgttgaacttttcacattaaactgtcatttcttcagtagtatgtctctctctccacccatccgccggggaaacgacggattaaaaagcgccgaatttcatcgtaaatgaaaatcagaatggaaaaaggcaatgcggggaaccaccacgaaaaccttgggaaatgtgatgaaaatgtgacaaaaaaagaaaaaaaaatcttaccgcagtccgtacatacgaagacctttgtccaaacccggacagtagcagaggaaaacagccaacaaagtctcgaagaccaagccgatgttcaacacccaattggacatgccttgctggacaatggaattccgacgagtcttcgaaatgatcagatcagcccattgcacaatcacttggagtagggaaataacaaactcaaagtaagcaaacaaacgctaccaattgacacaaaataagcggtttgacaagtgtgttcgagaatctttcggtccatgtaagtctataatttttttatttttgaaaattatcggtaaaagttggtttgtgcttaacccacccattcttgtccgtaactgtccacgagattgttaatcccacgagaatcccattgcgcacgcaattggtaaaggtcctttggaagaaaaccgttgtcagccattatccaaaagtactgaaatattgggggttatataaactaacaataagtttgatcatcaaaccgtaaagaaaccagccgaggcttgaatcatcccaatttgtccgtaggccaatgaaataagacgctcatttactaatttgtctcgaaccggatcacgtggcaggcgtttcatgatgtccgactcggcctcttcataagccaaactaattgctgggacctgaaaaatcgaaaaatcaaatcaggggtgaaaggcttattttgaccatgtcggtgccgagatcgatgcaaagaatggtcacggtaccgagaggaagcggaatcccgaacagaatgtacatcaggaacggtgagatctttaaaatggaagtttttaggaaacctaaaaaacacacacctccggaatgttagaagttaacgtataagcaatggattttttcaaattgtcgaaaatgagacggccttcctccacgccggtcacaattgactgaatgttcaaagaattaaaaaataacaaacaaataattataataataaatcacagcaaagttgtcgtccagaagaatcatatccgccgcttgttttgacacgtccgacccggcaattcctacaaattccaacaaatttatttcattacgctctccgactttttgcccacccattgccactccgatgtcagcctttttcagtgccggcgaatcgttcactccgtcgccggtgactgccacaatttgtccctgacgctgaaatccctcgacgatcatcagtttttgctgtggcgaagtcctggcgaacacaatttcatcgtggttactgatgacttcggccaattggtcctcattcctaaaaaacaaaaaaggaagaattgtaattatgggtcaattatttacatctcgcgcaaatcactcccatggattacaatcgccttggcttctctgaatttcgaatctcaaaccgttttccgttaacaccgacctcgggtcgacttggtccacagaaatttctttccgaacggcgatatcttcgacagtttccatgccctccgaaatgatgcccaccgatttggcaattgctttggccgtgatcggatgatccccggtgaccatcaccactttgatgcctgcactacggcacttcgcaacggcgtccggaacagcagcacgaggcgggtcaatcattgaaatcaaaccgacaaaacggaacccttcgatcggaaagttggggccttcaacatcgaactcaaatccctaaaaaacataaaaagcaatgggagaaccttaagactccaaaaaccttgggaaatttgtcgtggtccaagcgaaagtcgcaaaacccgagcactctttcgcccattccgcccaactccaaataggcacgttcgaagtcttcgcgcatttggtgggtcatctccacatccttaattaaaaatgtgtcaatctgttccgtcggtaccatttcccacctgtcctttaagcagcatgtgactgcagcgttgcaaaatgcgttcgggtgcgcctttcatcacaaccaaataaccggggtggccgtcgtcggtttcatggatggacaactgaaagcaaataaacagagttatgcgatgtaataaaagaaaaacttggtatttgttagtcgaattgaatggaatttcggcattttttcgatgtctaaaatttgtattgttacacaaaaatgctattanagtgatacttttgacgatattcaacacattccccacggntatttctgtgatttcagcagagaacttccgaagctaaattggaacgaaaattgtcaatgatta

SEQ ID NO: 20236 - DNA, 2617 bp, Heterodera glycines
tctcagtttttcctttcagtgaccctcgtcgccttttctttgactcattttcccgaggacgcttttgagcctgaagagttgcccttcttcgctttgattgggttgcctttcccatgcggcctaattagctgctctttctctcccctaattagcgttttttgcggctttatcggggccggcttcatcttcttctaccgtaatgttgtgatgttccttcgtcaaaacagtttcatcaggcgaaatattcagaaaaagtaaataagaagcataaattcattgataaatgtcctactgtattcagctggttactgtatccggtagtcattgcttttttggtgggtgtaccatttgcatatttatacagcacagtgcttgcttttgcaggtggcctctctcacttacccacgggggtacggccgtttcctctccggacgagtgagtctcttccaatcagtcccatttttaatggcccgtcaattagtacaaattcactcgcactgtgctcgacttcttctccaattgcacatggtctaaaggtgtccatcactccgttttggccccccacgggtgtccttccgaacttcttggcacatggacaaaccacgagggatacggcccttacaatgtgtttttggtgctctctctgttcaccttcactttcgtttgtcctctttttctctgccactatcttcctttccctctctctctctctcagctcgttctctccgctctttgcaacacaatgccaattccctgcggcatgttcatgccattgtttgtcgtcggtgccgcctttggccgactgatgggtgaaattgtcagttcgatgtttcccgatggaattacgggtggaactgatcaggtcccttcccttgcaaaagcaaatggccaattaattgccaattcagccaatctttcccggaatttacgcggtcgtcggtgccgccgcgctcaccggcgctgtcactcattccgtttcggttttaattgtccgccccaattttcagttgcttttctctttttcggttgcgatgatttgttgtgaaatcactggccagttgatctatataatccctctgatgattgctgtgatcattgccaatgcaatctgtgcttactttcagccctctctttacgacgtaatgatcggcatcaaaaatttgccgtatctcccggacattccgccgtcaaatgccgagttggccattcaaaaccggaaagagtgattgaattcgaatttgaagggtccatcattgtacggcagagaatataatggtctcgaaagtgcgttttctgtgccggctgacgcagtttaaagaaattcgctcattgctcatcgaaatgcccaaactccgttctttccccgtcgtcgatgaccccggtgagtttttagggaaaacggacaaaattttttggatatgttcagcttcgatgatgctgctcggttccatctcacgaaggacaatggtcgaattgttgaaagtacaaatcggagacgaagcgaggaaaaacgaagcggaaaaacgcataaaaagggcaatcgaaacgatcgacagacacttccgagaagcgcaattggaaatgatcggagtatgcgcacttttggggagggttaaagcaacacaatttagcagcagcggcagggaaaaagcggcaaaaaaggggagcggaaaagagacgcggaagcggacggtgggaaaaacgcggatggaaaggacgcggaagcgagggaaaagccaagccgcgggaagaggaaaaagggaatgatggaacgatcttcggcatcggacacggacatcgccaaaatgcaggcagggcaaggagcagacaaagccgcgcaaagagagggcatcagcaaaaagcattcattacccaaccatcggcaagtgtttcccgtggaagaggcggagagagaaaaagaagcgagagaaagcagcaggtgggagagaaagagagagaggagagggatgggggagaggaagagacaaagcgagattatggacaatgaaaagggagagaaagaaggaagggagtgaaatcgtaagcggaaattttgacagattcgtcgtggaacccgcaccatcagtgccgaaacgacgctgcttgtcgagtgcggtcggcccaatgttaggggcgactcggaacagaaggaacgcaatggcctcgtcgtctgcgattgagacgaaaatggacgaagagagagaaggcaaagaaaagaagaagagaaaggggggggggggtgaaatcacaagcactgattgattcagaatgccaaaatcgaccagaaaatgcgaaaaaatcgtcttgtcccgagttggcaagtccaatttggggctccttggaacaccaagcgccaataacgagtcagtccatttagaaattgaaatggcattttaaaaaacaaaaatagggaatttggcggaatatgttcggacagcgaagaaacgactgcgaatggtccatttgcgacacaaagaaacggaggaaagggcggactacgatttaacggaggacgaagtgattagggaaacaaaatgagaagaaagcaattggggaagggaaagcaaaaagcgaagagtgaatcgaataaattccttgggaaaggaaaagccatcga

SEQ ID NO: 20237 - DNA, 1773 bp, Heterodera glycines
aaaaaaccggtattaccggccggtaccagtaccgctcagctctattttctattaatttactgaattccaaatcgaagcgtaaattgcaatttttttttcatatcttttatttgtacaaaatgattatccgaaaaggttttctcatagatagaggagataaaatgtgaaaatgaaaagagctatttattctatgacgaaaagcaaggaaaatatgcattatttaatcgtatagaattaaaataattttaaaatacatacaaaaagcatcaaatatgaaaaaattggcaaatttcataggaatttttgttcgatcaagcccaaaaaaacaatttaaaaggggcagaaatgccttcagtccaaactcagtcttgattcggatttccgaatttaaaaatttttggttctaaaacaacgtaaatatctgttacggaaggattaatggcttttgtttccgtgtatttaaaccgattttggggtgtactatagtcaaccccccggaaaaaaatggcacaaatgatacaccaatcgattcgtctcgaggagctatgcacaaaaaagtaggtctccagttgcggaaatgtgtttaaacccatttttgaaccggtttaaagtgtattttttcttattgaaaattgtcaaattatttaaaatgttcttaatcttcaatcattagacaaaacgccaaatgtcattaatggccaggaaattgcttttggatgatcgaaatcagatctccgaacgggtcagcatttcttctcacacagtctcgccgccaaagaaattcacaaagatgatccgccagcttgtcagattgaacgccccctctggctagccgttgccgcaaaggtttccattgtgattcgattttgttggtcgacacgccctcctctttcacgaattgcatgctatgatttgcgcaccaatgctcgaagccgttctgtccaagattgttgtaaccacgccagaaatcggtaaacagagtcgaatcagggcgaatgtgtttctgtatcaaacacaacaaagtttcactgtcccgcctattatctgggcaaatctccagtcgaatctcatcactctcctgatcaatcatcccgaggatccagctgccttcaactactctgcccctctcgaatttcctcctccccaatttcatttcatcgatttcgatgactcggccagggcctcccatcggcccaaaattctcatacagaccatccaaatgaattgtgcaacattcccttaatttgcccttttttgaattccttttccattattttgttaatattggtcatgaaccactaaaaaggagcaggtgaagtcgatggtgcgctggtttttagcgcatataattagttgccctacaaagtcaatatgaccaataaataatgtagatctctttacatacctactatatgagaaccaatcagccacagtgttactactagtaatttctcccgtttccaacaaagaagacacgaattgcttgttcataagacatttttgttgcaaatgcatacgtcagaaggatggccttcgacaccatttgcttggatctgacaccctcaaaccaagtgttgtccgttagagcatgttgtggcccttcacagcgtcgacaacgaaaagaaccgattccttgatccgttcgaatggtcattggctgacgacatcgcctgcagatccgctcagttggcaaaagtcggtgccgttttgcccaatcaatcgcttgttcagggctttggacaatttcccttcccaatttttattaggttgtag

SEQ ID NO: 20238 - DNA, 1196 bp, Heterodera glycines
  unsure (1)..(1196): unsure at all n locations
ggttcgcagccaagggggggccggtgtaaaagaggtggggggaggggatttgcggcaagtggggggtcgcaaattttggaaattttcttaacaaattcattaaaaaatccaaaaaaattttccggtggcgcctatcggcaccgtcggactccaaaaatcccaatttttctttaaaaactggctctttttcattaaacataggttttcaaaaataaaaaactgaaataaattttttttttttaaattttttcttgaaattttattttttcggcgcattgtcttttctatggcgatattttctggtgcaccgaattttctcatatatagtagttgatgacattttgcggggtttttcccctaaattaacattgaaatttttaccaatccggatccggcaatttgaaaaatagggattgaccggcttacaggattatgagagactggatccagaatagcatttaattaaattaatggggttttatacaaattttattttatttttaaaattaaattggtcgctaaattaaattgatattttttatagaaacttttctaatacaaaatcaaattaggtgataattaaattaatgtttttataaaaattagtaaatcaaatattagctaaaatggataccacaaaactatcacaatcagcatttatgcacaatataattacctaaattattttgttataaaattggtaaaaatttaattttctttttaaattgaatttaggtgcctaaattaattatcaaataaattttttttttttaaataaaaattgtttaatatttaattttcttttttaattgaaattaggtgactaaataaaattattaaaattttgaatttatttttttaaataaaaattggtaaaaatttttaattttcttttttaattgaatttaggtgactccaagtgctgatcagacggagtggtcctgtgacggntgcgcttcacaaatgagaagaaaaggacgctgctgcattatttttctggncgagaattnatcacttttctaattacctaacataaaaaacacaacatttttcaaagaccgaacaataaaaaaataaaaatggtcagacaaagacgacatttttttattcttaaattttttctgaataaaaaaaatattatcttttgcaaatttgactaattttgaaaaaaaaaaaagattttttttggggggggg

SEQ ID NO: 20239 - DNA, 959 bp, Heterodera glycines
tttatttcgattcatatttggtaccattttatcaatcccttcccgcgcaaaacaaaaaattcgttagtttttttcgcggtctttgagtctaatttaaaaaataaagggaattttggagctccggcggtgccgataggcgccgccgggaaaattttttgaatctcagtgcaatttgttaacagattttgtccaaaaaacgtccgaattttgcgatttttgtctatttcattaatttttattaaaaaattttcactaaaaaagtcgtaaaaatttacgaaatagaaaagaatttcaatttagtaaaaaaatttacgaaatctaattaaaaattgtaaaatttttgagtttttacaaatttcattccgaccctaaaacaaattcgaaaacaaaaactcgcgcgtctttccgtctatttccaagccggttttgaacctaaaaagcgaaatttgcctacaatttttttccaaacaaatcgatgtcagattccgtcccttcactccgggactggattttttcgaaatttagggcttcatcaaagtttcaatttttgctccctgaaattttttttcaaaattttttttcaaccccctttaaaatattgggacttccgcccaccacagttacagtatcggtgggggtcgattgggccccgccggttgtgccccgccgattgggccccggtacgattgggccccggtacgattgggccccaagggcctgtcacattttccatactgtcaaaaatgtattcaacatcccaaaaatttattcataaaattctttgtcatccatctggtaatttcgagaaacaccaatcaaaaattccataatgttcgccctcggcacttcatgtccttattgtttttgttctcacacctccaaaatttgataaaaccatctgcgctaagtttggcgaaaacataaagatgaccttcatgttcaagttttttgtggttcat

SEQ ID NO: 20240 - DNA, 1815 bp, Heterodera glycines
actgcttttgttagccttttgtcgctttctcgccctttttcctttctctctctcttcttctctctctcgctctcttctctctgttttccctctctctctttctccgtctctcactccttcgcttttctctttcttctttttacaacttttttctattctcttttttatttttcgtatatttctttaacatacaaattcaagtgcattaaaagaagaaaaaaagataacatcacaacccaaccacaatcacagcactaacacacgaagaaagtgagtgaattggtggtgcaaatttttcaaccgtttccttcaaattattaattcaatgaagtcattaccctaaaaagtaaattggaggaaaccacctttgagcgtgttccttcagctgacccaaacaatttataaataaagatgcgttttcttgtatttaatttttccatttattttgtccatccttaccatagcatataaaccgttaaaaccaaatgaatagcagtgaagaaacaacggaaaatgttgggatgggcggaaataaggacgaacggcagacaacttcaaaagatgagaccgacgaaagcagcagcgaaaatcaacggaatgaacaacgccaacgacaaatggacagcgaaaaggaggactcgaggtgagcatgggctggacaatgcaaaaacagtcaatgaaaaactgaaaccgaaacatcggaggggggggtgagacgaatttgaccaccgaaaactaaaactccatgctttgaaacccaagacgaattaacaaagaaggaattgggctaattgagcatatttgagggcaattaacgcaccaaatgtgtatttttccaattaacatttgttttcatttgtccaggttcgaatgcaatatttgcttggacatggctaaagatgcggtcagtttaccagcgacgatgccttttcactacgttttcatcaatacgttccatttttgccttaggtcgtttcgatgtgcggccatttgttctgctggccgtgccttttccaatggatggacacgcgtccctatcgccagctgtgccccgtgtgcaaatcggcgattagcaaagacaaggttttccatttttactgaatttatcggaatggacaaccaaataaaaaagccaattcacagtctcagtcacattccctctaaaattgcattttttgccaaggtgattccgctctatggtcgcggtggtggggacagcgacccgcgcgagaaaattccaccacggccgcaaggtcaacgcacagaggagacaaatcaggtggacaaaagacatttttaataaatacgcaataaatgctgtcggataatcattcctttcttggcttccatgcaaacctacatttcccataatcaattttcacagaaaaaattgtcattcgttattcatttttcatgcagggctttcccgggatgttccattggggcggcgacaacggcggccatggcggcggcggtgtgcaattttcgttgggcatcggtgtcttccccatttcctttttcgcctcctttttcaacacaaatttcggaggcgccgaccgaaggccggacccacgtgagaaacatacatccagtaaaatagccaatttccacggcggcgcataatggcaccgcccgattccaatttgtacatttattccaaaattatatttcaaatggcttaaatttattattggttaaaatttaattttgtttcatttaacttttttaagcgcccgtcggaagtcgtcaaatgttggaggagcaattgctgtctaatacggtggcttttctccctcccaatcccaacaacaatta

SEQ ID NO: 20241 - DNA, 1262 bp, Heterodera glycines
  unsure (1)..(1262): unsure at all n locations
tttccagaccaggcctttggtctgatcaaaaaacttttgctggcaaagttgtagnccatagttggggcatttcgcttttggggtccaataagcgctgaaggcaaaagcaaaaaatttcgtaacagtgagactgtcggcaaagtcggtttttagcccgctggtactcagttgggcctcggaccaaaaaacctatagttttcncagatgcgccgtctcgagttaccccttggtgcaaaatttcagccccgcgcgcttagccgttcttctcaaattagtttttgagatgagttgccttgtcaatataacgtatatataactagcgggtgcgtgaaccgtcggctatttagctgggataaagcgcttcgcgcttcttgagcttcgctacctaggctgtgaagcgattcaaattgatcgaattggttggagattttttttttgaatttttaaaaaattattatgggtttttagtccacatcgaggctcaagacgggcgcttcgcgcccgttttttagcttattaggccgtttcgcggcctcagtcgggcccttcgcgcccgtttctaaattttgttgaaattggacgggcgcttcgcgcccgtatttaaatgttgttgagctcatacgaggtacaaaaattgttggaagatgtgttggaagaggtacaacagtgattagaagaggtgcaacagtgattagaagaggtgcaacagtgattagaagaggtgcaacagtgattagaagaggtacgacagtgattagaagaggtacaacagtgatagaagaggtgcaacagtgataaaagaggtacaacggtgattagaagaggtacaaatttgataaaagaggtacaaaagtgattagaagaggtaaaacagtgattagaagaggtacaaaagtcattagaagaggtacaaaagtgattagaagaggtacaacggtgattaaaaaggtacaaatgtgattagaagaagtacaaaagtgattaaaagaggtacaacggtgattaaaaaggtacaaatgtgattagaagaagtacaaaagtgattaaaagaggtacaacggtgattaaaagaggtacaaaagtgattagaagaggtacaacggtgattaaaaaggtacaaatgtgattagaagaagtacaaaagtgattaaaagaggtacaacggtgattaaaaaggtacaaatgtgattagaagaagtacaaaagtgattaaaagaggtacaacggtgattaaaaaggtacaaatgtgatagaagaagtac

SEQ ID NO: 20242 - DNA, 1676 bp, Heterodera glycines
aaaacctacaaaagagaattaaccaatttcaaaattttttctggtttagaaaatataatattataaaaattattgaaaaggcatttatatttttccaactgctgaaacgcaaccaattaaatataaaacgaacataattcaattgaaaaagcacaattattcgaaataaattttaaaatttttattgtagaaatttattaagactaaaataaattatttagaatggaagaaaaattattcaaaatttgtaaggaaattcgagttggccgtgccctaattgaaaaatggttgcaacaatttgaaatgtttggaaaaagaatgacgaaaaaagaaaaaatggagaaaatgaaaatatattggaaaataaaaggagaaaatcaaaaaataattgataaagaaattgcaaaaatgttggaaattaaacgacggacattttccacttggaaaaaataatttggagaagagaatatttaattttagatggaaatgaattttcaagaattttgaatttgtttggtgttgttaacaaattttattcaaataatttctctatttgaatttagttgttttttaaaattgcataaatttgttaagggtgattgtcattacattgtattttattgcctatgctcttgacttttctcgccccactcgccccgcccccccttctcattaatctgttcccctctcttttgttctattcattctgatcggggggattgggccaagtgcccgtccgatccttccctccccatctgtcccgtacgaatcgggggccgctcctttccctcatttactcattatgtaattgtgtgcacaccttcggaataaaggatattattccaaatttgggaatggtaatgcggacgtaacagatcatagaacaactttgggaaaggaactacggtaaccatattcaattgttatttgtttgccaaaaatcattctgtcctcaaatgaataattttgctgaattcggcactgatcgtttttaacaatacaatttgttttatcaatgcgcgcatataaggggaagggagtcccaatcaggggtgggcgaaacttcggcttcggcttcgaaatcttcgggttttttgagcttcgaacttcgtgcttcggcttcgggcaatttacccgaagtttcggaaaaaatacacccctaaagatcgagtttttggtgtgaaaaatacaccagtaaatttgagttttaatgtacttaattgtgattttatctattaatttttaatttcgttatgaaacatttcgccaatttaatttccttcaaattattaatatattctacatattctatattgctttttttatatttttgttgtctttttatattttattgactccaatttacattcttagcaagtaaatgccctcaaaaagcaaatatattaaatattttaacacttctcatgggacagctaacgtttagcaggagaaacgttgaaagaactcctttttcttcaacaaaatttgcctctttatggatttaaattcgaaatttaattgaattttattttgcataaattgtttgggttacaaaatattttttcaaaaacttcgaaaacttcgggttttttgggcttcgagcttcggacttcggcttcgaataaaaattgggcttcggcttcgagtactaagccgagcttcgcccacccctggtc

SEQ ID NO: 20243 - DNA, 1079 bp, Heterodera glycines
ttcaattatgaaaatccgtaatccgtaattacggaggtcccccaaactccgtaacttttgtaatctgtgattagacccagccctgattgcaatcgcgccaaatggggctgagtttgatcaggactgtgatcagtcgatctgtttgtgcgctcacccgataaatgttggtggcttcgtcttcaaccgtcggttccggcgtaacaacggattcccgaaagcgctgtttgtgcccggacgagggatggaaacgcaactcttcgcacggttgcacctccttaaatgaccaaatgctttgaaatgcgcaaaaaaaattgaatgccattaattcgatcaaaacggaaatggtaggggagaaatacggtacgttacaatttacagtcacttaaagaatttgtaaattttatttcttaaaacatttttaataatttcaagcagagcttggcactttgaaaatgcttggaccttccatgttggacatagacttgaatttctggacaaaaatccaggaaaacccaggctcctcgaggcctggatcaatgccttgatttggtttggataactttaaagaaaacatggtcactcgaattaataaattcaaaaatattttccaggaatccagtattttcatgcataacttagacctatgccaggatccaggaaaaattcaggcctggacccgccaggttccagtttgatctctaatttcatgtttttatagtaatgcaagataaccattaatttttaaatcagtctcaaaatctaagcactgaattatatagtaaaaaaaattaacaatatttccgggcgcatagattttttttataaatttgctggcgcttccataaaagcatatttggcctttcatccgagacgagattctcgaaatttaaatttcaaatcgcatttacccgattcgggcccaagcagctgaagccgcgcacggtgttgcacgcgcggacccgcatttgtacgccaccgctgcagaaggaccaggcggaccatgaggcccaaacggaagcaaaagctgaaattggcaaaaaaagtataatatgtttgttggttggcacatttgcgctgat

SEQ ID NO: 20244 - DNA, 863 bp, Heterodera glycines
tttttgtcccccgagggcactttcaaccaacagctgctggctgatcagtgtgatcatcggacaataaacaataaaataattgcatggagaaattaagaattaattggattggatcgaaaatcggtgactcccgagaagcggacgcgcaaaacaacaacaaaaatggggggaggggtgaagcgaatggatagggagggcgcaatcgaatagattttggatcggcggcggatggaaattgaacatttcgccgacgaaaagacaatgaaatcaatcccatccccgcgcagcggcactgcacaatacttccggaaactaatttccagttgaaaatggacaaaattaaacactggtggagcaatgttatattgtaaaaaaaggaatacggtaggctaccgtaattcgtgggaaggaatgttagggttattattgtcaaatgtgcaggaagcgatgtaaaaaactagaatttttattgcaaatgtatcaccataaacggagatactttgataccgtaatcggattagttattgtaaaagtacagtaaacggcggaataaggacagcattcaattcaaaataatctgaattagacgaaatcataaacttcaccatagtaaaatattaaactgttcatattataatgctttgggtttgccattaaaagaaaacaaaaacagaaaatttattttttgaaattttctattttatgacagaaagtaagcaaatatggacatttatagccttgttatttatgatgctttcgctagcatttccagccattctctggtttttgaatgatcgaattagcaaattaattaagtcattatgaatgtgcagagtacaagacgacatggaataaatttgctt

SEQ ID NO: 20245 - DNA, 3407 bp, Heterodera glycines
  unsure (1)..(3407): unsure at all n locations
actgtcgactttttgttcgaattcgcgtccggattcggaataggcacaaatcgaccggattcgtggtcagtgatctcgaaaacacaaggaacttgtttttatgacaataaaattttcactgacgctttttttacttatgcactttccaactgacgcattttcctggcgcccccttttttgctaaccgcagaaacggggacccccgcaccccagnccccgaggacggagataaaaatacacccctttggatggactcaactcaaaaatgtcggaatcggaattccgactccctaattttttcggaaatcgaattccgaccccaaaaatgtcggaatcggaaatcggaattccgtgacatccctggtgtgaaacgcgtaaaaaaaattaaagcttatacttgggcgcaccaggaaatttttttttgtaaaaaactatcctaaacttttttttaaatatttaaaaatctgaaaaaattcatggaaacattttcttagaaactaggtacttaaacatcaatcttgtaaatccttggacaccaagtaaatgcgccaccagcagtgcccatgaatcttgaacaacttttgataccgcaaagttatcagatttaccaaaaaaggacgatatgcaaaaaagctttttatcggactcgctaagttgggccccggcacgtttgggccccagcgggattttgcctataacttttttctttgccaacaaatccaacaatcttggtatcattcgatagccctaactgtcctctattagtctgaaaaaatctgaaaaatttcgttaaggttcaaaaaagttaaaccaaaaaggttggaaaatctggttttttgaagttttttggtcataacttttttgaaccttaacggaatttttcagattttctcagactaatataggacagtttgggctatcgaatgataccaagattgttggatttgattggcaaaaaaaaaagttatagccaaaaccccgctggggcccaaacgtgccggggcccaactgaggtaaaccgtgagggatgtatggccaacagatttttttggattagctccgaaaaattaaatgggtttcgaaaatggcaatttgtaaaaattttataatttaaaaatttcattttatatacatctaatgaactttatttctcagcttaaatgaatcgtcatcgatgttaaatccgcttccaatttcaattgaattattagctgaacaattaaaaactttggaaaatcacccaattcaagaccaagaaaaagaaaagaaattgcaaattctctttttttatatgcgattttatagaaaattgatcggaaaacttaaagctttgcatactgaaaaaaacacacaaaattttgaggccagttcattaattttgtgaaaaataatttaaaaattctcatttaataattagaattttcatattaaatcatttttaagaattttattaaattaatccatttttattaatcgttttcattaaaaatgtgaaaataatttagaaatttcatattagataattaggtttttatattaaattattcaattgttattaatgatttttcattaaaaatgtgaaaaataatgattatagatttatgatttaattatttttttttattatttttattaaattaatctatttttattaaccattaaaaagattgttggtgaaaataagaaaagaaatgcccttcttttttggctttccattgccaaacaacaattcaatgatgcatttgacataaaattggcagaaattgaacaacaatatgttaaggtagaaaagtgcaaaatttttaagcaaatcgaaaaacgcagtttcgacttagtttttagattttctgggataacttatagaattccatatttttatgggttcccaattttaccgaaaaaatccaggaaaattccaaagctaagaaatcctggttttttcctgtttagcctggacctgaggcctgaacaggatctttttttttgacctggacttgtatttcctggacaaaattccaggtcaaggaaaatccagtgccgaaaaattgcaggcctgggtccaggaaaaacccaggcctaggtcctggtcgagctctaatttttaagtatttgattttcaaattttcaaaaagtttactacgagcaggaatgcatttgaaattacgcaaaaattacgtagttttccaaattaatttttaattttttctgcttatttatttatgtgcctttttgcgacctttttaatttttaactctataattaggcaattttttctttgaatataaataattaaattatgtgtaaattaagacatatatttccacaaaattggatgcaattgactgggccacagaatgcattggtattgtgcattatactgtagaaaatacagtaataccattggttggcgaagcttacaaaacgttagataaattcggtgaattggtttctgatttgtcaaaaaataagaaaaattttgcaaaaattattatggagacggctaatttggacatgaaaaatgcttataaaattactatacagaacgcattgtcacatcaaaagtaattaaatacaataatttgaacattcaaaataatttttttttcaagaaaaaaatttttctaagaaaattaaaataaaatccaatcaaaaatggaattatttttaaaaaaagtttatttaaaatgattattttttttaatgcaaaaatggggtaaggaagactcaaaaaatggggtcggggaacaaattgagaaaaatatatataccgtatttcctaaaatatccccccccctaaaatacccccccccctttttttgaagggtttgaaaaatagagccaccgggggctctattttaggaaatacgagatatattctctctcgtatatgtaattcctaaaaattgaaacctctctatttgtataccagcgtattcctaaaatataaaaatattatagtagccccaagaggagggacgaatatttcagtgaatacggtacatattttcttcttttgtacagtaggatgggtattactgtggcgtttgacaccattttcactgccgcaattcgacaatttgatcaaaaatatagcagcgcaaaaaatgttgttcaattgccaatacaaaatgtgcacatttatgcatttgtttatgaacgaatgaacaattttctttcatcgaatgtcgaaaatatattttcatcaaacgaaaaaatggaatattttttttcattgatgaagaaattttttcaaacaactttgaaacaattgaacaaatttgtggaagagaatgaggaaaaaatggccaaatttttgtaaaaaaaaaactaaccaattttaccaaaaaagaacagttgttctatgtttgtatgcagggataaaatttgggatttatgtttagggatgg

SEQ ID NO: 20246 - DNA, 1557 bp, Heterodera glycines
tgatcatttttataattttgagaaacggaatcaaaccattagatttttaagattttttttgctgcaaattttttcaaaaactttaggggaaccgggggggggagaggtcggctactaatcctttaggacactaatccgaatatttgcctttcgctgatagcctcacaaaatgttatgctaatactgtatcccatttctatgtattgaaatgctgttatgggcttcataactgcgggaatttgttcagccatcgctgggtcaactgctgaatggcacaaaaaaataatgaaaatgcctaactatttccaaaatttggattttaaaatcttaaaatttcttaaaataattttaaaaatgaaataagtatgcagcctaattattttattaaaattatttgttgaaaattatacgaaccttttacatattcagcaacatattcacggaacaaatactcgtacagaatgaaagcaaatttgcgtgacatttcccattgtttctcatacaaaatgttttccttaaagcacgacaataaacaattcataaaattttaattaaatccaaaaaatatatattttcagaaaaagaaaacgaaaagataataattatttttcacgaaataaacaaaaatttgcaaaacaaaattataaaagacgaaatcgtaggaataaattataaatcaaaaaaaatcaatttaaattatcgattatgaccttttttacagctattaaattaacattcagcaaatgatcttacttcggtcgaatgcatctcataccaatcttttcttaaataatacaaaaggccaaggtgtgcttcatatttttcagacaaaaattggtttttctcatcaatggttaagccgtaaattgcgcaaaaattggcaaaatgtttcgggcctttcgcaagcgcaaccaaagcgtcatcttcaatcttgtaataatgggatgataaaagtattaaaattagctaatttgttaaaatgacaacttacaaccgcagcatttacacttgggaaggcattgaaattgcgatgatttaataaaattagaaaaaatatacaaatgaaataataattcattgatgttgctaaattgtttcaaatttgactcaaataataaaattaaaaaaggcatagtgtaaattaaaataattaatgcacatcgaggtccaattacgaattgataaaaaaattttttgaattgaatttttttttaaaaaccgggggtgtgtaccaccggcactattaccatattttttattatacaaaatgggagagttttgtatttcttctctttctaatgcgctggatgcttgtgatacattatatgcatgcatagaaaaattgcaattaataaaatgctttttttgcgcgaatgaattaaacggtcaaacgtttcatttctgatcgataggatgaaatttttatctaaaaaaatttacaaaatatgtaaaaaaaaatatgcgggcgccgaggatttttttttataatgaaaattttgaacgattgtcttttttgaataaataatttttttgaaaacttacatatttttcacaaaa

SEQ ID NO: 20247 - DNA, 2093 bp, Heterodera glycines
agacagatgattttgaaaagaagtgatcggagcaatgggacagtgggagacggatcacagtctgagaattggggagggggtggtgatggggtctaaagttcgttgagaaaacgcagaatttgccttttggcgatttacccaaattaaaatgccaaaaataggcaaatcgctggaattccgtgactcaaaagtgatcggaaaatatttaaggaccgactaaaaccaaacaaccaacaaatatgattaaaatatttggtaaatgttcaaattgctttatcatccaacaagttgttgatcacattagttgattgattgactaaattgctctatcccgactaattcggctctgatcacagtttaaaatgcacttttttgcctgatcactcctctcaatttgttgtttaattatttgggcctcgttaaggcatttaaattttaatcgttcattgcctttgtttccaattgccaattgagtgcagccaaaagtcaaagtcagtcactgctcgacgcccccgcagggccaccgcccaatgttgatccaattaccctcttaattttcctctctgatggggctctttaacacgtgtaaatgggccaaatggggcgggggcaaaggaaaataaaaagggaaatttaattgtttatagtaaattatttatttttatgtattggctgaaattaacttcaaatttggaagaaaaggtgaaaataaacagaaaataacaacaacacaatgtgatgatggttgatcagaagacatgaaaagaaattcaaacgcattgagttaattaagcaaagggaacggacgaaggaaattttgacggggcatggttgggacaaagtgtcacaagtgattggccaaatattggacaaagcatcacaagtgattggccaaatattggacaaagcatcacaagtgattggccaaatattggacaaagcatcacaagtgattggccaaatattggacaaagcatcacaagtgattggccaaatattggacaaagcatcacaagtgattggcgccaaatattggacaaagcatcacaagtgattggcgccaaatattggacaaagcatcacaagtgattggccaaatattggacaaagcatcacaagtgattggccaaatattggacaaagcatcacaagtgattggccaaatattggacaaagcatcacaagtgattggccaaatattggacaaagcatcacaagtgattggcgccaaatattggacaaagcatcacaagtgattggcgccaaatattggacaaagcatcacaagtgattggcgccaaatattggacaaagcatcacaagtgattggccaaatattggacaaagcatcacaagtgattggccaaatattggacaaagcatcacaagtgattggccaaatattggacaaagcatcacaagtgattggccaaatattagacaaagcatcacaagtgattggtatcacaattgattggccaaatacttgacaaagtgtcacaattaattggccaaagggacaagcacagggagcagtttccaaaagctgttgctacagtgatgatcactgatcaggcgatgcttttgaaaaattgtgcagtgatcaaagagagcagttgaagttccccccccccactctatgcatattctctgtctctctctttgtcttcctctcgctctctctctctctctctctttgatctcctttttctccaactcttttttcttttctacgtcatcccttttgctatttcctccctcactccctctcctttccccacactctttcccccttcagctgtccattcccatgaccatatcgtattctctccaccattctccccccccccatttttcattcttttcttttgcccccccccccctttttttttgaataatggaaattgaatgaatggatgggatggatggattgtgattatttgatgatttatgtgcccatccgtccgatgacgcttcccttccttccttccctccgtccgtccgtccgtccgccgttcgttcgttttggctgactttttgcttttgtcccccatttcgcccccgcggcgttcgtccgccggcccttccaataa

SEQ ID NO: 20248 - DNA, 894 bp, Heterodera glycines
  unsure (1)..(894): unsure at all n locations
aatgctgcagatttatacctgctttgcgcgcaaatagtccttctagggccataaattttgncaaaattgnaaattaatgtccttatgacaaagtgncaatgtttggntaaaatttaaaaaaatggnaattaaaattttaaaaaattggngaaaaaatgggttctttataaaaaaaaggaacacagcccgccgggcagaagggttagcaattggaacagatttgaaacagcgcattttttagaaatagcgcgaaaatcgggatggaaacgcccgaaagccgagttaattcctcatccaatcccgaggctcatcaatcaacccttggcttaacattccatggcatgcagccgaacgaacatcaatcagtccctcctgctgtagtgcttatataaatcgcgctagaacaccgcagttcagcagcagcacaaatatatactccatgatcaccatcaaccacacaacccattccatgctttgtgatcatcgacggtccgtcgtccttgaatggatggggggggggcgtgagggtgaaacttgtgagcaagtgggcggtggggggaagtcactaaaaataacattcacggagccaaaaaaggggtataaaaaaattaatgggggaaaaaaaactttttcaaaataatagccccgggactagggagtgcgaaaaatgatttcaatatttctataattcgtactattatctactctcaacggatcagaattcaataaaactaacacacaccgtgtgaacaattggggaatgaaaagtttattgtgtataaaaatactattacataataataacccctgggagaagggaatgcgaaacatgatttcaaaattttcgaatgatttgcactctattctactcaaaacgtttgagaagtcaatata

SEQ ID NO: 20249 - DNA, 2297 bp, Heterodera glycines
ggggccacattttgttgtttgccctcggcgcagaacagcgttttgaacagccacaacacagcccagagagaggccggaaaatctgtttgtccttttgtttggtattgggcggtgtaaatggtaaaaaatgttgtgttcacaaactttcccctttttgaacgggttaaggtacgtacatatgtatgaatcagcattttacaaaaattatttgttgctttcattgtttttatttaattttattttcattgttttaaaattggcatgtgttcatattagggaggagatgcgaagccggcacaaaaatgacgcggacgcgaaacgcgcaacaacaaaaaatcgccgcgattacgcgacacgcgggcgcgtcccacccctccctggtttttgtactcggttaagtttagcactgcagcttgaaaactgaaaattgcgacctcagaatttttttctttcaattaatattttaattgcttttaaagttattcaattatcattcattagttttaacatttgaatgatcattcaaattagttttaaaattgtttaccattcaaattatttttaattaccattcatataaaattttaattgctcactcaaaacaatgtaaattaagtcaaatctgttaggtgtcagcagtccaaacatcaaaaccacgagcccgatcattcaaaaattcagcagcattagatcagctcaacagataaaacgaacgattcgattttttgcaaacggaaaaaatcgtgagaaaaagccgaccaaaagttggccggaagttatcggagaatagcagaatagggcgatggttggaggatatatgttggtgttttatctgcataatctgtgctggacgaattgtcaccccaagggcaggcaaacaaaaaatttcaattaattcttttgccttttaaaaatttgttttcaattgtctgaaaaagtgccattacattacacaaaaaccgggattcgatttgccatatttttttgatgccattcgccgccgtttttaatttataaaatttaaaaaaaaaattattttcaatttataaattgtaaatttcaacaaaacaaattccttttttccacataattatgtgcccagaggacaacttttgttcaccactgtctgctaaaaaaagtgcgcacaacggcggccacagtgacggaaatggactcccatttcttcatgaggcggcccgtggaaccctctaatcttaaaattcgggggggggggggggagacgatggaagttgggtccttctcctcccttctctccctcatcttctttttttttgtccggaccaatgccaaactaattgcagggccattgtgaggttttgaaaaaaaaaaaaaaaactttaactgactgcgaatgccgaatttacgaatattcaaatcagcccaaacatttgcccggtgaattgtttcgacccgagataaatgtaggaaatataatttggcagattttgacaccgttttttgttttctggaatatctaaattcccggtttccgcttcacattcctgattctcgcattttcgatgacctcgagcagcaccatacaaatttcttttttttaataatttaccaggcagcagaggagtgagtgattagcagttgcaaatttctttctcacaaacaatcaaattatgtttttttttttgatccgtaaattctttgtgcctttctttctttctttgcttttgtattggtttgtccccttccaacaatttttccacgtcccctcggggctggggtcagtcgtcgtcgtcggccggccattcattcatccattcattgtccgaacaatgtgatttttatttgcccctcaccccggggggggggggggtgggcttttgctgctgctgatttgttacggtaattttcccatcatttcgtcgaggcagaaaaagcggggggagggggggcaataaagcgcatccgttcgccaccaccaccaccagcagcagcagggcggaaaccgagcagaaactaatgacacacacaataaaaataggcctctaaaaattaatttttctcagttttttttgctggctaagcaaaaatttttgacaaaaattttattctaattttctaataaccctggcttaaaaattaagttcccgttgataaactgtttaatttttttgaattgcttattttttcttttgcaatttttgaagggcattttaaaggtggtttggtttaaatccgaattttgttttattaatttttttaaatttttatattatttaaaagcgaaaattttcttacatttcgcccgcatcatccgttct

SEQ ID NO: 20250 - DNA, 2165 bp, Heterodera glycines
  unsure (1)..(2165): unsure at all n locations
attgcggattgcggattacggaaattgcggggtttttggacccccgtaattgcggattgcggatttccgcaactgagaaaatcgccgcaattgcggattgcggatttccgtaattgtaaatccacttgcgtgcagccctgctaactaaacaccggacggttacgagtttgcctggaaaatccggaatttgcctaatttttttatttaggggggcccgtgccgattattgcaggtaggcccgtagccagggaggaaatgaaaaatttaaaaattttttaagaaaaataggcaaatttttgaaaattttatgcaattcttaacagattgcattaaaatttctaaaaaaaattttcccggcggcgctaaacgacaccgccggatattcaagtgagaaacaagaaacaattaagtcacaaaaagttgacttaccatcacagaccatagtttcacctgaaaacgagaaaatacagtataccacccgaaaattgtagtacagtatttattcacttttccgtcatcgctgccgctggccatcagatgcgggtcgatgctgttgaattggactgtccagcagcgtttttcatgctcaccaaatgtccgtgtacattttgcggctaaaaagcccccaaaaatgagttagaaggaagctaataattcctaatgattcttcccctccccccttccttgaaatccctctgaaatggataattttaatatttagtcatattcgtgaaatgaaatttaaattaaatttttaccagcagtgtcccataattgcactgtgccgtctgaatttgtattttaattaatattcgtgatatttaggaaaataaaaaacagtaaaagaatacatattaccgtaatcactgcttgccaacatgtgctgaacaacaaaaattatgaaggcatttttatgataaataattttttaaaattaaattcttactttattgtatgggttccatgaaacattgctaaaaagtgtaacgaaatcagtttttgaaatgaggggggcgggaaggtgtgccgtgcctaattttggagttgcaccgaagctgaaccatcggctgatggacaaatgccggagtcgtaatgccgtcgttggtgcccgctgtcgttggcggctgatcagtgcctccgcaatggtccatcagtgcgttgaagtcgtacagtttgatcattttggtcacaccggcgatcacaaaaaagtcaccgtccttgttaaattcaatgctgcaataacacaaatgangaaaggagagatttttattaatttgttgaaaaattactaaaaaattgaatttttaaattaaattatagaataaagaataaacgcacgaaaaatttttagttttttcttaaaaatttttttagaaaataattttctgattttttttaaatctctgagtttgaatttaaaaaaaatattttcagttcctgactaagtcgccctaagcgatgggacctcaacaattccaaacatttcgatcaatacccagaaagattgactgagttttcaccggagagacatatatttaaaaaattcgggaatcggaattttctgaaaccctgctgatttatttatttattttttcttaaaattcattttttgtgcctcgaaacaattgagggcagattgtacgcgtcgatgttgtagttgagtgttgtcaacaccttcacttccccgtagcggtacatgttcttcaccaacagtgaaaactcgtccaaactgtccgccgtcgtcgtcgttgttgatggggctgcaattgttgctgctgatgctgtgccaaccgccgccgccggtgtttctgcttcttaaatggcaaataattattgttttgttcaatttggtagagacggttccaggaacttcggtttttcacaccttttttagctatttttttgttggaaaatttgggtgagggaggcctcggagtggtgccaataaggaaacccgaaaattttcagcataatgaaaatagttcggcaaaagggggaggctcaaccggagcaaagctgcatttctttagctataaatgattaaattntggttttttcaagtaaaaaanttaatttttttttcatttcgccttggtggcaatgtcatcactagggctgcgacttttagtgaccaaaaatctcgaaatagttaactaaaatagtga

SEQ ID NO: 20251 - DNA, 1108 bp, Heterodera glycines
  unsure (1)..(1108): unsure at all n locations
gggacgcaccccatctaatttttgcatttttcagttccattagagcccaaaatccnnccacctaacagttccattagagcccaaaatccccccacataaatagactagtgatagtccaattaaggtactattacatccacatttatgtggcacccaaattttggaactgtctcgccctcgggtgggacttaaaagaaggtggaggcaaatgttaaaaattttcaagtcaaaattttcgttcttaaatttaatgcaatagttttctcgctttttttcacggttttgaatcgcggaatcgtgcgggtttaaaatttaaaagctgaaaagtttctatgatttttaacaaaaaaaatcatttgtttttttttcattttttagaccctgaaatagtgcatgaaaaggggcgggttagacgacgagggaattccttacaaagggacgcaccccatctaatttttgcaattttcagttccattagagcccaaaatcccccacctaaattgactagtgatagtccaattaaggtactattacatccacatttatgtggcacccaaattttggaactgtctcgccctcgggtgggacttaaaagaaggtggaggcaaatgtttgaaattttcaagtcaaaattttcgttcgttttcgaatcgcggaatcgtgcgggtttaaaatttaaaagctgaaaagtttctatgatttttaacaaaaaaatcatttgttttttttcattttttagaccctgaaatagtgcatgaaaaggggcgggttagacgacgagggaattccttacaaagggacgcaccccatctaatttttgcaattttcagttccattagagcccaaaatcccccacctaaattgactagtgatagtccaattaaggtactattacatccacatttatgtggcacccaaattttggaactgtctcgccctcgggtgggacttaaaagaaggtggaggcaattgttaaaaattttcaagtcaaaattttcgttcttaaatttaatgcaatagttttctcgctttttttcacggtttttgatcgcgnaatcgtgcgggtttaaaattaaaagccgaaaagtttctatgatttttacaaaaa

SEQ ID NO: 20252 - DNA, 3248 bp, Heterodera glycines
  unsure (1)..(3248): unsure at all n locations
cagatttttatgaaatgaaatatttttttcaaaatgccaaaaaagtgataaaaaataaaataaattatttttaatagggaattttctctttttttaaatttgtgttattaacggaaacaaaatctagtntaatatatatatatttttttccttaagaattcagaattttcaaaagtgatttgattaataagacataaacaattatttaaatattttacagttaaaacttttttagggacaacaaataatttaattttaataaaactttttgggatttttaagtcccacggatagattcttcacatgaacccggttgaaagacatataactggccccggatttttttgaccagaaatttccgaacacaattttatatgtcaggcccactaattacaaaaaatgtattttttagtggaaaaaaaccaaaaaatattattaaattttaaaaaaatgatttttttttactgaattaagtaatttggtgggaaatttaaaaaataatttgagctaattttcagtgatatactctcctcctttttttccaaaaatgatctcataaaaattcttaaaacgtcaaaatgatggcaaaataaatgttactaaaaatattatatgacatatataaaaataaacagaaaaattaagtcgtgcgacgtcgcaacgacaaacgattgtgctcttcataagaaacccatgggggaaagcaaattggcgcggggctttgtccctaaattcgccagattgggaaatggtgccggcgggcatcaaaaaatatatggaaaaaaagctggacgagaacagcggtggattttggtaataaaacagggaattgaaattcttaaacgtcaaatggattaattacaatttttatatgcacaaagctttttggccaaatttggattttttgcactctttttgtcattttaatacagtaaatgcatcttaaataattaaaaaaaaaacaaaattacgaagcaaatgttctgtataattttgagactgcattttgacaatttgtattttttattttactttaaaaaaataaagaaaaattttgtcaagaggtgaaaaagttttcaaaaagcagacgttttccattttttcttccatttagggcatataaaaggcagcaaaaattatttattgcattgcatgcatttacacttaattaaacaaataattttttttttgcataatatttttatggcaatgcactaaaatacggttaaaatagcagggataaaattattttaatttttggccaattgcattgctcacaaaaattaaaattgggattattttgccaggattctgctggacgacttcatccggctgttttccaaaattcacctttgttttttggaaccgcacgcgatttctgaagtgcgtgagatgactgacagggcaattaggaaattatgggacggagtgatgttcgatggtgtgtggcagaggaacgaaacggcatggggaagtccgcagagcgcggcaagtaagtaaaaaagcctcgatgaatgaatgggcatgagcagtagggagctgctggagaccgagatttcccaaggctcgagagcgaggccagaaaaaagtcaagaaattcaagaccgagaaattcacaagcagcgccactaatgaacaggaggggggggggagggaatgaaaaattgaaaaaacccaaaaataaaaagggatgagtgagaaatgccgaaaactgagaccgtaaccccactgtgaaacaaaaaaaaattaactgaaaattccatttattctttgaaagtttctatgagaaatggaacaagtacagagaacatgtaaaaaaataaaaatccgttaaaattcgaaggataattttggaaaatatttaattattaatttatttaacaaatgtttatttatcctggcgcatgcataatttggagttaataactttatttaatatatttttttttacttcagcaaattttacgcgaaacccccagtactttgttcaaattgggtctcagcagccaaaaaaagtgctaatgatcatctcgttgatgcaaaagtacagaagagaggagggcaaaagcctaatgtcaataggctaccatgtttatcgtgtggtaaaatttggttagggcccggatttttagaggcaaaaaaaatatcaaaataatggcctaaataagggcgaaaatatatgggggggggcaatttaatgatttgcattttttttttatcttttattgccatttgattaaaaatttaacaaaagccaaaatatgtgcaaaaataaggggcgaaacgaaaaaaacgcaaaaacagggaagaagccctacagaaaaacaaattaaaaaccaaaaaatctgggcccaataaagtatgaccaaaaataaaataaactgatttttatctcttcaagactggacaaacatttctttatgcaagagatttcccgctgaattattgtgctcgaacttcggttttttcgagagcgagagaggtagttctaatcatgtttagtcaatgattaattgatgaaattcaaaaataaactcaagaaaatccttttttaaggacctaaaccttaaaaaattcaaaatttattttatacatattaataattttaaaacaattaaaattgcatgatttgaggatagatagaaaagataaattaataattattaataattaggatgcttatttttacggacgaagaatgttcaaaatagggcgaaaaaatggcaaaataaatgaaatatgaaaaaaagttatttttttcgagataaataattttggttttcaaaattattgcatttaaattcacttttaaaaaaatttcttgaaatttcaaagaaaattagaagtgtgaattcatttttgttgcgattattaaaaaataaatttcaaaaagctaaattgaggggcaaacgctaaaaattccaaaatagagaagcccatattttaggtgcgaaaccccaaaaataggggggggggtagcggtccaggatgacacgaaaaatgatttttattcccctttttgtggtatgttccgatttccaaaaaaccatgttcggatttctaaattccaaaatttttgaattattgccaattcaaaatcattcatttaatgtgcgggaaaattaatttttgtatattccttttactttattttgactttcatgaaattcaaaagcatcaaatttagtcattttattggacacaaagaaaacaaaaaataggggcggaggtagcggagaagggaaaaa

SEQ ID NO: 20253 - DNA, 1079 bp, Heterodera glycines
ggagtgggactcccattaaactcctgccgccctctagtttttgataggccttcttactcttcgattaaaaccgcactcaccgtcgaaactgttgaccagaaatcttcccaaaatgttggcctgggtggtctgccgccgcctaataaaggagaggtactcaactaacgttggaacttccaaaccgaactttcagggtagttagattacccccttttgtattataaattttttttttttttttgctaaatgaagcttctggccgaaatgaagctttcctttttgaatatgaccacaatgtgaccgtctctggtttagtggtttataccttccaatttttttttcttatgaagtttaattcaccaaccctgcaaaataattgtttttgttttttcctattcaaaatattttttaaacttttaacattaataaatttgatcttaatatttttttatttttttattcaacattaattttgatacatgtgacagttttggtagaaatgagtgaattaaaggaatttgtcacatcatgtaaatctgaattattagagagaattttatgtactaaaaatcctgaaaatatgctaaaaaacaaaaatatgttcgaaaatatattcgaaaataagtgttaaaaattggaaaaatccggtgtctttatgcataaaaatttcagaaaaatctctttctttattatttacgctccataattgcaaaacaaattcatttaagctgttcgaggataaaattgggctttttcagataaaatcattttttaaattaattgaacttcataagaaaaaaagaatggaaggcatagaccactaaaccagagcgtacctggacctttggcagtggacattacgacagtgagtgaattttttactattataaatggctttagtagtaattaaaaaatatatatttgaaatattgaaatatttacgaaatgaattttattatgtctgatcaggcactgaaataggtaatttgattccttctaaaaaaaattataatacaaaagggtgtaatttaactaccctgaaagttcggttcggaagtcccaacgtcacttgggtacct

SEQ ID NO: 20254 - DNA, 1295 bp, Heterodera glycines
ttatgtgattcccacaatttaaatgttatccacaacgaaaggcataactgtggaccaatgccataatgcacttacaattagttatttcccgagaatatgactttaaaatcgaaaatagtcccatgggtgtaaaaatggcgctgatcgctgccgtcggaaaatgttggaatttttgttaaatatagaatttgctccgaaataaccaatcaaattgacctaagttattttttcatatgagaaaggtggtggtctcaccgacgatgctgtgttgccgttgttcaactttgactggagaaaggcggcagcttttttgttagcaatttttcgcttgatttgctgtaattatgatatatattaatttgtttaatttttttctattgtaataaatcatagtgctgatcaagaccgaaagaaatttgagtgtcgtactgacctcgctggaaacgttgtagaatgcctcaatgtgctgaatcactattgggttttcttcatagaattttcgaatgcaattgcctttgggcaatcgaattgcgacgtttccttagacaaaaacacagataaattagacataaattaaaagaaagcaaaacaaaaacttttcagatatttgttttagtactgaaaaaagtggacagaaatttggtgcaaataaataatcaattaaccaaatcattaaattcggtcgttttgatatttattttcgttaaattcagaaagattgctatttttcagaagatgatttcctatggcgacgacgttttttgtgattaactcagttttggaataaaaactaatttttccttaaattttctgccaaaatttcaatttgacccctttttttaacaaattttcaaccctcggacaaacttacgtgcaactttgggcacagttaatccactcttgacttgcattgtcgtgtactgcttcaccacttcacaaacagaaattccctctttgacgtcaattggatttttgccaccggcaaaaaagtcggtaagttttttcatggctttttccaatttcgggattatctccaccagcagtttgaccaaaaagccgagcaaaactttgccgtagtgtacgcatttttgaccaagccatttgccccaacagaaggcctgcgacactttgtctgtcagcgcttcatatgccattatgatgctctgtttcaggtcatcccatcccctgaaaaacaaaggtattttgtaataagtatttaaaaatttggcgggcaaaggaacaagcagaggttgtcaacaaaagaaagtatactataccgtacggcgagactcaat

SEQ ID NO: 20255 - DNA, 2179 bp, Heterodera glycines
  unsure (1)..(2179): unsure at all n locations
cttttgtttgtcctcagtgttctattactattgcgggatctgatcaaccaaaatgtctcacatgtttttgtgaatctactgaatttgtgtacttaggtatggaaaaataatcataaaaaatgaataatttttttaacttaatcagcatttgttgtttttatattccttaatttctaatgcattaatttatttgtattgtacttccatttatttaatcaacatcttttttattccttaatttgaaataatgttgtacaaccttttatttaatcaacgtttattgcttatgtatttcttaatttcaaatgctttaattaatttatttgtattgtgcttgcatttatttattcatcatttaacttgaaaatgtaataatttaattatttgattgtccatccatccatccatttacttaacatcatttcaaatcattcattcactgctcttcctcatcaacatctttatgaccatcctcgctaacacatttcgccatgcaattgggaataaattcccgtgtcaattcggccttggccttcaaaattttgttttaaaaacccctttaaaaatacaccttttttttcatgtcggcttccacgtcgcacccaaaagtaacatttaatcctcgaatgtacggcactgggaccgtatgtttgttgcaaacgaaaaggaaaaaattttttattttttaatgtcattaaaaatgcctttttggtagcggggattagcctcaatgtcgctcatgaggctacccgccacgcgctctcccaagagcaggcgtaataccgcgtcaattccagcgcgagaattaaacttgccaacagattcggaacattcggtatcactggccaatacccaacactcttctccgggtgcgcctgacacatacattaattaagcattaataatcagaactacacccccccccccccactaaaaataataccaaacaataggagaatttcagtattttattggttaactctcacatttgttcaatttgagtgaagcatgtaggctagtcagacagctaacccgcaccggagtgtaggctagacaatcagccaacccgcacaccagggatgtgccgagccagacaaaatccgattccgattaaatcgccgattccgattatggccaaaaatccgatacggttttaaaaccgattacgattatggcccaaaatccgattaattgcgattccgattttttttaaataattttttcccaaaaattttattcataatcaaaatcataaattttaagattgtgatgcaaaaataaaagtttgtccacattctgaggcaataaacgttttctcagatctgtcacaatcaacccagcggtggagaaaagccgttcgctttcagtcgatgtagctggggctgagaaatatttttttgatagcttagattcggaaacgaaatgtcttctgcacacagaagcccaacaactgttttgttttgcaaaaacgatcaagcatttggaaggtggatgaccaacgcacctgataggaaaattgcaacttagtaataattcattcatggttcttttctgctttaatgtcccaacaaattttttcttcaaaatttcgacttttggttcgaattcgggtccgggattaaaaataggtgaattggctgccatgttcttaaactgacaccattaacaacccttcaaagactttgacatttttgctaaataacaaaaaacttgattatatcggggagaattaatccggcactgctttgtgagaaaaatttaatttcagtcattatcagggcggccaagtttttattttcaaaataaggacagatgaggctaaaactaagattcggaccccaaaaataagattttttctaaaactgatagtagcgcgaaggaaacgcaataaaaacatgaaaaaacgacttaaaacaaaattttattggcataaaaacgaaggcctgtgaactgaaaattttgtaaatcagcattttgaaaaattttattcaaaatttaaaaattaataatgtttttgcggcgtgctttttccaaaaaacttttgngatttggggggggccgggcgggggcgaaaggcgccccccgggaaaaattttttaaatttttgtatgtggatttggttacaaaaattttgtattaaaaaagacccaaatttttaagattttcaaattattttttt

SEQ ID NO: 20256 - DNA, 2548 bp, Heterodera glycines
aaaagaaaccgcggtcgcgcattcaaattgccgcggccgcgaccgcggatcgcacaaaaaaagaaaccgcggtcgcgcattcaaattgccgcggccgcgaccacggatcgcgcaaaaaaagaaaccgcggtcgcgcattcaaattgccgcggccgcgaccacggatcgcgcaaaaaaagaaaccgcggtcgcgcattcaaattgccgcggccgcgaccgcggatcgcacaaaaaaagaaaccgcggtcgcgcattcaaattgccgcggccgcgaccacggatcgcgcaaaaaaagaaaccgcggtcgcgcattcaaattgccgcggccgcgaccgcggatcgcacaaaaaagaaaccgcggtcgcgcattcaaattgccgcggccgcgaccgcggatcgcacaaaaaaagaaacgcggtcgcgcattcaaattgccgcggccgcgaccgcggatcgcacaaaaaagaaaccgcggtcgcgcattcaaattgccgcggccgcgaccacggatcgcgcaaaaaaagaaaccgcggtcgcgcattcaaattgccgcggccgcgaccgcggatcgcacaaaaaagaaaccgcggtcgcgcattcaaattgccgcggccgcgaccacggatcgcgcaaaaaaagaaaccgcggtcgcgcattcaaattgccgcggccgcgaccgcggatcgcacaaaaaaaaacgccgcggatcgcggtcgcgcttcactcttgttattaacccaattaaatgtattattaattaattcacaaattatttaattaatttaatgttttaataatcatgcataccaattgtcattcattattttaaatagaattttcccatttcgaattattgatgcaaaaacatatttttggactcagatgtttttaagtggaggagaaaaattcaaggaacaaccaaactatagaggtaaataatttttaataagttttctaataaataattttatatttattttttcattcaaataatttttttgtttatttaaaagtttaatttttcttctttaatattaatgttatggccaaaaaatattataaaaaaatgatttaccttttttaaaacgctacaaaatattctttatttctaaaaatagacggaaagaaaaaatatataaattaaaatccaaaaaataaaacaacaacattgttgttgtttttttttaaatttatttttttggttgttctcctaatagcctatttaattaaatctattattaaacaatgcttatgctttagaaaacttcaaatttattctccgtttgtctaattacacattgacacaatacgaaatttcgaatttcttgagggtaattatgaacacaaaatcccaagagaaaccacctgctgaaatctacacatttctccatgatcattttgtctcattggcatcaaaacaacaatcatcatcaacatggatatggaggtgttatggcgttactcaaaaacaattaaaatgggttactcaaaaacccattcaaaataaaaatatttatattaactgatcagaagcaatcaaagttttaatatttgatttcattcgatagtgctaaattttctctattagccttcaaaatttcaaaaaattttgttgactttcaaaaaagttgtggtcagaagaacgcaaaaaacaatgtttttcaaacacattggtcaaaaatttttttgaacttaacaaaaattttttgaaattatttaggctaacagaaaaaattaattaaggcaatcggaagataaaaatcaaaaatttggttgtttcttaacaaaatgatagtcaaatatttttatttggatggtttttgagtaacgcccaatttggaggtttatgagaatgacctattaaatacagacacggacacggtggatatgaattgtcggaacaataaaagccacggcttctctaggccaaaattctcataaattttcttaattattttacagtggaaaaaagcgcgaaataaactgtgcatttgtcaattttggacgagtgttggcaaaacgtttgaaatttgttcatgaaaagtttaacacatttgctgatggtaaagaaaaagaatgtggcggcagagacccgcacacaacaaattattatgattataagcatcatcatgctttcatcagtgataacaatacaccggcggaagggtaattaaaagggacgcgacttttagtgacgaaaaagtgccaaaatagttgactaaaatagtgacgaaaaagtgccaaaaaagtgacaaaatagtgaaaaaagtccgcaatagtgacataatttttagccaaaaattgagcaaaaaataatttttattcactgattgcagttgcaagtgagctacatttcctttataaaattctcttagcaaatattcacattttttaaatcaaaaattttgtcaagaaaaaaaaatttggtggaagaatttttgaaaaaattttccaattcttagtggtgtattttaaaaaattgttttgtcgattcttaggggtgtatttatgtgaaatttttttagatcgattcttaggggtgtatttt

SEQ ID NO: 20257 - DNA, 1401 bp, Heterodera glycines
  unsure (1)..(1401): unsure at all n locations
tttggttattttagagcaaagttataagcaaaaatttttattttgatggttttttaaataacgcacataatcatgatttttaaataatgacgtagcaccgaaaaaattagctgggttttagagcatatgcattcattcattcaagcaacaaatttaacgcgaaatttttcaggaagttggtagagccattgtagcagaattaactgattgttcggtggtgttgatgatgaaaaagagaatatatttctcgtgggatatacaaactctacatatatctgctttcctctcctcagcaatcttctataatgatcaaactgaaacagaaaatttaaatggttggacctacaaacaatacttggagattggtcccaatatgtgggtaggccgaagaaacaatgattcagttactttcaaattaaatcagcaacaggttaatttaaaatataattaatgtcataagacataaagtaaatttgaaacgtgaccggaattcgtaagtctaaatttcgcaattagcacttttgggttcaaaatcggtttaaatacatggaaacaaactaaagccattaatcctgcaataagcgatcatttaagcagtttttgaatcaaaaaagctaaattcgaaaaattgggctttcgaattttgtacgaattcgggttcacgagttcagaattgaccgaaatggttgccggatcatgttcagtgatctttaaacccccagggaacataatattagtatcgctgacgcattttctactgacgcattttccactaacgcattttccgggcgccaattgaaaatatgtttttttttacttaagtttccgtgcagtggcatttgccgaacataaactaataattaaaaaatgtcatttaggtgattggtcaaataagcgttcgtgagttgcgcaaaaccgccgccatcaatttgatggtgaaaaagagagtgtatttcccatattttgatggccaaccgtacagtattaatgcttggactgagaatggccaagaaatttttactgaagtagcattgtgggatttttcaaataataaacggtatttggagattgatccagaccaatttggaaatatgaattccaatgattggatttatttctatattgctgggcaacaagtaagtaaattaatcaaaaaacattaattcccaaatttacttttaaacaattaatttgttggttcgcatggcaactattgatagatgctggtaattgtatggtggtttcatatgaacatttgttgtgatagatttgattttgtgatgtctattntggcttattgttgcgataaactattttctaaatttcaccttttttgacaaaaaccgtgaggcatttaaacggcggtaaatattgatacttattagagaccggcgcggcata

SEQ ID NO: 20258 - DNA, 1431 bp, Heterodera glycines
ccagtcccgcagcgggatccgcaaatttgaaatttccggtctctaatacttatcaggagaatggatcatccaaaactgcaaaaattttctgatttaatttcagtgtccctaaaaatgagattgggaattttttcggaattttagacaaaatgcccgattaggttttttttttactgttttaggccctatgcacttgaactcgaaaaatagcataataacagcatctaaaacattttttctcagaccaagagtagtttgggaaaatcaaaaaatattttttaaacccgaagaaaaacttcagtaattaaccaatccaatctacattccacttttttggttcaaaatcaaagaagatggtttaatatacagtacgattaggatggatggattaccatatagtatagagaataccatagttaattatcttttcctttttaagttgtcgaaaatttgatgtaaaattttaagcactgtttggtaaattgaggaaaattcctcttccggattgaatgattgattcattcaccaatttttaacaaactgctgctgtgacgaacattgattcatttgagttcggctgtgataattaaataatgacctcatttgactttttaagttttaattaatttggcattttgttttatttttttgtgtctttcattttattttatgctttttttttactcttcgcccggacttaattttgtgatgcggattgtgtgtggtaatttgattgtgcttttaattgttctgtagtttaaatttatttgtttggtattgctgtggctttaagtaattgaaaaagtctttcttcgacattcttctccatcgccccgttttggaattcggcagagcaaaaaagaccccggcagtaaagggcaatttatttacgacgtggcgctcctgcaaaaaggtgacgatcaacgcggtactattcggggaatttgtagactataagtccgacagcgtctccaaaaagtgaaaagtaactcacaaactgccgaatttgtaaaagcgaaaagtaaatcacgagttggaaggagtgtaaaagtgaaaagcaaatcacattttatggaaaaagtggaaagaattcgacagttatcagctcggtaaagtaaaaccgtctacaaagctgagttttatcaaaacggtaaagtaattccgctgcttggacaaccgacattggcacttcaaattgaatttgggagagaaattgaaaaacggcgaagtaaagccaatgattattgtgagatcgccaaagacaactcgccagaggacagtgaatctcgggtttcagccgttaagtggagacgctgaccaacaaaagggacaacagatagtggaggaacccatgaatttggcagcaaatccgaatgccaacgaaggaaataggcgtaattctgtttcttcagcggcgacatcagtactcga

SEQ ID NO: 20259 - DNA, 1983 bp, Heterodera glycines
aaaaaggatgccgaggctaaaggctagaaagacgcagaagagaaggctaaaaaggatgccgaggctaagcccaagaaagacgcagaagagaaggctaaaacggatgccgaggctaaagccaagaaagacgcagaagagaaggctcagaaggatgccgagactaaagccaagaaagacgcagaagagaaggctaaaaaggatgccgaggctaaagccaagaaagacgcagaagagaaggctaaaaaggatgccgaggctaaagccaagaaagacgcagaagagaaggctaaaaaggatgccgaggctaaaaccaagaaagacgcagaagagaaggctaaaaaggatgccgagtctaaagccaagaaagacgcagaagagaaggctaaaaaggatgccgagactaaagccaagaaagacgcagaagagaaggctcagaaggatgccgagactaacgccaagaaagacgcagaagagaaggctaaaaaggatgccgaggctaaagccaagaaagacgcagaagagaaggctaaaaaggatgccgaggctaaagccaagaaagacgcagaagagaaggctaaaacggatgccgaggctaaagccaagaaagacgcagaagcaaagaaaaaggaggaagaaatgaagaagcaaaaggctaagcccgaagaaaagcctgaggcacctgccgaaggcgtagccgtagtgccggaagcgaagaaggcggaagagacaaaggaaaagctgaaagaggaagagaaaccaattgaagtgccaccatctccagcagaaaagaagagaaaagaggctgaggagaagaaggatgccgaggctaaagccaagaaagacgcagaagagaaggctaaaaaggatgccgaggctaaagccaagaaagacgcagaagagaaggctaaaaaggatgccgaggctaaagccaagaaagacgcagaagagaaggctaaaacggatgccgaggctaaagccaagaaagacgcagaagagaaggctaaaaaggatgccgaggctaaagccaagaaagacgcagaagagaaggctcagaaggatgccgagactaacgccaagaaagacgcagaagagaaggctaaaaaggatgccgaggctaaagccaagaaagacgcagaagagaaggctaaaaaggatgccgaggctaaagccaagaaagacgcagaagagaaggctaaaaaggatgccgaggctaaagccaagaaagacgcagaagagaaggctcagaaggatgccgagactaacgccaagaaagacgcagaagagaaggctaaaaaggatcccgagactaaagaaaagaaaagacgcgagaagaagaaggctaaaaaggatgccgaggctaaagccaagaaagacgcagaagagaaggctaaaaaggatggcgaggctaaagccaagaaagacgcagaagagaaggctcagaaggatgccgaaactaaagccaagaaagacgcagaagagaagaaaaaggaggaagaaatgaagaagcaaaaggctaagcccgaagaaaagcctgaggcacctgccgaaggcgtagccgtagtgccggaagcgaagaaggcggaagagacaaaggaaaagctgaagcaggaagagaaaccagtggaagtgccaccatctccagcagaaaagaagagaaaagaggctgaggagaagaaggctcagaaggatgccgaggctaaagccaagaaagacgcagaagagaaggctaaaaaggatgccgaggctaaagccaagaaagacgcagaagagaaggctaaaaaggatgccgaggctaaagccaagaaagacgcagaagagaaggctaaaaaggatgccgaggctaaagccaagaaagacgcagaagcaaagagtaaggaggacgcagaggagaagcaaaaggctaatgccgaagaaaaggctgaggcagctgccgaaggagcgtgcgaagtgccggccgcaaagaaggcggaagagacagaggaa

SEQ ID NO: 20260 - DNA, 2033 bp, Heterodera glycines
  unsure (1)..(2033): unsure at all n locations
aaaaccattttatgctcattttgaagggaaaattctggagaatattgtaaattttatttggtttggccttaaattgtggacttggctaaaaaagaattaaaattattgaaatttttgcccttggaaaaaatttttccctattggtaactttttttgaaactttgcataggccaatattttgaccccctccatcgaatccctgtttattttttcgaagttatgtttttaactcgagatcggctcttctaattttacaagggaaaatcccaaaaaaattttaagttttgcaaagttttggcgttctgattactaaataaataataaacctatttgcacggcgcgccaacgattcgtcaactcgacgattcgtcaacccagccaaaatgtgacgattcgtcaacccagccaaatgtcaacgattcgtcaactcaatgattcgtcaactcgacgattcgtcaacccagccaaaatgtgacgattcgtcaactcagccaaatgtcaacgattcgtcaactcaatgattcgtcaactcgacgattcgtcaacccagccaaaatgtgacgattcgtcaactcagccaaaatgcgacgattcgtcaactcaatgattcgtcaactcgacgattcgtcaacccagccaaaatgtgacgattcgtcaactcaatgattcgtcaactcgacgattcgtcaacccagccaaaatgtgacgattcgtcaactcagccaaatgtcaacgattcgtcaactcaatgattcgtcaactcaatcaatattacttaaaaaatggaacttaaagcaattattgaatatttcatcgaaaaggtcgtgattttatgtgttcttgtttctaaattagcctaaaagaatgctataattgtgctaagcgccattaaaagctcttgaaactgctttttaaaactatttttggctgggttgacgaatcgtcacattttggctgggttgacgaatcgttatattttggctgagttgacgaatcgtcacattttggctgggttgacgaatcgtcacattttggctgagttgacgaatcgtcacattttggctgggttgacgaatcgtcgagttgacgaatcgttggcgcgccattttttctagatatttaggatgatcaaagtcattggcacattgccatttcccaaaaaccacaagaagaggtttatgtgttggcttctccactgaattgttttccaggcgtgcgaccattgattaaaatgaggttggaatgtcattcatttatcaaaattataattgcaatttattcataaaatcgaaaaaatatttcgaattttaaagcatacctttaaagcctgggatctcacctgaaggtaaataaaatatgctaattaatccaaaaaacaatgaatgggtttattttaaacatccttcttttttaatgatttacgagtttattttaatgaataaatactaagtaataaacctcattataacgaatcgcctcattttttaatatgttctcacacaaaataaaaattaatagaatgtacaaattatatttgaacatttttatgctcttgaatttagaatttgtgaataaattaacatgctgcttaaattttacacgttcgattattaatttgtaaattatgctttggtatttattgagcattatccagcttaatcatcgacggaaaaggcaatttattcattctttggacttttttgacattaattcttgatgaataattttaacaaaattttataagaaatatttttgattatcaaacaaattgtaaccgatttagaaaataaaaaagtggttttaaaaaattgacaaatacaatcatttgatacatgatttttaattctttttgaacacaaactccgggtttttagacttgtttgcatatatttaattttattgacttaaaattttcagaaaatcccaaaaaattattttgtttttttcgtgagaaaatttaaaaaatgccttanagaaactttttaagcttgacaaaaaaatccattttttcggctaacatatgaagatttatc

SEQ ID NO: 20261 - DNA, 2225 bp, Heterodera glycines
ttttgtcgtccatttttggcattttaatcacttcactgaacaccaaagtgccgccaaaaacgagcgaagcgccgacccaatgggtaaaagagaaggggttttgaaaccaaaagatggaaatgagaagggagaggaatttgcgaagagtgaccactgaaaaagggacgaatagaacaaaatgaaaaacggacaaagaaaaacagacaaatgaccaacccaaagtgacggaaagagagtcaattgtggcattgagacgatagacgaacataatgcaaagccatctgaagaaattccaatgaaaacccagcagggaaagtgtgcaaaaattactgcaaaacacagctggccaaaagacggagccaaagtgccgaaattgggagggaaaagccgaggaaaagggcggagggagcggaggaaaagcgacggacactgcggagaatgtcgccgcccatcagagcgaagaaaggcaaagagacggcgtgctgaaattgaacagttcgctgatcaaaacgaaagcatggcacaaaaaaaccaatttgacttcgttaattggcacctcattttgtttggcattttcttcgccgccgcccccccccctccacaatgccgtcttattcctcttctcgagtatgggcatattatcattcctccttctccctttctcgagtcttgggtcaaatcatagtgtcgaaaattcagttccgatcatccattaccccccccccccctctcccatcctccctttttttgtctcaccgtgtaaaacatcgcttcccgcggatgcctcccatatttactaaaataaaaaacaattaaaatattaattgctgcaattaattattattgaactgttttggtttgcctctttctcccattttacctgtacattctttcctgacaaattgccaaataagaagagatcaaaagggctgccgaaagcatcagcacaccgacggcccattctctgtaatgcttttccgcttcttcaagtgaaaggacagactcaattttctgaaattcaataattatttttatttaaattttcattttatttttcccactttttccaaattcgaagtggccaatgtgcagagaataatgcccaaagtgatggccaaaacggacaaatatttctttaacggatattctcggcccaacaaaagtcgattcattagcagagaagtgagcagagagcccttttcagggatcagattaatgaattgaattggataattcaaagccattttgggattgtaccgaacggaaaataatgtgaagcggcacggggacatggaagttcaatgcttggttgttgatcacattgacaatgaaaaaagtgacaaccaccggaagataacccctgggaaatcgaatcaaaaaacaaaaaaagagagagacaaaacgccaccgaatgggaattttgtttttcactgagaagcattgggtggtgaagagcagtccctcgacactaatgaacagaaaagtggcaaaagtcattaaattcatcgcggaagggtcttctctgaaggaaaattaattggaaatggcgaatcatttgtccgatcactttgccaacgattccacacagatcatacaaccaatgcaaccgccaagggcaccgaacacagaaaaggcggcatcggacatcgctttccaaataattagttaacaattatcaggctaattagtcttaattaaatgtcaattaagcaattatacggttaataatctagccaattagccgttaattatttattaaattaaatgcaattattttagcagttaagatttaacacaaatatattttaaatgtaattattagaattattttgaggaatatttatgtataatatattcatggcttcttttatgattttgtgagtgatttaattttccgctttttatcaaattgtcgtcaaatcactcaaattatttgaacacaaaaagtaacaaactacaaacaaaacattaaaataaactcaaaacagagacaaaaaaataaataaataaaataggggaaaattgtaaaattaaaaaagaaaagggacaaaaaatggcaaatggagagaaattctagaaaaaatgaatattaattaaaatggcattttaggcgatgttcgaaataccaaattcgaatggaatgccgtcgagaaggaatcgaatggtgcctttgtattgggagaagagcaccgaacacaaacacagcccaactcaatccaaaaact

SEQ ID NO: 20262 - DNA, 2038 bp, Heterodera glycines
  unsure (1)..(2038): unsure at all n locations
ttcaggggggggggaattttccgtgtgaatttccagtggaaaattcatcttccatcccggtcaactttnggggaaaaacaggaacgtggaattccctgttttcggtcaagttggaaaaaacctgataaaaagcttgggaacatggaatttttccgtttccggaaatctcttttttcccaataataaaacaaacatttttctaaaattattttaaacaaaatgacaaacaaaaatttttttacatcaatgacaaccggtgcagcaggaaccgaataagtggtagtctttgtggtggtcgttgagctcaacggcggttcagttggagaaataatgtcggacacagtcggcacaaattccatatgtttgaccattttggccggtggtggaagaatgtcaaaagtgttcgaagttgcctataaagatcattttctttcattgttgaaaaaaattttttgattttgtcaacttggtgtcacccattccgtatctacaagaaaatttttgaaatttttttcttgaaaaatttccaggtttgaaaaaaaaattttttttttagtttaccatggcttgtcgctgttgtcgtggcggacagtttggcaattgtcgtcgtaccatcacaggtggttgtccaccagcaacggctgctacatgctgctggtggggcggcccagatgcgtgaacgtagaaccgtttcggaccggcaacaagcggtgctattgttgttgttgccgggtcagcgacgcctccgccgccaccgccctcggcatcggaggagggcatcaacgacgaagacgacttgtgcacaacaattgtacgaggcgttgtcatgttcaactgatgttgctggtgctggtggtgggggtggtgcagtgatgagacaggcgatgatgaagcagtagcaacagtagcgtccgtcgtaccaccaacaacattcccggtcgatgcaatgctaaaaaaaaagaaagaatatgtgtaataagtttggtttagtgacacgattttgggtctcgtttaatgtgttcagtccgagtaaagcataaacaacagtttaataaattatagtaattaattttaatattgagttatttttgctatctaacaataaatcaaaatccaaaatgggaatattttggtgaaaaaagatgaaaattatatatttttcatgccaaatttattatttttcaaatgattactcatttctgttcatgtgctgctgaactatccgaagctgctgttgtggttgttgttgcacaacaattgatgacggacgggggcatgaggaggcggcgccggcggacggtttgatgcgcaacggtcgagcagccaacagcaccggtgatgaaccagcagaagctgaagcagtactcaaatggaactgctgttgatgatgtggctgttggtagtagcgacggtgatgaaacggtgaggatgagctggtgacggtgttggacattgttgttggacgaaatgcgcgaactggagaggaagaagcgctgttgctgccgctgccaccaccaccaccaccggtgagtactgctcgctgttgttgattgtgggacgacgatgacaacggtgtgccgccgccaccaccaccaccaccaccagcgccaacattcgtaaaatgttgttgccgttgcgcaacacgtccaccgcctacagaccgtcttccaacctcttaaagggtgggggttgggatacaaggacaatttgagtaatatgatactaccgatgttgcctcccttttcgtaagaaaaaaaaattaccaaatttaatgtcatagaaaaggttctaggagattttcggggcgcccctgaccacgaatctgacaccaattatggccaattccgggtccttggttggaactcaaacaattgttcaaattgcaaatttatgttctaatcttccatgttttaatctatatcatatctattttaagaagcgtgaaaaactcgaaattttaatttttgtacaacaaatccgggtttggaatttttaatgtaaaataaatttattttatacgaaganttatatgatttgg

SEQ ID NO: 20263 - DNA, 2203 bp, Heterodera glycines
cgcatctgtgggtcattgcaatacgcaccaattgagacttttgcgggtgttggatttgtctgcactgatgttgaggcatctctggaggcgcgtctttcatctgccaaggacaatctgatcagatttggcgacgaaatctacataaagctgagcggcgaccatggccagagttgtacgaagattaccgtctcattcagccaggctgctcggtcaaattctccatcaaacaatttcgtctgtgccgttttcccaaccaaggatagccgcgaaaacttggagcgctatggaagcacactttgggaacaaattgacggaataggcacattggcgggcaaacgagtcaagtggtaaattttaaaatttgtttttttccatttttctgaattcaaaaggtttatgggcggagacgtcagttttatttggtcaatgatcgggcattgtggttctgcagtgacaacatttccgtctccaatttgcagttgcagaagtgatcatttggtgcaggagggcgaaatttgtgaactccggacaattgatcaaactgtgcagttcgcggagcagttcaccagagccatggtgaatggcgaaaaggcaaacgcagcggtcagatcggcgatgatgggcatcacgaaaccaccgcttctcctgtccattggatttgaccggatcatccccgcgccatttcacgttttccaggggcttggaaatgccctaattcgggaactcgaacagcaggacggatgtgccacaattgctcaaaacttttttcggagattcggcgcgcggagggagcaatttcgtaaacgagacatgaccgggaattcaattagaaaaattcttgtccatgcttctgaaatggaacatctcttttcgacggattggccaattacaatttgcagaacccttgtgcacctcgggaaaattcaaaaattttcaaaagtcattttttcttttttctcaaacttaaattcgaaatttaggcagaaccactgtcaccgaatgacatagatgagttggagaggcgcgtcgacgaatttaaatcttttttgtctgcccaggagcggatgcgcgggtttctctcaaagaagcccaaagcacatcttttgttgagccattttgttcccttcgctcgcgagcacaaatttcttggccttttagatgaacagggttgtggtgaaaaatgttttctatcccattaatctgaattttaaggtgatgaggcgctccattccgtttggcgccgacttgagcaactgtggaagtgtatgccggacgcagaccaaattttgcagcaactggagcaccattttgtcaacaattggctcctcgactctggcaaaattgatgaactgaagaggtatgtatgtttggagggggtaattgcgttaaacttgttttatttaaaaatttatatataataattcagagaaaaagtgatcagagggaagagtatgatgagttcgatcaaacggaagaagaaactgacgaaatttcgcttatcaatgtcattgattgatggtgatttagcaagaagaaattggtggacgacgggagacggacgaagaaagcgatgcagaagaagaacgattcgattttgaatagacactgttcgataaaagtttttcttcgtttttacaggaaataaattttttatttaatttttgagcttcattaaaaactgtgttatcatttcacttatatttatttgctttaaaaacctcaaaatacagttacagcatggatgggactcgaacctgagacccccccttttggtgactaactcacagaccactaagacgaaaaatccagcataattgtacttgcagcccaaaattgggccgctgtgtaaatagcatcatttacagtgtgacaaatactgcgccacctttaaatttataatatctctctcaaaccagaaaaccgatttcaaaatggcttttaaccccatttgccaatcccatcaataattcacagcaacagtataacaatgcccacagcaaaacatgtgtgcttattgaacaaacatttggaagatggaaacgaagatttttttcgctacaaacccaataagaattaaattgtaaaacatttggcacgttcataattgccacggccattttatataatattaccctcatgaaagggattcccgaatttgatcaggaagaatttgttgatgatcagccagaaaatgatgatcgtg

SEQ ID NO: 20264 - DNA, 2399 bp, Heterodera glycines
attttttgcctttcccccacaaaaatgccattcttggggggtgtatatttaaccccgaccccgagtcggggttaagggtcggggtcggggtttgtctgggttgaaagcgtcggggtcggggttaaccccgaaaaatggtcaaaaatgtcggggttcggggtcggggcggggtcggggttgcaaccctagttaaaagaaatcataaattaaaaaatttaatccaaaattttttaaatttattaaataaaatttacttaagatttaatataaattcaaataaatgccttaaaccgctttattctatagactaattttaaggttaaacttatcttaataaacttccagtatttttttcataattttatttttaagttttgttatggactcaagtatttactaattaataaaattggttattttttgttttctcgttcatttattagtaaaaaagaagggcatgcatttttttattttaaatcaattttaaattatttcttttagtttttactaatataattataaaatatttatgctggctttgatctatgtaatttttagtgttacaaatttaaatttcgcatgccgaagatcctttttatggcttcttagtaatttttggtaaatctgttgaaaaatggcaaattttcccattttttgatcaattggttcggcgtctatcaattcatgcaaagtatctttcccagaatttacaattttattttcgaaatcttttgaatcatctgatatcagtaaaaattttaaaaaataaaaataaaataattttaattctttattgcattttttcatatttaatcatttaaaaaattttaattagttaagattcactcgttttctattttaaagctgttatttattttgatgttttaataaactttttaaacttttatatcaaaagatttttgacttttgttttaaatatttgtcacacacatttattctttggcattaaaactatcattttttgttatttatacaaaatttaaattgtttgctttatcgttaattttaatttttttcacaccttggtaagatatggctaacggtttgcccaactggttttaattgctttttaattatactaatatgttatacagtctatggtataagggttagcccatgctgagagatgtaatcgccttttagaattttgttctggtatttattttcatattgtttattgtatttaatatcgttatttattaaggttttcaattttattttaaagttttgcattaaaatgattgaagtatgaattgaaattaattaatgattgatcaattaattttctatttattattaagctttttcggtgaattaaattttattcttaaataaatattaattcaattttgaaatgtaaatttagtttattttggtattttttattgaatttctttgcaaatgcataaattaaaaatttttcctaaaaggacaatttttattgaaaaactttcacaaatttgaattaaagtaacctcaattataacatcaacccagattaaaaatatagatcatttaattctaaatttattactgggggataatttttcaaaatttaaggactcattcatgcgcatcaaagcaaatggcaaagcgggttgctcgtggaccgtaaaattaatcgtcaatggctaaattgctacattttatggtagccaagaatatctgaaaagaataacaaaaatatagtaacacacatgccagtggaacgtgctgaattaggccttgggactcccaacccttagaaatccaatcatttttatgagggggttctggggtgatcaatcccacttccctccccaactcattccaattccaattccattctggaatggctttgtttcaggaaaagcatggaaaacaaatacaaataaaaataaaacaattaaatacaaaatggaattaaatatttaaataatattacaaatcaaatacaattaaataaaagcattaaattacataaaatacaaaatccggattaagtgatgagcagtgggaaaatcgcatattaaatatacataaatggaaggggaggagtcagatcgatcgctcattggttaacggagaagcaattaaatgaaaatgaaaaggcattaaaatgaatgtgaaaataaaatgagaaaatgcttcggcaatttaatgttaatttatttatctcttacacctcataccctgttttagaccgtccctggtctcagatttttgaaaccagataaaacaaaaagttttatacaattattattatttttttaaaaaatttatttcaaaaattttcttagatttttgcataaaaatatttcaaaatgcaaaaccaataaaaataaattatgaacttttggcctatcactcccttccctaaaaggatcgtccctgatcca

SEQ ID NO: 20265 - DNA, 1348 bp, Heterodera glycines
tgccatacgcgccataaaacgaaggcacaaggccaaatcgggatggaggggtccgtaaatgctattcatcatgctgtgggcctgggaacagaggtaaatcattgaatcataaagacaaaagcgacacctgctgcatcaaatcgtagccagtacggatgaacccttgctgcattttgatgagagcactcagataaaggttgtaggcactttgggaacgcggattaagacgttttattacggggaacacattgaaaatgtcgtcctcagaaaaaggcgcttgtgacttggactttaatgggttgagctgataattctaaaagcgaagacaaacaatgccgacaataaatgaagcaaaaaggcgaccttgagcattatttggacaccgttcattaaacaaaaacgacgaatgatcgccgagcgttgggcaccgccactccattcgacgaaactgtcacaactgaacggggaaagaaaatgccaatggcaacggacagattaagcgattcaaaacggaaataccaatcggaaggaatgcaaaggccgaagtgcgcgtacgaatcgtcgccgatgcttttccataggctctcttggctcagcttagcccatgccatcgttttcggtgtcgggcccgagccggcgccaatgacagttcctttatcgaaatagccgtatctccgcttttttctagctccagttgacttcttcagggccacaccatttgtttggtcgttgtcaaattgcgaaatctgactgacgtttttgccggagccaatcaaacaattgaggaaatgggcaattgccgtgcccataaaatgcacttccactccctggacgaagtcgcggaaaatgtgacgcaaacaccgacaaagaagctccattttagcgatagtctaacaaaaaacaaagattgcaatccgaaaatcgtttttttacgaacagcgaacgaaccgtgaggtaatcgagtcgagaattgtgctgtgtagcttcaattaacttgcccaaatagcgaatgttaatgccacgggcgtgcattgcttctaccagggcaactccatcgatgggtgaaactgccaattggacggagtcgcgcacaaattgagggatttggtgagtcaatagaaattcagccgcctcagcgatcaactttcgctgggcctgtttttaaaatgcttgaatcaatcggaacaaatgaatattttacaaaaaaagaaggtaaagagtcgcccttcaccagccaaaaaacaatcgtccctttgttttcacctgaacgtcctcctgtggcgcgtgtctcaccgccgtgctccacgcgtccgggttcagtcggatgtccgtctccgactcttcctct

SEQ ID NO: 20266 - DNA, 1783 bp, Heterodera glycines
  unsure (1)..(1783): unsure at all n locations
tcaattttcaacagtttggccgagttttcaacaattcttcgtatagttcgttggttgtcactgtttttcccgagtcataagacccataaacaatcgaatcctgctgttcccgttccaaaatgccgggaatgatcgactgggccataacacgtaaacctttgaagtcgatgatggccatgccagaagtgtgaagcctgcaaagtttggactcggccattttccaggcgatttttaattgactcactttggatcgtcaatttgggcatatgcctgaaccgcggccaagtcagctgaatacgatgcgtgcgcagccgcgtccccgccgagttcctgcaattggacaaaggcattggttttctcgcgccccacccgaacgcattgtcaaccttataatggtccttaacatcaaagcccagtgagaagaagatgttgttccaaatgaacatgtgcatgcgcggctcgtccattgggttgatggtgtgcaccgacccatcaataacctaatcaaattcggtaattaaaaacaataaacgactaattaaatttgacattaccgctgaagcgccccgagtgcaagcggaaaggaagtcggcatggactttgaacctggccctatcccgacagagtttctctgcaaaactgctctgcggcatgtcgtgcgtcgtttgcagctcctcgttccagtctcggatttgtccaggcatatggtcttccaagccgagtctgtgcggctgaacttgctcatcggctcgcaactggtcctgggtattttccacagaggggacaatctgaaagcgaattttctgcttcggttgacattggcaaaaccaacccattgataaagctgaaaaggcgtgggcaatcgctcgaaaatgtgtttctcattgcgcagcttcaacaattggacgagtgtctttttaaagtgagcgctaatgtcggaaagcaaatcgaagagactgtggaacacgcgaccgccgtaagtggacgacctttcgggcttgaacttttcgccaatagtcgagttgacgaagaatccacgggtgcagcaagtgacgtgaaaacgacgatcttcgaccgtgtccacaaccaaatagagaatgtcccccttaagacggaaaaagcaatgaaagagagaaagaagggagtgccttcattttccttggtccgggcgggggattgaaagcagagaatgagatctgtttgagagcgataagctgagtgggctgcagagtgccgttgctgtgctcggccattggaatcagcggcttcaaaatgatgtcggaagagttgggcaaaagccattcgggaggaagacagtccgactcggcacggagcaattcaattgtgggagagcctttcgactttttgcccaattcgtcagaggtcgattgagtaatggtcgacagacacgaaagtgaggcaaagtcgacgccgctgaccgcatcagaaatgtccaccgaacgaattatttcgcgcaaatggcgcacatgcactcgagcctcccgcaaattatacggttctgaatgacggacaaccgaatgaggagcgaatgggccggcattggtcagcaccaaccctcgaccactctcatgacggcgttgtctttgatgtccggcacattgcgaagctccgtgtaattgtctagtgctgttccctcgtagtacaacttgaaacaggtgcggtgacaactggaatccctttcgagcaacatgtgatnaagctcttgaatgatgtcggactcgccaatctgaaggcaggcgaaagtgagcaaaacattgtgtcc

SEQ ID NO: 20267 - DNA, 3236 bp, Heterodera glycines
  unsure (1)..(3236): unsure at all n locations
aggtcatntatgcatcggatgcaaagtaaaaatggggatttaacaaaaagatggctgtcttaattttgcaatagttaattaattgttgtgtcctctcaattagttaattagtgcccattttatgtcgccccaattaattaattacccattaattcattaccacgtgccaccccccccccccctcccatcaattagtgtcctaattcagtgtttctttgtgcggtgtctgcgcgacaaaaacttcgtcgccgggggcgccccgtgcacttgcagcggacgccgcgccgacgaaacggggccaaaaatgtgcaagtcgtgccgactgaacaaatgcgaacagattgggctgtccaaggcaatggcactatgtggtaacagcggaagcaatgggaacagaaaaagacggacagcggagcaaacggcataaaacggacaaacagagagagaaacagagagagagagaggcagacagagagagacagtaaggaacactaccgtaatgatgtgttgggcattaaacagagtcaaacttatgccggatttgcttttttgtttgaattttctcccaattttgtattttaaaaaattttatattttttattgatcaattacggataaatcaataattaaggaaaagaaaatgaacataaatgtgagtgattcatcgagatcatccgaatttcctaataaaattctaatggaaaatggcaaaatgattggggcattatggggcgattttacggctgtttttcatgacaaaaactaaacaaaaaaaggaccacaaaattggataaatatcaatgggaaagggcaaaaagtacagagagatggttcaccgattttgaccgtttctggccaacccaagccgagtgatcagaacgtggccaaggatttgccgctctcttttggccactaatttggcttctccgtcgtcggcactttctgtctctcgcaattcgacggtgcaaacgatttcattcttaaggcaaaatcggacaaatggaaattcgttttcagactttttgttttaaaaaacaaagcaaataaatacactgtaccgtggccctctgaagatgggaaaggagcacacagagagaaacgccttcgacttcgtcctcacaaagtttgggcctcgatgattcaaattccttaaaaagacataaaacaaaaaaatttcgatggattcggacattattggataaaaatgcaaaacaaatgattaattagcgaatttccgaaaaaacattttcgagaagggcagaaaagtgccaacccaagacgacagatacaaaaatgttgcaattgttgtgcgaaagtaatcacctcggggaacttcaaatgtgccagcgcccattgcgagtgcgttttggcaccgtcacttgacaatcgtcgcgcaattgtgccattccctcgctgctggtcacaaccgatttcttcactttgtgttgacatgtcgtccacactgctgaacacgtacacctgccaacagaaaggcatctcaagtggcaaatgaattggctaaagttggcaaaccaacgaaaactccaaggctatcggcacaaaatttgggatacaattaaatcaaactctctccaaaaagatccaattaaccccgtcaatccgtttggagtaaatacggaagaaattgtccaaaaacgtgccttgttggtgaaatggccacagaagtcgaaccaaattgtcacttggagtccgagttcagcgaagtcgacggtgaccggcatcggaagttctgcaaatttaggacactaattacagggccaaaagggcaaattggacacagaagaaatattatttgtacatatattagtaataaatgcttcaattccgcttgccgtgcattgtccgccagtgataagtgtggtggtcgtacgacgtcgtgtgcccatcgtacaccaacgggtcgtgcagcgagcgcgactttgtcaaattggagcgcaattcgggaatttggacgtcgcggacctttgggtcacgttcaacatcggaaatggatcagaaaaatatttttctctgttcaaaaatggtcattagagtgcaccaacaatggctttttctgcttctaacttaaaaaatgggattttttttgccatttttgacaaatcgcatcaattaaaaaagtctcctgaaaatgcttattgttaatccggatttgtcataataatccccaacctccgctcaccccggaacactttgttgagcatgtccagcaatggaatgggctgctgaatgcgtcgcttcaaatacttcatgaacacgccgttctgctcgcccttcacctcatacgcgccgacaccgccgctggtcgcgtagcctaagggaattcgaaaaagcgatttgaacgacggaaaaacgaattaagggaaccgaaaaaataaaatggggaaatatttgtcacttttaacggattttcaatgcctttcttgccgccaatttcccaccataaacggtgttccgattgacgcgcacttcgccgcgtcgtaattcctccgcgtaagcggtaaaagcgaccaaattggagggcaaaaatttgcggcagatgtccaacagaatgaggttgagcgcgggttggaagtcgcggaattggcccatcacctgagggggaattgcagcactttggccaaatgcaatggaatgcacagcaaacgaaagaccaaccaacccaatccatgctgaggcaatgctcgggcccatagtcttcgccgggcgctccgattggcagcaaatagcactgaccattcgcctcaaagccgtggccgacaaagtaaaacacggcttaactgatttgatatagcaagaaatgattgtttgcgtggtacgaccagggacggttccaggatttctgcctaaattagagggggttccgcctcaaggacgacgactttttaattttgatttttgaaaaaatttagcgaatttttttttgaaagtttgggtgagggagtcttggagggggtacaaataaggaaaaccgaaaaatttcaacacaacatactatttttgccttaaaaatttggatggatcattgggacccccccccccccaggggtccgtcccttggataccatatacataccgtaaacgccttcgcccaacagcttgcggtattcgcaaaccatggcacgcatttcctccaagtttaggtcgccaagtgtgaccgttttgaagccgagctgctggaaacctctgcctgtaaatgagtttgttttcactggttt

SEQ ID NO: 20268 - DNA, 2186 bp, Heterodera glycines
gaattttggagggggcggggaaaagaaattagtaatataataataaaattattcgctgtcatttttgttgtttactgatgctaataaataaacgataaaaaaacttaaaaagcacacaaaaatgacaatggaatgggctgggcgaggaacgacaacgaaaataaataacaaaaattataaaaaaatggaattaatttttattattttcattcgaaaaagactaataaaatggacaaaaatatatatttatgtattaataatgcacaccaaaacaatcagagagcaaaaggaccctaaaatatgcaaatatgcaccaaataatagcagaaaagagaaaggaaaaggaaaatgagtgaaaaattaaaatggaaaagaaaagagtttttgaacaattttgtattatgtaattaataaaattctcggacaaaataggtaaaaaaaattgcgaagtatagcaaaatgaatggcacggcacacacagacacttaccttaattgaagtgcccaactccacgtagcagaaggcaccgaccaccgaaattagtccggaaagcagccaaacgaccagcgaagcgcccaccgcttggacattgttcagaatgccggtgggagtgatgaaaattccggagccgatgatggcatttgtcacaaaagccgtggcactccaacggcccattttgttcacttcgcgcgacatttcccgacaaatttagagcaattaacaaataacaagcttattgattttctaacacagcaaaaaaggcataaaataaaaagttataataaatatttttctccatttgttttctatattaattaactaattaattaggacatataaacttgtttaattacgtaattactcataaagtgaattgcattccgtgatcagcataccaatttgcgggttacttgagcctgggacatgtgaaaacgttgcaaaacatgatatcgatttccgttttctccaaaaaaagaatgtgagaaaatgaatggttaaagaataaaaaaatatttattaattaaaattctaataaaattattttaattgtgaaaaattttcattttaacaatttttatcattttgttttcaaattcactttttaaaaacacttttaaattctttgattgccatggaaacgaaaataaaaaccaaatttttacttttgcccagggtaaaacaacaaaatcatttaaaaatattttatcaaattgtttgctattaataaatgcttcgaatatttttccgcattatttttgccacgttaattttcgcgaaaattcgtgccgaatgggaaattcccgacgaattgcgcccaccccaatttcttacagtaattaaaaatggcttccaatcggcggtttatttcacggagaatggccaaaactctgtcgatgaagcgacaacaaatcagcaatggcttttccaaaggcttttggaatttgcagatgaaaacaaaatgccaacaatggcaaaaagaaaaggaggcgcaaatttggaaggaaatggcatttaccgagagcatacagtctcgagcaattggcatacgctaattgacaaaatcaacggaaaaagcggcgacgttttggatggatgcgaaggcattagcgaattaattattcacatttaaatttaatcattattagggatcggatttaattgctttaaatcgcaaaacaggtacttaaaaaaagtaccaaaaaagttcaaaataagcgcttttttaatttttttgcatttttcatgagaaaaaatagagtaaaaagtaaaaatccgattcataatgattagaattttaaatatattttaagacattaatacttttacatttaataaatattttttagttcttttacaatcatccgaaagaattgagtttgaaattggggtaggaaatgtgacgatcggatgcatcaacaaaaatttcgatttatcaatttctccattaaatgtttatttctgcaaaaatggcacagaatgccaacgatcaaagtgaaaattaaattaacaatttaattaatgaaatgatatttaaatttcaggaaaaaattgacaaattgcgcaattattgtgcaaccagcagaaggaaattggacgaattatgaccagcagcaggagaaaaggcattttgaattttttggaatatcaccaaccgaaaataatgaaatttaaatttaatttttgca

SEQ ID NO: 20269 - DNA, 2342 bp, Heterodera glycines
  unsure (1)..(2342): unsure at all n locations
ccaattagcattaccacgaaaacattaactagtaanttaataatccttnantgtcaattaagcattaattaaactagacaatgaacgaattgactatttcaaattgtgtggcatactagcaaatacagtattcgccttacttggcatacagtacatccgtcgcagtgcctcgatgtcgctgtccgacaacttttcacgttgtcccattttgctgtcattatgttccgggtcgaatttggcatggattgtcttcacaccccacgttttggcacccatgtgggcatcgtagtgcatcacgctaccgtaatcgtacttcacaccgtagctaaaatttaaaattacaaaattcaatgaataacaattcaatcagagagcactaattactaatttcctggatccaggtacaggctcaggcaatttttcagcaacctggatgtttcctgggcttatcacaattctcattaatcggaaatgatttatacaatcaagtgtctaccataattaattagatgtatgaaatttattggtaaaaataaaataaaaataaaattagagattttaccttgaatattttgtctgatcagatattgcaaaaacatcatattgttgcggattaatattgtccttatttattgtaatatatttgtcacggtctaaagcggggaaataattaattaaaaataatttttatatatcattaatttattttagtaaattttttaattggcccacccgctcggctctgttcatggccaagcccaagcgagtgcagtgtttcatgcataattatcccaatttggctgggacatcgaaagctcaacattatgcgattgaatggcttaaccatgccaatttcgctgaagccacaactaaaaaattgcaaaaatttattttaaatttaatttttttttgttgatttttttcatttaattctgacaaaaaagatatcaatttaatttttaagtttttagttaaaataaaggtgccgggtcgttactcaaaaacaacaccataaaatggaaaatctttaacaaacaatcaaaattttcataattttgccaagaacaaaatttttagttcttgataatattcgctagcccaaaatgttctctattagccttcaaaatttcaacaatttttgttacattcaaaaaagttatggccagaggaactcaaaaaaaccgagtttttaagcacatttttggtcataaatttttgaaaacttaaacaaaattttttcaaatttttataggctaatagagaacatttagaacatttagtgcaaagcaaggactaaaaatttgtaaaatgaatcataataattatttaatgaactataatgggaaaaccacccaaatttcatcatactcgattatagaataccaaaattataaactattcttactgctaccgtattgcatccaatttaaaatacaatacagtacccgttgccctatttttctgtgtatttcacttacgctcccaaacttgtctccttcagataatgaagatgtgttgtgtgggtgggttttgctgcatattctttgaatttaatgcacgaattgctttgaatttgtttcaacgcgaagcgcacttgctttctttcatcgttacctaatttaaaacaaaattttgaataatttttatctaaatttataaaaaggatatcaaaaaatttttttgaattttaattgccttcattaaaatttccaaaaaaatttttccggcactgccagacggcacctcaggacctttattccccctttcactaaattttttaaaaattttactcaaaaatgccaaaaaatactcatctttttggcgaaaacggcaactaacaaattcctgtttgttttttttgctctccggtgctgaaatttctaaaaataacactggtaaaaaattttttgaaattttttgcccaaatagcataaaggtcttcgggttagaacccaatttaaagctgctgaaaatgttttaatatataaatgatatcgttttttaacaaaatatcagggaattcaaattgaaaaaagctaaacaaacaagcgaataaaataaaataaaatataaataattttaattattttttttaaaataatttttacgcaatgctttgtccaagaaaaaggcaattggcttgtcatatggccatttttcgatgggtataagttcaaagaacagtgcgttgcccgcccgttttgcccgtaggtgcggtgccaaagcggcaacagctgaagcggtcccctcaatttcggcatccggcaaaattgaatgggtcgcattgtaagtggctaatgatggcgaattggagcccaactgtgaaaaaacaattaaataat

SEQ ID NO: 20270 - DNA, 2886 bp, Heterodera glycines
  unsure (1)..(2886): unsure at all n locations
gggggggggggggggggggggggggggggggggggggggagggagggggagggttttttttttttttttttttttttttttttttctctcccccccccccccccccccccccccccccgcgcgggggggtggttttttttttttttttttttttttttttttccccacccataggggggggggggggggggagggggggggggaaaaaaaaaaaaaaaaaaaaaaaaaaaaaggggggggggtgtttataaaaaaaaaaaccccccccccccattaaccccctaaattttttacacggctaaaaagttattcaaatcaaaaaaaattttttggacgcaaaaagaattttttagcttcttttttccaatagggtatgagcaaagaaaatatgtaaatccatgcaacgcacaactctcgcgattgttaatccatcaaaaagcgtatgagcaaagaaaatatgtaaatccatacaacgcacaactctcgcgattgttaatccatcaaaaagaagaacgaatttaatccaaatatctatcaattttaaatggtgcagaactaaaaataatcaagaagatattcaaatatttcaagaacaatacaattttagtatatttgaaaataacttaaatttcgagttagaaataattccccagggtttgatcggatttgaaaaacctaaaagtggtttataaagtttttgaagctctatcgactcaataataaaaatttcgaaaatttttaaaaattttcgagttttccttaaaaccctttaggattttcggagacccctttggtcgaaaaaccaggctaaaaaaatgtttttcgggggtaatttaggtacctgattatgtttctgacctttatttttcatttgggaagcttttaaactgttttttcaaaaaattcgaaaaatctcaatttttggtccctgaaaatttgggcaaatgtttaaaaaaccgtaacataggtttgacaaggtcatttcttgcatttaaatattcaaaaaatgtagaaaaatacagagatttttatgcacattatttgatgtttttatcttaaacaagaaaacaaatattcaaaactttctgaaaatttttcgatttttcagaaaaaaaatcagaaatcctttcagaataggaatacatttgaggtgatcaatattttattggtgagattcctttccaaaaatttttttttgatttttaggcctcgaaaagaggacaaatctttggagaaaatgagaacaaagttggaatcctgaaacagatggtgaaaataaaacagttttccgaaaattcatacatattttccaaatatttatttttctcacattctcattaaaaacatttaaacatntatttcgaattattgttattttcttttttcaataaacttttattaattcaatttattttttcgttacttttggttttgtacttatgtaaatttcagtttattttttgtcttttaatttctcatcttttatcttacgaatcattttccatgggggtcgattaaagggaccatctccgaaaagaggatggcagcgcgcaccgccataccctatcagatttttattttaactatttttaatcatatattattagttaatggttttaattattttttaacaacaacaaatagatataactgatagctttagatgagggcgaaattctctgatatttttttaaaaccctttgacaacagagcaattttcccgaaatgaaaatatttattataattttcatgatataaatcgggaaaaatacttattaataaaaattaaacgagaataaaattgcccttcatttcccgcaaaaaatttattttttcgattcttaattacatgtgcattaaaaaatatttttcatttattcatattataatttttcggtattgggtgtgaggtttattgattaatggaaggagtcccaaaatacaagccttttaattgtgaattcatcagatgtatgaattccaatatgggatagatttgaaaagaatttatttattaatttaatcgtgcattttcatagtcctttatttccgcaataaaataccataggacaaaatactgcttagtgggaggaatagtcccagcaaactatcctttttaattgttaattcatcacatgaaaaaacggatatagaatgatttgaaaaaaatttattaccgaattaaaaaacatttatcccaatataattatttttaatatttcgtgattaaaaattattgcaaaaaaattactaatttaaaaccattatttcacgctttttcatagtcctttatttcccgtactaattaattttcgaagatcaaaagagaaccgagggggtctattccgatcgtttttcttaagtttttttcaaatcataattctatgtgctttaaaaattgttgcgttcacaaatcgataatttccgttgatatcgattaattgggggggggggcaaaaaaaatcgactgaaactcgcgctttggtgtgaagcgtactcgagaataccattaggctggggttttagagttaccgctgtccctttacaatttaatcgttttttcgagttttaacagttactctttatctctaattctctcctctctcctatggtgaatgcgcatctctcttcacagggggggggggggcccagatttttatactaatactactaacgatcctaaattgggcatacgtttggataaatgaaggggatggagtcgattattcggaaaatatatgcttaattaataaactaaacgctaattgatgaatatgccataaatttaaacaattggtatgagcatagaatccattgtttgacatgccaaaattgaaattggaattgaatgccaattcaaaatttgacaattcatttccccgtctt

SEQ ID NO: 20271 - DNA, 1532 bp, Heterodera glycines
cgttgaactcatacgtgcgcttcgcggcagtgattagaagaggtacaacagcgattagaagaggtgcagcagtaaatagaagaggttcaacagagattagaagaggtgcagcagtaaatagaagaggttcaacagagattagaagagttacaaaaatgattagaagaggtgcaaaagtgactaaaagaggtacaacagtgattagaaagtgggcattcaaatagagcatttacggaaattaaggaattgtttttattcaaaatagataaaaaatcgatgtgttatatttttcattttttaaaatataatacactttttattaatgaaaaacaaattatgaaatgtataataattgaatagttatttaaattgaaatgaaaaaaattttacaattaaattttaaaataatagctgaaattctttaattaaatataataaataatttaaatgaaaatcattattcatcaaaaaataatttaattaaactaaaaaaatttattattaataaaaccaaacatttaaatttattaaaagtaatgaaaattaacccaaaaaatacaaagaaaaataatgttcaccgtccggattcgaacctgctgcccccccccccctcagaacatgtcccagaatccccaatcacacagggattctgagatcttgacgatgtcaaaagtaaaatctgatcacgtattcgtgatcagcggcccaaataacgcctaaagacatgtttttggaagatttttggtgaaaaatttttttcacttaaaaaccatgtgctcccccctttggtcccgaatcccaaaagcacttttatttttgtatctttttttaaaaatgtgatagaaatgccaaataaaatttatataatagagcaaaaaattgcggatttttgtagtattttagttttacagtatgacttttcagaaccgagttatgaatttttttctgaaaaatcgaaaatttccagaaattctggaataactttttttcttttgaacattataaaaccaaataaatctcataaaattctcccgattttttgctatttttaaagctttaattcacttaaattgaccagtcctccattgagttatgaattttcaaattttaacccaaatttccaaggaccaaaaaaattaaaaatattttcgaatttttaaaaaattctaaaaaatctgaaacttaaaataaacatcatatttgtgctcaggaccctaatttaccccagaaaaatttttttcaccctctttttcaacccaaaaaaaatttttgaaaatttctagggggcctagctcgaaaatttttgaaaattttcgaaaatgaagtacaccgttcgatagagcttaaaaagctctacaattttgctctaaggccatttttggctaaaaccaacccctgacgagttatgggcccgggactcaaatgtcccgctcaggccaaaaattttttctatttctggaaaaaaatcgaaaattttccaaaaaaattaccaatggatagagctcgaaaaactagtttggaagtggtcttcg

SEQ ID NO: 20272 - DNA, 1767 bp, Heterodera glycines
  unsure (1)..(1767): unsure at all n locations
gcaactttccgctttggagactcttctcgacatttcttatcaggtacttattttgtttgttgggtctttaagctaaagataaatttttgtttgtttagggctcaaatgttgagaagtcctttttatttgatgtttccagcaaaatttacatcgccactgactcttctccggtggatatggtgggcatatcattcatccgttgtatttcacaattttgattttcctcctcttcaggcaacatatgagttgtgctgcgatatgattgatgtttgttattttattttatttttgtaattaagttgaatgatttaggtaacaattgactgaattatttaggtaacaattgacatttcatccatttatgggcaccggaatgagcagaaaaacttccgaccgattggctttgatcaggattcgtccgccgttatcactctccggaccagacaagtcttatttattaaatcgaagaaacattattttgtaccaattatttaatttaggttatttttttgcgccaaataaatgtttatttggcattggtttgtgtgatcaaagaagacaatttcgaaaagcaaggacttatcgatttcaatttcaatgtgtttaaacaggcaaatatcattttaatttaattttatattaattgacaattctttaaagggagtggaagatgtgttcgaattaggcaaaagacggttgccttccctggctgttggatgacaccaaaactcagcttctaatttttccgtttattcactggcattgtcttttatttttgttgccgcatagaccaaatttctatcaaattattattcaaatgaaatttataaagacacattcaaaaatacattcctaattattattgttgctgggaacttttgctgttgggaggggcttttcaaaaaaattaaatcttttgatttaaaattttttttcagagataacaaattgctaattacatattcatatcagttaccatgatctggtaaattcatggtatcagttatgctttaagaattctctatcacctaaattaaaattctttttcgcatttttggcctaatggatttgtttcaatcttcacaggctaatagtgaactcagagttcgacagataccaaaatgtttattttagagaaaaaaatgaatttataagccaaaagggtccacgctttgttctcaaatccaaaaaaagaaaagtatcaattttgtcaaattaatattttaggtctttggcgttatgttctttccgtttccaatctttgtgaagtaacaaattgttgttttaagggtaaatctttgttttgttaaaaatgctttctctcgcaattcgacgtttcatcgtccaacattcaaatggcacatttatgagcactaattttgtcgcgacatcgtcaaactttttgctgatggaccaagaaaatgacaaagagacgaagaaggactttaggaaaattgtgaaactgctcgaacgaagtccgactcagaaaacaaagaaagggcaggaaaaagcggaagaaaatgcgaaaagagaagagaacggaagggaggaggaaaggaccaattggaaggagcacatcagcaaaagtctgcacaaaagttacgacgaatacgcgacgaggaaaagcatggaaagttggaagaggagggcccgaagggacacattttnggtgtgaaattgcaattttaacattgacacatttgaattttcatcggttaagctatatgagagaccggaacttgcccgacttggtcacttacacccatc

SEQ ID NO: 20273 - DNA, 262 bp, Heterodera glycines
aggaggtgtgtggtgaacagtgatagaaagatgaacagagagagagagagaggagagagagagaggagagagagagaggagagagagagagagaggagagagagaggagagagagagaggagagagagagaggagagagagagaggagagagagagagagagaggggggagagagagagaggagagagagagagagaggagagagagagaggagagagagagagagaggagagagagaggagagagagagaggagagagaga

SEQ ID NO: 20274 - DNA, 1432 bp, Heterodera glycines
ggtctcttttaattaatttttgcttttcacaggtattacgtcaacagagactcgctcttctcatttcacaaggcggcagaggtattattcattttttggaatttaagaacattttgggcattttcaacaacaaaaagccgaaaccgattcttattattagaaaagttgtaaggaaatatcatgaaaaaattttttaattcatcacaaaatttcaacgaaaaagaaatcggttttataaatttgaccgaaaatttaaaacaaaaaattcaggaaggaaacaaccgaaacgggggggggtgaagagctctgttcccataaaagtgccaaaatctgttaaaattagccatttccaacaagggaatgaaaatgtcaacctcccaccacctcttgatgaaaagtgccattaaaatgaaactctttttttccatttccaggtgttcttggccaatctgatgtccatttacgcggtacgttttggcatttactccaaaaattttatgttatttttgccattaattttcctctttcatatttttggccgcccattacaaaaacagtccggacgacctgcaaatgttggccgacgcgccggcacatcacctttttgtgctgatggcacccgtgccggctgaccaaagctccgtgccacaggcaaatatttgtggataaattggcatttaattcgtccacactccatcaccgaaaatgaaatccaagaattatcgaacatattcaaaatttaaaaaaaaaatttaaatttttgaataaaattaaatgagtgatgatgaagcgttaaattttatgaaaaattctctaccttttcagaattttctacatttttttattaattgtaatttagaaaatttatttttcccggttcgggaaatgacaaaaaatgattaaaaaatcaaatttatctacttccattcatccattttcagattttggcggttgtccaacagtgcctggagggctccatctctaaacaaagtgtgacaaatgtacgggacaaaggcaaaaagcgggcggccggtgacctcatcccgtggacactttgccaacactttttggtgggcgcaaattggcggtcattttagggacgggagcgggaaaaaacgtcgccgggacataacgtcgccgcaaaatttttttttttctaattttagaaaaaaatctagaaaaattgtcaaaagtttagttagctagcttaatacgaaaaaaattcgagaaaaattcaaaaaaaaatttttatcaagaaaatccaaggaaatttaaaattttcaagttttgtggttttttccggaaattcagcaaatttagtttttattagattttcaaaaagctaaaatactttcaagttttcttgaaattttgaaatttttttttttttttttgcggcgacgttacggcggtgacgttttggggtgtaccc

SEQ ID NO: 20275 - DNA, 2176 bp, Heterodera glycines
  unsure (1)..(2176): unsure at all n locations
tacncaaataattcatttttgtatgcgntcacattcaaacaaagttgatgcccaaactgaaatatttgacgtatttccatccttcggttttcaaagaatttatatgattggagacaacctttgcccttaaattttaaatttaatttgattttgtttattaataatcacatccaattccaaatatttctgcttgattctcgaaatagaaaaacttaaacaaaattaattgaaattaatcaaaaaacacaatgccaacttttgtaggttcacatatgataaacattcaatgaatacattctccacataaaaagtttcattttgcttccttccctttcggattctgaatgaattttaaattattaaaaaaaaataaataaatgattaaaattaattaattaaattacaaaatatttttcttggctggcgaagatcgggaaaagctgctccttctgctcgccttcttctattccatgatcgtgtgttgtgcatttgtgactgtccttgtaaatcggcttccgtccataaggttttccaattccgtacaatgcggcaaaacggaactaaaaatgcaaccaaattcattaaagctcaaaatcaaatttctttgccctgggggctggattttaaatttttggaccagtcataaaatcattcattccttaattgtttttttgaaatctgttatcggaaatcccgacttgttcataaaaagtaccatttgattgcccaatcctgcacatgaacgcctgtcgtgaacacatatttgtcaacttttttcgggaaaagcctggatccaatttgaaaagatgaaatatttttttaaaattttcatgtacttaaattgcggtcgtcacaaaaatgtcaaatcacattttgaagttttactaccgttcatattcttcttccgtcggattcggtttgcacaccgaaccgtcgaatggcattttcggatcgggtggcacaagggaatgcgaaggttggataaacttaaaggaattgaatttgatcaaataactaaaatgggaaaatagttacgaaatattagatttccataaagcccagaaaaaaataaaattaattgttagacaaatccctaaaatacgggtcccttctggtcggattgtttttcgacccatgcttccatggagcatttggagctgcggctgatgaacagattcatcttcagctgttctctttgctcttctgtttggtgtgccattggcagcatgtcaagtccaagaagccaaaggtcggcataatcagacaaaaaagacggaccatttgaacggaggaaatcaatttgcatggcacggccatcgaagtctgagaatggcatgttgggaaagccgagaatgccaatttaaaatatataaattaatattttcaccattttccaccgatgaaaagcgagtgaatggctcagcagtttgattcaaagcaaaaagcacaaaaaatttgtgttgttctgcacccaacggataacttaaataatttccaattttgtattataatttttttttgctataaataattttaaaattaaaaaattcaaagatttaatttactttgcttaacgttaataaaaaaaattcaaacaatttcttagaggcaattgatgactccaaaatgatgacttttcctttgtcatttttcgtttgctttggcactgtgcgaatttaatggcgcgccaaatgattgtgccatttttgttgccatcctttggcatattttgcacacattctttttcaatcgaatttccctggggagttaatatataatttaattaggtacccaaaatttattcactacggtttcatttggtccatggttggtgtgataaatgcggcactcttcccccttgtgcctatgtggcagtgtgggataaagggataaagagagtgatttcgccccatggttaatttttatttatttattttacatttgaaagtgtttttccgtgtgatatcaaaattgttttggaatatttttatgcatttgtcgaacatagtgaaaaggattggggaatggaaaacggatgaggatgaatcagcagtttgataattaaccaaaatataataaaaatccatttccgaatccaacagcaggcatcgcctgtaaaatgcggaatttggccctttttcatgattaatcctgttaaatcttatttttcataaat

SEQ ID NO: 20276 - DNA, 1383 bp, Heterodera glycines
  unsure (1)..(1383): unsure at all n locations
tgtctttggcaagatgaaccaatttntggagaaaatgaacataaaatgtatccctagtcaatgggtcagctaattgcttaatggaatattgatccttttatggcattattttaatggaacccatcggcagcaggggttacggtggaaaacaattcgaaaggttaatgccccgcgggggacggatgatccgagggatatataattacgctaattgcctctttaatattaatattccgtcccggcccccctgcaattacgctgagtggccgtttggtgccggttgttgctgttactgctccgttttgtggcgcctccgctgccgcatgacgccacgcgccggccgcgccacttggcgccataaaagcggaagcggtggaagaactgcgcgggaaggcgacagcgcccgaggcgcggtgatggccattacccagttcgctggcggatttgacggcagccgcggccgctgtcgcgcggtgctggtggcggtggtggtgatccatcaaattgcccagcgaggcggcgtttgccaacggtgccgacgcggcggtggtcatccgacgtccggcacgagttgagcaacgaccacggcacacagtgcagcaagtgtttgtctgcaaatttggagggaggaatttgttttaaagtgccggaaaattttcggggcccggcttatatgggcatacggaaagcgcaaaaatattgtaatttaaattaaaatatttgaatttaaaatttaaatcactttttgacttgtaagtattgtgtgaaaggcaaaaaattatgaagatcatcaaaacaatgctcgagattcgggaatgaattaattatgaccaattaataaatttaatcaatggaaaaatggcaatcagactcgccaccacatcacaccttgacgatgatcgctgatcaatgtccaacggaatgagaattgatcaattttggtcgtcgtcgttttttggattatttggcgctttgttacggtcgttttggcgttttatgttttttttgtgtattgtcacgacagtgatcacgtcgtttggccaaaaaagtgtgtgggtgaagaaatttaggcaaaaaataaaggtgtagagcaggtgctgctgctgcttcctccaaaaagcataaaacaatgccacggacacgggacaccgaaggcgaggaacaaaaatgtgtttagaccgacctaaaagtggaaagcgcatttttaactaattagtaatcattatttttttggagaaatgccaaaaggagaatgtttcttgaacaaattttagaattgataaaaaaattcaataattgcataggtaattgtattttggtgcccgatttaatggcaaaaattcggttcggcctttattgaagtggcgctggcaaaggcgtatc

SEQ ID NO: 20277 - DNA, 1339 bp, Heterodera glycines
acaggcgggcggggaaggcgctccaactctccttcccctgcttccttcccattttatgacagcattttttgtcatgatcaccacgcgccaaagtgccaaatacatggaacaaaagctaattgtcggccaataaatggcaaattagctaaacaatgcttggcatttgctaggaggatatcccacgccgaaggcaggcggcttaattggtgccaaaaagaataaaagcaaaaaaaaagcgagacaaaaataaaaaaatcaggcataaaattatctcaaacgagattttccaccttcgttatttggctagtgtgctcccgttgctgccaaatgtgcgcagcagcattagtactattatttttaatgagactaattagcgtagcgtcgcgccctgccgtgggtgttttttcatcgggttctttccgctggccggccacctgccccttgccccaataaagaggttaattagggaggaggaggggttggcacaacggcagcaggtggcttttgaatgactggcacagacaaagtgccaagacggacagtcacgtggggcgagggaccggcatggcaataatttttgtgcacccttcactgaatttggcaaaacaagcggccaaagggtcgtcgtggcatcttttaatgaatgataatgagtcagaaaggattggtgggtaaatggttttcaatgttttcaatgttcaaaaatgggatttttaaaattgaaattgaattaaagggcaatttaaaataaaaatttaaaaattgaatatgtataatttatctgtaaaaatttaaaataattatagtggactaaatgttccaaagcaattcttaattttcaaaaaataaaacaaaaatctcccctcatttttgtgttgtgccattgatcagcaaacattgctgtactgatcattgatcctttggcttttgggaggaataaaattaaaatgacggcgctcaactttccatgaatccatcagcttaaaccgacggggcgtggaccgggggaaggaaacattgcgccaattgggctccaaaattagcagctgcgcatttggagggatcatccaatggcattggcatggagaagaatggggaatcaatgcgaatgtttcataaagctagacgaatccttggaaatggttttggcactgcaaattggccatttttggcacttccaaagaatggggggctaatgcgtttttgtagcgagccaaattaattttaaaattaatttatggaatttaccgcaatgggaaacaaaaaaaaaatttaaatgcacgaaaatgaattttgggagaaatgcgcaaaatgtgagccttcgtctattcccatttgc

SEQ ID NO: 20278 - DNA, 1782 bp, Heterodera glycines
caaacccaattgcacagccgcagctgaacgacggcgaaataagaacgatggtcaacgactgcgaattcattttggtgagggagaaaatggaaaaaaggagagattaattggaattatgatggtgccatctgtttcaggtagaacactcggaattccactcgattatgtcaacttttaaccgacaaattgagcaggaacaggacaaaagtggcaaactgataatggaagtcgaacggaggtaatgccgacaatggacagactcattttctgaacgcatttcgacactaaatccggattcttttttaaattttgttttagagtaatcactaaagcctctcccgaccgactgctccaacaacttttggtgggcgatgaaaatgccgtgggttcggaagaagtgccgtccgactcgcattttgtggaggactttttgctgatgcacagagtgtttttccgcgactctgcccaaattgtgcgccaattgctccgttggttccgcgcggagcccaaccgccgagaccgagtggcgcggataatgctcatttggttgaacaaccatttcgaggactttgaagggggacagagcggcagacaaatggccgaactgttggacgaatttgacgaagtaacagtggtggtgctaataaactgatcaattaagagagaattttttaattaaaggcaattaggcgtatatttttaatctctttcagctgttggccagcgcaaagatgttcaatcaccaaagccttctcagcataaccgtcagtgtgaaatcgcaggcccgaatggtctgacgaattaacgaaaatatttgtggcaacaagtttgcttgtttagataattttgacgaggtcggacagagctgaaaaactcgacttccaactgattggcaggaataatggcattttcgtgatgaatgtcgacgcaaattcggctgcggaaaaggccggcatcaaacgatgggacgaggtgataggtgtaaaaccatggatatgctgctgaattcagcgaattttttggaatgaattattattcaaaaaataataatagggacaacgactctctgtccggtctaatgaacgctaatattcaacgatttgttcagcttttggagatcaatggccaactttgccgctgcatgagcctttcgaaagcattggatttgctgagagaaagcacccatttgagcatcagcgtcaaaaccaattggattgggttcaaggtgggcaaaggcgcaagggcaattaatcgttaatcatttcgatcattaccttcaaaataactcgagaaaatcacaaaggacaataaataaatggaagagttaacagaatcacaatttattctttcattcaggaagcactgctctctcaccaaaacggaggaggcgatgatcagtcggactctttgcccgttccctcctctctcaaccctccggcgttttcgtcggcggtgccgtcgcggtaccaaaagaaaagttcggcaccggcgatgggaggaggcgcaacgatggcgcaacagaagagagaacgacgttcaacactctgttccgcactccaacagcaggcggcggaggtctcggcattttttcatcctaatattaagatttttatttaaaattttcgttcaaatttttatgcatttcaataaatccttcattgactttgcagaaatcgtcggtccaaatgggctgtggcccttcgtccacccccacgggctcaattggcagttgcaacggcggaggggggacattgtccagcaaaaaagtgctcaacaaactgc

SEQ ID NO: 20279 - DNA, 2706 bp, Heterodera glycines
  unsure (1)..(2706): unsure at all n locations
atttagaaatcattctcattaattttctttgtgttccttcaattatttaattttcaattttcatttttccgtaatttttcttaatttttgtcaaaaattggcattccacgtgccatcattgttttccaattattacattttttgtactagttacactctctctcaataaatttgattaaaatttaaaactttattttcgtttaatccaccacaaaatggcgccgtcgcccgtcggcgcaggcgatgaaaattattgcggcaaagggaacgaaaacggcaaatgccatccgcagccgttgccgttggccaaaaatggcaaaaatggtggagattttttggtcaaaggagcggcagaaaatggcaaaataacgacgaacaaaggcatcatgaacagttgtggcgaatccgtcgatgaacagcacacggcggcattcgattttcgccatttttccgccatggaaaaagggcacagagtgggcaattaacggactaattgattgtcagcgcaaattaattaattaatcgctgtctaatggacatcgattatccattaattaattgatgtttcgctgtactcttaagcgccaaaaatattgaatgtttcattttcgtaattagaaaatggaaattattctaaattattcccaaaggtctgtaaattgttcgtgctgaaaaagttcgacgtttcctttcgccacctttggctcaatttgcacactcatcagcttgtactcaccaaattggcaagcagttcagcctcaaatgatgagcccggtccgacaatttaatggattttattttattttaattaaaacaataaatttaattaatccaattaaaattactatttaactattatctgaaataattaatagtttatttttaaatattaaccaaattattcttaattttaaaatatatttttaattttgtttttgcatttttattaattttgctaattttgtttattttttaattcatttttcatttccccttcgcttcttctgtagttgcttccacttctgcttctgtttcggcgtcgtctgatcattttttgcccaacggacttttggcaaattcgggccgaaagggcagtgttttgtcagccgaattggcattctgttcaccgagtgccaagtcgcaaatgttggacctgcgaattgttaaagaggcgcaagtgagcaaaagggggaggaaaagccaaaaacaatgggaggaagcggtgatcagaaaacactgatcacgcactgcccattgatcataaaagcaaccgataaatgaatgagggcattaagcattttaagcaaagtcattggggatataagatgaagagaatttggcagagattggcttgaacattctaatcatttgatcatggcattcctaatcagttgatgccattcaaattcaattggctggctctcttatgcttttggctatcctttcgaaagctggtttttgaggtgctgagcaaagccattggcacgatgcaaatcgcggagaaatggcgccgggacacttcgctgcagactttcgacccggaactgattctgatcatccaatggggcaccgcttttgtgctcaactcgtggcttattctgtgtaagccgacctgagaaaagtgcgccatttgatcatcgggcgtctgtctgatcagaataccgaccttttgaccagtgtgcccaatgatttcttacatctttttccatatcatttggctaaaatgccaattgcttccgttttgcgttcagtcaacacaaaagaggcctgccagctgtggtgccgtgggctgcagcagctgtgtgccgtcggcgatccttcttctgatcagtcgcatgcactcgtcgtggagcggtggctgcgcaaaagggtatcatttcttgatcaatctcgatcagtttcaaatttaaaaatgaatttcaatttggaattttgcttttcagttccttgccctgcttccccatccgacaagtgccgcgtcggtgaacatcaaacacatgaagccgtttgtgcagcaacggctgcagtgcaaagtgagcagcaaacaattgcaggagatcgccgaggtgggcaattaaaaatggataaatgattaattaaaagtgaatcagtgggtaatttaatagggaaaatgaccaaaagcaaaatgaaataatttaattcaaactaagaattaaaaattaggaaaataaattagctcacagttttaagagggtgaaatattaattaaatgatagcacgtcaattaaattgctccaattaacggattataaatgtttaaaattaaacaactttaaataatcaaatattatctgatcatctgatcactgatcacaatttttcttttccttcaatgctttttctcctttgtgcccagggcgaaatgggcttcgaggcctttgtgctggcacataatcggctgctgaacttccacgcgttgttcgactgtatgttcagcgagtacgcggacactgaacacgcgcaattggtgccctttcaacgctttgtcgactttttacgagacattcagcacgacgggctgggacaggtggttgctgatgaggggcgggcacggaaaatgaatgggccattgattggaatccgaatttaaatccgaatttggcacaataccgtacagccaaggggcnctgtagctcattaatttaaagtgaattcggaattaccatctcaaaaatgatgcaaaat

SEQ ID NO: 20280 - DNA, 1202 bp, Heterodera glycines
  unsure (1)..(1202): unsure at all n locations
agagacttagttgagcgcactgcaaggagaaccctaacacagttcagcacaaaanaattaactattcacgcttgagaacgcgaagtntgctgcggagaatggcaattatatgcagaaagtcaagtgcatatatctcagcgcctagtgcatgaataggagcgtttttactgttttctgagagcgcctgaaagcagctttcgaatggtatagctgatttttttggatctggaattttcgcagagatatatgcaaattagtaaccagtgtttcgtttcaaattatttctcgtattctaacgaaataattttttactatgagtgtttggtttggaaactgtctaaaatgttccgggtcgcccacattgcacaattttcttgaaaataccatgaaaaatgctctaactccaagagacttagttgagcgcactgcaaggagaaccctaacacagttcagcacaaaaaaattaactattcacgcttgagaacgcgaagtttgctgcggagaatggcaattatatgcagaaagtcaagtgcatatatctcagcgcctagtgcatgaataggagcgtttttactgttttctgagagcgcctgaaagcagctttcgaatggtatagctgatttttttggatctggaattttcgcagagatatatgcaaattagtaaccagtgtttcgtttcaaattatttctcgtattctaacgaaataattttttactatgagtgtttggtttggaaactgtctaaaatgttccgggtcgcccacattgcacaattttcttgaaaataccatgaaaaatgctctaactccaagagacttagttgagcgcactgcaaggagaaccctaacacagttcagcacaaaaaaattaactattcacgcttgagaacgcgaagtttgctgcggagaatggcaattatatgcagaaagtcaagtgcatatatctcagcgcctagtgcatgaataggagcgtttttactgttttctgagagcgcctgaaagcagctttcgaatggtatagctgatttttttggatctggaattttcgcagagatatatgcaaattagtaaccagtgtttcgtttcaaattatttctcgtattctaacgaaataattttttactatgagtgtttggtttggaaactgtctaaaatgttccaggtggcccacattgcacaattttcttgaaaataccatgaa

SEQ ID NO: 20281 - DNA, 2392 bp, Heterodera glycines
aaattttaaattcgcccctaaattgttgtttaccagggtctctagtatgcttaaatgtacatatattgtgtttgcctgtattcaatgtttgccacatttattaaccaggtttattacacacattgaacaatgaaacaaaagtagtgtaaggcccattaatccggtgtaaaatccttaatccggtgtaaacccttgccccccccccctgggcagagagatgcgcattcagttgttatttgaaatgaatggaattttcattcttttttcaaatattcctaatatatatcattgtagattggaatcccacaaaagcctgctcagaattacattcggtgcctgatattatttttaaatttaatctttgttaaagatttcgctggcggctgttggcaaaataggcgcttcgaatctgcacaggtgttcatttaattttctgtcatagctctgccaaactatgaatggtgtgagtaaggtttaatgaggaaaacgagatactcaagccttttaatccatgaaaatgtataatcttattaggtgtaatctaataaaatcattacattaaaatgaatttttggacaaaatttgcgattttaaagctttttgtttttactaaaatattaattggggtttttacatgagtaatcaatatcttaatatcgtcccgatctttttcaatgccttaagcttggagattttaaaaggtctaagttgggaagtgttttcaattatctagacatattcaaaagctgtataccatcttatgtcacaaaaaaaaagcattttcaagggaagaaaattaatattataatttaaacattcaaaaatgtagaacggttaaaatatatattcaaaagaaaaggttcgggaactcaaaaggattgccttttcatattaaattatttattgaaatatttcaaatttttaaatgcaaaaacaataataaattacgttaaagagttaaaagggaatcttttaccagagcattatttgtatataaattagctcagcgggaaactttagatgaaaatcccctaccattgagtttgggattcaattaaatttgaaatagaaagaagaacaacgagaattacatggcaaagacataagagtaattatttttaacttccctaaatccaaaatctaaaaataatgatgaataacagaaaaaaacaatttatggggaagaggtgaagggagcaaaaaaaaaattatcaagaaaaattattttttaaattgctacgaatgactttaaacaacatacattcagaattttcaattttattattttttttaatgggatttgaattatctttgggtcattgagttgactgatgataattaattaattttgcttaaattttcaaaattttgggcagcctatattttgaactcgttttttaatgtaaatcgcgtgcatattgcgtaataaatgagaaattcgaaataataaatccatcaatcaattttgcttggcagtttttcagaaattgttggtcaaatttgcgaaatagttttcgattttggaaagaaatatggtacacagcaccaacaattgaaaatttcaattttttaatttatctttacgtttaatttattcgtcttattttattatttttattttaaaatttttcgtcggaccataatttctttatctttatgttcagttaaagaacactttcgctctttttctaggatttggaattttaaacacgtattattaaattttaatgaacagcattcaaaaaacagcgacaaagtatttgggatatgatgtataggaacttgaattatggttgaaagtattttcacatgtcacatttgtggcaggggaatgattgattaactttccgcggcggtgctcggcagggcgacttcatggcgcaccggtggagagggagatggagacaaaaaaaaatacccacgcggttttggaaatcggatttgcgtggcggcgactttaaagggttaaactaataaatatctttaatttgtgaacctgttcataaatcaccaacggatttcaccccttcaatgggttaggggaaaatcccgcggcggtaacttcaaagggaaacaccccttcaataggctcgggattttgcggggaagtatcacgtagcggcaatttcaaaagaaaataccgcccaagcaagcgggcggtaacttcaaaggaaaataccccttcaataggtttcagattttggaggggcccttccggtacccgctcggttttgggtctatcacttgcacattgtgctggaaaaggataaaaactcattaatcatttcaaaatgggtccatattgtgaaatcgtttcaaaaacggaaagcctatcaatcaaagatttaaaaaaaatttttggccccatattgctaaaaatcattaatcatat

SEQ ID NO: 20282 - DNA, 1337 bp, Heterodera glycines
  unsure (1)..(1337): unsure at all n locations
aaaatcttcaatttttggtttggggtctatttgccccttacaaaaaatttgtcgtttcccgtgatagcttaaacaaattgtatgtttaacatttagctgtgcatacacatcggtggcggtgtaaagtttgactatttcatgctcaatttgcacccgcgcggtccaaccgttgcggacgaaacgtacgacgagcgcgtgatcgaagtgcgccgtgaccccaaccgaacgccgtacattgcgctagttgcgggtgtcaaggttcctattttggcaattttggatacatttagtaatttgtaaccattgagaaagatgtccaatcctccaaagttcttacgccacaaaaaaccaaaaaaatatgaaaaaatatagtttgtatatgcgagaaaaaattatggggcctcaaaaagcgaaattttgactgtattaccttgaggttgggtttggatagggcaattcgattgaaaactgatgatcttttttgccgtcttatcgggttctctagacgcccaaaacgcaaaactttttttttcaaattgcttaattttgctccgttcagggaaagcgttggatatacgccacgcagaacatgcaggccggccaaatcatacaaacgacgtgtcacattccggaacggccggtcattggctgtgagggcaactcatacccattgggtgtgcaattcgtttttgtaaaaaattaatttatttcatttttgaatgacacgttgttttttaagtgctacgtcctcctcaattggaaaaattttttttatccgaaatcctttttcgtttcaaaatccgtcaattttcttttgcaggcgctttggtcgaagggacaatggtgaattcgattgagcttcatcggaacaaccctaactgtatttcatttttttgttgaattttcgtacatttgggcggtgaaaattgatcatttgcgtcctctttagcgcacgtggtcatcaccgaggcgggcggttgtgccgaaattattcgacacatggacgaattcactgttgtccgggttggtcattcgttggtggtcccaaattttaatagatttcctctagaattgaacaattaactccccaaacttttagccattaattccaattccatttttttcagatgccgaacaaatatgaatacgcggtgcgcaaggttagtggattttgcatttgtttttcaattttttttcaaaaatttttttccatcattaaaggaaggcatgggcggttgttggaaaactggtcacacgtggactggggagtgngttcgaacatgtttttttcaatttttattttattattttgacagtaaaaagcattggggctctgc

SEQ ID NO: 20283 - DNA, 985 bp, Heterodera glycines
  unsure (1)..(985): unsure at all n locations
gctgtcctttcatgtttaacgcagttaatttatgccttttgtcagactttcnccagtggaatcggtgttgctctgttatcggcatggaggacaacgccattttggcgagaattacctgcaagaattggagacaaaagctcagcaaatggctgagcatggggccgaccaaattcgatggcattacattggccgaatacaatcgaacatggtaactctgcatctttgacaggattttattcaggcatttcaaaaaaaaaccacaaaaagataaatcgcatttgtgccgtgcccaatttgtggtgtgtggaaacggtggacagtgttaaacatgcgaatggtcttcagagggcaatgaatgcgatggggaaaccattgaaaattttcattcaaggcaaaaattgcagaaaaattctaaaaacaaatttgccaccaattttcagtaaacacaagcggcgagctcaacaagggcggtgtacatcctgaaggactgcttccattggccacacatgtcacggaacagtgccattctttgacactgatcggtgggtagaggtccaaaattgaaaaaaaaatttgttagaaccccgctacgacctgccctaagattacggaatcaggaatcccgcaattgtgtccataagcatttttgaagaattttaaaggtttgatgacgattggatcgattagccaaagtttgggaagcggagacgaaaatgcggactttgcactgctccgaaagttgcgtgacgcattgcaaacggaactgcggttgtccaccgagttggagttgtccatgggaatgagtgccgactatcaattgggtgcatgccgattccgatcactttctcatcactgataaactgttgttcaatctattttcagcgatcaaatatggcagtacaaatgtgcgcgttggttcgaccatttttggtgtacgaaattatgccaaaaaattggacaccgaagagagcaaataaatttccaa

SEQ ID NO: 20284 - DNA, 1563 bp, Heterodera glycines
  unsure (1)..(1563): unsure at all n locations
cattttatactttatattaatgtatataaagtttaattcatttaagtatcaatatattaattaaattctacacataaaacttgataattattttttctaaattccaaattttatatttttgatgtttatatatttttcaattttgtggacagtttttaataaattaattttcaatagcagtattattgtttttataaatgacaatgattaagcttcacttaagaaatatttagggttttaggacaaaacaactattgtgagagaccggtaccgatatattatttcaggaaaaacaacaatcaatttcaattatttttgagataaattgaaaacaagatcgttagggatttgtttatgtatttagattatatacataatatagttttttcctttaagaaaattttcgaaattattattatttttttaaaattttatgttattatttactgatctaaatatttgtggctttttttttaaatgtgtctatgaagtcatggtgctacggagttgaaaacaaaagctttgtgtccaatttttaccaattcaaatgtcaaaacggtgattgtcaacagttctctgcgatctgtctttacaaaacaaaacaaaacacaaataaatttataccaaacagattaaatacgacgacaaacaaaaataatcaattcaacacaaccttattcctcaactaaaaaaaaccaccaaatatattaagtctcttaaaaagaatatacgaaacgccatagaaattaataatttaaaattgaaatgaagtcaattagcacatcaccgcccactagaaaagacggtcccctcggcttacagtaacaaataaaataacaaaaacaattcggctaccgatcggtggggttcaaggttgtgctcttaatgacgacgacggctgatcatctcgtttccgcctctgtgagcctgcgagctataatggtgacgaacagcataggggtgagatcgagaagtgcgagaatgactgagagacaattcagagatgtgatcagatacagatggaactgagcgagatgaacgacgaaaaccaagagcattatcatcggggaaatttgggatttgggtgacaatccaagcgcgaaaacatttcaatccctcagacaaaattttcccatccgaacgaatccgtgtcatatcgaaagtctcgccgaatcgccacatctccaccagacttcttccgctcgttgttagcgcgatgaaccattcgccagcgactgtttccaggatcggcagcagttcattgtacagggtgtgctgctctcggacgtacggtggtggcaaccaaacaaaatgaacatgtttgaatttggcacaaatcccacgaatccgtccacattcttctgcaatttgcgccacggttttgcctcgtagcatggcatcccgtcccaaaatgatcagtgccgccacaactttggaagtcagcaccgccttgtccagtgcccgaataatatcgccaattgatccgttgacggtcccgatgaaatgtgccgagatttggtttcccgctccaccacagangtgtgcaccagtggagtcgccgat

SEQ ID NO: 20285 - DNA, 2687 bp, Heterodera glycines
tatatatatcaatttacaaactttacatcaataaaatttagataaaatatttctatatagttgttttaatttgtagtttaattctcacccaaggtggcagtttttaagaaacgcctacttggcagttttttaagaaacgcccacttggcagtttttaagaaacgcccacttggcagtttttaagaaacgccctggcagttttaagaaacgcccatggtggcagtttttaagaaaccaccccaaacgccgaattttttgtaatgcaacccggcggtgccgataggcccagcaaaattagaaattttgaccattttaatagatttaactgaaaattggccattttgggggatttttttcaaaaaacagcaaaatcaataaatttcttaaaataagtaaatcagcatctcaaaaaagcattattgacccacatcaaatcatcaaaattattataggttagctatattaggattctacgcccctaaattaggctattaaaatatttaggaataaaatttttcttattgtttgtcaatgcttccaaattgccttttgactttggagtcgcttcgttgccctccattatcatttgttgacgcgcaaattccactgctatttttgcattaattgcttttcgctgggcctccaatctttccaattcatttccatcatcggacagtgcaaaagaagggcaaagattgtctaaaaagtgagagagaagatttttgtgttttattttattattttgtaaattattttttttaattattaaatcgcgttttttgtctttctaagtgaatggcacggagttaagcgttttaacgattttaaactgagctcgacattttgaaaaaacctgaacctaggttctgttggaactggacctaggcctggatttccagattgacctagacctgacgaaaaacccataaaaaccaaaaactcagattcccacaaaatggccttgaccctgggcctggtccaggaaaaatccaggcccaagtcgagaaactaattcccaagttttatattctttaattgtgatgtcattttgccgttactttggtctgaattgatgtcccaagttatgagtgatgtgttcggtgtgcttgagctcattgtgtgtatgtttttgaggcaatagaaaaaaaaatcaatagggtcaatcctaaaagaggaaatcaatattttttgacaataatgttgacatttattaatttaatttaacactagaaaagggttttttgtgctaaaaatcctgaaatatgtaataaaatataaaaattccatgaacaaaagttaagacttttatttacatatttttacatatttgataaacatattttagactttttagcatttttcataaatttaggaatttcttgttaaaattaaaaaaggtatcctaaaaaacgggttttttaaaaaaagacacaccaaaatttagttttttaaatgtacaaaaatgtgattctataccttgacatctacatatatgaaaaaattataaataaatcaaaaaataaaatattcactgaaattcgcatgaaattatctacgtatctgccaatatttagtatcaaactaaaataagaagaataatatttcacaaaatattgagaattgtaaaattcaaaatttttcgattttcaaatttatattttttaattcccaaaaaggtcaagccttaggggtgtattttttttgaattgtattttttatgtaaatttgccaaaaatgaccaaaatgccctaaaagcccaaaaatggcaaaatatgcatttattctcgaaaactcccaaaatataaaatcatacaatttataaccctattaattagttactaaatacatcgcaatcataaaatgtttataacattatgtaaattagtaaatgcagactttccgatagaacataatttggtttttaattattaattaatttaatttttttgtgtacagtgctcattgcaaaattttttaaaccattgtaatggataaatttgaatttttttatctataaaataataacaactatgaataaataaatctcagataaaaaaaattgacaacaataggccatataaatgtaactcttttatttgttattaagctcttattagtttttctgttatatttcacactatttctaatagaaaatagatgcatattacttttaaatcaaatatcatggggttgaatcgttatattagttaataatcctctttttgtgaacctttttaacaaaacggtaatagagcattttaattttataaatggtttttaatttataattcttgtcaaattataaatttcctttaattattccaatttaaaatgaaccattttacttcaactttatttcaactcagaattcattttaatcaaaaaatttgaaaaatttttttaaatagttatttttcacttcgtatgatttgtttgaatttatttaacagaaagatttgtttaaaaaatataaaaataaatatttcttataagcattttaagaactgtttatttaatcggaagattaaatttttaaaatattaaatggctttaagctccgttctttttgcaaatgatcgaggttttatttaataatcattcgttacgaagccattttctaatatccttttcttctctcttctaggggggtttactaaatgttgttgaaatattttttataattatca

SEQ ID NO: 20286 - DNA, 1380 bp, Heterodera glycines
ttcaggatggtgttggccagtgttttcgttgattttccggatgggaattgggaagtcaccaccagagaacagtggctggtgatgagacaccggagggaagtgggcttgatccttcgcttgcgactgtctgcaatcgattcttcgatacagtattggaagattgctgatagtaagcttccggggtttgcaggttcatcctcgatgctgaatcggctcttcattttggtgtagtgaaacttttcgttgtgttccaagcttccttcaagcttcttcacgtactcgttgacaggtttattcgacgaaccctgaccgtgttgaacggatccaagcacgtgggctatgcccaaaatttgattgatgaggaagccctgtcgaggctttttgccgagaattgagtcaatagaaaaatcagtgaagcgcttggacatttttaatctattttaattaaatattattttttgtgttttttgaataaataaaatgaaacatggagaaaaagcaacatatttatatatggtattcaaattggcatggatgtgcaaaatttgtgtatcaattcagttaaatgtgttaatttcaaaaccaaccattgacctgaagagcagcgcactgccacccatgaagcacaagacgacagggcacctaaacagctttggaaattagaattgtctaatgcactacctcaagtcctaaaagtcaaattagaaattgctgccaggataaacggggttctgtaagtcgagctcccgccctggttaacagcacagcaaataataataattatttaaaaatagagcaaatgaaattatgatgcccgggtgtgtgttttaaagtcgtccaaatgtcgataagctcctcccactaatcaataattttcgacgctatccctcaaggaatgtatttttgaatttcttagtatttggcacaattcccaagggaattgtgccaaatgctaagaaattcaacacgttccgcccagtaatcgataattttcgacaccaataccctgtagtggaggcattttcaaattttcctttgattttattcccttggggcttatcgtaagacaacgggtcttccgatattgagcccttcgttgccaatgcaaccagtcaaaccattcatttcatcttccccaaaatgaacaagcaacgtttaccatctgagctgatttgcgaaatcatcgccacaatcccgcttatgtacctatttggaggaatttctaagaaaccaggtatttttttattttaaataattatttaatgaaaaaacaagggagtacgcgtccgccatctggaatagcggtcatcaacaataggttcgaaatttttcgggccactggacatagtcgcttcattaaagtggtcggtgtgattctga

SEQ ID NO: 20287 - DNA, 3073 bp, Heterodera glycines
  unsure (1)..(3073): unsure at all n locations
cttcgaattgtccttgaattttgaattaatttcttttacattattatttttaagaaccataatttgttgcgggcttttgtagtaaaagtcgtaaaagtttgagtagaaaaagtctgtgccgtaagtgacccgcacatcccccaccaattcattctcatcaagctgatgccttaattaacgaaatgcaaaataattagacttgaccaatttaatcaagcaattaattaattcccttttaattgacctttttggctgcaccataaaattctgaggctgtggaatatctacagaaattgatcccattttttgctcttttttgccgctgtttttttccaataaagcattgatcatacgaacaacaattttggccatcactttggccggcacttccaacacaaattttcttgtgccttcgcttttccctttatggaagaatttttggacggattgccaataatcggccaagaaaatgccacttttctgttcattttcaacgtgtgaatttgtcggctgatcaacagaatttgtgccttttttatttgctgtgggcaaaagcggcggagaaattaatttccgggaaaaagtgaacaaacggtacactgaacaaaatgcggaaatgaaagcaataattcgatgaggataaacatttggattaaatagttttaattttcaattcgactgttaatacgcccttttaattaattatcatttttatttttaaacaattaaattaataattattattttgttttttcccactgattgtttctccgctttttgcctcctccactgcttcttcctccttgtccaattgcttcttcgcttgtgccgttccgctagttccatccgattggccaatgctcagagtgacaacagtggccaaagcgtcgcccgccattccgtcgacggcacaattaaatggcaaaatgctgacaaaaaggagaagcagaataattgggcagcgaatcatttggcaattcagcaattaaaagaattaagcaattggaaataaatgttcgctttgaaaggaaaattggcaataaaattaatttatgcttttaaacgcgtttaattatttaattattaatttttattgcttccgtttgtctattaaattttgttaatattttcttaaggcaactaataccatattagggaagcaaacggaaatatggctttatatttattggcaatttatgcttacacatagtgacacgttaataaatgttggctggtagtgcgtggattttcaatgtaaaaataaaaaaaaatcgtcagtgccatttgggggatggtggggcctcggcagtgccattttcgtcggtcctttcgctttgtccaaaaagaaaagtaaaaatttcataagaaaacttctaaaattcaaattcgaacaatttatttgaatttttatatatttttgcattattttattatatgagaggaacaaaaaacacttctctgaacatttatttataaatgactttagcactaaaaaacacttaattttccgctgcgctttttcacaaatattattttgaaatattcaaaaaattaaataatttattttattattntagatcatgaaattggcgtttgttcgtttgaatgttcttacggtactttgtctgttctgttcaatgagtcattcctacggtaatccatccgacgaatccgatgacgaaatttgcgaggaagaagaaaatgaagcacaatcagaagcagaagaagcggacgaattttttcataattttaacggcacaattcaaagtgaaagagaggagaaaagaacggtgaaattttaattgaaaaggattttattaattttaaatgattgcctaattaatgaccatttatttgcaagcgcaggttgtcgaaatattttgccgaaatacaaatgacaaatttcaattttccaccgacgacgaggggaatttcaaaattcaaatggaagcgaaaatcaaatggaaatttcacaaatgcaccaccggactgagaatggcattttacaagaaaaaagtgatggaaaacaaagtaagacaaactgaaaacagacaaattgacaagcgaaaagaccaaatgaccacaaatagagcaaaatatgcctataacattcataatttgcttcaaaaatttgttgtttttcaggtgccaaaatgtttgcccattattttgcggagtccaaaacggaaattaaaaaatgcaaaaagattggatatttgtgttgtcccaattcgcatcaaatggcttaaatttggcccaaaaataaatgcagaagaagccgaaaccgaagaaaatgacgaaattttgagaaatgaatttgcattggattttgatgtggaaaagaacgcgcaaatgaacggacaaattagaaattgcagtgatttacattctgctgaacacaattttgaaatgattttcaacaaatatttcgatgatggaaaaagtaattacctaattataattagcaatttattataattattaaacataaaattaattaataattgtttatgtaattaaaaggtgttgacgaagagggacaatcatcgaaaagtaaggaaaatgggcacaaagtgacagaaaagtaattaaaagggcaattaaaaagagggaaaagcaacggaattgacaaagcgaaagcatttaataaaatttgaataataatttatatttttatttttcagcttaaaatgaggccgaaccgtcgcaataaatgaaaaaggacgagggaaaagccaacttttaagagattctgttaaacactttgataacatttattctgatccgacttatgggtttaactttttggttaatttttgctattgctttttgtaattctttggttctctataaactctttacaatttctaagattcaaataaaattaaaatgactacggtaatcgtacattaaataccacatttgtttagccgaatgcccttcaaagaaacagcaaaattcattattttacttttgtgtttttaatcacataaaggaattgaatttcgttttgctttttgtgcctatttcattccgttttcgcgatattttcgtgcctaattactactgatga

SEQ ID NO: 20288 - DNA, 1386 bp, Heterodera glycines
ttttcgaattattagatatctccgacagcacacactgattttcatcccccgaattaccgaaattttttcccataaggagggctacgaatatatattttttaatatataggtaatatgtataataattacaataatattttaaatattttattatattttagaatcaatatttgtattgcaaaaaagtgaatctttttgagagtgcaaccgcatgattatgacaatttttcgattttataaggaataatgcgtcattacactgaaaattgagcatggcacgtgcctttggcattaatttattacaaaaaaaaatttcttatgcattaatttacatgcgatgggtaaggggccaaatttgcctttttgggatcttaaagatgtgccaataattgatttggcaacaaaagctattcctagtaatgctaataaaaatgcgaaattaattaaaatatttcatttaaaaattaattttatttttttatgcttaaaaaaattttattttaaaaatgtaaattaattttataattaaaacagtaacatatataaaatattttaaatataaaaataattaaaattgacaaaaaatattgaattatgataatataaaaaatttttgaataaattagcctaattttactaataacaaaactaaaccactcatgtgccatttgattagaatttttagatgttttttggtcattccgtcatccttttttgcttcatagcaaatttgtattccttttattcatcggcggatgaagttgttaagtgtccaatttgtcaggaagaatttggaggaaacgcgcaagagaagcttctttatgattgcaatgtgagctaataggtttaataattaattaattaattaggtcaattaaatcataattaatttttaaattccttaaaattaaaatattaaaataaaacattattttttagcattgcattcatatagcatggtaagcattcatttttcaaagtcttatttttcattgacccctttttaagcgaaaatccgtcgaaggaaaatttttgttttatttgtaataaagcagtgaagcctaaatcagcagggcatcaggtatttatttggttgcacatttatcattaaaaaatttaatttaaaattttaagttaaccatccaatgatttaaaactaagtgtattgatttttcagttagtcctgtgtccaaggctgtaaacagaaaaacaaaatttttttagccaaaaactaagcaaatttgtgttccacattttaggccaatttagttaaacaaaaaattaatagaattttcaaaaaagcattaaaaccatcttttaaccaaacatttttattggtatttaaataaatcaaagtttcagatgtttaaaataatcataattttt

SEQ ID NO: 20289 - DNA, 2167 bp, Heterodera glycines
tgaaaatcataaaaagccgtttagaaatgaaaagcggacaaagtcatcaatattccagtgacaatttgaagacggggtgagaatttcggacatttcctaataatgccccccccccaaacgttcagcgtccaggacactttctcggaagaagcttcgggtcggacggggctgttcagcggaggcgctacagcaaacaacgaggtaatgcgtccgccgacggctcatgagcagccgatttacatgagtcgggaggcagtggtctgaggagatggacggagccgggcgggccacggaggtggggaccaccgccttaaaacgctcacaacatcccggagatatgctcttggggttttgattgaatgaacaatagcagaaggggggggagggcagtcccaatgtaatttatcctaatttctctccctctctcttaaatatttcgtaattgaaaatgcaaaaaatacaaaatacgcttttatccgctgatggtttcggcttttggtagtccgtttttttcgttaggggatttcggcgtgccttacccccttaaaagccgacaaagtccgctcgtgtcccatttgacgccttccattcgttttccttcagcagccgaatccctacgacaccgccgttcacattgccttctccgactcgcgaatctcttccgtttgatgattgtccgtccagcactttttctgctcatcagtcacttcttttttcgtccagtcgtcctccatgtttctctttttcttctttctttgttcgttacctctattaccgtatttctccgtcctaccatttccacttattactgtattatctacacgaaatcataaataatcgctgccgtaccattggtctcatctctttttatcctcctattacatattttcattttattttttactatttccatcactgcatattatttaattaatttgttggtatttgtctcctttcctatgaataattttattcaatattttgcagaaatagatttttcaaaacaataaaaccatcttttttgttttttgattgcattgttttgattcgctttttgcctatgtattatgtttcaaagttgtaatgattctgataaaatgaaagcattacctcaaaaaattttcaatctttttgaattcggacctggttcgaaatggatgtcatattcgtgatcagcgcaccaaatagcccttaaaacgtgtttttttctggtttttttattctttatttttgtggagtcacccccaactcatccataacactgcgagtcatcgtcgtggtatttttgattatgcggtcttggtcgtggcatttttatgcatggataagttgggtctatggatgagttgggtatggatgagttgggtatggatgagttgggtatggatgagttgtatacgcgcgcttgtaactgctgtatcgaagtctaccatgagtcgtgcatttgagtgcgttcttatacatacatcctttttctgtatgtcttgaaatacgtatgttagcttccctaaggcgtgtatatatattcctcggacgaggtgcgtccttggagattcagtccgatgcagggcacctccaacccatttgacccactgctcatcatagtcctcaatggaaaccgcaaaaattcttgaaaaaacaatcctatgatgcttacgattgatatttcattgattgcctaaaaaattatatgtgtttatacattcttatgaatcaattaaatccagcacattatgccttaatcaattctactatgaaggagaattttattaagtccctttaggaatatcatattgattatacagcttactctattgccgtatctcattgcaattcatacagatctttacgacattgatacaataatatataatatttctatttaattattatgttattattatctgaacgcatgatacaataaagaaaaattactattcaacaaaacacagctaaataacgcacaagcgatcactagggaccggatttgtatggatttccatatgttttttgccaactcatttccccctaaaaacgacgaagatagcatttttagcttgggttgatgctgctaggatgaatttttatttccacatttccatttttacctcccatatttcggcattttaccaaaaaacccgaaaaacgcccccctaaactttttttt

SEQ ID NO: 20290 - DNA, 2190 bp, Heterodera glycines
aaaatactttcacttacttccacgcgttcctcccgcaattttaatttgtccgccaagtgctcccgcatttgtacgtccggatattgacaggcggtgaacgcctcctccatcgtgttcagttggtactccgtgaacattgtacgatggcgacgcttccgcttttcactgcttagagcactgagctgaaaaaatggaaaattaatttaaaaaatggaaaattaattaatttcatttgaaaattaaaattatcatgaaaattggaaaagttaatacagtcgaattttgtaaatgaaaccacttaggcattaattatattataaagcagattaagctaatttcataagattttggcaataattttgtcatttcttgcttttttgagtcaaaaattaatgaaacaccaatgaagttatttgttaaatcaaaatattataatttcattggaattaaaagagttttcaatccaagcaatttctttctggatgcccgagaaatttgctaaagaaaaatttgaaaaatgagaattttagttattattaatgattatctgcttaaaaatcttaatcttaaaattttttagcccatgaaaagaaaaatcacaattaaaaaaattgtgccttttgaatggcataatttgtggatgatttcgttgttgttgatgtgccaatttgttgtgatgaattattgttgttgttcttgcaatgaagggaagcagaatgtttgtctataaaaatgataatttatattaaaaaatcttattaatttacaaaaaattccataaattaatttattttgttaattttattatttaattgtgcgtatttaattcacttaaaatttcaccagatttaaaaattaatgatggcggtgtgaaaatcgttgttgttgacgctgtggcttgtgttagcattgttgcaaagaatggggggtacattggtattggcacaatgggtggagcagtgccaaaagcatttggtgttggggttggcaatgtgcacggcttaaacagcagattttcaattgaaaaattcgatgtcgatgacaaaattttcatttatataaaattgtatttttgattaactaaaaagacgcaaattaacaaaaattaatttcgtccaaaaaatgtttggaatatgaaatttatgtaaaaaaaatatcatgggaaatttaatgccaaataaggaataattattataaaataatgtaaatttaaatttagcagaaatagtacaagaaaatactttattttcccaaataaaattaaaatggtagtaaagaaagaaaattcatttatccatttgtaaaattaattaaaatttaattgaatgccaaaagagcaaatattaaagttttgttttagtaaaataattatttaatttaaaatgccaaaaaagttggaaaaattaatatgagttttatcaaaaaaactaaattttaaatgcaaaattagaaaacaatttgatctttttaaaatacatttaataaaacgctaatgaaaaacaataataaacgtttttcttgcattttcaaagaaaaatatataaaaatttgaagaggtgttttttgtccaatagcccgagattttgcattccaaaccccatcagtattccattctaattttaatggcatttacggtgccagaaattttggcaaccaaaaaatttgggccacaaccataattcatcagtgataatttgaaggcggcaacacagttattattatttataacaatattatttaggaggaggcgattgttggcaccgcaggtcgagtccatcataagcccctcaaccaattaattgtctattactgtcggtgtccccacaaaaaatattttattttcccctttgtttttgccgatagaaaatggcaccagcggcgccgcatttttaatatttatttaaacgacacccctttcggtcgaccgggagatcaatcccccccccccccttcagaggatatataatgatggagtgaaagaagatttgctcggaaatcggttccccccccccccgcccgccgaggcccgaagagtgactaccggcagggtcgagaatagacgagagtgggccggccggtagcggcggcgccaacaaccgcccatattaaaagcttcctcgccgtatgatcgtacccccccccccccaataacgccaaaaccttttccccgtgaggggggcaggtgtgatg

SEQ ID NO: 20291 - DNA, 2196 bp, Heterodera glycines
tgatttttaataccatatttagccatttttgaatggctttactttatattaacaaatttaaagaaatttttgggaaattataccctcaatttgaaaaatttatgtccatatttttgccattttatgtccatatttcgcgattttatatccatattttgacagccctagttatttatggccattatttttggccagcagaccattttaatcttccttttcgcatccctttcaaatatataatgaggtcaaaaagactttttcattcataatacatatcgcaaaaatgaacagacggtaatgaattcttttgaaaaattaaattttcgtttacccaattttttcccatgtttcagttggatttgtgcggatgtttggttggacattctgccatcttttgaccatgcccaactcggactcaaaatggcattgctttccgaccgttttgatgttttggtggacacgcattttgatggaaaaagcgaattgacaatttggagagaaataataattgacaaggacgaaggaccaaaaccgaaagtgtctgtacggatcgatggcagttaccattttgtggattttccgttgtctgttcgtcaactgccaaacaaaatcagctttaagaacattcagattgagtcattcttaaacttttgtgcacgttaaagcatttttctcttgctttaggtacatcgaccattccgtgatcaaatttctccgctccaagaagcgattctttgacaaaagtggcaccaaattggaagtgtttgtgcattcaattgatacggatgtccaaccgatttgggatatttttaccagtgaaatttgggcactttttacgacaaacattcgccatttgggcttcgaagatggcaatcatttggacaatttgcgtcgtcgcacatcgccaacaattctcactgatcttgatcaattgaattccatcgattccggtcgtctgttccccgatagaattgctgatgatgggccaaatgcaactgctggccaagcgttgtccaaatggttgcatacgtccacaactgatggtcaaccaaagcgattgtattgcaataattattttggtccactgaatctcgaatgggtcaacaacttcaaagaggtgtgtctagccatattttcgtcaatttgtttttgttttaccaatttttgtgtttagacatttcgccgtgccaccacttctgtcagttacacaattcaactttatttttgggtggaacaaatgccaattgaatcatttgaattggtgaacgaacggacgaaggaaaagctgacactgaaacagaatatcgatgaattcgacgtaaatgtgtgtaattggttgttgcaacggtgcccaattggggagatggcgacggcgccagcaattaaatggggagacagcttaaatccgagtgccaatttgaaccatatcagatttgttctgtggagtttcgataaatgcattgggtgagcagcagcaatagcatttgaattttatcgaaaaataaaatatttaattaattttaggccattgtcgccaccagcggaagaagaaaaagcggatcaaagcaatgaaaatgtcgtctgattaagtgtacgggaattaattaattacctaattgtatttgagaaatgatctatctcaatttggtgtgctcatttactctcagaaatgcttttgttaattctttcgttctacatataatattacacatttatatatattttaaataattatgaaataaaaatttaaatgcagactttattttcaacataattctttaataatcatttccgaaataaaaaatattatttaatgcaaataatttacataatgacattttgccaacattttttaaaaattatatttcatagtccaaatttttctccatccagctcgactttttttcgcaccgcttttctttcttttttttgtggcgcctttttcaaaaaagttttggggaacggttggggcgaaggcgctgaccaacgaaatgtccaagccacgaaatgtccataagagtaaaaaacacgaaatgtccaaaagtctaaaaagcacataaaaacccagaaaacggatctaatttagggtttttggagtcgctgagtacgaatatgacatttacctaacccatttcctaacccaggacccaaatataaatataaaaaatgaatgaatttattaaacattcaataaaa

SEQ ID NO: 20292 - DNA, 1676 bp, Heterodera glycines
  unsure (1)..(1676): unsure at all n locations
agatcttcgacccctcggcctgatcacggcctctcaaggagggacgaatgtggtgttgagagaccaatcaataagtgagtgaactttgctcactcctttcccttaggcactgttcctccccacatataagcgctggctttccgtccctccatcgttcattctgtcatttattcctcccattgcacttcccttcgcttgaccatttatttattatatttgtgctccaaataaatatttgtcttttcttcatatctgttgttctcggacacaacagattttggcgcagtcagcagagcagaagcgaactgaagctgagcggcgaaagagctgagaagcagcaaaatttggattgctaattccgagttggaatagctgtttccaaaatcgtcaaaaaggagaggaagctaattccgatttggaatagctgttcacccaggtggtggcactctcaatttatggtgttaatccgggacggataacagccagcgacgaatcgccgaatttggaggaattgaattgtaatccgggaaggataacaatttcaattactgatcgaggccgaacagagcaagagaaaaatttgattggaaggtaagactggaaactgagtggcattgttaatccgagttggataacattggccttcatcgattttgattgttaatccggacggataacaattaattctcactgttaattcgagttgaataacagttgaccagccagcaccaattttcattgttaatccggtttggataacaattgacatcactgtaaatccaagtcggattacagttaatcagcagcatcttgaatttgatccgagtgggacaaattaagaaaagtgaaagaatggccgcggtaacaaaggtcggaaaaggacccggtccatttttgccagatatgtgctgggcgacgtggtgggaacggttcgagtttttcatccagctgaaaggcgtgactgatgtcgcaacaaagcgtctgctcctgttcaccgaaatgggtcaggtgtacgaagagcttcggcgaatggcacagcctgaggatgtccgaaccatggaccttgccgaaattgaacaactgatggtggaacgatttggcgaagcaaaatcaattgctgcgtgcaggcatgaattgttttcagccaagcagcagacagggcaatcgataagagactattcagtccaattgcgaagtttgatcgcgaaggctgaatggagccgcgacagcattgacatgtgtcagcgcattgtttatcaatggcatctccaatgattcaattcgggttgaattgatcaaaaaaggcgacaaggacctaaaattcaaggatgccgtcgaatcagccgttttgttggaacagtctaatttggatgcccaagcaattggttcaaatgcaataccggaggtcgcaaaagttggcacttagcaaagaggaccaagaacgccgaataaagcacgagaggttgttttcggtgcggaaaaccggggcattttgcaaatgtgtgcccgaatcagaattcgacatgcagaaaatgcgggaaaattgngcattgggctgttggttgcaaaatcaaaaacagagacggaaatgcgaattntggtcaacaatttgatncaaagccanagaccaacggacgancaatcagaancatttgatnngtcaatgtcagcgtcat

SEQ ID NO: 20293 - DNA, 2412 bp, Heterodera glycines
gttttccgaaggcattgattgtccgaaccgccgccccagaaaaaacgaaaacccgcagttaaaccttaaaatagtgcgggtcctgctcccattgcttcacattgcgtatcatccgctgctcctcctggtcatactgaacatggagtcggccatttttaaatgtgaaaaataagtttaaaaaaatctaaaaatcataaatgaaatttgcgaagtacacattctgaaattcagctatttttgagtatagtcaagattaatcctttataaattgcttttagccgagaatatagtttagataaaaattctatagacttcaatattgcctgatatgatgaatatgtgtactgtaggacctaagtaactgagaatggtcactaattagacacattaacattgaataggcgctttaagtggaattgagccagaaaacccaaatttcagcattttttgaatatatttagtataatttgactgtgtagtatgtttgcatttttgttacacatcaactcaaaaaagcaaatgtttccggtttatgtcaagaaatgtttttgaatgtatgacaaaaagggtaataattcagccctcgcccatttttttaaaataaataaagatcagaacatgtagggtgtttttgaggtcgctgatcacaaatatgacacccattttgagttatttttaacccggacccgaatttgaatgattcacttgctcaaaaaatttttgtcatatggtattaatcgggtgctgagcctgaacgttgtgaattttgcaattttgagcactcctttgtgcgcatttttttttgaaaaattaagcgaaattaaaaaaagtcggatgataaacggaattatagtcaaaaacattagtggcaatgaaaaaataatgaaaacgggccaattatgcaaaaattagaatataaattaaattgaaaaattttgaaaaattgctttaattttgtttgccgaaatttaaaatgaaagtgaatgaaatactgataaaaaaaaaattttggggggggggcggtctcttaagtatgcaacacagcccgcaaacgcattccgcttctgtctgcgacaccgtacaaatgtgcacgcgcgcggagataccacttcactgctacgagtgggcgtgtcatccaaataaggcaataaaaaggcggcaaatatgcgcatttggcacatttcggattttcgtcggattttgcattttttgaatgaattcatccctctcgtgtctacgcgtttagtcttgaatttagcaatttttgacccaatgcctctaattgtcaaatcaacaaaaatgtcccgaaaagatggccgtttgccttcgccaaaattgctgaccgaagccgaactttgggcgcagatcatggatgctcgtcgacatttcatcctgccggcacaagaaattgctaatgccaaccctcaaaatgccgatggtgtcacctcccccaattccgttgccaatattcaggaccatggcaacacctctcaaagtccagttagccttgcgccgaagaccaaatacccgcctcttcaccctcgctacttttcgccaaatttccgtcgtgatcgtcgttcgtttcaccgccactcgttgccacgccgtgctcctccataccgtcggcgtgtttcgccgattcgtccgtctccccgtcgcctgccaaaccgtgattcaccttcgagccattccgaattgcgccgctttccttccggtcgctttttcccgcctcctccgatgccattgcccatgaaccgttctttgtcaatgatgcctaattattctaccccgttccaaccaccacatcagtatcagcgttttgaaatgagtttcaacaattgtaccttgactcaaaatttttcaaaaatgtgattcacctatttttcgaattgtttgtttcatttgctgttgctttaaaaagtttttggtctggtggttgctatggtggataataatatggtatcataggcatttttgacatttcacggagttttttgacaatgacccgtcatcgtaatcctagccatcgtcgtcacttgtccctaggtcactcaactccatattttctattgctctttaagtagtgtgctcttaaccatttttagtctcatcactttccgtttattcatgaatgattcacacagcatttattgaagagaatggccttatatttagatcgatttttaggtataattttcggaaatttttggtcgattcatagtggtgatttttttgcgcattaattttgatttgccaaattatattttttggcttctacaaatccattggaagatgcgcctcaaataagtgtcttaaaatccacgactattcgcccacaatttgatggagtcacatacaatttatgggctaaattgctgacgctttggtcggggcaggccatgacgtggtaaa

SEQ ID NO: 20294 - DNA, 2085 bp, Heterodera glycines
aaatatgtataaaaaaccccaaatatgtaaataaaactttttttaatggtatttttctgggaaagaaaatccccgtaaagtatgaaatagccacaaaatgacataaaaattactttttttttggtatttttaggcaacattttcaaacttattttttctttataaattttcaaaatatgtaaaaaaatgaaaatatgtacaaaaatatttgctgaaattttggattttttttttgaggatttctaaaaatttccgtaaaaaatactcaaaatatgtaaaaaatgaaaatttatatgaaaaaaaaaatccaaaatatgtacaaatatgtaagaaaatcccggaaagtgtttttcctgctatttagagcaaaaatatgtatttacataaaattggcagccctaataatttgtcaaagatggttaaaaaatttaaaatttgtatattgtttgccttttccatcacaaaatgccattcttaggggtgtatatttaaccccgaccccgagtcggggttaagggtcggggttaaccccgaaaatggccaaaaatgtcggggttcggggtcggacggggtcgggggtgcaaccttagatcaaagcatcgaaaaacagtcggagaaaatgacctacaggacaggagatagataattaatgccttggcattaaaagcatagccaaacagagggaaggcacaaaacacactttggcacattattttttcatcagaaatatgctcgcgggcaccaaccattttacggaagaagtaaaacaaaaaaggatgttgtccaggcggttctgcttctccttcgcctcctcttcgacattgtgccaaaagctgtgaatcatccattcattcattttttccatttttccaatttttttgctgaggatgatgatgtgatgatggtgagattcatcatcgttttgccctcattttttattgttttggccccattttcgaaccacataaaattatctgctttccaagcgatgaacggaaatggcagcaaaatgagaaaaagagaaaaagaagaagcgataataaaacgaatttataaaaataatttattgaaaattttgcaaaattaaaaaatttatttttaggaacttatgaccataattttctgaaaattttctatgtgtctgtctttattaaagtttttattccggcgaatctttttcctcttggaaccattcattttttatttttaagaatttctgcaaaaataattttataataagcaaaaattagcttatcatttgatcatttgacagccctaaatattcagttttgcctgtaaaattctttaaaaatgttttaaatttttagcaaaatttttctaactttttgagttttttacttattttaggcaaatcttcacccaatatttgatggacctgaccagccttcgaccatttttatatttggaccctttggcatttttattcaaattagcaaatggaaaaacggaaaatgattaatttaaaagaaaacaaacaaaattagcaattaaaaaggctgaagaatttgtgggatcacgtgaagccgaattaaagcgaattgcttcggaagcagaatttgtgaatgtgattaatctgtcggctgagcaaaattgttcgaaattgggtcggacggaatgaaaaatgaccgaattgtcgaggaaattaacaaactaattacagacactcttcaaacggtcaaaattcggacgaaataatagcaaaagccgaacaaacaaatgaaatattatttataaaatgcataattcgaacttttatgtaggttttgcagcaagcatagaaaattgcaattgataagtgaaaattgaaaaaaaaacaatggaaggtattacgaatttgttgctaattaggataaatataaattaatgtcttattgttgtttatttgatttattatcaggatttctcaactaaaattttcgaaactctcttttggctgtcaaaaaataaaaattttttataaatttatttcatttaaaaacttgtaaaaaaatggcggagggggctaaaatgaaaatttttgagcgttttaaaatcttctaaaaatcctctttattaattttaaaa

SEQ ID NO: 20295 - DNA, 1059 bp, Heterodera glycines
gaaaatcatttttagagcataacaactgatgacagccactgtcattgttccaaagagatttctataccagatgccaaaaaaagagatagccattttttggaccgtccatacctcacatatactcaaacggcccgaaaatcatttttagagcataacaactgatgacagccactgtcattgtttccaaagagatttctattaccagattgccaaaaaaagagatagccatttttttggaccgtccatacctcacatatactcaaacggcccgaaaatcatttttagagcataacaactgatgacagccactgtcattgtttccaaagagatttctattaccagattgccaaaaaaagagatagccatttttttggaccgtccatacctcacatatactcaaacggcccgaaaatcatttttagagcataacaactgatgacagccactgtcattgtttccaaagagatttctattaccagattgccaaaaaaagagatagccatttttttggaccgtccatacctcacatatactcaaacggcccgaaaatcatttttagagcataacaactgatgacagccactgtcattgtttccaaagagatttctattaccagattgccaaaaaaagagatagccatttttttggaccgtccatacctcacatatactcaaacggcccgaaaatcatttttagagcataacaactgatgacagccactgtcattgtttccaaagagatttctattaccagattgccaaaaaaagagatagccatttttttggaccgtccatacctcacatatactcaaacggcccgaaaatcatttttagagcataacaactgatgacagccactgtcattgtttccaaagagatttctattaccagattgccaaaaaaagagatagccatttttttggaccgtccatacctcacatatactcaaacggcccgaaaatcatttttagagcataacaactgatgacagccactgtcattgtttccaaagagatttctattaccagattccaaaaaaagagatagccatttttttgga

SEQ ID NO: 20296 - DNA, 2387 bp, Heterodera glycines
cacttagaaaatggtgggttttgtgtacaaaaaatatggggaaagactaaaaatcacgggtttacacaaattggaagaaagaagaaaaatcaatgatttaacaacagcttttaaaataatcaaagggttcaccagcctcgatgctggaaaaagtttcgttttctcagaaaggtccaggaggcctttacttttacgggtaaagcgccacacggccaaaactcaaaataattttttctatagaatagtaaaaaactggaataatcttccactggtagcggtacaaattaataaggcaaaggaattcagggatttactaaaagcaatgagttctgagtaggattttccatgttgccatatttacactatatttttatcacctgtgaatttttaacatttgattgatttatttttattcattttttattacgatattcactttgtattttttatttgaccaactttatttgttgttttctttttggcaccatataagagcactcatgtgcctttggtttgctcgataaattaaattaaattaaatatctcattaaaaacgttgatggcaaaaaaaaaagaaaaaattcgtttttattttttattaaaatcacataaattgttaaaaaatagtttatagaattttctacaaagtatttgggataaaaaaaattatcaaaataaatacaatatcttctgaatactgacaaacgaatacggtatcagctttaactaaaagttgatagaggagatgggtttttccagttcgaaaatttgtatattcacgatagtgtatatatcgtatctattcgatgtgtgatcacagactgactacagttgcgttacaccaaaatttacagtaattactctgtgtgtctgtctgtctgaccactgctacgaaaaaatagtacataaatcggacgagatcagcagaggggcaaaagggtgctcgaatggcttgatgatgagtaaatattgggtggataaataggagtgcgagagcagaattttttgccaaaactcgagaattgttgagaaattaatgaacaaattgaatttgccaaatttttcctagcacattcttcaggctggaattctaattgcgaaaaaatgctaacttttttggcccgaaattcaatcggggaaaaaaatcaaaaaaaaaatcaaaaacaacacttccaagcagacgaaataccgaccgaaatttgaaaattttgtaactcacaaaggtcacgaaaagacctgaaaaattctaaaattctcgagtcgagtgccaagtgccgagagtctcgcacaaatagcataatttggacaggaaaaaacaaaaaaaaatttttttgctcgtctcgtgtcatgtccgcctccgcttcaggatccgcttaatttcggcttacggacatcggctttatccggtggacagcttccacttgtttagccgctcgcgcatcttgcggaaagtgttcgattcctttgcgcgcggttgccgcgtgcccttggcgacgcctccgtatacctcgcctgttggacttccgctaatctttaaattcataaatgtaagttgaaatttaattttataaattaattaattttaaattaaaaatctttaaaaatgtacaaattaaaaaaaaatcaaatataataataataataaatattcaataaaattatatcgacaatcattccctattttctgaatttcccttttttgatctttattatattaaattggcataattttttcgtaacattttaatgcaaattatttttataattttattcgtattaaatccccttattttgtgctaaattttccttcaaaattaaccttaaaaatattggtgataaattataaggccttaattttaataaattttccatttttaaataagctttcgtcgttttttttgtgaccaaatccttattttagaccgaatttgcttctttttaagaaaatttttatttatcaacggtctcgatttaaatgcggttaaaatttaaatatttttgtgccgcccaccgagtaggatgacgaaattgtgccgtgccgtgggcggaacacgcgctcgtccatgctaacggaacggcgtcgaaaagcggcagtaaattgggcaaaaagtccaccagcgactttctcatttttggcatcatcatccgaatcatcatttccatcgtcataactgcgagttgaagaattgttcaaattctgtaaaattgaccaaaattaacaataaattaattatagtaaagtgccttggtgccaaaaactggcaattaattctcatgataaatgctttatttttaaatgaaattgttatattaagtaaacaaaatatgaaagtacttatttaagaagtaagttttaatataattcatttaataaaatcgttttccga

SEQ ID NO: 20297 - DNA, 2666 bp, Heterodera glycines
gtataagcccacaatggtgagcgattttggtttttcaaaaagttacaataattgattttcataggcttgaaaatttcaatttttaagattttttcaacaaagaaaattgtttccgttttcaatttatgaattgctgaatgcaatcaaaaattttgagctcagaaaacatttgaccggctaacttgtgaaagataaaaacttgcgacgcaatccgcttttcccttcgaagtgtttgtccaccagcgcatttaaatgaagcgaaaaacaaattcacagattcattcccttccctccccgaacagcgccatgccttggcattccacacatcccgtgcagtgaatctgtgcttggttcgccgccatgcaagtggcttgcctgctgatcacctaaattttgattgaaaatgtacttgctcacagaatcaatgcaaagataaaaataaaaactgattgctttcgccaggagcacaaaaaattgcggtgcataaaattatgcaaaaaaacgaaaaaatttcaaaagaccccttcttttattctgcacggattttgccgtctgaaattttatatttctcccgattttttttttgaaatttaaattaccatccgaatttcctcattttgttttccaaccattgcgctcatctccaaaatccattgcacatatttggaacgtccttcgccaacatcgacggcatttccatcggatgattcgtccattttttggcattcacgaaactgaaacaattcaattttgcaattaattaagcacaacaattttattacttatattaattataaaattaaaaaaacaaaaattgctgttaaataaacatttaaataaaataagttaataattaattcaaaaattgcaatttagagaagaatttttgggcaaattttgtaaatcaagggggagtaaaattttaaatttcggtctaaaatttgcgattgacaaatggtgggtgcacttcatttccccctcgaaaaagtttttttttaattttcaaatttagaaatttcacaaaagaaaatatttttaaaaaatgttagtaagaaaagttcaaaaaatttttgaaaaaatttggtagtgttcatcaaaaaaatcgcagaaaagtttcaaaaaatttttttcttgaaattttcttactaacaataagtttcttaagaattttttcccggcaaaacccaccaatttttgtcggatgcgctgtcgctgctccaacaattgctccaacgcgcaaattgtgccgttcaattcggccaacactccctcgagcgtcggcggaggcaataaaatgctaaaaataaatttacatttaggcattatgaaaaattggttagaaaatatgcaaaaaatattgtggaaaaacaatgaaaaccaatacatttcacgcgaattccgaaatttttgaaaaatttaaaataaaaaatgaattatttttaatatttttcgggaaggaaataaactgttcctataaataggtgtctaaaaatcggtgcactacgtttcccgcgtcgaaaaattcaaaaaaatttttactatcttagaaattttcaagaaaaaatcttattgttagagcttttttataagaaaactctaagaaaatgaatttcgaaattttttttcttagttttcttaagatttttcgtttcttcgaggggatgccaaatgtgaaaaaacaacacgaagacttacccccgaatagcaaaacgttcaagggaagagggactgtaagaagaaaatggaaaagaatttcaaaatatatcgggcagaaatgagaacaccgactttaattgtttgagttttttatattcatgaaaaacttactaaaaataaggaatttttttttcaaaaaagccttaaatttttgagtttttctgtgttcaaagcgtggcttatgcacctccaatttttgccgattttcggtcggctcagccaacaattgggtcaatcgttcgtccgttgcgccaattcgctgctgacgcgccgcaatttggtcggccaacagaacattcgcatgacgaagctgaacatgaagcagaaataattgacagcctcttcagtttttttcgtgtttgcctggacctggacctggcttttttcacattagactggacctggatttcctggacaaaaatccaggaaattccaggtccaggaaaaatccaggttgccaaaaaatggcatggacctggacccaggaaaaatccaggcctggatccaggtccaggtcgatctctagtgcaaacagacgccacgcagtaaaaaaaattgaaattttaaccattttttaaaacagattttcaccaaaaaatgcgaattttgtggattttcagaaaaaaattcacgaatttttttttgagagaccatggggggtataccaacaaataaaatcaaaacttttcagcataaaacactatttttagtttaaataatatttcgactgtgtggagtggtacagggatgggtccttggcaaaatgcaacccaaaatgaatgttttaaaaactcacaatcagcacagggttcagtgacaacagttcattgtacagtttgctgttctcggcactgcgcaaccaattgaggaagcatttggtcaactgaaattggacaaaaaaacgtcaattattaaatgagataaattatggttcattgagcccgaaaaaa

SEQ ID NO: 20298 - DNA, 1098 bp, Heterodera glycines
ttttagagcataacaactgatgacagccactgtcattgtttccaaagagatttctattaccagattgccaaaaaaagagatagccatttttttggaccgtccatacctcacatatactcaaacggcccgaaaatcatttttagagcataacaactgatgacagccactgtcattgtttccaaagagatttctattaccagattgccaaaaaaagagatagccatttttttggaccgtccatacctcacatatactcaaacggcccgaaaatcatttttagagcataacaactgatgacagccactgtcattgtttccaaagagatttctattaccagattgccaaaaaaagagatagccatttttttggaccgtccatacctcacatatactcaaacggcccgaaaatcatttttagagcataacaactgatgacagccactgtcattgtttccaaagagatttctattaccagattgccaaaaaaagagatagccatttttttggaccgtccatacctcacatatactcaaacggcccgaaaatcatttttagagcataacaactgatgacagccactgtcattgtttccaaagagatttctattaccagattgccaaaaaaagagatagccatttttttggaccgtccatacctcacatatactcaaacggcccgaaaatcatttttagagcataacaactgatgacagccactgtcattgtttccaaagagatttctattaccagattgccaaaaaaagagatagccatttttttggaccgtccatacctcacatatactcaaacggcccgaaaatcatttttagagcataacaactgatgacagccactgtcattgtttccaaagagatttctattaccagattgccaaaaaaagagatagccatttttttggaccgtccatacctcacatatactcaaacggcccgaaaatcatttttagagcataacaactgatgacagccactgtcattgtttccaaagagatttctattaccagaatgccaaaaaagagatagccatttttttggacgtccatacctcacatatactcaaacggccgaaaatcattttta

SEQ ID NO: 20299 - DNA, 1390 bp, Heterodera glycines
aatgaatttaaggatttcacgaggaagaatggaatttcccatctgttttgggcaccgtactgcccgatgtcgaatggacaggcagagcggtttgtcgacactttcaaacggacgtttcgaaagttgaaaaaggagggggtagcgaataggttggatacgtttttgacaacctatcgtaccactcctaatgagtcgctcgaaatatggatttattcccgaaaacccccaaaatatggatttatatggactaaaaaccttcaccaaatcaaaaaattttaacgcagaaatgctatttttaagcccctttcttcatagcatatgcgcagaaaaaatatgttaatccatataatttacaaccattgaaaatcgcacaaaaagctttgggatacgattaatagtcgaacaaaatttaatataactttttaaataaataagtttttttttaatttttataatttcttttcccaattttcctttgatatttaatgtgtttaattacaagcaaaagagctagaaaaagtcattttttgggggatcaattcgcttcccgtgccccccccctcccgagattaacacttcgtagtttacatcagccattaattacatcactcttaatcctatgtttatattcttttacttcttttttcacactaaactcgaaacattgccaacaaaaatgactaaatctctgaatttgcatatgaaatccaaaaatatttaaattatgaataattttttaaactaaattttaacaccagatatttccttttcttctgtgtttaattagacagtgaatgcaatttttacatataaataaatacgaccaaaccgttgaaatatggactttaaatccaaaatatagaaattgagaaatttaaattcatttttttgttcctttccttataattttaaaattgaaaaaattccataagtaaaaagtacctcttgtcgtttatcgtccattaatttttcgcttcaaaaaattctttatttctcctcctcttcggtgccaaataattctggaaaaatggtcaattttcttcattttattttgtaaaagtgacctttggcaaattttaggcaaacattacttcaaaaaaaaggacttgtcctttctccgacgctgaaccagtgaaaaagccaaaaaatatgtaaatttattttaataatttaagcaataattaatgatttatatttaaagcgaacccgagcaatttgataatgggtgggtatataaaaaaattaaaatgtatataaattatattcaaactttatagcggatttggcacaaactctttgttgtcagtaaatatatatattatatataattataaataaagaataaatagataaatattttataaaaataaataaagaatatatttattat

SEQ ID NO: 20300 - DNA, 1936 bp, Heterodera glycines
ttaatgtagttgatgttgtccgggtccttaatctttaccaaataaaactaatacttcaccggatggtataaatttcagggtaattataataattgtttcctttcttttgcaccttatgttaccgaacttttcagaatctcattagatatcggaaaaatgcggaccttttggaaaaaatcaataatgattcttctcttaagaaaaggggataaaagttgtcttatcaagtatagatcaattgccctctcatgttcactgtgtaaactatttgaaaaatttgttgtcagggcaatttctagtttcattttaaaacatgacataatctcagtacaccaatttgggtttgttaaaggtcgttctactgttatcttacttattgtaactcattgaaaattggttagccggtatctgcaatggaaaaaatctagggtatgtttattatgataataatcaatctaaaatatttatgtctctaaaatgtaatttaatctaagattaatatatatgtcgatagacgtaagatttctatatggatatttaaatttttggaaaatttcattgagtttcaaaaaagttaatgaacaaaaaatgctgaattaagattttttgcaattttgtgaccataacttcttttatacttaagttaaaaatataagaaaattatattatgaaagagagcaattaaagctattgaatggataccacgaaatattaatttggttgaatttgagccaagctattaatttaattattttacccattttttgttttcaaacccattggcagttttaacaaacgcgctagcacctggtcaaaataaaaataaaatatcggagagggactcaacgaaatttctacatccgtttttcaattctcaaacatttcttctccaaattgttttttcatctttcccattttttcttcatccgttattttaccgcgaatgccaaattgtttcttccatttgtaaattgttctacggctaactccaatttccttacaaatttccgcataattttgcttccattctttatgtgaatattttcttttttgcttatattcatttgtcattttaataaatttttgcacaattacaattttttcttcatcagttgttgatttatagtttttatgaatttgtttttgaagaccaaattctttgatccattcataaatatatttgcgatttgtccccaattttttcgctattttttcttcaattttattccattcttttgttgaatattttcttcctttttccttaattttctcttttattttataaaattttccaattatttctctttttttgagttcatttagttttttttcttctttttcttcccatttttctccaaatatttcatcaaatgatttttgttgcaactttttcttttctgctccaatttgatcaaatttaatattaaaaattacaattagaaataatatagggaataatttcattcttaaaatattttccgattttttttaaataaaattaaaattaatattattttttattattgatgatcatttatttatttatacatgaattaaaactgacacaaaaaaataatttcttattaaacaaactacaaaacaaaaaaatactcttctgacttccgtaaacatttaaaaaaaattcgattataattttctattaaaataatcataataattaaatttatttattttttacataataaaaaattgaaaattatttaaaaattgaattttcccgttgcttaaagattgcctacttcattgggcacgcggattggcaggtcaccgtttgtgtgccacgcgaggccgaatgtttggtgatgtttgaagcggcggaacgcgttgacccggagatcagacgggcggtggaacgccgcaacgaatgctatcgggtggcattcagctatttgaaggtggctaaattgaataaaaa

SEQ ID NO: 20301 - DNA, 2729 bp, Heterodera glycines
  unsure (1)..(2729): unsure at all n locations
agccattgttgttggacagaattgactgtttgtccttcaattaatcaatgattggttaattgattgataattatagccctttgatctccccgccgtttactggttggtccttggccacataaatgaccgtcactttatgcacttcacggctctgggccaagtcgaggtgccgaatttcacggtgaaaattggtgggcgcgtgccgaagtcgggccaacaggccgaaactggccgcaaaacggcaccaaccgcgccgctcaacagcgtcagccgacatgccggcatcagcgtcgccaaagtgttcatcattaccaatgttggtgccgttgcggatgtttttgttacgacatttctccgccagatgccgttcatctgaaactgtttgataagatgagatcagtaaaagtaagcggcatcgctctcaattccccgaaaatttttaaaatttgatctaaaaattgccaattttcggctagtctgtcaaaaattccaatttatcccccgacgggtttcagagaatctcaaaacgtttactcagataataaaaattgatttgtttgttttttcaaaattggcccctaatataaatctcaaaatggtcatttaccttggccattcagccgttcgtcaggacatcggttgctgctgtggacgaactgcaacatttcggggccggtgatgtcgaaatggggcaacatttgttgttgttgctgctggtgattgttggcacaaaaggaaactgaacgcatggacggacgtggcaaatccttaaaacatttttagatagactgaaaaaataaaaatcaaaaactgttttatagcatttaaaagaattttttatgtgtaaaatcttaggctaattacgcgcctaattactaaaacatttacaacaattattaatttaatttgctataatgtccaattttcgagagagntttcccgtattcccccccccccccccctcctctccttcgtccgaatacgtctcggtcagctgctacctgaaacgggtcaatcggggcaccgaaggaggacgacttttgccgaacgctggccgccttcgcttggtgaagcgacggagcggcgccgccattctgccggggacaggccaacgaattgagccattcttcgctgcaaaaaaaaatagatttaattttagcaaaaagaattaatgttttacacgggcgactccgtctcctcctccatgcaaattggctgcatacggtaacagtgtcggccgacatgggtacgcgaccaaagactgttgctgtccttgtccaaactgaaaaattgtgtaacaacaattaattaacgaatgcaattgggtgggcattttcccaattaaagcctttgccgaaaaaattgttttaaatttcgaaagaaaacctcatctacaaaattttaattttcttttgtctcttacactttcctttaaaaaattgaattttaaacttttacgtaaaaaacaaagtatttttataaaattttatgaaacaacagggtggggaaacacgaattactccagtttcaaaactcctcaaatttgattggtgttcaattcaataaatacaatacgcctgtgccatttgctgcccgatttgccagcgtttctgcccccccccccccactcacttcagcacggcaccctccgtctccatgaaggtgaccatttgttgctgttgcagttggtcgccgccaacaccgtccccaacatttgcctgctgctgttgttgttgctggtggtcatgtggtgccgttgtcgctgttgcggttgttgagggtggcaacgaattccattgggtgaccgggaagccgggcaatggccattggccggacagtcgaatgacaaagccctcgaaaaagtcgtcgccggtggccacaaatttgtccgccaagttggaccagtgcagcgagatggagtgccgtgcgaacaccgcacacaaatgccatttcagctcgttggcaatgcgcaaatgctttacctttgaaacaaggaaaaattggcactttttggaaaaataattgatgttttttggaattaaaattaaaatgaaaaaaaaaatcaaactcgaattaaggaccgaccaaaattgaaagattttcgaaacttattaatcccataaattaagaaatccctgaaaaaaggaaacagtaaatacccgcgccagtgattggatgagtgaatggacaagttgagagtggaagcccaaggtgatggaggaggacagatagcacagaaaacgggcaaaagcgtggcggtggtggtgctctgttggcccaacatcagcgcaaacagtcgctcgaagagcggcgcgtcggcacgctccaacacctttgggagggggggggggggaatggtcagagtaaggaaaattggtgatccaacaacaaaaaaatgatgtgaaattcgaaataaaaataaacagccgcatggacggacgtggcaaatccccccccccaaaaaaaaaattttttttcggcactcattccgtatccccccctccctccctctccgattccgtctcggtcagcatgtggtggtcgctgttacctgaaactggtcaatcggggcaccgaatgaggacgacttttgccgaacgctggccgccttcgcttgctgaagcgacggaatggcaccgtcattctgttgggggttggccaacgaattgaaccattcatcgctgcaaaatatttaagttttataaaaaaaataataaaagtttattgac

SEQ ID NO: 20302 - DNA, 2383 bp, Heterodera glycines
ccccccctttcgcgtgttaacctaatacattaagtgttgtttgtcgtctcttaatgaattaattgcttcttttgattgtttgttctctcttgacaatgcattttgttccaaatttgcctgtctctctcaagtgatattccttttaaacgattctttgtccaaaattcacttaatttcacatttttgattctcccaataagcgaaatgctttctttccacgacattttcttcttattccaaagccattcaattattgtttgtttgttttcccatgacagctgctaattcacgatgtttgttgttattacattcattcttttgtcgaatacctcttccgaataaattttgcaatttttttggaatctcaagaattggtgtcccgaccaaaaaaactattaaaattttggcaggtattttttctaggctaaaaaaatgtgctgatcacgaatctgagctcagattttgaaaatcattgattttatctaagattttttgtcaattacttgattttttccaaaattaagaaaattagtcggacataaaaatgatactaaaaagagctttcgaatgagctattgaatgtataaagaagtagttttaaattttttacgattttttgaaattaattattaatccctaggggtcagatgagacggagacctggggttcgagtccgtttggctgcggtttatttttttatgacacttgatgaaaaatcatagacaaaatgaaggttcatgcatagtcagagcttagattcgtgatcagagtattttttaacccaaaattcattgctaaaaattttttaaaaataatttaaaaaattgaaaaaaatcaagtagttgacgaaaaatcttagataaaaatcaatgattttcaaaatctgagctcagattcgtgatcagcgcattttttaagcctagaaaaaatacctgccaaaattttaacatttttttcgtcgggacaccaattcttaatgattgccatttttttgagtcaccaattagcgatagacaaaaatttttctaaaatattttaatttttaaaacgaccatttatcgaaaaaccctacattatcatttaaaatattttatccatttaaaaaatgaaaggatcggaaagaaacaaaagggatgagaaaacaattttaaagtgaatcacattttgggattgttttttgccgagaactgtcactcgtaatgaaccactaaacaaaggcgagtacgtccccgtcgtcgatgtcgaattgtcgcaacaaattgtccctggtgcgacaaagcaattcggacggatacgcggggtccgctcgtcgaagttcgaccccttggaaaaacgcaccaattaaattgaaaactattagggaagcacgtcgttaattatggttacgccctgcccccaaacctgttaatgtgtcgggagcaaaaccgaacagtcgggcgcccaaaccgacgactttgtggatgggcagcgcaagggacagactgcgctccatgctgcgacccgcgtgctcaagtcggacctttttggagtgaatggtggagaagggctgggcagggcgagggacggaaacggcgctggaggggtcgccatctcaaaaaggggaggataaaaggaggatatgggggcaattggtcaaaaacggatgtgtaaatgcaggcccaccccttgtttaagtggaaccgaaccttaccatttgaaatggagtaaatggtcgccagccgtgcgatcgtcgcgcggtgttcggccgggatggggtcggcaccgaatcggctcaaaaaaagcaattcggcggaacgtcgtgccaccggcgacacatcgcaacggtccaaatcagtctgaagacgggcggggggtttcaaggttacatagaacggaacaattaattttgttgattataagctggcttacacacaatttggggcagtttggcgatgatcatctcgcgactgtccacgccgcgggcgccgggcagcggagcgcctcggagaatgagtttggccaaatcggggagacgggccaatccgtccagcgattcccactgaaattagtcagttccatctatatttttcaaaatttcttaagagaaagctcataatccaaaatccgacgatgggaaggagtccaccaaattcgtcttcccctccctccgtttttttacccgactgatcggattgtcctgcagaatcagcgttttcaaagcgcaaaagccactgccatcgccaaaattcagtgtttgtagtgcgcaagaggacaaatttaaataattcaaactgaaaacaaaaagcgaccatttgcattttccaagaaatgcttttaaattcactttggcaaatgcgaaagggtcaccggaaagtgggcatttggcgtcgctttgcgtgccgat

SEQ ID NO: 20303 - DNA, 3192 bp, Heterodera glycines
atccactatttgttgtacaacatcaacccaattcagcgtttccctttcggcaaagtatctgtacagtcgctgcttcacatttcggattgcccgctcagcaactgaagctttcactgacgaatgcacgggctcatgtttctcaatctcccgttcctcaaagaattccttgagcaatttgtttttgaattcggtgcctttgtcggagaaaatgcggtgtgggaccattggcatttgcttgacaagctctttgaatgcatccagcatctcctcggccttcttatttttgagtggaacgacaaacaggcgttttgagagaacatcaaccgcaaccagcaggtatcggtgaccgcgattgtgacgagaaagcgcttgaaagtcagccaaatccacttggacgtcggtcatgaagccagcagctacagtttttgctctcggaaatcgtacccgcctggggcgcatcagggtgtacgtgcggtgtccctccaaatagtgttgtacatcctttttccgtagttgttttaactttttccgcgcctccttccacagtgcactaacaccggcaaacgcagcaggagaggatggatcgttgtacagcttgtcaagagtggtgttgatcatttccattttttcggctgaaattccttctttattgacgtcctgctgcttgtgctctgcgatggtctctttggtggagccgttaatgaatacaaaattgggtcctgcctaagccgctcctccaattggtccgctcccggtggtctaatggtaggtcgacccgctcttctgtcaattatatacctgatggccgttcgcaaattgcttcgcaccaatggctgagcattttgagtgttgataattgcgtttccccggacacccatacgatcggcataacggttgcatttgatgtatattagctcaattctctgtgccatggtcagctgatttgacggaatggcaaacagttcacgttgttgttgttgttcatcgctttgtgctgatgttgatggacccggctctggtgagtaatacactcgtactcttcgcgcttgcctcactcgtttacgtatgcgcagctcaccactctcatcaccattttccggggggtggcgacgtttggtccctctcctaggtggcggaacagacgacacttgtggggcagcaggaggaggttgctggtgccgtggcactgtttcttcaatttttggctctcttttcggaatatgatagggtgtggcgcgaggaggtggcttttttgacggtttctgttcatgttttggttccgcaggggggttgtacccggcttgccgtgatgtggatggtcgcggatccagatcgaactttggctcccttttaggtttgcgatcaacttgttgtgatgtggatggccgaggatcgagcagtggttgtggttctttcttgaggctaggacgcggtggaggtcgaggtgtttcaatttttggctgtggacgagacgggggtgggcgagaagggggaggaggataataggcccggtattttttgcgatgcaaatcgtcatcgccatcatgtaattttcttctggttgcaatcctgtgctgtgcagtgtccatctcctcaattgcgtccgcgttgtcaggcagaacgggcaaatcgccataatattgtgatggtgctggcagagcgaatccgctctccaacatgtagtcatcctcttcgtcactttcgggtagcggagcagcagctgcttcagcaagaaggtcccgcacaaccggctgccgttgttgtatgtcgtttctcttttttcgccattcctccacacgcccatctctccgagagggcggcgcagcagctctaggtggtctcggaggacgctgtggacgcggcggaggactccccggcggggacggacctgggcctggagggcttggtggacgacgaggaggatgctgaccaggaggcggtggtggaggaggaggacgaggagggcggggtggtgtatctacaacttctgcttcatcatcagcaccgcctcgcctcatcagaacactcaatcccttgactagctcaacccgtgctggtttgtccgcgacctcccgtctcatttgcaagtatcgcctaagctgttgattgtagctgacatttttagctgaagggtttgttcgttcagccctggcacgcgtcaaatcgtgtcgtacagcatccaaattgatgtcacccgtgtccgtcgcagaggtgagaccccggtaaatttcttgtggtacaagcacaaatttatttgccattttatgaaacaacgagtgtgaaataacaacaatttttttacggtatttatacatttttgctcacaaatgaattggcaacttcaattaacacgggtgttaggagtgcagcgaacagtccgccaacccctgctcccttctgaacaatcatacgtctcgcgcctcgttcacttctcactctgctcaggcagcgaacaaaatctgcgtagggcatcagcctgttcttctgacgtttgttcaagcgaaatcgagatgcgacaatgttcaaacaaatttccaccagcgctagcagttgatcagcgttcgctttccgtatcagcttgcaacactttttcgcggacctcgttctggccagcgcacaaagccatttggaattctcatggatgagttgactaattttagcttgttcctcctgactattgggctccattctttggtacaaacacaactaagccttgatcctcctcttgctcgtccttaaatatatttgtgcgtaggcgcagcacggggtcagatgaggcgtgcatgtcaattagtaaatagccgtatgggcgagcggtcgctttacgataggcgtcaagaaagaagtcgagttgacgcgggaaaagctgtacgccaatgttacggatggacaacagcgagttgggtgcccgcatcagtaccaggtactgggcggacagacgggccactttgatctttcgctcaaacaaattctgcgtaacgaacacgacagcaaattggtggtggtgggactttttggtgaacaagtcggacaaatagtgctcatcaatggacagcatcaagtcgtcgaggatcagcaaaaggggctttggcatgcgtttgatcagctcttccggaggaacacccgaataaacgtcaacccccgactttgcagaagggtcagctgaattcatttcaccaaaacagtaaaggg

SEQ ID NO: 20304 - DNA, 1266 bp, Heterodera glycines
  unsure (1)..(1266): unsure at all n locations
aattcgattnttggcacaaacaaaaactgtataaggtaacctactgaatggccagcatttgttgcacgattggaagtaagaacagaataaatggtggcaaagtgccaagaagacaaataagatacaaacgtgtccgttcgcgcaacaaatggtcaatggcattatttgatgctggaggcggataattagccgtggaggagaaaaacgctgaaaaaccaaattataaaacttgttggaccgttaagcgaaggattttcattaaaacaaaagttcaatgatttaaaaataattgcggaaatagaaaaatttttaatctcttttgcaatttttatattcttttttcatttttttctttattttaattttaattaaatcccgtgaaattaatatttacctttcttaactataccaaagaccatataaatgacacaaatacagtagaggatgggaggagttaacgtagtaattgttaagaatacagtaccaattgtcagaattagtgaagtaattaaatcaggttcctaaatgataaaaatttaaattataaataaaaaaacaataaaatacggtaatcattgctggtggaaaaaaggtttgcaaattttgcaagcacatggaatagcgtaatgcaggtcgataattggcaaagattgaataagcagtactgtagatcaaacacacagtgatgcaaaatttcgttttgctaaataaatttgtcgaattataatttttattttttctttcattttaaaaattgacccaaatttaccgaactgaaaaaagtacacgccccaaagaagcagcagaaagtgcatgacattctgaaaattatagtcttttttaaatatattttcattacaaatcgccaaaaaaattcaaattataattttcaaatcagtttgaagctcattactggtttgattttctgtatatttcagtgaataaaacctgtaaccgcgttaattacttctcccgttaccggtcaatttgtgaaaaacttgctaatcaaccgacaaagataagaacaggtaaattatatcttacagatcatatgagttaccatcagcagagctatgaactaccgtttttgtactttttcccccatttttctcgcccaatgttatttcatcgtttctttgttttttcttttattttatcactttgccactgaataactttttatattcttttcttttttaattttccgcggcgaagtcgttagttattataaaactatcaaaaaattaagtttctttttaaatttaa

SEQ ID NO: 20305 - DNA, 1288 bp, Heterodera glycines
gcaaacacaaaaaagaaagttttttcctactaattaggctatggagaatccaggaaaaaatatgtatttacataaaaaaaagaatccctgcttattgacataatttactagttcaaattgcaatgattttttttaattgaatgagtccatatttactagagtatttttgtcccgaatcccaacttaaaataactatggattatagactcataaagtgcacttttattccttacaaaccaatttaatgttcttggtaacattcggtttttgagagatttgatttaaaaaactttaaaacgctgaaaattgtcattttggcgatttatcaaacgttgcaatttattttatgttcttttctgccgcgcggaacaaaacgaaattacctataattaatttttacatgacttaacaccttaaaactatcatatttgaaaaagctaaatggattataattttgggcatcatgtgaaattaattacagcctccaattataactacttgataatgatgaaagggataatttaacgaaaaaatttggatgttattcaattattaagacaaaatttgttaaaacaccaaaaattagagtctctatttttatgttaaattttacattttcaaatctcgacttattaaaaggatcacgatataataggaagggtaataaaattgatgctggtgtttcttaaattccttcaatgggtttgaaaacaaaaaatgggtaatatatataaattcatagcttggctcaagttcaaccaaattaattcaatagctttaattattctctttcagaatataatttttccaaaaattttccttataaagcattgaacatgctgtgttttttgccatggtcatgcaaatatatttataaacctttaaaattttaaagtctttaaaatggattgagccaaaattaatttttatattcgtagccctaagaattctctatttacctttaaaatttcagaaaatttcattgagtttcaaaaaagttctggacaagaatttctgacttaaggtgatgacaataatttttttttatacttaattggttgaatttgagcaaagttatgaatttatattttttgttttcaaacccattgacggaatttaagaaacgcgccggcacgataaaatttatcggcgtgaaatttaaaatcgatcgattttcggtgctatagagaaaaaagcggtcggaaaagaatagttcgataaatttagaaagtcgaaaagatgatgaaaaaatcacaaattgttttgcctttgtcgatgaattttctta

SEQ ID NO: 20306 - DNA, 1634 bp, Heterodera glycines
ctaaacatatagggctgtagaatgatgtcaaatttataaaatttgtccagctgagaaaaaagttatgatactttaaacttggctcagactataacggccagactatagtgtcccccccccccccgctatgcgtaatactgaatcctggtccgattcagtattttgcgattttcgtccatattataatccatatttttgtcttttgtccatataaattcggtccctatcaatttgaaaacgcaatagaataattcaattaatacacacatcaataaataacaattacaataaagagaataaaaatggaagataattaattagtatgtatacaataaattacaagggaggggaggaattaagttaaagggaatgtattaggtatatacaatataatataaggggtagggtattatatacaacataatataatggaaaggaaggtattatttacaaatataattatatcaagtaattaggaatatacaatggcagtacattaattagcgattaaaaaggatttttggaattgatacatacaaaatactgaaatgcacaaactgaacacataaattttaaatttaaaatattattttggcgttttatttacatttcagcatttagtatgctatgggcaaataagttataggaacgggtgaggttgccgtggccgggcccgcccgttttgtttgccttgttaattgctgcataataagctggtcgcgtgcgctccctcagaatgatggggttaaagccttttctggccaggacgaaattccccaataggcgggcacatcgaccattgccattgcggaatggatgtatgtacacctaatgaaatgcgttttcacttagttattgaatattttaattttaaaaggtactaagcgatagtgcatttcggcgacaagttgaatgacgccgaggtgttgttcgtgtttcttgaaccatccaatcagctcgttcatcttcaacggcacaagccggtagtcaaccggaatatggtctccgacgctgacattgcaagttcggagccgggccgcatctcggggctcatggtagtctctttgatgcattttctggatcatattaaataacttcggtcgctgttgtcttcatccggatgttgtcaaatgttgaactgccgtctatataaataaaaaattgcttaaaggggaaaatacaaaaaatgaagattctgtgaaacgataatgcagccggcgctagtttaaaagcgggttcttttgaatttttttcatttttttggtctaaattttttttctttattttacacataatgatggatatgtgaaagcaaaaaagggtcgccgtcggagaaaatgtggactttcgtatgtaaatctggtcctgctggcgcaccccatcctccctacgcgccaaacatccaggtacttccgtgttttgctacccccacctcaaaaatttttttaaaatattatttttaaaaaaatttcgaggagggggtagcaaaacaaggaataccattatccatcctattggtctcaccctgtcgctcacattgtgcatgtatgcacgaaaattgtaaaattttgttttttaaccacgaaactcaccattttggcgcactaaaagcgcaccttcgccctggcaatgta

SEQ ID NO: 20307 - DNA, 2129 bp, Heterodera glycines
  unsure (1)..(2129): unsure at all n locations
cagtcggtcggtcgcttctctcacattgttatgtcgaccagggcacggaatccgctgtgttgttcgagtttgcagcagcatttcgtactgtcgcatcagcacacatctcgggctctccctctccctgctggtgccggtccgtgccatttgtgcggacgtcgtcaggacggagtcgtctcggctcggcagcgaacgaacacaacacaaaaaagtggcacacacaaaaacagcagtcggcggcgggtgttctcggcactggtgagttgcagcaaaaaggctgaaatgaatggaggtgaagaacgacagaatggaggaaaatgacgaacgggcgcggtgatattgcttgatggcatccccccttttttggcagaaaatttttttttaaataagccatgaagagcagggcttgaaaaaattttagtttgaatccgattttggacataggcgcaaatgctggggccgcaaaagtcgggccgcaaatcggactccgttgtaaggatttttgggatcgctgatccttcttaaaaacaaaaagttttctgccaaaaaaagtggcgggggggggggggtaccatcagcagtatgtgttatcaagtggcaaggggcgaaggcacttacagtgaaaaggaagcgacgaaacagcgaatggaaatgcaatggtcagccaaaatatgctccttttataggggcaatttgaggcaaaatcgaaagttgtaagcgcaaaagattcatccctgtatataaatagcacaatccacagacatttcttcattctttgtaattccgctactataaaattttgtggtattaagtacatatgtatatgtttattaaacaatatttatgtacaatagaagcatccaaattaaatcttctttgatcattggatatctatgaggttttaagtctaatttggttttagaaaaaaaatgacggaaaagaaatacttccataagaaattttggtaatactatagatggtgggtgagccccctttttggataaaattttttggttttaataagtcgtgaaaacatgtttatggtggttttcagggtcgaggaacccgaatccaacatttattttgaccaatttcgaatcctggacccgaacaaaaaagtcgaaattaaaattttcaaaattcactcttatgtccgtatctgtatagaatgaccattttttgatgctgcaataatttttgactaaattcagcttattttgatcaatttagaacaaaagttttttaattttttaatattagttttactttttactcgttaaaaacaaaagcctgcttttaacagcaaatgtgcaaaataaatccggtgctatggaccaagtacgacaaaatgcaaatgattaaaatgaaatggaattaaaacaataagaaaataaaacataattaattcacaattattaataaacaaatattttaatgggttcattaatctcagcgttcatcagatttatcacttatttcaaatgccccgtctccgacgattaattttcccgcgcttttaaaatgccacaatttgaattacgttccatattacagcctccttcgtagcgcgaatttgcagaaatgaagttgcaataattcaaaatatttgtgtaaacttctgaatataaaaaatgaaaaatagaaaattttaaataaaaagaacgaaaaactattttttaggtgtttaaatcgtaaaaaaaaagtgccaagtagggattttaggttggcattaaattgtccattggattttgtgccgccgtttggcagtccaagcaaataaaagcgtccgtttttttgcaattgaattggatttccatgagtctaaatatctatgttgtatgtaaactttgtaaacaatttcgcgaatttaaaaattaaattaatttgctaacattcagaaaggcattttttgtcgaatttgcacacaaaaaagggatctactgattttgctcatccttttttgcggtccgaagcttttccttgttcatttgactgaattgtaatctgttcaataattcaaattaatgaatttaattttaaccaaatttgtgttttaattaattaattttatttgttaaattattacctaanttatttgaaatcaattttatttaagaataaatttagtt

SEQ ID NO: 20308 - DNA, 3287 bp, Heterodera glycines
  unsure (1)..(3287): unsure at all n locations
ttgtttgaacaattcaaagtgttgtcattgttgttgttgttgaaagatgaatgggctaattcttttataaaaagtgaatttttaatttaaatttaaataatttaaatttatttccatttttaccattaaaattctcttcattttcatcagcagaaaatgagttgccaaaattgctctcaattgacgtgtccaaactgccacagctgcaccggtcgtcgccctgaactctcaaaaagcagtggtcgcatttattcgacaaaggcaattggacctaaaaagcgatttaattttattttttaattattcaaattttaatttgccattttgggctgtttttggaaagtggccgatgttttgtggttaaaatgaggaggcgaaagaacattgggcctcggctcagctgctgtttcatcgtcaatgacttcataactaaaaaattgaaaaattaataaatatttaaaaatgccaattttattaatttttttacaattcttccgaaattgttggcaataattgctgagttcgtgtcgtttgaagccgattttttgtgttaatgaacggaggatgattctgcggggttcgatgaaacacaatttggcccgcccacttttggttgtctttgttttggtctaaaataaatattcttttttanaagtaattaataatattcaaaattaattggcaaaatatcataatttagttcattaaccgatcattaggatcaattagtgtcttaattggttggaattgtgttttgcttttcgttttgccttgcttttcccgcttataattgtttctgctattgcgtcgttgacgttcgcaaatgagcagcaaaccgatgaaggcgagcacattaatgcccgtggcaatcgctaataaaatgatgagcaaattggtgcgaaattgaagcggaaattggcaaagaaagggcggcggagtgtccttaataaaaacaatttgttaattaattattcattaactaattagagagggctcaaaaagagtggaaaaaattacccaaatatagtggaaaaaatataaacttatcttttaaaatggcataaaatcagaatgttgccaacgaaaactagtatgtaaagcaaaatgggtttagttcagttgggccctcacggttgggccccaacatgcttttggctatgactttttttcgttgtcatccaaatccaacaatcttggtatcattcgaaagcttcacaagtttagaagctatttctaagatattattgcctcgcgattagacaattgctaaaaaattatagcatgaaaatttgcaaaaaactctaaatttctgaaattttttcttattaactttttcaaaagccaaaaaacctttttgctttttgtaagactaatagagcatgttaagagctttcgaatgataccaagaattaaatctcaattatggcgacttaaagcggataaattatccaatcaaatttgattggttaccgtaccattgaatgcgccatttccttctgctgagagtcttcacttaaacaccagggacatcgatgccgaaaaagttcaactaaatttatttaaaaaaaaaattaattttcaataaattgaaaaatcattttccacctgttaacgtggtgttgaagcactgtgcgtgaagttcaagctgtatcttttcattgccctcctcctttttgtggtcatttgactttgagacaaattggaaaacggacacaaacgacgactcgtcacagattcgggagaatttgaactttgggtcaatgccatggacaagggcctaattggaaaaaaacaaattaactaaaaatatttaatttattattattttgcctgaattgtcacatcgcttggccccccgcgagcccaaaatgtgaaaaattccaacgaaattccctgtaattgagcttaaaaataaaaatcgaaaacaaatctattgtgctaccggcacttccgcttttgttatcgaccaatcccgcgaaagccgctcattaaactttggcatttggttaatgagggaaaacctaaaaaggcaaaccgacaattaagcgacagtaaattccttcctaatcaaattaattatcaattatatgtttttatgagagtgagagttttaatagaaattttttttattccattaaaaaatatctgttcaaatttttactttttttagttttctctctcataaaaaattattcaaaaatccctttttatgtaaggaattaatttaaaaaagccacctcggctcagcacaaagttgcgtggaaatgcagtctctgcgaaaacgtatttgttcaaccgaagtgctgatccaaaattgttgttgttgctgatccgaagatgacgacggagtgctcgtggcatttgctgaaaattcagcggacaaaacgaaatgaaagccgatcagacgaaaagttatcagcagaaaaaggaggagaggagaacacttgtaattatgatttttataattcgtcatcattagcagcggaaaatggcaaaaattattaaaaaggaaacaaagcacaaatgaaaaaaagcatttaaacaaaaaattaaatttaattggtgaattaattaaaattaaaaaagatttaaacaaaaaaataaattgatttggttaattaaattgaattgtttaaactgatgagatcattaggaagcaaaatgatatgctgaagaatatttgtgtcgaatgggtcataaaattgctttgtcgtcatctttgatgattggcatgcaaaatgaaaaatgagcgatttgtttcttttcgtccggattaaggaggggcgacgaatgaatgaaaatgaatgacttatgaatgagtggtagtgggaaggcgttttgatttgatcaacacaatgggcacagattggaggagggcacttcaaagggaaaatggggaggaggaattgcttaatgagttgcctaatgaatgcccgcccacccacgcaataataacgtaagaaatagacaattccattttaaaatggtttttcaaattttcgagttggacatgttttataaaattaaattttacactggatttcaattcaaaacagagaatctgtctcaaaatttagtttattctcatcagaaccttcaaaacaatataacaaacagtcttattcccgtccttttatcattggtaatccttttggaaatctgccaatgagcaagtgagcgaaattgcgtaagtggcagtgatcagaaaaattttgaaacggattcctgaaaacttcttttttttaacctccatttgtcaataaggnnacctgcagnngccatgcaag

SEQ ID NO: 20309 - DNA, 1638 bp, Heterodera glycines
tcggctcgctcctgaatagttagaagaagtttaaaccttctggtggttggttacgcttcagttaaaacacagacgcactcgtgcgctcccacaaacttaccaatcgatggtccccgtttccgttctcggataacatgtggagtagagttctacgccttcgatcaggtcaagtgtgccgttcacaagcaccggttggtcagcgtgatcctcgttggcaatgtgcacacaaacgaactctgcgagcgggtttgggtaatattcgcccggggagctcaaaatttcctctttaaaatatgcgtacagctcttcaacagtttggagcgcaaatgtttgtagaaaatgctttattgctctttgcattaaatagcagccggggcagcaatagaaagaaaggcaacaaaaataataacaacagaacaaatactaacaatcatcaaacaagccggcaagtcaatggtacaaaatgctcggcttaaatagtggttgactggttagacatagcttcgctgtcgacaaacgcgtcacagcgtacactggattatttgtagacagaggcgaaagctccgccccccgagttaggtaacgaaagtgactggatcagaccatattcaccacttgtcagtgccatcatttccgtagtgtgtactacatcgttgctgcgagcttggctggtgttgtccgggcccgaatttgatgttgtacggcgcagtagtcggatcacacaaacggcaatgcagatgactgccacatcaaagaggtacatcaaagcgagcaggagccgctcaatgctgttcatcatctgtgatgatggtgttagtcctgcggatgcttctgctgctgctctgctgtttctacgatcagtgctgtcttccaatttggcgtcatcatctctctcgaatatgaggaagttgaagcgaatgtcactggagttggtcaaaaactgtagctgcgaggaaggatcattgaagtagtgcccaacacggaacttgtatacacgtctacgccaaatcaggtacacatggtcggccgcaatgaaaaaatccgttttttgttctggtaaaaacccgacaaagttgctcctcaacgagtgtgttgccgtgctgttctcaccgccgccgttatgaccaccaccaccaccaccacctccgtcagtgttattcagagtccaccatcgcacaaaatcggtgatgagcagctcatggatccggcgctcgtgcttgtccaccatgtacaaccggccggaaatatggtcgaacaaaatgcgtccatacgcactcaaatttcgtgctatcttgtgctgatgaccgcgcacaactgccactgcatttgcatcatttcgaaggtcaaaaatcacaaaactgtggcggtcatgtccaaaacacgcccacggcaaggcgctggacaacaactcgatagtttgccgccccatgctcatgaagttgtccacatcagtgagggcaatgttccacatatcagcactgttgtacagtcgatttatgtttgtttcccgctcaacgtgacacgcggtgttctggttgtagccgaaccaatgttggatgggtgatgtcttggaaagggagcgaaaggtgcggtcaaagaaattgggtgggtcaacgctcagctctacgttgatccatt

SEQ ID NO: 20310 - DNA, 2289 bp, Heterodera glycines
tataaattagtccttgtaattctcattaataaaccttttttttaattccgttattaataattataagaataaattatttttttataagttaccccaaaattaatgtacctataatttaattcgcatatgtcaattcattcttatcattaatggccaaattaaaaaaaagctatttcctactgaatttcctcaaacaaccccagcgatattaaataaaaatattatgaaattgattatataataagaaatttaattcataaatttattcaaaatttgaaaaaaacaataaaagaagaattaaatgataaatatggaaataatatacaaaaaaaaaacttttaaacaaatatatttacctactttttaaaagtcaatattttataatgggatagttttcaaaatagtaatctgagaataaatttaaaaaatattggaaaatttccaatatgtgacacaattgcttttatttattttattttaaaattttaactttaatagttgttgactttgcaaatgtgcaataacatcaattttgaaaaatttttataaaatacttagtttatgttaattttttatttaaatttacttttgtattttaacttaccgaagagataaacgagagaataattaaaaataactgagtttttgaatcaagaaaataaaagataaaaccaagtgattttccaaatataagaaaaaaattaaacataattaaaaatagcgaacaattcttattaaagctttaaaaaactatagttttgcatatatatatatattttttttttgctttaatttctgaaatattgtttgtttttaataattttttgatagatttttaaaattccggtcttaaacaaaaatatttaatgttaaataaataattaatgaggaagattaaaaataattccaattacttttatgaaaataaaatctttttttctaaatatttttttttagtaaattatttttgaatttctctaaaaaaaatttaaagttttttatctcttataaaccgataaatatttgcggaattttatgtgctgaatcttcaaaatattatataaatattcaaaaaaccgtttatagttttatttcttctcaatttctttctaaaacaattcaagttaaaaatgttaaaagttttcagattatatattaatttataatagagcctttgaaaagatttcgaatgatatcaagattgttggatttggtgtagaaccttcaaagttatattgactcaattttattcagacaattggtccgttctggtctattggtagcgcggaatcaaaaaataaggttttgttaattaatacatatttttagattatttaaatttttttcaacaattattatataaaacagggttgtgcattcaaatttgaattaaattatttaattttttttttatttcacttgaaataagttagtttttcatttttgcattactaagtataccaaaaagctcttagaaatattttaataaatcaaaataaattaaattgccgagcctagaaatgtccgaaaaaataagaaaatgattaaataaaaatttctcaacagaggaattgacttcccattgcgctttcaagagtgataaatcaaaaaaatttatttttcattacttattatccatttaaataataaacatccaaaaagatactgtcaattatccacttcaaaaataagctacgatattttttattgaaaaagttgataaagtaaaaaatatcaaataatataaattaattttttatcaaaaataaattctaaaaccatgaaaatgagatcattaattaagtattaaaagtgaaggacacaaaacaattgcctcattaaataacgctgtttttgaagagtaaataatttttttaattaaaaccaaaaatttctaataatatttttttgaaaatttattaacagttttaaaagttcttaaatttttattcctttgatttaattaaaaattcaaaaataaataataaatagatgaaattgagctttgactaaataataattaaataataataataaatcacttttccatatttgatttaattcagccactttacaagagattcaaaatgatttacattatttaaatgtcaaatttttaagtttaattactctaaattaagctgtatgaacataattgtaaatttacaaataaccaatttataaattataattataaatttttttttaataaaaatgtaaagaaatgaaaaattaaactatattttatgggtgctaaaaggaatgatttaatctttgttcttttccaaa

SEQ ID NO: 20311 - DNA, 2569 bp, Heterodera glycines
ggtaatttcacgtgagaatggaaaatattaaaatcaaaattattaaaaactatttttttagttataattttaaaaggttcgttaaataaaagaaataaataaaagaaaagaaatgttataaaaaaatgaatagtatatcaacaggatttttttctgaaaacgaatattttctattgtattattcaaattgaatcaaactcatattttcgttaattattatcattttgaacaaattgggaaaaataaaaacaaatttctaacgtgagaaaccataatcaacttggataagggcgatttacaaaatataacaaaatttaaaaatgcaaaaagattaacactcgcctaaatatttataacacccctaaaatataatcataaataaaaattataattgtttttattaattaacagaagcagacaaatattgctcataaaaagttcattaaaattaaaaaataaattaatattttataggtcaactgaaatttctatcaatttattttttgatacctaaatcgttgagattgacagtcatttgacaaagttacgaccttttgcactatttcggacaaaacaaaaatgagttacaaggtaataaatgaacaataattttatacaataaaaccaaaaaagttaaaacattaaaaattaatttaatattaaaataactgttttagactttgaaatttaaattgagtttgttttaaatacaattgacaataaaaaataaataaatgtgtagttacaaagtaataaatgagcaataattttattataatataaccaaaaaagttaaaaattcatttaaaatattgaaataccaaccattaatttcgaaactcaaattcttcaccatatcgagaaagttttataaagaattgtgtaataaacctaatttgaatataacaaatttaagtgaatttgttattattagttcctaattaaatacaatttttataaaaattttattattaatttcaaatgtgaggccattaataaaaagagatcaagcttaagaaagtgtattaaagaaaaaagaaagcagtaataaatttaataaatatgaactcgactgattgaattatttaaaatcaatttaaacaaataaaattgcaaattctgttttataaataatgtcggtatgcctaaaataattgaatttaagtaatttttatttatttaaaaaaaatacaaggaaaggaaaaacaataatgcataaaaattctttgttttattttataaaattataaaaaatatttcatccaataattcataaaaatgaaatattttctcaaatttactaaacgaatattttttactgattaaaaaggtaaaaaaagaattaataatttctcattattatattatttttaacgacttttaatttttatatgaataaaagaacaaagataaaaattataaaaaaaaaacatttgaattggaaatgtatgggagaggaaggatggcaagagactcaaaataatctaaattctactcaaaataatgcccatcgaaattaaatataatttatcttactttaaaactatttttcataacaaatgaaaaaataaattgctttattatgattttaaaatttgaaaagattagatgccgaaaaattttttgagaatttaaaagttggaatatttttttattaataaaatttcattttgatttattagagtctcaattatttgtcaactttaatttggatccaaatgtttaaaataccggctaaactagtaaaattaaatggtttttttttatttcataaaagttccgttgttttaaataactaattaattatggatattgaattatgaccgttacctttaattccccactgaatgagcacgtgaatcatgaccgtgaaatcaaatagattttataattgaaatattttaatactcttgcttagtataccttttttgttaaatttttgtagtccatagtatttgttatagtgttattttgttaaatatcttacaattagtgttaaataattgaactaggaaaataaaaagtagattatttctcgttggtagttctctgaaatactgttttagatttaaaaaaagtttatttattttaaatgactataaaaattatttgtcaatttaatttttataaaatatataataaaaaattattataaaaatttcaatatttataaatttcattttaatgatataaaaaagatttttgatgtacttttaattaattatctttaatttcaattttaaaaaattttccataatatttatttttggccgaatatttttattttactcatttatttttttagtaaaaacaaaattatataaatatcatgtttattagtttaaataacaatatttattttgtatgagtttcatgcattcaataaaaattgcaaaaataaagaaataaatattcagaaagttattgaaaaattacttgaaagttttaattatttgaattatttgagcagcataaatttgaaaaataaaataaaataatattatttaaacaaaacaaaacgataaacggacgatatattgaatttatgtatagtaattatgtttcaaat

SEQ ID NO: 20312 - DNA, 2957 bp, Heterodera glycines
tttcaattaacctttttttttgtcccaaatcccattcaatataatttatattttacttccaattctcacctttctgctcacaacaaatgcccttttgcgtttgtttgtcccgattggacgcgaatatcccaacagagccatcaaacgctttttcggatggattgagagttcactaaaaataaaattaccaattaacctgcctgtcatttacaccggtgactcacatcatcagaatcacttgcgcccactgaaagaatgccaaattaaacccaacccaatttattgtgctcaattgcgattagccgactaatatttccctaattggccccctaattagccgcttaatcccttggccacctgtctcttccattccttttcagtggcgtaaatcatttcgtaagttcgcgtcatcatcgcgatcagaaggttgaactgcatcagactgaccagcagctcgaagatgaagaacagaatctgtgggggacatcgaatgggaagctgaaataaatgagaataagcggtggaatgaatactttgccgatgtttccgagaagaggggctaaaacaaaatggcaaaaagtggataattattattataattggtttaatgagcatggcaaaagtgtgaccttggcacgtgtgcaaatcctggtagaaagtggagaattcgcccactgtcattatgaacagacggatcagtgcctccaccggattgccaataatgttctctttgttgtcgtttgggtcgccttgcgaaccggcggcaatccgcgctctttcacaggcgcgaaaaatcacgaaaaagccttagaagggacaaattggcaaacggatgaaagacgattgacccccgcggggcaaaaatttggcacaaaggaagggacaaaccctgggaaaagccgatgagaaagatgaagtagatgaggaagaagcggaactgaaaagcaaaacgccgattgttttgcggttgaagtgatcgccgttggacctaccaaatcctgggtgataattttgtagatctgaataaggagtatagcggattaatcggattggaatattaccatcaacacaaatggcccaacaaatttaacggcgcgacaataatactgaaaagggaggtgaaaagccatcagacaaacgctgaaatgaaagtgccaaaaaatggagagaagtgaggatgactgtggcgacggagaacatattgtccagcagaagcattgagtcggcaacgccacacagaaaacggacgggcaaaatgagaaggaccagcaacagggccaatttgtagaaaattttggaggggaacgaagtctaagggggggggggacaaagcatcaaaatggacaaatgactaaaagaggaaggaaaaaataagcggagggacaaagcataaaaatggacaaatgactaaaagaggaaggaaaaaataagaggagggacaaagcatcaaaatggacaaatgactaaaagaggaaggaaaaaataagcggagggacaaagcataaaaatggacaaatgactaaaagaggaaggaaaaaataagaggaggaacaaagcataaaaatgaataaattatcaaaagaatggggggggggtaaagcaacaaaagaagaagcgatcagataaataaagaaaaacagcaatgagaagagaccagagcggaaaagcgaatcgaataaaagaaaaatcagccaccaaaatgtgaagccatcggcgacgaccgatgttacgaatgtcgagcaactcgctgatcacctgatccaacaaatgatcaaacactctcaattatgccaaaaattggagtttgaattttcgttaaaaagagacctgaaaaagtgccattccgtagaccaacggctcggaaatcattcgaagctaaaaacaaatgagcaattcgcatttttgttttttttattcttgggttaactgtgccctcaacgccgaacatgccgtacttccacagatgacacctcggctggtcaaagtacaaattgtctaagcaataagaaccaattagctgacaaattgcaagattaagtccattttacgcttaaacaatcaaattaaatatttcataccggtcatagtttgtatttaattcaagaaaggatgaagccactagcaaagccttaaatttaacaaaacctactgaaaattccgaatgatccatcattttgggtgatcattctgtcgctgatcagagtcaacgcatttgtgttggcatcaaccgccttgtgattatcaaatgctaattgttgctaattgggtgctcattactcacttggcccgtccacgaaacatttccttcagtgattacccaagtggtggcggaaaagggacgactcataaaagcgacgaaagagacgatgtagaaaatgcaaaagccgaacagagaaatgaaccaactgatcagagacaaagggagaggggaagggtacggtaatggaccaacagaggaagagtacggtaatattggcgcaccgttttttagcgaaagctgaaagaagtgaaatgaggtttatttatacatttgactatccgatcagaatgaccgatcggtgggcaatgagtagggggggggtgggagaatctcgactcgactttcgacatttttcggctttttgggtctctgtaaaactcttttctcgcacacccctagcagtgagtgagtaattaataaacaaatgatttagtgaccttcccattttgcctcaagcaaatcctccaacagtccgtccaacagttccaaatgtttcgtgctctcctgtaaattgcgcattgtcaggccatcatcattttccgtgttgtgttgcgtaccccgtaaacgaccagtgaaagtgccgagtcttcgttcagatcgcccgtttcctgattgatcgtgtcgattttggccaacggataggccacggaggacgcctagccgtagtcccacacatattcactctccaactgcagaa

SEQ ID NO: 20313 - DNA, 3716 bp, Heterodera glycines
  unsure (1)..(3716): unsure at all n locations
tcccaccggtttctgtggtcgcgaattcggttggccatgccaatttcgtgaaacggcacaatttcagtggcaccactgaaagccgaagacagaaaatgagcgaccattaggctgataaataatgcatttgctcaccgttggcgagggtcacagtatcggttgaccagcccaacattgtgagcccagtcgatggcatctgtcaccaaatcttcgaaactttccaactgagtgttctcatcatactcttcaaagactttgaccgcataattttttattttttcttaaattttaaataatttttcgcatttttaaccgttttaatcccatgatggatttgttcaccttcttctgtgatggaggcttcattttcttcattactttttgatggcgaagtcaaaacgccaatttttggctcgaaaaggccgaaaagcaaaaataaaacgaagacaattttggttttcaaatgaatattagccattaagaaataattattatttatcttaaagtgaaaattaatagattaattttatggattatataaatttaagtaaataataaatgtttttatatggctttactttcgctctttgccggaaacacttccttcctcgcattttcatttaaattacatgtgaaattcattcggaatactttttgaaaatgaatgaataatatgtcaataatgaaattaatttgtaagcattaaaactatagacccggataactaactgtttcgatctatcgaattaagtttttaggcttttaagtggattttaatccttgaaacaaatttaaaaaaaataaacaaacttcttattacttttttctttaatatatattttttatggtatttaaccgtaataaaataggataatttaaaaacaattactgaccaaaagcttcgttagcttaaatttgaatggaggaagcttctgccgattttcgaatttctttgtctcccataccggcaaaagtttaggttatttcatttaatcctacaaatttggatataaacggagttctaaatttaactattttggccactttttgtttcagttgtcaaatgaaccagagatgtttaaattgaatttgttcaaaattaagaagcttcaaattggcggcggcgaaatggcctcgaccctccaaaattttcgatttttgtattgtgaattataagtgccaaaagtttaatttatttcaatattaattctgtaaattataatgttaaattttttctgcttctttcaatctatgtttagttacctaattacatttaaggcacttaaacaaatttgccattcaaaattggctttattaaatttgccgacacgtaaagcacttttctttttgtacttaaaaaagatgcttaagttactgtaataatgctattatttggtttaacgcatataattatattacgcaagcattcattttttgtgccttcggccatgtcatttacaagaattttacgctcacatttaacatggacaaattaagaaactctaacccattcattagtcgcctaatgaggaaagcggcgcttaaaaattaatgaaaaaatggatgaattcattttgggataaattcagaaaaatttccaatggctgtcgtcgacacaaacattaataattcagtaagagaaagtcattttataataattgggttaaaaaccaaacgagtaaattcagctgtatgccgagttcaaagatgctcgtccgagttggcttctcatcggttgtgccctccctttgggaattgtcgccgccttcggaatgcttttcaatttttgcgttatttttgtgacaattcgctcaaagtccgcatttatattttaaattccgtttcaattattctaatcctttttttggggctttgaatggcactgccaattttctgctggcactttgctctttcttcgaactgctccatcagcatggccattttctgtttgtgttcgtcgctttttcgggcttaaatttcatcgaatatcaaacggccgcacttttcgcggcactttccgtctttggaatgggtgggacaaatttaaaagtgaaaatcaaaaatcgtgccaattttaggtggcattgccatttcaatgtttttcactgggcttgaccgactcatttgtgttcttttcccggaaaagtaaggcataaaaaaacatcccaaattaattgacttaattatccaattaaaaaaggcactccaaaattaatttgcgcttttatttgggcgcaattacttttgtctgttttctgttctccgctgcgttactttacacactctttttgactgctaaacagctcaaaggactgatgatcagcggatgtatcgtcgacattgtccaagtccaaaaaaaaaaaattatttatttaaattgaattttaaaatggaattcattaaattttagggtccatccgttgcatttttcgctccttccaatttgctcacaaatctcgtgaccactgccatttatttggccatcggaatcgccgtcaaagccaaaactggtgatgatatttaataaaaacgctttttcatcccaattaaccttcattttttgcttcattttcagcttctttcgccgcccaagcgaatctttcccgccgcggcgaataatcgccgcncttttngcgttcgcttttcgccnatcgtcggcgtcaacatggggcggctatgggtgcttctgcgcccctccattccatcgccgatcaccgcgtggctttggcaagtgatcaccggcattccactgaatgtcattgccgcatcgaacggaccaattctgtactttacgaggggagacaatagcaaaaaatgaaatgaaaactcaagcgtaatggcattttggcgctaaattcgggactgctgcttaatgacaccgagtcgagaaaaacttcccgttttttttgagcttggtatcgacttctcgaggccaattacaagtctctgatgatagtcttgcaaaataaatgcgttattaacaattactactaaaacccaataattaaatgctaaatcattaaaaagaaaataagttgattatatttctaaatatttttgattaaaataaatgcttttccttcatttatgtatttagcatcgaatatcggcaggcgttccgctcggtgtttccgtttttcttcaaacattttcaaaagattgataaaccgaagcaaccacaaattatacggctgaaaactttcactgtaaacaaaggcaaagtttttccgcatttatcaaatgttcgaaatatttaaacgattgagtgtatttttagttttgattgttgtttttttcgacaatgatttcttttggcaaaaacagagcctatttcaatttatgtcatatcactgatctgacatcagcagatcagagccgcgactaaaatcttggaccatcttgatgttgaggctgaaccaaccgccgtcgttcgactcggccggttcaacccgcagcgaacaacacctcgcccgctcaaggttgtcatgccaacacccacacatcaacacatggcacttggaggatggaagcgcgagcgtgctcaactccgttctcaacaaaacctggcccgcttgttcgtccgcccagcactgaccaaagaacaactcaaggaggaatacgaagcgcgcgtccgaaaacgtcaacaaatcccagctcccatggcgccggcagcgagggagccacagacaaatgttccgactcccgtcaatgaaaat

SEQ ID NO: 20314 - DNA, 2149 bp, Heterodera glycines
ttacttaattccattgactttgctaaacttcttgacacctatgatgttgattctttacttttgaaaccacctcatctcattcagtgaccaaatttatttatattgttatttatgtcggtgtcacgcttttgcgtataaattgattgattgattgaagaaattaatatgtttattgaattatttatttaacaatctaaaattgatggaattgaaaaattgtttaaaatgattcaaaaatataaatgtatgtttttttttgttcaaaaaccatcgtcattatttattgcaacatgttcaattagttgatgaaccaatgtttgcagaaccgatcagcgaatttgtctggatagaaataatatttaaaattataataaaaataatattcaaataataatgccaataatatttatgtcttatttctgaattatttattaaaaaatttccaacggcaattttattactattccgttgaagaaatttgcttggccaataccaaatggggtcagaaatggcccagccgtgccattgaatgagggcgctgacgaataattccaagctataaatggcaaatttaatttctaaaaattcgatgaattgaaaatgccaacaaatgacggtggtgctctccgcttcttgttgtccattgttgttgttgatattgttgttgttggccgttgctgatgcttcttcctccccatcatctgctggttggttgcgcaaaaattttctgaaaatttatttaaattttaagtttagtttccgctatttaggaggcgtattttttgcagcaaatttttaatctgcgaattttttctctttagggttccgatgttctatttttcagaatcggatttcagaaaattctgacaaatttgttcaattaatcccaattcattaaaacatcaaaattctttttccagcggcgccacggcacgaacagagagagtccctccccctacatgcccatcttggtgcaaaatcttctaattgaaagcataagaaagtgcataaaaattaaaattttttaaatttattacttaaaaaaattaccaaactaaaaaattatttcgaatattttggatttaatcccaaaagtaatgattgtacataacagagctaatataaacagcgggacggaggggtagttttgggtattaaatggtcgatcggataccgaaaacccgccgaaattttatttttccggttttctcgtaatgactttgaataacattgaactaaatatttttcattttgaggtaatttggcaataaaattcggccttttttccctcgccttatgataatcgcaattttcacctgtgctttgcccgccggtttttgaaccaaacctgcgatttaatttaatttaatttaaatttgtttgtttaacattaattcgtttgatcacttggattttcgcctcgggcaaattaattcgtcgtgccaattggtccctggtgttcacatccggataatgagagctttggaaacatttttcgagttcctggaaattgcgaattagttcataatttttaaattggcattttccaattattcattttaaaattaaagaaatttagtcaaatttaatcatggctaattcaaacaattttcatttgtctgagtttgcccatttgtcacgcgccagtcctaccgtacctccaactgtagctcactaaacgcggtacggtttcggcgcgatgttttacgccgatcatccgctgacgctgaagtgccaccaaccgaagaatttgaggatgctaaaattggaatttttacatttagtatttgtgattttatatggcatttgtttccatggaaaccgatggcattaacccatcaaattccttttttttgaatattttaaaaattttaatggcaaattttgacaatttttggtccgaaaatgcaacaaaaaacgaattaaaacaatttaactgttcttcaaaaggtaaagcagcaattgaagaagaaatttaactttttaattattttattcagatgcgtttgaacttcgaacaaagcacaaaaatcctttttacacatccaccgaagatgaaactgaggacgaagagggaatgaaaacaccaaaaattggtatttggatttaatttaattacctaattgtattttgtaattacagccattgg

SEQ ID NO: 20315 - DNA, 3330 bp, Heterodera glycines
  unsure (1)..(3330): unsure at all n locations
aattccatatacaatttttatttcattaaattaaatgactataaatttttcatttttcaacttcatctttttatcagaaaattgaaaaaagattaatgcttaaaatcatatataaaagcttataaactgcattaaaagagtaggggttgtttcggcgccagccctagttttttgacaatgattttttagattgatgtcaaccaaatctaaagcatgtgaagggctttcgaatgatactaagaattttagatttggttgacaaagaaaaaattatagtccaaaagctagtgttggcgccgaaccgtgggcgccgaaacgaccatttccctagtaattagatggatttatatttaaatcgcaaaccaatttaggtccaaattattttttaatactattcaagatggtgcgcggactaatcaacaaatcgcgtgacgaacaaattgaacaacaaaatgctcgcattgccgaacagcaacaagtttctgtcgcaaaatcgctaagtctaaattgcattctcaaaatttaggtcattcgagagtgtaaaacattgtttcgtcatgtcagtgcgcacagcaataccatcagttcggccttgctaatgttcacagaagatcacccggagttcgccgctttgcttcagcatccgattcctttggtttgaaactttgtttttcctattttgggttattttcatttgtttccggggcaggaatccgagtacttcccaaatttgtcctctgtcggtagaaattttctcatcaacacccaagttttcctaaaaatgcaatcctctacctttctgcggttttgtttgtgtttttgggtctcaagtttcgagtgttttcattctgttttgggacattttgcattttccacccattttcttaaccccccactcaatcgcttctctgccaggtgcagccgcaacaacaaaatgtccccacgccgagtcagctgcagttgttgccaactcgccatgacaacgcgttgtttagcgactcatggccaatagtcggcggagcgagccaaagcctggcaatgcgtgcaagcgagacgtttcgaaaaacaacccacccgccaccgagcctagggcttcgtctgtttggcattcaagaagtatttcttaggatcacaaacaaacaaaaaatacgcagttgcgggtttcactttacccaatcaattaactgttttagaaacattcaaatttaacattcttggactcattcaatcgctcgaagaattctctagtggctacataattcaaaaaatttcttagctttcaaaaagattgaaccaaaaaattcaaaaaccgacttccgaagtcaaaaaatcaaaaactgattttctaaactttagaaaaagatcccgctgtgggattgaaactcaaaattnttgcggacggcattccgcagggataaatcccgcgcgggatcccgtcccgcacctggctctataatcccccttccctcttcgtcaacaggaggcgattatgcccggtggaactgctgcagtgacgaaagacgccgaagtgacaccggcgagaaaaggtgtttttttgacgggcacacaaagttataaaactcaacgcattccacattgtgtgaatgctgattcactgttctgttccgagaccttggcttcggaacggagtccaaaatttgccaggagtcgaaaccaaaacccgggaatttgccggttatgagagacccccgaacatataaacagcactaacgcttttcattaataggaaagccgagcccgaagaaacaccgtccgtttcgcaatgttttcaaagctttgggcgacggcgtgtcgaaactgaagttctctacgcgaaagcgcccagaggtttttgagtcctccataaacacacatccaaaatatacgattgatattaatttttggggagcagctcgttttcccctcccagaaatttataaaaaaactgaattttttaaaagaaaatatctcgaaaaaagatatttgaaaacttcaatagcgatttttaaaggtttatgatgaattgctgttttttctaaaaaatttcaaaaaaaaattgctgtaaattttttctagaaatttactttaatttttcggggaggcgaaggtattgcaccctaattttggacactggcttaaaggccgctatttgccaatctctcctcccttccctcttctctcatgtgcagaagcagcagcacgggacgacactgtccgggacggatcagcgccgaccgcaatttgcaccgactttcgatgcctcgattgccgaacagtctacgttccaatgggcaacggaaggtcaatcatcgtctacgagtcaatgggcaacggaaaaacaggacgttggacagtacaaagaattgcccaagtttgggcacggcggtgggggcggccaccgccctttctgaatttcgccacgtgataagacaatgccatgaatttgcgctttaccttttaaacttcaattaacttatctcattttctgcgtattttaatttcattttattctttattctcatttttttgcttgttcgcttatgttttccttgtgtcttatggataaacttaattcttttcttttttactcaattacgtaatttattgcctaggctaaaacaaaaattttgaacggggaaaaaattgtttttttgttttgtttttcatcacttaaatccttggtccgcggatgtcctcattttatagatttgtttgaagggaaatccaagttttaagtatgcccttatttcgaaaaaacaagaattctgcttaatgtggactttgacctgcattttctggacaaaaatccaggacaagcaaacattattgtttatcccatggctcattctgacaatatgtagctgactaagtttttttggttaagagatagacaaaaataaataaaaatttgtccaagtcatcttcggaattggtgctttttggcaaagcctgttcaacaattttttttctaaaatctaactccaaagagtgtcatttagaaaattccgaccatccaagtcccaactacagtgtaatagaatatttaaaacacatttttattcataagacggaaataccaagcagagaaaagcaaaaagctgatgaatagaaataaaaatacgcaaaaagcacataaacaaaggaaatggaaaacagacaannagaaattatccaatgagagagactgtcccaaaaagcacccaattaaacccganagcactaatttataccataaaaacaattatggtgtttgtctttangggagacagcctctgaaaatgcataagagggaaaaaaaataattcgccaagaaatttaaaatgaaatgaa

SEQ ID NO: 20316 - DNA, 1592 bp, Heterodera glycines
acgaaatgggcgagttcggcaccattggagcaaggtgtccgttggatgtcccaccatcagcagcatgtgactgaaatatttcaaacagagccgcgcgtaggggtggtactacgtttccccccgtcaccgttcccccccccccccctccaaatcagttcccccgagaaatttatttttaaaacttagaaacttttcgagaacaaaatcctcgaagttttttataagaaaattacaagataaaaaaatttcgagaaattatccagcaatcttttggctggtggggcaatcaataaaaaactgacttgtgccaatgcacagcaaccaatggccaggctgaggaacaggagaagcgaccgatgctcagtgccgtgatttgcatgttgtcgccgaataaatcttgttgcattattttgttgctgttgtgtcacccctgtcattgtcgcttcactgctgacgacaatgaatttgggtatttgagtaaactggaaacggcactggttggcctagtaaaatgacagacccataattcccccctccccccgaaatacaaaaaaaaattctccaaaaagttatagtaataatttttttattataaattttacttaaatttaacccaaaatttcctccccccccccccgccgccggatcacaatttcccatattttttccaaaatttggtctcaaaatggcaaaagtctcactttttttctatggcgccgaaaatttaggttaactacactggacccgaagagcaaaaaaaaaaagaagttattcgcgttgtccttccgaaaatttttctgttcagcttacgagcctgtaaaatggtgtgccgggccgtcattgctcagatggcacatccacagttatattagtaccatgtccccggcgagcgggcagactgagagtgccaacaataacacccgctcactccggcccctaattatctctttgaaaattgtttgcaaattcaattaattaatacacataagatggtgcctgcccaccgccacagatggttatgttatgacgctgatggcattggcacagcattgttttgtctttataccgtgaaaatttcgttatccgcgactataatatgggaagaagaatatgtacaaattgccacaagcgatgccataaatttggaccatcaacaaacaaaacaatggccatttttatgcccttgggtgtaatgatgacacattttgacgtacaaaaaatattaacatctgctgcacattttgcactctagtagccagatcagccctaattcagataatcaaatattttagggactttccgttatatatttatttttttaaccttttatatgtgataaataaaaggaattactatatatattaaatatgaattaaaaaataaaaacaacgaaatgcacatttttagtttgtgttttacaattgtaatacaaataccgaaaaatacacatttttagtttcttacaattgtaatacaaatactgaaaaatacccacttttagtttgtgttttacaattttaatgcaaataccggaaaatgcacatttttagtttgtgtttttacattgtaatacaaataccgaaaaatgcaca

SEQ ID NO: 20317 - DNA, 1243 bp, Heterodera glycines
ccgccgggcccgggcttttttcaaattttttgaattctttttaataaaattaaaaaaaatttacttttttattttagcttagaattatatcaagccatgtaaatcgaccttttttgctttttaaaaaacttttaatggcgcatttttttaaaaaaaaatttgaggtacaatgggggggggtccggcggtgccgataggcgccgccgcggagaatttttgaaaattgtgtgtgatttgttaacagatttcaccaaaaaatgaccaaattttgaaattttgagctgaatttttgagaaaaaattaatctttttgtacaaggcgacgctgaggaaaattttttgacttttaatgaatttattatgaaaatttgttgatttttcataaaatttggaaatctcttgctggttaaattcgtgccgattaaatttttcgatcgtcggctgtttctcatcagctttttctttggactcctttttcgtcttctccaattcttcgaaattttttacatattccgaatttgcatggattgttgaaaaaagatggtttttgagcgatttagtgctgaagtcagagaggctaaattcatatttggactttccattttctttacattctcggcactccgcgattttgccatcctttgatttttcaaataaacctattttccagattgatgcattcatttctgaaaaacatttcaaaggatttaaaaacaaaaagattggcatgtatgtaagaaaatcaattggaatttgtttctctgattatcgttaatttgaactagacatttcgccatattaattatttaaattttcaaattgtgggcagtttcgctggcgaaatttaagcccgttttagcccggtttttttccaaaaaaaaacgggcccgggacgggcttaaatttcgccagcgaaactgcccacaatttgaaaatttaaataattaatatggcgaaatgtctagttcaaattaacgataatcagagaaacaaattccaattgattttcttacatacatgccaatctttttgtttttaaatcctttgaaatgtttttcagaaatgaatgcatcaatctggaaaatagcgttaattgaaaaatcaaaggatggcaaaatcgcggagtgccgagaatgtaaagaaaatggaaagtccaaatatgaatttagcctctctgacttcagcactaaatcgctcaaaaaccatcttttttcaacaatcatgcaaattcgaatatgtaaaaa

SEQ ID NO: 20318 - DNA, 1590 bp, Heterodera glycines
gtccgcaaaagtcggtccgcaaaatgtcggtccgcaaaagtcggtccgcaaaaagtcggtccgcaaaagtcggtccgcaaatgtcggataatcttattaatatataaattcatccttttggctttggatttagcttcggcataatgcttaataacggtacccgcggcgagaacgcaccaaagcattgggtgccaaaggagctgggaagttaaatgatagttaaagggacaatttaggtcccgccctatcatacgctgcacccttcccgttaatacagcgattaactcaccttatttttgctcctttaaatccaaaaatttatgaaaatatttaaaaattaaatcaacttaaagtttccaaccaaacaatgtttttgactgttttttctttattttcgctcgaatacttaattttaattcgttcccaacttcttgttctcgataaagctacatacaactggccatgagcaaaaacatctcgtgttaaatcaataccaattttctcaaaagtttgtccttgtgcactattaattgtcatacaaaaagctaattttaatggatattgatgtcgtttaagaacataaggaagttttttatcttctattaaagttattcttggaataaaatcaatttctccaattcggtctcctgttaaaatcattactcttaaaacattcttttcaatatcaagtatttgtacacgtgttccattacataagcccatatttacattaatgtttcttattaattttgtaacagaattaattttaagtttaagttcatggtcaggaagactatttgtttgaagtttattgagaacctctggaagaataggcgcacccttgctttcagcatcatcaatgcttctaaaaacatattcctcacccggaaattttttttaaatttgatcattataaatattgatttctctgttatatggtgctaaaatacaatggctgcataatttcgaataatcatttgttttaattatttcaccaaaaatttcatcaaccaaatcattgtcttcaacatcacaaatttttggaagacatataccgttttcatcattacctttaccgttccctatttccaaaatttggtttgcaaaattttgtgattcattttccgttcgcatattttttctcaaatggaatattttaaaattaacccacaactcacttttttgtagtgttaaatctaaaatttcggtttttgttgctttattttttattggcaaacattgacggaagtcaccacttaaaatcataattttcccaccaaaaataatattgttcttatgtatctctcttaatttcttatcgattatttcaattacaaatttaggtgccattggtgcctcgtcaaaaatgaaaatatccgtttctctaacttcttttgcttctttagaattgttttcaatcgacgatgatgaatttatatttaaatctaatggtaatttaaacgcggttgtgaacagttcgaccgttctttaacaatgttgctgctaaagcactaaaagccatatttgtcactttttttaaacccaggtaagaaaatgaaaaatagcagattgaacaaatgattttcctgt

SEQ ID NO: 20319 - DNA, 3246 bp, Heterodera glycines
tccggtggctggtaatttcgacactgggtaaattcgacactgagtattttcgacactaagtaatttcgacactacgttttcgacatagagaaatttcgacactgaactatttcaaaaactctcactgttttccagcattttcgacactggaccatttcgacagtgagtaaattcgacactattgagaatttttaaaaattaataagaaattttggtgttagtattaggtattatgataaattttcctatttcattttctaattcgtactttttaaaaggttaggttggtataactagagttggtcgggaccgggaaatttgacaaaaaccgggaccgggacttaccgggaccagaaaagtcgggaccgggaccaacttttttgaccgggaccgggatcgggaccttgagaaaagccgggaccaaccgggaattttttcaagagaaaattttttttgaaaaattttgaaaatttgagtgcactttgttacgaaaattgccaatattcaaaaatgttcccataaatattgtagtttcgttttgggggacgaattcgaagaaaatttttaaaaattttcatttcgggggggggggaatcttggattttctgagtcccaaaattctggatttttataaattaattaaaaaattttgcgaaaatggccctcacgcgaaaatggccacgcgaaaacggccctcacgcgaaaacggccacgcgaaaacgaccccgaccgtggaatgggtcgaagcgggtcagttccgtctggccagttccgtcttcaaaagtcatgaaaacatgttttagggtgattttcggttttcgggccctagaagccctacaaagcgctttgaaatcaattaaaaattgcaatgatcagtgatcactgactgatcaggtttttttgaattatcgccccaaaatatcgctatttggcattatgagtcattgtctaacactgacactgggtttgacgttttactcagttataccaacctaaccttttaaaaagtacgaattagaaaatgaaataggaaaatttatcatacctaatactaacaccaaaatttcttattaatttttaaaaattctcaatagtgtcgaatttactcactgtcgaaatggtccagtgtcgaaaatgctggaaaacagtgaaagtttttgaaatagttcagtgtcgagatttctctatgtcgaaaacgtagtgtcgaaattacttagtgtcgaaaatactcagtgtcgaatttacccagtgtcgaaattacatagcgccgcataaaatatgcactaaaaatccgccaaatatgcaataaaaacccgaaaaatgcccaaatatgcactaaaatatgccttaaaaacggtgctgggtcgttacttaaaaaaccatcattatgaaaatttttgtcgaaaaattatttataactttgctcgaaagcaaccaaatttttaattattgatatcatttgatagccctaagtgttctctatcagtctgcaaaatttcaaaaaatttcgttaagtttcaaaaaagttatagctcgaggaactcaaaaaaccttgattttcgacatttttggccataactttttttaaacttaataaaattttttgaaatttaacaggctcataaagaacatttagatctatcgaatgatagcaaggattaaaaatttggtctttttagagcaaagttataagcaaaaattttcattatgatggttttttaagtaacgcccattatgatggtttttaagtaatgacatagcaccctcgaaacgactgagcttttgccgctttctttttgagggttatcccatgtgctttatcccactttttcccatactccaattccttctgcgcgcatcatacaagagagaaagagaggggggggggataagagaagaaacagacgagaggagatagccgagtgactgttacgaaaacacggatttcggaattgggaccgggggaaagagccaaatttgcgagaccagcgggaatcaagtaaaagtcaacccgttaattgggggatattaccaaaatatatttatcccataattagttaaaaccgttaattgctttccacagtccattcaacgccaaataaacccattggacgactaatgagttaatttggtttttgttttcttccgctgaatttgcttcaaattcttttatcaccgaaattatttcggcttcatttaattttttgatatttttatttttcatcgctttttgaatattttgttttattttttcgtcattttccaactcttttattaattttcttgcattctttccaaatttttctgttgctttttccacgctttgtccatttttcattgtccaacagaaatctttccgcaatttttgagctttttcataaaaattgtaaaaataatttttcggtgtaatttttcgttcggattcttcggcacataaaatgccaaaaatataattttggaaccattttcaaaacaaaaattcatcagattggaagaatacgctcggagctgtgctcaacagtttcttttccgtcataatcaaatctaaattagaagaagcggagtttaaatttattaagacgaaaaagcagtttaaaaattgaaaattaagtggcttaaattttgtatattttaataagcattcaatataatttagctaaatcaaatattttaataataagtctgggtgtctttattatctttgaaattttgaaaacttaaattttggatacacttaaaaatgataagtattagggactgcatggaattcccgaaaaaaattggaggtcagatttcggtttgcggaatttttaataaaaaatcggaaatttattttttattagtttttttaccaattcggaatgattttttttaattacgaaataattagtttttcagcgcctgtcggcccgccggaccccaaaaactccttgttttttcctaaaaaattagcccaaaatctcaaaattagcagtttttgtataattctgtttaaatcgcataaactttttaaaaaatttccccagcacccaccggactacgcttatgttcgttcccaaaattaaaaaaaaacgcgggcctttaaaaatggcgtcaatgtaaatagtcactttcccaataatattttaaacaatgtaaattgattgacataaaaaatattctgaagagaaaattactttttaatttttggtttagtttaaaacttagtaattaaaatatttagaaaatttctattatttttttaat

SEQ ID NO: 20320 - DNA, 3080 bp, Heterodera glycines
aaaatggaaaaatttttgaataggaaaatatttttttttttttgaaatttctgtttgtgaggcatttttctagagaatgcgtcattttttcgactttcgaaacacattttattagtggttttttaaaatttaaatcaaagtcactcaaaactcccttaccatggaaattttagcaaaattttttcccgattttgaaaaaaaaaaaaaaaatttttttttccacaggtgatcagcactccgtccgacattttcatgatcatggaatacgtgtcgggtggtgagctgttcgactacattgtcaagcatggacggctgaagacgggcgaagcgcgtcgcttcttccaacaaattgtgggcaaaggggcgaggaaaaaaaaagatttttaaagaattttttttaattttctgattccaaccaacaatttatgtaggagagatttggaaggcccaatttttgttagaatttttaaaaaaaattttctggttccaatcaaaaatatggttagagggcagaaaaaaaaagatttatgggatttttttctaaaaaaaaaattcgttctttttacaacaaatcacggcgagggttgggaaagagttcaagggcgtagccagacccttagcttctggtggggggggggctgaagtcaaaaattcgatttttagatatgtatttttggtttttttgaaatcccgaattattgggtgtattttacaaaacttttcgccaaaaaattactattatttgccattttggcctccaattttcaaaatatggtaaaatgtgggtccggcggtgccgataggcgccgctgtgaaatttttttttgagtattgtaatgcattttttgttaagaaatgtgtcatgacaactcgtacaaatgcttttagactaggcctaagcttttggcttagacttaagcctaggcttaggccgaagcttaggaataagctttattattttttaaattttatattctacaagttgcttttgtacgagttgctattaagccggaaaaaggaattgggataacgctaaagggagcgcctggggggacgggagcagaggtaatgttgaaagacgccgcccggctattgtaatttcgttacggttcaaaaagttatggccaaaagtgttcgaacaagcattttttgcattcttctggccatgttgaatttggttgacaaagaaaaaaagttatagtccaaaaaccacgctgaggccgggcccaactgaactaaaccgttttatggcttgttcaaataataataatggacctttttttaagaatattattttgaataatttgatcaatttccgctaaaatcatttttgttttatttcgtagtgaccgtttggggctgtgccgtgccgtcttgtccgagaggcgtgtactcaaagccgaatggcctggaatgccacagcacttcgtgttgcgagggcaactattgcaatggcgcggctgggccgtacaattttggcatttttgccacggtttttatcaccaccatgacaagtggtatacaaatagtatatagtatagaataggcccggaaatttcaaattagcgtatctcgctgcggaatttgaattcaaaatcctttgcgggatgggattctgcggttaatcccgcaaaatcacgatttctaaaaaaatggcgggattggtgggctgggatttcgcaaaatcccgcgcgagatctccgtccctgtatagattattaatgattgtaaaatctaagaatactgtagtacaaaagttaaactttttaagaatttcgttataaaaattctatgaaaggcgaaaatttgaaaaattaccaaaatctataaaaaaaacaaataaaaatatactgtaattggattattgtaaatttgtttccaacattcaattcatgtttaaattttaaatcaccaatttgttaccgtattttcttgttttcagacaattctgattcacttacactttccattggtcaaaaggggaggttttctctgtaaaaatctcgccaaaaattccataattttttttggcatcgccttgacatttttccacacaaatttacgattaaaaattcttgaaaatcggggaattttcgggtaaaatctttgttaataatttttgattttagtgattttcattcgtcacaatgtgtaagaatggaggaatgagaggccaagtgatgctttctctgatcagcaacttgaagaaaaatatgaggacggacttgagaaaaagagagtgataaaagccatgatttaatttgattataattactttttctgtgcaaatgcgtcatgtgagcataaataatttggatttacaaattttacactcattgtttcatcaaatcctcttaatcccgccctagtgaagatttttttagaatttctaaaatttgatgcttgaaataaaaatgtaaaaaattgcagcaaaatatccttggcttaagcataatgtcgctgtaaatgtttattgattttttttaagaatttgctcagtttaatggcttaaaatctaaggctttttccgcgaaatttcaattacactgaagtgatggaaatagaaaaattttccttttaagaacaaaaatttattttattttttctcgagcgttttttttttgaaattttaatattaaaattttcattttattaccgtttttcccgtgttcgtataaatttttgactgattgaatatatttttttaatttttaaaattaaatattttcaattaacgtctccgaaacatttaaaatatgaggactaatttgcatgaataaattaataatggccattgctgggaacgtaaaaatccaggaaaatgatgaatggcatttttatcaactactgactgcatcggaaaaaggagtacttatttgcccataatcattcattttttttttttttgtttgtttctgtgcagttttttaattattaattttttttttcgaaaaaataaaaccaccaaaaaatggacattatatatttaaaaaatcattaaatgagcatttttaacaaaaaaaaattatcttccataactttaatttaaattattattttttgtttttgttagacctgca

SEQ ID NO: 20321 - DNA, 2720 bp, Heterodera glycines
  unsure (1)..(2720): unsure at all n locations
attaaacccattaattttctttctgaccatattctgtttagttttggccatttcgtcaggtctctgtagcaataatagccgcaggcgataacctcgttcattttcgggcttgactgaatgcatttcagcattgtcttgtggaacaaatctcttcggcttgtcgctatgtcattacgccaacataaaaaaatcctaaaaatatttcagcatataaatgatgctatctcttattagcatggttgggtgcccgacatgtttggcagtaaaaaaatgtttgtggacgtctggggcttggcttggtatatccttgatattaattctttctatgtttctctcattaaaaataaaataaatttgttacataaaagctttgagaaaatctcacgcaaaaatttcgcccgcgctgctttcggtaccgccggttttttaaatattttaataaatatgacagaaaaacattaatggggtaacaaatttaagaacaactttaataatgcttaataaatgtgtaatttaatttgcagattcatttttttgtaaaatgttcaaaatgacttacaattctcggtcttttgagctcaaaaaattatagctcctcttttgttcaggcagagcaattgacatttgtgtcttttgtttagggaaagcttcggtcggcgattgttttttattttctaatttacgttttacgaataattggctatcacctgaaaattaattgattaattttgtaatattggtaaataagtaattaaacttaattacttgattgacggaagaatgtaacgaaaccatttgaggaagaatttattggtcttactgactcagaaattaagcaggaatttcccatttaataacaatggcaaaaattagctaaatttataataaaatagaaaatttacgcaaaatttcaccataaacttccttaaattgacacaaaaaccatttatgttcccacgttttcatgaataaaataatgtaaaaataattttgttggaaaagtaaaaaaaagagaggaaaaatattttctgtgaaatttttccaaatgccaattcgtttgtcttgacgcaattcactttttatgtgggaaaggaaaacgatgtgaagaaatttgataaatgaaaaagtgaaataaaattaatttaatttatttaatggtataactaaattaaataaatttaaaaaagacaattatttcgaaagacaatactttattgtgtttattaaattaggtaaatcgtttgtttggctctaaaataataaaaaaaggcatttaaaatcaaattatcaacaaaataatagtgaaaagagtaatacaaataatttaaggaaaacctgaaaagaacttcaaatggaataaagtaaaccctaaaataatttgtcaatgttagcaattttaattgtcaaagttaattaattgtaaaacattcatttgttcgatttttattaaaaatcgaaaacataagttgttgaagttatttcaaattttttcaaaaaagcgtgcaaaaaggcacgcctcaaattaattgtgtaaaacggaaagagaagggcattcattcattattgctgcacaaattatgcttttgggaatgggacggacaacaattttcgatttttgccaacgtttctcggtgtacttttatacgttgttaccgaaatgagcacgataaaaatataaattacgaagataacgaagatatatctgtgatgggaaaaattacaaaatgaacgacaaatcaattaaggcaaattgcaaaatgatttaaactaaatatatgattttcatagcatatttatctattttagagatttttagtttaatgctttgaaaatgtcagcacggccccgggccgacgatttttgaccggttaaaacgatctagctaagaattcttggtttttgtaattttttgaaaatatttatttggcatatgtgtttgacttgtcaattttatctaatccctagaatttatatttcgctaattctcacctgaaaagtgggatgcgcaggcgaaggcggcggtgcctataacagtgtccgtctgaaagttggtcaatcattcggtcgtcctggtccatctctttggccatttgtccaatttgaccgtccccaatgccattttcctgcacaaaattggtccaaaatcataatctaaacactcaaatagtttttattttgaacaaactaacgaattttggtcatttaattcgggttgatttggcttcactttggcaattgcaggaagaaaatatcgaatttcatagctcctaaatttattactttacaataaatatggaaattgcaattatattgctaaaaaaagccaacgagtttgctgaagaaaggaaaggcaaaataatcaaaatgaagaaaatgtaaaaaaggagaatagtgacaatggattaatttaatcataatatttttatttaatatttattttcattattgttgccagccgatgaatgcgaattaatttgtccccgggatgagaaagactgtgtttgggacggcatcggcccgaggaacagcagaacgactcgcctaagctaagttatgctttattgtttattatttagcaaataaaattaaaataataattaaatttaattattacgaacattgatacttttgtcacattgactcaccacggtttgagtgagaagccgatcggagggtgggtggggagaggagggttcgatttcctccanaggtctaccatt

SEQ ID NO: 20322 - DNA, 1234 bp, Heterodera glycines
tttcaacgttttttctgtttttttaattagtcctaaatttgtttaggctttataataataatttggtaaatccaaacttctcgggttccctcgttcagttttgcttttcaaagttcctttggtgtaatttgtgctcatctctttggtctctctctttccgtttacaaattttggatttgtttaggggagagcccccgcccatttggtgtcatttgtctccgttgggcgggggtttgagaattgggattggcacgcattataatgggagtggcgagagggatggcacatcttcatccattcgtcccgaacaaaaagaaagtgcacgcaaacagcaatttaattcttccaactttggcacttcaaaagttggacttgggaatgtgcttggataaaaaaacagctgcggcttaatttgccttggcattggcaatttgccaaccttcgacgatgtccatttcgtccgactaatttggctgaattcttcgaatccgtcaattgcccccccccaaatggacactcttcggcatgtgctcgcctcttcctccctggcaatggtcgtttttggctgttttggcaattgtctatcggcctccgtttttctccgggtttaattgcccccccccctccctttggtccgttcatttccctccgtctcagcgcaaaacttccattaacattttgctgagtgccctcgctttcgttgacattggccttctcctcttcgccatccccgtgttcgttctaccaactttggatcggtcggtggttctgtcgacgaatagtagtaattaattagtgctaattgagcatttagggatggatttgtcacttttgagtctgtccaggcggtcatcgtcaaattcctttacccggtcaatctgatgtttcaggtgccgcttaagatgccattgccattcatttgccaaatctttgccattcagacgtggagcatttacacaattgtgttgatcaccgctgagcgatggttggccatttgccgtcctctccatgtgctaattgctgcccaattacgaatcaattagtcccttgccctttttaattgaggtccgctctttgtgcacttcgcgcactgccaaatggtcattgcttttcactgccttgttttctgtcctttacaatgtcgtccgcttttgggagtacagcttaaagtcggtggttgggattaattcacttgggggtactgtatgtggttacggtgggctgtggttaccgt

SEQ ID NO: 20323 - DNA, 634 bp, Heterodera glycines
ggagggactaacacgggcaaaactcacccggcaaaaaaagtgccaaaggaaaggggcgaactcggcacagaaagacattttgtaattgaaggacggactgaaatggaacggcgggatttgggaagctgagcttaatcagtgtgaaggattattcattcggttattctttgcctttgctttggttcactctttcctcttccaaaaggtgtctttttatatggaattccctccattttccctcccttctgacgtcgtcaaaatttcgttaaaattggattatttttgatctttaaccaattaatttaaaaaatttcaatttttcgtctattgaagaatgaaagaaattcgaatggcatttcgaaattgtgcccttttatccccgtggatattccgtttttcatatttcagtcgccatcacttgaggagaaaagaatgttttttatttgcaaattcctcaatattcaaatgcatttttcggtccttttccttttttcaacaaaattcgcagaaaatgacgacaattaacggactaattcacgtaaattctggaaaagtatcgcccattacggagaatttagcaaaccttccttttttattttatctcggaaaatgataattgcaaaaaacaaaaagg

SEQ ID NO: 20324 - DNA, 1365 bp, Heterodera glycines
  unsure (1)..(1365): unsure at all n locations
atcgtacncaatttggaatgtaaatgttgttcccaatcctcctaggtggactacaaggcattcgcgcatttgatcacgacttgcgcagcggaggagttggccaaagtgggctaagcggggccatggacggacgggggaggaaggagtggcggggccgaggccaacgagtgacctgccgattcgggggaaaaccgatcatccatcccgtcgttctttccatccttacgatcgatcacccttttccccctcgcccattgtatctccttttgttctctttctaatcgctccctctccaaaatgtgtgtcccggctggcgagaatggcagcaccttctaattctataaaatgcatcgtttgttttcgcttcactcagtgcacttccaaataaaatcgaatggatgggttgcaaaatccaatgggaaacaaacaaacgaagtgaatgaaaatgctctgccaatggcacggcatttggccattaatcagccgaaaaccaaatcgaactgcctttgttgtcaaattaaataataaataaaaatagttttaaatatatttagaatactgaggcaatttcaagctaataacgtcaacagaagtgattgctaattagttttttgctttaccttcggtctttttttaattttcgctttttctccgactttaactaagatgctcttcatcactttaactgctcctatcatttaagccaactccaattcgtttccgctacgaaagcgttttttttcttgcaccgaaaattgggagggcgggaaagactcaaagaaaatgcgagggttggagaggaaaggttggaaagagagtgaggctgagaaacaaatgaaaaaaaacaggtgaggagggggagggttcttgacgagcgggtgatgttagccgaaacggacaattctcccggaggaaccatctcagaaaaaatcccatcttccgctggggtgggctccaccccgcctcccagcagcaggagcccacctccgctccccctttcccttctcgcctaaaccctcctctctcccccttttctcacttcccccttctatcctactggtaatttttaattttattctctatgccagaaaaatggctatcacttttttgcgataaattttataccatacaaatgttccccgcttccactcagagacgctgatagtaatgaccattctattctgctgaaacagtattcattaattctctatgccacaaaaatggatctctcgattatgccacaaattcagaaccatacaaatgttcccggtatgagacataaaattccgcagaggaatgatctttctattctacagggaataattttatttattctctatgccagaaaaatgattatcccttttt

SEQ ID NO: 20325 - DNA, 978 bp, Heterodera glycines
gccgtggaatcagggcgaacagtggaaatgtgccgaacatcgaagtgcgattgttgggccgaattgtgacgaggcacaaagtcagaagagaaaggacaaaatggaaaataaaaataaatgccccaggcaatcgcaaaaggaatggacagaaaggatcagaacttttacaaggacagacaatcgagacggaatatcatggacatttgggcacacacaaaaaacatcgagaaagacagcttcgcaatgggaaaatttgagggtaagcgaatgggggggggatttggacaatttgacaaagaacggcggacactcacagagatatttggccgactcatccgattttacgaaccaaaagcattgctgccgaaggacgtggtgtttgagctgcactgccgcgatttcatcaatcggcatgccatcagcgacaagcattacttaagggtgagtaggtaggcaatggcacggaaagaacggcaaaaaaaagttaaaaatttaaaatttaaggaaattggcaaaggattgtatttggacctgtgcgcatacggtgggtcattagcgagtacggtagtcactcgccgattgtacagaccacagttgtcgtcctaatacggtgtacagttgtcgctcatttgtggccactctccgccccctccacgccaatgtgaaaatgctcgaccgatcgacaacatcttattcgtacattgatctgttatggttgattcctcaaacactcaatgatttttgaacattttgtaatttgacagtgccaaacaggacagacgcaaattgctgaagggtcagtcgccggggcataggcacggccattgccctaaaatttgacattggcacggccattgccctaaaatttgacattggcactgccattgctcaaaaaattgacattggcacggccattgctcaaaacattgacattggcacggccattgccctaaaatttgacattggcacggccattgc

SEQ ID NO: 20326 - DNA, 1937 bp, Heterodera glycines
gcctcagacgggagcttcgcgccggtttttcaatttttgttgaccttggacgggcgcttcgcgcccgttttttaaattcgttgaactcatacgggcgcttcgcgcccgttttttagcttgttaggccgcttcgcggccttggacgggcgcttagcgcccgttatttaaattttgaggtacaaaagtgattagaagaggtgcaacagtgattagaagagtgatcagaagaggtacaactgtgattaaaagaggtacaacagtgattagaagaggtgcaacttgattaagaaaggtaaaacagtgattagaagaggtacaactgtgattggatgaggtacaacagtgattagaagaggtacaacaatgattagaagaggtacaatagtgataaaaaagaggtacaacagtgattaataaattcattaaattaaaatgaaaatattttttaacaaatttaatttaaaaaatacatgaaattctatcaattaaaaaaataattcatttaaacttataaaatttattcattaaaaaaaattaatttaaatataattttttatttattaactcaaaaaatattttaaatgaataaaaattgaaaaacacgaaaaaaatggtagaaaaataatgtacaccgcccggcttcgaacttcgccccccccccctcaaaatgatgcctcagaatccccaatcacacagggattctgaggccttaacgatgtcaaaagtaaaatctgatcacgtattcgtgatcagcgtcataaaatagccctaatctttttttaaagaagtgataaaaataccaaataaattttataaaatagagcaaaaaattgcggatttttatattattttacttttccaaaatatcttttcagaaccgagttatgaattttttactgaaaattcgaatttttccagaacttctggaataactttttttagtttcatgatagaaaatctaaataaaacccataaaattctcctgattttttgctatttttaaagctttgttgtatgaaaattgacttaccctgaggttagttatgaattttcaaaatttaccccaaaatcccgagggtcaaaaaaaatgaaaaaaatttcgaatttttaaaaaattctaaaaattatgaaacgaaaaacaaaggtcatattcgtaatcagcatctcaaaataccacagaaaaaaatttttcaccccccttttcaacccaaaaaaattttcaaaaatttctagggggcctagctcgaaaatttttgaaaatttccgaacatttagtacaccattcgatagaactttaaaagctctacaattttgccctagggcaatttttggctagaaccaacccccgacgagttatgggcccgggactcaaatgtcccgcttaggccaaaaaatttttctatttcctggaaaaaatcgaaaaatttctaaaaacatcactaatcgatagagctcaaaaaacgatgttttggaagtggtcttcgttttccctggaaaaatcgttaaaaaatcataaaattcaaaaaccgaaaaaccgaattttaggcctaactcgaaaaattttgaaaattttcgaaattttaaaatttggaaaaatcgagctcattgagctctacaataagtccgctggcgaccccctgctccgagcaaacccttacgagctattcgcctggtactgaagtgtccaaaaaaagtgattcttacgttgcctaacctacaggtcaggcctttgatctgatcaaaaaatttttgctggcaaagttgtaggcaacagttggggcatttcgcttttggggtctactaagccctgaaggcaaaagcaaaaaatttcgtaacagtgagactgtcagcaatgtcagttttcacgccgctgggactcagttggccctcggagaaaaaacctatagttttcccgaattctcctcaaaaagttgtaa

SEQ ID NO: 20327 - DNA, 3185 bp, Heterodera glycines
atttgagaacgacggaagagagaaagatgatgatgggctttcgaagatttgagcttatgaaggagcgatataacgaaaaataccgtatcgcaaatctgatcactgaagcattgggacagtattcagaatgagaattcacttttttgaaagtttatcatttttttatccatgaaaaaagtaaagtaacggaataaacattctttttacagtttttcgtcttcatactttaatagcaattaataaattcattcggctctctatttttccagatgttttttggcgaagagattactaaaattccgcgggaagtcggcaaagaggacgtgtgtaaagcaatttctcatcaaattgaggccattgacatagatcagtgcaatttgaatatgtatttgaagcctgacacgggagtgatttcacttgaccaattccaagcgatgggttccaaaagattgacaatgctaaggaaactcgaaatgcttaaagaaaaatttggaaatgccaattcgcaggatgagtacaaaaaggcatttcgagaggttgttgcatattgcgttgcgttatcatcgttaattattttatcaaggacatcggtgctctgatgccattggtaaccaatttatgcgtaaatgccggactcaatgaagcaagaagagaggaccgcatttcgcattttatacttcgtcttgctttttgccatattccagaacaatccgattggtttgttcggttggaaaccgaactttttcgcatgcgctttcaaaacgagacgaaaaaaaatatggcactttttgtggcatcgatcggcatacaattgaaccaagtaatggtggtttttttgcgatttgttgttatctcccacccctcacagtgacggtcccaaggttaagggtttttggggcctacgggtacccttaggaaaaaaatttttttttgccattgttttgaataacggcgcctttttaaatcagataaacgaagtttaaaaatttattattctcgcgtcgtttttaggttgacacttctgagagagagcagttagttgacgaactttgccaagcgctgtcactgagtgctgaagagatggaaggggtagatttgtacaaagtgaacgaacagcaatttgttggtcattattttctcaatgtttactttaggttgatttcgttgatgttttggaattgctttcctcacaccgaattctgttaaaaaatggcaccgcttacatttcctcaaatgaactttttgcatttgtggtgcctcgttttcgtgacaacctttccgcgtcgatgactcgagccaggaaagaaatcggatttttgcaggagaatgacaggctagtgcccctgatgaggagcatggtccagggaggagcaatgtgccaaaatgagttcgttttattttttattcatttggcataactgtgtcaaatttagaaacacaaatgtcgagcaaatcacttcggacatgattgattcactagcccaaagctcattcccactttgcatgcggcaaattcatttggttttgcggcgggagcaccaccttcgacattttgcaagacgacagttcggccttttcttaaaagtttgttcgttttttgacggatatttacatgtattttcagggcgctggtctttcgctcgagggatctttggaattttttaggatggaattcaccaagaaaatgaataacgagaaattttcaaaagaatactcgtataacattcggcacatgtacggaagagaaggaagtcgcatcgaccaaaggcctttgtcctgtgcctccattatccttggcagtttaccaacggcgctcgattgtcacgggtgtccgtataagtgagcaggcaccacgggtcaatttaaaaatgtgtaatttcttgaatttatgaaagatacccaaaggcttaggatatgaaaaaataaatcgttttattttagacacactgatgcgattcttttgggaaaacagctcgaaagtttgttccgactcctttgaagattattctgaactaattttcagctgttggtctcagcgatgatcaaataaatcacattttggacctctcaaaaacacaccgcttcgataaggcactcaatgatcattattctttttttaaatttgtttcgtttaaggcctgtaccaaatacttcgaatacactcataatatgactgatttggaggaactgatcacacatccgaaccaattcttcagtttatcacaaaaagtgcggcgtggcgattttaatcaacggaagaacgattctgacaatgagaacaaagaggaagagttcgactgaagagaaaagtgtcattcccattgctaacttattaattcgttttcgatctctaaaatcctactttttcacttttaatctacaattgaggtcttttatctcccaaatatctgcgtgataaatggatttaaatgattgcttttcaattctaaaggccaaacatgccaaacagcggcgtacaaaatcactacagaaaacgcgtcgcatattactacgattgtgagtttgtttcaattgctggtacaaatgaagttggtcccccatattggaataagtttttctgaaaatacagcatttgctggggtgcaagattccaaaacccatcatgcgaacttatttttatgacttgtaataaaacattttttgcgaactgtggggcgggagcagctttcctattaccaaattcccttttgcaattaattattttaagccaatgttggcaactattattacggccaaggccatgtgatgaaaccgcaccgaattcggatgacccatcacttgttacttaattatggtgtttatcgtcacttggatgtttatgtgcgtactttcgtcgttctttttgattgccattcatttctctgtttcagcgtcccttccccgcctcccttgaggacatgacccgctttcacagcgaagagtacatggacttcctccgttctgcaactcctgagactttgaagcagttcaacaagcaaatgttaaaatgtgcatttattttccgttttggactttgtacgttttccctttagttaatgttggtgaagattgccctgtctttgacggactcttcgagttttgacaactttccagtggcggctctttgggtttgtctgcattttaccgtttgcatttcttttccttttgttagcggctgcggtaaa

SEQ ID NO: 20328 - DNA, 2067 bp, Heterodera glycines
  unsure (1)..(2067): unsure at all n locations
gttttttgggggagggaaatggctttttttttaattttttgctttagtttcgttttaattaaaaaaaatttccccaagaagaaatttcgggaaatgttattttaaccaatttttgtatttttggcttttacgtcaaaaaaagccccaaagcccatttttcaaaaaaataaaacgaaacgggaaactctaaccaaattaatttgcaaagcgaacgatagaaatgggcggggaatcatttggggggcaaattaagggccccataaatcgtgcgtaaaattggccgaatatgaacccaaaaattgaaagtgatctttggttaatgttcagcaatgaaaggggcggcgtcgaaactgaacagaaaatgcaatttttggttaaaaaacgctttacaaaaaagcgatctttcgattggaaaaggagaaaaaagaaaatatcgaaagatttattggcacgggttaaatcactttccgtatgacatatcacaagaggaagtgacttaaaagaaaatgatggattgttttgctaattcactcattaagcgatccattcccttctccgtttgtttggcccttgggctaaaaatgcttttcgttgtgccaacccatgagaatatttactgacgagagtgagtcttctcacaacgagtcttatgttgtgtttgtgtgcaaatattttcaaattggcaaaggcaaatgatgcattggttttttatcatttgccaccaatccctttaaaatgccatccgtttttatgaatttaatattgccccccctcccccctaatcggatgattgaattttgggagtgttatggaaggataaacgccattcacccttctcaaagtcaacaactgctgatgtccgcatggaaatttatggggaaaaactcccgccggggaatgaatgactgatttgtgcattttattggcggcaaatcattcaaacgaacgaatgaatgggcaaagtgggccaatggtcgtcgggaaggttttattaacaaaacacgggaaaagcgaggagtcgagagaggatctttgaacaaaatgataataatctgattaaagggggatggatgggggcagcgtgggggcagcgataagccaattcaatcatattatcgagaatttgtttctacaaacaccgaaaatcaacaaaaaaactataaaacccccaaaaaatcatttgagaaatccgagaaatgggattcaagtccaacagctgtaaagagaagctaagaacttcattcatgcgcccattcatttgcttggcatttggcatttcgccatgcatccgtcaccaacgcccttttcgtgttggcatgaattaatgcgtaagtgcttcatgaggtgtgttgcacttgtggattatgcattaattggcttcatttcacacgaatcattcactgcccccattcaaagaaatgccatttcgtggggagtgaaaatgccaatgagaaaagaaaaaatattctttaaaacttttatttaatttataacgtattttctgcccgttttgacattggcattcggacagaacacagagaattctcttcttccttccttctctgctgctgatgtgctgttggccgagccctccaactaatagcattttctgtgctcaacagtctttgtggccattgcctgaggcgatggctttgtcagtttatgtgtggcaaagaaagagagaggcaaaaagagaaagaggggtagaaagaaaaagagtgtacttgtcttggaggacagagagaaaagacatttggcaaaggacagagaaaattggaaatgattgcctcgggggacaccgacggacagcggcaaaataagggaaaaagcgggcggcattccctttttacgactcatattccacgccgggactcaagtgtccaaagcacaataaattatttgcattaaaaagccttaaaatgctaaaaattgaagtgaaaattacttattgttaacgttaaggacatatggcagctctttttaatgtgatttttttattcaaaagagaattattacctatanaaaatttaattttctgagttttcatgggattaattntttaatttt

SEQ ID NO: 20329 - DNA, 2388 bp, Heterodera glycines
  unsure (1)..(2388): unsure at all n locations
ttcaaatgtttattaaatttcaaaaaagttagggccattttcttgagtctctaaattttcaaaactcttaggttacaatttttgtaaatttttgctaaattttttatatataagatagtaaagaacaggtagagctaccgcttaatagcaagattattaattagtttaagtttgactaagttatgatttattatttagcaaataaaattaaataataattaaatttaaaattgctgtcatcggtattttgtcacagcatcgaatcggaatatggccttaaatctatctcaacctgctgagcttgtactgctccaactcaatgcatgaaattgaagttgtacaggctcagtgagaaccaaaagtacaaatctaaggccatattcggactcggcgtagctgatttacccagtgttatgtaaattcagtgttttcaggtagcattagaaaaattttttgttacgagctggttccgaaaaatgccgtttttggagacaactttcaaaaccggctctccaatagttccaatattataaattaaaattttttatagtgtatttgcatggtattaattcaattctaactccttaaattcaatgcccgtgggactgatctcttgcccacaaaatggcaactcatcatctataataatggcaggtattttgaaaaaaaccaccaatatgaaaattttgacgaaataattatttctttgctcaaaagcaataaaattttaaattcttgctaccattagatagctctaaatgttctctattagattgcaaattttcaaaaaatttcgttaagtttcaaaaagttatggcttgagcaactcaaagctcgttttcgaacatttttggccataacatttctgaaaattaatgaaattttgcaggctaatagagaaagaacatttagctctatcgaatgaaagcaaggattaaaattttggttgctttaaaacaattttataagcaaatattttattctgatgattttttaaataacgcccattgtgaaggtttctaaataaagacatagcttcttttggattcatgtttaagttttgtttaatttgaaaaaataaaatatcgaaaaaaactcatgttgcaccctaagcattttctcaattatggcatttttatgaaactgtgccgcagcattcattgtttgtttgcttttatttgttgctctacatgaaaaggaaaagcaattttgacagtgaaaagcgagaaatgcgttgtgctgaattgaaaatggtggggaagggatcaccaaattgataattctgatcattgatcaccggtcgaaatattttgggggtcaagcgatcactaaaattgcttctctcttttttctacaccgatcagtcagtcatcagcgggcttcagtcatttgtttgttcgacgttggacgacgtgtttaagtttagtggacttggatctttgcgcagatggctggcgtcaaatttctggagagatttaaaggaattaattagcccggcaaattttttgccattgaaaccccataaaaagttataaaatccccggttaaaatggcatgattggagacagtgccggatcattgattttttaaatcaggcttattgaatgtgttcaaattcgatcattagtacggagcgaccacaacagtaattgattagcccaattcccttttttgggattttattggaatttttctgccacttttaaaaacctttactcgagagtctcgagctattaaaaaataaatatattttaaattactcacttaacgcccgcggcggacgcgcatttgcacagcgcttgcgcgttggcggtgttcagtccgctgttgagggcgcacttcttcacttcctgcaccgccacgttgtccggcgggtagtccaagccgcacctggtgcagaattaatgtgccgaaatatgttggaagggcggcattttgaggctcagcatttcaaaactgggacggcactttttttgtggggggggggggggcggcactaattgggaatgactatttttgccattttgaactccttttttcaaaaatattgtggaatggggatccggcggtgccgttacgcctttagctccctcagctcctccctggctgtgccgttgagtcagaatgctgtttataaaaagcgggcattttctctgcctttttagggtccttgtcttaccagtctgttcgagagtcaaaagcctaacggttttttgggaggtttttgtctcgnncctccgcttgttgtnngnccccccagccnnnnttgttgttgttcccccttgnncgncttctagcagttgcccgccttgctgttcatgcntttgctcgtgcaacgatacatttttttgccggccatcccatcaaaccatttcccattgacctgca

SEQ ID NO: 20330 - DNA, 2382 bp, Heterodera glycines
aaaacctgtaatttttattaaataaccagaaagaaaacattaaaagacggcaaaaacaccaaaaaacaaattttcaatttttcccaagggaaaagggaaaaaaaataatattgggcattttctgaattttatcaaaaatattttcgacaattttaatttttatgttttttaataacgatgctttcttgggctccgtaaattctccgtttttttcattccaaactttgttttttaaatgtcattttgttgtatcattgctcattcaaattatgactaattgtcgctttttcgttggattgtttggttattcattaggaaacataaaattttgggttttattttgcgacaaaaaggcaaattcttttgaattttttttaatgaaaaatgaaagaaaataaacccaaaaatcgcaaaaaattgacaaaaaatcaaaaaattaaataaaattaaaattaaataatttaaacaattgcaatttgaagaaaaaagaaatggcgaaatagggaacaatgagaaagtggggtgcttcaaattattaagggtgcatcgaaggacgaacccattctggtgcaaaatctgttaagaaattggaaatcggtcaacatttacaataaatctaagaatttgatacttacaaactacaaaacttaagtttttaaacaaaaatttataaaattgtttcaaaaagctcatcccgcaaaaagggttatgaaaagcaaaaaagaatgtctgctcgcccgctgccccccccccccctctcgcaatcggttggacccgaattcaagagcttttgtactgaattccggaatttatgtattacgcattgtcgagctctaaattactccgttttttgatagttgaacaaaatctctcaacaaatgtggctcaaattttcaaatttttttttggaaccaaccgttaaaactggcaataaattgcatcaagacgaaaaatttggacgatttttttcctcttaaaatgtttaattaatttttccagaaaaataatttatttttcattttacaaataaatcaaaatattacgtaggatttaatgaccgctataaaccgaaaatttattatttctttaattctaaaaatattttttacaaaatattttcaaaattaatttttgtaggatcgattaaaggacatttcagtaaaaaataactaattttttaaatattggctcagaatctttaaaaataaatcactttggtgcaaaacctaacaaatggagacaaaatgaaaaaatcttatttaaatgttaatttcccaaattggcaatcatttaacgattttccatttatgcccaaatttatacgaaatgaataaaaaacaaaagataatgatgatgttcatcagcaacattgaactctttgaagccattcactttgagaaccgccaaaatgcttaccacggagcaaatcaaaaaatccgctgattcccgacgattgcaacggtctgtttgaactgcgcgggtgggcagggttcagttgggtcaaaaatgatgggtctgatttaaaaatacataaattattgggaaaaaatgagtaatttgggaccggaatttttgaaaaacaaaaccgggcataagaaatgccgaaaaagttgggatcggcactttgattttcaaacaaactctcaatttcttgtcgatattccatgttgtagcggagaatttccatcagactctgatcctgtcgatggcaagtcaaatttggagcagttgccgtgtaaatgcacgccttcgtctgtccaattggcaccatacagtcgggctcggcggcacaaagcaaagccatgcaaatttaaattattatattttaactttcatagggagaaaaattctatattttaaagggttaaaagggatcggaatcgacctttattttttgaaaaaacttgacccaaacatgaaaatatccgaatatcgggcccagtcctatggaaaatacaagccgggaccaaacttaatttcgacactctgtcaagtcgacactttataccgcctgtcgacaacagttggccgatcgattggaatgaaaccgcaaaatctaatcaaagtatccattatcataataataccggatattagcccaaaattgatgtaaaatggacgattttttaatgaattacaaaaaagttcgaagttttaattctcaatttattatccttttaccatttcattatttgccgcgtttgctcggatttgtgcataatcacaaagtttgtttcgaactgtggcggggtcaatttttgtgcttttgtcatatatttcagtcaatgtgtatgttctgttaagctccaaaatgggtgtacattggcaaaaattcggaaatttcctggaaaaaagcgaaattaaaagggccggggaaatttt

SEQ ID NO: 20331 - DNA, 1131 bp, Heterodera glycines
gtaacgtttcggcaatttcaacagtgaatcagacatttacattggattcgaatgagtggaagaacccggtgatatgctcaatttgaggcgggagggggggcactcgccgatccgtcacaaaatggtgcagcaccccctcccattggcatttccgccgcttccgttctttttttcctctcctcgcctctttgcccccttttcgtccacagcctccgcgaccgaagaagtggccaagtcgaaggaggaatggcccaactcggcacttttcagcagtcgctgctgttcctggaaaaggacaatggacggacgaacgaagccggagggacaaggacttgtaaaaggcattccgcaattgaggacataaccgtttcaatgcctttgccactgagcgctgaaaatttggcacatccaatcgaagtttaaaggatttcccttttggttttgtctgtcgctccttttactttacccacccgatgtttcacaataatgtgcgttttgcttttccgcaaattgccgtccttcttcttcgctgaccattcgcatttctttcaggtcgcatttatttgccacaataaacagcaaaacattgcccgtttcgtcgatgcgttcaacttctacaaaataacaacaaatttgtgtttttttgggcttccgtcgactgaaaggctcaccttttatccacgatgccaaatccctaaatgattggcgatttgtgatgtcaaagacgagcattgcggccgaggaatttcgcatataaagagggacctgggacaaaagggacggacaaatcatcacaaattctgtgccaccccccccgtcccctccattgaccatttaccatcgatctgaaccgttcttggccggcagtgtcccaaatttgaagttcgaattcgcgcccattattcgccctcctgtaaaagtgccaaaaagggaattatttgtctcgagtgactgacgatcgtgaacagatataactggcgccgagtgtcgagctcatctgactggtgaagccctgtccgtcgtgacgcagcaaaatgctcgtctttccgacccctaaatgacctcagaatggcaaattgcaatgccaagtcccacccatgtcgcccagtacgacgactttcgatttgattg

SEQ ID NO: 20332 - DNA, 1051 bp, Heterodera glycines
tacgacgactttcgatttgattgccctgggaggggccaccatcgcattgtgttgcggattctgccgctttcgcactgttccgctgctctgctcattaatctgttgggttgacgaagaagagaaagaggaaaatggcatttaagaaaagacagccagtcaattgaatggttttgttttaattaacttaagaaaatttgacggaataaaaaacaaaaaatgcttttgaaaaagttctacaagaacccttttaaatttcactttctgcgattgattggaaaaaagcaatgataaataatatgcttaaaacaaagcgagtgaaagcaatcaattaatttaaaaaaatatttatgcggaaatgcataggtaacttgtttaaattataacttttgttgcatttaaatgaacgattagaatttgtggtaagacacaaccaaatggaaagagaaaagggaggagaaaataaaaggcatttaagtaacagtgaaatggccaaaaatggacaaggggagaagcagacgaatcaacaaatgctaacgaattgtcaaaataaaatataaacagaattagtcacacataaaaaagaaaaaggtaaaaatggggggggggggagaaaataggacaaataaataaagaaaatatttgaaaagttaaaacaaagagatggaaaatgcgttttgatcagttgcggaacacagaaaatgaatgacccttatcgacgaacgatcaataagacggagggagagggctaaacggagagagggaagggatgcgagagaatggcaactgatcactcaccgatcgaaatggaggaggaacaaatgccaatcaatggtaaatatttccaccacctaaaaagtcaaataaagcggttgaaacgacgccaaaataaacaaacccttcgggggcttttcggtgggcttttcttttgcattatttaacgtcaaaataggctcttcataattatgttctgaaataataaatcgaatttaagagagaatggcaaatcgaaaagaatggaaaatacgcaaaattatttatttgtcaaaaatga

SEQ ID NO: 20333 - DNA, 1765 bp, Heterodera glycines
  unsure (1)..(1765): unsure at all n locations
ttttacagaaaaaggaacgtcggaaaatcgaaagttccccggtcttcgcctaccgatgtggaaaaattggtaaattctgctttcaatttcatcgaatgcgccctaattggctttcacatntcatagttagcaaattaaacgtctcgactattttttttttgttccggacacttgactttttgcggcgcgtcaaaataaatattcaaaaaatactaatccctatattttaaatttttgaatcgggctgaatacgttatctgaacccttgagtgaatactagtaattggtttatttgtgttgcaggagtgcgagttgccgagtacagaaatgcgcaagcctttgctttccggtgagccgaatgcaatgacattgttggaggaaatcacggagacagaagaaacggagaggggggacaccgatgaacaacaacaaaacaacagctcacaattcattcgcactgacaatgagcaggtgtggtttagtggtcaatgaaatgggctcccggtaaattggacaccagaaaattggacaccagaaaattggacactagaaaattggacaccaatggaaaaatggacaccagaaaattggacactgttgtaaataaaaatgaaaataaacaaaataaattactaaacaaaaattttggcttggcctaaaagatctttatcttaatctgccatatgttgtttataagcgtaaataatatggaaatgaatttgttattatttttgtaacttcaggagaagaaaaacatcatatcattcataaagaaataagttttattactcatttctggtgcattttttggcccattgatcaatcgtcacccatttctggtgcattttttggcccattgatcaatcgtcacccatttttggttaattttttggcccattgatcaatcgtcacccatttttggttcattttttggcccattgatcaatcgtcacccatttttggttcattttttggcccattgatcaatcgtcacccatttttggtgcattttgtggcacattgatcaatcatccctcatttaacccatttattctactcaaatttattttcacctaattcttgattttttttaaaaaggaaatcttagtgtccaattttccggtgtccaattttcctttagtgtccaaaattccggcggtgtccatttttccgcttggtgtccaattttctggtgtccaattttcttgtgtccccttttccggtagaataatcccccttcgccattttgaaataaattgttgaaattgtttacaaattttcatggtcgtataaagaaaaaaaattaatcaccattctaagaatctttttggtagaaattctgattccaagaaaatctcctcaaaaaattaacccttgattttaccgtctaaatcagggctggacgaattacgggttacgtattccgtaattaccgcgtttttggaattcccgtaattatgaattacagttgagattttttgttttttttttcaatttttcttctacagagacccaaattcgtatttttttaaataatcaacccgaaactgcgcaaattaaccatttttagtgcaaaatctggaataagtaaaattaaatttacagaaaacacgggctggagtacatacaaatcttgaaaaaaataatataagcacaccataggttttagctcagggggaagtttgggcatcatattaaagcagggttaccctttgtccttatttgtaagatttgtccttattttgagggtccaaatcttacaaat

SEQ ID NO: 20334 - DNA, 2184 bp, Heterodera glycines
  unsure (1)..(2184): unsure at all n locations
ccctttctccgattttgccccctttgttttctttttcctctggattcgntggcatctgctcggaccttttttttcttctcataatcacatcctatctgatgctattcgccccccccccccgtttgttggtctacttaagtggagttgctgcttgggtaggggacgggaagcacgggaaatgtggacacagacggcgaaacccccgggactaaaacccggccactctcaactcaattcttcgccgtccgccgtcaactttaggccgaagaagcggctatagacttcaattgctcgttgtcccttgatgcttgccaggaatgcttcccggaccatacggcaggaaaggttgaatgtcattgtcgggacctcgacctcgacgcattgttagaaaatccggagtcccggctacctatcaccaccgccaagtccgacttcgcaatcatggccctgctatatttccgtctcgcccactcactttgtagagttgaagagcccagactagtcggttgctacagttgttctacaggggctcaattcgactatgtgtgccattccgacctcgaaacagccttagccacagtcgtttgtgatgacggtcaactctttgttatcaactgcgcaccaaacgggacggcagggaggcacatcctaccatatgaccgctctgaagtcgcaacggaatgccaagtgcgttgtccgtgggggtaaaagcaaattttggctgaatggcacattacggtatatccctcgccaacaacggttcggacaccagcaaagaatatccgaaactctcccctttaaccccgaaaatttcaacttttggtcaggacttgagattgacttattctctccccttaaactcctcggcaaaggccccgccatcttattgctttttgccgtcggcctcgtcgtcctttacttattcgtcaaatattctccatttttcaacacataccgacttatcgcccgtctattcatcggggccattttaattaattcagtcggctcattctctccaaaagtcagcaccgctttgccctacacaaatcggcctattcagcacatcaacacttcgccgatttggacaaatttgtttctttgtccttttccccccgccttagtctcgaatctcccccctccgttcccttccccagtttatcccccttttccgacacgccacaacagaagagttttgaaaaatttaccgatttattaacagattaacatagaaaaggcactttgctttgaagtttaatttaattgtttttaatataaaggatatattttaaaattttaaaaattattttaaagaaaatttgtgtaaaaccaagcgttaattaaagacgaataatatcgaaaattacttttaaaatttatactagcaaaaatttcaaagcacaaatcccaattttaattaggtcaagagttaaattaatgttttttcacatttcaattcggcttaactcagaaataacattagtttttttttaatttcattatacttcaattagtttaaaatatttaaaatgagcatttttagaactcctttaaaaattcactgaattcttttgtttttattcacatgacaattaaagtggctatttaaaacgggttttttggttgttgcattccaatttaaaagagaacgaacgaatgatgccattagcgagtgaaccaaaaaagtaaaagtcacaaattccttttaaaaaatattgatgaatttcgaagaaataaactggaattgaagagacaaattattattagcgaatagggcaaaaacctaagcaaagaaagttcattcattgtcactcattcgttggaacagaacagcgtaattgacggtaattaattaattagtttttaatggcctttgtttcttttgtcaatgtttgtgtttgggcaatcacttcattcatttcatttgttctttcgttcgtttatttcttctcaaattgcgcatttcaattgcataattcgatggtcccttttcgttttcgtttgcatttgcccttggccattcgatcggctgactgttcatcatccgatcactccacgcccatcgccacttttgcgaacggtttgcccacccttttctgatcatcgacagattgtcagcctcgcccgcccacccgctgtttatccaggaagattcccattaccgctcgccctccctgcggttcttcg

SEQ ID NO: 20335 - DNA, 2971 bp, Heterodera glycines
tctctttattcttctctctctctctctctcttttccactttttctcactcttcctctcactatagcgcgcgcttctctctttcgctttctttctccctccctcactctctttctttttttctctctcacttcctctctctctccttctctctctttttcttccaaacacatataaattttttttgggcacattattttttagtgatcaactaaccgtaaaaaatggttaggtgccgaaaaaattcctatagagctggaaaaagctcttgcaaaaaatttatgacgagcaaaaagaaaataaaatttccacaaatttcttttaatttttagtgtgacttgtaagcctaaaaaactaacaaattaattaactcaaattaaaaataaaatgtaaaatgccatttttaaaaagttcaccaaaccgaccgactcggaagagccttcgatggacgattttcacatttccgctggaacaaaaaattgcaattattcaattgaacaacaatcattcagcttcgaagcagtggagaaataccacagcaaagattttgcgattccaatcatagcattaattgatgaaaacttcagcgaaatcgacgtaaaattgacaggtcattaattcattcattgtactgtagagatacggtacagccaacgaagatttacattttgagggacacaaatagcgaatgcaccaattcattaaaaaccacttatgactaagctttggctttagaatgaaccgaattttaattttaaaagttcattcgttttgtcggcgcatatttccatcataagaagtagacataaatattgtttgaattttaacaattaatatctgttataaaattttaaaagcatttttcagatgcaaataacagaagtttaatggaatttcacattggcacaaatcggtctctgaatgtcacatttcccgacgtaaaaaatggaaaaatattaatataaaatacataatatttatttttttattttaaacattattttaaaatataattatttttaataatattttaattaaaaaaggtgtcgccttatgaccaaaatttcgcaacattgccaaatggaagtttcacaatgattctgtgggtggcactgcgcaagaacagttacgaaattatgttgaatgacacggcgttggacaacagacaattttggccaaatgattggtgggaggggtcgggacgagagaatgtcacacatatcgtggtaaaaactgatttctacaaaataaaaatatttcataaaattacagattttttcgaagattccatttttgagttttttgggtattaaattctttttctactccaattcttaatcaataaatggcgcatttttctgttacaatttaatctaatgccccgtgggcgggggtggcttttcgcgggggcgggggtttgctttgaatttgctccaaaaaatctcacaaaaaatgaatttttatgaatgatgtgttgtttctcttaactttgacctcgtcatcattattttcgtcatccttttcctcttcagccaggggccttatgctcgtctcgcggtttagagctaaaccacggttaacggcgttaaccgtggttaaaaatccttaaccggtatgctcgtccttccctttttaaccgtggttaaggataaaccacggttgagttaaccgtggtttactcccttcttaaccacggttaacgcaagttaaccgtggtttatttccaaccggtatgctcatctaaccgtagtttaatctttcttaaggaatcttaaccacaactcgagttgtggttaacgtaaatttatttaataatttaaatagtaaaataaataaataaattttttctagggtaattttacatgcagaaaaagaatctgacttttatttttgtctatgatataaattattgacggattagtgttatttcatcaaaaaatttgcacacgcccaaaccgctaaaatagctttttaaaaaaggtgacaaaatttaggtacaggccattttttgaaacaggtacaactacggttttgaatctggtaaatcattttctcagatttggccccaccatattaaaacatttgataaaacaaaacagatagaaggcctgatctaatatgttcaaaaattgtatttcatttaaatcgagtccgggcttcgcaattgtcaagatgaatacaatattcgtgattagcgactcagaaaactgacgaatacatattttcatttattcaaacatagacaaaatttaaaaacctgaccctggcgccaaaacgtgggcgccaaaacgttggcgccaaaacgaccttggcgccaaaacgtgggcgccaaaacgtcggcgccaaaacgaccccgaatcttcgctatttacaccttttttggggcgcgcaaatcgaaattccgaccccaaaaatgtcggaaatcggaattccgtgccatccttggtgtgcacccatttggacaacacttggcgagcagttgcatttggcctatcatcagcaatttgatcggggaacaggtcatcagattggatttaattcattggtcaagatcagtgaaaattgtcagcgaagtgtggcgacgtaaattgtccaactgattgccattgtgtcgggacacgttgaattttattttacgacaatttttttgtttgattcacttcgttgaattgatgatttcttcgccgaatttccatgcgatgacagtgtgccaatgctttgaatggacaagcggtggccaaatggcttttcacgccactgcaaaacaatgtgccaaaggtgttcaaatgctggttgaaggaggattattggcattttgcgtcatagattgaagccttcaaagcggtgcttacgaattgattatttggcatttttacagtcttttgggttcgatgacaaaaatattttggaaggcactttcaatttgtttttgacgacagtttttttacgaattcaaattgtggaattttaatg

SEQ ID NO: 20336 - DNA, 2419 bp, Heterodera glycines
ccgcttaaaaaagttagaaaaattagggaacttttgttcatttttttaggttttggttatcaagcaacaaatttgtgcgcatttgcactatcagaaaattgaaacagcagctggtgttggatttgtgtgtctcgatgttaaggccgctttggaatttcggctcaattcggccaaggacaatttgatcagcttcgacgacgaattgttgatcaaactgagcggggaccacggccaagggtttaccaaattgaccatcagtttcggccaagcacttcgaaacaactctgcatccaaccatttcattgctgcagttttcccggccaaagacaccagggaaaatttggaacaatatggtgctcttctctggccccaaattgatcaaatgaatgcattgatcaacagaccgattaagtggtaaaaagggtgaatatttttttaaaattgtctgaaggtttctcggaggtgatgtgagctttgtgtgggcactgatcggtcattgcgggtcagcagtgacttcatttccatcgcctatctgcaattgtcatcgtgatcgattgctcaccgaaggacagcagtgtcaaacccggacaatcatgcagacaacacaacagtcagaacaattctccaaggccgtggaaaacggagagaaagcaacagccgcagttcggtccagcacgatgggaattgtcaaggcaccgctcatgaagacaattgaatttgatcggattattccagcaccgtttcacgtgttgcaggggttggggaacgcacttgtccgagaacttgagcagcaaactgatgccacaattgccgttcaacaatttctgcgacagataggggctcggagggaacaatttcgtaaaaaggacatgacgggaaataccataagaaaagtcctcaaacgtgcatcggaaatggaacatctctttgaatcgacgtggccaaagacaatttgccaagctctaatgcacttaggccaaatccaaaatttcacaaaagtacaaattttgagcaattcactcccaaatttataaatttaggctcaaccactttcgccaaatgacttggacgcatttgaacaccaaattgagcagttccgtggttttctgacccaagaacaacggatgcgcgacttcctatctcagaaaccgaaggcccacttattgctcaatcatttcgtcccatttgctcggcaacattctttcctcggcttgctggacgagcagggtggcagcaaacattaattaactcaaattttcaaaaacattaggggatgaggcacttcattcggtttggagaaggctggagcaatggtggaaatgcatgccggacgcggaccaaattctacaacaattggagcaccattttgtcagcaattggctccttgacaccggcagaattgctgagatgaagcaggcgagttttgagtggcgtgggaaggggttaattttcccagaaatcatttgaattttaaacattttagaggctggaagaacaaaaagaagacgacaatttttcggagcattcggatggtgaaaatgatgaagactcggtcatcgatgttattgggtgatcaaattttgttttgttttttaaatttacttaaaaaaattttagaataatatgacttaattattttttctttattcgttgagaaaaacgtgaaatattgcttaattaaatatataactcaggtgggattgaacctgggactccctttttggtggcaaactcacagaccactaagacaaaaaatcaattagtttttgaactgggggcttaaaattgactcggtgtgtcccatattgagaaaatttaaaattaattaatgctaattgagcttgccaggtgataatggcttctttttgcgctttttcatttttggcatccattaaattagtttgattgtgtttttctttaattgaacccttcggcggagaatcgccattgcatttaattttcatatttttttaatcacaattacggctgaggaatgaatgctttggtaattgtgagaattgttatttccgttaaaagctttggtcgatttgtactgagatgatgcccattttcgtcttattggaaatgtttttttgtcaagcatttgatgaaatcgatatcgccgttcccccgggaattgccccccccccccgtcgaagtgcccttgggctatgcccctttcgttccatttccaaacttcgcacgagctggcttctcctctcgccacattctcatgtttcattgctttttcgacaaacagacagactaactttggtctgaccctatttgaacatcgttaagaaatcggtttctaaatcgccattttccatttatttaatcaaaggcacatttcgttggtggttaaacaaaatgtaggagaattattggcaatgaatgattggcaatttctgctgctgat

SEQ ID NO: 20337 - DNA, 2568 bp, Heterodera glycines
aatgcaataaaaatgaaaaatacacccttaaaaatcgacctaaaaattttcaaaaaatgcacccacccttaaatcctgaaaatttcgaaatgtacttcatttctaactacaatccgtgaataaaattatttgccttaattttagctaatttacatagagaaaatatcaattttaataaatttcacccgtacatttgaaactttttcgcccctattttgcgaattttttgcccttatttaggtccctaaattagaattttttaccccctaaaaatcccatccctatttatgattgaaatgtgcttcttttttttttttgcttctcaaaccgcttttttgcggcgcacttttccagaagaaatctcgtctctttaggtaaaagtctatagagacgagaggttcgaataaagaacgaattgtatctagcattggttgagcaataagctgttcttatagtgaattcgtttttacagggtttttggaaaaagaaaaggattcgttattttgtaaatttattttacctaaaattatttcatgaaaaagttttaagtctatttttaacctacgactctcaagcgacttttgatcataaatgtttaacaattcagcataattaggtaaatcagcagtataattgttacgtctaaatattactctcaaaaaagttttttgaacattctccaatttttctatatccttttttaaataaggattgaaaattggagatccgaattctaaaattggtctgcaataaatattaaacaaatttacaagtattttcgtatcaccagttttgattgactttaatatagcaaaagcagatcgtaatgcttttttcgagataatttcaatatgttgtgcccatttcaaatcattagtaaaataaatgccaaggtctctgactggttcgtttccgggatttttaggaattggaaagtcatcaataaaataatttattttttggtttttgtgtcccaaatgtaaagttaaacatttatttgaagcgattttaaggccgtttaatttacagcattgattaaatttgttaataaaattttggagtggagaaaaggaaatatttgaaagaacatgataggccttaagatcatcggcaaatagtttaattttaacattttcagtttcgcagaattttggtaaatcgtaaatgtaaatgagaaatagcagtggtcccaatattgagccttgcggcacaccactgagacagggatattcatcagagaaatcagacccgattttgacgaaaaacatttggttttctaagtaattctgaatccattttaataaggaattatttataccaatgctttggagcttagatattagccggttatgtggaaccgtgtcgaatgctttagctaaatcaaaataaattacatcaattgattttctattttctaaagcaaaactgaaatcatccaccacttcaagaagttgagtagtaacagaatgtgctttacgaaaaccatgttggcaatttggtaacaaattatttttttcaacaaaattttttatttttcctgctatattttcttccaaaattttggaaacagaacatagcagggaaatcggacgaaagtcgactgggtttaccggattttgaatttttgggacagggcaaataattgactttttccatatttctggaatttgggcagtcatcaatgagaaactaaaaatatggaaaagtggtcggactaaattttctttacaatttttcaaaaaaatgttgggaattccatcaatactagtgttgttagaatttgaaagtttggaaagagaaaaataaatttcatatggagttatgttaaaatattcgatatttttttcaggattttctatgcattgaaattgttctaaattttgatctgtaaaaacggaaaaattgttgcgctaaggcattcgacttttccttatctgaaaagagaatcagaccatttttatcagtaaatgcaggtatcatggtatttttaattttaaggaaagaatttataaattgaaaacgttttttagagtctaaggtccgcaaaaacttattttcgggatttttataaaatttatttatttctaaatcgatttttttcgaaacttctaagaattttatttttatatggtctttgtgaatgtccttccaaagctgtttacgatagatgattagtttcaaaatatgttctggcagtttttcaactttttttttgtttgtatgggaacataattccttatcaaattatttaggaaaaacataaatttttggtaaataagctctatgtcaggacaatcagaaaaaaataaattccaatcaaccattgagagtatagcatttatttccaaataatttgcttttttgaagttataaaattttttagaggcattactattaacctgtaaatttatgctgaattgaattgcattatggtcactattgccgaatgggggttcaactataacattattcaacagattttaattgtttgtaaataataaatctaataaattgttgcaccgtgtaggagagtttaccattagtcttagtttaaatccctctaaaaag

SEQ ID NO: 20338 - DNA, 184 bp, Heterodera glycines
ccccccccccctacccctccgtcctcctcttctcttcaccctcctcccttactgctttctctccccctccctttgcccctttcctctttccttcccctctcacatctttgcccccttcccactctcccctttcccccccccctacccctccgtcctcctcttctcttcaccctcctcccttact

SEQ ID NO: 20339 - DNA, 1953 bp, Heterodera glycines
  unsure (1)..(1953): unsure at all n locations
tatccaatgagtttttaaaaatttncgagtcacaactctcacatgagaaaaataattaggaagaaaaatgtattacgcccttcatactgtttgtgaaccatgcaatattttcagttgagtgttttataagattacaatataaaaatagtaaaaaagagaaaaaaaaccaaaattcaaagtaaaaaacatggattattgaaaggtcatttttgaatggaattatgcatattttaacacttatgtattgagaaagcaattttcaataaaaaaatacccaaacaaacagtcaaacagtaattgattaatgagcattttgaagtaacagcatggaagtcaatcgaattcttctccgacttcccattccacgcacaaagaattgcgaaccagaagaagactattgcggggagggcaaatgcatgtttagtcgtaagttcagcagaggccaatcataattacgaatgacaaatggcaaaactgtatatgtatttggacgataaacgataatttgtttttgtcgtaacgacatgttctgagaaaatgtgctaaatttgtcgtccgttttgtcgttcgtaattatgactggctcccctaattgaggatcgataaatttcgcctccttctaaaaatccgctcaaatttcagctgctgacggagaaggtgcaaatatcttcatgcatgttcagtattgtacgaatgaaacattgtgtgagaaaggggttgaacaggatattatcagtaaggaagacaacacggtaactggacgcttaacatgcgacaaaaggacttgttgcgagtggaatttgtgcaacggttcgcctttttttattagtgccgtggggggagcacgaaaatgcgatgccacaaaaatgagcaagaaaattttaagggttttaattaagtggggatcatccctgaaatttgaattttttattgcttttcgcacaatattgacagtgggcttagttcaaaaggaatttttgaaaattttgcttgaaaatctaaattaattacggaaaaaccctgaattgaccacgtgaatcgtgaccgtgaccgaaaaaccccctgaaattcacggtaaccatgaccgtgagtcacggcacatctctattatcttttaatggacattttttaaatatcgatgcggtatcgctttttcttgaaatcaaaaattttctcacggtgtcggattttcagggacccgtgctgcggtcggctgtcatttgcgctctttgtgctgggctttcgtggcaatgattatcgcattttgggctggtaagattaactttttggacatttgtttttaaatttttgaaatatttgatttttcaatatgtatttcgcataattatcaaataaataatcccatcattaagcatcatttgatcttcgctactaatgaggcaaacgtcggaaatgaaaccttttcaaagaaagaacgcatcttatataaaaacatattagtaaagaataaatttgtaaaaatttatcgcatcaaaaatcaaaatgatttacattttattttctgaaataaaatatattaataaattatatacccgccggaaggaacaaaacccgcgcagaatttttaattgaattgttctttcatgcatttttgtgggaaaagcaggaaaaggagtcattcagcaagagcagtggatttatttaaaattggagatttttgcaagaaatttttaaaaattaattatgattttagagcttgagccgaaaactgtgggtgattcaacaaactcacaattataccacttcgtttgaaaagaaaaaatattattttaagggtaatctaaaaaaatctcacgtgtttttagggaaagaaaaattttaattttaaacgataccaccaaaatttaaataataaacattttttataataaaaagaaattgcaaacaagttggcaaataattcacacattttctgtatttaagaatcagcag

SEQ ID NO: 20340 - DNA, 661 bp, Heterodera glycines
attcaaaaatttgaagcaattaaataaaagttcaagcaaaaaggaaaataccaatggaaaaatggcaccaaaattgagaggaaaattggaaaattattaggcacatatcgcgaaaaaaaatatataaatggaaaaaagaaatgaatataaataaaattgaatttaaaagaatgaaagatagtttttataatgagaaaaagaaagaattctttgaaagatttgatgactttaaaaggttatgtaaaggcaaacaaaaagaatttacgaaggaattgggaatttcagaaaaagcatttcgaagatggaaaaaagaattggtgccaaaatattataaaagtaagggaaataattatatttttattaattattatttttaagcatgcaaaagacattctgatgaggagaaattaaaaagttgaagcaatattttaatcaaagaaagaaatccaaagtcagcgatggaataattgcaaagggtgcttgcgcgttttataaaaaccgccacctagtcgcgttttataaatccgccagtcgcgttttataaatccgccacctaacaattcgcgttttataaaaccgccagaggcgttttataaatccgccaaaatggaaaggcgcgttagaagatccgccagtcgcgttttataaatccgccaaaatg

SEQ ID NO: 20341 - DNA, 1417 bp, Heterodera glycines
ctcccaataggaacttcaaacgacttagtctcgtgcatttgtacggcgagaagacagaatatggtgaggcagttcgcaacacattcaggtaaaaaattaaatttagatttaaatcataattttttccagaagggttctctctttgccgcttttgcctcccgacattatcagaagagctttctcaattatcgtggcggcgtcttctcctcctggaatgccagtgttcttcctttacttctctcgaacatacatcggcttgacacagcgccagttgttggatggtgttaacgcatttggagataatccactcaatttttcacccattggcaatcattgtttgtttaaatttatgcattttatttccaaaaatttaatttttagctgcactcgggacaacaatttcgaccatcaattcggaacacagctatgcggctaccccagtacagtccggcatcggctcaccggaaccaactcttacatggacaaccactgtgagtccacgggagcagcttgttcaatactcgttgagcacgctatcgacttcggcagcgccttcaggcagaattatttaatcaatcatccgtttaaatttaataaaaaaattcagttccagcgtgggaggacgaaatcgttcgtgcgccacattttccaattccgctttggaacatgcactcacagacaacatctgccctcgctcgtacaaacaacggactggaggcaactcatcttcattttatggtctttaatttattaaaaacaaattgaaaagaaacatttagaaaggcctctgtcaccaccccgccctttcggacttcatttgtggggttaatgaaagcatcgacagacaggtggacgctgcccgatctgctcgccatttcattcacaagcgacacaaacgatacatcctccaggatgctgtcattatgtgaattttggcggacgcgtcgtacaacagcaatggtgaaattagtgatctgatgtcggcgcttggtctccaagttgaaggatatgcgggaaaattgagagattttgaaaattacgatgattcaattgtccatgttccgtgatgattttattgaatgtttaataaaattatttttttcaatatgtgaagctgagggtgtgtctatagagagaattcggatcacataggagcattaaaaatttgttcgaattttggtcgccattagattagaaattaaaaatttttcctatttcattgttatatttgtgtttagggttaggcaaggggctatataaatgtcgtattcgtattcagcgaccccgaaaagcctaaaacagacccgttttccggctttttatgagctttttagacttttggacaattcgtgggtttttactcttttggacaattcgtggcttggacaattcgtggtttggacaattcgtggcttgg

SEQ ID NO: 20342 - DNA, 2634 bp, Heterodera glycines
ccttctgttgatggaagtgcgtgccaagctgggccccttcaagaacacaggtcgtttcgacttgcacgaggtgccacttggcacttaaatgatattttgcagaatgccgctgatttcaccattgacttccggctccctgcttcgtcctgctctctccaaccatatgatctgcttcactccggaaagcgttctgcaccctttttaccctacgcctatccgtcacccaaacttcgtttttaatgttgacggcgacccattcccttcggctacgcatttggtcgcccaaatggccataaagtttgcagattttgtaagttttttcaaccgattaatttttcagattccttggcgtcaaccaaagttgcatggaatggataatggagccaacggatgggcccgaatgttggtggcggttacattctgtaatttgcgaacagattcagttgccgttggagaaggttcagcaatggttggtcacaatagtcaccagacggggggggggggcacagctgccgtctcgaaacacccgcgttttttaatttaaacacaaattaggtaaatttaaataagaattcattgccatgaaaacaggaaaaatatttaatatttcttaacgaatttgtttaatttccccggcggcacctctctacaccgttggacgacaaaaagcgcgattttaaggtacatggaagaacgccaaaaagcgctgaaagaagcgatgaaaatccaatttgatcagcaccccacactgttgagagttttactcgatactcaggtgaaggctttcaccccccgccaaacaaaaaaaaatggaatgaacttcgataggatgcctttttggtgtgctgttgtcgtttttcggccgtcgaggctgaattaaacattggaatgcgcgaacgcgacttgcgcctttggctcacgcaaattcgccaaaacactaaacaagtttctgttgtggtggggttgtgattgttattcgcttcccattttctaagctgatggacctttgtcttcgtccgatggcttttcgtccgccattttttggtggtaatcgaattggacttttgctgatggaattgcgcagggaattcattctcaacggcgcatttgccaaccatttgcccgaactgcctctgaatgtcgacacaattctcggctctgattcaccgatggaaaattttgtggttggaaaaatttttatttcacatttttgagcgatttttttagacaacggctccgtttgatgtgctcaaccccttaaatttcactgccatttgggctagtacggcttaacaaatgcacattgtacaaattggtcctctccttgctcagatccctaccttttgatgatgaaacaccagggcgatggttcatctgctggtgcaattgccgtcaacgcggaactgacggaacgaaattgggccaacgctctgtccaagaaacacccgcctttgctaatttcacgtgatgacacttttgtcgaaagtgccttttctcagatgttcggagagattggactgaccaaaggttggacttttattataaggaatggtaatagagagttttagtgccttcttcaaatggcactttacactctgagaatggcctttctggtggatacaatacgctcgaggaaatgtcccacgaaatgctacgcactctttacattaaggttgtgtccgtccgcttcttttttgtttcattcaataaaatgtttgttagatgagttcgcatttccgcacacaaatatccgagttggatgaaatgcaacaacagattaacgtccgttctcgcgaaagttcgcgactgcaggaactccgtcggacgcttgaacggacccgcgaccaagtgggtggggagaattgcagggcccttgggtggggaaggcatacacattttcagggggaaaaatttctatcgaaaaacaaaaaagcactggcaaagatgggaaatgcaaaattgaaaacgaaaatcgtatttttccattcgcaaaaagagatcaaaaaatgctttccctccactcccctcctcacctcacctccccttcactcgctcgcaaagagtccaaatggaaaatcctaattcctgggaccaaattgcatttccccccccccccccccaccactcattgatggccgtgcaatttagttggagaagggcaccagtggccaacttccctctgctccatcaaatgcacttggtcagcaaagcaccacttctgcgacacatcaaagcgattccacaggcaacggacctccgcccccggcgaatcagtcgctggcaatgagtgcccagtggacacaggcggccgcaatttcgtcgggccaaacgcaacggcctccagcgtttccacaaaggatggaccatcagacggttcatgggttgtgcaggtgttttgaccgttgttctatgtttgccaatccaatgattgccatttagagatgaaattccaacccaagaagggcctcctttgcggtctctcccctttcctccacctttccatcaacgccaaatgtccttgggccgttccgatggtcatccaatggacggtgctgtcaaaatcccttcacttttctcgcaagagttgagtccgttgccccattctgcgagtctttctgcctcaacccaaaggcg

SEQ ID NO: 20343 - DNA, 2383 bp, Heterodera glycines
agtgtttgtatttcctcctcaaaatcactcccaaaatcttcatatcgcgaaagcgaagaaaagcgcgaaatttctgacggtttcaaatttcaattcattgccgggggggcattaaaaaagcgcgtcgccctcccaccggcggacggccgcttaattggccaatggaataattaacacggcgatgatggatttggagaggactgaaaatgaacgggtggtgacgaataaatgagtgactttccgctggtgccatccgttgcccacttttaattgcccttttcccttttaggcccatcccaaatattccccccccaccacaatttgacatttgggtagtaaagttgtttcaattattgtataatgccaatgtgtatcagtgaaggttcaaaccaaaaataaaaagcgaaattgaaaaatgaaagaaaaaaaagtgaaaagcgaaactttagaaaagcaaaaatgcgaaagtcgaaaaaaaaataaagtatcgaaattataaaacccccgtcttccccttttccccccattcatcctcttccatctatcgtcccccttactcttccttctatccctcacctccccctctcttccgcccattcatcctcttcccccctccctctcatccgtttcctcccttcctctccctttcccttttttcactctgtcccttttgcttctgcgcttttcaataagtttaatggcctttcgcgacacactttggcatcgcttcacttttccatcccaaaaagttcgtcgttcgctgcgaattacgtgctcaaaatggtataaagtgagggaaacacgcccaattacgcgtttcatgcgccagcccaatgggcaggcaaaacaaaatggtgccgcggcattttatgaaggggcggggaaattcccccaagttccctttccaaatgatggcacagaaaaaatgtgaaaaaacaaaaattggactaattttaaagcttttttctaatattttttaatcaattaaagatttgctgaattcttattgtgcaaaaaaacaaaagcaattagcaattcctttgcaaaaagcgttaagcgatgggaaacgacgttttttgagccatccctcaggggatttccattctcacgtttttcctttttattttcttccatcttctggactccgttccaaacaaaaaatctatgtttttagttcttaagtctcctattaccgtatttttccgcttccttacagtttccttctcttccgcgtcctttcctaccgtattcttccgcttcctacagtttccgtcccttccttgacctctttttgcgcttccatcggcggatggatggcgccgttcggtcgtccgccgcttcgtctccgtccctaagcgatgttctgctcaattttccctcctcaccttctcagccaagcgaattgcagttgttcatctacggatttatcctggtaacttctctttctcttttatttttttaaaattttatttgtaattttatttaaatgcttttccttccccaaaggttctcattccgaccgccactattctgggaaatggcctcgtcatcgtttctgtcctccgattcaaagctctccactcggccatcaattttctgattctcggcttggccatcgccgatttaggggtcgctctgtttgtcatgccatacgccgtctacgtttacgtatgcttcttcttttcttctatagaatgccttttctaattgtctgtttaggtccaaggcggtcgttggctgctcggttagtctgttttttgtcttttcccagtttgccaattctccctctccccaggcccgctgatgtgcaatctctacctgagttcggtccgtttctctctctctctccctccctctctctctctctccctccctctctctctctcgaccctctttctctctctcacgttccctcccctctctctctctcacgttccctcccctctctctctctctctctcacgttccctcccccctctctctctctctcttgctctctctcctccgcttgatcagttcacttttcctctcttaaggacgtcgcgtgcagtaccgcttccatcattctgctcgccctgatcagtttcgaccgataccaggcgatcagtcacccgattcagtactcgcgccaggcccagaacatcgcccgcgtggtgcggctattcgtcggcgtttgggtgtactctctgctcgtcgccagtccaatcgttttgggtccctccgcttttggcattccgccgagattggcttttcattgctccattaggtttcaacgaccctccgcccgaggaaagcgctttccggcgcctttgagcccttccagggccgcttctacaacccggggtctccctgttgccctccttccgcccccttccttctcccc

SEQ ID NO: 20344 - DNA, 2417 bp, Heterodera glycines
tttacccggccattttgctgctcgcccgcagcactctcaccatgcgtcgacaggactcctacaaaatttttgtgtttcttaaatcatctttaattaattcaaattttacctgtgtcgcttccacacagtcccgtctcagtctctgctgaaattttgttctggtgaaggagcacaatgagtaaacttaatgaatgtaagtttaggcaagccatcccacagccatgaattacttacataatttgaaagttcattttttagccaataatgggcctatggaaatgaagttttcggaatgattttcgagtccgagcagatgagggcaattttggaccattctcatggttcctgtttatagaaaacaactgctggtggagctgagtgaaggggggggggggaagaattggcccataaaaaagcattgggccgtctcttttgctccttccagcaggcattgaaaatgaggcagaaaagagcatatggccaaagggaggaaaaacaattttgctttttatctaagttttactttacaaacattttttacaaatcgaaccaaaattagttgaaattttcaataaaataacaatataagcaattaagcaataaaatttcaaggaataaaaagtcacagactcaaaaatcaacatatcgccataaatttaaaaaaaagagattaaattcaaaaatattggcaaaatgtttaacaaagattttttaaatttttggccattttttaaagttaggggaatttttttttgaaatgtaggctaattgagaacctttagggctgttgaatagccaatacgagcaattacaattaattattccccaaagagccgggctatcgcccagttaaaatccacaagttaattagtgggagaagaagcaaaccaatgcagcagaaaaggccgtgggatttttaagtgaaagctttcttaaaagctattcaatttcgttatttatttttgtcagttagagaaatggcttatattgtatcaaacgagtttaaaaaggaaaaaatagcaaataaaattaaatttattaatttttataaaaagaaaacccttaggctaaataaaataagtgtgaattttaaattttaatttcacttctgagcaatgactaaaattcgccctcattctttgaaattttttttgccttttttaattttgttataaaaaatatatttatatataaattttccctcaacagattctcaattccgcaataatactttataattacagccatttggccatacaaatctcacacttttcttttttggccaaattttggctttgtccacctgccgtaaatttgcgaaacaacagcacgaaagacaacaaattaaaaatttgatcaaacttggagaaatcaccggccgatcactttttggctctgccgccattagctgacttcgaccgaccaatttatcgatcatgtcttcattaccgatcactttttggctctttttcgattgccgatcacttttggccatatcttctattgctgatcactttttggcccagcgactgatcaatccttagtttttccaaccgtgcaatttttcagatgtaacaatgtaacacaggcttgaaaataatttgcttaaatggcaaatttatggattttgagggcaaaatttgaaaaaaatctaagaaatttaatgcttgttggggaaattgtttggaaatattagtgaaatttaaagaaaatgccttaaatttttagtttccttttcttttaaatttaagtctgagggctctttctattcccaaatatttggctcaaatttcatttctttaggcccaaagacggccaaatttctcagctttttggagcagttcacactgtgcacaatgttccgcatttttggccgtttcgtcggcacttatcccatcgcatttctgtccctgtttcgcaaatttatctcaagtcccgaaaaaagcatttctcgagcaaccctaggccatatgaatttctaacatccaatttctggcatctccaacaaatagggtacattacgtagtgattgaatttggcacaaaatcccacagaaattggatggtatttttaaattttttattagttggtaattcaatttgtttcttacaatcagagagagggtgcttgtttcgataaatctcgaaaagcggaaatttgcttcagaattacatcccgctcgtgttcgtcaaaaccatctcactggttgccatctggggactcttccacggcttggtaagggcctttatgccctcattttcagaattttcgggttttctttaaggaaaattttcgaatttttcatattttaaattttgcgccctgatcaggtgctgatgccggcctttctcgcctcgctgccttcacggtggttggagaagaactgttaccggatggccgttcataggattcaggta

SEQ ID NO: 20345 - DNA, 2255 bp, Heterodera glycines
  unsure (1)..(2255): unsure at all n locations
atttaaatttctaatacttttttttcgaattctcctcccaaaaaattaaattttttcactaattaagaaattaaactttattgattttttttatatttaaattaattaacaaattattaaaattttanntgngtaaaatganatttgttcttgaaattgcccattgtttttgtggnaaaaccgaacccgtcaagcagtggaaggcttcccaaaaatgatccaaaaacccataaaccgatgatcaacaaatgcaaacgcttcatttttgtcgatcggattgtgcttcgctggagagcaattctaaagaaatttaatttaaaatcattttgtaatcttatacaagagtttacagtttgtatttatataatttaattaaaaaaatatattgtcgaattgatatttttaattctttttataaaattgttatttttttagtttttggatcaatacaaattattggatttattatttaaattaattaatttaataaataattaaaaaaaaattcactattacaatttatttgaatattcatttaaatgctttaatttttcataaaattacaagtcttattatttgaaaattttcaaatttaaaaatatataatcattacaattttgaatataaaaattaatttaaaagaatttaaatttttaaataaaaataattttattattttaaacattattaaaccaactttttctgacaaatgctcaaatatttgtgaatagccatggctaacaaatggaatgttgaaatggtgcacaacacgcacaaaatgagatgaattgccaaacatggaaagaatgtgaagggccatcgggtgagcaccgaaatgacctaaaaacactattttaatcgtaaaataattattcaattaaatatttatttcgaaattaaaaatttatatttttttcattttaaaaatagtttctaaatttattgaattaaaaattgagctgggatttataaaaaatttaaaagaatttagaaaaaataatttatttttatgtaattttctttttgtttttttccattcaaaaaaagaattaaatttatttaagtataaaaacagtatatgtaccgttaatggtatgccgacggcaccggctaaaaagtcggttatcgccaggctgaagatgtacgcgttgatcggtgttcgacgaatgtgccgtgcccgtaaatagacaacaatcaccaccaaattgctcaccgaaatgatcagtgccaagcacaaatcggcaacggaatacaccaaaaatacagtatcaatcatcaatatttacagtagggggagaaataagctaaaatgaaaaatatattttaataaaattgaatttgaaaaagattgtaaataaaaaataataattcacatataaaaaataataaaatattaaaacaatatttttttttactatcatttttaaatttaaataaaaaattattcaattaattttttaattattttttaaaaaaaggaatttttcttaattgattatattttgctttataagcatgaaagaggaagcaaatgtgcacaaaaacctgttgtgctaaatcagtggtttaatttattggaaaaatattttatttttgttcaattggaaaatgatcgcttttttatttcgttttttggcctttttattcaaaaatatttaaaatatttctaagaaaaattttgttttgttcacaaataaaaatttaggtactttgagttccaaaatatttatcatattttacgtatttcgttaaattaaataaattttacgtatttcgttaaattaaataacgagaaaaacctatgatggaaattaaaaagaatcatttaataatgcgtagttctattggcctaaatttaattaatttattgcatgtaatgaaattgttaaaaaatgtaaattaatataatattataatataattggaacatttaaacaaaaaacgtataacatataaattcataacttggttcaatttcaatcaaattaataatatttcatggtaacattcaacaaacagctcaaggtgttctctataaaaatattaatttagaaattttttttttacaaaattgtaaaaaagttatgctcataaattttcaataaattttgagtcaaaattatttgccagaactctttttataactcgcgtatttatttttaaaatttcaaaaaatttcattgagtttcaaaaaagttttgaacagaaaattccgatttaagattttgtggaatttaataaccataactttttta

SEQ ID NO: 20346 - DNA, 1713 bp, Heterodera glycines
gggccagaacgaaaggaagccagtcatgacggtgggcaggacccgaaggaggccagtgaagacacttcaaaaccatcgcaggttgacaaagcaatccaaaacgaaattgacagagctctcctccaaattcaatcacttcaaaatgaactcacccatcttgtcaaaagaaaatagttctgcagacctccagctattcctttaaaattcctcaaaaaccaaattttctctagtttccctttgctggaggtctgaattttctatttttcagcctttccaatccaaatcaattgtcgtctatatcaatcaattgtcgtctatcacttttacccatttgacctcatttaaacttttcctaatgtattcgtctttaatcatttatcaactatttaaatctaacgtgtaagtggtcaccccttcgttagatattttatttattaataaagataaagataaagtaatttgaaaaaatgtattattattagaaaattttataacaattccaaaaatataattaaaaataattaatgataaaaaatattattcaatttattttaattaattataattaaaattaaatataaatgaaaattaaacttatagatatattactaaataaaaaataataattactttttcaatatttatcaaaataattttaaaaacttttaattattatataatggcatcccaacggtccagacaaagtacggtagaatgatctactattgctgtacggtagaaggatctaccattgctaggtttgcaaggacccgctgaacaccgtccgatgtacaatggattaaaaataaatgtataaaagcaaaaataatgatgcaattcataacccatgaattagccctctaaaaaattaatttcaatgctaaataaataacttataaaaagaaatatttctgtttcttaagcccaaaaggattcaaaaattgtattgtaagtgacaaattgtttttcctaatgcaattcaaaatttatctaataattatttttgtcattttaataaattttttatgtaatcttaaaaaaaaattaaaaaaagacagattatatacataattaaacaaaatgaaattgccatgacaagagatttatttgaattttgaatatgtatgtatgaaatgtgatcagacaaataaaaaataaaaaaactaacaattaacaatttatttaagaatgctcagataaaaaaatgatgtttcttaaattaattataaaatttgaaaaggttgacaattaaaaaaaaattcaaataaatatttacgtagaatataattaaaatataaatataataaaactaaatacatagcacatataaagctggaataaatgaagtttgtacaaaaaaaaattgtaataaaactcttatttcataattttgtaattacaaaaattagaatataaactgacaataataaataacaaaaatcatttaaaaatgaaataattgtgaatatttaagcacaagtatatgaaaaattgaacagatgacattgaaaatagttattgacccaaaaaaccatttactataacaaaagtataaattcacaagatctaacaaaaatttgaaaatttataaccaaaaattcaaaaaatttaaacttactaattttgtccctatcttttttgaaactcaataaaattttttgaaacttaaataaataatagagaaatctttggaatatctaatcatatgaagaa

SEQ ID NO: 20347 - DNA, 786 bp, Heterodera glycines
cctcccgcccactccataagggaggcgttcaatgtaccccttaatgagccacttaataattttttaaacaaaacttaaaaaggattaaactttttaaaaaatgataggcaccatgccaaaattgtccaaggacgcgtgcaggttggccatctgattgtgagcagcaccaatcattccaccaactccgccaccgccgctgttcgaaattggcgacgaaagggtcatgtcagaggtggagaagttgccgctgtcgccgctcaaatagctctgtcctccgcccccaatgctcgtcccgttcgaattgcgcatcatccgccgctccatgccaattgtgcccgggttttgctgctgctgttggtaggcggccgccaaaattgcctagaggggaaacattaccaattataaaggcagagtggaggacaaaatcatacattaaaaagggtggtgggtcggtaaaaatttttgcgaaggggggtcggccgccgatgactcttttttttgcttttcaaaaaccgtttcttttcggcgcgctttttccaaaaaacttttcgggaacaggggggggggggggcgccgccgggaaaaattttttttttgatctttgggtgtgatttgttagcagattttcaccaaaaaatggcaatttttgcgattttgagccaattttttaagaaaaatagtaattttgtgaggttcgggcggtgccgccaggcgccgccggggaaaaatttttggactttttaatgaatttgttaagaaaattttcaaaatttgcgaccccccccc

SEQ ID NO: 20348 - DNA, 1402 bp, Heterodera glycines
tccaaaaagatgaatattgaatttaaaatttatctttccccacccgtttaacctataattgcgcgaaaacgtttgaattcttttaaaacttttctttaagtttttttgaatttttttcgccaaattttctttttattttcaaaaagaatgaattttttaaattaaactaagtgtttggcatgtttccagcagtagttaaagtttaaaccaatattttaagtccgtatttggctatcccatacgaacataagcccgatttagtgataagctgatagtggtctttgatcagtaccttcggatcatcgctcctgacccggcaccagactttgcagtggacgcagattgacggcttaacacagaataagcattgatcagcggcagagaaaaaagggggaggagagagagagaaagtgtgcgtattggatgaagagggcagcagggaacataaagacagagaggagagagagagagagagtggcaagaaatagtgtgtggaaaagtgtggcggagccgaaacgagacggttagagaggcgttagagcattttttttttgttagttgttaattttatgtagcagttttttaaaaattaaccaattaaaataaaacaaataaatgatttagagcaattttgaggatttttttaaattatatttatttttaaatataaaaatatttgaaaaaatattttatttaaaatgtttttgaaattctggaagagaaacaaatatataaaaacataaccggtcccaattagaattaattatccctcattaaaaataaaattaattaaaacacttcacattttcagtgccattttccgcttgtgccgcctgtacaattgaatgaaagtgatcggattagagatggaaaggacggccaatgtgcacagttccaacggcgtataggtcagcttgaacagattggcgccccacagcggacttttaacacgatcacctgacaaaaaaaacacataaaaaaactaaattccgaatttggcataatgcacattagcaaaattcaaatcgtgttttataacacctcaaaataattagaataattcatctactgggcctaatcaattccgataatgtgaattttcggaaaatgatcgagatgagaattttgaaagtgggcctaatgagcgattgaatggaatttgaatatcgaaccaaatcaattttcaatttaattacaatttttccgatcaaatcttcgtcttcccatatgggagacaaattttgctctggggctgatcagagtgattgcttttatcaatttgcaatcgaattttagaacatctttagtcccacaaaaagtccgattctgtctgtcaccaccgtactttgtgtctaccgtactttgggactcaaattcgccgtagccaaaggtgtaaaaatgg

SEQ ID NO: 20349 - DNA, 1621 bp, Heterodera glycines
  unsure (1)..(1621): unsure at all n locations
tggacgattggatggatgcctatgtttaccaccaatatcaacaaacaccagttttttgttgttgtgttgttctaggctactacttttggctgtttgatgttggggtggtgcattttgtcggttggttcctccccaaattcgttttgtcctccctcccctgtttctgcttgccccccaccccacccgtctctgctgcccatttttcacccctaaaagctgcgcaacacaccttatcggagattgcttcttcttgataagcggaaaatgaaagaaaaagcatttaagtataatggnccaatgaggtggaaaagagatatttgtcatccttatgcagtggatgctgcttatcaagctagccaataatgaagtaaaattggatggaaaagccaaaaaaatgaagaaaaagggataaatgaaacatggtgaggataatgatattcaaattcaaaaagttattacacaaagatgatagtttgcggaataaaataataaatattgatgaaaaaaagggtgctggagaacggattagttaaatataatattaattattttttaaataaacaataaaagccccaaaaattacagcaaataatattaaaatattaaaagatgcattaattaaatggttgatgaacaagagatgcaaaatccagcgaaaatttgattaaattattattcaattagttaaaaaattattatgatgtcataaatttctgtttacggataatgatactccgatgcttacggtactcaaataatgccgcagttagctaagcatgaagtgcggcgtgagatccgcagttaaacaaatattattataaaaaaaaaattttgtaaaaatcatttcattgccccgcagggcgcggaggagtgtcccctcctctccccgtccgggcctccccgctaaatcgccgcgccaaatggagaaataatgattgaggcgtagctgtggcggcgattggtggtggagtcatcggcgcgaattgttttgggaattgggcgtgcagattaactgctgggggcggaggaggggacaagcaacagaagaagcatgaggaattgggaaagtcgtcggataagtgagtgtgagtggataaaaagggaggaggggagggggtggagctcacacggggagggggatgaagagggatagaccccagcagaagggggatgaagcggcttcatgtgactctcatcaaccaaaaaagcatagcgtacgtatcccgtcccattattcacaactccgatgcttttcaaccgtgaaaaatataaaaggaacataaatttgaaaaaaaccattttaaattaaaaaattcgttttttaattttcttcataagaaaattattttgagagaattctttcatataaaaaaattatatgaaacgccattgtatgaactttcataacacttattttgcacatgaagactctctcaaatgccctttttatggtcattaaaattaatataaatttcaattgcttacatacaattgttttcatttgatggcatttaattgtgccattctttcgttgtttgtgttgttgacattttcccatttaaatggtcaataatatgtgccatctgcgctcttaacaaaaagatggttcaagtctgatcag

SEQ ID NO: 20350 - DNA, 2352 bp, Heterodera glycines
acgccgtgtttgagctgatcaactggttccagccaatgcatgtcgttgggttggagaatgccagcgaattgatttacatcccggcacacgtggcggcggaaatgattcgggagggaaatgtgagggcggggggaaagcatcataaattgaattaatttgggaatgctttagctgacatcaaaggaactggtcaccgcttacatcgaccgattgaaggaggtcaacccgctgatcaacgcaattgcgcacgaaaactacaaagcggcactaaaactggcgaaggaagtggacacggaattggcaaaaatggattcaaaaaagcgaaaatcggtaatgggtttaattgatcaaaattgattggactaatctaatggcattgtttagttggctttctcgaaaccgttttatggggtgccgttcacttcaaaggacaacctgaaaacaaagggatttgtgaccattgcgggcaatcgctatctgaaggaaggcggaaaagtggccacggaagacgcgctaatcgtaaaacggtggcaattggatgaaattaagccaattaatcaaataaatagccaactttaaatgcattaaacaacatttgatgctaaaaggttcccaaattgggttttttatggaaaattttccggtcaaaggatgaaggatgcgggtgccattcttgtagccatctcaacgctgcccaatttggcgatgagttacgcatgcgatgacaccgcttacgaaggagtcaccaacaacccacacgacacacgtcgcattccaggcaaaacaaacagcaaatgcaattaaatgctaattaacgagttcttaattaccaatcattcgccgctttttcaggcggaagcagctcaggcgaaggagcactgatcggcgccggcgcgtcactgtgcggaattggcaatgacatggggggatcagttcgaatcccggccaacatgaacggagtgttcggcctgagaccgaccagttttcccgaccgtaagtgatcattggcataaatgtgctgctgatcagtttaggttttgtcagcaatgctgcacataactgagtttcaattaacgacaatcagtaattacggaaggttttaacaaatccgtgacccttaatccgtcatgactgtgtccaaaaacgccgtaattccaatgaccagaaattgcttgtagcctttggtttatatagtgtacccattggttgaactgaatgaatgatattctagcaaacattaaaaaaatttctacacgtgtttatctgtttctgatcatcactcctttcccaatcagacgttgtgccagccgaaggaattgtgccggacagccttctctacaaaccagcgcttaacatgctcaccaatggccctctctgtcgctatgcctccgatttgccattggcacttgcggtaaaagaattataaatcaaactaaaaccattaactaaattaacaaaaacattttatacaaaagttgatcaataaagcaattccaaactgtctaattataaaagcgcgatcaaatgaatttaaatccgctttctttaatttcatttaaaaaaattcttatttttaatgtcaatgaattttgaaggtaatggccggtaaaaaggtgaacagcttccaattggacgtggaatttgcgaaggatttcaagctgtactacttggaagacctcaatgttttgatcactcatgagttgaaagccgagcaaagatttgccgttcgaagagtaaaagcattcactaaattatgctaaattaaaatttgcaaaaccatttcaggtcaaatcgtattttgagtcgaaatacaattcaacggtccaaaaggtggagttcactttactgtcgcgttttctcgaactgttctatgccgacccgtggaaagccggagttccggtgtgcaaatcactcaaatttggcactaataaattgatcgtaattaatttacataatttatttctggcagaccttcgatgagctgaaaacgacgtaccaagacattcaggcaggcgtggcaaacgacacttttttcgcgttgcaatttgaggcgttgaagcgatttgctgtgccaaaatcggaaaatgaacagaaatgggtgggaattttaacacaaaatttcgatctgttactgattagacaagttttgtgttccttcaggtgctgctcaaaaaggagaagctgcgcaaacaagttgcccaattgctcggcaaaaacggactgctgctgaccccggtttggccaaccgatgtgccattccatcacatggaaccgttcgtcgctttcgacctcaaatacacaatggtaggccagtgaagggtgcttgctataggtgccttcttcaatccgccc

SEQ ID NO: 20351 - DNA, 1566 bp, Heterodera glycines
  unsure (1)..(1566): unsure at all n locations
taacttntcgggactcaatttatgacgaaaatantgggccctccttattttttattttctactaacacttttctagtggatcactttatagattcaggaaattcattgcatgaattgaaaagtatttatttttattaaaatttgctgcttattttccgtaagaaagtttttgggaggaatttcacaaccttgccataggaaaaactcatatctgactcgtataaaacataactcgaacagtaggtatatttgttgtgcaattttatagtccagccttcgctagggctctcaccgcggtgtattttaggtgtgtctttgatgtatcaaaatttctctcggccgtgttgttgactgaaaaataaaacgaacttaaattattgcaatattgtttatacgaagtcttttgatattattctgacgacttccatgataataaatacttatacaaagtttatctttttatatatttcctcatcccaaacatggatggaaaataggcaataaatcgacaaatattttcaagttttgccatgctatttatctttcgggactcaatttatgacgaaaatatgggctccaattattttttattttctactaacacttttctagtggatcaatttatagattcaggaaattcattgcatgaattgaaaagtatttatttttattaaaatttgctgcttattttccgtaagaaagtttttgggaggaatttcacaaccttgccataggaaaaactcatatctgactcgtaaaaacatagctcgaacagtaggtatatttgttgtgcaattttatagtccagccttcgctagggctctcaccgcggtgtattttaggttgtctttgatgtatcaaaatttctctcggccgtgttgttgactgaaaaataaaacgaacttaaattattgcaatattgtttatacgaagtcttttgatattattctgacgacttccatgataataaatacttatacaaagtttatctttttatatatttccgcatcccaaacatggatggaaaataggcaataaatcgacaaatatttaaaagttttgccatgctatttatctttcgggaatcaatttatgacgaaaatatgggctccaattattttttattttctactaacacttttctagtggatcaatttatagattcaggaaattccttgcatgaattgaaaagtatttatttttattaaaatttgctgcttattttccgtaagaaactttttgggaagaatttcacaaccttgccataggaaaaactcatatctgactcgtataaaacataactcgaacagtaggtatatttgttgtgcaattttatagtccagccttcgctagggctctcaccgcggtgtattttaggttgtctttgatgtatcaaaatttctctcggccgtgttgttgactgaaaaataaaacgaacttaaattattgcaatattgtttatacgaagtcttttgatattattctaaggacttccatgataataaatacttatacaaagttcctgtggagatatatttcctcatcccaaacatggaggaaaatagg

SEQ ID NO: 20352 - DNA, 2517 bp, Heterodera glycines
  unsure (1)..(2517): unsure at all n locations
tgttttttccataataatgacaattttctttcccctaaataaaataaattaaaatttgtttatttatttttgaaattttgaggtaatatctgtcagattgggtctttcaatttttggattatgacaaaaaactaagaaaataagtacgaaaataacagaaattgctttaaaactgcatcgaaaaacaaaatgtttcgctatataaaatttaagataatttaattttaaaattattttatataaaaaacatttcaccttttgaaatattttgattgaaatttaatttctttgcccatttttcagtcgtcaaataattcacaccaaatatttgtttaatttttgctctaaattcttcccattcctttcgtgaatgtttcccattttgcataaattcattttttgttttaaaatatttttcaacaatttcccttttttcatcatcaatttgttgatttttcaaaggttttccattttttaattgtttcttccatttataaatgctttttaaacttatgcccaaatgtgttgctattattttttggcattttgtcctttttccttccaattttccatttaatttcatttttaatttgccatatatttgatcaaattgctttaacattattcttttttcttcaactgaataatttttgttcttcatcattccaaattctcttttccatttgtaaattttcttttgattttcacccaatttttttgcaatttttctttcaattttattccattctttctttgaatatttctttcccatttgcttaactttttctttaattttatcaaatttttccacaatttctattttctttttattttcaaaaattataaaatgatcacaaatttgtccaaattttactggcgcttgttccaattcatcacaatttgtggacaatagtacactctgctcgtcatgcacttccgaattatcatcaaaattttgatcaaattgttctgcaaataatctttgtgcgatattttcatcattttttgtctcattttgatcattcttttgtccaattattccatgttgatcagtttctttctctccattttcctccgatttttcgtcccatctttggccaaatatttcgtcaaagcttttttcttcctttattccgccagcataaattttgagaattaaaataaataataatatttgaattttcatttttcataaaatgaatgattagaaatccatttgaattatttgcttttatttcgtttataacaattcttttccaactcaaatattatgatgatttatgtattttgtgcatattttttaaattttgtagttgtaatatgaataaaaatattttaatattcattttttataaaaacatttataaattacttattgatttaatgaaaattcatttcataaatgtatttttgcgcaattctttcctgcacaattctttcctcattattaataatatttactttaatgaaattctattcaaaaaaggagctttttgggtcttgcagtgctgataggatccaccgcaagaaaaaatggaatttttggattgatttttaacagattgcactatgaaaaccagcggactaatttttgaatttttgaaaaatttttaagaattttattaaagtgcaatcatatttctataatattcctcttctacccttatcgggagatgcgtttgnnaattatgtgtcattatgtttatgtcacttcaataactcagctgcggttgctggtgctgcaccggccgtcgtccaacctcaacacgttcaagacataattccttggtagagcgatttaaattcgctctcgactgctctacaaaagtcaaatgtctgatgaacaaattgagtgagaacgccgccttctcgaagcatcttggagtacagccgatctgtttgccatctgtagtcactgattttggatttggcgacacgattgaaaagttctcgaaaagcttttcagtcgtcaacaatcagtctttatcggcagatccggatctcttcaagccgaaagagggaatggtgaaaagttacgacaatttttgaaagacatcggaaactgctccaagatttcaaattagaagaattcgacaaggccaattcaactgcctcatgctgcttactacattgaaagtctcaaaatgattctgtcttatgcagtgaattttggccatatttacagcagatggggacaaaactcaagtataacaacattatggaagaattacagatttatctttccaccattgcgaggctattgaacagccttctggcgttggagaaaagagagggaatattctggggagggatttggggattgagttcggggatggatttgaggggaataatttccgaattcaatatcactttacgattaaagtcaaatgctaactgctcgtttttgtaacgacagctttaaagccaagggtaatcagaagttggggaatttatcaggagattaaaagagaaaatcatagaacatacggaataattaaatataaaacgaaaacataa

SEQ ID NO: 20353 - DNA, 2014 bp, Heterodera glycines
aggtccatgcagagtgcctaaactaacatgtaaataaaatttggtgcgtttcagaaccctttctgaaaaaatatttaagaattaattttgcaaaaaataaataaaaacgaaagactcagattttcgaaaatttttttgagccagctagctcggcgctcatttcagtgtaagttagtcctttaccggggagtatccctgcaaagtttggtacgcttctgctcaattagcaaaaaatatgagtgatcgaattttcactaaaaaagttaagcctacattttttggcatatttaaaaagcaactttaaaatttttaaaatgaaataattttcctgcaccgattgtgtgttttggcgtagtgatggcactgaaaagaatgtttttggcacaaaaggcacttcgccaagaagcggcgaccgaagcagcggaagggacggaaaacggaaataacacaacgaaaagccgagtgaaaggacgccgaaaactgagacagcagcagcaacaacaacagtaccatcatcagaatgtgaatgcattccaatggatcggaagcgacggatgggccgaccgattggacgtggtacggtaggacacggttgggtaacagtcggacagttttgggttactgttggactggctttaagcagacattaagtatttgcccaattgaatgttcggataaatttttccctttaatgtggcaacgaatctagtcacttctcggatcaaacattcaatgccgccgacttaaatggtcactaattgcctttgctaattaggtggagggcgtggaggaggaggcggccggcagcttttccattcgaatccattcgccaaatgtgcgcacctttgagccctattactttgcgcttaacccacacaatcacacgcgcaacccgtggttccgcgagttttggcaacaaaagttcaaatgtttgctgacggtgccaaaggacgacacggtcagccgacagtgcaccggacaagagagtctggccaccgggtacgagcaggacccgaagctgagccaggcaagaaacagtagaattggggggatgacacaattggggaaggggcacggcacaatcaacgggggaccggtagagactcatccgcccatattattgagattaagatatggcaccaaaaataggcattaaaaagggcaaaaattaaattaagcaaattagccaattccatttttctatgatttcggaggggatttggcaatttttatgcaaaatcatttgtttccattttctttcgcttgtgctaatctctcattgctcaggtgataaacgcgatcagagttgtcgggtaagttctatttgtattaaggaaaacctattaatgaaatttcctcggaaaagctatgccctccgggagatgtacaatgacaagtgccattcctcgcggcaaaatgcgaccgccaacgcacttctaaatgcccaatttgggttgccatgccccgaaatggaaaccatcaacggcacacttttgtttaggcaaaatgagaataaaaaataattaaatgttatttaacaaataatcattgaacaaggcaaaataaagcaattaaattaaggtatatgatgaatgtcagctttgttgacgaattccaacaggaaatttcgttcgatacttccggcgaccccccggcgtggtgcgttttcctaaaaaatggggggggtgagacagatgccaataatggcaccgggataaataatatgcttttccgggatgacgcacaaaaaaacttgtaaaataaaatatcaaaaaatcatgtgcctaaatatggggttggggtgatgaacccatttttgacagattaattcacttttcgaaacaggtacgacattttgaattacgtcggtggcgaccatttccgtttggccggcgatttccgacaaacttcggccggctctcatttgctacgaatgcaccagaagaaactgatgttctatgataaaagtgacgaaatgccagagtaagtgggggggggggaaggattttagggg

SEQ ID NO: 20354 - DNA, 2614 bp, Heterodera glycines
  unsure (1)..(2614): unsure at all n locations
acatggccaagcttgccaagctgtactcgctgctgacggacaaggagttgagctcgctgtcccatacgctgcagttggcgcgaccgtccaccatcactgccgccagcgcaacggacgcgacgagcaccagcgactactgcacggagtcgtcgccaccgccgccgccgcaacagtcgccgactgtcgcctccggcgctggcgttgctgccgctgcatttgttcaaccgccgcaacacaggccaacaaagagggcatttctggaggacaaccacaacgactacaacacgggtgggcaaaaagggacataatttatttaactaaatggggcagggcttgcatttaagttgatcccacatgaaataatttgaaaaaaattaaaaatattatactggagagattttgatccgacatttttttttattcttatttaaaaaattatagaaattataaattaaggtttacagtctcctctatatcttaaggtgcaacgacggatgttcttgtttgcagaaccaacacatcattttagtctctcgaaaatttcgtgaaattttatatccatttattgatacaacacacttttgtttttactaaacaacatatgtatgagggaggacgagggtgatatgatgatgatatgattaaatgattaattatcccccaatttattctattgcactttgaattttatgtgtgtttatcgttgtggatggaaattcattcttttcttgacaaagaacatacaaattcaatcaatcacaaaatgtaattataaaggactgattccatttttttttttgagctttgtggtggcattggtttgtttacaaatctgtctgaattattggataaaaatgtggcaagaattaaattctccggccctttggggcctcaaaaatcatacccatatttgaaatgggctcctgttgtccctgagttttgccaagccaaaaacccaccactccatcaaaggggaacatcaaattcagttgatcgaataaaccatatttgacacgacaatgtgctaattattaaaaaaaattcgatttaaatttttgtttaattatctctcaccactcatttttattatgtgccgcctggacgccatctaaaattacgtattctgttacataatttcaatcttaacaaatccccacttatctatatgttcaatgaatgtattgtattatcatttacttatccatcactcggtctacgtcagttgggccatggcacgtttgggccccagcatgtttttggactataacttttttatttgtcatccaaatcaaacattattggtatcattagaaagcccttcaaaggttgtattagcctgcaaaattccaaaaaattttgtcaattttgaacaaatttacggccataaaagttggaaaatctggctttttaagttgttctgaccataatttttctgaaccttaacaaaatttttcaaaattttgcaggctaatagaagacacttagggctttcgaatgctaccaacaatgtctgatttggttgacaaagaaaaaagttatagccaaaaaaccgctgggccccaaacgtgccggagcccaactgacgggttccgccatcactccctcccccctccccctctacaaaaaaaagagcgcgagaagggatggggtctgtctttaattaggcctaatccaaccaaccaattgttaagtgtacgaatcatctttttatccttttttagacgcctcccctcgtgacaaggagatcaaaaaaaaccaaaataaaatagtttttcctacaaaattgcaatattttgttgtgccgtgccccatctttcttctctttatgtctctgtgccgttttgatcagttgcggcggtgtccctcttttgctgctgtcctttcttttccgtcttttgccggtgttgttttttccaatcatcattttcattttcttttttttaactcattttttctgatctgctaaatacataccatttttccccttttatacaataaattgggtatgaaaataaaaatatttgcatactaaattcgaaatgaccgaggcgaaaaaaataaatttcttaattcacaatctaattttaatttttcaacagtaattccggaaattttttttttcaaatccccatgctaattttatccctatgcttagagtataggaggtatacttttttctccatcaccatcattagcaacagcgctcttcagctgaatcaccgtccgtcctcacagggtaattaactaattatgtgcctgtctttttaattgatgagtgagtgaataatttgtcgttgttcagcagagcttcaactataattgtcctgttggaagctagaagaggacatgtaagttgaatttctgtccactttagttggtgccttttctttcccctcttttttcctgttattatttgactcggttgtagacttattctaactganacgaatttaaattatgaaattataattaaatttaaattactttaaatttaaacctttatattagtaccaaataaaaaatttccatttttatcccttatgggtttacaaaaaaaaattaatttaaaagaattttaagtttaatgataaaaatgaataaataaacatttcta

SEQ ID NO: 20355 - DNA, 1034 bp, Heterodera glycines
taaaaaagggaaatttctaaaaaatttggctaatttctaacaaaattcatatagtcttaaaaattttccgcttgcggcgccaatcggtaccaccggacctctcccctcgcacattcaccaagttttttggaaatgtgccgcaaaaaatgttaaaaatctgatttagtgatcccgaatgcatttttggcctttattcttattttgaaaattttgaaatagaaaccctggatttagacaaaaacacccataaaaattgactattcttgcataatttataatccttaaatttggtcatttttagacaatatctgtgcaattataccaaaaaagaattgaatcgaggcgatacatcgaataaaggaatgtggagccaaacacattattaaaaaaataataatgttttatgagattttttggagctaattaaaaacaaacccccgtccccggggacgagaaatttctcacccccgcccccgccctgagaagaggtacaacaattaattaaatatttattaattgaaatgaaaaatttttttaacaaattcaaaaaaaacgaaattctttaattaaaaaaaataaatgaatttaaataatttacaacaaattttcagattaattaaaagcactgaaaattaacccaaaaatgcatacaaaaataattcatttacaccgcccggattcgaacttcgtcctcgcccctcaaaatgatgcctcagaatccccaatcacacagggattctgaggtcttaacgatatcaaaagtaaaatctgattacgtattcgtgatctgcaccctaaaatagccctaaagacatgttttcggaaaatttttggtgaaaaaaattttcaactcaaaaaccatgtgtgctccctcccctttggtcccgaatcccaaaatcacttttatttttataaaaaaaattttagaaaagagataaaaatgtaaaataaaatttatattatagagcaaaaaattatggatttttatagtattttacttttccagaataactattcagagctgagttataaaa

SEQ ID NO: 20356 - DNA, 858 bp, Heterodera glycines
aatgttgtgccataagaaaatgccaagagaattgtgcgaggccgcgaagtggccgagctatagtctattttatcattcataattctacattacaaccgtactgcctagcggttgcgatgtgccgaaggcgcattcaaccgctagtttttttaaataaaaaaataaaatcttatatatttttttgtgtttaaaagcgcattcgatacgaaaacgaaacacgaaacaaaaaaattttttgaaaaacgaaaaagaaacacgaaacgaaaaaattttgacggacgaaaacgaaacacgaaaacaaaaaaataaccgttttcgtacgaaacgaaacgaaaaaaccgaaaattttttgaacttatttcaatcataattaagaaacatataactttaaaattgtatcatctaactcagggaaaggagatcctagtaggtggaaaagcggatgtggctctagaacagagggtgtgaccaaaaaattttcaaaataaagaacattaatgacaaaaaataagatttagggtcaaaaaggaaattttgtaaaattggttcgaatcagttaatatacaattttctggataaaaaatgtattaaatattatgtttttcacatcccattatggattttaacaatttttggggaagaaattagcaaatcatacatttcggtgaaaccgtgctgaaaaaaacagattttcaaacaattttttgcgttgtatttttttttaaattggtgaatgggaggtgggtccggcggcgcctatcggcggcaccgggaaaattttttgaaaatttgagtgctatttcatagcagattttcttattaaaatctgtaaaaacatgattaaaaaatcgataaaat

SEQ ID NO: 20357 - DNA, 2104 bp, Heterodera glycines
  unsure (1)..(2104): unsure at all n locations
cacatccatcgtctgccattggaagctgttttttctccatttcggaacgtcatcaaaagagtcggtgattctaagtataatcttcaagtcaagtggaagtttatcgcgttcacaaagattcgcaagcgtttgttccaaatcgtagccaaagtgtcgcagacaaagctaaaaggacgaaatgcaacggaacaacgaaagacaattcgcaatacgtgcaactgctgcttggataggtcgggcataatatcggctaattcttgcaattggtctgctattacgcgctccttcgggtgaccaataaactgaaaaatatccgaaaattttagttaattgcaaatgaattataaagaaaaaaagaataagtgggcaaaactttgcctcaaacattcgctgtttggccaatgtgtcccttatgcaatgccttttcacttcgtacgccgtctccaatgctcttttcattgacatacgttgaaagtctgtacaaatacgaccagcaacaaatttgtcgaattcgtcttctaatttaattcggtcatccaaacggacaataaatcttacagaaatttatatggttttcttctttttttaacagtttgcttactcgcttctgtcaacgttgtcttgaacaaatttgaatttaaactccaaagaagcgaaagattggtaaaagcagacaacaaattccaccgccgtttgaataattttggaacgcctggcggacaatttactaaaataggaaattaaagagaataaaggctacaacgttactttgtgcacaattgtgcacttttttgaatggacgcacagattttgcaaaggttggaactgctcagtaatttccaaatgactgtgattaaataagggacacatctgacgatggaacaaagagttgcttggtcgtccgaattcaatgtacggcttttgttcaagtcaaaacacatggaggtgaaaaggttcgtcagctcaaccaaaaacaagtccaaaatttcagcaaaaaggccgctgattttgggtgtttcaattagtgatttttccaattttgatgattgcgagctggccttttctaacaactgaaaaagcaagtattatcggagaattttatttgacatccctcatgataaattcgaaccctgattagaacaaaaattaatagatccctccctaatgttaaatccattggcttactgaaaaacaggtgctttttactttttggtacatacatccaattatacctgaagaacatcctcgaggttcatttcggaatgtgtcatttttcatctagaacgcacacttatttcggcgtaaaaatcaagtaaataatattttaacttggtttggaccttctaggatgtatttcggaaaaaaaattttcagcttacaaattcttttttaataaattatttttataggcgagaaaaatacttaacttacaattaggtaaataaacatttttcgagaatttgaaatatatttgaagaacttttctttccatagtttggcatggcgttttatttttatttttatataaaaaatgagacacacttccctttttttttttatatctctaaaatatttatcccttcgttttctatttatagaaaactttttcgatgcataatttccttttttaaatctggtgtcattgtatcgaattttaaaaaatgctctattaaaaatcattattgaacgtgtccaaaaggggaagggacgaaaatttttgtccagtaccgtcctcgccttttcttcgtttataggttctagcttactcctattcttggtcacttcagtcccgggtctatagctcgccggcccctttaaattgtatatatcactccgcatcgagacgtcatatatcaatataagaataagaattggccacatctttatttatcctctaaactattaaacaataagcaaattgagtgtgaatattggatactttcaattcattttcaagtatttaaaaacaagtctgcaagtcctttgaatataaaaatgagttttanaggaattctatttgttttttattcaatttcgacctgaatgtcagctgcggtttcttcttcgcgtccgatggaagattggaaatctgagttagctatgc

SEQ ID NO: 20358 - DNA, 1052 bp, Heterodera glycines
  unsure (1)..(1052): unsure at all n locations
aaagattcgtgagtaatgggactctgaaggtgtaatttactcatttacaatcaatcggaattgntaattatatgtaattagttaattagtaaggggtaaaaatcaactcgtacttcctttgattctatatttcagtttaaaacaatgaaacctttttaaaaggtagtacgagtaacgtaggaccagaacttccatcgaaatggtctaaaataagagggggccataaacagagcgaggatttttagggccctagtcataaataacatttgaaaaaggtttttaaagctcgttctgtttttaacaggggttccagaggaattccccggtcaaaccgggagagcggagatgactaaaggtggaggtcatttctcaagtgcaaaagattttagagaaaagctatgttatatgtacgagtttttctccgaaatctttaaaaatcggcgccttagtgaaaaacgacctaacactgacaatgaatcattgaatattccaatcattatggttaattttttctttggaatgtttttaataaagagaaaagaaagtcaccagaaaatgtgtcagtgaaatcaaatttatattaactgttgtaattggaaaaggtaaaaaaacattcggcatgaatattttgaaagttaaaattattttgaaatatttgatttatgaaagccaaaaaatatttttcaattatattaaacgaaacattcacagccaaaatgatgtttttcgtgtatttctcaccaaaataaagctgcaggaaaatatttaataaataaaaatccgcgccttttcgacaaaggttcagaaaatccacgaacacctgacaaccttcttagtgagtaagaaaaagctcattgtcagattcttcgaaaattcattgatttttttagcaatgaataataacaaataaaaaatcgaagccaaatttaaaaatttccgttttccattcattatctttgcgttttctctccgtttctcaattttttctccgacttcgtgacgagtgaattgtccgtacaaatgagacaacaattcagctggactttgcaata

SEQ ID NO: 20359 - DNA, 1484 bp, Heterodera glycines
aagaaaaaatattttttccattaaatttgacgaatctttttttttaattctcaaaaaaccccaaaataaaataccaaacaagcagcggagcataaatcccgacgataatgccgaaattccctgcttgcccaattttaatttggcaccgacaaaataaaaatgccatttctcaaatttaaactaagtgattgacggctgggcaggcgggcactaaaagcgatagaaggctttttctttgcttttcccatcttcgtcaatttgccgacagcagcaaattgtgccattcctttacaatttgtgccgaaattcaacccatccgccaccagcggaggagaagcacccctccgcccctcttctccagcatccccactttcccattggtaaattttattttttttttcgggtgccgtaaaattggaggacggtaataagccaatgactccccgagggcaaaaaaaaaaataaataaaaataaaataccataaaattttattgtgtgccgaggagcacaacttgatagtcaattcaagtaatatgtgcctttcccgttaataaaattgaccaaattacgagtccttttccattcgaagaaaacatttaaaatgtttttttaatttccaaaattttctttcgtctttcgccgtccgccgtttttctcccggaatttatcgattaatcaatcagacacaatacaaactcctttgtgtgtgtgtattggtgggcagcaaaaggaaagtacggcaccgcaaggactccctcgggatttgccgcggggggggggggcaaagcccggggcggccaagtgaaaagcgatgggggggggggggggggatgtaggacaaatcgttttttgcgggacattctctcgctgatctgacaaattgggaaaggaatagaggaccgaataatgggtgaaaagataaggctaaactgtctaaattatatccacaaataatatttttgaaaaattttcgacaaaaaaggataattagggcgggcgttgaacggtataagaatttttataattattttttttcgtggagaagttgaaacgtatcaaagtggcggatttaaaaaaccaattaacggctcggggaaattccaaaccctaagcatttttaaattacaatatttaattatttggatgagccacaataagcatatccccaccctttactcacttccgcagcgctccaaatctcttccggtgacgtcagtggcgtaattggggtcaattggccatacggcactggaatggtactgtcgcgattgtacgttatggaccagggctgaacgtaactgattttcagttacggtcatccgtaatccgtcattacggcgatttttttcagttacgggcattccgtaatcccgtcattaccggagggccaaaaaagcccgaaattttggcgaaatccgtaaaaacgtaattccgtaatttttccaaaatttttttttaattataaaaaatcccattctaaaaa

SEQ ID NO: 20360 - DNA, 1261 bp, Heterodera glycines
  unsure (1)..(1261): unsure at all n locations
aaattttaattaatctctagctctcggctctgcctctctatctcctttttatacctctgcaattttcaagtctctatttctctctctccgacttactcttcaatttctttttcatgatttcttttctctctctctctcgctctctctctctctctcttttcctctctctctctctctcgctctctctcttctctctctctctctctctctctgtgtgtctttctctgctctccaacacgcactttggcactgtttctctgatggcacacgatatacataagcagcattttttgtggctcggggcttctttcttcgctaccgtatgccaacgtcgctggtaatgctctccaacaacgcgtaccattacggtaatgatttgcattcttttttagggggtcatgtccacggcggacacaaatggtcatgacgttcgttgttcctctgctgctgtcggctggctgatcatgaaatttgtgatgcctgtgctgacggacggacgaatgattgtgagctgatcactctccccaaaacagaagtctcatattttgtaatcgctccttttaatctaaaaatgtaccaatgtgtagaaattttgagctgatgagcaccgcctccgttacgccgagggggggggggggcgaattgggcgcatcgataaaagtgacggattggggaagagaggggagaagtttttgaattttgcatcattaatttttggatttggcgggacaacgagcaaaatgtacatatatgttgagaatcaaatcgaccgacagcagtgggagcgaaatgccaatgaatgctcatcagacaaatttggcacttcaataaattcaacttttcccctaaaattcccacactctaaaaatagacaactaaaatcattgatgagactttttcgagttatcttattttgatttaaatcatcacattcccttgactggctatgatcttaatttatcggcattgtgccagaatttgcgagccccttctgctcagaagagccttggctttttgttgggtgtcggaagcgtccattatcatttaatcccgttgagttatggctaatgggtcggtccttcaacaattaacggaatgccttttccaaaaaaacgctaaatttgtcgaacctcccaaagcattttccttcccaaatttcttcccaacttttccagcagcaattttcaggtgttggttgtgtttatgaaaatgtgtccttccccatttccctaanttttgccaccattcatgaccnntgcag

SEQ ID NO: 20361 - DNA, 1211 bp, Heterodera glycines
ctgctggtggcggagacaatggccttaattaagcaaaattttaattatttaaacaaaattaaatgccttttttaattgctcacccgatgcaattagtggtactgaaaagccaaacgcagacactgttacaattgttgtcccaatttccgtcttcccaattgaccgccgctgtctccccaataattttgcatcgtttcattatccatcggttgtcccatccctttgctttggccaatgtcagcttttcctttgtccattcgttcaccaattcaaatggcaccattggcattgacgacacttgcacataaaaatgaatttcgtaactgacggaagaaatggcattggcacggagaaattgctaaacaatttgattggaaaaacaaaaatcacaaaaatgttgggccacacctccttgaaattgttgatccaatcgaagttcgtttgtttgttgtaatctgcgcaacgcaatcgcttgggttggccatcttttctcggagaatgcaaccatttggacaatgcttggccagcagaaattgttgaatttggcacatcaaaatcatcaccaaacgcagcgggcaacaaagcaccggaatagattgaattcaattggttgagatcggtgaaaattgttggcgaagtgcgacgaagcaaattgtccaaatgataaccatcgtaaaagcccaagtggcgaatgttttcagaaaaaattggccaaatttcacgaacaaaaatgtcccaaatttgttggccattcgtggtatgtgaagaaggaagccacaaatgtaaattggtgcctcttttgtcgaaaatttggtgatttgaacgaagaaaagcgatgacggagtgatcgatgtacctaaaaatgggatgaatgcttttattgcgatagctctgatttttaagtactcaatccgaagatgcttaaaacggattttgctgggcaacggacggtcgggcaatggaaatggcacaaatttgtcatcgattcgtacagacagcttcggttcaggtcctttgtccttgcgacgaatttcgattgatctccaaattgtcaattcgcttttgccatcgaaatgtttgtccaccaacgcattgaaacgtggcgaaagaagtgccattttgaggccaagttgaggacggtcaaaggatgggaaaatgtccatccaaacgtcgttgcaaatccaactgaaatgggaaaacagtttagtcaa

SEQ ID NO: 20362 - DNA, 2019 bp, Heterodera glycines
  unsure (1)..(2019): unsure at all n locations
actatattttaaatatttccagtataaaaaattctttaaaattccaaaaaaattttcacccccagaattattaaattttttattagtgcaagagtagtgcaagagtagtgcaggagttgttcatcagtggttcattagttgttcgtgagttgttcaaaagttgattattttacataccaagatgcacatgcagtatcttggcgagagttgaagttatatccaaaatttaaacgtcaaacatctttttacattgttttaagagtttctgatgtattatttttattacttaacctaatttttaaaattgaattttttcggattctggacacaatttcccatgaagtatcttggtcagtattggacatgtaatgcccaaatgcacgtagggcgtctttacacattattttaagtatttccagtgtaaaaaattcatcataattacccatcaacccctcagaatccctgcgtatcccccctaacaaaaaaagtaggcaaaaaaaattgtcaatcagatccctttttagggtatttcccgaacccggaccaaaacctgccttataccatctgaaagagcaaagtctgtagaagtgtcatcaactcttcttttttcgattgcaccgattttaaggcaggatatgagccatcaaacacaaactgtcaaaaatttttgaaaaaattttcaaaaattttctgaagaaacttttttttacgctaaaattgcaaaaaacgctttccaccaatcgatagagaatccttaaaaaatagttgtactcttttgttcggagccaatccgaccaacttgaagagagttattcaaaaaatttgccttcaggtgctagattcctcttatatagagaatatgtaaaaacaattttagctgtcttctccagtcaattatcactggtaaaaattaccatcgaaaagaagttgaggaattcatgaacatcattagatatgacgttctgcaactggtaattaatgaactttatataattaatcatttttcaacaaaaaatattcaaaaagcaaattttgtgtatcggaattctgttttttaaattttaaattaaatagaataacaataaattcgaaagttagatcggtaatattttatgaacaaatttttcagttgactttcggttccatttgcgccaacatcacatttgaaggtgaaaaagcaagaatggagtggtatttggggcgtctttccaaaaatgctcaaatgatactcgacaacgtggagccttatgtgtcaggcgaacttgtaagatgattcttttacattaatttaaaagtagtgacaaatttgtagtgacctttatttctacttaaacaatttatcactttttaaaaaattttatatttcctacaaacctagatcagccctattatggcacctttaaccaattaataaaagcatttacaggtataaagctttcagatttttgaaattactatttttaaattctaaagaaaaaattaattgcttcttggtatcggagaatgccggattaatagggcttaaaaataaatgcatataaaaacctctaaaaattattttaggaaaaactttgtaaaacatgaaacttttcatttttcccttttacatacattcatttatagtatgaagtaaatgtttaccattttttaaattccatagaaacttttttgtgaatttttactgaatttgttgtttaattttaagctaaaatcattccccaaaattgaaaccgcgatggctaagcaagttattgatgatatgtcgtttactcaacccgttactgacaacgcgacaatcttccagatagctacaaatgtgttcgagattcttgatgaatatggcaataaaaagtcagcttgtatatttaaatagtgttgnggaagtcggtccggactctgggcgggcctttccggatctgtggngaattcgggctttgtcaatctttttccgatgaattccgtgcacaaaattaccttnctattnntgagtcgcttttttanaattttaacaatttgtgc

SEQ ID NO: 20363 - DNA, 2672 bp, Heterodera glycines
  unsure (1)..(2672): unsure at all n locations
cagagtctgtacaaccgaaagcatccaaacgatggcgccgaatgctggcgaaatcgcccaaatcccaggcggatgatggagttgtagttatgcactgacgagaacgatacggcactcggccgacaccaccgccgacagctcaaagaaaaagtggctaattttgagagggggaggaatcacttttagcaccaaagtgcccttcttccgaccgcacctgccacccgcgtcggtgctgcgccccctccgccgtttgctgcgtgaaagaatgccctgctccgcatgttcgactagcgcagcagtgagcactccgccggtggttccatgggcatttgattcggttctggcgaaagcattcgtcggtgttgtcctctgcccaattccaaccgttgttgggctgcgatggttggctggtgaccgagtgccaatgacggaatcgccacgttactggcggaggagaagacatttcgcgccggggcggaaagggaagaaaggagcgaacaatgggcgaaactgaggggggaatgggtaataaatgccaaaatggacaggtggatggggaaatgccaaaatagacaaggaaatgccaaaattgagaggggaaaatgccaaaaagttgattacggaatatttggcctggcagtggacgaacccttcctcatttgggccattctctgtgncattgccgtgtgatagtctgaaattattctctcttttggaaataatgcattaaatgcattcaaattcacacttctcggctcaggcgaagtcggtgctgaattggcctcacttccgtttggcgtttcgtccaatttttgcctattcgctgccgtcccaaagtctcttcgatcgccactgaccacagaagaagccgaagacggatggtatgcagaagaagggcgagcaaaagtttggtgtgtttcttcgttcgcttaataaagcattccgttagcaaaatgaatgcttttcctttgctttacctatcctcggtgtgcttgtcctcagtggcgaaccgatgccgcccaatcgtaacgatggcattggcacattctgttgagtatcagccggcgttgttgacgccacggagagtgaaaagcggcgacggccaatgggtggagtgggcgccgaactgcttgagggcacggccagccgaccacccccggggcactgctgctggaagaaccgactttggtgctgctggttccgataaatctgtgccggcttttgctgctggcttcgatgttctgccaacgttgctctgctaaaaccttcggccgaagcggcgccatcggcccaatgtgtggtgccattgttcttcaaaatggacgttggcattccgttcaaatgctcgccttgtccagaaggaccattctgttgcgagtgccgaactttggcatgatggacacggacggaggggagcacttggccggggaaatggtgttgcagttcatgcagttcgtcctcctcctctacagacttgccgagagacgattcattgagtggtggggacacaatgccaatgccattgtagtcgttcgctgaggtgccgccacggtcgctggtctgtgacacgtctaacatcgtccggtctgagctgctcggcgagttcagcagaaggcgtgtccgcttcttttcggggcttgaccaattctgaagcatgcttttcgttgttgcatcccctgggggacattcacctgaatttgctctttgcctgcggcgacatcctcggcaaatttaacaaagcccaagtcaatgtgaaagccgtaagggcagcacccgcaacgatgctgctgctgctggtggtggtgttggttttgctggtggagttcgccgtcccctcttccgttgggttgcgcaaattcagtgccattggcaacaaacgaatacgctgcggtcttaactcggcaattcctcgctgttcaatccccctccggcaattatcccgcccccggccgttttttccttttaccttttgccgatttttgccgaagccattagccacggcatttccgcttttcggtttctgttgatggacaatttgatttcgcccgttttcgtgttgacgattggaaacatttgctgtgggtgcgccgcgattcatttggccgtccgcaaaagaaacgccgccgggcggacgcatttgccccagggcaaaagcagcaaaaaaatattagcaacttcgaaataaatttatggttggtgcaatatttatttaatggtggataaaaaattggaaggaagctctccgccagaacgattaattgcgtaatttacccccccccccccccccgagggcagggcctgttttggctaagtttggctatgatttgtcattgtcaccggaagcattgataaagcattagcctaactttgtcctcgccgcatgcgtagaaaggacaagtttcaattcgcgttggaaatgagcggaataaaatatattattatttaatgatcacaatcgtagccaaaatatttttttgagtaaaatcgatcagaaatggtttttttcattaatctgatttttgagacagtgaatttgaataatcgccaatggattatgaattaattaaatgatgaagcattgattaattgctttgggtgggcaattacgaagaaacccaacactttgaggggggggggggggggcgacagcggtttcaccccctacacataga

SEQ ID NO: 20364 - DNA, 1722 bp, Heterodera glycines
tggtctcataataaagaagtaaaaaaggggttatgcaattcttttacgcattggctttttgaacctctaacccggattcgaacatttttcgaaaattaaaattcgcgtttcttgcaaaaattgttaaggcattgttcgaattttacaataaaacacaagggattcagatatgaaaacggaaaaacacattggctgcattcaacaagcaatgttagtaaaaaaaaatgagaattttaaattttcaaaagagttcgaatctcagttcagggtacgaaattaaccgaaagaaggccagattcgcgctaagcgcatcggattaatttttgggaccgataatctttaccattgccttaaatagatgctgtcactgctgacaatgaacactttcactttggccaaaaccgtgaggaaacgattactttgaatgatgtgcatgagcaacagaaacagagcgatgaagtaattgacagtggttatcgtgatgaggaggcaaaacggcagtttggaatcacttcccggatcgaaatcccggtttcgcttcaaaaattcaacaaattaattgataaggtgcgagtttttgcacgaattcatatgctaaccaacaaaccttgtattatgtattactagtatttaatctttcccgacatgggcttttacgaactgtttgcaaacttagtaaactaccgttttactctgttcaaatcctccgtttttacaatattttagctctctgaacaacaggagaagcccccctatgatgacagcattgaccaacttgaacgccaattgcgtctgggaaagcgtttgctgagccaatttaaccgcaaaaagacaccaaaattggctgatgaacacggagaagagcacaaagaaggggaggaagatgagcaacagctaaactcatcggaagaaaacaatgacgacgaattggacaatgaccagccccaaacatcaacagcaaatgccaaaaagaaacgtggaacaaaacgaaggcacatgcccagcagagttgccaaggtcagtccaacagacagaggggaaaagggatcgcactttttgattgatttgaaataaatggatttcccatgtcagaagagactttcatccaaaacgaatgcaaatcgggaaaagaagcaagacgggggagaatggttatcaaaagagagtgcaagtcgccgcgtttcatctgcggaccaaatcgaagaatcacacaaaacgacggaccatttgcgcgactctgaaaacgacagcgaatcaaccggcggcagtgaaaacattccgccgccaccgaaaatgacgagggcccagcaccagaaaaacttggtaattccatgtcattttattgttcaactaatggcgtatttaaattaaggagatcaaaaagcttttccgccaagcaaaccgtgcaatgattgaggacgacgacgaggaagaggatgaagagaatggacaaagtgatcggaagtcaattaagtcggaaagtgacggcgagaaaaaagcaaccggaagacaaattaaaaggtttttaaaatgttttggtctttttgaaaaatgatttaacaggcgagaatctctgaactcatcgagttccgaaattgttctcgacagtgaagaggatggaattaaaacgtcggaaggatacgaagtgttaacattggacgacagacccttcgccaaccgacgcagcgcaacaaacaaaaaggttcaaaaacactcgatttt

SEQ ID NO: 20365 - DNA, 1109 bp, Heterodera glycines
tgtttcttacattctctactacatattcctgccgcttatttggctcttcaattgtatgcacaattggagcaagccaatcaaaacaactccatactcaaaacgctgtggcctcaacagttcgctgattgggcctcgggttcgtttttattttggtattttatttgactttgttttgtctaaggaccgaactcccgagtttaatatgccgtcttcgtctgacctttcgcgacagccgatcagcagcacaccgttccgtttccggctgaatttcgacgatccgtctgcatacagtgacaatggtacggattggatgtcctttctaacaacccttctaattttgatttggaattcagagaatcggccctctccagccaaccaaacttccgtctctctgcctgacaacggctgcaacgtttctccgtacgcgcgttacacgggcagcggagactcaccgaccagcagtcggtccggcaacggacggaagcggcgcccgcgcagaggcgacgaattgttcatggacagacggcacttgcgcaagagtcgagaggtggaggaggatgaactggacgaagtggaaaatgactacacaatgggcgacgactgacttttctaatctcctttgaaacggtgctgactatatatcctattcttttatttattacttatgctttgattatttattattgtattttttctctgcttcgctctgagtttttgtttgatttaaaatttgtttttcggaaatgtcgtataatatattgtttgttaaaggacttattattctttgcttatgcacatacattttgcaattgtgagaaaattacagagacacaataaaataaacttattacgggttaaacagtgaaacttattacaaaattgaattaattactaacaatacgcaagtgaattaaatgtacgaaaaacagtcattggataaagcttcagtgctgcacaaaggtcctcccggtgattgtcttcttttccgtctttccctccggcagagcgcggttgagcaccttgaggaagtcattcgtctttgaacgcatccgcgtgtgtaaataggcctaaattttaggattatgttaacaaattttcagggtctggca

SEQ ID NO: 20366 - DNA, 635 bp, Heterodera glycines
tcccataggaaaagtgttttacacgactttgttaaaatttttattttttttcgaaaaatggggggacaaactgcactattaccataaaaactgctggaaattgattgttttaaacttcttttttaattcttaagaaaaaagcaaccttagagcatttgatgtgataatggagataatctcgaaatgtgtggatcaaactgattgtgttgtcgcgcgcttttttgttcgtatgtcgcgggaacaaaacttaactttcggtgtgcttttgaatgcgcatgattgagcagcaatgaaaatgagagaactgactgaccaaatgtgatgtatccgacgttgtccccaacccttgcctcggggttattcctcagttctaacggaggttcgcccaccgaatagagcacttgtggcgcagtttgacttgcccttctcccctcacggaactcctaaatgtaattacaaaaaccaattttgaatatccaaatcagcaacatcaaacctgaaggaacactttgccgattaccacatcgtccgggtctttgaacaacgtgctgaaaatgacagtcacccggtccgattttgcctcaataaatctacaaggaaaatttgaaacaatttaataatagaaattgcattat

SEQ ID NO: 20367 - DNA, 1050 bp, Heterodera glycines
aaaaaagaaataccctttttcggagaatatttattcttctgagacagcaattttcaaaccgaccttttgtagggctcaaccgcagatagtaatgcgtttttggggaaaacccacatgtacaacggtgtagaaaaaaagagatagccatttttctgagaatatctattcttctgagacagcaattttcaaaccgaccttttgtagggctcaaccgcagatagtaatgcgtttttggggaaaacccacatgtacaacggtgtagaaaaaaagagatagccattttctgagaatatctattcttctgagaaagcaattttcaacccgacattttgtagggctcaaccgcagatagtaatgcgtttttggggaaaccccacatgtacaacggtgtagaaaaaaagagatagccatttttctgagaatatctattcttctgagacagcaattttcaaaccgaccttttgtagggctcaaccgcagatagtaatgcgtttttggggaaaacccacatgtacaacggtgtagaaaaaaagagatagccattttctgagaatatctattcttctgagacagcaattttcaaaccgaccttttgtagggctcaaccgcagatagtaatgcgtttttggggaaaccccacatgtacaacggtgtagaaaaaaagagatagccatttttctgagaatatctattcttctgagacagcaattttcaaaccgaccttttgtagggctcaaccgcagatagtaatgcgtttttggggaaaacccacatgtacaacggtgtagaaaaaaagagatagccatttttctgagaatatctattcttctgagaaagcaattttcaaaccgaccttttgtagggctcaaccgcagatagtaatgcgtttttggggaaaccccacatgtacaacggtgtagaaaaaaagagatagccattttctgagaatatctattcttctgagacagcaattttcaaaccgacctttttgtagggctcaccgcagatagtaatgcgtttttggggaaacccacatgtacaacggtgtag

SEQ ID NO: 20368 - DNA, 2602 bp, Heterodera glycines
taccgtatttgctctttttatatgccagtctccattaatctgccggtctccaattatatactccctttgaactaggttgaaaaataatctcccagtctccatttatgtgccggggggggggggataaatagaattttttaataatttatttggccggcttcttcgtgatcgtttcgtccatctttaaccgtttcagttgccctaaactcgcgcaaaaaagcccagaaggctgtttctatgcctcaaaacataaaaaattacaaaaaaaacttcattttgatcacgttaaaaatttcgacattttgaccgacttgtcgacactttgtcccactactcccaaacattgttagacctgtcaaaacattgtttaacccatttaaaaacaaatatcaagctctacgcactcaattacccccaaaatcccccactcactgcgaaaagccgacttttttgaccaaatttttagacaaatgaccaactcaactttgggctagggactcaaattttttaaaagaaccgcctcgaaatgctctaaccaaaaaccacctcgcccattacccacggcaacttaaaagccgctacgggcgcaaaaaaaagatgcaactctaaaaaaattcggaaaaattccctttttgaccagtttttcggacaaatgacctacttaactttgagctaggggtccaaaatttttttttaaatgtgactaggtgagctctacaataatatacaatagcgcctgagctaacatttcgctaaagcacacccgcccgagtctaactttttgagaccccttcctggccaggggctaaaggggggtcaccccttcaacttagtgctggcgcacaattttttttttttaaagaccaaaacgattccatattttcttaacttttcattaaaaattccaattttttatgcataccggaagcaagaaaattacatatttttgccattttggggtcattttcagaagttctttaacaaaaaattcaatagaaaaaatttttttttgacgcgatgacattttttggcgacatgttcaacatattcaaaaaattttccactaaataaatcaaccgaaaaataatctcccagtctccattagtctgccagtctccaattatatacccccttctgagaaggttgaaaaataatataccatggtatataaaaagagcaaatacggtaagttgtttgtttaagcaaatgtttcggaaattaaaacataaaatacaatgagaaatcaatttacagtaaaatccaatattaaacttaataagtaattttggttcataaaatactgaaaacttccatatacgtaattgagttatgtcctgatcggatctaacttttaaatgtccaagctgtgcgagtttttggcttccagcaggttaagcaaaaacttcaggttgtaagcaattctttcgtcgtgtcgtccacgaaacaacaattgttcgttcacctgtccaaagcgagatggagttggaagttgggactacttttttttgatacggaaaagtccaagcttttcttggccaatttggagaagcgtaaaaggagcgcaatgctacaatttaatttcactgatggagaagcgaagaaaacaaatgataatttaaatccataattgtggagaaattttaatggaaattcaaatgaatgaaatttaaaaatcatttttttaaacttcagttaaaatgtttctcagcctttttatttcttcaattttccgaaggcttggctcaaattttgaagaaatcaagaaaattaaactaataaatgttaacgattgatcataatgatatttttgtaattaatttttaaaaaatcaaattaagctagaatagggtatttaaagactaattttaatcgtttcttaataccgtagttatattaaactgcattaccgttaacacgagagattgtgagattaattcgatgaaccacactattgtgtttttctgtaattatacacgaaaaaatatctttttgaaaatattaaagtttggatttatgttcgtaaagatggtaaattatagtcaaattcctaatcagcattttccgtgataattaacttaacaaaaaaattcttcaaaaaatttcatttttggccttctgttaattgcaagaatattcttttttgctttaaagcaacataaatcccacaattcattaattgttcgttaatgattggaaaacaatgtaaattcgccataagcatgctttatttgccctggggccctattccggtcttccggttaaatattaaatcagacaggattaaggcgttaacgactgttaatttaaccggaagacgggggcataagacccctgataagtttaatacaaaaaatctttttcatagctgaatgagtatctcgttcggctctagtgcactttatgagtccaatcgagttttatgagtccaatcagagtttttgagtccaatcgagttttatgagtccaatcagagtttttgagtccaatcgagttttatgagtccaatcagagtttttgagtccaatcgagttttatgagtccaatcgagttttatgagtccaatcgagttttatgagtccaatcagagttttgagtccaatcg

SEQ ID NO: 20369 - DNA, 2306 bp, Heterodera glycines
aaattcaaacaaaaaaggaccaattcattaaatttattttaaaaatataaaaaattcaaatttgaagcagactcgcctcttttccgtctccgtcccccaacaaaaaataaacatcggcgtcctctctcgtgctcatcaaatgcttcatccggataagccactgattgggacattataaacaattgtgaaattcgtaattatcttatttacgcaataaaataattcgaattatgaaattggaactagacaaaataacattgtaattgcctttgaggaactaaaatcgcaaattgccaaatttatgaattctcttttttaaataatatataaaggggaacttattgaacatcagtaagcgtggggggaagggtggaggagccacgcctgttgtggtacacgcatcgattatggaagccgcgcatgcactagcaacgaagtcctttgcgcgaagcgctcatgtcagcgcccgcccatatataccaaaagtatactgtctacaccgagcaattactgtgcaaagcatactgtctacaccgagcaatcactgtgcaaagccaactgcctacaccgagcaattactgcgccgcgacacgctagtttctactatatatagagaaaaggtgcaactcgtagaaaaaattataagtccccgtggtttgcccggagggggctgaaattttgcaggcaggggtaacttttgacggcgcatctgggaaaaataaggaaattccggtccggaggccaactgagcgccagcggcgctgaaacggccaactttgaaaaatggtcgccgttttcgggctgtaactttttcctgggaaccgggagcggaaaaagtctgctgagagggcacaccccagacatgttggctacaactttgtcactgatcactttttgatcagatcaaatgccgagcctgtagaaattggcgactgaacggcgctcaaaatgccggttttggcttttcgtgaataactcgctgggggttaagcggagcggattggcgccgcttgagcatttgtgtagtttttaaagctgcatccgatggagttttcagattttgaaaattttcaaaatttttcgagctaggccccctcgaaaatttttcgtttttgaattttattattttttgccgatttttcccaggaaaacggagaccactttcaagcaaccgtttttcgagctctatcgattggtgtcatttttgaaaaaatttcaaaattttccggaaatagaaaaattttccggaattgagctccccatttccgttcaaggcttataactcgtcaggcgttgattttagcgaaaatttgtcttagagcatttttgtagagaattttaagctctatctaatgtgctttatttggtctttttatctttaatataaaaaaagttataaaactaaaatgaatttttaaatgcaaaaccaaaggggggaccccatggatttgcatttcatgagaaatttttttgctcctaaaattgccaaaaaatacttttctggggtaatttgaggtgctgaacacgaatatgcactttatattgcgttttgaattttttggagggtggtaaaaaaattttgaaaaatcaataatttttggcccttgaaaattcaacctaaattttaaaaattcataactcgcctcaaaattgtccaattcagctcatttaaagcattaaaaatcgagaaaaatagggagaattttatgagatttatttgaaatttataccacaaaaacaaaaaaagttattccagaaattctggaaattttctatttttcagaaaaaaatttatatctcggttctgaaaagtcattagagaagagtaaaatactataaaaatccgcaattttttgctctattatataaattttatttgacctttttatcatcttttaaaataaagatacaaaaataaaagtgattttggcattcgagaccaaagggggtggacaggatttttgagtaaaaaatttttttcaacaaaaatcttccaaaaacatgtgtttatgggttatttgggccgttgatcacgaatacgtaatcagattttacttttgacattgttaagacctcagaatccctgtgtgattggggattctgaggcatcatattgagggggcggggggcaagttcgaatccgggcggtaacacattatttttctaagtattttttttacttatttttagatgtttttaatttattaaaaatagttttgatttaatatttaaaaataaataaatttttaatttacttttttatcaataattgttttaaattttaaaattcacattgtacctcttct

SEQ ID NO: 20370 - DNA, 1770 bp, Heterodera glycines
  unsure (1)..(1770): unsure at all n locations
gaattattttgttctccatcgactgttcggagaaggattaatgtaaaataaatacacagcgaattgaacggcataatgacataaattaacaaaacattatattaataaaagacaaaaaagagggattgaatttatgtagaaaaaatatgaaaatatttcctgttatgagcgattaaatgtagaaaaattacaaaataccaaaatatatcgataaacatttaattttaaaaaacaaaaagaccaaagcatgaaataggcacaaaatgtgaacaaaaaataaataattcatagaatttgaataatttaattgatttaaatttttgaattctttaaaatatattttgaagaaagtaagtttatttttaagaattattattttggatttaataaaatcagaccccaactatcagcaacaattttataattattatttttatattatataagaaagtgaatcaactgatgacaatttattttttagcattgccaatgtcagggcattattctttccaaatcggtgattggcatgccaaatttgcaagctcattctgaaatattttcattgctatatataaaactatgcaaaagttggcaccaaatttataataaaaaaatatggctgagataaaataattaatgtgttttttgttttctgttgaaatggtaatggcatttctttttgcttcattaagcatccaacctcctctttctcttctcctattcctcttcctcctcatcctcctgttcctcctctttctcttctcctattcctctctttctcctcctattcctcctcccattcctattgctcctactcttcctcctccttctttctcttcctcctcctattccttctcctttttctcctcctcttcctcctccttcttttcttcctttttctgctcgccgtcctcccatttcgttaccatttcaaatttttcgcgtcacgtacgccatgccttgtgctgcgggcacaaatgcattattatgtgtagccatcaacactggtttcgtcgcttggacaacttttccgccaacatttaacacgggggggccaacagttttactaaaaaaaaagcccagagtttcagtgaaaattcgtttaatttttttttgaaacttgcacagtcattgagacaaatttctttgctatcgctgggactggacattttcttcttgcgttagctgtgcctgcaacattggcaccactgctctctccgttcaatggcttttcctcgctggcactctcatcatcaccagctgatgagtgtctctcctttggctgctcatcaacactttgttcgccttgccgttctgctgcgtttgctttgtccgggcaactttgcttctcgtcaccattttcgcttctgctgctgttggcactttcacctttcgcttcggcactttcagcggtcgctttcggcttcaatacttttgttgctttttcgtacacgaactttgcgccctgccccgccttttgccgtgccggggacacaactaattgattgacctcatgcgctcccttggtaatagtcgatccaactttcattcgaagttgtcttaattaggtatttaaagatttgctatatttaattaattgaatcaattagtctgattcggcattaattcctcctcctccgctgcttcacttaccttatgccattaaatccatcgaacaatgttttttcgtcctttttgctttgtttcaatggcgctttttcggtggtcgatttcttcgatngtcgtctgctgtattgngccgccttcctc

SEQ ID NO: 20371 - DNA, 1601 bp, Heterodera glycines
  unsure (1)..(1601): unsure at all n locations
taattatttatagataaagaattcnatagtcattacatttacatattatatgcattattattaacaaagacaactttacatctcgaatattattcccttcctgagaaatgcgtttttactacagtaccctactgtcccttgcttttgtcctatctctgtgcttacggtgtcccactgtttggtcagtgcacagtaagaacaagaatgactccatgtctaatcaccaaagtgaccacgattcgatggcacaacactcggaaacggaaggcggcggcaaattaaaaatgccagaatttattaagaaacttatgcgtagcaaacaaacgaaaaaagacaaaaaagcggcgcaaaatgacgcccgaggggaacaaagtgaaagtgaaagtgtacagaatgggcaaaatgacaactcagcagaaatagcgaatatgctaaacgaaatgcctaggtggacgacgagtgccgggacgagtcgaaacatagccgaaaacaattcgccactccatggatcatcccccaattattacaacacggtcagaggcagcaggcaccaacggacaaaaagcagcaaccctaatcaacaaccaggggccgtagtcaaagaaggtggttatttgaccagggcattaaccatggtcatttgacctggtcaaataacgaccaaccatgtgaaaaacggcagtaaaagaagatggtaaattttctgctggagcaaccaccgttttttaaccgccaaccgtcttcttttactttaccaccaactttctaccatgaactgattaaaatttgcacttgtcatattaaataaataggcaaaataaggtttaaaggccctagaaaatttgtagaacaaataaaaataaattattatttatgcattaattttttgtttaaaattttttattgctatttaaactatttcgacatttagaaactattcacttaaaaatttacattggtttttttatgatttgaattaatacaatgtttttgatgtaattacataatctaaaaattcgagaatcacccaaaatataaaaattatgggtaagtttgtttttaggtaaccaccaaccatgttcttttactgtgcgttcacaaaccaccaaccatcatggtcaaatgaccaggttaaatgaccatgaacccgtggttgctcatttgctacaggtaaaccatgatggtagtggttatttaaccataaccaccttctttgactacggccccagaaagtttaaaatacgagttggtttcgtcctttttgatggttcttttataacatatgtatctacatagagtgtctagctgggaaactcaaatttgaattcgaatttttaattgacttttaaataaagttaattgttcataaaaaactcaaatacaaaaaatttcttgagaaaaaattccataatttgatcatcacttctgacaaacttaaagagcaacagaaacattattgaccacgacttccgatcataaattgttgtccaggaatgacccttggaagaacattttggaaattcaaagaaaggacattttaaaaatgtttattatatgaaataaaaaaagggcttgaattttattccatggtttctgttttg

SEQ ID NO: 20372 - DNA, 1426 bp, Heterodera glycines
caaagtgccgtgcggttgatctccgaggtttgacggaaaatgcctattccctatagtgccggatgatggctcactgagttggattgtgccgcgtttgtgcgggtgacgggctatttgtcatacattgggggacagcccattgaataagtggaagagtttatgcgttgggccgagacgctatgcgctctattttgcacgtcaaaccttgcaaaagaggcaaaattataggaagcgcctatgggtaatgagtaaatccattgtaaggaccccgaggggaaagcgctggcatgtgccgcattcttccacgagccacggggcagcgaatgctttttgcactcaaaaatcacttcaaaagtgccctgtgcgccggagacatcgccgacgctgccgtggaacatacgcatagaactgctgtgctcctaactacgagcttttactgcttcagcgactaacctgctcttgacatttgttcagctcatcgattctgcatttgccgttagtccgtccgcttccatgtccgtctccaacagcgcttttcccccaaatttcatcccattggtcggcatggaccaaattcacactttgacggagtgtttgaacaaatgcatggaccaccagaattgtcaggtccgttcgaccatctcctgtccgtccattatatgcttcaattcacctaaagtccgcttcgttccatgcccaatcacttcgttgtttgctctacgaccaattcccttccgctgatattctcttccccgccgaccaaagttgggcattggcagtcaatggctgtgtggtgaccaaagcgggccaagtcggcgcagttgacaacgaagacgggcaaattgcaagcacgaaagtggcacagcaaaagaaaggggtgccgaacaatcagaaggcttttggggtggcgaacagaccgtgcggagggggagagaatggaggaataatggcaaatttatttggaaaaaaatgaggagagaattttattattattttatcaagattattaattatgaatatcaaattgtgagatgcaaaaccaattcatacaatataaaaattacacaaaacatcgtttgccataaaattcattctgccaatcactgcttttgtccttttctctatcggcgagtgaatccaaacgatccgttgggccttttcccattgccaaaggcaacttcagccggtggaagtgccattggtccgttcgtctgctgatcactttgtgtttgttgcgtgcccagcattagtcctgcgataatgacatttatttgtttaattcgccgccttccccaaccgctgtcctcgtggaaagtgtcgtgcacagtttgccttccggcatcatatccttgatcagtctttttctcaaccggtctttcaggaatcggtttctcaaagggatgcgcagggccattagaaggcaaat

SEQ ID NO: 20373 - DNA, 1139 bp, Heterodera glycines
  unsure (1)..(1139): unsure at all n locations
tttcctcacattaaggttaaatatattctgcgcagattggggcgtttgttgtacggtggtgggggacggagaagggaaaggagaagaaacagttacagcagagtcaagttggagttgtgccgcttaaggcaacaagttgagagggaggggggggggggggggcaagaacggacagccacgcggtggaggaaatgccaccactttcccaaaattcactcccgccccaccgatttgctgctgttggtgttggtcctcctcctccgcctccggaatgcctttttttgtcccgttcattctctgcgttccttcagcagcagttgaaccaggtctttctgtacttgcccacgttgttgttgcttcagccgttccttgtttgttttcttccattggcttgcttttcctctcggtctcttcgctcttcctcatcccttcctcgtcttttgctgtctctcccatggtcgtgttgtcttctttcttctgcttctcctgctgtactgctccattccgttcctccccctcttccttcccttcttcactttcctccgtctcataactttctccctcctcttccctctctgctccttcctcctcatatgatctttcttccttcttctactatttttcttcactcttcattttattccttaattccacccttatttcctcctcctttttattatcaattattatcattctactactccaacttctcattttgataatattttnatcccccatttactncctcaaccaatacccattcatccccatctccacatccaccancacattctcaatctccactatcaatttaactatttctttctccactctttccaataccntctcattcattccctcaaattcaatttcttttattatttccatttatcctttccttttctcctccacacttatactcanatcaattatctctcccacttttnttataaaatactaattttatcccttcttttntntctcattaattancccattatttattntaattctcnaantnttcntttctctttctttnnnacttnccattgtcgacgtnttccttttnctnccattatcttcttcttccacatatggaaaatcttccctttttcctccgtttgtaatttttgccattt

SEQ ID NO: 20374 - DNA, 797 bp, Heterodera glycines
aaaaaagcaaattattaattttaaaaaaagaaaattagacagaaggatcaaagttttcgttctgaattgctttatttatctttttgcattgtatatttttaacggatacatgacaaaaaggatttattcaaccaacattgtgatttaaattatattatactgttgcaactaacatcactttgagatcggaattctagcactaaaaattttcctggaatcggttttattatgtaaaaaaaaaaatgcaaaatcagaagcaagccaaaaacatcagtaaaccgaaatttcatccttcaaaatcgatgaattaaatgaactaataaatttattatccaagaaaatattaaactcttctataattatttttatttctcttgattgacaagcaatgttatacaaatataaaaataacagttaaaaatgatagtaataaaatcaaataataacgaaataatcaaaaattttaatgagtaaaaaacaaactaataaatttttagagtataataattcagtaaatatttctgagttttcttgccaaattctattttatatttcaatcatctataatatgtttgttaaattcatattattaggccgtatctgcagcattggccttctccaaaatgtccttgaagaagaacggtgtgaacgcatagccttggcccaaataaaatttgctttgaaattcgacccttaattattaaacgtaaattagtaacacaaattaaacgggcgtagcatttaaactttcaaataaaatctaacatgtaaaattgagggctctttttactaatttg

SEQ ID NO: 20375 - DNA, 1036 bp, Heterodera glycines
ttataaaaaatatttcatggattacaattgcaaataatgatattttttgatttttggatgcattttttccaaaataaattaaaattacaaaaatcaaaatttgggtcaagaaaaaaataaataacaaaaatggaaaaacttttaaaaaaaaattaaaatgaaaaagttttaagggaaaatttttgaaaaagcgcaaaaaaatgaaatatttttttccaacaacaataaatttattgacgaaaaatgacacccaaatgaaaaaatttaatttgtcccagcccgactaattaaaatcaactcatatcatttccgttttttttaattgagagtttatatgtggccaatttttttatatttaaataataattaatttgacttaaaaatgccaaaatttctattaaatattttatttgtttcattctaaatattaattgacatctgaaaataaaatcataaaatagatggtcattttacattatcaattatttttcttttttttctttttggattttattcgtccatttttcaaattccataaattccatcaccataataataattaatttacttcatcatgatgcgcaccgccacctgcaccactgacatggtcatgtgcctcgtcaacggagtgcacttcgtcatgtttggtcccatttcgtccatttcgtatcacatgcatctcctccttttgcatattaatacgaacactctaaaaaataatttaataaaaaaaaattatttaaataaatttatattatagccatcaaaatgagtacctaagtccaggttttggcctgttttgaccgggaccgggaaaatcccggtttcccagccaaaaagtcccggttttaacccgaaaagtcccggtcccgttctactctagttgaaatgtatgctttgcatatttgatttaattaacattttgattttacgtgacattttattattattaggttataaattttatggactaaaaaagcccgaaatatggacgaaaaagctcaaaatggccaaatatggtgaacccaaatcgata

SEQ ID NO: 20376 - DNA, 860 bp, Heterodera glycines
ggacgggcgcttcgcgcccgttttttaaaattttatgggggatattcggccgcttcgcggcctcaggacgggcgcttcgcgcccgtttttaattttgttgggaacattcggccgcttcgcggcctcaggacgggcgctttgcgcccgtttttaattttgttgggaacattctgcagcttcgcggcttcaggacgggcgcttcgcgcccgtttttttaagtttttgggggacattcggccgcttcgcggcctcaggacgggcgcttcgcgcccgttttttaattttgtggggcattcggccgcttcgcgacctcaggacgggcgcgtcgcgcccgttttttaacaacagtgatgagaagaggtacaaaagtgataaaagaggtacaaaagtgattagaagaggtacaaaagtgattagaagaggtacaacatggtttaaaattaaataaataatgaaaagtttttataaaaatcgattgcattttaatttaaaatttttttataataaaatactctttttattcattaaatataattttgaaaattaataattgaatatttattttgaaatgaaattcattttttataaattcaaaaaataaataatgaaattctttaattaaaaaaataaataaatttaaatattttataaaaaatatttgaaattaataaaacatgtaaaagtaatcaaaaatgcacagaaaaataatgtacaccgatcggatccaaacttcgccccccccttcaaaatgatgcctcagaatccccaatcacacagggattctgagggcttaacgatgtcaaaagtaaaaactaattatgtattgatgatcagcggcccaaattacccctaagacatgt

SEQ ID NO: 20377 - DNA, 1365 bp, Heterodera glycines
  unsure (1)..(1365): unsure at all n locations
tcaaaatgcccgacactagcgcattctttagacaacgaaantnaattctgaggatttcccaaagccatgcgcagctttgttagaccgatgccgaaatggcaatataatggaaaaggacagacaacaatgcttttctttatatcagctgatggtttacaaaaatcgaaatacttcctgagtactttccaagaaccatgagaataaatatcgcactagcgccaaaatcgaacaagaacgctaatcatcagaatcatcttaattttcccccagtgatttgtgagtgataagaaaatagaagaaattcagggattaattccagaggaatttccaaggaccacgtgcatcattgctacaacggtgccttaatggctttttaatgtcaaaatgcccgacactagcgcatttctttagacaacgaaaattaattcctgaggaatttcccaaagccatgcgcagctttgttagaccgatgccgaaatggcaatataattggaaaaggacagacaacaatgcttttctttatatcagctgatggtttacaaaaatcgaaatacttcctgagtactttccaagaaccatgagaataaatatcgcactagcgccaaaatcgaacaagaacgctaatcatcagaatcatcttaattttcccccagtgatttgtgagtgataagaaaatagaagaaattcagggattaattcctgaggaatttccaaggaccacgtgcatcattgctacaacggtgccttaatggctttttaatgtcaaaatgcccgacactagcgcatttctttagacaacgaaaattaattcctgaggaatttcccaaagccatgcgcagctttgttagaccgatgccgaaatggcaatataattggaaaaggacagacaacaatgcttttctttatatcagctgatggtttatttacaaaaatcgaaatacttcctgattactttccaagaaccatgagaataaatatcgcactagcgccaaaatcgaacaagaacgctaatcatcagtatcatcttaattttcccccagtgatttgtgagtgataagaaaatagaagaaattcagggattaattcctgaggaatttccaaggaccacgtgcatcattgctacaacggtgccttaatggctttttaatgtcaaaatgcccgacactagcgcatttctttagacaacgaaaattaattcctgaggaatttcccaaagccatgcgcagctttgttagaccgatgccgaaatggcaatataattggaaaaggacagacaacaatgcttttctttatatcagctgatggtttacaaaaatcgaaatacttcctgagtctttccaagaaccatgagaaaaatatcgcact

SEQ ID NO: 20378 - DNA, 2994 bp, Heterodera glycines
  unsure (1)..(2994): unsure at all n locations
gtttcgccaactaaccataattatgacatttcgccaactagtcatctcgccaactgacactttgccaactgacatctcgccaactagggcaaattcttacgtttcgccaactaagctagattcggacgtttcgtcaactgaaatttcgccaactagagtacattacattttttactcatatcttgatcggtgactcgaaattattactccaagtgcaaggctcacataaaaaaacttatctgcgaaatatacattgctccagaagaaagatagaaaacttgggtacttttagttcctaaatcttggccttatcgtattactaccacttataacgacataataaggtttgccccaattaaaataggtctcaacaattttgatatttaaccgatttgggctagattttcgggattcgaccctaaaaaagagttgggcgaaaacgaattgaatgccgtccgtacgtttcatgacggaaccgaaccgaattatatgtttttttgccggtgcaatgataccgagggattctgaatctctaatcaaagaaatacagacactgcggtgaattgataagtgatatggataaggagaataatctgtgagagccctggctttcatagagatacattggcattacattgtattactattctagtgcaaaatcttttttagagtaactggcaatattatgaggtgatacgtgcattgttgggagggagaaaatcactgagagccctggttttcatagatatacatttgtattaaattatattactattctagtgcaaaattttttttagagtagttggcaaaattagttggcgaaacgttcaattttgggtgagttggcgaaacgtccgaattcggcttagttggcgagatatccagttggcgaaatgtcagttggcgagatgactagttggcgaaatgtcataattatggttagttggcgaaacgtccgaatttggcttagttggcgaaatgtcgtcgtgcccttattttaggctaaatattaattttttttttaaacgacaaagtctccgcgtggtcatgaaaatgaatcatcgaactttgaggaaaatgtgagccgaattttccaattctatggcaaatgataagggctttttgcatttcagctggatctgtacggatgtttggatggacattttccctcattttgaccgtcctcaaattggcactgatttcgccacgtttcaatgcgttggtggacaaacatttcgatggcaaaagcgaattgacaatttggaacaaatctccaaaaggtgctatggcgttagtcaaaaaaccgccaaatgagaccctttatttttttctcatgtcttttactgattattttgtataaaattatctagcaataaattttaatatttgcctttaccaatttcaaatatatttttataataatatttttatatatatttttttttgtctacgtttaacaaacaaactacggtcatttttactgatttttgtgttttaaatttgaaagtattaatgcaaatttccctacagaatatgtaacaaattatttttaacaaggtcttgcttaaggactaacaagcattacgaatcaaattattttcaacacatcgaaatacgaaaatcgtcttttttcgtcgcgtattaaagcaatatttctatttgtccacttcgactatgtctttttctgttgccatggtgatctattaaaaacttttagttcgacatttaatttgtattaaccataaaaacaaatctcctcaaggtttggtgttttatcaagccaagatttcagacaaagatgtttaaaaatggaaatgaaattgtttagttaaaattaatctttattttataattaattaaatttttagatgtcttgcttaaggactaacaagctttataaaattcatagaaaagttgatattccttataaatatctcataatttctgaattgctgtagggcttgggttaataattgcttcaaaatctccaaatccgtcgtagtaaataaaaagggaattaatggtattgatttgttcgaccattaccttagaatttatttagaaaataataaacattttatgtaccgattttgttgtctcaggcgtatagatattccaaacaaagttgatttcttttttggaatttgctgtatttgggctacaaacaataatattaagtttgtataatcttgcagcacataaaaaatctatatttgatgcccatttaaactgttcagaggcatccaaagcggggtttttatgattttcaatatattctgacagattttccaaagatgtttcaaacatttgccaccagtttgatgattcggcattaattcattctagcaatttacttattgaatgaatttcacgattttcaagaataaattaatttgaataaaaattttttgtaaaaaatatataataaaaaactattgtaaaaaatatataataaaaaactaaagccaataaatattatggaatcatttttacattaatcaatgaatcgattttacattaataaatattttattatacgaagtgtttgtttactaatattaaaatttattgctagataattttatacaaaataatcagtaaaagacatgagaaaaaataaagggtcacatttggcggttttttgactaacgcccattgtggcggtttttgactaacgtcccagcaccatctgttgtttactttttccacccttcaaacgaatggacgggttcttggttgagtttgtcgtctgattaactttctgatgagcgcaattgtccctttcagttgaagttaaacccaattgatccattttaagactatttttgggactaataatttacacaaattaaaaacaatttaagccaaaacagaaaaatgaaattgcttatcagaaagagttattatttggtaaaaaactcttattttcgtttatttgctgcgatgaaccgaataatatgtgctaattgttatttcttcanatttcattcaaat

SEQ ID NO: 20379 - DNA, 2136 bp, Heterodera glycines
ttatcatcagatacctgaaaagttttgttttaagaaaggactttggacagacgagaaagacatattttaacacaattggtcgaatggtgaaggatcaccggctgagccggagcgataccacctgaggctgttgctgttgaatgtgaagggagcatgctcctatgatgatttgaaaacagttattgatattaatggtattgcaaaagtttgtgaaactttttcagccgcatgtttagaaaaaggttttattagaaatgatgaagagtggaaaagagcattagaagaagcagagagttttgaaatgcaatggaaattgagagagttctttgcattgattttagtacattgcaatccggccaaaccggaagagctttggaatatgtttaaagactcattgtctgaagatttttgcaggagttttagaaaagttggcttatgctaaagcatataaagagattgcacttagcattatgaaggctggaaagacgcttgccgattttccaaccatggaacagataaatgttgatgatgatgttgaacaactgtttgacctagccgaaaaattggatttgggacaaagaattattctttgatgtatgataaacagaggaatgtttgtgatgccattttgcatagaatatggaatcctgtaaatgaaccccccttctactttcttagtggaccgggtggaacaggaaagacacatgtgaacaagacaattgtacatatgctgagaggtcaaaagaagaaagtttgtacaatggcttttactggcatcgcagcaactttgctgcctgctgggagaacattgcacaatagatttggactgactttggatatgagtaattcgagtattagtccgagatcaaaggcttggcatgaggtgaaagacacagatttgtttatttgtgatgaggcgcctatgataaataagcgcgcaatgagaactttggatgagaattgagagaaattatgaataatggaattgcatttggtggcaaagttatgctttggacgggagactttcgtcaaacccttccaattcagaaacatgccacgagagctgagatggttaattcgactataaagagagtgagtattggagattagctaaaagatacaaattggcaaagaatatgagagctcttgaaacagagcaagaatttgcgagagatttgttagaaattggcagtggaaaattgaacaatgaaaatgatgagataattttgcccgagaattgtattagcaatggtgatttagcagaagagatttttgcaaattgtattgcttctgagaattggaatgaaatggccaaaagtgccattttagcaccgaagaatattgatgttagtgaaatgaataatagagttttagaaatgttgccaggagaagaagttgtgtatacgagtatagacttagctcaagatgagaatagacagagagcagatgaatatttggatgagtatttgaatgctttgaacccttcggggtttccacggcataagctgaaactgaagaaaaatgctattgttttgttaatgcgaaatttgactatagaaatgggactttgtaacggttcgagaatgaaagttgagcaaatgcaaccgaatttgattgtgtgtaaacttttgactggagataaggcaggtcagactgtgtacattcctcggatcacgctttgctgttctgaggattatccttttgacctgcataggcaccaattcccgttggtgttagcttttgcaatgacaattaacaaggcccaaggtcgaacccttgagcaagttggaattgatctgaggaaagatgtttttagccatggtcaattgtatgtggctctttcgagagcaagagcttggaataagctgagaattagattagatgatagtaatttagagagaaaggtgatgaatgttgtttacagagaactattagataatagtgattagataatgttttagactagctttattagaattggtttttcttagagaaatccgttgttctttgtgttgctcaagacagtacgaacacaattcaaagtaagtcattccttttaatttcataattaggtaacctttctccaaataattgtacgtaacacattcgtactacctagcgggggacgcgccgaag

SEQ ID NO: 20380 - DNA, 1633 bp, Heterodera glycines
  unsure (1)..(1633): unsure at all n locations
gttagcctcggatcagactgaaacttttgagccaagacgggaaaatattattacggcaaaagtaaatgagtgtttctcagcaaatcaaaattttntggtaaaaggaattaaacatcagtacncaagtataataatcggcagaactttggtcacaccaggggacagtaattgtgttacagtacgaattatgaacgctggaaaaatgccagtaaaagtatataaagggtcaaacatcgcggaattggaaatggtcaaaattaatgctttaccaggggatgaaattccaccgaaagattatattccccccgagacaaaatggcatgaaaaattaccgtatttaccgacagaaggaaaaaacagactaccatctcaaagaataaatctgatggggacgagattgagtacaaaatcacaaacggaattaaaaaatattgtggataaacattatgaagcatttgtgggcgatgatggcaaaattgggttatataatggaccaattgtccataaaattgatctagttcccggttctttaccatttcattttcgaccctacagatacccacccgaaacgcagaaagaaattgaaagacaaattaaaataatgttggaccagaatatcataagagagagcgaatccgagttcgcatcccctatcgtaatggtccccaaggcagataaaaaatcttggcgttttgccattgattaccggtcgctaaataaaatgacaaaaaagcgagttttccatttaccgaacattcaagaattgttagacttaatgggctctaaaaaatattacacatcaatggacatgcaaagtggtttcatgcaaattccaatgtccacagaagacatagacaaaacggcatttatttcacaccttggcatttatgaattcataacaatgccatttggtcttactgctgcccccgatacatttcaaagagtgatgaattcacttcggaggcgtctaacagcagcaatgttaatttatctggacgatattataatcggaagcgaaaccgaagagatgcatttaattgacattgaaaactttttaaaattattaaaagaagtgggacttaaattgaaaatggacaaatgccattggggaatggcagaaattcgatatttgggatttttgctaagtgaaagaggcattcggatggacccaagacaagttcaaacggttcaaaattttaagccaccaaaaagtctaacggaacttaagtcattactcggtgcgctcacatattttagacgttttataaaaaattttgcacatattgcccgcccgctacaaactttaacacaggataaattcgagggcaaaattgaagagaattggggaaaggaacaggatgaatcattaaatttattaaaaaatttgctaacatcggcaccagtattacagtcgccgagatttggtaaaccctttacaattgagtgcgacgcgtcaaaaaaagccattggcgcggttttattccaagaaaaaggtcctgttgcatatgcctcgagagcattaaacagacacgagacaaattatccatccattgaaagagaggcactagcattggtatatgctgttaaagagttttccccctatattattggctcaggggtaaccaaaattatt

SEQ ID NO: 20381 - DNA, 871 bp, Heterodera glycines
cagacaaatgggtaaaattttggaaaatgaaaaagaggaaaattcggtaaaaattttgagtacaaaaaatgagggtgaggaaaaccaattggaaataaaaggagcaaatatttctatagaagaagtggtgaaagagcaacgaaaagtgaaagaactcgcacaaatttattacattttgaactcaggaaaaattcccccggaattgaaatggaaaagagtcccaacggattattgtctgataaatggcgcaatatattacaaaaaaggaaaagaaaattcggaacaaccaaaattaatcattccataccagttaagggaaaaattttttcacaatattcatgatgagggacattttggttttgaaaagacatggccagaaataaaaaatcgattttattgggaagaaatgaaaaaggatgtccgattattaaccgagacttgtgaattatgtcaaaaaagaaaaatatacccaggacaagcaaaatcggcaccaagtgttccaattgtgccagccgaagcaccatttcaaagagtacattgtgacctaatgggtccacttaaaaagacgagacttggaaatctatacataattttaacaattgacagtttctctaaatgggtaacggccaaggctataccaaaccaaaaagccgatacagtatctgaggcatttatagaaacggttatccatcagcactcggtaccagaaattgtcattacggaccaaggaagacaattcacatcacaaatttttgcagaactttcaaaaatatatgggtttgaacataaaatgtcaacaccctatcatcagcaatctaatggattagctgaaggctctatgaaaatcctagcaaatattatgtccccaata

SEQ ID NO: 20382 - DNA, 1798 bp, Heterodera glycines
atttaatttttcatatcagttcagtgactttctcagcaccctgaactaggaatgctgcaataatcagaaagcattttggaccggcaaaaactgttaaatataatacctatttaatagaattgacattatttcatataataaacaaatattagaatatttttatagtctggtacagattattttgaaaaaaaagaattcattaaaattactttaaaaaattaaggtgttattgaaaaaaattcgttcaaacacaccacagaaagatcaaaatattgaaatggttaaatgtgaattttaaaatataccataaaatttaattgtattggtaacataaaaagtaagttatatatcagattacgatgtaaaattttaattttaataaattatttcatcgattctcaaggatttttgcggaacataacaaaaaattttcagtctcacatcaatgtttcatgaaattttttgtcgagaacgaaatctgaacatccccgaaacgatgttttgtatcaaattagccctaggaatcgaatatagcaaataattaaacacacaatgaatttaatagcgcaagaattttattttagaattctaaaagatctgcttaagtaatacataaaaagaaatttaaaatttaaacgacaaataaatacaaatacaaatatttctttaaatggttaaaagatttaaccatgtatagataagttgctctgttgtaaccgtattaattatttaaacgaaaattaccgaataaaatgaaattgataacacaattttatcaacaaaaaaaacaggcagccaataaagaaaaatttatgtaaataaattaatttaaaatatactcgaaaatttattaaatgttatataagcaaactaataaaaatacaataagttaactaaaaataacaaacaaaaatttcagcaataaaattaaatacgatcatatgcattaattcttaaatattatgattttccttagtcctcattgtaaaaacgcaaaaaagtcttaaaaatccgaaaaagtaaaaaaattcaaaaaattatcggtaaaatgaataaagattacggagcatgataaaaacgaaattgtcgtctttcttagcctaacgaaaagagcggttttcttgtcatgaaagttagaaacgaagaaattaaattaaattttactattgctaaaattaatcgcaaaaaattaattaaaactaataataaaagaaaatcattagattacattaaagcaattacaaaagaatcttcaagaagatagggagaacatatcgtcatttatttacgaaaattaaaataaaattgataacacaattttatcaaaaaaaaaaaacaggcagccgacaaagaaaaatttatgtaaataaattcaattccatctaagtgtattcagtcaagttcaaagaataaacatcaacatttatttaggcttattttgaaccggaactttaatggaacaaattgtttaaaataacattttaaaattcaaacaatttattcaacaaaatcaatttgattaaaaaattaactcgaaaaaattagcttaatacagatacgtgtaggtgtgtgatcgtctattccatttaaatttttatttattatttctttttttaatataaatcgtgtataatcgcgaattcctgttagtagtatatggtgtcaaaaccgcccgggtaccataaggacccctccaaaatcccgagcctattgaaggggtattttcctttgaagatgccgcccgatcacattcccgagcctactgaaggggtgtttttcctttgaagttgccgcccgc

SEQ ID NO: 20383 - DNA, 1461 bp, Heterodera glycines
caatcacaggtcaatcccgtcatatgaaaatcaacctttgtcgccgtcgcatccgcaagatcccctgctgcaattttctcaaacgcataattcgcatccagaccaaactcaccaagcggaacagcaaaatttgccttctcagttttcaacaaatgaaagctccccaaaacaaccgattcaacctcaacagaatatcccattgcaacaaacgcctccgtctcctccgcctacacaacagtccattaaaccagggacaattccagccgaacaaaacgacaaccgagaacctgtatcatctgtggattcagctactacaacatcacaattggataagacaacacagccgattgagatggcggttgctggtcatgacaacgcggaaggaacgaacaaaaaatctgaagaggcactgcaagcggaaaaaagagatgaccttcagcaaataaatgtcaccgaatcgcgcagtcagccgcaagaaaagcaattgcccatttcccgggacgctgtgcccgcgcagcaatcgattgggaccggaactccgagtgaacagtcaattacatcgcaacagagagaaacaacccccgacgaaagggagcaaaaaagtgcacaaatagtgagagaaggagttttggacgaaacccaaaaaaggaatgagttggaaaggggaaaaagcagcgaagtggcagaacagcaacaaaatgagcaggtaaaaaaatctatgacactgatctcatgtcattccttgaaactagagtgccacgggaccgggaatttttgccaaaaccgggaccgggacctgagaagtcgggaccgggacttcgatttttttttcgggaccgggaccgcaagaaaaaccgggacctcggatgaccgggaattcccggcccggtcccgtggcactctacttgaaacaaataaccgatattgcactcaaattgtcatccacgaaataataaaaaaacaatgtatatattataacagtgtggcatgtttttttttcaaaataaggacaaacgaggctaaaactaagatttggaccccaaaaataagattttctaaaactaatagtagcgcgagggaaacgcaataaaaccatgaaaaatcgacttaaaacaatattttattagcgcaaaaacaattgaaattgattatcaaaagtatttttcccatccgccgatttcctccaacaatttgtgattggaaatgagcatttggtacatttgtgggcaagaaagatcaaaattggctttgaaaaatattgaaatgaattttaaaaattaataaaaatgttttttgcggcgctctttttccaaaaaaaaattgacagttaatgttaaagtttaaggcttgttagtgcctattttccatttttatagcctattttttggggtagggtcgtttggcgccaagccaaaaattaaaaagtaaaatggaataaatttcaaaattttacaaaaaaaa

SEQ ID NO: 20384 - DNA, 1981 bp, Heterodera glycines
aaaaaggcgaatgcccttattcgagatgcatccgatgagctcttttgtgccttgtcgaaatctgcctaaacattctaaagggccgagtccctttgcgtccccggcatttgaataagctgaaagctcatgcacaggtgcttcgtcgtctcgtccgcacacgctgctcgcgctctgccaaaaaggttttgctacaacacggagatggcctcccagctattgtggggctcattgcgtcaattgctctcccgcttattgctgatgtcattgaaaaatataaatagtttccaaaaaattaaaaacaagaaaaaatgcagcatacaaagcgctatttgctagtccccgaagagatttatcagagtttggcagcaccgccaccatctgacggaacaccaattgggctggtccgtacccgaattaaacaaataaaaaatgatgacgccataaatgaggcggaaagggcagtcaaatatgagcaggaagttaagcgtctcaacaagctcacaaaggacgaagatgaacgtcccgtgggtgttaaattagaaaatttgagtgatgtggttgacgccatgccaaaaccagtcaacgttacaaggccaattgttgtttctacgcgtcgccatctcaaggttgggcgtgcgcgaaaagaaaatgttgaacaattagaagatactgatgatgatgatgattatcaaaacccacggtcgtcaagtgcaaataaacgacaacccacacaaacggaaatcttaaaattaatttataaaaacgcccaatctctaggggtgtcggaggaagggcaagttttgagagccggtgggcgtccatttataaccagcagtgttgatgacattgttagtcacctgttgaacaaggacaagcgtggccaaaataaagagccaacggcattcaaagaatttgttgaaagggcaaggcagaatccgctcttgagtaggcatttatttcccgaaggccaatccggcaaaggaatttataaaaacaccccacttaagtttaagccatcattatggatttgaaaaagcttcgtttgctcgagtttttgtacaaggacctaagttcgcctgtcgcattcacgagcgttgaaccgctgctgagagaggcgcggaaaagtcaaccaaaaatcaatcgaaacgatgtccaaaattatttgaccagccaacgtacatacacactgcatcgccaggcgaagcggcgctaccgccgattgccaacattggcgcccggcttgcatactgaatggcaggccgatttagctatttttgaccgacttggtaaacaaaatcgtggcttcaagtacttattagtctgtattgatacccttagtcgacaggtgtttgttgagcccgtaaagaccaagacgagcgctaacatgatcattgcctttgatcgtatattcaaaagatcaaaatatatcccgtggaaggtgttaacagatcagggaaaggaattcactgcccgggcagtacagcagttcttccgcacaaaagacgttgaacacttttgtatgctcatttctccccaatttcatgccggaatggcagaacgtgcgaatcgtagcatcaaagagcgcctttaccgctacttcacggagcgcaacacgtacaaatggattgatgttgtgcaagacattgtttgcgcaattaaccactcgacaaattcgagcattggaatgcgcccagtagacgtgaactttaaaaacgcagaagcattgcgacaaaaattacatgatgcagctgaaaatgttgtacgacgcaagccaaaataccgtgtgggagatcgcgtgcgcattgaaaagtacaagcacgtgttccaaaagggttacctcccacgcttcaccaatgaacctttcacggtggcagaggtacactctgagcgttcgccagttgtttatcggttacgtgatgacaataatgaaattattagtggttggttctatagaagggatttatgcaaaacgctagaagac

SEQ ID NO: 20385 - DNA, 2533 bp, Heterodera glycines
  unsure (1)..(2533): unsure at all n locations
aatacacctatttaattgttttcaaatgggtccccttcgcttacgaccataccacgtgaaaagcacgccatcccggtccgatctggcaagttaagcaacgttgggccttcttagtacttggaacggagacgtnctgggaatcgaaggtgttgtaagcttttttcttcttttttcatttttatattgtaaagaaaaagctttttatttttttttgttaaaatttatctgcttaacattataaattaaggctaaaaaattaaaatttgaattaaacaacgaatattatctctccatttttcgagtttttgaaccggttcaaaaaccagtttttttttgttaaagagttttgggtgacgccgccgggaaaatttaggaattttttaagagattttcacataaaaataccaattcaatcatacattgtcgaatggtggaatgggaaaaccaagtatggtgaccaattttgttctttcgtaatttaaaggacacctgattgtaggatttattcaaattatgtacattaaatttttaaataaattccgactgcgtctgtcataattgccttacacatcaataaattttaatgaaaatatttacaatcacaaattcattcattgaaacaataatttttaattaaatgaattaagttcacaaagtttaactctgatgtttgtttgctaaccaacagaacattttaatccagtaatttcttcaatccacgcgccatccaaaagtgaataaatgcttgaatgacctaaaaatgaatttacaaacacataaactttgctaattataaaatttaaatttaataaaaatttacaacataattttatttgagggactgaaattacaatattaattaatatgcttaaaaaatagaatagaatattttgtgagattaattgaactcaatcagacaactttttaaaataaaaatggctaatgaaaatttacttaataaataaattagtggaatccattctttcattaataattcacttatttttggaccgaatttttgatttttaaagtcttatcagatttgaaaattcatcagcatttacccctttttgcccaccaatcgcataagccagccgaaagcactccaacttgaacaaagtgtgtgccattgctggccaacagagctccgccgctatcaccctaaatttggatttttcggtttttactaaaaaatgatttttttatttgaatttttgctattatacttttaagtaaatttatttttttaaatttttatcttttgcgctgcagcgcccttgacacaaatattgttcgaatgtctanaggcagaatggcactctgctagctgaacgaatcggcccataagcattgttgcgccatgtcctttctctntgcaatcatcttaatgacaataattaattcattagagcattaaggtttcttcgacttttaaaaaaattaaaaagataaacatttttacaattaataattaataaacatttcatttctgattttttgggttttaaccttcttcttgtccccatcccgaaacaaatgcttttccggcacggaaatcatttgcgtctccacaatggatgcatacgggataaattggcccactgaggacgcaattaagctaaaaagtaatcataaattattaaattttatggactatagttgtttattgtatagaatgaagtagtctgtatttccggccccaatccaagttttttgacattacattttttagttgttattggtattatatttaaatttaaaattttttacctatgattgtatcttaattgctttgcaatattcaaccgaatttaaaaagtattaacccgaacccaatcattgttttttgccaccttaattatggcctggtcgtattgcgcatgtccaatccgttttgggtcgggcctatagcttggatgaatgaacacattgaaattgtttcttcgttgatgggctgttgaaagagcgccattagcattattgaacatgtcatctgcggagctcgaattatagcctaaaattaatgttcgtaggcatttttacatttttggctataaaaattgcgatgtgactgaacaaattcatgggcgacatttttaaaaaaaaattaattttaatcaaataaaaagaaaaaaaggatttaaaatatctaaaaacttaaggcgtttcggtcttttgtcgaagttgaaatattgtttaagcttctcatagttcaatattctccaattttttttttaatacacctatttaattgttttcaaatgggtcccctttgcttacgaccataccacgttgaaagcacgccatcccgtccgatctggcaagttaagcaacgtttggccttcttagtacttggaacggagacgtcctgggaatcgaaggtgttgtaagcttttttcttcttttttcatttttataataaaaattttataattattttatattttacagactttttttatttaatattttcatatgatagaaatatgtatttttagttttaattaatttttacagttgggcaaagggtttg

SEQ ID NO: 20386 - DNA, 2465 bp, Heterodera glycines
atggaaactggcaaaaggaaagttcatgctagcgacatatttgtgcgaaggtaaaaatgaaaataattttaaattttgtgaaataaaatttttaagacgactgagaccgactgttccataaccaacagaaagttgcgcgcttgggagatgaccgttgggagggaggggggtgtggggatgagccggctgaaacatattagagggtgatgacaggcacaagaaagaccatattgttcattttttgccgtttacttaactcgaactgaaatgttagagaaatgggcggccaaagtaaaataattaaatttaattatttttagtgattatcattttagcacttttcgccttatccgttcgacacaacttcgtcgttttcgccattcgttctgcgtgaatcgttcgatttgctgaagcagcaagaaaagtgcataacgtcatggccgatcggattctgcgccacggcaatgtagagatgcagttgtgcaaactgctctcgcatcgttaaaacggactatttcgtcatcgtcatcatcatcggcatccccaccacctgaggaatcattgcccgcagcatcgtcgccaccatcaaaaaagcggaaattattgtccacttcggtaccaaaaggcttatcggaagtggacagaggtactgtaatgcttatttattattattatttataataaacatttgttcattttttaaagattgttcatatagatgccgcctctttgacaattgccgcattcaggcagatgaaacagctgctttccgaatggagatgggagaacgattggatcagaaatggacttcgctggtggaaaaagagcgacaaagggcacagcggatcgcaacacaaagttctgcggtgattggtcagctgatggaggcaaaggtaacgaagagaaagaaaataaaaaagagggggaggaggagaaaaaaataattaaaagcggtcattgtcgatgtgtttgagtaagggtccagttacgtatggggttacgaaatgtggtcactttttttgctgtccccaatgctcagtcccgataattgccagtgatgaacccaaatgtttgatttgttcgagaatgtcacccaattggaatatttaggatcttaataaacaaatgaaaaatttcagatttaaaaattttgaaatatgatcccaaaaaaccattgatctcagatatacccaaatgcttatgtatgcttcaaaacttttcgctttgtaatgcgaaataatctttaataaattaacaccaaattcatttttatagtacccaaatctttgaatcaatatatttttattcaaattcaatgtatttgatttcgctaaccttttattttaattttcaccttctgtttgctattcaaatgtataacaattaatcaaatattgtttaataacttcattaatttaacactaatattgctctacacggtttaattatttcaattaaaaggatgttagaaaagtatatggatatgggggggggggcgtacaaaggatatgcgagaaaaagtggtagcaaaattatgtaaaaaatttattttgaaaaattaaagtgtttgtaatataaaaaaaaaaatgtgaacaatcaaatttaaatttgaaattcaaaaaaaatttatcttttaaagaaaaaatttccataatacatctcttctttgtacatcctcgatgccattttttgtttgttcgttctggtacgtgtctgaaaatgaataaatgttatttttaaaattatatttttaattaaactctagattttattaagctttatttttaatggagtgcatgagcactctacctttttttaattttttttaatttaggagtgcgtgagcactctagtagtgacccgtgtacttttgttacaatttttggcgctaaattcaaatttgaattttcgcgtcgatactcggtgggtggagggacgcttgctggggacgtggattgtgccatagggagaggagggattgtaaatcaattaaattgagtaaagacagaaacgggtttattcctcggcatataaaaatattaacatttaattaattaaatttttatttagcattagaatgattatgttttttcactttgtcctcttcattgtctactcggcaaaaacgcattgtgtcaaacaggtttatacattttgtattaaaatatgcaaaaagggggtgtgataaagaaaattaaatatggatttgttttactgaccctgtctaaatcgggtttcccttttcaagatggacctgaacacactgcgcatggacatgatggaattggccagcagtgccggggacgagggcaccgtcggcaaagccaacgcactattggaacgtgcgggcgacaaattggacctgtccatggagcacatcgtaatattaaagcgccgggtaccgctcaacaaccacgtgcaaagggtcattactgactgaccttaaattggctttttggcccttt

SEQ ID NO: 20387 - DNA, 1723 bp, Heterodera glycines
  unsure (1)..(1723): unsure at all n locations
gggtgcgttgtcctcctccaggggcgccaaccatttggtgcagctgtgcctgaggtgaacgtaaagacgaggcgccgctgcgagtggttgtgaccggcgaattgtcagatcacatggcaccacttccgggcgtcccgggggttcggaattgctgatgatgggacggcaaatgcatctcagtgggcaggggatgggcagggttttgtgcagcaaccgccatctgggactggtgctgtgtgatattgtgtcatctaaaaagtaaataatttctcaagctcttaatcaatgctttacaaattcaaaacatcgccaggcttgggctaaatctatcaagaaaacaatcctattttatattttcgacacctacaaacccttcttttcatatgttattttttttaattttaataggtcttcttttggctgtgagcaaaaatcgttcgggtaaaaaagtgaaacacaaggtcttttggtgtcgatcatttttacattttgctgttgcggcgatgtgccccacatgcccggcggggacatgtaatgcatggcagactgcacggcacccaaatgcggatattgttgcggtgacggttgtggaggcgtgctttgttgattagcgtaatgtccaccgagtgaattgccatgcggaggcgaattgaacatgttggattggttactttgttgcgattgattgtggttggcataatgctgctgctgatggtactacaatcggacaaactcacaaaatacaatgattggaggatgttcacctgtgccacgtgctgttggtaattctgttgcggtgctccgatgagtgccggcgaagtgagcggcaccattccctgctgttgcatggccatttgcctttgctggaagaacatctgctgctgttgtcgttgctgaatttgcaccagcgctgcttcctgctgcactcgcaactgtttctgctgctgttctcgttccttctcctccttacaatttgcaaaataattaacaaccatttaaatacctaaaaccgcctaccttttgttgctgctttttcgaaattcgtttccgcttttttggaggttcttccgcttcggttgcatggtggttcgctttcgctgagatcgtggcagccgattgctgctgctgcgtttgcattgcgtacggcggaggcattccacaggcggaagccattggcatcccatgaggagaagcagagggaccaccactgggcgtcccatggggtctgatctgctgatgcgccaattgcgattgcagcataaacgaagggtggggaggctgataagcggcaccgacaattgctgactgatgaggattcatttgtccagaaattgccgaagttccgccaggcccgaaaataaatgcattttgttgctgctgctgttgttggatttgttgaaccctttgctgatttatttgttgttggtacaaatgctaaaagagaaagtaacagcaaaatgcaaatggagaccgaacacctgttggtactgccgttgttgcggtgttaaaaccggttgactagacgactgttgcagcggagcattgcccacaattctttgctgagttggcagtgagttttgttgngctgagaccgaattctgttggttctgagactgatcncggtgggacgttgctgctgaacataatgggaaatagaaaataatcatttacatcataccaacctcaanncagtcacgagcagcggactgttttccgcacgcta

SEQ ID NO: 20388 - DNA, 1045 bp, Heterodera glycines
atgtgatgattggccaatggtgatttaagaaatgtgtaaggttggctgatctcagcgtctggccctgagttgttttggttgtccaaattgtgtcccggtatgaataaacagaccttgatctctacttccagatggtattatagatggtcggttgttctgggctgaagggcaaggctgcgactggtggttcgtgtggtggttatctgactctgtttgtccgtagctgctcaaatggcgactgttgttgcagttactgctttctgatgttgttactgatgttcttttgtcgagccaattgttgttgcctttcactgtctcatcgggcaaatgttggacaaaatgggcggaatgtgtcgggaagggactgtgggggaaatggttgttcacttccaaattcacaagcgaagaaggtctgcagaagaaaaactaaaagattcttattgttttaggcgattttatgaaaaacacgtatgagataataaaaataactgtatgggttgtgggacccctgtatgttagcaatatgcaattggaccaacaaaggaattataggacactgccaattatttgttgtttttttggaaaacgaaccttgctgcgaaatgcaccctctgggccatccttctcagaattgactgtcaatggccccggtgttgcttgtctgttatttgttgtccctgccctcgtgcttttgctctcacttgtctcacaacctccaacaaatttctgaacagctttgtgtctgttgttatttgtgcgatgttgttgttgcgaaaaaaaatgttgtttttgctggagctgtttttgctgatccgctgaggaggtgttaaaagctccgctcatgcggcattcagtcgatttttctgagtgccgtttacgtttgtactgttttaatgtgtcgttgaatgcttttttgaaggttaatcgaaaaaggcaaataatgggactttatttcacctctcagaaaatttaatcgctataaagtaacaacagcagtagttgccagagagcacaaatttgtttaaagctaacagctggaccacat

SEQ ID NO: 20389 - DNA, 780 bp, Heterodera glycines
cgtgccatcaatcatcattcatttcgataaacaccttcactttgctgggcattaatgagtttgaaatctatcagggaaacagcactgacactttgcactcaaattatgtgtacaagtgagtgattgggcgggaattggttgtactgctcgagaatgggcatcttcttgacgagactctcgagctttgagaaaaacaaattagtggaaacaagggatttagaacaaatgaatggctttattgaattaaagagtccaaaacgggtgcaattttcttaatggtcagaacattactgctgctggcaaaaccttttcaattttcagatattctttgccatttgaacgtgtccatgacaaagtgagaagaatgggctgtggagggcgggggcagtgccgaaatgtgaaacaattcttaaacacgttttaggttggctggaccatatttttccaacggcattggcaccattccatcacgggtccgttcacttttttgcactcacatcacgcatttaattaggctccctattcttgacgccattgttttgtcttgccccattttatgatagactattctcggtctcccacttggctcttctctcacatttcaatctcgatatctattctcgactctcgagcagtttcatttatgttcctcctcagtttccgtcctttactacgtatttgttccgccttgtccagcatctgatgcgcgatcggcctcccttttctttgcgttctccgcttcttctttggaacgcgtcgttggcactgttcagctttgtc

SEQ ID NO: 20390 - DNA, 1398 bp, Heterodera glycines
cgcttattttcctgcactattaccatcatgtggctgtgctcgtttacacggtccattcgggtgggattttatttatctgattaatttataaaggttttttaattttgaggcactgaacacactgcgccaggtcaagcgttcatttcgtaagtgaataaaattaattggttaattaattaattaatggatgggaaaattaggatagaaaatggaagagaagtcatttagtgaaaatgcattgagatgttggcatttagcaattcaaattataataggaacatctaaaactgattttcaaattcaaaagtgggaaaaagggctgaccaaatacggaatttcacataatccgagggataccattccatacgggatacggtaaaacggaaagtatccagccaaggttctgatcagttacgatgagatagatctcttctgtcccatcatgtctttgtcggggtctccctctctctcgctctctcctctctctctctcctctctctctctctctctctctctctctcctctctctcctctctctctctctctctctctcctctctctcttctctctctcttgctctctcttgctctctcactctctttcgctcgcgctctttctctctctttttttcgtgttttcttcatttttttcccacaccttcacttttttcttttttttataccaacttttttctctttctcccccacccctcccctcgcactctcaatttttttctttctatgttttatctctttctttctcctttcctcctacctctttcattatcaatattttcccatttttaatcattttctctttccctgtccctctcgctctctatgttttctctctctctctatgtttttctcctttttcttccttcttctccattttatagctctttttttaaccaacttctttcctatctcctctttctctccctctccctctcccctcgctttctcaatttatttatttctatctttatctctttttctttcctttctttatcaccttatcttttcccaccatttttttctctcccctgttttttcctttcttttgttgccaaaaagtcgcggtgcctcttctcacgaagcacgcattagttttcctattaacacgctagctaattagtaggggaattagagactgaaaatttcccgagaccgatacgcaaaaaaacccgagacctttatcgagtcgagaccgtgactctcgaacatcactactaattagcatttcaaattattggaaacaaaaaaaaaacacttcctccccctttttttggcatttacatagttgcctttcgcactttcaatgtttgaaaagcgtgtgtgccagccatatttacctccccgttgcccaacagttacacatatttttccccctcgagcg

SEQ ID NO: 20391 - DNA, 2188 bp, Heterodera glycines
  unsure (1)..(2188): unsure at all n locations
cgagaccgaaacggtataccgaaaatttttcttcggctttttcggttttttaaccgaaaccgaccgaccgacaaatttttgagtttttcggtttttttcggtttgggtttttttcggtttttataccgaaaccgaccgaccgaccctcttgtccggtctctacttatatccaggcaacgtttcgtcggcgacgttacggtgacgaaatgacagcggcgacaacgttttggtgtgtacccgtttttttggggcacatattttatttcctaaaatagagcccccggggctttatttttcaaaaaaaacctatttataagcattttccgaatcatagcttggaatattcccttgtaagaagtggaacgaattgcttgttctcttataactgaaatttatttttctctaatcatagttggaatatcgatttgtttttgactcgttcttttttcaatatcctcgccattctaagagtttaggccccatacacaaatttttttaaatttcagaataaaagaagtcaactataggttttcagcagcatccgtttcgactcatttcgaacccctaatcctagttcgaacaaaaagtcaaaatttcattttaaacgaaattcatatttattgcccaaatcaattcgaatgcaccaaattcatagcgaatgaaaaggaaaattcgtaatactgccgatgcccccccccctttttgaaaaaagttttttctgttctaaaaagtcgtgaaaacacgttttatggggtttttagggccgctgatcacgaatctgacattcattttgaccaatttcgaatcccggacccgaattcgaacaaaaatcgaaaattcaaaatttttgaaattcttacttttggtcctaaattgatctaaataagctaaatttagtcaaaaaccattgaaacatcaaaaatggtcattgtgtacaggcacgaacataaaagtaaattttgaattttcgatttttgtaccggaaaattgttcgaattcgggttagggttcgaaatgggccgaaacggatcttgattcgtgatcagcgacagtacagaaattttggaattctaataatatttcacgagtcttanaaatatgtttcttggcgatttaagaaacttctgaagaattacaaatatgacaacgatttagttattccgatcacccaccgtacccggtttcgaacaaaccgtaccatctgaactattaacatatatttttaaacaaatggaaaatttgagtctgccgatgccgataggctgataatattaaacattttacagatcaaatacaaattttcatctgctttcaatactttctctcataataatatggcatcgtcttcaaatttgagtccgtccgaagaattgcgtcttcttcgggacagaagcaaagaattggagcaaatgaaaaaggacgggcaaagtgagggaaattgtgccaattcagtcgctgaacagcaaaaggaaatgaaggtggacggaacacaaaacattaattaatgaaaaatgacatatttttattatttcaggaattgcgtaaaaaatttgccaaaatggaaatgcgggaagcaaaacatttgagcaagattgatgaacttgagaaggtgggcttttgcttttgaaacttagcgaatttttagtagcatcaatgttccgggcttgctataatgagataatagcaaaattgaatttgtttattaaagaagagttattaaagtaattcaatattttattttaagatttttgagtgacgtcagagcatcaaaaaacagccaaatttcattattaaaatttttcagataacccatgaagccgagtcggagcagcagaagctgatcgccgatcgaaacgttttgcaggcgaagatggccaaaatggagaagaagcgaaaagaagaaaaggaaaaatacagtaagcgaattgcgagtgaatggttactgtggtttttccattaaattatcgtaattttaataatccctccccctttttaagcagctgcctttgctcaaatcatgcagttacaagcggaaaaaaacaatctccaggacaaaattagcaaaatgaagaagcaacagcatcaacgggtaaattatattaatgaatgaaatatgtgaaagggaggcgaacttaatgagaaacagataaaaagaatagttttttaggtacttccgggttttcatcgc

SEQ ID NO: 20392 - DNA, 2416 bp, Heterodera glycines
  unsure (1)..(2416): unsure at all n locations
ccgacatttgcggaccgacttctgcggaccgacatttgcggaccgacatttgcggaccgacatttgcggaccgacttttgcggaccgacatttgcggaccgacatttgcggaccgacttttgcggaccgacatttgcggaccaacttttgcggaccgacatttgcggaccgacttttgcggaccgacatttgcggaccgacatttgcggaccgacatttgcggaccaacttttgcggaccgacatttgcggaccgacatttgcggaccgacatttgcggaccgacatttgcggaccgacatttgcggaccgacatttgcggaccgacttttgcggaccgacatttgcggaccgacttttgcggaccgacatttgcggaccgacttttgcggaccgacttttgcggaccgacttttgcggaccgacatttgcggaccgacatttgcggaccgacatttgcggaccgacatttgcggaccgacatttgcggaccgacatttgcggaccgacatttgcggaccgacatttgcggaccgacatttgcggaccgacatttgcggaccgacatttgcggaccgacatttgcggaccgacatttgcggaccgacatttgcggaccgacttttgcggaccgacatttgcggaccgacttttggggtcataatttctggatttaattttcaaaaaaaaaattttttcttaaattggatgatcatctgaatattgaattttatatgtgattttgcggagttaagcaagttaatgcgaatgaaaatatgaaaaacgacatttgcggaccgacttttgcggaccgacatttgcggaccgacattttgcgaccgacatttgcggaccgacttttgcggaccgacatttgcggaccgacttttgcggaccgacttttgcggaccgacatttgaatattgaattttatatgtgatttttcggagttaagcaagttaatgcgaatgaaaatatgaaaaatttataaagtttttccaaaaagttcttttttcaggggtgaataatgatgggtcggtgttcagctgtgtggacggctgaaaatgttcctaatttcatggaaatgtacggtaactaagactgtcgggaactcagcgcccaaaaggattaatgcgcaacaaatcatacggtaggagacatgtctggtcatgatgatgtacggtaatgcttggtacccatgtggtagtgttgtgcacgatgactaatttctgacaaaatgggtttttaattccgaatctgtcccatagatggtcagaaattaaaaaatctaaattttttaaggataagtttttgggaaaatgcttatatgcgcgttaaataggagctttctctgctcattcccagccgattggtggcggctgttactctaaaaaacgaccaaaataaaaactttattatacatattttaaaattcatttcattataataaacagggctgtcaaaaatatgcaaatacatattttttcatggattctacgtagtctaattagtacgaaaaacaccttctttttggtattgcgtataaaagtcgggacttttttttgtcgcatattttggggttttctgcatattncatgtgcatatttgcccatttnttgtacatattttcagattttttgcatatttaccatttttcgttaaacattttccgattgnaatatccccaagtaaaaaaaaattatttatactttaaattaaatccaaatctgaatggatgcgcgagtgggtaaatagtgaacttcctgtcgaaaatcttgacaaatttgattgcaaaaacaacgggcaaaatttattggaataaaatttttaattaatttgcacccctaaagttttttgtgcatatttggtgtatatttcacgactttatttgcatacgtaatgcaaaaaaaggccttttatgcagacagctcatagacggccaataaaacgttggccgtaaaaaacaaaatccccaatgtttaaaaaaaatttttttttcaattctagagaaatgaataaattaagatttaaaatttacgcattgtgggttgttgaaatcttaaatttaaattgctctaaaagctcaaaagccgtgttggagtgaaagtccgaccttgaacctaaatatttatctcatcaacaaattttaatttgatttaatttttcgaattcattcggaacattttctttaaaatacacagctattactacattacaactaagaattggtccctactcaaacattcttttcaatttgggtcgtgttttcattttcttacgtcatttctcttttcacgaggccattgatggcgaacacccgacgcatgtgaattctgaatattttttttaatgaaggttaattaaagggtgccgagcccttataaaaaaagccatcaaaaaagtgcgttattaaaaaa

SEQ ID NO: 20393 - DNA, 774 bp, Heterodera glycines
ttttttgtttgcttacctatgcattgttcatttataaaagttagaattttcaaaaaaaaatttggaaatttccaaaaatttacagttttttcgctaccctacccgctccatgtgctgctcagtgaagcgttcattgtcctcttgtttggcccgattgaggcattccgaatttcttcgggttgttttattggaggggtagcggaataatttggcgactgaaatttgcaaaaaaattttaaaaaatggaaaaaccgaaaattcgaaaaatatttaaaaccaataagcgttggaatattttcagggtaagggagtatcccaattaaatttggagtggttctgatcatttttattaagtttatttggcaataaatttttaataaaattgtaattttaaaaaatagaaaaataaatttgaaactttttaaaaaaataatcagcaaaatttctcgataaaataatatcaaaaataaaataatcttacatataaaataaaacaaattttgtgttcaattttccttgccccttaaaggttaagtaaaatccataaccaaccgggaataaaatctttttcgaaattttaaaaaccttggaatttgttctaaattcaatttttctaattcttagcccaatttttgaaaaattatcgaaaaactagcattttaaaaagaaaattgtttaagctcgcactggaaatttgactgaaacatcgtcagaactcttcttctctcttctgctaggcattgtcgcggttggcaaaaaaaaaatttatttttt

SEQ ID NO: 20394 - DNA, 2079 bp, Heterodera glycines
  unsure (1)..(2079): unsure at all n locations
tgccgcggtggcaaaaaaaaatttttttttctaatcaaactttgttaccctgatttacgataaaaaaaagtcattccgctcattgccgattnttcaaaaaaaaaaaaaatgtcgcctcgaactgaaagtccgtttggatttacaagtttccaaatatgggttatccgagccttttttcaaaaatcatgaaccccgtctagccctaaatttaatccgttttcacaggcggccatttgtgcttatttggcactgctccaaacgtacgttgcttttgttgaacaaattggggccggcatcgaatttgtgctggtgacattggaagcactgctccaactgttcacaatgatcactttttccacgaaccgatcaactgcttctgctgctgtccaagcgcataattcatagtgccgccatttctcaagtccaagaatttctctgggtcgaaaatttttttgcatcgaagatttacatggattgaaaattttcagggactcgaaaaccatgagcccaaaacccaagactgaaaatttcctaaaactcaagacaacagagaactctaacttacgcaaacattccctgatcgagaattttataggactcaaaaacggacttttttagacgaaaaccctaaaccccaaagatagcagagcactctaacttcaaggcctgctgagcccgagtctttgccagcaggaggaaacagaccgagcaacacttaatccacaaaatctcgaaactaaaattttctagacccgagactgatgagatctcataatattgatgttcccaaaacaaacaaaaaccaatataaaatcttttttttcattaaaaatgatatataatggcatcgtgaaagtgttcaattgtgaataataaatgttccttttaattttgctaaaattaaaacaattcttttgctaattacctataaaaatgcttaaaatagctaaagttttctctttcgaatggtatatgcaaattaatcttaactacatatttgatgatgacaatttaaaaaaaaatcagcatagaaatttttttttgctatgacagagcttattcaataccctaatacatcagaggtaaaaaatatacaaaagtatattcgctataaaaaatatatacaaagtgtatatatgaaatatattcgctataaaaaaggtatacaaaaatgtatatacgaaattatattcgcaaaaatgtatatacaaaattatattcactatataaaatgtatacagatgtaaaaataatattccctattcagtgaatatgctcatagctcataggtagtagcattggatgaaagtgcataagcacttgtaaatttttattatccaatgtctatgtcacattttctattcatatgactaaatgccacatcttcttgtttgattttattaataaaataattttttgtgattatataaaataataattgtaaaacttataaagtgcatatgcactttcttatccaagcttttccctttttggaaagtgcaagtaatgacgcgcggcgtttattaagcataataaaaatgccaacatggaaaaatggcacataaatacacagctgaatggtgccttacaatcaccacattcccccaaaaatggcaatgaattttttttattttcctaaaagattttttttttttgcttttatggcagaatttttaattttaaaaattttctcccttatttattaggggtggttttgaaacagtgagttttataggtgcaggcaccaagaaccggcatttcctatagtaatttcgaatttgtaaattatagagcacggaaaaagtcaaaaaatcgcgccaaattcataaaaaaagtcttttttcccgtacatattttttttaatcattttgacagtaagcccgccaattaagaggtttcgtctgaaatctgttccaattatgcaataatattttttgcgcgccattatggtttacaaaacaggaaagtacctaaaaacttaaattttaattttatttttttgtaagattttactgacaacagtgatcgaaaatgtaatttaaaatattttaaaaattcaggtactaactagcctgaatc

SEQ ID NO: 20395 - DNA, 2165 bp, Heterodera glycines
  unsure (1)..(2165): unsure at all n locations
accattctttaacattaaatgaaaaaaacttttaaacattattaaagacacttcattaaataccactaaaaatccttcttaanaattaaaaaaaaaattaaacattaattatagttatttaataaataaaataaattcattttacatttaatgtcaatttaggaatttcatactaatttttcgaggaatttggtaccgcgggaggagggctggctattcattacatatttaatgcctgtctattctcaatttctagattgacgctgatcagttggagcagttcctggactggcccgagaaccgttattggaagtcattgatccatcttccggcaacggtggcggaggaccgacaaaatcaaagtgtaagcagtgccaatgcaaatgccaatgccgttgtgaacagcttctacttcaccacgggttaccatggacagcgtttgcgcaaatgggccgagtaagtgctataggatcaatgatcattgatcactgatctcaagcacattgcgacatccaatcaacaaacagtttcatttacatgagtgcactaatcgtttctcaaccgcctcccctccaaaaattttccaaaagaaaatttcaagaaaatttttcgaaaattcttgaaaaatgtttcagtatttttttgaatttttttttgcaaaaaattactagttcatcatactattgaaaaaccgctagcaaaaagttttcaaaacaaatttttttttaaattttttcttggtttttttctaagattttttcctaaaatttctataaaaaactaagttttactggggaacggcggtggcaagatttttttctttaaaagaatttaggtaatctgctcattttctaagattgattttgatttttttgcttcttattgttagcacaaatgaaatgttgtgggcctttttgtccttgaatttttgggcctgaattgaccctcccgaatttttttttttttgactgttttaaattatcagacgcacccatttgctaatggactggcgttctgttgtggaccgttacgctgatctgaacgcctccgtgttccatgacgagtccattttcctcgacctgatcgacaatatgccaaccgacgcgtggcaatccgggctggccacactgttgtgcatgtacgtgtacagactgagagacttagaaatttaaaaaattgaatttttttatgaaaagccctaaaaatttccggcaaaaatggctaactgaaatggaaaaaaccgtaattttatttattttcattttgttaaattctctgagaaaaaatatatagaaatttaacaatcattgggcacgaaaccaatgattttgttgcctaggtgcttcatttgtgccgtgttcatgggccacgattggcgcaccgtcctcatggccggcaccacaattgggtcgatcattgtcggcacgcttggcacactgagttggattggtgccacaatggacccgatcatgatggtgcgtttaacatagaacaaaatattttagacagacgccaatcagacgccttctgatcactattttttattgtttctcaaaggagcaaccgctgatcaagggtcccgagcacttttttttagatataataagaggaccaattgggctctcgataaaagcatgtatcacttaaatcttcttctataaatatctccgatcaccaaaccaagagcttctccgtttcagtccgatcaatttgaccaacggcactgatcaaactttattgacttgaaaataggactcaataaaattcctattattcattgtgtttattaattgttttttttccaggccgctcttatcatttcgattggcttcagtgtcgacattccggcacatttttcttatcattttcacagtgcaggtcggttggcatttggccgattcttatgataatgaatgcaatcagcttttttccatttttgatcaatcattcgatacattctttataaatttaactctttccatttcttattcatctgatcactttcatttttcagtatttttgatcaaatttttatccattctttataattttagcctgtaattttccatttaactgatcattttcccatgttctgatcaatttaattacagaacatgaattttatatgataaaatctgagccaccccctttttttatctatagat

SEQ ID NO: 20396 - DNA, 1190 bp, Heterodera glycines
  unsure (1)..(1190): unsure at all n locations
ctgccaatttggcgatgtgtgcacgggtggtgtccacgcgtggtgcgcaaaccaccggatgccagaacgatacatcgaattggacgaaaacggcaacaaatttcggccacncaacancaacagcaccagcaacaacaacaccgtgtgccaccactgtccaccatgtgcaacaacgcgacgggcccaagcgccactgcggcgctgggcgcggacgggcgcaagcggcgtattccgtcccgggaacggttgtcccgcgcacgaacgggcgcaattgcgtcactgatggtcaacaccaactgttccatcatgcaaaatgcgatgactgttgaattggtgcacaataccaacaacaaacgatcaacgagggcgaagaaaaatgccgtcgatggaggcggtcaaaaaggggaggaaaaagctgatgatgatggcaacaaaatgccaaaaaatgatgatgatgatgagtggaaacagcgcaaaattgtgctgttgaatggcagtgccacctccacgttggcggagcagcgagacggtaccaagcgcattgctgctgttgatcagcaacagcccaagcgatcgatgatcatgttgggcgaaaatttgaacaaaatggcacaaaagtttgcccgacggcgctcctcactggacgagcaggacacgcgcaaacactcagacagcggtggcgagctgttcaaccgcagcgggctggtcaccaccacactgttgttggccacatcgaagagtttgtgcggtgaggaacagctacggcacgaggagtacaacggtgacaccaccatgtgcaacaacaacagtttctatcacggcattagacaaggggcggtgccgaaaaatgaaaatgttgccaaacggagtgcatcaacgacggggggtggagagcgtacgggctcattgcccatgtctacgtcattttcctcgtcagaggacagcgatttgactgcagagcattcccagtacagtgtacgaatgccgtgcaaattgccggtgaagaaatggcagaaggaaaagcaacaacggggaggacgaggacgaagacggcactccatgcatggcattccgtcaaaaggcagcaacagtgccgaacagcagaaaatggcaccggcggcaacgacagcggaagaggggaaaaggtgtggcaaaaaatgtggcgatgaggaggaggaggggcacaaaat

SEQ ID NO: 20397 - DNA, 3342 bp, Heterodera glycines
  unsure (1)..(3342): unsure at all n locations
gagaggatgaaggagttatggtggtggaaaaagttgccttcataggcaacacagnaacaacaacaacaacaacaacaccacattggggctgatgcaaccagcaacaacaataacaacaacaatacgtccgctgttgttgctcaacatcagcagcaacaacacaaccttgtgcaacaccagcaacatcatcagcagcagaaatatactgcacaacaccagcaacagcaacacatggaacagaatggtgaggaattttgccacccaaaaaatgggcatttgcccttctcctcccccaaataaaaattttatttttaaacgtttttttattttttgtaattttgattaaagacaatttgtacaaaggcgcagttaactcttgacccattaaatggccgatttttaatagaaataagtcgtaaatgaattttcggttcagcgtcagcaccaaacccggtcgttcccacctcgtttggcccatcggtagcgtccaactttggccaaatggcaccgccgctgagtgcgccgccgatcatctccgtcccatcacaaagccagcaacaacaacaacaacacatggtaatgatgatgcagcagcattatgctggtggagctggtggtgttgctgcaccgtcctccgctggaccatacagctccatgtcgtcgtcgtcgtcgtcttcaatgtcacaacaacagcaccagcaacaatacggggtcacttttcttaacaaatttgactaaatttccaaaaaactatgaagcttgttcgcaccgctggaccccccattttactacacatatttttttaaattgacttcaaaattgttcgagtctttgatgagagtgtctcgtaatgatgttgttgcacagatcatgatgagcaacaatcagctgttttatcaccaacaacagcagcaacaacaacagcctcagtaccatcaactgcagcgtccacagcccaacggggacccgtcctacaaggagacattggactgctgggaacagatcaagtcgggcgtggacactttgtacgttttatatggagtatctcgtccaccccccccccccgtatcattctagtgctgttcgagaccgaaaatttcccgagactcgagaccgagaccaaaaaaacccaagacttttctcgagtcgcgaaacagcattaatcgtttcctccaagaaaagtttttttttttaaatttaaacacttagaaaacatgctttgagataaaactataaataattttcagcatgtcgacgagtgatgcggatgctgttgagatggttggtttatcacatattccggggaaaattttaaaaacattttcgaaattattatttatttttgcctaatccaatgaatttaactttaaaaaacaattccaaattttgaaaaaattttcgagtgggaaatgaaatattttctattgtaataaatgcgattgtgaactgcttgtcaggctcgaattgtggaagacctgaagcgcagcgaggaggacaccgccgagttcagtcagcaacggtcacgcgttgatcaacagtcacaatcgcaacaacaacagcaacaacaccagagtcggcaaagcgggggtggtggtggtggtgccaccaactttttcacatttggccctgtgccagcagctgcttccacgtccgccggcaaatcgaatgccatcacaacgccaaaaaatgataataatgccaacgccagcagtacaaattgcttccaaccaccggcggcggcgacaacgtcggtggtggtggaggagcagggcacggtgggacaacaacggcaccagcagcagcagaggaaggcagttgaaaaggcggaggccgataccacgtaggtggacaagaatgattgggtgtggctggcactgtgcttaatgcccgaagaatttctcgagactgaatgctaattttccatcccccaaatttttttaaaaaactgaaatttttctaattttctgagaaattttttctaagaaaaaatcaaaaaaaaaaagaataatttctcacataatttatcttacagtagcaaacaatgttgggtcaaaaaaatgcggtattttttgttttgtcaggttctcaccaccttcccagtccgacgaggccacctcagtcgccgctgctgccaatcgtcgtcgaatgtccatgtcagtgatgcaacagcaacagccgcaacaacaacaacaattcgcacaacgcacatattccgtctcttcagcaaccgccggcggttcatcaaatatggcgagtggaggggagatacaattaattaattaattaattgactactctggtcactaattatgatagagtatggaattatcacgaaacactgattgtgagactttgagaaacgccttgggactaagacccagcgattgagggggaggggctgcacgaaattttcgcttgtcctttccgtttcgtccaatggcaaaattggagtccggcggtgccgttaggcgccatcaggaaattttttttagaaattttgtacagtcagggacacagttggcccgaatcgaaaatcattgattgattggctttgccaatcgtgtttgattttttgcgcctcttttacaggacgagcgtgtacaccaccaacttcaccacccttttggtgtccatgccggcggtgatggcacaatgttaatgagagtagcaggtgcaaatgtgggaagccagcagcagcagcaaatgccaatgccaatgttcaaccaccatcaccagcaacagcagcagcaactgtactcatatggcaacgtccaactcccgcatcacaaccatccgcaacatgttgggacgacgaattatcctccacctccgcccaataatattgctgttggtgatgatcaacatcatcatcatcttcctcatcacaacagatttcaccgtggtgctaaatttaaatcgattatcattaattgctaatgaagtgcgaccaattagttcggggatgcctaacaaggatttgtgcaaacgctctcaaaaatttcagaaatcggaattccaacggccaaataaattcggcaatcggaattctaatgacacaaaaatgccggaaatcggcattccgacacatccctggtgcctaaattattgtatggcactcaagacagaagattcccgtgacccagttggccatcgcccagttgtccctttctgttttacaattacccattttccggtcacgaattgtggcaccatttaaaaaagccattttttaacagttgctggtaatgaccatccgattgcttcgggtgcgcttccgatgccaccattctatcatcatcatcaccagcagcagcagcagcacccacaaccaatggcacaaca

SEQ ID NO: 20398 - DNA, 1589 bp, Heterodera glycines
gattattaaattttccaataaattgcgggaggggatcccgggatattaatcacgcaaatcctgcatttaaaatttgcgggatcgcctgcgggattgtgggattttggaaatttcgaaaaaattttccaataaattgcgggaggtaatcccaggagattagtcacgcaagtcctgcatttaaaacttgcgggatcgcctgcgggattgcgggattttggaaatttcgaaaaagcttttaaattaaatgaaaaattccaaaataaaagcctttgcactcatcaagagcatacgatgaatacgaatttctccatcaccaccaacacaaatattagacagtattacgaaccctagtaccgtacccgccgaatacagaaaatgtcaataatgcccttaactgtggactggaaaacagtcatcatttggctttgagtcaaagcagcacacaatgccaaatttgttaataaaattaattaaaattcaaattatatagataacagagatggaacccgtcagttgggccccagcatttttttttgactataacttttttttctatgtcaaccaaatccaactctattgttggtatcattcgaaaactctttacacgctctattagccttacaaaaaccgaaaaagatttaggatagtatataaaaaatttatgaagaaaaacttcaaaaatttcgactttttaaattttcatgtataacttttttggcaattgtttaaccgcgaagcaatagcatagaaccaagttctaaacatattaagctttcgaatgatacctaaaaatattcgatttggttgacaaagaaaaaagttaaagtccagaaacttgctggggcccaactgacatagacccaacagagattgaattgaaaagttacaagaggatcgagaccaagaaatgacatcataaaacagcaagaaatttcttgttctgaaaattctcgctcagcaggtcccctaattgattggccctaattgaagccataattttgattttcacttttttttttgcttctagctatgaaatgaaatcatttttttaacaaaggaaatgaaaaaagcaatataaaaaacagcaacaatttttaattcaattgaaaacaatgtttacggaggttttcgaaagaaaatggcttttgttgtgcttttttaattaaaaaatggaaggctttaaacatagaaacatttgaatggtaacaaatcattataaatttttgaaaaaaaaaaaattatttctcacttttgctctacagtgaaaaagcaaaaataacaaaaaaatttcattttaaatttcctctttttaattttgtttttattctagtgtttttaaaaatttaaaatgtcgacttcatcgaccctatttttggttgttgttgttttggcatctttgctgatctcggctaacagtgagttgttacatgcagcagagagttggaccagtaaaatcaggggtgtgatcgagaaattttcaaaatcagaacatcaagtccaaaaaatcagattttggggtccaaaatcagaacattttgctaaattgcttaaagatcagtttttttacaattcattctatcaaatatgta

SEQ ID NO: 20399 - DNA, 1021 bp, Heterodera glycines
ggggggactgccccgaaaacaaaaaaatcgattttttcaagtgtcgtttggggtactcaaacaattatgggagcaaaatccaacgcagattaaagtacaggctataggaagctattcggaaggattcggtctccccataaatctgggcgcatcggctcggggggactgccccgaaaacaaaaaaatcgattttttcaagtgtccgtttggggtactcaaacaattatggggagcaaaaatccaacgcagaattaaagtacaggctatagggaagctattcccgaaggattcggtctccccataaatctgggcgcatcggttcggggggactgccccgaaaacaaaaaaatcgattttttcaagtgtccgtttggggtactcaaacaattatggggagcaaaaatccaacgcagaattaaagtacaggctatagggaagctattcccgaaggattcggtctccccataaatctgggcgcatcggttcggggggactgccccgaaaacaaaaataaatcgattttttcaagtgtccgtttggggtactcaaacaattatggggagcaaaaatccaacgcagaattaaagtacaggctatagtgaagctattccggaaggattcggtctccccataaatctgggcgcatcggttcagggggactgccccgaaaacccaaaaaaaaattttttggataaaaattatttaaatgaactgactagataatatttaaaataggttatttctcttcctttcagtatccctgcaaagtttggtgcgcttctgatcagtttctgaaaaaaaagttaagcctaaactttttggcctgtttaaaaaggaattaaaaatttttaaaaattttattcatctccctttttgatagaaaaagcatcagagtgcctaaactaacatgtaaataaaatttggtgcgtttcagaaccctttctgaaaaaatatttaagaattaattttgcaaaaaataaataaaaacgaaagactcagattttcgaaaatttttgagcca

SEQ ID NO: 20400 - DNA, 1634 bp, Heterodera glycines
  unsure (1)..(1634): unsure at all n locations
tataatgtgtgtatantgtggggggagaccaaggcttaagtaagcagatggaaaaaagggggcggacaacaaaagtatcataaggaaaaagggacggggtttgcagatgtgaaaaaattggccaaggaatacaaagagaaaaagggggagaagggagctgagaaagggcgacggcgaaaatggggcggaatggaaaaacgacaaatagaagcgagaaaacaaaaacgggggagcaaaaggattggtggcaaaaagtgaagggaaaaagagaacagaggaggagaggggtgcaacaaaaagcttaatttgatttcttccgaatttgatcaattcccctcgtcgcattcgcgacattggccggcgcgcgactactcagttctttggcagctggctgcacacttcgggcggaggcggaagcgagaacagagcgcccgtaaggcgcaacaactccgcctgcactgtggacatgtgcgccttcgtctcacggagccagagggccatcggagggggcagctccatgggcgcggcgagttcagcctgggcggtagcgagcagcgccgctgtgttgtgcgtgcgcgaacggaggagccagagggttcggagatgttcggccggcatagaagagtggaattgcagggggtatggggacgggggagatgtcgtgagatcggccgaacggagggaagggggaaagcgcgaaggagggactgaggggggggggaagagcggacagacgctgacgacgacgaagatgatgccgaacgggaaggctttggcggtatcgaacgacggggcggaaaatatgatcggttgcggaagtcgggcggtgggggggggggcattttttcggtgtggggggcgcgggctggaggggacgggacgtggtgagcagggttcgacgaggccggcgcttcgtcttttccaatttgggcaccctcgggtgccgacgagcagacgacggcggccaacttgggtattttgaacgagggcatggggtcaaaaatgcagttgtcctctccgttggcgtcggatggtgctctgacgggctcgtggtggcgtttagacattatgttattatctaaatgagggggaagtgatgacgaacggaatcggtgggaaattgaccgggtggcggagggggtggtcggtaaaacggggagggtgggaacatcggcaatttcggcttgacgcacgtcggttgccaccgtctcggcattcatagccaccggaagagggccgggtgcccaagacgagggaataatggggcaaaaattgacgaaaatggggggggggagggcgatggtgggaaaaaagagatgaggaggcggcggcaagagcatcccgacgatcggatcggcacgggaattcaggcgattggactcgtctccccaaaaaggaccttcgggtcgggattcagactgaatgggaggggggttcgacggcgcagctggttggacggaaagtccctcaaatcgacggaataggggggtcgggccagtctcttccccggacgaggagtcggacgagggggagcgcgagcgagggggcccgtagatggactcaagactctcgacccctaccatttcgagaggaaagtaatcgaagtgggggggagccggccatccagaccggca

SEQ ID NO: 20401 - DNA, 3089 bp, Heterodera glycines
aaattttgagcttatcaattgtctgtgccaatgtgaagtcggtcggcagttttggaagtacacgttctgcatgacgagcgtactcctcatgaccgagctttccaagcagcagtcgcacttgcattgcgtctggaaggtccttgccatccacgtgaatgaacgggccaaaacggtcgaaccatgcttgaaaagttacaattgtggattatatgtgaattggccaagttgactattgatagtcgaataaatagtggaatgattgacggaatttggatttgtttggccattatggagaaggattttaaaaacttcagtgtgattctcgtttaataagagaagatagcgatcaataacaatggtcattatgaacataagaaaaaataattttgtaataaagtgaaaaaattttcaaaagaggggatcttttataaaaacattcccacttttgtgtttattaaagcattttttatatttcttcagctacattgaccattccgtcattgaatttctccgttcaaacaagcacatttgggacagaagaggcaccaatttggaagtgtttgtggatgcaattgatatgggtgttcaaccgatttgggatgtttttatccgtcaaatttggcctatttttgcgacaaacattcgccatttgagctttaccagtggcgatgctttggacaacttgcgcagtcgcacttcgccaacatttctcactgatcttgatcaattgaattcaattgattccggttatctgtgccccgatggaattgctgatgatgggccaaatgcaactgctggccaagcgttgaccaaatggctgcacactccgacaaaaaatgggcaaccgaagcaattacgtttccgtgcttatgtgggtccaccaaatttcgaatgggtcaacaacttcaaagaggtcgtctcgccagaattttcgtcaaattgtttttattttaccaattttgtttagacatttcgccgtgccaccacttctgtcagttacaaaattcaactttatttttgggtggaaccaatgccaattgaaccatttgaattgatgaacgaagtgacgaaagaaaagctgacactgaaacaggagatcgacgaattcgacttaaatgtgtataattggctgttgcaacggtgcccaattggggagacggcgacggcgccagttaagtgggaaaaccgcgaaaatccgagtgccaatttgaacaatgtcagatttgatctgtggagtttcgataaatccattgggtgagcagcaacagcatttgaattttatcgaaaaataaaatatttaattaattttaggccattggcgccaccagcggaagaaaaagaaggagaagaagaagcggatcaaagcaacaaaaatgtcgtctgattaagtgtacgaaaatgaataattaattgtatttgagaaatgatcgatctcaatttgttgtgcttaatctctcagaaaaatcgattcagaaggcaagataaagtatttcgtgcatttgaaccggttttgctgcatatttagaatttttcgaaaattgaattttcgaatttttgttcgagtccgggtcaggggttcgaaatgggccgaaatagatataagaatcgaattcttcgacccagaaaacccataaaacaactttatttcgaaaaaattttgaaaattttctttatatcattgaaaacctaataaaaaaataaaaaatttggcacttttttactttagataatccgatgctttttctggcgctagttgcaaagagggcatttttaaattatcaaaaagtaaaaacaaaaggggggagacccttttggtttgtaaaatggaaaatatatagtcatgaaaattttaacaaagtttgaaccaaaaatgtgaaattcgaaaagtttgaattttcgattttttgttcgaattcgggtccgggattggtcgaaataggtgccgcattcgtgatcagcgaccccgaaaacccatagaatgttaccaaaaaatttgcacacaaaaagcaagcaaataaattgaagttttgtatattcaaacgaacgaatcaacaaaagcatttcctagagagaaaatgagagcatcaaatcaaattccaattagtgagatgggccatttcatcaaatataaattaattaatttccgttgctttgatccgcttcttcgtctgcttcttccgatggtggcgacaatgggctaaaataatttttattttttaaatttcgacaatttcaaaattgatgttgctgctcacccaaagcaattactgccgtgccaaaaaaaaaattggatattgttcaaattggcatccgaatttccgtcgttttcccattggtccgccgccgtctccccaataattgggcatctctccaacagccaatcactgaatagaccagtgccatctttcgtcagtgtcagcttctcatttgtccgttcattcaccaattcaaatggctcaattggcattggtaccaaaaataaattaaatcgaattttgtaactgacagaagtggtggcatggagaaatgcctaaacaaaacaaaaggcaatcaattaattagtagtttaatgaaattatggtcggtcacctccttgaaatagttgatggactttgaaaaatcatcgcaacgcaatcgcttcggttgtccgtctttgctcggcgtgtgtaaccatttggccaacgcctgccaagcagaaattgtatttggcccatcaacagcgatcgcactggaagacagataaccggaatcgattgaattcaattggtcgcaatcagtgagaagtgtcggtgaaaccaaacgaagcaaattgtccaaatgatcgccacagtgaaagccaaaatggcgaatgtttggcgcaaaaattggccaaatttctcgggccaaaacatcccaaatttgatccgtttcgtatgaatacactttcaactcaaatttggtgcccattctgtcccaaatttgtttgttggaacggataaatgcgagcacagaatggtcaatgtacctgaaaagggaaaaaatgaccaaccacattaattggtttctgtataattttttaaattactcaatccgaaggtccttaaagcgga

SEQ ID NO: 20402 - DNA, 1843 bp, Heterodera glycines
aaaattttgaatttgggtgtaatttgttaacagattttcaacaaaaaaggttaaaatgtggttgaaaaatgcgccgtaaagacccctaaagattgaccaaaatttcaattaagggaggtttcaatcagaatatcaaattgattatcatttgtcctccatttttgcttctttcacagtgaaatcgatggccaatttcacgttgtcttcgcctttgtcgtagaaaccgttgcttgggtccatcaattccttgaatgtcttccccctttacacattccccactgggggtgcacaatgtggacgaaacccaaactcgtatactgttgttcgacaaaaaaaaaatagtcataaacttttgtaaaatttgacaaaattaaagtatcattcgatagcccttaattttttccatgagaatcaagaaaaaaaaaattttttgctcaacttttttcaaacaggactaaatttttagttatttttccaaggaaatagatgagaagcttatgagctattgaacgatacccaaaaatgttttttatttttgtcaacgattttgacaaaagttatgacgatttttttttgtcgaaacaatacgaatttggctttttaccgcacaatttttgtgacaaatttttaaatgaaaattagaatggacaattctttgcaaaaaacgtgtgctttgatttttaaaacatttttataaatgctcaaacaaaattttccaaaaattttctcccctcttcttccccctcaaggcttgtacaagggcgtgttggccggcaccgtcaagcagttgccctattccgtgatcacttacattgtgtatgagcagacgcgctacgctatccgcaatatgtcggcttccgaataatattttttcccaattttaccaccacattttttgttttattttaactcaattttcgttatttttctaatttatttgactgtttctttcatccacaaaatctcacatttgctcaaaataatttcatcatcaattttacgaaaaaaccacatcaaattctacaaacatgatgatggtatactgtatttgtgtgattacggtgtccttacaataatctgttgttgttgttgttatttattttaatattttttgctgatatttttttgtgttaatgatctgctcatattttttgaatggcgcttatacgatatcataaatagggcccggatttttagctgcttagaaacggaaaaaatagaaaacaaaattaaatacaaaatttgaaaaaattgcgaaataagccgccctaaaatctccaaaataggtgccgaaaacggaaaaatttgtaaaaatgcatatcaaatttctttgcgttatatattttttcaaatgctcattttcaaggacttcttgaaatcaatgatactttaaagtgagagggttcaatttccaggacgcccttgccattcaaggacgaatccgagccctggctaaaaggacaaaataaattgttaagtgccaaattccctaaattaatatttttaattaaaattgtgcagaaaatgagtttccgtgttttcatccgtgccttaatcatgtgcaatttgcaatggatgaataaaattttatctgcaatgattcatttattaacataacaatgtttgagcgggagcgagcctaagaaatcctggccaagcaattatttctaaacaatttttgccaattataaataaaaaaaattttaaaggaaaattttaaaaaatgatggaaattacagtgaatgatcgtctgggcaaaaaagttcgaattaaatgcaatccgaccgacacaattggggatctgaagaagttggtgtcaactcaagttggaaccaagtaaaaa

SEQ ID NO: 20403 - DNA, 1556 bp, Heterodera glycines
  unsure (1)..(1556): unsure at all n locations
tgaaaaaggccnttaatctccagaattattggaaaccgtgaccggaataattctgtttttcctttgcgacaggaattccttttctgaaaatggtcaggagtgtccagaattcttttccggaaaccttgaccagagttccaattttggaaaatcgtaaaggggttttatgctacttattttgaaaagggccttaaatctccagaattattggaaaccgtgaccggaataattctgtttttcctttgcgacaggaattccttttctgaaaatggtcaggagtgtccagaattcttttccggaaaccttgaccagagttccaattttggaaaatcgtgaccgggtttttgctacttattctgaaaacggccagaaacctccagaattattggaaaccgtgaccggaagaattctgtttttcctttgcgacaggaattccttttctgaaaatggtcaggagtgtccagaattcttttccggaaaccttgaccagagaagggccttaaatctccagaattcttcgaaaccgtgcccggaagaattcttttttcatttgcgatcggaatttttctgaaaatcggcagaagaggcctgaattctgttccggaaaaccttgccgggagattccgattgggaaaatcgtgactgaatttttcactacttattctgaaaacgaccagaaatctcccttattttgaagacggcctgaaacctctagaattatatgaaaccgtgaccggaagaattctgtttttcctttacgatcggaatttttctgaaaatggccaggtgtgtccagaattcttttccgggaaccttgaccagagttcaaattttggaaaatcgtgaccgggttttatgatatttattctgaaaagggccttaaatctccagaattattggaaaccgtgaccggaataattctgtttttcctttgcgacaggaattccttttctgaaaatggtcaggagtgtccagaattcttttccggaaaccttgaccagagttccaattttggaaaatcgtgaccgggtttttgctacttattctgaaaacggccagaaacctccagaattattggaaaccgtgaccggaagaattctgtttttcctttgcgacaggaattccttttctgaaaatggtcaggagtgtccagaattttttccggaaaccttgaccagagttccattttggaaaatcgtaaccgggttttatgctacttattctgaaaagggccttaaatctccagaattcttcgaaaccgtgaccggaagaattcttttttcatttgcgatcggaatttttctgaaaatcggcagaagaggcctgaattctgttccggaaaaccttgccgggagattccgattgggaaaatcgtgactgaatttttcactacttattctgaaaacggccagaaacctccagaattattggaaaccgtgaccggaagaattcttttttcatttgcgatcggaatttttctgaaaatcggcagaagaggcctgaattctgttccggaaaaccttgccgggagattccgattgggaaaatcgtgacag

SEQ ID NO: 20404 - DNA, 2053 bp, Heterodera glycines
aacatttcatgtttataaacacatggtgaaaaagccccacctagatgtcttcacactgattatatttaaaaaagaaaacatgatacaattttcgaactatttttatagagtcattttcctttagttgcacatatatcaatcaaacaaaaaatctctcttaatttgttgtctctccatcacatattaaaaattgtgccatcgcagtttctttaggtcaagaagaagctgtacacatgttgaagagccacctgaaaatatggcaatttgtgagaaaggcttaagaaagtttaataaagtaaaaaaatgggagtgttatggagagtgaaactcccaatttcattcccctcttttcctctccaaaaattcatattcaatgggtaacagttaagtttgctcccttcccgtttcgatttttttttttcaaaagtcataaaatgtttcaaataaaattgtttttttaatttctttaaaaaaatagtcaaaaccgggagttttaactgcacaatgatgtaatattcacgaccaacgaattacacagacttttacagattggagggggggggggggagcaacgaatgtcaaacgaaaaacaaaatgaaattattatgtaaaactgacttcaaaacggtccaaaaatgtgttgtagctttcgtacggaggtattttcagatactgaaaaagaaaaatttatacataattatgcaaaatgaagggtttcccctccccatacgttgtagcaagtcatcgcggacggcagttcgttttcgttgccgacgaatgatgcggttttcttgacgacagtcagcggaggcgacagacccttaaaaccgccgacgggcaaacgaggcgaaccggtgcaaaattggaggaaacggcgacgctaaacagaaaaaaattcaaatgaatgaaaccaaggcaacgagcccaaagaaccagcaaaaaatatcccgcaaatatttaaccaccttctctttgggaaatccgtgcaacatgtcgatcagccatttgatttgctgtgaatcgtatgtatagccgtggtcctggaaaattaaagttatggggaaaaaagtgaaattatgaataataaaaaattaaatttaaaaaaggaatcaaaagcgcaacatggaaaaaaacaataaattggctggcatattaattaagccattagttggtgccaatgagtgaaatcaattgtgtggtttaccgggcggatgcaatgctgcagcaccgatttgctccacactttgtcgtccgcgtcgtcggtgccgcagaacaactcggagatttcgtcgggtgtgaaaatttgaagagattcgctgccaatgatcagctgaaagccgcgccgaagggcctccatttcggcacgaacgccctcaacaagacgccaattaaacacgagctgaaaagagccacttttacaaaaataaaatttgtaaatgtttcaaaaattaaatacgattattattttgtttgaattaaaatgggaaattgaataaattaaaaactacacaaatcacctccataaattgtttgcagtttgccttcgtgacttggacattctttccgcccttgaccagctccagtgtaagatcaccaggatatgtgaaatactggaattaaaaacggatttaaaaaagcacttatttataaacatggtaaactattaaaactacgatggtgtcactcattgtcagaataggtgcactacgtttcccgctcgcattgatttcagttttttttaaattttcgacgtttgaatttttttttaaatgctaaaaaaattttttaggaaatctaaaaacattttatagagggggaaggcgaactgctttcatcaacagaacagcatcgacatcactttttattaacaaacaaaatgagtgtgcccagcaggtgtcactcaccaattgcaattcgtcaaattcttccgcagtttctggttgcgcatatgctacgcaacgagcggtaaacggtgggctgcaggttttctaagtcgactgcgccaagaggattctcacgaccgaccaaacatttaaacaccagcggagacaag

SEQ ID NO: 20405 - DNA, 1679 bp, Heterodera glycines
ggggggggggaaatggaaaattagacaatttttaaaccagattttcattgaaccaaagtttaggcgaattttgcgtcccggcggtggcgataggctaaaatagccaattttgagtttatataccgacatagcaccgccaattgggcgctccccgctgattcttaaaattgagtatgtgtggattttttaatttgttttctattatttttgtgttcaagacgattaacttcgctaaatttggctagtaatttgaaaaaaataataaaattactttttatatttaaaaaaaatttccaagcagtgaaattcgttattgaatattctactgatcatttttaatgtatattcttaaaaaattaaaataataaatcagtataaaatttatgcaataaatttgataaacatcgatttttaaataattaaggaataaaaatgtacattatccgtggcttgctataatattaggaattataattaatttctaatgcttaaatgatgtccgcatggaacgggtcgttttggcgggcacccaaatttttcgtatctctaaaaaggtacggtacttaaatgccgtgtttccaaatgtcacgcctatgtgaaaatctgatcataaatctgagctttgtttttttaaatggtgccgagaaaagggcgtttaataaaaaacaatcaaatgaaaatttctaacaaaaaattatccataaatttgctcaaaagcaacaaatttttaatcccttagagctatagaataatatcaaggtttcttaattttgttggttcgcagaaagttttgaacagattttttgatgatataaattcttttatggctaatggaaaaaattttagtcataaaatgtttttattatttattttcatgatatcattcaatagcactaaatgtttcctatgcctgcaatatttcgacaaattttgtcatgtttcaaaaaagttatgacgaaaaatatttgaaaacctggtgcctggtgtacttttggccataaccttgtttaaacttaccataattttttgaaatttaggtgaaccaatagagaactattagggctatggaattatattaagaattaaattagttgcttttgagcaaagttatgtgatattttatataacgtcctttttgatggttttatacaaggttgccagatgaagcttttcaaaatcatcattacaaatttttgcgtttgagccattttttgaaaaataagtttcggggcccggcgaagacgataggcgccgccggaggggggggggggggaattggaaatttagacaatttttaaacagattttcactgaaacaaagtttaggtgaattttgcgtgccggcggtgacgataggctaaaatagccaattttgagtttatataacgacatagcaccgacaatttggcgctccccgctgaaagttcttaaaattgagtacgtgtggattttttaatttattttctattacttttgtgttaagcacgattaacttcgctaaatttgactagtaatttgaaaaaaataataaaattactttttatatttaaaaaaaaatttccaagcagtgaaattcgttattgaatattctactgatcatttgtaatgtatattcttaacaaatcaaaataataatcagtataaaatttatgcaataaatttgataacatcgatttttaa

SEQ ID NO: 20406 - DNA, 2903 bp, Heterodera glycines
agtctactgacgaattgtccgtcactgatgaattgtccgtctctgatagatattgtcttccgaagattatccactgacggattgtccggataccgtcagtggttggaccgcaatccgggagtttttgcgccagaattacacattccggcatttatggcttgtaaaatggcatttttaggcgaaagcaaaacattcaactggctcctccggtggtggaccatcagtgccggcgccaaacaatcggaagaaaacgcaaaatcaacaacagcaaaaaggaaacaacgaattgggaggagaaggaagagaaaatggggggaaaagagaggaaaagggaggagaaaaaggagcagcagcggaagcagaggaaaaggaaaagaaagttgcagttgaacatcatcaaaaacaacaacaacaaaagcaagaagttcaagcagtacagcagcaacaacaaaagcaagaagttcaagcagtacagcagcaacaacaaaagcaaattttggtgggaatggagatgaagatggataacagcaaaaatggagaaacaagggaagaggtggaaaaggaaggaaatagcattggggaaggaggagagacggaagagaaagagaggaaaaggaaaaattctaagcaaggagggggagaaagaggagagaatgaagcagaaaagaagagagaggaacagcagcaaattgacactttttaaaatattgccggtgctaattgctaacggacgtcgtaaatcccccgtcaaaatcccgaaaattaatgtcacaattttcaagcagagagaaattcatacactcgatagatagcaagccatttttatgcatccgattgatttaccaattaagaggtttttcttcataaattgcatttgatcactgatttaattatgatcagtcggtcattcttctcaattaattcatttcttcttcttctgcggctgatcattgtttttttgttgttttgtccgtcactcatttcgcccttttgtgatgctttgtcccgcttcttcttctttcggtggcggagacaattagaatacctgcaactgccaacacttgagaataggcgaaagctgtttgatctgttcatggcgcataaaattgtttatggccgaacagatctgaaactattttctatttttaatccatcaacacgctttaacacagggttaccctttgtccttatttgtaagatttgtccttattttgagggtccaaatcttacaaattttaaatgtccttatttgtaagatttgtccttatttaagctctttgtccttattttcgtcttattttttggattcagggagaaatttagatttttaatgataatttttgaaagaaatgttttttgaagcgaattaatatgcaaaatcttaacaagattcagttaatattcaaatttttctctcggcggtttcttattctctttaaaaaattggctcaaaatcgtaattttgtcattttttgaacaaaatcgttaagaattcgtattaaaaattacaaaaatttttccagcaacgtctattagagctgtatctgttattatttctaagaaatgttctgatttgggagtgccttattttcatttaaaagaggaaatttctgaaaaatttggctaattcctaacaaaattcattaaaattaaaggcatttaattttgtcccccagcggcgcctatcggcaccgccggccccccaaaactcctattttttttttcttaaaattagcccaagatcgcaaattttggtcattttttggacagaacttgttaaaaaattgcattaaattttcaaaaaatttccccgcggcgcctatcgacaccgccggactctcttccctcatccatacccaaaaaatttaaaaaattaaaattgattttcggaaatgtataaatttctgatttctaagccggaattgcgcagaaaaatagttggcggtgagtaatgcttggttttgttgaataaaaatgcatttaaagttttggaagcgtgttttaaaaaatgtccttatttttgaccctaaaatcttatttttgaccagcgatgttcttatttcgggaaattttcaagggtaaccctgatatacttgatgaaagaatcgtaaaaatcacattttatccaaataatttctgaattttgttcgccttaaattgttgccaattggcgtccgaggggttggacaatgtgccaataggaggacttgagaagctcaaaaaaccaagttttttacaacatttttagtaataactagggctgggaattttagtgactaaaaatctcgaggcgctagtgaaaaagtcaccgtttttgaaaattttttaaacttttttttggtaaattttttttgttttgtttataaagtcatgaaaccaagtgcccgggggttttagaggtcgctgatcacgaatatgacaattatttgggcctattaacaaacttggcgctagttataaagtgacagatttttaattttatcaaaacaaaagggggagtgacttttgttttgcaaaatttttttgagacaaaaatttgtgaatatactttttattcaccataattgtactgttaatgctttaaaatgagagaaaatgggatggacaaaagataataaaaagagaaaggttatttgatttgagtcatttatgcattattcgaattgcctttgattgttcagggcaaaacggtgacccaaaaagacaggcacaaactgctgcaggcgaaagagttgggaaaacggcaaaaatgagataaaaataaaaactttattatataataaatttaaaaaaaagtacaatggcgtcaggctatgtctactacaaatggagaaaattggcgagaagtgatgtcaaaaattgaaaaattaaaaaatttgaaatgacgcgtcccgccgcacatt

SEQ ID NO: 20407 - DNA, 1571 bp, Heterodera glycines
  unsure (1)..(1571): unsure at all n locations
aactagcgggtgcgtgaaccgtcggctatttagctgggaaaaagcgcttcgcgctttgggagcttcgctacctagatatgctattgcgttgtgaagagatttggaatttttaaaagattatctgggatttttaggccgcttcgcggcctcagacggtcgcttcgcgcccgtttttaaatttagttgggccttttcggccgcttcgcggcctcagacgggcgcttcgcgcccgtttttaaattttttgggccttttcggccgcttcgcggcatagtacgggcgcttcgcgctcgtttttcaaatgttgttttgctctgacgggcgcttcgcgcccgttttttaaatttgttaagctcagacgggcgcttcgcgcccgtttttaaatttagttgggccttttcggccgcttcgcggcatagtacgggcgcttcgcgcccgtttttcaaatgttgttttgctctgacgggcgcttcgcgcccgttttttaaatttgttgagatcggacgggcgcctcgcgcccgttacaacggtgttagaagaggttcaatagtgatcagaagaggtacaactgtgattaaaagaggtacaaaagtgattagaagaggtacaacagtgattagaagaggtacaaaagtgattaaaagaggtacaacagtgattaaaagaggtacaaaagtgattagaagaggtacaacagtgattagaagaggtacaaaagtgattaaaagaggtacaacagtgattaaaagaggtacaaaagtgattagaaaggtacaacagtgattagaagaggtacaaaagtctaacttgttatgagatgtacaaaaataatttcataattttaaatataattttatagaattaggtttatttaaaaattttaaaaaaacaaaataataaaaaatgtaaaagtttattttttaattaataaacggaataatttattttactttattttgaaatgaattattatgcatccaaatttttaaatctaattttgcttaaaaataaatctatttttcaaaagaaaaattaaatttaattaaaataattttgttaataataataaaacaaaaaataatttctttaattaaaaaaaaaataaatttaaataatttaaaacaaatcttcaaattaattataaacagtgaaaataacccaaaaatgcatagaaaaataatgtaaccgtccgggtccgaacctgccgccaccccccccccctcctcataagggtgcctcagaatccccaatcacacagggattctgaggtcttgacgatgtcaaaagtaaaatctgatcacgtattcgtgatcagcggcccaaataacccctaaagacatatttttggaggattttgtgaaaaaaaatttttcactcaaaaatcctgtccaccccctttggtccataatcccaaaatcggttttatttttgtaacaattcgtaagaaagtgataaaaatgtaaaataaaatttatattataaagaaaaaaattgcggatttttgtagtattttaattttcaaaaatttcttttcaganagggggttatgaatttttttctgaaaaatcgaa

SEQ ID NO: 20408 - DNA, 2688 bp, Heterodera glycines
  unsure (1)..(2688): unsure at all n locations
ttactaattaaaaaagaactaaaaaggattttttatttctttctttattgtttttttaaatattttttgtaaaattaaaaaaacaatagtatgaaattcccattattattattattattattattattttacagttagcctaacctttgttttgcagaattattattatttttgcatcttttaacaggtggtagaatttctgaacgacgatttgccagaagtgcgtgctgctgcggtgttcgcactcggctgttttgtgcacaacacgtcgcgcaacaatgagcacgcgacggcggtaaaatccgcttttttcatactgttaccgtaaccagaaatttaagacaaccccacttactgtacctataataaaattaactataggttgaaaatgaagtgtgcgacaaactgtgcgaaaaatgcacctacgacgggtcggtgctggtacgtgccgaactcgctgctgccatccaatggttcgtaaacggcaaaggctgtgccaggggtttatgcactacgagggcgtattaaaagggtgtctaaagaaaattctgtaagcatttgttgttattgttttttttttaaaacgcacatacgttttggatttttaacatatttaaaaaaaatattcgaaacattaaagaaattttcagtttttaaacttttatccaaaatttcgattcaattttttacaaatttttagaaaattgttcacttttacttttgaagtagtaaacttttattgcaagggtccattgaatcgcgccgagactcgccatacattcaataaatttgaaagtaaaattgcttcttctaggttcgtcatcgactttcagtctcgctttgccaccatctgtgccgagttggaccgccgggtggccacccaatcgcccagctcgatgatgatgattggcaacggcacggtgcagcatggccaggaattggtgagtggcaaaaaaatatgccaatttccttttccaaaaagtttttttttggtaggatatcaattaaacgcaattgaaatgctctaagaattggagttgtaattccaaaatcaatccaaaaacaccagcgaaagttacttcttttcgcgagtttggttctcgaaccgttttttaggaaaacgaatcttggcaaaatatatataaaaaaaagtacgacaaaaaagacgattcaatttttttttcttaaattattaattaaaaaaagttcacttggtcataggtttttgtggaaaattgaggcccggaccggtcaatgtttgtctggtcgtggtatttcctggtcccggtttttcctattaattccggttccaattcacttaattttatgcaaagttcaaattattgcaacctcgaaaaaccacttttctttcaaatttccaatctttttcatccctaaataaaatatgcctgaaaaattaaaacccatttgcaatatatcaattttaaatggccatttattcagtccaaagcgatggcagcgatgtgtctgtcgccgacagagtccgaacttttgttgtccgacaccgcctccacagcgtcggcagtaccaccgggagcagaccaccaccaccacaattcccattggcctgcttcatcctcctccgccttctccacgctgccgaggcggaaaatcagtgcccgaagcggtggaggcggcggtgcttttggcaattcaaatcaccacggcttacagccccaccagcagcaaaggcaagcgccaccggcgccgtcgcaagggcgtcgtgcggcaccggcgaacagcagcagtgccagcatttatgccatcttaccacgctcagcgtcctccatcattccgagtaagggggatgctcgtccgagggcttacaattagttttttttttattgaaaattgttaatttttggattntaaaaatgatgaaatccatggagagggtaccaatccaggatttgtgtcgacgccctcaaaaaattccgtcaagcggaaatcggtattcctacggaccttaaaatttcggaaatcggcattccgatattccctggtaccaataagaaaatcggaattttaatcaaaaaaaccttaaaaattaagcggatttgaacattcctgtcctccactgccccaccccctccttgctaaaagttatagttttgttgggagctaaatttctggtctttctcatctgtctatgtacatcattttgaattttatagtgttttttcagatccaactaacatccgtcgacggttcagtcccattcgcaagatgagttccatcctggccggtccgtccacagcgtccgcagcgcccaccagtccgtccggcgaaacggccggtttgaattcgaatagcctcttcaagtatgtaccggcattttcgcaatggaaatatatatataatatgctcatcctattttacgggattgtagcataattatgtgtgccattttttattagtgtccataagcctcccataaattggctcaagaaaaatctgctttagtgacgttcccctctcccatttgttttaaaaaagtttgctcagttttcaaaatttttgaaaaattaatgcattttgggtcaaaatgatcaaaaccagttaggtaattcctgttgaaaatctatgttttacagaatattgaatagatcacaatcagttttttttcacatgcctcgccaaaaatcacaaaacagcaaatttagcttg

SEQ ID NO: 20409 - DNA, 1378 bp, Heterodera glycines
ggtcaaaatattgggcctatgcaaaatattaagaaaattcaataatagggaaaaaattttctacaagggtaaaaatttcaataattttaattcttttttagccaagtccacaatttaaggtcaaaccaaataaaatttacaatattctccagaattttcccttcaaaatgagcatgaaatggttttatttgctctagtattcaccaagttataagctaaaaaaatttcataaaattgtcgatgttgtacgtaaccaacgctttttgaatatgattttttattgccacgaaaacttttattaatgaaaaaataattctgccttctttaaaagaagaaattgaaattaacacacaacatagggaggacttgaacctgggaccccccttttggtgactaactcacagaccactaagacgaaaaatccagcataattgtacttggagcccaaaattgggtcgctgtgttgacaaagtatatccaaaattttaaaaaaaaaattgaaatgcactaattgccttttttggccgttgctcgcctccaattcaaaatctgcaggccttagtctattgcagggctcccatcgtccatcctccgtttccaaggacgggtatgccgattttcaaggacatagtggggaaaattcatgaaatccaaggacatttaaaatttttattatatgcaatgcaaaatggttaatatttattcaaatggcttgtatttttcaccggaatggattttttccaacatttttttgttttcacttatcattttcttcatttacgacgacttttttctgctttaaaaacgctttttttgtggcgcgctttttccaaaaattttgtgggacagagggggggggggcggtgccgacaggcgccgccggggaaaaattttgaaaatttgaatgcaatttgttaacagattttcaccaaaaactgcctaatttttgcgattttaagccatgcaacgactttttttgtttataaaatgggtttttttacggcgcgctttttaaaaaattttttgaggataggagggtccggaaaaatttgtaatttttaatgcgagttgtttacagatttttgtccaaatatgaccaaaatttgcgatttttggctaattttttaagaaaaatagtgacttaatgccataaaatttcaaaaattctcaaaaattacatttttaaatgatataatgccataatttaatcaaaatattgttgaaaattacaaagatttctcaaatttctttgattttttttaaacttttccaaatgctcattttcaaggacgtccttgcatacaaggacattttttattttcaagaaagagggcccaatttcaaggacgtccttgccattcaaggacggatggcaacc

SEQ ID NO: 20410 - DNA, 2288 bp, Heterodera glycines
gaaggaagcactgacagaagcaaatgccaaaagggaagtgccgttactcaaagtgggcttcgttgatgactcggctgtagtctttgctcgtctccggattcgtcccgtaatattccacaagcaccgccttcagttcctcgaccagtctcggcttcatttcgttggtcaccattacgtagtcgggtgccaagcatgtctggccacagttaagccatttgccccaggccaatcgacgcgcggtgatcggaaggtccacgttggagtcgatgaacacgggcccaaagggagagagaaaagtgaaaacaaaggcgggggggggggtgaagcctcacgacggattattcaacgccatcaaatgggaagttgtgaaaatgttattttcaaaattgctatttcccttaaaatatttgacttttcaattaagtggtcctaaaagtcgtgagggttctcacaaaacttgcaattaccgctcaatttcatttgcagttgattattttatcccaattatttgacaatgcctccccttaacatacgattttccgccgagttccaaagtgcagggcgtcaaatgttccgcggccgccctggaaatgtggcgggcgaccagcgctgacccggtgaacacaatgtggtcgaacttttccttcagcaattcgccggtctgttcaacgccgccctgcaccactgccaaataattctgaacggaattggcactgttcagaagaatctttggcattaccccccaaaaaaaattggcacactcacccggtcaaatgccttcgaaataatttcgtcaacggcggcggcggtgttcgacgcgacttcggacggtttcaaaatggcagtattccctgtaaaatgacaaaattttggttgaatttggagcacaaaaaaagaaccagcggctaaaacgtcgaccaaaggcattagcaaagtgttgagggggtaattccatggaccaatgagcaaaacgacgccctaaattggagaaaatcagcgaaagttcttgcgattgtttccgttttcgtcccgattttaagaatcatttcgacttcgactgaccttcggctcgcgaacgatttgcggggagtcgagaagtgtggtgaaagtcttttcgacatttaaaggcgccgtccatcgctgaaaatcccttttctcaaatccctcaaatgtttccttttcccacctccaaattgtcgagtacatattcaatttcaatgatcaccgacgaaatttcgagcggataattcagtttcgcgtcccttttcaggtccttttgcacggcttcgcagagaaattcgctgttgtcgaggattgtcttgcgcagtttcttcagctgctgcctccgatgtgccaattcggcggtttttcccgtccgaaagaattcccgctgagactccacgagcttaatagggaaaaaacatattaaaaagcaaaatgtattgaaacaattacggagtgaaagggggaagtcatcggagagaaaaagcggagaaagcgaacggaattaattgggggagaaggaaaagctgaaaaagtgaaaagcaaagttaggaaattgtgcattagttgatatgacaaaaaagcgaaaagacgaaattcccacatttatccccgaggtttccttccgttgattttttgttttgaattaattcgcctaacgaaaaatgattctcgttttagactctcgcccatttgttactaattaatttgccttttcggttattttttgataaaatgaaaattgattcttttttcttttcttttttctaaaataatatttggaaaacattggaattgaattattagggcttccaattaattatatgcatttttttccacgaaaattttatttttagcttaccgtatatgctctaattatagcccagtctctattaatcccgcagtctccaattatcccccagtctacgaggtgtttttgaaaaataatccctctacatatcataatcccccagtctctaattatccccccttttctgaggaggttgaaaaataatcccccatgggctataattagagcatatacggtagtttgacgcttctaacaataagacgaatttccatatgcatatttcactatttatgtatattttggcatttccaaaaacccattattaaagcggcttcaaatcaggattaatgaattttatgatttatgtgcataaattgtaatccaaagcgctaggaattataatatatttattggtaaaaggttgcattcgatcagcggagcaaaaggggcaccgaagcgaacattcccttcactt

SEQ ID NO: 20411 - DNA, 2135 bp, Heterodera glycines
  unsure (1)..(2135): unsure at all n locations
ttaaataattttgtttcatcatttaatttccaaccgacgcttgaatttatgaattgctatattttacagctttctgttcggtgtattaattaaatttatatttttaagtttgaaatttaattatatttatctttattttcgaatatcacctgcttatttggcttaaagattaatattttaatattcaagccaatttgaatttaaatttatcttattttctcatttacttgaaatcagtaattttaatgaacttttaaattgaatttagagattaataatggcaaattttattattgctttaaatagattaacgttttatttataatttttgctattcttaattagtaattaacaagtaaattatataatttatacaatttaataaacttacttttatgaataccaaaagctccaaacaaaggtaaaaacgtattacttgcttttaaaaaatgtattccactttgtttgtttaaatcttaaacaaacggtgctatgttaatttcatgaatattataatatataatcgagttcgaatttttttatatgcattttttataaaagtattgcttaagtatgtcaatataataaatgtttaaaaaaccaggagtnagtataccccccccccctatgtaccgcagaattctcccccgtcttgtcacagcccccgtcttgtcacagcccccgtcttgtcacagcccccatcttgttacagtgcttttacgctttatcccccaacctgtaccatttgcatttttattacgaggaacattttaaatttcatttaggtttttaataattttattattttttaaattataaatatatagaatgattaaaatatatttgcttgaaaatttctttttattaaattaaatgggatgatcgttatcatgattttcattaatatttatttttttttcctttcganaatattaattatgagaaacaaaaatattattagcataaatagccatatacaatttctgcctcgtgattacgaattaatttgtatttgttatttgacgaaaagagacaccaaaaaattaaaacaaataaaatgaaaattatttaaaaaatatattttaataatttatttctgagtaggggcctgacccgactccaaaaatttgggccatttatttcatatttttatattaatgaaagtaaggcgaattaaatttcattttgttaaatcttcatatacaaattcatttatcctatagctagatttgttggttatttatgtcatttttaattatgtcttctttttggtattcatttttaaattcctttttaaacgattatccctgaagataacatttaactgagtcgctggataggttaaaaagattcaattaattaatttgttttcttaaaaggattactttatttctgtcttgtattttcagtttatgatttagtgccattaattttatgctttttcttagttatataatgtaaactaaatttattgataaatttgtttgatatttataaaaattaaggtaaaaaaatgaggcatgtactcgaccgttcattttcacaagttttcagaacgtagtttttttaattcttttttaaataatttaattttttcatatattttttaaatttaagaaattttttttattttctgagacattaaatttcagtgcataatattaattttataaattttaatcaatttataaatcatcttttaaagtatttgataatgtgaattgtttttaacacttaattttttttatttaaattttattaaagtgtcggcgttgctcttttttgggtccctggccgggaaaatgattcgatcgtttaatattttacagtacaaatcaatcaaaatacgttaaattttccacccttttctctttttatccctttccttttctgtaattattttttcttctttttaacgaaaatttttttatttgttaaatttattaattcttatttataaatggctttatgagtttgagttctcaggatctacgaattttctattatttttttggttcgaaatttcttgctaatataaaattaaaattattatttttttataattttatattattgttcattgaaaataaaaatttggcgatctttttttaagttgttagagtactaatagttca

SEQ ID NO: 20412 - DNA, 2154 bp, Heterodera glycines
  unsure (1)..(2154): unsure at all n locations
aaaataagattttnagggtcaaaaaataaggacattttttaaaacacgctgccaaaactttgaatcgcttttttattcaacaaaatcaagcattactcaccgccaactattttctgagcaatttcggcttagaaatgagaaatttatacatttccgaaaatcaattataagattttaacaattttgtcgaaacataagcaattggtaaatttcagtgcatttagaatcaaaaaaacagatttttaacaattttttcggcgcatttttccgaaaaataaatttaatgcaatttgttaacaagttctgtccaaaaaatgaccaaaatttgcgatcttgggctaatttttaagaaaaaataggagttttggggggccggcggtgccgataggcgccgctgggggaaaattttaagaatttttaatgaattttgttagggattagccaaatttttcagaaatttcctcttttaaatgaaaataagacactaccccaatcagaacatttcttagaaataataacagatacagctctaataggcgccgccggaaaaattttttgtaatttttaatgcgatttcttaacgattttgttcaaaaaatgacaaaattacgattttgagccaatttttttaagagaataagaaaccgccgagagaaaaatttgaatatttaactgaatcttgttaagattttgcatattaattcgcttcaaaaaacatttctttcaaaaattatcattaaaatctaaatttctccctgaatccaaaaaataagatgaaaataaggacaaagagcttaaataaggacaaatcttacaaataaggacatttcaaatttggaccctcaaaataaggacaaatcttacaaataaggacatttcaaatttgtaagatttggaccctcaaaataaggacaaatcttacaaataaggacaaagggtaaccctggtattaacagtttttgttgggatgattttttcaagatttgcttgaagaaagacgggtcggcacgtcgatagagtttttatttttaaagaaattttcgccaaaaaagacttttcttgaatttggcaaagagttctctttattaatcaattctaaagtattatctttgtgacacattgggatatttacggacaattttggggaaaaaatagagtttctttgatttttttttattaattagaaaaaattctatatcttttttttcggccgacatttttaaatttctccagccattcccgacaaattttattggggaatttcctccctgaattttaaaaaaatattttttttcaagcaattttttttcaaaatccaagactcaatagactgcgttttgaaaaactcgaaacttttctcaaagtcgagactctcaaaacgaatttaaagattctttcatttttttttgaaaaatttcgtcagctattttctcaatgtttttgttataatatgcaacattaatgccaaacattgtcatagattttttatttgcatcataattttgtattgcgcataaactgcagcatttacgtcatcaaaatttgtgaatattattataatttatgtacatttcctcccatagacgtaagcaaaagcctatcaatattaattatccaattttaatatgccaattgattaatttaatagcgacggataatggttacttaaataatcaggcagtgtataatttttataaatttcatttcatttttttctaaaaaaaagtcatcaaaaaatgtttttaatcgctttatttatgctaacattctccttaacatttgatttggtcgtttcttttgccgaaagtgaacaattagtgtattataattacaaccctaatgattattactcaacaagcgggagttccctttccgaactgaaaggtgaaaaaaaggaattttaattattaaataataataaattaatttgttttagatattcttgatagcggggacaatatcaagtgagacatatgacattttattaaactctcgactttgggttaaaaaaaactttttgttttatgcattcagataataaattttatttttagcgtttaggggggaggtagaaaatccataatttcccanaaaaatgctcaaaaaattcaccatttttatttttagctctttgtttgcgtgggctttgaagaa

SEQ ID NO: 20413 - DNA, 2435 bp, Heterodera glycines
  unsure (1)..(2435): unsure at all n locations
cgaaaggtagcggcggagaatggcggcacttcgcttctccgcctggaaaaaatgtgcaatcatttcaccattttttgacatttgctcaatggcaatggcacaacataaaactaaaaaaatgtgacgagcaaaaagaaagggagggacaacaaaagacatcgcatgttgctgctgatcatcgacggattccgccagtcacggaaattcgatccgatgaaaacgcaaaacaaacgaagaaaatgatcagaccaaaacactgaaaaggattggaaaattgtgaataagcagtgggaaagaagaatatctggacattcgatttaatttggtgacccatcgccggagggattaagcggagcagaaaatgcggtaaaaagtgcataatgcctttcgctggcactcagtccgcttaagttggcacccaaatttggctcctccgcccatctccatgacgactttgccgcttttccatctgttggcagaaatgaacccaagggcaaatgccgaaggaggaatccattcatttaaagacgatttgccatttgttgcttttgattggccgttcttcgctctctccaacaaaagcgaagtttttatttattatttgaaattccaaatttttttactactttttatttttcaattaattaattattttgacctctcttggaaaatgtccctcagcagctgaacagccagccaacctttgattgtcccgtcccttttcgccatgtccaatttggcaatgtcttccgatgacgagggcggccgaggagagcaaatgtcgctgaaagtggtccttttgggggacaatggcacgggaaagacggcgatttgttgccgttttgcgcaacacgcgtacccacagaaatacatacaggtgaagcagaaaaggcaatttgaattaatttagcaaattggcaaacaaatttcactaagtccggagagaatttggaagaatttggccaattaacttaattaattagctttaattggcccatttcttggcatagacttccggcgtcgacttttactcccgccgcatcgcaatgcctcgcaatgtgtcggtgcttcttcaggtgccctttttgtgcccttcgatcactgactgaccaatgctgattgaccgccactaatttcagctttgggacgtcggcggtcacaatttgacttctccggcaatgctcaacacttacattttcggtgcacaagtgagaagggatggacaatgttaggttgtcatatacacttccgacaacttaggccgttttgttcgtttacgacgtgaccaactcacaatcatttgaccatttgaccgattgggtgggcgccgcgaagaaaggcggcgctcaaatggaaaaggtaccggcgcggaaatggctaatggaaaaatgccgggggagggggtaattagaattcattttatcatttgatcattgatcagcctttttgcttggcattggtgggcaacaaaacggacagtgaacaccaaagagcggtcaaaatggaccgacacaacaaattcgcggaccaaaacgcactcagtgccttttatgtgtccgccaaaacgggcgattccatcgatttgatgtttaagtgagggaaaagtgaaggaattacaaaaaatgactaattaactgattaattagttaattgattaataaattttaattattttcatattgcctttctctttagaaaaacaacagccgaagtgctgggcattccgttgacaaaggctgaccaggaatggaatgtgaatgttgtacaggcacagatcacaacggtcgatcggagcataaataagcggaaacagcagcagaaggcggaggagccgcggaaagaaaagtacggtaggagaaggggagtggatacggtaggcaaaaaaagttgaattgccgtaattttaattaaagtgtgacttatatgaaatttaaattgattttaaatttatagtaaagtcggaggagaagcgaatggtgcagcagaagcaaaaacggcgactgctaatgaaagcgaaaaaacgatcaaaaaatcgaccgtttgctcattacaataattaaaggacaatatgcaattacttaattacgcaattaaataattaataaaatgccacgaagaacaaaatccgcttttaaagtttctcagacttccaatattaaaattagtgctaaacaacacctaaaaatattttttgataaaatagaatcttctaaaaataatgtatacgtatactgtgaagatgatggggacgttctatttagaataaaagagatcagtgattatggacatctttttggtcaaaagttagaaaaactaagaaatacaaaagaaattttttattttttttgtatttttattctctttggaactaggtattactgtattatacaaantaacattataaaaaaaattcggagctgtcgccttattgtccc

SEQ ID NO: 20414 - DNA, 2714 bp, Heterodera glycines
  unsure (1)..(2714): unsure at all n locations
tccattgattcggttttantttggatgatcaacctgcattggttttaatttatcagagtgatcagatgagcccattgattcggatttgtttgggtgatcaatatgcatttgttttgttttgtcagagcgatcagatgagtccattgattcggttttattcggatgatcaatatgcatttgttttaatttatcatagtgatcagatgagcccattgattcggatttgtttgggtgatcaatatgcatttgttttgttgttctgtcagagtgatcagatgagtccattgattcggttttattcggatgatcaatatgcatttgttttaatttatcagagtgatcagatgaattcatagatacggatttgtttggctcggcggtgccaatgttcaacagccagctgctgttgccaaccatgccaatcagccaccattgcacaacaacgatgaaacaaacgaattagcgttttcggttttttattgcgagttcgataggctaccacctcagcgccagtcacatcgttggccaacttatcgctggacaccaattggaccattccgtccacccattgcatcagatcacggtagtcggacaagaagcgctgataatctaaaaaatagtaaataaattaaaattttataatgaaatttttaaataaaagtgtgcaaattataaatcagcccccagttccatacttaattcaaagcaaaaaaatggcaaacataaaacccgatcagtaacaagtgcaaaaaaaaaataatttttttttacaattttgatcacttattcggagaagcctaaggcttgaaatttttgcaaaaaactctcaatcagttcagtggatgcagaaaaatgaggcgcgatcatgaaaatttccgcccgagtcaaaattaaattaaaaaatgtttttatattaaaaaaaatcttgttttcttgcgatggcattttgccccatttttgcagcaaatcactgccaaacgtggccaaattttcgagcgttaggatcatctgaaagcggaactgatggaaaagccgtcaaagttggacgagtcgcaaaccctgcagcaattctcacgcgacgcggacgaagtggagaattcgataacccaagtcgcgcaggaggagacacacaatgacccgaccaacattcagcagacaccaagggcaacaggtagagtcgggagagggggacaaaggttttggcgtcgagactctcgatttctgagttgaaaaaaaattccggaattttgaactaccgggaccgggcgggctgcatttttanaataacacgagtaaaaaattcggttcttttccgttttgtgcccctctaaaaaaatttttaagtttctatgacaatttttaggcgcttgaaacgaatctgaaataaatttaaaaagaatgccgtttaatctggaaactaaagtttgaaatttcactagaactaacattgggagtcaaatttcgattaactcacataaaatagatgttagctttaaataaatgtcacatttgttcagcgcctaaaattgccataaaaagtttttaaaaaaaggtttttttaggggggacaaaacggaaaagaaccaaaaatttttggtccgaagagcaaaaagaaagaagctcttggcttgtccctcccgaattttatgctggttatggtcctgccttttacttctctaaattatttcttaatcgtttttcaaaacttaaaaatcttccttcataattaatttatccttgatttatacacggcgattcaattttgggctccaagtacaattaagttggttttttcgtcttagtggtctgtgagttagtcaccaaaaagggggtctcaagttcaattcctccttgtgtttgtgtataaatttcaattttttgaagcaaataaataaaataataataaatacagaacgccaaaagaacaaatacaaacagtaaaaggtacacactatattttacccttgaattatttaattgtgtgtgtgtgttcgcccatttgaccccgacccgccgatccgagcccgacttacccctgaccggaccctgaggcactaccttgtgcaaattttgtggaggctcctccacagttttttattttctcaggagttgcctacgaaaaaatatgctttttcatttttattgacacatattttattattttttaaagaaaattcgttaactaattgagcctagtaatccttaaaatcggcatttttattaaaacaaattgtattcaaatttccaacaattttcccggcgcctatcggcaccgccgtaaaaaagcgtgctgcaaaaatcataagtgaggtgttaccttcaccaaggcaaaaccatgttgcgtccctgactttggactcaacattccatcatctctgttccggtagctgctactgcacagccagccgcgtctttttctctgtgatgccacgcatgtacaacattgcgaagccttccgtttccccaatgctgcacaggtgccacccatgtaccgttgcgaagcctgccggcctccaatgttgcacaggtgccacgcgtgttccgttcactgctactgcccagccaggtgagccattcaccgaatgctacccatatgctattgcagaaggtccacgcatgcaccgttgtaaagcttaggtagctgctgctgcacgaacatccagacacgcatcttttggtagctgctactgcccagccaacctggactgtgcacc

SEQ ID NO: 20415 - DNA, 1051 bp, Heterodera glycines
  unsure (1)..(1051): unsure at all n locations
accgaagggactcactcggcctcttcgcggcctcgtggtgggccttcgccccccccccccctcccacgcccttcagagcacgacaaatatttcaacaaaaattttgaaaaattgactagagcaatcgaacgctaacggacgacctaatggaaaaaaatccccgaaggagagaatttaattaaatccattccttcgggggaccgtgccgggtgccgcggggtaagcagtgctggttcgtttcatcacggcaccgaaccttttggctagtcagcaatcgttgcttaacttgccagatcggacgggtgcgcatgactttctgaaaaaaatatttatgaaacaaaaaaatcgattttttcaagtgtccgtttggggtactcaaacatttatggggagcaaaaatccaacgcagaattaaagtacaggctatagggaagctattcccgaaggattcggtctccccataaatctgggcgcatcggttcggggggactgccccgaaaacaaaaaaatcgattttttcaagtgtccgtttggggtactcaaacaattatggggagcaaaaatccaacgcagaattaaagtacaggctatagggaagctattccggaaggattcggtctccccataaatctgggcgcatcggttcggggggactgccccgaaaacaaaaaaatcgattttttcaagtgtccgtttggggtactcaaacaattatggggagcaaaaatccaacgcagaattaaagtacaggctatagggaagctattcccgaaggattcggtctccccataaatctgggcgcatcggttcggggggactgccccgaaaacaaaaaaatcgattttttcaagtgtccgtttggggtactcaaacaattatggggagcaaaaatccaacgcagaattaaagtacaggctatagggaagctattcccgaaggattcggtctccccataaatctgggcgcatcggttcggggggactgcccccgaaaacaaaaaaatcgatttttttcaagtgttccgttggnggtactccaaccaattatgggg

SEQ ID NO: 20416 - DNA, 1543 bp, Heterodera glycines
  unsure (1)..(1543): unsure at all n locations
gatcgattggtcgaaaaaatggtggaattaagtgtgcttaggagtcgcaaataatcactctcgggtatgtgaactacttcttctagtaacagttcaaaattcaattttttgcgttgattaatttatttattgaattnatcaaattttgcaattaaataattattatagtatattaaagtggttcattttttaaagatatttagtaattgtttttctatcccttggcagtaccgcaataaatcttttaaatcagattcattttattttcttaaaatttaatattccttgaaattcggcaagttcatttcttagtctgatgctctcatcaagcgcttcttcgtgctttaatacttcttaaattttatttttgaatggtttttttatatttttgataaaaacatatgctcgcatattaaatgattacggtaagtcacaaacaagaatctgtcagaaatttaaatttttcgaattacaattttaaatttaaaaactttgattggagtcatccattttaaaaggtccgtgctcgagcttaaaaagaagcgagatgttttattttatttattttttaacagcttcaaattgcttcttaataccaacttaattactattaacaatttttttaaaatttaataaagcataggtgtgtttcttttaaaattgatgattttaatcaaaaaaattatcgttattaatatcataagtcggaatttttgtacaggacttttttaaaactcaatgaaattttttaaaattttaaagaataatagagtaattaaaattgttaaaataaaatttaatttaatagcttcagaaaaaaaagttataaagcattgaagaggctatgtttttgccatggtcatgccacctaataataaacaattaaaatttttaagtcattaaaatgcaattaagtcaaaatgaatttttatatttaatagttctatgaattctttatttttgttaacatttcaaaagatttcatcgagttttaaaaagttctggacaaaaaattccgacttaagattgtgtggaattcaagaactacatatttttttatactatttaaaaaaattttgaaaattttaatctcatagaaaacacatggagctattgaatgatacttcgaaatataaatatggttgaaattgaaccaatttatgaatttatatgttatacattttttgttttcctaccccttggcggtgtttagaaaactaagaatttaattgtatttagagttgtcaagtttatttaattaatgaaaaaattgatttattgccagtaatttttcttttagcaatatgtgtaatttcaaaaattagatggcagtcctgattttaaattctcattttcaggttaaaaaatgtatgcttaaagataaaaatttgtacaacctaaaatataaacttttgaatatttccttttgatttggtttattttctacttttttaaaattcaaaatacccctataaatagtctgtcaaacagtgtaatttggtcaattgtggggaaaattgttgatcatttcgtatttcgtatt

SEQ ID NO: 20417 - DNA, 1954 bp, Heterodera glycines
ttcttaaaactgccatcccactcctctcacttgaaaaattcttaaaaatttgaaaaatctttaaagaaattaagaaaatactataaaaatgaaaaataaatttttttttgaacttcataaaaaaaattttgaccaataagaatttcatagaaaaaattagaatttgataaagaaaaatttcttttttttaaaaaaggttaaatttttaaaaatatcagcaaataatttttcatagaaatttttttaatgatatttctctttaaatttttacaaaatttttaaaatcttccctcaatttctttaaatattcaaggattttttcaagtgagtggacgggtaacagttttaaaaaaaaacctcataatttgattgaaaataattagttttaatcacttaattaattaattttcagttgatttctctctacgagcgtgccaaggcggacgaacgaaatgtgccgacacttcgtgcgaacactgctcgtaataatggacaacagcaacagcagaaaaaagtgcctgctgctaatggcgggaagaagaataataatggggtggcaccggtggtgaagcagcaaattgttgtgatcagacaagcagagcagcggggagagactgtggcgaaacgagaggacggcggggtgacgagacggcgaaagagaggcaacacagcaacaacagaagttggagagcaagagcagccgccagacaacagcacagacgatgaaaagagtgttgagcgtgaggaacagcaagtgatggaaaagaagcagagaaaggcagcggcagccgcagagagtgtggaaagcatagagacggaggaaaagaagcagaagacgggaaaagactaaaaagagttaagaccttaagacagatgtttttttttcttcacttttttgctgaattttttttttttgggtgtgatcggaatatttgttgtttcttttttatataaatttaaacttctaaggtatgtaaaagtatattcaatactttttgaattttggtggctattagagaaccaaacacttttggctatcgaatgaaattaagaattattttaatttttttttttgtcaaaaagctttcaatttacatcgatttatggctcttcggacggatgattatttttcttcaagttataatccttttaatgccaaaacagttacaacaattatgaatataggccaaaagcccgggcgcatttctagtggacaacgtcatcagtagggcgtgtaattatatggaaatccatatttttttcctggattattggaggcctgaaacgcacgaaaaacatgtttttagcttggtttgaagcttctaggatggattcctatatccattttttccatatttttccatatttcgcgatttatgtccatttttccatattttgggcatgttttgtctatattttgtgtccatattttgggatttttccaaaaaacctctattagaacggcccccagcagctaaatttgcctttttgagcccaaaaaccggaaaattttacaaaaaattattttttcgctaaattttctcgagaatattgaataaattcaaattttcttagaaattaataaatttatgttaaatataagcaaaaaaacgaaaatttcgcttttcgggttgatttttcgctaaaaataagtaaattttagcttatcgtgtttttttcttctaaaatgatttctaatactatatttagccatttttgaaggttttactttatatttaacaaatttaaagaccttttgggaaattcttccctcattggaaaaatttatgtccatatttttgccattttatgtccatattttgggatttttggtccatattttatggccatatttcgcaattttatatccatataattacgcgccctagtcatcagcaccttttttcttgtaatattataaaggattgattttcataattggtggtttcgtctc

SEQ ID NO: 20418 - DNA, 2732 bp, Heterodera glycines
tgtgttattaatgatgatttttatgtgcatgtgcatttattttaattaaatattaataattaaaatgataaagtattatttataattttcactaggaccctattcccttttatttctgagaatgatattctgagaactctatcccttacaaacttataaatttttactaatttacatatataagcagagaagaaaaaaacaaaacaaaatatagataacatggaagaaatgagaaaaaaaaatgcaaaataaggccgaaatatggacaaaatagttgaaattcacaaaaaaaaaaagaaaatatgtaaaaaaaaaatttttttttttttaattttcggaaggaaaaaaaaattcaaagaccaaaaaaaaattttcaatgaagatgcttatttaatacatgaattatagaatgacataattttaatctataattattgtgtttaaagatgaaaagaaaaaaatatatttacataaatttaaaacttttgttaaaaattcattttttaaaggaattttgaagtgaaagagaaaacattttttacatttaatatggttttccaaaattttcaattaaggtcgtattttacaaaaacaaacaacaaaaattcttgagcggtgtctttttgagattttgtgaaaatgccttaaaatgaatatacaatatggaaatagtgacaaaaatctaaaacatggaaaggaaaaaaaattcatgaataaagctcaaaatattattttgtgtttaggtcaaagtgtttaaaaaaataggagtcaaaataaatccgatgcctaatcatagaattcattgttttgcctaagattttggttagcgacatttactgctcgccaagcttttctaaccgaagtactatttttttagcctaatatttctcatcattaaaattcattaactttttttggatataaggtggtcaatgaggaagatttgatatttagcgcattttggaaagccatatttgataggacaaaggtgtaccgaagtaaaaaaaaagattgaaaaaaaaacttggaaactaaatccatataaactatttctcagataagcattaaaaattatagaatatcctaatgatctctacggtacagtattgccttaactccattgtggaacaacaatcttgtttaagtggaatatagataattaaaaaaaacggcaaaatgccaaaaaaggtatttaatgcatgaaaatcccgaaaaaggcaaaaaaaaaagaagacataataaaagtcaacgtagaagcctcaaatcaagtggaaaatgcgttatttatgctcaatatatcgaaactagtgcgcagaaaaaaaaaggcaattgcctcaaaatgcggtctctattcattacttaagagaataagctgaatgatcggttaaacgtggaaagcggggttgataagattataaaagaaagaacggatgtggatcgatagctcaatggtagaactgaccacggaatgggcatacgagtgagttggattcctaaccaaggccaaacattttacttattttaagtattaaaacctaaaaacataaatatattttaatgccgaggcaattgtttgtcttttatctggtcgatgcagaatataattaattcaagcgataataatatttaatatgctcttattttcattttcaatttattattttttttgagagaaaaaaaaatgtgccacgtatttaagcttattagagaatttagagtatgcctaagctgatatgttcagaattctttgcaaacattactgtattaagtatagaaatggctaataatatttactttctttaaagtttttcttaaattcatttttcaacctcttatgtatgtctaattagttggaaaatcaaaaattaatactgcttataaatgttagaatgtacattgcaggtttattatctcttctatcataacagagaatcagattctaacttaattctttcagttgtctgtctttttcttgccaaggcattgaattaaaattgaaatttaaaacaatcccatatgttcgaatggaaggaatagtcaaagtttgaaaataagtttgttctggaactcaaccagatattcaagtgaccaattttatgtctctatgtctctaatatcttatgatttatgatctacgtgtggttcaacactcgacatgaaaatgaatattgaattgccaaggcgtgaagaaataattaaaaaaaaatatatatataaacagttgtatcagctttcgaggtataagttgttctaataaaataatcaattacagaaaattagaattatctaaaatagaaaaaaaatttttttttttttttatatatagaattttcatatcttttttttaagtccaactcaattcttattgatgattccataatggatggagatgttagatgctttatgaagaggcttatcattcagttttatatgactaatttaataataattcaacatttcttatacgtactttcatgcttgccgaagcaaatatttttacggtttatttaaacaagactagcaaatgcaatatcattctttttttttttttttttaatccaagaaggaatgatttccaaatttcatgtcatttacgtcttgttttcatgcgtttctggtccttgcttacagcaccaaccacttcttttaccacttaggtcttcatttcccattcatgagaaattatctgtaagtatactgtcgtttcgatcacttaacgatttatgacaaaa

SEQ ID NO: 20419 - DNA, 1186 bp, Heterodera glycines
ttcatttttcccttacatttcaagtaagattgtgtccgatcagatacaagccgctccgcaacaacacattcctccaatggcgccaattcaaattgatcagacacctgtccgtgatcaaactcctgtccgtgaccgcacacctgaaccagtcaaatctcctcgtccgcagcgacagcgcaagaagccaattcgctattcgcccggctaattgccacggacggtctttccaaaagagggagatgttggatgtgttgatatttaatattattaagtttcgacacgaatacttttattgattagttatttgttgatgggtactctcccatcgactcattctttggatttgtgttattttgcattcggtgtttattttcggactctctaatttgactccgtcgttattttattattattttgtgattctaattttattgtttattcatttaataaatttatcttgtttgtgtgttagcaaaacacaacaaaacgttatattatctttattttaaagaattataaacggctttattttgttaattttttaaattaatttatctaatattaatttaatataaaatatttgttttcaagaaagttaattttttactttttttaaaaatgtatatattttttttctcattgtatcttttcataaattagttttttaaattgaatggaccgaaaatgatgggcaagatgtacaagcgtaatttattcaaatcattttttaatttgatattgctttataactttttctttttattatttggtactataaatggtataataataattatttatcattagaatattttttcatgcacggatgttaatctatcataaaaaaataaaatttttgtttgaatattaatttattgtttcaaatagtttttttttctttatttatttatcgagcaaccacaaggtattaaaaaagtacatttacagtggtgcaaattaaaaaaatatatagcaacgaaataaaataaaataaagttcacaggatggtacaaaatatatattgaaaacaaatcaataaaatgtaaaaggtacccaatgtttaaggcagacaaaaacagcattaagaatttagtgtttctaggagatagtttctgaaaatcttgtatttctgaatttccattgcctctttaggcagtttattccaaataaatatagttctattaaa

SEQ ID NO: 20420 - DNA, 1837 bp, Heterodera glycines
aaatgttttaattttttacgtttctagatcaaatcatggcccttcttcgatgtcctgactgcatacattctgagcatgttgaagatacgcgcctctttagcttaagagtctaaataaattatttaatgaggaactcctcgctttcaaaatgacctctccctaattgctaactcatttataaataaaaaatatttcgctaataatgatttattaaaatgagttaaataaaattaaaagttgtctgtccactactttgagatttttataaaaataattgtttaaatttctttaaaaattaaaccaatgattatataagaaattaattttttttgcttaaattaaataaaaattaagccttgagagtgatattttatataaatcattgtcaaatttttttaaaattttttgaaatttcctttcatataatgattacaaattttttatcttgtttattattccttaagtcgatttattttgtatatttaagaattggcgctaacacatttgaaattattatgttacctattataagttgctgacttggaagatatgtacacatcttaagctaacaattttaataggatttttacttcacgcgtttcgttcagactctgatataaatctttctgtttgtcatttattatagagttattcgtttgtaattctcaaaggttcaaaattaatatcttaaattttgtaaatggaggatattattttaatatttaaaaatttgatttcaattctttaatacattttaaaccttattttgttattccattttctgtttttaatagaatggtaagtcagtatattagatgtaaatcttctgtaagaaatctttttattgtttacaaattttaattaattttggttaaataggctttaaataaataaaaaaaagttatttagaaattgtataaatttttaatttgtttgtacttagggtgtaacataatttttgatacccaaattttttttattaatttttttttttaatttcaacaaaacacaatcatgattcaaaatacccgccattattatcaataatatgttgccattattctggcaagagatcaataccaatggaaaagtatttagggagttagagttaagtaagtaaaaatggtaattttagaggtaggtatttttgatggctgatttaaagaaaaataaaagagatacagagccagagaactagtgattaaatagagcaaagttaggactataagaacacaaaaatataaaattttaattacaaaaattgaattattggagagccgagactgaaagtggtctccaaaaacggcatttttcaagaccaccaagtaacataatgttttaaaagtggttttggaaattctgaatttaattaaacaaggtaaatcgggtatgttgagttcgaatatggtcttagatttggtctctgggatcgcaacaaacctgtacagcttgaacttcatgcatggagttggagcagtacaagctcaggttgaaaagataggtcacatttaaggccatattcggattctactggtctaaattgtatagaaaaactaagattttgttatatcagctttggtttttgaccataaaaaattcgagaaaaattagtggaccaattttcaattttggcatggtcgggaaaaaaggcagaaaaatctatcaatcgaataaaaagtgaaacgatagtaagatataaaagaggacaccatgaagaacaaaataaaaaaagaatcatttaaataggctcagaaataacggaattatgaatttttaaaaattggaaaaaatttgggtatcaaaaattatgttccaccctaagtatttgattttttaa

SEQ ID NO: 20421 - DNA, 1751 bp, Heterodera glycines
ttttgtctaatcttcctgtcggggcacctagcaattcagaataaactagggtgggtcgggaccggtaattttgaggtaaaccgggaccgggactttttgggttgaaaacccgggactttttggctgcgaaaaccgggaaaaaacgggaattttccggtcccgctcaaaagtggtaaaacttcggtactcagttgtccgtgttttggtcccggtcccgacctaccctagaataaacacatgtaatttcgtaacaatacaaaatttgattgggagacgttcggccgcggaggtaaatgattcaccgatgaaaaagcatcagcaaaagcagcccattgtggatgagaaattgcgaattggaataaaaaaaaacaacaacaaaaaagatgggaagtctataggatggagaaatgtgatgaagaattgaataaaacgaaaattgttcatcatcatattcatccttttctccatttccttccctcaattcattggccacaaacatttctcggaagatttttatttgtttttaaattatctcttacattttgtaaccaattggacaaaaaaatggatcagggttggtacagtatctctatcataaagtaaaataaattttaaaattttcggttaataattaagtttttcagctatgcttataaacaatcaactttcagaccaccaaacgacgacttttgggccggcatatggaagcgaaggagtcaaagtgaacggcacggacacaacgacgaacaaaagcaacagcaatggtagcagtttgaaaattcataatacataaaaatgaaataaatgaaattaaattcattattgggatattttgaaagaaattcaaatttaaaaaatttttaatcaaaatcaaataatttaaaattaactaaaccactgtatttgtagcataatttaccgaaaatattttacatttatttattttggaaaaagtttcaacaatttagtaacattaaaaaataaagaaagaaagaaagaaaatttattttaattcttccatctttataatttaaatttcttgacaaaaaactgaattatgctaatgaatatgtataaatttaatataattttgaaaattcgtttttccagagtggacatattacttgtacgcctttttaattttggccattggcgccatgggaatatatggactctatcggctttgcagaaggagtacgtttacttataaaaaagtgaaataaaaataataaaataaaaattattatttcaagtaataaaaatgaatgaaaatctttaaaattgttatttaaaataataaaaatgaatgaaaatttaagtttgtctttgtcgcaaacgagccattgcaccttttgatgacacagtgagttgccggagtgtacaatcttcttcgggctcgacgttttcggcatggctcgtagagctgaaaatggcgtgtgccatctcagccagaagaagagaagcggcaagagaggcggacgtggagcatgtggaggcggagctcgacatgcacgtgccggagacggaagagcaacgagaggaagcgaaggggcacgggccggagacgaacacggacgggaaggagatgcaccgggagaaggtggatgggccgaaggcggatggacacggggtggaggcacacacgcaggaggcgtagcggggcgaccgtccggggcggaggatgcgcgagtgattggtgttacccttaacgtattatctctaattacccccccccccccaggtggactact

SEQ ID NO: 20422 - DNA, 542 bp, Heterodera glycines
tttttttttttttgagggaagattggggcaggggcttattgtcaatttcgttgggaggccccctccaaaagttcgatatttttataatgtttttttggaaaaaatgtcatttttaccttgtaaaatccgcgaaatccatcatggcgccacgtctgtcgcacacaatcagcgagtccacgatagtgatgtgcctaaacaggggcgtatctagaaacatttttcggggggggggacccgacctgaagaccttttttttttttgctatttaaccaataacttttttccaactgctaggtaaaaactccactttttcactaaaatgacccaattttggccgttttaaggcaaaaaacttgtaaaaatagtggaaaattgaggtccggcggtgccgataggcgccgccgggaaaaatttttggaactttgagtgctattttttacgaaaattttttaaattttcgtttggggggggggaattcgaaaaaattttcattatttgctggagaattttttaaaattttcatttcgggggggggggggggg

SEQ ID NO: 20423 - DNA, 1664 bp, Heterodera glycines
ttttcaaaaatgagtttttcatttttattcaattccaggttcgggggttcaaaatggaaatcagaagcgaagcgacccctctacctctgcctaacgaaaacccctaaaagttttacacgaaaaaaataggaaaattcatcgaccaaatttacacttttaaaggtaaaaactaaaaaaatgtggttagaaaatcaaaaacgaaaattaaaaataatttttgaattttctgcacatttaattataaatcattaattaaaggatttggcgtggagaaacccccccccccccccgcaaaaaaaaactgaccagaaaatcgcactttcaacaggtcaaatgggtggcaaatcgctgtgctggtaagtccaccggcaacgccgccaataaaatgctcataaccggtgaacatttttttggcaacaaattggtagcgaaaatataccctaaaattttcaaaaaaataaaattttttttttaatcattgagacttgaaaacaaaggcctacaaatttggagggagaattaagtattgaaaataaaatttttgagtgagttgccttttacgacaaatagaaaggaagaagttgattgtgggccccgaaaatgtacaacaaacaaaaacaacaacgaaaaaaacgacagaacgccaaaaaatttttttttaaattttgctgattgtgagaaaagacaacttcaatttgccgccggggctgctaaaaatgacatctgcaattttcattatgggaaatgaaagtaaattttatccaagtcgaacatttagggacaaaaaaaaagagcttttccccgttagggctttctagggtcggaaaaaccgattctcgcatccatttgtgcccattttgaatcccgaacccggattcgaacaaaagtcaaaattaatttaaaatttgaaaaaacagaccaaaaaaagtgcaaaaaactttcaaaaacccatttttttaacttgtgcgtttcttgattattattattattatgtccaaccaaaattcgtccaccggtggcgcggacagtcggaaaattgaccatttgttcaacaaatatgctagaggtttgttcattttattatgatgataattccggtgtgcccttggatcgtaaaaaaataacgcggttcggaaaatttgaatttacaactttttgttcgagtttacattagtagggattagcattggtcaaaatgttgtcagagtatcgccccgtgatcaaaaagtttccatgacttattatgacaaaaatttagcaaaaccaattgaattttaaattttgttttttatggtccatcctaaggtcgagactatccctaacaaaaaaaaatttttttttcctaccccccccccccctctttttcagatgcaaaggacaaagcgcagaaaatcggacccgatcggatcggtcccaatggcatggtgcgtttcttgcgcgacttgaacatcgagccaacgagtcgggcagtgatggttttggcgtggaaaatgggtgctcaaaaacagtgcgaattcactgtacaggagttccgcgacggaatttccacactgatgtttgtgtctttattttaatggggagaaatgcagttttaaatttttaaaaattgacaaattcagaattttaaggagtttttgagtcgagaaaatttttttctgcatttt

SEQ ID NO: 20424 - DNA, 1783 bp, Heterodera glycines
ctgaggccgtgttttgttctcccattcgtttattgttttgtctgcgatgaacttttgttcaaatgtctttttaataaattttatttttaattcttccattattgttaaaaaaagaaggtaaataaactaatttacttaattgagtaaataatggaattatctcatcagaattggtctaatgaatgaccaacaaaagtcgcattttctactaccaccaccccgacctcggcaatttccactacggtccgcagcatccgatgaaaccggcacggttgggtgcgttcgccccttttgacgtgccaactctgaccctttaaaatgttcagcggccactcacagtttggtgctcaactacgaactgcacaagcatttgacgtgtgtccatccgcccagggccacccaacatgacttggcccgcttccatgcgcccgaatatgtgcagtttttgaagcggatttcgccactgaacgcggatcagtacgagggactgtttaatcgctttaacattggcgaagattggtcggaacgcggagggagggacgggcggataacaaattgtacggcatttcagtcccgtcttcgatggcattttcgacttttgttctctgtacaccggcggaacactcggtggttgctaaaaggaatgtgtccttaatttgcttttgcgtaaacagagggcgccattcggcttaaccacggccaagcggaaattgcgattaattggagcggagggttacaccacgcgaaaaaggccgaagcatcgggcttttgttacgtcaacgacattgtaaaacacacagaaaacagatggggaaactgaaacagagaattattgaaggtgatcggcatcatcgaactcttgaagtgccatccgaggtgatttcgggatgggcacccgaagatttttttattttttgctcttccggcctaaatttttttgtcagatgttattttccgaaatttttggggcttcgtgggaaaaaaccggaaattttagccgttttcgccaaattttagccattattacgggactgaattaaaccatcggccgaattatttttttttatcgcctcaatggcctttcctattttcccctaaagagtcctttacattgacattgacattcaccacggcgacggcgtccaagaggcgttcaacctcaccgaccgggtgatgaccgtctctttccaccgctatggcagctatttcttccctggtttggcacaatttttaatgaaaaaaggtggaaagtcagtcccttgccttcgtttgccaaggcactggcgacatgtacgacgttggcatgggccatggccgctatttttcagtgaacgttccgctgagggaagggatggacgacgaaagttaccacagcggtaattgcaaattatttatcattgattactgtaatttggcattttcagtttttaagcccgtcattcaggccgtcgtggacaatttcaatccttcggtgattgttctccaatgtggcgccgattcgttgggctccgatcggctcggctgttttaacctcagctttgacggccacgggtatgtttagaatggcacaaaagagagagagagtggttgagaaaaagagaaaaagtctggccaaaccattggacaaattgactcggaatacccttccaaattcattccctcagggaatgtgtccgctttgtcaaatccctcggccttcccctccttatcctcggcgggggcggctacacattgcgcaacgtggcgaggtgaataacacaaaagacaaaagaggagcaaaata

SEQ ID NO: 20425 - DNA, 2633 bp, Heterodera glycines
  unsure (1)..(2633): unsure at all n locations
gaattggaatttttttcaaaaatttcttcccccaattttttttttcaagagaaaatttttaaaaaagagcgaataatcaaataaataattattttttaatattttcaactaaccacttttttccgaaattcattcataaaaagaaacatttggctgccatttgcttcataaatttatctcctttccataaaactaaccaaaagtcatcaaaacgagtaataaaaaattaaatttttaattattttttaacttttcaaaatgaacaatttcgccaatgattactttcatttaaccaaatgttctgctgctgctgtgttctgcttctatgttttcttcttattttctgcttccatttgcgttgcgcagaatgtaagcatttttttatatttggcattctttttttttggaatcattttgccagagggcaaaagaaaacgtcgcgttgcatattaaatatgtacaaaaaatttacataaaaccaatttacctttcaaaaatgctaaagacattttaaattcatttaaatgaaattattttttcaaaagcctatcattagggggtgtaaaaactctcgggctcgaattccggaaccgaaaacccgataccgatacgaaaaaacaaaacttgagtcgaggactcaagaacgagactcttgaacagcacaagatgaaagcttgcaaaaggggcggagcggagtcttccgatggcacctggcaaagaaatgacttttggcactaatcaaaagtgaagagctattgattaatggcaaaattacaatttcagcagaagcagatgtccacgtccgacttgttcaacgcgttcatcgacggcttaacattgtttggcagagaatctttggtgcccaattcttccgcggatcatccgcagcaaatcaaagaacagctacaacggctacagcagtggattagcaatactgcggcagaagttgtggtcacttacgatcattttgagggcaaatatttgtgccaaccgagggcaaacgaccgaagcgatggcaccgatttgttcagtgccgtcagttcgcatttcgaaatgtccgattggcaattgaaaacacttggcaaagtgtttaaagcggtggaaaaatcgtcggagcaaaagttccaatttttgcaattgctgttctcgtttggtgccattttgggcgcccaaatgggcgccacggcaaaatgcgaaggcggcaattgcattggccaactgttgaaggcgttcgaatgtgccggtggaaattggaagcacttagaaaacaggcaaattaattcaggaaagaatttccatttttccttggaaattcggcatttgcgtgttattagggttttaggctcgtttttagctaatttcattaaaataggaaatttaaaatttaaaatcatttttcgatacacttagggctaccgaacgataccacggttgttgtatttggtgaccaatgaaaaagttatagctaaaaacttgtgctcgtacgaaaacctgcacgcgaccccttctctcccccacttcttttacgaaagggtcccccattttggggcagtttgcaagcgaaggagcaggaggggagggtcgacccttcatgcatctttctaaacccggatttatcggcctaatgagaagtaccgcatgttaaaagtgtaaacgcgtcgagttataatttaaatttttaagtatcccaaattttggcatacttactgtgatggaaagaatgcatgaaaaattgatggaacgaattttgctgaaagcgcattcggaagaaactgaggagcatcgacagcaaaacattcgtatgccggcggagcaaataaatgggctcccccctgacaatccgggcccgtagaataagaaagtggttatggttaaatgaccacgaagttgctgtctaactgtaaattaattttatccctctaattggggccatgtgtctcatattatcccatgaatagaagaaaaaatgaattttttatgtgcaattaccccaaaattgtatgtgttcaaataacccggtacaataagatcatagtttatggtcggtcgtttgacggaggttggtagtcaaaacggcttcttattcaacgggtttaccaccaaattcgttgtcatttgaccaagtcatttaatcaccttcttattctacggtccccgtctgtagacaatctgtcagtatccgatttttttaagcgataatcgcaagatttttgataatagctcaaaaaaaaaaaatttgctgacgaattatccactgacaaatgtctattactgacggattgtcctacactgacggattgtcaattggtcttattgtccactgacaaatgtgtctattactgaccgattgtcttctgacagattgtctattgatcctattgtccattgacggattgtccagaccccaaattaatgcgtcaattccatccccgatttgtcatttttagggaaacttttgcttctcaaagatctaaacattggaatgagtggaattacagcatttcaagtggtacttttttttgccgaaaaggctagcaatccactcagcgataagttttttgccaaattttgaaactattgcccacaatcggaccggatgattntggcacgcaatttgatgcaaaaagtgctca

SEQ ID NO: 20426 - DNA, 2382 bp, Heterodera glycines
atttttatcaaaatttacaaaaggcctatgttataaccctgcgaaaggtatcgtccttttaaaaccatatttaacattacctatcgaaataattatgcctttgaattatacaagcataaagaagcaactaatagagggtaagaatgggatataccccataaacataatcaacatgattataaaaatatgtaaataaaatttataaagaaaaatcataaagcgtccataataaaaaggcatatgcttttacatatgtaataaacaaagcatagcaagaaatttcaaatatttaaggaatttgagaatcaatttctacacgtgaacagctcaattgataaaatataaaaattaaaaagataatttgtaatattttattaatccaaatcaacaaaaaataaaacaaattgcagaaaactaatgttttaaaatgagtgtagtcaggatttctttcgcaaatgaccaaaaattgatttattaagtttgggtgtcctcagcgctcattaaataaggtgtcaaataaactatagaaaaaaccacaatttattaagaaaaataaagaaaaattagaattttacactaatttaaaacaatataaatatttggtaataaaaattatacacaaaaatacaaaaattatttgaaaaaataataaaaataataaataaccaaagaataattgacaaaagaatttaatggctaaaaacagaattaaataattagttataaaattactatttatatgttcaataaaagaaaaaaaacaaatatacaaaatagtaacgattgatttaaattatttatggaaaaatagcaacaaaaaattgcatttgcggagcaatcatgcaaaattaatattcgtattaaatatttttatcttttttcaactgtttatcgttcattatgaggtctgtgattcatgtaaagtgatgaatggcttttcttcacttatggtttaattttataaagttggacaaatatatgatttagtttaatggaaagacgaagatcacttgccattcataaaataaaatacctttaaccacttaattaattaaaataatgcgtttataaaaatattaaatcaaatttcgttgaaaataaagttaaagcggcaagaaaattgtttttaattttatatttaaaaatacgatggtcaaattaaaaaatatagtattatttatttattaataaacttaaaatacatcgaaattaatatttataaatagagacacaagtagtatagggatcactttcttgaccttttttttgccccccccccccctccctcgcgcactcaacccatattcaaatgaaagcaaaaaaaaaattgatgaaagcatgtaacaagtgatcagatatattattagtcggatgtgaatttaccgaccagagcaaaaaaaaaaaacatttagaaaaatctaaatatttttttatgattcagttcctcctatagggactataaaaatttcagataattgttgtccatgtataattcggttcctacggtatggcgtaaaaaatatttcattacgattattatcatttttgtctttgatagattcttctggcggatttaagtaatttatagctaatgatacaatattttcgaataaatcatcaatttctatacgaaattttctcatctgcttccggtatttataacaggttgccatgctatgttttgaagagttctcattttcctgacatttttttatatttttatattttaaacaattctcaaactcacccagaattttcgaaatatttttatattcctttgaaatttgtagatatagtagcctaatattttgcgctatctctaatattttttcatatagttgatgtattcctggagcactaaatgcgatgatcatatatgttttcgcatagaaagaaatattattacaatatgacactaaacgatctgcctccataataatttttctttcttttttccaccttgtaacaatttcatttttgatgaactgtatttcttggtcgatggttgtcattttctgatttaatttttattctttttggtactcaaattctcttttattcgtgaagcccaataaaatcccacactacagattgaattctgttttccaactccaacattttggtgtgaacccggcgagattctaaatgtagttttctcgtttcactcaatcccttaagtaccttttcctctagtttggtgacctgatcgaaatctttggaccgatcgacctcactccacattacctcaactttttcagactcggaattaattttatcaaaaatggtgtaaatttcccagatacaatctgacatttttacataccattctcgaacaccgggggcatagggggccttttctcgggatttattgcccgattaagg

SEQ ID NO: 20427 - DNA, 2203 bp, Heterodera glycines
tttccctggccctttttccctttccctcagatcgggtccctttcgtttttctattggtctgatcagttcccatttccatttcaatttattcgttgttgctaattagaaccaacctaccaacgcccaaaaggcggattttttcgttggaaaggttttctcagttcaatcaattcataaatgagaagccattcttgcgaggcaaaagcatggaaaacatagagcgcgattgatctcgcgggtcggcccggcacaaatgttgcgtgaaatgtgcggcaccgatcactcccttgggaagaggagagcacgcagaacacatcgcattttgaacattgtgaaagagggcgacaaaataaggcgaaaattattgtattttcggtgttgactccaaacgtccgccccacccctcaaaatccacaatctcacagggattctgagggcttaacgatttcaaaagtaaaatctgattgcatattcgtgatcagcggcccaaataacccctaaaatcatatttttggaagatttttggtgaaaaaaattttccactcaaaaatcatggtcacacccctgtggtcccaaattacaaaatcacttttatttctataacttttttcaaaaaagtgataaaaagctaaattaaaatttataaaatagagcaaaaaattgcggattttttgagtatattatttttataaaatactttttcagaaggcccacaggcgtttttttctgaaaaatcgaatttttccagaaatcctttgaataacttttttattttggaagatagaaattccaaataaatctcataaaattctcccaatttttctctatttttaaagcattattccactaaatttgaccaaaaacgaagagatttatgaattttcgaaatttcataggattttccggggctcaaattttgacgatttttcaaaaaattttaaccaccttccaaaaagtctgaaacacaaaataaagcgtatatacgtattcagcacctcaaattatgccataaaaatgcattttggctaatttaggagcaaaaaaatttttcatgaaatgcaaaaccatggggtcccccctatggttttgagtttcaaaatcacaattaattttataactttttttaaactcatggtaaaaacatgagataaagcacattagatagagcttaaaattctctacaaaaatgctcttagacaaatttccgctaagatcaacgcctgacgagttataagcctcaaacggaaatggggagctcaattccggaaaatttttctatttccggaaaattttgaaattttttcaaaaatgccaccaatcgatagagctcgaaaaacggttgcttgaaagtggtctccgttttcctgggaaaaatctgcaaaaaataataaaattcaaaaacgaaaaattttcgagggggcctagctcgaaaaattttgaaaattttcaaaatctgaaaacgccatcggatgcagctttaaaaactacacaaatgctcaagcggcgccaacccgctccgcttaacccctagcgagttattcacgaaaagccaaaaccggcattttgagcgccgttcagtcgccaatttctacaggctcggcatttgatctgatcaaaaagtgatcagtgacaaagttgtagccaacatgtctggggtgtgccctctcagcggactttttccgctcccggttccctgagaaaagttacagcccgaaaaccgcgacgattttttttatttggccgtttcagcgccgctggcgctcaactggccgccggaccgaaaaatccttatttttcccagatgcgcctcaaaaagttgcttaagcaatgccgcactttcaggagcctccgggcaaaccacgggcacttataattttttctacgaactgcaagtttattgtatatatatataaactagcgtgtcgcgcagtaattgctcggtgtagacagtatgcttttggtatatatgggcgggcgctgacatgagcgcttcgcgcaaaggacttcgttgctagtgcatgcgcgattttgaaatgaatttatggatgtgacgttttttaattttttgatggaaattcggccgcttcgcggcctcaggacgggcgcttcgcgcccgttttttagcttgttaggccacttcgcggcctcagtcgggcgcttcgcgccggtttttcaatttttgttggccttggacgggcgcttc

SEQ ID NO: 20428 - DNA, 2182 bp, Heterodera glycines
gagtcaatttgtaccaattaatatattcgtattttcattattctctttctcttcgtttttataaaatttctttttactttacattgtatgcatcaaaaataatttgctaggcttttactaaaatgagtaggtagggcttccaattttaggaataattttcacataggaataatgcgaaatccaagtcccaactttttttttggctcgggattttaatttttcaaaaaaactagggtggagtcttttccaaaaaaatctgggtcgcaaaccgattaccgagaaatgtaagggcctcaaaagcctcggaattccatctcaagcagtgatgattcaatgatgatatgctcttttttttagttttttttttggattttttctgaagagctttgcttaaaaggtttttcttcctgctactattaaggcattccatcgccctgggcggcttcgtctcctatcagctaatcttgctctttttctccattccggacatgttttgattacgctgcccacccctctcactgctcgtcgctgtttcgccccatcgctagtcgccccgcgggcatctttttaatctcgtcatctttcgtcgtgtttctcccccccccccccgccctccctcacaactcagcttcatctctgatcactcactactcactcatcattttgctcatttccctcatttgtcttccatcgtccgatgagttgcctccagcagtttcatctctgatcacatcgttcatccccccccgcccctcatttctttttcacacattccgcgatcttctcatccggatccatccgatctgtccctataaagagggaagccgcttctccttgttttaccaatttgcaataatgcttttgctcggcgtgaaaaccctgtgatttataagttatcataacacttccatcagccaaagggagcggcagcactataaatagcgaactcaatgaaaacatttgatcattctgctgatcagcagaaagaatcagcagtgtgaatgtgcggcatgccaattgaatttctttctttgactttgtgcttttatttgtccatccgcttctttcgtctttgccacccatttcccctttagacacttttatttattttttaaaaaatttaattgactcacgaggagtctcagaatgattttaattaaatattaatcaatttttattttttatacataaaatttagaagcacaaaaagatgaactgtgacgcccaggtgaaggcgtacaaatttgtcgcttattccgcgctgaccttctcgctggccgccgtgctgtccgtgttcatcatgatgccgttgatgtacaactttgtcagccacgtgcgacgtcagctcagccaggacatggtgttgtgtcaggtgggggacacagaaagtcaatattatttatttgattaacgtaacaaattttaaaaaataaaaagaaattatataaagcaataaaatattgaaaaagaatttagtagtatttacaaaatagaaataattaatttaatgaattataattaatttattaagggttcgtcctctgacctttggcgtgaggtcgaagtgttgaaaaatgcgccgttcattgctcacaatggcagcacttcatcgtcgttcaacactgctcgaacagctcgacaagcgtacggaggcggcgccgaagttggcgcaggcccagcgcacggagctggcgcacccgcggcgggcgctggacgcgcagcggcgcccggcttttgtaaaccatgttgcgtgcctggaccgcctggtccccaggggcgcccaggacggcacggaaagccgggcaagccgggcgcgcccggtgtgcctggcgccgccggcactggcccagcaatttgtaagcttttccatttgaattaaatacctcaaaattaatgcataaatttttggaaaattatggactaaagccctcaaaaaaaataaaaattaattcttttagtaaaaaatacttattatctcatttcttaggcgaggccactccaccgccgtgcccacgctgtccccaaggcccacccggaccacccggcgaattgggtccgcctggcgaggttggagccggtgagtcattctcatatttaaaaaataaataaaatattttattttaagagggacctaacggtcgtccaggacccgagggttcgcccaggagagccagggaccaaa

SEQ ID NO: 20429 - DNA, 1215 bp, Heterodera glycines
  unsure (1)..(1215): unsure at all n locations
aagaaaaaataaataaaatggtttccataaaagggccngcggnaattataaaanaaacaaagaaatccctgctagggtaataattacaagaaaacacaanactcgaaaaaacaatnacaaaaaaagaaaagaaaacttaagacatcggtgaaacggattaagtgaaataaaatggaaaattaaataaaacaatccgaaataatgttacaaattcaaaaatgcttttgtcataccatcgaaagaaatttccagtcataatgtcgtgttcacgttgttattgcactcatcgacaattttgcccacgaattcgctggcggatgtattgtattcattttgttcgtccgtttcgaagtcgccaaagagagggacggccgagtcctaaagaaataaaaaagcataaaaccggaagtccaaaagaattgtcattcgcctggtccatcccggcattgttttccgattcgcgcatttcgtagcggtaaaactcttggaaattgatcagacagaggacaaagtcgtggccttgtttgcagtcgagcagttgttgaagtgatatcctaagaaaagaaatcatctggacagaaacaattagaaaatggttgaaaagagacacaatttatgaatgtttaataaaaagtaattaaaaccaaaaatgtttcttttttggaatggtcctcctcttattggaaaatggcccaatctttgacagacggaccttccgtcttcaatcggcttgaccatgtcaaagaattggtcacaaaagtcgtcaaattcgggcattgctgcttcaatggccaaccattcgttgtaacaggagcacaactcagtgtaaaagaaacgaagttcgaagcgagtcagcagaccatcctcgtccacgtcaagcaatttgaagaaataggccattgaagacggatgctaaaacagaaactgccaaattgtgccaccttttgtcagactgaccaccaaatgattgtacgcaatttggaagacgacgaattcttcgtaactcatcgcctccccgccattgtgtacatgaacttcaaaaaggcggtccacaaatgtttgggtcatggccccgtccaaatgtctcttgaagtcggccttactcagaaagtttttgtgatttgaatccaacatttggaatgtggcgttttgttcgtgtgtcttctcgggggaaaacggaacgaaggcgaaaaaaatgaaaagggaaataaacaa

SEQ ID NO: 20430 - DNA, 908 bp, Heterodera glycines
gctgaccaaagcgtccgaaatgcgaatgcgcccactgtgtttggggtccaggaaaaagaaaaacatcgtctccactgtgttcatgtaacaaatttgaaaggtttccttaacagaaagggtgaaaaaaagaaagaaaaaaggcaaatacctccaaatccttcaaaacgtcgacccgtggcatcacttcgtgcagataatagtcacaaagttgctaaattatgatttatgttccatatattgttactattcgttgcattttgttaattgactcacctccctgctcaaacatcctgtcgaattcgggtcgtactgtgccattttgatacggtatcgtataaacacaattttgagcgataaatactccacgatggtttcaatttgaatgcgaaaatcctcggaatgtaaatgccaatcgggaaaatgtgcagtgaaaaaagtgacaggcgagagaatatttgtgagtgattttccgacggtacgcagcacagactaaaacaaaaaaaaaatgttggaatttgcatataatgtgaaattctcgccattagtccgccgaaagaaattgtcttcacagtttttccttcagtttcttgaagagtcacatctttggaggcttctaaacactcgacaaagtcctattaaattaaatattattaaatttattgactcattaaaaaattcatattacgttaatgtcctcatccgacggcaatttattttcctctctttcgagtataattttcagacagagcctacgaattgactcaggcacaagttcttcacgagttttgtttgctgatagtggaagacgtaacaattgtccatggaactgaaaagtctaataaaataagcaaagaatgcgcgacaaacttcctcagcaaattttttatacttccgtaccattccttcgt

SEQ ID NO: 20431 - DNA, 1586 bp, Heterodera glycines
tacaggtgaattgccatttagcgctcaccccaataacgtgccaacgcctggataagggagggaggagggccatgatgtgcaacgttagggcacttccggtttccattgcattatgcgatgtgtcaactccaattattggaggaaaccaagtgcatgtcggctgacgcaaagaccctaacagactaaaacgcgcctaggtagcgaagctcaagaagcgcgcagcgctttcccaagcgccaccctcgcatgcacacacccgctagttaatatatacgttatattgacaaggagtttcgttgctaaaaccattttctcccggccgaaggccgggagcgccctgaaagtagtggaagggtcttacaactttttgaggagaatccgggaaaactatagagaaaaattcagcgcggacgactgagtcccggggaccgatttctcactttttcttgcgtttgttagcccataactttttttctaaaacccgaatcaaaaagtgcccgctgtgagggcactccccacaactgtcctctacatgatggtattttttatttttttattagagccaccccctggcctgcacgcttggctaattgaagtgtgctcaaaatgtacacttcagtaccaggcgaataactcgccaggggttgctttgaccgaaaaattgtttctgagcaaaaatgtgtagtatttgaaaggctatccaaccaagttttaaaatttcgaaaattttgaaaatttttcgagctaggcctaaaaaacggttttcgggtttttgaattttaggattttttaacgatttttcccagagaaacggagaccacttccaaaacatagtttttcgagctctatcgactggtatttttttcggaaaaatttcgattttttcccggaaatagaaaaaatttttggcctgagcgggacatttgagtcccgggcctgtaactcggcaggagttgagtttatcgaaaaattgatttagagcaaaattgtagagctttcgaaactctatcgaatggtgtaatacatgtttggaaaatttcaaaatttttcgagctaggccccctagaaattttcaaaaatttttttggggtcgaaaaagggtgtgaaaaatatttttctggggtaaaataaggtgctgagtacgaatatgatgtctattttaagtttcagaattttgggaattttttaaaaattctttattttttggcaattttttggccctcgggattttggcctaatatttgaaaattcataactaacctcagggtaagtcaattttcatacaacaaagctttaaaaatagagaaaaatcaggagaattttatgggatttatttaggttttctaacatcaatatgaaaaaagttattccagaaattctggaaattttagatttttcagaaaaaaattcgtaactgccttctgaaaagctatttgagaaaagtaaaatactacaaaaatccgcaatttttttctctataatataaattttattttaaatttttatcacatttttaaaaaaagatataaaaataaaagtgattttgaagtcgggtccaaaggggggagcacatggtttttgagtgg

SEQ ID NO: 20432 - DNA, 653 bp, Heterodera glycines
aagaggaggaagaggaggacgaaagcgggcaggcgcaagacgacgaagagcagggagacactggcgaagagaccgaggcggaagaaagtggtgaggagaccgagaacgacgaggagggagaaagtcgcgaagagaaacaggaggaaaacagtggggacgacaaagaggaggaagaggaggcagaaagtcggcaggaggaagaggaggaagaaagtggggagaagaaagaggagaaagaggaggaagaaagtggggaggagaaagaggaggaagaggaggaagaaagtggggaggagaaagaggaggaagaggagggataaagtggggaagagacagaggaggaagaaagtggggaggagaaagaggaggaagaggagggagaaagtggggaagagacagaggaggaagaaagtggggaggagaaagagaaggaagaggagggagaaagtggggaagagaaagaggaggaagaaagtggggaggagaaagaggaggaagaggaggaagaaagtggggaggagaaagaggaggaagaggaggaagaaagtggggaggagaaagaggaggaagaaggtggggaggagaaagagaaggaagaggagggagaaagtgcggaagagaaagaggaggacaactgtgctgaggagaaagag

SEQ ID NO: 20433 - DNA, 2550 bp, Heterodera glycines
  unsure (1)..(2550): unsure at all n locations
caatattatgaaatgaaagaaaataacccaaaaattggcgacaaaataattgccgaaaaattggaaattggatatgaaacgatgagaaaatggaaaaagaaatttgctccaattcttttttgttgatatgtgtgatttattttccatgttctggaggaataaatccattttttcaaaattttatttgacgtttttcttaaatttgattaaaatcgctttacaaaatttggtatggaaacgtgaagacaattatggctaattaattttataattaggctccacacaaatgagttagagtaaattatttcacattcctttgagaaattttgatttgtagaataatttcatgcatttaaaaaatgtattggccacaattaattaaacatttttttattattttttaataatacttaaaatttattttttgaaaatccgaaatcaatggaagaagaaatttgctctaattcttgcttgaatgcgattaattttggttgtttagtgctggaagcttttaaggataaatccattttttcaaaaattttattttatatttttttgaaatttttgaagaaaaattattattttatttgtcaattaagatttttttataattgactaaaatagcagttttagaaatttgattggatatgaagaaaattataactaaattacctaattgttttttataattatgcctaaacaaaatcagtgaattcgattaaatggctacgctttcctttgtgaaattatacaaataaaattatttcctttatttaacaaagtttcatgggcctaattgaaatttaaacttcgattattttttatattattgcatatttcagtgaatttaaaatagtgaaaaaaatggaaaacaacacccaaatgatcaacaaaaatgagaaatggtaaaaatttgaagtaattagcgaaagttgaagcaaaaaaaaaaaatatatcaatgtaaaatcaaagaccaaattggggccaacaaaatgaaaaagtattttttaaattttatggccttttttaaatggaaaaaagaaaagttttttttattttttttcttcaattttggtgtcattcattgatattttcctttttctgttgatttttctttaattgctccttttctcacccctaaaggtcagagcccttttctaatttatgataataaactgataaaaattaaaaaaaaatttacctttccatcagaaaaattaccaacatttcgcaacaaaaaagccatcccatggtaattaatatattaattattctcagaggcaatcaatcaatcctttaatgaatcaattttatcataatgtttgctttttaaaaactaaaaatattttaaattattaaaaaaaatccaagaaaatgggtattattattttttattttacctaattttcttaaaaaaattgacttaatataccaaaattatttactccctgccggggcgcctaatgaaccgctgaatctcaatttttccaattcattaaaattttttaaaaaattatatttcaataataaattcctctcactcacctcttccccgtcccgatagaagtgttccgtcacgcgttcgtccacaattggcgcctccccattctgtgcatggtgcacaaagcgttcagtgcgcgtgacaaccgtttccacgttgccctcctcctgctgcatgggctgttgctgttgttccgctgcaaccgatgagggggttggcgaaatgccagcggtgcttgatggcgctaaatttgaattacgacgattttcaattaaaatttaacataaaaaaatcgattaaaaataattaataattttcatatgatttttaaacatttatacttttttagatacccaaataaataattttaaaaatataaaactcacgtgttgcactgagcgcttgcgacagcgcgactgcagcggttggtgcagcggcgaacgcaagtcccccagtggcagccgccagactgcccttgctggaatggtcacgacgcagtgacgctgcagaaacgatgggcgtgccgccacgactcgcactggtacgccatgcgtcgtcaatgtccgccgcggtggcgcccgtgatgtccaagccgtacatgcgatgcagcacaatgtcgtcacggccaatttggcgtaatgctttttccaagtcgtcggacactgaaaatgattaaaaatgataataaaatattataaaatttatttattttaattctatctttaaaagaaaaggttaattaaaattaattagagaaacttttttaaatttattaattacatattattacctcatttgaaaatgatcaaaatttgctttttatttaaaaaacattttttgaaatttaaacaaataaacaaataatatattttagtgattggtattttataaatgaatcatttaaaaaaaaggtaaattgaacatttccgcaatgaatataaaaaatttaaanaattgaaaattttcaaaaaataataaaataatttttatttaattttaaatttacaaaatttcctcaaaatttttttaaataataaattaattcattt

SEQ ID NO: 20434 - DNA, 3081 bp, Heterodera glycines
tcatttaatacgccacatttggccacaatttaagaagtgccacgttgaaagccttcgagccgagaaatgtttgtatgccaaaataagcgacgcaaatgagcatccgaacgagggatggtatatgggcaccatggatgccgaaaatggcacgacaaagcacgggaaaaggaattttatgcaccttttggaggatgggcaattaaaaagttaaaaattaaaaaaaaatcatcatttaaaaaaattaaatgtgccagcgatggaaatttggcagcacctgacttggctttgagctgagattgcacaaaaagagagtgatcagaacagacaaaattaacacgacaaacacctgagaagggactacgggacagcctaattagcataattaattaagcaaatcaataaaaattttagaaaagccaaaggaatcaattaagtggaaaattcttagctaagataaattttttaagaaataaacattaaaaacaactgccgaaatgagcgtaagcaaaagattaaaaatttttataatttcaatagtaattttaaaaaaatggcaatataatttgttaaattttgcttacctgccagctggccaatctgagcgaaaacaaagtgccggctgtcagataaccggcaacactgtggatcacttaattacaaaattgaaacaaaaatttatttattatttttgaatgaatgaatgcccaccggacatccaaagtgccgtaatattgtaagcattccaagtctgcttctcgactggcagcaaatcggcattgctcaatttctgatcaaagtcacggcccgcggaattatcagaattttttgaagaaaatttcattgaaaatcttcaaaattgaagaataaagaagaaatttgctactaaaattgcgcatttctcgtgaaattttttgcataaaattaaaaggaaaagaacgaggaagcaattatgaaaagaaattaatgttattaatgagtcaagcaaatgaacgaaaggtgatcagaaattatcggtggggtgaatttaaatgaattatttatttttatttttaatatttttcgaattaactaaaataaacatagagaatagaggaagagaaagaaattttttaattacaaaatatcattgataggcaattaatgatcaagaaattactaatgattaaataatatatatgggataatgaggataattgtttgcaaatgtgcaataaaaacgaacaacaaaaaaagagagagaatatgaacaaagtgagagagagagagagaaagaaagcgatcaattagggggggggggggcaacgcaaaaaagtgactaattaggcaacaaaattgaattcaattcttcgtcatgccaattctccaacaaattcaatttcaaaagcaccgccacggcacaaaccaccgactgatcaaaccaaccaaaatcggaaattgatgcaattactatttttataaaagacacgaataattttgaattgctaataaaattgccaattaattttcaaattaaatggatttgatttaagcaaatggaaaatatgcaacagaattaaggaatcggcactgatcagtgagaacccgccaaaaagagacggattaagtttaaaggctgatattttcatttttattttcaaaattctccactaagctcagttggatgagcatttcaatataactattttaattgccaattaaagcaaatgcaaccaacaaattagtaaattagtggtgatcattacgaaaaaatgctgcagaatgaaaggcatcaaaaccaaaaaacgtaaaatgtccatgaaatgcaaatgccgagaattgataagtgagagagagagaaataattaatggccgcaattagcgatttaattggttaactttgttcggaagaacggtcatcgcaattaccagcagaaatggtcaaagataacaaaatgatttctgatttatcaaggaagtaatttattgggaattttttattttactatacaaaagtgattttgccaattagttacatttccaagtcgtccccctatacattgactgcatttttcgtcactttgtccgcttcatctttcgctcacccatttggtcattttgtccgcttcatctccctcccattcatcttcctctatttcgatggccctcttcatctcttcggcctgccgttcaaatgcaaattcgtccataaagtgccgtttcgccctctcatccaaaatgaaatccgccattttgaccgtttccgcgtcgtatctccgccgcatctccgcgatgcatctgcgcactgctttgttccggtcttgccccaacggccaacacccgtccgggcgcgccgggatggacacggcacggttcagcaccgacagataggccaattttttggccaacacacacaaatccttgccggggtactgtaattccatacagtatccagaccggttaatttattttcaattttttaaatttattcttccattttatttttttgctataaaaattcaaaaaattcaatggcgaaattatattttgaataaaaaattatagaaaatccgttgatgaggctccgaaaagggaggagtgccgagtgtcagtcttgaccaactcctctcggggggggggggcggatgattccaatacgaaaaccccaaatactcaacaaaaattcacgtcttcccctaaaaattttccggatggtggggactatacttggtacccttccccacccccttccccgctctcgtgccgtgaaccctataggcattgttttaccccgccgtaaagtgccgtgcatgtggcgtcaatttcccactgattggcgccgccaccgccattgcccggccgttgcagcagcagcgttttgatgctaatgttggccatttggtacgcgttgcgaaaagtgtgcagtctgtccacatcgaaaatgtattttttgcaattgtccaacagctcagtgagcacatggccgacccatcgctggtcaatcgggcgaaagtcgaagccaactgaaaggggcaaaaacagaagacaaattgcaacagaaaaaagtgactcccaaaattcgaatcctaaaaatgaattttgaaa

SEQ ID NO: 20435 - DNA, 2149 bp, Heterodera glycines
atgcgatcgcagctctgacttcatttctcaatgacttttccattgcggcaaactaacgttaaactgtacaaagaatttttttatcgcaggggatagcaccgaaaagagcctgaccatggaatgttaggagacgggtgctgacacatgcttgactcgcccaccaccgattggatgccgaatgaacactatgaaagggtggggcgcctttttcgtggttgatcggtatatgttagatttgatttttggcgttttattttttaattgtgttgtcccttcttaatgttgtcttattgataggtatttactctctcgcttaatcgatgttttgccactccgtcccagcagaaaatgtttccccatctttcgttctggtgttagtgcatttttttatttaatcattatttttcctccgacttatctcccttttatgttgctgactttaaataaaagtgatttcttcacgacttggtcattttagacagcagagaaaagcagtgagaattttccccaacgcacccaacttttcccgggttttgagaaaaaaaaattacggaatttaaaaaagcgggacgtgggaaccccgcctttttctcgtttccgaaaaatccagtccgggcaaaaaagacggaaactggaattcccgtcgatctcaaattttggggatgggaggtcattttttaatttttttttgcatgtacatactcattattttcatttgtatgttatttgttattgtattttgctcattttaaagcaggtatctaatctctttttgtcaacttttatggctactgaaatcctaacaaagcgtggaagaaaaaaattattgcatgagggttttctgtatgtcttcgaaaaatcaaacacatgtggtgacgttaagttctggaaatgtgaatttttcggaacccaggacatcacatgcaaatgttgtttacacacagatatgaattacaattttttggaggttcaactattcaattataaatgttaaatatgtcatttttttgtcaatcggcgtgcacaattgtccgtctggagccgaaaacattcaagttcaaaaacatacgacatcgctgaagaagctgcgcaaaaaacgatggagaaccattctgttacggtctataacacttgacaatattccgactccagtttggctcggtttccggataaagaagcaacaaaaaaagttttcggagacttacgcacgctctactcgcactggaaatgcatctgttaccagagcttcgaccaattctcatttggttatatttgttatagattgaagtcaacagatttgcaggttcgccacaaactacactggacgtgttcggcgtgctgacgggactcggaccgtaccaatgttttccccccaattatggagtgtctactctaggacgatcaactgagaagatcgcaccaacaattttgcagaggctgcacacaggcaactgcagagggcttttaactgctctcaaccatcagtatggcgtttcattgagacattgcagaaacaacagaagctacgagattccgaaatgtccaagtttgaatattgatgatcctcatcgtctcaacgttgataatttcaatccacagtctattattgattttcttgcgggtgtttcacactggcaatgaaacctcccccgcaatgaaaccgcggcaaccctcatgttccgtgggcggactcatattctagcaaattcttgatcagcgacccacgaaaactgcctggaaattttcacaattgtattgtatataatcttgaaaaaatgcaaataaaagagtcgtaggtaatattaccgctggtaacgtatcttgcacccgaattcggataaaaagtcgaaaattcaaattttttaaatcccgcatttttgttctaaaaatactttacatatttttatttgaccaaaattttaaaatttcgacttttggttccaattctggctcggagttagaaattgatcaaagtgggatgcattattcgtgatcagcaactccgaaaacattttatggtttttgaaaacaaaaacggcagtgttactaccgagttctcctcccattggttttggataaaaaaaattacggcaatggtaaaggttattggtccccgaaattttttttttaatgttttaagaaaatattt

SEQ ID NO: 20436 - DNA, 1810 bp, Heterodera glycines
ccaaaaaataaattttgaaaaaaataaatgattaatccaagtaatggagtttaaaattattcaaattaaaatttttaataaatttcataataaaacgaaaaattaaatttttaattttggtataattattaagtaaaaagaaatcatttataaaaaaaaaaatttaagaaacaaaaattcattcaactggtcggcaaaaagacgaaaatattttgcaacaaaattaaatttgaattctctaattaataaatcaaagtaacacaaggaagaaaaggaaaaaacatacatctgaacatgatattaaaatagtaaaaaaagatttaaaaaaataatattttacaattttgaataaataaatgaaatgaagtaaataaatgattattcattacaattagtacaaatctaatgaaatataaaaaaagtaaaaacaaaagataactatgcaattaacaaaaacaacaaaaagcacacaaaaaataattaatatatgagtgaaaaaagtaatcagattcaaaaaattaacttcgaaaaaattatatgaccgtaaaataaaaaatatggtaatttattaaaaaataacaaattaaaatttataaacgaaaaagaataaatgtaatttagcattgaataatgtaatataataaataatacaataaaatagtaatcattttttgtacaacatacaaaactaaattcacaaataataactattcaattctttcattagaaattaaacatatttaaaaaatagtaataaaaatacaaaatcattatcaaaactgaagaaaatgtacaatttaataatataatctacttatttgcaagatcaaatcataagaagaagaaaaaacaaaaaacttaaaaatagcaaaattataaaaaataaaagaaataatcttgaataacttttataatctagtaaaaaccaatttaaaataaaatgtttttaaattattgcaaagtaaaagatatgaattgatagtaaaaaatcaaaaaattcccaagcggcgatttcaaaatagtggaaattggaagaagttagtgcagagatttccaccttttcatcatcaaaaaaatgctatatgaattgaaatttataaaaaataaaatatcaatatatctgattgaaaaataagcaaggcatcgtaaatataactgaataaaaaattaataacaaattaattatattttgaccgaacataaattagtttttatcttaataaatacttgaaaattcgataaatgattgttttttatataacagcatagttactttcatcaacattgataacttctacaaagacaagacatttattaattcgaaaaagaataatacaataaataaaattattaaattatttttgccaaaaaatgtaaaaataatgaaagtttaacttttaaagcaatttaaagtaattcaaagcaaaatttttttaataaaattttttgacaaattttaataattcacaattattaattttaattcaaaatttgagaaaaataacaagaattatttaacaatgtatatttttaataaagagattaaattaaaataaataagtaaaaactttaatttattagccaaaaaataattaattttcattaatgaataaaaaaattattaatgaaatacaatttcaaatatgaatttttcaatatgaaaaatgttaaaaaatattatttaattataaaaaactaaaaaagtctaaatttaatttaattttaattaattattcggaattaaagaaataaaaattgcatttgttaatattaaaactgcgacgacgaatgaacgataaagcaggatcat

SEQ ID NO: 20437 - DNA, 2271 bp, Heterodera glycines
cccggacgagggggagcccgttcgggaggacgttcgcggggctggatgtccatgtcctggaatgtgcggacgcacaagtccacctgctctttgtcggtgacgattgtcgcaaatccctcacgccaatttctgagccgtccaggaagtgtagctctcacgctccattcggatcagttcaagcagtaccggtggtggaagtttgcttttgatgagattggtgaccagcgagctgttggcgattggcgagagctccccctcgggctcgaggctgcaaagttgggtgcagatccgctcgatctcttgctggagttggcgcaactccttgaggttgttccgggcaggtttgaggtggagaagctgggcattgagttggtcccgtcggttgccgacgtcgccgtagcggtctcgtagaatgctcacgactgtgctgtaattggcgtctgacggtgggtaaccttcaatcatccgtcggggtggcgatcccttctcgaggtactgtaggaggaggaggtgcttttggaaggcggggtattggcgcgagtggacggcaaagtcgaaggcggcccaaaatgtgacccattcttctgccgatccgctgaacctcgggatttcgattcggctgacccggagtgcgtcgtcgtcattggtcgactgtcggaagtgaccatggtgaggttccgatcgatgggtggggcgattcgatgctcggggaaatgtgaggttaagcgggaatgccggggttcgctggttgaatagggtttgatcggctctagccgaattggacggctgatgtgcattcactggctgtgcctgagtcggtgggtcggtggattgccgttggcggtggatccggttttcgtcgtcagccccgtgatcagaaacacgactgctgctgcgagaagagatggcgtccgtcgtgtcgaatcgagcctcgatgtagacttggaggccgtcgaggatgagctgggctttagagagaagagtgatgactggccattcttcgacatttgggtcggcttgctcatcgtcgaaggtcgggagtgcggccaggaggtcctcctccgcctgcttcagaaacgggtcgcctagcagctgaatatggtcaaaacattctcgtagcatgccattgacgcggtcgatgcttctctgtagcaattgccggtcagttcgtacgcccttggcgagtttggtctcctcggcgagcgggatttcctctggcgccatcctggtgaattcagtgagcctcccgaccctttgtcggaggcgcttgacgaggtccgaaagggttcggacttcggcggtgagacgttgacgaatgagttccgacatttacgaaagtctaggattggcggctggacgcaagagtcgggcttggttggtcgagagcctagagaaggcggctgtcggttggtgggttgagtggagattagccgagagcccgagagggacggctgacgataagagttgagtggtgaaagccgggagcctaaagggtcggcttaagaggacggctgacgactcaattgagggcttgtcggaagcctaaaggggggctggcgacaaagagttgagtgatgaaagccgggagcctgaaagggcggctggcggcttggagaagagtgatgaatggtcgaaagcctgaaatgggcggctgacgactcggtgagggtttgtcggttgtcgggagcctaaaagggcggctggcgacttgagttgagtgatgagtgccggaggcctaagatggtcggcggacagcgaagggttgagttgccgggagcctaaagggtcggctggcggcagagaggagtgatgaatggtcgaaagcctgaaaggggcggctgacgactcggtgagggtttgtcgggagcctaagagggggcggctggcgacttgagttgagtgccggaggcctaagatggtcggcggacggcgaagggttgagttgccgggagcctaaagggtcggctggcggcagagagaagagtgatggatggtcgaaagtgaattgaatggtgaagggtttgtgttcccgggtcgtggcaccagaaagtttgtcggaaaaggagggggacaaactggggggatggaagggaaggaggagattcgagactcgctcaaaagagcggcgacgcagattggcgatggagaaggcgagagaaagggtgtgccgctcgttcgattttgggggagtttctcgccgtctgtaagcacatttcccgtgtttcccgacccctacccaacgtgggagtttcaacaacaatttattgaagc

SEQ ID NO: 20438 - DNA, 2139 bp, Heterodera glycines
caacagttgcattcggttttcacttcttcctccattctaatgctattttgctttagaaaattctgctagcgacctgctaagggcattccgtttttcgagtttaggaaaactcggtttgccccagtggcaacagtatttggggtttgctgttgattctgctgaggaaaagacgatgggaattcgttcggttttggcgggacattgtcttattgcaattccgtgaaacatgaccaggttcgttacaagtgtaacaaacaacttgatagggtcttaactgatttttggaacttgtttcaacttcacggttgttcgggtgcatatattttcgttcctggtttggtcggtgttccgaactttgcctttttgcagccatttgtgttgcttctgcacgagaagctaaagctacaaattcatcaaaagacattacgttacggcgatggagctccaaattcaatgctagatctggattgttcaaacttcggataaggtgttttatggaatactcatcggccaggtttcgtgttagccctggataagcacgacgcactaggctcgaaattctgtcggccaaatcgtctaagttttcgccatgctttcgtgtgaccccattcatcaagtcattaaacgcgctcatttctctgcaatcagtgtcctctaattgttgcaaaatgtttcttttaacattttcgtagacaaatggttcattggccaaagcggcattataagctctttcggcacgaccgcttagttttgcctctagcgattcgattcgctttttgttgggccaatcggctgtgtactgtgagtacttcttaaagaaattacggatcgaatcgccgccctcatttccccttatatccggaagccggtctaaaatcattgcatattcgaggccacttagacttgtctgttgtggaaaaatttgttgctgtctattttgtccttcttctcgctgatttactgcttgctgattcaccatttgacgcgctgggtttattgcagtgtttgggtactgcacattttggggtggaaacattacaggcatttggttgttaaaaaacgttgaaaaattttgagctggtagctgtggacccaaattttgagcgccgtaaaattgcattggctgttgcaaattttgcattggaaattgaggccagaaaaatggcggtggaagcattccatttatcccaaactgttgctgattgtttgcattttgttggattggaatgccaccaacctggaaatttgcaaattggttcgggttattcaccaaaattgggtggttttgccggagattttgggcgttcgcattaaaatttcgcgcattttctgcttcttggtggttattatcttctaagcgtataaagcgaccgcgtgcgtctcggggtctttcccaatttctacgattaccctcaaaattcaactgtcgttgcgcgtggtgaattggactgatatttggagttgacgtaagaaaattatcattttcgcgtggtgtcacatttccggctatttgattttgttgaataagacccgggtttaacaaattttcgtccctatttgcaccccgatttcgattactttcatccaatagacggcgctcgtcttctgcattcagctccctcaattgttcattcacattaagcaattggttgtgtatctcctgctcgtccatttgagtccctgaatggttccgatttccattatttcgctcattattctcttcatttctctgttgaaaattttgttgattgtccaaattaattggtggaaatgctggaaaattttggtttcgaggctgaacattttccggaaccgcctgtcgctgatttccccctctacgaggtgaccgaaaaatcatgcctttagcctttatttccttccactaattgctgaatgtaaaccacaatctgtgtggtgcaatctcttgctgtgagtattgctgaagatttgaattcaatgcaacctattactgatagtgttgccttcaaatgatgtgattgtagattgattttgtccggactagggaacaaaatgagtttgaatggcgtttgatgccttaacactgcagcgcggcttgtacaaacaaattttttacgtaaaattgttagcccaatctgtggatctaacttttccgacttt

SEQ ID NO: 20439 - DNA, 1349 bp, Heterodera glycines
  unsure (1)..(1349): unsure at all n locations
tttgaaaactttcatttgggagaacaaaatttccattccttttagaattcttagaaaatttcatttttatgaagtttattctaaatacgaatttataagttttttttttgtcaaattaagtaaagcaatcgcatattattttaagtgtcattaataaaaatttagcggaccaggagaaaagcaatcttaaaatatttgagcataaattgattctaccaacaccttcaaatgaaaaaagctacaaatttaaaataaatttaaaaatatttaaaaaaaaattcaatttgtttaatggcaaaaaatcttgcaacattgattcattaataagcaaattgttgttaataacaattttttatcaaataaaaaatcatcaaaaatcatcatcatcatcatcagtgcaaatgctcaaaaaatagtcaacaacatatgatttggttatgatctgtgcactgatcagtgatcactcatcataagagctaggaattttagttactaaaaacttgcacaaatcgtcaagcggtattttttaacttagctcattgttttcagaagagtttgaacttttgcatgaaaataccggctctaggtctaatcgacttttatgagtccaaagatattttatgagtctaatcaattgataatacctggttttcatacaataactttgttcatgatcgaacaaacccaaaatatttttggtatcattcgaaagcacaaagtctgaataatgtaataatacgagaaaaaaccagagaattctaacattaaaaaaaaaaacttacgaacgaaaataatcagcaattaattaattaatcaaatcttttttggcaattgcctaaacgctgagaattttatatattttcgcttctttagactttttgcattcgaatgataccaaaaagatagggtttgttcgaacatgaatgaacaaagttattgtataaaaacccgggattgtcaattgattggactcataaaatattggaccagggatgggcgaagctcgtcttacaattagcactcgaagccgaagcacaattttttttcgaagcacgaagttcgaagcccaaaaaacccgaagttttcgaagtttcgcccgtccctgctttggactcataaaagtcgattcgattcataaagtgcaaatgagccgaaaatactttggcatgagtcctacctaacactctgccaaatttcagaatttttttatgaataaacttgagtaaaattcaagtttttagcacataaaaatgctagagctctactcctcctcctcctcctcctcatcatcatcaacgtgtttagtgtggtcagcatgtttagctcctttcagnattttttcatcatga

SEQ ID NO: 20440 - DNA, 1944 bp, Heterodera glycines
ggggggcaaaaagtgggggcccggggacctcggggagcgacatgtcgggggtcggggcgggaaataagcccaaaaatgtcggggatcggggtcggggagctcggggtcggggcttaaccctaatatcaaccatcaaatgaatatacatttttccaaattgaggggaaaattttccaaggttttttttaattccttaaatttaatcaaaaaactcgaaaatagctaaatatgatatatagaataaacaaacaaacaaacaaataaagctaaattaattttgaagaaatttgagataagaattgcaattttttgtttttatttttggcataaaaatacattttttattgaattttcaagaaatacccaaaaacgaagtttttttttttgttgccagccctagtgatcatcattttacctccatccaactgtctgtgtccggatggtagtctccaaaaccggatgttgccattgttgtaatacttaaaaaataaattaagaaaaattattatttatttaatttgattaatttgtacctaaaataaatggccgaaatgattggccattgtttcagccaaacagaatatattaacaggccgacaacattgtgcagaataaacaaaatgattattggcatcattggcatgcgttgtgcctccaccaaagatgaagcttcagaaatttcctaaattattattttttgaaattattggaataaatttctttgaataaataatttttagaaatatttatgactcattattaagtggaaaaatagcatttgaattttattcgataataattttgaatatatctaattattaagcccctttatgatttatttaattttaaaaattatataattattaaatctttttatgattatgttaatttaaaaaaacaatttttaaaattgttaaatctctttaagaattactttgggtatttgttggagaataaaatattctacaaaaattagttatatataattaattattaaatttcgttagaattgaataatcaaaaaataataatttataaatttattctaaaattaattttatgattatttcacctcttcctttttcaaaattttgcgcaaccatttcaataactttggccataaaacacaacaatattcagtcaatgtacggcccaagttggcaaaagcagaaaataacattggaatgcctaaaaaaggaaaactttttaaaaaaataagaaaaaaattaccaattaaaatgtataataatgtaaatgcttggcttaatgaattgctcgcgcgggaatcgccccaaccactgaaaattaaaaattctttttaattgtgttatgcctttattacgagaaaaaagtaaatttttttttaattcttaacatgcaaaaagtatagcattaatcaaaattaaattatgagagatttaatttattttcaatttttattcgttgaaaaaagtccaatattttatttctatattatctataaattttcaaattgcattaatcatcattattttttatttcaattaaacagattaatgattatattttaattctttacatgaaaaaaaattaattaaataaagtttaataaaaaaaataaatttatatttttttaaacatttaattttaaattttacatggttgttaagagctgaaaacaccaaataacagaacggggaaacgattttgcaccaatttcggagtcaataaggcgaaaaacaagcgatccagtcagaagccaacagatcacagaggcaatcagagcaatatgtgccaaaagattgatcaaaaactttaaataaaattgaatatttttatttttaatttttatataataatacccaaatcgtggtgtcctcaatttctttcatgtgaacaaaactttctgctttttggtccattcatcgtcgaaaactttttttaaaataattttattaatgctaa

SEQ ID NO: 20441 - DNA, 2222 bp, Heterodera glycines
  unsure (1)..(2222): unsure at all n locations
aaaaatggggaatgcaagttttgcctgtttgtttgttttgatataaattaattgttccctcctcccggtgcacagatttacctctgttttgaatgtgtgccgccgcgcaatctgtgcaacgacgtgcgcctgtacaaccaccggacaaaattccatcgtggccaaaattcggggttcaaatgcaacctgtgcaatcagaagtttttgacgccgcgcaagttgcgcaagcacaagaaaatgtcgcatgtgttcaccaagacttaccagtgccatttctgcgaggaactgttcatcagcgaaacggcggtgggatatttttttttacacattttatgtactgatgccataattattgggatttggtacctcatttaaaattgaaatgtcaccagtttggtaagcatttattgttaccgccaacttcaaaccttggtatcttcatttctaaactcaaatgtcatcagtcggagaatttcttggtacccccattttcaaatcgtggtacccctattttcaggtcttgctaccttccttgataaaatcgaatgccatcagttggcaaccatttcttggtaccccaattttccactattgatacttccattttcgtaaattcaaatgctcattgtttttttatccaaaaatgccattttcccatgataggtgaccacccacgagcgcatccacacgggcatcatcaaatttgagtgcaaaatttgtgactacaaatgcaatcgtttcctgaacatggaggaccatgtgaaggaggaccatggctatctgtgctccatttgtcagagcaaactcagcgaatggggtgacctcaaaaatcacatgctcatggaccacggcggctatctgtcgtcagagttcaactcaggtcagactggacaggaccggcggcgtcatttcaatctcttcctcctggtgtggtggtggtggtcaggcaggctcgtaaccagaaaaacgaaaattcggagaggagttagttccatttttgtcccaacaaatttttgcggtaattttcagtatccattttggtgatttttgtttcaaaaactgagagagtaaccaattgataggcgctgccaacaaaaaaaatttttttttaccaaatttgaaaaaatatttgacagaaatatcaaaaaagaatgaaacctcccaccttccatggttatgtgcctgctttttcttgggtcatatcattcattatttattaatggcgttttgaattttcggccgatatctcatcatcgcttcccatcttcaacattaccaagaaccattcaattcattatacgattttaaaaaaatggattttatcattttaacaaatttgcgcattgatcaaatagccagccaaagagtgctaatggctttgatcgcgctgctttaatgtgtttttaaggaatttgtttattcaaaacccatttcagccaaccaaactcttacggtataccacaatgggacgaggccgaatttgttgttgttgttgttgttgttgttcttattgttgttacccacccattgggcgaagcgaacatttcttattattacaattactgtcatttaaggaaaaaaaagacaattttaaccgctcattttttattcgcttaatcacaaacattttcaacaaatcttgttacacatatattacttttttttttacttgtttcttggcgaaatttttgtgatctgacatataatcaaccggcacaaatcccatggtggaaaccgccggatgggacacactttcagagactgtgaatggagatgtgctgtttcagggtacatcgaaagcccgcgcgtttggctgatgttcaagggggactgattgatttgacggacgatcgatcagaggaaggaggagaaggaagaatgccgccgtcccggactgatcggtggctgtggcaaatgatctgagagaaattccaatacgttttttttttgtttctggcaaagtcgatcaatttccgttttatattacagcactcgaattttcacatgttgttaggacacatttccacaataaaaacaataatgataatgagtgatcttttccccttcaaatgaaaatggcatggcatacggggcgtatagcctttgatggtgctgattattttaaatgggtgccaacaaaatttggcacaaaaaccgtccgccattggtggaaattttattgnggttttttttggtccgtaaattcacccaattttgcctcc

SEQ ID NO: 20442 - DNA, 347 bp, Heterodera glycines
cgtttgcgctaatttttgtatccgtgcggggtaggcgatgtactagagctcggagcgggacgggatcccgcgcggggtcccggtccgcaatcccggcatttttcggaaaattcggcaattgcatgataatcgcgcgggatcccatcccgcaaaatattttagtaatctaatctcgaagcaaggatacaaaaatttgaaatttccttgctctgttgcatatccccccccccctcaccacccaaaaaatttctagggaaaaaatataattgtttgttgggaatttgtcgctttatcccctctaagacaaacagccacttaatttttaggcgagaattggtttctgaaaa

SEQ ID NO: 20443 - DNA, 2236 bp, Heterodera glycines
  unsure (1)..(2236): unsure at all n locations
ttcatcaaaaaataatttaattaaactaaaaaaatttatctactgtggaaccaaacatttaaattnattaaaagtaatgaactttaacccaaaaaatacaaagaaaaataatgttcaccgtccggattcgaacctgctgccccccccccctcagaacatgtcccagaatccccaatcacacagggattctgagatcttgacgatgtcaaaagtaaaatctgatcacgtattcgtgatcagcggcccaaataacgcctaaagacatgtttttggaagatttttggtgaaaaatttttttcacttaaaaaccatgtgctcccccctttggtcccgaatcccaaaagcacttttatttttgtatctttttttaaaaatgtgatagaaatgccaaataaaatttatataatagagcaaaaaattgcggatttttgtagtattttacttttacagtatgacttttcagaaccgagttatgaatttttttctgaaaaatcgaaaatttccagaaattctggaataactttttttcttttgaacattataaaaccaaataaatctcataaaattctcccgattttttgctatttttaaagctttaattcacttaaattgaccagtcctccattgagttatgaattttcaagttttaacccaaatttccaaggaccaaaaaaattaaaaatattttcgaatttttaaaaaattccaaaaaatctgaaacttaaaataaacatcatatttgtgctcaggaccctaatttaccccagaaaaaattttttcaccctctttttcaacccaaaaaaaatgtttgaaaatttctagggggcctagctcgaaaatttttgaaaattttcgaaaatgaagtacaccgttcgatagagcttaaaaagctctacaattttgctctaaggccatttttggctaaaaccaacccctgacgagttatgggcccgggactcaaatgtcccgctcaggccaaaaattttttctatttccggaaaaaaatcgaaatttttccaaaaaaattaccagtcgatagagctcaaaaaatgatgttttggaagtggtctttgtttttcctgaaaaattcgttaaaaattcctaaaattcaaaaaccaaaaaaccgttttttaggcctagcttgaaaatttttcaaaaatttcgaaattttaaaacttggttggatagcctttcaaatactacacatttttgctcagaaacaatttttcggtcaaagcaacccctggcgagttattcgcctggtactgaagtgtacacttttgggtaaaaaaaattagccaaggctacagccttgggcgcccaacgtagggcttaggttttgctggcaaagttgtcggggatagtctgacttaaaatcctaccagcaagagctaagcgatcccggtccaaagaaaaaatttcgtagaagaaaaactgcaagaaaaagtgagaaatcggtccccgggactcagttgggcgtcgagaatttttttctatagttttcccggatgcgcctcaaaaagttgtaagacccttccactactttcagacccgtcccattagccgttaagctcaaattagtttttgaaacgaaactccttgtcaatataacgtatatattaattaattaaattaaaaattaagtaattcctttttttagtcatgccttttttttatattaacgaatggttggttatgaatgtgatttaaaaagcaaaaatttttattttatttatgtaaatcacttaattttgcactttattaatttctaaaaataccttttatgaatattaaaaaagtcattttagttagaaatttgtaatataaattttaaatataaatatttgaattcttaatcaattaataattggtttctcatttactaatatgttcaataacttaaaggaaaaatgaaagaatttcataattattttcgtataaattattaacgctatatttattatttataaatttattaaaaattctgattatttaaattggtgaaccttttccaataaaaatatttttttcatcttttcatataaaaaaattcatttataaataataaaaaggaaaggaaataatgtgtaaatgtaaaataaatggtactctactaaatgataagcaaaaatcaaattataaaataaaaagattaagaattaacttagcaattaaataaaaatataataactaaggaaggtaaataatttatttttaatataatatacataattaa

SEQ ID NO: 20444 - DNA, 2439 bp, Heterodera glycines
  unsure (1)..(2439): unsure at all n locations
gatttagagcaattttggaggatttttttaaaattatattttatttttaaattataaaaaatatttgaaaaaaatattttatttaaaatgtttttgaaattctggaggagaaccaattatataaaaacatacccggtcccaattagaattaattatccctcattaaaaataaaataataannaccacttcacattttcagtgccattttcccgcttgtgccgccctgtaccaatggaatgaaagtgatcggattagagatggaaaggacggacaatgtgcacagttccaacggcgtataggtcagcttgaacagattggcgccccacagcggacttttagcacgatcacctgacaaaaaaacataaaaaaactaaattccgaatttggcataatgcacattagcaaaattcaaatcgtgttttataacacctcaaaataattagaaaataattcatctactgggcctaatcaattccgataatgtaaattttcggaaaatgatcgagatgagaattttgaaagtgggcctaatgagcgattgaatggaattttgaatatcgaaccaaatcaattttcaatttaattacaatttttccgatcaaatcttcgtcttcccatatgggagacaaattttgctctggggctgatcagagtgattgcttttatcaatttgcaatcgaattttagaacatctttagtcctacaaaaagtccgattctgtctgtcatcaccgtactttgtgtctaccgtactttgggactcaaattcgccgtagccaaaggtgtaaaaatgggactcggccagcggactgatcaggcaacagaaacgggccaatatatatacggtattcaatgtcgaaaatgtggcccaacaaaatatggtgaatagttttgcgcgtcgtaccgtaatcaattgactgtactgaccgtacaacctgacaaaataagaataatttggtaacaaatttacaaagcaaatttattattaggttaagcatcattcagttaattgcaaatcctcacgttatggcaagaagacgatccaaacaaatggcggacatctgttttgaatttcaacaaaatttataaaatttaatttaaatataaaattataaaaaaatattttatccaactttaaaaaaaatacatttaaaaaataaataaaatcgcaattttgtatcagaaaataacagaattagatataattttaataatgattaattatatacaattttattaaaacaaatatttgaataagaattttaaattaaaaaaaagaaattatttttattagagaaaaaaacttttttaattaaattattttttaagtattgtcaatatttaatatgtgtatttatttttattaatataaaaaaaaattttgttcaaaaaaacattatgcaattattatatatatgctcacatgtgttagagtgatgctcctaaaaaacaattaaaaaaagaaataatttgtctaattagtgcctaattattaccatgccgtccaatcgattacattaaaaattcggacaccaatcgctgggatgacaacacgacggagcaaaattggaggatagaaaaatgtggtggtgacaatgccatgcaaaatgtcagccaacgccaggctaagcatcagaacaaaactgaatcaacaacaaaaaaaaaataattggggaaaaatgatttaaaaacatttaattcaaagtaattagattaggaaatttttaagtaaaaaaaaaaatcgtttttttacaaatttgttttgcattaaaattttaaatgttaaaaaaatatatgaaaatttgagaataattcaaaacatattaaatcataaaatttaaaagcaaagaatgagatgaaaatttatattaaaatttaaaaaaaatttaataaataactaaacctaaaaatatttaataaaattaaaataatataattaaatttaacagaaaaaatatatttaaaatatagaaaaattgaaaaataattttgttttttcatttatttagtagcaatttaaatgtgaaatgaaatgaatttcaattttcaaaaataaaatatactaaattattttttatatatatatttttttaaatgttccacctcgccctctgaaggtatctgttcctcatcagcacaacaacaaggcaacagttgccaacaattgccaaagtgcccaatgattccaacgcaaaaaagacgaacttaattagcattaaataaatttgttggcacaattttggaaaaattaaattttcaaattcaaattttactgctggatttacaacaaaatgtgatttgggaatttacaattaaataattattagggacgtgaattttagtgaagaaaaatcccgaaatagttaactaaaatagtgagtaaaaagtccaaaatagtgacgaatagtgacataattttcagccaaaaaatgagcaaaa

SEQ ID NO: 20445 - DNA, 1028 bp, Heterodera glycines
aaaaaagcaataaatttgatttcatgttaatttgttttctgaagaatgcgatcatctttagctcaattgcgcaaattatcctctggcaaggcttttgtaagcgcaaaattttattcggcaaaatttgattatataaatataaatttttaatcaaattcattaattatagtttttgaaaaaaattatctttaggtttgtgaaacaggagtgatttcgcaaaaattaaaaattgcaggatattaaattttacattgttaaaacaaaaattttaaataaattatttaggtattttgagtggaggctaatagaagcagacggggaaatctttatgatttcgattatttcttatagtaatggtggaggtcgcagcggtgcctttctggcgctggatgccaccccccccctcacgggggcagggggcgggaaatgtgccgaaatctgccaaaaagtgaaaagccgtggcgccacggcgcggaatggcttttccaccggcgagccaatttttgattgtgccgccgccgcctgcgggtcgatgcgcttttttttgaagtgaacggtggaaaagcgccattttggggaacgcaaatttgaaaaatgtttttgcttgggccaaaaatttaatggtgaaattaaaatatatatatatatatatatatatatttaatctcatgataaaatgaaaaaatggaattttaaaatgtaaaaaactgaaattttatagtaaataattttaaaaaattttaaatttttaaaagtcgaagaattatttttggtgtgtttcgttcatattaaaataaacttaaaataataatttgtataaattatgtaagaatgcaaacaaataatttgattaaggaaatattaaaaagtattgaattaaataaaaatatttttattattgaataatcatttttcatttgtcaatgattaaaaataattcagaaaatattatttgttaatcttgagtagaaataaaattaaaataagaaaataatgctttttcttgtcatttattatttacattttcc

SEQ ID NO: 20446 - DNA, 2790 bp, Heterodera glycines
  unsure (1)..(2790): unsure at all n locations
agatagtactaggcttttctctgcacagtggagttgacccatagtgcaagaatttatgttgaaaatntgaagattaatttaaatatatggaatagtccaataaaaaataataatttaaattacgcgagccctttggacattaagaaattcgttcaaaacatgtccaccgatgagagaaaaaatttcacatttttgatgaaaacccaaatccatggggaacaattcttatccacctgccccctgttcgaaaatagtttttttggaaaaaaaacttgctgctaaaaaacatttttattggttttttttcatttgaaataaaatttttctaaatgctggcttttgacccctaatgattattttttaggccaatactgattttgaaaattttcagttgatgtccctgattttgaaatggtaaaaaattttttttaaaggttttaaaattttctgactttttttatcaaaaatttccgaaatgggaattgttcggggaaatcggaattccgaccctaaaaatatccgaaaccggaagtcggattccgtagcgtcactaatcactaatactcgctactctttcggcaccggcattgatcaagacactaatacccgcagaaaaaaagcacattctgccaaaaatgaatgctattttaaccattacatataacaatgaatcgaaaattcaattttctgcacaatttcaattaagataggtatttaaaaaattgaaaatatatttccccaattggtttttccccatttttctgtccgcgccattctccgcccgatttgtttgctcactgaagaggccggacaccgggcacaaatgaagcgaagttgcatttggtgtcatccaagaacagggccacttgtcggccaaagcgctgacgctcttcaacattggacataaattctaaaaatttctgatggctcgtgtttgggtactcccaaatttggcgccggttgtccttcggcgtcacatccgtccgcactggccaagtctggacagcgttctgcaaaaacaaatgtgaaaataaaaaaaattatgatattaatggacaaaaaaagcatggacatttaaacaacgtggttttttgccaaaatttttactgtccgatcattcattaacggattaattcggaaaatgataatttcccggctaaggcggggtatggccaatgccagcccgagcaaagcagggatgtgcaggaacgagaaaaagtcggaattcgggtcggaacgactaaaaacttacgagtcgggactcgggatgagaaaaatttgggagggacaaaaactgatgggattcaaaccgtgatggccacaattttttggtcgagattcgagacaagaaaattatacggggttcgggggtagtaagcatccctggtgcaaaggcagattcgtttctacccaccggaccatcgatgtccaattgccaactcatgaacagcttggcggcctccgggtgctttgcgtccttcagaattgcgccgtaaatggcgtacgcggtgaacgggtcgttgtccgcggggatgacatattcggtggccgcccccgcgttgtttgggtatgagccaaagccgccaatgatcgccttcagagtgccgttctcgagcgcctgttgcaactgcacaccgccgcaagtgatcagctggtttcgttgcgcgaactgttcaagccattgccaactgtatttgtccacaatctttttgaatggaatttgatatacggtagcaataatacatgtagcattacttataagttaaattgatttaatttagggttttaagtcatttagggtaatttgttaataggcgaatttaacgaccgatgctcctcctacctgtttgtaaatgaacaaaactgcgtcatcatggtttgggtcagcagtaccaacagtgccattagcgaattctgctgactgcaataaatcaccgtaggtcggcggattggtcgaatttgagaccaaatttttgttgatactaatgcctagtgtcatcaccttcaaatgaatttgaattaattattcctttttaattataattattaaagctggaattgtatgaaaaagaaatctcaaaatacaaattttttataatattttttttcacaaaaaatctttgaaaagaatgaataagaccaaaatgccataaaaatgaacttattaggcctagaataatgttttaatactttaatttaatttttgataacaaggtgacatttaaaaaaatattttttgaattttttatttaaaaaatatgtaaaaaaagtgggaaatatttaaaaatatgtaaataaaagaaccattcacaaacacctattcagagcacttagaaatcagaaaatataatatcttaatttacaaccctaataattatttttcacaaaaagtttgttaaaaaaagcaaaattaatagttttttttaaaagttttaattggcttttacaaaaaattttagattattaaaaataatatttttaaaaattttattttacaatatttttcagaaaaaataattttaaatttagaatatattttaaaaaggtgatgttctcaggctgttttttaataaaatatttgacttttttaaaaactttgttatttcacaaaataaatttttactttttttaaattttttattaaaataaaattttaacgtttgaaaattaaggaaattattttttcaaaacgatttttaggacaactttacagcaaacatacgtataatccggtgaagtagccatccgggtcgcggaatgcgcggtacactttgtcccatccgcgcggtt

SEQ ID NO: 20447 - DNA, 315 bp, Heterodera glycines
cccccctcttttccaaaatgtttctctttccccatgtgtgtttttgtctcccccccctccttctcaatgaatgtctttccctcttcgactgtttgtctcccccccccccccccctcttccccaatgtttctccttccccatttgtctcttcgtctccccccccccctcttccccaatgtttctcctttcccttttgtctgttcgtctcccccctctcctttcccttttgtctcccccccctctcttccccaatgtttctccttccccatttgtctcttcgtcttttccccccccctcttccccaatgtttctcct

SEQ ID NO: 20448 - DNA, 2146 bp, Heterodera glycines
  unsure (1)..(2146): unsure at all n locations
gaatttttttctgaaaattcgaatttttccagaaattctggaataacttttttccttttttagatagaaattccaaataaagtccataatgttctcctgatttttctctattttttaggctttattcctgtaaaattgatcaacccttcgatttgttatgaattttcaaatattaggccaaaatcccgagggccaaaaaattgccaaaaaataaagaaattttaaaaaattccaaaaattatgaaacttaaaatagacatcatattcgtactcagcaccttattttaccccagaaaaatatttttcacccccattttcgtccgaaaaaaaattttcgaaaatttctagggggcctagctcgaaaaattttgaaattttccaaacatgtagtacaccattcgatagcatttaaaatgctctacaaaaatgttctaagacaatttttcgctaaaatcaacccctgacgagttattggcctgggactgaaatgtcccgctcaggccaaaaattttttctatttccgggaaaaaatcgaaatttttccaaaaaacccaccagtcgatagagctcgaaaaacggttgcttgaaagtggtctccgtttctctgggaaaaatcgttaaaaaatcctaaaattcaaaaacccgaaaaccgttttttaggcctagctcgaaaaattttgaaaattttcgaaattttaaaaattgcaaaaatcgagctcattgagctctacaataggtctgctggccaccctgcgctcaggtcaaagcctaatgagttattcaacggggactgaactggacaaagttggtactgaatttttgtagaagcacacaggccagggggttagagatagaggcctggaattttttttaacttttagccaacacttcaacttagggccctcacagcgagcattttttgatttgagttttaggaaaaaagttatgggccccaaactgcgagaaaaagtaagaaatccttccctgggactcagtcgtccgcgctgaatttttttctatagttttcccggatgcgccgtgaaaagttgtaagaccaatgcacaactttcagacccctaccgatagccgttctcgagattttggttttaaggatgagttgccttgtcaatataacatatatataactagccggtgtgtgcttacatgtttcttggtgcttaaagcgcttcgcgctttgggagcttcgctacctaggccttgtgttagggtctttgcgtcagccgacatgcacttggtttcactcacgtgatgagctgacacattgcatttatcagtgcaatggaaaccggaagtgccctaactcgcacgtcatccctcctccctcccttagtccaggtggcagcacttaatagccatatttaagtgcagatgagaatgaggcggcatcggtaccgcacacactggactatagctcgtttgatttatgcaattagagatccaaggctttgcacataatcatgataagcgctaagtggcgaataacctggaggccccataagggccgaccagtttcaagactatgctcaaggctatcaccacctcgcactcaatatgttaatgtgaaaacagttggcatgacaaactggcttggattgctctttattgcaatttgagcatgtttgttgccacaatattcagcacctttgcttgtccttggttgtctgtttcccttctgggagcgtacactcggacattgttcccatccgttgcccttgaaaaggctgtgtacaatttaccatgggaaaaaacatccctttctaggtcaattccgacagtgctgattgtttggccttgacctttgagaatggtcatggcgaatgcaggtttgatgggaaactgcaaacgctcatattttacgccgccaggcgttttgtcctcgtagacattgcgtgttctttctatgaagaacttaacctggccaccaacagcgttgctgttgattacgcgaccgaccanggcgatcgtcgccaagttcttcaagaacaatgcgccgtggcgnntgatcagtccttccttaatcactttttgtgataaggagaacaacgacgctgccgaccttgagtcgcagacgggggggggaggcatcccagagctggtgcgccggttcacgctgccacttctgact

SEQ ID NO: 20449 - DNA, 1533 bp, Heterodera glycines
taaaaacgggcgcgaagcgcccgtcctgaggccgcgaagcggccggatccctcccacaaaattaaaaaaaggcgcggagcgcctttgagtccgcgaagcggccgaattaaagtacctcttctaatcactcttctaatctgagtccacaatatttagaagcgcaaagcgcccgtctgaggccgcgaagcggccgaatgcacttgctcatcacttatcaaacgcgcatgcactagcaacgaagtccttcgcgcgaagcgctcatgtaatgcatattcttttcatctctcacaagtatactgtttacaccgagcaactactgcgccacacgctagtttatactactatagagaaacgttgcagttcgtttcaaaaaacaaaatctcccggccgaaggccgggagcgccccgaaagtagtggaagggtcttacaactttttgaggcgcatctgggaaaaataagggttttccgctccggtggccaactgagtcctggcggccaatttctcacttttgcttgcgtttgatggcccataactttttttctaaaactctgatcaaaaaatgcttgctggtaggaaactaagttgaagtgttttctaattttcaaaaaaaattccaggcctctacctatacttggaagggctgcagaaattggcaacttttcagtaccaactttttccagttcagtccccgttgaataactcattaggctttgacctgagcgcagggtggccagcagacttattgtagagctcggtgagctcgatttttccagattttaaaatttcgaaaattttcaaaatttttcgagctaggcctaaaaaacggttttcgggtttttgaattttaggattttttaacgaattttcccagaaaaacggagaccacttccaaaacatagtttttcgagctctatcgattggtaattttttcggaaaaatttcgattttttcccggaaatagaaaaattttttggcctcagcgggacatttgagtcccgggcccataactggtcaggggttggttttagccaaaaagtgccttagaccaaaattgtagagctttttaagctctatcgaatggtgtactacatgatgtaaaattttcaaaaattttcgagctaggccccctagaaattttcggaaattttttttcggacgaaaatgggggtgaaaaatatttttctggggtattttgatgtgctgagtacgaatatgatgtctattttaagtttcataatttttggaattttttaaaaattctttattttttggcaattttttggccctcgggattttgggtgaatattggaaaattcataactcggtgatggttgcatcaatttatctataataaagctttaaaaatagagaaaaataaggagaattttatgggatttatttgagttttttatttcaaaaaagaaaaaagttattccagaatttctggaaattatggatttttcagaaaaaaattcgtagctggcttcttataaacgattcgggaaaagtaaaatactacaaaaatccgcaa

SEQ ID NO: 20450 - DNA, 1670 bp, Heterodera glycines
tccatttttgactgtttttagcgtatttttaagtctgttttagcaaatattgaatatgaatatactttttggaataattttttaggctttaaaagatatattttggcagtttttagtccatataaaaaatgcaataaaaacggaaaatatacccctaaaaatcgaacgaaaattaaaaaaaaaatacaccattaagaaaaaaagacttaatttttttatttctatattttttctgattatcttcgagaaaattcactcatcatatacagagcagcttgttgttccgttcgcacaattcaaatttgactcttttgtcttccatagaattcgtttttcttattgttttaaatttattgttttttaaatttgagcgactcatcaaaatattttttcatgtaggatttttgtgaaggtagtaatttcatttgttctcttccagcaattcacaaatctcatttgtatttaatttaatttatttatattatttcatgcttttagaagtaattaatgctaatattttatttgttataacgtgattccaacgccaattatgtctccatcctagttaattcgtatttaaaatgcatttattttatgtgcatttccttttctatttacatttatttatttaaaacaaatcaaactctaatttattaactaacaaatagattttaattttcttgacttgagacatctctaccgaactatccacaacactgacttggttatattaatttcaatgaattgttgttctattaactatataagtttattattttttttattaaatgtattttgattatttaataaacacaattttttttgctgttattaattacctgaataataaaaatattttagttgaaaaatattttttattattttttttgaagtatgtttggatatttttcatttattttgatttatatgtattcaaatttatatttctcaatttattatatgggtttttaataagaaccaattagacagacattgtaataaacacaatgaaaaaataaattagcttattatttgcttgcttacaaattaggaacaaattgggtctccttgaataatgattcattggcattaaaatttaaagtgttaattttgctaaatactttaattttgatttttttttttatcttggaaattcaatgttaggttgttttttatatttattatttatcgtgtttctttcaataagcaaaattgtctgcctatacggtggtggatggcatattgtctggacaacggttgtgaacgaattaacggaatggcttagtatattaattgtacactcaattgtttatttcgcagagcaatattttcctttcacaaatataatttaataagaatttctgccttgtcttaaattttacacatgcgacgaactgtttatcgaacgaacccattaaggaatatttattaattttttcaattctatgtaatgatattttttttacttcagtcaagtatttttagtagaaaattatttatttgtaatttcaatttccttttgttaatttagtatgcattctccaatatctcttatcgttgaagtaagcaatttctaattccaatgagcaaatattaatttccgtagctataccacagatgcagcttgaaattctcttgatcttcatatgctctttgaattgtttatatgt

SEQ ID NO: 20451 - DNA, 1089 bp, Heterodera glycines
tgggttcgtgagggatcttgctttatgaaaaccaaattgtgatacagaataattttgtattgctcaaaatttaattatttccctgactaaaattctttcaaatactttcgtgattgtaattgtttgtttgaaattattcgtgaatatgtttggatgtggttatgtgtttttcttaattgtttgtgtgtttgtcgtatttatattcgtgactgtaattgtttgtttaatagacagtatttgtgtgttttctaattatttgtgtgttttctaattatttgtgtgttttctaattatttgtgtgtttttcgtaattgtttgtgtgcttgttgtatttatatattcgtgattgtattgtttgtttgaaattattactgaatatgtttggatcagtgtttgtgtgtttgtcgtatttttattcgctttctctctcctctctctcccggtctttctctctcatctccctcctgtctctctctttcggtctttctctctctctcaccttctcctatttctctctctctctttcggtctttctctctcctctctctcatcttttcgtgtttctctctcctccagctctctccaattctctctaattttctcacattctcttacaaagggaggtggccaagtgtccgtgggatttccaaatgaaacttggttggatggatagagcacccatgggttcttaagaaaaattgttttattttctgccaaatgaacacgagtgccgagttatgacgtgccaaagtttttagttttataattaaagaaaataattaattatttacatatctccaatgtgttgtttgatgtagaagtaatgtgttagtcaaaatttttattggtcacaagttcgaatcccctttgtgtaaatccattttttaatttttatttttcctttttatgagcacttcaattagcaaattttatttctttatcaaaatctttattttaattttattccattaaaaattgcattaaacataaagatgtaataaaaaacctgtcgaattaaaaaatatatttttgtctaatatttttattgagtattttatgcactaaataatttcaaaaaaataaaaataa

SEQ ID NO: 20452 - DNA, 2022 bp, Heterodera glycines
  unsure (1)..(2022): unsure at all n locations
cattttgtggctttttgataggtcaatgaggatttttttggaaaatgaggatttgaggatttttgtggctttttgagaaattttgagaatttttgaggcttttggggaaaatcctcagaatcttttaaattttgataaattggcataatgtttggcaattatttaatttgaattttggtttttaataaagtatcaaacggaaatctcacccaaatttagccagaaaattacaatttttttcgaaaatccacaaaattatgaattttttagatgaaaatctgctaaaaatatggtcaaaattctcaattttttcccctccggcggcgcctatcgatcggcaccgccggaccctaaaaatcctttttctttttttttcaattttactcaaaatcgcaaaatttggccattttgtggacaaatctgttaagaaatcacattaaaaattacaaaaattttcccggcggcgcctatcggcaccgccggcccctcaattccccaagttttttggaaaaagcgccgcaaaaaaaattaacttcgatttttcatgctcagaatctcacaaaatgcttatttcgaacaaaaaaaattactcaaatcgatcatggacaataaaaaatataacatttgaacattttatacgtgttttgaataaattttgtaaaaatgaggctttttgacccaaaatgaggctttttaaaattttcatcttgcaaccctgttttaaaccgataattttccttatacatagtcagcatcaaaattatactgtaaaattaatttttataattatttttcttgaaattttgttagaaagaatttatttctcttaaaaactaactttgaattttttttcaattttaggagagtgggaggaaatgtaagtgtgaaaatttgacggtatgcccgggcatataattagagaaaatacggtaatttataaataaatttaaaaaaaggcaccgctggccggcaagggagtggagggggaaggtaaaaagacagagggaagggaagaagggtgagcttttgtcattattttgtgaacggaaggaacagttctttttttctttttggtagttagggatgtacgagtctcgactcgagaaatttctcgggttttcgcttcttggtctcggtaaaatcacttctcgcacatccctattggtagtgcattcgttgacaaaacacacagtgctgggacgttagtcaaaaaccatcaaatggaaaatttttgacagaaaattattcataatttcgtctaaaatagatcaaatttatgtaggctaatagaaaacacttagggctctctaataatatcaagaattaaaaatctagatgcttttgagcaaagttatatcaaaaattattttcatttgaaattaattcatacattcatttgtcaatttattcgtaaattattttttaataattcgtacagtcaaataattaaaaaaatttctattaagaaagttgagccagtactttacatttaatgtcgaaaaagggtaacatttatttttttatttttaattgtctaaaataataaaattaattttaatttttaaaaaaccatctctagccaaagtcttatcagccacaatcacagcattgtgatttggtgccatgaatgaatttgccaatttgcaaaaaattgagaattttttttgaattatattgatcaaattaaagcctttttatgtttttacatttctgtataaattgcactgaaattttaaaattcccggcggcgcctacggcaccgcttgaccctgaaaatccttatttttcttgagaaatttgcctcaaaatcgctaaattggtcattttttggagaaaatttgttaacaaatctcataaaaattccaaaattttcccgngcggcgctttcgggcaccgctggaccctcctccatgttagcaaaaagtttttgaaaaaagcgcngccgttaaaacgttaaatagtcactccttttcccnaaaatttctaanataatgaaaatgacatanaaaagattttataaat

SEQ ID NO: 20453 - DNA, 479 bp, Heterodera glycines
aaatcttacttcatttaaatttgctgaatttcctgaaataccaaatatttcaaatttattttcgtttccttgaattttctcagtgtcccgacatttgcggtccagacatttgcggccccgacttttgcggcccgggttttgctcaatcctggacaaccttcgaaaggatattcccccggaaatggggtctccaggccgcgaactgttctcatggttctccgactgaacttctggtgccttggcgcgtgggcatggcgatgcgatttgttgccaggggcgttacgattggcgtcgtccgtctccccgggggtgggtgcagcccgtgccctggcgatgtgtgatgctgggttaccgcatccggatactgatatactctccgtccccgtggtgatggtcgccaacacaacggacggaccgatggacggagggcactgccggggggggggggggggggtcggaatgtgccgaaccgaacctcg

SEQ ID NO: 20454 - DNA, 780 bp, Heterodera glycines
aaaaatgtacgagttgccctgtgacaccaaggatgggttatgatgccctgtggtagaggggaaattgttcaaaaaaaaacaaaatttaaaaaaaagtttcaaaattttttggaaagaggttcatcttgaaattttaggaaacactgcgcgaaaaattaaaaaaaaatttgcttaaaatttttctaaaaaatttataaatttaaaaactctttttttaattcatgtgagggagagggcgaaaaacttgtaaaggggcgaaagattttttaacagatttggcatgaaaatgattttttattttctggcggaatcttttcggacaacctggcaaaaaaaaaaaaagaaaaatccaggaatctagaaaaaagccactgatgggcgtcaaaaaagcccgagttttcgctgacctgggccttacaattaaaacttttttttccaattttactcgaccactcattttcacaggcgttggaacgacgcattttggagtacatacacaaggccggtgtgcacaacaggaagtaccggtacatggactacaaacagcaaatccttgcggaaggtgaacacgaagaggaccccgtctatccgccatttatctgatcactgatttttgatgccgacacatttttattgtttcaaccatacattttttgtttaaaaaaattagtaaaaaataagttcgtctttattttattgtataatttattcgaatggtttttggcctacaaatttatcgaaagggaaaaaaaaattttctgattaaaaaaaatttttttt

SEQ ID NO: 20455 - DNA, 2572 bp, Heterodera glycines
  unsure (1)..(2572): unsure at all n locations
tcatagcaccgaccgaagaaacggcgagcagaaaaagggaatggcacagtgaattggaatggaacgcaacagaggagaggaggaccaccaaagagaatattttgcaaaattatgaccatttgccgggcgttttaccttatccccccacccacaaatcaatcaatcaaataatcaattggacggatagagagagggaaaggatgaaaatagcattggggaaggaggagagacggaagagaaagagaggaaaaggaaaaattcgaagcaagaaggaggggagaaagaggaggaaaaggatgaaaatagcattggggaaggaggagagacggaagagaaagagaggaaaaggaaaaattcgaagcaagaaggaggggagaaagaggaggaaaaggatgaaaatagcattggggaaggagaagagacggaagagaaagagaggaaaaggaaaaattcgaagcaagaaggaggggagaaagaggaggaaaaggatgaaaatagcattggggaaggaggagagacggaagagaaagagaggaaaaggaaaaattcgaagcaagaaggagggggagaaagaggaggaaaaggatgaaaatagcattggggaaggagaagagacggaagagaaagagaggaaaaggatgaaaatagcattggggaaggaggagaaagagagagagagagagagaaaaaggaaaaattcgaagcaagatttttgccatttttatacgtccgaattatttaccaatttagacattattcatcaaaaaaggcatttgatcactgatgattatgactagggatcggattcttagttttttaactattttttctgcggctttaactcgacgaaaaatgcacgaaaaacacatttctttttcgaaaatttttcatttttagtgccactattcatcactaggaatcactattttggagcttcgccactaaaaaaaaactatttcggaagttagccactaaaataattttttgccactattttggcgtttcgtcattatttttgccactattttggcattttttggaaaatttcccaaaaaatgcaataaaaacgaaaaatacaccccaagaatcgtgtagaacataaaaggtaactcgcccggtgggactcgaacccacgaccccagcaatccgtgccgtgctctaaccaactgagctactggcgcctcttttagaggttctctcaggtcctttatcccactttctcccacactccgttccttctggcatcacaatcgacctaaaaatttttcaaaaatacacccctaagaatcgacctaaaaattttcaaaaatacatccctaagaattggaaaaatttcacaaaaattcttcccccaaatttttttttcttgttcaatattttctaagaaaatattttgtaactgcaatcagtgaataaaatctttttccttaattttaaattattttcaaattaaaaaacagcctatttaaaaaattgcacccctaaatttggaactttttcgccactatttttgccactattttggaatttttttctcactatttagttaattatactttcagcctcagaaaagcataaatcagatccattcatttttgcttttcactttttggttgaggattaggttgcttttcccaaagtgccgttgtgcgagcaaagaaaatgccgtccgttcccattcactggcagaggagggcattaagccactcaaattaacccaaggaaaatcaatggacagattaatcaatggcaattaatctgagagaagagaaccaaaatgggaacagcagagatgggcagggaaatcatggcatataaaagcacaaatgaaagatgccaaaaccattcatcaccaaaatccaaattagcactaaattctattttgctcccctatttattttatttatttaccgttttttaagaacataaattttttttaagcacaagggttcttaaaatttactagattttaacgatttatttagcattttacatatttattttgtattatgcaataaaaccaaaaaatacaccccctaagaaacgacctaaaaattttttcaaaaaatacacccctaagaatctacttaaaaaatttcagaaaaattaccctcctaaaatcgtcccaaaaattaaaaaaaaatacactcctaagaaattaaaaattttcccagaaattcattttcatggcatttttggccttaaaaatcccagtcctactcatttgcaactgcaattagtaaataataaatttttggctcaatttttgttcgattcttaaaagtgtatttttcgcttttattgcatttttgttgcgaaattttccaaaaaatgtcgaaatagtaaaaaaatattgacaaaacgccaaaatagtaaattttcactattttaagtagagtgccacgggaccgggattttcggtgtcaaggcagttcgtacaatttcaaatgggaatggccataatttttttgttcgtcatttagtttcttcaaaatttgtttcaacgaaagctcaacgtgtttagaagctatcattaagcagaagctaagcgattaatcatctcaccanaaaa

SEQ ID NO: 20456 - DNA, 843 bp, Heterodera glycines
aaatccaggttgtcaaaaaatgacctggatccaggaaaaatccagaccttattgaactcacattttttaaaccaaaaaaatgtctgcaaatttgtgcatatattccaactattattaagacaacgatgaaaaattagatttataatcgtatttattcaaatttgatgtgatcaacagccattaggcacaattgttaacgatgcaatcaaagaaacacatcaacaatgtgcgcgaacaaatgatttatactgaactcaattcctcactcaaaatgcgagcagcacaaattcccacgcaaaagccaagagcacttttcacaaaggacctaaatttgacagagaaattattaaatttaaaaaaaaaattttcttaaaaaattgttaacttatattcttgaaaaaagatggctcaagtacagtttatgcgtccattcaatttttgtgcgtccaatcaattttttacatcgaattgtattgcattgacaatattcaaccaagattttctggtatatttttacaaaattttgaatatcttagcagaattaccagtcataatataacataagttgttttccgtttcttagctagattcgttaatactaacgacctttatggtagcttttgttagtattaggacaaattccgcaaaaaggccatgggttcgctcttcagtatccaaattagccaatgattaagccgtaccattccctatgatgaattaagctgcagctaaacggaaatagagctagcataaacatgatcaccggatgaaaaatttgattggacgcataaaaattgattggacgaacaaaagtccattggacgcataaattgtacttgagcc

SEQ ID NO: 20457 - DNA, 1307 bp, Heterodera glycines
  unsure (1)..(1307): unsure at all n locations
tctttggccttaaaaatagcacgcgagacacaatcgccgcctcattcataatacctaattatgcatatccatttcatttntcgtagggttcgactggaatgaacccttgccaaagccaaccgttaaacgaatttgcgtatttacacacagtcagaattagtagaatacaattttaaatctcaataaaacatgtaatttacaaattgaggttaagtgtgcggtatttattgaaatgggagatggtcaaatactgacagtaatttctgcacctccagacgcttccaaactaaatttcaatagcctccgaagttccgagtctaccagttcagacgaggtgcttgtaaatgagttgactaaaggtgaaaatcacttaaaaatttaattaaagttaataaaactatagatttattgccagctttgcgtcgcacgaggactcgcacaatttccagttctaaaggggaagaggacattgtgacaacagagagtggacaagtgagttcttaacattacatcataccaaaggttttgtattgttcaaaattgagtttagaaagtgtacacaaagggaaggcccccatggtacgatctggcggggaagcagctcaaaaaatcgtatttgattggcatatgtggtggctcagcatcggggaaaaccaccgtggcaaaaaagattattgagaggctcgaaatgccttgggttttgcctttttttaatcttattcattttttaaatattgcaggtcactgttcttgcgatggactctttttataaagtacccgaaattctttttttaacaaccaatgatttaaaattttaggttttgaatgaagaacaacatcaactggctgcgaaacaggaatacaatttcgaccatcctgacgcatttgactttgaattgcttcgagagtcgttggtccgacttcgagaaggcaaatcggtggaagtccccgtctacgacttttcgacccatcgacgcgccaaaaacccgaaactgatgtatggagcggacataatcattttcgaaggaattctgtcgtttcataaatcggaaatttccgacctaatggacttaaaggtaaatgacaaaactaacaatacgcatggttcactaacatttaactgattatgctcaaggtttttgtggacactgactcggacattcgtttggcgcgtcgcttggaacgcgacattgccgagagggtaaactgtgagcagttttattattcactttttaatgacctttagggccgagatgctacaggcggaaaggtatccgtcgctttttcgcacattatataaaanggaa

SEQ ID NO: 20458 - DNA, 2085 bp, Heterodera glycines
ttccccttttaaattaaaatgcttaattgaattttaccttattattattcaacccctaaaaggataatcaatggcattttccatagcatattaatcgtttctctctctctgtccctttttccatttttctccattttaattttctctcaaattgccccccccccccccgagggtcgcttcaactgattgacttcgtcgccctttcccatcgctcgttttttgtcccaaattcactttgacactcctttgaccgaccccccgtcgaatgttcaaaattggatttgtttttgccctgatgttcttctgtccccccccccccctccgaccattccttcgacaattccctcggcactcatccgtcgctcaaaatgccaacccccgcgcccgacagcggcgccctttgttttgtccgcctaaattcaattgcctcgcccacaatctctgccgaatttggccaattccatgggatgggaagcctttaagaagtgggaatttcgtgtcaaaatgataagaaaaccactcaaaaatcacccaataaataaaataattgctctgatttaaatcggtggccgataattaaggcgagagaaatgccaatgagaaaatggtgccaaaaagagaagcaaaaagagcataggcatttggtaatttggtgaggtaacgaacgaagtgaatgtaattaatgatgccaatttggtaatggaaaatgtccaatttaattattaaagttacatttttaaaatttttttaaaattaaaataaacgctttttgaatgactttttaaaattaatttttttttgcaatttatcgttataaaagcaatttaatgggcaacaaacaaatggccaatgcaaacactgcgacacgcgctttttcgacgcaatcaccgccaacggcaaaaaaagtggcgaatcaccggttaaacaggcaaatgatcaaaatggataagcaattagaaaacaaagaatcgaaaataagaaaattaaatttcagacgccgttccgactttcagcaaaacagcaaaagaagcgcagaacaaacgaaggggggtaagaacaaacattggcaaaaagagaaaataaaccaattagaagactaattacataattatttcaaaaaaattaattccgataatattttatttattgcattctgttgagatcggcataacaataacattggcaccccatcgaatggaagtggcgatttgccaatgaattcggcggcggaaagggcccggcagcgtaaaataattcattcatattaataaacttatttaatttatttgttcgcttttaaggcagacggtgcagcagcgcggcgttagtcgcagcgcgaaacggcgcaattcaaaggccaaaacgaatgactccgcgccaatgccatttggtgggcatttggaaatgaagctttacttttaaatttgaggtaatcaaatcgtggagcaaaaagtcaccaaagaatcgaatggccaaagacatttttgaaggtaaaaagaaaaacaaattaataaattctattgaatttaagcgatttttgtggaagccgaagagttaaaagcaaccttcggaattgagaagggatcgaatggcaaaaggctgagaatggagccaaattttgtggcacatacgaatatgtactgtaaaagaatggaaagtgattaaattttattgttttatattttgttttattcatcaaaccgttcttttattggcactttcttttttaaggtttgccgacactttggactttgtaattcgcaatttggacgatctttcgttggtcaccgaaaacgcagaacaattgggaaggtaataagagaatgaaagaaagaagaggaggagaggaaagggaacaagagagagagagagagaaaggaggggaggaaaggagaaagggagagagagagagagaaaggaggggaggaaaggagaaagggagagagagtagagagttaggggaggaaagggaaagagagagagagagagaaaggaggggaggaaaggagaaagggagagagagagagagaaaggaggggaggaaaggagaaagggagagagagtagagagttaggggaggaaagg

SEQ ID NO: 20459 - DNA, 1230 bp, Heterodera glycines
tcggttgccatgaatgcttagtaataatttgaccggtgacctctcccctccgggcacatcgttccgcccttttctttactgtttctcctttatttagttatttttctggtgtttttacattagtttattctttttgtttatgttttcatattttgtgctcaacacattccctccttttcactcaaaaattcactaattgttcagtgttgaatatgtcgctttggcgcgtttaattgacaagaaaaacctttttttctaatttctcgaataaaaatttgtacaaatcaaaacaagcgattcgtgcaggtactgaaacctttttaaaaagccgattttgaggatatttgacggtgccgaaccaagccttaaccgctaaagatggtaataaaagcggacactagcattttgaatgccttttcaaaaagcgccatcagcgaacagtcaattacgcttgtattaacaattcagtccttaacattgttaataccaacataaatctccatcttatttcaaaccttaccttccctttcctaattagctttttcccttttttcataatccattttcctattattggcgtcgcaatttgactatctttccaccttcaaattttttacatataatctccattattgttgaattttaaaaacattttatttgataaaatgtttgaatgatgaataaaataattaaaaggaattgcgctttaattggttttatcgtttaagcttggttcatcatctatttgcagtgttaatttcgcttaatttgtgtgaatgtcgctttataaggaggatgtgtacgagacggaagacccgccaaatgcggagccaatcgaaacggtggagaaatttgagagcgaagaagtggagaaagtgcacatgagcatgggggctgcgaagaagcggttcgaccactgtttgttggactcggaaggggcaggtaaaaagggagggagctaattggttttgattgttttgtttttgcaaattggcttttatcctcattaattacttaattttccccgttcagatttctccgattcggtcggagtgagacgccttaagcggggattcaaagccagcgaagtctttgaatcggaaacaattggcagcgaggaggaggaaacactcgaacagaaatttaatcgcctcaaccgggaaatcagaaatttggcagccagaagttgaacaagtgaagacaatttgtgctttttactgttccataaaa

SEQ ID NO: 20460 - DNA, 1376 bp, Heterodera glycines
  unsure (1)..(1376): unsure at all n locations
atcaccaatatgacatcagtcctttttattaccttctaactttgtttttcgactcttacttatgcgttcttttaattttgaggtgtaggccaaaaaccgaatataccatggcgctcttatgaatgattgtttttctgtgaaaaattcccgctatcaaaaacaaggaattaacataaaactattacaatatattttcccaattcgcagagccagaacgaatctcctagcgtcaaaaaggaagacgtcgtggccctggacgagttgctaaaaacgatcgcttcgaactgtaagaaggaaggacgccaaccgattagtcatggacggtcagaggaaagctgaaaagaacgatggacaatgaatgagtgacgattcattccaaataacaaaaaacaatgaaataaatcagtttggaatgatcagttgaaatcgttgatgaaactgtccccgtgcttttccatctcttttctgcaccgcttcacatcgatgaaaagacttctcgcctttctcacatcttcttcagtgacctaaacattttgtctgattttgtgttccctttttaaccctcgtaaatagaccttttcgccttttcttctctgtcgtaaaatgtcggcagttgaaatgagttgcatgcagtaacgcatcgatgtttccaatgctatttggacgagcactgcgatgctggcatcctccatttcaacgagttcatcagaagcacggattttcagtatctctccaatttcctgaaggtttttggtcaaaattccaaaattgttgttggatagcaacgctaaattaataatttctttttcggggcccaattctgattgaccaataaagaaaggtattaaacataaataattgcattaatttttcaagttttggattttatatttacaagcaaatgttttttttaattttcgggccttaaagaatcgaaaggattgtttccccgccggagtaaacactcacattttctttgtaactcgacgtcctgatgataaggctgcggtccaataagtccaaaggcacgccgtggggagactcaacggaagtgccacgaatgttcacaatgccgcggttggtggccatcaccaaaatgggcgaaaggtccgattcgatgtaacggttgatgaaggagaagcactcgaggtcgaacatgtgcacttcgtcgacgaacagaacacccgggattatttgcgctttgttttcctcccgccattccatcacctttcatttcattccatttaattttgcttttccgtgtcaatttgtcccctttttcctcacctttttgtcaatttgctccctcacttcgcttttaatttcgcccngtatcaccgcgaaaaaaccgccaaatacccggaggaaccttaaaa

SEQ ID NO: 20461 - DNA, 2871 bp, Heterodera glycines
ctaatgatgctaatttcttcaatggccttttcaaatggtttaatggacaaaaatgaatttgcttcatcaatttccaactgttgaagctttgtatgaaaatattccaatattttttcttgaattgttcctccacccttttttggatcatcataatcaacaaatttgttgaatttctctttcatctcatccacaatttttgtttgatcattttcatccatttcaacaataaactgtttgtattccatcatccaatcccacagcatcatctgtttcaatatttttgcttgatccgtttgggcatttgcaacaacaaattgtttgatgccctgctccatgtcccatagtgccatctccaccactaatgtgttgaactcggctttcaattggccaaccaatgcgcggacaatgggccaacgagtgaccaaatattcactgtttaattccgatccatcaacatccattccagtgagcaattctccttaaatagtgaaatttcaaaaaatgttttttaataggggcccggctcattacggcggtgccgttttgatgacactaaagcttagacaccaccataaaattataccatattaacatttattttaaattattttttaaattagtttaaatatatttaaaaaatgccaaaatttaaaattccataagaaatttaaagaaaaaaaaattattaatttcatacaatccaattattttgtgaaagcttttcagtttactcacctgtaaacccgtaaatgtgtgcaatcggcagttccattctggtatgatagagatgctccatgtcctccgatatttcggcaaattcgttaattaaataataatttaatcttttatttttaaatatttaattgttttgcacaatcaccccctctcgcgagatttcggcctaagatactcgagaattgggcaaaatattggcctttctcgagacttaggtccaagatactgaattggacccagagacccgagatttggtactgatttggatccagagatcgagatttaggctcaagagtcgggccggagctctcgagccttgaagtaaagatatgggccatgacttagacgtaggcctaggaaagtgatttggattaactcgaaaactgggcaaaagtatgggaggcccgagactctgatttgggcctagagactcaagtcttgggcccgagagtcaagacccaaactctcgagctcacgatatgctcatgttaacaaaaaactcactgaaaaagctgaacaactcatttcggctggtcataattttctcaacgttttgtcgaaaaattttcagttcatctaggcttggtcttgaagggttctcaaaagcatcgaacatttcttcaaccgtgtcaatcctttcaaaatataattgtttgaacagctccaaattgcacagctccgaattgccagtgccaatgcaaatgatggaaaagcagaaaataaattggaaaatgaatgggcacaatttccggggggaaagcattctaaaaaatagcgatgaaaaattaaacaaaataaaaattgttagacaatgtatccgaaattaaacattgaacacttgaaaaacttcggaaacttagaatttttatcaaacaaataataaaaattatttcccgaaattaaacagtgaaaacatgaaaattctactgaaaacttagggaaattgctaagaaagaaatacggagaattattattcacactaactttttttgaactggagacaaaaatttttagaatttttttaatacaaattcttaaatattgacaaaaaattttaccggttatttggcttttacaatagtttgagaatttgtttttttccttaaatattaaaatgaattggaattattgggcctctgaaattacatatttatatttttaaaaatttgtttttacctttttgggccagacaatcagcagatgcccaaaagtgtgggcggtgcccataaaccaattttaatgtgtttatatttaaaaatataattcctaggccatcattaagccatttccggcatttctaatttcttgtttttccaaaatcctatgctttaagcttctcctatgtatagttggtatggcgtaaagcttcaacaactaaacgaataaatcgctaggctttatgatacaaaatttataaaataatataaaaattatatataaaataatatataaaaaaatttttcaactgccaaaataaaaaatctcaatcaattaactaatgcgtcattgtcagcattaaatcattgtctctattgtaaatttaatattaataaatttaaccgctgaaaaatttttcccataatataaaaataaatttatcgactgtaaaagatgaatatatatatgattttgatgaaataagaataaaaatagataaaatataggaatatataaattttaaaataataaaatataataataataaaaaagcaaaattaaagctaagtttggaattttttaaacaaattattattaaaaaattgttatcataaaacttaaataaatcttctagtttaattttttaataggctagcaataggtctgagaaaatataaccaaattgctttaaattttttttacaaaaatttttgaaaattctctgaattcataatctatcattttttaatcagaatcatttcaattaaataatttcaaaatgatgttttttaaccttttttaaaagttcacgaattcatattcatttttatatttagaaaaattttcaagttttaataggaactggtacaaagttcaaacaagtcgaaataagtgcaaatgtgttatattgaatatttattttagttttaaatttacttggcgttttgttgttattttaatgtttgtgaattgtttagt

SEQ ID NO: 20462 - DNA, 1172 bp, Heterodera glycines
ttttttgaaccgtccatacctcacatatactcaaacggcccggaaaatcatttttagagcataacaactgatgacagccactgtcattgtttccaaagagatttctattaccagattgccaaaaaaagagatagccatttttttggaccgtccatacctcacatatactcaaacggcccgaaaatcatttttagagcataacaactgatgacagccactgtcattgtttccaaagagatttctattaccagattgccaaaaaaagagatagccatttttttggaccgtccatacctcacatatactcaaacggcccgaaaatcatttttagagcataacaactgatgacagccactgtcattgtttccaaagagatttctattaccagattgccaaaaaaagagatagccatttttttggaccgtccatacctcacatatactcaaacggcccgaaaatcatttttagagcataacaactgatgacagccactgtcattgtttccaaagagatttctattaccagattgccaaaaaaagagatagccatttttttggaccgtccatacctcacatatactcaaacggcccgaaaatcatttttagagcataacaactgatgacagccactgtcattgtttccaaagagatttctattaccagattgccaaaaaaagagatagccatttttttggaccgtccatacctcacatatactcaaacggcccgaaaatcatttttagagcataacaactgatgacagccactgtcattgtttccaaagagatttctattaccagattgccaaaaaaagagatagccatttttttggaccgtccatacctcacatatactcaaacggcccgaaaatcatttttagagcataacaactgatgacagccactgtcattgtttccaaagagatttctattaccagattgccaaaaaaagagatagccatttttttggaccgtccatacctcacatatactcaaacggcccgaaaatcatttttagagcataacaactgatgacagccactgtcattgtttccaagagatttctattaccagattgcccaaaaaagagatagccattttttttggaccgtccatacctcacatatactcaaacggcccgaaaatcattttttagagcataacaaactgatga

SEQ ID NO: 20463 - DNA, 994 bp, Heterodera glycines
tgacagtggctgtcatcagttgttatgctctaaaaatgattttcgggccgtttgagtatatgtgaggtatggacggtccaaaaaaatggctatctctttttttggcaatctggtaatagaaatctctttggaaacaatgacagtggctgtcatcagttgttatgctctaaaaatgattttcgggccgtttgagtatatgtgaggtatggacggtccaaaaaaatggctatctctttttttggcaatctggtaatagaaatctctttggaaacaatgacagtggctgtcatcagttgttatgctctaaaaatgattttcgggccgtttgagtatatgtgaggtatggacggtccaaaaaaatggctatctctttttttggcaatctggtaatagaaatctctttggaaacaatgacagtggctgtcatcagttgttatgctctaaaaatgattttcgggccgtttgagtatatgtgaggtatggacggtccaaaaaaatggctatctctttttttggcaatctggtaatagaaatctctttggaaacaatgacagtggctgtcatcagttgttatgctctaaaaatgattttcgggccgtttgagtatatgtgaggtatggacggtccaaaaaaatggctatctctttttttggcaatctggtaatagaaatctctttggaaacaatgacagtggctgtcatcagttgttatgctctaaaaatgattttcgggccgtttgagtatatgtgaggtatggacggtccaaaaaaatggctatctctttttttggcaatctggtaatagaaatctctttggaaacaatgacagtggctgtcatcagttgttatgctctaaaaatgattttcgggccgtttgagtatatgtgaggtatggacggtccaaaaaaatggctatctctttttttggcaatctggtaatagaaatctctttggaaacatgacagtggctgtcatcaagtgttatgctctaaaaa

SEQ ID NO: 20464 - DNA, 2773 bp, Heterodera glycines
tgtcttgctgaatgtaattctcccacaaatgtttgttgttctatttaactatgccatatatatgtgtatttttaataattgtaatatgtttgccctgtttatccatgttttatggtcatttattctcattgccgaataaaaacggtaaaaaaagtggttgaagtaccgagtcaaaagctctttctattcgagatttaattgagacgagtcgggatttgttgcttaatgatccaatcaatcgcaaaatgcctttgtcattttgcatttcgacctcccttttccgtcattctctgttcctttggtcgggaagggtactgataaaatcccgatccatgtcgaacccgagcaattaaaaaaggatcggatacagaggtcggaattccggattaaaccttttcgttttttaatgcttacaaaacattttccatagctttttacaaagactttttctattctcagagattattaaatccaatttccaattgaatttttaagtaccatctcaattggagccattcttatttaggtcgctattttgctcgataattaataaaaaaaaagagtaagaattaagaatgagaaaaaatgaatagataaatgagtcaattataatattttcttttgctcttctccaatttttgagtcatcattttgctccttgaaaaaatgtcaatttcaacgaattcaacaaatattggcaaattttcatttgatgattatggtaatgagaaatgggaaatggtagaaatttaaatttgggaaacgatagaaaatttaaaattaaaataaaatcatctaataatttaaaaacattaaaatgcttttttcagaaatgaattatgatgaattgagtattttgaaggaaggagctgttgttaacacaaactgtgaatcattcactgatcagcaacaattgaaggcggaaaaacatagaaattaggaaatatttataatttattaaaattataatttagtttttattgcgaaattcctttttaggaattcactgaaaagtttgccaaaatggaattgatattgaaaatcaccaaactagagctcaagaatgtgagttttacataaagaataattttttgacaattaaatctaaattgctaattaatttataaataattaaatgattttaattattaagtcatttttagaagggactccaagaaaagttaaagcagcaggaaacgaatgcactgctcgcaaagatcgaagcggagaatgggaaaatgaaaaatgaaattgagaaaatgaaggcaaaaatggacgagatggagaactctttggcgggagcagacctcccgcccgttttggtcatctcgtcgcttcttgcgacactgcccccggccggcaccacctccatttccgaatcggcaagtgacactccatcatcctccatcggcactgctggcatggccaccgctttcccagcgcggggagccaccgcctccccatttttcccgtctttgcccctcgaccacggccagctcgcatcgcccaacatttggcgcaagtcgtcggcttgggttcccaagtcccgaaggcgcgcttccttcgccgatttcagtttctgttcctcctcctccctctccattttcgccttctttgcccgggcttcgagctcggccacttcggcccgagctttcgcctctttctccagcaattctccaaaactgtcccccggcggagggagcaccctcgggcggctgcctctttccttctcggccatctcacggccttcctcttcgttctcgtttcggccatgggagttcgatgcgcccggtgctgcgccgccgacatcctttgaagggagcaactctccctggggcgggcgtaccaccattgatgccaattttggctgggactttccccctttcagattgccccccacctctgatcgacgccggcgggggttggggagttgcgggaattggtgctgcagtcggtgaatgtggtcatctcccaggcgagagagctgatcagcataacgttcggcggtcattcggatgtgccgttcctccgatgggtcccgttttccgtcgcgctgccgatggcggtggcggttcattcggtggttgaggtgccgtgccaagtcttggacggcacgaattcggcgctcattccgcttccggtttgcaacttttgccattcctgaagattgggaagacaaatcagctggggatgtgctaaaagaaaaagtgtatgataaaagatgggagaatctcccaattgaaggtggtgaattgtgcgttcacggatatgctgcgcggagatgaatgaaggggagatgccccctttccttggaagtgaggaatgaacaaaaattgccattaatccaatgattttgcgattgtcaattgaaacaacgaatgaatgccaaacaaatgaaagtttaaaatgaataattcaactaaatttatacaaaatatttgaagaatagttagggaaaatgtttcaaaaagcgaaaaataaggaacaaaagtataaaccatggaaaatcaatcaatcaaaagataatatgcataaatagtttttatattctaaattcgatgataaattggcatgggtgagagagagtaaacattcaatgaaaattaaatatgtaattcaaaatttagaacgaagatgctctatttttggaatctatcaaaggattagcaacaatttagagaaatttttttaagagggctaaagaatattcaaattctattaccaaggcgaaagtgattttcaccaaaaatatgagactcatcttggcattatg

SEQ ID NO: 20465 - DNA, 1476 bp, Heterodera glycines
acttaaaggttgatccccgatgaaacaatttttgtttattagaaaaagttgttttgcctttctctaccttcaacatggcgtacactcacgaagagaaaggcaattcttcaaacaatttgaatataaattcgttattcgatttatatattcaccatttgcactcctaatgatgtcgccaagaaactgttgcattcgagcatcacttttaactgaaatgcaaaacaatttcttgagtctaaattgcattggatttttaaatactgaaatcgttgtcctccgtctcaagagtgtatgcgttgatacaccctaggtatttaagttcgtccttagatttaagcaaaatgggatgatactaaaaaaggataaacatttggatttacagtttttaactatttaaacaaaattttaggtttaacattagtccaatagaaaaaagcgaaccaaaaaactagggttgctccacgaccccgagtcccgacttttttgggcctatcccccgacccgcccccgactattcagccaaatatttaaattttgcctagacaccaagccataataaatgtttgtttttcctatatgaacataaaataggtaacagatttattaatagattttatcgaaaatgaccagttttttaatttttaactgatttcatgaattttgttaatagattttcacaaaaagtatctataattttgaaaatttaaaaataaaactttgtaaaagtttaagaaattagaaccgaaattaatttctttagaaaaaaatttgttcgtatttatcatcgcattttacgaaattgattactgtccgtacccgcttccgtctcccgacattttgccccctgaggggtcgggcaacaaccctacaaatggatttgacctaatcatctataaagtttaaaaaaatgaggcattctctttaaaatataataaaaattacatttttttaatcaataataaactcaaaagcattctgcttgtcctcccgtttccatcgttaaatgggtggattcttagctgcaaaaagggtttttattattttaatgcatatttaaaaaatttgggtgtactatagtcaaccccccggacgatatgccacgctcgacattctcatatgtatctcccaaagatctatctccactctgtggcgagtgatgtccagaactgaacaaagtgcggcatatacaacgaattttttaatctttggtatttcctctattttgagcctgctctacatttatgtattgcgccagtatggctattgctactgaaattcattcaactttcccgagctgttgatgaaataattattctagacgatttttttatatctcaaagcttaactattgcctttttgtatgataactggtagatattgggagtaaaaaaaaggttttttgtgactatttacaataaaaatttatgctgtattttctaaaaaagatctaaaaataatttctttgcgtaaatattt

SEQ ID NO: 20466 - DNA, 703 bp, Heterodera glycines
cttcactgacactatcagatatgagaaggcgtttaatgacatggtacgttgttggaagaaacccccccccccccccctcccaaaaaaaaagcaggccagaggcagttttcgtacgggccgtttttgtacgagctcacgtttttggactgtaatttttttctttgctaaccaaattcaacattgttagtgtcattcgagagcgcttcatatgctctattaacctgcaaaattccaaaaaaattcgttaagtttaaaaaaagttcgagccaaaaaagttggaaaatctggttttttgaattttggccatattttgaaccaaacgagatttttcaaaatcttgcaggctaatagaggacacttagggctatcgaatgataccaacagtgctggatttggttgacaaataaaaaaagttatagccaaaaacttgggctcgtacgaaaaaaatgggtgtcgcgataccgtctcatccaccgttataacgatattttccgaaactaagaaaagcgacctttttttattctagaattttgttgtttttttgttaaattatgaattttttataaaattttattatttttttatcatatacgatccatttcaatgcttaacatgcactcacgcgaaaacatgcgaaaacatactggcccgaaaaaaatgatatacaccaccccaaaaatcgttgcaaagtcatgaaaatgca

SEQ ID NO: 20467 - DNA, 1613 bp, Heterodera glycines
  unsure (1)..(1613): unsure at all n locations
aattgctaaattaaaataccagatttaaattaaattatagataaataaataaaaacaaaaaaaaattttttaagacatttgattttataaaaaaatataaatttaattcattttaataataaataaaataatttatgtaataacaactttaaaatttttttaaatatgtacaaattaaatgtaaaataaattttgcttttttcaggtaatgatgatttttttgattaacgaccaatggaatacaaatgaaaaaaacttgattattttcccatttttctttttttatactaaatttggactcaagcatgtaatgtttggtctgtcggctgcataatgttcgaattgtactccagcggaaaagcaaattagttttgagagctggacttaagctggcagctttgcacctcccctctccccgcattttttacagaaaatttcacgaaaaaataagaaaatttaagtgaacagtttttttcgttttagacttatataaaagaaattttttgagtttgtaggcctctagagaaaagtaaaaagagttaattttaaaatataaatcaaataaattattttttaatatttaattactcatcagtggtttaaatgaacttatatattaattaattttagaatatattatgtgtcagtagcttgtatttttcagtccttctcgtcacccatagtgatattctgcgatacttgttttcactcttttaattattatcttttttaaatatactaataattcttatttatttattttttaaattgtatattcatttttatttcacttatttttaaaaattcaattaaataaatttactattttaaatattttttattcatcattagtcatgaattaaaatttttttttaagttttttattctttttaatttgttttctttgtctaaattttaacaaaattatattttaaataatattttcagcatattgtgattaatttctcagttgtaaaattgcttttacataaaactgttgtatatctattaattactttataaaaatgtaataaccattgtaaaataatttttataggtttaatcgcttagaaataaactaaaataaagttgaatgtttaagcatcttcaaatttaaataaaaatttcatatttatttttttatatcatattagaagtgttaatttatatatttttctataattataaactgttttttatattaaattaaatttttctttaggtgttttatttctttaattaaaaaactcacaaaaatataggcattgctttttatttataaaatagttttaatgttagttatatttcaattactatattttactttttattgaataaaataaatatttggtgtaattctaaataattgtcttaattttaatttgtcagttcatcttgtatttttatggtcaaataaaattaataataataaaattttcaaattaattcgaataatataattgcaataattttttctttttgctgcttatctcttcaaatcttataatcacaccacattttgaacaaaaataatgttgacattaaatatttttttattattttgagctatttttgaataattttttatttattgattnatttntttttaaaat

SEQ ID NO: 20468 - DNA, 1503 bp, Heterodera glycines
atttttcctaatttattcaatttggtatttttatttaatattttcaaaataaaaaataaataaataatttttccctctaaagaccatacgtgaagttttaataaaaacaaaaataaaatatttttacttaaaaaatatttaaaaaatactttaatgaatatgaaataataatgattaatttgtgaatttaaataaacataaattaaagtttcttttaaaatttcaaaataatatttaaaaaaaaacaggaattggccttcaccagtgcaactgacaaaagaaaatttactggaaaataattttgatcataaaatttctatggaaatgctgatcatttcaccggcatttcctgaacaaaatatttcgactctaatcaatccgactgacgcaaggaaaatcaaaaatgaatttaaaaatggtaaatgtatttaaattaaatattattattttattttattctatttaattaatttctttttagcttttgaaacaattagagcattaaaagaagatgaatatgtcggcgaaatttttggacaatgatttataatgcaatttttagatcaattattttacataattatttttataatttaaatttcgaaaaaaaattaaaacattttgtattatagcttatgagagtatcgttattagtgacgtgactttctgtttattctgtgacttttgtctattttggtcttttcacgcataaaaatgtatgtgcctgccggttttggcattttgccaatattcaacattaaattataaatattttacaaatccgcgaaacttggttaattttaatgcctgacaaactttaaatgcaaaaatagcccgattggtgcatggactgaaggtcagatttcatgcaaaaaattgggaacgaatcatagcaaagcgaaaattaggaaaaacaagcacgttctacatgaataagataataaacaaggacacaaacgattgaactggttggaaaatttgatcaaattacaaaagaaaaagttagtgggttcaaatatgacagatcggaaagaaataaaataaaataaaattttattaataaaataaaattttatttatttgtcgggttaggcgggcccggatatttgggtaaaaaccggctccgaatattgccgggtacagaaaaaccgggattgtgtcgtgtcaaagtttttaaaccgtgttgtcgccaaagcgacacaaatttctttgaaatttcttttatttttgatccttttcgtcgatcaattttctcccttcgctcgctcctttaattatgactcatcttttcttttctccatattttcgctatgagtcatcatttttgagggaattttttccctttgcttgtgcacatttcttcacgtgcctggccccgcccccatcgattgtgagggtataaaagcccggcccattctccattttcttcactcggatcacttttttgattaagtcaggtcgggaacagttttctgtccaagcatttgcattaaaattgtaatt

SEQ ID NO: 20469 - DNA, 1379 bp, Heterodera glycines
acccacacccaaacgtcttgaattttgcgtcaattatttgtccgtttccgtcaaccttaatttcataatattctaaaaaatcaatgatttcaataaaccatgatttgaagtttcattacatctccgcaagccggtgccccgacaatccctgtaccaacagacggatcatttttgtccaaagagcccacatttcttgggttttcgtaatggtcaatgactttctcatggtaagccgcaatttgcagcagttgaatgttaccatgacggtggaagaccaaagtggggaaaagtcgcgtcagcgaaaaagaattaatgattttgttttgcattactaaaaaaaatatacctatcacataattttaaaaaattaataatccgatccgaatgagtgctatcatcgatcaacgatcgcgatcagaggatcaggcaaatattaagaaaaaacatattgccaaatcaatgccaatttaaattattcccaacccaaagggcaccaaaaacagctaatttgtaagagcgcgcccataggcgtcggtgtcacccagcagctacagtcagctaaatttttttccatggaatataataatttaacatgagaatgaacgaatttatattttagcgaaaaaattgaatatgcgtgaaatcgtccatattcaagctggccaatgcggaaaccaaattgggtcaaaggttatcatgttattaaatctgtttaagtgatgttcttttaaattagttctgggaggttatttctgacgaacatggaattcaaccagacggaacttacaaaggcgaatccgaccttcaactcgagcgaatcaatgtctattacaatgaagcacatggtttcttaacaaagcccagtctcgcccacacactttaaatttcaggtggcaaatacgtgccccgtgctgttcttgtcgatcttgagcctggcactatggattcaatccgagctggagcgtacggacaactctttcggccggacaatttcgtttttggacagagtggcgcgggaaacaattgggcaaaaggccattacacggagggtgctgagttggtggacaatgtgctggatgttgtgcggaaagaagcggaaggctgtgactgtctgcagggctttcaactcactcattcactcggaggaggcaccggctcaggaatgggcactctactgatttcgaagatccgcgaggaatatccggaccgaattatgtcctctttctcagtggttccatctcctaaggtaaatttaaaaactgtcggtttctgttaaagtgcactttataaatcaaattgacttttatgagtccaatcaattactgaccttttaagagttacaaaacgataaataatcagtaattatttaattatcatat

SEQ ID NO: 20470 - DNA, 1015 bp, Heterodera glycines
ttttgattgacaatgaggccctctacgacatttgcttccgtacattgaaacttcagaatccgacttatggcgatctcaaccatctcggtctgtctctgctccctttttagctatctctgctgctttcagtgtctgtgacaatgtctggcgttacaacttgcctccgtttcccggggcaactcaatgccgacctccgaaagttggccgtcaacatggttccgttcccgcggctccactttttcatgccaggatttgcgccgctttctgccaagggggcagctgcgtaccaagccttgtctgtgtcagaacttaccaagcaaatgttcgatgctaaaaatatgatggcagcgtgtgacccgcgtcatggccgttatttaacagtcgcggcgatgttccgcgggcgaatgtcaatgcgcgaagtggacgatcaaatgatgtcggtgcagaacaaaaattcgtcttacttcgtcgaatggataccaaataatgtgaagactgccgtatgtgacattccgccgcgcggtctcaaaatgtctgcaacttttgtcggaaattccaccgccatccaagaattattcaaacggatttcggaacaattcacgggttgttttttgcaatttttttcatttatattttaagtttttagcaatgtttcgccgtaaggcatttctccattggtacactggcgaaggaatggacgaaatggaatttaccgaagcggagtcaaacatgaacgatctcatttcggaataccagcaatatcaggacgcggtgatttatgtccagatatacgtgtttataacttcgcttttttatagacggctgacgacgaagttgaatatgacgcagaagtaacggagactgctgaggcttaaccaagaccaatcgataatttattgtatttgcattacgaattgtcttgttgcttaatgaagagtgactcttgctttttctgtgtgttcgggcgtagcgagtttaattggttttaggtgtccactattataaaaaaatattt

SEQ ID NO: 20471 - DNA, 1702 bp, Heterodera glycines
gcaattctttgctttttcacgtcctgaatcattggactttctcaaacaggtaaatattgatcataggccccaaactcgaaaatgcttaaaaacggtcagaatcgatgtaaaaatgttcgaaatgggttggaaaaatagaattaggtgtgagcttgcctttttcaggctgaaagtaccggaattggagacttccctcttccctgattcaaattcgtgattagatcacttgtcccaaaaaatggaatccgtcaggacaactcggaccatctcaccccccaagagttcctccgtagggttaatcttttttgtagtaccattgttccttcacttttccccttcgctgtttctcttgtaaggccgcggttcattttgacccagggctccaagatctgaggtttaaacctcattttatggttttttgataggtcaatgagggtttttttttgaactgagtattttctgacttttttaagcaattttgaggattttggggaaaatcgtcagaatcggtgtacggacatttcaccaactggccaacttgccaattgacatttcgccaactcacccaaaatcggacgtttcgccaactcacccaaaatcggacatttcgctaaccggacattttgccatcttagtataattttatgctaccgaaagaagcattgacaaattctttgcatatgcttggacttgggatgcaggactttgtgggcgattttccgtccgtggaaatgagtaaagtagtgaagaattgaggccaacgaaaaacgattcacatattttaatattttttctattagttttccttttattttgtaaagaattccttttaccaccgatctcttttcaaatcctcggactccgaaaaatcttagtaaatccaccacttccatttcatatatgccgccagtccctaaaattcctattcgaatcactagttattatgctagtgtcatgttttaaaaggcttttgaaaataaaatttttcaaaaatggggggggggggtaaactactattaccatttttatggtagtgtaaactattcaaagcctgttttaccagaatttatttaagtcaagaaacttttgcatttttaaaaaaactaatcattagaggtataaaaagtattaattagtcgagactaaatgaaagggttaaaacaaattggaacagctcaatttttacaaaaatttattcaacgaatacgacgcaacacatataaagtaacaataaaaatgcctccaatggttgctccggcaaaaagcaaattcccccaattgcgcgccggcaccagcttcaaaaaatgagattgtctttacaaaatgtctcttttttgctcgccctgtttctccgcgagcacgcgttgttcctcctggcaaaaaaataaaaatataaaatattcaagaatggcaatgcctgcgcagaaaatagccgaatggtgaaattggcctcttcatggaaacgaaactccttgaacagctcgtccattccgcaaattgggtgtctgttttgcagtgccactatcatattttggtaaattagccattttatctggttttaagtgtatttgtctgaaattcatttcacgtatttccgaaccccggacccgaattcgaacagaaacagcaagtgcggagtttacttttctacgtttaatttttcgtcctatgttaaatccgtttaaaaattttgcataccgat

SEQ ID NO: 20472 - DNA, 2777 bp, Heterodera glycines
  unsure (1)..(2777): unsure at all n locations
aaggaattcaggggtttactaaaagcaatgagttctgagtaggaaattttctgtgccacatatacactatattttaatcacctgtgaattttaacatttgatttattttattcatttttattacggtattcattttgtattttttatttgatcatttttatttgtttgtttttggcaccatataagagcactaatgtgcctttggtttgctcgataaaattaaattaagtttaacttaataaatccgtcgtccttcgcctttatcctttatctcattgttctttcttttaagacattttgcgaaacaccttcaaagcccaaagaaagccgtcaatgaaccagcaagtaagttaatcaaatatatgaaataaaagttgattcatttgaatttttcttatcatttgggcgggttcgcaaaaaaggtgcgataaaatattaccatatgataaaataaataagcaaaatttgagtccattcgcgttaattattatttttggcagtaataaaagatgaatgagaataaaaagtgccgttttcttcccgctgagcttgtccatgcgttggtttcggcattgccgttaaaccaacgctgggcaaccgtgcgggtttcattgttatttgaccgttttattctgtcaatacaacatgaatggcttaaacaattgttttcttcggtagaaaattaattaaaaatattttttatttatgtattttaattgtgtttaattaattaaggtgcatgcttttcgtgcggccaaagatgcccttttagtgcgcgtggaaaacagtgcaggagctaatcttcgtgttctgttccaaggtgggaaatacgggactgggtcgttttggcgccgacgttttggcgccagcctcagtttttttattataactttttttcttgttgaccaaatctaacaatcttggtatcattcgaaagcccttcacaagctctattagccttacaaaaaacaaacaaaaattttagcttctaaaaaagttattaagaaaaaaactcaaaaatttcgacttttttggaatttcatgttataacttttttggtaattgtctaatcgcgaagcaatagcttagaaatatcttctaacgtcggcgccaaaacgatacggacccgggaaatacacacataaataacttataattattgaaagaattcaaacattttacaaatagagaaatccaaatttcaggaatttctgcggagttcaacatcccaaacgacattggcattgtagagtggcttgaggagaatgatcccaccaattacggcatcgtggaatttcgtgctcaaatgcacgcgcttcatttggaacttatcgggaacggaaacaacgaactgctcggggcggccacggcttgtatgtttttgggcaattaattaacataacatgggccgaggggtcgtgataggcaaattcttttgtggaaatgcgtcagtgatcgatactatttgtttaaaaacgaaatacggttaatgtgatatttttgtagccttaagcatggatttataatgaaccaaaattacccttacagtatatgatattttcaggaattttacagtatttcaatccaagcatgtttccatcctacaaattattttttaaacattcatacaaccttttaaattcttataaaaaaggactgacacattttccacttacttacgtattttacgtgagttccgtccgtgggtatgtaaaaattcagaggtcctctgattccgttttcgatcattttttgacttttttagtccagtttctagtgcatatttagtgcaacgatttccgagtatctcttattgttacttagccaattgactctggtctcaattaatagtacttactgaattaaatttttagatttggtcttcattaaaaccttggtttcccgcaactacgtctgatgcgatgatgaaaaattcattttagtaattcaacacatatttttaaacaattatttagcatttactttgccattgctaattgttattgcatgaatcgaattttatttaaaacggattttaaaaaattcgaattcaatttgtaatttattttgaaaagaattcatgcaataacaataaacccttaacaatgcatacacaaattcgatcataatcactatttttgttaatgttacttttaagtattgttgtgttttcaattctaaaacaaaataaatctattctttcctcaaatcggctaaaattttttgaatattgcttggaaaattttttccaattgttcaccaagcccttcccattttcgattttgaaatgaaattatcttcgaaaattgaccatctcaagctttttggtgtgatttggtgacaaaaaaaaattatcaagcagttgtagtcaaatttcgaaaaaacttttgctcatttaaaaatgaaaaaatacttgatttattttatggaagcattttttaattccatttcccagttcgtattaaacgacttcgagttaaattcctcgggttcattttaagccctggtccatattcaatgaaaatttacaattatccttcatattcttcatcgatttattaacagaaaaaaactattaaaaatgcacattttgtcattttaataaattcgtataatgtcaaaacaattaattcactatttaattgattccaagattcgcaagataaaagttaatcgatgagatgatcaattttctgcagataaattatcagacggagggccagcaaatcgggcagctaaaaaaataaaatttaaacctcaaaaantataaacattta

SEQ ID NO: 20473 - DNA, 1778 bp, Heterodera glycines
gggctgatcggtctttctcttgctaatctttgactctttctctgatcactctctttgggcttatcggtctttctcttgctaatctttgactctttctctgatcactctctttgggctgatcggtctctctgctaatctttgactctttctctgatcactctctttgggctgatcggtctctctgctaatctttgactctttctctgatcactctctttgggctgatcggtctttctcttgctaatctttgactctttctctgatcactctctttgggctgatcggtctttctcttgctaatctttgactctttctctgatcactctctttgggctgatcggtctttctcttgctaatctttgactctttctctgatcactctctttgggctgatcggtctttctcttgctaatctttgactctttctctgatcactctctttgggctgatcggtctctctgctaatctttgactctttctctgatcactctctttgggctgatcgttctttctctgctaatctttgactctttctctgatcactctctttgggctgatcggtctctctgctaatctttgactctttctctgatcactctctttgggctgatcggtctttctcttgctaatctttgactctttctctgatcactctctttgggctgatcgttctttctcttgctaatctttgactctttctctgatcactctctttgggctgatcggtttctcttttccgtccgttttcttttaggagggcgtttctcttcgtgagcccatccgtgacacctttttgcaccatttcgacgtgaatacggtcggccccgtcatgaccaccgccgcctttcttccgctgctcaaaaaggccgcctccgccggggagttcgctcgcgtggtgaacatcggttcgtcgctcggttgtattggacaggcggccgtttcgcctcggctgagtccgtatcagaacgtggcttatggcatgagcaaagtccgtccccttctccgtccgcccctttctttgatcagtgcttaggctgctcttcatcacttctccaaaatgatggctttggacgagtcggacattgtcactgttgcgattcatcccggcactcaactgtcccttctcactcacccaattttgttgttttaaggttgggttaaaacggaaatgggcggtgctaacgctatgatgagtgtttccgactccgttgcaaaaataatggcgcggatttgcgcactcacaaagagcgactcgggaaaattgctatacggagaaaaggaattgttgccgtgaagaaaaattgatgtcaattcttcccaatttgccttttgccgactttgaaccgtttctgtgaaattatgcctatttttaggcaacataaattcgtaatttatctatgaattattcaccattacctaatttccaattaaacaacattagtgtattaggttttgaattgtttgaaaacttttccctgtgtcaacgctatatccaaaagaaaaaagtttattgagggatttaaaagttgagatactcggacaataaaaataatggaagagaaaaaaaggatatgtatttataaagggcatgctaacaaaaaatggccattttgtggccgcgttggccacagacatacactgagcaaagtgagcggtgtgggaaaatgtacagaacagaagaaaaacgtgaaaaacagcaaaaaaagaaaagaaacgcaattgaataaacatttaaatgttcaaaagtttattattctcaccccattttattttatttt

SEQ ID NO: 20474 - DNA, 1966 bp, Heterodera glycines
  unsure (1)..(1966): unsure at all n locations
tggtggatttgtgcatcggagcaccccgggggtgccttagcgccgtccggacgaagtacgcggagaccgagaaaagctatttgtgcaaatttgccttgaccaaaattccatgccacaaatgttggccttgagcattggccaaatgtcccctgacaatctgtcagtggacaatccgtcagtgatggacaatgtgtgagcaaataacccaagatttgaacaagcatttttaaaaaatgtaaaagacaattaccatagaatgatgaattaaatcgaattctaaataaatagaagttttgtaaaaccccatccgatttttaaaaattaaatcgagcaatcgcaatcgcaaaattttacaatttggggtaccaaagttttggaaggaattaatagaatacatacagattatgaaaatgcagaaataaatgctttgataaaattttttggtgtgaacaaagtttacagatgtattgttcactacatacgtgcaacataatgacaatgaatggtggtgtaagttggttatttttacttatttaagggttcatattactatttcagtgctttttgacagtattgaaaaaattcgagagcatattgaaatagctatcgcacctgccgctggtgctcatgaaactgagaaatacatgaacaatttggacctagcatcagtcagcaaattgtttgggataaatattatagtttgcgaaaaagttagcaaagaaattttccgttggcaggtgtattcgcccaatttagaaatttcggttagactaattattttatatgctaaaaattttacattaactattttaagctttcaataagtcaaaagaagtcttcacattcaatatttttatattaccatgatgcgcattttgaactcataaaacaaccacaaaagataaaatagttatttattttatttttaagtaacaatatgtattaaatttatttaattttcccttttgtaaattgcaaagaaatattgtggtacgtattgtggaacttcatttttcgactcttgcataatagcccctgttatatggttttgcaattttaaaaaaggttttatatcgagaagcttatttaaaaaattttaaactgtagttgaccgatgttgctacgaacacgatgtgtgttacataaataaatggcaaaaacgttacgattgtgatattaacttttgcaattgtctttataaaactactgattgctttctaacaaaagtttgccagtgttttatatttttttaatatttattatgtttaggatttgttatgcttgtcagttcatatttttggagaaagttttaaagagcaataaaagtttgcattttactcgattatttatttttactatatttaaattatataaaaattgataatcacgcatatgtacaatattttgtttacattggcggttttataaaacgcgactttccattgtggcggatttataaaacgcgactggcgcttttataaaacgcgactttccattttggcggatttataaaacgcgactggcggttttataaaacgcgactttccattttggcggatttataaaacgcgactggcggttttataaaacgcgactttccattttggcggatttataaaacgcgactaggtggcggtttttataaaacgcgacagcacgatggaaaagtaccaaattttgtgcctcctcaactgttatagcaaccttattgaattaatattagtgtaaatatgagtgattaaggatacgatcggcgcaattttaccttccatcgttcgtcgacccgaaaatgggtgcagaacaaagtcgctgcactttatccctccagcagatacatacacgcgtgtctttttccattggctcaaagggtgtttcagtcctgattatcgtgaaaagaagtgcagagatatgaaaataccctaacattgtaaagttaaaataaatatntttatataaaacagggatg

SEQ ID NO: 20475 - DNA, 2783 bp, Heterodera glycines
ttttttctctctctttctctgtgctctctgatcactttttccctctgtctttctctgtggctctttcgttactttttctttgtctttctctgtgctctctgatcactgttccctctgtctttctctgtgctctttcgttactttttctttgtctttctctgtgctctctgatcacttttccctctgtctttctctgtgctctttcgtcattttttctttgtctttctctgtgctctctgatcacttttccctctgtctttctctgtgctctttcgtcattttttctttgtctttctctgtgctctctgatcacttttccctctgtctttctctgtgctctttcgtcactttttctttgtctttctctgtgctctctgatcacttttccctctgtctttctctgtgctctttcgtcattttttctttgtctttctctgtgctctctgaacactttttccctctgtctttctctgtgctctttcgtcactttttctttgtatttctctgtgctctctgatcactttttcctctgtctttctctgtgctctttcgtcactttttctttgtctttctctgtgctctctgatcactttttcctctgtctttctatgtgctctttcgtcactttttcttttctttctctgtgctcttcttctctctctctctttcccctctgatcacttcttttctcattacctctccctctttctgttgctgaatttcttccgttatttcgtcgtgcttttccttcttttcactgtttcccaatcgttttgtggtattcagcaacaaataccgttgtccggacaatcgtcgcaattcattctttaattattttccatttccattttaaattcaaaattaccgcgcaatcgttggcgatcagtctgctgcccccctccttcaattgcttgtacaatccctggcgcccctctcaaatgaaatgaccttcttcaacttgtctctctttaacacccactcacttggttggtattccaacctcatactccccgcggtgccatccaaaacgggcacttttgtccccgcccccgctgcgttttgtcccgctccgtggcaacatgcgccattcatttgccattggtccggcggaatgaacagtcgcgagtccatttcaaaattgtcgctggtggacgtaacggagtcggaattgggaagcaaacagttggcacaggcagaagaagaactagtagaagggcaactgatcgaacagaaaaatgatcggtgaggaagtgatcggaggaaacgatcggagggaaagtgattggaagaaagtaatcagaggggaaacgatcggagggaaagtgattggaagaaagtaatcagaggggatcggagggaaagggattggaagaaactaatcagaggggaaacgatcggagggaaagtgattggaagaaactaatcagaggagaaacgatcggagggaaagtggttggaaataaagaaaacgactttccttttcctctcccacctttctttctttgtcggtgtgctgtttttctcctctttcagtagtattttgttctgatcgttctctccgtcgtcacaattcggcagtttaacgcggggcgggcgacgcataaacaaaagaatagggaaaaaatcgagaagcaaaatgcgaagctaaaggggaaaatgggaggggaagggataagcaaactcggcattaattagctaattagcacccatttgggcattggaaagtacgaatcggcttttcggtgatggaaattgagcacaattacagtgcaaatgacggaggcgcccacttcgaacataacgcaggtgaagaaaacttctgagaaggggcgaaaagcaatggaaagcgaatttatgagagaccaattaatggcaaagtgtctgaagtctgtggctaaaataacataattaattagttaaacaattaattaattaattgtctaaacgaaccatcgtttcggctaccattagcataaacacacaaagggacatgaaaatggtgacaccttttaaccatccgaaaataagcttaaattgcgaaaataaatttacaaaggttgagcttctccccagaatcgggcggaagagaaaagccgagcaaagcgagcgaagaaataagcagcgaagggagcaccaaattcactcctttttaaggggacgggggaatcgtttagttttccaaattagcttaattgttaccgtaataaagcgttcgccggcgcacggaaatgtgaaaagtgacgtcgacgtacggttcggggcaacagtcgtagaccaaataattgcggacagaactgacacctgcgaaggcgaaaggtcacaggaacactttggaaaaacgttcactgagcaaatgccattcgccgttgggagtgtacgggtccaaagagacggaactgttgaacagatcggtggagaagcccgagtaggtccacgagccgaacttcataatgcaagtttggtcatcgaagggaaacgaagtgacctaaagggagggataaaaaggggataaacggcggaggggggggatcagtcacatcgatgcgacaagacgaacgaatgatgtccggggggatccaagtgacggacccgttgaacatgacgatggcattcacctgcagagggacactgatagaagggcactcattcgccgttcgaccgaccggccaaagagtgtcgaaacgttggtccaccgaattgtaaagctaaaaccaaacgggtcgcaactttgcaacttgctgaatggccaaccaaaacatcaggcttccaaatggaattgatcg

SEQ ID NO: 20476 - DNA, 2882 bp, Heterodera glycines
  unsure (1)..(2882): unsure at all n locations
ctgcannggtcattttgggcgggaagaaaaaagcgtaaagccgagaaaaatctttctggggagaaaaagcccatgaatatttaatgaggcaaaaaatgggtggttaagcagaaaaagaaaaaacgaaagtcctttcttctctctttagaaattattttattgaaattaatttaagaaaaaagaaattcgagaaaaaactctgaaaaataattagtaaattatttattcacaaattatttataaatgcattaatcattaattgatttccaattttgaaagttttctttttcaatattatttttttactttgttttttattgataattcatctttttcgatatgaaaatgcaaataaatggagaaataaatggcggaacaaagcaaaagttattggtatttatttgccctcacaaagaatgggcatttatttatttgtcatttgtaagtaattaattaaaattaaattaaaattaaaattagccgtttttcagctgggttttcgaaggaggagaggactaattgtaagccacaaaagaaaataaaatataaagaaaagctctttggggactatcaaacaaatttcagggatgagcagagaaaaagggcgaaagagagggcgactgattgggatttggagtgattaatcagccaactgattgggatttgatgggagtgattaatcagccaactgattgggatttgatgggagtgattaatcagccaactgattgggatttgctggttgtgatcagtggttgagtaggatgtcgcacccccggctacccggacgaatgatcggccaaccgaacttccgatcagtcactccgtcgcgagaacgactgcaacgaacgttccatcgtttggcggtgcccaattcgagtcactcccaaccttaaaattgtaaaattcgcaaaataaaacaccgaaaataagaaaacatttgttatttttaccattctgatcaaataaaacattgatcagctgataagacattgattaaacaacattaatgatcagcttatcagaatgtctgtcgatcagacattgactgatcagttgatttgcctgccaaatactctctttagcattttaaaatgttacgcggtgaatcgcgttcgatcgaatcgcagcaattctctgccggtggtccttccgaatgcctttgaatattcgcccattccaagcgaagccaaccattccgcgacgtcctcaaagtcccaattttcaacgagcttctgaacattgaaaggattcactgaataattaatttttgtttgtttttcacttttttgaaagtgccggcggaaagcggcgaatttccgttgaaagacggcgaaggcgaagagcaaacggcggaaacgacgacaattcctaagaggaggagaagcgaccgttgattgatcattgattaaagggttaattgaatgataacaatttaattattttaattttttgtgccattcgctcgtaattcatttttcgctattttttcctttggcattttattttcgcatttatttcgcttggtttttcttttgccttccgcggagtcctctgaaccggcggatgagccttggcccgagtcggacgagcagcttttcgtgccttggccacagctcgtggtcggctgttggtcgtcgtagtcaaccgccggaatttttaccgcattttccagcaaaagcggcgcacgtcgcgaaggggacggagaatcatttggcatggacagcggcattggctacaaattcaaattgaaactttagcaattagtcggtttttttgtgcctgtggttgcaattccgcgggcggcgccgacagtccgcgcagagagacgggcgactgcactgcgctcgccgccgcctccatttgctgactgagaacggagacgcggtgctgaacaggcagagacgggggcaccagtgaatgttgggaatggtggtggtttggatggctttggttctgttgttctgtgtcgccgtagtcgctgggctccagcgaagtgcgcgaggaagtgtaactgaagaggggaggattaaaaggattaagcagcagaagcattcaaagcaatgctaatagctaatcacccgcccaactcacccgctgtcctttttgcaaccggtgaaagcgcccgtgggcgaatgcgaattgggcgtcgatttgacggcgcttccgggcacgcctttgacggtgccggccgcaacattttccatgaccgactctcgcagactaaggccggcattgtaacggctaaactcagagaatatttctctagtgtttgggcgtgccttggcgctttctcctctctttggcattcccacattctttttccccgcccccttttcttggcattgtcccccccccccctccgattcactcactttaccatcgtcaccccattgccattgtttctgctattgtcgttgttttctgatgttgtgttgcaggtgctgcttggcatcgtctcattgttctgctgtccgctcgtccccgcttcgttttcgcccttttgctgcactttgctgcgccttttggccagcgccgatcgcaaatccgagtcgaagtcggccgggggtgggactttttcagatttactcgctgaatctttgcacaattatgggctgatgctttctcattttcggcatttactgcttgccgaagaagtgggaccatttgcgctgcccccgggcgtcgcatttctttcgtcccgcgcgattgacctcaatcggaccgactgcaacgcttcggccgacaccccgcggcagtcggcggtgcctccgcctgcgccctttgccggcgaaggcgccgaagagaaagaaggcgaagcgcaatgaacagaagctaaatgaaatgtcatctacacataactcaatttcactaatccgatc

SEQ ID NO: 20477 - DNA, 2287 bp, Heterodera glycines
aagtgagggtgaatgaatgggattctttcttcccatcttcaattagtcagtccctcgttgattggtcaatgtccatttctgatctgatcagtccatctttctaatcacttcctcttcccaggtcactttcccttttccacttgtccttgtttcctaatcagtctcttcttctccgatcactgctcttttctttgatcacttccgatcgctcttcgccccgccgctcctttcccgtcgtttcaactcacatgcgaatgcgtcgtacagttccacgcatcgtccgccgttgcggcacgcgttctgcgattcgcatgcgccccacgcgcccaattggacgccagcgcccaaagcgcgctgcgccatttggcccagtgccaattcgacgccgttcagtcggaaatcgcgcatttggccggcaaagccagaccggtctttgccagtcctggccccgatgatcagaagggaggcgcgcgggggcaccgacgcggcaaaaaccgttttctcggtacggtccaccaccaaacgcattgactaaactcagaaaaattgaaatcaaattcaaaacgaataaatgccctgaccatttcatcaacttcccagctgacagaatgccatctaaaaaaaatgccatcgcttccacagttaactccctttggaataatcaaaaatgaaacctcaaaaaatccaaaaatggtcaaatcagtcggcccgtccggtccctcttctcctcccctcccccacctgttatcattgatcaccatgtcgctgaccaattcgtgactgatgcccgcataaatcaattgcccaacaagatgtccggcgcgtacaaacagctgaaaccatcgctcgtggttagcggatgcataagtgaatatggtcagttgaggccgagcaaatcgaatctatcaaaaattaaataattttgttggattaaatacactgctgccattaaagcattgctttttgttggcttaaaagccgtgccggacggagaacttacagacaaagcggcatggaaagaagaagcggaaggaaaagagtgcgaggcgattagacgctgattacggtccatgaaagtgatggtttcgaacacgtctaatgagcaaaagtcgattatgaaaatgaaaatatgacagaaaatgatgcatttaaattaaaaagttaagccccggttttccgacatttcgtccctaatgaatcaggctttaaatacaccaacaaatttaggagcattatttaccaaatttaattgccccccccccctctatttttgccgattccttcccacatcgtccgctgcactccaacggcccaatgctgacatttgccattgcgttcgcttccgtgcctccgccaatgaacagctgcaggacgggcagcagttgctgatgcgtattcatgccaatgtccagcgcgtcgttgccgctgtcacaattgcagcccctgggaaagtgttgagggctttttcggcactcggattggtcttgagtctcgaaggcattccgaattttaaattttggtcggtccgcttcacctgtgccccgtgcacgagtcgttcattgcgcacgtgcaaacgcgcgagaagggcggtgcgtcgccccactgcagcccgtgctgcgcgttgcgcgtcgcgtaccaaacggacggccgattttccgccccataatgcatcaaacgttggcctgaaacagttccagtggcaatgctttaaagatggccaatttggcaatttattggcccatccgtccttcgacccacccaccgcctttgcattggaagcgcatcatctgcccgcattggtcgaacgcgcccaccaacctgtccaactccaactcgcccagtccgtagtggagcacgcgtcgcacggcgccgggttccgtaatgcctgcggcaaaataccgtatttcatacaataaagcccctcccacctaaattaaagccctccttgaaataaggccccttttgaggggggggggggggggttgaaaaacaaaaactgcaggggccctatcttaggaaaaacggtaaaatatttaaatttaattaataacttattattgaggtgccgggtcgttactcaaaacccatcaaaacaaaaaattttgaccaaaattattcataacttcgcccaaaatgaatcaaattttataatcttgttatttattattcgatagctctaagtgttttctattatcctgcaaaatttcacaaaaattcattaagtttcgaaaaagttatgacttgagaaaagggaaaaagcaagttttcttgaacatttatggtcata

SEQ ID NO: 20478 - DNA, 1294 bp, Heterodera glycines
  unsure (1)..(1294): unsure at all n locations
gttttaagtcttggatttgtcaaataaattcaagacttcaaattanataatcaaaaattctcttaaaatttttttgactcaatttcaaaaaaggaaaaaaatttgcagtcaaaaaattattcgaatttctccaattttgtttccataatttccgaaagttattcggtatcataatgccaaaacaaaacgaaatcgttttaaaatattcctttctggacttgacttggtttcttgatatcgaagctgttttctacgctatttctaaaacggttataccaaaccccagatttttgaatccggttttcagaaaaaatgccttgtggtgaaaacaatatttcacatttcactccataactttgtgagttcggcacggatcgagaccgggataagaccattggaaagagcagctcgagctctacaagaaggtatggaaagaaaaaatagttatttctgggactttttcagaaatcagaattaattctccaatgtggcccaaattttaggcccccagccacagccccttgcttctcccagttttaagtcttggatttgtcaaataaattcaagacttcaaattaataatcaaaaattctcttaaaatttttttgaacccaattcaaaaaaggaaaaaaatttgcagtcaaaaaattattcgaatttctccaattttgtttccataatttccgaaagttattcggtatcataatgccaaaacaaaacgaaatcgttttaaaatattcctttctggacttgacttggtttcttgatatcgaagctgttttctacgctatttctaaaacggttataccaaaccccagatttttgaatccggttttcagaaaaaatgccttgtggtgaaaacaatatttcacatttcactccataactttgtgagttcggcacggatcgagaccgggataagaccattggaaagagcagctcgagctctacaagaaggtatggaaagaaaaaatagttatttctgggactttttcagaaatcagaattaattctccaatgtggcccaaattttaggcccccagccacagccccttgcttctcccagttttaagtcttggatttgtcaaataaattcaagacttcaaattaataatcaaaaattctcttaaaatttttttgaacccaattcaaaaaaggaaaaaaatttgcagtcaaaaaattattcgaatttctccaattttgtttccataatttccgaaagttattcggtatcataatgacacagcaaaacgacatcgttttaaaatattcctttgctggactcgacttggtt

SEQ ID NO: 20479 - DNA, 970 bp, Heterodera glycines
cagcgggcactttttgattcgggttttagaaaaaaagttaggggccctaaactgcaagaaaaagtgagaaatcggtccccgggactcagtcgtccgcgctgaatttttctctatagttttcccggatgctcctcaaaaagttgtaagacccttccactactttcagacccgtcccattagccgttaagctcaaattagtttttgaaacgaaactccttgtcaatataacgtatatattaactagcgtgtggcgcagcaattgctcggtgtagaccgtatgctttgcacagtaattgctcggtgtagacagtatacttttggtatgtatggacgggcgctgacatgagcgcttcgcgcaaaggacttcgttgctagtgcatgcgcgtttgttaagtgatgagcaagtgcattcggccgcttcgcggcctcagacggacgctttgcgcttctaaatattgtggactcattcggccgcttcgcggcctcagacgggcgctttgcgcttctaaatattgtggactcatttggccgcttcgcggcctcagacgggcgcttggcgcccatttttaaactttttggggaacattcggccgcttcgcggcctcaaagggcgctacgatgatagaagaggtacaacagtgattaaaagaggtacaacagtgattaaaagaggtacaacagtgattacaagaggtacaacggtgattagaagaggtacagctgtgattagaagaggtacaacacgaaatagaagaggtacaacagtgatcagaagaggtccgtttttcaaattttgttgggcttgggcgggcgcttcgcgaccgttttttaaatttgtttgggccagacgggcgcttcgcgcccgttttttaaatttgtttgggccagacgggcgcttagcgcccgtttttaaatttagttggggccagacgggcgcttcacgcccgtttttcaaattttgttggggcca

SEQ ID NO: 20480 - DNA, 2287 bp, Heterodera glycines
  unsure (1)..(2287): unsure at all n locations
ggcacagtgaatggattgtacaaagtgtgatgcatgtgcaaaggattcgcacaaaaacctgaaaattaattttaaaaaattattttatcaattttgaaaatntaattatttttacttgtgccggatagacagggacgacgagtagacaaagaatgcaaatgtttgtacctgaaacgataaataatcataaaaagtaaactaaaaatatactttttttaattcaaaatccttattaaaatctaaattttggtttgaattttttcaaaaactttttttaatgagtatgcttttcgtaattatctcaatgaattaattttaagtgtgcgtaaaaataggcattttgcctaataatgaaattttaataattttttcctttacaaaaatgtcattcttagatggtataaagtaacaccagtaccgagtcgggggttggtgttcgaggtcagtagtatttgtcgtgttttaaagcggtttgagtcaaaatggccaaaaatttgggttcggggcgagttttaatccctaattaattatttccaagcaaatttttttttctattttaaattttgcatattttggcattttgttgcttacatgtcgatgcttgtacagcgggaaagccgacagaagcgaatgacattcgaattcgttcctcaattgtccgctgtcgttgcccatcttctgtccattttgcgatgtggaaatggtaggagacgtgtgccggaatgtccacactgaagcccatggaaatgatcacagctgccatcaccacggggtcctggaaaaatggagaaataattttaaacaaaaattaaattgtaaatacatatatttttaaatgccaaaagatttatggttaaatccaaatgaatttttatgaaaatggcatttttctcctagcattaatacgtcaagggttgggaggatgtgtcaaagaaaaattgattttaggagctttaggagttcacaaaaagtcggggatttaaagccgatagagttgtgggtcagagttacagaggtccggaggttgaaaattagacttagataacaaatacatttgtgatagggacttggcaatatgccaaaaaatgtcgggaatgaaccttccccaaaatccaagctcgagcttagcaaaattactaaaaaattaaaaaaaaaaactcacaattgtcatcccaatcaatgccattatgccaagtgtctctgaaaaattatgatttatataattaattaattaattaaaaatattaattaccggtgagaatgcaggcaatgacaatgctcgtcacagcaacaacaaatgggttgaagttcatgaacgccgcacaaataatggacatgcataccaatgtgccaagtgccgattgccaaatgtcagttggctaaacaaaaataatgaattttaattaaatttttattttaatttaaatttttggaaaaaatggaaattgatcggtcatatatatatacatactatatatgaccataggttcattttagatgttgaaatttaattgcaaaaattttataaattttttacaattaatttatcggggaactgaaattttatgcgcacttataaatatatttaaattaaaaatatataatttaaaaataaaattaattattattatgataaaattatggaccatattttcgagcagatccaagaagagaccgtcatcatggagcacggacacattgaaatccttcacataattgtcggccaccttgcgccaccgttgcatcatcaccgcccgttcatgccactccctcaactccacgccatggtaagtgacgatgatcatgaacgagtccagcaccgttttagagccgtttttgtgcgatttgaccatcccacggtaaaggttatactcgggccaattcaaaactgaaatttgaatgaattaatatttaataaattaaaatttttgcctttttaatcgtttttttaattttaaaatttcattttttatatttgagtcataactcatggagactttttgaactaattatcagttatttatttattgtacaattttaattatttttaagagtttggcgatgtcataggtttcctatgaattttaattctgaaaatttaacgaaatttattggtaaattagcgttttttttaaattttgttcttttttttgtaaaaaaatgaaaagatggagaattttaatgaaaaaccttttataaaaggtgcaaaatattgaaaaattctcagggtaaaattttaatttatttgttttaaaattatggataaaaaaaaattcttccactcaca

SEQ ID NO: 20481 - DNA, 1514 bp, Heterodera glycines
tttcaactgcaaacagcatgacagtttttggtcatgcgaatttttatttttttattcaaattcaatcttttcttaatatttatctttttcataacaaattaaatatttcgttttttaatatacctatctatataaatcccatccctagttataaggtgattacgaaaaaaaaaatttaaaaaagcaagcataatttaaaaatccctgcatggacattgaaattttttctacgaaaatcactctccaaaatgcaatgcgtttaaagcaatttttcaaattttcatgtcctttggaattttttcataaattgaattctttgtgggacctcaactacaaaataagcattacttagcaattaatctagacaaagaacaggataacaaaactttcacattgatgcaaaaaagatcctgcgtaataatacgtgacaacgccagccgaaaaaaattttccaagtttttcatacacttggacactcgaaacaccacacatacccgtaccaccaccgtattcacgtaaaaccgaaaggttactgtaaaagtcatcacttgttaatgaaatgaattccgctttttcaaaattctcaagaagaacggagatagaattgatattgtagtttgcactgaaatggaaagtccatgagtttattcgaatcggcacggtgcattggtcaatggcagtttgtacataattttatataaatcattgggattaaaaactaatttagaattttcttaaaaatcagaagtctcaaggaaaaattaaaaaaaaccttaccatttttttaaaattgaaataaacttgcaaaaattagcaaaacttatttttttttttaaatgatgtaaagaaaattaaagttaattaacgaaaaaagttttgagtttaaaaataaaaacaattttgaacgaataatgtccggtttgacaactcccccatacccatgaaaaacccactttatgtgagtccaaagcaaatcggcaatgcttcggtcgaatgttggtaaaacattgaataaccattcccatgccttgctcgctctctcttggcctgcctttctcgctctttcttcgccgattgtcacatcaaaatttgtcaccatgatgttaaggcttttataatcactaataaagaaacagtttttgttgttgcaccgggtgatcatgtttgtgtcattttgcagattttttgaaacatatccttgtttggaaaatctgaaaccaaacgaaaagtatgtaagagtcgagcttttttgtccagcttaaacttcgaaaaattcagctgatgcgtttcctcaaatttttttacatctcttctcaattatttgggtcaaaaatgcaaatttctatattatctcacggatcgggaactggactaatcgatgattggtcattactcaaaaaccatcaaacggaaaatttttcattattttgcgcaagaagcaatttttagatcactatggttgtttttgagtaaggttagagacatggtagtaagtatactctgctgaataatca

SEQ ID NO: 20482 - DNA, 1516 bp, Heterodera glycines
  unsure (1)..(1516): unsure at all n locations
gtgcgcggaattcattgaaannaattaacaaagcccgaattcttcacggattcggaaaggttgtccagaatccggaccgccttcccccaccactatntaaatatacaagctgactttctatggccgtattcatcaagaatctcgaacacatttgtagctatctggaagattgtcgcgttgtccgtaacgggctgagtaaacgtcatttcatcaataacttccttagcaactgcgttttcaattttggggaatgattttagcttaaaataaaaacaacatatttaattaaaattaacaaaaaatttctatttatttaaaaatatgctaaacatttacttcttactataaatgaatttatataaaaaggacaaaatgaaaagtttcattttttcctaattttttctttttcttttaaaatagtaactttaaaatctgaaagctttataccgtaatcattaatcggttaaagctgtcataaaagacttaattataggtttttaaggaatataaatttttaaaagtggtaaattgtttaagtagaaataaaggtcactacaaatttgtcactaattttaaattaatgtaaaagaatcatcttacaagttcgcctgaaacataaggctccacgttgtcgagtatcatttgagcatttttggaaagacgccccaaataccactccattcttgctttttcaccttcaaatgtgatgttggcgcaaatggaaccgaaagtcaactgaaaattttattcttaaaatattaccaacgtaactttcgaattttgttattatatttaatttaaaatgtgaaaaattcagcgctaccgctgtcgaactgaattccaaaacctaaaatctgctttttgaatatttcttcattgaaaaatatttttaattatataaagttcattaataccaattgcagaacgtcatatcttatgatgttcatgaattcctcaacttcttttcggtggtaatttttaccagtgataattgactggagaagacagctaaaattgtttttacatatttcattataataaaatttcatttctaaaagcgaacatgttgtacaaaaaaagttttgtgactacaaaaaattcttcaagctcgcttttcaaatgtccttaaaaaattacaaaatcaactttttaaagagtgaaacgtcaaatttctttatttgtataacaaaaatttacccattggagaatattggctcgttaattccaacattccgaaacaaatttacgaccatattatttgcttcatcggcagaattgtacgtcgtagatgtggctacaaataaaaaggttaaattatataattatacttgattaaaacaaaaaaagagaaaaataaaagcaacagattgtgttctccatttctttcaacaattttttgcgttcgtcctcctcaatttcactgaaccaaatgagaagctctgtaaatataaggcaaatatcataattaatataatttaatattttttgaattttacatgaagtaaatattgataaa

SEQ ID NO: 20483 - DNA, 2413 bp, Heterodera glycines
aaatcggtagagatttttgttctctttctgataggccttctcattttttactgaaaaattttggcaaccccctaggaatctttgttctaaaatttcccagatttcaatccatatgggggggggaggttgattggtgcatgacacattttctcgaggacaaaagagttatcggtgtagtttttgggtatttgttagtgcattaattaatgtttcttttagcgtaaataactcttttttgccggcattcatttttgagaaaaccggggttttttttttaaatttttgttccattacttttgcacctgactgtaaatctcaattgaaatttaaatattttcgtctgtcatgtcgggggtcgggtcggggaataggtcccaaaaatgtcgggggtcggggggctcggggttcggggcttaacccctttttttaaggaccaacgctcctcggccccgtataatttgtttggataaaataaatttataaaaatcataaaaagggtattgagtttcactcaccgaagggaattgaattcgccggtcaaaaacttgcactaattcaggccaataaaatgccaaaaattgcgggtgttcatcgccaccaccaccataaacaccaaatgaatggcgcacataagcaaaacaaaggaccaaatggagcaaaaaaagaaaagtataagtcaatggccgcgagggaattgggccaaaacgtgcgaaaggatcagcaaaaagggcacaacaaacagaaggccaaagtttgttgggataaaattcgtcatgtgaattgggcagaagaaaaacaaaaagtttttcggcaattttttccaggcgaatgtttgaatttttcatttaattccgctttcataattttaatttctcagagaaactaaagattctataaaagcttaattgattgaatcctgagaaatttatgaggaattatggggaaaatattcatgaaagcgaaatttaagaaatgaattccaacgcaccaaatggagagaaaagataaaacattttttgatttttaagaaaaattcgaatagaaagaaaaaggaaaagaagaaaaagctaaaagaaaaggccaaagaactagcggagaaagcacttttgaaggcattggacaaagtgaaattgggaaaaagtgaagaaaaagagaaattgaaaagagcactgaagaaagagatgggaagagaagaagagaaagaaaacaaagagatggaaagagaggaaaagaaacagacagacaaagagagaaagaaagaaacggaaaatgagaaaaaggaaaaggcagagagagaacaggtaaatgaagagattgatgctcgagagtctcggtcagaggtctcgtcggcccgagaaaagtctcggctttttggggactttggccacggatttattaacggactttttgaaacacagctaatttaaaagaaaaaattcaacacctaaaaaatgacattttgctaagtaagaaaatctatttttaaattcaatgttttaatgaggctttttaaatgtataagaaaaagtctcacttgggtcatgggtctcgggaaacgatcataacaatactaataaataatttaattaccattttaattaattgaaaaataaataattaaatttgaaaattaaagattaagaaaattaattccacgaatgaaaagacaaatttgagaaaaggcggaacgaatcagcgaggcaagcgaacagaaaaaaaatattacatattaataagaattcttttttatgcttttttgccattgttatgcacgacattcaccgccaaccaaacgaacaaagccaaaaagaggcttttccccacctcaaaacaaagaaagaagtgctcaatttggtcggttgcttttggaaatttaattttaaattttcaatgtgccaatgtttaattaattaatgtgccgttaagttgtggacttcggttgcacttgcacgagaaaaactcgcagtgggaaaggcgaacggaaaagcggccaaatgcttgttgaagtttttggcacggactgttggcggagcttttgcaccttttgcccaaagtgaaaaacaaaaaataataataattaaatgtgttttttattttccttaaggcgaaaggcattcgaagcactttctgcgcgagcttcgcagccaccaattggccttcctttccagcggttaccatcgcttttggcgctctcgaggtggcacaattcgaaattcgggaaattgaaactttgccatttttaggagggattaaacatttccatgaggccgaaaagaatgtgcagccaatttttgtgaattgatcatcataattcatttttattaacaaaattctcgcatttaatacatataaatacatattccccccaccacctcggcattcgctgaccttcaaaatgtcccacacacaaaat

SEQ ID NO: 20484 - DNA, 1308 bp, Heterodera glycines
gatcattttgtctaattcgcaaaattacagctcattcttcgcgaaatataaactgaatcagtgtttgcggaatgaccgagctgataatcgccaataatcttcgattacaattttcttggtcacctttttggaattccaccatttcaactccttatcctctaaatataaactgaatcagtgtttgcggaggaccgagctgataagtcccaataatctccaatttacaattttcatgatcacttttgtgatattctcaatatttcaatttcttatatccaaatgtaatctgtataagtttacagtaggaaattgtaatttgggggttattggcgatttcaaatcgatccttccggaacactgatgctgtttatatttagagcgtaatgagctgaaaatgtcagaattcaaaaagtggggtcgcgaaaatagtaaatctgaggttattggcgcttatcaacctgatccgtctgcaacacttaaacagtttatatttaaagcctaattagcagaatgtgaaattctctcatttgttactttatgatcatttttgtctaattcgcaaaattacagctcattcttcgcgaaatataaactgaatcagtgtttgcggaatgaccgagctgataatcgccaataatcttcgattacaattttcttggtcacctttttggaattccaccatttcaactccttatcctctaaatataaactgaatcagtgtttgcggaggaccgagctgataagtcccaataatctccaatttacaattttcatgatcacttttgtgatattctcaatatttcaatttcttatatccaaatgtaatctgtataagtttacagtaggaaattgtaatttgggggttattggcgatttcaaatcgatccttccggaacactgatgctgtttatatttagagcgtaatgagctgaaaatgtcagaattcaaaaagtggggtcgcgaaaatagtaaatctgaggttattggcgcttatcaacctgatccgtctgcaacacttaaacagtttatatttaaagcctaattagcagaatgtgaaattctctcatttgttactttatgatcatttttgtctaattcgcaaaattacagctcattcttcgcgaaatataaactgaatcagtgtttgcggaatgaccgagctgataatcgccaataatcttcgattacattttcttggtcaccttttttggaattccaccattccactccttatcctctaatataaactgaatcagtgtttgccggagaccgagctgataagtcccaataatctcccatttacaattt

SEQ ID NO: 20485 - DNA, 1418 bp, Heterodera glycines
  unsure (1)..(1418): unsure at all n locations
gcccctttttacgattttcttttcatttgtaaaaaattttctcagcctggcaccgccgggcccccaaaaaattttcaaaaattgacccaaaaaatattggtcattttnaggtaaaaaatttttttgtttttttaaaccgcctgaaagttttccatttttgccagaaaaaatagctgtcaaaattggaaaattgaaaatttgctttttcggggatgccgtaacaatttttcccctccacagcgcctcgggcggcgcccctccgccgtcgtcgccggcgccgttgcgccgcttcccaacgctggacgcgcttgtcgactttgcacgcgcgcacgcactgcacgacctgaagcagaagggcaagcgcgtgcgcgagcggttgcgacgcgtggcgcagaacggcggactgagcggtgaatgtttttgccaatttttgttttcatatttatatatttaaaattttaagaaaattaaaaattattttagcttttttgaaaatctaagtgttaataaaaactaaatttgctgatttttaagaaaaaataaaaaaaacgaaaaaaaaattttttccttaaatttcttaataaaattttgataatcagcaccaacgggaagcttaaaattccctcctttttcacctaaatttttcttttgggcccataatggatgcaaaaaaaaaaagaatttgcttttctaagaaacacaaattttttgaaaatttggcggaatactaattgtaagacttcctctctttttttctcaaaatttctcaaatggacaatttttgggataaacttaaaaaacactaaatttgcggcccgacttttgcggcccgacatttgcggccccgacatttgcggccccaaattactcatttaaaaatttaacaaaaattaaccactttattcaataaaattttcaatagaatctattatgatatgttctatttttaactattttttgatcagcacaagaataattccagacgtttttcgaggcgtgcatccagctctttcaaagtaaattttaagagctctaatctcgagactttaattttaaagattcataaacggaattaaagaggaggaggaatatcagcgaaacagaattcggccatttgaattggaccccacaaagggcctgactgaaacaaggaagaaaaaatatgtggaaaatgacagagcgatcaaaaatttgattttgcgttatgataacgatgaaaataggaatgacgaaacgttattagggcacctcagagctctacagtatcgactggccgatactgtagaaattcaggattagtagaatggatggaaagttcaagctttgttggggccttgagcaagcccaattttgttgaaaaattagaataatgttctttaaattttgaaaagaaaaatttggttaaaatcaaataaatt

SEQ ID NO: 20486 - DNA, 2766 bp, Heterodera glycines
  unsure (1)..(2766): unsure at all n locations
atataagaaaattaaattaattttattaagaaaatnttgcgcaaaaatccagatttattaatcaaacattaacaaataatttccaacaaataaattcttattcatttttttgtgaataatattaataatactttttaaaattttgaaaataaattttaattttgccttttaaaaaaagattaataataaaaaaattcataaaaaaaaaattcacgaaggagacaatgagaaacagcttaactttaaaccaataaaaaaattatggttgcaacctcggccgcgccccgaccccgaacaccgccatttttggcaatttttcggggctatcaccgaccccgacgcattcaatcccgacaaacactgactccgaaaaaaccgattcccgacttttccaatcccaacggtcggggttgcaaccctgaaataaatcctttaaataaattttgattttatttaaataaagaaatcataattattgcaattctgtcaatgaataattaattatattagcatatttctatattttgtcgaaaattttttttaaatatattagtttattgctgatctattaatgcatttgtgtggggtgggtaaccgtgggtggacggaccatttcagtccaatgatttaataaataatgtttaaatataaaataaaatgtttaatttaatttattatttttaatatttatgtgcctcaaagtaaaattaataacaataaatatccaatataagaaaaagttttttttcttatttaactaatttcgccaaattttataatgttaataagttattgatttctcagaaaaatgggattaaaaaataatctaatgcggccattaaaagattcattaaaaccaaactgtttaattgtatttttaatatttatgtgcctcaaaaaagaagtgttttttattaactgagttaattattagcaatagacttaatttttaaatatttataatattcattaatatatttctttaaatttaatatttaaggaaattttagtatagcgaaaagtttttgtctagcaccgacaataagataattaatatttaatacaatgcaattttttgggtaatttgtaaaaataatatttttgtttaaaatttaaagttactaattaacaatctgctttatatttagagcttttaaaatatatttatttattgagtttttttgacatcaaaatttaagtttccataggatatttttaatcttgtaaaagcatgcaaagaaaacattttattttcatatttttctgttttttaatattttctataattatttttgtgttttcaatacttgatttaaaatacagttttattcatttttatctttattattttcttttatcctgtctcatttgcgaagtatattttcggaggaggtgccgtgatttctttcatactgcacaattttttattttttaatcaaaattttgttttaaaaagaattcaattaaactcaaaaattctttaatttttactatttaattttcaaaattgattaaataaatgagcttttacataatatgcatgaatttttttttgtatatagtgggactattttttacagacttaagcagtggggcggagcgcagtttatttaagggaataaataaaatattaaacataaataattatcaattcttatgtcatttgcataattaattctctccaacttatgtacattttataagggcagtgtttatgtaactaattacagtgatataaatttttaaacgttttaatttgatttttccaattctttcacaaatttcactttacatatttttcattgctaattttttttaatctctcgtggtgatttcatatggtgttttaaatatactttttttatatgttgaattaattaattgttcctttgttgctgttttttcattgtaatttactgaattttttaattttaatcgatttaatttttttttattttcccaattcttacgaaaatttagcctcacatatttttccattttttagataaacaattgatgacactgagcatattttattccatactttggctaatatttctgtcattttcaaattttatattcttttaattttaatgcctaaattaatggaaatttaaatagaatttaaaacttaaattcttataaaattatgatttgttgttttatttcatgttgtggtttacaagaagttcacgtcgacaagagatatatttttaattttttctgttgagctaaaaaattaatttgttttatttatttaatttctttattctttttttattggggcagcctatatgtaatcaattattgtgatctaatatttttaaccaatttaaattggatgttttgcaattctttcacaattttcatcggacatatttttccattttttagataaacaataaataatattatgcatatatacttcgatcttaagggaaatatagttaatttaatttgttttaaaaaatgcccttttcatttcttttaaattcggcttttttaaatgtttaaattatttattattgttaatttttttaatctctcgtcgtattcaatgcagtgtaatagtaccatctgttgggttgttttgcatacattttgaattaattttattgatttctctttttttatttaatattttcaaaataatataggccaaatcggttgatttatgtaaatgaaataaattttatttgtttctctgttttgcaaacatttaaatttcatttaaaagattttatttaatggcattgaattatatat

SEQ ID NO: 20487 - DNA, 1148 bp, Heterodera glycines
  unsure (1)..(1148): unsure at all n locations
ctttttaattttataattcaatttttattcttttnttccatccttctaccncctcaaantnattnatttatctnaacatnaacantncantnccattttataaggggagagcctaggcggtgatttctaaagatcacaattgtttttaatttttaggtatatcctagggataaattctctgtcatgacaaaatgccgtctttcaccccagctaagggccatagatagataagggacagaatcatttgtgcctggacacatttagagaaagcaaaaaaatgtatatttgtaattggtaatgatgctcaagatgacgaatttccggagactcgagaccgacatcgcgactcgatcccgagaccaagactctcaagcataaattactaattgtcgcttgataaaccactaaagcacaggaagctaggtgtgggatttaaaacaaatttttaaataattgcatcattatttaataaaaaaaacaaattatattaagtaaaaaattgatttgaataatcctactggtgagaaatcattttttcaaatcaaattttgctccattataagggctgggtaattttatatttttcattttattaattacttaacttcatttgacaatataattttttcttaaaaaattaattaattatttatatattcatatttatctttataagcaaaatattgcttaatttcttcatataaatatttttaatttactttttatgtaaataattgaattttgaccattattaaagaaaaacataatgttttattctttttctattatcttttttcatattattattatacatcaatttttatttcacttttcaatgcaattgcatcagtaagcttattaatcagggtaattaatttgtctaatcatttttaattaggaagacgacaacatgctaattgcatttgtaagaaatgatcagaaaatgcaaatcagtgaatattcaaagcaaaaatatgaggcataccttggaactatttattttatgagcaagaattggcaatgtgacaaaatagcagatgaatttaagaatatgaacggacagaatgccaaaaatttagctaaatatctggactattttgtacgagatatttgtctagaaagttcgtcggaatattaacagtgaagcc

SEQ ID NO: 20488 - DNA, 1257 bp, Heterodera glycines
gagtcgcttaaatgcaccccctttgacacgtaaaatattcaaaaaaagagatagtgattttttctggattaggccggagaaataaaaattaccagttatttgaaatgcagtgggcaagcacagcgagtcgcttaaatgcacacccctttgacacgtaaaatattccaaaaaaagagatagtgattttttctggattaggccggagaaataaaaattaccagctatttgaaatgcagtgggcaagcacagcgagtcgcttaaatgcacaccctttgacacgtaaaatattccaaaaaaagagatagtgattttttctggattaggccggagaaataaaaattaccagctatttgaaatgcagtgggcaagcacagcgagtcgcttaaatgcacaccctttgacacgtaaaatattccaaaaaaagagatagtgattttttctggattaggccggagaaataaaaattaccagctatttgaaatgcagtgggcaagcacagcgagtcgcttaaatgcacaccctttgacacgtaaaatattccaaaaaaagagatagtgattttttctggattaggccggagaaataaaaattaccagctatttgaaatgcagtgggcaagcacagcgagtcgcttaaatgcacaccctttgacacgtaaaatattccaaaaaaagagatagtgattttttctggattaggccggagaaataaaaattaccagctatttgaaatgcagtgggcaagcacagcgagtcgcttaaatgcacaccctttgacacgtaaaatattccaaaaaaagagatagtgattttttctggattaggccggagaaataaaaattaccagctatttgaaatgcagtgggcaagcacagcgagtcgcttaaatgcacaccctttgacacgtaaaatattccaaaaaaagagatagtgattttttctggattaggccggagaaataaaaattaccagctatttgaaatgcagtgggcaagcacagcgagtcgcttaaatgcacaccctttgacacgtaaaatattccaaaaaaagagatagtgattttttctggattaggccggagaaataaaaattaccagctatttgaaatgcagtgggcaagcacagcgagtcgcttaaatgcacaccctttgacacgtaaaatattccaaaaaaagagatagtgattttttctggattaagccggagaaataaaaattaccagctatttgaaatgcagtgggcaagcacagcgagtcgc

SEQ ID NO: 20489 - DNA, 1960 bp, Heterodera glycines
gatgatgagcgacagaaagagaggaacaaaccaaacgacgaaaattctgtgagttaaagcaaataaaataaaaatgataatgataattcatttttaaattttacaaataattccttacaaattaggtaatttcccagttttaagtagagctgagcgggactggtactgaaaaaaggtacaaatgagtaccaagtcccggtttttcccggttttcccagccaaaaagtcacggtcccggtttttgtcaaaattcccggttccgctcattgtcagctctagttttaagtcattgttatctggaatttcccaatttaaactgtccgatcaaacaaaagcagggtgcggcgaaagctcccaagtctttctgatcaattgggtttcgtctgatcacccgttttttgtcttatcatttgtttttcatctgatcggaaaaattgtgaagtcctgcaaaccctgcacaatcacacgggtccatctgctgattattttcctcattttcagcattttaccactgaccaatcgttcggtgcttccgtttccggcgccgcctttaaaatgcctttcgacgagtgaaagtgaaaataaaatggaaaacgatgagccaacggaagcggcaaaattggcggaggaatttgccaccaaaaatttgacgacgaaagaacggatggatgccattctgaagatgatcagcggaagaagcggagaagaaggagcagaggaggaggaagagtaaggggagggggaggatgaaagggaagaggaaaaagagaaagaagaggaggaattagcaaaatgaacattttcatggaataacggtgaaagtaaaatactttttgaaattaatccctttttcctttcaacacataatcttttttatcttttcatgaaccgctttttgccctttgttgtggttgttgcttttacttattttatattccataaaacgaagcgcttttactgaccgattgcccggacgaacaaatggcaaaaatacaaatagggcgcctcttaaaaactgttaagtttggtcattttgtcaaaaatgcataagcaagaatgtaaatatttgttttcttcactaagtgttgacctaactttgtcctttctttactaattaggtaattaattattcattagccgagtgggggcgggtgcccttttgatgaatgaatcagataagaaaagttcgtttctttcatttcccccaccctttgctatctttcatttatttttccttttctttttatcggtcgtatttgcattaaaaaaaaagtttttatttcattcattaaaaaatatagggttgctccccgagccctcgggggacaaaatgtcgggggccggggacctcggggagtgacacgtcgggggtcgggtcggggaataggtcccaaaacgtctcgggtcgggtcggagggctcggggtcggggagcaaccctaaaaaaatacattccataaatatttaaatttgtttttttatttgttttatgccgtagggcaaggttgaaataatttgaattgtgccaaagggtgggtgccgtttcaccttattgaagcattaggttaatgaaggaaggataaatagacaatttgcacttaaaatgatcaatctgagctccgacaattggaccgggtgccattcggccatttcggacgcactttcgcgccattccaccggggcggacgccgcgtatggcgacagtgagctggacaagaaagttgagaggagattctgcgaaatttttgagactgaattggctgtttttctggttgggacaggtgtggccaaattggcacttttcatggctaaattcccactttttgccccaggcaccgctgccaatgcgttgtcaatggcttatgtgaatcgcgcgggtggcatcattttcgcgcatcggcatgcccatctgatttgagacgagtgcggcgcgcccgaatattttacgggcggcgccaggt

SEQ ID NO: 20490 - DNA, 1468 bp, Heterodera glycines
  unsure (1)..(1468): unsure at all n locations
tttttgattttaaaaataataaatattttctgcatgattctctaataaatcctgtcgattaaaatgaatcaattaatgttttatcccagctgaaacagcatcctattattctgggtcttttaagcattttggaattatttttcctattgactctttatataatgtccggtaacgattgctatttctcttaagccgtaccccctcatgtgaaaatcccagacaacatcatatatctgaggagcaattggactattttattttttgagttttaaaaataattaaatattttctgcatgattctctaataaaatcctgtcgattaaaatgaatcaattaatgttttatgccagctgaaacagcatcctattattctgggtcttttaagcatttttgaattatttttactattgactctttatataaatgtccggtaacgattgctatttctcttaagccgtaccccctcatgtgaaaatcccagacaacatcatatatctgaggagcaattggactattttattttttgagttttaaaaataattaaatattttctgcatgattctctaataaaatcctgtcgattaaaatgaatgaattaatgttttatgcctgctgaaacagcatcctattattctgggtcttttaagcatttttgaattatttttactattgactctttatataaatgtccggtaacgattgctatttctcttaagccgtaccccctcatgtgaaaatcccagacaacatcatatatctgaggagcaattggactattttattttttgagttttaaaaataattaaatattttctgcatgattctctaataaaatcctgtcgattaaaatgaatcaattaatgttttatgccagctgaaacagcatcctattattctgggtcttttaagcatttttgaattatttttactattgactctttatataaatgtccggtaacgattgctatttctcttaagccgtaccccctcatgtggaaatcctagacaacatcatatatctgaggagcaattggactattttattttttgagttttaaaaataattaaatattttctgcgtgattctctaataaaatcctgtcgattaaatgaatgaattaatgttttatgcctgctgaaacagcatcctattattctgggtcttttaagcatttttgaattatttttactattgactctttatataaatgtccggtaacgattgctatttcttttaagccgtaccccctcatgtggaaatcctagacaacatcatatatctgaggagcaattggactattttattttttgagtttaaaaataattaaatattttctgcgtgattctctactaaaatcctgtcgnactaaatgaatgaattaatgttttatgcctgctgcaacagcatcctattattctgggtctttaagcatttttgaattatttttactattgactctttatataa

SEQ ID NO: 20491 - DNA, 2770 bp, Heterodera glycines
ccccctcaccgcgcaccacacgtcagagacgcagacacacccacccaataggcacggacccccacagctcatcctctctgcgctcagcggagaaaatcaatcgatatttaaagtaggcaccctctgtagtcaagtgccggaatctttggttcggaatgtaaaaaatttccgggattcgagcctataataaaacccttaatttggtgccaccgccgctgatgcgggagtggcagaagaaaagtttgagacttcctttaaaggtcgaaaattggttaatgatttattagtgtttctctgagccaaaaataaatgtttttataacgcgcattttagacttgttctgattaaatttttaaatttaattacctatattaaatatcggttttgggcttcggtttcaagcagagttgagttgtaccaataccggtaccggcgtgtaattagtacataattacctgtttttctagtaccgaagaatgggaatacgagctagaacagggctcccatccgtccttgaatggcaaggacgtccttgaaattgggccctctttcttgaaaataaaaaatgtccttggatgccaaggacgtccttgaaaatgaacatttagaaaagttttaaaaaaattcaaagaaatttgagaaatctttgtaattttcaacgatattttgattatattatggcattatgtcaatttttttgctcatagttgagaattattatttattattattattaatatggtattaggaatctttcttgaataaaatgtaatttttttctcatgattgagaattttttgaaattttattgcataaagtcacttttttcttaaaaaattagcccaaaatcgcaaattttggtcatttttggacaaaaacctgtaaacaaatcgcattaaaaattacaaatttttcccgcggcgttgccggggaggaatcaagaggggaaattaattttttgccaataaaagagttgacaaattaactgttgcttttaaattttttttattgcaaaataaaggcaatatccacacttaataaatttttatcatttaggtagcatttgacaaatttaatgtttttaataaatattttccatttttgcaaattttcaaaaaatttatttttccttcatcgcttgcggcaatgcaaactgctttttctcgacgtcatgaatcttaaatggtaaaattgattaaaattgtataaaaatataatacagagcaaaaaattgaaaatgcaaaattaatcaaatcttattaattttcctaaaaaataattattatttaaaaattatttctcctcactttttacttagagaaattatttagaaattaaaattacatataaaaataaataaaagtgtggatattttaattggcaatattctcggcaagcgcggagggcatatcattcatccgccgtttggttgcccaccctatcgattgtccttggcggggggggggggggaaatttgcatgaaattcaaccaaaggacaaaacgaagaaatcaaaagaaaaattggtggaaaatattcaaaagattcacttttcgaagaatgtgaataaatgcaattttaaattgtcttcaaggcatcaatcatattgagatcatcacccgatcaaaatgtcaatgtttgtcgatcattcgatcagtcggcccatcgaaagcccgcgacgggcggcagaggcggcaactcgcgcatggcgaaccgcgcctcccactgctgctgctgctcttcgcttggatccctttgctggaacagaaagcactaaacagctcaaataattaattaaaaataccgtgacgagagtcggtggagaggtcccacgggtgtactgtaacttggagtggaattgttggcccgggggcgaatcggcgcggcccaatcggaggagatgaagcagtgcaggaattaacgagctgaatagcacaaagatggcagcacattcgacgaaaaaagaatagccgcggtgtttctgaagcgaacaaatgaaaatggcattggcacagacaaaaaatgccaaaattagaaacggaagagaaaatcaaaaggcggggggggggagaaagtcataacagaataattgaaaaaacacctcgtaaattccgctgacgctgacgtggaagaaacgatattcgacctgagaagcgggggcatttagttgactaatttattggcacttattccgaccatttgggaaagaaaggcgaaagtgacagtggcggcgcaatgtgccaaaactgtggaagaaaaagcgaattggcatggccaaaacaccgccgattcattgacccaccagcaacggccatcaaagcgacgaaggaaaaggcggagagacgacgagagggccaatggaaggacagacagagagagaaaagtgccaagaaaacggccaactgagcacccaaatagacgaacaacaaatgccgttgccaagctgagaagggaaatgaataaccatggcattcattgggacaaaggacaaaagggcaccggggacgaatttgggagggtaaaaagaaacagaacccgggaagaaagacttttattcaggccgatgaatacggtattaccgtagaagggcggggcacgcatgttcagaagctcggccgacgtgtaaaagtcgaagtcggagttggtgaacacataggcacaagtgtacatgccattcggcctgtaattaaggcaattttcgttaacattaatcgttttttgtccgccttcaatgaccctctcccctctctctctctccctctcccctctct

SEQ ID NO: 20492 - DNA, 1179 bp, Heterodera glycines
ctctcgtgtttttggggactctcgcctctcgccaaactctcgctctcgtctttttggggactctcgcctctcgccaaactctcgctctcgtctttttggggactctcgcctctcgccaaactctcgctctcgtcttttctgagacaagtcacacccctggtatatacccgagttgggcccgttgttgcccgtggcgggcgaagtctggtgttggtgttgggccatcggcgacgagtgcagcacggagccggaggaggaggacgagccgggaccgccggtgtgatgatggtgaagcattgtactggtagcggaagccggtcccgactgagggcccgccgaggagcagccgccgatggtgccaagcgcacttccgccggagggtacagccgggggcggcattgccaccgtgtccggcaccgtggccaacgacgtgccctggggcggctgttgctgctgtcgataggcggactcgtggaaggcgcgacgctcaaacagatggtcgttgtgcaggaagaagcggcacaacttggcgtagcagcactcgacaaagctaaaatgggaaaaacagatttatttttagaattttgatttttaaaacacggacattcgcaagcgctgcagactgggctgcatgtcgtcaccaaactcgggctcgaactgcatgaacatggcgtgcaccgagtgcggaaatgtgggaattgcgacggtggctgccggcgttgagccgctgctgagcgaattgctctcctcgcgacccacacggaaaatgccgtcccgtggcgcctcccggatgccaatgggcacgtggatgccgagtcggcaacgccgttcatacatgctaaagataacaaaaaaaattagccaaattttgtgatggaagagcggcccattggactgacttgctcagctcctccatgtacactttgcacttggaggcgatcacgttcacgtccggcacaaccgtcaaatagagcacgtccttgcactggtcggccggcatcaattccaatcggtcccaatcgcgcagcaccttcagcagaaattgtacatgactcggttttcatggcaaaaattatgtcgattcgtttcccccgacctgtgccgagacaagaatcggctcacgctccgcgtggctcacaccatcacgtgcgggatcgctccgtccgtccgttgttcgct

SEQ ID NO: 20493 - DNA, 1253 bp, Heterodera glycines
  unsure (1)..(1253): unsure at all n locations
ccccccttttttggccctcccctttgcaataaaattttatgggaaatggcaaaaaatttaggctttcgatgagaaaaaagaatagtgtttattgcggagcaggtggtttgctgccacgcttaattaatatcagcttnaaaagcatgtatttcaaaaaagtatttctagagccaagattttttgttagaaaaatcttgcttttgaatttttttttaaaattttcttgggagggaatagtgtcccccttcccaacggtcgtaatcgaagcagtgttaaaatttgcacatttaaatagacccattttcatgggcaacatgaatgctttttctcacctttttggcgaccgatgcctccgcaattgcgccaagcgcaagacgacgactgctccgcaccatggcggccatgtcctggctgatgctcaaatgcatcagcaaatccacaaactgacggtcggttgggttggcggggttaaagcggccgaacagtgggcgaaaagcgcgatgactgaagttggtttgctgctgctgaagcgacggcaaaatgaaaccgccggcctcggcgatgtcatccgcaaaaagaccggagccacggccacacaaatagcgatgacggacggcactttaaaagagcgacattggcacaatttccatttaatcatttaagtgtcgaatcaaaaatccggcgccggacccataaatcctacaaaattttaaatagactctaaaccaataaaatttgccagcccttttttggcgaaaatttcaaaaaaggtgccgttttgggccacctgaagccgcagttgcatttttgcagctccgccgtcggcataattcggaagccgctccattgcttgggcagaagcgccgccgctcctccgcccgagcccatcatcatctgttggcgctgccgacgctgcagatggtcacagcgcaggagcagcgcccgcggcgcgccaatgtaaatgccctactcggcagaacggatgttggagttgcagcagcacagcgtacacgagttgatctcgatgtcgtagtgcaggtcattgacggtgtcttggatgatcagtgtgagccgtgtcgagctgcgagcgccgaccgtcccaaccaggagatgagggcaatggcaatgagaagggcaggccgtttaaagacgacctcgtacatattttgaggatgaaggatttttcgagaaattatcagcgacagttatcttagcaaagggattttttaaaattttctcgggggggggggggg

SEQ ID NO: 20494 - DNA, 3041 bp, Heterodera glycines
aaaattacgccagtcgaattgccaagacggaacagtcaaggctctatttcagttttcccgatcataaaaaagatggtaaaatattttagatgatgtgccccctttaaaagcaacttaataagtggttttttgagtttcaggttcaagaaatttctaacattcatttcgacccacttccaatgaaatcatttaaactaaaaacagaaccaaagtgttgtttgctttggctgcttgtgaaaaatatttctaacaggggaattcaaggattcggtttggagggaatgtcaccccggcacgaaatttttatttttgacgcatttttgagaaaacagacacttgaaaaaaccgagatttgaaaatattagattaggtgacatcatgtgacaaatctgagtagcgtcctcgaaaatcacataatgcacaccaaaataataaatgggtaacctattctggatgatggacaaatttcgaatagcgaatcggaaccctttttaaagttactaatttttcaatttaatgcataatttggctaaagcatagcaataatgtaagaaaataaagcagaataaaatagccaagaaaattcgatatcgggcaaaaactatttttttatggtcgtgtaaattgcaataaagccaaaactaaaaaactaagaaaataccgatttgccgttgtaaacgcgcaatgacttttggaaattgacgatggattgcgcgttgcaaatggaaagtggacgagtttcactcgtgtcagagttgcaagaagtccttgaacaactgctctctttggaagatggggacacatttttagcagtcatctttcacttttgggagtgacagttataatttaaagtgctggcttaaacaaaatgaagataaataatgggttgtacatattcatgttcgtttttaattaatagtgcgaggaattcaggggcatacacggccaagatttggaattgaaacatccatgaatggccatttcgtaaatttgactaaattttgcccaataaatgtgagtttaaaaatttttagctcaaaaaccgccaaaataagcactaaaaatggaaaatagtctcaaacccttaaaattagggattgaagagaaatttttgagaaattttcatttcttagggatggggtaaacccaactcatccaaacccaactcatccatgcccaactcatccatatacccaactcatccatagcacgatacgagtcgtcgccgtggcatttaatgccacgactaagaccgtacaaccaaaaaatgccacgaccgagaccgcataatcaaaaatgtccacggtcaagaccggcataatcaaaaatgtccacggtcaagaccacataagcagaaaatgccatgccacgaccacataagcagaaaatgccatgccacgacgatgactcatggatataaaaatattccctgcggttcctttgtcccgaaccaactaaattataccgaactcacccgctctgttttcatcggttggccgcccacggtgcccttggaaagtgtgtgcgcaaccataaaaatggtcagaatcgtgtagacaattgagaaaaggcaatgcattttattggaaattgactgtaaaaaaaggaaaataaaaaaaatattagtcaaaataaatttgtaaaaattgctcaaataccaaaagtcaaaatcgaatcagaaaactttggtttcgaaatttaatcaaaatccgtttttgattccaaaaacaatcataaaagtgttaaaatttgatcaatttcggacaaaatccattaacaaattacactcaaattttcaaaaaaattttcccggaggtacgcaaaaaaagtacaaatgctgtgaaatgagtaaaatgagcagcggaaacaaaaagttttgaaaaaattcattccgccgaaaaacacaaaaattttgaataaaaattaccatttttggtatttgtatagtttttacacttgagaaatttatatttttttgtttgttttaggctccctaaataattcgggatttttgggtaaatatgatttttattattttttttcttcgaattctttcgttttcgtgattgaatgaccaagatttgattatttcgtccttttttgaccctagaatttatgatcaacgtttaataaatttgagatatgctttaaaaaattaggttacaaagaagagggacggaggtgccgccgattagcggcgcagggaaattttttttttgaaaaacacctacaatttttgttgataaaattttttcgtaatttgcctaataaaaagaaatgtgctcttcacaaatactgctgctgttcccccaccagtgtttttgcttttattagcatttttcgcttaaatccatcccctcccccctcccccgtcatctgtcagcaattgtgagaccaatacccactaaagcatttattgtaataattccaaatcatcgcatttacccttcgcatttggcttattgggaggggctgggggagatgagaataaaaaatgaaaatgatgatgattatgagaagaggaggatgacggaaggggggggggaaacaaaaatcgtttcaattttccattaatttaactcataaatcctaaaaattgtcaattttgcgaacgaacatttgaaattaattcaaaaaacaattttataagaaagaattcaaaagaatattttaaaaagttccgattgatgcaaatcgcgatcaatttggttcattgattttacataattattttttaataaaattgtcatatttcatgggtttatgccaaaccctttaaaaaatggcaaatttcgcagattccaagaaatttatttgttaaatattcattccaattcattgaatttccccttaccatttggcttacaaattagtgggggggggggggagagaagtgaataaaaattaaaatgatgagcgatgtgtaaaataagtggaggatgacggatgggggaggggggaggtggacaaaaatcctttgaattttcgcgtaatataactcctaaatacaaaaaatgtataaataatggagaatattttat

SEQ ID NO: 20495 - DNA, 1026 bp, Heterodera glycines
cggcttctccttcgactgttccctgttggatttgtttcacttcggctctctcccccacccgcaatatttgttgaacattcgaatccccgccaaccgaactttgtgccttctcagcaacaacaaaggccccaattgcgccttccccgggcccctccacgagcttcgcctcattgtttatccctttttatttctaattttttctcttttacccaaaggaaattcaccaaaatggcggattcactttggtttggctgtggcttaaaagtgccctttcgcccgtccttttgtccgtcctcttttggttcttccgccgcgtccgtgcccttccccgacagcccgtcctcctcgaaaagaccattttcgtcctcggctgttccctgctccttttggatggttcatttgtccgcttccttttccacttcggcacttttcctcatttttagtgccaatcgaatggctttcgttgcgcatggatttccctgctcttttgctctttggtgatctccgtcagggctttttctacgccgttctcttctcattttggctcatttttgcgggagagcatctcatcgacgacagatcgagaaatgatttggtcggctgacccaccgaatgccaaatgcttttttttcagcgcaactattggcgcaatttgtcccttgtggttctttcctgtgccgttctgttgggcttcgatctctccgaacggggccgtcagttgtccaaccctttccattccgtttggtcttcagaagggtctccccggttggccctcgtctccatcgttcttggcattggctcagctatcatttacacggttcggccattccgtcgttgtacattttggcattattcattgctcatttgtgtgcggttaagttgtttttgctctacaaagtgtgcatgggttggctgacaattcgtcagaagagagaggccgaattgcgtcggcacaatccgcggaggcgcctccgcgtggaggcggtgctgttccgtttccgctttctgatgctattgacgctgctc

SEQ ID NO: 20496 - DNA, 1396 bp, Heterodera glycines
ttgatagttccgggttaggaatttccggctcaaagtcggactctcagatttccaaaggctccaaggttgttagaattccaaatccctctcccgcctcccccccgccgtttcgcccatttatttctttcctaattttgtgctcaaatgactccttcatcctcttttttaatccgccatttgttgctcaaatcccctttgcttgtcctttgttttgtggtcccttcgtccttttccgatccgtgtccctttttcggcgattaccaatgccccgagggctttcactgtgcatttgacaaatgccaagatgagcaggggattgagccaccgggcgattgtgccaaagtcagttatgcgcctcaattaaaacgcgaacgcatcggatagatcagatgtggcaaggaatcggagtgtcggcaaggcaaatgcgttctttatgtggggcgaccgtgcggaaggaatgttttggtggcggagggattggcccgtgcggtggtatccgattgtgggccccaaggcaaatgcattggcgggcgatgtgccattgacagtaagcgaaagaagcgaacgatggcacaattggaaattgaaaggatgtgcggacacagtctgtgaggagatgagcgagctttgccgggatgggatgtgcatgcaattgtcctccatgttctgcttctcgcccttcgattgcggccctccgtcacttttcgagtgccatcaaaacaaatgccaacggcgtcgcgacacaattgttccagttttttcaccatcggcacaaaaatgtgaccccggagaaactctcagcggtgataaatgtgtgactcaggaaggtaatcagcaacagctggtcctcttttattcccactgcttaggatgtgctcaattggtttgctcatccggccaaagctgtttcaatggcttttgcgtcccgacaagcaattccaattgcgctaattccggtgaatgtgccgaaatgaatatttgtcgcgaaggacgctgtgtggcggacatttgcaaagcaaatggtggcagatgtctgccggagaatgcctgctctccggtgagtgtgcccgagggcgagtgccgtcccttccagggcattccgtgttcgctctctgccgctgccgaggactgtcccccgccatacttttgcataggcggaatttgttcaaaagatggtgagtggcagtgacatggcaacaaatacaatgactccccgccaaagagtgctttcgcaaagtgtgccaaatcggagaacgatgcgacggcggaatttgcattcgcgtggagggcaacggatgcagagacgcgatcagagagtgcggggagcacttcgattgtgtggccggctattgtaaggacagaatcagcgcgtacaaagaggcgacgaacaaaacga

SEQ ID NO: 20497 - DNA, 2037 bp, Heterodera glycines
gaaccctttttccgatttatcattctcaacagttcgccattcattccaaaaaccgcccccaattcgcatttgccgggaattaagcgatgtttcaccgatttctgttgtggtcgtggggtttcgttgacaatgtttccatttatactaatggggggatcaataggagattatgtgaaatgcctgcagcagaaagaggtcaattgtttgaaaactcatttaaattcttttaatgcgcgtgtgtggtaatttgttgagtgaaatgagagaagaaagtgaaggggcgggcgacaaaagtgcgcggaatttatggaatgaaaatgcagtaaaagtgcggtttgcaatatttacttataatatgatggattaatcgaattaattgcgattcaatcgaagggagtcgatgaacatataaaggaagattgatcattgtcatggataggggtggaagtgagtgagaagaatataaaaatgaatgggaagggatggaagttaaataggggggggggaagaaaatgttcagaagggatgagaagggaatgaaattgttgttggacagagagtggacaaataaatgcgcaaggaattcgggggaaagagaagggatgagggaaatggcgaagcgacggaagggagggacagcagcagaagaaagagggacgaaccgaccaaaagacagcgcaaagcaggaggagaaggaggaggaggagaagaaggaggtcacgacggaggggaagaacatttaggggattgatcgaatgcgcccgaaaaatgtttcccttccgttggtgcggcacgcgtcagccaattaaagcccattgcgagacggaagcgtggttgaaaaaatggcataaatcaaggcatttttgaaagaaaaaactcaatataacacaacgcaaagacaattttgcagtaaataagaacacattaaaagccgaccgattttccgaagttaattaaaaagcaattaaatttaaaaaatttaaattcaaaaacgtttttaaaaattggcgttttgctttgttctgctttgcgtttcgatttagataatttgactaggctaacaaaagaatgacaaaatgaaaatgggtcaacaatttatcccagcaacttcttcaatggctttcttcgcacgaaacagggaaataatgtaataatatgctttttttggttaattaactagtattcttttccacatacatataaggtatgtttattatgttttagtggatcttcaaatttatcggcgaaattcgacataattgacagacgtattgcaagtttagagcagagttggcgtaatgccatgcccatctcatcaaattctgcaactgccggcacctcggccatgtcttttgattatgcagagaaccgattgtgtgtaatttttactcattcatcaatgataaatgcaattacttttaaataatggtttagatggtgcccccaattttggatttaaaacataaataattcaacgctagttaaaaacagcttttgaaatcattaaaagccaaagggctgtattcgtaattgatgcattttgagaccaaaatgactaaaaaaactttttgatccttgaaaatggtttttcagaactttattaacttagttatcaataaatatattttttcgttcgctgtgtgtcaatgcttgggggaatgtctaggtcgttgagatcgagccatttttcaactttatttcaaattcggaaaattgctcagagactttacgcgctcattgacatcattaagaattgtcatcaccaatctacggtcacttgatgtctattgtatacttttgattccagcatcaatgtaaatcaatgaagacactaattgttacaggggaattcccgttagtcaatgttagtgctatggctgtaattacctgcccgagaaatttttttaggtttggtttttttttttgggttttaaccgaaacccttcgaccgatcctctcgttcggcctcttattagtataaaaaaattgcatagagtaccaggaatgatcgccttcatcacgaggtcaggccttgct

SEQ ID NO: 20498 - DNA, 1882 bp, Heterodera glycines
  unsure (1)..(1882): unsure at all n locations
ctctagagtcactccataatgttttatcatcaaaagttcaaaaaaaaatttttttttttctaaaaagctcttattgaaaagaaaactggtcaaaatgctattttgagtttctcatgcgataaatattcgcaaaaaacatactgaaaagaatattaaacccggtcctgtttattattatttttaaaagaaattttcatattttattttgggactcaaaatttaccccatttttcgtatgttctttgtgaagcagttctttatttttatttaaatttacttcctccaacactcaaattgggaaaaagataggtccttttatgttcaagtgataaaatgaaaaatgaagatgaaaaattccgacttgtaacaccgtaaacccaaaaaaaaaaataaggggaacataaatattccgcggtggttccaaagtgatgcctttgaaaaaaaataaataaaatatccgtaaaaaaattctaatcaatttttcttacaaaatgtattaaaattaaaaaaaaattccggcggcgcctatcggcaccacttttctttttgaaattttcctcaaaaatagcaaaaattagtcctattttttggcgaaaggcggctacaaatttctttttttttttttgctcaccgctgctcaaatttttaaattaaattttggcccaaacagcaaaaaaaagcttttcggttgcaaattcaaattgttctcgctttgttttttaaaaaatttcaaaagacaccacatcggaacgagcgcctacaattcccataaaaattgcgttaaaaatgcccttagatcggttggttgccttcttatccataaatgtgcatccgtttctttcctctgtctctaattccacaaatcccaccacacaactgagcacgagtcaaaatatgtaagttcagggcgtccgtagctgtactcgcggctgctgctgctgctgctggtgccgaagcagcaacaacagtcaccactgctgctactggaattgttgaaaatgaaaatgtctcctccaccccgtcgcccgccgttgtcagctgcagccaaaatgcacgagcaaatggcgattagtgcggcaatgatcagacaaatgagaatgatgatcagcagaatcaggctgatgcattggagccatgcgctccaatccacgcggcttctggaacagccggaagtttctgatcctcctctgaatccgcgcttacgccgacgccgtcccttttttgcatctgatgggttaaaaagcaaaaaatttaagcaatgttcagaatacagcatatgccattaaaagaaaaatgaatgaatttcctctactaattaccaccaaaactgctaattaaaatttatttttatgcactatcacagtaggtgtaagtccctcgccttagccattttaaaacaaataactaggactatgcttaggttttctaagaatcgatttttcaaaaatcaaaaatcctggtcatgatttggcggacaatcgaaaactttttactcatgaaaatcttgaaatttgtttgaatataattttgcaatcgaatttagcatctattaggattacaacctatttttcggttttagcacctaaaatcctagccctgtaaattaccgtcatcattttgaggaaacaaccgtgcgtagactgtcttgtataatttagcattttcttcaagccatttttgatatttttccttgtcattgttgctttcttggtgctgctcctgctgatccccgttcttcttccgtttgnggggtgagatgttcaatgattttcttggcatttgacacaatgccaattttgtgaaaactgatcagtgcccaatagccgtgcattgcgagacgccattggacatctcttccttgggtgtaaatgccaatcttttt

SEQ ID NO: 20499 - DNA, 961 bp, Heterodera glycines
  unsure (1)..(961): unsure at all n locations
tcagaagtgctcttagctcttgctcaatcttccgaattgctttcgccgcttctcgggtggctttccncctttatgatttgctcaaacttttttcgagtttgtcgattctcatccaatcattttcgttaatttttctctcaatttgtccatcttttcttttaaacttttgagaaacatttccaccaattttttgccccactcatttttttccgtttctccaaattttgcgcattctttcgctaagttttcgtattgtcgggtcattagcaaattgctttccttcatcaaatccatcaactcaagtttcactttcatttcaataatttctgtttggctttgatttttgcgtccttttccatttttcttccagaattttttggcttcttcaattttgtcatccaattcctttttcaaaatttgcaatttattcatttcttttctggcattatgctcctcttggatttcgggaattgtaaattttttctcaaaaaacattaaatttgcataatcttgtgctgtcatatttatggcaaagttactcagcgtttcaatgacaattttggcattggcaatgtcttccaactttttgatcactttgtcatccatcgtttcttttccttcattttcctaaaaattattttttaaattaaaaaaaatattttttcaaaattaccctcccaattgtttcagttatttcatgcttaattatatcaatttgtgtgttcaaatctttcaattcctttgttgataatcccatacaaagcaacactaaataaaaaaagaattataattgtttattttttacttttaacaatattaatagaatatgataataatgaatgaatttaccagtatatgagataaaaaaataatataaaattatcatcgcgtattttctaaaatgaatgcatttcatttatgttatctatctgtattattaaggggtttttaaggaaatttt

SEQ ID NO: 20500 - DNA, 1318 bp, Heterodera glycines
atttctttctattaatcaagtacatcttcgtcagccgagaatattagtcatttacatttgtttttttattattttattgtgtaaatatttatatttaaatcacggcaattttaactattgaaaattgaatgatagtcatatgtttgtggaactttcaaagcatttaatttttttggaaaaaattttatattttatttttgatgaaacaaaatatcctttttaatatttaaatttgaatataagttttataactttccaatattattatttattgggttgtatttttccaaagtttgttgaaagtacattattttgtacccaaaaagcaaataacattataaaaatgatggactagactcatttataacaagaaaaaatttggcgcaacttaaaaagtgtgctaagatatttaactcttcattgaatattatttttaattaatttaattctttacaaaatatttggcttttcaaaaataatcattacttttaaaaatacatgttaatgaatttttgaattttacagttatttatttagcataagctaataataaataatgaaaataaatcactttatttccctattttaattttatttatttatttataaattgaattatttaaaaaaatttattttgtttaaaacttaataaatctaatataaaatatatattccgctacaatgttgaagattacaattaacttgagttttgttaattaatttagaagtatataataaaatataaataaattataagcaaaaataataagtagcttaaagcattatcagaagtcaaaatatagaaagccgccattctagagatgattttttctttaatcataaagaaaaatttagatgtatatttgataatcctccccatcaaaatttaataaagattgtatattttgaagccttaaaacaggataaacaccaaaatattcgataattaaaacttaaaatataatgaacaatctaaattaaaaagttatattattttatttactcaaatagttgtatttttttatccaaattgttttatatttccactaattttaagcattttacgcaatttcaaaaacaaccctcatgttgcaccttacttaaaattctttttttttaaatttattagtaataatttgcaaatacaaataacttttcaatgtcttatcatgaacataaaatgtacccaaaatggattaatattaagaaggttggaatacaaaatctcattcaactgcatgcagagccgaataataaatattcaaaaggattgaagaagactcgaaaataaataagcaaaagaagaccgatacaaata

SEQ ID NO: 20501 - DNA, 2149 bp, Heterodera glycines
tatattttgatagagaacaattaaaaatattttattgaatatcaataaatattaattgggtttaatttgagctaagttaggaatttttatgtgttacccatttttgttttcaaaccgattggcgggtataagaaacgcgcatgggtggtggaatttaagaaagcgccagaacgcaaattaagtcttataaagaaaaatcttctcacttttaacacaataacttaaagtgaaaatatccaaaaaaataaagcattaataaaatcaagaaacattcaagaaccactcaataaataatggaagctatggatctagtataatgttttttacaatattcttatatttaattcattttttaaaaagcattaataaaaaaaacatcttataccagaaataaatcgattctaatatattatccactatatgcctaaaggcaacattttaccgtataagaattttcaaagcattcaaatacttattgtctcacccgccactgctcaccgtagctcctctcaaaagaaacaaaataaataaaaattatttaagaccaataaaaaacataaaataaaaatttggaaaattaaggttcaatgaatgtcaatatacattaaataattttaacacaggaacgaattgtatagggcaacaaacgaataattttgtttaaagaaaaagaaaagagtgagtgcgattgaatattaaattcatagaataatatttaattgctaattgataaaaaattttaaatataaaattttaactgtttttttgaacaccaaaaacttttaatcaaattaaaaaatctttaatttcgagcattctaaataaatggatcaatgaaaacgaactacgcgctgaaatgacatgtgaaaaaaaaagttaatgaaaattcttttttatattttctctacattatttcaattgaaatttaattaataaaaaatatttcaacttaaaatttattgttttttctttttttaaacagcaagatagattgttttgaattgttttgtatacgaaatatttaaaaaaatattaaaaattattgattagatatatattgaaatactttgaataatcattgttttggatcattagtgaggataaactgaagaaaagtaaaggagaatgagggaatcaagtaaataaataaataaaaaacatgagagttcaaatgaaaagtaatataacaaataaaccaattagaaaacagaataaattgaaatcaacactgcatcaacatattagagtctataatataagaaattattacaaatagtttattaataaatccatttttaaaatttaaatacgttaaatataattatttaaccgcattaccacattagaagacgaatattatttagtaattagtggttaattttcaattcaaaaaaatttctgataattgttgtccatgtataattcggttcctacggtatggtgtaaaaaatatttcattacgattattatcatttttgtctttgatagattcttctggcggatttattttagctaatgatacaatattttcgaataaatcatcaatttctgtacgaaattttctcagctgcttcctgtatttataacaggttgccatgctgtgttttgaagagttctcattttcctgacatttttttatatttttatattttaaacaattctcattatcacgaagaatttttgaaatatttttatattcatttaaaatttgtagatatagtagcctaatattttgcgctatctctaatattttttcatatagttgatgtattcctggagcactaaatgcgatgatcatatatattttcgcatagaaagaaatattattacaatatgacactaaacgatctgcctccataataatttttctttcttttttccaccttgcgacaatttcattattgataaattgtatttctttgtcgatggttgtcattttctgatttaatttttatttttttggtactcaaattctcttttattcgtgaagcccaataaaatcccacactacaaattgaattctgttttccaactccaaaattttggtgtgaaaccggcgagattctaaatgtagttttctcgcttcactcaatcccttaagtaccttttcctctagtttggtgacctgatcgaaatctttggaacgatc

SEQ ID NO: 20502 - DNA, 1255 bp, Heterodera glycines
  unsure (1)..(1255): unsure at all n locations
actaaattntgatcaaaaataaagaaagttatgaattttctaaatttcactggattttccggggctcaaattttgacgatttttcaaaaaatttttaccaccttccaaaaaatctgaaacgcaaaataaagcgtatatacgtattcagcaccaaaaattaggccataaaaatgcattttggttaattttggagcaaaaaaaattttcatgaaatgcaaaaccatggggtcccccctttggttttgagtttcaaaatcacaattaattttataactttttttaaattcaagataaaaacatgagataaagcacattatattgggcattaaattctctacaaaaaagctcttagacaattttttgataaaatcaactcccgacgagttatgggcccgggactgaaattgaggcctagcaaccaaatttttctatttccaaaaaaattttgaaaaatttttctgaaaatgccaccaatcgatagagcatgaaaaacgattgcttgaaagtggtcttggttttcccgagaaaaatctgcaaaaaataataaaattcaaaaacggaaaattttcgagggggcctagctcgaaaatttctgaaaattttcaaaatccgaaaacatggatggatgcagctcgtcgagctgcacaaaaaagtaattatcaccatcccgctcagatcaaaacacagcgagttattcgcgaaattcaaaaaatgccaaaattggttttcaaaattcgccgaagtgtacaggccaggcctttgatgctagggcctcgcccaagaagaaaaaaatttcccaaacattccaacttagggccctctcagcagacatttttggctccggcttccctgaaaaaagttttggcccaaaaactgcatgcatttttccccaaaaagccatttcagcgccgctggcgctcagttggcctccggaccggaatgccattatttttcctggatgcgcctcaaaaagttgcttaagcaatgtcaacatttcaggtccccccgattagccgttcccgagattttagttttagcaatgaaactcgatgttgctttagttatatataaactagggtgcccagttggctatggtgtgcatgcgtggcttggtaatatatggcccttatttgttattttaaaacatacaaaacattaattccattagtgtgatgttttaaagcgctacccaatgggggggaaacgcggttccgccgcgtcgataaaaagtgatgtaatttagcaattcatcgca

SEQ ID NO: 20503 - DNA, 1559 bp, Heterodera glycines
acgagttggcatagcacgagtagttatgtatgattttccattttaatcgtttagatagtttgactttttcataactagggatggtaaaaatatggatataaaatcgcgaaatatggacataaaatggtaaaaatctcaaaatatggacataaaatggcaaaaatatggacataaatttttctaaattgaggggtaaattttcaaaaaaacccgaccaaaaaaccgaaattttccattttttgcttatctttcacataaattaaccaatttttaagaaaatttaaatttaatcaatttttttgacaaaattttgctaaaaaatgtctttttcggaaaatgttccggtctttggggttaaaacggccaatttagctgatgggggccgttctaataggggtttttttgggaaaatgccaaaatatggacataaatcgcaaaatatggaaaatatggatatagaaatccatcttaaaagcttcaaaccaagctaaaaacatgtttttcgtgcgtttcaggcctcccacattccaggaaaaaaatatggatttccatataattaccatccctaatcataacgtttgccaattttcaaaatttgaaaagggcggatttaacctttacaaatgaaaaattatccgtcaaattgatttatttgattgatttgttggtggagggtagggtaaaacgcccggcaaatggtcatcattttgcaaaatattctcctgattgatgggtcctcttatgttgcgttccctttttcttcctcttccaatcggtcattttatgccaaaatgtttccgccccttccgtttttggcaatgatttttcgcctcccattgttttgaacaaatttatggcaaaaaagattgaaaatcttggttttttgaattcttctggccataacttttttgaaccttaacaagatttttcgaaatttttcaggctaatagagaatacttagggctttcgaatgataccaataatgttagatttggttgactaagaaaaaagttatagtccaaaaactgggctggcgcgaaacgagggtgtcccgccaaataagtcgttttgtccccatttttttaatttttaaaaaagaaaaattacattcctaaggcttcaaaaagtccggaatagtgacgaatagtgacataattttcagccaaaaattgagcaaaaaataatttttatcaactagttgcagttgaaaatgagtaggacagagattttgaagggcaaaaaacccaaaattagtaccgaaaaaataattttttaaattaaaattcttgccaggaaaatgaaaattttttcatttcttaggagtgtattttcaaaaattttcgaccgtttcttaggggtgtatttttttgaaaattttgaggtcgattcttagggatgtattttccgtttttattgcatttttgttgagaaattttcccaaaaaatgtcgaaatagtgacgaaacgccaaaatagtgatttttaactattttagtgacgaaacgccaaaatagtgatttctagtgacgaaaaatgacgtccaaatgaaaaaattttaac

SEQ ID NO: 20504 - DNA, 1256 bp, Heterodera glycines
  unsure (1)..(1256): unsure at all n locations
ttttttagtttaattaaatgatattttgcgcttantggtgagaatctcaaaaaatgtgccaaatttgtnnggattaggttaaattaataacaaaattaatggtcgtcggtgaaaggataaattaatttaaatatttaaaaatttgaaaattcgaaaagtcatacaaaataaaaagtaaaatttttaaatgattttttcacaaattttaattaaattatatgctgagcgcttattactgatttgtgagagtcttcaaaatgttgccatatttattgaattaattaaatgaaaaacaaatttatggtcgtcgatgaaagggtgaattcatttaaattttttaaaattttaaaattcatacaaaataaaaataaaatttttttttaacaatcgatgagaaaaacgattatttggggagggggcgaatggttgttgaaagaagaatggatcgattcactttaaccattcattataaacagacaatacggaggaatgtgaagggaaatgtggcggcggcggcagtttgtcaaaggctcaaaagtgaaaacaattattttcgacacgttttaatcagggatgtgatcaaaaaattttcaaaataagaacatcaaggccaaaaaataagattttagtgtcaaaaataagaacattttgcaaaattgcttcaaatcgttatttttacaatttattcaatcaaaaatgtattaaatattatatttttcacctcccatgatcatttttaacaattttggcgaggaaatgagcaaatcgtacatttcagtgcaagtgagatcataattcgatttgatttgggccacttttcacggtttcaactttcaataaattgcgcacatcagtcaactgagctgaacaaagagagaagacgcgctccacgcatgcattggacacgggaattgaaagaattttgttgacgagcaacacaagattgggtaattccgcctcgaaaaccttcatccacttctgttctgcgttcatttcgccaaatttctcgtcagaaatactttcaagtatttcattcagcgccgtaatttcgtcaaaaagctcattgtcgttcacttccggagcaataatctgttcagccaaactcatcacttcggcgcgattgactttcttttccttgagagaaatccattttaaattcgtgggaaaacgtttcacacacgaaccatttatcgacatagttaagtgtattgatttcaaaaaattctgaaaaatggggaaaattttgaaaatttccc

SEQ ID NO: 20505 - DNA, 1177 bp, Heterodera glycines
ttaaggaatcaagccaccacaggttaatgtatccaaattggagcagccattacaagacacagatttgacattgaatgttgaaccaatttggtaagcgcataccagggatgttgcgaatcgaaaaataaaatgcgaaatatacgaacacgaaacgcgaaatttttttctaaaaattattcataatgaaaatcgtaaattttgagattgtggtgcaaaaagaaaaaaaccctaaatttaaaagaattgttatttatgaaatccattaaataccttttaatgttcatctggtgtggtcccgctgatttcctttttaaatattctttgtgcagctcatgatggtggtgttgcaaatacataagtaatggcgtggttggtaattggggcgggtgagccttcttataatctcaagacttgcattatgcaacgcgagcagacagtttgaaaaaaatcccaaattagtgacatattataataaaacctaacaaaaaaaaagtaaaaattaaaaaagtcctaaaattcattcattatttcgaaatttgtccggtattcaattttaataattttagtgtgtatttaaatttgtgactgaattattaacaaaaacataattataagtaaatatgtgaatcttttactttctctcggtttgaaaattatttttctctcattgtcacaccacatccatttttaacagtgcttaaaatttcgtgtttcgtgctaaaatacgaaatccgaacacgaaacgtcctaaaaacacgaaaatacgaaaaatacgaacacgaaacacgaaacaatcaacatccctggcgcatacggtcgtgcctttccgtgccaaacagccccgtgtgtttgggcttgtgccacggaccagcgcttggattgtgcaaccttaattcatataattaaggatataattcgagagtctcggtttaagacacaggtctattccctatatgggtgggcccctcatgccaaattaccgtcagtcgttgcacagtcatccggacattgagtggtcagtcggaccaaaatgttcccgttgagtaccccggacggctgatagcacacattggccgcgtcgcaacgcacggattcgcgcattgtgcgttttgctgaacatcaaacgctgccgctccaagcggcaacggttccgcgttagtgccgcccagtgcaagcg

SEQ ID NO: 20506 - DNA, 1437 bp, Heterodera glycines
  unsure (1)..(1437): unsure at all n locations
gcacagcagcggacaaccccagcaaagcattntgctgaagcaattaatggaggaaaataaacaaacaattttggtacagcctaattaatagttatttgatataaccattaaggggagagttgcaatttgaaaatggaattggtattttgcattttaaaaacggatggcgctggttcagttcagtgtcgtgttcttcgctccgccgctgctcctttctttgctccttcccgcctccaatcagtcatttctttctgttcttttcacaggctcaattttgagaacagtgcgttgagatggcgggggtgggggaggagaacagaaggagaagtagaaagaagtaggaaggtgtttcttccatttatagggggggggggggggaagagtatgggtctctctctctctttgccgaagcgtcaaacacttggaggtcagcgtcagaggaaagtcgcggggggggggggggggaagtacagggcgccagacagttatatcccttcttaatgacttatttctcaaccatttaggaccatctagatgggatgggccccggattgcaggtttttttagttcgggaaaaatttccgctgcggcgcctgtcgacatcgccggatgaaaaagtttgtaatgcccaaaaaaagcaaatgtcccaaatattgcgtacatttgcttccctcggtgcaccgatgcctggtcaatttcgtggtcaaacgatgtcaacacatccgccaactcgcccttaatcattttgcaataattaatgaccattctgtatttttccgaacctttttgccgaactcctcccactcagttacgattacctgcaaaaaagttaaataaaaatttgaattttacgaattttttgttaaactaaaatttacagtcaccaaagaataaaaaaatttgggttctagtcggttttacgcgtcccatggcattttacgcgtcccatggcattttacgcgtcccatggcattttacgcgtcccatggcattttacgcgtcccatggcattttacgcgtcccatggcattttacgcgtcccatggcattttacgcgtcccatggcagggatgtcattccgaggctcaaaaattttcggaaaccggaattaagtgctatccctggtctatggtattttagccgtcctaataactatgatgaaacctatttttttgtccggtattcagtaattttttaactaaaatttcgttgttaaacataaagtataataacaactcatacacaggcaactcgaacaatggcttagactaggcctaagcttttggcttaaacctaggcttaggctttttcatattagtaactttctgttgacatcattaagaaaaattataaaaagaagattctagcttatttttaagttttctatttcaattttattgtcctttattttttattatgggacgcgtaaaaccgact

SEQ ID NO: 20507 - DNA, 1856 bp, Heterodera glycines
  unsure (1)..(1856): unsure at all n locations
tataaaaatagtttgtatactgtacacaacaatttntggtttataactttattttgaagggcgataaaattatatttgtgaagataaaaaattgtgtgcacaagacaaaaagaataatgaaaagtacaaaaatgaaatgattaaaaaatatttttaaacggaatgccaaaatcgccaaaacaaaattaaatatgaaaattttttaccagttcgcaaattttgggaccaggtcgtttcggcgccgacgtttcggcgccaagccagaaattaaaaaataagaaaaaacacacgaaaagaaaatctaataagaattgaaaaattttgagttttcggctttttgttagaattcgggtccgggattcgaaactggccaaaatgaatgtcagattgatcagcgaccctgaaaaccccccaaaacattttccacgacttttcagaactaaattttctactcgtgtatttttttatttttggcttggcgccgaaacgaccctggcgccgaaatgtcggcgccgaaacgatacggaccccaaattttataccaaaagatgttgccaaaattaatgattgttaacaaattttggagagagaaaatacatatgtcaatgagtcagcgctcggcccaaagaaaatattccattgggtgaaacccaattttccaacgattaaaggttcagagccaacatttgccagttgagtacttagtattttaaatttttgttggaaattattttggtactgaaatatttttcctcctgttttacaaaacaaagtgaaattaaaccggtccgtactgttgtttgcgccttttgaaggccgacacgctggtgtgatgttaagtgctagtaaatccatcgtttgggctgtatgttgacaaaattgggcaatttccttgttgccgtcttcgatacgatcaacaatcgtgtcgaacaattcaaacgcgtcctcaggaaattgttttctattaatatattgaaattttttattttaaaaaagaaaattgtaaatttaggctagattataaaaagcatcaattgagcagaaataatatgacaggcaatcataaagggtctttaaagaaaatgtttaccaaaaatatcaataaaacaatttttatttaattacccatttccgttgttttcgaatttcttccgccaattttatcagtttagacgtcattattgtatgttttgattgttggcatttggatgcaatttcagggaattgaattattatgtaaatagaataatataatgtttataaattaatgaatcaatcatttacacacaaaagcgtgacgccgaaaaataaaaaataatatgaaataaaacaaataattgctcacatttggagctgagatggcaaagaaattaacaattttaaatcagatctttcaagaagcttggcgaactgattagaacttagtaaagtcgtctctttaggtaaaagtctatagagacgagaggttcgaataaagaacgaattgtgtctatcattggttgagcaataagctgttcttatggtgaattcgtttttgtacagggttttgggaaaagaaagggattcgttattttgtaaatgtgttttaatacctaaaattatttcatggtaaagttttaagagagaattttgtgctctatctgataggcttacttattttttaccgaaaatgtccnctaaacccgaaggtttttttcgaaaattttccagtatttaagacattttttccgtaaaattttatttttatcaaattgtttatgcaaagtttgcatttaaataaatagaggactatttaantttcgtgtgccgagaaaagtctgaaaaagacaatgaaaatgagtaataaaatagaacat

SEQ ID NO: 20508 - DNA, 2886 bp, Heterodera glycines
cccaaattccagagggtcaaaaaattgccaaaaaataaaaaatttttaaaaaattccaaaaattcctaaactgaaaacgaacatcagattcgtgctcagcaccttaaaaatacccagaaaaaaatttttcacccccattttcgtccgaaaaaaaatttccgaaaatttctagggggcctggctcgaaaatttttgaaattttcacgacctatcctacaccattcgatagagcttcaaaagctctacaattttgccctaaggcgttttttcgataaaaccaacccctaacgagttatggacccgggactcaaatgtcccgctcaggccaaaaattttttctatttgcgggaaaaaatcgaaattttttcaaaaatatcaccaatcgatagagctcgaaaaacggttgcttgaaagtggtctccgtttttctgggaaaattcgttaaaaaatcctaaaattcaaaaacccgaaaaccgatttttaggcctagctcgaaaaattttgaaaattttcgaaattttaaaatttggaaaaatccagctcattgaactctacaatagtctgctggcaccccctggcttagttcaaaccccaatgagttattcgccctggactgaactggacaaagttggtactgaatttctcctattttctgcagcccttcctactataggtagaggcctggaattttttttgacttttagacaacacttcaacttaggttcctaccagcggaaagtttttgattcgggatttagaaaaaaagttatgggccgtcaaacgcacgaaaaaatgagaaatcagtccctggtactcagttgacccttggaccggaaaacctatatttttcccggatgcgcctcaaaaagttgtaagacccttccactactttcagggcgctcccggccttcggccgggagattttgtttttgcagacgaaactccttgtcaatataacatatatagtaacaaaaaaacattatttttatcgcggaaacattcattttatgtcactattcgtaaccattttgaattttagaaattagaaacaaaaaattcaataaatcgaaaaatacctaagacttgtatttctacaaaattaaaaaaatgattcctagagtcagaaatgttcaatttttaataaatttctattgcaaaattctagaattgtcttttgacaaactaatcctcaccctttgtcactaatcaaccacttttctttttctcttcctcttctccttctccctttttctcttcctcttctccttcttcctttttctcttcctcttctccttcttcctttttctcttcctcttctccttcttcctttttctcttcctcttctccttctccctttttctcttcctcttctccttcttcctttttctcttcatctgctccttcttcctttttctcttcctcttttccttcttccatttcatcatgtgcaccccttaattattttttaaacaaataaatcaaaaacatttggtctttttgttaatttttaatctgttcttaaacctgcaaaattaaaaaaaaaattgaccaaaataactcgaaaaactcaagttaatcaaatttcacaactttttagttttaactttcttttgcccagccaaatttccgaatgaaatttcgaaggatttctaaaaagtaagagctaatgaaagacacccaaggaaatttggtttgattaggattttatcgaaaaaaattgaaaaggaattgtgatcccttttcacgagtaaaaaatttgtcaaaaatttttctcataattttcttaaaaaatgtaactcacgcaccagtcagacaactcgctttcatctggccttaaattgaaatgtttttttaaaaatattttaatattttctttatagatgtgtgacttaccaattaagaaagtagtcagtgatgaaatcgcttaatattgggattcattattataaaacatatacactaatataatatttattctatttattctttatttataatatatataactagcgggtgcgtgaaccgtcggatctgggctgggaaaaagcgcttcgcgctttgggagcttcgctacctagactgtgaagcgattcaaattgattgaattggttggagagattttttgaatttttaaaaaattattagaggttattagtccacattgaggctcaagacgggcgcttcgcgcccgttttttaaatttgttgaactcatacgagagcttcgcgcaaagtgattttggaattcggaaccaaaggggggtggccaggatttttgagtgaaaaaattttttcgacaaaaatctcccaaaaacatgtctttaggggttatttgggccgctgatcacgaatacgtgatcagattttacttttgacatcgtttagacctcagaatccctgtgtgattggggattctgagtatcattttgaggggagcaaatgaataaaataaacgcttaaaaaacaaaaattaatagtaattaatttatttaactggcaaaactgcgcacctcttctctattttatctcacaaagaattaaaattttcatcggttcgataaaaatatataaaaatttataacgatcaaatgtttgggtatgtgaaattgtcaagttaaaaaatttaataaaattggttttggaaaaaaataaaaaaacaaagcaagttctaagaagaagatgatggaaacaaaacttactaataattcaaaaaataatttgcgataatagtctcaattatcatttaaatttaatattgcttatttatgtgtttatttttatttgcaagttgtgaacggtcaattataggatcaaaaaattacattgataatattcctgctctgaaaaagattaacaaaatagatagatttaatgaaggtggtgatga

SEQ ID NO: 20509 - DNA, 1636 bp, Heterodera glycines
  unsure (1)..(1636): unsure at all n locations
ttttncggacgaaaatggggggtgaaaattttttttctggggtattttgaggtgctgagcacgaatatgacctttgtttttcgtttcagattttttggaattttttaaaaatttttgaaaattcgtcaattttttggccttcgggattttgggttaattttcgaaaattcataacaaatcgaagggtggatcaattttcatgcaattatattgtaaaaatagagaaaaatcaggagaattttatgggatttatttgggatttctatcttaaaaagaaaaaaagatattccagaatttctgaaaattttcgatttttcagaaaaaaattcataacccccttctgaaaagaaatttttgaaaattaaaatactacaaaaatccgcaatttttttctttaaaatataaatcttattttacatttttatcactttcttacgaattgttacaaaaataaaaccgattttggtattcgggaccaaaggggtgagcataggatttttgagttgaaaaattttttcaccaaaaatcttcaaaaaatatgtctttaggggttatttgggcccctgatcacgaatacgtaatcagattttacttttgacatggttaagacctcagaatccctgtgtgattggggattctgaggcacccttatgaggaggggagaggcaggttcggacccggacggtgtacattatttttctatgcatttttgggttattttcactgtttttaattaatttgaagattcgttttaaattatttaaatttatttttttttaaattaattttttgttttattattaataacaaaataattttaattaaatttaatttttcttttgatgaatagaattatttttaagcaaaattagatttaaaaatttggatgcataataattcatttcaaaataaagtaaaataaattattccgtttattaattaaaaaataaacttttacattttttattatttagttttttttaaatttttaaataaacctaattctataaaattatgatattatttttgtacatctcataacaagttaacttttgtacctcttctatttactgttgtacctcttctaatcactgttgtacctcttctaatcactgttgtacctcttttaatcactgttgtacctctttttatcacagttgtaactcttctaatcactgttgtacctcttctaatcactgttgtacctcttctaatcactgttgtacctcttttaatcactattgtacctcttttatcacttttgtacctcttctaatcactgttgtacctcttctaatcacttttgtacctcttctaatcacttttgtacctcttctaatcactgttgtacctcttctaatcactcttctaatcgctgttgtacctcttctatttactgttgtgcctcttctaatcactgttgtacctcttctaatcactgttgtacctctttttatcactttgtatcttttatcacttttgtacctctttaaatcacatttgcacctcttcatcaaatttgtacctcttctaatctctgttgtacctcttctaatcacttttgtacctcttctaatcacagttgtacctcttctaatcacttttatacctcttttatcaaatttgtacctcttct

SEQ ID NO: 20510 - DNA, 2734 bp, Heterodera glycines
gctttaataatggcattaattggcacttaaatcattggaccaagcaactaaaaaatctctgtctctgttcttaggtctggaaatttctaggcatttttgggtttccctcttgtgcttaattcccggttacgcattggcatagaagccatgaaggtataagcataatagccatacatttcatagtagcttatataggaaacatgatggttgatagaagccataaaggtataagcataaaagaattgcagccatacatttatagtagcctagaacccatggtggctcgtctaggagccatacggtatgtttacgcgttggcatagaagctatgatggtatgcatgcataaaaactcactgttcaatggcatcaatttgcgctgctcacccagcatcataatgcagccgtcgggcggtgttgtcggagtgccgccaaatgccatcattgtgcccccgggcgatgccatgcccgtgccgttggtgttggccgccgacaatggcatcgccgcagccgggccgcccaacgcgttcacaatgttgttgaacagtgtgtgggaacgctgtgcgggggaacagaaatttaaaaaaaaaccgaaaaatgccgaaaataaattaaaattatttaaaaaaattgttagatcgagaaaatcaactgggaaggataaaaagacagaaaataaatcggtaatatattgcaatttaaagctaaaggaatgtcaaattgtataaaaaattaaaaaactcaaaaaaataatttaataatttactaaaaaatgcgattaaatttttgaattgaaaaaaatcagttaaaaaactatcgcaaaaaatttatatataaaaatatttaaattaaaaaagaataatttaataaaaataaattagcaaatatatgtaaactaaatgcattttcacccgatgctgcggttcctccgcttcgtgcacaaagtccgggtccaaattgccactgatcgcccgcttcaattcgggcccaatttcgtgcagtgtcctcagaccggcctaaaaatgttgtctaatagatttgcatggactgattcatgggcagactttgtgtttttaaataaataaataaataattccaatttggtgtgccgtgccgaatcctgcttttcattttcggtgcctcaaaataaaaccaaaatatttttggccaagatttaaggttgtgggatccatcttggaaatcattgctcctgtttttatactttgctggacaaaatccatcatatgccaatggtaggactcgatttgcggtactcaaattgccccttttttcgtttttggcaccaaatgatcggccggccaaatcacctgcagtgccatcgcgtgagtgttcggtgccgccattcccttggcctccaattctttgcgctttttgaagcgtcggaaatagtcttggatcagaaaggtggcgtagaatttgcccacggtcacttcgtcgtctcctgtaaaagaaaatgaattaattggggaaaaaagtaagtttaatagaaagaaaaatttaattttgattccaaaattatttattcaaataataatttagttttaatttaaatcaataaatataaagtgaatttttaaatatgtcctaaaaagtaaagttaataaattttaaaaagataaattttatactttgtttaaaaattaattattcaaattaaattttgtgtttaatttaagttaattaaaccaatgaattagcaatttcaaaaatgtctgataaatataaatatttaattaattattatattttccctgctaattagccaatattatgtgttttattaataaagtattcaactacctaataaataaataaataaaaaataaataatttattataaattaattaattaatgttaattatatgtgccattaattaattaattgccgccccccccccccccactcacttcccgccggtggcaccacttcgtccagcattttaatcggcgttcgcttccaaatgcgacggattgccgcccgcagctgctcattggcctcgtcgatgttcccatcggtgtaaattttcagatttgtccgtaccaactgcaaatgctttttttaaattagaatttaaatttcattttatttaatttattttttgtaggaattaattttgtcggaggattttttgcataaattttaccccttccccaaaaagggtttggacatgtcaatttttgagatccatttcagaaaatttaaaaactcgaagaagcgagtcaatttcattttacattccaatttttaaataaatttccataggattttttgcgtggtgagtcgaagtgcaaaaagtccgaatgagtggtgatcggaaggggcgggtcatttcagtaccgaataatgattttaattaattaataatataactatttaatctattaattagatctgctggccataattataatttctatttactatttaatatttcccaatcaaatcacatttttgtgagagaaatacagtgccccaaaaaagtcttaactcaaacctgaaaaactatcttatagttcatttaaaaacttgaaataattcatgctcgcacaacttttggtgctgatcaaaaaagtctcctatatcaacttgatcagatcactccttcctagtgaccggggcacctaaaatacactgaaaatcggggaaattttcgaaatccctagggggttgggaaattttttctagagaaaatgggcaagctcactggaaaga

SEQ ID NO: 20511 - DNA, 1808 bp, Heterodera glycines
tctattattgaaaaagttataagctaaaaaaaattcataatatcaagggtaaaatatagtgtgtaccttttactgtttgtatttgttcttttggcgttctgtatttattattattttattaatttgctttaaaaaattgaaatttatacacaaacacaaggaggaattgaacttgagaccccccttttggtgactaactcacagaccactaagacgaaaaatccagcatatttgtacttggagcccaaaattgggccgctgtgttaaaaatgggttttagaccgtgggttcaaatctgcgtgcctgcacaattttttattcttaatcaggcggtctcaaaaaccacgggagaaaatagtgtaagaaaagtgacattttgtaaaaaaaaataatttatttttaattgtattttttcaaaaacagatttatttaatgtcgcatttggattttttatttacatcactgtgctctgtttggttggtcgaagagattaaatcgccgtgaaggattttgttcactgaagagtgtttgtttgttccattcagcccatccccattttacacatttaatacacacaaacacaaatttgtctgaattattattttgcaaaaaaaaattgtgcaacaaatgatttttatttacattatttttttaaaaaaggataaaaaacaaatagaaaaaataaaaatgaatttgaaaattcaatgggaaacctaataaaaaaaaacgatggaaaaaaaatccaaaaaatatttcacaaaatgtcaccaaattaatcattgttctctatgtgttcactcattattttcatttgattgtattttttcataaaaaaaaattattttttaaattataaagtaaaaatccggaaaatgcaatttgcccagctgtttcttttgctttgcttttgaaacatataaaaaagaaaataggtgagtgattgtgagccgagaaatgttttttattgtgttattgtgagtaatgttttgaacagctgtttttgaggtaaatttcacggtaaattaattcattggacggaccaactgaccaccctttaaatggctagcaataatccaatttcttggttagcagtttagaatgggtgatggatgggtgcagcgaggatatgaattacgcgtacgcaaaacgcattttgaaaatgaaacaaacagacaccaaattcgacgcggagacgcgcaacacaaaatgatgcggaaggaatacacacaaaatttggacccaaaattttagcgaaatgggatcccgctgaattggtctcaaaaaattccgcaatttccaaaaaaaaatgcagtattgcggggactgggatatccagcaaaatgccgtctcgcaccgggctcggtaaattggaagttgcattcgaacgcaaaatttttaaaccctcttggcagtttactttaaaaaaatcgcaaatttggattcccacctgatttttggccactgaaccgtccaccgggtccgtgtactcgtagctgtccgccttggccacctcaaacgtgcgcccgttccgctcaaatttcatgcccacaaatccggccaacaatggctgcaaataattgatcatcaacgacgcaccgctggactccacattctcatagtcgtagctaaattataaaaaaaaatgattttccattttttttcatggcgacgacgaaaggggtgcactacgtacgcctggataaagtcaggatcgaatttatgttgtaaatgaaaaaaaaccaaaaagatccaatttttgaggccgcgttacctctttgggcttttgcttttcaaacttagaaattttt

SEQ ID NO: 20512 - DNA, 1253 bp, Heterodera glycines
  unsure (1)..(1253): unsure at all n locations
agaggaaacagtaatttgtagaatagtaagcgaatccgggataaggtgaggattagttatttattcacgagtaaaatgatttaagatatggtgaggattatgagacagaaatgtggccatcagtgcgttggattgctttttcttatttcaagcgattttatttgcgagaatcggcgatggaatattatcctaaaaatgtggtaatagaacctttttacctaatttatctcatcttaccttctcaattaatctttagatgatggcctgttattatttggcagctaaagttgatgagtttaatgtttccattgacaattttgtagacaatttaaggtaaaacattatcatttttattaattttttccgttttttatggaattattttcagaaacggcaccagacaatacaacacggagaccatcttaacactcgaaccggatgtgatgcttaaacttgtaagaattgaaaaataaaattgtttctttttaagactctttaattgttccgttagaattacaatttgaccgtccacacgccctaccgccctttcgaaggccatctgattgaaatgaagactaaaattggcagacaattgtcagaaattgagttcgacttggaatcaatcagaccaatgtcaagcgaatttctgaaggtctttctttcctcgcggaatgatttttcgcaaaatgaaatcacttttcagaactctttgctgagtgatgcgatgtttctttactccccttcacaaattgccttggcagcggtgaaattcggcatggataaagcattgggaggtgctttttctctatccatggattggtttcgaaacaaatagttaaattggcagaagtccgttcctccactttaatggtcgactttctcgccgctttgctcgacgtggacatcggcgacactggcggaagaggcacagcagacattttgcagttggagaaactgcaagttcggcttgaccaaatctgcaaattggttctacaacaatttgcccagggcgtaagtgccgaagaaagcgcatcccttcaagtcagtttgacagagaatatcaaatgtattttagtgaaataaatttagacaaagtttctggcctatacgcaaaaagaaagtgaattaatgcccttgctcatccaattggagaaggccaatcttgagactgtcggaggaactaacgcagcgngatttgattctgatgaagatttttattttgaaatatttataataatgataataaacggggt

SEQ ID NO: 20513 - DNA, 1518 bp, Heterodera glycines
cagatttggtccatcaagtgctggaaaatggatggtgcctttttaacgccaaatgggagacgttggcactgaaataagccgcggtgggtgtttattgtgcaaagatgtttcgatttttcatccaattccatttggaggtaggcgtctctcaggtcgaggtttgagaaaaatgcggctccacatatatgacgtcgggtctcggaagaggatggcgattcagttcgatcgaatcgttcaatccggtcgaaaagtcgatgcacacccgggtctttccatttttttttttgacggccaaaatcggggcggcccaatggctgaattctaccggtttgattgcgccaatctgcaagaggcggtccagttcggtgtcgacagcttcgattgcaccatgggggactggtcgtgctttacagaagatgggtcgggcgtccggttttagaatcaggtgcgctttgattgcgcaatggccaagtccgttcttaaaaacttcctcaaaatctttttgcaacacagcggtgagcgaggattcatccgtaatgccaatcgccgggtttgttgccttgacgacattggcgttgattgatgcgtttggctttcctttgatgctctttgggaacaaaatttctcttgggatgagctcgaattcctcaatccacggaaggccaaacaaatcatgctttaagtcactgctgacgtaagcgatcagtgttttggatggccgatcgaaacaactgacggtgcaatgaaattttccttcggttgaaaatgcggtgtcattgcagttgcgggtttcgatgtccgttggagagagtttgggttgacccaatttgatccacgttttgaagctgatgactgttgcttgggctccactgtctccattcatcttcaaatttatgccattgatcgtgaccgggatcttccaccatcggccttgggttgtgccaatcaccatacaatgtgacttgaccacgaccgtgtgaaatgatcggttctgagatttgtgtgccgtgttcgacgagcgctgacggcagacaatcgcaatgtggccttgccggttgcatttgttgcaaaatgcgttggcaaatttgcagtccgatcgccagtgatcgttgcttccgcatgatgcgcatggatgcgatggatggcctcggtttgctttgtcgtccgatttttgcttaggcgaaggcgcatgatgtgacgatttgggtgccggttcatgatgtggccatttgggtgccggttttgccttgtgtttgcctttgatggtctctcgccattgctgaggtcgcaattggatggcgctggttgagaccggttgagtaagcagagaaagggcactttccttgacgatttgaatcgccttcaattcctcttccaccttttggagagtgatgtctgtgccggtcttttctgcgtcctccagcattttgagacacttttgcctcaggtcgtggtgctcgtcgttgagtgcaatgaccaggattatgcactttagctgttctttggtcggactcaaat

SEQ ID NO: 20514 - DNA, 1172 bp, Heterodera glycines
acttaatataaattaaatcattgactaatttactttgttcttttattatttaaaaatcaatatttccattttttctataaatcttttttttaaagtgggattgaaacttttcataaatatttacaaaaaatcaaattaaactggccaatgatttgtcaattttttaagatttttgcactttttgtgaatcaacctagccccttcatgccacgaacacataaagcgcctttctgttgactatttaaaaaaaaatccaaattgatgtcactggaattttcgcaattttattttcaatttccaaataaataaatagaaatcactgtgtaaaaaataatttttttttttttttgaataatttttccttttgaaaatggcataagaatcgcatttaaacttcaataatcagaagccatcgtccttctcgacttccaaattttcgaattccatcgtttgcttctccgcattgtactcatatttgccggtttgtccactgaactgtcccactctgtgctcccccaaatcgacgtgcacgcggcgaagctcagcgacattgtgctgaacatttaacactcattaagagtgaaagttgaacaattacatttatcaaattgctttttcgtccaattaatggaattatggatgaccctttgtcgtgaatcacacttcgaaattgttcggatttgattctttgtgatgacaatttgacaggcaataattagggatgtgcgagaaatgatttttaccgagaatcgagaaccgagaccgggaaatgaccccgggaaacgaccgagaccccaaaaaaccctagaaatttctcgactcgggatcgggaaccgagaaatctaaaattttttagccgttttttaccaaaaattactatttttgccattttggtcaccatttttcaaaaatatggtaaaatgggggtccggcgatgccgttaggcgctgccggaaaatctttaaaaattttaatgcaatttgttaattgtaagaatatagcttaaaatttcaaaaaatttgctgaaaatttttacttttttttggtttcgggggcgggggggggctttagcccactccctggctacgcccttgatcaagtgagcatttcacaataaaaatggatttaatttacgaatttatcaaattgtaattatcaattacttcataaat

SEQ ID NO: 20515 - DNA, 859 bp, Heterodera glycines
tgatgttagaaaattattatcagcattaatgttcataaagaataattaactacaaaaaatacaatatgccattttacgcctatttaacactttacgaaggttttttcccaaaaaataaccatataaaaaaattttatttacatattttcgtacatattttgggtttttatacatatttcttacatatttggggattttttttacatatttatgtacatattttgaccaatttttgtacatatttttgacatccctataaatcattaatgaaaacttctcaaatacaaaataaaatttttatttgaaaaataacggaccgggtcagtttagtctggccgtaatagtctggtcgttatagtctggccgtaatagtctggccgttatagtctggccgttatagtctggccgttatagtctggccgttatagtcagagggtcggtttagtctggccgtaatagtctggccgttatagtctggccgttatagtctggccgttatagtctggccgttatagtctggccgttatagtctggccgttatagtctggccgttatagtctggccgtaatagtctggccgttatagtctggccgttatagtctggccgttatagtctggccgtaatagtctggccgtaatagtctggtcgttatagtctggccgtaatagtctggccgttatagtctggccgttatagtctggccgttatagtctggccgttatagtcagagggtcggtttagtctggccgtaatagtctggccgttatagtctggccgttatagtctggccgttatagtctggccgttatagtctggccgctatagtctggccgttttagtctggccgttatagtctgg

SEQ ID NO: 20516 - DNA, 1028 bp, Heterodera glycines
tagtctgcccgtcttagtcggaccgttatagtctggccgttatagtcagagggtcggtttagtctggccgttatagtctggccgttatagtctggccgttatagtctgaccgttatagtctggccgttatagtctggccgttatagtctggccgttatagtctggccgttatagtctgtccgttatagtctggccgttatagtctggccgttatagtctgtccgttatagtctggccgttttagtctggccgttatagtctggccgttatagtcagagggtcggtttagtctggccgttttagtctggccgttatagtcagagggtcggtttagtctggccattatagtctggccgttatagtctggccgttatagtcagagggtcggtttagtctggccgttatagtctggccgttatagtctggccgttatagtctggccgttatagtctggccgttatagtcagagggtcggtttagtctggccgtaatagtctggccgttatagtctggccgttatagtctggccgttatagtctggccgttatagtcagagggtcggtttagtctggccattatagtctggccgttatagtctggccgttatagtcagagggtcggtttagtctggccgttttagtctggccgttatagtctggccgttatagtcagagggtcggtttagtctggccgttttagtctggccgttatagtctggccgttatagtcagagggtcggtttagtctggccgttatagtcagagggtcggtatagtctggcaagctgttttcgcctataactcttacaaatattattttttgtcaattataaacaaggaaaaacttaaaatatctatgtttagctacaaatacaaatggaacaccccaatcataaaataaaaacaaagcaaaacaaaaagaagctggaacatgagggtgcactttatgtttttcaccaattcagtgacgatggacttcgtaaatattgacgatgcgagtttttcgggcctaatcacaaatgcataggt

SEQ ID NO: 20517 - DNA, 2111 bp, Heterodera glycines
  unsure (1)..(2111): unsure at all n locations
actaaactaggtaattaaaatctgcatgtttaagaacctttattatttgtaaattcagcgaatgaaccgaaaaacggtcttggttgaagtgatggttttgaattctgagtgagaaaaacaattatttggtaatattatcgatggcactatgggtcaagctagagcccggaaatgcggatcctgttgcaggattggaattcaaaattttttgcaggaccggatccggccggattaatcctgcaaatcctgcattaaaaatttgctggatcctgcgcaggattgcggatttttggaaattttgaaaaaatttcaattaaatttaaaaaattttcaaaacgataaataagtgttccgatacatttttagacaaaaactggtgaaaattaatatgaaaaattggcatcaggaatagaatgaacaagcgcgtcctcatacctaatccatatgtatattataaaaacaaagtttctgtatatttggcattctgtcttagaaattttaaaaaaaaatcaataaaatcccgcataatcctgcacaaaaattcaaatttgcggatcctgttgcaggattggaattcaaaaatgtttgcaggaccggatccggccggattaatcctgcaaatcctgttttttccaaaaaatgcaggattgcggactgggatcctgcaaaatcctgcgcaggatccggtcctgcgccgggctctaggtcaagcccagtgttagacaaaattgctcgtaacgccaaatagcgtaattggcgtaaattattgcgcgctaattcaaatttacaatgatcactgatatttttgattgtttattttgatcagccttaactttcttcatttccaactaaactgaacaaaattggtatctaaaaaaagttttgaaaaggtgaatctttttctaagcgaatgctaagcaaattaactcgtttcaaaccatcaaatttttcgaaaatgttaaaatgaaaaaagtgaggtgaaaatgtggtcaaaaatctgggtatttgtcgttttctttgttgttcttaacgcctcggtcgtgcagtgcattcaacatcgtcgtgtgcttcaccagtttctcaacgatcttctcttgtgggccgagatgagagtagcggccaacctaaaattaaaaattcaatgataaagaaaaattgaaacaccaaattgttgcacattctgtgcatgtgttccatttcctgttcgctgatcagaccccaccaaagatgagagcgcgcaaaagggacgacatgggcactgagaaggtgaagcttcgtacggacggggtaacgcgaggcgtcaattgtccggagttgctgccagtggcagtagaacattttggtccaatgttcaagcgaattgagatcctctgggtgaagaattttggcccttgacagacgataaatgtttcgcagatcattcatagcatcgattagcaagaatttcaatggtccgggtggaattggggcggtgaatgaagcgaaattttggtggttaaggattttgtatatgtcaccgcctgtcaaaagttggcctcaataacccccacctcatccccatcattctacccgtgaattgttttgtccgagggtgccgtcgcacgccgacatcagacagtcgtttccgaacaacgtccccctttccacgagcgtccgcttccgaacaaatggcgtcaattattcgctggccattgcttgaaaattcagaatcattttttaattcgcattcttgaccatgcaaaagatggaagctcggcggtacaacatccatcaaagcaatgttgacgagtggagggccgtgtacgaattttggggtgggggaggcgacgggcgggcatcaacaattttgtccgacaattggtcccgccgagttcgccaattcctgaagacagccctcgaccatggctcacacgtcggtacagacaagtgcgcgagtctgttcctcgcccacccactctaaatttcccccctccgtcagctccctcttcagacgcttcattgcccacgtcggcgcccaaacgtcatgtccctggccggcgaacgaccgcttcaacgcttcacgggctttgaaggagatgcctgcgtccaantgtgatgagcagantcgttca

SEQ ID NO: 20518 - DNA, 2557 bp, Heterodera glycines
aaaaagtaaattttcaaaaaagcaaaaatggaatttattttttattttaccaatgtgacaaggtctgtgccaatgtacaacttgttggaggcacgcattgaacagcatcggagcaacaaactgaagaataacaaacaaataattattaaattaattaccaattaatttgtaaaaggtaataacaaacaaataattattaaattaattaccaattaatttgtaaaaggtaataacaaacaaataattattaaattaattaccaattaatttgtaaaaggtaataacaaacaaataattattaaattaattaccaattaatttgtaaaaggtaaaaattttatgccttttatcttttatgtttttttttctttatttttttaatattaaacattataacatcagattaccacaaattaacttttacttttatcaacaaaatgaatttcgaaaataaatattttttaaagtacatatttttaaaattgaaaacattttgagaaaaacccaaattttttccaaaattcttcgacctctccaaatagcacaaatcttaaaaacaagaaacacttgcaacacttttcatttaaatattttttattttattttgcctttgcccattctgtgcccatttcattccgctgaacacttccgacggcgctttgcacgtgctcaagtcctaattaatgaattaaattttaattaaaaattaaattctaaattttgatattaaaaatttgcaagtttcacttccgcgcatgtcgaagcggtggaaccgcacggcaacgggccgcactcggcctcaatggcgccgtcctcgtacaccgtcaatttgttgaccaccttcaaatattttttgggaattaaacatttattttggattttcaaaattgaattttgccaattttcacttcacctgatctttcgcgcactttttgcctttcactgcgttttgaagttggcccaaagtgaaagggacggcgcaaagcgcaaaaattgcgacaattagtgaaaattggaaaggcatttattatttatttgtttctcaattcaataaagcaaaatgtaaaataatttaatgtgataaaaacaaaaaatattagtaaaatattataaaaatgccgtaacaaaaagggcacgcaaatgtggatgtgctaggatttatattattatctcatttaatttaatttgcagatagcatcttctccgctcatttttcggattaaagtgacgtcacatataaacacctaaaaatgcctaatttttgggttcgatacctaaaaaccaatttagtactgttagcgcctgtttttacttaattatttgcgtgattttcgaatttcttaagaaaatgagcactcctatttttgagaggttttcaagattttaaattgcagttcaaaatgacgattattttgaacaattttctgccaaaaataaacatttctagaggatttgtgaggagagaatttcggttccaattttggaaatccggaaatggagacaaataaatttaggagcattagagtgatcacttcactgatcctggagaatgtggaggcttttttcaatttcgtggattttatttttttttggcatttatgatttacaaacttcaatttttgaaagattttcatttgtttaaaatcagtattatttaattatttttaaagttttaattaaattcttaaaataaaataaatgccccaaacaatttaaaaaattaaaaaataataattttgattaactttaagaaatgtccatcaaatttggacctatggttttttctttaatctatcaatattttttatctaaatttggacattaaactttgatttaattgatttgaatttttctaaagaatttttttatttttaatccgttagatttaattgattttttcgattaaccaaattttcaatgaaatccataaaattaatgtataataataattaaataaatgaatgagcatttaaatgtcactttaattataaaataataaaaaaaacaataaattatgcattaaacaaaattataattcgccaaaaattccgcagaaacacagtgcaaaaacgtgagatccgaaaattgttttcggttgtccgatccgtccgtcgtcaattgtcaccaattttggcgttgtgtgcacacaaattccttccttccgccgtcggtcggtggtcgtcgacgaaattttgggtcaccgaaacggcggcggactttgcgccatcgccggcccaccgatcggacggaccgatcggacggacggacggcgcgcgaattgcccccactgatcggacggaccgatcggacggacggacggcgcgcgaattgcccccactgatcggacggaccgatcggacggacggcgcggactgtcaccggcgggcgggtaaaagaatgaatgaatcgtatttaaacagcagcacgcgcacacccaaaacggggtcacatttgcttctccccccccccccccgttgatcacgtaaatttttgaaaattcgacgaaaatgattaaaaggtgacatgaagttggcaccaggacctgcagcatcagctg

SEQ ID NO: 20519 - DNA, 1298 bp, Heterodera glycines
cgttgttcatacgatttgacaatctgaaaaagtgatcgagaattaaacttttcccaagaaagatcaaattagagcgatctatcaactcaaaagtcgaggcccaagactctcgcaaatcactaattgacggaagcaattgctttttgatttattgcccctcaaaccgaaatttcaaggcattttcattaataaatgttcagcttaatacccaaaaattctcacaaagtacaaggaatgtagaagtgatagatttggtatttttaatttttggggatattaaattttagtttaaaaattaattaacatttttaattggtcgatgtccttaactgacctgttgaaattttaactcaatattttgtagaattttctgctgtcttttggcgagaaagtgatcaaaaatggaggaagaaactcggagaatggaccaacggaaatcgaaacgaaaagcattggccaattcggaaagaagctcagggggaagttgaattttgggaggaaagcgcatggcttaagcaattaaaaataattagttaattagagggaagttgaattttcgggggaaagcgcatggcttaaagcaattaatcgaaagcgaaggtccgttttgaaaatgccggttttgccctcatcagttggcaaaatgtactttttgttttatttaggttaaattaatggggaattaaatattcaaataggctttatgttgataatttgctttattactgatgtggattgagagtgagttttgcgctttcctcacttttcttattggtgctcattagaagagggcaatggaacacaaaaacggcaaaaatcaatgaataacaaatacaaatgtgcctaaatggcgttggttctcacagtcagaaaatggcacaaaatggaaaaataaaaacaaaattttaataaaaggatcgccgaggctccaaaatttttcggaagtcggaattccgaccccaaatacgttggaaaccggaagaattttatgaagttttctaaatattttaataggctaaattttaaaattcttaaccaagtataggtgagttcaaaaatgtttttggtatatttctgtttttgcacgataaaattattcaattcatcaaaatcttttttaatgtcattttacactgttgccctaggtgttctctattccgaaaatttttggcaaacgaagtttttttaaattttgcatgctaatagagaacacctagggctatcgaatgctacgaaattcattcaattcgaacaactatgaaaaaagttatgctccaaaaaccgcgcgggcgcccagt

SEQ ID NO: 20520 - DNA, 900 bp, Heterodera glycines
tgaaaagaagtgatgtaacgccttctgctgaaaagacactgtactactgtatttaatagtttttaattaataaaatttggaatttcggatattcaatgacgatttgatggagcatttaaatgctaaattcttcatggaaaaatttagggcaaataggcaataaatgtttatgttattacaaacgctgccattaaaaattgcggcggagcgctatcagttattgcggacctggctgattatacaaatacgacttagatatcacaaataagctccagtgatgtaacgccttctgctgaaaagaattgaactactgtatttaatagctttaatgaataaactttggaattattcggaaattcaaggacgacttgatggagcatttaaatgctaaattcttcatggaaaaatttagggcaaataggcaataaatgtttatgttattacaaacgctgccattaaaaattgcggcggagcgctatcagttattgctgacctggctgattatacaaatacgacttggatatcacaaataagctccagtgatgtaccgcggtctgttgaaaagaattgaactactgtatttgatagctttatgaataaaatttggaattattcggaaattcaaggacgacttgatggagcatttaaatgctaaattcttcatggaaaaatttagggcaaataggcaataaatgtttatgttattacaaacgctgccattaaaaattgcggcggagcgctatcagttattgctgacctggctgattatacaaatacgacttggatatcacaaataagctccaatgatgtaacgacttctgctgaaaagaattgaaatactgtatttaatagctttaatgaaataaactttggaattattcggaaatttaaggacgactt

SEQ ID NO: 20521 - DNA, 909 bp, Heterodera glycines
agcgctatcagttattgctgacctggctgattatacaaataggacttagatatcacaaataagctccagtgatgtaccgtcgtctgctgaaaagaagtgatgtaacgccttctgttgaaaagaattgaactactgtatttaatagtttataatgaataaaatttggaatttcggatattcaaggacgacttgatggagcatttaaatgctaaattcttcatggaaaaatttagggcaaataggcaataaatgtttatgttattacaaacgctgccattaaaaattgcggcggagcgctatcagttattgcggacctggctgattatacaaatacgacttagatatcacaaataagctccagtgatgtaccgtcgtctgctgaaaagaagtgatgtaacgccttctgctgaaaagaattgaactactgtatttaatagtttttaatgaataaaatttggaatttcggatattcaaagacgacttgatggagcatttaaatgctaaattcttcatggaaaaatttagggcaaataggcaataaatgtttatgttattacaaacgctgccattaaaaattgcggcggagcgctatcagttattgcggacctggctgattatacaaatacgacttagatatcacaaataagctccagtgatgtaacgccttctgctgaaaagaattgaactactgtatttaatagctttaatgaataaactttggaattattcggaaattcaaggacgacttgatggagcatttaaatgctaaattcttcatggaaaaatttagggcaaataggcaataaatgtttgttttattacaaacgctgccattaaaaattgcggtggaacgctatcagttattgcagacctggctgattatacaaataggacttagatatcacaaat

SEQ ID NO: 20522 - DNA, 1290 bp, Heterodera glycines
ttcatctctgagactcaattctcaggctttccatcactggaactcaaatctctggcattccagacactgggactcaacccaccagcatttcaatctctgggactcaattctgcggcattctaaacattgggactcagcccaccaactttcaatgacattccaatcactgaaaatcaggccaccagcattccaatactgggactcaattctccggcattccaatcgctgggactcaacccaccagcatttcaatctctgggactcaaatctctggcattccaaacactgggacttaacccaccaactttcaatggcattccaatctctgggactcaacccaccagcatttcaatctctgggactcaacacaccagcatttcaatctctgggactcaaatctgcggcattctaaacactgggactcagcccaacaactttcaatgacattccaatcactgggactcaacccaccagcagcatttcaatctctgagactcaacccaccagcatttcaatctctgggactcaacacaccagcatttcaatctctgggactcaaatctccggcattccagacactgggactcaacccaccagcatttcaatgtcattccaatctctgggactcaacccaccagcatttcaagctctgagactcaattctcaggctttccaatcgctgggactcaacccaccaacatttcaatctctgggactcaaatctccggcattccaaacactgggactcaacccaccaactttcattggcattccaatctctgggactcaacccaccagcatttcaatctctgggactcaacccaccagcatttcaatctcggtgactcaaatctccggcattccagacactgggactcaacccaccagcatttcaatctctgggactcaattctcaggctttccaatcactggaactcaaatctctggcattccagacactgggactcaacccaccagcatttcaagctctgagactcaattctcaggctttccaatcgctgggactcaacccaccaacatttcaatctctgggactcaaatctccggcattccaaacactgggactcaacccaccaactttcattggcattccaatctctgggactcaacccaccagcatttcaatctctgggactcaacccaccagcatttcaatctcggtgactcaaatctccggcattccagacactgggactcaacccaccagcatttcaatctctgggactcaattctcaggcttttcaatcactggaactcaaatctctggca

SEQ ID NO: 20523 - DNA, 1013 bp, Heterodera glycines
tttacgctttgctaaaaaattttattcaaaaaagtataactaatatttgtacatagttctagatttttttttttacatattttatatacatattttgagacttctcatataaaaaatttgtagccctattaataaataattaaactacagatatggaagcgagccactggcactccgccgccagcagtaatgctattaaatgagacaggaacaaacattgagccagatttgcccaggtcgtacaaatccaatcaaaattttatttcttttttcctcaatttagtgcctttctgtatattgaggaaggctcaggattaagtgagttttttaatgtcaatgtaaatcaacttttaattcaagattttaatgaaaaagtttttggagtttagaattaattgctttttactaaacaatttaattctttttttaatctattaaaattataattcattctattgtaattaaaatacagtttcgcgcaataatttgctggatgcagacacaaagccaaacgaatttcgaatgctaatttccgatccaattcattgcatgggaccttcgagcattgacctgaaatttaggcaagaaaaaaaattgaataaacaattcaataattaaatattgtttagaatatggtcaacaaaaggcataaaagtaatgttaaaacatttaaataaaaaataaaataaaaatgataaaaaaaagggacggactggtaaaacttttaataatggccgtgtttcttttttgaaaatttactcttttttgggtttacgcaatcttttttaattcaattattactatctatttttggttaatagaagactgtcaatttattttttaattttttcaatattagacaagttttgcccaaaataaagggcgtaggcagaggggggggggggggggtccttataattcattaaataatggaccgtatctcctcgatcatactcccccccccctctaatgtaaaccacccctctaatataacccccaccttcttgttgata

SEQ ID NO: 20524 - DNA, 1576 bp, Heterodera glycines
cccccccccccccccccttcacaattttggaaaaaaaaaataaaataatagggagcctcagaccttttgaaaattttttataaaaactgatgccaagctaatgtgataaaacaggttaattcttttcctttcagtatccctgcaaagtttggggcgcttctgataagtttcatgaaaaaaaagttaagcctaaactttttgtcctgtttaaaaaggaattaaaaatttttaaaaatttattcagtgtccgtttggggtactcaaacatttatggggagcaaaaatccaacgcagaattaaagtacaggctatagggaagctattcccgaaggattcggtctccccataaatctgggcgcatcggttcggggggactgccccgaaaacaaaaaaaatcgattttttcaagtgtccgtttggggtactcaaacaattatggggagcaaaaatccaacgcagaattaaagtacaggctatagggaagctattccggaaggattcggtctccccataaatctgggcgcatcggttcggggggactgccccgaaaccaaaaaaatcgattttttcaagtgtccgtttggggtactcaaacaattatggggagcaaaaatccaacgcagaattaaagtacaggctatagggaagctattcccgaaggattcggtctccccataaatctgggcgcatcggttcggggggactgccccgaaaacaaaaaaaatcgattttttcaagtgtccgtttggggtactcaaacaattatggggagcaaaaatccaacgcagaattaaagtacaggctatagggaagctattcccgaaggattcggtctccccataaatctgggcgcatcggttcggggggactgccccgaaaacaaaaaaatcgattttttcaagtgtccgtttggggtactcaaacaattatggggagcaaaaatccaacgcagaattaaagtacaggctatagggaagctattcccgaaggattcggtctccccataaatctgggcgcatcggttcagggggactgccccgaaaacccaaaaaaaaattttttggataaaaattatttaaatgaactgactagataatatttaaaataggttatttctcttcctttcagtatccctgcaaagtttggtgcgcttctgatcagtttctgaaaaaaaagttaagcctaaactttttggcctgtttaaaaaggaattaaaaatttttaaaaattttattcatctccctttttgatagaaaaagcatcagagtgcctaaactaacatgtaaataaaatttggtgcgtttcagaaccctttctgaaaaaatatttaagaattaattttgcaaaaaataaataaaaacgaaagactcagattttcgaaaatttttttgagccagctagctcggcgctcatttcagtgtaagttagtcctttaccggggagtatccctgcaaagtttggtacgcttctgctcaattagcaaaaaatatgagtgatcgaattttcactaaaaaagttaagcctacattttttggcatatttaaaaagcaattaaaaaatttttaaaatttaataa

SEQ ID NO: 20525 - DNA, 2236 bp, Heterodera glycines
  unsure (1)..(2236): unsure at all n locations
gccaattagtgctaatgagttttaattgtggcgtgaatgttaagattcaacttttcttttcagcgaatntatttaattgagtctataataattgagttcaattgcgacaaattcacaaattaaatgctntaatttaaaaatgttaccctttttggcagtttttttttcatatttgctatattttagcaccaaaatttggcaattgataaacattggtcactaatttcagcatcctcaagtgaaggccaaaggatcgacgttggacttgtccgatttgacctccgacccgttgttggcattccaacgaaagtggggcgccaaataattggcataataatgattaatttaaatttatttattttttacaattttaaacacttttttattttcattttcacaggttttacctccctttggtccttctgttctgctttctgttgcccgtggtaggtgtattcaaccaattttttcaaaacgatattattggggttttgaaaatggtcaaaacgtgtccccacgactcaatctcttggccaaaaaccaaatctagcaattttgatttgtgtgtttaaaattagaattatttataacggtaaatcttaattttttcacccacaatactcaattttcattccttttcagtttattcccgttttgttatggcatgaatcggcaagtgtggcattttacaccgcctcactgttccgctacacattcacattgcactcaacttggctgatcaacagtgtggcgcacatgtgagtgatgaaggccaatcaatgggctgatcaatagcagctacacactgatgaaactaatgatatagtcattttgatcagaggcatttgactgggtttctcgagaatttgtgccctgtgccatgagtttggtcagtcaaaaatgtgatttttaattccgttcagaacccgggagtaattttttctggctcagaaccgatcattaggtcaaataccctttgtactgctgataaatagagggatttttggattaagaaaatgtatatttattgattagtcgcgagaatttttttctttgctcttactgatcattagttggaaaatgtctacttcctctgatcattagctcactgatcatcgggggtttaagttccattctgatcaattgggatttctttcagtgttggctaccgcccctacgacgtttcgatcagttccaccgagtccgtgtggaccaccgttttggcgggcggagaaggcggccacaattaccaccacacattcccacaagactatcggacaagcgaaatgcgaacactgctcaacttcaccaaggcaccaaacaacagaaaattggcactatttacctttgccattcattttaggcattcatcgatttgtttgagaaaatcggatgggcctacgatttgcgaacggtcggcgaaaaatcagtcgaaagacaaaaggccaaacaattgggaaaaattcgaagggagctgaaggacgagtgaaaggagcctaatgagttgattttgaactctattttgtaaattatttttgtttctctaattaaaaaagagaatttcgccacaaaaaaagccgacattttaattaactctaaattttttgtacgaaaaatcgaaatcatttaagtttttttaaaaatccattaaaaggctttcgtctccctttttttcttttcattatcgttttttgaaattattaaactttcttttcccaccacttaaattgaatgtttaatctccgccaatggtcacaattgaaaagcgataaaagaaaatccttcggaacttttctttttttattaataattatttcaatgacaaatttccttttaaatatattttaaattatttaattatttatttttcttttcgatgtttttcctcccaattttattctctctgatttatttctcattttctgcggctgaaccaaaaaaattacgcaaattcgcagcaaaagaagtcaaatttggcgacgaaaacgttgacaaatttcattccggaaaatgctcatttttctgcttttttgttccacttgagacacaggtggacagacagagaaagggacgagagagtgtgatgaggagagaaatagagaaagagcgagagagaggaggggaagagagagagagaaatagagaaagaggggaagagagagagagaaatagagagagaggggaaaagagagagagagggtgtgggtgaggagattagagagaatgaacgagggag

SEQ ID NO: 20526 - DNA, 2410 bp, Heterodera glycines
cattaaatcgatcggtcaaataagttcattttttaaacaaaacccatcacagccccttgctcgtccatgaaatcgttcacactttttggcactaaaaataatttatttatttattaaatttgaattatgcccaaaattatgaactaaatgaaaggggggggggaggaaaagtgataaaagaaaatcctgaaaatttaagaaattttattcatttctttatacaaattggatgtttttatctgtcgaatggcgatgttttaaatttagtgtgagcaaaaggaaattacaatatgcatccgtggtaccgtaccggtatcgtacgtttcgattgcctggttgagcaacagcacagtgacggtagcattttctttggtcactttgcccatgattgtgatcgaatcgtggcttctgatcagcctctcaggcggcacttccatcacatagggaacggccaacgaacggttttcaaagttggggaaaacgcctttggttctgtccacggcgaatttgctgagcgttccttcttcgtaatcgccttcgacctgttgagaaagaagaaaaattttatgttcaaattgaaaaaaatgaaaatgcaactggtacaagaccagggttacccttgaaaatttcccgaaataagagcatcgctggtcaaaaataagattttagggtcaaaaataaggacattttttaaaacacgcttccaaaactttgaatcgcttttttattcaacaaaatcaagcattactcaccgccaactattttctgagcatttcggcttagaaatgagaaatttatacatttccgaaaatcaattataagattttaacaattttgtcgacgcatttttccgaaaaatttttgggtatgggtgagggaagagagttcggcggtgccgataggcgccgccgagggaaattttttaaaaatttaatgcaatttgttaacaagttctgtccaaaaaatgaccaaaatttgcgatcttgggctaatttttaagaaaaataggagttttggggggccggcggtgccgataggcgccgctgggggaaaattttaagaatttttaatgaattttgttaggaattagccaaatttttcagaaatttcctcttttaaatgaaaataagacactaccccaaatcagaacatttcttagaaatatgaacagatacacccctgctctaataggcgccgacagaaaaatttttgtaatttttaatgcgatttctcaacgattttgttcaaaaaatgacaaaattacgattttgagctaatttttttaagagaataagaaaccgccgagagaaaaatttgaatatttaactgaatcttgttaagattttgcatattaattcgcttcaaaaaacatttctttcaaaaattatcattaaaaatctaaatttctccctgaatccaaaaaataagatgaaaataaggacaaagagcttaaataaggacaaatcttacaaataaggacaaagggtaaccctggtttagaccggactgggacagttttgtctggccgatttagtctgagacaagtttagagcatcataactttttctttgttgaccaaatccaacaaattggcatatttgaaagctcttaacaagctcttttggctttccaaaaaacacaaagatataccgacaaataaaaaagttataagtaaaaatatgcaaaaatctgacttttgtgcagtattcatgttgcaacttttttataggtttttcaatcgcttagaaatagcttatcattagctctaaacaggtagggcttccgaatgatgccaaatttataaaatttggccagctgatgaaaaaagttatgattctttaaacttggctcagacgaaaccggccagactaaagtgtcccccacccgtttagacggcttgcttaaggcctaacaaacggatttacatggataataaatcctttatacaaatgcacttgttgactgcaaaaaaagacgtaaaattggaattttcgtatcggtacgattttttgatcgtacatggaaatgctgctgtaagcatacttttttcccattttccgcccatagataagatgacaaaagatatttgtacaaaaaattcagaataaaaaatggtgaattttatattattctttttaaattggtatttaaatattgaccatgcaattcaattcattgacaccgatttattttggatcgcccacactaagtttttttttcggaaaacttcttaaataaatccattctttttagtccgcttaaaattcattctctatgaacacataaatcgacattttatgagcaatggttgagaattagtccgtcgattttgacatgattcaccccttttcaataacataagcagcagaagcgagagaacagagaagcttggcaaagtgagcccaaaatt

SEQ ID NO: 20527 - DNA, 2678 bp, Heterodera glycines
  unsure (1)..(2678): unsure at all n locations
cggacctgagctcagattttggaaatcattgattttcgtttatgatttttcatcaactacatatattttttgattttttatattatttaaaaagtttaccaataaatttggggttaaaaataatctgagctctgattatgcattaaacttcagaaatcaaaggcgctagattttttgcatcactttatactatacatagcaaaagatcggtctgaataagtgaaacaaaagaagcaattgtaatttatagtacagcagtcaattcgaatccgaataaaatgtcgataaatataatactttttggaattttgacaaaacatgggcatattttctaatcaaatgagtaataaattaaaaaagcggaataaaaattgttttgataatggcactttcccatgtcattttcagagcgccaattatattttttatctaattcctagtcaagttattcttaagagtgcccataataatggaggcggccgttgcggaggagggagtgttagcggtgctgggggaggcgccgggtgtgaacaatcgcatcagttcattcatacggttgctcaacgcgttttgttcctccaaaaattgacgcgtttcctccggcagcacacgacgcacacaaatgctttaaaaacaagaaaataactatgaagttcgacattggaaaataaacatgggctgtatttttttgacaaaatccagccgaaaattaaattttaaattggtatctttaccccggtttcaatggctcccgattaagacgagtttgacgaatttcgacaaatgcgcgccgaacaatggaagcgtattcgcaccgagccatcagttgttcaaattttaaattttggtcaggatggatgtccatgaagttgtacaagtcctcgacagcctgaaatcaaattttccgttttttgtttgctatttttatttaaatttttcacataaaaattcattttcattcaccccatggaaaatgtcgccagaaattcggctgaatattgacgacagttcatcatcaccgcccattttggtgnnattattctgattttgggcagctccgcctgcgccaccgtccntgccgtttctcttccatcgcttttcggcccaccgttcggatacatcgccgcacataactcaccaattgggaactttcgggaaacggatacagatagttgagcatctaacaaaaagcaaaaatccatttagaaaggctgcaataagtatatgcacacccctacaaaaaaattaaaaatttttagtcgaaaataataggaaaaaataaattaaaaatccctttttaaaccaaaagttaataaaattcttaataaaatttacagtgtttttcactaaaagtgacaaacgtaccgcatatttttggttgatgaccaaacgctgcaaaaaaatacacaacaatttggacgtgtccttcactgtgtcggaaatttggttggtttgtccatcggcaacataaaaacgcgaataatactcgtggattgggtgcagcacagtcagaatgtcaacctaaaaagaaaacttttgtttacaaaaaaaaactatttaataaactttttcaatcctggtcggctcaacaattgcgtcagtgaatttggtgagacatttgcggaccaacgatgacaattgaccgccaggatcagaggcctggtatttcatgaccaatttcatcagcgccacaaaacacacattcggatttgtgaattcgcacagtcgaatcacaataatgttgagagaacggaatacctataaaaaatgattgaaacattaaaaaaaagccaaatcaattttaaaaaatcacctgtttgttaagtattttaagacgctgatcgctgaccaacgaaagaagtgaatcaatgaatgaacgcaaagtatccgtacttatccgttgcataatggtcatttcgttagtcagctaaaagggattgaattagtggcattgttatgaaatccgtttcatggcatttcactaacagtgctaagaaagttgcaaatggaacgcataaattcactaagctcctgctctttttggtccccttccttcactccgtccaattgttcaagatgttggcttcgaatgtgaaagatttgcgtgaccatctaaaaaaaataaaataaaattcccacttttcgaaaaaatgaaagaccgtcttaagaatgagttcggttctgtcaataatatactgccgtgttgtctggtcgttcatcagatgaagtaactgaaagggcgcagtcaaatttgtaaaatcccaaaaaaattttttttttttttttgaaattttacctgggctaacgcctcctcggcaatgttaagctgaagacaggaaatgttgtgcacagttcggtcaatgtgttccgcactttccagcgacgaaattgaagacactgactcactacgacgcgaaaaagtgctggttgggcgcacaactggtttctgaaaaaatcggaaaacattcaaccaattctcatggggaacgggtcacaaattcttggtattataaaaattggttagttattgcatttttttgacaattttagtaatatccattttaatgcgtaaagagtgggctatggttttctcatttcttttttattagatggcttcctctcattattctgaatcaaatcatacctccaaaaaatttgatttttttttaaaattttgg

SEQ ID NO: 20528 - DNA, 1264 bp, Heterodera glycines
tcgcccacttttggagggggccctttgaaatgttttgtcccaactgcagcggttgcgtggggtttgttcatttccctttctcgtctgttgtttccggcccaacaatgtattgtcatcatagtcgttttggaaaaatttttgggtccaattggaattttccagcaacattttgcgattgaagtgtcatcgtggtgttcaagttggatgagtacgaaacggctgaggaaagtccaccactgccaacaaaatgtgaccggcgcggggcacgcggattgccctcatcggtgttgtcattgagcattgaattgttggggaggacagcaaccgaacgacgacggctaaaaaataaagagcaaaaatgaaaattgtacgatttttcatttacccgctagcagaccgagccctttttgtcgcatttggatcgtccgcagttgagttgattgtttggttgagccgcgaagtggacgcatctctcttttttgccgagtcagcaacaggacgtgaagagggattcgcattggcaaagagctcaacacgatcctaaaacgaatttgaaaataataataattaaaaattgagggaaataggtaatacatttggtccatttggagagtctgtcaaagccttgtcacggttttcggcaatctaaaagtaaaataaaacaaaaattaattgaaaaaagtttatgaaaagaccttggccattttgttcgcatctttggccaattcaggcgaaatgaaacagcccaaggccttttccccaatgcatttcataatggcacccaaagcagcaaaagaggagtccctcacttcagagtcggcatcagagccatgctaaaaatgccaaaaaataggggtaaaacatgacaaaatgttgactttgctaagaatggccaccaaatccttcagcaaacccttgggaatgtctttggccgggagagaacggaacacgcggtagatgaacaaatccgtctgtgatttctgactcggattctgtttggaggtcatagcctcgagcaaggccttgcttaggtggtcgaaactctaaaaatattatttttattttttttaaatcatccatttcaatcgggttttttttatctatttttacggtatatgctgcgatgacatcgatgcattcgaccagcgcatctctgagcaactgtttcttttccttgaacttgtcgaaaatcaccgggacaaccaacaaaacgtgaggcgtgaatttggcacgcaatcccttggcaaaaaacatcacgcatttg

SEQ ID NO: 20529 - DNA, 1621 bp, Heterodera glycines
tggcttggttggtggccatggcatggccagagggacttttggaggaggacgaagaggaggtggacaacgcggtgggccatctcccggggaacaaatgctgctgggaatggtggtgatggaaatgcagggacggcttgaagttagcgttgttgttcaacagcattccaaggggcggaagaccgaacggactgaatggaaaacactgtaaaagccttccccgccccaaaaagtgctacttgtttcgctgcaactcctcacggaacagtgccaactgctgcaactgcttcgcaacccggggaatgatttcggcacggaattgtccgcccgatggcatcgaatagccgggcacaagcgactggacaaattgacggaagccgacccggtccagcagaaactcagtctggtccaccaacatcattgcggcgatctgtccgggaaatcattgaccgatcagtcgcccctccctttcccacttgatcactgatccgttcgctttgctgctgttccatcacttttgctcgtccccccgccaatgtttctgcgccggagaacgacggcggaggcattgcgggcgaagcagcggaagccgtcgttcttcgcccgttgacaccgctctttttgccccccgtcttcggcgtcgtctgctgacagtcgccacccaccgttgtgggtgatggcaccgcaccatgagggcaaaactcgtcgccaattgcgccctttgaatgataatacgtttatttatacaaaatgattggggactcctttgtgtcggtggcattggcttactgtacccttaatcgagatccaatcgtatcgttggcatttgcctacagtatcctctgccaccgtatgtatccccccatgttccatttattttcagtgttcctctgtaactcaccaccatcgctttccttcgtttggtcgccatgctaagcagcggtgcactcatcggcgacgttggcacttccgctgcgtcgcaactgtccgccattggcacatcgtctgccccccgcttgcccaccacgaccattgtcagggtcagtgactccgccctcctttttcgaccgctccattgaagtgggccgactcgttttgaaattctcaatctgaacaaaatgtaaatcttaaaatgacaatggcattttggtagtaaaaaaaggaaagggcatttccatgtttttgacctgctccaaaagttggcgttgttgtgccgtcgaattgggtgaagtcgaactgtcaaagaaagggacgattatcagaagcatttgattggtcgcttctcaccgcgtctctccgctgatcagtgcctcgacggaatgttttgatgaaacggcgccgccattcgtcgccggcggcggactttgaagtgcggtgaacgaactctccaaagccgcttggatggcctaaaatgggaaaaatgctaaattttgtacaatttcagaaagtccgtcgcacatcaatggacgcctccgagtgggggtcaatgccaatttgaagttgaagaagcactttctgacgttcgacggcatctgcgataagaaacgacgtgaaaggtaaaggcaaaaagaatgctaaccgtttttcagatttttcaatatcgcgcctgttgaagctgttgaaa

SEQ ID NO: 20530 - DNA, 903 bp, Heterodera glycines
gacgcgttggcgtcgctgctgcgtttggttgtgttgctgcgtgttcggcttcgtctcgccctcctcctcttcggtattattcgccaattggtgaagctgctcaaatccgtccaattcatttttgagaaaaaaggcatcgttctgacggacaaagaaaacattcattttaaaagctaaaaacggaaaaaatgagatgagaaatttagaggaattaatttgcgctcgaaaagcatcattaatattttttcaactccgacggtgccatggaaatgtccgacggagaaaatttttggaatttatgcgatttaaagtgatgattttttcttttctaaataaactcgaaaaatcctcattgacgcctcaaaaaaccataaaatgatgaaaaaacttattcaatataatttgaatgtttgcatatgcgcaaagaataaataaagctgagaattgctaacaggcgccgccgcttccattaaaatgtattggtattttttcgaaacttagctgacccttgaaacttagaaaaactgaaaacttgggattttgcgaattctaagagaatttggattgtgaaatgtcattttaattttggcattgtgtcggtcccttccgttcgcttccacctggtgctgcttcagttcgtcctcatccgtctccattttgttgtccgtctgcgcttgtggcggaggagagccctcgccgcctttcctctccgttcgtgccaattcatcctcctccgtctcccgctttatcgccgccatccgccgttgctgctgctgttgtgccatccctgccacgagcaatgcttggagtgccgaaggcgccattaagtcgccggaaaaggcattgttcagcaacggattggtggcacggagaagctgttggaggacggcgacttcagaagag

SEQ ID NO: 20531 - DNA, 1334 bp, Heterodera glycines
atgaaatccatttcacccagcggccttggggttcgtttttttttttccgggagtaagcaattttggaaatgttttgcattaaggggaattatccccatgggcgtcggggtcacacagaaagtaggatttgcatttacagcccacccaaacccgaaaacatataaatgccaatttttatttcgaataaaaaaaatttcaaaaattaaaaatgaatttcaaatgcgatcgctagggataaattataggcaagaaaagtggcataaatatgtaaatggaagtccaaatcagacgaatttttattatttcccacttagtcatttccggaggacaagaaacaacagcatgaaaggggacaaaacacaagacaaatgctgccgaattttgccatcaacgccgatcatttttgttatttttttccgaccgttggcctattacgcgaaactttgctgccgaattttgtcgtctcccccctcccccagcagtccattgcatttgcttttggtttggttgatgtgtcctttttcaacatacataaataaaataaattcaagaaaatcccctcctcctccgcgccgctcaatcccttcgtcaaatgtggacgccgacgacgccgacggagtgaaaagattccccccccccctcaaaatatatgcacaatgtgtgcttttactgtgctgtccgtcgtttgttgtgtgatgtgtagggttggcaaaaatatgcacataaaatcgcaaaatatgcgcataaaatatgcaccataaatcgtgaaatatgcacataaaaagtgaaaaatatgcacataaaattttccaattgagggtgtaatttctcaaaatttcttcaaatttgttaaacataaagtaaaatcttcaaaaatggctaaatgtggtattaaaaatcattttaggagaaaaaaacacgatacagcttaaaatttactcattttagcgaaaaatcaacctgaaaagcaaaattttgcttatttttgacataaattaaccattttttgagaaaatttatttattcaatatttttcgtgaaaattttgctaaaaaattatttttttggaaaattttccgggttttgaggtcaaaaaggccaatttgtctgttgggggccgatctattagaggttttttggaaaaacgccaaaatatgcacataaaatatgcacgaaatgccaaaatatgcacaaatatgcaaatatgcacataaatcgcgaaatatgcacaaatatgcaaaatatgcatatggaaagtcatcctagaaaattttgaccaaaaaaaaaagttgaaaaaattttcaaaatgtccctcttctaatagcgccgaattt

SEQ ID NO: 20532 - DNA, 839 bp, Heterodera glycines
cgtaaaaatttaaaaagttaattcaacaacgaaggggggaaaggttgaaaatttatgaaattttgaacaattttcttaatattaattaattaaaaattccgaaaaacttttggtcggcacctatcggcaccacggtcccccaaaactccaatttttttttttgcaaaaaattgtcccaaaattgcaaaaattattattttttaggataaatctgttagggcatcgccgggaaaaattgatatttgaatacaataaatacattgtcagatttgtccaaaaatgaccaatttttgcaattttttgagccagtttttttaagaaaattaaggattttaaggatccggcggtgccgataggcgccgccgtgaaaatttttgaaattttggctatatatttagcagattttgaataaaaattattaattttgccaaaaaaaactcaattcataccagtgcatttttactcacgtttttttagtatcaaaatatgaacattttacaacattttttcaaacatttgggaccaaaagatcaaaaaaattttgcgtcagactttaaaatttcttgataaaatagttacattatgcaataaaattttaaaattataaatatatttaagaaatcggaataatttttgtcgctacctcaaaattataaattctcataaataagagcaatgtaaacctggtttaaaggccagcttctaacgaaatcagatcattaaagtgaaaaaggaagatttacgagaatctaaaaagaaaaattggttttttgggttaaaataaaatttggtcattcccccgatcggggtccccgacccccgacaattgagctcctccc

SEQ ID NO: 20533 - DNA, 1268 bp, Heterodera glycines
  unsure (1)..(1268): unsure at all n locations
aattcgtcagttggacaacggcggctttttcatcgcccgtcgcgtcactttcggcactttgcaggaattagtccaacattacagcgaggaggccggtccgcaagggcacgattcattttggtcgaaaattcgcattntaagacggactttgtgtgactttgacaaagccggcgatgaaagtggaggtctgtaattcttctgggagttccaatttcgcactttgtttagacgccaatgaccagcactttcacccacgacgaccaatgggaaatcgaccggcgaagtctccgattggtgcgccaagtgggcgcaggacaattcggcgaggtccgatcataaaaccaattcgtaaatgaagcaacatcaaaggtgtgggaggcgcggtggaaccattcgatgcccgtggcagtcaaaaaggtgccaaaggcaatcgaatgccaccaatgcgctccctcttccattttaagctgaagcccggctccaccgcttgtgtcgcggattttcttgcagaggcaatgcccagcaaattcttttatatcagcaaaaggtcgcttttaggctcaactgatgaaacgtctgcgacacccaaaactgcttcagctttacgcggtgtgcactcgggaagagccatttttaatagtgacggaattaatgcagggtaagcaattaggggggggggggggtagaccggctcatagaccggtccaattcccaatggtatccaaatccaaagccacaaacatcgcttaatccaaaatcccatgacaatccctggggaggagaagcagagaagggagcatcgttcgcattcagagaatctgctgcactttctgcacggccatggccgagtgtgtaacgtcgcgcaggttgaagaagcgaaggacgcccttttcacttttctttttcagttggtcgacgtcgccgtgcaaatcgcctctggcatgcgttatttggaggtgccaaagcgaaagtgtttaaatttccaaaaattcgcaggagaaaaatttcattcaccgtgacctcgctgcgcgaaacattctcatctctcacccttcggtggtcaaaattgcggacttcggacttgctcggcttatccgcgagaacgaatacgaagcgcgagtgagcgcccgttttccgattaaagtcggcgccctttccctcactttttactttggacattcagtggacggcgcctgaggcggctaattacaacaaattcactgttaaatctgacgtttggtccttcggcattctgctcaccgaattgg

SEQ ID NO: 20534 - DNA, 2270 bp, Heterodera glycines
  unsure (1)..(2270): unsure at all n locations
cttttttttttttcttttttttttttttttttttttttttttattattttttaaaaaaaaaaaaaaaaaaaaaaaaaaaaaaagggcatataaaaaaaaaaaaaaaaaaaaaaaaacccttttttttttttttttttcccaaccgggaaaaaaggaaattattaaaaaataaancccaaaatttttttcaataacttttttgttttttgtaccttttgcgggcgctttttttttgaaaattttaggaaatttctttggcccntggtacaaaatccgaaaacccacccaccccctgcccactatgggtcaggttacgggagggggggggggtgtgcnaacgagtnngagtngggaaatgtcnaacgttcgncntatttatcannttaatcanncnanccaaaaatctgggcaaacttataaaaaaaaatttcnaatatttctggcggcatttcagcgtttccaaaaaaatttatgtcaganaatgactttttcaggggcgaaatgaccaaaaatgtccgactcgcaaccctaacaaatgatttaaccattcgtgccaattccttttcatttcctcctttctttgctttcacattgcaaattgcttcaaatgccttcgctccgccgtcggcgtcgaaatggtcaaaaaatgccttttttgacttttgggattaaacgggcgatcatttgcaaccgaagtgcgactgacccatcccttcgaaggatggccgtgtgattcgaacttcggggggagcgatggcggcggtgggaaagggaggcaaatggggcacaggggccaaagggtggtgggcctgatgagccatcggactgaaaaggcaagtgaaaatgagaggggggggggcaatcacctgacggaaatggtcacccgactgattggcttcgcagtgcccccgccgttcgactgaaagggctgcatcgaagtggaccgagtcatgaaggggctaagagaaacttagaaacggggaaaacaatggcaccttccgggaggggtcgtaaatggggatgaaagtgccgcaggcgatttggcacggacaccggcgatacaatcccccaggtgattctgcaagagatcacagaccaaaagggactccgccacctgtgaaaacgtaaagttgaccggacgcagaagacccacagacaaaaggccaactaataaaagactaacagacaaaagaccaactgataaaagaccgacagacaaaagtaacatttttatttatatttttaatgtattaatttgaattttatccatgtgcggaaaatgttttttgacaagcaaatcattataagttaaccgctatggactaagttgaaaatgggaaatttgccaaagttaaataaatgtttggcagcttttatcgcttcacaaaagggcggtattaaattggagttttgtaatgtaattttcatgaagatggattgtggccagaagccaaattatataatcgcgcaaagcaaataattgaataataagctctctatttcagtttacacgaccacgaaaaaagacacgaccatgtaatattttggtaaattcatgcaccataactttttctagaagcacccaaattaaacattcttgataccatttgatagccctaagtgtcctctatttttttgtaaaatttcaaaaaatttcgttgagtttcaatcaagttgtggtcaattaatttttgaaatttataagccacaattttttgaaacataaccatattttttgaaattttaaaggcaaatagagggcacttagggctatcaaataataccaagaatatgtaatttggatgcttctacaaaaagttatggcactgatcaaaaattgatcattttatagtgatcaattctcaactaagttatctttttatgtaaaagtcgtagtcccattattcaaaaggcaaatcagtagagaattttgtgctcttcccagtgggcttgcccattttctctataaaatatttcacaacacactacgtatcttatattttcacgagtttatacagtatattaagttgccttggattttttataatgaatagatatcgcaataacaaaatatgatattattcataaactctacatacaaaaaaattatcttttatctttctttttcagtatgtcaatactcgattataaagcaatatacatacatatattctaaaaaaaaatgaacgtgagcgagtaaacgaaagatttactctttttttactgctataaaagtatacaattattggatattgactctttataataaa

SEQ ID NO: 20535 - DNA, 1544 bp, Heterodera glycines
  unsure (1)..(1544): unsure at all n locations
aaagctcaggtcccggtcccggtcccggtagggcaaccgggaaccgggaaaaacaagcactggtaagaatggggggtctgagtgaaaaattagtgaagaaaattggagtcaaagggaaaaataaaaaataataattaatatattctttaaaagtaaaactcctaagtgtgcaaatggcctagtggctagtctccttgactttccttgcttctttcccctggttcaatccctctacagaaattagattattttcaatttttttttgtatactcgtgggttttcctatcaagaaaatatcattcctcatatattttaattgatatatatattttattatttttttaaatgaaaatccatacaaattgagcctaataatcccaaaaaagaagccatttttgttgaaaatctgttaacaaatctcactcaaattttcaaaattttccccggcggcgcctatcggcaccgccggaccccccttctttcccaaaagttttctggaaaaagcgcgccgaaaaaaatggtgtgataagtaaatctaaatttcaaataatattcgaccatttagtccaaaaaatgatttttgaaataattgaagaaaatttgtttgaaaattttcattaatttaatttgctttattttgggttttattaaataaaaaaccaaataattttgtattattttcacttgaaataaattaaaatttgaatttttttttaaatttttaaaatttttttgaatttttaaaatttcccggttggtcccggttcccggtttttcttgcggtcccggtcccgaagaaaaatcgaggtcccggtcccggcttctcaggtcccggcaagtcccggtcccggttttgcccaaaattcccggtcccgtggcactctactttgaaaaaaataattgcgtataaaattgtcattttccaatttcaacagataagtagcataccattggatagcattttttatgggctttccaatgataccatatttgcatttgtgacataaacatttatttgatttattttaccatattcacaatttgatcaaaattagagtgccacgggaccgggaccgggaccgggccgggaattcccggtcatccgaggtcccggtcccggttcccggtcccgggttttgaaaagctcaggtcccggtcccggtcccggtagggcaaccgggaaccgggaaaaacaagcactggtaagaatggggggtctgagtgaaaaattagtgaagaaaattggagtcaaagggaaaaataaaaaataataattaatatattctttaaaagtaaaactcctaagtgtgcaaatggcctagtggctagtctccttgactttccttgcttctttcccctggttcaatccctctacagaaattagattattttcaatttttttttgtatanctcgtgngttttcctatcaagaaaatatcattcctcatatattttaattgatatatatattttattatttttttaaatgaaatccatacaaattgagcctaataatcccaaaaagaaggccattttttgtgaaa

SEQ ID NO: 20536 - DNA, 3495 bp, Heterodera glycines
  unsure (1)..(3495): unsure at all n locations
gtgtgaacacnncgcgctgcaagcggagtgccanttgcaacaccttttttcaccgatatccgacgcagcgagtcgcggctgagcatgggactgagcccggatcagtattgtctgaacgtgcgcgacattgacgaggtgtggaaaataaaactgagatggcattggcatcctcgaatgcaaatggacatttttggatattcattggatgtgtcctaggcgtcaaaagggggtgggtacggtagatgggtacaaataccgtaactgatcgaaataacggcaattatttttttaacatacgcattacatagatagaaaagggtctatatttatatactgtaaattcattatgcaccaaaaaaggtaattaattttctgatccccgcccccttttttcacagtgcgctctcggccttcacaactgttccacctatgccacgtgcaccaatttgccggatggtcggtttttggtctaaaaaatgcatttttatttttttgcaatttcattttgcaggttacacatgccaatgcccggccgggtgggaagacggcaatcccgaactgccggtgggtggggatggctaattaattgaatattgggctgtgcgagtttttccaaaatgggggaagggttcaagtgtttttcaaaatccaacaaaatctcggcaaatctcgactgttatatatatatatatatatattccttttaaagggtcgcatttgtgccagtaaattgtgcgctcagtgcagtgaacacggcgtaagtgatcaatgggtgctttgtcagacttttctctgatgcttttcctcgtttcgatttgttattttgactgatcaatcacagtactgattgggttaattgttccaatgccccgctacttcagtcttgcatccccgacccagccaacagcaccaacgtggtctgccaatgctttgacggatacgccggcacattctgcgaaatcgcgccctccgcgttgccgctggtgttggccatcattctggcactgcttttcctcctcctcgccctgtggtcagtttggtcaatcacccaaaagggaggaaatgccgggcctttccttggattgtcaccaaaactattcaaaatgatcggaaaaaatgtctaatctgtctaacgaactcacgaacttaatttcgattaaactcttaaattttccaatctccaagatttaaaatcccccctttcaattttttatctttccatcacaacactcatttgagtcaacaatttttttttactaatttgctaattagtaaatcagtttaatcaattgcgctgatttgtgagatatcttttgactaccaattgaccgctttttcccttccgttcgccccttttccgtcccaacttttgtctgtctctcctttgacgtcattcaaaacacatctgctgcagtgtctcggcattatttatttgtttacgtaaatcccggcaaaaaaaagcatttctcgtctctccaatcccctaaataatgcaaatccccgtccgattggtctcccccccccactccaactgggactcttcccctgggaatgaattcccaaaacggcaaaagtgtgccatcacatccaatttggccttgcctcttcgcttttcgtgctatgtccgaccgcctccacctgggtcgacagatttttttcaatacattttttatttatttttctccttttaggggaaaagggtagaggtgcgctattagagtccgaatccgagcctgaaccgtatacggatttttacggacccgtagtccgtatttttcggccgatacgggtttttacaggctatgggttttacgggttttatcccgtaagtccgtaccccgtgtgggtgcaccccaaatctacagccgacgaaatctcgacgcagaaatttccaaaaacaggacagtcagatctaaaatgaaagtgccgggggaaggaacggacggacaaatgagctaaacaaataaaggaacgcacgcgacgtgcttttcatggacaagccacgggggaagcacaaagccaatggcaattccgagctagaggtgacaattgttgtcaatcaaatgccaaaaacatttgcctgattcccaaaaacaccggcagcacaagcggtggaaaccttaaaatcccaaataaaacccaagtgggaaaaggacaatggaaggacttgttcaggtccaaaccaaaccgccgcaagcctcgggggaattccaagaataacactggggaagaacgacgatctgaattaaaagggcaattagcgatgggttgggatgaacttcgatttaactgtttgggcaataaatgtaagccaaaatcgatcgaaaagggaggtaattagtggcaatgacatcttggtagtgcccggggctgtggagagcattttcaaccaggcgccgaaactattgccgaaggcaccgatcagaatggacttccgaaggccaaatttctcaagaaaccaacttaacaaaaaatattctttagctgtccttcgttcaaacggaccttccggggaacatcagcaccatgtaagtgagcatgtaaaccatcgaagtccaatcgacggcggaataagaaacaccgtaataggcggagataatgtgggcgatgatactgcagcggttggagaaagggttgtaggacaaaacgcatgtgcgattgttggttgggtctcacctgtattcgatccattgcatggcatttgaggctgaaagcatgacgaacctgtcacccccacacgtcagtttcagtccagcggcggcggcggtgccaaagcgagcacttccgtgaacatcaatcgaagcggcgatgtcgtcggaggcgaacgacgacgcgtagatgagcgggagcgagacgaaagtgtcgcggagtttgccaactcgcgcggcgctggcgcatggggtggcacgtcgacggcaacaaacgctggtggtggcactcaactggacgacctccatcatccccagcaccaccaacgacggcacggcggacgaaacggtgcgaacggaggcgaaaggcataaccgcgcatttgccatggtcggagaggtgggaggggaagggacctggggagaggggcaaattgcgattgggtgactgatcagtttttgacgcaggaggagcgatcattgggcggcgaattgtcggcggatgacttgagcatctacgacaagaacaccatggtgggtgtagcgggtggtgaacttttcattcattccacccctcccaagccatttctcctcgtatttaaaattttatttaaaaaacaatttgggaaaattttgagcttggcgttatttgttgaaagaatcattaactgaccggggattcccggctttcagttttaatctcaaaaaaacttttttctgtattactccaatacaaaagtccgagacagttcctgaattaacccgttttcattatttaaattatcgataattggctggccaagagggaacagtcactactgatcagttatcatatcataaaattatca

SEQ ID NO: 20537 - DNA, 2668 bp, Heterodera glycines
  unsure (1)..(2668): unsure at all n locations
aaaacttcaatcaagaatgatgtcaaaacatcaaagttttagggcatttgagnccaaaatcagataanngggattttntaagnaatttgcntaaaaatgatcaaatacgggttacggttcggtaccctcgaaatcaaatcatnttatccaaatnttgtgggataattctttctttttctctcagaatatgatgcacatgttcaaaaacatggccaacgaccgtaccggtctgctgatggtggaggactgcgtggacgtactgtcggaggcggtcagtgaaaaataattaatcggataaataattaccaaattaatgaacgatgggtataaatgaccctaatattgaatgaatgagtttgggaagcctttattgaaaaactgtggggcgggcaggctttgaaccgcgtaaaaatgtttatcagtttaattaccggcactgtgtcaattgtcgctcaattaatccattatcttcctctcggagaagcttcttctctatctcatgtccatttaagcccgacaatgtctcttcggccataattttgctcggccaacgccatggactgctcaatgatttgaccattccgataattaaaaaggccggcggaacggaacaaaacagagggtttagcaaagttggaaacatttgaatgttttaatttcagttttcctccgctgctccaaggagcgactggctttggcactttcaaacaaagagccgacgatttggcatttcatgcttaagacggggtcaagaaggagaagcagcgacgaaactgttaacataaaaaataattccaaataatttgcattttttaatttataaaaatttatttatttgtgacaattaaataaacattaattcttcgatttgcttttgtcaatctttcaaaagtgataataaattattacgcgcagagttctttttccgtttctcatcggtgcaacggacgaatgttggcctttacgtttttctcctcaccttcttcggccgaatacggcggaatttgaatgggcggaagttggccagacgggtccaacatttctgaatgaggctaagtggccggtggtgaattgggcagcccaaaatgggctaattatgtccgatcggtgtttaccttgagggttgaagttgccctttgatgcgccgtaattgccgcccgacgcacctccgcccatattcgaaccataacctgtttgtattttcttagttaatttgggtaaggataggctttgctgcacctcctccgcctccaaatccgcccatgccgccgtccatccctccgccttccattggcattccgccgcccccgcccattcccatgccgccgcccccaccgcccatggcgataccgcccccgccgcccattccaccaccttcaaatgcacaccagccggacgacgaattgccttaaaattaaaatcggacgaacggattgaaccgatataaagcctttgccacttaccgtatcccattccgccgcccccagtcatgtctccgcctcccatcattccgccacctccgctcatcattccgccgcccattccgctcatatctccgccgccgccgcccatactcatcgacccgcccatatcaccgccacctccgcccatcattccaccaccgcccatcgctgaaagtcaatcaaatgccaaactcaaactgtgctaattaccgccgtcgggcattccgccgccgctttccatcccaccgccgccccattggcacagtactgacttggcaaggaccaaaaggacggacagatggacactggtgagagaagaggagcacatcggaagggaagtcaatctgagtgaaacggaggtactaatggagcgaatgaatgaaagaataatcggagacggagggacgaccaattacataaatagcagaactgtccattcattcatttctcaactcaatttgaaagtgttggaccgatcggacagaaaaaaacccggaaacagagcaaacaaagaaacatttgcgagacatatttagggatgaaagaaaatggggcgggggaattggtcggactgatcggagacgaaaatgggggaggggaaatcgcaaatgggacacatttggactgaaatgaaaaaataaagtaaattgagcaacggaagaggggaaaattgggaatgagaagcgggtgggagggatggtcaacactcacaaatcagcacactcatccaataatatattgaaaaacccagctccattttatattttcaacatttgagcaaatctgaggaatcggttgattggtaaaagagaatttcaatcagaagcctaaatatgtaagaaaatttggcgctacaaaaagtgattctttttgaaaaaaattttcaaatacttttccatcaattttagtttttatgtttttttttattcttttttaaaagatggttaaaatgttttagatattctttcattgatttcactaatctccgattcggcttccaactgtagatgaagtaaatatgaggtgaattttcgaaaaaagatgcgttgcaagcaaaatgtgagaaattaattattttttattaatatatttttaagtggcactctcgtaattgtaaataaatatttgaaaattttttcaaaaagttcaaaaagaaccactttaaagaacgcataatttttatgatttgcataatatttaagatt

SEQ ID NO: 20538 - DNA, 2759 bp, Heterodera glycines
cgtgatcgtatcgttcgaaaggcgcagtgacaaatgtccgaggaacgacgccggtggtgagcatcgtcagaacacaaatcaaaaatctaaacaaaaggctcggtgtacaagccacccgagagaaagtggcataaatattcgtgccgattcagcgacgtttcgacccattcgacgacgcgctgctgtgcggcttggcaagcccggtcaaacagcccaattgtgagttgttcgtccacatttcgcaaggcgttaaccgatccaatttcggtggtgggaccgggcgaatttgccgacaaggcattatttgtcgtaacaaatcgaagtgtttcgctggagagaagcggcctcctgcgcagtttttcctcagcgcttaaccaaatgccaatccgtcggttttcctccgtccgtttcttcagaatttgctgtagctccctccgagcagcttgaaaaatatcgggcgtcctttgctcttcccgaacaatttttagcaaaataggagacgattttgccgaaatatcagacggatattttcgtttccttgaattgttgacaaactaaaatcgtaaaataaataataaaagttctcctgtaatttaaacaaactcgttgatctccgccgttgcaaataattcgattgttgtcgtgattttgctctttctcttcctctttttgctgccgtttaatttcaattctaaaaaaacggcccccgtcttcgtctccgataaatctgacgagtccgtcgatggtcggtggctcgcccatcgccgcaaaatttgaggctgacagacatccggcactgcttgtcgttgggtcgcaaagttgttcaaagaaatgccacggtttcgaggaagaaagtttgttgagtgtaagaaaagttgtggcttcggaagcattcattggctgtgccctatcggaggaaatgagtcgcggaaattggcaactgatggaagggatgacaagcggagaaaccacaggccgaggctcaaaaaggttcgggtggttgcagcacttgcgcagctggatgataatgccaagcacggaaagcatgttgccggacttgaggttgtccattgtcctgcaaaaaataacgaaccgttttctgatttaaaaacatttggttgtttttatttcccttacgttcgccttgacagaaattcgttgtataaaaagcgctgtctttttgacaatggacagggaatgatcttctccgtcttggtcggcaattgcttttccacttccgacttcagtcgcctcagaatgaacgggcgaagtatctgatgtttatgaggcgattaattctcgattatttgaaaagcgaactttgtgcaagcattggaccaacgcctggtccacttcggacgtcccttcgaccatgtcagtgatgggcgagtgaaaccattctttgaagtcgtcgtgtgaagcgaacacatgcggcatcagaaaatggagcaacgcccaaagttccatcaacgaattctgcaagggagttcctaaaggaaaaatggacgggaaaagggggaaaatatacggccattgagaggggggggggggggagggatctccaaaacaaacccaggataattacgaaatataagaaaaattcttctaaatcaaaaaaagattggtaaaatttcttatttggtagatttttttaaatccttttaactttgttacggcagtttttgggctgaaaatacttaaaaacgaccatttttggcatattcaaaaaaattgtctcgtgtctcgagagaagtcctggtctttttatggttcgagttttgggtaacattcggtttcactatgccttacccgtcagcagtaaccttcgacgcgactgaattctgagcagcgtttgccagcgctgacttttgaaatttttgatgttctgcgcctcgtccaaaatcaaatattgccaggccttctttttgaacgcgcgaatgtcttgggtagccaatttataagaagtgatgcaaacgtggaaagcattgcttttggaccagccctaaaaacaaataaaatgggcaaattaaaaaggcaccgccgcacctttcgtttctcggctctttcctttgctgtaccgaaatatgtcagcactttcaatgcggggcaccactttttcagctccatttcccaattcaaaatgacagaggttggcacgatgatcagatgaggaccccaaacggcacggtcacaagccaaatgggcgagcagagcaatggtctgaaatgggtgagaggaaacaacgaaatggcgaataagaaaaagtagataatggatcgagaagtaatatttacttgaattgtcttcccaaggcccatttcgtccgccaaaattccgttcagatttttctcgtacagagtgactagccaatcgagtccgacgagctgatactcgcggaggtcgcctcgaatcagaaagggaacttcagtttttacctaaattggaattcgctttaatttggaatttaaacttttcccgacttccgtggtctcgagtgtgttgcccttcggctgaaattccaacgcggccactgcgatgttgtccaactgtttgcgccgaacttcgctgttgtccgagcggagtccagcatagtccacgttgttcaggtcgggcttctcctcgcccgtccgttgcgcttctgtccgatcatccgagctttccaagtgactgctaacagtcatttcgcattcgtccgccacagattgtgaaggaggcggtattttatagcccaagactccaataccactaggcaactgaat

SEQ ID NO: 20539 - DNA, 1331 bp, Heterodera glycines
  unsure (1)..(1331): unsure at all n locations
aatctctaatgacctctaatcatcgtaaaaaatagtcccaagatgcgggaaaatcaacggtttttgaacgggttaactcacgaacaaaaagtcttgggaaattgtcacggcgctcaattcaaaaaccagttttttcgcacgtcgggagtgtttttattagggttaagccctgagccttcggggggcaaaatgtcgggggccgtggaccatcgggtgggcacatgtcgggggtcgggtcggggggagctcaattgtcgcgggccggggaccccgatcgggtagtgatcaataaaaaattttaaagaaaaaaccaatttttatttttaaatgctcgtaaatcttcctttttttctttaatcatctgattcaaattcgtacgttggcgccagtaaaagtgcgtccaagttggcctttataacatacagtcatggtcatatgttatctacacccccatcttattttatttttgtcgtcatactataagtttcggttaaacccttccaataagacccgaattcgaacaaaaagtcgaataaaatggccgacaaaactactattaatcttattcttcaacgacttgaagcgattgaacgtaaagtcaacaacaacaacaatgccgttccagcgcagttgaatgaacaactgcaaagcattgttgaccgtttgtgtgacatcgagcggaaaactgacaccgcaaacaacacaactgcaacgcgacggactcagaggacaaagagcggaagcgcagtcttgtactgatctaccttccagaatcaaccaaggaaaagccgatagaacgggccaaagaagacgccgacatggtgtccgacgttttggacgctttggatgtagaagtgtgcccacagatggtctaccggatggggcgccggaatgatgacaagcggaggggccctcgcctggtcaaagttgtgcttccggcgagcacctttcaacgcttcgctttggcacaatggggacgacgccgaaatgtactccgcgcaaaaaacgaggagtgggatcggctgcttgttcgaccgtcgttgacaaaagaggaacaaaaggcggaacatgaggcgcgtgtcaagaaaagggaggagtacgaacaaaaacngggatggagtgacaattcacggacaaaaaaacaattgaggtcacaaaattttgtcaattttttatatttcaaattcagaagtttagtaaataagttagatgatttaaaaaattgacttatagaaaacaaatataaaattattgctatctncgagacttggttgagcaataagttagataattcgcttatagntccaaattttttcctacacaattgtacg

SEQ ID NO: 20540 - DNA, 1069 bp, Heterodera glycines
aaaaatttttagaaaaacctttttttatttttcccttgatggttttgagccttcaaacaaattagttatcccaccgacaagggggggaaatttttttgattcttttattttcaaaataatccacaattaatatcaaaatgtgctgttggccctccctttaacaattagtgatcataacagtatttcgtgtgaaattaagctaaaaacttataagaaaattctaaaaaaggtttcgattttcgtagagctaattatttagcgattaactcagttctttcttcgattaactggaattttttcttttcagattgcactgagattgactcaatgtttcataaaattaatcaatttttgttgtttttaattagagaatatgtcccattagtccaaagcaattttgagcccaaattgcctgaacacattcagaaattaattaattatcgaaaattactttggaaagacattaaaaaagaaagaataagggaaaaatatattggaatttctaagaaaattattcaaaggttgcttttaccgataaggataaatctgacgccttggctaaacaattcttctcagttttcactagtcaaaacattgaacccgaacccactggttccaaaaatctctggaaaaaagtatggatttttttactataacacatgctgaaatttatttttcattatgtaaacttaaggataaaaacaatacttctattgacggtataccaagaattcttttgaaaaactgcaaagaaactttaatagccccattatttcaccttttctgtttttcattaatgtgtggcaaaattcctacaatatggaaaaaatcgattgtttgtccaatcccaaaaattccgaatcctgctaatcccattgattttcgtccaatttctttgctctgtacaatgtcaaaaattttagaagaaaatatagctcgaaaaataagagattttgttgaaacctaataatattttacctaaatgtcagcatgggttccgtaaaaatcgatcagttaccactcaactattagaagtagttgatgattttagcaaagctttagaagaaaa

SEQ ID NO: 20541 - DNA, 1552 bp, Heterodera glycines
tttaatacgctaaaaatgtgcattaatagtttgtgttattttatataaattatgaaataatcatttttaaaagaattaaatgataatttctcgagatgtcaattaattaaagtataaagtaataagaacctataaaaatcaaattaattttaacaatcattttcgctttcgcgacaattttactaattaattaaatgcccaatcaattaacaataaaacaatattttttgtttcttttatttgtaatttgtttattcgttctttcgcatttcatctgatcatttggataatgtgcttgctgattgccaccatttgctcgtaattttgttccaccattttcctgctgatcatttttagtgccgttttattgtccattttggcaatgaatggaattgtgcggaaagtgaatcgaagtcggtctgtcgccgcgctgaaatcgtccgactttttgccgcttatctgtcgcttcgccaaacaaagttcaacaaattcggacacctgcaaatgctccaattaattgcataattggccaattaaatatttctcgcctgaaggtatttctccgcccattggcgcccgctcgggcgatcacttccaaatatttggtccatcaatttgaaaagtttgcgcccattgggccgacggagtgctctgaactcggcacattcggcgaagaatttctccggagattttgccaattttcttccgtttggcccttttacaaagacgagatcaaacagtggcacgttctgacaaaagacattaattagagtcacaaatgccggtttcattgtgccattcactcacaattcgtccttggcccacgcaatttttgtgccttttccaatcgccgccacagcgccaacaaaatttgtgtgaaaaggtgctaggtcgatccctaattaaatttaattatacaaatcggtgtcaatgaatttaattatacgataattttataaattaaaaaagaacatataaaattcaaatttttgttcaaaattttttgcacaaatatcttttgtcatctatgggaggaaaatgaaaaaaaggtaaacaaaaattaacagcattcattgacaccgattttataaattcatttccgatcacatccctttcctccaacttttctcggtgacatcctttctgatgatatgcaccgggtggacaaatgccgttgatccgttcattgtccggttggcattggagaatgctgttgccgcaagggagaagaccgttcaggtcgtcgtccaatggcacaaagtccgccaaattcgctttgatcgtgccgacttcgccggtttgatgctttcccttcacaacgctacgccgatttacgcgcttaataaaaaatgaaattaatatatgtccaatcgatcggcaaaaattaattaattcttctttccgtaattaatttgcctttttcctgctttggctcttgttccgatttcggttttattggccgtgtcttttcccacatggattactaccgtttcatttagtcactttctttattttcccatcaattagttcgtacttttgtttcggccattgg

SEQ ID NO: 20542 - DNA, 1641 bp, Heterodera glycines
  unsure (1)..(1641): unsure at all n locations
tcaaaaagaaaaatatncgatgaagggaagcaaagcgccaagactttttgaattactatttcctctgatgtccattatcccatcccccgattcttcaagtgtatccgagtatataaagccgaccaaatccctttccagtcatatccttcatccctttcattccatttgtttgataaattttgttttttcagttcatttctgttaaattttctgtgcttaccaattcaaaaatgtcggacaatccgaaagaagcggagaaagaaatggaaaaagcaatgtaaataattaatctaaatttgattttctaaggtcattttgcttttcccttttcagcttcatctctgccgactgttggttgggagtgttcgatttgcttccgccatctcaacttggcctcggaattgcgatgatcagtcaccgatttgactatttcgttgatgaacatttcaaaactcgcaaatggaaattgagaccaattgtaattcgaagcaaaatcggagagaatggcgcaaaggaaatggaaattgtcaattccgatggaaaagaattgccaatccctcaaaatccgttgccgaacaaagtcatcggattcagatgcattaggaccttgtataaatttaaatttttaatgatttgtgtcaatcatactttcttatgattttcagcttcatcgaccaaaatgtgctcacttttctcggccattttcatcgttttttcgccaattgtgcaacagaattggacattaccactgaaaatgttcgcattttggagtttattgtgcacaacatttggccaatgttcaaggacaccatttatctgttgattttgaacatcgtcgcttttcgtcaaatgcaccaattggccccgtcaatgctcaacgactgtccatcccttcgcactttcaatttgtctgacggcatttctcttggatttccgcctgatgacagtgccaatgcgtcggatggccaaacggttgccaaatggctgttcacgccacgtcacgacaatttgaagaagaagttcatatgcgttatggattcaacgatggaacaatggttggcaaccgtggaacaaatcaaagcggtgattatttgattattccaaattaattcgtatttcccctattttttgtcttctttttaggcattttcaaatgcttcgtctcctgtttatttcggcatttctgtttactttacgccgtcctcttcacttttttcttccgttgtgccatttaaactgaccaacgaattgactggagagaaattggaactggccaaagaagcggaagaagaagaagatttaattagttttcggcttaaccgttgtccaattgtgcccgaagataagaaacagcagaaaatggttaaggaattggacttgttgctatggaaccgaattgaaatttatatcgaagacgacggagtcggcgatgggtgattaataagattaacaatttaaaatccaaatgtttatttttgttttcttttcagtcttctcggcggtttcccggggctgagtggtgatcactgatcagaaccagcagaaatgaatgagtgattggttattgatgcgattatgtgacccaaatgttagactgctatttaagtgttgtatttgattttttctcataaattcgtaaaa

SEQ ID NO: 20543 - DNA, 1374 bp, Heterodera glycines
taaaatagaaatcaattaattatttatttatttaaatgaaaataaaatgaaattatataattattctctatgcttttagcattttttcgcagaatcagtcgggttttaagattttctttgattgtattcatcatcacaccagtgagagatgtcaaagaccgaccccggtcgcggcattttgaccgggctaatacgggcttaaatttcgcaagcgaatctgcccaaaatgggaaaaatataaataattatatggtggagatgtcattagttcaaaatttaccgatagaaacattcggatttgtggaaagttatccaatgtcaagagtttaacatttctgattctatttccggcgcctataggcatcgtcagattcaaaattcgcctaaaatatccaaaagttgatcccaaatcagcatttttttggtgaaaatctctcaaagtggatacaaaacttaaaaaattttcctgccggccctaaaaaattggctcaaaattgcaaaatttgttcatttttggacaaaatctattaacaaatcatacaaaaaattaaattttcctcggcggcgcctatcacacagccggaccctctagttctccaaattttttttctgaaaaaagcgcgcagtaaaaaagtattttgtaaaacaaaaaaagtcttcacatgggcttgacttaatcccaacccgggccgcccgtttaagcggggtttttttgaccgggcggccagggcccggccaattgtcgaagcccgagcccgggcccggtcccggcattttcaaaattccgttctctaataaggacaccatcgaaataaggacaaggcggcccactcgaacgaatacaaatctcaaagtcttgagaacaaagagcagaaaatagctacaaaacaaaaaggatttaaaataaatgtctattttttgatgatacgcatagctacattgaaattttacgaaatatactttcatgaaccacccaaaaaaatgggaagcgtagaagaattttcccacaaaattgtccaaatttgctgtaacaaattgaagacatgtgacttttttgtgcacttaataaaaacatgaaaaaattgacgtcagtacaatatttatgcctaaaaaataaatttgcaccatcgtgaacagagcactcgtccgaggtgatttcgaaaaaaaggaaaaacatccattacattgaagatgaaaatatttcggttttaattttattttgcattttaaaattcaaaaaacaaattataattgaagaagaaaagcacaccaaggatgaaaaagaacaaattgatcagcttatttagcaaatatttctttctcagagagttgtcaaatcgaaatttgaatttggacccaaattcgcgtcaatat

SEQ ID NO: 20544 - DNA, 2319 bp, Heterodera glycines
tccattcccatttgatcagttcgccggtcatgtgcactcctaaaaaatttatttgttttaattgaaattattaaataaataattataaaactgaattttatgaaatgaaaagcattaaattagtcaactctatgaatagggtttgaattacaaaaaatcctgttttacccaaattttaattgttggtcctaataatctttaaaatgtatgtaaatatccgtcgattcccaactgatcagttcgccgatcaagtggatatctaccgggacgatcccagggaggatgtgcacgaattgtggcgcaaattcacggaaagcatcgattggatccatcggctgaactgtggacgaaaattgctccaattcattcagctgctgcaccgattgttgccaaagtacacggagatgaaccgattgaaagcggaagatcaaagggagcaattggaggaggaaatgttttgggcggcggaagaggaagaaactgtgccaacaccggcggaaggggcggcgcggggagacgatgagggaaacagtgccaaaaacagaggtaaaaattgggaaaagatttcaaaaaaattattattgtttaaattttcaaattatgctccataacaaaattataaactcaagaaaaaatttttttgccacttcaataatatctcacgaaaaaaattttccagccccctaggaattttttctgaaaatttcccgatttcaaacctgtagcaaattttgttctctttctttttgtcttcaaagttttgagtttacctatattttgttacgccaaatttgggaccattttcggaaaaaaattcataaaaatttttttcttttagctcttagtatttataggggaaggtatgcttgaaatttcagctgaattagtccacgggaaattgctgaagtggcaaaaaaaaaattcttgagtttataattttgttacagagcataatcttaaaaattttacgtaaagttttattttagttttgagagccttcgccacattggaactcgagacaatttacaagaaaatcaaagagaaaatgttggcacagtttgagggctggtggaagcgcgtgccggaacagaaggagccgctgtacgagttcttcaaacagctcgaggacatctcaacgcgttacgtcatggcaattgttgacgcatttttcgacggcatttccattgagagttttcggcaggaatattcactgggcgtcaaaggtggggctgtgagcggaatgatcagaattggatttgacactttggcactaatccaaacttcgaaatttgtttattttaacgaacattgggaaaaatgccaacttaatctatcagttttaattagagaccggacaactggggtcggaggatcccgagtcttgatcccgaccgaatcccgaacaatcccgacgattttgaaagaacgatcgggacgaatcccaaatttaatcccgctggattccgaaaaaatccagcggtatcccaatcccgtccggtctctagttttaatttaaaaatgcgacccataccaattaaaaatgggttcatgattttaaaagcatttgcctatattacaaattcgaagttcgtttcatcatcattagggctcggaattatatgcaccaaaaattgcaaaatatgcacataaaaagtgaaaaatatgcacataaaaagtgaaaaatatgcacataaaaagtgaaaaatatgcacataaatttctccaaattgagggtataatttcttaaaatttcttcaaattcgctaaatgtaaggtaaaactttcaaaagtggtcaaatatggtattaaaaatcatttagatgaaaaaaacattataaagctaagattgacgaatttttagctaaaaatcaacccaaaaagcgaaattttcgctttttttaaatttttgacataaatttacaaatttttaagaaaaatttaatgtttgcaatttttttttttagaaaatttggctaaaaaatgatttttcggaaaattttccaggctttagaggtaaaaaaggctaatttagttgatgggggccgttctaatagaggttttttgaaaaaattctcaaatatgcacataaaatatgcatgaaatgccaaaatatccacataaatcgtgaaatatgcacaaatatgcaaaatatgcatatggaaagtcgtcctagaagctttaaaccgagctaaaaacatgttttttcgtacgtttcaggcctcccacagttcaggaaaaaaaaatatgcatgtgcatataattccaagccctaatcatcattaagccggctgcacatttggaatttatttccatctgtaa

SEQ ID NO: 20545 - DNA, 2629 bp, Heterodera glycines
cgtccggaaactgagctgctgtaccaaaaaagatttgtatgtgtggcgaagtggtttgtgagaaggtcaccaaaggggtgggtcccaggttcgattcccagtgcatgctattgatgtatttcgatgattttaatgaataaataaaaggaaaagtgaccaaaatgattttaaaattgtttacaaattttttaacatttttatttatacgtgtaatgaaaataaaccatcaatcctcgatcagtcaacgacatcgatgtcggcgtcttgatcactttcttcgttcgttctgtcttccgctgcttgctcccgtcgttcctcctccctcttaattagttggataagattttaaagccccttccatcaactcaccagcttcaattcgtcgagtctgccggtgtccatcaaccaattcgagacgaaatgatgctccagctgttgtcgcatttgttcagcgtccggcatcgtcttccaaagctgctcaagtcgccgccacacggcatgcaacgcttcatctcttgaaaaattagcaccttccaaatttaatcccaaagtacaccaaaaggagacaaaaaattagagaaaaacagatattgtttttctctggcactctctatttattggtacacatctcgttttttcggatggtgtgtatacctatgtaaaatttaaccaagtgttacccattccctcctcctcctccccattcacttttttcccgctatttgctttcaaaaaacgacatccaattggccaagacaattaagtgttgttgtcgcaagaagcgacgagatgaccaaaacggacgggaggtctgctaccgccaaaggaggaagccattcatgggaaggttttctagtgttcggagtggacgatggaaagccccgggaactgtcacgggaggaggaggactatttcggagggggtgcgctcgatcacccggtggcatttccccgccgggagaagagagggaaaagaaacaagtggtcgaacgggagcacttcccgtcgcaattgagggacagagcgagaggcgtcaagaaaatgatcggaatttgccttttcttcccaattttctctatttttcacctttttcctcccaattttctcaatattctgctatcgtaattttattcaatttgtcgtatttcaattttgcccctttttctcctctttttcacatctgcgtctgctcttccccctttgcctcgccgctttgccatttattttttgaattcacctttgtcttcattttggccgacacttcccctccggccttctccgattcttttccgatttttccccattttttctctttgttttgttaattcaaactttggaccattcacatttttccattcacaatgtttacgcattttgctatgccagggagccatcctctccccggcctttgactctccccttttttcttatcgcatcgtttattttgctcatttgtccaatttgcatttatctgggcctaaccccggggaaaaatatttaccaatcacccattcccctcccccctttttcatcactaatttgtccgtcacatcattcattcgttcacttttcttcctcactccactctagggagaaaaagttgttcttttgccttaatctctcaccacaccactcaatcgcggcattcacttttaatccccatttttgccgtttgtcacatttgccccccccctctctcacgaggtttaattacccaagtttgagcgctccgttaataaactatttttctgtcatttggttcatcaatttgggcgggggtcaaaagggagccgactcccgattcgcaactcacttcttctccggcccctttgcctgggcatttcggagcgattcagcaagtcaaacgggactccaactctcaggagtgcccactcgaaccccacctctctccttttccaatcacccccagtgattggacagcgaatcggacagcgagagggaaaacgggagtgaaactcccgagcgcaacgatcggacagaagttggcacgccggaagtgctgacaggagtgctcggacttaggcagttgaacctgggagcaccggcttctcccccaaattgagtcggtggtgccgttatttaaacaacagcccacttcttctttgcctcccacccttctctccattccacccccttgggaagggaccgaacggcagcgaagagagagagagagagagaaaagagaccgaattttgaggagtggattggagcagaaggaagggagaaactcccggccaaatcggcagagagtttttgccacaaacaaagttggtgccgttagcagggggcttctgcacatcaaggaacagcagcacaagcggtcgccgagaaccagcaacgagttgtggtcgccgaggaccaacaagcacatcgatttgtgctaacggcgaacaaagttggtgccgctaacagggggcacctcccactgcacctccatcacccataggtacaaaagctttagagcaacgactgagaaacgacccgaggactagtggaatattaaaacaaaaatttaatgaacaatcgggatcgggcgttaaaagtaaacaacgaaaatttataattaaaaaatggaaaagttactgaacaaattgtataatgacccaaat

SEQ ID NO: 20546 - DNA, 1388 bp, Heterodera glycines
gtccgaaaattattataaattactcattttctgaaaaatttttcaaaaaaagtttttagaattctttttataaaaaattttctagattttcaagaaaaatttctaaatttgagtttctagtttaaaaataccaaagattttttttttgcaaattttttaaaaggtttcggctacgaaatttgtccaattccaatcagttcaagccgtttttttttacaaaactaaaattaattttcccgactcatttacgactgaactgactcaacaaattggggggcaggaaattgtacaaaaaagcgatgcaagcggagattttccacaacacgcccaacctggacgtgttggaagcggcggtggaggaccttttgctgctcgagtcaacggcgccagcagttgcttctacctccccctcggcctcggctgtcccgggcgacgatggtactgaaatggccacgcactgtgtgaagggctgtgcgcttgccaatggccgcttgatcattgcgccgactgttgtgatcaccaccggcacatttttgaacgcggaactcgtgtggggcgcgcaacgaaagcccggcggtcggatgggcgaggcgaccagctcgggactggccgggtgagtcctcaaatcggctagggctacggcatgccgtccgtgttatgcctaacttaatcagcaacagcatgaagcgggttggaatcatggcatttttttgtgtgtggattaggaattttccagtccaatataaaagccctagttctatcgaatgatctaaagttatcaaattcagccaactgtgaaggaatttagaatcaaaaaaccggactggcgcccagttgtccttttcaaatttggattatttaccctatgccgttcgttgtgcattaattaattcatccatttaactctcatttttaattgatttatataaatttgatcaaatccccattttttttttctagcacatttcgtcgcgttggatttcgcaccggtgtgtttgaagctattttatacaaacattttgtctaattttgttcccactcccctcggggaccggtaaattggacaccaagcggaaaaatggacaccaaaggaaaattggacaccaaatttctttttaaaaaataaccccaggaattagcttaaaaataaaatttgagtatggtaaatggattaatgaattaaggcacttagatgggggatgattggtcaatgtgccaaaaaatgcacgaaaatagtaaccctatgtaaacgaaaacctttttctttatgaatgttatgattgctttcttctgcttatgttagaaataataataacattatttatttccgttttattaagcttataaaaaacaggtatgtgcaaacaaaaataaaatcttatggccaa

SEQ ID NO: 20547 - DNA, 1646 bp, Heterodera glycines
tgtgaaactagaaaattagaattggtggagaatagaaaagttcacctggctcccaaaaaaaaaattgttgaaattttcttataaaaattttctatgcttttctttggaacatttctttcagctcctttcctatgtcggctacacggatgaacgtctcgtcaaaattgtgtgcgaaaatgtggacgaaagccattcgctgatcagtgcactgaacgaaggcatcaaagggccccgctattgtccgtcgttggaggcgaaatgtctccgatttgggcacttgaaacaccgcgtgcgtatgtggtggcattcttcgtctctgatcagtgatcaagaactggcccaattttttgtttttcaattgaaatttcgactcccgacgggtttataggcacaaaattccgatttttaaaaattcggacgggttttttatgaattttttttttttgattcatggtgtttttcggtcggaatttcaatttccaactgatttttaggcattaaattatgactttttaattcgagattggtgccatctgtctcaaaggatgccactcttgtttttatgattattattaaaactttttgttagatttttttggagcccgagggattcgacagcgaattgatttacccgcaaggctgcgcattggggtgagaatgaatggcggaagggggagcaagcagcgcattctctcccctctccacggaaaattttagatttttttaaactaaaaaattcagtttttaaaaaaaactttttcttggcggggaggaaggtgacgaagaaaaaaaaacaatttttatttttattgaaaactataaattttaaaaaattcaaattcttaaatcattgacccgcattcagtttcaccatggatgtgcagcagaaaataatgcgctccatcgacggcttggaacgggttgaagtcgttcaaccgggtaaaaaataaaaaaataaagcattttgacaaaaaaaaatatcataaaatccaaggatattccgttcgctacgactttgtgcacccgcaacagttgtggccgagcctggagacgagaaaagttgtcggactgtttttggccggccaaatcaacggcacgacgggtgagagtgatcaccactgatcacatgagtttccgatcagataggtttggtctcctgaactgaggctcgcaaccaaaaagaaatcaggatggcaaatccgaaagcctttttggcaccttttgcagtttagagtaaaaaaattcgtataaaaggtggagagaaagaagaaaaaaactacaatcattaaatgattaaagggttttttatgggttttttattacaaaataaatgagtttttgaagtaaaaaacagtcttcttaaaatgcaaaaaatgtcggggccgggccgttttcgcgtgagtgcctatttaagactgaaattggcggatagtgccgaatatccatttcgacttatttcgaatcccgaacccgaattcaaataattttcttaacttttttttttgttttttctttcttgcggcttgtaccttctataataatttgtcagtttgttcgaatgtgcatcaaacggaaaaaataaataaaattttataaaaattcaaaaatttaacaaaaaaataacaaatttcgggaacagtctaagg

SEQ ID NO: 20548 - DNA, 1922 bp, Heterodera glycines
cttatcacaccacttttttcggcgcgctttttccagaacttttggggaaaaaggtggtccggcggtgccgataggcgccgccgggggaaattttgaaaatttgagtgagatttgttaacagatttcaacaaaaatggcttctttttgggattattaggctcaatttgtacggattttcatttaaaaaatgataaaatatataccaattaaaaatatgaggcaccaccatgaccagtgagtgagaccgagggtaccccctttttggcagaaaaatgtttgaaaaaattgcttaaaagacagcgttttccacaaatttttcaatataacggcggaaaaattaattaaaatcaataaaattttgtttgtattggaattttaaattttttttcccaccaattttcagtcgtatcgcctctttgggttggcgcattgccgcatgttacagcaatgctcggctggacattggccatccatttcatttcgaaatatacccaaaattaaaaaataatttttttttatcattttcccttttttgcaccctttttaattggcaaatattggaaaacaattattatttttcttaaaatttcttttaaattaaaattttaatttaaaaaaatcctggcgaagccaatccgtgatacgtatccctgcatgccatcataaatttgtctgcaaattttcaaaagtgactattttggcgcaatataagttccatgaaaacaaaaaaaaatcgtcgcctgggggtggggtacccccaccaagccgaaattctgggactgtccctacccaatggagcagctcgttccccctccccctgcccgaaaaaattttcagcaagtctttcaaaaaaaatttccagaaaaatcgtttaaaattagaaaaaaaaatttctctgcttaaaaattccttgattagatttttgtaaaattctgttattttcttctctgttgcagctgatcttctgatcaaaaatggtgcgaatttgaatcatagctgtacaaacggcaacactgcgttgtgcgcaacgaagttggggctgaaagacatcgtcaagcgactgttggaggcgggggcagtcgctgaccaagcgaaggaaaagggtaaataccgtaataaatatttcaaatactctttattagtgccaccaccctctaataaagcccccacaaatagcatggggttgaaaatcgggtacattatcatttatctcccgcgacaaataatttatcaaaaaaaaacatttttagaaatgtttatacccatatcttgcgattttctatcccgtatatttgtaattccatttgctattaataagtttttgtttatccatccaattcaaattgcccttagtttaggcgtcgatgtgcaagaagtgtcctcgagttccgccgggcccaccagtgataagtgaaagaagaagaagtgatcatttgaggaaggaaatgaaatgattattttaggcaatgctttatccgctaattgtttgctctttgagctttatccttttgttttggctatttattgtttgcttttttaggttgatttttgcttccgaatatgcttggatacataaatattttctgcttataaatttatataaatttctgtttttgattagtcaaatcttttttaacatccggattcgtgctctgcaccttaaaatagtcctagaaaattttttccaagattttcaaaaaaaaacgggaccagtaaactccatgattgccgttattgccacccaaaaagttataaagcattgaacatgctatgggctttgttgtacaagcctttgctcggctccattaatccttaacacaccgagtcaaaaacgagacatgtgtcaataaagagagagtgcagagaaactttttttatctaacttttctctccttttggcatactatctaatattttcatta

SEQ ID NO: 20549 - DNA, 1041 bp, Heterodera glycines
cgtaagcgtaatttttgtaacccagagtctctacggtcgggacattaaaacggcaagagctaacgcccattatctgattttaatgcgtaacccttcaggacaattacaagtgaggacactggggtcacaactgttcccaaaaagactgaattatttcatggatgcatatcacgatgcgaccaataatcaatttagctatctcatgattaacatgcacccaaattctgatgaggaattcagattatgtagcaaaatttttccagatgagactctggaaatttatttaccaattgaatagtatataagaatatgaatttaaattaaattaaaaatgtataaatttagctccgaagtgaaggagaatacagcattcctaaagaagcttgcctccaccagatcagaacaaaagaagaacgaattaatcgaaaacgctacagctgaccaaattttggcaatcgttgaaatttgtgcaaatatattgagttttagttttaaactaacgaacaaacaaaaaagaaggttggcacaatacgccgatttttatagagaaattgccaaatctcgttcagagaaaacggcaagaaaaaggatacaacaggggagtggtatagccctgggagctgtcttgatacctgtcctgagtgttttagcccaacatttattagaaaaaataacatcatgaaatttgcaaagaaaatgttaatgattcccgaggcggaatatttggctctacggagtgcgatgaatagtggtgattatctccaaaatgaaaaagcgagtttagacgcaaaaatttctcagaatttacaaaaccccggcataagcgaggacctcaaggcgaagagacacgattggctctataaagaaaggcgtacggtaaaggggatacttgaaaatagaccacagaaggtagtgattgagaatcatgtacccggtccaaatgttgcaccatatctaggcctcaacacccaatccaaaccacaggagaccgatgaaccccggaaaataattattcctaggaaaagacttgaagagcaaact

SEQ ID NO: 20550 - DNA, 1665 bp, Heterodera glycines
gtcgtattctcgcgcgactgccacttgagccgaaaatgggaaaaatgattgtgcttggtgctgcgctgggagtgggcgatttgatgctcacttctggtgaataaaaattcaattgaacatttcattttatcacccttcagcttctgccaccagtttcaacacacctttcgttccgcgtgagcgcatgcacacgaaactgtcgcatatgcaccgttctttctccggaaatcggccttccgatcacattggccttctcaatgttaaccaacaatttgcccaagagtacgaaatggatttaacacaagctgagaatttttgtcgccgatattcgcttagttttccgttgctcagtatgtccaatgaggcaaaaaggtaattttggacctttcacagttgaaattagtgatgtctacagtttcattttttagacaactttacgacgttatggtacacatttctggtttccctgaaaagactttccaagtatttccaatcgatgttcatggcgatgactccaatttggacattttcctttctttgatggtcttttttctttcgacaattaaaatcaatcctttttttagattgccgcatattacccaaatgtctgctatataaagtttgcatatataatttcctaaattttaattgtttgattttaatgtttcacttttgtttagagacaaacgtcgcgtgttcactttggaacagacgacagccattctcaggtcagctgaccaaatgcgactttgtcccatttggatgttttttaattttttgttttttctttcattcagtaatatgtcgagttgcgtcccattcaacagaaatgaaacgttcgatttcccttcacctctctttgtgtttgcagaaaaggtctgtttgggctgttgttgtaaattttgttgttcccttccctttttaaatattttgctgatggtgcttattacacccccaaaatgatgccactgtcttccgcattttggtatctcaataaatttcattgaaattggcgcacttgtacaatgtctctccgatcgaatgcaaattctcattctgaaatcctccaaaccgcgggtgttttgatacgcccacttgctaccccatatcagatttctgtagcacacacattattaatacagatatttcacttctcttgatagctccaatacaataacaataaaaccacggaggaccaggactttctcatgaaagatttagaagtgagcctatttgtcagtccgtcttcttaaaccaggggtgtcatcagaaatttaaaaaatcagaacgaccgtgtcacagatttaatttcatgaacccaaaaattgatttaaaaagcttttataaaacctaagtcttgttaagcttggcttgcagatggcactcctgacctaaactgctctttataacctctgacccgaaacgactcattgtcagccccgggtttatttgggactttcgtttttgaccgatcgctcttgcttattagttttcccccccgttcttctcgctttttaggtttcgacctctaacgaaaactctgaaattccccgtcacaatttgtgctcccttctcgcctccatgtcccttcaccatttccagcttcgtacctcctgcatctcatgcaaacaggcgtcaatggtctctccgttgcaattgctcctt

SEQ ID NO: 20551 - DNA, 1075 bp, Heterodera glycines
cagatcagggagtcttatatggggccaagtttttctgatcggatcaagattatgccacccttttctcagaagcatgccattgaattcagatcagggagtcttatatggggccaagtttttctgatcggatcaagattatgccacccttttctcagaagcatgccattgaattcagatcagggagtcttatatggggccaagtttttctgatcggatcaagattatgccaaccttttctcagaagcatgccattgaattccagatcagggagtcttatatggggccaagtttttctgatcggatcaagattatgccacccttttctcagaagcatgccattgaattcagatcagggagtcttatatggggccaagtttttctgatcggatcaagattatgccacccttttctcagaagcatgccattgaattccagatcagggagtcttatatggggccaagtttttctgatcggatcaagattatgccacccttttctcagaagcatgccattgaattcagatcagggagtcttatatggggccaagtttttctgatcggatcaagattatgccacccttttctcagaggcatgccattgaattccagatcagggagtcttatatggggccaagtttttctgatcggatcaagattatgccacccttttctcagaagcatgccattgaattcagatcagggagtcttatatggggccaagtttttctgatcggatcaagattatgccacccttttctcagaagcatgccattgaattcagatcagggagtcttatatggggccaagtttttctgatcggatcaagattatgccacccttttctcagaagcatgccattgaattcagatcagggagtcttatatggggccaagtttttctgatcggatcaagattatgccacccttttctcagaggcatgccattgaattcagatcagggagtcttatatggggccaagtttttctgatcggatcaagattatgccacccttttctcaaaagcatgccattgaattcaaaacagggagtcttatatgggggccaggttttctgatc

SEQ ID NO: 20552 - DNA, 1442 bp, Heterodera glycines
cagagactagctaacacagtcagcataggcttggacttccgtaccccattattatttttataatgggtttgttaaatgcaaaacaattcacaaaagttgttttaactccattcagagatgagatagaaaaaaaacaaaaataagtttgaagagccctcgaagagctgcaccggatgcgagtgccgccgttgctgtacgctcaacggttgctgtgcaaagacggaaaattgcttatcagaaaaaacgaaataaaatcaggaatactcacgcccgtagacaaaccgttggatatatggggacaaacctatattggactaccatacccaattaattatttttgggatgcgaattgttttgtgcgaaactgttatgaaaaaagggttcgaaaaactgggaaaaccccactcagagactagctaacaaaatcagcataggcttggacttccgtaccaattattatttttataatgggtttgttaaatgcaaaacaattcacaaaagttgttttaactccattcagagatgagatagaaaaaaaacaaaaataagtttgaagagcccttgaagagctgcaccggatgcgagtgccgccgttgctgtacgctcaacggttgctgtgcaaagacggaaaattgcttatcagaaaaaacgaaataaaatcaggaatactcacgcccgtagacaaaccgttggatatatggggacaaacctatattggactaccatacccaattaattatttttgggatgcgaattgttttgtgcgaaactgttatgaaaaaagggttcgaaaaactgggaaaaccccactcagagactagctaacaaaatcagcataggcttggacttccgtaccaattattatttttataatgggtttgttaaatgcaaaacaattcacaaaagttgttttaactccattcagagatgagatagaaaaaaaacaaaaataagtttgaagagccctcgaagagctgcaccggatgcgagtgccgccgttgctgtacgctcaacggttgctgtgcaaagacggaaaattgcttatcagaaaaaacgaaataaaatcaggaatactcacgcccgtagacaaaccgttggatatatggggacaaacctatattggactaccatacccaattaattatttttgggatgcgaattgttttgtgcgaaactgttatgaaaaaagggtacgaaaaactgggaaaaccccactcagagactagctaacaaaatcagcataggcttggacttccgtaccaattattatttttataatgggtttgttaaatgcaaaacaattcacaaaagttgttataactccattcagagatgagatagaaaaaaaacaaaatatgtttgaagagcccttcgagagctgcaccggatgcgagtgcccgcgttgctgtacgctcaacggttgctgtgcaaagacggaaaat

SEQ ID NO: 20553 - DNA, 3359 bp, Heterodera glycines
  unsure (1)..(3359): unsure at all n locations
gctcttggctttataacaaatatataatttaacatcattagcatataattttattttcactcctgatggcaaagcatcaggaagatcgttaatataaatcaaaaataataaagggcccaggacagagccctgggggacgccagaggtaacttttttacttaggataaagaatccccaattttaactcgaaaagtcctattactcaaaaagccctttatccacattaaaagtttgccctttataccaattttttccaatttgtataaaagtaaattatggggcactgagtcaaatgctttttgaaaatcaatataaatacagtcaacattttttccatttataattgcctcgtatcaatcttccacaactgttattagttgacttgtcgtagacctattaaataaaattacaaatttaatttaaaaaataaaatatgcgcaattgtattacaattttggatcatcaccagtccagttcataatttacattcaatgggcaacgaaaggtgcacaaattttgggagacgaacaacagtaaaattgggcttagagaagagcactagtgcaaatgggtggattaacgacacaaaaatggttgtattaaatgcgcttaggctggataagccccacactaccggtactaattatattttctgtgtttttttctaaagctgagggtaaatttctcatttaaaatttaagctaaaaatctcgaatatggttaaagatggtatgaaaaattatttcaggtgaaaattttaaaaaagttgctaaatttattaattttgagaaaattgtgacttgtatttgggcacaaatcgggcgccggacttttcgacagcaaaggacttttcgacagaaatattataaattttaggaggggacttttcgacagaaaaagtaattaactttcaaattaaggggcgtaaaatcgtaaaattttttccaaaacaacaaaatgaagccaaaccagtattgaaataaataatttataaaatctaaaatcctttacctagaaaataaatttaaaaaaattggacatgaatttttaagaaaattgtttcattcttcctaggagtgtattttgaaaatttaaggaccggttcttaaaggtgttttttctaaaaaaaattttcccaggtaaaaaacgtatctctagtaattctaatttagcaatccatatttgtatgttaatttaaaagaaatttagtaaaattgacaagcaatataatttattttaataagaattatttgtttttatatttactgtcgaaaagtccgggagcccacaaatcaggggtgagacgcggccgtaatccgcgcttttaatttgaatcctcgaaccgcgaccgcgggattttttgggacaaaattataaagaaaatttgaagcgattgtcttttttgaatattcaaattttaaataaattttttgaaaagttggattatttttctcaaaaaattcgtttaaaaattctcttttttcctcgacggagctgaatacctttaatttttctttaaaaaattgtatctaaatcaaaaaataaggtgattttttaaaaatcttttaccaatttgcaatcaaattttttaaaatttttcgtgcggcccatatcggcacattataaggaaattttaaaaaattaaaaaaaagttaatgtgaaaaagttggaaaatttttgagtttttaaatacgcgatccacgatgcgcggtaatttttttgcgcaatccgagaccgcgggatnattctgtccgtgccccacccctggcccaaatccgaaaatgcaaatgcctttgttactgattagagttccatgggttatatgaaaacgtcatatccttatctgagccttttgatccgcaattgttctactgtaattgatttcttcttcctgctatactgtcgtcgtcatacggtacctcgcacgaaattattttggagtgttgccacttggtttgtgttcgagtttcttttgaatatggctggaaataccttatggtatgcttgccgatattccgtactaaacaaaggtgggaacatttccatatatcccagagctgccaaatgcccttgtttttatgatttcccttatttaggagagtagccgaatcttagagattcgacaaatcctgttcccaagactatctttgttttcgatgttgaaatatatttttgtaaactttatcaatttttaaaacatcttatatttttttatttgcctcaaaacagcataatttgatttaagtttttcatttcaaatgtccaattaatatattccaccgcccaactacttaaataggaaaaatatcaaataataatgataatttgaatgcttttaggcttatcaactttgaaaaatttgctaaaaattgcccgttttttggttttggcgatggactaaattataaacatttgttcaacaccttgtaaagtacaaaatgggtccgtttgatgcagcggcaatgttcaaaaagagtgcaaaaatttggtgtccaaaccaagcagtgatcggcgaaagtgacggtttgatcagaatgacataaatcgaacagattaaatagccgccaacattaatggcgacaatgcaaaaaagtgcacgaaatgtgcggcgattgatcgaatcagcggacggtaagcctaaagatgaattcagttgttataggcttctcgggattattcgggactatcgaattaatatgcatataaaaatccactaattagtttgaatataattgtgcgcataaaaagtatttttattcaacacaactcataattttaaaattttatgtgtttcactgctcaatgaaagcgtggaccaatgactaacataaaagattctaaaaagaagattaattaaatgacctataaaaaactaatttttgtttaaaacactacgaggtttcataaaggcaatttaatcccgtgggatcccgccccgcaaaaaaaaaaaaaattgagttccaatcccgcagcggggtacacaaatttgatttttgtaggggtcccacgggattagcattgcattttttgaaaaatttacaagacagaatgccaaaaattttctgaaaaatttacagaaaatttaattaatttataaactcatttttgggctccctatcatttcgtcactgatcgtttcgtcactgttcagttcgtcactgatcatttcgtcactgcgaaaatttttaaaaaattgtttggcacattgtcaaaactgaaaatttttttaaatttaacaaataaaatctgttttacatatgtatataaaagaaatgcatgcagcacaaaaattgcaattttggcaaagtttaataaaaatctttaaaattctgacttcaaaaagtagtgccgcgaagacg

SEQ ID NO: 20554 - DNA, 2871 bp, Heterodera glycines
agaagagcgaaaacaaactttttttttaagagagagaaaagaggaaaattgtacggttttgtgtatgagaaactgttgaaagaaagcaattagtcatcacacgctttgatcagtaaaatgaggaactgattagtattttcgaaaatgggattctttagagaaataaatgttaaaatatgctcggacagcgattcaaagctcaaaagaagagaacattgaatagatctgcaaagagaattattacattgtttcatatatcaatgaaatatctttaattaattttaagaatagcgtgcagaaacaccatcattgatatcattgatattttaacataaataaaaggtatttgtaagctattgatacgcgataagacaattaccaaaaaagttatacatgaaaattgcaaaagtcgaaatttttgaagttttttcttaataagttttttctaagcttgaaaatctttttgttttttatacagctaatagagctttttttaagagctttcgaatgataccaagattgttggatttggatgcaaaagaaaaaagctataatggaaaaacgagctggcgcccaaacgtgagcgctcaaacgcagtgaacccatttttttatggtaaattttttgaaaaaactccaaatagttccgaaatagttttttaaaagtcacaagacaaaattgttcttaaaaagtttagcaaaaaataaatgaaagcctaaaaatcccatccctgtttataaacaaagaatcgagattgatagatttgcttacaacaaacatttacttaattgataaagcagtaattaagttagcttaaaatctttgtatttaagaaatttacttttttccatttgaaggaaaaagcctgcaaacaccagaagaagtccttatccgatggattggtgagtttcaattagaaaatgaaaaaattattataaaaaataataatgaaaaaaacatttttttattcaaaacatttgctttccacctttaggagaagcccgaaaatggtcagatggagaagagtgttggagtgaactcctctgatggtgaatttaaatttatttaaataatcaatccttaaaattttggaattagtcatttaaagtttaaagcttgaaaattatcctgggatataaaatcacgaaatatggccataaaaaatggccaaaatatggccataaatatagaaaagaacaaaaattgatacaataaatatgcctataaactcctaataaagctaaaagcttttttcatgcctttacaattgaaaaaatgggaggattttcaaataattttgaatttacacaattagttattcattttaaaattaaaaataaatgtttaaattcgttttcagtgccgccaaatgccaccaccactgcgcttactgccattccgatcccctgaagcgaaggagaatgaagaaaaggacaaggacaaacaaatccaagtcaccaaagccataatcaaatccaaattccgccataatcaaatccaaatccgccaatcatttatatcttaatttaattattatttttactaattattttattcataatttatttaatgtttttgcttcatttgggtttattcaattttattttcattcaatttattcatttatcaatttatccaaaattcgaccgggattatacttatttcattgtaatatgaattatatttttaaataaattggcatttaaatttcattaaatggaattatttattttttgaaatggcgccactttttatacattccttctgtgtgagtttatttgacgagaaacattgaaaatcctcgtgcttttttttggctccaaagcatatgcgtcaatggcacttcgtacaaaaggcaactcgttttacaaaacaaagcctaagattaagcttaagcctcggcctagcctaaagctttggcctaagcctaacctaagcaattgtacgacttgccaaacgcaaatttggacaaaatttgtgccgttgctgcccaataacgcaccaccgctctcaagaatttagcaatcagggacaaaccctgcacatgttctttatgtcattattcttctcaatgttgttggccatcattaagaatttgtgattttaaaaattatttatttcaatactgatttggcttgatttttttgcttttttaacatattccatccgatgaatttggttggtttgaattagagttgtacgagaccttggaactcggtctggactcagttcccgatttttcaaatctcggttattaaaatctcttacgattaactttggtgtcacgctggaccccatcgttataaaaactttcataaaatttaacctaagaaatcttaaaataatttactatttttgctaattgtcttaacaaaatttcaataaaatatttatttttaagcctgccaagaaatcccattaattggcaatttgatgcaaacttgaacatattttgttaaaatgatgctaaaaagaaattaacaaattcaaatattaaagttagattgattaaaagatatttacttaaattttaaacgccattgaaaattgattaaaattttcaaaaaatctctttaatttttcatttcgcggatggggagaggattcccccccccctctggttacggccttgctgtggcataattttctttttttttttgcattgttaaaataataatgaaaaataatttatttcattcaaaatatttactctccacctctagcggaagcccgaaaatggtcggatggagaagaacactgaagagaattcctttgatggtgaatttatttaataattagcgtatttaaaaaacgtaaatctaaattaagctttttaaagattgaaaattattttttggtggacttctagag

SEQ ID NO: 20555 - DNA, 1406 bp, Heterodera glycines
ccaaattttgcagggaaactgctgagacccttcaaatgcttataattttcttagatttttttgcctggaggaacacagttcttcacacttaccacaccagcattatttttttaattatttttttcattttatcacccaacgttctagactgatcagaagctcaccaaattttgcagggaaactgctgagaaccctacaaatgcttataaattttcttagaattttttgcctggaggaacacagttcttcacacttaccacaccagcattatttttttttaattattttttgcatttgatcacccaacgttctagactgatcagaagctcaccaaattttgcagggaaactgctgagaacccttcaaatgcttataaattttcttagaattttttgcctggaggaacacagttcttcacacttaccacacaagcttaaaatttttggcctgtttaaaaaggaattaaaaatttttttaaatttattcatctccctttttgatagaaaaagcatcagagtgctaaaattaagttgtaaataaaatttggtgcgctttagagcactttctgaaaaaaatatttatgaaacaaaaaaatcgattttttcaagtgtccgtttggggtactcaaacaattatggggagcaaaaatccaacgcagaattaaagtacaggctatagggaagctattcccgaaggattcggtctccccataaatctgggcgcatcggttcggggggactgccccgaaaacaaaaataaatcgattttttcaagtgtccgtttggggtactcaaacaattatggggagcaaaaatccaacgcagaattaaagtacaggctatagggaagctattcccgaaggattcggtctccccataaatctgggcgcatcggttcggggggactgccccgaaaacaaaaataaatcgattttttcaagtgtccgtttggggtactcaaacaattatggggagcaaaaatccaacgcagaattaaagtacaggctatagggaagctattccggaaggattcggtctccccataaatctgggcgcatcggttcggggggactgccccgaaaacaaaaaaatcgattttttcaagtgtccgtttggggtactcaaacaattatggggagcaaaaatccaacgcagaattaaagtacagactatagggaagctattcccgaaggattcggtctccccataaatctgggcgcatcggttcggggggactgccccgaaaacaaaaaaatcgattttttcaagtgtccgtttggggtactcaaacatttatggggagcaaaactccaacgcagaattaaagtacagactatagggaagctattcccgaaggattcggtctccccataaatctggacgcatcggttcagggggactgccccg

SEQ ID NO: 20556 - DNA, 1629 bp, Heterodera glycines
caagcttactcctctcgtattccgaccatgaacgcgatgaccatcaatgtgtcgttgctttgtttatcagtgacaatttgaagaactgaattttttttaattaaaagttttttttaaaacaatttaaattaaatatttataaaatatagaaaatattaattaaaaatgagaaatttagaacaacagaaaattgaaaaacctttagttgaaataaaaataaaaataaaaacaatgtcatattaagtaaatttcaaagagaggtaaaacaaagatttgattttcagcaagaacttttttgtaaacagaaaattcgctcaatttcgcaaacatttcatgaccttaaaaaacactgtgtgattactgtagttggacaattaccggtaaaattctctaacacactgttcatcagcgacggctcctgcaactttttcagctcagaaatgaagcgtacctgaaataattgagcagggataattagcaaaaatcgcatggctaaacccgaatcacagtatattaattgcaaataattatttttaaattgggtttaataaattattagagaccggatttttatacactaaaccagggttaccctttgtccttatttgtaagatttgtccttattttgagggttcaaatcttacaaattttaaatgttcttatttgtaagatttgtccttattttgagggttcaaatcttacaaattttaaatgttcttatttgtaagatttgtccttatttaagcactttgtccttattttagtctttttttggattcagagagcaaaattattgaattttgaatatattttttaacaaaattcatgaaaaatcccaaaagaaattttcccgtcggcgactatcggcgccgcagtgccacaaaattcccataagatttcaaaagttgacctaaaatttgccaagcaaaaattagggtctttttatgaaaatttgattttcaaaagttttttgtttttagatggagaaaaaaaattctaggtctttttttactcaaagttgttaggttttttggtaaatgtttttcttaaatgatcaaattagttaataggtattttgtaactcaccatgtattcgcacattggtgacttttccagccgaaaatgccaaactccggagcatttggcttcttcctcttcgtcaatgggtgagtaaatctgaaaatttgtgaacaaatttaaaataatattctatatttgtttaattgtttcccacctcaaccttttccaccacttcattaccgaaactgcacactttggtggacactgaaatttgctcaatttattaaataatacttttttgtacatagaagggaaaaaggaattctaaaattaaatgctattttttaagtttaaaataaaaatataataaatattttaaaaaacaaaaaaggttctaaaccggctttaaatattaaaataattgttgttgcaaaagttttttccaaaaaatctttaaaaaataaataaaaataaaacctatttaagaaagaaatctgttttgttttttaattcattttttttgttatttgattaattttttcgtttctacttgaaagagaaaaaaaactcctcaaatgtttttttttcgaataatcccccattgggaaa

SEQ ID NO: 20557 - DNA, 1462 bp, Heterodera glycines
attatttggtctcctgaagtcaattccccattagaatagggggatttttcatattttctttaaagtattttatttgaaatttaattaataagaaagtttgtctaactttaaaaaatattttttaaatagccataagcccacaaattaatcattttttggacaaaatttgttaacaaatttcactaaaaatttcaaaattttccccggcggcgcctatcggcaccgcttgaccccctccctgtaccacaaaggattttgtaaaggcgctcacaaaaagaagagattttaaccaaaaaaagattttgtaaataagttgaaaacatagaaaaattctctacgaatattttggaattttaaaaataatagacaattttaatgaaaattattgtacatatataaaaaatcagaaatggcctcaacaagcaaatcttttggtatttttaaaggatttttcttattacacatacaaaatttaaagtgcaaaccgaatcgacatttgacgaagaattcaaaaaatattgttcgggcgatttgattgggcaggaattggaccctttggattggtggaaaattaacgaaggattttgaacaaatcaattccgaaaattctattttattaaattttttgttatttttgtccatttaattttaaaaaatactcaatcatttacacagagaaattttttaaaccgtttaaattataatattttcacttgaaaaataattaaagtaaaaaatttttaaaaaatcaaaatttttcattaaaaaaattttttcccgtttcccggcgggattcccgttaaaattgacgggatttttacgggaacgggaaaaagccgggaatcccgttcccgtttcccgtcccgctctttatcgattcccgtttcccgttccccgttcccggaaatttttttttaccggactctactttttaagcatgatgaatttttcgtataattcacatattttttacaccagaaaaaaacaaaaataaattttaaacttattttcatcgtgacaacaattctgcagcaaatttctgaatttaaaataaataaattaatatttaaattttgttctttgaaaatttttccgctttgcggaaatacgagactttgcgggaacgcgaagaaaaatttcccgtttggcggggacgaaaaaagcattttttaatcggaaactctgttggtgaatgaggaagtccaaagataagccataaaatatttaattaacaaatactatttaaataaattaacacgtatttataaaaaaatttttatcatacgaggaatatttatttgaaataaaatataaaaatgttatttgattttcttaaaaaatatcaatcagtctcagtttctccttcttcaatgccattggaaaattgcgggacacctaaaaaaacatttcataaatttgaatataaaaataatggctgaatcattgatagtgaagacagacc

SEQ ID NO: 20558 - DNA, 1973 bp, Heterodera glycines
  unsure (1)..(1973): unsure at all n locations
tgttttctattaaatttggtgcataaatgtatagctgctttacacctcccgtcaaatccggcatataagtcgcctcttccgcgtgaaatagccttgtattcttaaaaccgagcacataggctaggtgttttgacaaatctatatgggagacagcagcggaaagatagacaataaatttttgatcaatgctgtcatattgaaattgaacatcctcattggctagtctttctcttttttgtggtcctttctcagcttcagatacttgtctattttcaatatctttacgtttaatatgctcaccgagtgcctcattaagcctattcactatcccgctaaaacccttttccgatttatcattatatccctcgagagttgatgtatatttggtctttgcctgtctggcgattccctttgcgacgtcggctgatttctttgcttttttcaagtcattcttttccacatgctccaatgttatgtttttggctttatctacttcttcttgaaaagacttaagttcatttcgggatgtttgaatttcggttcccatttcaaccattttgtcaaaccaaatttttatatcaggctcttctaaaatgtgaggatttgtttctcgtagtgtgtttagttgggtttggatggaattcgagatattgttgatctgattaaaatgtctttctacatctctcccggcgcgttctgcggcgctctttgcgacatcaatttttgaatctttggtatcttcagccttggcttctctccttccacgttgttttttgattttgtaatgatggctgaatgcctcgttaattttatttcccaggcccccggcggttttaaaattcatgtccggtaaataaacttgagtcgggacactgctgtcgttttcccatactttaataaactcttgaccgtttataccgagtaaggtgaatgagtaggggtaaataattgatgagagagctactgaccaaatttgtgcccaattccaaaatctcggggagtcgtactgtgaattttgatgtactgttccctggtcccggtgtgttcgagggtagcacaatgtaaaagtcatccatctattttcactaattccaggttataaaatattccttttattaaatttccttccaaatcttcgatcctgtatgaatcgggtgtcgtcgaattggcaacaacaattttaaacaattcttcggtaaagtttgggaggtatccctttgaaaattttcccttttccttggtaatacgaacgatatcaccgattttaaattttttcttttttaaaattttaaattccctagccttatataatttttcccagagcgcacgggcattttcaaaattaattgaagacggtttggctcccaatgttctattcacactgttgttaatgtttgttattattttgtctattacgtcgacccatcgaagagtgtctttctttgtaaaatatctgtacaagcgctcctttattgtccgatttgccctttcaacgactccggcgtgcagatcaggactatacattacatttttgatgatgaatttttcctcaaaatattttttcatttttcctgcttggaattcaagccccctgtcactatatattttcatcgggataattttagacttttcgaacacccgatcaaaagcctcgatcatgtcctcactcttctttgacttggccggtgcactgaagatcattcgactcagcacgtcgatgcagaccaataaatatttataaccgtcgttatgctttttcaactggtcaaatatgcacaaatcgcactgccaatcggtatggaagccacttggtatcgtctttagtctcgggaatcttttcctgatgggcttgtgaatcgtgtatgttttctgcttttctaggaatttatgaacgtcatcggtcgtaattttcgggtcaatcttcctgagaaggtttaaaattttttgaattcccagcanaaacttgccggaga

SEQ ID NO: 20559 - DNA, 2066 bp, Heterodera glycines
ggggggggggagagggagaaacgcttccatttggggaccggaatcgcaataaatttaaggcagaagtttgtttcctgaaatttttctttttttctttggaattttcttttaaaatttttcttaattttttttttttttgaaaattttctaatggtggggatgagggattaactgtagggacttgtcctggtagtgaatattttttaatattgttgccttagagaagccaatgaaaattcaaaatagtgaaggacagcagagaccgagaaattgagctttttcaaaaatttccaaaaaactttcttgaaaaaagtggaataaaaaaaattagatttctttgaagaatgttgcacctaaaaatgggaccgcttgctatcttttctaggccctaatatcactgtgaaacccatgttgtgatttttttttgggggggggggggggcgagggcgagtgtgaagccggcggggtaccgaatcggctagggtggacggtacccgatccggcggggcagcatccaaacccggtcatttatcctccttaatccgtccctttcccaatgtaatttagtaatttttcagctatttttttgaaaaaataaattttctgctaacagtcaaaattttcattttaggaatcagaacgccaaaactttgcaaaacttaaaatttattggggattttcccttgtaaaaatgcaagagccgatctcgagttagaaaagaaactttcaaaaaacaaaagagaattcgatagaaaagaccaaaaaattcacttaagcaaaatttcaataaaattggtcaataggaaaaatttttttccaagggcaaacatttcaataattttaatacttttttagcaaagtccacaatttaaggccaaaccaaataaaatttacaatattctccagaattttcccttcaaaatgagcataaaatggttttatttgctctagtattcaccaagttataagctaagaaaatttcataaaattgtgatgttgtacctaaacaacgctttttgaatatgattttttattgccacgaaaacttttattaatgaaaaaataattctgccttcttctttaaaagaagaaattgaaattaacacacaacatagggaggacttgaacctgggaccccctttttggtgactaactcacagaccactaagacggaaaatccaacttaattgtacttggagcccaaaattgaatcgccgtgtagatggtatccatccgatttcgtcactcgtcatttaattaataaaaagtgaaattgcaaaatcaaaaattatgtgaatttttagacaaaaaatttttaatttggaatttaacaaaatggaataaacaaaatgaaaattttcttcacaaccttcgtagagtgtgctggctgctctcaaaaattaagtaaatacaagaaaaagtcaaataatcaggtcaattagtgtgccattaattccttattgcaaaataaggacaccaagccaaaagcaaggacttttcaagggctgtcgttcatcaaaaaatgccaatttttgaaatttctaaaacaatttttccgaataattcacgagatgtgtgtggcaaatggcaacactgatcagataacaaaaggggagatcaatggtaaattaaatggtaattgcaatgacaaattagggagtaattaaaatataaaaataggactagaaaaaattaacaaatttgtggtaatattgaaaaaaacaaaacatgaaaaatggcaaaaaattgtcgtccatctccatttgcagaagaagggcatttcaataacgagtcgaaatgctgtggtattacggtatcctactgtaaatcaaaaacagtaccaattcaatacagtaattatggaacaaaaaaatgaaaataaaatatgacatttatgtacaacatgagatcgtcagattctccatcatcagctttgtatactaataatacataatgaagattttgagaatgaatgattggtgagaagtttttcttggaaattccctaaataaatttgttgaagtttcaaaaatgttcccaaaaaatcacaaaaatggcattttgcg

SEQ ID NO: 20560 - DNA, 2120 bp, Heterodera glycines
  unsure (1)..(2120): unsure at all n locations
tctttaatgactgttccacgtgagatggaacacttctcgttccgactagtggggcgagtgtcacttcgatggccaattccgcgacgttaagcctttccctcgtttcatcaattttttcaaattcaaccgacaaatttagctaaaaattctcactgattattattttggattttaattatttgccaccttctcattaaagttgttgggaaatgtttctttgataattttttcaaacttctcagcaagcggttccctggtcatgccaagccaaatgagcagcacttccatgaggtttttcacgccgagtcgcttaattccgtggtgagtcgaagtgacaaaaatatcagtgagagactttcagaggggtggcgtcatttcagtacggaataaattaatttaattaattaataatataattattttaatctattaattatttttctgaccataattataatttcaatatattatttaatatttcccaaacaagttacagttttacgagagaaatacagtgccccaaaaaagtcttgactcaaacctgaaaaactatcttatagttcatttaaaaacttgaaataattcatgcttgcacaacttttggtgctgatcaaaaaagtctcttataccaacttgatcagatcactcctttgtagtgaccgggcaccccaaaatacactgaaaatcgggaaacttcgaaatccctagggggttgggaaattttttctaaagaaaatgggcaagccaactggaaagagcacaaaattttctaccgaattggttttgggatggttgttctacgatttgcacatagaaagttatacttggttgaataattgatcaccataaaaatgatcaatttttgatcaacgccataactttttccagaagcatccaaattaagcatacttggtatcatttgatagcccgaagtgtcttctatttgcctttaaaattttaaaaatttggttgttggttcaaaaaagttgtggcttgtaaatttcataaattgatttggtaaacctttgtgaccacaactttttttaaactcaacgaaattttttgaaattttacaggaaaatagagaacacttagggctaccaaaagataccaaaaatgtataattttgatggttttagaaaaagttatgatgcatgaaatttatcaagaaattacttggtcgtgtatttttgtggccgtataaactgaaatagagaacaaatatatttattattattagcttattattcaattttaaattatattattaattaattaaattaatttcttccgtactgaaatgacgccacccctctgaaagtctctcactgatatttttgtcacttcgtctccttgacccgcttaattcattcaaaaaattggaaaaagttgagttcttctgtctcattctccctctctctcccctttctctctctctttccctttttctctctctctctttctttccctttctctccctccctccctctctctttctttcctttctctcgctgcttctcactctttttgtctccctttttcctcccccctctttctctcactcttttcccactctatatatctctctctctctctctctgtttcatttctctctctaactccctcctccttctctcttcctccccctctctctctctctcctcatttattattacttacatttgaccgtgttttgccataaaagggtgtttccaacagtccggccaattttcggtaaagcctcgtgaagaaaaagcatgccattgcatagttttctgattgtttctgttcttcaaattgaactttgctttctatttggtcatgttgttgttcaccagcagcatgagaaatgttgtcggtgctgaaaaatgaaattttagggaaaatcattggaatctcagaaagtttcagaatttgggtcatttgataaggcctcttgagaaaagttgaaatatttttcttggaagagaataattttaaaatagaaatgtattacaaatcaattaattcatttgtttttttaaatatttgcccatttttgtgtttatttggcgaaactacccattaattaattaattgattagctcanttaattaatccaattcaccaacagaacaacg

SEQ ID NO: 20561 - DNA, 1814 bp, Heterodera glycines
  unsure (1)..(1814): unsure at all n locations
ccctcgcttcaggatcgtttttccgatgaaagtgacatattttttgcgcgcgtttcacgttttttgaaggacgaaggggctgaagaaaatgacattttggaaaatttggaggatgaagtgaattcgactcgcatttcgccaccagccaagcgcgcttgttcaattgttgagataatgcagaacatagccagttgtaccaaaaaaggtggtaccaaaattgcaattttgataaaaaaaaaaatttagctacatcatctcaaaataagggcatgtcggaagaaattctctcatacaaagaggaaatttgtgtttcaatgaatgctgatcccttgcagtggtggaatagcaatgaaagaaaatttcctaaactttcaaacattgcgcgtcgttatttgtcatcaccatgtacaagcatttcaagtgaacagctttttagtgtggcaagagacgtatatgactaccgtcggtcaagcatttccccagagacggctgaaatgttgatctttttgcataattctattcctgatgtcaatttttcatattaattttcaccagtttttgtctaaaaatatatcggaacacttatttatcgttttggaaattttttaaatttaattgaaattttttcaaaatttccaaaaatccgcaatcctgcgcaggatccggcaaattttaaatgcaggatttgcaggattgcaggatttgcaggattaatccggccggatccggtcctgtaaaaaattttggattccaatcctgcaacaggatccgcaaatttgaaatttccgggctctagttttattaaccattaaaagaaaaagttttctgttttggtttgtttgtgcacgcccggaattaggcaaatagaatttgtggcacctgtaaagaacaggaatcgacaaaaaatctttttcggtcacaaatgtaagggttttcggtgtcgctgatcacgaatcaggcattcattttgaccaatttctgcataaaatctacctattttgcgcaataaattaattttagtaaaagcgaattcccgactttgtttgaatttaggtccagggcttcggaattggccgaaatgaatgccggattcgtgctaccgaaacctatatattgaaatgttttttgattgctaattgaaaaaaatttacggggcctgaactgtacaagagataattcccgttttaagacgaaaaaaatatataaaaaacatttgtccttccctcacattctccgtttaaaatatggataattgattgtctctttgttaaactttggtttattaacggatcaaagaatccacaaaaatatccagcagaggtgattccgatcaaaacaaataattaggtgatcatcgcttttgctcctcttcctcctccgtttcaaattcgatcatcacttgctcaatgccaatgcatgcgcggcgcctgcggcgtccgttgtttaaactgcgcagaaatttgaccactcgccgtccgaacagttgcgcatcatcctcctctcctgtcgatgtcgatgatgatgaagcagcgagcccaaaatccgaagcggacggctaaaaccaaatggatttatatcttataaaaaatatcgaacaaataaaacaatggggagggtctttcaattttcaataaaaagccaaacataacataagattagaaaacacttaaaaagtgcacatccttaaatgaaattgctttttaatgcattgtaaaaaatttggaataaaataaaaaaaggaaaagccgttagncggggttaaaaaaatttcggtgagaacttttaatgtatgctttatatatagatgtactata

SEQ ID NO: 20562 - DNA, 1965 bp, Heterodera glycines
  unsure (1)..(1965): unsure at all n locations
ccaatgtggcccaaattttaggcccccagccacagccccttgcttctcccagttttaagtcttggatttgtcaaataaattcaagacttcaaattaataatcaaaaattctcttaaaatttttttgaacccaattcaaaaaaggaaaaaaatttgcagtcaaaaaattattcgaatttctccaattttgtttccataatttccgaaagttattcggtatcataatgccaaaacaaaacgaaatcgttttaaaatattcctttctggacttgacttggtttcttgatatcgaagctgttttctacgctatttctaaaacggttataccaaaccccagatttttgaatccggttttcagaaaaaatgccttgtggtgaaaacaatatttcacatttcactccataactttgtgagttcggcacggatcgagaccgggataagaccattggaaagagcagctcgagctctacaagaaggtatggaaagaaaaaatagttatttctgggactttttcagaaatcagaattaattctccaatgtggcccaaattttaggcccccagccacagccccttgcttctcccagttttaagtcttggatttgtcaaataaattcaagacttcaaattaataatcaaaaattctcttaaaatttttttgaacccaattcaaaaaaggaaaaaaatttgcagtcaaaaaattattcgaatttctccaattttgtttccataatttccgaaagttattcggtatcataatgccaaaacaaaacgaaatcgttttaaaatattcctttctggacttgacttggtttcttgatatcgaagctgttttctacgctatttctaaaacggttataccaaaccccagatttttgaatccggttttcagaaaaatgccttgtggtgaaaacatatttcacatttcactccataactttgtgagttcggcacggatcgagaccgggataagaccattggaaagagcagctcgagctctacagaggtatgaaaanaatatatctgatgcattccataanntttttccgtgagnttttcttnnttnttggccgccccccctttttcctcagntctatacgnnttttcgttgtttgtaaatttttnnnnnnnttttatacaatctttatattttttttttccccccctnntaaaaagaaaaaatccnnggcaaaaaattttcaaattttccattttgtttccaatttccaaaattttttgggatttttaatggcaaaaaaaaacaaaaccgtttaaaaaaatccctttgggaaatatattgggttttttaaaaaaaaaatgtttttcccccttttttaaagagggtttttccccccccccctttttttttccccttttttaaaaaaatatttttgggggaaaaaatattttttttttctcctctcttttttgtggggtggcgcgcgcggacgcggggggaaaatattttggaaaaaagcccgccgctccctctaaaagaggagggagagaagaaaaaaaatattttttttgtgtttttttttataaaaaaataatatttttcttgcgggggcgtagtttttttcccgccccccccgcgcccccccctctctctcccttctgttgtgttgttggggttgtataaaaaaaacaaaaaaaaaaaaaaaaaatattcttttttttttttttttcacaaaaaaaaaaaaaaaggaaaaaaaaaatatttttcttttcttttttttttttattttattttttaaaaaaaaaaaaaaaaaaaaaaaaatttttttttttgtttttgggggggttgggttttgtttttttcccccccccccccacccccctcggtagggggggggggggggggtttttttttttttttttggggggggggggggggggggagaaaaaaaaaaaaaaaaaaaaaaaaaaaaaaacaacccccccccccccccccccccgccccccccc

SEQ ID NO: 20563 - DNA, 1534 bp, Heterodera glycines
aggcagatttcatttaataaacctaatttgatttgagctccttattcttgaaatcaaatgatcaaaaactatagaggaggtaaatgtccaaaaaaggcactcgctccgctgcctttcgtccgaccgctcatttgtccgtgtgccattccgtttttgccactctgtccgcccgctcatttgtccgtcccattccgttttcgccgctctgtccgctgcattttgacttgtgctgtgccaatatttaactgttcttccacttccgggcgagcattggacaaccattgccttagaatttttaaaacttatctgtttatttcccaaatttagtcaaaaattcaatttattagtgaagtcttgattaaattccggctaatttcacgattttcagcgattttaaaagtctaaaaaactggaaaacgttgaaaaactgttacgaaatggagaataaaattctttgcgaatatttgtttaattccaacattctttaaatttgaagtgcaagctattttaatgaaatttgctaaaaaaaatcaaaaatttaaattgtttttctttgttttgtttttccatcttttcattccaactttttcttatctgctggcaatttgattagtttttgtgcctcccaattttcctttgactctaaatcgatcgatgttcgttaaattgtttctcatcgaattttgttttgcgaaaattaaagtgtttggatctgagattggtctactctctgtgtttggttgaattgcgtccctgtcttgagtcaaataaaagcacaattacacaaataatgatcgtaattggcataattaaaaagtgacactttatgacattttcatttttccaatgtgttcattccccaaaaattcgggctaatgtaaacaattttttgttttgtttattttcactctcttaaaattgttaatgaccatccggctgtaataattgcttaaattgttgccgtaatggacaacgcttgagtttgtgtttattatggccactcacataaacgtgataattacctaattaagatatcaccaatttgtacattgacgagggcttttgttaatttatttcttaaaaaggaaaatttaatttcaattgaaatttaatttttccatcattttcttttaggaatacgcgacaatcaaaatgcaatggccgagaaaatgtcgggaattgatgcaaaattggaacaaattgaaaatggttaaaataattaatgttcatttttcatttattttaaatttgaaaatgctggaaaatatttttaatttatatttttctttagcattggccgagaaagtatcggaaaaaaattgtgcaaaaaatttttcacgagcaaaattatcattaaaatcaattttttgcaaaaacttacttccctacgtacgggagtaacttttcataatttgtcgaaccaaaattgttaaattcgataatcggatacgaaaaatataatatttaatacacatttttatcatataaattgtaaaaataactgattagaagcattttgcaattgtcctgattt

SEQ ID NO: 20564 - DNA, 1982 bp, Heterodera glycines
  unsure (1)..(1982): unsure at all n locations
tttaaataaatgtaaaataacccagttttacaaatgttaagattttgactcaaaaactgttattgagcntaagttctatttgtcgaaatatttttcaatggcacgacttnttcacagttagcaaaaaataatttaattaaatcggctggaaaactattggttatagaaagtgatttcgatcacttattactcaaattcatagctaaattttggtacattaaaataaaatatgtttttttaaatcattaaaaaatgaatgagtcaagcatattgaccatatttatttataatttatttattttaacttaaaaattttagtatgaatattaagtattttgaccaattttagtaatcaatttttaaaagaatttgttttttaatctttaacaattttgccataccgtactttagctggctgcccatttgcctgtgcctttttgctattaattaattaattaattaattaattaaaggtaaacatatccaagggatctgcccttccttcactttctcggacattttcagcagaacaaactttagtctttttttctctccgttggtcatttggtctttgtgtcccactgcttaatagtctttttttctctccgttggtcatttggtctttgtgtcccactgcttaatgagtcatccattaatagcgtttgatctttgtcccactgcttaatgagtcatccatcaatggtcgaccgttgtaattagctaattaattaaggaacagaacattgcgacccaatgtttacaattttttgtttattttcactcccaaacatttttctgagcatccgaatgcaataaacacaatatttcgttgcataaattgtgctgaaacttctctatgatattcacaaatgcatttagcatcaattagctaattcatttatttatatcaaattttatttatttatttttaattaaatttaatttattgcaaaaaaatagttgtaatattttaaaatatacggccttttcttggcgaatttagctatttgttgtttaagtaacaattttaaaaagtttgccctattttttaattgccaaattcgacatggccactttaaatgtggcccatctcatcactttaattggcgttggggtacaaaattataaattaaaatttattattaattttttctaatatttatttttgttttagtcaattgcttcatccgttgttgctgatgagcaacaaaatcaaaacaaaactcaaaatggaggaggaggcttaaagcatttgttgggatcggatggtaaaaattatattttttatttgaaatttatttaaatntaattaaatanaatattttaagggttaatttttgcttttagttttcactgagcttcgggccaaacaaaatgcgatggccgagaaaatgtcgggaattgagacaaaattggaaaaacaaattcaaaatggtaacaattttattctaattaattcattttcgactttcgttgattaaaatttaaaaaatgaaaatgaaataatttattttataaatttaaattaaaaaacaaatgaaatgaaaatttcttatttgattgttaaataatttattaactattgtaagagataaataaattaacattaaattgccgaagcagcattttctcatttaattttcacattcattttaatgccttttcatttcatttaattgcttctccgttagccaataagcgatcgatctgactcctccccttcccatttatgtgtctatttaatgtgcgattttcccatttctcgtcacttaatccggactaataattattattattctgtattattatttatttattttacatttatttccctgggataaagccattattttaatggacttggagttggggagggaagtgggattgatcaccccaggaccccctcataaaaatggttggatttctaagggttgggagtcccaaggcctaattcagcgcgttccactggcatgtgtgttact

SEQ ID NO: 20565 - DNA, 2841 bp, Heterodera glycines
  unsure (1)..(2841): unsure at all n locations
ttggttttttttgcatctcacacccctctttttgctcttctacgttttaaatctcgggaatgaagaggcaaaaattgcctaattttttagccgagctttgaaaattctagggggaatgttaagcaggtggtgccgaacgattgaataaatttgtttcctataaagactaatatttaataaaagataatcctttaagggttttaatagaaacacaagcattgagttggaagaaaagcataaactaagcccaaaaaagaaaattgttaaaaaccacattgaattcagcatgacagcaatcaataaatcaatcaatcaatttcggtcaatcaatcaatgtgtattgaaattacagttttttgcttaatcgtcttcgtcttctctttcttttttgatagtattcactgaaattttcacaaaaactacaaaaacttgggtcgaattttcttctatttttattttgaatttaatatttataaaaaagcctatttttaatgcatcaaaatttttttgaaactacataacctctaaaatttattttttttaaaacaataggaaaaatcaattttttaaaaccccaaaacaatatttgcaaaactgagccggaaattaagccggccgattcaaaacaacacctccccccgcaccaatacaaaactttttttattatatttgtgtgggacactgaaaattttcgtaactttattattatacaaatcggacgactaattctgtgaaatccgtcctgtaaattttgatacataaaacccggttagtgtcaattattatttattatcaaaagatcaaacaaacatcttaccagttttcggtccacacttcgctttttcgtttgttcgctgctcttcatctttgatcgggaatttttcggtccctacgaaaagaaattacaggaaaatcataagcccatgcgattttttgtctggattctggatcataccagaaaaaaatgcttgtttccatcttcgaactgtttcccgattaataccgaataatttggaaatttcaatatctttcatattgtgtacattcttaaatatttgataattttctctgaattcttcttttaatgcgtcgtaatgttgttttccttaattcttgtttatttgaatttatttaaaattttgcgcacttttaaagaaatttttcgaaaataaaagaaaaaggcaatagatttaagttaaaaaatatcccatttaaattaccatttttctttcgttttgcttttttttcaattttttccccttcaatattttcttcattttctttttcttgtttgattagtatttcacttgaattttctttcaatttcattcttccatcatttattaaatctgtcattaatttcattgttccttaaaaaaattttaataattacgaaattaaatagtttttcgctactttttctatttactggactagcattcggacgatcatcatcaaaagcgggcgtttctctatcattttctaaaattatcttaattattatccataatttattggggtgctaaaattttgtcgattaagaatttgatttttgcgatacagaattggtgaatcagggaatttagtgaaaaagtgaaaatctgtatattaaaaatggcaaaaaattattaaattgataaaagaaatttttaaaaaacaataaaatattacatttaaaaaattgggttttagaagaaaattaaaatgaaatttctcaaaattttgttcaaaatgtgcttttttataaaagtgagctttttaaattctgataggtttgaataacaaataattttttaaacataacaaaaaagaccaaaagcaaataaattatgttagcactagggatgcgatttttaggcaaatgcctaaaatttatgcacttaatacgcacagataagcacgaaaaaagccctttccgcatggtttggggtgtctacgatgaattttataatgcctaactttgcctatttcggggtttttgtgcctaaagtgcctattttagggtttttgaaaaaatccttaacaaaaatgcaataaaaacaaaaaaatacacccctaagaaatgacccaaaaaatttttcagaaaatacaccctaagaattgtaaaatttttcaaaaaaattatccctaaatttaatatttttttcttaataaaaattttttggtttaaaaatttgttcatattcgaaaaaaaactttaaaacattaataatttcatttacaattgaaatatttaaagtttaaacgtgttttgttacctaaaaagcgttaataaaaaattttatttgcctatttttgtgcctattcgggcttttttgtgcctatttaatgcctatttcgcgattttttgtgcctaaaaatcgcatccctagttagagcaccgtgggaaaatgaatttaatatgttttgagaaattcaatcccacgtcttaattcaaaatcatgcaattgaaactaaaaatattgaatatatttatactcattttcgaattcatttttaggaattatacttgataggttaatctggtgattaacagcagcggaagccttcccatggacagccccaaaatcgaactgttcaaaagtatctatcggagaagatctgtcttccaaattgacaagtgagagaggttcaatgatgttgctaatctcttcagaaactgctcaaaaaatgtggtgaaaggaaattgaataaatttgtatttattttaaactttgttgattgactggtttaaatttggtatgtatttgttagatttggtctgtatttggttttcacaaatttgaattaatatgcatcaaggaggtgccganaaggcgcattcaagagattaaaatttaa

SEQ ID NO: 20566 - DNA, 2493 bp, Heterodera glycines
caatccctctacagaaatcatattattttcaatttttttttgtatactcgtgggtttcctataaagaaaatatgattcctcatagttttttttaaattgatacatatttatcattttttaaatgaaaatcctaccaattgagcttaataatcgcaaaaaccaacctttgtttgttgaaaatctgttaacaaattgcacccaaatttttaaaatttcccccggcggcgcctatcggcaccgccggaccccttctttcccaaaagttttttgaaaaagcgctccgaaaaaaagtgatgtgaaaatcaaatctgaatttctattaatattcgatgatttagtccaaaaatgattaattgtttgaaataattgaagaaaattcctttcattttctctctaccacacactctttaatcttctgtgccctatactcttttcctttcattttctctatgccacacactctttcttttcgttttctctctgcttacattcttttcctttcattttctctctgcttacattcttttcctttcattttctctatgccatacattcttttcttttcgttttctctctaccacacactctttcaattcattttctttcttctaagtttttttatttctctcttcgaaacacacactcttttcttttcatttctctcaatcacactttttcctttcattttctctctaccacacgctcttttcttttcattttatctcaatcacacacttattttctaccagacattcttcccttgcattttctctctaccacacactcttttctttccatttctctctgtcaaccactctttcccttctctgtctgatttgcagttgctgcttggccaacattcagccaatcagcgattgaattcgttgcgtgcgtttcttccaactcacaaaggaaggtccccaggtgtccgtgggatttccgaatgaaactttgtgggtgaatagagcacctatgggttcttaagaaaaatggtttcaatttctgccaaataagtacgggtgccgagttatgccgtgccaaactttttttatcccataaattgaataatcatttgcaccactttgttctgtctccttgtgaaattagtggattttaaaatcatttgacaattgattgattaaaaaaacgacaaaaaaaaagaatcaactttaacattaagtaactttactaagtttataaaatcgcaaatttcgtaaaaaatatccattacaaaatgtggtcgacattcttggtatcattcgatagccctaacatttctctacaagctcatctaaatttcaaaaaatttggtcaagtttgagcaaagttatggccaaaagtacccaagcaatcaagttttcacacatttttaggcataactttttttaaactcaataaaattttttgaaattttgcagactaatagaggacacgtagggctatcgaataatagcaagctttattaattttgttggttctgagaatgttttgatcagaattttttatgatcaaaataagcaatccgtaattgagcccagccctggcgctagcgctttcttagcaattccaaagagggcgctagcgctctcagcaaattcaatttggaaaatacattcaaatataatcgaatcaaatttaatttattttaataaatgaatagaaaaaaatatggttttttaaacaagagtttgtgaattgttttcaataaataagccattgtaaaggtaaatgcaaatctttgtaaatatatttaaaaatttttatttcaaatttattgccgcctgctaggctaatcaattttcaatgaataaattaaaattcaaacattttatttacgctaaatttggaaaatcgccaaaataaagaaccaatgatcgttacttaatcacaaagataaatttctaatttttttctttgactagggcatacatcaataataatgataaatttttctcttctctatggatgcttttcatttctccatcagtgccctcaaaacaaatttcttttagatgtcgtctgtcactgagccgctcaaaaagttgaaaatgtagtcgatctctaagttttcacgttcaacaagcaattccccacccaagatgacaaaagtgattggaaacaacggggcgaccaaatcagcgttttctgttttttaatttatgattttacattttttaatatattttttgtaaaatttacctttattttttaaattatccatcattgaatcgattagcactgccatggaagcaccacttgccgtgccaattgctccagatacaagtgcttttgctgctcgaaaacttttcaatgaatttaaaattcgagcggtagccccaatggcggcgacaggaccagcacttgctcgagcaaattgtgtcgagagcaacaaaaaaaattaaaatacttggcatggtgtttttaaaaagcgacgaaatttctaaaaatatttaccaaattaaaatagttttggttttatttatagtgaacgat

SEQ ID NO: 20567 - DNA, 1629 bp, Heterodera glycines
ctccaccaccgggcaactgatagagaacaaaaaatattagcgctctcaatttgcattcgccaaattaatgggttcattacgttcccgctcaccccccccccccaccgtaaaaattttaatttcttcaaatctagaatttttaaacggggggggggcaaattaatgtcctttttacaaaccaagcttcattgtactataatataaagaaaaatgccaacggtatttaaattgcaaattttatacctttccaacttggtttggttacgaactttgtcaatcaacacacttactaatgctggtgttgttcgcgtgggtccagcggattgtcactggaaaacaccgatgcgcaaagatgtcgtccacagaggggacagtgaaagttcggctgcggtttgttcatctccacgtgatttgtcgcttgtctaaaccccaaaataatcatttcatgtcgttgaattccatttttgggttttgtcaagcagttcaaactctttcaacttactttgatattggaagccatccaaaaatggccaaagccaagaaaaatcggctctgcacgccaaatttgtcggccaacgcttcgtcgagtacattgtccgccaacggaagttcgggctggccactgtccaccagttggtgataacgcgcagtgatgtcataggttgcggaagtgttcagccccgggctaatgcgccatgggcaaatgacggtgtgcgcttcgaccaatttgcgttgaatgtgtctaaatttgtacgacaacagtatgtgtgcgctcctttgatttgttcgtggtttttgatgatgatcccgaattgaattttcatttaaaccaactcccaattctgccgagatttcagtttccataaaattcagtcgccactgaccgaatgcaatggttcagcacgcgattggacacttcgtcgccgggcaatttgatgtataacactttgccacagtcgtcgcattgcaaaaactcctcccccacatttttccatccatgacgtgcgcacacaacaggcgaaatttccttcggcttcgcaattcgactggccaccttttgatttggtcaatgtttacaacattctcaaacagtaattccaaatatttcacatcaaaggttgccaatcttcgtctgtaatttgcccaactcttctcgtcattcaatgccaattcagcagacgagctaaatttttagaaataaataaatcactaaacagggctaattgtaggccaaacatttaaaagtacctgccaacattcacgcctccatcatttccgttgactgcgtcgtttctagccaaaaaatcggaaattgagcgatggagcgtttttaccaaagtgttgcattcaatatcggaatcggcttttcgttttgtcattttttggacaaaatacccaactgaatacgtacaatacataaaaacgttcaagattagaaaaaagcaaagaaaaaaagttaaagatgaaaaaatcccggaaacgacataggtatgtaatttaaattgtgcctttacgaatttaatagtttcaaaaaaattttccagaagcattcaagtttttgtaagaagtacctacctatcttacaattagtatcattcgatagctctctaatctgtaagacctgcaggc

SEQ ID NO: 20568 - DNA, 914 bp, Heterodera glycines
aagtgtgcaaatggcctagtggctagtctccttgactttccttgcttctttcccctggttcaatccctctacagaaattagattattttcaattttttttgtatactcgtgggtttcctataaagaaaatatgattcctcatagttttttttaaattgatacatattttatcatttttaaatgaaaatcctaccaattgagcttaataatcccaaaaaccaaccttttttttgttgaaaatctgttaacaaattacacccaaatttttaaaatttcccccggcggcgcctatcggcaccgccggaccccttctttcccaaaagttttttgaaaaagcgctccgaaaaaaagtgatgtgaaaatcaaatctgaatttctattaatattcgatgatttagtccaaaaaatgatttttgaaataattgaagaaaatttgtttgaaaattttcattaatttaatttgctttattttgggttttattaaataaaaaaccaaataattttgtattattttcacttgaaataaattaaaatttgaatttttttttaaatttttaaaatttttttgaatttttaaaatttcccggttggtcccggttcccggtttttcttgcggtcccggtcccggtcccggcttctcaggtcccggcaagtcccggtcccggttttggcaaaaattcccggtcccgtggcactctactaaaatccattggacgcataaagtgcaccactagagccgagttgggagccctgataatgacattacctttcacttttaagacaacaattctgggctcttgtatgattggtccccataaatttttcgaaaaaattataattaataaagagtcgggtagaacaccttttcttatgttttcggggtcgctgatcacgaatccggcatccatttcgac

SEQ ID NO: 20569 - DNA, 2139 bp, Heterodera glycines
agttacccctactcatggtcaccattggcacattggatgtgcagtggattgacattcacttcaccgaccgcagagcgaccgatgaggacagacagcgggtgatccgagtaccggtacctaaggcatcgcatagcagggttgaacagctcagagactttttggcggtaacattgcgaaaccgtagcggagcaaaactgttgccaacacccagtgaggtggaagctaacaggaaccgaacaaagcttcttgattctccaccaccactgaaaagagagaaaagagatgtgtcatcaacgccaatgtttgacgcgagtggaaaacgcctccaggactctcctcctttgtataatataaatgaagacgaacgacttgaggagtcaccgcctccttttgaagaaacaaaaatttcggcggcaccaccaccgcctgtcacaagccccgttaagccaacaacaacggtcaaaacgcccgctgctccagctgcagcaccttccgcaactgcaaaaccagcaacgcagtctacagtaacaaaacaggcaccccaatcgccaaaaccaacagcaaagcctactaccgccacccctgttaagtcaacaaccgcccctccgccaactgtaaagacaacaacagcccctccgccaactgtaaaggcaacaacagcccctccgccaactgtaaagacaacaactgaggtaaagagcccatctgttaagccgacaatttcggctcctccagctcagctaaagtcgcatgcaaagacaactgcgccagccaaggcgccacctccagcttcggtttccgctgaattggctcctcgcgctcctctggcagactctccaccgcgttttgatgaagaagaaaataaaacagacaaattaaccgccgcaaaaccttcaactaagacgacaattacggcgcctccggcgcaactaaaaagctcggcaacgcctcatcaacaaaaacagcaagtgcccgtaaaaccatcagctcccatttcggttcccgcaaaaccgtcaggctctccaccgcgttttgaagaaacgagacaaaaacagcagcagccaccacccccaccaacatcagctgctttaacactagcagatttgccagaaaacaccctcagcgttcaaatagaccctctctcatatgtgcccaattccgtctcaattcaatatcttgagaacatggaacgattcaagctggtgttcaatgaggcgatcgtcagtcatgtgtccttctcaccgcagttgggctatgtgcttggctttgaaaaccctcaacatgtcgtgtcaaatgaactgtcaaaatatcctgtggatttgcgcggaggcatctcaagctttgctgtctactcgaaagggttgaccgaaaacatgatcattggcaattcactgagttcgctgcttcgtgttgtgtctatcagcggtgccatcccttgggagtacaacgagaagatttacgactcgccaatatttgcccgtgtgttaccacgggagatcaatgagattgagattgaactgcgcacaatggacaaaggccgtctcgtgccgttcgcctatgggacaacgatggtcgtactgatatttaagaaagtgataaacttctgatttcatcattcattttgtttttatttgacactaataaatggttcatattgtgtttgatccaagcattgcgcagtatgacgagtacgtgcagtacggtagcggcttagagaaggaggaattcgactacttccggggcaccagcccttttcagaggggctacggtgttcagcgaggggcaggcgttggagacgtgtttcgggggctttggcgctttttcctgccaattctgcgtcgtgttggaactacggtagggtcggaggcgctgagcactggacaacgcgtgctggagcgagtcgggcatgagggggtgccgctcaaggaggcgttggtcagtgagggaaagcgcggaattgacactgtgctggagaaaggcggcctgcccaaacagtttggaaacggacgaacgggtataaaaagaaagagagcacgtgtgcctggtcatcaaacaataattggacgaccagttgcaaagacagcaagaaaacgagttcgctcagacgcaatttggactttactaaataaatggcatttc

SEQ ID NO: 20570 - DNA, 1528 bp, Heterodera glycines
gaggaaacgtagggctagtgaatgctagcaggctctctttattttgttcgttctaagaatgttttggtcagaatttttgatcatcaaaattattttatgccaaatgaaaagatttacgttataaattgttatgattttttggtttcttgatatcattcgctagccctacgtttcctcgattagcctgcaaaatttcaaaaaatttcgttcaatttcaaaaaagttatgaccaaaaatgtctgaaaaactggttctttgactacttttagccataactttgctcaaacttgaccaaattttttaaaattaaagtgagctaatagagaacccataggctatcgaatgtttccaagaatgtttaatttggttgactttgacaaaagttatgagtagttttttaaaaatttgtactggaattgaaaattaaaattcttttgctgaacgcgcttagtgaatttgcgcgcatttttgttttaaattttaaatttcttttggtatgtagcttcgatttacttttcttacgatgattttgggctcagagctccaatttttcaaattttcatttgaattttaatttttaaaccattctaaaaagtcccatttgtgaggaaaaaatacagtattctaaaaatgtggaattactggaatcaattctaaaatgaaaataaaattgagaattatgaaaataatttatgttatattatcctttttcttcccttttacccgcctcattcacagttaattaagataataattttaattgttaaatttcttctgagtgcaattttttacataaaatgacatcgttggttgaattgtatcttcccagcaaaatgatcactttcgtcactttgtcctgggtttcttttattatgtcctttgaattgtatcttcccagcaaaatgatcactttcgtcactttgtcctgggtttcttttattatgtcctttgaattgtatcttcccagcaaaatgatcactttcgtcactttgtcttggtcttcttttattatgtcctttgaattgtatcttcccagcaaaatgatcaatttcgtcactttatcctgggtttcttttattatgtcctttaaattgtatcttcccagcaaaatgatcacgttcgtcactttgtcctggatttcttttattatatcctttgaattgtatcttcccagcaaaatgatcactttcgtcactttgtcctggtcttcttttattatatcctttgaattgtatcttcccagcaaaatgatcactttcgtcactttgtcctggtcttcttttattatgtcctttgaattgcatcttcccagcaaaatgatcactttcgtcactttgtcctggtcttcttttattatatcctttgaattgtatcttcccagcaaaatgatcactttcgtcactttgtcctggtcttcttttattatatcctttgaattgtatcttcccagcaaaatgatcactttcgtcactttgtcctgagcttcttttattatgtcctttgaattgtatcttcccagcaaaatgat

SEQ ID NO: 20571 - DNA, 1851 bp, Heterodera glycines
ctaccttattttttctgtgggtctttaccgtattttcgattgccattattttacgaattcgattgtttagtaatttaaaattgttttgctgccaaatgcttgacaaaatattgctgcattcacaaatatttttgaataattcttatccaatgcttaaattgaatttgagttaagccaaatgctaccgtaatgcaagaagccgaacagaaagcggacggtccagcgcaatttccggccgctgctccgaagccggtaacatttgacaataatggaatatggtctttacaataaaattcaaaaaaaaaaattttattttaaaaaattattttaattttgacaaatcacattagcatggaggcgtcaccacggaaaaggaagccgcagacttcgacgacacaaagagcgccggacaaatctcagaccggtaattaattaattaggggtcatatccaagggcgtatctagggggggggaaggcggagtttaaacggagatggagcagataagcccattcctggaaggcgttcgcatcattcgattacccgctgtcattcattaatttttttctctctcaattaatgcataatgggattaccaaataattttttttagcaaaataaaacaaaatcttattacgaactgaacgacttcgaatgtcttcatcagggggctcgtcaaatgagttcccctttggtacatcccaagccttcgggcaggaaacaaaaatgtttgagtggaaaggatgatgagtcctcgatttcggctattgataggaaactttggcaaggaaagaccacgataaaaatctctgatttagaaaaagctcaaaatgatatggggaaattagaagatggagtgaacagagcttttcgctacatgaatcgttccttgaaccaaaaagtcaattgggtgaaagatgtcgtgtccaatacaaatgccaattttgagacactgaaagtccaatacgagaccttaaccgaaagagtcgagatgttggaacaagacagtgatgggacgaattcaggtgggactgttagtatttctaatctgaatagagcgtcgcgtgtgccgtttgtgacgccaatgggcaatgcacagcccaaccaagttgtaccgaacccagtgccaattcatcaattatcaagcgaagacgaagatgacgggccgactctttttggcctgaacatgctctcgaacggacccacagtggggtcaggtttggaaatgttttgtgaggagtctgtttttgcatttgacgattgggctgaacgtttcaaggattacctgtccgtgtcaggcaaggcttacacagaacaagaaaaagtcacaagactcaaattagctctgagggacactcctcgggcactgtttaaggagttattgccagcacaaatggacactcttgactcagcattgagtgaacttcgacagaaattggactcccctcagcgtcgggaaattgcgaaacgaactttatcgctgtgcaaacaaagggaggatgagacagtggcgcaatttctcagacgcctgacgcctttggtggatgcgacaaattcgacattgaccggtgaaattcgaaaagagaaaatttgcgaagaatttttggatagattgaagccaaacattagctttcttatccgtctggtgggtctgtcacgagcaaaagacttggacttggtaagagcacaagctgaggagttggaggctttactattgatgaacaagggcgatgaagcatcacgcctttatcaggcagtcaatgcgctgaacaatcagtcatcccagtcccagtggtctacagaagcaaaccagaataatgatcgtgctggacagtggtcgtcaagcaacaat

SEQ ID NO: 20572 - DNA, 976 bp, Heterodera glycines
  unsure (1)..(976): unsure at all n locations
gaagcggttagctctcgagtcaaagcaccagaattcaaggcaatatgagaaaagtgtcactttagcacacgtgaatgaccaacactgggccacaaccatacaagggaagggcattaaaatggactcggataagcaacatcctgtgatcgagcaacttatcgcatcgaacatcgaatcaaattcataatgttctcggttttatgacataatatagaaaatctatacatacataactcaggatttttcttcagttattccagaagttataagtgcaaaagttgattccaaaattggagaatacgtgaaccaatcaatagaagaattaaagttaccccccccctcttgtcccccgtccccgcccaatctccccgcaattgtccccctccctttgctcccccttttcccctcgcgccaattccgacgcggtccgtgaactccttttcattccattggcggattatctcgcctaatctccacgccgcttaaaaattncttgnctccctcccatgcgtccattcatttncncaaattcctttctcattgcccattatcattcttacattttgttttctctttcattttctgcattgattgctcaatatttataaatgaggtgattaaattcaaatcgacacaaataactgaaatgactgatgagtgatggatgaatcggttgcaatcggagattattggcgagggcggggggggggggggcttgaaattccgattggtcgtcgctctcgggggtttctcttttctcttccgtgtcaattccccgtttcccgttaccatcgattgtctctcgggagtatcggctgtatccccccctctcccctttttgtcttcggctcccctttttgctccattcttcgtcaccactttccgctctcgccctttctgttctctgctcaatcccgagatcagagggtgattatccactccaccgtctctctttgctaacctaaacaattacccc

SEQ ID NO: 20573 - DNA, 429 bp, Heterodera glycines
atttaaatcgttcgccgattgtcaacggttggccggaatgcagggcggaacacaaacattggcagagtattggcaggagacgcaggggtccgttggggaggagggcattttggcattcgttggactaattaacagaaggacggtgccaaagcaggacaattgggaacacttctacgcccaaatcggtaggtgcgatttgtacaagagcacgaacggaaatgggaaaggagagagggggagggggaaaagcagaaaagacaatgggaaaggagagagggggagggggaaaagcagaaaagagaatgggaaaggagagagggggagggggaaaagcagaaaagacaatgggaaaggagagagggagcgggggaacagcagaaaagacaatgggaaaggagagagggggagggggaaaagcagaaaagagaa

SEQ ID NO: 20574 - DNA, 2754 bp, Heterodera glycines
  unsure (1)..(2754): unsure at all n locations
agtggtcaaacaccgatcggattttatgtaccaccaaaacaggaaaaggagaagaaacaatctttttcctcttcggtaagctgttaccgtatattctctaattatggccctgtctccattaatcccgctgtctccaattatcctccctttctgaggaggttgaaaaataatccgccctatttatcccccggaggataaatggaatttttattttcaaaaatttttttttttatttttcgcgttttttactgaaaattccattaaaaatgcaataaaatcgggagaatacacccctaagaaatgacccgaaaaattttagaaatacacccttaagaattgagaaattttctcaaaaattggtcgccaaaatctaatttttttttcttgataaaattttccttattccaaaaaattataaaatgtttatttaataatcatttaaatgaccaaaactaaatttcttttggttaagtttttctccctaaaaatccttaataaaaaaaaattataaatgtatatttcatgcacctttttgtgatttttgtgccttttaatgctattttttcaattttttctgcctattatagtgcctttttcccgatttttgctgacttttttccgttctctagtcataagtgaaacttgattgcatattcgggatctacgacctaaaataaccctaaaacatatttttggatgattttggtgaaataaatttccactcgaaaaatattgcccccccccccttggtcccgaatcgtaaaatgagttttatttttaaaactttcttcaaaaagagataaaaatataaaataaatcttataatgcaaaaaattgtggattttttaaatattttatgaaaatttcctttcagaacggagttctgaattttttctgaaaaagctaaatccagaatttttggttttcatctacaagttagaaaaaccaaataattatataaaattctcccgatttttcaaatttttaagctttattccactaaattgttcaacactgaagtgagttgtgaatttcgcctaaatttccctggctaaaaattttcaaaattaaaaaaaaaattccaaattttctgaaacgtaaaataaagttcattttcgtatttcaatatttcggggtttagtcaatgttttataaatattttggcatttttcgaatttttcatataatatgcagaaattcttcaataaaaaacaattttatttggagtgatgacattttttgtttcaaaaaattttccattaaataattctatcgaagaataatctccccgtctccatttatgttcccgtatctaattatcccccccccccccccccctttctgaagaggttgaaaaaaaattcccccgggccataattagagaatatacggtaagtaggaaaaagcaaaatttgggatttctatttttacttatttcgtttgtcgcattttccgtccactttttgcaattttgaggatttttaaggaatttttcataaatgcccgaaataaaatgcaaaatatcgtaattttcatacatattttcattttttacaacttttgagattttgaaaatttagaaaaatatcatataaaactcatttttttgaaaatttacccttcccccaaaaaatcaagacttttttcttaaaagaaatatcaataaatcaatttcaaaatacctataaaacaaacttcatcgtatgttaccgtaactagtactagttttcaagaaattgtgactcacggatgcattttccacttacgcatttcttccctcgtggtttatttaattaattatattaattaatgtatttgtttatcagcaatcggaatttgagcatcagccaacaatgtcaagacgaaatcggaccaaatctaaacacatggaggaacaacctcaaccaacggccgataaatatgatttttcgctgtacaacaatccgtcatcctccagtgttcgttttaggcactgaataatggctttactcagaaattggggctgttacgaaagctttttgagtcatattttataatattaaaggaaattaatagaccagtagaggtgtcgaagaggaaatattttgcaaaatttgttcagaaatttgcttaatcaatctaaaactttttaaaacgtagcggaaatctcgggattggggggtaattactcaaaaatcatcaaatggaaaattttggtaaaaaatgatgcattactttgcccaagtgtaacaaaatttaaaaaatgatatctatcatacaatagccacaatggttcactattcctgatcaaaatttcaaaaatttttggtcactttctcaaaactttccagaaaaacgaaattttttgaaattttacaaggtgattgagaatatttagggctatagagtgatgtcaagaataaaactttggttcttgagcaaagttataagcaaaaattcttattttgattggttttttttttgaattacgcccattttgatgggtttgagtaacgtcataactccgaaatctcccttctccaatttttcgtggcttaaaccacttaaaaagtattttcagcacctcgggactattttttgtaatgattagaggtcattagggtttggttggaactcgttttgggcggttttttaacgggcccaattctaaagtttttccaattttgttaagaaagaaatccacttttggacctgaattttaaaccgtagggattctcttatttngttgcgttngtgcctcctattattttagga

SEQ ID NO: 20575 - DNA, 2350 bp, Heterodera glycines
ggtgcttgtattactcggttcccgtttgccctaccgggactgataaatcgaatttccaaatccgggaccgggacctcggaggaccgggaattcccgcttcgggtcccggttcccggttcccaacccctctttctttggaaaacaaacaaaaataacatttaaattacaaattcttttgtgaaataattattttagttttttgaaaaattatgaaaatgtattttcggtttgcagtgatacccgggcccagtttaaaaacttggaccccaagccaagcccgacttttcttggcccggcaatatacggaatttattcaatgcctattggaattttagaaaaaaataaaataaagttattaataaaaatggaaaaaaattttctataaatatgtttaatctgtgaatgcgaaatttattggtcggcttaattaccagcagcagatggagtcggattaaaatgaatacacaatgcaataatttaatcactttttcgctggagtgatcagcaacagcagttgatcattgagcaaaaatggggaggattaattgtccatcggcggagtgtacaaatatgaaaacggcaacggataaaattatacatgaattattgtacactaatgagatggtaaatgccatttttacattgtggcattccctcccaaaatgccatttgtcatttgtatgcaaatcgatggctgctcatttttcctctgctgctgctggttactcacttttatgaactccttgtaaatgaggagaccctaattgccttaaattacccaataaaattttctagtttgagaagcattcccaaattaattttaggaaaagctaaactataaaaatacataaaaaacaaaagttggattcatttctctgtcctattcaaaacgaagaagtgaaagagagcgagagagatagagaacgcagagacaggcaacgcaaggaaaggcgagagaacgcagagagtgttgccacaggagagaaaaagcgagaacagagaagcaaagacaaaagtgtgcacgttagaagtggaagcagaaaagcgagacagttctacgcaaaacccctcgggcgaggacgaaaagcggccgaatcattgtgaaaggacgaacgcaacgcaaggcatagagaaaataaaaaggagagagagagagagagaaggtgagagatagagatagagagtgaagaggaaaaggcagacaacgcagaagagataaagcaaacggaaaggagagaagaaacggccattccttctgctgctgctactgttactggcgagacgaaacgggccaaaccaagttcaaagtgccaatgtgacgacggcggtttttgttcaatgctaatcagctattgctcactaattaccccaaataacaaaactatgcttctcccaacaatggcccccaaatgccttccgctcgaacttttgttcgaaatcgtgccttttatccctgccgaaaaagccgtcccgaatgcgctctcttcctgttggctgctgcacaaacttttgctgccacgtgtcatcaaatggcaagaggtatgccgtgccatttttgggccaaggaattgggcttgaaatgcacttttgtaacgtcggccacccaatttactcattctctgggccttttatgttttttaagaccccatcccggaaaaaacaccgaaaaaatttcaaaaaatcacgaagtctacgaatatattaatatcaaattaaactattcaagtatctggggtcaaaaacgattataaaataagatttaggcaaaaaataataataatacagtttttaggtatttattttttaatttttgacacaatacagtcaggtgcataagtttaacaccactagccttttcgagaaatttggctttataaaaagttaaatggttggtgatgaccaaaatgttttgacattttttgtagcatttttaatgggctttcgaataataccaatcattaagcaaatatcggttcaaacccgaattacagttgactttgtgtaccataccccattttcagtggtacatatgtttaacaccactttttgaatctcaaatttgagagcacagaaaaatctgaaataattcatgcaaacataactttttatgctgatcaaaatcaatttcggagtctacaaaaagtactgtatttcttaagaaaacagtgtttacagtagaaatgaccatcatcaaaaataaagtggccatacctaagtgggtataagacgtagactaaacattaaaaagcaaagcggtagtaaattttgggctctttccaataggcctaatcaaaattttcaaaaaaaatttcccaaccccctaggaaagtttcgaaagttttcccgattt

SEQ ID NO: 20576 - DNA, 1713 bp, Heterodera glycines
  unsure (1)..(1713): unsure at all n locations
atgtgtgtgtttatttgtgtgtgtgtatgtgtgcgtataatgatggtatgcgagcgcgttttttctttctntactttttctttttgtttttgtctttcttttctttctttttcttcacttccggctcaccgttgacgaagcgccggtctcggttcgcggcgcatcagtgcccgcagagggcaatgcaaaattcgctgcccgtccgtcgccgccactcccgcggctttgttcatcctgctgctcctcgccgtcatcatcgtcgtcgctttgcatgaccaggcgatgctgttcgcttcctgctaaaagcggggggtggggagtgatcatatgatctttttttttgcggggtggggaccgctttccacgtaccatttgcacgcacgccggctcgttgctgctgatcactttgacgaggtgccgccatcacactgctgccgccaccgccaaacacgccgtttccgccctgctgacttatcggcccgctgcctccgcttggaatggaaatggcattgttgctgtcatttgcttcaacaattattggcgtgtttgttgacggcggattgaacacttaaaaatggggaaaaattaatattttttaaaatcaaaaatgtttttttcaaaaaaaaatggggagaaattattatttttaaaattaaaatgctttttccacctgaagtggccaccgccgaagagctctgtccaacaatgcggtgccgcgactccgcattgtagagcagggtgaagggaaagctgcccttcgcattgtgaccttgggcgcgcactttgagccgtgtgaattccactatttgtccggcacaaatgttgctcatgcgcggcacacactcctgccagccgtgcatcgccatttcgtgctccaaatcgttgtggtcgaagatgatgcgcacgtcgtagccgctgatgtcggtttgggttgtgaacgggccggccaagacgacaaggcccacgacgcggctgaaaagcgggaaaatggaatgctgaaaaatgaaattaaaaaaacacttacttcatcaccatatctggttgccactccaagtaaatccaccacaggtttgagaaaccattctcaccaattgccggcacaacagacgcaaattcgggctgaatgtgtttgttgaccatcttctgcagctgccgggcatgcacaagtgcaaccgcttcacgcacactgggcggaagcgcctttaaaagaaaaatttttaatttcaaaaatttttttttgcccctccccctccacattgacacaaaagtgtaaaaaaaatgccacctcaaccacccgaatttgattagacgctctaccccctgggtcactccacgaaaaacttacactattcaaactccacattggcacacttgcgccagaaacagcaccattcggatgctgcacaatgccgacggcaccattcggatgctgcacaatgccgccaccaccattcgggtgctgtccaatgccgccgttgtccactgaattcgagacctgtgttttaaaaaaacatgaaaaagcataaaattaaaaattccccctaaccccagcacacttacagtcaatgtcaatggctgttgggtgggtagagcaacggcaccgcgcatgtgttccaactgcaaagcaccggaaggatcggcaccagtgctgccgccatgattgttcacattagaaggccttaaattgatttaaagtttaaacccccatcatta

SEQ ID NO: 20577 - DNA, 1882 bp, Heterodera glycines
gcaatggctggcaaactccactatgaagaacaacgtacctgcctgtcagagcatcataaaaagcagtgaatgtcggacagagttaagcagcgtgaccgaagaaaactgcatttttattcctattcatctgaaaccaaatatgatggagccaagaaaaataaccatctttttggggcataaatcaattcatttattgaaaacaatggcataaaagttataaaagccaattgaagagcaaaatttttatcggttcatgtaaaatagcacaaatcgtcaaaatattttttttaattgaaagaacgacattatacaatgagagccctgcacacaacacaaccatgattacctccctctagccattcttcaatacatgcattgtgaaatgcatggccgcatcctagcacacgcacatcgccaaacataggttgcagacagattaggcatctttgaccgaaccagtcgtttcggtaacgccgctgaagattggaggggcatggggtgtaaaatgatctaatttttagctctccgtttaacgaaccaaatcgcgcccgctctgccgtctcgcagatgcaccgaacaaacgtcccacgttgtgcgcattctgacggatgagcaaatggagagccttcgtgtccatcactttgtccccaaaaagtgccggtagcatggcactcagccattgcgcagtgactttggccagtgactcggacaaccatttgcatttttccccctctctgtcctcagaatcggtaatccgtcggagcttccccttctggaagttacacattatgtatcgagagtatccaaaataatttctgcaacaaatgcggacccaagcagaaaagaagcaatgtgaaaaaattgtcctatgaataatagcgtaccgattgtcgagcacaaaaagcagtgtatgtcggacagcattgagaagcgtgaccgaagaaaactatgcatttttattcctattcatctgaaactaaatatgttgagaaaccatcttatgggggataatatgaaagatacatttaattcgttgaaaacaatggaataaaagttggtactctttcggtttgtatcagggttgttccgggtcgagaaaaaggccgggtatcgggtttcgggtcaattgacaaatttttaatttgtttaaaaatcaaatggcactgcaatatttgcagcgaattgcgccatttataggacgatggaaataaaaccaaatggaatcaggcttttcagccatctgctttgcttaaattcaagaaattcatacaaaatatctttagaaaaaggataataatgaacaaatacaaatacaaaattttcgattccattgaacacaatcgtttcaaaaaaaattctcaatttccttatccacctaattttcacccagacccctttcttaccagtgcttatttcgacccgaaacccgacccaaaatcatcgggtcgggtttcgggtcgagaaaaaggccgggtttcgggtatcgggtttcgggtaacccggaacaaccctggttggcgttttgttttttacgccaattattttttggcaatttttttcgttttttaccgtccatgcgtgccttaagagtgtttgacgttctttaacaacccacaaaacatcatccttctctgtttgatatgtacacagacattttacgaaatccaacgaacattctttccttacgtcaattctgcacaaagacatgaaatattattaagaaagagcgatgatgaaagtggaaaagagggaattgagaataaaatatgtagaacgaagggagagagaagagagaaggcgaacgatgggggagagacacgaaagggagggaagcgtacggaagggggagggacatagaaagagggacgggaagggtgaaaga

SEQ ID NO: 20578 - DNA, 3067 bp, Heterodera glycines
  unsure (1)..(3067): unsure at all n locations
tttcatttcataataatcattcattttgctcattttttgttcttcggtgaatcgaattggacctaagaatataataaaatttaatattaataattaaattgaaaattaatttaaaatttacttttgctcatttcaatgccaaattcctttttccattttcttaatgtttctttgctaatgcccaactctttcgcaaattgcttctgtcttccattttttggcattcttttaatttcatcaatttggtcaataaattccctctttttctttttataataataaattccaaattcttttttccattcgtaaatttttggtcgattaattcccaattttttcgcaattttttgctcaattttattccaaatttttgccgaatattttccctttttcttaattccttctctaattgcgtgaaatttgtgaataatttcgattttttgttgaacatccaattgatctgtctgatcagttaattcattttgatcattttgatgaaaatttgtattttgatcagtctcattttcattttcatctcctccaattattatttcattttgccattcttcgccaaatatttcagcaaaagttggtcgacattttttacacagattaactgacaatgttttgtcagttgaattgtttatgattaagaacacaaatataaaaaggagaaaaagcatcactaaaaaaatataataaataattaattaataatttttgaatattttttattaaatatatttgtattaaaataaatttaattacatcagaaaaaatttttttgtggagaagcattgacaaaaaatgcgatcaatagtaaataagattaaataactgaaagttatgaatttcatcataatttcacatgaaacaaataaaatagcgaataaaattaaattatactaaaaaatttagaaaaaagtcagcagttgaacagcaatacacaaataagaaaaacgaaaaatttaagaattattttctttttcccatatttttaaagtggtaattccaattttcaataatccggcaatttttttgtcatttaaagaaggatttacttattcatttcataataatcattcattttgctccttttttcatcatgataaatcgaattggacctatgaataataaaatttgaaataaaaaaggtacttttcgagttatcagggcctattttctatttaggtttttattaagagctaaaaaagtaaaaaattttgaaaaatcatatttctgcctattttggcgttttgaccaaaattattaagaaaaatgcaataaaaaagaaaaatacaccactaagaagctcaaaaatttctgaaaattcttaaaaattcgtttccaaagttttttattttattttttgacaggaatttttgattttaaaaattatttttctaaatatttattaggcctaatttttttttagcttatttgatagatttgccattttacacccccctaaatttggggtttttagtgcctattttggcggtttttaaagccaaaaaatttaagcactattcataacaatgtcacggtttgcataatgaaaaatttacgattttttttcttttttccaaattttaaaagcagtggttccaatttgagaagaattgccaaaaatgcgatcaattagtgaaattgatcttcattagatctttcaaaaaaaaataaaatactaaataagattaaatattgaaagccatatatttcattcaaaaaaattataatttaataattgaatttatgcgaaattagaaaatttattgaataaaaaatctctcttcagatttagttatatcattcaagatatatcgcaattttcatgaattttttacgcagttatgattagagttgtacgggaccgggaaattttgccaaaaccgggaccgggacctgccgggaccgggacctcggtttttgttcgggaccgggaccgggaccaaccgggaaattttaaaaattcaaaaaatttaaaaaaattaaaatttttagtttatttcaagtgaaaatattaaataattaattttttgtttggttttttattttataaaacccaaaagttaaagcaaaattaatatattaaatatatttaataaatattttaaaccaaaattttcaattatttcaaacaataattattttttgactcaaatgatcgaatattattagaaattcagatttgcttttcacatcacttttttcggcgcgctttttcaaaaaaatttttggagaccaggaggtccggcggtgccgataggcgccgccgggggaaattttgaaaatttgagtgtaatttgttaacagattttcaacaaaaaaggcaggtttttgggattagtagactcaatttggaaacggattttctttaaaaaaatgataaaatgtgtgtcgattaaaaaaaaactatgagaaatcataaattgtcgatagaaacccatgagtatacaaaaagaaaatccaaaatattttaatttctgtaaagagattgaaccatggaaagaaagtagaaactcaaggagactagccactaggccatttgcacaatcattgttacttttaaagaatatattaattaatttttaaatttttttcctttctaattttcatcagtaatatttcacttagacccccattcttaccagtgcttgtttttcccgattcctggttgccctaccggaaccgggaccgggaaatagatttttaaaatccaggaccgggaccaggacctcgtaggaccgggaattcccgccccggtcccggtcccgtacatctctggttatgatccaattaaatctgacagtaaacagagaattgttaaaatcttggcgtaaaatgcttactccaataaatttgtttaaaaattatacattacattaatcttgagaattttgttcaattttatattccccgcatttttcaaaaatttcctctttaagtgttcccattcaaaaaggatccctcaaaatttaatggaaaaaagttattattataataacataattcaaataaaaattgaataaacattagtaaaagcaaatgaaatgnaaagtataat

SEQ ID NO: 20579 - DNA, 1644 bp, Heterodera glycines
  unsure (1)..(1644): unsure at all n locations
tctagagtcccataggaattcttgcgtcattggccgactgaatgccttttgcattgccaatgggaattcttgcgtcattggccaagggagtgtttggtgggtgattattgtccatgcgcttttgccttctgtttttgatggtctttgtatgttgtaagaatagaacaattgttgcttaaattattaaacaattttcaatacccatattcatagccctaataattaattaattaatgacctttgattgattgctcaaattccatcaattccttgcttgagagtttcacaaactttttccaagtttctttattttcttcattaagaaatgaaagttcccccatttttccgtcaactagcttattgtcgancatttagttttgtattttcattgttgagaccatttccttaacattttcactacttctccatgctttctccattttttcattgtcacagattttttctgcatttttgatgattttttgnggtttgctttcaaattcccttaaaacaaatggaaataaaaattttgaagctttaatttgaaaattttaacaattttccccgtttccctggccaaaaaccccctttccaaagcccttacttcttgaaccattttgggggatttaaaaaaaaaattttgtaaaaaaaaaaaaaaaaaaaaaaatttcaaatttagggcttattttgggggtaaaaaaatttcaaaaaaaaccggggggggaaaaaaccccccccgcctttccccctttttttttttatattttttttttttttaaaaaccccctcttttctcccacaaaaaaaaaaagaaatttttttttttttattttttttaaaccccccaaaaaatttttttttctcttttttttttttgggggtccccccccccctcgtggggggggggggttttttttttttattaaaccaaacaaacaaaaaaaaaaataaatatatttttgtttttttttttttttgttgtgggggggggaaaacaaaaaacaaccctctcttcctaaaaaaaatatagttgggtttttgtttttttattttttttatttttttttttttatttataaagaaaaaagaggggggggtggggggaaaaaagaaaaaagaaaaaaaaaaaaaaaaataattttttttttttttttttttttttttctttttttttttttttttttttttttttttttttttttttttttttttttttaaaagcgggttctttttctcctcgtcttctactccttttttctttctttttttttcttttttttttttttttttctttttttttctctcccccccccccccccccccccccccccccccccccccccccccccccccccacaaaaaaaaaaaaaaaaaaaaaaaaaaaaaaaaaaaaaaaaaaaaaatttttttttttttttttttttttttttttttttgtgttggggggggggtggggggaagaaaagaaaaaaaaaaaaaaaaaaaaaaaaaaaaaaaaaaaattttttttttttttttttttttttttttttttttttttttttttttaaaaaacaaaaaaaagggagagagggggggggggggggaagggggggggggggggggggcgccggtttttttttatttttttttttgttttttttt

SEQ ID NO: 20580 - DNA, 1013 bp, Heterodera glycines
tttttaatcacctggtggaaaatgcaaatttaatgcgctccctgccgccccaagcgaaggataaaaacaatggctttattattatccgatcaaagggagcagtacagttttgtacagaaaatcagccgacttttttgaaaatattttttatttatttattattttaatcgatggccaaccaaaatgaatgagcggaatttcttttttttggggggggggcgggatacacgggccataaaacggtgatggacgggggcagtcttcgcgtaaatgctttattaatgcaattacaacatgtcataccaactgatcgctcttcaaccaattttcaaatggtttaatcggagacggaagtcattcattcattcattagttaattaggtattaattatgcccactaattaattggctcgtccattcattaattcatcttctttatgtcaccagtttttcgtttgtttgttcgcctgcattttgtcaattatcaccaaattattttgtggggtgaggggaaaatgcagggcaaaggcacgctgtcgatcattgcttttaatagcaggtggggaaaagcccatcgaaaaagggatgggaaatgccggtggaagttggcaaaaaatcaaaagattggcataaaaaataatgaaacgcgtgccaatccccaaaacttcaacaaattcgccccgctttgcgggtcttcgaagatttgtcgaatttataccatttcggcgcaatttggtagccaaatgaatgatgtcacggcaactgatgtctgtccaacatcagcagacagttcgtccatcatctgccagtgttttgctgcttccgctcacaccgattggccttccttcgcttcttcctaatgttgtgccctcccctctcatcccctctcttccctccttctctctctccctccctcttcctccctctccctccctcttcttctctcccctctcatcccctccttctctctctccctccctcttcctccctctccctccctcttcttctctccc

SEQ ID NO: 20581 - DNA, 995 bp, Heterodera glycines
ttcatgtccaatttgcgcttttcgttcggcttcgtgcacgagaacggcacgcgaccaaagcagcttagctcaggattggattagattacacgacgcggctattaacactcattcactcagggggtgggggtgttagccgcttaatggcccgttttatgccaattaacattgtcctcatataaaacaacaaacgcagacagatggccaaaggatgattgcaatgagcacacgaacgaaaggacaaaaacatattgcacacgttaaaaaggcagaattttggccaaccctgagggtgggcacataaaatggcatttctttgtcggcattattttattatatccccttttaaattcttttgtttttgaatttgaaaatgcccttccaatcggtgtccaatttctcgattgaccttcttctgtcagcccattcggcaactttacccaccacaactatcagcagcatttctccgtctctcccctttgatttcgttgccgtccatccgccgtcggctttttctccgctaaatttggcaaaaaatggcaattttttgttctctatggcatttgctccgtttcaattttggtggcgtccctccatttccgcgtccgaccttccctcaacaccatcatcaagttcaagcagcacagcaagcatcgtcagaagaagaaagtcagcggcaactgttcctcctcctccaccttctcctcttccttcgttttcgtcagttgtcgcgccgtcgtccgcccattcgtcggccgtgcttaaatttggtcatgaaaaacttttgccgaaacatcaggataaggtacaactttgccagcattggcatgccgcaagcaaattgccgaactttatttgaaatttcatcccaattggcattttccctctccgccaagggactgggtcgttcggcgccgtcgttttggcgtcagcccaagtttttggactataacttttttcgttgtcaaccaaatctaacaatcttgatatcattc

SEQ ID NO: 20582 - DNA, 1890 bp, Heterodera glycines
ccattacggtggagagggtgaagattatggcaatgatttcacaagcttccgccgcctgtcgactcgaacgaaaaaggtgatcactgatcatgatcagggaagaagagatttgagaccgttggcaaaaacgatcaaaatgggcgttagtcaacaaactattaaatggaataggtattttgacaaaaaattattcataacttttgccaaaatgaaccaaattttaaaagtttggtactttcgatagccctaagggttttctactacacaatttcaagcaaaaaaaaaattgttaaaatttcaaaaaagtcatgacctgagaaattcaaaaaaaatcaggtttttctaaatatttttgatcatagcttcattgaaacttaacgaaactttttaaattttgcaggataatagaaaagatttagatctatcgaatgatagcagtaaaatttggttgtttttgagtaaaattatagcaaaacgaaatttccatatgagatttcgtaccaatttccgtgctgacaatgagtcgaaccaaaaaaatatcaatgcgactaacctaaaagaagtatcaatgatagtaatatgtatttaaatttaattattatcgtaaaatttaaactcaataattttttcccaaacttttttgaaacttaattaaatttttgatatttaacagaataattgagaaatttttgttctatttaatcacataaagggggaggtatggatggcttaattgaagtttgatcaatttttatgcatttaaacgacaaatttgcctttttggatgtccataaaaatatgacacatttaatagggtctaaattttattagaaaaattaaatttaaatattattttatcgatgataattttggcgctatatggaaagtgaccagttttgaaaattttttcaaaaggggggacccttttgttttgcaaaatttttttgtgatagtcataaaaatttattcatcttaggtttttggggtccccgatcacgaatctttcaattattttgatcaattccgatttcctaatctaaatttgaacaaaaaatcataatttgaaaaattcaaaatttcgatttttattcgagttcggcttagggattagaaattagtcaaaatacatgccagattcgtgattagcgacctttaaaaacccggataacaaattatcatggttttttatcttaaaaaaattttgcaaaacaaaagggtccccccttttgaaaaaattttcaaaatatgtcacttttcatatagcgccgaaatttttagctaaaatatatttaacttcattaaggccaatatttttccactcgtaaagtgagcattatacataatgaagataattaaactctaattaagtattcaatcaatttttagtcggtaattaaaattttttattttatttttttaattatcaattcagcgattaatggtcgaatggatttacaaattttagtagaaagaggggaaatcaagtacttgatgaacaatcgtagacaaaacttatgattaatccgaattcaaatgtgatcgctgcatttctaacttgaatgaatgcaaagaaaattttttaatttccatcgggaccaaaattctccagcattaccccactttcaatatgtttccatgtatttaagctggaaatgctaattaaaaaattttgagtttttgttcaaattcgcgtcttggattcggaattagtagatgccggattcgtgatcagcagatcacctaaatcctcggaaacatttttcaagaaaaaaaaaacttaaaattggcactagtaattgaagaatctatacgaaagtaattttatgttattttgtacactcacaattcggcatgttcccttgatagccttaagcaatatcgaaatttgac

SEQ ID NO: 20583 - DNA, 1017 bp, Heterodera glycines
  unsure (1)..(1017): unsure at all n locations
aatgcacacccntttgacacgtaaaatattccaaaaaagagatagtgattttttctggattaggccggagaaataaaaattaccagctatttgaaatgcagtgggcaagcacagcgagtcgcttaaatgcacaccctttgacacgtaaaatattccaaaaaaagagatagtgattttttctggattaggccggagaaataaaaattaccagctatttgaaatgcagtgggcaagcacagcgagtcgcttaaatgcacaccctttgacacgtaaaatattccaaaaaaagagatagtgattttttctggattaggccggagaaataaaaattaccagctatttgaaatgcagtgggcaagcacagcgagtcgcttaaatgcacaccctttgacacgtaaaatattccaaaaaaagagatagtgattttttctggattaggccggagaaataaaaattaccagctatttgaaatgcagtgggcaagcacagcgagtcgcttaaatgcacaccctttgacacgtaaaatattccaaaaaaagagatagtgattttttctggattaggccggagaaataaaaattaccagctatttgaaatgcagtgggcaagcacagcgagtcgcttaaatgcacaccctttgacacgtaaaatattccaaaaaaagagatagtgattttttctggattaggccggagaaataaaaattaccagctatttgaaatgcagtgggcaagcacagcgagtcgcttaaatgcacaccctttgacacgtaaaatattccaaaaaaagagatagtgattttttctggattaggccggagaaataaaaattaccagctatttgaaatgcagtgggcaagcacagcgagtcgcttaaatgcacaccctttgacacgtaaaatattccaaaaaaagagatagtgattttttctggattaggccggagaaataaaattaccagctatttgaaatgcagtgggcaagcacagcgagtcgcttaatgcacacctttgacacg

SEQ ID NO: 20584 - DNA, 1811 bp, Heterodera glycines
catcctgtagtggtaaaaaattttcagtaaaaaaaactgttatctgaatattacaagcaaaattaagaccattccaaagaggaaggaacaaaaatttttgcctaaattttatattatattgttgaattgtttgaaatgcatctgttgtctgccgttttgaaatttttcaacttttcgcgaaaagatttcccagaaaatgcatgggacaaataaaaattaaacttctattatgatcaatttaaatttcctatcagtttcgggtttgctttaaacacgctggccgatgaaaaaatggagttttatggatgtcaaattttgggacttttcttcgacgtggccatcagcgggttgtttcgtgacaaaaacaaaccagtttgatgttattcgaatgagctagacgcgctctacattttcaaatgtatcaacaaagggtctaccgccactccctggcgagatatggcctgtcaaagcagaacggggccaataaatttgaatttttgttaatcttcggcagttgcctttatttcgagcctactctacttgtgcatcttttcccaatatggcactgcttccgaattattgaactgtttcacgactgattgttgagataatttttttttccgattcctttatctccaagcatgagccttataagtgattgttcatatccttctcttgaaaaaaattgtcagtaaaaaaaacacgttttctgaatattaacaacaaaaatttttagacactttctaaagaggaaggaaaaaaatttttcatttgcctaatatttatttatactgttgaactgttggaaatgcagctgatgccgtcggaaaagctccgattttttggggaagtttttttctttcagtttcaccactgattgttgaggcaatttttttcgccaatttcttttgtctacaaacattatttattgcgtttcatcctgtagtgtgtaaaaaattttcagtaaaaaaaacttgttatctgaatatttacaagcaaaatttaagaccatttccaaagaggaaggaacaaaaatttttgcctaaatttatattatattgttgaattgtttgaaatgcatctgttgtctgccgttttgaaatttttcacttttcgcgaaagatttcccaaaaatgcatgggacaaataaaaaatttttctttagactacaatttttttatcctgtagaactgtaggaaaggcaggtgatgccgtcggaaaagctccgagttcttggggaagtttttatttatcagtttcaccctttcgtttgtggaggcaatttttttcgtcattctctcttgtagtacaaacactatctattatgtttcatcctgtagtgtgtaaaaaattttcagtaaaggcaacttctaatcggaatatatgcaatcaaactcaaaagtcatgtaaaaagtggaaagaaggcatgaaaaggcacgaaaatcccgaaaaaggcatgaaaaaaggcattttaaattttttattaaggcttttaagggagcaaaacgcgtaaatagtgcgcagaaaaaaaggcatatgcctcaaaagacggtctctatttataagtaataaaacaaataatatgccaaacaaattgtaaattgtgccgctttgagtgaatgttaaaacaaagtgttaattaaatataatttgactgatgaatcattcgctgattgtcccttccgtcggttggtcaactgtttaggtttatgtctttgtatgggctgggctcggcggagaagggcaaacgatggttgggctctctaggggggctttgctgcttctgccccaattgactccggccattttct

SEQ ID NO: 20585 - DNA, 2005 bp, Heterodera glycines
gtcttcatagagtaaaaattcaaagaaaatttaaaatgatcggactaatgctcttgaattcctcataaaagagcttttttaaaaattgcgaatcgtataaaaatgcgacaaaatcacaaaatcgtagaaaattcaaatatgcgaattaatcgctgatcagcagcactcatatacaatataatacaaattcgatgaattgttgatcagcactctagttcaatagaatacaatacacactctgctgatcattggcacactttctgctgattgtcgctgaataaaaacagtttctctccgtctcgtgtgatcaaatgcatataatttgatcagactgttggagcagaatcactatgggatggattacaaaaacgtcgattgattgttggggcgggcgggtcagggaaagtccgtttcccccgcggggtgtggtcggcgatggatgggaatgggacgacgatttgtgtgtgtgcgtgtcgttgcactacaaaacgccaattgacggatggggggaaatcaattgctctaattgtgcgattgtttataggggggggggggcacccgcacagcccaaggccgacggtcgagatcagataagatcgagattggagttggagattcgagatttgctcgctgagaccttgggatatgaggtgggggcgggaaaggaatgtttgacagactaacggcggaaggaggcaattggattggataaagcgcgggagagggagggggggggggaggcaacagaagggagatgacccttccgatcaaatttttcaacaaaatttgatcggaaagtgtataaaaaaaaaaatgctacgaattctatgctcattcatatttggggggacaagtacttacattcttacaaaagaaggttaaaattccgcacaaatatcattagaacaatggacgaacgcaattgaaaatatccttgaattttgaaaaaccatggagctccccctagggtaagataaaaaaaaaaaaattctgaaatttaaaaattactaaaaaatcaatatttaattaaaaaaataaatagtaattattataaagcattaaccattttcacccatataaatccattgactcttttccaatcttttccccttttttatccgcgccactcaataaaaaagccccgagggtatccacctgctttgcttctcccccaattatttaatgatttttgtctgtctgacggcgatttgattttgctgttgtttgttgttgttttggcgttgtgtttgttgttgctgttttgcaaaatctgatcgggcggaagaggaagcacacaaattggtggttgtcaatcatccgcggcgattggtggcgatttgtggggcgttttgcccctatcgccgcccccgcccacggcgatcggtcgtcgctgacggcggcgtcggtggtcacgcgggcggggggcatttgtcggattttgccccagcggaaatagcctatgtttggcgaggattatccctcccccggccgcgccggagggagcaccaccgctgactaactgacaacgtgaatgtgcgcagcgggcgcgcacggcctgcgcccgcccgtaatcaatcaaaaccgccgccaaccaaaccaaacgctgcagcacagtggcagcggcggcgggtgatgtccgctctgccgccctttgtgaggcacgcagcgcggtgcatgcacacaaatgatgtgtgtttgtgtgtgtatgtgtttcagtacggcgcatgcatccggcgtgcatgtacatgtgaaaccggaagcgcacactgagaaaggagggcagtgcacgcaagttgattatatttagagaaaaagagaagtaacggaaagtgtagaaaaaactaattggggttattaattgttggtccggaaagggacacgccataaatgcatccggaaaagggagcaagtgtttatagagtgcatgcccggaaagaaaaacggaacggacatgggacacacggatttgttgaagtgagtaatttaaaaatgaaaaaagaaaaaa

SEQ ID NO: 20586 - DNA, 943 bp, Heterodera glycines
  unsure (1)..(943): unsure at all n locations
taaaatgaagaaaaagaaaatttacgatttttaaaagaagatttactggttttttcgttatttaaaattttcaaaatttttacaaaaatattactatttttttttataattttacttttcataaaaagattattgactttctttttgggtttctcttagtgcagagaggggccattttagtgacgagcttttacgagctttttcataaatgtggacatatcacatgaaaaagcgcgaggcaaagagaataatcatcattgtgaattaaacataggaaataatttcatttgtaaaaaaagaaaaaaccatttgctatgctttaataaaataaataatttttattttatgtaaaatatttttaaatacataaaaattattacttatgcggtaatatttttaattaaattatttgtttttttaaaatgaacagggcccggttaaagaaaataattagctctgttattttttttttataaattctgatgtttttttaatttatgtcatggcatattttagcttttcaaatttagaaaaatcagtcaaaaattttgacaaaatctggcatccagaaaaatgtccaacaaattgaatctgccgttagcattttgcacattatttgtccatattttgctggatgtgccgtcgtcaagcgatgggatgattgccaacaccgttagaaaccctgcgtttagcaaattcgtcactcagataacccataaatcgactcaaacggctcaactggcacaaagagtggtagcccagaaagcaaccggcggaacaatccgaagaaacgtagccaatacccaaacgaaaaatgttggcaaaatgccaaaaacggcgacgcaagaaacgacaaacggtaaagaaaaaaatataatacaaaactttgtgtatgaggaacaattaattttaagaaaaaatctttataaattanatagttctt

SEQ ID NO: 20587 - DNA, 985 bp, Heterodera glycines
caaaacaatcataaaaatatttttttaaatattaataaataatctgttaaaaaaggcttttctggatggataaagattccatccatctgggaatacaggtcgggtgggaaaatgagaaatattttttattctgtccattaatattgccaggaaaaatgttatcaatttttccctacagtatgccgaaattgcgcacacacgcgacgagtggtcacaggcgacgctgaatcccattgattaccccggaaaatgtagggttcagtttgccccggacaatggaggagttcaaggaaggactgatcaacgccgcactggacattctgccggattttgcgtttgccgtgcccgtttctctgttcgttgccaatccgccggctgcaattctatgggccggatggttggcggttggagagtgagcaaaaaattgataaatattaaaaaatggaaaaataaataaaattttataaaaattccatggacactatctaaacagagagccttgattaatttaatcgaaaatttctttgaattatttttgcttaaaagaccgagttccaatgatattgccaaaaatatgatggaataggatggaaaataaattgtcttgagcgcagaaattttaggtattttgccaagaaaagttggagtttggatgtcagtcgtccgcttcgcgccctcaggacgggcgcttcgcgcccgttttttaattttgttgagaatattctgccgcttcgcgcccgtcttttaattttgttgagtacattcggccgcttcgcggcctcaggacgggcgcttcgcgcccgtttctaaatttgttgggctattaaggccgattcgcggcctcagacgggcgcttcgcgcccgttttttagcttgttaggccgcttcgcggcctcagtcgggcgcttcgcgccggtttttcaatttttgttggccttggacgggcgcttcgcgcctgttttttaaattcgttgaactcatgcgg

SEQ ID NO: 20588 - DNA, 2466 bp, Heterodera glycines
aaaaaaattatggatcagtaaaaaaaaatggtaaaattcaaaaatgatacggtactttatgcaatgggcactggactaaaaagcgaacctattggattgaacggggcttccgcgaaatattgcgggtgaggagtcgacgcgcgctgtcttttgccactaattatgtctatgtgcgtagtagagttggactgttgcgcaatttccattgcgcggaaaatgaaaaggctttaaaatgtgaacagaataatgtgtcacacttttatattgggccgtggaccgcccatttaacagacacggatctccgacatccttattcaacgaaaagtgcaatttcgtaaggcggaacaacattatgtcaaattaccatttttaatttcagtacatcccaaaaatgttcgctaagagagatccgttcggaaaattaacattttctttacaacaaaaatgttaaaaagcaatttattacacctagcgccaaacattgtgtgggtgcgaaaaactagagacaatgcccataaatcttcggccaaatattttgccaaattatggcccaacaaaaattatgtaaaatattcccgttaaatgttgcgaaacaggataaaattttttataaaatactgacaaattgtttgaaaagcaaatttcgaaatatttaaccggactgctttgcataatttttgctgagatataatttagcaaaatatttggccgaagatttatggtcattgttcagatttttttagtacacatacaaaactgtttggctcaaaattagccgattacatttacattttttctttcaatagagaaagaacaatggcaattaatcttttattcagaaaaacccaatatttcgaaacgggaatgtaccggtggaaccaaaaaaaatttccgaaatgatcattaattatgtaaatgggcgggatcagcattctttttgctgtcagagcgcgcggtataaaggcagaagttttcgcaaatttttcacttatttaatagttataactctgccgaaagttccttctgacccatgtccaacagggattagctaaatgaaaccctctcacaattatttattttcaaaattgtgaacagtgtttcacttaacaaaaccctccttgtcaaaattatattttaaataatgttatagttggaaaaattaataaataatattttttctaaattaaatgttcaattttctatctacgaggtagaagccatgcacaaatttgtaaatgtgtcaaaaccactacctcatagaaagctaatcgaatacatagaagaaaatacataaataatttctcggaagaaaagtattaacaaaaaattttttttttttggataataaaattgggacatgagcggaggcatacttttggatggaatcgaagaatgagaatgaaaatttgcacttttcgctggctccttcctcccaaccgattgcgccaccccttttggcaattaatcttgtggtcaccgaattctgtggatttgtgagtgacgcgagcataacaaaaaaagaagtaaatagaataacaaaagtaaaaataaaagtgaaaggaattaaatttaattatattgaattaatttaattgtctctcgttttcaacccacgtttgaagcaatattttgattttacaaaaaatttaaacgctttttatgacagtacactgctaattggatcaaaatgggtttttctttaactgttggatcaaaatgggtttttctttaactgatcatagataaattagaggttatagttttctaaaatttgtacttttttgagattaaatttgaatgtggccttttttatagaagactcatgcttgttttggttgtgcttgcttattattttgtataattttcggttttgcttaaaataactaaaatggtttttctttaactgatcataaataattggttctaaaatttgtactttattgaggggaatatgaaatgaccttttttatgacagactcatgcttgttctgtttgttcttgcttatgtttttgttaaatttttattttcgtttaaaataaccaaaaaggtaattcttaaaccaatgattaataaaagcgcctatttttattgaaaatcttttaacaaataatttcaaaattcttcctagcggtacagcgacaattctcaccgactgatttataaaaaaatcatcaaaaaggagtcctattggattaatctgtaaaatagtttaatcgaaaatgctcaaaaagctaaggttaattgaaattgatgcaaatttttgaacaccccctctacccattaaaatacgctaatttaatcgcatttaaatacagtaattctttttcacgccaattaattgcgtagttttaaaaattattcggtgtgaccactaagataaacataaaaaaccttaggggtatattaattaatttattttatagaaaatgctttaattaaaggttctgcctcaaaatgcaaaggat

SEQ ID NO: 20589 - DNA, 1159 bp, Heterodera glycines
  unsure (1)..(1159): unsure at all n locations
acagcattgactgcaaaggtggaagatcaggaagatgatgtaaacgctacgacggcttcaaacagtacagaagaaacagcagtgactgcaaaggtggaagagcagaaagatgatgcaaatgcaacgaaggctacagcattgactgcaaaggtggaagaacaggaagatgatgtaaacgcaacgacggcttcaaacagtacagaagaaacagcagtgactgcaaagatggaagagcagaaagatgatgcaaatgcaacgacggcttcaagcagtacagaagaaacagcagttactgcaaaggtggaagaacaggaagatgatgcaaacgcaacgacggcatcaagcagtacagaagaaacggcagttactgcaaaggtggaagaacaggaagatgatgcaaacgcaacgacggcttcaagcagtacagaagaaacagcagtgactgcaaaggtggaagagcagaaagatgatgcaaatgcaacgacggcttcaagcagtacagaagaaacagcagttactgcaaaggtggaagaacaggaagatgatgtaaacgcaacgacggcttcaagcagtacagaagaaacagcagttactgcaaaggtggaagaacaggaagatgatgcaaacgcaacgacggcttcaagcagtacagaagaaacagcagtgactgcaaaggtggaagagcagaaagatgatgcaaatgcaacgaaggctacagcattgactgcaaaggtggaagaacaggaagatgatgtaaacgcaacgacggcttcaaacagtacagaagaaacagcagtgactgcaaagatggaagaacaggaagatgatgtaaacgcaacgacggcttcaagcagtacagaagaaacagcagtgactgcaaaggtggaagaacaggaagatgatgcaaacgcaacgacggcatcaagcagtacagaagaaacagcagttactgtaaaggtggaacagcaggaggacgatgtaaatgcaacgacggcttcaagcagtacagaagaaacagcagtgactgcaaaggtggaactgcaggaagatgatgcaaacgcaacgacggcatcaagcagtacagaagaaacagcangtactgtaaaggtggaacagcaggaggacgatgcaaacgcaacggcggcatcaagcagtacag

SEQ ID NO: 20590 - DNA, 1048 bp, Heterodera glycines
cagaagaaacagcaggtgactgcaaaggtggaactgcaggaagatgatgcaaacgcaacgacggcatcaagcagtacagaagaaacagcagttactgtaaaggtggaacagcaggaggacgatgcaaacgcaacggcggcatcaagcagtacagaagaaacagcagttactgtaaaggtggaactgcaggaagatgatgcgaacgcaacgacggcttcaagcagtacagaagaaacagcagtgactgcaaagattgaacatcaggaggacgatgcaaacgcaacggcggcatcaagcagtacagaagaaacagcagttactgtaaaggtggaactgcaggaagatgatgcaaacgcaacgacggcatcaagcagtacagaagaaacagcagttactgcaaaggtggaacagcatgaggacgatgcaaacgcaacgagggcttcaaacagtacagaagaaacagcagtgactgcaaaggtggaactgcaggaagatgatgcaaacgcaacgacggcatcaagcagtacagaagaaacagctgttactgcaaagatggaagaacaggaagatgatgtaaacgcaacgacggcttcaagcagtacagaagaaacagcagttactgcaaaggtggaagaacaggaagatgatgcaaacgcaacgacggcttcaagcagtacagaagaaacagcagtgactgtaaagttggaacagcaggaagatgatgcaaacgcaactacggcttcaagcagtacagaagaaacagcagtgacagcaaagatggaagaacaggaagatgatgcaaatgcaacgacggcttcaagcagtacagaagaaacagcagttactgtaaaggtggaacagcaggaggacgatgtaaatgcaacgacggcttcaagcagtacagaagaaacagcagtgactgcaaagattgaacatcaggaggacgatgcaaacgcaacggcggcatcaagcagtacagaagaaacagcagttactgtaaaggtggaactgcaggaagatgatgcaaacgcaacgacggcatcaagca

SEQ ID NO: 20591 - DNA, 2552 bp, Heterodera glycines
  unsure (1)..(2552): unsure at all n locations
aaangaaggaggaagaaganagcgagagggnnggaagggaagcagcggccgggaggggaccaanagggaagaaaggctgaaacgtaatgctgctggaagagatccggaagtaccaaaaagtgccaaatttttgtggaaaattatacaaaaattgatatttggtgcgtttttaaatgaatcaaacgcgtgcatcactcagttccccatgcttttttcatttgttgcattaaatgtgcatgcgtatcaaaaatttattaattttttgtcagccgccccaaaatgtaaaattgcgcttttcctaataatttttttttggcagttttattgagttaggcaacaatataatgcttaaacataacgttcagcattttgtttttaaaaaatgagataggacattttggattaataagggatgtattagcatatttttgaaaagaaaattagaccatctccggaataatttcacttttcgtatgtattggggacattttgtgccaatgaagcaccaccacaatccaccattttctggcagtaaaatgagcatttgtgagccatccgccgcccttccggctctgctcgcaaaaactcagtcattgcccagagagggacatttatggccttaaaacggcccccatcctgatggcggcggtgtgtgccgtgttgtgtcctatgccaaaagctccaaaatgcgcatcaaatttcattgtgaaaattcgaaattcgcgtcccccagcagaggagaaaatgccgtggaaaggaggcgcttattagagggccccgggaaaaaacacaaaatgaagcaaaagtgcagcggccgtaaaccatgtgtaaatgctctatgaaaatgggcacaaaacgttagagagagagaaaaagaatataaaaaataaaaataaggaaattgtataaatttttcgtgtcttaaatatgcatataaatttttggctcaattaaaaacggaaataaatgaaaattttaattgctcaataattaagcaaatgaatgccaaaagaatgtggaatttgcacaaatatcttgccgaaggagataatgaaataaaattgtgatggataaaacattctcgtcaatccttcatgttggatggatggattggattggaccaggatttgcggagaaagaaaaggggtgggaatgttcttcatccccacccatccacggggggcatggtccacgggaatcaatgcccgctgagcatgaccccgcccccatctcagaagcaaaaccaccaaaagcagttgttgatcagcagctctctcattttcgcatactatttaactttcctcatcctctgatctgaggattgatcagtgtgaggggatggataactttgcaaaaacaatgaattttcccgatgcaacaggcgttgtgctgtgcgattatgggggtaataccctcctccgacataatgttccccacaaaggcaccgttcaataaacaaaacaaaaaaaaaacgcggggccaatgggccaaggatcgataatgaacaggcgcaatggaaattaggcggattatgcgttcgatttttgggctcgagacttacgatagcacaaaaagatttattgaccaatcgatattaggatggtaagtaataatattacataaaaaataagtaggaaaaacggtgaaaaaaaatcagaataaaacaaaaaaatcggtattttaattaattaaattacagtgttatatattaattatgcaaaaaaacaagtaaaaagggtaaaaatcggattaaaaaaatattataatattgaaattataaacattaaaacaaactaaactcatagtatacataaaaaaaacatcaaacacgccacaaaaacaacaattatattacaaatatacatgtatatataaaatccaaaaattgctatatatatacataatcttatacatataaaatggaaaaatattatattatttaattaattaaagaatatgtttgttttttatattttttcctatataaaattgcttgaaaaaattgcaaaaattcaatggttttatgcacccaccgtttgtcatcaagctagccttttgtaaattttcgcgcatcttcatatggtcatggttgagctcgttgaactagaaaaataaaaaaataaaatttgattatcgaaatatatattctttaatattaattaaattaaaaaagaatgagataaaaaaaattgataatcctctcattcctttaaacattaattagaaaacaaacctgaccatgaaatggttatgctccaaatcctgggagagtttgacctgaaaatgaagttgaattatatatatatatattattattattaagtgaatttaaaagcattttactttttgcttaatttagcaaaaccctttccttgtacaggtatggaattattagagcccagaaaagggccgggcttgtcagagttttcccgacattatgatcctgaatgcttcaacgtaaatttgatacaaaaaaaaagaatttttaaatcctgaaatccggtntcagtgagtcccccaaatccagaaaagacgtccccccaccccgattc

SEQ ID NO: 20592 - DNA, 1203 bp, Heterodera glycines
ttttatttttcagtcataaacaatattgcaataatttaagttcgttttatttttcattcacaacacggccgagagaaattttgatacatcaaagacaacctaaaatacaccgcggtgagagccctagcgaaggctggactataaaattgcacaacaaatatacatactgttcgagttatgttttatacgagtcagatatgagtttttcctatggcaaggttgtgaaattcctcccaaaaactttcttacggaaaataagcagcaaattttaataaaaataaatacttttcaattcatgcaatgaatttcctgaatctataaattgatccactagaaaagtgttagtagaaaataaaaaataatcggagcccatattttcgtcataaattgagtcccgaaagataaatagcatggcaaaaattgaaaatatttgtcgatttattgcctattttccatccacgcttgggatgaggaaatatataaaaagataaactttgtataagtatttattatcatggaagtcgtcagaataatagcaaaagacttcgtataaacaatattgcaataatttaagttcgttttatttttcagtcaacaacacggccgagagaaattttgatacatcaaagacaacctaaaatacaccgcggtgagagccctagcgaaggctggactataaaattgcacaacaaatatacctactgttcgagttatgttttatacgagtcagatatgagtttttcctatggcaaggttgtgaaattcctcccaaaaactttcttacggaaaataagcagcaaattttaataaaaataaatacttttcaattcatgcaatgaatttcctgaatctataaattgatccactagaaaagtgttagtagaaaataaaaaataatcggagcccatattttcgtcataaattgagtcccgaaagataaatagcatggcaaaaattgaaaatatttgtcgatttattgcctattttccatccacgcttgggatgaggaaatatataaaaagataaactttgtataagtgtttattatcatggaagtcgtcagaataatagcaaaagacttcgtataaacaatattgcaataatttaagttcgttttatttttcagtcacaacacggccgagagaaattttgatacatcaaagacacctaaaatacaccgcggtgagagccctagcgaaggct

SEQ ID NO: 20593 - DNA, 1039 bp, Heterodera glycines
accagaattagaacaaaaaatttgaaattttttccaaactcccccctgaaatcaaacaaatcttggtagaaatttgttctttctttatccaattaataagtgaagcattgttttgcagcaaaataaatgattgttaaatgaatttgaagcttttccccagaaaaatgcatttcttgtaaaaaattttaaattttttcgttcgaattctggtccggggttcggaattgggcaaatccgagtcagattcgtaatcagcgcccgcgaaaacccccaaatactcatgttgagaccaatttaaaaaaataaaaataaattatggaccccattctttaggattgccaaaatttgttttcaataaaacaaattaatgcaatttatgatgccgacaagtgaaaggaatcttgagaattcggaagtttttgtaatgtttcttcccaaaaaaaataataataatttcttttaccaaaaattattcataaaatatgactcgtgaaaccaacggaaaaatgtcaaattggaaatgtcttcaaaaaacatttgttgacaaagttttaaattgtaattaataaatatcgtgtgctaaaatgggcaaatttaaattaattaaacaaaaacttctgttacatttttctacatttgcttaaccgtttttaatttaaagataatttaagcgctttccctcaatttatttaggttatttttaaatcattcaaatcgtgatgtgatgcttaaattttgtactcagttttttgcctttttcagcagcttaactccaattttgccattatttgttcatctttttgcttttaaatgtttgctttttgtttttattatcattaataatttattaataattccatttgcatttattttaattaaattaacgtttttctcattgtgcagctccaacactcaaagtaatgtaattatattattatatattctctttttttcacttttttcaatcctccgaatttgcattttcttgtgaattcctaaaataaatcataaaatggatgggatttattcgtcctcattt

SEQ ID NO: 20594 - DNA, 2088 bp, Heterodera glycines
aaaatacacccctaagaatcgaccaaaatttttttttcccccccccgactaagaattggaaaatttaaaaaaaaattcttcctccaaatttttttttggcaaaatttttgatttaaaaatatcaatatttgctaagagaattttataaaggaaatgtagctcattggcaagtgcactagtgaaaaaattttttttttttgctcaatttttggctgaaaattatatcactattcgtcactatttcatactttttgccactattttgtcactattttggcattttactcactattttagttaactatttcgagatttttcgtcactaaaagtcgtatccctaatgattagtcttttcgtgcattatttcttttttattttttgttagttaaaaatatattaaattcgcttcaaattttgcatatagttaaagaaaatttttaaaagcttaagctttttataagctttctatgagttcaaaattatgtgattggttaacaaaaaccttcaaaataattatccagccctttcatcaacaaaacttcctccatcatttatgtgtttctcggtctcatgtcgagaactgcaattagttgatcattttttgatttttgttcttcaccattttattaattatgaagaccaattgtcgttcaattcaataaaagtgtctccttcggtcggtcggtcagctgcagctgatgagcataattagcacagcaaatgggtgataaatgacaaatttaatttggatttcacaattcgctgatttttatttcctcgattaattcattcaatctttttttaatatctaaaaagtcaattcattctctaacagataaaaatgattgctgcaaaacttgctcaatttttgctttccttttccatcactttgttttctttggcatttctcgccagaggctacaattcggacaaatgtccggtcaaaggattcaacggcgaatgttttgagcgaaacggtggcaatgacactgaatatgaaaattggtagaaaaaggattaaaattaaaaaataatcataaaataccagggcattttcttaaatggcctcagtaatcggtcggtcggtccttcccgaaaatgcttttcgtcgtccatttgcgtccgcaggtgttatcagtacgcgtccacgtcgatgaactacgatcagatgaagccgagcctgattctggtggccagctcaacggccgatgtgatcgcagccgtccgctttgcccgttccaaacgcgtcaacgtcgcggtgcgctcgggcggccatcagttcagcggagcatcgtccgcgagcgggaaaaacatacaattggacgtcagccaagcgttcagagtgagtgcaaggaaaacgcagcgcatttaaacattgagctgatcagagcgccaaaggatcaaatgaaaaaaacgacacgacagcgatgctcctccggtggcaaaacataaaatggcacaaatccccttaaaaatggcacagaaccttctctaaaatgtggcaatgatatccctctaaaattatagtaaaatcgtaacttttcgtactgtaggaaattgattgagtctatttgggtgaccaaaacaaattgatagaaacttaactgctcaacagcatttgtgctcgcatcgactgatgtgaaacagagtgtaattagctgctaattactcagaatgtttctgccggcgattttgcggtgttagaaccgaactgtagcaatagtagcgtcgctgtccgtgttggcatcagtttcacactgctcgagttctttttgatgatggcggaaaagggactgttcgtacccggcggtttgtgcaggtaggaaaattggtaagcttcttctgccaacagaacaaagttaatcaatcggttaattatattttgcatgcaatgccaattttttgactaattagcagaattgactatttaagccaaacaatcaactctagtatatcccatttaatgcttatcccttacagtaatgtccatatcggcggacacatccaaaccggagggtacggcgtggcaatccgcgcgttcggactggaagcggaccatgtgcttgcatttgacatcattacggcaga

SEQ ID NO: 20595 - DNA, 2885 bp, Heterodera glycines
  unsure (1)..(2885): unsure at all n locations
tttttaatgctcgtgatatttctaggctacacgtggacttatgtccgtgcggtccaaacccaacaaggaatgaacagtttggttaacccgccagttacagatgccgaggcatttcacacacatcttttcctttgaagatgctacccaatatgcaaagcaaatgttttcaaatatcggtgctttaaatcatcatcatgaaaaacttcgttattatttttaatgccattttaatggcataacaccaaatttaaataatttcatattaaaaaagcatttttatttaaagaaaaaagacgaaaatgtcatttgcttaaaaataaatttaatataattccattttaatggcataacaccaaatttaaatgaatttggtaaaaaaaaaaatatttgatttaaaaaaagaagaaaaggttattcgttcaataaaaataaccaaatttaaataaatttgatataaaaaaattttatttaaagaaaaaagaagaaaattattcgataagaataacaaatttaaataaatgatataaaaaatatttttatttaaagaaaaaagaagtaaaggttattctataaaaataaattaaaacgctaacaacatttgtaaattattttattcgtgacataaaaactttttagaagaatgtgtatttaagcattaatttaaacaaattgtaacatatttataatttaaaaattgataaaatgcataggaaaatcgggtttgctttgcacttttttaggaatctcccatttttgcactttttataaatcgcccaatttgcacggttaatcttttttaaattcattaatttgtgccttcgaataaaaaaatgaatatcctactcaaataaacatttataaataaatgattatttaatattttttagtatgatgttttttttattaaatgaggaacttttccaactaaagtgaatattgaataaattatattccgtaaaaatgggttaactcatcaaaaattataaaattaatgaaaatgaaatgaaatggggaaaattttaaaaattttcacgaaaacgccaattcagcgctgtatttatgtcctgaaaacaaagaaatttcagggcatttaagacttaaaattccaatatcccatgcctagaaaggtttttaatgtattaaggccgattaaatgattagtttaattgatgcaaaaaaaaatataaatatctgaaattaagaggctgtaagttgtacagaacaaatttttgacatgtatattgaaaaatcaatttttttatccctaatttgaaatttaattaatttttctgtcgaaaagtcccctcctcaaatttataatatttctgtcgaaatgtcctttaccttcaaaaagtattttaatatttacaattttctttaaagttatatatttgtattaatcaaaataaattttttattaaaagtaaaatttttgaaaaataaattttatccaaaatacataagttaaaaaacgatcaaaattacacatgacatcttaagaaattaaaaaacaaattaaataagttaatttttacattcgtactcaaaaatctatcctgatttccaagtacaatcttggaaaaaagtaaagttaaaattttccaggcacaaaagccgaaatccaagtaagtacttggccggaaccccccccccccccccaccccctatgcctccataaagtttttgtaaaaaaccgcgccgcaaaaaaaaaacgatttaaaaaattaagagattgtcaatttattaaaacaatagaaaataggcatcgaatccttaggaatttgtagttttaacgaaattgttgaatttcttaataaaaatttccagaaattttgggactaacaataagaaaattccaagttaagcgaccacgaaaacccatatattggtgtgttttttctttgaaagtgagaaaaaaaaattgaaaatatttatgagccctaaactgcataagagccaatttcggcgtatggcttctcgatgtttcgcgaaatggaagtcaatttttaaattaaatttctattccttttcaaattatcgccaagtacctaattttggcaccagattttataagtcaagtttattctattagcctgcaaattttcaaaagtttccgttaagttaaacaaatttcaatttggacacacactcaaaccgaaaattaattaatagttttacatttttggaacagtaaaggaatacaacagttggaaaagttaacacgaaaaataataagtgaattaaggatgtttaaatcaaaaaattgcaaattgattattagagatgggatttttatgtgctaaaaatcctgaaatatgtaataaaatatgtgctaaaaaatgcttaaatatgtgctaaaaaccccaaaaatgccaaaatatgtgctaaaatatgtgttaaaaattggaaaaatcaagtgtctttttgcataaaaattcccaaaaatctcattctttatcatttttcgcccatacaacgcaaatcaaatacctttcaagtgtttgaaggtaaaattaatcttttttccaataaattattttataaattgaaagttctccaatgaaaattaagaaatcgattggttactttcggcaaacaaaattttttttttttgaaaatatntaaaaaatgacaaaaaagttgattttaggggtgtatttttcaattttcttgtatttttcttacaaatttttctcagaaatgtcgaaatatgtgcaaaatatgtgccaaaccccgaaatatgtgcgatatgtttttatttgacaaaatgccaaaatatgtgattttatgtttttataagtcgctctaaatcgaaaattgttcggagaaaatgctttttttgggcttctctcgtcataactaagccgcagaaaaaatatgtaaaa

SEQ ID NO: 20596 - DNA, 2227 bp, Heterodera glycines
  unsure (1)..(2227): unsure at all n locations
ttatgaaaaatgtaataaaaataaataaaaaacgcactcaagaatctatttccataacccaaaaatacggcccatgatttggcggatagtcggacttntacgcctgaaaaaatctattgacttacaatnttgtagctctggataaaaaatgagacattattcagttttattgacaagtagtccaggcattttaagttttaacaactattaggtacctatttctcgattttttgcacctgaaaaatcctagacctggttatatgaatgcatgttttaaattttgatattatttgtaaattggagattttgaattgaaatatttatacaatgtaaaatggttatatggaatggtccaatgccgaggatgaacttgttgatcacaagaagacatttccctctcaacagcctttttcgacgcctcatcagaacggacattttgcagcatttcctcagaaagtcttcggtctaaaaattcaaaattgttatttaataacggaaaagtaacaaaaaggaaaagaaaccgataaatcatttgcatttttgccctgtcgcgcgacgacgtcccatcggcaacgggtgcagtcaaatgcacttgctcctcctcagattcgggtctcggaatgggttgaagaattcgagcagtccaacgaggcgatcgctcgaaattgtcagcacaagatcaggcagttaaccaacgagacggaacctaattatgagagaatgaataaaacgcatagcacatagcatgtattagaaatgaaaaatttcgttgttttagagaaatagttcttttaaaaatttttcatataaaaatttcaatagtgaaaaaattttctagcttttttaaagattttttgttgaaaaatttcaaaatatagtttcgagggggataaaacgacgtggggaaaacgatggggccaaatgatcacgtcggaatttggacgtcgtcgagtcgaaaagacaagtcggagattggagaggcaaagttggaaattgtcgtatgccttggccaccaatgaacgcaatctctgatcggttatctgcaaatattatcattttcttaaattgaatgatgccccaaacaattccctgacatgttcgtatgcttttgtggacggctcgtccaaagtgttcagtttcaattgcccaagttcggggattaatgtcgtttttgttgggtcaaaggcaccgccggagcaaacgacaaaaatggcagggtcaattttgacctccaactctagcttcttgcgcacgtcaaccatatgctgaagggctgtcgcagaacggcctaaaaagagcaataaaaaaatttttaaaataaattcaggttttcaactaactgtcatgaaaatggccattttatgcaaaactgctagcaaaaattctcatattttaaataaaattccaacgatttttctcggcgattcacaccgaaccccaataactttttttttcttcttaaaaacgctcaaatgcacaaaaattaaccgttttttgcgatagttttttaaataatactctcaattcaaaattttcccgtcctccggttcccaaaacagttggtgaagacggactgattttggcggtctgaacacgtcgattgttcaccgccggggaatggcacgtaaacaccacctaaaattacagaagcagtattgttttagtttaaaaaaatcaggagcatgtttaggaaaacacgttgttcaaagtcgccctctagcggatttgtttcaaattttagtgacattctatttacaattaaaaaattcatcaaaagcgctattttaggcatttttattcctggttttgttggccataatttaccttcaccgattcggtgctgctcacactgacgccaagcccagtgtcattgcgcaacaaatgggaggaagtgtcgggcaaatcactccgcggggtgctgatttgtttggaagcattttcaaatgcctaaaacagaaaaaaaggaactaaaaaaacacaaagaacatacttcagagagttgggtaagctgttggaggaatgatttggtgatggtgatgtccaatgtttcggtggcctcaacgattatggccaattttgggggtggcaatgcgattttggaatctccgctcgtctctttgtctcactttcgttcaaccgcagaatcatcggattggtgccgggagggtgcgaaatttggacggatttgctctgaaaatgataaaaaagttgagggtgatgatgtcgg

SEQ ID NO: 20597 - DNA, 2099 bp, Heterodera glycines
  unsure (1)..(2099): unsure at all n locations
aaatttaaaaaatatatatttttacctgttttgttagagtgattcnaagttttttggacccggttattttgccgactgnattcatgggattaatcccgcaatcccataattccaaaaattcaggcggattgggatctcgtaaaatctggcgtgatccgttccgcgccgcgcattctatttatacacccattaaatttaaacaattcaattatttgtagaagaaagggcaccgcacttcgttagttttggagccaaagatgagcgtgttggtggaggacgagctggaggaggattttgttggggctgatcaaaaattgcttggagagagaaagttcaaggaatgggagcagagactgtggcagtggggacaagcggaagagcaggcaagcgaatggccaagcccattttgggcccaacattctctaattgggcatctgataattgggcgtcaaaaacctgcttcacggcaccaatcggattagagtcatgagattatagaacacactgaccaaatcccatgaaaattaaaaatctattttaatataaaaattagagatcggtattttggaaaaaacctggacctggatttggattacattttggatctggacctggattttctggacaaaaatccagataacaggacaggttgccgaaaactggcctggacctggatccaggaaaaaaaatccaggcctggatctagagtccagctcggtctctaataaaaaggtattcccagaaattttttaaatgtttaatgagtgtcactttttccttgcacctttctttggccgatcaaaaaagcattttcatcacagcatttcacaatcgcagcattttctttttttttatttgatgggtgtgcatatttatttgcctgtgacatgatgatgatgagcgggggggggggggaaggctccattccatccttttccattcattcattcatccattcacatttcactcatcattttcatttcatcttgcttaatcgatttgcgtttgcccaccgggggggagggagggatcgcccgcttttggcaaataatttggcttccttgccgcacaatgcgcttcatcaccaccaacagtttcagcagcagaaccaccgcttttcccttttttcttgcccaaataacacacaaaatttggtcctcgcccaaaaagaacaacgaattttccgcctccctttctctgcccctttgaattgcatgccattaactctgctaatcgtttaagaaaaaataggaaaatctttattgaatttcaaaatgtgatcaacgacttactcctttgacaccatggattacagtttttatgacaaaaaatggaattgaaaatgaccgagacttttttgggaaatctttcgggatggcacttgtctctgatcagacccattaaagaaggacccgaaaatgagcaaaacacacactaattggactgaagccaatccatgcttttatattttaaataaaacacgatttgctaggaaatgccaacccattttcatttctgctgatttcatcaatcaaaaaagtcatttctgtcccagccaaatttggccaaagattgtttgctcagtgggccttaaaggagcccaagaatgactaaaagccttcccttcttctgctgatcataagacaagactcaaaaaacagcatcatatatataattcatgcaagaatttaattaaactaaaattaacatttttattttatttgaatgtggttcgaagtttattttcctttaattttatttttaatgaaatatcaaggtatgcttttttgatatttataataatgcttagagacaaacctatgacccgaatacaaacaaaaacccattttacaaaattataaattttgactcaaaaaattagtgattacaactgcggatatgaatcagaaaatgatcaaaaaaccgagtgaacgcattgcacaaaaacccaacccatgcatagtattaataattcttaattgtgcataattntatacaaattnaaattttattatttgtatttattaattgctannatatctcgcagcttttcatatattatattttatttttattattcgttttcgtgacttcatacc

SEQ ID NO: 20598 - DNA, 1062 bp, Heterodera glycines
  unsure (1)..(1062): unsure at all n locations
gaatttctcaataaaaaatcttataaaattttttttaaaaganaattaaaatgtctttggaaaaatttcggaaaaaacctcataaaattccaaaaaaatcactgagaattttccaaaaaacatttcttcttgaaattttcttacaaaaaataaattctctaagatttttctcttgagaaaattcaattttctcataaaaaattctctaagatttttctcttgagaaaattcaattttcttataaaaaattttctaaaatttttttcttgagaaactctgtttgaaaatttaaaaaaatttctagcggcgtgttttgtcatggcgtgacttcggccggcgtgattttgtcctgttcccttaatttgatattttttttttaaaaatcttattataaaatgcattttggccacttaatttatttgcatcgaaattttaggtcaatcgccaagtttacaggaggagttggaaataatgtcaaatgaagtatgatgtctcattcattatgtattatttaaatattttttggaattaaaaattaattttaatttggaattttatttatttgccaattttcgattttagttggctgctcgcgtttcactcaacgcaattcaatcgccagattatacgcatttgcctgcaaatggcgaacttagcgaatcacctgttcggcgtagcatttccagcagagggaccacttttcaacaggtgaagaagcccactgatcagtataatttatcaatcgcatttattgcgtttaataatttaattttggtaaaatattttcataatttttatttatttttcaatcgcattaaaatgggtttaattttaattattattattatacttaatatatgtacattgttgtttcatttagaactcacaaattcctgatcggatcttcaaagttgtgtttgtcggcgattcggcagttggaaagacatgctttttacaccggcaagtgtttttcaaactcattagaattttaaataggttaattaattaattgatgctttaattttttcagcttttgtcacaaccgnattcaaaccttgttca

SEQ ID NO: 20599 - DNA, 974 bp, Heterodera glycines
ttaaatcttttctagaagaagtagataaagccaaaaacacaacattagagcatgtggaaaagaatgacttgaaagaagcaaagaaatcagccgacgtcgcaaagggaatcgccaaacaggcaaaaaacaaatattcatcaactctcgaggaatataatgataaatcggaaaagggttatatcggaatagtgaataggcttaatgaggctttggctgagcatattaaacgtaaagatattgaaaatagacaagtatctgaagctgagaaaagaccacaaaaaagagagagactagccaatgaggatgttcaatttcaatatgacaattgtctatctttccgctgctgtctgccacatagatttgtcaaaacacctcgcctatgtgcttggttttatgaacacaaggctatttcacgcggaagaggcgaattatatgccagatttgacgggaggcgtaaggcaactatacatttatgcaccaaatttaatagaaaacagaattatcgggaaccagatggctccactcttaagaatagttaacttcgtcaatgacccaggatcgattagtgaagttatatatagcaccgagtactttcatcgtctacagtcgaaacgaatttcagaaattacaattgaaattcacacaccatttggtgaattcgttaaatttcactggggaagttgtattcttacattacattttaagaaaagtatattttaaaaatgacacacgtatttttcgatcccgattacaacaatgtggtaaaggaaaaagggcctgatcactaataagaaccgaaaacgggtattttatcagttaagtttcatctaaaggtataaatagaacaaataacacaaataattaaaaaatgtcaactcttatgaaaatagacaaggcgagtgaggatggtctcgaggggggcctttcgctgttcgatatccccccgacgaacgttgcaattaataaatccagta

SEQ ID NO: 20600 - DNA, 1617 bp, Heterodera glycines
ctggttttgaattgattcgaaacggaacgaccagcatcaaggtgcagtttaatgagcctataaaggacggcgggtatgagatgatagttctgggggaatttgattcgattctatctattaacgctaatcgtgtgctcagtagcgacggaagcatatgatgaattctaacgagattgaaatatttttaaccaaacacccgacaaccagaaaatattttatcggggtttttgcttccgacgggatgccaaaattgaaggacatgcattttctgtactgttttatggcgaataccgaccgggcgggcattataggtgaacattgggtcgcttgtttttaaattcgccgacagaaattgaatattttgattcattgggcgattatcccaatgaagatttaagttcatatcttaacctattcgaacgaattctctttaacgaacgtattgtccaacatcaattctcagatgcgtgtggtcaattttgcatttattttttaacacagcgatgctccggaatcctttattgtgaggtcattgaccgtctatataaggttcgcccgatgtccgatatattattaagaattttgtcagtaatgtttaatttaattgttctcctaacgatagtcggtcaactcagtggagaaagggttactattctttctgatacaaaaacgacaaatatctcactcactatgacaaagagttcggtcaatgaaaggttgttcggcttcgatcggtcgagattatgtacgataactaggaatctgatttcatggtggagtgtatcaatccaaaatataaattcaataggaaagagcggaaccattaatatcaaactttaccgggattttagacaattaaagccccgagcatgtttttattacaacgatcatagttatttaatttttcaaaacgaaaagacaaatgaaacttcggtaacaagagggagtcaagaaatagttgtcaggaattttcccggtggcgaccttagatttgatcatatgatggtcgacttttcgtaatcagagacgatcgaatagacgagattgacattagatcaatcgagaatttatggacacatcataatggcaccgaaattattactagaccgatcggatcaataccgtcttcatttaccgatttcctaataattgagggacaaatttatctgattaataaaaataaaatatacaaagatcgatttgactcaaatgagatacttcccaaatatgtgtcagacgcgaatagtgaattctttaattttgtcatgttcaaagaatttgagaaaattaaagatttttgtcaatttttgatttggtagtggtcataatttgtatatctgttctcagaattttgaaattaaagagaaaaggcaaaaattcatcatatagtggtgaagtaatgtatataaggaattgcaacgaagatgagaatgcctatctgtgttcaaaatgaattctctcgttgaaattttatgcgattttaacgatagtgaacctcacgaattatcagaaattctacgacatcggaagaaagaaaaagtgaaacttttaagaagacacaccctaataacgcccggtgagaggcacaatcagtttatctcagcggatgacatcgca

SEQ ID NO: 20601 - DNA, 3342 bp, Heterodera glycines
gggatttgcgggattaattccgcgggatcccctcccgcaaagaattttgagttcgaatcccgcagctggacccgcaaatttgaaatttccggtctcttagcgatcaataattttcaaaaaaacatttttttgtgttcctttgaccataatttttttttttttgaaagacaacaaatttttgaaattttgaaggctaatagagaacatttagaggtatcaattttcaaatttctaaaaaaaaacccattttaagacaccggatcaacaagtgagagcttcaaagcgtccatttccatttgctctccgtcttcgaccgggttgttcaatttaacaatttcctgtctagtactttccagcggacgtcgagcgtttgggttgtcgagaatacggctcaacagattgttcgagtccaatcgcttcaccaaattaatctgtatttataaaatgaataattatcatccatcccgttaattgttctcaattacttaataaattttcagaaaaacactttttttaatttttaaccaaatagttcaaaagattataagtgcagaattatttgagcatatttttgtttaccaaattttaaatgttaaaaagagaattttgagaggctatcaatttttaaatatggacacaatttttttaaatttttggtaaattttaaacaatgttttattatagtttcaatttactttttacatttagtcagtttctcaacatcttaagtaaaactttaaacaaaattttttcaaatcgaaatttttgattttttgtcatttagcacggaattatggtaatataattctctttactaaaaatcaaagaaaacatataaatgcttgattttgccgacaggcgccgcctaggaaaactcaaaatctaatattttaaggtttttgacggaacaaatctttggtggcctgggatatgatggcacattatcggtctcgagccttgactcgagaaaagtctcgggttttttggtctcggtctcaagtcgcggctttacggtctcgattctcggaaaattttcggtctcatacagcacttctttcttcccatcaattaaactaccgtaaatgcccatgcgcgtttgtcgctgtcccattcaatttccaaacggtgctcattgttttcgctatcccgagggtgcacgtaacgtgtgatgtccaccggaaatgagcattgcttcttttccggttttgaattgatttgctgaattagttaatttgactatttcttaattgggtaattattttttaagcgcgaaaaacatgtgatttttaaaaatctggagcacttttcttaattgtttttattaacgtatcatatttctcttgccgcgcctttcgatggcactaatagcccctccgcccaaatttttggcaacaatttaacatttttgttaattcttatccactaggctaaaaccagcacctataaaattgtatattataaattttatgaaaacatatttgtgcaaaaatgtgccgaagaatgtttgatacagttaaatatttatcattttcaaaacaataatatggtgtcaaataagtttttttgtttttaaaccgtttcaaaaaactttgactaattttttaaaaactagaaaaatattaatattattttaaatttgaagaaaatattagcttttttttacaaagtttcgtaaaactgccaatttttttgctttattagcatgaaaaatctcagaaaattacatttttttctaaatttcttgcattttttgagcattcgtggtcacaacttcatgaaaactgaataaatttctaaaaatttttaggttcttaaagcaaactaagaacaatcgatgatataagattatttaattttgtgtttaagaaaatttattaagattttatttattttacgaaacgcccatgttgtgaatttatacaaaatgacccggacgcggacactgaccggcagcctaacttgatacccgtcaatattcataattgagtgcggcggaaaagcgtcctgttgctcctcagtggtatccaacataaacatgcgcagttggacttcataactgaggggaaaccgaatttaaagagaaaataattcaatttctgaaattaaaaaaaaaatattattttccccataattgaatgaatacacaaagtcacgccattcttttccaaaaaatatttgttaattgaacattttgaaataccgaaaatatatggggcgaaataagttcatccatttaaaatataaaaataaattagtcatttgatattgcaatatttaaaaatctgaaaaactcgcccagtatttatcaagtcttctctgggcacaacaaatatatgtgaaaaatgtccaaagcctgtccaagtgggcactggatacgggggcaatttcgtcattggcacaataaccttaaaattgtaaattaattcattgatagccggatgacttaatccaaaaggtcataatggatgaaatatgccaacgatgaaaatttataataatgttttacattttttgttttactatccctttgcggatttaagaaacgtctacaagacctatcccctaggaatcacaatcatgagctttcgcctcgaaaatatatacatacgtcattaaaaataaattaaatccaattttatttgaaaacaaatgccagaattcatcctaaggccagagattcgatgacaaattaatttaaatccttttttatatgccaatcctcggttaccccagggctcctcaattgcactcacttttatatgttgatagaatggcagctcaacggtacgaagatcgctgacgcgttgatttgcagcggaacgccacggagcaagaacaggcgcattgttattccatttgaattgcggactcggtatattgttggacgatgatgaaacatcgggtttatgggttgatttagagcgcggctttccgccttcactgatggcacaacacaatgccaaaagggtgacgatgatcagaacccccgggcgagaaacggcaaacgcaaagcgcattttgagttagattttaaaataatataagtgtaaaaaggggaataattgctgaatatatctgttgctttttagatgcgaaatcacttggaaagcaatattagaatggaaatattagaaatggagagagaaatgaaatagatagatatattgatttattattgaatgtttatatgaatgtgcatttcttctatagtcgaattaatttgagaattttttttttaatttgagaaatttcattaaattattagtaaaagttcttcctgctgattgtggacttactcttcaataatagaaggaaaacacatttgagtttaaaagatttaaa

SEQ ID NO: 20602 - DNA, 2540 bp, Heterodera glycines
tggcaattggccaatccggaccaagtggaggcggccaagcagttcgtcaaaaaattgaccaacaccaaattctctccggacgattttgcaaatcccggtcgacaaataacacaataaatgcaacggctattcacaactttttctctgtttaagtgcttcaacagcattacaaagctgtcgaaatggtagcgttggatttgccatttgacagcgaacagttcaaaaaagaggcagcggaaaatgacaaattaagttggtcacttttcctatgtttcacttgaaaatgcaactttattcttcccctcgccagttccgtacttcaaaaatccaacttttgagcagagagttgccaaagaattggaagaattcgcagggatttgtgagacaattgcagaaacaaaggagaaagggaagaggaaaagtgcaaaggcagaaaaggaagaggaggagagggcggaggaaaaagaggaggaggaaacgagagggacgaagaagcggaagaagaggggagaaacaaccgatgaaggggagggacagcagaaggggaggaatgggaagggccaaacgcggcggaataaaacgcaacgagggcctgacggatgaggagaaaaggaggatggatgaaaatgcattccttgcctcacaatcagtggattaatatttttaattattgtcacgtatcattttgcgttcgcaacagacattaaaccttttttggtccattaactgtgtaagaaaaaaaaatcacaatcagcaggaaagggtttcgtattcaacctccattaaatttgaaaggagtggttttatttccccgtttgggatggttccaatcaccataaatagaccaaccattttcacgacggagcatttcagaaccgccgatatcaccccaccctcgttcctctccaaccctcggacccctacaaaaaaccttgatcaactgaccacccaccccttttttgaattgccaaaccccgcaatttttgaatcggaattcgtcccatagaaattgagtcaaaatcccacagcgttctacgcaaatttgaaagttccaggcacttaatagttcctttcaaaaacaaaactttctttttggatgcgccatttttaccatgaaagatatgtaacaaaataaaatttgatgccaaatatacaaaacaaaaaaaatgattgtgcagagaagcgatcacaactttttgtcaatccgttctttttcccacatacgcctttggtattgctgagccaaagaattgatcaaggaataaacgaaccaaagaatctgaaaaaaaacatttgaattcctacaaaatgaaggaatttctatttaccattgcagaaacaaaataggacatcactgaaaacagcagaatttaggtgagaaagaaggtggattactcgccttgttggaggagacttgaggcttgttccggaattgggtccccgggccgacggtggagactgatcttttgggcttgaaggaactctttgagcggtgcctgaagaacagtgccaatccgtgggattttgttcaacagcgagaccaaatgctcaacgtgatgttcagaaaaggtgagcacaacgaacaacatctgacagtggaatgttgtattagggcaaaaaaagtggaatgagcaaagcgaaattgtcatttttgggagtgacttatttgaaaaaattgactgatcagtggattaaaacgaaattggtcaccactaccaactcgaccatcgaccaacctgcatgtgcatttttacgagtgcctttccgattaaagtcgcgccgaaaaatgtccaaaaagggatgagaaagtgaccacaagtgatgccagccaagtcgaagaacggattggggatggaagcgaacaacaaaatgccaggaaagcccatccgcgtcacggccctttccatccaaagttttatccgttccatcaaattctgagggtacgaacgtttgagtaccggaaaaatcgcatatttaaatcaaatccccaccatttgattagtcgcatcgcgttcgacaattgcgatgaattctcgatattcctcgctgtccggctcgtgtcccgacagtcgcgccgctctcgccatgaaaaagggcggcaattcgcccagtgcggtgcccgcgccccacatgagtgactccaagcgcacctgcaaatgccaacgaatgtttttacgaacgatttgctttaccttcgcaatgattgtccaaagcgtaaccaacgaagaatgacccatcgcatctgtggaacaagtgacactgaacggaatcagtgaaattagtggagaaaggacaaatggaagggaaactgactcatcgggatatggcggttcgggaaagtccaatgaattgcactcgaaggcggcgagagtcactcgggcgatgtgcggtcccttaaaaacaaagcgaagaatggaggaaacggcgggaaacactgaccaaataaaggagaaaagtgtgaagacccgtgccaagtccaattgaggagagaacgcccaaaccgagccaatagaaacaccaaagaagttcttctcgaaatg

SEQ ID NO: 20603 - DNA, 1699 bp, Heterodera glycines
  unsure (1)..(1699): unsure at all n locations
tgttgacaaatctaacaatcttggtattattcgaaaggcattcacaagctctattagccttgcaaaaaacaaacaaaaattttagcttctaaaaaagttattaggaaaaaacctcaaaattttcgacttttttgcaatttcatgttataacttttttggtaattgtctaatcgcgaagcaatagcttagaaatatcttctaaccatgttaagctttcgaatgataccaagattgttagatttggtcaacaagaaaaaaaagttataacccaaaaacttgggctggcgccaaaacggcggcgccaaaacgatacagactcctatttagcctatcttataggttcatggctcctccaaaacataaatataaatttcatgctgattacgagcgtgaatttcaaggcataaaaagaagtaaaaagggcgatgaatatgcgaattgtgtgtcgtgcagtgtgggcgtaccatatctgcaagcacgcacaatccttcaagtccgcggactgtgtatcctctgacggactgttcaggacgatgttttctgattaagcggttgcaagaaaatagtgaaaagtctggtgcaagtgaaagtgaattttgatcaaaaatgttcggaaatgtttaaatttcttttttcacgtcctgaattgctcaaaaaaattgctggaggtgagaaatatttcgtaaatgctcattttattgaataaaaggcaaaaacaagccccaaaacaacgttttaaaaaatgtacttaattttgaccctaaaaacttattttttactactgatttacttatttcggaaaattttcgatgcgacctctgatttaagcataaaaaattaaaaagaaatgaaagggaaagagaaattaacaaaaatttgggaattaatcgtgacaaaatttacaaatggaagagggaattgaagaaggaaatattcaaatttttaatcattgtcccattttgtagaaggtacaattatcagattatcaaaggaacagaaaatagaaaaaattaaacaatttgaaaaagtgaaaaaagaatttacaagaacattcaatttgaaacccaatgggaaaattaatgaaaaaatagcggaaaaaatttgcgttaaatttaatacaatttgtgattggaagaaaaaatcaaaattgataacacgtaatttaattaattaaaccttttaaattgtaaaatttaatttaaaacttttctttttaggagaaagaaaagtttactcggatgctgagaaattggaatatgtgaaaagagatgaggagatgaaaagaagaaacccaatgataagtgatagaaaaattgccgaaaaattaagcattccaattgccaacttaatacgatggacgaagaaattgggcaccaaactgaaccgttagcatttcgatcatagtaattagggtttgcggattttcagtgatttattttatttattgtgtctttaattcggtgataatgcatgaaaaaagttttcatcctgaaactcttcattttaatcttcagtgcaacatttcggcatcgggattcatccctcatccaatgacatcaacatcccaataacagcaaatttagcttanatgctcctcgtaaatgagattttggatgtgaattttanaatcataaaaaatcttagaattggtcgatcatatggggtctttgcattatatgtaataaatctgggctttact

SEQ ID NO: 20604 - DNA, 1913 bp, Heterodera glycines
ggcccagtatgggtgctaaggagatggaccggaacccggacccggcctgggagatagcccttgaaaaactgatcaaaaagttgttcttgatcgaatcggtccgggtccggatcagcactttgggtcctccgaaaagtgtcaggtgggcctccggaaaatgccaaatcacttttcgtactttttggaccggttccggaggcccggaaaatcggcaaacaattttcccagactaattttgacccggggaatctaaactcgggctcggaattccggatttggaaagtctgaatccggactccggaacttttccgaatcttccggatttttagctgaggcgaaacttgtatagtgcatatccccccccccccgttttcatcaacccaatacttaagtataaaaaaagttatggttatttaaatccacaaaaccttaagtcggaatttttgtccagaacttttttgaaactcaattaaattttttggaattataatgataggtaaatagtttaaatagaggagttgaaattctaaaaaaaaattttatttaattctttctgaaaaaaagttataaagcattgaacaggctatgttttttgccacagtcatgcgaatataattataaacatttaaaattttcaagccataaaatgcaattgagccaaaattaatttattattcgatagcgctaagatttctctatttaccttaaaattttggaaaaatttcattgagtttcaaaaaagttaaagcctagaaattatgactcaagattttttaaaattttgacaccataactttttttataatttcatataaacattttttaaattaatattctgagagacaacacacttaaaactattgaggatatcaagaattactaatttggttgaaattgggccaagatacgaatttatatgtcttgcattttttatttcctacaacatggcagtatttaagaaacgatccagcacgatttatatgtgctaaaattctgaataagtatgtacttattgtcttcttttgaaattttcaaaaatttctacaactttatttgttttatgataaactgttatgaaacagaggcaaattttcaaaatctttcccgaactcgactacttaaaccctttatttttgtcataaaattggctaaaaattaaaaagtttgatcagctttgacaaaatccgtaacaaatcacattaagattaaaaaatattcctcagagacaccaattaggaccccgaccccccccccccgccctatattccaaaaaatttaaatgcgctgtaaaaaaatgcttaagcaaaaacaaacaaacaaacgtgttcatataatccaaaatcaatccatccatctcaaatcttactaatgatagccccttctcatgtccatgccaccttaaaccacccaaatcccacacccacccatcctaattcctttttctcttaaaaattaataattgcaggctgaaaatgtaatattgtacttttttaattgaataaattataaaataacacaatttttaccaaaaattaattttttgaataaaaaattctagggagtggtaagggcaaaaaagtccaatttaggggcataaataggggcgagaaaagcgtgaaacatgggcgaaaattctgaaaattgacgtaaaggacttatttaacaattttattacaatagaatttaatttcaccattttttgagcaaaaggaaaaaaggaatttttattacaaaaaattcgatttttggcttattttttcatttttaggtcgacattaaagtgaaatttttattgtttttgtccaaaaatcttaatttttttttgtatctttttccaacaaaaacaccaaaataagggcgaaaatagtggcgaaatgaaaaaatgccaaaataggaacacctactattttggg

SEQ ID NO: 20605 - DNA, 1816 bp, Heterodera glycines
gcgcttctcccgatcagcactgtctacctggcggttctcctcatcagctcggttgtcttggcgcttctcccgatcagcccggttgtcttggcgcttctcccgatcagcactgtctacctggcggttctcctcatcagctcggttgtcttggcgcttctcgcgatcagctcggttgtcttggcgcttcttacgatcagctcggttgtcttggcgcttctcccgatcagcccggttgtcttggcgcttctcccgatcagctcggttgtcttggcgcttctcgcgatcagctcggttgtcttggcgcttctcgcgatcagctcggttgtcttggcgcttctcccgatcagcccggttgtcttggcgcttctcccgatcagcccggttgtcttggcgcttctcccgatcagcccggttgtcttggcgcttctcccgatcagctcggttgtcttggcgcttctcccgatcagcactgtctacctggcggttctcctcatcagctcggttgtcttggcgcttctcgcgatcagctcggttgtcttggcgcttctcccgatcagcccggttgtcttggcgcttctcgcgatcagctcggttgtcttggcgcttctcccgatcagcccggttgtcttggcgcttctcccgatcagcactgtctacctggcggttctcctcatcagctcggttgtcttggcgcttcaatcgttcttcatggcgttttgcccggacattgccatctaataagcaatatttatttgtttaatcttgcatttttctcacctgcttcagcgatggcaataaacaatgccacaaacagaatggcgaatattgtcaatttcattctcagcgaatgattcgaccgagcgaaggaattgccaatgtgtttttgttcacttgttaactgtttaaataacagcgcttcgtttttcttggagctcagaaaccaaagtttatctacaaggttgcccatcacaagatttgatgagtccgtcgaccatttgcgctgtccgccttcgcttcgtcagatggacgaattgtccatggggtggaacgcaattaatttgtgattaatgaatttaaattaaaaaattccgcaacatttttattgcccttgtgactttaaagtggggcaggcaattaataaattgggaatatttgaaaaaattatttttggtttagctttctccactaaattgttattgctatttttttggaatttttcgtaaaaacaatataatttcattaatattaatttatttgtttttcttcataaaatgattttctgaatttcttacgatgaaataatcaatgcaaataattgcacattgattactggaaattgatttcttcttttatttataagcatttccaaagccgcccagcttctcatttttatgaattttttcgtttttctttaatttctttcacatttttatggcgctaaattattttttgttcgtcattttaatgattctcataaataacggcaagtttataataaatatttaataaaatagtcttttgctttttcttttaaaatgttttgtgccttttctcatattctactggttgtttaagttctgtaataaaagagaatttttttttttgtttgctgatttaaaaaagtttcaattaaattgagtgataatttgcaaatgccattcgaaagagaaagttttagcatttttagaaagcgttaaaaatcccgtttggttttttcattttttctgttttaaggctgcgcgcaagattttgagttgggccttccccttaaaagatttgctaacgtccaaatttttcattgcaaaattcaaaacca

SEQ ID NO: 20606 - DNA, 963 bp, Heterodera glycines
aaaagtgtgtgaaaagttaggcgtagcactgagaagcatttttaattggaaaaaacaaattggcaagaatgggtgaagtatttggtaattaataaattaattcattaattaattatggaatcaatgaattaaaatttgaagtaaatattattaaattgggggcacaatctaggaaattggtctaattaacaaaagctttttatttttaggaaaaaagcgattttctgaattagagaaacgaaaaatagtgagacattttatggaaatgaaagcgaacaattggacaaaaatggacaataaaacgaggagtgagaaggagaaagaagtcactatgacctttgaagtgagccgaacgacgattgccaaatggaagtgccaattgagaaagagagggggtaagaaagtgccaaaaaagaaatcaaaaactgaaaaagcattcaacagatgatcaatggtcggaagaggaagcaaatgagcacacatcggacgaaggcaccgaaaatttggacggagaagaggatggacagcaaccaatggcacatgaggacaatgccaatgaaaatgatagtgaaaatgccaattacagtgaaaatgataatgaaaatgccaattccagtgaaaatgatagtgaaaatgccaatggccgtaaaaacgatagtgaaaatgccaattacagtgaaaatgatagtgaaaatgacactaaaattggagtcaaagaatctttgggtgagttatttgtacagaacccttattttgtatgttaaaataatattaaatttttaatacgaaaaattaaaaattaggtcaaaactacccaaaaagaagagatgaatgggaaaaaattgtgaaaatatttgatgaattaaaagaaaaattaattcgtaagaaaagtaaactttgtaatcgtttggaaattgaaaataaaattgccaaaaaattggacacacatcgattaataattta

SEQ ID NO: 20607 - DNA, 1768 bp, Heterodera glycines
ccaaatatgcgaaaatggatgtcagaatcgggttttaggaaaatatgaaaaacaagcccaacggctttttctctgaaaaaaaatgtgggtgagattttagttttgatgctcttaaaaaacccaaattattaagtgattgccaaacattatgccaatttataaaattttaagcatgaaatttaacaaattctgacgattttccccaaaagcctcaaaaatcatcaaaatttctcaaaaaaccacaaaaagcctcaaagcctcttttgaaaatatatgcaaaaatggagaaaaaaataaatcaaaaaccgggatgtcggagattccccggcttggccggtcccgatactggtctttccagctctaatctattttcttgaaaatttctaactcccattcctttatggtattataatagtgaatttttttgaaaatcttcatattataaaacaggaaaaagagccaaattataatatgcggacatggaaatgagctcagacaaaccgaaccaaaaagtaagaaaaaatagaaattatgaatttaatattgtatcttatacatattaaatagaataggaaaatttaaaaatggcagagaataaatccattcagtttttattcgtttttttgtcaacgccaataaattaacggcaaaattatgaccccaaaaagagagatgaacaaatgggagaaatttgaatttaaaaaacggcaaaattatgacttaaaaaagaacaaatggaataaaatttataattttaaaaacggcaaaattatgaccccagaaagatcaaatttggatttaaaatgtaccgaaacagcaaatttttataaataattctttttatccatgtttttgtttaatgtagaacttctaaaaacatttaattctcccattttgataattcatctaatctattcggtttttttaggttagtgtgtcctatctgaagcagtaattcattaatttgttaaattaaattgttggacaatgaccgatcagcaacaaccaaagaaaaaaatgtaataattattaaaataatttacctttatttttaaaaataataaaatatttaggcccattgagctttgccaagaagtagtacaaatgtgcgatcataaaggccctaccgcatttgtaaaaattgccaagataaatttccaattttggaaactcgtcaacgaccatttgcggaataaaaaatggcttcttgattatttggagattgatgaaaaacaaatgaatggaaggacggaaatggttatttatgacggaaccggaaaaatattgccaattccgcaaaatccattgcccaacaaaattagcggcttccaaacgatttggatcacgtaaattaaccgattatagtaaatattatttttttttgttaactttctagttacctggatgcaaatgtgatcgcttttctccacctttttcaacatcttttcacttcgtgtgaaattactttgaccattgaaatgaccaatggtcaatttttgttcagtttggcccaaaatatttggccactgatcaaaaacaacgttaaacgcttttcaatgccgaccaactttgaacattttcggcatcacttcccttcaattctcagcagcgaccaatggccatctctccaattcgtttattgtgaagatgttttgcccgatttcccagccgatgatagtgccaacgcgtcggatggacaagttctgaccaattggctgttttcggcacattcttgtgatttgccaccgaaggtggctcagtgtgaatg

SEQ ID NO: 20608 - DNA, 1296 bp, Heterodera glycines
  unsure (1)..(1296): unsure at all n locations
aaataaattttccctatattttggaaaaagatatataaatatatactttttttggtgatttaggtttttttggtattttcattgaccaatttttttgatgagtttgtggatcagagcagccaaaaaagcctaataaaattgtctaaactaatcgtttgtctttttatttcaaattcgctccctagtaaaaagattcgccttttgctgattcgttgtccaatttcgcgagatgagcacaaatgggccaagtgggaaaaggaagcgattgaatggacattcgatgatcaatggaacaaattaactttttacgaaaaagacgaaatcgatttttgaacccaatcaaatgaatttttattttttattttgtcaactttttgattatttctgtgatgtatttgattctcttctgtgtctttttaaagatttttcggttgataaacttttattaaatgctcgaaaaattcattccagcggaaagaataaaacatttaataaaatgcaattaatttacattgcacatgttaaaattttaaattctaaattcgtcaaatttgactagtatttcacggactaaaaatcttcgaatttattgaacttttcaggaatttcgtattaaacaattcaattggttgtttcgattgaaaatgatgaacaaaaattagtggcacaaaagcggcaaaaggctattgggccggatgttagcattgactgttttgaattactcttctcattggccatttgtttgtgcttgcaaattgtccaaaaggaagtggcgcaaaatatttgccaacatttgcattcacatggaattttatcgacaaaagggcgagaaattttatctttttttaaaattttttgcataatttttcatttgaacttttcgccctcataatagggcaaaagataaaatttatcttcttttataattaaaattgctgctgaataatacgctatttacagcaatttttatttattttcattgaaatttgcccatattttaccatttttgcgcctaaataattcgctccctatctataaggggtcttcggtctcagttgctaaagcttattcataaaaattaaacaattcctttttctaaatttagctatacaaaatcgaatttcttcgaatacaaaatgaatattgcaaatgaaatggttcaaataaatttgccaaattggaatttgccttattttgtgtatttggacaatggaaaagaattttttatctttaaatatatttttattanaggattcgctagattattgtattatttanatgaaaaatttttcaaga

SEQ ID NO: 20609 - DNA, 922 bp, Heterodera glycines
ttgcctaatttagacttttgtcaaccacgaaatcgctgttcgccaggccaccgttcgcgatctgtccttggtcaaaaatgccggcgtggcgctgagctgtcaaacgctgaattttgggggagaacggcacgtgaccttgattgccaattatatcacggatgattggcgcatcacacggcggacattgcggtgaggggagggggggggggcgtggaatggacttgggagtcagggaaagggttttgcactcggaactgaacctccccgcctcgctcccctacggtttgggtgggcgtggacataaagcaaagagttaaaggcggaggcaaatgccatccgatggatagtccaaaaaacttctcgagacggtcgttccattcacaatgtttcagtgtggagaaggcaactgatgtgcattcgttctctcagctgctccgcgatgttcttgtcgaatttcagctgagtgatgccccattgattcttctgacaatggactcttctgagtacggcgaccattcggaaatggtcgagcaaatgccggataatgtcctgacaatgccaaatgccaacatggcactgaatatggtaccaaagggatgtcaacattgtttctaacattttacaagattctggcccaaagtctgaccgagtccgccgactttgcgtccgtattggcactcgtccgcctttgtttccgcctgatcagtgccgtgcgtgagaccgatcgtctcgggcaattttccccgacggattctttgcccacccattgggcagaaatggcggatgtcgacggacaaaagctaaattataccaccgaaatttatttggcactgaaatttgtgaggcaaaacgcagccgcaattttgactttactcgagagggaagggatcggaggtcattcgttaaaaattgaactttgaaa

SEQ ID NO: 20610 - DNA, 1422 bp, Heterodera glycines
  unsure (1)..(1422): unsure at all n locations
tgtgtacgaaaggattcgcgaaatggtcgggctgagtcgaaaggcgaaggcggcagagacggaaacgaaaagtgagngggaaaataagaaaaagagggacaaatgaacacgagaaaagggggaaggggacaaatggacatgtaaaaaggggggagggcgacaaatgggaccgaccgattgattgaccgttcgattctttttaaacttttagcggaacctttcaaaaaacgccggcgattncaggaagtcgaaacagcagcaacgaaaagtgatcagatattcaatgaactttttcattaaaagtgaatcttttgcttaaaagggaaagattttctgcaccgattggaagaatgtgcgatggaagaggaggacgaattggacatttacttgcgcacttcgttcactcaagaacagactcagtcagtggcaaagtgccgatggattaattaccttcccccccccactttagggacattctcgaattttggtcatccatcggcgaagcacaggtaagacagatgaaaggacatcatacacatttaggcataatgactaacttcgctgcttttcagttcccccgattggctcgcttggctcgtttcattttggcttcttccggcgcgccgtgcccaattcccttgcagcagccgtccatctgcaaattgggaccgtatgaaattggcaccaggcttaacttgaggtgttttgtttgtttttttttgccaaaaatctctcccaaaatatatttttaggccagaagtgctgaattcattggcccatgtgccccaccaatcccaacaagttcagcagcagcagcaacaccaacagtcggcctctcccatggagtgaagcgactgaaccgtcaaaccgagcggagaacggcgccaagcataatcccgaagtccctctccgtgtgaatgtccccccccccaatttgccaatgcttcgtcgtttctccgtttgtcctcagtatgtccctattgggacggcacttccccctcccttttgtcagcagtgttttgctgtcctctgctcctttttgcccttttcctctctctcttttcccctttttcttttctcttttgtgcatttctctctttttattctcttctctttttcactattattattattagaattttgcttcttttgcttctttcttccccttctctctcatctcatcaaatggcattttcccctccccaccgttttattgttcgtactgtaagtagtgatttttgtataccttcatctcaccacactaaccgcaagtttaaccctgtgaatccattgaacaacacaaaataccggtgaatttttactcaaattccctcaggattaattatgtaattaatttaaatgtcgaattgcataagccagcctgggttgggcgtatttatgtatactgtatggaaactactg

SEQ ID NO: 20611 - DNA, 2717 bp, Heterodera glycines
aaccggcgaagtcggcacgatcaaagcgaatttggcggactttgtgccgttggacgacgacctgaacggccttctcccttgcggcaccagcattctccaatgccaaccggacaatgaacggatcaacggcatttgtccacccggtgcattgctaatcatcagaaaagatgtcaccgaggaaaagttggaggaaagggaagtgatcggaaatgaatttcaattttaagatatttgatcaatcttcctacatcacttggcccatcttttgctgatcgaaatgctaataacgaaccaagaaattgccgaaataagccaatggaaacgatgaaagcatcgagcagcagcctttgttataaaaacagctgttttttgtccgatttattgtcgagtacgagcagaagagggaatttgcggctgctcgaaagtgagccgtttgctgacgaagcggcaaccgaagcggaaacggagctacttttgttcgcggaattggagcagcaaatggacgaagacggaaacaaacagaaatacccggatgaagaaatgccgtgccattcagcttcatcttcggcattttctgctgacaactgtcacgcccaattgccaattttttgcggtgtttgttttgccgaatgcgccgcctttgattctttcgcattgcgccgctgtgaaccgttcggtgcgacacacactttctgcgacgactgctggcgacagcacattggccaatgtttgagcaacggccgagtgccaatcagctgcatggtctgtggaaaagcaatttattccatttaaattttttgtcatttttacggcttttcgctatggcttttgtgccgtttaggcccctaattgttcatccgtcgtccgcccttcggtcgctttgcttgttgttggacaacccattgcgcagcggtaccgtcaactcatggtcaaacgacgccgtttgtgccgcgacttcgtcgtctgtgcccaatgtgacggcaccgttcggctgcgtttgaattggcaaagtttggcatcgctttcgcgcaaatcgcagccattggcaaagtgtgcgcattgcgaagagatcatttgctgtcggtgcgcacaaaggcagcatttgccgctcagttgcgaagagcgcgaactttacgagctcattctgcgatcacacggtgaataaaaatggaatataaacaaattaagggatttttcgattaaaaaaaatattatttaaattaattccgaattttcaccgtattttcacacgtgctgagtcgatccacaaaaaaactcagtgattgataaaataaaaaaaagtaattataaaatcggtgtcaatgaatttaattataattaaatgtaattataaaatcggtgtcaatgatgctgttaatttttgttttcattttcctcccatagatgacaaaagatatttgtgcaaaaaattttgaacgaaaatggcgaattttatattttctaatttaatttataaaattaatcgtataattaaattcattgacaccgatttgtataattaaatttaattaggggtcgacctagcaccttttcacattccccaggccactccctccaatctctgctcctttcccccggcttaaatcgcatcgcccgcggcgttcgctgcgacaattgcaacaatttggtggagaagaacaccggctgtgaccacattgtttgcgtttgtggctacgaattttgttggcgctgtggcggcgattggaaaaggcacaaaaattgcgtgggccaaggacgaattgtgagtgaatggcacaatgaaacatggcatttttgaatctttatttaatacattttgttagaacgtgccactgtttgatctcgtctttgtaaatgggcaaaacggaagaaaattggcaaaatctccggagaaattcttcgccgaatgtgccgagttcagagcactccgtcagcccaatgggcgcaaatttttcaaactgatggaccaaatatttggaaacgatcgcccgaggggacgccaatgggcggagaaatacattcaggcgagaaatattaattggccaattaggcaattaattagaacattttaaggtgtcagaatttgttgaactttgtttggcgaagcgacagataagcggcaaaaagtcggacgatttcagcgcggcgacagaccgactccgattcactttccgcacaattccattcattgccaaaatggacaataaaatgacactaaagacgatcagcagggatatggtggaacaaaattacgagcaaatggtggcgatcagcaagcacattatccaaatgatcagatgaaatgtgaaggaacggataaacaacttgcatataaaaaattgtttattgttattgttaactgattggatgtttaattaatcaattaaatagtcgcgaaagtgattgttaaaattaataatttttatagattcttaacatttctagttactttatactttaatttttgtgtagtccaatgaatttttgaaagtttgcatactaatagagactgttaagcgctttgaatatgtcaatttttcacattttagcgaattatacataataaaaggaatctgggtgttttaaaaataaatttgattatggatttgcaattctgaacaattcggccattggatttgagaataaatttcgagaaatgttttgcgacccgtcgaataatgccaagactttttccacaagaattaagcaattcaaaa

SEQ ID NO: 20612 - DNA, 1721 bp, Heterodera glycines
ctccagcgccatccattttcagggctagttgattcggcaggtgagttgttacacactccttagcggattccgacttccatggccaccgtcctgctgtctatatcaaccaacaccttttatggggtctaatgagcgggcactttggcaccttaactccacgtttggttcatcccacatcgccagttctgcttaccaaaaatggcccacttggagctcaaacattcaacgcctgggttcagagtcaagcaaccctggcttcatacccatttagagtttgagaataggttaaggacatttcgtccccaagtcctctaatcattcgctttaccgagtataactgcttaacgagctccagctatcctgggggaaacttcggagggaaccagctactagatggttcgattagtctttcgcccctatacccaagtcagacgatcgatttgcacgtcagaatcgcttcggacttccaccagagtttcctctggcttcatcctgctcaggaatagttcaccatctttcgggtctcagcgcatacgctctgtctccgccccatcgcatgcgatcgagacgggactatgttgcgccccaacaccgcagtgccagggatcacacatcagctccgtaagaagccttcactttcattgcgcctttgggttttgaacacccaatgacttgcgcatacgctaaactccttggtccgtgtttcaagacgggtcgaacagatgaccggcttttacaccgagaacgcacaactgagagcccgagctggaccgaactggtgtgctggtacgtgtcgcacgcgaccgccaccgacccccagctcgagtcaacacggacccgaaaccattgcacaattcacccagagtaaacagcactcccccggatccgggtaccagaccccgaaaggctggcctcaagaccgagctcacgcagctactccgagcatctcagcgcactccgcctgcaaatgccccattcgccactgaacagaaggacagcaaaccccagtctggaggctagcaggccaacgtacagcaacaaacgggtgaatgcagaccagatacgccagctctgtccgtttccacctcatcggtttcacgtcctctttaactctctcttcaaagtgctttgcaactttccctcacggtacttgttcgctatcggactcgtggccgtatttagtcttagatgaagtttaccacctgatttgggctgcgatcccaaacaacccgactccaagacacgtaaagatgggtaggcaccgccagttggacaggtcttgcaccttctctggagccccggtcaagggaaacttgaacaagcgggccaacccaagctcacggtctatacgctacacctcgcaaccccagaggagctgcgattcagcgctggactcttcccagttcactcgccgttactacgggaatcctcgttagtttcttttcctccgcttactgatatgcttaagttcagcgggtgttcacgtctgagttcaggtcgaaaaatcaaagcaggaatgccagtaatccaggcactccgccacagcatgcaaagcattggtgcgcttgagttacggtccgtaaaacgcgaattagaaccacaagttcgcgccagcacaccaaaaccccacagccgagctgagcaagtaacgtaagaacacgtacaagtacatgatcccacgaagcaacgcacaagcagtgcattttatggtaacgaccctg

SEQ ID NO: 20613 - DNA, 1740 bp, Heterodera glycines
atattcataaataattattaatatcttaaaaatagtttagaaattaataaaatgaaccaaagaacctgacaaatgaagtatgaaattaaatttaaataattaatttgcataaaagcaaaagcctcgccattatattaaaaaagtatatattatttttttataatattatataaataattttaattttatcccattatacaaaattaattatatttgcaattgaccatttttatattattttttcattcatagaacttcatggcttccagcttcaacttaaatatcaaaattaaatgattcaaattcttaataccttacaaataatacttcgactaaaaataggtttattaactatttgaaactgattatattctatatatttaatataaaagaatttacaaattactgttatgctttatagacaaaaaaaagtatcttcgatacataaattaaatgcttattcttaaatattcttttaaataaattcaaagattaatgaattattttgtattaattttaaattaattatagattataataaaaataaatatcaataatactactatttattggatttttgttttatatttaaaatcaatctgcatgaagcgcttcttgaacagttgcaagagtttagcagaaccgaaaatttggaagaacatttatcatattcaatgttatggcgtcaagaattttctttgcatgatcaataaaataaaataaaaagttaagtataaaatattatatattgtgactaaaaagtgaagtagtaaatgaaactttaatgtaatgaaatgaacaactgatttaggtgcaaaccgttaagtcttattaaaatgtatttattatttgttaaaaattttgaatcaattagtcatatttaggcttcagatgaactcgcgctgaatataattttggatccatatgcggctaagcacaattatgcaacaatattggttaattcatatcacatacattgtcgacaaatcattgactccagaattttctgaaattaaattaaactaataaattacttgaataaatttattaaacttcttatatgcttttaactagaaaatttggcaatgaattatttacaaatttatcgataaaattaagaaaaattttaagcataaaaatataaaactaaatccaaagcaatatacgaaaacatagaaaaggttatattaatataattttgatttgtgatattaaaaaaacatacttctagtttaagtaaatggattcaatacatcaaaaaatttaaaaatgtatattcaaaaaacatttgaagcgtcaaacctaaatgagttggaaaagcgtaacaatgcgatagtaatatcaagaatgaaaaaaattaaaaaatgcacaaacgcagtgaaaattattttataatttaaaagaatacaatataatagggtattattacagaagagtgaattttaaaaaatttgcgtataactaaatttatagcaagacacgcacgtcgatctgaaccgtgcaattggccaaccgctcgcttcagttcttcgaagtttggcacaaattgcttattcaaaaatgcaaaaaaatatagtcgataaattaaataaacaaataaaactttaaaacacaaaatttgaaaaacaatcatttctaaaattgaactgattatagaaaagtagataaatatgtctagagcataagacaaatcactaggaaggggcaaaaagtttttttgtatacaattcatataagcaa

SEQ ID NO: 20614 - DNA, 1377 bp, Heterodera glycines
acaaatccttttccaacaagcgatgaatctcagcgcaagttaaaaccaccacagaatggcaatgtgcacagctcgcaaaacaaagcaatacccgagataaaattgactggatttgtcggatttgattcgctgccttaccaattggtcagaaagtgccaagaaagcgggtacatttaactagcatttttcgctattttatttgtttttgtggccccttgcctctccagattccaattcaaccttttgtgtgtcggtgagacaggaatgggcaagactacacttctcgaatccctcttcaacatgaaaatggagtttgagcaatgcaaccgcgaactaaagacagtcgaactccgcgaaaagactttcggtattcagctttaaagactaacaaacacaacattttttaaagatgtacaggaaggggctgtaaaggtaaaacttcgggtggtggagactgctggctttggcgatcagttggacaaggaaaagaggtaattcataaagtttcgctaattgatatttgatgataaccccctttcccgcctcagtttgtcaaaggacatgaccggccgtaatgaagtctaccgggcgccagcaatctgcgcactgtgtctcattctgaccaacaccttcatgctccaggtggcgggggaggaggtcatctggaaagccattcctcaaaatcgaaaaattttatcatttttggacatacataatctgttaacagacccatccaaatttggcaaaatgattacagatttttaaaacttttttttttgccagggtatcgagtgctacatgaagcgggcgattgtgggcaaaacggctttggtgtcctccgccgctttggtctcatcgcaccatttgatgcgaaaaaatcctgaggttggatttttgagattttttacgccatggaaaagtgtcggaaaagggaaccgtttcgccgcccctagaaaaatgtccgtttcgccgccataattgttttttttttattttcaaaacatttgttatagcggaagttaagctatccggctaagcggaaaaataaattaacaatcttatgcacatgtgtggccgacattctcaccagcttcaaaaataaacagccatacgaagaacccaaccaaattcagcagccgtacccacaatttagcggtttttaaaataataataataaaaaattttgagttttttaaattgtggcggcggaaaggacatttttctatggcggcgaactggccgaggcgaaacagtccgtggcgaaggggtcggagtcgttttcgcgtggggcgaatttttgaactatagctttttttttgtcaaccaaaatacgatagccccaaatatcctttattacccagaaaaattgtgaaaaaa

SEQ ID NO: 20615 - DNA, 1506 bp, Heterodera glycines
ttggggaaaattggtcgggtttttttaggtttgggggtcatatagtgttatttatttactgccgccatttttcgtcaattttttagggcgacacagctggtgattttgtcgctgcgtttcagtcgatgaccgatgcaaacgcggacattctcgacaagctcggaatgattgggaaaggaacgttcagtgtgttgaaatttgctgggccagttggccagatcatacatgctggtctttcagtagggttacaggtttaggtgtgaagaaattcaatgaataacttgtgttgtctttacagcaagactccgaagagttgcgtgcaatccaacaacttcaaagtcaaattgcgcatcaatttgtggcagtggcgcggaagatcgacgattcggtacaacggctacactacgcaacaacgatgaatgattatcagaaagtctgtagaacttttttagtcaataaattcattctctggactaactggtgtgggtcgaaccaactaaatgaactaggcatagggagtattgaataccaaagtatggtgtcagattctgcttctcgggagagcgtggagttcctggttttttgtttggacaatataaaaatagaaaaagtttatctctatttagatggttggattccatatcaatgcactcgagcgcctgatgaacgacatgatccaggcccccagtgcaagagcgctgagacttatcacgactgagtgtgagaatggcccgcacacaccgcgaaaaattttgcgtgtatgtttcgccagtttaatctcagacttggtagactagaactacgattttcacttttcctgagcttttttacattcttttcccgcctgactacatatcattattttttaatgttttggtatatatattttagtggattaatttgattgccgatcaaaattgtaagctccctactgtgaatgaagcaaagacctacgcgagggcactcgaggtcacaacccaaatcaaaaaattggcgcaaagacaaaatcgtatcacaaattcgtctttttatgccatgtggcagtccggtaagatatccaaatattaaaaaacaaacgaaaatctatgcttattatcttaaattatacaattttaaaaaattcatgggatgacagaattgctcgtcaatctgatgaaactaccgtatgcaacggggaacgagcatctcggctacattgaaaacggtgggtttatatcctacccaagacctgacctttatcacttaatttcagcattgttgaaaaagcagatcaatttcgagagtttaaaaacacctcatgaaatttcacagcgcatggtaagctttttcatagaaaatcgtttcgattcctaccacgcggatgtgcatcgcaatgcaagtgctgattatttcgagtaattattgtaaatttctgacgttagacccttccctggaaatggatctgcttggacaaattgccgcaaaatgttaagcctagacttaaaaaccaagcttcaaactttcgtt

SEQ ID NO: 20616 - DNA, 1137 bp, Heterodera glycines
tataattagccctctcaaattttcctcgggcctcagaaaatggctatctcttttcggccaattttgtaccgatcaaagggaaaatggcttaattcaggccccaatgtgcgcctgaatcgctaattagcttggcacttcggaatattacatataaattagccctctcaaattttccttcgggcctcagaaaatggctatctctttttcggccaattttgtaccgatcaaagggaaaatggcttaattcaggccccaatgtgcgcctgaatcgctaattagcttggcactttcgaatattacatataaattagccctctcaaattttccttcgggcctcagaaaatggctatctctttttcggccaattttgtaccgatcaaagggaaaatggcttaattcaggccccaatgtgcgcctgaatcgctaattagcttggcactttcgaatattacatataaattagccctctcaaattttccttcgggcctcagaaaatggctatctctttttcggccaattttgtaccgatcaaagggaaaatggcttaattcaggccccaatgtgcgcctgaatcgctaattagcttggcactttcgaatattacatataaattagccctctcaaattttccttcgggcctcagaaaatggctatctctttttcggccaattttgtaccgatcaaagggaaaatggcttaattcaggccccaatgtgcgcctgaatcgctaattagcttggcactttcgaatattacatataaattagccctctcaaattttccttcgggcctcagaaaatggctatctctttttcggccaattttgtaccgatcaaagggaaaatggcttaattcaggccccaatgtgcgcctgaatcgctaattagcttggcactttcgaatattacatataaattagccctctcaaattttccttcgggcctcagaaaatggctatctctttttcggccaattttgtaccgatcaaagggaaaatggcttaattcaggccccaatgtgcgcctgaatcgctaattagcttggcactttcgaatattacatataaattagccctctcaaattttccttcgggcctcagaaaatggctatctctttttcggccattttgtaccgatc

SEQ ID NO: 20617 - DNA, 2402 bp, Heterodera glycines
aattttacattttaaaattttttcaattttaaccaaggtttgatatgctgtcaagtgttttttggtcttttccatctcatgcatacatttccagattaatttccactgttttttctttttattttttgacaaggaatatgtgtctttttccctgtactgcctgtacaagattaaccttttcttttgctattcagcaaatcataacatttacaatatttgatgggtgatggcattgtttaaaaagaaaggagggcgtttgatttgcttgttttgttaatttctaaaaaaaattctaaggcataaaatattcatattatttttcaggtttctattggttttggataaacttattaatccgaaaaccggccttacaaaaaccttaaattcttaccattttctagttatttaactcaataacaaatgttttccgtgccgatgccgtcttgtctgttaccgtcaccttcttcaacgtctctgactcccgtccaaacacccgttctctcgccaattgtaaatgattcacgtttttcttatcacgtgccgatgccgttctccccattttcaccgcctccgactccaactttttttcaaacagccgttcccgtcacggatgacactttgctccgtctggccaattttgtgcgttccaccaacagtgacactcaacaacaacaacagttagtccgacaacaacaaatggctgggattgagagcaaagacgacggttaagaaaaagcaatattcttcattcatcaatgtttaatttttagacgcccgccgcatttctgcagcgaatattgggacaatggcaagggtggcgatgctcgaattagtcagaggtattttcaaaaatattttaaccatgccaatagaactgtcataagctatcagtttttcataccaattcttccactttatttatatttgccgaattactgactttcagcccaagtacgttcgccaattgtggactttctttgtatggtgctgtctgacttcaaccaatttggtcacttctgttctttcatcgatagtcgtgaatttaaaattcttgtaagtaaaaaacgaattcaattttataatttcaattttgacagaatacaaaagcgtttactgagcttctcaatcttcgctctaaacagaagccggtgagtaccattatagaaaatacgacaaaaaaaaagttattttaaaattgaattattccccttttttgacagaagtcgtatttgcaagtggcgcgtgcccttaagggttacgagggtcgattggtggatggccatgttatgttgcgaaaagtcaaggacaaaaggaaccagtttaagttcttcccggatttgccataatttgagttttacaatttctcattcatagtgacttttgatttttcagtgtatgtgcctttatttttatttaattcgcaaaaagtggcggcatttgattttgtttcatattcaattattaatgttttgatatatataactgtccgtctctttttaagtgcagttatttcacgttttactttgtttatttcattaattggtactatataaacagtaaattggcaattttttctcatttatttgccacaagttttcattaggcatttttcaattgacgatgtagagtgccttgattttatccattaattaatgtttgagattaaccgataacagaagaagtcaatatggatattgcgaaccataaatggggtagggaggaaacggcggcatggcacagagaaatgatggataggtaagaaattgagatttagccaaagataggcaggtagatcgctccattttctgcaattttaatatacggcgaaagaagtgaggagagaaaatccccaaaattcaacattttcagaaaattatggtggggaaatctttcattgctgtgacgaatgttgaaaattttaattaaatcgtacggcatataaaacgcaatggaaatggaagtgaataacacataaatgatgtttttgttatgaagagggggacttgaatgtggtggtgttgctttgttgtgcgcctctagctctggtaatctagctttatgatacctgctgaactcatacagctaaatggccagagcgacagacacaaacatttgtttggagattaaaaaaaattgttgtggtggaagaaatactaatctgcgagatcagcctttatcaatgtcgggatggagaggagtattccgtctgatgacgatttggcagtcagtctctgtcttctcgtaatactaactgcccacgagtgattggaaattgatgaattgacgcgatgaattttatgtattattattattggaattggtttggtgatagcgtcgggtgcggttagatagtgcatacaaataataggaatgattggaagagagaaacatttgataatatt

SEQ ID NO: 20618 - DNA, 1448 bp, Heterodera glycines
aaaaatcgcccatttcccgccactatgccaattttgggcggggacagacctaacgggggagatataaagtataggtattttcaagacaatttagtcctgtactggggagtatccctgcaaaagttggtgaagttcagatagcttttcgaaaaattacttggaattaaattttactaaaattataagcctaaaaaataaggttaattattttaaatattttttcaaaaaatcgcccttataaattgcattggatattttcaagacaatttagtcctgtactggggagtatccctgcaaaaattggtggggttctgatcgcttttccaaaaattacttggaataaatttttactaaaattataagcctaaaaaataaggttaattattttaaatattttttcaaaaaatcgcccttataaattgcattggatattttcaagacaatttagtcctgtactggggagtatccctgcaaaaattggtggggttctgatcgcttttccaaaaattacttggaattaaatttttactaaaattataagcctaaaaaataaggttaattattttgaatattttttcaaaaaatcgcccatttccggcactatgccaattttgggcgggacagacctaacggggagatataaagtatagggaatatcaaatctattcccgaaggattcatcctcccgaaactgtctgactgttcgaaaaaattttttaatttaagcctaaaaaatttgtctgattattttaaatattttttcaaaaaatcgcccttataaattgcattggatattttcaagacaatttagtcctgtactggggagtatccctgcaaaaattggtggggttctgatcgcttttccaaaaattacttggaattaaatttttactaaaattataagcctaaaaaataaggttaattattttaaatattttttcaaaaaatcgcccatttccggcactatgccaattttgggcgggacagacctaacggggagatataaagtatagggaatatcaaatctattcccgaaggattcatcctcccgaaactgtctgactgttcgaaaatttttttaaaattaagcctaaaaaattttctaattattttaaatattttttcaaaaaatcgcccttataaattgcattggatattttcaagacaatttagtcctgtactggggagtatccctgcaaaaattggtggggttctgatcgcttttccaaaaattacttggaattaaatttttactaaaattataaggctaacaaacaaggctaactattttgaatattttttcaaaaaatcgcccttataaattaccattgcaatattttcaagagaattgagtcctgtactgccgagtatccctgccaaaattggtggggctctgatcgcttttcccaaaagtacttggaaataaaatttttactacgattataagc

SEQ ID NO: 20619 - DNA, 1050 bp, Heterodera glycines
ttttcactaataccctaactgtgctaatcgtttccttgattatgggttaaagcagataatgaattctaaataagtctgtacttgttgtgtggtgctccgggcggttatggtaaaaaaataaaacgaagaagtgttttgctatgtcaggcacaaagattttgaagttcactgttgtgttgacttttaggctgggaatggacatgaaaaatggcaaactaatgttcggcgattccttaagaatttgaaaaaaagaaataataaataacaataatttaaattatataactctcttacgtaatttgtttcgattgttttaaatggcatcacttgtggcggactgaacaacaaaaaattgccttcaatcttaaaaatttgcattcaaattacaataaaatcgagagcagcacgaccaatccattattatcgttttattaattttcttaaaatattttttaaaaggaaaactcattaattcctctgttaatttgactctccttccgtttttgaaaacccctgaggttctataagcctttgaagtaaaaatcttttttctcccactattcttcgccaatatttctcactttttttggaaaatattctcaattcattttcgatatctcaagacttttagccctttgtcaactgattttcgaacctcaaatgacgtcatttggtcaaatcgcaatttttcccaccatttttgtgggaaaaattcctcttcgccgtcactgatattactgctcagtaaaaatttgccattcagttttatgccatagctgaagttggtgaatgcaataataaactcaagcagctgactcggtgccgttttgttcaaccgacggtttaaacgaatttcgttctgaaaaatcgataaattgtttaaaaattataattattaattaattagtccaacttctcttaaaaatatcgaagcaccagctgtagaaatgccaaatctcatcatcaaatcctctttcttttctttgccgtttgatttattcgcttaaatgttaaaattggttaatattttctttcgtcaaagattaactg

SEQ ID NO: 20620 - DNA, 1288 bp, Heterodera glycines
  unsure (1)..(1288): unsure at all n locations
ttcttttccgaaccgttgccccgcagagtgaagttgacaaattgcattttttctctcggtatcagctggacgaagatcaaatgnccagccgataaattgccgacgatggaaatgtcctttttgattatttgcttacaattttcgactaatgccgaaccaaatgtcggctcgtccggttccaccagctccgaatcggatggacggacaaactcaaacaaaattgacatgtaaggggaaccaatctaacagatcactttcatttaacacaacactttaaaaaaaacatcctcttaattttaaaacccttttttatactggagactaataagtgtacttaaaatgaaaaactatcatagaagcggcgagatcaaggaaagggtcgcgaattacgttagactaactctgagagggatttgtcaaacgcaaaaagtaagggaactcaatttttgctaaacttccttaagaaattcgctaaaattatacaattttctgcgttcgacatattttttttcttgcgttcgacaacttttgctgaagaagattcgtcgaacacaaaaggaggggttgaaaaattcataaattttgccaaatttttaatatttcatcaaaagtcccaaaatttttcttaaaattggctcataattgcaaaaataggtcattttttggacaaaatcttttaacaaatcggataaaaattacaaaaattgtaagctgacgacgcatatcggcaccgccggaagtgatgtgaaaagcaaaaaataaagaataatcattttgccgctgacccccccccccccttatttgttagtgggggtcatagccgaatgcatgagctcccccccccatgtacacgtacgtattaagtcaatgcctaaaaaatgtagaattcggagatgcgttcaatttttagaaagtattgatcaattaagattattgactgatcattaggtgggcaagctgtcatgcattcattgcccacgctttcatggtacaattgcagtgtcggaccatttcagcttcaaattttgctccgtctcatggtaatatgtccaatcccatcatccaaaatccggcacaatccttcaaacgcgctcctctattcgccagcttcttatgcgggtcatgcttttccttgtccgctgggtcgagctcaatgtgttaccttgcagcgaaaagcattaaaattaatagaaaaatttaatatttaatttcccaaagattacttgtcgcaaaggtgaacagttcttgcgcattgcttaaagtgtatcactaattggcgtatggcgtc

SEQ ID NO: 20621 - DNA, 2340 bp, Heterodera glycines
aaaaaggaaaaaattttctttgttgaaaaagcttattttaaaaaatttattttttcaaccatatgaaagtcaattattgtgattttttgaaaaatcgctcaaagttaatgaggtgattctatttacatgccgcaaatttttgtgaaattaaaaaactcaggcaattgctgtttggccggttaaaatctttaaaattcatcgatttgacgtaaatattttcagagttcctatataaattaattataccttgccatataatagcgaatagtttctcttccccaaatctgagggcagaataggtaataactatatggcagaggtacgcataagtgtcattatagcgatcagaaaaagttaaacatgtaatgaaattaaaaagtattatttttcaatacactgaattattgtgcatgtttaattgtttctgtccttgagttcccattattgatattcacattttttgttgtggttcgctgactggcccctcggggcatgtgtcgcaccaatgcggttcgctgactggcccctcggggcatgtgtcgcaccaatgcggttcgctgactggcccctcagggcacgtgtcgcaccaatacggttcgctgactggccctcggggcacgtgtcgcaccaatacggttcgctgactggcccctcggggcatgtgtcgcaccaatgtggttcgctgactggcccctcggggcatgtgtcgcaccaatgcggttcgctgactggcccctcagggcacgtgtcgcaccaatacggttcgctgactggccctcggggcacgtgtcgcaccaatacggttcgctgactggcccctcggggcatgtgtcgcaccaatgtggttcgctgactggcccctcggggcatgtgtcgcaccaatacggttcgctgactggcttcggggcattgtcgcaccaaagtggttcgctgacattccctcggggcattgtcgcaccaatgttgttcgcagacaggaccttcggggcattgtcgcaccaatgtggttcgctgacaggcccttcggggcattgtcgcaccaaggtggttcgctgatattcccttcgggacattgtcgcgccaatgtggttcgcagacaggcccttcggggcattgtcgcaccaatgaggttcgctgacgtgccttcggggactgtgtcgcagcaacttttgcatctgcattcttattgagatgtgtgagccctgactgatggatttcagcacaggacgactacactccacggcgaagaatgatgacagaataacctttttgcgcaattttaaataaatatttttattttctgtgcatcatatggttattttcctcatactttgtgccacatttgcaacactttctgatttgttgtttcagatgccttctaaacaacaaaatttgagaaagaagatgcaagatgtgtatcggcgacaggcagagcgatctgtcagtcgggataactcacccgtctcagacgggagtgcagatgggaatggagaggcatcggcgtatctccggggcaccagcaccccaagcttaagtgctttgcaaataagcacgccggcttcttccattggaagtaaaaagaggggaagacccttgagagccggagcgaagccaatcttggctacccaagaaagggtgtctctcattgacacacctcgaactgcggtcactcaaagtgaccagggttcgccgtgcaaaaaaaggggaaaggtcgccgagtgtggccaacccatgtttgcaaatgaagctattgctttgacgcctgtttcgactctaagtcgtggagggcgaccagttaagcaactgggagggcatgccggtaaaggaagaggcaaaaccaacgagtctatgagcaaatgctctgaaattgaccaaagtgtggaaaacgctctaagtccggcaccctcgcacattgtgcctgaaaagataaacttcagcacagtgcaaattaatttcgctacatcgcgaaattttgcctgtaaaatttggaaatgggcagcaatcggcctttacgaacgtgatggcgaaacaccgattgccccaagctctggcccaagatacattgagacctgttggaatgatatgacccagtttctcaatgacggctttgctgccacatacttggcatacttggcaaccatatcacaacgaaaagtggtcgttgttgacccaatggtatggagcaatggcctggacagagtcatgccttacaaaaatatgacatttgggtacgaccctaatgttccggcagaagttatacttttgccagtacatttccctggacattggactctcattatccatgatgtgcaatttggcactcattttgccgattctttg

SEQ ID NO: 20622 - DNA, 731 bp, Heterodera glycines
gccatcgaatttcaagtatcgtatttttttaagtatttattacatgggttttggataatgtttgttgggttggtcaaaacattttataatggaaaaagcccaaaagcccctcccggggcttggccagcggttcagcagcaacagaagcagccgaaaattgatggaatatttgggcaatcaaaaaagcaaaaaaaaacagtaaaacgatagcaaaaagtgggagacttttgttgacgggaagcccgggaggatcatgctcagcagaagctaatccaatgtaagaaatgccactcaatcaccggcaatggccaacaacaggattttggccgcccaactgccccatgggccagggagggaaagcgaaacaggagggaaagcatccccccatttcccacgagcgggaagcggttttgcctctcgagactctcgaggtgtacatttgagccatttttaaagcaaaaggcatgacgctgaccatctcggcagcagcagcagtagcagcagcaacaacagaagggaaaagcatagacaaaatgacaaaaagcaaaacgtaaaaagggaccggcggccgtctgctgtgccctgtgggcacacataacaagcggaggaggaggaaaagccatgggccataaggccgggtaggggaggggggggaaagtccaccccaaaaacaacacctgacagactctgactgactgatgggcttttgctgatcccataagatggggggg

SEQ ID NO: 20623 - DNA, 1657 bp, Heterodera glycines
tttaaacagtgttgccagtgagtgcgtttcgcaaacccaccagaatgggaaaattgccataacttttaaacagattcggtattggcaccaattttattctctattatttagtaaataacttttttagatttcataaaatttgcatcaataataattttaaatcacaagtttttggaactgtaccttttttaggttttataattatgtaaattgattgaaagctagttttgcaaaaattatgaacaaaatttactaatttggtggctttatgaatcgcacatcacggggggggggaaatttaaatggtcttaattttaaaaattgtcgcaaatacagcaggtctcgccgcaacggcctatcttctgggccaaaaatatttcattcaaaattttgtcaaattgtgaaatttattttaaaattttaggattgataaaacccggaagttcccaatttaaagtggcactttgaaaatttgtaaaaattaacaaaaaaaaatgcctatgtcaaagatgaatgaaaattgtacgtgtgtgcgtgtccattgacaaaaaaatgccgttggggacaacacatgaccaattggcacacaaaaggtccccccccaggggacagagaatggcatttttgctgcccattcaagcatggcttgatgagagggcctctgctgccccgtgtgagtacggtacccgccttttggcaccaccccaccaccagtgccctatcattgtgccgggaattgttgtgccaatctcggaggcaaaaggctgcaaattgggccggggcggggacgggggacccattggccaaagagttgggcaatgaatggtcccgccaggcatttgtggaatgtgtgagatgggattttggatggatgaatggccttggcatttgccacacgaccctcgagggagggaagggacgaatttgggccaacgaaaaggggggagggaagagaagagagagagggcatctgttggacactgatttatggcatcggaagacaaaatgaattatgattatgatgaagaggaagagaatgtaaatgggagggagcaaacggagcgcaaaacaaaaggagagaatggcaaaaaaaagtgccaacttttaaaaagcatagcgattggaccaattttttttattagcatcattatctgactgaattggcctaccgcggggtcatgtgacagtccacaacacagggatctgatccgacgttacccaggaaagtcgcggttgccgagccgaccaattagttaattagttcattaggcggtgttcattttttgtcccctccagtgaacggtgccttgttgttgttattgttcaactcgctgttctcgatgtgggttcaagcttcttcctgctggaactgatttgaatcagcttacggaaataagagaaagaaatttcgcactgaatgttctccccaaaaatgggcaaattgtaataataatggggggaggacgggagggggcgggtgactgatggacacaaaacaaagaaagaagcggcgcatttcccgaggggaggggggggggcgatgccaggacattagcaaaggtgggaggtggtggtggtgatcagcagccgaacaacattataatgatgatgggcatggagggagatgcacaaaaccatcaccgccacagcccatttg

SEQ ID NO: 20624 - DNA, 866 bp, Heterodera glycines
acctcatgtggaaggctgtagaaaaaagagatagccatttttctgagaatatctattcttagttatggagccattttccaaccgaccatttgtagggctcaaccgtatatagtaatgcgttttcggggaaaacctcatgtggaaggctgtagaaaaaagagatagccatttttctgagaatatctattcttagttatggagccattttccaaccgaccatttgtagggctcaaccgtatataggtaatgcgttttcggggaaaacctcatgttgaaggctgtagaaaaaagagatagccatttttctgagaatatctattcttagttatggagccattttccaaccgaccatttgtagggctcaaccgtatatagtaatgcgttttcggggaaaacctcatgttgaaggctgtagaaaaaagagatagccatttttctgagaatatctattcttagttatggagccattttccaaccgaccatttgtagggctcaaccgtatataggtaatgcgttttcggggaaaacctcatgttgaaggctgtagaaaaaagagatagccatttttctgagaatatctattcttagttatggagccattttccaaccgaccatttgtagggctcaaccgtatatagtaatgcgttttcggggaaaacctcatgttgaaggttgtagaaaaaagagatagccatttttctgagaatatctattcttagttatggagccattttccaaccgaccatttgtagggctcaaccgtatataggtaatgcgttttcggggaaaacctcatgttgaaggctgtagaaaaaaaagatagccatttttctgagaatatctattcttagttatggagccatttt

SEQ ID NO: 20625 - DNA, 921 bp, Heterodera glycines
aaaagagatagccctttttctgaaaatatctttcttaggtatggagccattttccaaccggccatttgtagggctccaccggtatatagtaatgcgttttcggggaaaacctcatgttgaaggctgtagaaaaaagagatagccatttttctgagaatatctatttttagttatggagccattttccaaccgaccatttgtagggctcaaccgtatataggtaatgcgttttcggggaaaacctcatgttgaaggctgtagaaaaaagagatagccatttttctgagaatatctattcttagttatggagccattttccaaccgaccatttgtagggctcaaccgtatataggtaatgcgttttcggggaaaacctcatgttgaaggctgtagaaaaaagagatagccatttttctgagaatatctattcttagttatggagccattttccaaccgaccatttgtagggctcaaccgtatatagtaatgcgttttcggggaaaacctcatgttgaaggctgtagaaaaaagagatagccatttttctgagaatatctattcttagttatggagccattttccaaccgaccatttgtagggctcaaccgtatataggtaatgcgttttcggggaaaacctcatgttgaaggctgtagaaaaaagagatagccatttttctgagaatatctattcttagttatggagccattttccaaccgaccatttgtagggctcaaccgtatatagtaatgcgttttcggggaaaacctcatgttgaaggttgtagaaaaaagagatagccatttttctgagaatatctattcttagttatggagccattttccaaccgaccatttgtagggctcaaccgtatataggtaatgcgttttcggggaaaacctcgtgtgaaggttgtagaaa

SEQ ID NO: 20626 - DNA, 1987 bp, Heterodera glycines
cgctaattataactcagttgcattaaatacttgtaaattgcaatacatggttgcttcactggttccaaggaggaactgtattcaattagcaaaaaataatgaatgaatttgataatcattatgaattcggagaatcaatcaaatattgtcataatttatacgcctgcaaaatgaaaactcaaaaacaattccaaaacaacaaaatttcttgtttccgtctcatcgtcatttctcaacgcgttcattcggcgacaaactttttgatcttgtccaggaaggtcacgtactgagagtgctcgtaatgagtggctaaaaggacattaaaattcgcaaactctgtagtggtacatgtaaatagtgtcatcagcaaactaaccgaagctgacgagctgctgacaaaattcgggagtgaagccgcgctcttcgagatatctgacgaacagcaaatcgtgcaatttctaaaagcacattttaaaaaagttcgtaatgccattttgaatcaccgggtcaatgtatttgccggacgagctgtacacgtcgtcgccaacttcgttcacgggttcgccattcaccgacggtgcgatgaaaaactcttcgacggtgaagtcaactggcggaaaaaatcagggataaaaatattgaataaacaacacccgcaacatgataaacccgacgaaaattcccgattcgaattgaggggaaaggcaagaaacccatccatgccgtaaacgcgagcaattgacttacatccgccgtcctccgtcttcaccatttcaagagcgaagaacatactctggttgttttttgtgatgctaaaaataatgcatttgttttgtaaaaacggaattgaaaaaacacctaatggtgaagtgtggcaacgagacgggcacagactgaaaatgaatggatcatattgaaaatcagagttcgacttatgcctgggtttattatcaattagattttttaagtactaattgtaagtagcttcttttaaacaaattcaaacacccagcccaaaattggactatacaggcaacacttggggattttccaagaaaattcaggtcaaatcaaacatgaaacttagacccaagcaaaacaaaaaaaaaatagaaacctctggctccatttctgcttgtggctcgtcttcgtactcctcgtcctcttcgatgtcgaccgaatgattcacgttcagaatgacttcaatcctgaaaataggaaattggctctaatgcagtttatgagtccaatcaattgacaatcccgggtttttatacaataactttgtttaggttcgagctaaaccgatctttttgatatcattcgaaaacacaaagtctaacgaagctaaaatatataaaaccatatcgttaaggcaattgctaaaaaagatttgattaattaagtaattgctgattattttcgcctgtaactttcttgaaatgttagaattctttagttttatcgtattattacattaattagactttgtgctttcgaatgataccaaaaagataggatttgttcgaacatgaacaaagttattgtgtaaaaacccgggattgtcaatcgattggactcataaaagttaaatcggactcataaaagtcgattggactcataaagtgcattagagccctaatttccttccaaagcaaatgtcttactcttttgcttttccttttccatttgttcttcgtataaccgctctttctcctcttcgtcggagtctttctcatccaccgaacattcctccgattttggtccctctctttccgaggcttcgcttcccttttcctcattttcttccgcttcttcggtgtgtatttcatcctcatttttcgtactttcttcgcctttttccgttcttaggtgttcttcagatggttttaattctaagacggcggccttttgtgtgactttgtctgaatttattgtccataaaacaaaatgccaaattcgctttaatcactgccgaaacatcact

SEQ ID NO: 20627 - DNA, 2416 bp, Heterodera glycines
taaacttttcataccccatttttcgcaccgtgaatgttatttttattgaattctgaaccgttttgagtagattagactagaaaaaattgaaaattttgaaatcatgtttcccactcccttctcccaggggtattattttgtaaagtctttttttcaaaataaacttttcaaaccccatttttcgcaccgtgaatgttatttttattgaattctgaaccggtttgagtagattagactagaaaaaattgaaaattttgaaatcatgtttcccactcccttctcccaggggtattattttgtaaagtctttttttccccaataaacttgtcaaaccccatttttcgcaccgtgaatgttatttttattgaattctgaaccgttttgagtagattagactaaaaaaatatgagtgatcaaactttcactaaaaagttaagcctaaactttttcccaaagttaaaaagcaattaaaattttattcacctccattattgatagaaaaagcatcagagtgcctaaactaacatgtaaataaaatttggtgcgtttcagaaccctttctgaaaaaatatttatgaattaattttgcaaataaataaaaacgaaagactcagattttcgaaaaatttttttgagccagctagctcggcgctcatttcagtgtaagttagtcctttaccggggagtatccctgcaaagtttggtacgcttctgctcaattagcaaaaaatatgagtgatcgaattttcactaaaaaagttaagcctacattttttggcatatttaaaaagcaattaaaaaattttaaaatttaataattttcctgcaccgaaggtactcactcggcctcttcgcggcctcgtggtggggccttcgccccccccccccctcccacgcccttcagagcacgacaaatatttcaacaaaaattttgaaaaattgactagagcaatcgaacgctaacggacgacctaatggaaaaaaatccccgaaggagagaatttaattaaatccattccttcgggggaccgtgccgggtgccgcggggtaagcagtgctggttcgtttcatcacggcaccgaaccttttggctagtcagcaatcgttgcttaacttgccagatcggacgggtgcgcatgactttctgaaaaaaatatttatgaaacaaaaaaatcgattttttcaagtgtccgtttggggtactcaaacatttatggggagcaaaaatccaacgcagaattaaagtacaggctatagggaagctattccggaaggattcggtctccccataaatctgggcgcatcggttcggggggactgccccgaatacaaaaaaatcgattttttcaagtgtccgtttggggtactcaaacaattatggggagcaaaaatcccccgcagaattaaagtacagggtatagggaagctattccggaaggattcggtctccccataaatctgggcgcatcggttcgggggggctgccccgaaaacaaaaaaaatcgattttttcaagtgtccgtttggggtactcaaacaattatggggagcaaaaatcccccgcagaattaaagtacaggctatagggaagctattccggaaggattcggtctccccataaatttgggcgcatcggttcggggggactgccccgaaaacaaaaaaaaatcgattttttcaagtgtccgtttggggtactcaaacaattatggggagcaaaaatccaacgcagaattaaagtacaggctatagggaagctattccggaaggattcggtctccccataaatctgggcgcatcggttcggggggactgccccgaaaacaaaaaaatcgattttttcaagtgtccgtttggggtactcaaacaattatggggagcaaaaatccaacgcagaattaaagtacaggctatagggaagctattcccgaaggattcggtctccccataaatctgggcgcatcggttcggggggactgccccgaaaacaaaaataaatcgattttttcaagtgtccgtttggggtactcaaacaattatggggagcaaaaatccaacgcagaattaaagtacaggctatagtgaagctattccggaaggattcggtctccccataaatctgggcgcatcggttcagggggactgccccgaaaacccaaaaaaaaattttttggataaaaattatttaaatgaactgactagataatatttaaaataggttatttctcttcctttcagtatccctgcaaagtttggtgcgcttctgatcagtttctgaaaaaaaagttaagcctaaactttttggcctgtttaaaaaggaattaaaaatttttaaaagttttattcatctccctttttgatagaaaaagcatcaagaaggctaaactaacatgtaaataaaatttggtgcgtttca

SEQ ID NO: 20628 - DNA, 1679 bp, Heterodera glycines
attttgtcccggcgaaatttcggccgacgagatttcggcggcgagattttatcccgccccttttttctgtggtctcgctttttaaaacgatggatgtagcgccaaaaaaatttttttcggaaaaattacaacacacactcaaccgggagctcggctctcgagtggatagctcgaaaagtccatagggagcttagctctcgagaatcccgcccccatgtctggagcgcagaaattcaattaggtatttgtaatatgtgtcaaccactaacctgttgcaaagtcggctatgccctggtcagcccactcgggcgccgcgttcgactcatcgtcgccgacacagctgttggcatccgccgccgtcgcctcatcacttccattgctcagtgtcttcagcaagtgattgcctttgtccccaattctgatcgcttcttctctcagatgctgtgctactccgccatactcatccacgccttcttctgctttgtcctgctcaaactggaacatcttggtcgcgtacagctgctcccagacaaatgtcgtgccaaattcctcctcttcatccgcagtttccggccatctttttcgatgttttggttgttgctgcttctgttggtagtgttgctgggtactgcttgacaattccgttactgtcgtccctcctgcacctctttgtgccactgttgctgctgctccatgggtggtggaagcgaacaatcggtcaaaccattccggacgaacgccgccgtgcaaattgaaagcggaggatgatgcagttgcagcttctgctgctggtaatgatgatagagtggtaagaaggggaaatgttgtcggtgcatcggtaccaatgggttttgctgggagttgttggcgaagaatgtccggtgcaatatttaacaacgacgaagccgacgacgatgattgggttgttctggaaaaagctgaccgatggtttaaaagccaaaaatgtaaatgggattgggggcgtgggttcgattcccatccaagaccaaacattttgacaattattttacaataacttgaaagggacctaaacgatttgccattccgaatcatccacttaaattcaagcttaaaaatcaggaatatgccaaatcaatccaaaagcatcccgattccttctgcctattaaaaaccctcatttttgttttccaatcgattttccgaacccaatccaacaaaaaaaaatagaaattaaaatttgcgtaaaactgggcgcggcccacgcactgagtggacgaagacgaaacaccgcgcgaagctgccgaactggtgctgccgttgctgattgttgacgagaatttgtcgttgttgccgtttttgttcgccttccgtgctcgttctgttatcgctgatgctttcattggcactcttgacgttttcggcgtcgtcatctcttcctcctctcccgactgagtgctgttccgctgcttcttctcaatgtcacgctttttctttggcgaactgaaaatcaaaatgttcaaattgttagaccctcgattaattagagatgaacaattggccggtatctaatttgggaaccctaattcgactccaagcaagccgcaatcccgaataatccaatgagtcccccactgctaatcatcccaaaactgttgccttctgagactgtcccccaccttgtgctatttcctgtctga

SEQ ID NO: 20629 - DNA, 929 bp, Heterodera glycines
atagctcactatagcctgtctttattctgcgttggattttgctccccataattgtttgagtaccccaaacggacacttgaaaaaatcgatttatttttgttttcggggcagtccccccgaaccgatgcgcccagatttatggggagaccgaatccttcgggaatagcttccctatagcctgtactttaattctgcgttggatttttgctccccataattgtttgagtaccccaaacggacacttgaaaaaatcgatttttttgttttcggggcagtccccccgaaccgatgcgcccagatttatggggagaccgaatccttccggaatagcttccctatagcctgtactttaattctgcgttggatttttgctccccataattgtttgagtaccccaaacggacacttgaaaaaatcgatttttttgttttcggggcagtccccccgagccgatgcgcccagatttatggggagaccgaatccttccggaatagcttccctatagcctgtactttaattctgcgttggatttttgctccccataattgtttgagtaccccaaacggacacttgaaaaaatcgatttttttgttttcggggcagtccccccgaaccgatgcgcccagatttatggggagaccgaatccttccggaatagcttccctatagcctgtactttaattctgcgttggatttttgctccccataattgtttgagtaccccaaacggacacttgaaaaaatcgatttttttgttttcggggcagtccccccgaaccgatgcgcccagatttatggggagaccgaatccttcgggaatagcttccctatagcctgtactttaattctgcgttggatttttgctccccataaatgtttgagtacccccaaacggacacttgaaaaaatcgatttttttgtttcaaggg

SEQ ID NO: 20630 - DNA, 1900 bp, Heterodera glycines
ctgctgtacttgttgtataacaaagagtacagtaacatcacacccctgtaatctgggtaagtaccgtaccacctataccatacgctttgacaaatgagtgaaaaatcaccttcataaacttcatcacttaatttctggttgtccggttttttgctcgacacttgtataaatagttcttcagtttgaaatttaggtttggctaaatttaattttattaattttccaaataatttttaatgagattaaagagctaaatttattttaattaccggcagtttttctgtatttcaacaattcgttccaatttagcaatttcagtttttgaacatcgacaaaattttctaattcaaatccaaaatttaaatttgaaattttgcccagtgcactaatgacatcaattagcgtaagaattgtgccgctcatttcaaaaattggcttcacagccgaagcaactccattatgcactcggaacaaaaactcataaaccatgtccaaatatgagcgaaattttttgcattccacgttttgctcatactgtaccaatgctgagtcattactgtaattgggttaattgatcattagcaaaggctaatatttgaagctgctaaaagttgtgcccagggcaaaagattggttgctaagattttctgccatcaaattgctataaaaatcacggaattcctaacccaaaaatgaccataatattcgtttatgcccttgttaccgttcaatttcctgcgcgtttttgtcgctgctgctttctggtttgaatttggcaccattttcggcacaatgccaatcccttcgcatcaaatgcaaaatgccaaggtgctttacatatttttgtgtgtaaaatcttttgtttgtttcatctacagtttgcctcagattgtgtcgagttaccgtatcaaaggcatactctaacacatacataaaattggattgccctttcacaaacatgaggaatgcttcatcttcaatctatgtttcaatgaatttatcagccaattttattacttcaattattccaagatttaaattttacagaaataaattatttttccagcgtgaaaaatttgtgttctttggatccgaatttataaaataaaaacatttaaaactatcgaaattgcctcaagtattttttaccttgggttcaatattttcgaaattttatttactttattttttgcacgaaaatagtcacaatctcgagatttttcgtccattttaaatggtcttattttgcaaatttagaattattcttattatattaatttcaccacgctttccacttcgtagattagcaaatgcaaaatgagttcgtcctttttctcgccataatttttgttagcatcggcattttttgatgccgatttcgatgatgatgataatgatgatgatgtttgtgccatatccatgccaaataactgtccattgccagtcagaaatattttctgctccatttcattttgttccatttttgtcgcattttcttttgctttattatacattttcttcatgattttttcaaacttggcacgtgcttctgctaagttcttttcttctaaaatggcaacaaacagttttttctaggacatagtaatgtcggcgctagttaaaaagttgtcctttttgaaaattttttcacttttttttcatgtaattttattttataaatgataattttttaaattcattttagcaaatggttaaagtttcaaggtattctattaatgattccaacaatctgccgttcatcgcttttccaacattggacgatataaatttgagatggcttttttcccaaaactttgaagagattttacaatttttggcacacagcggagttatccaaaataaatgtttatgccataagtaaattttggtgaaaatttac

SEQ ID NO: 20631 - DNA, 2827 bp, Heterodera glycines
atagggagtccaattatatgcacatgcatatttttttcctggactgtgggaggcctgaaacgcacgaaaaacatgtttttagcgtgttttgaagcttctaggatgactttccatatgcatgttttgcatatttgtgcatatttcgcgatttatgtgcatatttgcatattttggcatttttccaaaaaacctctaatagaacggccccccaacagacaaattggcctttttgacctcaaaaaccggaaaattttccaaaaaaataattttttagcaaaattttcacgaaaaatattgaataaataaattttctcaaaaaatggttaatttatgtcaaaaataagcaaaaaaagcaaaatttcgctttttgggttggtttttcgcaaaaaatgagtaaatttttgctttatcatgtttttttcttctaaaatgatttttaataccacatttagccattttttgaagattttacttaatatttaacaaatttgaagaaatttagagacattacacccttaatttggaaaatttatatgcatatttttcactttttatgtgcatattttgccatttttggtgcatattttatgcgcatattttgcgattttatgtgcatatttttggatgccctaataatcattattcccttttcaaaggtcaattccgacaatgtgcatttccttctctctgttgggcatggccgcatcggcactttacattcccgtgttcaagcgatgctcaaatttatcaaagtaaaaatatattttaaaaacaattgtttattattttaattttttaagaaaattgaatggtgatggagaagcaaaagcagaagcatcatctcaaaattcaacccaaatttatgcgtacatttttgccttagtccaatcggcgtcgacattggggtaattatttatttgtaatttaaattttaaataattaagtaattccgattgaaaattggtttttaatttaacagaaaactcactttatttttttaactccattttcaaacattttcagctccttttttggctcaacaattggtggctatggcgccgatgcgtttggattcccatggatttgtgcttttgttgcgttcgcgcattttctcttcataattttggaacaaatccgcaggatattgtccaaatatttataattaatatgattttgtttgtaattgatttgatgaactcagcccattcttttttgattctcatttttttaaataaagattcaattaattggcattaattaaatttatttactcattttctggtattttgtgaaaatataattaattcacaaattttatttaaaaaacacgcgttcatataataataatatcttccgtttttctgttacacaaaaattttgattagattgtaaaaaaataaataattatttattagttaatttgtcgtcaaacggggaaaagtgtaaaaatggtcaaaattccaacccgcaagtcgctgtaatatttaaaaaacggggaagcaattaattcaaatgataaaccaatgaaaaaacaacaacaattgcatttagtagaatagttatttaatttaaaatgaacgaaaatttctcgatgtttacgaaagttatgaaattttattcaaaatttttaatttgatataatttctcgttagttagctaaactatcggttagatgccatcgctattaatatttagaagttttttcacaccaacgaaaaaacgacaacaattgtattttgtgaactatttaattgatttaaaatggaaaaaattcaatatttagaaaagctataaaattataaaatatttttagacttttttattcatttttttggctcgtcagctaaacataatttatcggttagatgtaatctgtattaatttttaggtgccttttcgaatggtttaccaaatgtacttggcatccaagtacgaatccgagccctggctttaaaccctcaataaagtccgaaaatatgtatatattcaatatttgcttaaataaactaaaaatacactaaattactaaaaaatggtttaaagccaaaaaatgcaaaatattatcaaattcgagcttcaacaattgcaaatcaaacacatctcaagattttttggtaattatctcattctgttttcgtattgccactttcggcatacaatttgtgacatgaagtgccatgccatcgtcggatgagggcgtattgtgataaaatacggggaaaagagaattgagtaaaataataatataaaatgaaaatatgtgtcaaaaaaatataacaaaatcaataaatatattctttggcgcttttttaattcatttttacaatttggataaaatttttcaatagaaaaacatttagttaaggatatgtattatatttttcttataatttttccaatttttacacaaatttcttcaaaaaaaggtaaaatatttttaataaaaaaaatgaaccttgcgttattaacctttggaattttcatgaaaattgaaatttcaaatagtggaaaatgaaattcatttataaaacgaaaatacattttagaccaattcattggacaaagtcaatcacttaagtctatcaacaacaatcataatggtaatattttttaattcatgactcttattcttaataatatttagtggatttgtatccgccttctgccccaagcattggtagcaatttttcattaaaaaatatttttaataatttttttttagaaaatatacatggacaggcatcaacatcaaatggcggtaattttttgtttattattattagtacaaaaaaaaaaattccctagcaattgatgatgaaacattaat

SEQ ID NO: 20632 - DNA, 1569 bp, Heterodera glycines
aatttttaagaaaatagaaggatttttagtgccggcaggtcccgataagcgccgtcgggaaatttttttttctttgaaaaatggggagttttggtagcatttatatcagcgaggaatccgctaaatgagtgtaaattctcagatattggaattggcacctcataatccgccgtttcttttcgatcgcttatgttataaattacatataatttttattgtcagcccacattcatctcactcatcaatgggtgtatgtgtttaagcaattgtttataaatcccgaactaatccgaaggccaataaacgagatcaaatggaaaaaatcttttctgttctcagttttactgataaaacgcacaaatacaatcgaatatgtaagtgttttgttaggtgaacgaagttgctgatcaaaatgccacaaaagtcgccaaacaaattaaaaaaaagcaaaactcaagaaatgagattaaaaaagaaaatagaattaaacaaaatgccgaagagaaagtcgaaaacaaagacaaataattattccaagctcttcgaacgatgcattccgaccacccgcgattgcttctcctccttcgaagtgcccatttccgacagattcgtctcactcgtcgcatatccttgaaaatgacgaattaatgaggataaaagttggaatttcctgttttagagccaaattttggatcaaaaacaatgcgcatttcaagagataaaatgccacacttttgagccaacatttcttcaacttcgaaaattcgatgtttttgttattgttccgtaccatcgtccttcggcggtggcgtcggactgtccgtcagtgcaaaagcgacaccgccggcagtataaattggatccgcagaaaaggaagtgccgagaaaggtgccattgtttttccgactagcgccgccaccgcgtgccgcctcgggcgtcgtcaacgaggagtaattcggcggaaaggaagacgagtcagaaattgcctgagaagtaaaagccacattttaaatgggagaatatacagctcgttcccgccaccacccgagaaaacaaaaaattggacatttaattttcgaactttcttaaggcttttttagtatccatgtcgagcaggttatcagggtaatttttaaaaatattgtcctaattggtccaatgcaccttgtgtaagatttttaggggatttgataaaggtaaaagcatttgataagccacaaatatttttaaattgaaaagtgccaaaaagccggaattaaaattataaaaaaagttttttttttaaattatgtatttggaattcagttttattccgctcgcctgccgctcgtcatcgtcgtccgccggcgttgtgttgtggtggctttcctttgaactgtccgtcaccaggtcctccttcagctgttccatctcgcgtagttcgcccgtggctgtaagcaataaaaaaaatgagtttagtttcaatgcaaaacccaaaactaagtcgaccaaattccaggggggggggcgaaggataaaatgcaattttttggaaattttctaacaaatttcttataaagaaactctcaa

SEQ ID NO: 20633 - DNA, 2312 bp, Heterodera glycines
agacgaattttggggacgccgaattttaaaatgggaggaaattagcacttttttgactgaagttgaggccgcgatcaattcgcgacccatcactttcgtctcagatgaagctgatggtctttttccattgcgaccaatcgattttttgtctccaaaagcaaacctcgcttttgatgagccggacatgtcagacgaagtttttcgaccttccccagctgaaaagttagccgcccgatggtgggggacagcaaaatcaattcggcagttttgggaaaaatggtcacaggagtacctgttgttgttgagacaacgtaatcagacgaaacacaaaggacctagaattgtatccaaatctttaccaaaagtggatcaaattgtcctggttgaaaatgaggaatttcctaggaatacctggcctatgggaaaaattacagaagtccagggccccgaaggaaaccctcggagtgccaacattttaatggcaaatggacgggtgttgtcccgtcccgtttcgaaattggtgccattagaagaaccacccgggattgtgtgtgagactctttcgcgccccccgggagatccccaagagggaaatctgatggatgtggtcgagcaaatttcagaatcggtcggtaaagaaaatccaaaagaaaagttccgatgggcaaaagagccaccccgtggcaattttcggtagaaattcaaatgggcagaacgccctcctcgcccaacaatttcggccacaattctgagtactcggctaacgatgctgcttgtgttgtgtttcttcagcggaacagcagttttatcagcacctgtactctccgctgcacttttatccacacaaccaaacgccacaggcattttttcctgtgtttccaagggggtaatgctcgagggactccccgaaaccgaaaaagttgatatttgctgtgacggtatttgcggtcatcgggaatacagaagaccattcttttttccgattccagaggaaaatttattacttgggacctcttgcctagctattttttggatgggacccaatgtttccacttcatactcggcccaatgcgccccagtggacatctgtctgctggtcgattgctatgtatgctgggaaagagtgttcaactttcactgctcccccactttctccgctcttttgatcggttgcattgcccttgttgtaggcattgtatcaaccgttttgtgctgccttctcagttggacaaactgtttcttccgcgcagttaaacgttgttgtcgaacaatttgttgtcgcatgttccgaaatctgaaaggaaggaagcaaaaacggccaatagaaagtgattcagaaagtgattatgaaaaccgtcggcacaaaagattcaataatcggagatttaggcctttgacaaaattgggcatggccctgaccttaatttgttggttccaagggatccccctaggaaatggagtccctaccactataacggccaatactgaagaatgcgaatccaatgaaaatggaacagaatgccgatttaactctgtgactttgttgaatttgctcccagtcggccaatcggtggaccttatgatcaggggtcccgaatccatgctattagggattcttacgttcactttgaaaggcttataccaggaatgtatccctgagtctttgggattcattcgttcttataaaatgggatgactcggactttgtaccaattcagatggtcttgagaatggaaggattacgcctagcaatacaccaccaaatggcaacatgtaagataagaccacagggtttaaaaggttactataaatgccgaatcggcagccgtttttcctatacctgtacggcagttatggttcacctttggctgaaattgtgtgtgaaaatggaataaattgggcaattccgtgctccgctcagcaaacgcagcataatacctctttgtctttcgacacagccaaaattaagacaaattgtaaggtgacgtgccctgggggtgatactttattcgaaatggaaggcactctggcctatattttttcgatcagccgatcctggcgtttgactggagacaaaaccgaaaatcatccaggagggtttagcctacctgaaattggtgatcttttccacgtcttgaaatggatcttcggcggcacccagcttatcatcattttgggagtgcttttcgttggaatttgtgctttttacattttcctcaaatttaacccaattttttggggttatcgaattttggctaggaaaatttggattaccatttctctgctcattaatctgtgatgggctaatgccg

SEQ ID NO: 20634 - DNA, 1431 bp, Heterodera glycines
  unsure (1)..(1431): unsure at all n locations
cttcttggcttgtttgtattcgtcctccagtttttgccccataatagatgcttcccaaatnncatcgaagncgcgnncggccttttagcggatgttccgtgaaccgctcttcgcacctttttagctcttccaaagactttttcagctgcgggtcggacctgttcatgtgctcgatgggatccaattcgggaatgagttggtcgaagcgttttttcgtttcctacggggaaaatagctagacatcaaaactgatggaatatttcgaatttatgtcactgaaatttgtcatgaaaagtgtagagacatcagccaacaaaaacaaacgatgtcatcagttcaattcatattcacttttgcatacctttacgaagttcagtcccaacggtgggactgacctgtctgaggctgctctttccgaaaaaagacaatgttcaaaaataacaaaataattcaccagaatggtcttggccactgcttggaatgcctccttgctcttcagctcttgaggaatttttagccgaattgtgctcactgcttggatacagtcgaaagcgaagggcagcaccaccaccacgccattctccccgggcggcggaggtttcaccgcacatagattttgcgcgcagttctcactttcgcgcgagacgaacacagccacgtcgaggaaatatagcatttcaggagacaacggattcagtgggttcggctttttggtgtacctcaacagcacgccccagccgaagtccttgtcgaagcatttgagctaaagaatgcatttcgtttagttttagcgttaagcatggtgttcaaaaaagtcactttgagcattcggcctggctgaaagaagcggataacttttgccggcttcagtaccaatgctttgatggcatttctctgctgctcaatttgcttctccaatctgaaaagtccttccaattccgacaaatggtcgacatgcgcacttaggaaaagttgtcttttggtgttaagttctgaagaattcgagaaatcaacaattaagaatggcttttcaactctgcagaaggtccggaaggcgggaataattctgccactgatagaaggaattgccgagcataaactgcggattgatgtccggcactcgcaacagattaagcaccatattgtaagtgagtcggaattgggagttcagtggatcgctcgtgccctaaaaagtgccaaaatgcgtgatttcgaaaacaaccaaaaataaaagtggcacttttattatttgcatggccgtctccgcgctcatctgctggtccaccatcagaatgaccagtcccttnctcgtctttgccccgtctccccgccctccgcttcattntggatgtattcgccacttgttatccatctgaaattgcgatgaaacaaaaaaacggtctttgtaaactattctttacctgttactga

SEQ ID NO: 20635 - DNA, 1645 bp, Heterodera glycines
tcgtgtcccgacatttgcgcctttgtccaaaatcgggttctaaattaagttttttcaatctctgatcgcataaacagctttaaataagcgattaaaagtgattgtaaccgatcatttgatcttcaaagaatttttgaaaaaataataaaattttcaaacaacaattattgatcctaaacaaccaaaagacagggttttcttaattgtaatgctgtttaggctatcagggtttgaaaaaaattcaactttgagtccaattttggacataggcgcaaatatcagggctccgtttccattcggtttagtatttaatgcaaatgtttctgcctgtattaaaatcaatgtctttgatttcggaggcgtacgcctcgcactcctttcggctgaatgaaaagataatgcatggcaacatgtctcgctctcgaatggttctaatgattttcacaacgttgctcttctgcgtcgcgtcgttcgcgccactccgccgtccgtgctgaggccgcacttcgccgcccatcggttggcgctcctccaaacagctcatcgccttggcaaagttgtcctgtttaaactcgccctgaaaatgcacaaaatgtttggctgtaaattttaaacatttttccttgcctttatgttcacaacttcccaaagaccgtccgacccggcagaataaaccaaatgttggaggggaacaggccgatagtccgtgtaaatgatgttgcactgtttgtgctgcaaatagcaaatccattctgaaagtttgaattccaaaaaagaaaactaactaaatgtaaagccaacctgtgaattgcttggcatttggaatagttgcagaaagaaacaccaaattggtggttttgggcaataaaatgagagtttcttcccagacgacgccacgttctaaaaacgaaacgatagaaaagaactgaattattagaatattaaaacatcgacgagttccaaggtcccaatccgatgaaaatgaatctttgggtttcttttgcttacctttgtcgcgcatgtaatgaatctcatcaaagatcacccagccgacttctctcacaatttcacagcctcggtaaagcattgaacgcagtatttcggtggtcatcacaacacatgatgcatttgggttcagtgtcacatccccggtgacaaggccaacgtcttcgaactcttcaacaagttcacggtacttttggttgctcaatgctttgattggggacgtgtaaatcactcgctgtttgtcccgcaatgccatggcaattgcgtagctgaaaaaggacgacaattaaaaaaaagtaactcaacgattcaccacccgaaacgaaatgattgataaaaagttatagtttaataaacccacagggcaacaacagttttcccggccgatgtgtgagccgagaccagcacagactgttgattgtccaggcatttgagtgcctggctttggaacatgtcgagtttgaactcgtaaagctttgccggggtgttggtcttttttagctgttgatattcaacgtcaaaggggacgattgcctaaaagaagacaaaagccatgagaagtcaaaggaaaatggacgcactacacattaaatagggaagggggtcgacccccgcccctgactttgttcgtattagggcc

SEQ ID NO: 20636 - DNA, 901 bp, Heterodera glycines
tttttatgcgtccaatcaaatttttcatccggtgatcatgtttatgctagctctatttccgtttagctgcagcttaattcatcatagggaatggtacggcttaatcattggctaatttggatactgaagagcgaacccatggcctttttgcggagtttgtcctaatactaacaaaagctaccataaaggtcgttagtattaacgaatctagctaagaaacggaaaacaacttatgttatatgactggtaattctgctaagatattcaaaattttgtaaaaatagaccagaaaatcctggtggaatattgtcaatgcaatacaattcgatgtaaaaaattgattggacgcataaaaatttaaaaagcttaacgtttttttaagaaatttgttgaacatctatattctttccccagaggcacctataggtaccgccgcgtttacccctcttttttttgaaaaagtatcgaaaaatgaaggccagagcaaaaaagatcatcggtttggtcaaaggaacgaaacaaatccaagattgttcttgtaccaaacaccctgcataaaaccctaaaaatggattttttacaaaaagtttttcaaattcctctccataattgcgttttacgagtttcatattgttgttttctgatgaacaggccaagacacagctgtgaacgcagtgcagaagttgatggaagggttggaccagtacatggcgatcaaacagcaggacgaagagcagcagcggagaagaaccgagcgcgagcagttcaggcgtgagcagtcggatgagaccaagcgcgggttggccgccgaccgggcgaggcaggaaggagctgaggcgccgaaagcagaaggaacagttgagtagcaaatgatggtagctgaacatttctagtcccagtt

SEQ ID NO: 20637 - DNA, 2708 bp, Heterodera glycines
gcttttaaaaaaatattttggcttgtattttttaatttgttgatgtgtgcttctttagttttgtgtgtctgcggtagggccgaaacgcactttttttcttattttttgttttcttttggaagagcaccgcactgacgaggcccactcttccattagaaatttttataacaaaaaaaatttttttcatttaattttttctcaggaattgtccgcaaatgtccgtccgcaaatgtccgtccgcaaatgtccgtccgcaaatgtccgtccgcaaatgtccgtccgcaaatgtccgtccgcaaatgtccgtccgcaaatgtccgtccgcaaatgtccgtccgcaaatgtccgtccgcaaatgtccgtccgcaaatgtccgtccacaaatgtccgtccgcaaatgtccgtccgcaaatgtccgtccgcaaatgtccgtccgcaaatgtccgtccgcaaatgtccgtccgcaaatgtccgtccgcaaatgtcccactgcgccgattagcatattcatttacgcttaaagttcacttgtttaaataacttgtagcctttactaatttaaattacatgatgttaatgcttaattattctcacaaaattttgagcaatgcccttcttattggaatgttgccattttgaccggcccgtgccactgaaactattgccgattataccacgtttgctatttttacaattatttatcaagaattgaaaatacataaagatttcttatgtttaatttaaagcattatactaaaaataatttgtgaattaattatccataatattgagctaaattgatatactatccactaattgtagtaatcaaaataaaaaaactgaaataatcaaaatttaatttatatgctagcgataattatccagaggaggaaactcagccgaacatgatcctcttcgttttagtcaaaataatctaaatttacattaaaaaatataattggttctattgccataaacattagcacaaatacaagaaattcgctcatcatacaaatttaaaaagaaattaaattaattaaaaataagtaaaaacgaataaattatgcgataaataattttcaacaaacaataaaacatttttataagagaaaaacctatcgtaaataatcaaacgcatttgctaatgatctttcataatcagtaataaaaaatttttaattaaataattgcaagaaataaaataaaaatataaaatatacggaattgaaaatgcaaacagaaataaaacattaattatataaaaaaataattagattagtcacaaaattacttattgttggaatcaatattcagaaaatagaaaatacttaatgaatataactgattaaagttttcccaacagcgtaaagaattgctgcattcagcaactcaagctgtgtgttgaattatgcagcatgaaaatgaactaaatgtgatgagatgaaagcttaaatttaaaattttaaaatatgattcttccaattatttttataaatgaaaaagtttaatttttctattacgaataaaattttaaaataaatcgttattgaaactatttcacaattaaatgaaaaataaattaatttataaaagaaacaaatggtaacagtggtaaattataaatattcaatttaccataaataaaaaaataaattagccctaaaaaattcattcataattattattttatttgtaagtagaaaagactttaaaaaaagaagccgaagtacatgataaattataaagctaactattaaataaatatacaattaaaatttaatacaaaaataaccactccaattttttttctacacattctgcaatcgtactttttgatgtttgtagttttaaaaatatatgcaaatttttcatttatataattaaaaattaaaatttaaagcataaaacgaatcgttcgatcgtcttttaaatgcttatttaaacttgaattaaattaaatattaataatatattttttaatttattaattttccaaacactactttttctatttaatgaaccgagcatgttcaattttttggttatctgaatataactactctttttgaaagtttgaaaaaaaatttaaaaaattataatatatttttttgtccggacttatttctttcttcacttcatttcatcgttccattcccttgtgctaaacccatccccctttcttttctgtgtacttgatggatgggggaaggagtgaaataaatgcaagcaatctctctccttctctctttctcttctcgcactgtgtctcgaataatgtgttggtcttactaatctccgttttctgcactgtctcttattcactggaaaaatgcaaaacagaaaatcgcaacttatatatgaatgggttggaagggagaattgggaatggggggggggtgaggtggacaacggccaaaaattgtggacaacgctagaaaaatttgatcggaggagaatcgaatggacaaagctgtggatacggaccgattgtgctgcagatgttcaatgtaaatgaatgggcggtagaatggagcaaaaggccataggctatgggcatgccatctcaaatcattctatcaccaagctttgggccaaatttcgtagcctttttcctttttttcttttttatttctgtaattctgtttatttgagttttgtcctgatctgcttcaacaatgtcttacgtcccgaccaaaatgacctggatt

SEQ ID NO: 20638 - DNA, 1136 bp, Heterodera glycines
  unsure (1)..(1136): unsure at all n locations
tttgtacaagtgccattaatccatattttcggcaaacgactgatntgccctttggtttttcggtgtcatgacagtgggtacaaaaggcaacaactcgtacaatggcttaggctaggcctctatgctntaggccaggcttaggcttgcttggacctaagcttaggcttctttatntagtaaaaagtttttattgtacgagtttcatttgcattccccaaattgttttaggcatttctctgtgccaccactgcggtcaatttcattattcacttgagacagcccaaatcaataatgccaattgatcaatttgaattgatgaacgaacaaaccaatgagcagttgacactgttgagcaatgatgaatcagctaattgtaatcattgggtgatgaagcgatgccaaattgggcagtcggcgacggcacaatgggaggacagaaatttgaatgatttgatgaacaatgtcaacgttgagccttatcatgacattccgagtgaggaaaacatcttttgctggtacttgtcaagtttacgggatacatttcaaaagcattttaaagaaaaatgaaaataaatttcaaggggttttcgaggtcgctgatgacgaatacagcatccatctcaaccaattccgtactcctttagctcattttgaatcatatatgtgaaattctaaaatttttacagatgctaccctcatgggcataaatatgcctatgagtgtacccttggcacaggaagctgtcaaattcgttgtaaaattagtacatttataggcatctggaaatgtatgtgaaatgtgccccgtaaactagacacgtacccttttttcttcggttggtgtcatttaatttaaaatttcgctttaatttagggcatctccgcccgagagccaacagattgtttacagacgacatcgatacgagttgtgccttccttttgtacgagttgtcaccagacaccctttccccccttcagggtttcactgcagtctaagcggcttccggcagtaaaagtggatgaattgtcgagaaatggctgaattactcgttgcgagagactcaaagtgctgctactcatttttatttgttgattctttcgctcgaataaattatttggctgttgtgtttggtccag

SEQ ID NO: 20639 - DNA, 1313 bp, Heterodera glycines
ttatcattgcgtttattttcataagtcactttgttcttcgggtatttttcaccaattttctcgaattgaataataataaattatcctacaaataagtaaattttaatagatataatttctcaaaatttgttttttttcttaaacaaataatattactacgtttttataaaatctttttcccttttgtcccgtgatccattgaaagtttaagagaaataatccggcaaaaaattttgcattgccttaaaaattttcaatttaaattataattcttttgccatttatttgattttttaataaagagtttgtacaatgtttttttgataggcattttttaatttttattatttttcagtacaaatttttaaatttaaagttgttctttggaaattttgattttaatataggaatctgtcactcttattttttattgcatcgatatttttataagtttgatcttgataatgcattaggtgaataaaagaaccttctcgatcttttttctgaccaacagagatcacaattctggcattgccaaaatatttaaaatgaatgtttataatgtcgttttgggaaattcaataatttttttaaataaatatttttgttactcatttaaatattttattattgtttgtcagattttaactgtttttcagtaattttaatttttttatattatttaaaatgaattactactttatcaatccgcgtattaaatagcaaaaaattaatcgaagaatttttaatttggtttaattttgactggacattgcgtatgaatcattaatttattaaaaaacaacatgaattactttaatccatgttttgaatttatgagcaaaaaataatcaagatttgaaattaattagaattttgattgggcatttccaattgaattaaataaattttttaaaaataattttttcctaatttttgaaagttcgcaccaaatttcggggacggtgcccctaaaaagggggatttcaaatgggccctagcactttcagcaaccccgtccccgagtaccgcatttttcaaaattcctgtctttaataatctcaatttatttgaaagcaaagtgcctttctatattattatttcttttttttttacttttttgcatttatttcacaacacttcgtccggcatgtcttacaaattagcattgatttttgggtggaatgaaagacagccaagactattgctttatgaaagattcattttaaatattattattaataaaatatattcgaattctcaactaatatgtctacaggcatttacagttctaaatatttcctcgcatctac

SEQ ID NO: 20640 - DNA, 1162 bp, Heterodera glycines
  unsure (1)..(1162): unsure at all n locations
agaatgcaagaaatgtgaacgtccaaaaaaaaaggttgacatcttatgcccaaatcggtcatctgaacatcagcagaatgattgatacacgagacaaaatattgatgaattggatgtgccgcgaaattatttcccctgagtcaattcgttgagcaattgcgtaaaatattgctaaattcaaaataattgagaatattatttaaatattagaaagaaaagtaccatcaaattgttgagcttgtagcgttcaatcagaagaaagcgctccgaaaatggaatttccacacaattggccaaatggacaccgcagcgctccttcagccaatcaatttggaaatagtcggcaaaccaaaggaaagtgagcacatttttcgctaaatgtaagtgatcgatccgaaagttaaatttgttaattagaaaatatttagaaaatttgtattttcttctccctttcaccgtcttttgtgtttcccaacaccaacagaaattaccaaatcaattagtaattaaagaaagcataaattacgatttggaaaaaatgggtgacggaaggacgttgctgagatggcacccataaactcaatgaactgctccatggtgatgtcgtgcccgtccaaattgagcactcgctcccgcttctccttcatgtccacgctaagcattcgtttgaccatcggcgagacggacataagccaatgggcggacactgtcagctgacgatcgccgatgcgcacagtcaaatcatcgcccggagaataaattggcgggcacggactgtaaaaatttccaaaattggggtgcgggagaaattcaagagcattgtgcttctcacttgtccaccaattcgcgttttttgagaaatctgatgacaacagaaattggcaaaacagtgaaactaactgatctgcctttcttgagtacggtagtctaatcaaatttattaagctgattgtgtgagtgtattattagaccatacatttttaatttgctgagttccctgctcccatttccagaaaataatttcagccaaaggctcctcctttgaaacagtcgaattgccaatgtcactgatccacagacaatatcgtttagtgacaacatttatttggtacgaaaatttcctannataacatagaatattatcaaantaacattcattaag

SEQ ID NO: 20641 - DNA, 2514 bp, Heterodera glycines
agaggaagaagaaattgagcagatgaatgatgccgagggatactcagaaaatgaaaaagtaaaaaattaaataaattaaaaatgcaaaaaaaaataataattttctttcccagcagaatttctcatctccgaagaagcaaatggtcgaagtgaaaacgccctttttcgaaggcgggcgcctcaaaacaatcatttcttggctttcctacgcaaaatgttccgtcggctatcaccgggagaatacggtaagctaaacggtatattgaatacggtagtcagggggattttcagtaaaaaattaggattattcattaactaaaaaccatcgctaattggtccatcagcagctgaacttccgcgtgtccgtttattcgcttcgctgccccgtccaattgcctccccagcaattcgccgtcaaaaattgtgtcgccactttggtcaatcaaaaatatttgtaaccgcttatggatgaataattaattgtttaggagaatttgcaattttcgtgtgaatattctgtgggcattgagcacattggggaggacaatgggaaaatgtttgaatcggtgacgaatttttaaaaaacaattaaataaatatttaaacttaaaattcaaataattcgaataaatcactaattgaattcaatttttcagctgactttctccactttgtcttgtgaacaaactccgtcaaatgttctgctcaaatgcgcaaatggcgccaattcaaatggggcgccagaggcacaacgattggaagttgagcataaataattattatgtacaaatcattcaaaatattaatttttttatttttagcccattttcttatgcaagaaaaacgcgagtcgacgacagcaaaaataacgacagaactgacaaatttaaagacaaaaatggaggacgaagaatggctgccgatcgaagagatggaggaggaaaatgacaaagttggggaggaagtaattaaggactaattagagaaaatggatatttaaaaaattaattgaattaattgaacaatttaagaatgacaaagtcgagcgaagaaatgaggagaaatcacagacaaaacaaacgagtgagcaagaacaatttagaaatacttactgcctgtagtggtgttaatgtattggtatattaaataattattgtcccatttaattaattaattgcccctctccctcagattccgttgagcatcgtctgaaatgtgccgccacttcgctcgcctcggccgagtgcgcgtggacttggcctgccgaagagcaagaacagcgccacaattcgctgattggcttccgcaccattttggcctcgactctccacggcaattaattcgatcattaattaattataaattataatattgcctatttaatttgagttcatttcttggctctttcatttgcttttttctcacttttcatgccctttttccaggctcaccggccaatgtcagcattttgagtgccgatcagagaaaggtcattttgaggggactgagcccaaaggccgtctatcgctttcgaatccaagtccattttttaaattatttattttaattttgatttattgtgcgttttttttttttgattttaggctgtcacctctcttggccttggtgccgaactcgtggagtatttcagcacggggcatttggccaaagaattggcccgccaaaaaatggaacccattggcaacagtgaccaagtggcatttcccactctttaaatttcaatttttcgatgcttttcaattcaagtccgatttgtccgtcctcgtcgggcactttccccattcggtcgaattgccgtgggactcttccgcccgtaaggcatcgctcggccacgctttttgcctttggttggcttttgcgtggacagcaattgcaattggcagaatatttggcgaattcagcggccgatagcataatgaattaacaattaatttatgtgattttgttgtattatttgcacaaatatgggtattattatttcattttatttttaatctataaattattgtattaaaatattaataaaattaattaaaatattgtcaatcattcacttttcaacaaatttttaatgacataattggcatggcaattaactaattatttgttaataaaattaatgaaaaaagaaatgggcagaaaaaaagaaagaatttgaaaaaatgagttgggtcgtataattgtcaaaaggaaataatcttcgcctgtcctaaattaagaggcaaaaaccaatcattcaacaatttccatgcccaattaattcaatccgacgatccgttggcaaattgaaattgttttacctctccaacccatgcgatatgcccccaactcacccccttctcattccccccatcattcacctcactattttcatcccacccaaataattaattctgttcatagaatcttaccatttattggttacataatgtcggttaagaatgaaaaatgccataaaaaaacaaaagaaaatgccgtaacttttcataaaag

SEQ ID NO: 20642 - DNA, 2231 bp, Heterodera glycines
tttttttcaaaaattcaaaacaattttcagaaattttttgtccatattttcgtatttttgtccatgtttcagcgtttttgtccattttcttccatgttttgcatggcgctatgtaatttcgacactgagtatttcaaaaactttcactgttttcctgcattttcgacactggatagttcagtgtcgaaattaccagccaccttaaatccggcccctagaaataaatgaacaggtaaatttgtctcctttttttgatgattttgctcataaatttttcatttatttattttccaattaaaattccgtttgctgtgattattaattactctgttttatcaaaattgattgtttcttgtggccttatcactgctgctctgttgctgaagcattcattctcaattttgttcccctttttatcagcacagggttcactgacacatttataaattctcataataaaggaattttaaataatatttcaattttcaaaataaatagagcctcaaaattttgaaaaaaaagactggaaataagtcctaatttgttagtagacaatgagggatttaatcggcgggtacactgtcctcccggtgataggtcactgttaaaatttaattaaattgatccttaaatacacactcttctaaacgtttgttttatttcaaataaaattattaaccatagagagtggagcccgcagaagtgtttagcgcaatcggattttgattctcgcaatccgcaattgtggccctttaaaaaatccggcaacccgcaattgcaggcccaagcagcaatttttgaaattttttatttaaaaaaatattatttttttagaagagtttcatgagatgatgggattaccccacagcacctacaatatgtccaaaaccgggttaaaacacattttttcaatcccaggtggactaaacagtagagcctggaatttttaaatggccgggaccgggacttgaaaaatgacccgggcgggacccccgggacccccgttttttggtttgcccaaaaatcaccgggcaaaatcccggcggggtccggtcccgtccaggctctgctaaacagctttaaataagcaattgaaagtgattgtatgcgataatttgtttaaattttaagcttttaagccaattttttatgaaaaaataaatttgagggcccggaaaatagaaaattgaccatttttaacagattttcactgaaatttttgacattttacactcaagaatattttttcaaaatgaacaattcaactttcgcttcaaaaaatgataagttaaaaaacaatcattcaaataatgcatcttcaaatccaaaaataagcacaaaacaagcaagtaagtaatgctgaaataggcaaaaatcttgagaaagtccagtctttttttgctgacgaaattaattttaacagaaaaagaagaatttacttaatatgtgccatattttggacccctaaaatttaagtgacatcaaattatacaaaagcgtctcaaatttttcttaaaaaatcaaaatcatcggattgtcaagcccatgatgatgctccatcttcaaacgacgaaagcatgaacaatattgaacaaattgaaagttagttacctatttgatgggattagaaaataaaatactcaaaatttaatttttggcacgaattcgtcgccgacgaaaatgccactctcggcataattttaaaagaatctcgttcccccaagatctccgctccttttcagaccttgaaaacgaaaatttaccggtcaagtttaaataaagccaggaacggcaattttcggcttttcctgggttgccgaacactaaaaataccaaaaatgacatgaaaagagtacgaaggtaaaatggcacaaaaattggacagggcagtgaatttttcagttttaaatctaaaatggtcaaaaaatcaaaattattcaaattcaacagttcaatttccattcgaacactgagtaaaaaaaatttcaaataaaaattttgtagagaaaacccaaatatgatgagatgattttttagagaaagatttttcaaattcatcggatatttgtcgaaaatttttcggatcatttcttgagaaacgtatgagatttttcatgcctttttttggcctttttccgaaaattccattaaaatgcaataaaagtcggtctctagttattagttgttaattagttaattagccagcagtgtcaggtgctcattattagatg

SEQ ID NO: 20643 - DNA, 2103 bp, Heterodera glycines
ggggacctctagagtcacattttgatgatcaatttttaggcgaaacaaacgtttgatgcattttactaaatttattttagcaaattatttattaaatcttttagataaaaatttaaaaaaaaaacatttaccaaaacgctttacgtaagaaatgaaattgagacgataataattgattgtgcaaattggtacgattggatttaatgctaatggtaaaaacattggaattgctgccagtaagttgtaaagctgtaaccaattcaatccttgtgggtcaattttgaaaataagaaaaacacaataaaaaagaacagaaaaataaataattaggggcatcgaagcctaaataaacaaaaaattaaattaaaaaaatatatattttttaatttacaataataaatgattaatgaaccctgaacaagcagatttcgagaaacttgtttattcatttcaatcatttttttggttatttcagaagaagttgaaacgctttaaaacgcaaaaatttaaatttaaaaaaattaaaattaatttacgatttcgatttcttttccaagaattgtttgatacgaaatgccagcacaaacattatgagataagcaaaagtgcatactatgataatgtaacagtaaccaatagtcacacggacatcctaaattagaaacaatttttttaatttattaatttaaatttacattaaatgtatatccagccaaaataatttgatcgtcgagattaatgccgagaattgccgcgacgtatttatcgtccaaaattgcgtgatcagaaggagggaaaaagcaaatgaagacattaacgcaataagcaaatgggaacaaaagcatcagaaaaagcagcaaaaaatatttgagggacgaaatgtttttgtcacttaaacttggaaaattattttgattaattaattattttgattaattcaataattaattagcgtaccgaacaatgacaaaatagcggaaaataaattgtgacacatagccaaacatggacacgtagacaagaaacatccagaaagttaatgccaacaaattccaaattcgattttccaccccttttatggtcaccaatccgtgcacaaccatctccgtttcgcctttttccgttacaacattactctaattaaaataaaaaatgaaaacaaataaatatatataattaaaataaaataattaaaccggattgaaaagaagagtcattgtaagcattaaaatgtctgtcacgcatgtttggactaatatctgtaatttatatcaaataatcatataattaattaatgcgatttgtttttaaattataaaaatttcaaatttcaaatgcactttgctgtaaatgcgcatttgcactggtgtgtgtcgaacaatcaaatggatcaaaatgccattcaacaaaatgccaaatccgaatgccgaccaaacaaacaaattatcgattaaactcactatagttatggccataatgcaaaaaatgtttactctaattaaaaaataaacaattgcttaaaattaaaatgttgctttaatgcaacatagccctttctagaagcatccaaattaaacattcttagtatcattagacagtcctaagattcctctattagtctgtaaaatttcaaaaaattttgttctgtttaaaaaaaataatggccagaaaacttcaaaaaattattcatttggatgattctaaaaaaagttatacataatgcattaacgtttgtcaaaaaattttaaggtcatgtctatttttttgtggtcgcggtgaaatggaatagaggcaaaattttacacgatttgcccatggaaagttggtaaagtagacaaaaaaatcataagtttataatttgaaatggagcataatatcattttagtttgccaacttctcatgtaaaaatttaattaaataacagtaatttactgtatcattaattcaatttctttgcttctcatagtaattgcttttgaaacagtgtctattattaatttaattttcttgtttaatgtgaaatatcaaattgcatttatatatatatatatatatatatatatatatatatatatatatatatatatatatatatatttgcta

SEQ ID NO: 20644 - DNA, 3024 bp, Heterodera glycines
attttccagttttataaaaagttgcagattattaaaaataatattttattgaatctctttgaaattttgcagacagaaagcccttatactaaactattttcctgcaaaatttaacatcattctgacaactacgaaatgaacatgaaaatcaacattttcaaaattcgtgtcttttatttgtttaaaatttccatccctataattacattaccaatttaaaaatattttaatgacaaaataaaagtgtatttgacatttttacattttaaattaaataattaataaatgagggatattgttttatttttaattaaatttccgataaattttttatatgtatatttatttttgttttattattaaatggatacagtttttttttagcttattcgatgtaaataaattatttaaaattgagaattaaaaagaaatgttttaaatttacatttatttcattttaagaatttgttaaaatttcacctaagtaattagtcttactttattaaaatatttatattaaatattatttattttttttataatttggattatcggcatttttttatttatattaaactcttgttcttgacgcatccctagggttcatccgtcctctccgcctgtcactttaatatgtgattttaatttcttaatcgtatttttagattatataaataattaagcagtatttgcgcaatttttaaaatttatattaaattttaatattttatttttcttaaatcgcgtgttttttatttatttttattaaaattattactttgtttattaataaaattatttattttttgaattctctcaattgttctgcattttgtcgatttttttttcttttttattttattatttatttttgatttttgattcactcacaactttctttatttatgatattttatgatgcctttgtcttaatttatgtattttttttttattcattttcatttctaaatcgttaggaattttttaattaaattggaattaaaattcacaaaaaacattgaaattttaagaaatcgatttgagtgagtacgaaagctatgcttagttttgagtttaaaaattaatttgttattttagtatccattttaggtatttcaaagggaaccggaaaatccgaatcgaataaattttctttctttatcaaaggcaatcaaaccccaataagactgtagaaaagaatgttgtgtgattagtccttaataaattttcgctattttttacgttttaaattcatatttatttttcttaatgctttcatttatgtttacatttataatttcttttaggcatatcaattaacattaattaaacattgtaattagaattttttcacatattacgattaataagtgcttatttaaatagcactgtaaaaatattataaattaattcattcattgacaaaatatttttttttgctttataatcaaattaaacattttttgtctatttttaaaattattactattttcattaaaatattcatattttaatattattttatttattttttaatagatttgttatatggtttttgttttttcatctcgtatttccgctgcgtcaattggttctttaaatataaattaaaaatattttgtaatattttatatttttataatgtaaatttgtaattattaagcaaaattgggtccggcggcgtcgataggtgccgccgggaaaatttttttgaaattttacggcattttgttaaaaaaaaatgtaaattagtgttcctccacgaacaattaaaaacgcgaagtcataaaagtattgaacaattataatatattctttagaaagttagtttatttttttcttatttcttacattctttttaatgttcttattatgcatttttaatgtttaaatttttttattgctgttctatttttgaaataattcatttaatatttatagtttatttataatttggaatataatattttgtttgatttattaaatcctgatgaattggatgaagcgttttaggatgatgaagctactcaaatttatatattaaaatgggaattttgttttcgttttttcaatgatttctggtgattattttttgctttataatagatttcgtttaattatatttgaaaattgaatctatttatataatcgaaatttagtataactgcttatacaatctctatgaaatttattttatttatttctagtgcaattattatttttaaatttatgacagtttagatcatttttcattagcgtaatttttaatgaaagagtcagattttctttttcaatgctcgtaaataagttttgagaacgcaaaaaatttctttattgtcatacactctctcagcacgtcgataccatcatgatttcatctgatgctgcacatttcgcgacatttccttcattcttcgtgacacttcgaagaattcgcgtcgaaatgccaccagagctgccattaaaatttcaacgttgttggtacaatagcttggtagcgattcattcaaagaaatggttcgtagcggtgctcggcgtaccatttatcaaacttttaatgagcaaggcatcaaattataagagtcgcgaaaaattatgttggggttactcgttttcttctggtgcaccttcatctcataaagcttgtttccttttcttaatatgtttgggttaaagccaatccggaagagctcgcggaagacaagcaccatatcgaaacgtccaccaaaatgtgaataggcatatgtgtcgtatttctttggaagttgaaagacgagccaatccacaaatgccttcagtgggttctctgtcaccacttgtttattcacttgcgtgtacacaaatcgacgttggcagaagacgacggtacgatatggcccgcagatctggcagcccgccgtcgccttattcatttgccgttgtcgatgcaatttgggcacgcaactctttgcgcgataaaagttggctgatgttgacttttctccgactgattggggtccatcgcctggtgctgcatcgtttcca

SEQ ID NO: 20645 - DNA, 1153 bp, Heterodera glycines
  unsure (1)..(1153): unsure at all n locations
ccggatttttattcttggtttttgaagcctcggaattccccaaaaccatttttgccacggctccaattcccttcatacaatggcacactgttgcggcatcgactgctgctgaagggagcccctcgtgccgacaaatgacgccgccggcggtgccatcggacttggcggacctttacaaaaccatgcgtagagagaaaaaggctaatgaaaagtgccacgcgaaaaatggcactgcattcaacacgtggacagtttcggcacaacttactcgaaaaggagaagccttggcgccatttcgaggttttctgctcacagaatttgttcagcccttggaagaagccgccaaaggcattgttgaccatcgttcggctgaattttgccaaaacgaattgaaaagcgtggagggattttcaaatttcaaaaacggacaatcgaaaaaagaggcgcaaaagcaaaaaaggacgacggcactttgccaatttgcaaatttaatcatgccattccccggtgtgggcggaaaatctgtcaaaaacagaaaacggacgacgaaggacggcactttgagagggcacttgaaaagggaggggaagtgaaccgaacgaaggacgagacgaatgacgagcatttgccaatttgaaaattgatgatgggcgagaaaagggaaagaaagcatcacacctcacagctaagcaatgctttaaggcatttgaaaaggcaattagtctcccggttttttgaagaaaagcgcccaagggttgggttacggttttgggtgggtgggctcatcaactcccaagtgcgtcgtgatgaatgagtttgcatgtgattaggtggattccaattaatgggactacatatagcatataaatatattttcccataattaattaaagtgatacttgcgtaaattaggaggtttatatttataaattgaaataacaaataaaaagcgaataaaaaaatgtcaaattagtataaaacaatcggtcttcgtagtgatcaaggcttgttcttcttcttccctacgcttatcgccacaaataattctggaaaaattaaaaattaaattacccaaagagcacaaaattaactaattagcattaattattaaatacgctttctttctctcgccttnaacgcgtcactgagcacg

SEQ ID NO: 20646 - DNA, 1352 bp, Heterodera glycines
  unsure (1)..(1352): unsure at all n locations
tgaaagtaccatcttctgttgcttttgttgaccaagctggtgtatcttcagcccctgtacttgactgtcaaggtgttcaacaacagttgtctcaacaggaagagagaattttgacagacaaatcaaaaaaatggaagcaattacaatcaaaaagatatgcagaaaaacgaaaatttggctttgtcgattcacaaaaggaggaaatgccgccaggtttttttacatgggtttgaatttaatgtatcaacggaaggtatttagtgagattcctctaagaatgggttggggtatgtaatgtacttttccccgggtatgcaaaccttaatcgaatagccaatctttggtttcttggactggaggttggctaatgttaaaactattcacattcagaacatgtccgcaaaatcattcgcgatcacggggacatgacctcaaggaagtaccgtcacgacaaacgagtttatttgggtgcactgaaatacatgccacacgcggtcataaaactgcttgagaacatgccgatgccttgggagcagatcagagatgtcaaagtgctttaccacatcaccggcgccataacatttgtaaacgaagtgccgcgagtgattgagccggtgttcattgcccaatggggcacaatgtggatcatgatgcggcgcgagaagcgcgaccgtcgccattttaaggcattgttttttatttgtttattttttgtattcgaaattcccgttttaagagaatgcgtttccctccatttgatgacgaagaacctccgctggattatgccgataacattttggatgtcgaaccgcttgaaccgattcaaatggaactcaatgacgaggaggaaaatctcgtgaaggaatggttttacgattacaagccgttagcgaagacgcggtaacattttgggttacgactttaaattctttttcgaaatttcttcctcagctgtaaaagtgtcatttacaaagcaatttgtacttttcacttttaaggttcgtcaatggtgaatcgtacaaacaatggtcgttcagcatcccgattatgtcgactctttaccgattggccaaccaacttttgacggatctgcttgacgaaaattacttttacttgttcgacctcaagtccttcttcacagcaaaagcattgaatgtggccattccaggaggacccanatttgaccattaatgaaaggaactcactttcagtatgtctctttataccatttctaccgaatagggtgctaacttttaattctataaatctggaatcacacttaaaaaataataanatatctaccaacaagaacgaggattggaatgagttcaatgacataaacaaagtgatca

SEQ ID NO: 20647 - DNA, 814 bp, Heterodera glycines
acatcaaaactggaggactatgatttgcctgctttttactttgacccgttgatcaatccgatcgctcaaagaaatacagaaagggtaagcaaacgctgaagaaaccatattggcagcgggtaaattgatcgaccgcaaaaaatgggcaaattacaaaaacggttttgtttgttcgtgttgtggaggtcgtatataatttggcacattcaggcggatttgaacccaattggtcggttttgatcagattattactgtgtcacattttcagatgcccgagccattgcccggcgatgacgaagagttcgaaattccgtcagatctcgtgccgatgttcaacgaatttccgctttacactgaaaacacggcaaatggaatggcacttctttgggccccacgtccatttaatcttcgttcgggacgaacgcgtcgtatcatcgatgtgccattggtgaagtgttggtaccgtgagcattgcccggcgggcatgccagtcaaagtccgcgtctcataccaaaaactgttgaaagtttttgtgcttaatgcgctaaaacatcgaccaccgaaaccacagaagaaacggtgagcaacaaaaaaaagacaacacaaacattctttaatgttggacaaaaatggggagagaattgacagttataagaagaaaaatttaaatgaatcaaaaggtataatttgcatattatttattttagttatctcttccgttcgtttaaagcaacgaaattcttccaaaacaccactttggattgggtggaagccggtctacaagtgctccgccaaggctacaacatgttgaatt

SEQ ID NO: 20648 - DNA, 1822 bp, Heterodera glycines
  unsure (1)..(1822): unsure at all n locations
gtaaatagattaaaaatttcgacgtctccatactttcactactttcgttcgaaagcttttttttgggctctacaacatgtgtatgagttttttatgttgccgcactctaaaatggtaccagctagtgatcagtttaacgccaaaatagttgaaaatagttttttttcaatttttaggtgttaaaaaacgaaatcgtatccctagatatgatacacgccctattcattaataatttcataaagacatatatgtagaatcaaactcagaaaaatactgaagatataaaaacacccaaaggtttaagcggtttttatccttcttttgaattcttttattttaataaatttgatttatttgaaaaatagaaatgcatttccttaccggcaatgagcaatccttcgattctgagggtcaagaggctttgcttgactcggcacttaaagtggtgaaaaatgagtccttcgagatgaaacgagcgttggatcggaacgaactgatggaagggctgaaacacgccgcacaaatgctttgcgaactgcggacatctcttctgactccgaagttctattaccgattgtgtgagtcgaaattgaaaaaggaaaacccacggggcgtacagtcaccgcctttttggcaattgcttcgttaagacatcgacgtcaccaatgagcttcaacatttcctaatttatctgagcgaccgatatttgggtgaagagcggaagtattcagttgcggagctttacgaaactgtccaatacacggggaacatcattccgaggctgtgagtttggttgggaagggaagagaagggtaaaagggctcgatactcgataatcagcgattgtttgttcttaggtatttgcttatcaccgttggcacaacgtacataaagtcgggcgagtcttcgaccagcaacattctcaatgacctcgtcagtgcccccccatggctttgctgggggtttttgttttaccattcgcttttctgttttgtttcttctgttggaccctgtccgtcccttatttcaaccaattcccattttcaggtcgaaatgtgccgtggtgttcagcatcccctgcggggtcttttcctccgcaattatctcctcacttccaccaaggaattgctgcccgacattcccagcacttcgtctgaaaaatccgctcaaaattttgctgcatcggaagaagaagaagagcaaagtttgggcacgcaaataaatgggggaacggtgcgcgacacaatcgaatttatcatgacgaactttgcggagatgaacaaattgtgggttaggatgcaatttcaggtgctttttaaatctcaataacatttcgagtacaattagggctgtgtccgggggaagaaaatcccactccctcaaatcaaaattaaaatttttcaagaaaaaatagacaaatttttagaaattctaggcaattttcttaacaaattaaaataaatttccaaaaaaattcccggcagcacataactataccgcggacccccattttaccacaacattttttgatatattgcctcaatttctatacaacaaaattttcaggcttagaattgtttacaattagtctatcattttaatttggtttgaatttagaaattgcttatgtcaatttaattttcctgcatttccttttgtttttcttgcccagcaataattaatgttccgttttctttgttttttagggtcccagcagagagagggaaaaacgtgagaaagaacgtcgggaactgcgggatttttggtcgggaccaatctggnttgcgactggtcccaatttgcagaaacctgaacctgaact

SEQ ID NO: 20649 - DNA, 2644 bp, Heterodera glycines
  unsure (1)..(2644): unsure at all n locations
tttacggaggggaggggggggggtaattaggaaagacaataaataggaaaagccttataaggaaccgtttacatatcaaataagcatttgccatggttcacaaaacgcaccgacagatttcctttggttggactgtgagtctgcggttttcagcaccaaaagtgagttcggcgtccaaatccgtttcattcgcaacatcgacgatgacaaaacgactgaagggattgtaaccgggcaaaatattccacgaagaaacattcactgccggaacaatcgtaacggccattggcagcttggcaaaacggacaaattccttgaaacgggggacttaaaaggtataaaaatcatagacacctcctcaacgggtaacatttccaaatcggcactataggaaaaggaaaattccgcgcttagaagtcgctaaaaataagaattgcattgtcagatggtcatgtttctcattttcagtaccccaacatatgggatgaggtcgtgacggtcagtcgaatgctcttccgacgaactttccctctccaaaagcggggcggattctgccgacgatagccgcggcttcctcccttcccccgatgagggaatcgttgagggggaagaagccgcatggggcagggcgtccgactcggcaacaatggcaagggttgaggacgaggcggaagtgggacgacggacaaacacacgttgtgcttgtccaatgtgggacggattggatgccaagccgattcggtggtcggaccgattgtcggaaaagggcgtcgaagatggatctaagacacggccatcatttgcagaaaccgaaaaagcattagacgaaaccgattccaaagacgcgaatgttcaagctcttccgttcccccggtttaagcccatctatccgacacgttgacggggaatgaccaccggcagaattggcactttcaccggagaccatttggaagagcattggcccagcgcaagtctaaagggtggcaatggacgaagggactgacaaaagcacctggggttgttggattttgatggttatgtgcttaattcccactgaactgctcgaattacacaatgtgatggtgtggaagtaactgaaaagagacggacttcgcctttttcgtccctttgcacattttttacctttgcccggtgaatacgcaaagttccgcgatggaatcattcggattttcgctcaaagtcggcgaccgctgcaaggagctttcgatacgaagcgatggcangcgggggaaggactctgacggagaattggcgatggtttctgttcggctcttcgaaggtattcggtgaaggaaatttgcacaagtttttgcatccgagcacttcgcaagcgtagccaatgattttcaaagttccggttgacctgcaaaaagtcgacgattttaccgaacgtttttcaacattttcagacacctcggaacccccagaagtttcacttcactttgggtgggaccaatgcacgggccaaaacacgagggaaggctgagacggatcggaatgtgctcgaagtggcacccctcggtgatcagagtcaaattgttgacgattaaatcgacgggcaatggattttgcactttcactgaaacttcggaggcacaatcgaccacccaacagagttcatctgagaaaaatggaaataaggcgaaaacggggaaaaaagcacttgcctttctttgccctttcttgaaatggcgaataaatgaaaattttggagttacgcgacgaaatttcgacagtttttggtgccaaatgcgagggcaaagggaccactcgaaagtcccttaaaaggacgaggattcgaaattaaagaccattcggacaataaaactttagcgcgggaattcgcgtgagttgcaaaggcgccaaaagaacgggcggcgacgagtcgagggacaacggcacggaaaggacgtggaattgggcggattgaatcttggtgagtttgttcatttcctccaccagcgaaagcaacgcggccttgtccaaatggtcaaaaaaagactgaagagaaaagagtaaaccaaagccattcaatgcgtaatgaattccattgaaaccacggcattggcatttttgctattgcatttattttgtttgtgctttcgcccctcctccttacctccaacatgaagctgaggtgtcggatggccatgttgtgcagcccggccctaaccgcgacggtgcacacttcgtgcaccgctttgatttggagagaaaaagtggcggaggtcccttcgcccttgggctctttggcataattggaaaatttgccaccaatgccatagccaaaaagactttcgttgagaattgggtaaacctaaaggaaacagaatgaagatttatggcttcagccccacctttttgtagtcattttcggaatgattttcgatgaataatcggaaaaacacggccaaccgcaaaaaaaaggcacattttcgcttaaagccaatctaaaaagcgaacggtgcgattgtcaaaattgtgccaaatttgaagcgtaccattttgtacacttcggacgcggccaaacaaatgttcgacttcataatattgtcaaatgtaaggaatttgtcgtcgagaaaaaggcaagtgtgttcccgaagaaaagactgaaatccaagca

SEQ ID NO: 20650 - DNA, 997 bp, Heterodera glycines
ttttgtgtccaacaaagcttaacttaattttcataatatctctgaataaagcagggcttcgatttgttcttatttctaagaaatgttctgatttactgatttcttgaaatcattcaaaaattaagaaattttatggcgaaatcttgtccataatttgtttaagacgaaaatttttgtcgtttttgaacaaaaaataaagaaattagccaaaattcttttaaattgtgtcaaacccgtaaaattagacattttgacaaaatctgtttataaattgcactcaaattttcagaatttctccggcgggcgccggggggggtgaactatagtgaacgccccgtgaaaaaaagggtgatataccaatcgattcgtctcgagtagctacgcacggaaaaatatgtctcgagttgcgaaatgccaaaaaaccgggttttgaaccggtttaaaactcgaaaaattgagtgaaaacttgagcctcgatatggactaaaaacccctaattattttttaaaaattccaaatctccacaaccagatagctaatctaggtagcgaagctcaagaagcgcgaagcgctttatcccattcccagagccgacggttcatgcacccgctagtttatatataactaaagaaacaaggcaactcatttccaaaaacaaaatctcctacggggcgtagggaggagttcgaaatttcgaccttggggaaaactttttgaggcgcatctgggaaactatagattttcgatccgagggccaactgagcgccaggcgccgaaaagtgactttttaattttgcttcttcaccgacctcgtagggcctaccagtttttctgaaaaactggctaaaaatggcctacttttttgggccatttcagcgccggcggaataactcgccggggtttgattggaggaggtcggtgtaagcggcttttttgtagagcttgacgagctctatccaaccatgtttttagatttcagaaattttcagaaattttc

SEQ ID NO: 20651 - DNA, 1825 bp, Heterodera glycines
  unsure (1)..(1825): unsure at all n locations
tgttgcaatggctgcaaaccgtgcccatgccgtactcttcccgtttcattatgcacaaaaagccacaaaaaagtgagaaaaaaagacacaaagtgtgatnttatatgggacaagacagacagacaaaaggatggataatgtacgttgtacgggtggtgatggccaaatttcaatcaagtaaaagtgccaaaaattactttcncatcatgaaggggagataaattataattttttatgaaattattgtacatgttttggtgcccttttgatggcatcactataaatgagaaaaaataactttcaaaaaccccgtattttttatccagagtcattattgattataatatttttcgaacactatatatatatatatatatattatgaacagggaaaccgaaacaaattaaaatttgaagaaaaaaacataattctttctttttggcatgtaaatatttttgtttaacgtgaaataattagcttttgttacaaatttaaaataatttttttggcgttaaaatggtaaattaagagaaataacccacaaaaaacattatcaaaaagcaggaaagaaagtaaaaaaacttgtttaaggataatttgtgctaaatttagtgggcttatcataaaattggcccacaaaatcaattcattatgcttatacaatatgaagcggcaacggatggaaagtcaggccaacattgaagcgcatttcaagttcattcgaaacgccctcagtgaagtgctcgcgaatggccgctttctgaatcaattttcaaaaattttatttaaattcgttattaatatattatttataaggtttcgtttttaggcacaaaaaatcgcaaaatatgcattaaatggcacaataatcctcaaataggaacacaaatatgtaggcaaaaaaaaattgtttgcattaacgctttttatgaagtaaaacacgtaaatactaaaatttttcaattgtaaatgatattattaaataatttaaaaaataggcattataaaagtcatgatagaccagggttcggatctattctgatttatcagaaatcttctgatttggaggtagtgaccaaaacaaaaaaaatttccgccggcccttttccctcgcccatttcccaaaagttttggaaaaatgcgccgcaaaaaaaaattcttaaaaatctgaatttttgatcccgaatggcagatcagaatctcaattaaaaaaacttttgtacttcatttggggaataaaaaccccaaagaaatatataaaattgatggaaatataataaatgttgtggatacaattagggatttaggcataaatattgataataaattgcaattttccaatcatgtcacacaaataataaagaatgcatatttacgtatgcgttctttatttcgggttattaaatcaaaatcttctaggatttggattattttgtacaaaacttatgttagaccgttattggaatatgctcctgaggtttggaatccatctcttctaaaaaatattaaaaaattgaaaaatgtcaaaaatatttcaccaaaagagttctttttaaatgcagccttccacccattccataccaacaaagattagaataccttcaactgccgacacttgaaagcaggcgaaagctgtctgatctgttcatggctcataaaataatttatggccgaacagatcttaatccctttgaaatattcaaaccttctgaacgctttaacattcccttttatagacttaactcgaaatataaattaggcaaaaaatttataccttttgcggggagggtaactaaaattggaaccaactcgataaaaggctcat

SEQ ID NO: 20652 - DNA, 1310 bp, Heterodera glycines
aaaaaatattaaaattaataaccctttttttttggtttttatttttagtaaaaattaattcaaagtatttttggaaaagcgatcagaaccccaccaatttttgcagggatactccccagtacaggactaaattgtcttgaaaatatccaatgcaatttataagggcgattttttgaaaaaatatttaaaataattacaaattttttaggcttaatttaaaaaaaaatttcgaacagtcagacagtttggggaggatgaatccttcgggaatagatttgatattctctatactttatatctccccgttaggtctgtcccgcccaaaattggcatagtgccggaaatgggcgatttattgaaaaaatattcaaaataattaaccttattttttaggcttataattttagtaaaaatttaattccaagtaatttttggaaaagcgatcagaaccccaccaatttttgcagggatactccccagtacaggactaaattgtcttgaaaatatccaatgcaatttataagggcgattttttgaaaaaatatttaaaataattacaaattttttaggcttaatttaaaaaaaattttcgaacagtcagacagtttggggaggatgaatccttcgggaatagatttgatattccctatactttatatctccccgttaggtctgtcccgcccaaaattggcatagtgccggaaatgggcgatttattgaaaaaatattcaaaataattaaccttattttttaggcttataattttagtaaaaatttaattccaagtaatttttggaaaagcgatcagaaccccaccaatttttgcagggatactccccagtacaggactaaattgtcttgaaaatatccaatgcaatttataagggcgattttttgaaaaaatatttaaaataattataaattttttaggcttaatttaaaaaaaattttcgaacagtcagacagtttggggaggatgaatccttcgggaatagatttgatattccctatactttatatctccccgttaggtctgtcccgcccaaaattggcatagtgccggaaatgggcgatttatttgaaaaatattcaaaataattaacccttattttttaggcttataattttagtaaaaatttattccaagaaatttttgggaaagcgatcagaaacccaaccaatttttgcagggaaactcccccctaacggactaaattgttttgaaaaattcacatgaaattttaaaggcccatttttttgaaaaaaaattaaaaaaaattaaaaattttttagggttattttaaaaaaaa

SEQ ID NO: 20653 - DNA, 2296 bp, Heterodera glycines
ggaattgatcggcggcaatccacgacgtttgatctccaaggaaaggccaaataactgaacgtttttgatggcacgttcgatcagctacacatgaaaataaattttaaattttgaacaacaaacaaacaaacaaacatactttaaggtcgtccattgggacgtgaagaaaaaggacgggggggggacagtgtcagacattttgttttttttaaaagaattattttgcagaactgaaaacggaggtgtaccggcaaacaaatgaataagaaagaaatacgtttagagagagaaaagaatagggagggaaaactatgttttaggcgaccaaacattttgtgtagaaaaaagcactcatcagaaaaaattaaaatgtagaccagacatggaaagagagaaaaatgagtaataaaaaatgagtgaattccctatttcccctcacttttatacacaccatcccagaaatgagctccaataccaaaaaagatttaaatacctgtctcagtggtctgtgagaaagtcaccaaaatgggggtcccaggttcggttcccagtgcatgctatagctgtatttcgatgattttaatgaataaataaaaggaaaagtgaccaaaataattttaaaattgtttcaaatttttaaaaactttatctgccgcttgtaatgaaaataaaaaccatcaatcctcgatcagtcaacgatatcgatgtcggcatcttgatcactttcttcattcattttgtcttcctccgcttgctcccgctgttcctcctcccgcttaattagttggacaacattttttaatgcccttctctcaacccacagcttcaattcgtcaaatctcccggtgtccagcagccaattcgagacaaaatgatgttccagctgttgtcgcatttgttcatcgtccggcatcgtcttccaaagttgttcaagtcgccgcaacacggaatgcagtgcctcgtctcctgaaaaatcacaacattcaaaattggactcccaaaaatgatatggtcccaccctgctcatccaaaagccccaaaaatcggtgttggcgcgcaaatggaacaaatgttgaagcagcaaatgggcctttgtcttttttgaaagaagtgtttgcaccattgattgttggtcgagaaataacttgaactgaacttgccgtctccagtccgtccaaatcagctggagacaatggctgagccttaaatttaaaaaattatttccacaaaaaaataaaaccaattactttggtgaaaatttggattttccccaaatgtgccattgtttggcaaattgttttcgcccattccgtttcgacaagattttggtgtggatttaacgtgcaggaaaaaagttaaacgtcacgaagtaaattttggaacgcttcacgaatttgcatgtcatctcattttttgtctaacaaaatttatttgatgtgaggtgagtatcctcacaaaaaattaaacatttgttgtttcattttttattgtttaattaaaaattaaggcgagtgtttacttatttgtttttgtttcttttacaattctttgtgcgtaagatggacactgccaattcgtcagccattgtccaacctttgaaaaacattgaggagcaaaagcgcattgcacagcttggtaaaaatggatttcgttcctaataaaaaatgtttaaaaatctgatagggatcgaattctggcgagaaactaaagaaattggcacttttcggttgggggcccgaaaaattccaaaggctacccttttgtagtgatttgaaattggttgaaatagctgtcagatttatgattagcgacccctaaaacccacctcaacaggctttacgacattgacaaaaaaaaaaatttgcaaagtaaagtggtccctctgggaaattttttttcgttgccctcaaacaacaaaaatgtcggataattgatttgagttttcatttcatacaaatcctcgagtctattataagtgacttaccaaatgttgttttttactggatatgaaaagagtgcaaaaaggccaatcattttccgtccaacttttttagagcgcaaaattgtctcactcagcaaacagttggatgagaagggcacagatctcaagaaagcgttggagcaaaacgcatcgttgaaggacagaattggcacactcggtgagtgttttgtgcccttaaatttaaggacatgtttcgaggacggatgagaaatttgtactgaaaaattttagagcaagaaaaatggaagtctctcttctcattgaaacattgacaaagagccgggacagactgct

SEQ ID NO: 20654 - DNA, 1265 bp, Heterodera glycines
cgagaaaagaattgaatgacagcaaaataaattttatcaaattaggtcccaaatatttggtaaatatttcttgctgaataattcctaattttgttcttttaagttagtcgtgctgccaaattgatgtttatttatttccgttgtcactatgattgtatgtatctgaataaattgcgtaaagaaaaattcactggtaaaaaacctgtacaaatagcaccataacatacttttaaatgccgaattaatgtaaattttggtagattctaggcagaaattttacaaaatgtatacctattgaatataaataatgtaaaatgtcaaaataaagaaataaaaaataacaatatcattagaactataatctcatatttttaaaaaataaaatatttaaaagcatgatcgtaataatcaggtgaaaatctattgacgcagccaatgcgcaaggcaatcgcaaattttgaaagcaaatacagtaagtttttgccataaattattaaaatattttaaattaacgcgtccaataaatgcactttagaggcagttggcactttatttcgtgaatttagaattttaatggacatcagttgaatttactgaacgatttttaagaaatgcattagacgtaaaaaaagcaagatatattaataaattagttgtaataaaaataaaataactaataaatgtttaataaaagtattaaaatattttaagaataaaattaattggcacacggttgcaaaaattaaaaaaaaaattaattttataaaaatcatgaaaataattctttacaaataaacaattaacacagaaacaaccgcaacatataatgtttctccatcgacaacgtcaagattccggagccaaacagcttgtaaatatgtttcttaaagaaaaaaatttagagagaactactgcccatcgcaacaaatgaatgaatttattttaaatattataaatttgaaaaatgcctaaaaaataaaaaataaactaatttttttataatcttcaattatagttagtcaataaaacttttttttaatttaatttaaagaaataaatattaatatcaaaatactaggttaaaaacaaaagtgcagacgaatacattatgttgtaaaaatgcatgagatcatcaaaacttttgaaatttctaaaaacacaacatatacaataatttataattaatataataaagatattattgaaattaatcaatcgcttttcacaaaagaaatttcaatatataaataaattctaatgttcaa

SEQ ID NO: 20655 - DNA, 906 bp, Heterodera glycines
  unsure (1)..(906): unsure at all n locations
gaaaaaaaaaaaattaattttttttaatttcttacaataaaaatgaaataaatagataaaaatttataaatttgaatatgtataaaaataatgattcgaaaaccctaaaaaatcgttgttttccaatattaaaaataatgaattattcttaattcacaattatacaattttaataacaattttggttaagttgaataaattacgagttggtttttcccgaagtgcacgaaagttttcgagtcgtaaattaaattttttcactaaaatattccaaaaatatgtcttaggaaatattttaagttgctaatcccaaatatgcaatcattagcttttctttattacatcgataaggctacagatccctacatatctgggattctgatgcatcattctgaggggggggggggggggggggaagggttaggttcgaatcctggtgagtaaatgatttttctacatttaatgattttaaacatttaaaaaagtttcaatttagattcgaaaagggtagataattggagactggcatataattagagaaaatacggtattttatttttgaatatttttatacatttttaatgcgctctgacggcgcctatcagcaccgacgtatccaaaatttaaaatctgaccaataaattggaaatttttggtggataatcttcaaaataaagccaaaatcttatacaacaaattaatgtatttttctattttagatatgtaatttgcttaaacggtacttactaatttgaaaaactgccaccgtttattttttaaatcatatcgccagggctggtatatctgaggctttagcctcattttgtggttttttgataggtcaatgaggctaaattttcaaaatgagaaattttgtggttttttgaggacctgcagnnngcatgc

SEQ ID NO: 20656 - DNA, 2343 bp, Heterodera glycines
  unsure (1)..(2343): unsure at all n locations
attgctcctcacatttatttgttgcttctttcgttcccatctaagtaatgttngggttttttngaggagttgtgggttcccttgatgattataaaatgatgggttgttgagttttgagtaggtgggtatgtaggtggggtagagagggagaattttaaaaatttagaaaagggtggtattattttgataaaaaaaaatttaaaaaanattaaataatttagaaaaatttattttnatatttaaatgaatatgatagaagagagataatgatgtggtgagataaatagataaaataagatttatttagagtatgagagagaatggaaaatgataatatgtataaaattgaatttttgagttgagngtaataaattatttgcccgaagccaaccaagggtcggattacgccctctgattcggcttagatttccatccctagtaattaatctgtgaatgctaacttttcttttgaaatggaatttaatctgttagtgctgtccgtatatgaacagtttagccgactcaataagggaagggaaaatgttgaaaggtcaagattaataaatgcatttaaaattatcagaaattaagtcttcaaaagttaatttaaacaaagacaactgtaaattaaaaatttaatagtttatttttaactaatcattttagtttattttattttttcaatttcataattaaaatttgttaattagctatttgtttagactaaattaaaattatttttcaatggcaccgcccgtcgaaaaaaagaaaaaactttccttcgtcgaccaccgcctcatttcttctgcagctattggtgaaaatgaacagcaaccgatgggttcactcgtgacatcaagcaaaatgaaacgccctttaaaaaaaatgtgtgcaaaacttttggaaaattcattcgattgggaatttaatattagcgtatttcataaaaataccgcccccctccacattaaattagagccccccccccccgccactaaaacaaagcccccctttttagaagggttgaaaataaagcccccggggctcttttataggaaatacggtacgcggagaaacacggtaatgcaattttttgaacttttaagttggatttgtacggatgttttgatggacattctcccatcttttgaccatgcccaactcggactcaaaatggcattgctttccgaacgtttcgatgttttggtggacacgcattttgatggcaaaagcgaattgacaatttggagaccaatgacaattcaaaaggacaatggaatgccacaactctttgtcatgggcaaatctgtgccatttccgttgcccgacggtccgctgcccaacaaaatttgctttatggatcttcggattatgtaattcattaatagggcattttgaacagtgaaaccgtttctattgtagttacattgaccattccgtcctcgcatttctccgtgccaataagcaaatttggtacaaaagtggcaccaaattgggtttgacagtgtcgtcaattgacaaggattttgcccagtcgctttgggaaatgttcgtccgtgaaatttggcccatttttatgacaaacattcgccatttgacttttcctaatggtgctcatttggacaattttcgtcgtcacatttcgccaacatttctcactgatcttgatcaattggattcaattgaattcggttttctgtaccctgacgggacaggtgatgatgggccaaatgcaactgctggccaagcgttgtccaaatggttgcacattccgcgaaaagatggccaacccaagcgattgtgttgcagattttacactgaaccatcaatgccaatggaatgggttgaaaatttcaaaaaggtcgacatggacatatttttcgcaaaattttcgttttcccattgtttaggcatttctctgtgccaccatttcttcctctgcccgctacacaattcactttatagtctccgcttcaatgccaattgtgccatttgaattggtgaacgaacgaatcaaacaaaagctaacactggagaaagaacgcgattttgtattttctattctatggaaaattaaatgttgtccaattggggagaggacggatcaatggaatgccgagaattgggataatttgaacggattattcttccaattttatagtggcaaaaattgcattgggtgagaaacggcatttgccattgctaattgaaccaaaattgcacttcatttagcccattgtctccaccacccgaagtagaagcgggacaaagcggagtaaaaagcgcttaattatttgggagtcaattaattaattaattgcatttgacaaattgccgatcatt

SEQ ID NO: 20657 - DNA, 1712 bp, Heterodera glycines
aattcaggaacattattgtgacataaattagataattattgcaaaccttataaaccaacgcgttggcaaacacggcgcctcgcgccacaaaggcattgtcaaagttgcgcttgtttatgcgcttaaatttttttttccaaaaattatggttaatacctgaaaatataaataaattaaacatattttaaaatatggtataaacatttaaaaataaaaacaaatctacaaatttattaatcatagtattgatactttttagccgagcaaaaaataacacaattaatttatttttaatggctcccgatttttctctatttctctaacacaattcttttcattttttctctctctttctctcactctctcacttttctatttttctatcgcacactctctcctccctcactattttctctttttatcaattttgtattattttcaattgaaataaattaaaattaaatttttttttaatttttaaaatttttttgaatttttaaaatttcccggttggttccggttcccggtccagaagaaaaatcgaggtcccggtcccgacttctcaggtcccggcaagtcctggtcccggttttgcccaaaattcccggtcccgcttcactccagtatatatcctcccccccccccccccgggggaggggacagaaaccccaccgctatttgcagcgacggcaccatacaaattgccctcatccacggcattttgcaatccaaacggcggaagcggcgacgaatttgtgccctccctctcccttccggccgctgctgcggagacggcacacccctcaaaaactttatttggcacaatgtatgggccgggcatccatttgtccccctccgggcccattcaaaccctttctcctactcaaatgaaccaaaaaaagttccgtttttcttcatacataatgataggcttttgaaaaaggggataggcttgttgcaatttctaaaaaatttgaaaaaaaatattttagccattagcgttttcgggaactattttggtttgattaattgaccaggattcattatgggaatttctattgcgaatttgccaaaatcctaaaagaaacataatgcaatttcgacacatcaaaattgtgtaattaatttttttttaattttttgaaaattcccaataaattaatagggtcaaaagctccaatttttaattggaataataaaataaatccaaaaagctaacctcaatcattttttattaaaaaaagaagaaaaacttggtcgtctcattggtaatcacaaaatgtggtactactctcacacatctggcacctccattttatgggcttctcgggaacgaaaatttttaactcattgacagaattttattttatttttttgtctctaaacttagtaataatttttccatccatccattatttttaaaatttacttttttaaacaaaaagccaaacccccgcatttgagtccccgtccccgaatttgaaaattaattatcgaattttatttaaattcccattcccgcatcatctttttttaaatttttggctcccgattttccgtccccgcatttgtttccccgttgctgaatttgtaaattatggaattttatttaattttgaatcccaatcctcgtccccgcattggtccatgtccccgaatttttcaatattgacagtttttatttaaatttttggctccgcgattttccgtcc

SEQ ID NO: 20658 - DNA, 945 bp, Heterodera glycines
  unsure (1)..(945): unsure at all n locations
attanttctcagaaaaatggctatctctttttaggaaattttctatctcgtaaccccgatgctttccgttccggagagcctcttcaaaattttttccattaccctaagagctgcggaaattgtgaattaattctcagaaaaatggctatctctttttaggacaattttctatctcgtaaccccgatgctaatccgttccggagagcctcttcaaaattttttccattaccgtaagagctgcggaaattgtgaattaattctcagaaaaatggctatctctttttaggacaattttctatctcgtaaccccgatgctaatccgttccggagagcctcttcaaaattttttccattaccgtaagagctgcggaaattgtgaattaattctcagaaaaatggctatctctttttaggacaattttctatctcgtaaccccgatgctaatccgttccggagagcctcttcaaaattttttccattaccctaagagctgcggaaattgtgaattaattctcagaaaaatggctatctctttttaggacaattttctatctcgtaaccccgatgctaatccgttccggagagcctcttcaaaattttttccattaccctaagagctgcggaaattgtgaattaattctcagaaaaatggctatctctttttaggacaattttctatctcgtaaccccgatgctaatccgttccggagagcctcttcaaaattttttccattaccctaagagctgcggaaattgtgaattaattctcagaaaaatggctatctctttttaggacaattttctatctcgtaaccccgatgctaatccgttccggagagcctcttcaaaattttttccattaccctaagagctgcggaaattgtgaattaattctcacaaaaatggctatctctttttaggacaattttctatctcgtaacccc

SEQ ID NO: 20659 - DNA, 2493 bp, Heterodera glycines
tcaacaaaatttaacattcttggtatcattcgatagccctaagaattctctattagctcatctaaatttcaaaaaaattttttcaaatttgaataaagttatggcaaaaatattcaaaaaccccggttccttgggtacttttggccataactttgctcaaacatgacaaaaaatttttaatttaggtgagctgatagaagagaactcttaaggctatcgaatgataccaagaatgttaaatttgattgaatttgacaaaagttatgggtagttttttgttgaaaatttccatttgattgttttttttcaaacttcaaaaaaacatccccactttttttaaatttttatatacaataaaaatttataggttttgtatatttttacataattttgtcgttcagtaaaaaaattatgctattttacttgaaacagtaaaattattttaaaatgagaaaaattattttaattttcgggaactctacgtctgtttccatttgaatttttaaattctgttactggttaatcaatccaacacaattttaaacatataaaatctaacggcttcaatttttcgaaaatctcgaaacgattgggcaacttttgtgggcaaattcaagtgtacgaattttttttcttttcaaaaaccctaatttgcattttcgaatttcgtaggagagggggcggcgcgtgggctgtggccacttcatgccattatttccttgacattttttgatttagttacaataaataataataaaatttatgtgttaaaattcgctcgcgcccagacggctgcgcccaaatggcccagttttccttttgcaaaatccagtgactaatgtaacacggcacgggaaactgttcgaattcatatcgtaattgcggggaggggggaagggttgatggccacttcatgcccaatgaattttaccatggtatttgccacttcatgcccaagtaattttgccaaatctttattggccaaaattttaccttggtgttggccacttcatgtccaatgcaattttccaaatcgtcgtcattggccaaatctgttgggcaacaaaattcatgaagccctggcagtacggtcatggcaaactgtgaacgggtgttcaactttttggccatttttggcagctgaaatctgaatagctttaacacatcgtcctcatcactttcccatgtttcgttgttggcatcgtgccaaaggaaataattcaaatatgccttgcccataaacaaatcaatacggtcaattttggcaccggtttgccaacgcgcgaaaaagttggtcaaatatgtgaatttgtatgtgccatggtaatgcacgtcacagtgataattcacatcggtacgatttttattgcctaaaaaatggccaaaatatttattatttataacccgtattcgaacaaaaagtcgaaagcccaaaaatttcgagtttagcatttctagttcaaaattgttttaaatataaggaaaaaattgaaagccatcaatcctgcaataagaaatcatttaagccgttttgaatcaaaaatgcaaattcgaaaatttctaatttcgacttttttgttcaaattcgagtccggggttcagaattaactaatttgttatttgcgatctcgaaaacccaaagaacttgtttttattcattaatttttgtcactgtatgcttaaaattacgtgcctaattcagttgagaatgcaagatttttttgaaaaactaaaatttgtttattttttcttgatcaaaatttaagtttttcatttatttatttttttttgaaaattatattccaaatttattatttttttgtgtcaattatttaaatggaaaatttgattgtttgtgctaagagtaggtccgctcccttaatcttcacctttttttccagctttagcatcaattctctgcactatttgctgttgcggaggattgtctggatcaatttcgtctttatataatcgcttaattaaaatgccaattaaaaaaacattggtaccgaacaagacagactacaattggacagacgggcatatatgagaatgtgtataagtgcttaaattatatggactaaacaacaccaaatatggactaaaaaatgccaaaaaaatggactaaaaagcttgcccaatatggactaaatactgccaaaatataaaaaggcacttaaaatgattatgattttttttgtttgatttagggtttctccctagggacagggatgatgggccaaatcgaaaaataaaatgctttttatttaaaaaaaaaatttaaaattttctcaagccatctctcagataaatttatttcgggtaatttgctctccgatccccgacctttctctcctggctgaaggtcgggaaggaaccctaatttgattatcaccaatttttattgtgcaaataacaaaaaaaaaatcggcactaatttaaaattaaattttaaacatttacgttaaatggatccatcgggaacacgtggat

SEQ ID NO: 20660 - DNA, 2212 bp, Heterodera glycines
cgttttttggctctgtgccgtgccgccattggccaatgcgtccgtcagcgaatggcaaattgtccaatagattttggcccttcggttctccaaatcctggggggggggggcaaaatgttttcgggaaattgaaattagagcccccgggggggggggggctttatttcagcaggcacgtaggaaaattggcaatttttttttaatttactcaatttttttaacatttgtacgccaaattttcaaagaattttccgggtggtgccattttttcaatttttttttagaatatgatccaaatggcaaaattcggcgaaaatggcaaaaaatttcttagttttcccacggaaaccgaaaatttaaaaataatacaattgctaattacttttgttgcgcgacttttcagcatttcttcaatggccgccaactttacgagtccattttcaatttgtttgccaaatttgtcccgctcaatggcaattgtctcctgtaaattgaacggaaaaaaagaaatgtgaaattcaaattggtataaaaatgtttgacaaaatccatataaaaaaatctaaaataattattttatacgatttgcattcatttccaattgtaattagtcactagaaaaaataaattggtaaaaaaaagcccataatcaaacgaacgaagaaaattaaattttcatttttcatcgattgattttctattaccatggcaggcccgtaaccaaaaaaaaaatattggtgggaagaacccgaaaatatttttttttaatcatcgggcaaaaattttttctcccgtattatttttcagaaattttcagtgtcgaggagaaaaaaacaacagaatttttggtcgtttttcgccaaaaattataaaatttttgctatttgggtgccagattttgaagggttctgacggtgttgataagcgaagcggcggaaattttttgaaaaatttaaagaaaattgttaggaaaattgtgcgaaattttcaaaaaacatgcacattttttcttgaaaattttttcatactcgccaaaaccacgcgcacatgttcactaattttttttttttttaaataaatttttgaggaattgaaaaaatattttaaaatttatttccatagcgcatattagaaaaatgttgcaccaaattttggcactttttccgaaaatttttgagaccaaaatttgcaacactttttcgcactactccttcaccaccaccacctgcacaatctgctgagtctccatgtcgtggatttgcttctgtgtcctgatcactcgctccaaatgttcggcgtgtgcaagcgccgcccgcttcagttgcgcgtccaattcggcttcatccgactcattgcgctgctggttaaatgtgcaaaattgcggggcaataattttaataaaatttataaaaaattttggaagatttctaaaatgttttcttaaaatttcttagaaaaatgggaggggggggggcggacaattattcccaaattatttggtaaatccaacaggaagtgacaaacaagggaccttggtttctcccacccccccccccttatcagtactccatgggttttcaaagaaaattccaagaaaaattttttttttggaatttccaaccatttttttcaaaaattctccttaaaaaatcacctgaaaattgttttcttgaaattttatttaaaaaattcgggggaaacaatacggggagaatctagcagttttcaaatatattttcttgaatttttttttagacaaacgggcaggggaattgaatgaacccctcggcattcgagcatcattccctgtcgaaatggcatttttttttctgaaaatttcaaattttgagaatttttaaaaaaatttttcaagggaaaaataataaattccggggttcggcattggttgaaattgaatgagcagaagcagtgggccaaattcaaacaccacaacaggtgtatgtcataagcaaatctcacaacaccgttgagccgacgaggtgatcagtttgtgttgcgccagtggtcatttctctgttccgtctccgctcaatttccaacgcccattttggaaagactgaacgaacacataatttcacagacataaaaaattgcaatacacaccgccgaaatttttgaagtggggtcggttagaaaaaaaaaattttttttttttgaccgcccttattttttttttctaaatcgtcaaaaa

SEQ ID NO: 20661 - DNA, 1325 bp, Heterodera glycines
  unsure (1)..(1325): unsure at all n locations
gaaaatttttaattatttaaaatatagaaagaatagttattattttaaataaacaattcaaataaaaaaagcaaaattaatacatagttttccataagaattataataaatgagcttctaaagagacaacgtcaaccgagacgaaccgatgttttagaaagaaaaaaatgaaaaatttaatttaattatttatttctaattaaaaagtaaacaaaaaatcatttacttataattttaaaaggaaataagaagaacaaaaaattcacgcaaaatttagccaaacaaaaaatattggaatcaatttatttatattattaaattttttagggtttctagatttttactaattgtaagtccacatttgtgcctccaacctttgcgcacaagcgttacacgttaatttttcgcctactttttttgtaaaaaaaaagctaaatagaaaatattcatgacatttcctacaaacgtaagttcaagttcgactccttagtaacaattggaaaatattgtaaaacaacaaaatccacaacataatattttcccggggtgccggcgccaccaccggatctcaagaaatccttattctctaaaaattgcaaaaatttacctgggttttcagctatgaggatgtgaaatttatcatttcagataaatgaaaaatatatgacaataaaaaaaatactaaacattttaagtaactgaaaattcttattattttaataaaattgaaattatttattattttaattattaattaaaaattaaatgaaaggctaattaataattaagtctttcattaaaagcaattaaaataaaaagcacattaattggctagtaagtgcaggttcgagtccgctccatgccagcattatttatttatgtgcagtaaataattaaagagaaaataataaaatattatagaacaaaataaaaggaagtatgtaaaaattaaaaattgctagaaagaatgaaaatttaaatagataagtaaaaaatatgtaaaataatgaaattattacaaaaaatacctacatattataaataatgcaaatataacacacggcaacgcttcaatactcagtacccagtcaagagaaaaaattaacaatttctataaatctacatattatttatatattttactttactaatcgtcctgggcgtgtttcctaaatgtgcttaattcgaactaattgattgcattatataaaaaaaaattttttatataaataaataaattctagcgcatttattatttttaannttaaattgcgcttttaggaaaaacgccggcacctcgaaataatttcattataaaaaaatat

SEQ ID NO: 20662 - DNA, 2086 bp, Heterodera glycines
  unsure (1)..(2086): unsure at all n locations
aaagtgcgcaggaatgtgcaaaagtgatcaactccgttttcgcttatcgagatacatcgtctcgatgctcatcacaaattcccctttgcttcaccacaccgtcanacctgtatagcgctaccatcttccgaaacgtagattagccgcggtttgtccctgtgttcgaacacgtatcgcttgtgctgctcgtcaaatggcacaggtgtctcacagtcgaacagtatggcaaatgtatgaaatgtggccaaacagtcggcaagtacaaacgaaaacacgcccatggcttggcaaattccctaaacaaaatcaacaattagcataagccaaaatggaaaaattaaaaaatttaaataattcaaaacaaaacccactccttgtgacagacgatccaacatctcaagcagcaccggtgcttcatcttccacaaactcattgcgctcttgtgccagcgggtacggtccatcgagtacaggtggctgcgagttttcgtcacggttttggctcatgatttgtttttgtgtctaaaattttaaaaataattctttaaatttgaacaaatatttattttgttgaaaaaacacaaaatggtaaaaattgggacaataaaaaaaatttttttaacaaaatttggagtgatagatgcaaaataattcgtaataaatggacaaataataaataaattttggcgaaattattatcagactggtgtcaaattacataaatgaatggcacagcggtgtggcgcaagacaaattccagacaatctttttaatttttaacgaaaagataaaagaagcgttgtcaaattacacaaatgagcaggtgtgagggaggggcaacgtaaagatgtgaaattaaaaattattggtcaaataaacaaacgcccaacacctgaaagggtgctgtaattatttttgaggagataaaaaattaacagacaaatcaataattaaacttaaatgtatttgttaattcactgaaaaatatttatattattttagaagtaataaaaaatttattttaggaataataattaattaattaaccttttaattattttaatttttaaattatattttattatacggtcccccatttctttttgcttttaaaagagaaaaccctgaattcaataattgatttgtttatttgacccccctcccctctctcgctgctcgctctcgccccccctgcccccgctggtgacgtcaaattttccctttatgagagcaaattaatgtttatcatccattgccaatgtggccgagtggttagtgcgtcagtctggccgccccccctggggttcggatccgcttggtgcggggaatttttggagaattttaaatgaatttaaattcaacgtctttgacctttaagacgtttaaaataatttaaaattaaataaatttaattaaaataagttgcataaagtcgcgcagtcaaaaaagtcgcgcaccccccctgcaataggtttgggtttgcaagaaaaaagtcgcgcaataggtttgggtttgcaagaaaaactcgcgcaataggttttggcttcagtactgaaaagtctggcgctcagatagcccgcgctcacttggcggcgctcaaatggctggcgctcagttggccatgcacccctcccatacctatggggggctaccgtaatccggtgaaaatggagtctctaactactcccactcccttctcccaggggtattattttgtaaagtctttttttcaaaataaacttttcaaaccccatttttcgcaccgtgaatgttatttttattgaattctgaaccgttttgagtagattagactagaaaaaattgaaaattttgaaatcatgtttcccactcccttctcccaggggtattattttgtaaagtcttttttcccaataaacttgtcaaaccccatttttcgcaccgtgaacgttatttttattgaattctgaaccgttttgagtatattagactagaaaatattgaaaaattttgaaatcatgtttccccactccccttctcccaaggggtataatttttgtaaaatctttttttcccccaataaaccttttcaaacccccttttttccc

SEQ ID NO: 20663 - DNA, 1020 bp, Heterodera glycines
atagagagaatcaaaacaaaaagaaattttcagaacgtgagggaggggaatgaagaaagaaggaggccaagcgcggctgccgtccatggccgaaggcgtacagcttggccttctttcatctgcgcgcaccagaagtttgagctttgccacgagtgcgttcccgagtgccaccttgaggaagataaggttgatatctgttctccgccccccttgactcaccggagttgttgtaccacacatttttaccgtacttgctgtagaaaagctctgaccgtaccgcaccgccgttggctgagatcagctgtccgtccttgtcgtagtagttgtcggggttgttgaactgctcgaagtcgaagtactccggaccgaccactgttgtctcagtcgtcgcttggtccaggtagcgccgccacgtctccgtccggttgagcagcagcaaatcgccgatgatgatcattccatggctggcgcgggagatggcgacgtccacccgtgcggcatcagcccagaaaggctgagagtcggctccactgtcgaagacggagcatgttgtgacgacgacggcaagtgacgactcgtggccctgtgtcgcgtccgctgtcgtcactaaaatgtccgggatttcttgttgggccaccaaccgttcgatctccagggcttgggcggcgtagaagcaaatgcagcggatgagtgtgccggggaaggcccgcgccaaacgccagagggctctcatcgctgtgtcggtttggcccggattggccgaagaggtggacacttcatcgcgttgcgcaggcgtgttctgatggactaaaatgagggggactccctttttcggcaatttgaatgccgtttggtcggtcatgagcgcccgctcggagtcgtcgcgtccaggtgtcaactgctcgccgtgcggtttgtaaaaaccggcctccgtgcagcggacgagagcagaatgtgagcgaaaacagaccgacaatgttgtgacgtccgtccctcgcgccacatccaggttctggatga

SEQ ID NO: 20664 - DNA, 1223 bp, Heterodera glycines
gtcatttctgtacaaaaatctgtaagcaactcgcattaaaaattacaaatttttccggacccccctatcctcaaaaaattttttaaaaagcgcgccgtaaaaaattattgagttaggctcgataacaaaaatttaatttttttattatgttgcggcgacattttgtctcttccgaataatgcatgaccaaaactctaaaatatttaaaggatgatagagcaaaaaattggagaaatttgaccatattgatcagtcacatttaatttacgataaaatgcatatttctgatcattttaacaatgcttgatgaatttagaatcagtttctctcattttaatgtaggattttactccttattagatgctcagaataattattttatcaactgccttcaaagttcattaattatcagttttaatcaatgttttctgaacattttttcagttttctagtttttactaattgttcgaaatttgatcagattcagattttactccatttcttgtacagaccagctttcaggccgttaattaatcgaagatagaattttcctttagttaattattttccactgattcgtcaattatgttttcgtttttcctaatttctcggattcagaaatgaatttttaacattttttttgcggcaaatttttccaaaaaacttttggtgaacgggcgaggggaggggtcggcggtaccgataggcgccgatggaaatttttttgtaatttcgttctgatttgttaacagattttcactaaaaaggccaataaaataaaatgcaatttttctaaatattttattgaaaaattgtcatgcctctttgaaactatcgacacattcaattgcttctgacgtatcaacacagcaaatcaattgctttggctggccatcgcttctcggcatttgcaaccattttgctaacgcttggccaccagttacatttggcccatcatcagcaatcaccgcgggcaacaaattatcggagtcaattgaattcaattggttgagatcggtgagaattgccagcgaagtgtagcgacgcaaattgtccaaatgttggccatcggaaaaggacaaatggtgaatgtttggcgcgaaaatgggccaaatttcatgagcaaaaacactccaaattggctggacattcttggcattataggggaaaggcaacacatgcaaattctaattgatgcctttgtcaaaaatttgctggttggc

SEQ ID NO: 20665 - DNA, 2525 bp, Heterodera glycines
tttttcaattggggtagacaaagtgaaaatgcaacagccgcgggcaattaacggacgacgaaacggtcaattctttgcctacttacaattaaaataatcatcagagcaagccattaatagtgaaagcggacagtgcccgcttaatctcccgcttcaaagagagcacataaattaaaatgccgagaaaataaagagaatgaagtagaattgttaaacaaaaatatctgtggaaataaagcaaaagtgtgttctactggctggtcattcatggtcactcctcacaaataatcatctattatccctctcctcagttaatgacagttcaattagagttccatccgctttccctcccgctcttctccctccgcttcttccgtctcttcgtctttcacagctcgtttcgtcgtccgtcccttcctcgtcatctcttcctctccaacattctcttgtccctcccctctttcgctctcttcctcctcctcctctccgtgtgctttcgtcggtccaagcgcagcagcggaagaaaacatcgccgccatcaaatcggcgcccgatggtgaggataacaaagcggcgtacgtcttccagtcgatggcatgcgaccccggctgattgtgcggcgaatccgacgacggcacaaacgaagcggtggacgcggcggcagcacccgacgaacaacgcacttcttctgacgacgcttccgttgccttgccattcgaagccatgctgatgttagccaatctgagcaccaaacactaattaatcaattaagcgtaatggtttttgttattggtcccctcatctgccaaaactaaatttaaaaatatttcaatttttgccctgctcatattttgctcgttccaacaaaatgtgataaaaaattgaagggatgggtctcttcttcttctttttgcgcatttattaccggacgaatgaaaatgcgtacaaccggtttctcgcctctctctctctcttcactaaattttgttgattcttcacaaaacgattataggcaaatgaaacccatatacaggtacatattgtacataaaattaaatcatcaaattattcatagattcaaaaaaattctggaaaaaattgaaaaagcgttttgcattaaattccaaacgccgcaacagactcagcagaaaggaaaagaaacatatcacaccacacataactttgaaaaaatgaacaaaagaaaaggcaaaacaaacgcagcgaaagtgagggagagagagaaagaaagaaatagagagagagagagaataggagaggagagaagaaaagaaagagagagagagagaaagaaagaaagagagagagagagagaataggagaggagagaagaaaagaaagagagagagagagaataggagaggagagaagaaaagaaagagagagagagagagaaagaaagaaatagagagagagagagaataggagaggagagaagaaaagaaagagagagagcattccaataaaagaagtgccgttgttgttcgtcagtttgtttggcattgttttgcgtccattcggcgccgtcgttcccatcggcgacttgcgctgtttcgcctgtgtcgagctgtgcttccggcactcctccgccaaatttgaaccgtcacagtcgcgccacggcgtaatttttggaaaaatttttttaagcgattttttagaaaaattttccaaaaaacttactaggtaatttaggcgaaattaaaaccctaaaaatttgcggtaaaataaaggaaacattggacgtgccgtggggtttattccgctgagcatcgctgcgaattgcgcggccgttgccattgcggaggcgacggagtcggaagagccggcggacgaaaggggcggcggagagagcaaaagggcggaggacgaaggcaccggcggaggagggacggagttgccaccattgttggcactgctgcgattggagggagcggaggaagtgaacatttccaacagaagagacactttctgagagggaaacgaacggtgaaaaaggggaaaattaaaaagagaggaggattaaaatgccatcggaagggatcaacagcaaatgcaacaacaaaaagcccttgccatgtcaatgtcgttcagtcggctgtttatgccgtggagcatcgtacgcgagtaaaaataaatatttaaaataatgaaaaaacaaattacttttcaaactttatcaaatttcttttgggcacattcaaaacatttttctttgtaacattgcatttaattaattaagacaataattgattgtttcattgtgtctgagttcattggtaaattgacggaatctgtcatcagaggtgaaggaccctgccaaacatttccgacaaagcgaaggaggaatagcgagaactgaaatttaaaaatctagcaaaattatggcaaaaagtgattatgggcaaatgccaaaagcacctgataattaaacactgtgaaggagtcgaggctatgcccaacgtctaggaggaaataaaatttgcaatttttatttggcattttgtgtg

SEQ ID NO: 20666 - DNA, 1342 bp, Heterodera glycines
tcaaagcccttttttgcatggataattattagaaagaaaattaggaagcagcgggatggagctgtttgatttgcaatttatccgaatgaccaattaaatgtacatcgatttttatgcgaaaaagtcaaaacaaaaaaggcgacacgacacgtatagtaaggttaaagttaaacaccaacgaattagaaagacaaaaaaataaagaaacgttaaatgctttttgttaaggtatggaaattagactggttatttattcttcggcattttctcatccttctgtcgtagacgacaatcgttgctcacattctttgaccatttcgatcagaacgttgatcactccggcaaaagcatagccgccaaaaccgtgcgtgacctgaaaaatcaaaaaatggaaccgacaaagccgacaattgaccaaaggatgcgctgtttcccattttttcgaccaaccgaatgcaaattaacttaacccgcccaaaaccaaatttttgttcttaattaatttgccaaacggtaatagtaagtggtgctatcccccattttagaccagaaattattaactcgttgagttttggactttttattcaaattcgggtccaaaataagaattggtcgtgttggatgaaggattcgtgatccagaaaacttttggacttgtttttattaacacccaaataaattttctcgtcggcactttttgtttcgagaagtgaggccaccctttctgctcaccaaagagaagcggttgaaccccgcgctgacgccgtcgccaatttgttttttcaggacagccatagttggcagattaagatgagcaggcggcgtgtggggactctcatccgcctgttggaaagccaaaatgtcggtgagaaaacgtctaaaaatatgaatcaaattaattcaaaaaaaatgttggtccaatttctcacccaattgtttccagttcttccttgttgtatggcttagcgccgctctcaccaccattttcacctgacaaattgtggcaatgaaaatcaaaatcaaagtctcattaaaatggtcattttcgtattcacttccaatgtaattcttcgagttttagagaatatttggcacttttacctgacgtcaattcgttggcgattggtttgatggggtaattgctaatgcaaagtttggcaaagtcttcagccaactaaaagaaacagaaaattaaacgtcatattaaagaaaatccgtgcgcgactaaatcaggcccacaaccagaggggagcggcaagggggcagtagccacccccctcccccaatcaaaaaaatatttcctttttccagaaaaatggcaatttaaaattttccatatact

SEQ ID NO: 20667 - DNA, 1399 bp, Heterodera glycines
  unsure (1)..(1399): unsure at all n locations
agtaaaatggcaatntaaaatnttccatatactttagaaatttttttgaaaattttcggctactaatggtccaaaaatgaaattttctagaggggaaacgatttgggtggaaatgcttcgaggaattagtgcgccgcccccaaagggtctctggtgataccctcggacttttcccacccattgctcagacattctccgtaactcgccttgacggcttcagcctctagcaggaaggtgaagcaggtgtcctcgctgtgttgccgttgtcctgtttgaatttcaatcccggacttctgtagcaaattcaggagaaattaattgtggagattaggtgataaaatcagtttggttggttaatttttaaaatttggtagcccgtcaaaaatggtggttgcttttttgaagccatgccgcccaatttacatggcattttaaccattgtcacagagttagatgacctgacgcctttcgggcatgttctttgccccttgtcgtttcccaaaaaattttttacattttaaataaaattttcaaagaaaaaaactttgccgtcaaaaacatgaaaagaacgcggctaatttttgaatttttgttaggcataaatcaacaaacttcaatgcttttacgcagatcgacgctgttgctgcctgttttgcgcaggtgatctttgaatggctttgatggtgacttggcagaggcggttgacgatgattgggactggtcagtgatgagcgccttttgctgtaaaaaggtgaaatcagtgagttcatcaaactgagttgaaatggatcacttttccagccttcagctcttcaataatggccttcaatcgtttgttctcttccgtcaattctttattctgttctttttgcatctcgtttatctgaaacagtgatagcaagtgaagaatggtagaactggaattaatttagcatataatctttttgggtcttatgcagtttcgacatatataaatgactctcttcattttcttagaagataatttttgaattaaaaaaagttgtaattacattacgccaaatatttattgtgttttagggatgtgaaagttcaaatttgcgtgtaaagaactaaaaaaaataaaaatctataaaaattcttttttccaggctaaaaatctttttgtttttagtaaagttaatagagcatccgaggagctttctaatgaaaccaacactattgggtaatagttaagatggtaggctctattttttgcggaagttttcaaaatttaaaaaaatcgttccatatatatatatcaggggtgtgacttgtctcagaaaagacgagagcgagagtttggcgagaggcgagagtccccaaaaacacgagagttggcaagaggcgagaggcgagagtttttcaatttttttctgta

SEQ ID NO: 20668 - DNA, 2313 bp, Heterodera glycines
acttataaaattcgattggactcattaatttgcactggagcctacctggttcactctgaaagagctgattcattcggtttatttgtttgtttttttggggggtgctgtgggtttttggttttcattttcctaattataaacgtgtcattattgacttttcctctcacattttgcagtgctgggccaaggatgatgcgggtgccttatctgtcgggcggcggcggaggcattggcggacagagacgttcaacaggcggaggcacagattattggcacaagaaaggcggcggcggtagtcaatcgggcggaggacgcgaagacgacagggaccgacgtccgggtccgggcggcagcagttattaccaccaacagagaaacaatgaccgatggaagcggaatcagcacccaaacgcaccgccgccgctgagtgttgcacagcgacgggcccggggtccgttgcccgactgggacgaggtgactgggactttgtccgtgcatcaatcaattcattatgtatcggaacacctcatgtcaggtgcaagaagtcgcggaagacagcttcgactacatggaaataatggagagccaatattcgtaagaatgcgtgtcattgggctatggtaacgaatctgtccctcattctttttttggctaatcacattcggaggttttgaggatgctgttcacgaatctgaactcggacttgcccaattccgaccactgacccgaactcgaacaaaaagttgaaactttttttccaaaatatgcgttaaaataaatcaaattcaattgcgcatttttcaattaacaatttaagcactgatttgttgtaaaagcttttacacatggaaaagcatctttagaaaaaaattcgattttctgtatcggaatcgagtaagtcgcagtgcagatttgtaatcagctactaaaactgtttttgagcctaaaaagtaaaaattagggactcaattctttaccattgtctgtcgttgaaattaatcctaaaaatgacatcaaattcagtcagtactacgccctttccgccgttcccccctttgacccgtcgcttggcgtcattgcttcagccgccgcacatccctcggcggcacccatcgttccgtctgttgccgtcaccgctgcgcatgctgccaacgtggtcagtgcgtcggtcgtcccgcccgcctcccttctgtcccccaccggtctcatctccttcccactgtctgctcccactgcgctttccccgggcgccgtcgtcgtggccaccactgaccaatttccgcccacttcggccgccgctcagttcactcccgtcgttctgactgctcaatttccgtccaatgcgctgttcgccacgcgtccgacgaccaccgccccattcattgacgaacagaagctgaaggacttagtgcgctcgcaaatgtttgtgcatgcatctagctagccccaggcccgtaacccggaaaaatggactagtggagtgttttttgaaaatccaaattcaaaattgctaaaaacggtctgaaccgatgtataaaagccgaaatggataggaaaaatagcctgaataagggcaagcgcgcccccattgctatttttcctatccatttctagcttttaaacatcgattcaaataatttgctaatcaaaatttaccatgttttaacccacattggttacgggcctgaacccagcgcattcttgatccatgcacattaaagtgttctttctttccagtgagtactacttctccgctgacaacctccagaaggacttcttcctgcgccggaaaatggacatcgacggctttttgccgctcggtttggttgccagcttcccgcgcgttcgttcactgacgctcgaccagaatttcattgtctccagtttgtgtgacagtgacaaagtggagctgaacgaggaccaccaaaaggtacagacaattgacagggttttatcagatgaggaggtcgatggggggagacgagcaatttaattgaattttttcggggatgcgacaaattcgtcatcggactcttgccgttcgaaatctcgcggccgcatttttatcaattttctaatttaaaaatttttcaagaaaaaaatcctagaaaatttttttgtaatagaatttcaagattaaaaattttgaaaaattttcagcgctttttttaaattttattttatgacattttcgttataaaagttttctttatttttttacttgaaaaatttctgttataacatttaaaaattatttactgaggcgagatttatgagtgcatccatttgatcacctacatatgctggatttag

SEQ ID NO: 20669 - DNA, 3069 bp, Heterodera glycines
  unsure (1)..(3069): unsure at all n locations
ccctccttacccacgcggcttttatttaatcatttttattcatatattatatcttccattctcacaactttttttatgagttaaatcaaataaaaattttttattttttgtagtcatcaatgttttgaaaattaaataattttatttccagctctaaaaataaaaaatcctaattttttcttataaattttttttgcattttttgttgtactctcttactttttatgtccaattttctaaaaaaaagatttagttatttatccttcttctaaaataggaaacttcatcattcaatttgttttttgtctctattacccattcgcggtttatttatgcgcaaactgtcaaaaaaatgttttcttttcttttggtttttaattcgtttcttttttaaatttttttatttcccgcaccaaaaattatcgtatgacaaaacaaccgatcgtttttctaaacttttttttccattcgtaattgtatgtgcattaaaaacattcacaaatcggcaatttccgttgatatcgattaatggagtgtggggggggggggataaaaaaacggctggaactcgcgcagtggtgcgaagcgtactcgagaataccattaggctggggttttagcattaaaatggtggccgggttccctttacgttttaatcgtttttcattgttttcttgagcataatattattatttatttaaacaatttaaacaacaaaaataaatatagcgcttagcttagctgagggcgtgaactgtctaaaattgacaataaaacgatttacaccggaaatgaaaatatttttactagaaattctatgatataaaaacgagaaaaatagtaataaaaatcatttttcgctcaatttcatatttcttgatttcccgcactaaaaaatgtcataggtctacagagggggaggggtagatttttaataatccaaagaaattttctaaaaatgtggtttttatttaggtccataatttttttctcacccaaacaaaaaaacaataggggagggcgggattttaaccaaatgctttttctaaaatatattttttcaattaataaatattttaaattgctttatttgattcaataattgttggtccaaaaaacagcagtgcactcgcgcagttatgagaaggatccgccattaccaataggcatgggtttttgcattcattaacttaatagtcgggtgtctctttacgttttaatcgctttccttttgttttgcaattactctttttctctaattctcttctctctcctatggtgaatgcgcatctctctgcccagggggggggggccaagatttttatactaatactactaatgatttaaaatgagttttctcatacatcaaaaaccttcgcaacatttcagaaaagttctcaaatcataaaatgaaaatatatttcatttgtgctatgattggaaaatttagttgtttttaactatctatttatttacgatgtataagataactgaaaaatttgctattatttgaataaaaatggaaataattaatatttaacaaggattaattaaaaggatatatgcgataaaattattgccaagaaaaaaagcggagacctaactaaaaacaaagatctaatttaaatattttaggataaatatttcttcaattacataaatcttattttttaaattactaaattccacaaaacatttcaccacttaaataacatgaatgtagacaacaattaaaaaataatatacttattttacattaaaaatgaaaggattaaatcagtaatttaatttatattctaatgggacggaaacgaattgcgctcgctggccaaggtggcagaagaaatgtttttcaacaagagtttaaaaaatatatttatatttgcaaaacaaaattaaaaactaagtcagtaaatttaatttattgtgaaaaataattanaatataaatgaataatctaattttacatatttattttctttaaatagttcttttattgacacaaacaatcataccaaatatcaaaaaatcttaaattcgattgaaagtaattattaaaattataatataataattgataaattgaaaggacaaaagtctcagagaattccagaaaggattatatattagagatcggattggtcagtttttttcggtttaggtttttgttttatgttcaataaaagagaaatgcgttaatttattgaaaatatttaatggtcgctttgtaatttgattatattgaatgtgaaaatcaataaattgtgaaaattaaatgaaaaaacactacctcatctgcacttgaataaaatataattacttacatattgaaaagtaattagtcattcaattatttggtacttttaaaattttaaacgaaaaataataaaaaaattacaaaaacttaatttttcacttaaaaaggtaatttaatataaacaaaaatataatgaaaccatatattgaaagatatttaaatgaaataaataaattaattaattaacaaaacgttagataacatattattatggctaagcatacaacacaaaaacgcaatagtcttctacaactaatcagtaagataagattcaattaatttgcaagcttaaacccctaaatagaatatggtaacaaatgatagactaagagaaaaataagtcagcttaaaatattgatttttacaaagacataaaacttcataaaaacaaacaaagataaaaaaggatagttagtgtaagcgtgtaatcgattgattaaaaataaaaattttataaaaaatagaggaaatcataaaactaaaatattttttctttttgaatcatatgtataactttaaatgaattaaaacgtcataataaataactgttaattttaaataatatttatttttcaagaaaaaaaatagataaatacaataaattattttatgttattcttataacaaattaatataagaaacccattttaaataagattaatttaaagaattttacttataattataaaatatgcttattcggtctccaaaaacaagaacgagtcgccgtttggaacaagttgctctttgta

SEQ ID NO: 20670 - DNA, 2333 bp, Heterodera glycines
ccaattttaaaaattctataattttttatttttcataaattttacaacattttgcagttaaatgcaattgttttggatcagttcaaatacaataaaaattaataaatttttgggtgcttttcgtcttttttatgcttcaccattgcttcgtcaacatttcaaaataattgtccatttcattcattttcttttcctgcatccttttcccgtcaattcgtccgatcttttggccttctgtgtcaccaatgcgttggacaagtggaattttcatggaaaatgccttgaaaaatttggacaaaattcgcagggcatccctttgcaaaatcggatggcgactaaaatttcaatttattaaaatacaaattttattattttttcattaaatttgcctgattgtcgtgaattcgatcatcaaattgctaatggacaaaaacagaaaataaatcacccaaatcatttccaataattttggatgggtgataatttggtaaaagccaagcacagatgggataattacaacacaattatttaggaaatgcagcaaaaaagtgggcccaagttgtcgccccgtgcgaatgttttcggccaactgaaattaatttaaaatatattaaattattaattaatttttccatttttgcttcacctgatatcgttcacttaaattgtgcacattattctgagtttctaattttgaagtgaacaattttaaattcaacgtgctcataacagaaaaagccttaaattaatttttaaaacaaaattatttttattatttaataaaattacaattatttcgaagaaacttatggccaatgctacgtaaaatgcaattaacgctccatttgtaatcgtttcttgagtttggtctttaaatgattgttcagcactaattataacggaataagtggtcttagagggaaattaattaattattaattaattaatttgaaaacccaaataatttgatagccttaattcgaaaattaccaagacaataaaccaaacacaagagaacagcggatttttggcattttcataattcttgaacagaattatggcaaatgcccgttcgataaacaaaacatggccaatataggtaataaaaagctgtggaaaatcaaccaaaaactgaaaaatgattaaaattataattaattaatttttaaatccgttaccagaacaattttgtaaccaaatggccaccaattttccgccttcaccaaaatgacaattatttgggtggcacggccaatggcaaaaaaagtgaacaaaacgctttgagtcaaaaggacaaatttcaaatttcgatgcaaaagcgaagtacggcacaaaatgccaatgttaagcagagaaaggggaatttggagtacaaaaacggccaaattcagagaatataggacggaaatgagcacatccaccggggcaatttgctcaaaaatttcggaggaattggacattttgcagctaaacaattaaatagtaaaaataattatacaaacccaaaatttaatttcagattagtgagggaaggggtgttgggccgagaggatgcgcgggaatggagggatgagggaagggtttggtgagggagagggaaccgacggtcgaatgccgagggaagggtgctgctatgtcattataaaaagccaacaaaaagggcgttataaaaaaccatcaaatggaaattttcaacaaagaactggccataacttttgtcaaagtcaactaaattagacattcttggtgtcttatgtaatagccctaacatttctctattatctcacctaaatttcaaaaaatttggtcaaggttgagcaaagttatagccaaaagtacacatgtggccaggttttcgaatatttttggccataatttttttgaagcctaacaaaattttttgaaattttgcaggctaatagaggacacatagggctatcgaatgatagcaagattattttaatttgttcattctaagaaagttttgatcagaatataacggctcagcaccgagggaagtgcgcaacttccgctcggttggcgagttcgaaattgaaatgcttctgtgattacggaaaaagagagttaaattggaatggtttattttgaattttaatatttaaagttaattctttattatgaaagcagcaattttttaaatcaactttcaaacactaaaaaagaatgataaaaaggaacgaccgcggtaacgaatgaatgttcaaaaaaaatttttttttttttacattataccaaggtaataaagcacgcaaagtataaatgtaatttaataaaaactgaagttggataaaaggaaaattaatttaatcaaa

SEQ ID NO: 20671 - DNA, 3199 bp, Heterodera glycines
tcagtctgaactcaattttggcgttctgttcacttgcggttgagccgccaccaccctttttggcattggcacgataagtgaccagaatggcacaattcagcagcacgcagaaaaccagaaaaattgtcgaaacgatgaacgtcaatttgctgttgctgggtgcctaaaaattttttaaaaaatccagaaattttttttagaaaatttacattcggataagcaacatggtcataggtcagcccaattgcttcttcgccaccaccgatttgataatgaacccatccaatttcaataaagaaattatggaatacaaaagccaacggcaaaaggaatgccaacgcgcacaaaaatggcagcaattttttccatacataaaaatttttaaaaataaaattaattattagctattggtttcggctatcagcaagaaattgttaattttgtaaatttataagcacatttgaattgcttcaaacataaatatatattaaggcttttgatatcaaaaagttaaaaaatttaaagataataaaaaacgaatttaattttaattaggtagttggtattaaaaaattgaaaatttaattaatatgtgtgaccttttcatatgtcaacggtttgacaattgctgacagccgatgggccaaaagaagaaatgtcaagcaattttccacaagcacattgtaaaaagtcgaggcgaaaatgagacgtgccagccaaccaggcattgatgccaaagtgtcaaaaagtgccgtaattgccacggcacggattgtgaccaatacgttggggaggttgatgaaaatattctaaaatttaaatacaatttttaatattttcaaaaatttaaaatttgggtaaattcaattcaaaattattaaaaattattttttaaattttttgaaaaatatttcattccgaccaaatttttttaactaaaatgcgatttgtcttttcataaataaaaaaagttatgcgagaaaatttagaaagattaattttaaacaattttatactctctcagtttgccgctttttcggcaaattaatttttgtaaatgcaatttaaatttattttacatgatggcggagagcaagaaaattttgtagaaactgccttcaaacttctggttgcgtccttcaaaaataaaccaacattccaatgcatacaagaaaagtgatgggacggaaatgaaaattgagacaaattggacaattatcaaatttatcattttaaaaaattctaaaactaaattttgtaaatttttaaattattaaactcaattaacaaataaaatggtcggattttcaaacaagtttttgcttatttttcacttatggggttttagatgcttaatgtttgtttctgatcaaattttatttttttttaatattttatcctttgaaaaatatatttcgtttaacatttgaaaatggaaaaaattggctttctttcgccttatttttgaataaaattagtctttaataacaaaaaaattttctatcatttttcaaggttcattcatgcctattatgatcctttttctgtgaattctcaatttaccaatttggcgccgcccaaaaatttaattattgaaaattatattaaaaaaatgacagaaagtccctaagattaggttaaataggtaagcaaaaattaacacctgctttattatgtaaaaaagacgtgaaaacttattattattatttttttacttaattttttggccataaaattttaattaacggataatagaatgccaaaaaattccaaccttttaattaaaattttcacctgttttaaaggaattccgaagcaattaatatatttttttatcaaaattaattaattttgaataaaagaatttttttatagtaaaaattcattttcgatatttttattttattttccattccaatgctttttttattttctgatcaataaaagtaatgaatatattcaatcatttctcatccacttcaaaaatttttttaacaattcatctcaaaatatttttgtttacttttacttgtgtagcagccaacatctgtttaactttctaatttctttgttgtgaatttaataaattttgattttatttttcgtaaatatttattaattaattgtcatatggttaatcaaattttatgacaataattcattatcaaaatttaactgataaattttcaaattccaattttatgacactccccgtaatattgttttccaattttattttaaattttctttttgataataattttaaatgaaaaaataattaacaaatttacactaaattctgaccttatagtagagcccaaattcaaaattaaaaaaatgtgttagaagaatgtaatcaccattttaaattcactaaccaaaaacaaatttcattcaattaacacaaaaacaattaacgaccagggctatcaattacatttaatggggttaatggagtgaggaggtgggcggtgtaattttttttgagaaaatcattgtcacacgtcagcattgcatctgtatgagtgagtatgtatgaaaaatcaggcgatgttggttaaaatgggtgaaatgttataaaaaaagaaaacatgaaatttaatttgattaaagaaaaaagcagtggtaaaattttgtgtttatttaattagacatactgtaattcagaattacagtaatgtcgtgttatcattctctgtgtttttttttctctttcaatttgcttattttaaaatcatttaatatggacatcttcaaaattgctatggtatttattgtctttggatacggtaccttaaaatttgctttcaattcgattgcataaatttttgtgaaaatttcccgcgaatttttgttagtttgaaaaagttggaccgatttgcaataatatacctaataaaaaaaccggcttcttgtattaaatacaattataatatattttaaattaaaattattccttaaatttatttttattccctttttatttgttttataattccgttttatttttggaattaatcccgttcctaaataagaaccaattttcacacatttccggcagattccctctcccccaaaaaatgtccaaatatggcaattttacgcccgtttaatggcattttattttgcgttaattggaaatggcaaaaggcttctttcttttttcgtataagctcatctgtccgtataaattccccat

SEQ ID NO: 20672 - DNA, 2127 bp, Heterodera glycines
tagcctgtaaaaaagatatagagaaaaaactccaaaaatttcgactttttcgaaatttcatgtataactttttggtaattgtctaattgagaaagcttattgttaaaaacagcttctaaacatgttaagctttcgaatgataccaagaattttagatttgatcgacaaagaaaaaaaaaaccaaaatacaaatttttcgagttaaatctttctgtttattttcttcatttccgcttttaattgcctgttttttttcttcggcacttgtacagaataagttgctctaacaaaaaatattaactgtttggctccctttgatttccatctctgaaataaaatatacttttgaaaattaaaaaaagacgaaataaaatacaatccgagctcctgataaagtaataaaaaaaattttttaaattcgatacctaaatggaaatataaacagtgacttttcgcttttatacccaaatttatatatgccgacaaattttccggtcattcattttcccttttctgtgaaaaccacactcaaaaacatataaatatggtcactttttgattcaaaaatcattttctccatttcttcaacacaatttcaatttgtcttctaatcccccccccaatttcatttagcttccacacattttgccatctgtcaaccaatcatcatcatcaacatgactaggaagtgttgtgtgacagacgtgcctcccacaaatgaaccattggggttgtccgactccgggtcgccgtccgcgagcgacagcagctactcctcaccaagtgagtttaatgcggggcgggaattttggcgccacaaaaaatttttttttaaggtagtacgacagcggacgtgagttgaatgggggtggggaatggcacaatttcaattgtataatcctaatgaaattgaattttcagattccgaagagagtgcctcggggacgaagaagaaaccaactcgcaagagcgctgctgctggacgttccacgaaacagacgaagtcaggcccaaagagtcgtcactcgcccgccggtcgtggaggaggacgtccccagacgccgcgcatgaagaaacaaccgctgaagaagaagccgccgagtcgcactcctggtcgacgtgtgaagaaaccgtcaacgaagaagtcgcctgctccccgccgtgcaaacacctccaccaagaagcgcggacgtcctgccaagaaagcggaacaagccaaaccatcggacagcggaacagccgccgacagtggccgcgacgacagcggacgtgagttgaatgggggtggggaatggcacaatttcaattgtataatcctaatgaaattgaattttcagattccgaagagtgcctcggggacgaagaagaaaccaactcgcaagagcgctgctgctggacgttccacgaaacagaaggcatcgcgcggaggacgtgcgggcaacaaaaaggcgcaggaagaacgctctgaatcgtcaactgaatcgggctctgatcgcgaggaggatgaagaatgaatgagccagccggagaagaatgctgcttcacgagaccaccgcgataataacactaacccccatttaaaaaaagagaaattgtatctctatgtatgtatgtatatattgtatgtccatatccctgtggcattatcttgctgaatgtaattctcccacaaatggttgttgttctatttaaatatgccatatatatgtgtatttttaataattgtaatatgtttgccctgtttatgcatgttttatggtcatttattctcattgctgaataaatacatttatatgaatgagtacattttccatgtcatcattagcaattcctctaagaaggtcaaaatcggttttcaaaaaattttatgtgctatatccataatcatttttttttgggcttttacatacaacaattttaaaatcattatttaaatttacatggtttttcttttttccagctcggctgttgcttctcattttcatttgccacgtcatcattcgtatctctcctttcgctctgttttcattcatttttccttctgctcttccaccatttctcttattgctctaattctctctctctctctctctctctctctctttctctctctctctctctctctct

SEQ ID NO: 20673 - DNA, 2544 bp, Heterodera glycines
tttttaatctttaagaaaaatacgtaatacatatccatctttattttatttttctaggacttttgaaaatgtttctatcgcccatcattttgtttttccaataatattttttaccttgataatggtggtggtagttaagaaactgaaaaagtgccgaaaattgtcttaattatttgacccaacagaatgtcagacaactgaaaagaagccgaagaaaaaatggcaaaagcaatgtaaaattaaaatgccaattttcaatttcaattttaaattttgttttcctttttttcagttttatctccgccgactgttggctttcagtgttcgatttgcttgagccttctcaactgggccttggaattgcacttgtcagccaccgttttgacttttacatcgacgaacacttcaggacgcggcgttggacactgaaaccaatgcaaattaaagccaaatttgaagcggatggcaaaatggatgggaaattgtcaattacgatggaaatccgttgccaattccacaaaaagcgatgccaaagaaaatcgtcggatttaagagcatttcaatcaagtgaaatgatgattttctttttctgtttgtaaaacgattccttaattttcacagatacatcgaccaaaatgccatcgcttttctctgccgtttcgccaacttttcgcctcctgtccaattaatttggccatctacacgggtggtgaccgcactttggagttcattttgcgcaaattttggccaatgatcgcgaaaaacatttgtgccatacaattgccccgatatgctctcagccgtttgcgacgctttgtcccgtcaattctaaacgattgtccatcgcttcgtattatcaattcctattctggtggctttttcgccgaatttccggccgatgacagtgccatggcgtcggatggacaagcgttggccaaatggcttttcactgcccatccaaacaatgtgccaaagatgttcaaatgctctttggacatcgatgacgggaattggtcgtcgagggttgaagccttaaaagcggtgctttgttttatcatttcgtattcatttaatcattttttccatcttttaggcattttccaatgcttcttcacccgccgctttcattgtcgtcgtttggtttcgttcgtcatattttgctgattccattttggcatttgatcaaaccaatgaatttactcgagaacattgacactgaaaagcactgactatcgccgtcgttttctgctgatccgttgtccaattgagcgagacgcgagcaaatgggcaaaatgggaagaagaagcgattgtttgggaaatttatactcagtggaacagaattggaattcaaatttgtgatgcggatggcatcggggaagggtcagcgaatgattattcaaaaatccaattttattgcttttctatttttaggcttctcaatgcaactcccggcccaagtgatgacagaagcgaatgatttgctgagaagtgatcgatcaatttgattatggaattggaaattgacgtgctcattaaatgttggagtgatcaacatggatttgtgttatgccttaggataattttaatgatttgttcaaataaatgtacttagctttttcaaatataatgtcactcaacaaagtaattacgctgactgtctacaaccacttcgccacctgcagcaggatgggagtttgcggattgacaaaatctgtcaaaaattcaaaaaaaaaatttttcccggcgcagcctatcggcaccgccccggaccttcccctccccgttagcaaaagttatttgaaaaaaacgcacagcaaaaagcggtttgaaaagcaaaaaaaaaatgttagacattaaatgggccaattttccataatttttggttaaaaattggtaggggtcaaaatattaataaaataaataaatatgctcacaaatttggccaccactttctcattgtttggttttttgaattagtgtcgtcccacaaatctacagcttccggcaaagatttcgatgaacgaaagtgccaaacacaaagagtcactaatttggccaaaaatgttcaaatgggaagaggaggagagaatgagtaaagaatgtgttaaaataatttaattcaaaatatattcacaaaaaatggcccattccctcggtttaatttccccaatttcgtaattgaatgccatttgggtcattttcttcccgcttttcccttccttccttccctcccgtccatccatcatcatttatgtccctaattttctgcccattaagtcgtccattttccatcccaaaattagaaaatccccgtgccgtttctcccgttcgtttggcacgccgtctcacaatgtttctgccccgtccatcaatgagcggactgttcaccaccacggcatcgaccggcgaaggggcgaagagtcgccgtgcgctgctgctaatgggtgccatgttggcatatttgacgatgggtgccgcggtggtcaacgcgttcgaattcgaccaggcgagtgccaatgggagaaggcatatactaataaaa

SEQ ID NO: 20674 - DNA, 2133 bp, Heterodera glycines
aaaccaaaaaaatctccgaatttttgaaggttttttgaagcaaatgtgccaaaggtgccctatttttcgtccgtgtgtctgtgagcttcttcctcccgctttttccattcgattcgacaatcaaaaacatttttttgtctgatcactttttgcccattttacatgggctgccgcttggcttggccaattgagcggcgtttgattaattgccgaaaagagttctgatcagcgccgttaacccccgccccccccccccagggtaggcattgtcttgtcgagagtgatcaaaaggagcagcgacggcagctgtcccatcaatcgcccgggcaaaaaagggggaggaggaggccaattcgatcaaattgagttgtgtatgttttggttatctgctgctggtaaaacaaagccgctttttcgggactggtagaagctgatcagcagttattagggctgcccgaaagtcggtttgacgaaaatttaaatttctcatttttgggtcagtattaacacggcttttgaaaaaaaaaatccaaaaaaataaacacgtactataattgaattattaaaagtttgttaccgtatcaatcaattcgcgtttaaaatttcaattcatcatactaccgtatcccgtttttaaagaaattctgattcactgacgcatttcctggtacggtatcaattcccgcggaatttttttaaatattggcatacctaacgaatttttcggaatatggcataatttgtaagtagctagccaatttttgagctgagaaagaggggataaaagcgaaatttcggaattttacgatttcttatcgttgaattaaaagtgaagtgcaccaccaccaatcactttagttggtgccttttcctcctccaaatgttgaaatcatttgcactgaatggaaggagaggggaagcaattaatcgtccccaatttttgccgccgtttgatcattaaatgagggcaattacgtcaattggccgcccaatgctttcagcaacaagaaaaacggaaaagcttccgctttttacgtaaaatttatggccgcacaaattttgtccaaatgtaaaaacatttagactcgaaagggattggaggaccatcagcagagggtgagacacgcggacagaaaatttgaagcgatttgaaatgacgccttcgcgatacatggaaaaaaatcgccgtaattcgcggtcgcgtcccacccatgttggagaccgagagttggccccaaaacccgagactcttgagcccgcccgcgtgcacggggccggacttgagtcacgaagacaccacagattcggcaatcataatgggaaagtatgtccctgatctaccattttcctttcgcaaaaatggctggctgggagttttcaagggcgctgatcacgaatctgaactcaaatttgacatcatccaatccgtgatttttcgaatctatggtttttggtctgacaaaacccgagtttagattcgtgatcagagaaaacactcttgaaattcccaagctaacgctttttagctaaaaataaatctccaaaatgaatgccgtatgcttaaaccgagaccaaatatcgccgagatttctgggacaaagaccaagacaatttcttgcggctcgagagtctcgccaaatgcactcgcttcaaaagtgtgaaatgccgaggagctgtttttttttgtgtgttatggccaacaaatccataaataattggcccaatattttctgctgctccatcagtgcgtgccgtttgctctctttaagtgtggtcattgtttatgcgcggcaaaataacacaccacgcgccggaggaggagggcatttctgagggattggatgtgtggcatgggccacccgcccgtcaataattaattaatgcaactttttactttcatgacgaacttatgtaaaaagacagagaattatgttaagcgactttgttaacaaattttgaatggctgaggagcaatacggtatcgcggtggacaatgtgtacggtgtcaacaaagaaaatgcccacaatacctaattaacattttcggataaatattatcactatattatcagcgccaacaataaatgacgagaggcacacacaaaaaatggtgcggtttttaaataaaaacaa

SEQ ID NO: 20675 - DNA, 1797 bp, Heterodera glycines
ctaaagcatcagagtgctaaaattaagttgtaaataaaattttggtgcactttagagcactttctgaaaaaaatatttatgaaacaaaaaaatcgattttttcaagtgtccgtttggggtactcaaacatttatggggagcaaaaatccaacgcagaattaaagtacaggctatagggaagctattcccgagggattcggtctccccataaatctgggcgcatcggttcggggggaatgccccgaaaacaaaaaatcgattttttcaagtgtccgtttggggtactcaaacaattatggggagcaaaaatccaacgcagaattaaagtacaggctatagggaagctattcccgaaggattcggtctccccataaatctgggcgcatcggttcggggggactgccccgaaaacaaaaaaatcgattttttcaagtgtccgtttggggtactcaaacaattatggggagcaaaaatccaaagcagaattaaagtacaggctatagggaagctattcccgaaggattcggcctccccataaatctgggcgcatcggttcggggggactgccccgaaaacaaaaaaatcgattttttcaagtgtccgtttggggtactcaaacaattatggggagcaaaaatccaacgcagaattaaagtacaggctatagggaagctattcccgaaggattcggtctccccataaatctgggcgcatcggttcggggggactgccccgaaaacaaaaaaatcgattttttcaagtgtccgtttggggtactcaaacaattattaaaaatttttagatttttattcatctccctttttgatagtgaaagcatctgagtgcctaaaataacttgtaaataaaattggtgcgtttcagagcagtttgtgaaaaaatatttatgaattaattttgctaaaaaaataaaatagtgaagcttaaaaattaataaaaaattttaaattcagaattactggagttagcatcatagcagtgcttttccttgtctttttgatgccctcgcaaaatctggttcgcttctgatcagtttataaaaaaaaagttaagcctaaaatttttcgcaaatttaaaaagcaattaaaaatttttagattttttattcatctccctttttgatagtgaaagcatcagagagccttatttaacttttaattaacatttggtgcgtttcagagcacgttctaaaaaatatttatgaattaattttgcaaaataataaataattaatgaaaaagtcagaatttcgaaaaattttaaaaacaacaagcgttggcattttttcaggttaagttagtcctttacaatggagaaggcctgcaaaatttggagagattatatcgattttagtgcgctaggttcgatgaaactttttaaaatataagcctaaactttttggcctgtttaaaaaggaattaaaaatttttaaaatatttattcatctccctttttgatagtgaaagcatcagagagccttatttaacttttaattaacatttggtgcgtttcagagcacgttctaaaaaatatttatgaattaattttgcaaaataataaataattaatgaaaaagtcagaatttcgaaaaattttaaaaacaacaagcgttggcattttttcaggttaagttagtcctttacaatggagaaggcctgcaaaatttggagagattatatcgattttagtgcgctaggttcgatgaaactttttaaaatataagcctaaactttttggcctgtttaaaaaggaattaaaaatttttaaaatatttattca

SEQ ID NO: 20676 - DNA, 1992 bp, Heterodera glycines
  unsure (1)..(1992): unsure at all n locations
aggatttcatatatctcaaggaataaattcctntttgttaataaaataaaaaataatttccaaaaatttgaaaaattaaaaaaaaagaggaatttcttcctttttcgacaaacaatgatggtgagaaaacgctttaaatttgaaatgtaaataatataattcattgaaaatggtgtaaaatatccaaactttaaaatttaaatgcattgccaccgtccacaattctcaaggcatgactatgagcaaaaataggaatttgttctcaaatttcttaccctaaaatttctgtcggacaaacaccaacacaaagaaaaaaaatttgaatttttttttctaatttttattttctaactgaaattatgactttttattgaaaattaaagaatttcctattatttactttggaatttgtcatgcgatgaacgcgttatttgaaaccaacaacaacttagaaaaagtaattaagatagtgtcgatgttaagcattggcattatgtgcgtaaaaccgggatttgcattttcttttttaattatgtgatatcggcactgttccattcgatgacaaaatgtacgtgcctttgatacgcttcacacttcaaataagcagcaaatatcacccgaaattttttaaaccaaaatgcccgaagagggaggggtccaataattgttagcattcaattgtctgacactttttgtctgaagaatgtttaaataatgcgaatttggcacatttttgaattttctaacaagtggaaacaaaggcaagaacagacaaaaaaatgaacaaaaactcttgaaggaaaaacaatgaaaagaagtgataagtctctcaaaatgtgtcggccgtgccagaaagaaagcttgttttaggcaaatgatggcacaatgaacgacgttttggcacaaaatattttatcgaaaaaaggcatgttgtgacgttacttgaaattaaatcaaagttttttttcctctcaaatttgatttttaacatattcctaaaaactcacacatataatttgtgattggcttttcggatttgccgttttaaattcaatttggaatggtctttggtgtgttttatcggtaatttagtttattgaatttcattttttactttcgaaaaagacgtttttaaaaggtgcgttaaaaaggtaaaatgcttcggtagtttaatattaaaaaataaagtaaatttattgtaaaaaaattgttttaagtaaatattttaattattataaatttttactttttcaaaaactcatatattattttttagtttatgcacaggtctttcggattcctcttttgaaattatgatttaagcaggcttttatcaagctatcaaattaatgccgaattttcaggtgttttcaattttaaagtttgggaaaagattttcaaaagcaccaatttttggagtaaaactctttaaaactttcaaattttctcaggcggcgcctattggatcgctggatcggtatttttcgctgacaaatcggcactcgctcgacgacgaattcatatttaagatttaaaatatttgcagtaaaaattaattaatttttgtttgttttgggtcttttttaaattaataagcatcactaaatcatcttaggttctaattaatttgagattaatccttttcctcttctttttctgataccttttagtaattattctttggtcatcaatcaattatattttaaatcactttcccctaaatatttgtttctttttataaaattatatgtttaatgaaaaattgattttaaaacccattgaattgtgatacaattaatgataaatgttttttatatatgcaattcaaggtgctaacacagtgaagctttggtttgtgacataattatcgttgtcaaatattaaaaaatgttgcaatttttaaagcaaatttatatgctataataatattttcagtaggaaaatgttaattattttgtatatttaattaagggggcccgaaatgaaaatgga

SEQ ID NO: 20677 - DNA, 1884 bp, Heterodera glycines
ttatttcacatttcacgacaatttcatctgctgtcatcaacaacgcaacgccaaggtgctcttcgcattgctccccgtccagctgatgctcgtcgtcgccgccgtctgcctggtgatcatcactcaatgctgcggcggtggacagaaggtagcgatgcttctgtcgtgactgattttttaaaataatttccctttttcattttcagaacacggaagagccgcaaatgccggcgggaccggaaggggcggaggccagcgccaaaccaacgggacagagcgcagcacctggtggaacttcagcagctggtggaacttccgcggtgggacagcagccagccgaagcctccaagaaatcattggctccagcggggaccgcatcggcgggtgagaggagagggacgggcgggcggggaagcgtttttggttcaccctaacattttcctcattttcagtgccctcagcgtatgcggcgcccggcacggggacggctatgagcacgacatcgcagaagtcagccgccggaggagccatgtcgcagaagtcagcagcgcctgctggaggagcctcggcactgagcaccgcgtcgcagaagtcagccgccggaggagccatgtcgcagaagtcagcagcgcctgctggaggagcctcggcactgagcaccgcgtcgcagaagtcagccgccggaggagccatgtcgcagaagtcagcagcgcctgctggaggagcctcggcactgagcaccgcgtcgcagaagtcggcagctggaggagccgcgtcgcagaaggcctgaacaaccaccggacagcacaagaacaagacgctctacaacccgcttcaatgatgttcatcaacagtgatcagaaatgattttaaatgatcccatattgttcccccatatatgcctaatgtgctctattgcctgtgatcacttgtcattgtgttgtgtgattaagaatgggggtatgagtgaaaaatttgttatgaaaattagagtcaaaggaaaaaattaaaaaaaataattaatataatcttaaaaagtagcactgctaagcgtgcaaatcctagtggctagtctacttgactttcccttcttctttcccctggttcaattcctctacagaaattaaattatcttgaattttctttttgtatactcgtgggtttcctatagagaaaaaatgattcctcatagtttttttaaattgatacatattttatcattttttaaatgaaaatcctaccaattgagcttaataatcccaaaaaccacggaccgggtcagtttagtctggccggtttagtctgaggggtcgttttagtctggcaagctgtttttgtgccacataggttatattctgatttttttcgagaaatgtttaatttattatcaaaaaatatttatcaatgtgttaacaacaaaaaaaaaacaaagcattgaaaaattacgggcgcatttcataatttcgagaaataccaacgagcaaatggttgatgttatcgggattaacattgacattggcatgataattatggtcattttggtgagcagggttattgttgatggcattgtagccctaaagtcgaagaattctcgcatcagcggcacgatattttggcgcttttgcaggagggagttcaccagcgatgcatcgtgagatgtccgcatcaatttccgaagtcgaagaacgagcaaatatcaaaattcttaatatggaaattagtgaaatttaatggattttttcacctttgcggtccgtcactgagttggtgaagaacataaagtgcaccctcatgttccagattgtgcttgtttcgctttgtctttatttcctgattggagtttacgatttgatttgtagctaaacagacattttaaagttatgt

SEQ ID NO: 20678 - DNA, 2155 bp, Heterodera glycines
  unsure (1)..(2155): unsure at all n locations
gtagtcattttcaagttttgttattttttcgttgaaaacacactgataaatatgttatggtgttaattttaatcatttttcgaaaaaaagctgagtagaatctattttgggcaaaagcagcttgccgtaatatagcttttttatttgttatctaatccaacaatcttggtatcattcgaaagctatttaacatgctctattagtcttacaaaaagagaagagatttttaagcctggaaaaatttttattaagaaaaaacttcaaaatttcgagtttttcgcaattttcatgtataactttttttggtatttgtctaatcgcaaagcaatagcttagaaaaagtttttaaatacattaagctttagaatgatatcaagatttggatgacaaagaaaaaagttgtagaaagttatagtggaaaaacatgctggcgcccaaccgtgcgagcccaactgacgtagaccgtttcctccacctgacaaagtgtgccctcaacaaattgccgacaatgccaagcgaaagaaggcacaaataagcggacaattggaattgcatgatgcaaaaagattgatgcgcttttgtatttctcaattagctgaaaatttttgaaaatctttgaaaaataaatctcccaaaattagcaaattatttagtgaggcttaagcctcgagagagtctcaagtcttggtaaacatttaaataacattatcggttttattaaaaccttagtcaattttagatcaaagcattttacaaatgtttttaattaaaagtcaaccttatttacaaaaataaaataaaatcaaataaaaactattanacagtaattagaaatttttttggaaaagagtcgacttttggtaattattcgtctcattcctcaataatttattttccattttttaccactcacttcaaaaagtaatgcgaattgatgtgcctcaacaacaatttttgaacaaaattgtcgtcccgtcagaatgaattcaatcactgaattgtcaatttcatacaatttttcaaattggtgcccattttgtcgcatttcaattaaataatttttgtcaatttctaaagtgattttttgcttcatcagctcaaccactcgcttaaatgcccatggttcggtggaagtgcgaattttgaagtgttcggcgtggggcttaattaatttaaatatttatttttaatttatcatttaaattgccttgaatattgggcaatcaattaaaaacaaagtcaatgctttgtcattgaaaatgtcaattgtcattttgccaaagcacaggtccttgaaatgccaaaagaaatgcgcactttgcggccgttcaatcggaaaatgtttgttttgctaattaaaaaacaactaattaattaattaacttgccttccacacgcaattattcagtgtaatttttttcaaagttgtgccatcattagcaaatcgctataaaattaatattaattaattaaaaattattggaaattataacttgaatgtaaatgcaaaatggtattcgctgtgccggccattcatcgcttataaaatttgagtaaaatgacaagcatttgtctgtgcaattcgcaaaaatctaaacacaaataattaagaattaaacaaccttaattattcattagggtatattaaaattaattacttctccattggttgtttcttcatgtgccctgagtgaatattgaagtgaacagaacaacgggcaaatccacaatttgcccattttaaattttggaaaatgattggcttcatttgcggcaacaaaagcactccaatgagctaacaaataagagactaattaattgaatcattatcattaccattgacaaattcaaagcgttcattgatactaaaacgatcacacaatttgaacacatcaaaaagcacatcatttggaatgtaaattgatgagttcattttttgggcaatttttaaataattttttctaaattcgctttttataaattaaagaaataacaaaatgagcaattgttattttgcagcagataaaggacatctaatcagctaatgggagtgcttttgttcattgaaaaacaatggtcagctgtcgcaatttgacaatgaaatgcaaacataaacggttgttactaaatgaaaatttaaaataagacagaaaag

SEQ ID NO: 20679 - DNA, 2609 bp, Heterodera glycines
aaacagtaatggaattggggaatcagggttccgggctgtacaggaactgttagccgaactctcgttatcccattgtttggtcacttccgttgtcagtttttgctcgacacggcactccccgcgccgccgccgccggtgtcgtgccccggcacgtgcggttggtggccaccgtcgacgtcggcactccccggcactttggccacgacgacgacggcccaacaatggcaacaacaacaacatgaattgttcggcgtcggggacgacgaggcgacgatggtcgaactgatctttgcccactgcaaagtttgttgtatccttctttctaacacaatttatttgtctaattgtaaaatttgggtttaaacaccaaaaagagggttttttataaaaatttaaaaattcacccattttccttaaatttctgacctttcttttaatatggaaattcaatttttgaatgtttccctcttttaaccatgaatttcaatttttggttttaccagtgaaattgacaatccaaaattaaaatttctcaattttttagccctgcccttggggcacccggcgtttgccgtcgtcgtcgtcctcggtatttttctcccctgccgaagtgccatcgccgtccttgccctcgtcccaatgccatccctgcgaagtgccgttgcccaccattgactaccttttcttgttgttccacgccctgttgcccttcgtggtgaaccagttcgtttttgcagcgcattttttttttgttgttgatatttttggtatattttttcatagtgtggcgatctgtcaccattccgccagacgtctgaggcattcgccaaggtttgaaattgttaatggcattggttattaatttgttttgcattttccatttgctgggatggcattggctcgttacaaattttgctttattttacatttctaaatttttttgctgtacccggcggaatttgctgccattcgaaggatgtttaattcactacccaaatttcgtggttcaattttttaaaattccatttccttgtatcatttttgcctattcgtatacatgtccctctttttaccccctcaatcccccttttttgctaggcttttgccgttgactctgtgccaattgggctgcgccctcatcgaatgttcgttggcatttgtcggcgctttgctccttttccgtccgtttggccatttgcggacatttggctgtccacgggacggcaaattggccgaatggtaacaaaaaatgaaaatcccttgggaacaaaagaaagggcattttccggcaaaatttgttgccataatttttcatataatggtggcacaaacaattctaggtttttcatgttttgtctcatgttgcacaaaaaattgtttatcctccaaaaaactaacaataagattttttcattattttcaacaaaaaacagcgatacggtaaaaaatttttcggtttttcgtgtcctaaataagcgaagtcagtgtaattaatttctccaaaaagatttttatttttcatgcaaattttggttataaaaattttattaattactctaacgcttttttgaatcatcaaatgaattaattgcttaattaaattaattagttggaattttccaaattaaaacttttgcaattaccctaattagataattaatttgtattttttaatccccccccccttcaaaaaaggtattctctgttcaacaatccggtgctccaatacacacgggtcctccactgtgcttctgagcttgtctatccgctgtgagtgccgccggcgatttgccaccgaaatttattttttttaaatattattttaataattatttttaagtcaaaatttagttcaattgtcaaccattcattcctttgttaccactaattttttgtacgcttttttgcatcgaattttagaaattatgataattgctaaattccttcaaatttttttgaaaatttttttctaggaaattttcttaaaaaattttctaagcttttttaaaaaatttctaacaatttttccccctgttttttcagttattccctcccatttgccatttatgcgctcaatttgctcactttgctcgttctccgtgcccttctccattgcgttgtcgccgccttttcccgccgtaccgttttgcccagtggcccattttatgccgccctttgggccctcccattgctctcgttggcacacgccgtcctggtcagtttttggcggtgattgtggcagttgtgccgaaaatgcaacaaaaaatggccggcgggcacaatttttggggccactaatttcgagttccgaaaattttgaaacttcgagttactcccaccggaatttttttttgaaagtttacaagccattttagcatcgagttttgtcagtttcaatcaaatcccggggattggggacaaatgagccgccattttatttggaaatttagtgaaaatcatccgagaattcgatcagaatctatcatcaaagacttgttgtctccaccattcaaaactcacctattttttaaattggcatttggcattccatattccttcccctttttttgttcagtctggcgttctgcacgcgctgttccccttcatcg

SEQ ID NO: 20680 - DNA, 2476 bp, Heterodera glycines
ttcaaatcgtacccaattgggtcctctttttttacaaaaatgttactctcatttcttgccatgttttgagcgatcattttccgtttacaaaaatagccgaaaatcggatctttattacatcggaaatgcttgtaatgtatttaatttcaacaatgaattcattattgaaaattattttttatttttttttgcattttttcgggttgattttcaattagaagaaaattcattttgttgctataaatttcatttttttaatattttaaaactttttggcattttttcttaaatatttattaatatttcggaatatatatatacaaataaatcctcgtcctattaatcacaaataatgatcaaatcattataaatatttatccaatggcaaaggcaaattagaagaataaatttacattgtttacctcaatttttactccaaatttgctcatttgccgcagattctgctggccaaccgtgaccagcacagtgccgtgcttattcctctcattccatcgcttttcgccgtttcccttcgtttggtgcctttttcttcgcagcttcgcaccgtttgcctgcgctttgagctttacggatgttcagcaaaagaagggaaaggaaaagccaaagtcggtggaacaagcgaatgttttggttttcaaatattaaaattattgattaaaatttttttgccttccccaccgaaaaatgccgttcctctccgctcccccccccccccacccccccctctttcaagtccgtctggtgcttcttcttcttcctcttcagtgttccccctgctccttttgctcattccctcctcttttgtgcttttcctcctcctccttttgctccttttccgtgccattcgctcttttctccgtcgtgccatttcgtccgatcaaaagggactgttcggctcgtcttctgccggcggttcgccgccccttttgccctcgtcgtcttggcagaatattcgactccctttcgacacgacaaatgcaaaagtaaaatgatggggcaccatataaagaggtcaattcgaactcagtcatggctaattggccactaattgctgttcgcccgatgatcaattagttggtaattgctgttcgagagtcattcattctcgggtccaatcaccgcctcaatttgtcttccaattgtccctcttcctaaggtattctcgccaagtttttgccgcttcgacactctctctttgggctgttcgcttcgttcgtcgccggcggcggaggagcagccgaagaacatttattatgcggaggaagagggggaggaggacgaacaaatgcaacggaagaacgaagtcacgcgcagccgatcactgcacgccgcggcactcattggcacaccgacaaaagtgggggaaatggaggaaaaggggaaaggcattttaaaggggaaatgccgaaaaattctaattgattttatgattatattatttaataatgagtcattagcaatttgatttcaaatttcttttaaatgcatgtatcccacaaaggacaaagcatcccatccaattcggttaattttggcaaatgataataataactaataatgcactgatttatttgtacaggtatcagctcaaatccccgtgcgtccggtccgtctctgtcagttggcccattcgtcctcccaacccgagtctttccgggcggtgactcgtcccttgtgccaacgggcaaagcccgtgccgaagccgcggagaacggcgaattttacagaaagaaattaaaattcattttatttatttcgaattaatacaaaatttttaaaaaatttggcaattgttcagagaatgaatgaatggtttgtctgctgcttttgttcatttcgttctgcaaaagtgcgtttgtctgatgatgttttgttgtgttttgtttggcaaggaaaataaaataattttgggacgataaatcggacatttttggagtgccagtgaatatttcaaatgtgttgaatagtggtgacagagaatcaatcacaggaggaagagaagaaaaggggcaaatgaatgaatgttcaagagtcttgagaaacagcggacaattagagacggaaattcaattttggacatttaaagaaagtctcaaatattggatagaataatcaaaagaaattcaaaaaaattttgggagggggggatggacacgggggagaagaacattggacggaaaacgacaaggagaaagtagggatggacgagagagacagagatagagagggggagagagagagagagaagggagagtgttaaatgaaaggaatggcaagacggagaaacaattaaggagcgaaaaggcaaatccagagaaagaaaaagactgttacagtattattcaaagtgtactgtatgttgtttatttgtgtcctagcgaaactttccaccattttacagtaacagttgtaataaaagtggaattgagtgagtaaaggtagcacaaaaggacaa

SEQ ID NO: 20681 - DNA, 1293 bp, Heterodera glycines
  unsure (1)..(1293): unsure at all n locations
cacccaatgctggacgcggggtgatccaacgcatggtcagctccctgctgaacgcgtcgccgaacagcagcttctgtggcatgcgccttaatgaagtgtgcttcgacaatgcggagttttaattaatggaatggaaaacttccatgaattgtgataccagcgctaaaaaaatcatacaaaaaaagtcactcgataaatgcatatttggccatttttgcgtttttagagcatatttagatcatttttggcaaattttcataagtaaaattcaataaaaacgaaaaacacacccctaagatcgacttttttggaatttaaaaaatatacccttgaaaagcaaaaattttgaatttattgcaaaaacattgaaaaaaaaattgttaatataagaaatgtaatttttgttttagtatataataaaaaattaaaaaatttgaacttgcatatataaatttagaaatcaaaattttttgcaattatctaaaaacgctccttagccatttttaaagccaattctgtatttttacacaattttggccttttttgagggttaaaagccattttgggtcatttttaaggcatattttagtgaatatttgggcattttcctggttttagggcatatttgggggatttttagtggcgcatatttggcattttttaggcatacaaataaccctaataattagtagtgacttttttgtatgattttttttaaatgttaatgaagtgtgttaatataatggatgttagaaaataggaatatgttggttataaaagaaataatatttattagaattttattaaatttatttcgataataatataataaaatgcatataaaggacgcctattaaacccaaggacaaattttcttttataacatttctcgcggcacgaatttgaaattaggaaattaaacatttttttttgcaattttttcgtaacgcatcattgggaaaactttgaaaatttgtaggattgtgctaatattgtgattttaaaatatatttggcgttttgttatttaatttgtttcatttttgttgtgatttttgtgaagtgttggttgttagattaggcagtcgtcagttttcctattgatttgtcttcgccttatttaattttgaaataaataattgtcttcgacattgggctgtgttttggttttgctttgggctgttgtctttgctgtgtgctgtgcaacaacaacattattataagccccctgacacaatcatatctgttttttttacgacttggcgctcctggcaccgggnaatcagcagtggac

SEQ ID NO: 20682 - DNA, 1124 bp, Heterodera glycines
  unsure (1)..(1124): unsure at all n locations
tttttggtcagcggtgtgtcgcttatttcacgtcgnccacactacnaatttcatccctttaatctgatcgttttgggctcgaccaagctgcttcactcgaatttgaaatttgttntgatgtgtcaaagtggggccgtttttttgtttgaattctttcgcttaatgcagatattgcaaaaattcttgtcaaaggacattttcaatccatgctttgtgtttttacaggtgaaaaagattcagtctttccatgattaaagcttcttcaatagaattttcttgagagaagttataaagagcattgaatttagaacctggacctgtactttctggactaaataggaaaaaattaaggtctttcgtgcggaacatttctgaacctggattttttggacaaaaatacaagaaaacccaggtaccaaaaaatggcctgaacctagagctggatatccaggaaaaatccaggcctgggtccaggttggtccagattgaagtttattgattcttattcattaccggttcattatgccatttagatgaccctttttttctttggcatgtttcggacattaacaattcacgttttatttattgagcgactgatggccatcattttcttggacaaatatgaatcttacaagaaaattacattcagcatttgttggtttacttttacggtaaatgaaaaattaattaataaaaaaaattaaatatttcacttggcttttattagaccgttttatgctttttgaatgttctcacaaatggacaatcatggacatcaacaactttaaatttgatcacaatattttttacattttccctgagtctcgtggaatgtattgtaagtaaaattaaaatttttttaattttaaataatttgttgtttcttttttgtttagtttatcgcaatttttggaatttattgcagagaaaaatataaaaagcaaatggaaaatgtacaacaattaaacaattttcttggagcaagataccaggtatattaatattttaatgtttgataaataatttttattagccaaaattttctaattaaaggattaaaaaaaccattaaagtcttatcatagttataaattatgagaaatggcattccgacgccccaaa

SEQ ID NO: 20683 - DNA, 1785 bp, Heterodera glycines
ttttgagcgtaatacgattttacttacaccatttttgctagcttagatcacatgcgattttcggcactctgataattttagcgctcataatgggatgtataaaggcgattgtagaaggaattggaagcgctaaaattgtttgaggagattttttgagcgtaattacgatttttacttacaccattttttgctaggcttagatcacatgcgattttcggcactctgataattttagcgttcataatgggatgtataaaggcgattgtagaaggaattggaagcgctaaaattgtttgaggagctttttgagcgtaattacgatttttacttacaccattttttgctaggcttagatcacatgcgattttcggcactctgataattttagcgctcataatgggatgtataaaggcgattgtagaaggaattggaagcgctaaaattgtttgaggagctttttgagcgtaattacgatttttacttacaccattttttgctaggcttagatcacatgcgattttcggcactctgataattttagcgttcataatgggatgtataaaggcgattgtagaaggaattggaagcgctaaaattgtttgaggagctttttgagcgtaattacgatttttacttacaccattttttgctaggcttagatcacatgcgattttcggcactctgataattttagcgttcataatgggatgtataaaggcgattgtagaaggaattggaagcgctaaaattgtttgagaagctttttgagcgtaattacgatttttacttacaccattttttgctaggcttagatcacatgcgattttcggcactctgataattttagcgctcataatgggatgtataaaggcgattgtagaaggaattggaagcgctaaaattgtttgagaagctttttgagcgtaattacgatttttacttacaagggaacattccgagctgtgagtgggaaaatgcatataagctatataccattggatagagcggggtcgacttgtattgtgaatttttaattttagcggtgcattccgcctgcttcaaaagttacagggcctcgaaaatcgaaaatttggctgtgttttcacatgaagttggtggctcagttggttaaattcctaattttgggggtccgggttcgaatccaacataaaaataaataaatttaattaaatttttaacaaattaaagattttaaaaatacatttttaaatatgaaaaatgcattaaaattatttctttgtttaaaataaatgtggactgtcattgtaaacacgaaaatgataatctcaaacaacatctcgttcgaagtgggatcgaacattattttattgaaaaccattattatttaaataatataaattttacatcaatcacatattttgaaaaaatagaaaaaaatctacacattataatttgggtgagataatggaaccgtctcaaattaaaatctaattagattgttattgtatgtataaagaataaaaaattaaatttaaaagatgatatgagataaatttattattttttatcataagttgtaaaaatcgtatacaaggaaaatattacaatatagcaataagaaaaataccacagattttttaaaaaatattataattgctattgtccttattcatatttgcaaagcgaataactattttggaatcatataaataagattaataaaaaaaatatatgtaaaaagtagctgtctatgtaagagtggtaaataatagttgtggaaaatacaaagatctcatttcgaag

SEQ ID NO: 20684 - DNA, 1337 bp, Heterodera glycines
ccaccagcattccaatcaccggactcaactccccagcatttcaatcaccgagactcaaatctccggcatttcaatcaccgggactcaaatctccggaatttcaatcaccgggctcaattctacggaattgcaatcactgggactcaaatctccggcatttcaatcattgggactcaacccaccagcattacaatcacttgtactcaaactcagcaatccatcggcttctaccgcattacatcactgggactcaattctacgacattccaatcattgagactaaaacctaggcatttaaatcattggactcaaatctccggcatttcaatcaccgggactcaaatctccggcatttcaatcactgggactcagaccaccagcattccaatcgggactcaattctacggcattccaatcacttggactcaaatctccagcattccaatcactgagactcgacccaccagcattccaatcaatgtgactcaattctcatgcaatccaaacacagcgatgcaatccaccagcattccaatcaccggactcaactccccagcatttcaatcaccgagactcaaatctccggcatttcaatcaccgggactcaaatctccggcatttcaatcaccgggctcaattctacggaattgcaatcactgggactcaaatctccggcatttcaatcattgggactcaacccaccagcattacaatcacttgtactcaaactcagcaatccatcggcttctatcgcattacatcactgggactcaattctacgacattccaatcattgagactaaaacctaggcatttcaatcactgggactcagaccaccagcattccaatcactgggactcaaatctccggcatttcaatcactgggactcagaccaccagcattccaatcactgggactcaaatctccagcatttcaatcactggactcaactctccagcatttcatctccgggactcaatctcaccatacgaatgtaaaattgaaaaaatgcaaatgacaaattttttactgatttaaacagaaatcaaaatgaaaacgaatgtacaaactgaccttataccgttatttgtaaatccattttgtaaaattaactcctctgccaatgagaacagtaaataagcgataagtccaaccaataaaaacaacgaatgatccattcaaaatcttttttcaaactcttttcaaatttcaaaacgaattctcgaaccaaaactaagatcaaattctcgagtcaaaattaagaacgcattgagtttgccatattcaaaaacaaagaagaacaaaattaattcataattaatcaaatcaagttaa

SEQ ID NO: 20685 - DNA, 2289 bp, Heterodera glycines
tatttatatgcttctgcatctcttatacattttgctcttatactttttcctatttgaattatatatatctatattttttggattttaatattttattttaaaatgaattttatgtatattttgaatatttgattaacaataaaattgttgtaatttcaatgattaccttagttaaaaaagtttgaataaatttatttaaattaagtggttaaatgatgagatgacatattttttgttttcattttaaaatacttggcgtatgttgccgtagtgtagttaaatccccggattgctgggaatgattttgattgatattcgcaacattactaagtattatttaaataaaatatatgactattattataatattttcatctggttaagataaagtcgggtttaaaatattaaataagaatttcgcaaaataaaaatttatattaatactttttttcgtattttaaaattcttttgtatttaaactttttctttataagttctgtatcaaggttggtggctcctctgttgtttggccgtagtctctataatcgtagtcgtcatccgggataaagatcggggtcaacactgcattcgggtcccagcgtgtcacgatagtttcgtgtgtctcgtgagcagatgagacgggcaaaagactgaggaggtagtagagaaggcatgtttttatataaaactttattttgtagttaaattagataatttttccctaattattgtgagttgctttatattttgggtgttcaattctttaatttttaggagaacatttaaattttatattataattttcttaaaaatcatttaaaataatttattaccagtttttttctatttatttgtattttcttgttaacttcgcactgttgcgaaattccctcgatgaaaaatatgattataatgagtttttgaagttattatcgttaaaagaaaaagccaataaaagcataattaataaaaatttatttttatagtctttgaaaattatcttcatttaattgataagtatatgatataattatatcttttaattctattcgttttttaatgtaaaactgataatttaaaataatttattgaaattctttattcaattataaagtcagtcatttattcctttgtagtatttattattagtaggatattttaatttgtggtttgttttgattgttctactattaattaattaataattttctgataaattttaatgcgaatcttaaaatttattgatgtgggttttcataatggctgatcgctgatctgaaatttcggaccaatcccgcagctaatcgaattcgaacaaaaaattaaaaactcataattttcttataagcaccaattttttaaaaatttttaaacaatctaatccgatttaagccatcattagattacattaatatgcttgcttctaagtgtttaacggcttaacatactgtattttttgttgattatttttaatagaggaaatataattttttaacaaagatttgtaaatattttgataattttttaatagtttttaaatttaaaaaaattactacatgacaaattattttaaaaaatttaaatgttcaaaagaattatttattattagtttaaattaattagatatttttattttgataaatttattaaaataattataaattaacacctctgaagattatggccttgcgcgacagtaatggttttaatttaaatgtttttataattaggtttcattttttaggtattttttcttatatttttggttaattgaattcattaatttctgtgcatgaaaataaaatcaatatgtctccagcaaaaaataaataaaaaatattattttatttaaaaatatcagttcatagccgagtaaatgtttttccaatgttatacaatctgtaacaaaattaaaggtccatgtattttttttgctacttcacctacttcgcttttttcagtctaattgttgtggacatgagcaatgtaattgtccgtgacgaatgattcgatatatttatacagttacaccttaattgcacataaccacaagagctttgatccatataaatttttatttttttattatagaagtttatatttggaacgctacataagatacatactctctaacaccagttagacaaataaataataatttcatttcaaatatacttttagttttggacggtttaaaagacagaggattaacacttccaatcagggctgcacgcaattgcggattgcggattaaaattacggaaattgcggggttttggacccccgtaa

SEQ ID NO: 20686 - DNA, 1466 bp, Heterodera glycines
ttgttaatttcgggattagttcgtttccccttccttttccccctccccgccgaaaattaaaaaaaattatatcaaacacagaaatttttcaaaaattaagtaaatgtttttgcatgttttgaaacaaacaaaaatgaaaaaggacaacaaacgtgaaacttttggaggacatgagtcgaacagagagcgcaatccacatggccgagtagtaagtgatcatctgcgcaacgcgagctcgccgttccgtgatcaccatctccacgttgggctgtgtcctgttgcttacctggtgggaaaattaaaaatggaggcatttaagacagcaattaaggcattaattgccgtttccagccctggcatgccatgcctaccgtgatggacataagttgtggcaccgtgttcatcagctctttgatggtgtgcgcgagacggagacggacgagcagccgactgcgcagcgcaattgcggtcaaattgatggtgaacgaagaattgagcagaggagagttacaactgtgcacttaaaaaattggcaaataacggaccaaggggttcatactgttgaaaatttggtaagcaatgaattaataataaaaatcgtgtgaaatttaaaaaaaaattttggagattttttgtgtgccacttttttttatacaaacgtttggcattttgtctgggagaacaatgctcggcaaatgtgttgatgagctcgcaaagttcgtccgtgtgtttgctgaccacgtcaagcgttttcgtgcagtccgtcacgtgggatttctgttaaattggaatgattgatataaacatttagtgaattttgcataaatgataaagttttaaaattaaaattagccatctttttcgccctcctcctcctcccaccggtattttagaccttaccaagttgggcttcacaagatcgaacaaagcacggacaaccgggtcatttgggttggaaattgtacgcagttgagcatccggcggggaatatatggtgaaacgacactgaaatatcacttttaggtattgtaatgtgttgttgcctaatgcctaatgaacaagaaacacgtacgtccccctaagagtcaatttaatttttttttaatggatcgacaaaatttacttactcaaatcagcgagtaactcgaagcccaaaaaactatgcaattgacgctcatttaccgtttgaatgacgccaaccagcccaggcactgcagctgtccaaatggcgaccggcttcagctgctcctcctgcagctggttgcacgacttcaacaagttggtccaaaacttttcatacactgccgcacgcgacgtgccaccagcaccgccaccttgtcaataattagtgtaattttatttggactaaatggctgtacaacttcaacttcatgtacctagtttgggggacagtaaaaaatgtttgcaatttataacagattaattaataaagttcatggtcaaca

SEQ ID NO: 20687 - DNA, 1526 bp, Heterodera glycines
  unsure (1)..(1526): unsure at all n locations
tgtataaacgccaaatttgttaaacgactatgaatctcccgttatacttgtctggatgacaaatagtcgtccaaaaaacggctcagcccgacccaattgtcatgctcaagaggtggtcgaattgtttgtttgcaaacaatctgaaaagggaaaaaccaattttggatgagttacaaaaacccaaaatttgtataaaacatttattttataaacccaaaaaattgttaccattttgacacgttattagattattttttggtgtttaattgccaaaaccatggatggccaataggaaatttgatgaaatttataactgttttcaaataatattcaagttttgaacaaaaaaacaagacctgaaccgctcgcaccacaacatcaaaggcgtaggaattgccgtcaaagatgcgggtgcgcaccgcctccaagtccgggtagtggaacagcagcgagtccaccgctgtgccgcttgaggtcgccgctcgtacgccctcccacatggtcgacgatgtttgcaaatggtgatgcctgtgtccagtggcggcgctgtcgccgacttggtcaagcagttcaaactcgcacattttcagtgcgtacggttgtccgtccgattccttgcaaattgggaatttttataatagcatttaattgggaatttataaaattttctataatttaaaaatccgtgcacgaaaccaacctgtttttaatagaaaatccaaaacccatgaactttttttcgacgaaccggtcaaaaacccgacccgtcctttttctttaacacagacaaactcaaattcacattttacgactctaaacagtttcaatagtgaacctcggcttggtcgtcctccaattccgacccttcaccggaagtttcgttgacaacggcccaaagactgcactttctgcccccggcaatcagagtggaggagcaggcgaagtcaatcacgtaaatctgtgcaattatttgtatttgtcattttttgtcgagaaaaaacagttattacattgtccaatgttgtgtaaaagagtttaatcagtttgccagccaattgtttaagcacagtgaactgaaaagtgcaaaaaaatatgtacaaaatgatggtacgcaaattccatcaaaattttcagtcaagttttgcttttcattgtctcttcctccgaaaagaatttttaaattaaattcaaataaatttgaaaaggtttagcctcctcccgtccctcccacctgatttcggtccgcaagcagcacacggacgagcagaaagtgagctctttgaccagtaactggacaccccttcagctgcacatccactggcggtggctcggccggatgggccacaacgaggctggccaagtcaatggacatcagtggggcagatgaagcggaggcagcggtgccgggctggacgcaagagccgctggcaaatgcacggattttggcatcacgaaaagcactaaaaatcttaaaattaagagaaaatgaatgatccatgataaatccaagaaatagnnataaataa

SEQ ID NO: 20688 - DNA, 2681 bp, Heterodera glycines
  unsure (1)..(2681): unsure at all n locations
ccaaatatgcagagaaaattatttaattcaattgttcttcatgacaattcaattcatatggtgaaaactttaaatttacttttttcccaaattgactcgataaacaattttcgttgttttggggagggcaatctgacgattggtactccaatttactgtcgagaacatgactgttttaaaaataattcattcaaacaaatatatggaacaaaattttgcttttacgatccatacgaaaagatttaccttgtgaaatctgacgaagaattaattcaaatcaaagcatggggaactattgaaaaagttttttacttgccaaataatttaaatcaatcatttattgaaaatagacggaataaaagagaagaaaactcttcaatcaatgaagaagcaaccattgagtgtttaaaaggaggcattattattaaagcaataaatgatatacaagaattacaaatttccattgaaaattatacaattataaaaaagaacccccaaaaagaggaaataatttatttacccccaaaacttacatcctttgaatataaacctgtaattaaatttataagtaacccagataaatcaaatgagaaacaaatcacatgtcaatcatctcccgtatgcgaattaattaactgtcgattttgtatggaatatcttaaaagcccacaatgtgtagaccagattcactgggcattaatgcttgtaattataatgataattttatatgttatttcattaagcctccaaattattcgaatactcacacgttttatccattggattttacaatttatttttaattgttttaaaagaaaacccaaagtaaatcgaattagaatttcaagaccaaagttaaaaagaccattgatttatttaatcacttccagtttaattttattcaaaatgatttttgcttgtgatgaagtgacaaatttagtcgctggaacaaatgactgtgctgtaactcaagaaggaaaaattgaatgttcttatgaccaaacaacccaactctctattacacctgaacacctaacctgcctaaaactcgacaatacaaaaactaacaccactatggaaacactacaaattacaatagaaactttaacaataatttgcaccgaaaaatctgattattttacgagaggttacgaattatcttcgacatcacaaaaaagatgctcaggcgctgggaaatgtaccggccaaacttgtcaatcagtaaaaatgtcagaccggaatcccgaagtgaatgatcacgctaataatcaaccaggttattcatactgtgtaccatcgtgcggaggatggcattgtcaatgtttcctcgcaactgatggatgtctattttacagaacttatgccgaatcagttggtgacgaaattttcgaagttgttaactgtccatcttggaccattcaagcgagaattaaattgtctatcaatccagaattaacctattctgttaacttgaaacccggaattttaacacacattggtgacgagtctaatagttctatatctgtcacactgacttcgacttcaattccaccgacgccgttatttggttcgacatttattatagttcgcgaagaattaaaagcagcaatagttgcgaacgaaaatttactcaaaaatatattacggtgtaaaaacaaagaagaagcgcaaagttttagttgcacttttccaccagaagcatgtcaatgccacggaggtgattccgttgtacattgtgaatgcgaaaaaagtccacttaccgaaatatttgctaggcaagagaaccttttacccattaaaacacagggaagttacgtatacttcgattcccaaattaaagctaaaatacagcaaacaacttctcttcaaatgcaagtcacacttaaaggacataaggttaaagctatttatgataaaaatatttgtaatattgttacaatatcattggaaggatgttattcctgtactagtggtgctaattggactctatcatgcaaaacaaattttggtaccgcattagccaatgtggaatgtccaagtcaaaaggtccaagtgaattgtgataaagaaggaaaagaacaacaaatccaacttgcatataataagcaaaatattacagaaaattgtgaagttatatgtcccgatggcaagtctgaaattactttaaaagctaatttggaatacatatcacaacaagatactaaaattattcccgctaacaatactaatgaaaaccccatcatcggaacttccttggaccaagtaattgatataataaattttgtttacactcttattaaaactaattttttcaccatatttattattatcatattcatacttattctattttttctaattccatgtctactacctattatatatagaattatgtgtgcttgccttcctcgttcgcgtgggagtgtcgcgacagcgcgaaatcctaaaataaagaagggaaaaaataaaaaacactaaaaaaataaaatggggaaaaacaaaacataaataataaaaaataatttttcatttttaatttggaaaaacatattagaaaaaactatcaaaaatataattataaaaaatgaatgaaatgaataacggaaaattgtttgaaaaggaaaagtgcattccctcaggaatgaaaggaacganaattaattaatattanattgcgaatt

SEQ ID NO: 20689 - DNA, 1856 bp, Heterodera glycines
  unsure (1)..(1856): unsure at all n locations
caattgcctatctccaaaccctctgttttcgacaacataatcgtcattaaaaataaaaatatttatttcctaaaatccaatcactgaattggaactaattaaatttaatgaatccaatttgcaatgattgttttgtgcagaagtgacgtggcagtgattgcgcctttttctcttttcccgtcgccattccctcgccatgcttttgagcacgctttggccgtgcaaaaggtgggcaaaattggaaacacaaaaattaaacggaaatgtcccgaaaaaggcgctgaatttgctgtactttcgcgtcgccacggacattgactttttggagagagcgtacagcgatctgatcaaaacggacgaaaatttcagcaatacgatggacgtgctcagaacggtgcgcgaggagggcatcagacagcccattacggtgatgtaccaacgcgcggtgcgtttttgaaaagaaatttagaaatgtcaaaggcaattagagcaaatgagagaattcccctgccattaattaattaattaaggattacatgttaaatatcgttggtggccaagatgaagcagagccaaactacgaaattaaacaggcaaagaaggaaataataaaatttttaatgaataattcatagttggaagtgaactgcggttcggttgccggcacaagtttggaccgacggacagctcagcttaaccatgtgatgctgcaaagggccggttttcagccggcccccgaagatttgcctgaaaattggccagacaaagcgcaaatcgaatcaatcaaaatggcatggtgagaaagtgaatataaaaaattatatttgaaattgaatcaaattaattattttccatttgtatagggaagcctataacaaatccgatgcaattgtggtgattttgatcaacgaaatctcggagactattttcgatgcaaatttcttcgagactgagttggaccgactctcaaatggacgcattaaagtcgaacggattacattgaatgattgtgtacacaggtgggaagtcggcttaattaaaaattaaaaaacaattagcaattatggatttggaatagagctgggatttttatttttatataaaaaactcatggccacaaaaaatgttggtttttgtaactcagttcaggcctaacagttaatttcttcataatgatagacctaatccaacgtatttttgtgtaaaatttcgactgtttctgttatattaaaattttccatggccgtgagttctctccctaaaaatattcgccctaattatgagtatcgcatttttaattatgcaaatttttcaaaagatgtaaattggatgaaaatttcgcactgcgtttggacggtcgcgaagtggcggtggttaagtcgcgctattccgtgcttggattaagagtcaggggcagcgaattgaacatattgaaaaatttgcggttgatgctcgaacgatcactcgcaatcgtaagaaaaataaattcgaattttatttttcccatttattcaaatgttttttcttccgtttagaaaattccgtcgactttcattggctttagctgctcaaagaaagtgcaacaggcaatgcttttctcataatttaattccatttaaaataagccatttcgaagttcagcttcttgccgagcccggcgaattggagcatttcttcccggaggaaagtgacgcggaaatggtaaaagcgattcggaaaacatttgccggaatgtggtcattggagaacacagacgagaacaccgaaaaaannntcccggcnctcnttccaatatacnaataatataaggaattttggtttaaaattctctaaaaatttaatgacgcgactctaga

SEQ ID NO: 20690 - DNA, 1148 bp, Heterodera glycines
  unsure (1)..(1148): unsure at all n locations
aaaaatttaatgacgcgaaanaatattttgaaagcaattctctaaaaattcatttaatttgagttaaggatgccattaaccatcctgaaaattacgtgctcaaatcgaacatggaatgtggcggcaacaactatttcgatgaaaaaattccgataaaattaacgggaattactccgactgaacgttcgttccacattttgatgcagaaattgcgaccgatgccaattaaggcatctttttgaattttgaatttttattttggaaagaaattgccttttttatgataaatttgttttaattttagaacgttatggttcatccaaacactagaccgaaaattaacgaaatggtcagcgagttggccgtgtacggagttctcattggcaacatgaccactggagcggtgagtttattcggaaaaagagtgcttaatccattaaagtgtccgaggcttttaattattattagtaaaatgattatttattcaatcaaataaaagtgccgttgttttgcaggtgtcgcacaatgtgcagcagggccacctgctgaagaccaaattggccactgccaacgaaggcggcatttccacggggtcggcggtgcacgactctccaattctgttctgagcaatggcaaattgaagaagaaaaacaaacatttgcgattttcgaattacatatatagaataggctattattttgtttggttttcaatgaatttatccatttgcattttgctatattttgggaaaaagtgaaataaattaataaatgtttcttttctctttttttaactaatttaattacatttaaaaaattaaaattaattgtgttttttgaatttatcgaatattttgtcaaaatattcgattattaactaatttccaaaaggaaggccacataatgcgatcgtacgcattggccattttttcttttgtttattcccatttttgtcatattaattaatttgcagaatatcagtttcatattccatctgcactttaatacatttattcctttgagttaaataatagcacagagatgtgaataaatgtgattaaatgaagcatatcaaataaaggtaatagttacgatggtttttgttaaaaagctnttatttgaatacacggaaacgaactgaaaatcaca

SEQ ID NO: 20691 - DNA, 2676 bp, Heterodera glycines
ctagagtcggacgaagtggagaaataaataaaacaaaaatggaaaagcattacaaaaaatggcaaaaagggaataactcttgtaaattttgtaaaaattattattaatttttaaatttgtttgattttgattgatccatgcaacacaaaaatcgaagaattgtgcagcgaaatgcggaagaatgttcaaaaattgtcggatttgaagtggacaaaaaaaacggacggaccggcggaaaaaccaccggagggaataattgcgaagcgaaaaacgggaaatgggaacaaattcatccattcattcactatttggggctgatcagcagaagcggaccaaccttgggctgaaatcggcagaaactcatttttgatgcccttgggatgacacaaattgtgattaaaaagacgatgcgatgcgatgcgatgttgatacgaccgtgggatgattgatcactcagtgatcagtgatcagtggtttgatcagttgtgatcactgcgggagaagctatttaatacttgggtagccatcattctgtgaaatgtgattgcgatgttttcgaattgatcaaacaaatttcaattaaactttattttcctatttaattgcccttttcccacgtcgcttttctcttgggcgtttgtttttcttccatttcaccattatgctgtaaaattcattttttcattataatctctccgtcaatcttttcccaatccatgcccctctccctccccctaaaatcatcaaattgccctttttctttctcattagtctctcactagttgattaattagtgccttgggcatgtttaatgactctctcctgatcactcgttgttctttcttcccctcgctctcttctcttcccgttctcttttcatttgtcctccgtcgatctgtgcgcaaaaataaatcagtgaaaattcttccgccaaaatcgatcagagcgaaggacggacggacggacgtggtcagttcagtcagtcagcaacaaccatttgcacatttattatgacgaactctgtcccttccttttgcctctttatgggcgccgaaaattttaaattttaggaattaaatcaaaaatttttgcctaattattaattgctttttaaatttgggttggattcgatgcgataaatgatgaacctcttcgttgcttccaaacggatgagagagtctttaaatgagtctctaaggcttttttaaaatattcttttatttttttcgattttttaccaacaaattttatcggggaaccgcgattttcctctccccgaaggtcggggagcaatattgtttttaattatttttagcttttttcgttaattatgcgccgtcgtccgtttctttcgcttttcattttattcctttctctgcgctttacgccaattttggcacacactgacaatgaaaatgccgaagaagcagagaacagcaacaaagttgagcccgaaaggccaaaaagtgacgtagaaggggaaatatccaaagacccctcaggcggtaaatttaaatcaaaattatttatttatttgaaaatgattaaattggtaggttttggcactgacattgagtgggtgccgtgggatcaagcagtttcggtggcgcttgacttgaatcggccaatttttctgctcattcacaaaacgtggtgcggtgcatgcgatggtaaaaattataattaaactttgccctaaaaccaattttaatttactgtttcaataaaaagttggcacttttctctgccaatccaacaaattgatcaaattgatcactttgcgaatggtcctttgatcactgatcatttattattttatttaaaattcgcgtcacttcactctgatcattaaaatgccgaaaagcgaaacgattgtttggttttgttcagcgctcaaaaagagttttgccacctctccaaaacggaaggaactgttggagctgagcaagcagttcgtgatggtgaacacggaggacgaggaggagccggaggaggaggagtacgcgccggacggacggtacatcccgagactgttcattctgagtgagtggaaaatgtgccgttgctgaaccactggcggttgattagggcactttgtcggtttcgggactcgaaaagaaacggcactctcgagacaaaaaaagagctaatgcaagctcaactaatcaattttttttttatttagcccctctccaattgattttaattttaattaaaattatattgaatttagataaacatggcaaacgccttccggtggataataagaagaactatccgagtaacgtggcctacttcccgcagggtaattattttgttagtctaaacatttgtaagcattcgactaattaagtgccggatgtgatcagagcgatgaaagagggcacggaagagtttgagaaggagcagaaggggacagagagaacggaagagggagagagtgtggagggaaaagagaaaagggagaaggaggaggagggaaaaaagaaaaagaaagacgcagagagtgtgacagaaaaggtggacagagaaacatagaaattatatttggattttttattcatttttagaaaacagccaaatcggagaaaaaggcgaaaaaggaagagccaaaagcggaggacgaagtgggcaaaggcggatgtccacacgcggcaggaaaagctgcggcaaagt

SEQ ID NO: 20692 - DNA, 1198 bp, Heterodera glycines
gtgcacccatttggacaatgcttgtccagcagaaattgttgcatttggcacatcaaaatcatcaccaaacgcagcgggcgacagaccatgtgaatagattgaagtcaattggttgagatcagcgagaattgttggagaaatgagacgacgcaaattgtccaaatgctcagcatttgaaatggtcaaatgaccaatgtttggcgcaaaaatgggccaaatttcacgaacaaaaatgtcccaaattggttggccattcgtggtatgtgaaggaagccacaaatataaattgatgcctcttttgtcgaaaatttgatgatttgaacgaagaaaagcgatgacggagtgatcaatgtaactgaaaatgaaataaatgcttttattgtcatagctctgctttttaagtactcaatctgaatagaatcaaagcgaattttgctgggcaacggacggtcgggcaatggaaattccacaaatttgtcaccaatttgtacataaagtttcggttttgttccaatgtccttgctaatttcgattggtctccaaattgtcaattcgcttttgccattgaaatgtttgtccacaagcgcatcaaaacgtggcgaaagaagtgccaatttgaggccgagttgaggacggtcaaaagaggggaaaatgtccatccaaacgtcgttgcaaatccaactgaaattatggaaaaacagtttagttaaataaatgatgaatttgtgtgactattaaaattcttttaccgtcggttcattttttggtaattagcacaatttggccgagttccgaatgaggtcaaacaaatagcagaataattaattaattgcgttggataaaacctggtttttagggttttcctatttttttacggattgtatttgatgaagaagcaccaaaatcacatttaacgaattttttccaaaaaatggaaaatttttgacagaaaattattcataacttcacccaaaatgaaaccaaattttaaaatattgatatcattcaataggcccaaccgttttttattagcctataaagtttcaaaaagttacgttaagtttcaaaaaagttataacttgagaagctcaaaaaaccaagttttttacaacatttttggtcataactttcttgaaacttaacgaaacctttttgaaggcacgatgacatttcgcctactaagccaagatctgacatt

SEQ ID NO: 20693 - DNA, 3688 bp, Heterodera glycines
  unsure (1)..(3688): unsure at all n locations
ttattttctaaagagatttcacccaaaaaatntatgaatttccgtgaaattcttatttatttttttatatnttgtcaaaaatattttgaaaaatatttacttttcattatttagtcaagaaaaattaaatttttntaatttcaacgaaaggaaaattgtttttaaattttgccaatgatgaccaatttttatgggtacttttgtttaaaaaaccctattaatcacaaaaaaaaaattaattaaaaaagaagtcaaccaggatagaactgttgacaaaagtagtgtttagtgttaacgcactaaccactactccactactacatatgaacgaataaaagcaaatttctttatttaaaaaatttggcaaaatggttaaaaaaattcaaatttgtataatttattgctaattccatttagcactttttattactatttgctatagaattttgctgatcatttaaaaaataattcattgcttcatcattattgtgaaattttttatgaatttttttgaaattttgccatttttatctttttcaaaactttaatcacttttttctgatcaattttggcgactgcactaaaaaagccgaaaatttaaaatataaaaataactctgcccaaaaagataaaagtggattaaatgatctgtgagcagccacagttcagaatgtccccttgccaatgtatagaaaattgtttaaacgccagaaaggaatttattttgcctgctaattcaaaaaagacggttatgactgccttttttaggcggcttatttcaatagaaataattgcttaacctataattaatatcaattcattttgttataatttaaagtctaggcagaagttttcgttaatgcaaaaaaaaaaaattcgacgattctaaaagtctaagtgatttgtacttaaaataaaattttagcatttgctgtaaatttcttgtataaatatgaaagttgttttaagcccaagtgccgagataaaaatgccaattttttgcggacatttagacaactagagacctcgccagctgccatttcgccaaatgaaatttaaccaatttagacaaatttggacgtatcaccaactcattcaacattggatatttcgcaaactaagccaaatttggacgtttatacaaactgacatttcaccaacagaagaatcgtacgcggtagtcctttataggttagagacgataataattctatatggaaaataaattataaattaccaaaaaaactgattttttatgagatatttccttagtttcagatttttatgctaattggaatagaaaaaccatgaatttgatatcaattttactcattagcacagagctcccaagtttttttttcaaaataaggacagatgaggctaaaagtaagattcggactccaaaaataagatttttctaaaactaatagtagcgtgaagtaaacgcaataaaaacatgaaaaattgacttaaaacaatatttattaacgtaaaaaccggagctgccaattgagaattttcaaaatcagcattggccgataaaaaatcatcatttggagtcaaaaaccaactttttggaaagttttattcaaaatgaaaaaaatcaaaaaatgtttttttttcgcggcgcgcgttttccaaaaaactttttgggacaggaagggtgggtccggcggtgccgataggcgccgccgagaaaattttttgaaaatttacttcggatttgttaacagaatttgtcaaaaatgaccaatttttgagattttgagcttatttgtttatgaataaataagttttgggggcccggcggtgccgataggcgctgccggaggaaaaatagaaatattgacagttttttaacagattttcattgaaattttgggcattaactcaagaaatgaaaaaatttaaatagaaatcattcaaatactcgcttcaaaaaaaatatgtaattcaaaaatattcactttttgaatttttattttcaaatccatgaataagcacaaaacaagggaggtcgtgccaaaataaggacaaatcttacaaataaggacacttgggagctctgcattagcacaatgtccggtgatgaattcgaaataaaactttttgtaagaaactcaacttgacaagaaacatggaaatggtcaattccgtaaattcaatgattccaaactttcaaaagttcttttcttcttttttgttctttttcgctttgtcctgtttcgttttggcatattgttcagggtgttcttttttcaaatgtgcccataaagctgaagttgaactttgctcagaaagtttaatttttgttgagcaataatggcatatgtttttcattaaagtgcgattttgcgtaaaatgttcccaaatttcgctaacttttgactaaatttgatgttaaatttagttttaaaaagtaaagctctaattactaataggatattactcgaattaataagattttataaatcgtgcgaggtgatatttaatttcgccaacggtaagaaatgactaaacaaaaacataatattgctcaaaggcagcggttctttatttatattaaatttcaaaaaagaattaataaaatttagatttctccattttttggactttgataaaacttcgttatctcaaaatattccctattaatatataaaatttaaaataaatttcaatcaaaattctgaaatagtttgattatacgaaaaaaatttgtacgcacattattggatttgtttcttttgactgtttctttgttttgtccaacaatatcttttataaatttatttatgcaaaaaaagaaaaaagtccacaaaagggagtaatccacttactctgcggacgtgtcatagattaaatcgtcctcgagtaatatggattaaaaattaaacaaaaaaaagaaatcacaacaaaattaaatataagaatgaggtcaatgattaataaaaccaaatcactatataaaatatataatatctttaattaaagagataattcacttttccggtcattttatacgttaaggagtttaattttagttttaaattgacaaaaaacgaattaatgagcaatttgtgaaagtgaaacgaatgaacaaaaagtaaaaaatggattttaaatttgataaattatggcgttaaaccatttgtttgaattgaacagaatcatttcacttgctaaattaaccaataaaaattgatcaacaaatttgacaatcgcatctcaatttaaaaaacataatatcaaaaccacattgcgcctgaggctttaaatgccgatatgtcttcgtcttcttaatacaggctaattaagttctgctgtcctcaaattgcccttaattggcctccctctcccacttggcccatttgctctaattacatccaatccgcgaattgacgagcataaagcgcttctcggaaacttccatcagttaatgttccctggttaatccatttaagcaatgatnactttttttcggttccacttagcacctatgtttttacaatgtcatttttaatgaattcgaataagtttattcgaatgaatccttgctaattgcttctaattatttaaatttcctaatgattatcttggaagggccatatttattanacggcatttcaaagaacagtgaaaaatgacatagttagaacagctaaaaacaaacaaaaaactttggcattct

SEQ ID NO: 20694 - DNA, 2351 bp, Heterodera glycines
cgtctataaattctactattatctataaattctaatactatctataattcaaatattatctttaaattctaatttataccgtctatgatcgactataaattctaatattaaaccgtctataatttaatattatatcttctataaattcaaatattaaaccgtctataatttaatattatatgttctataaattctaatattaaaccgtctataatttaatattatatcctctgtaaattctagtattataccgtctatacgtcctacaattatctataattctaatattatctataaattctaatttataccgtctatgatcgactataaattctactattatctataattttaatatgatctataattcaaatattatctttaaattctaatttataccgtctatgatcgactataaattctaatattaaaccgtctataatttaatattatatcttctataaattcaaatattaaaccgtctataattaaatattatatcttctataaattctagtattatacctatacgttctacaattatctataattataatattatctttaaattctaatttataccgcctatgctcgtctataaattctaatatgatctataattctaatattatctttaaattctatataccgataacttctataagttatttagtataattgtattttttttaaatttaatattatatttatatagcagcttggacaatattaataatttattattgtttgtataatattcttatattaaaccgtctaattgaaacggaaaaagtttttctcatttcaaatatcaaaagtttttatcggatttgaaaaaaaaaattaacagcaagccgaggcttagcaagaggattttctatgaatttatttaaaattatatgcattcactcagagatgaatagcccgagagagatgccgtgccaaatcaaatgaattggcaaagagtgattgtagtgggggtgccaaatgtggggcttactaacacaattttgaaggggaggggcgaattggtggccaaaaaatccattaattgtagggccaaaatcaatgaatggattaataataataatgtaattgccaccaaaaaaagctattattagcatttccaaatgccattgaattataatataaaatatttttgtttgattatattaaataatgtttaatacagaaatgttgaatgaattgtgagttagcaaatgggttttaacctaagaaaaaatgaaataaattgcaaacatgaacaaaaactttgccaaaaattaataaaatcctaaatttgaaaattaaaaaaaaaatgccgttttatatgattaccccgaccccgactcgggatgacgagttcgggatcggggggtgcggagagtctgggtcggggtataccatgaaaaatggcataaattttcggggtcggaatccgggttttttaattgcaaaatttttatggacctcggaatccaaaatccaaattacatccatggaaatcccaatatatataatatataaatattttttaatataatatgtattaaatataaaattaattataattttttgaaataattaaacttgatattaataaataaaaataatggattttatatcttttaaatgacattttttatttatttttattacatttcaaccaaatcaattagggcacaaatggactttttccaatgttgaatttgtcggcattttttcggctgaccattgccatcacattcaattcttgtctctccccttaagggcacttcatttgcccatttgtttgtgaaaggcaaataattattgccaaaagcacacaaattttgaaattttgtgccattgggggagtgattatttgccctcgggcatttctttcggctcttttttgtttgtccaccatttgtacatttgtccgccgtgccaatgccaaaaaaatggccagcaaaaagtcaaattgtttcaatttcttttaaaaattatttttatcgcatccatttaatggaggaatcgattttcctatgggtttttcgtttacctaactttgtcatggctgatgtcggacgagcacttagaaaatcagtaatcccaactacgggtcggggtcgttttcgcgtggggcgagtttttgaactataacttttttctttgtcaaccaaatccaaaaatcttggtatcattcgatagccctaagtgttctctattagcctacaaaatttggaaaaatttcgttaaggtccaaaaaagttatggtcagaagagttcaacaaaccaaattttccaactttttggctcgaactttttttaggctgaacgaaattttttgaaattttgcaggctaatag

SEQ ID NO: 20695 - DNA, 2529 bp, Heterodera glycines
gggctccctatcatttcgtcactgatcgtttcgttactgttcagttagtcactgagaaaatttttttttaatttgtttgtcagtttgtcaaaactcaaaataagctttactttattttaataaacaaagctgtcaagttagctccttcaaaaaaatttttttaaacccaaaatccatcgtttaacctgccaaaaaatttcttacaaaaatgttattttttggcaaaatttgtgataaaatcgcttcaaaaatcacattttttagaaaagcagtgccgcgaagaggacgatgtgcgggatcgtgctggtcgagagtttcggtctcgactcgagaaaaatcgcgggtttttcctcgagtcttggggtgaaatctcggtgtcgagtaacgggaaatttttggtctctagcagcactagtgcggtgggcctcgcaaaacggtcagaaacggtcgtcgtaaaaatcatctcaatcagtgttgtgattgggatatagtagtccagttggccaagtggactatttcccaataacaaaaggaatttcaagtcgattcctcctggcggtgtgattaattattcagaattctacaatgccgccacggaaacagttaatgccgataaacaccagagtagtgtgtaaaggggggcaagtagatgcgtaacctcataggcactaaaagtcgaacctactacgtaggtaacctatcctgaagacacatcaaaatatggataaatccgatttatttaagggttatcttttttgattagccaattgtttgaaaatgtctgcctttttgattagttttcccggtttgttctgataaaggcgatcgtttgtcaagtcgccgtcggcgcaaaaaacgccaatttcccttgacgattgtcggagtgctcgtcgcaatggccgtcctcgtcataattctgtactttgtctgttccggacagtgcagctattcgtccggcgaaaagtatgccgacatagacggggacatcgaagcgggcacagcccacggcccacactggcccagcgaaatccgtgtcaaattccgttacggaagcaaagacagggacctggaggaaaatcggaaaacggaccacgtttatatcgtagtcggaaaatacggtagggggaggttcggttaactctattagtgagcggaagttaagtttttttccgattaggataaaattcggtaattaattctaccgatttttcatacctgtcagaaaatccgagaaatgatagatattatgccaaaatatattttcctttttttcgttattcaaaagtttctaatttttagaatacgaccacacaacaggtggagctcgagctcgaaacaagtgcgatttgaaataatttcatttttcaattatttgttgtaaatatttagaaattgacgcaaaaatttcccaacaaaaacattttccttcaccccaaggctccatgttgacggtgatttgaaaagagttagccaaattttaaaagggatggctaatggtaaatggtccaatggaagtttggactcatttcgtctgtgcctcgactttgcctaccaatttgtgtgcctgttgagaaatggggagtaagtaaaataaataaataaagaaatcggtatttacgaggccccaaatatgccagaattccttaaaaattattcaaaagggatgctatgtcgtttcgtaaaatcctccattttaactatttttggacaaaacatggcattactttgcaaaaaaacaatcaaatttcaaattcttggtatcattcgatagccaagctttttctctataagtttgcaaaatttaaaaaaatttggtcaatattagaaaaagttgtttgaaaataagtactatttctgccataacttatgttaactttgataatttgctatgcaaaatttggttacttttagcaaagttatgacatgttttgtcgaaaaaatcgccaaaatggcggattttacgaaatgacccagcacgcagaaaaggcaaaactagcagccatggcattaagaaccatatttttgccgatctatcaaaattgaaaagaaagcgattgcatttttattttttgctatgaattgccattttgcacaaaacaaaatcaatgttattgttttgtaaaaattaaaaacactttaaaaggtgtccactaaaagaacaatggccagaggctttcattgatttcgaccggcgatgggtaagaaaagtaaacgatcgtttgccagtgtacgacaagcgctaccgtaactcggcacaaaattctgaactgtcacggggcacaacggaggtggccaatgaaatgccggaaacggccagcgccacagtgccaacatggctgaccatggcggaggtggacgtacccgtggagtttggcaggttattttgaggatgaatggtcataatcagtgatggatatgattgattgatcatttgttgaattttcagagccattttaagattcttttataacttttactgaacattctacggaaattatcaaatcattgggttttatttgtcctctttta

SEQ ID NO: 20696 - DNA, 2309 bp, Heterodera glycines
  unsure (1)..(2309): unsure at all n locations
tatantggaatacaacaaaaacatatgtaattaagttggattatatacttaaaagttaacaaacttttttgcctttcccccacaaaaatgccattcatacattggtgatgtgtaaatctttcacctttcaaatgtacaacgaaatatttcgctatttttaaaaacaaaaacatattttttggaatgtatagataaaatcacagcgtaatttaattaaattgtttttaattttcaatttttttatttattttcaaagtgcacaaattagagacaaagcgtaagccaacgaccatttgttaaaggcatttctacaaagacttttctgtcaaacggaccaattcattttttcgaaaaaactttcgaatcactcactaattttcaaggtttaggaaatcaggaatatttcagaattgaaaaccaatcatatttgtacagacttttttccaggcaaaattacacaataacttaaaactctaagacatttttccaccattaattaattataccaattattctgcgtgtctttataaaacaagcatatctagcattgcaattgttgttaattaaacgcaatgtaactcttcagcaacggtaagtttaccatttgtcatgatggatacctttatttatggttaattgaccaaaaataaaaacatagtaaaataatgcaaacaaagtttaatagtaatctaaatcaaataacaaaacaagatttcatcatctccccttttcagttactatatgtccttgcgctttttacccagtggaattcgttttgattaaaattgtcggattcactgccgaagacgttgctaaaataaataaatcaacaatgcacgaattgataaaatcccagttaaaaagtaagacaactagctgaaaagctaattcgaactggaaaaagggcacaatcccaagatggcactgcgcgcgctatcaaacgccgctttctcagaaattggagccctaacccaaatgccaccagtctcgagaaaatttcggcagaagtaccggcatcatcagttgcggctccacccatttcagtgccgccgccattcgctgtgccgtcgttttcgtcatttttgctgctgctgcactgtgtgttctgttcactttggcatttcttcccctcctcctcttcttttgctgtgccttcgccatgactttgtgccaacattttcaatgatcgctttcgttccgtgttgcgctggcgacggtaatccttcgcctgctcactgctcaacggcaccgaatggttgtgggagttgcgacagtaaagcatgttccttccaatcaaatgcataactttgaatggacaactgatcggccaaaggcgatatcggcacctgacaatgaggaaaaataagggaaaaaattcgaaaagccaaaagcatttgggaaggaagggacagagggggtaatggggggggggggtaattaccacaaattaaacgcagtaatttagaaaatgtttataactgcttgaaattgagagaggagcagtgcgtgcacttggaatggtttttgaaaatcgaaaaaaactacaaatcaaaattatcaagaaaaaaaagtgagaggagcccgaaaaacttttgttgcgtttcatggcattttttgggccaacaaataaatattttgagggtatttcagggtcaaaagttttgactctcgaattgtctgatggcaccgcccccactccaaaaccggcgaacaaccaccgaccgacccaccaataggtaacgcgcgacccatcctgggcagaccacaaccggttcacacaatactgacgacgaaagcccagcacagtggcattgctggcgtcgggaaggttggccagccaaagccacggtctgtcgcaaaggtcgacgaccaccggcggcggcggcacgaaagacgacgagcacagctcagaaaagttcatgtggtattgaccaccaccagcagcagcaggaggaagaggaggggcggaaaatggactaaaacggaaaatggacggactgaaaaagtttatttattttttgtacagtcggagagagttgggaaatttgggagaaggctcaaaatagaaaattggcactttgctaaacacccttttctctttcttattaaattcacgaaaaaatacctaaataaaagttaatacattcacaaaataatttgtactccttgaacatgtgtgtttatactattggcaaaaatggtagtttttgtaatttcatatcaatttgcccngccattgcctgtcggtgcaacttgttcaatggatttatgggacttccangtgcagccgccctcacctttcacactgt

SEQ ID NO: 20697 - DNA, 1705 bp, Heterodera glycines
atagcaagggaaaaggtggcgaattcgctctctcttggcattgtgatgtttttctcaagttgctcaatcatgtgcctgttccgactcggcttgagcctggccatgtctttgccccttgcccacatgaccaggcttgcccgttgctcagcaagcaaaagtcatgcaaattcaaagtgcgttggcaggaatttcgaaccgatcacagaactaaaagtgtgaacagagacgggactttgacgggagagttcagtttccttataatggagaagggcgagcgaaagccggcggacgctgtgccggcgcgacttttgcaggtgtaaagccaaacatgaaagaagacactttccatttagctggagcgagctcacaaatgtgtgtcgtgccatatttgcactgcctttgacggccttcagcaactcgtcgtgtccaaaaggcatgagaaagtgtacgcgcgcattcgaagggcgatgccctcccaacttttgccagtgaatgtgcgtttatataccaatcccagcattttgtgttttgatttacgaagcttgttttagatggaggtcgtcaagagtgaaactgacttgttgagaagcagtgaaactttggaggaacaaaatcggcagagagtgctgtccatttccgatgctgctcaaaccaaattattaaattaaataaaatgttttatttatccgttttttcgaattgaggggggaggggtaagtggcaccgactgttctttctctcctccttcgctaatactcgtcagaaaaagtatagcaccgaccgaaaatgtaccccgccagatttattttatttttcagtctagtcattttagtcctaattatatgtaggaaaattcagtaccgtatcgaagataaacttattcttcggaattttcttcaaaaaattgcagtttttcactctcatttatttatttgaattttaaaatacgaaataaatcaaattacattaaatagaattaagcaattttcgattgtatacgtcatacttgtatatgcttgttcaacaacagtgtcgtcattattcactacattttttctttttattttttggcgtttcgtctccgtctgctaatgcacattggcgttgtgcacaacgttttttccacaattttcgcgcggtctggcaaatctttgcacgggtcgtctgtccgttttcgcgattcctccatcagaaggtcgatctgtgaggaaagtccatggtttaataatgcaaaacagttttgattttgtaaaaaactaagggataaagcaaaaataaagcctcttcttattctaaatattttatttatagaaaagaaaaaaaaataatagaaatattggcctttgtgaatttaggcatttttaaaattaaaggggaagaaaaagaataaattattaaactcagtttttaaggtagccgaaaactgaaatttcaaaagccaccaaaatagagatttaattcattgttactcgcatttttgaatttaagtaatttaaaatttaaagggaagaacattctaggaatttattgtctaaacgagataataaatagttctacatgaataattcatgtttcagaaacatctttaaaaaatttttgaaaaaagtgaaaacatatttaacaactgtatttgcatactgtaggtcgaccgaactcgagccgtaaattagtgagcctttttactgtatatcgatttcaagaaaaa

SEQ ID NO: 20698 - DNA, 1391 bp, Heterodera glycines
agtcacaacaaaaaggaacttcaagtttttagctctgaactgagcactcagtcacaaacgaattcataaatctgccacaccatcttttgatgggaacttggctcgacttttcagtgccgaaattcgattacgcacctacttcctcccctttacacactctctggtgcttatcggcacaacattgccgtggcggccttactttcaatgctgccgtggcggtgcaattattttttaaataatccaccgccaggaggagtcgaacttgaagtcaaatccaatatacaaatagttgacatgaatttgaataaggaaaatggatgaaatagaaaaaacaacaatgaatcacaaatccaaagaaaaaaggccaccaaaaatagaaattaatatcattgtaaatcatctaacaatggaaaagctgaaccgtttttctacataattcactaattatgaactcaattacttggcttgaagtagtgaacaataaataatattaagaaaaaaacagttaattcatgccaaagaatgtgtctcgctcgattcgatggttttatgaaacaaaaaataaataaatgtttttcgggaatctcagtgatgattttagttcgaaaatcgaactttctgacaattcttggcattttcaattataaaaatatacaaaattgattttaaataaatatttcccgtgtgatatgtagaaatgattgttaatgattagtgatttgattatgtgtgattatgcaatgccatcatcacatcaaacaagaaggcaatcatcgccatggcaagcgtccaccaaacggaggtattggctcaaatggaactcggacaatggcagcggcttcttcagctgatacaaacggtcaacagcagcggtagaagaagaaccatcatcatgatgatcatgttcatcatcaagtggcaacagtgtctcgcaagtttggtttgagaaccgggaaatgcctacgaagaaaagagtgccacatgcattatataggggaaaaatgcacctttcaaaaatgggagtagctcgtttcccgcgcatttttctattttatttcgagcttagaaaaaaatccgaagaaatttttttcgaaggaatttgaagaaaattttttttcggaaattagcgatttttagtgaaaacttcaaatggatatttttcaaaaagtttctttctgaagttttttagaaaaaaatttcgggatgatttaactatctgttttttccgttattagaccccttcgaaactttcaaaaaaaaattttctagtaaaaaagtataaaaaaagttttttcttattgttttttttttgaaaaactttattaaaaactgaattttttgccactacagtacaatattcaaaatcttaaaaaaaaaatcacaaatatttt

SEQ ID NO: 20699 - DNA, 409 bp, Heterodera glycines
cggggatctctagagtccctaaatcgaatttttgacttcagcccccccccccagtaagggtctggctacgcccttggttgttggcagtggatgataaaaaaaagcgaggtccttttttttttgtgcgacggtttttccaaaaaagtttttggaaatagggggtccggcggtgccaataggcgtcgccgggaacatttttgcatttttttaatgctatttgttaacgaattttgtccaaaaaaatgaggaattttgggttctagtcggttttatgcgtcccatggatgatcgaccatccccagtttcttaggccataacttttttcttacttggacaatacctatattcttggtattaaacaacagtttaaggcctgttgtatcttttgtataattatattgataaataa

SEQ ID NO: 20700 - DNA, 1907 bp, Heterodera glycines
  unsure (1)..(1907): unsure at all n locations
aaatgaaaatcaaaaaaaaaactacnaaaacaagtgcttgtctggcatgagaaacaaatcattcatgattagccatgactccaactcatccaaattgccgatggcactctgaagcaccgacgaccgccgcaacaattcaatgccatactcaggcaaaaatgcgtgccgaaatgcttgagccggttgatgccgatcaatggggtgatggacaaaatattccatggccaaatggggcagaattggtgcaatggcggcgacgagcacttggccaacaatgtcgagagtgaccagaacggcatcatgttccggcgaattcatcggcccctggtagagacggtcgcgcacaaagtgctaaacaaaatgaattttaaataattaaaaagacaaatatttattataatttagaataataagaaaaaagggtttaaaaagagtacaaatgcctccgctccatcaaattttgaaatttaaatttttacaattagttgaatttcaaataatttaattttttttttaatgttgaagattaaattgaataatttttaattcagtttcaaaatagggctgcaaccccgacgtcggggttggaagcgtcggagttcggggtcggggttaaccccgaaaatggccaaaaatgtcggagttcggggtcggggttgcaaccctatttcaaaatttaaaaaaggcaaaaatttaatgatttcttttcaaattttttgtagcgccctttttcagaaaaaaatttctgtgaaagtaggaggcaggcgcgtgccaacagtcgccgccaagaaaaaactacgagtctctaaactaaaaactatcacaaatctaaaaatgacaaagttgggagaagaaaatggcaaaaaaagagaagggagaaaaactgaattggaaaatagaaaaaggttgagaaagtgtgttccggaaaagaaaaaaaataagagaaagataaaaaggaagagagagagatagagagagcgagagagaaagtgtgtttcagaaaagataagggagaaagacaagaagggagagagagagagagagagagagaaagtgtgtttcggaaaagaaaaaaaaataagggagaaagtaagttggaccaaattggacagcattaaaaaatcataaattgcgcacaatgtatcgggaggagagtgggttctgcataaattggaaataatggtcaacaaaactgccgaagcgatagttcagccgatggtccgccaaacggtccatcaaactgtccaactcggccaaaatgaactgcaacaaaaaaagggaatttgaattggcaatgaatgcatttggccacaacaacaccctgtccaatggcatcagtttgagccgaggaggcggcggcatttgttccccatttgacaatggcagtgccgaattgcgaaacggaatcaacaggtcggccaacgcagtgccactgttctgcttggcctcggccgcggattccaatgagccaagaaggaagcggaaaatcaagcggatttggcgcagccgagtttccacctgacagagagaatgtgcggcatgaaaaccatattttttgggagacaattaacgatttttggaaaattttttttaaagctcattaattataaattttcaaaaattttttagattatttggacaaagcatataattcagtcccaccaatttgagcgttttgggcccgatgctgacactgcccgaggattcggaggcgagccaagcgcaccaaagacgaagtgcgtccaccccgagggcacccgcatcggagggagccgattcttcacaacctgtgatcttaaacaaattcaattttgtataataataatatttaatttgngatttttcacttctttttttttaaatttcaacggtgtactgttgttagaggaatatttgatactgtaccg

SEQ ID NO: 20701 - DNA, 2857 bp, Heterodera glycines
tgctcattacgcccttcgattctgtcaaactctgtttgtgatttgtttccactttttccaaaaatttcgccatgttttcatcaaaaattttacggtgacggagatacgaattgtcaaaatttgaattggcacttattttcaaatttttggtgttgtacaaaaattctgtccgattcaatttgtccaattcaacgccatatttcttcaccagtgattcttgattaacaaaactcggtttttgaattcgatgataggcaagccaacaaacgcttctgcttttgaatgttctccgatacgactgatcaaagaagaagcgccaaatttgacacagactttgcataaggtcaatcagagtgcccgcatttcggtacagtacgccccatccccgttcatggtaggcaaattttacgatcggctgctccacaatgggaatttgttccgccaagtcgggatcagctgcttaaaagtaagattgcgaaatcattgattatttttaatcagtatttaagagaaatgatcatttcaaaaccttttacactttgtcgagcgtattcccgaaacaaatattcgtacagtatgatcacatgcttacggtaaataccacattccttcacgtcattcacatcatcatcactgttggtcttaataaacaaaagagctaattactttacagtaaatcttatcttttaatatagtttttaagaaatgcattaattggaataaaattataaaatggtccgaagaataaaattgttgtcgctgaaattacaaattccagcgccaattaacaaagtgttaattaattggcctccattacctcttccttcaccaatttgtcaacgactttctcgcattgccaatttgttttaatgaagtacaaaacgccaagaaatgtttcatatttttgtgccaaattgtcattgtaacggtcaatggtcaaccattgagtcgcacaaaattcatcaaaaaacgtccgaccctttgcaaatgcaaccattgcttcatcttcgagttgttgtacagtctgctacaaaattgaatggtaattaatgaaaataaatttaattttttcggtcagtgattttaaaacctctcaaattttttaaaacaaaagttgaaggattaaaaatgtttcaattataaaattattaaaaccattaacttttaatgcggttagtcgttttggtttaagtgtgtcattgaaaaaggtctgttttcggcggaccaaatcaactcaattacattgattttttcttaaaaaccgtcaattatttacgttggcccacccatcttaattaaaaatggcttaaaaaggggaattaaaaattggaaaaaatggtataaaatttggtcaaaaatttgatatccttatacttttggaaatgagaaatttacatagaatgtttggctaaataaaaaatcaaaacttaccaatgattttacatttgaaataaaaacgaaataaaataaaaaaagaaaaattgctggggtaagaaataaattcatttttatgggggcgtattaaaatggtaattttaataattaccacaaaatattattattattattgcttaatttaattgaatgctaagaatttcaatatatttatatgcgatgattacgtaatgctgatgatatgttggtgagggggtttcttccgtgtttaatcggataatcacatgaaaacacatgaaattcatgctcgtattaatgctataatacgcgcaatatgaaatttatcagaaattttttaacggaaataaatccatcaaattacgtaaattgactactgacattttcatattatgactacaaaaatttaaaaaaatattaatatgtttggcgatggaaagtcactacgagcgagaatttgaaaattttattaaacgctaaagaaataaaaagtaattagtcggtagatgaaaaagaaaggcataattaattactttttggaattggaaaacagaataaatttcaaatttactttaattaatagggacgtgaattttaggttttaactattttttttgctcaattgatttgaagaaaggagctcaaaaaacgcatttccgcataaaaatttttcgattctgatgtcattatcggtcactagaaatcactattttgggattttgtcactaaaatagtgaaaattcactattttggagttgtcactattttttcactatttcgacattttttgggaaattccttaacaaaaatgcaataaaaccaaaaaatacacccctaagaatcgagcaaaaatttttcaaaaagcactcctaagaaatgaaaaaaattttctcaaaaaggggcaagaattttaattttaaaaattatttttttatgtacctattttgttttttttgcccttaaaaatcccagccctactcatttgcaatgcaatcagtgaataaaaattatttttgcttaatttttggctgacaattatgtcactattcgtcactatttcggactttttgacactattttgtcactattttggcatttttactcactattttagttaactatttcgggatttttcttcactaaaattcacgtccctattaattaataagattagaacaacaaaatgaaaaaatagaggtcataaataatattaaaattaacaaattctggcaatttttatctgattaagaagaaagaaaataatgtgccaccgcaaagtaaatttttaaaatggacttaattcataatcgagtgatttatttatgatttttagaaatcttaatttttaggcactgttagacccccaattctcattattgactgcgtaggcccgaagagagtcgccctggttagctgacttttgcgccgcagacatttgcgccgc

SEQ ID NO: 20702 - DNA, 1335 bp, Heterodera glycines
ccccgagaaattttttttttgaaaatttctgtttgcaatttttttttttaattttggagatggggcgaaacggggcaactgattggaactgatacggggagatctaccgtctgtaaaacttttatgtgacgggctttttccgcctttgttgaatttccactttcaaccccccccccccgccagcttatccattcattaaaaatccggtttcaatttacaaacacatccctccttcattccctcccccattcaattaatccgccgtcatccgcctcaatcctggaaaatcaatccgcaaatgatttctctctgtgtctatgccctcttctagcgccggaggcggcacgaattagtcatcaccggtcggatcggcgccggacggcgccgctggatttgtgaaaattttcatttctaaaatagggttagaccccaatttcccccgggttttttttggcatttttcggggaattccccgacccgacatgtccccgacagtagcttccctaaaaatttccatccccccgatttcgggatgtgtaaatttttaaattactcataatttagggaggcccatgggtttaaattctctcccaccattaaaaaaaatcaaattttcaaaaattaaataaaaattttcttcgtctcttctaattggcacattcagcctgtattttgtacaagaaattttgagaaaaatacgctgaaaattgactttgattagcatttttttcttgaaaataaaaatcacaaaaaaactaaaccaaaaaatcaataaaaaaatttttaacatttaattaaaaattcaggctatttattatcaggcatttgtctaaataatggacattcgacggcattttatgtgccaaaaattgttttgtttgccccttttaatgataatcacttcattttgtacacggtcatcaaatgctgaacttagtcaaaacaacaaaaaattgtcctggattattggtaagattttgcgtgttgtgatggggggggggctatagaaaattttcaaaaaatcttagaaaatttttttaaagaaaaatttagaaaaatcttttttcaaaattttattatgaactactaattttttcaaaaatcactgaaaaatgtttcaaaatttttttgaattttcttacaaaaattttctattttttttttgaaagtttcaattgaatttttttttattagttaaggggataggttaatatttttataaagtacatttttaggttataatttaacataatatggttttactcagggattggtctaataaactttctatagaaagaattccgatgtgtttttttttggatttcaaaaatcgga

SEQ ID NO: 20703 - DNA, 1190 bp, Heterodera glycines
cgaattaataataaaaaattctattataaattttttttgtagaggggaaaattctgaaccaaactactatttgaaaacccaatcaaaactgggaaaaatttgaagtcaaaaaattattcgaatttctccaattttgtttccataatttccgaatgttattcggtatcataatgccaaaccaaaacgaattcgttttaaaatattcttttctggacttgacttggtttctcaatatcgaagcttttttctccgcaatttctaaaacgcttataccaaaccctagatttttggttccgatgggtttcagaaaaaatcccgtgtggtgaaaacatatttcacatttcacttcataactttttgagttctgcacggatcgagaccgggataagaccattggaaagagcagctcgagctctacaagaagctatggaaagaaaaaatcgacatttcagggactttttcagaaatcatatttaattccccaatggggccccattttgggtccccagccacagccccatgcttctcccaattgtggcgaaaacaatatttcacatttcacttcataactttttgagttcggcagggatcgagaccgggataagaccattggaaagaacagctcgagctttacaagaagatatggaaagaaaaaatcgacatttctgggactttttcagaaatcatgtttaattccccaatggggccccattatggttcctcagccacagccccatgcttctcccaattttaagtcttggatttgtcaaataaattaacgatttcgaattaataataaaaaattctattataaattttttttgtagaggggaaaattctgaaccaaactactatttgaaaacccaatcaaaactgggaaaaatttgaagtcaaaaaattattcgaatttctccaattttgtttccataatttccgaatgttattcggtatcataatgccaaaccaaaacgaattcgttttaaaatattcttttctggacttgacttggtttctcaatatcgaagcttttttctccgcaatttctaaaacgcttataccaaaccctagatttttggttccgatgggtttcagaaaaaatcccgtgtggtgaaaacatatttcacatttcacttcataactttttgagttctgcacggatcgagaccgggataagaccatggaaagagcag

SEQ ID NO: 20704 - DNA, 1709 bp, Heterodera glycines
  unsure (1)..(1709): unsure at all n locations
cccctaagaatcgacccgaaaattttcaaaaaatacanncctaagaaaagaaaattttcaaaaaaattcatctccaaaatttatttattgacaagaatttgtgattttaaaaatatttatctcaatactgatttggcttaattttgttacctttttggataaaattttacgattttacaccccaaaaattgaaactttttggcacctattttcccatttttagcacctattttggcagtttttagcacctaaaaatcccagccctaattataaggttaccttactttttcatttttattgcatttttattgataggaattttacagaaaaatagtgcataattccagtcaatcaatttgaataatgtggaatggtcccaatataaccacccataaaaaaaattgaaaaaggcatgaaaataggcatttaaaattttttattaaggattttatggagcaaaacacttttaatttaatcaaaaaacacttttggctggtcattaaatgattattaaatattttttataatttttttctaataagaaaatttttaaaccaaaatttttatttgagatattggcgatcaaattttgtgaaaaattttaattcttaggggtgtattttccagattttattgcatttttaatggaatattcagaaaaaaacgccaaaaaaggcaccaaaacggcaaaatgccaaaaaaaggcatttaaggcacgaaaatcccgaaaaaggcataataaaagtcagcgtagaagcctcaaaccaagtggaaaatgtcttatgtatgcttaatatatcggaattagtgcgcacaaaaaggcatatacctcaaatctctaatcataagacaattttttatttaaacaaaaaatatttatcatggcaaaatatagaaaaagaaagtgtgaaaatttggccaaatggacggtgaatgtgaaagcgagtcccatcacaaaaaaaaataaaatgccaaaaaacaaaaattgaaatgccattgcccccggtggcgaaatttattgacatcagccgcctcactttttcgtttatttggtcagccgtttcttcgcggtgccaccgccgccgccgcttggtgctccgtcgcccccgttgctcatgccgtccccgacactgacgatgccgttgttggtgttggaggaggacgatgtggatgatttcaaaatttttgtcgtgtttggcgtgccgacaaagtgccgcggtgtcacgacgggcggcagcggacccttgcggaagccgccgtcgccgaggtcggtccggttcagcgcttggatgagcgcggcaagcgtgatggcgcgcaacgcgtcctcagtggcctcggccgcggacggcagattggcagcgaattcgcctgggacacaaagaatgagtaattaaaacaatataaggaattgattaaaataatgatcagctgcttgatcaaaactttgttgttaaaaaacattccagctaagaaaaattgattggaaaattagagagtggaatgaaatcgggatcccgtggggtcaaattcgggtcccgacctcgggatccgaccgtatccttttataattcaccgggattgatcgggacctggatttggacgggatcccgactcggggtccctcctgaccgtttgtaacaaaatcatcccgattgaaaggaaccgggattaggtcgggggatctctcgggcccaattgcccggtcaact

SEQ ID NO: 20705 - DNA, 550 bp, Heterodera glycines
ggaaataaccattcgattgccgtctctatgcataaatgactctggcggtgctgggattttcatgttcagcaagtcttcttcctcatcaaaagcgtcattcgcaattacattctcttggttggccggcattgggtcctcattctcctgattttccagtgaatccgtttgtagacctttctttttagcatttcttcgcagtttctggtgcgacattagcttatctggatcaaaaaaagaaataaatgcgtagattctaaaaaaaaaatacaaatttgtgcttctttaagaaaattcctccgtatgtactttttttttgtaacaagcaaaattttgaattcttagaaatacataatttggcgtgttgtcgctctgcaggttttcactaatttggcttttttgaaacagccactgcttacttacaaattaggtaaataatgctttacttacatatgcgtctacctaattaggtactcattgggtttgggaccgcttttttggccagaaattttcaaaaataaaaatttcactcttgacgatttattcaaattac

SEQ ID NO: 20706 - DNA, 1015 bp, Heterodera glycines
  unsure (1)..(1015): unsure at all n locations
tttccaatcattggaccttttccattctttggtcggactgaccaatgccgggtccgtcgcttcgcttctccaagtccgttttccttcccatttntaatgcatttttcgattggtaattcattgcatttcgcagatttcgggtcgtctcgccatgcttttcattgtcaacggatgtcccccgctttggcattggtccccggtgttctcattggtcctcacttatcttctctccgaacaatttcggtcttccttttttccgatggcattttttataagcactcgctttttctttttttgctattaatttgtcattgttttccattttaagctaccccttttacgcgcttaaaacccttggcatttctcttcgatttgtcacttggcttcgttacaacgtttggctgctgctttatccgctcggccttttccttgagggtacattttgaaaacttcactaattatctcaatttatctttgaattctttcagccctcgttttgctcatttccgttccgtttttttactcttccgtcgtttattcactgcaacttccaaatgcgctcaatttcagttacaattttggcgttgtgttggcccttttcagcttcatttgcttccctttcagtgggtttattactttaatcatttatttttacttttggacaaataaaatgtcaaaggcgctaaagccgaaaaaaaaatggtcggccatggaattttaagggcgttcacttatcactagggctggcaaaaatatgtacaaaaagtggtcagaaaaaaaatatgtatttacataaaattgccagctctacttataaccgatttgtaaatctgtgacaagggcgtagctagggagcgaatgccggtccgtcgtccatcacttccgccgggaactgcggagcaacgaaaattaaaattttcaaaaattaattaatttgatttactgtcttaattaggtttgattggcattgccatggacccaagagcaaagaaagtccttggattttgttcccatc

SEQ ID NO: 20707 - DNA, 2789 bp, Heterodera glycines
  unsure (1)..(2789): unsure at all n locations
ttaaaacgacttcggaatgcttcttcncaccttttttacccaaaattctaagtacacttttaagtcaatgccacctttttcgctttcattgtttttttgattattaccacttgtgcttggtttttcgttatcattaccatcatctttaccatcactagaagcactatttttgctggagttttccttaattcaaaaataattttggaacaattatataacaattttttttttaattatttcaatttaaggcaataaaattctcttaagtttaactttcgcgagacgaatttaaaatagtaaaaaaaaagtccaaaattcaaatataattttatggcttagaaaaatgccaaaaatgttctctttctacataatggtgtttatttatttaaaaaaaattagaaagaaaaataaattccaagctatgagaacttatattaccccaatattattactagggattctttttttaggcaaatgcctaaaattcttgcgcactaacacagataagcacgactaaagcccgccctttccgcttggtttggggtgtctacgatgacttttataatgcctaactttccctacttcggggttttcgtgcctaaggtgcctattttaggatttttgaaaaatccttaacaaaaatgcaataaaaacgaaaaacagacccctaagaaatgacccaaaaaaaaactttcagaaaatacaccccctaagaattgaaaaaattttcaaaaaaataattccaaaatttatttatttttttctcaataaaaatttttgttttaaaaatttgtccgtatctggaaaaaaactttaaattatttaataatttcatttacaattaaaatatttaaatttttacgtgttttaatacctaaaagcgttaattataattttttttgcctatttgcggatttttgtgcctatttgatgcctattttgcgatttttttctgcctttttaggtgcctattctcgatttcttgtgcctaaaaaaagaatccctaattattacgctattaaaaactcaaaaaattatactgactgtaccgaaggcgtcgggaaaagcgcatctcattaagtttgaaaattaccaaaaataaagatttaaatatccgaaaaggagaatttatataattcatttttaaaaaagaaagtaaattttaaatttttagtaataattttatttaaaaaaaattcattcaatttggtaccgaattgatgcgtttcaccactggtttcaccactgcttcttccacacgcttaaacaatccccacatttgagatgtggcctttgcggatttcttagatatgctgatttcttttttgaccttttcccgctcgaacaacagccgcattttcatgtggatcagcgtgtacagcagtgcagcaccgactcgctcagcttggtctttcaattcctcgcgcaatggcttttcctcgaggatttgttttttttctaatatcgcaaattcttgctgcaattgcttctcgtaatttgatgatgataattgcttcgttttctgcttgccatttttgtcattatttactgttttcaaaatttccggcattacttctgattcaaaactagaactaaaaaggagcacacattgaatgtcggttatatactttttaatacagatttttgtgcatatgtttgcttataaacagtattttttttaaaacaaaggtagacgaaataaatccaaggtttatattttttttaaagacaaaaaatataaaaataataattgctaaaaaattaaactataaatgtctttgttttttaggcaaaggcctaaaatgtcttcgctaggggtttcttcgatgacattttaatgcctgtttcgcctattttggggtttttatgcttaatgcataggcgcgtattttttgcctatttcgccatttttggcgcctattttggctttttgaaaatttcataacaaaatgcaaaaaaagaaacaaacaaaaataaacctaagaaatgacgcgtgaaaatacaccccgaagaattgaaaattaccaaaaattggtcccccaaattttttttctttataaaatttttggtttaaaaattgttcttattcggaaaataacttcaaaatatttaaaatttcatttacaattgaaacataaccaaaatgaagttggggagggggggggggggtggggtcaccggcgaaatgattgaaaataattaaaaatttgaacaaattacagccggatctcttaaaattcctcgaaaattccaaaatttgactttaaaattgtcattttcggtgaaaatctgctaaaaatggtaaaatttcaaatttttcctgggcgggcgggccgtcccggcctcccaaaactcctattttttcataatttgactttaaaaaaaactccctaaatataagtatttaaaaacctaatttcgtcaatggattcatctagtgaattccagaaatcattcggcttcctcttgaattcattgttcaaaaattcgtgcactttcgtaaagccaaccttcacaatcggttcaacaaaatcttccctgaactcttttaaatcaattaaaattcttctatgaaaaaaattgctataggattggatcgattcttcgtcacttttctcgatctaatggcggctgactgttttggccggtgataagaaaagtcgttttgatcgtttcgttcacggtgttgacaccggatagaatccacgactaccgtaacgccaaactgtaaaattcgtaggaggggggcggtaacttcattccggcgcccccaccaaagagtaaaagac

SEQ ID NO: 20708 - DNA, 2233 bp, Heterodera glycines
tctctgctgaccaaaaaggatttttaaaaaatgaataacgcaatatttttttcgaattccaagataatatagaaaatctttgagttgatttttcgattttgcagcgagaggcgccaatatttcagctaatgaaaattatttgctaattaaataaataaaaaaataaaatgtaattacctaatgaattttaaaaattttttcatttaaaaatgccaaattatttctaaaatttttactctactattctctaaagagatataaacacatattgtgaagaataacaagcaagattattacgtattaataataagacagcccaaaattcattaactgaatacaataattaatttaaaatcttcaatccacaaaaaagtcaaatttattagtataaaaatttttgaaaaattccatgatagcgacaaaaaaatagtaaaaatttgttgaaaatctcaattctcaataattgaccagattaatttgaaaattgatgtcggggggtcggagactccgatcgggtagtgatttaaattttattttgtggtaaatcttcgttttctccaatttaataattaggaatatgatttttagtgattgaacaattttttgctcaattgttttgaagaaaggtgctgaaaaactcatttttgcgttgaatttttggatcggggaatgacatgtctggggtcgggggccggtgggttcgagactgatccctattttggatcataaaatttaaaaatttaacattttttaattgaaacgttctaaaaatcattcttcttcttctgttcttcgaaatttattctccaaattaccaaaagattattaatttcctatcattttttttctcaaaactttttcttccattctgaaattctctgatgatgaattttcaaaatttttgcaatttccgtgtcactcatttttgattttcttttttcatttcccaatattttttcattttattcattttttctttctcagttgtccttttcttgataatgccaaattgtttcttccatcttctaactgtgatatggctaactccaattttcttaaaaatttcggcaaagttttggcttaattttactccattcttttgtggagtattttcttcctttttgctttattttctcttttattttataaaattttccaattatttctctttttttgagttcatttcgtttttcttcttctttttcttgccatttttctccaaatatttcgccaaatgacttttgttgcaactttttctcttctgatccaatttttccaaataaaaagataatttaaaaaaacagcgagaataatttcatttttttcgtctaaaactggttttttaattttttaataaatttgcaatattttttggagcatataaatgaacaaaaatgaagattaaaaaactgacagaaaaacgaaaacctacttatttaatggaaaaaagattatcctacttaattgcaaagaaataaaataaaaaatttccttaataattttatccaattgacaaaaatataattgccattggtaaaataatgattaaataaattttcaattaattaaaattaaaatatatgttttttcaatcgaaaaatcgtaaagctattttaaagaaaaagtatcactactatctaattcatagatttataaaaaacattcttatcaatcagagctgttgagttagctatgccttatgtttttattagggttcgagccccgtgggcgggggtggcttttcgcgggggcgggggcgggggtggggggtttgtttttaattggctcaaaaaatatcacaaaaaaattattattttttgaatgatgtgtttggctcaacattctttaatcgatgtatcgcctcgattgaattcttttttggtataattgcacagatattgtctaaaaatgaccaaatttaaggattataaattatgccagaatagtcaatttttatgggtgtttttgtctaaatccaggttttctatttcaaaattttcaacataagaataaaggccaaaaaataagattttagggtcaaaaataagaacattttgcaaaatcgcttcaaatatttttacattttattcgatcaaaaaggtattctattattatatttttcataaatttcaatgcattcgggatcactaaatcagatttttaacatttttgcggcacatttccaaaaaacttggtgcatgtgcgaggggagaggtccggtggtgccgattgg

SEQ ID NO: 20709 - DNA, 2782 bp, Heterodera glycines
  unsure (1)..(2782): unsure at all n locations
gcctaggaccctacttttggagggtcatnggtgtgtgggttgcacagtataatttatacaaattcttggcncgccattggtaccacagagaaccaatggattaaggtgcatntaaaaaatggtgataaaataaaaattgatattcccgctgggtcataccaaaatgagcaagaattggaaaatgctataaatgagtcgataaaaaatggtataaaacaaccggctacaagagttaaaagacaattggaagatggagtggatttgttttttcattataatccagatgattactgggaaaaaattgaggaagaaaggcaaagatataaagaattgttaaaattgatagtgacaaagtcaagagaacgtgatgatgagacggacacgcataggaagagaaaaatagaggatgaagaaattactcctctccaaaatcaatcgttgactaagaaatcaagaatagaggcgctagaagaagcagcaaggcaaagagatgacgggaaggaggaaaaggaggagagaactggtcaagaatttctcaaaatgtatccagtaaactatagagagaagctaaatgaagttcgattagaattaataagagatttattcaacattcaagaccatatgaaaaaatatcaaggtgtaacagatggtagaagaattcaagaactaaatgaagcagcactaaggatgagaacagcaatgaaacaccgaagaaaaaatttgaatgcttttaataaagcagtgttgaaaaaggatttacgaacaacagctgaagaatatgagaggacgagctatgaacaaaataaggattacgttgaaccgttttttgatagttatccaacagattactgggaacatattcataaaaaatatggaggccttcaagacgattacaaaaaaattcgcaaattaagagagcaacaacaatttttaactgatgaacagaaaaaacagtcaattcaggatgaaattgatcaacttcgtcgacttattgattataggagaaaaagatttgctgcattggaatacgaagctaaaaagagggactcactgcaacaacaaccaatggctttagccttgactcatggtgaagtactaaaggaacgattaggaaaaatagagcgaaccaccacatcacatggggaagagacaaaaactcatggaaaatctttagttgagttgatagaacaggtacagaaagaaagaggtgagaataaggtcgaaaccgagggtaagacacgaggagaaattttaggagataaattaaaagccaaaattgatgaacaagacagtggtgcagatggtgcaaccgatggtgaagcactaaaaaataaaccagaaacaacaattattggtgaaaaaggaatgacaagaggagaaattttaggcgaaaagttaaaatctaaagatgaagaaaagaaagaagaaagaataacccatggcgaagcattgaaaaatagaattgaacaaattcccgaagaagaaaaaacagaaggaaaaacaagaggtgaaatgttaaaagaaaaaattggggctagtaaaccaatagaagaagaaaaaacagaaggaaaaacaagaggcgaaatattaaaagaaaaaattggggctagtaaaccaatagaagaagaaattgaaggagtgaaaacacgtggcgaatcattaaaggatttaattgtttcaaaacaaattgaaacaattttatttaaatatttgaaggagcggcggaaattttcaattgattttaatgaccaaagaattgacttcattgaattgtcagctcaattagggtacattctcgggttcgaagaccctacaaaaattctgattggagctatagcaaagtattattgtgacttaaagggtggtatagacagcctttgtgtgtatattaatggaataactgagaatgtaatagtaggggaccaactcgcttcacttttgcgaattgttgtcgttgaaggaaaatttggagacgtgattgagaagatttataacacaccaatgtacattaaggtggcagtaaaggaaattaatgagattgaaattgaaattaggactagggagggaaggcttattccattccaatggggtacaacattacttgtattagcatttaaaaaatctattgtattttagtatttaaatattcattttcacattatagtatatattaataattgaataaatatggtgcatcaaatatttgatccaaactcagttagttttgatgattttgttgtagtagagcagattggctcgggagaagcctttaattattttcgcgggatacccccataccaacgagggtatgggcgtcagcgaggtggaggagtaggagatgtgttgaggtttttatggagagcacttttaccaaaattaaaatctgctggtacattattgggtagagaggcattagacactggaacacgtgtattggatagtatagagaaatctgaagcaccaaataaaccatcaataatcaccgaagtgaagaagggagtggataatattctcgaaaaaggtggggttgggcgtcaattcggaacgggaagacgaagaaagagtattaaaaggaacacgataattggaaaaactgtacctaagacagtgataaacaagagaaaaagatcggacgtatttggaaaactattttaaaatggtctttaagaaaatagacaaagagtcggtaaactctataacttcagctttatcaatattcagccttccaccaactaatggtgtcagtgagtagttcttcagtgcgggaatatttaccngctca

SEQ ID NO: 20710 - DNA, 1063 bp, Heterodera glycines
  unsure (1)..(1063): unsure at all n locations
ttctttgatcactttgtttctcaatatatttgacaattggttcttctgaggcttttggtttgaatgaaaaggatccttttatttctgttatgaattcagtccgctgaatattgtttgtgctttgctttcgctgttttgcccgtttttgttgactgtttgatgtttctggaccaatttgatcacttttatggctgatcaaatttgtgtcagttgttccttcggacatcggatgggcttgatcaacataattttgatccgtagaatttaatttttgaccgttcgctgaattgacatgctcattgctcacttccattgacatttgcattggcatttggacatttcttggatcaacacttccaatatttggatttacttccatggcttgatcatctaattgactggtgtgcgtgtttgataaagttaactttgacaaatttgtagaaaatttttcaatttctaaaaaacaatgagaataatataaaatttgaatatttttgaatattagctttacctttcgcatttgaacttgaagaaacattggcattttgtatgttctttctagtcacttctttgattttgatttttggaagttttgcaattatgttttctacgcagtcttcttcacatatttcttcacgaatgtccactcaaaatttatttttaaagaagaaatgttacaataaaattaattcaaaataaaaaaaaagtaaaaaataacacttaaaattcgtttaaaaatttaaaatccaatatccaagtctaattgccttttgctccctttttgacacatttgacaattaatgcatttttaatttctattacaaacgggccagaatttttgttttanataaaaattggagcttgtcggtacaagcgaactcaaaattattttgaaatttgctaaaaatgatcaaaatccgccatttatgtgaggtgtaaaatctgctaattncaattttttgtgattttttggaactannatgtaattaaggtttcttcatctattttctttatagtttttacattnaattttaaatctgcctagaaccttgattttgctggt

SEQ ID NO: 20711 - DNA, 1839 bp, Heterodera glycines
gtccactgtcggattgtccactgtcggattgtccactgtcggattgtccgggagccatttggagggccttggttcgagtcccatcagcaggcgacgaattttttaattaaaataatcatagtttaaataatactttgaatttgctcatttcgacgccgtcgcatatctgttttggctgcttcatcggcatgtttgccggctaaacagcagttttcaattaaaattcttgatgttaaaaatagaaatattaaattcctatttttcattttaattttcctgctaaatataaataaattttaaaaatgatgataattattcgaatgaaatacaaaaaatttatgattttacatgatgtgaaatataaatgtaattaaatttgatgtaatattctataatattttacgcaaaaattattgtaattttattttattcataaattcataacaattgatttatcgacgcaataaaatattattttagcgtcgcgtcttcattttcatatattttagcataaattattatttaaaattataatacgaaagaaaatatttgttgcatttaagaaaattaatgctttggctaaaaattttcatttctgtcaaatattttgaattagcgtactttcgtttaaattttttaattaattttaagaaattataaataattcttataatttagttaagcttaggactttctgccctcggcctcgaaaaaaaattttgtttatgactaaaagtcgaaaatttattcattcattggtatttttcaattatttctcttttttcttctatattttcttcttctttttcttcccattttcctccaaatatttcgccaaatgacttttgttccaatttatcattagctgtttcatttggataaattagagcaattaaaatgaaaattaaacagactaatataaataatttcattttcttgaatattcttgaaattttgtttaattttctttaataaaacccaaatgattaaattttattattaatgagcatttatttattcgtgaaatcaattctcagaaaaacaaattggattttctaataaaataaactttaaaacattaaagtattctaatggtcttcaaaaaataaatcatccaattattttttattttttgggtattttttttcatttatgtttttttaaattgatgaaggaaaaatttattgcaaagataaatgaatacaaagataaaaataagaaaattatttttcataatttttattttattttttttattaatgttgaatattttgtttaatttatgttttgtagtttgttttaataataaaatattttcattatgattattattttttcatgtgtaaaaaattgtgcataaattatcaaaattttattaaaaattcatttgagaatattttgaagaaaatgaaattgggcctaaaattgtctttaattttatttttcatcgtcgcaataaatattaattatgttttaacagaaaagaaaaagttgaagcaaaattcatttgacgaaatatttggagaaaaatgggaagaaaaggaagaagaaaggcgaaatgaactcaaaaaaagagaaataattggaaaattttataaaataaaagaaaaaataaagcaaaaaggaagaaaatattcaacaaaagaatggaataaaattgaagaaaaaatagcgaagaaattggggacaaatcgaaccacaatttttaaatggatcaaagaattggggcttaatcaacaaaaaaagaaaagctataaatcaaaaactgatgaacaaaaactcgaaattgtgcaaaaattaattgtaatgaagaatgaatttaaacaaaacagaaaatat

SEQ ID NO: 20712 - DNA, 2317 bp, Heterodera glycines
aaaattccatgggaaatttacaaagccattatataaataataattataattatatatatatataattttaccaatattttagctctgttaattgtttcttcagaaagtaaaacattgacaaacaaattaaacaattttttctgttcatcttctgaaatattttctgccaattcgtcaaaattaattcgattggcacaatttttcatttcttcagattcattttcaaaataccacaagtgttggttgcaatttgaaaaaatgaataaaccaattttctccaacatttgggcaatgttttgcatcgaaatttgaactaaaaacataattttatttggtcccagattttcatctaggaacttaaaaaaatgatttatggaaaaatgaattaatacagtttagtttttcatgctttgtttcttctcgatccatcaatttaatttgtcttttaaaatcagaaaaaatattggagaagggatcaactctgttaaataatcattattaatttttaaatttcaaagtcaaaaaaaaattactttctgccgaagtgattgagtaaaattttagaaatttctaaactaattgtgttaaatttctcctccaaatttttataaaattcaaaatagagcaatgggtattgttcgccgtaaagtttcaatttcatttcgttatttttatcataaagtttttcataaatttgctttgcataatcaattgaaagcagcatcaattcgtgtaaaattagcaaattctgttctgttgtcaattcctttattgcccttgttgcgaaaacatttgggaacaaatcgaagaatttcaaaaattttgtaaatttctaaataaaaattactataaaattttaacatcaagttggctcatgaaaatgttggcattatatttttcgcataatcatttctatttcccagatcgaaattcaaattattattattatctaattttattgaatgccaaaatttgagattcaataaaattgcttaccatccgaagttgctccaaactgttggacggattgtccaatgtttgcatactttttacaataaataacttcattaactgatcagaatccactactcttggggtcatttttttatccatatcactttctaaatgctttgaggaggatggcttttgctgatcgggcaccgactgttgatcattttgggtggcattttgaagaaaaatgcttcgcaaatccacaatttttaattctttaagacaatttctggttgaatggtcatcagaaattaattcgcatttagaaaaaaatttgtccattttgatcagaaacactgatgcttggctaagcgataattttactaaaattttgtattatttgtaaattatcttattattatttttattatattataagaattaaaatgagagtccaattttctgattgggatttgtcatctaagtccaataaatacttaaaaaagcacataccttcaccaatttctgatcactaaaaaaaatttatgaaaagaaaattcaaaaacagtaggttcttttttaatgaagtggaattagaaattttttctataaaaattttgcaaattaaaaaacaattttttttttgaaaaagaatacaagcaaaaaattaataataacgattttttaaattaatcatctaaaaaattaaattagtttttttttaaacaggtgacaaaggcaattttacttaacacctagcaatttaacgaaacagtcaatgaaatatgcctaatttgcacttttacaaaataactatgttggcatttttaagaaaatgaagaataaattatttttttatttttcgagacttcaaatctaagcgttacatttttcgtttttttgtatttttttaaagagattaggtaatttctcaaaaaattcaatagctcaaaaccagattattttttactggatattttaaaattttgagacttattatatgcgtttttctcaagtaaaatatttcttaaaaaattgattactttagatttttcaaaattaaatattttgattcatacttattccatcttctgagtctgaatatgcaatatgaggtggttcttcagatgaagcttccgctgtgagaataagctttcgttttttatttccaccattggccttttgtgccatcagaataactgataaagacaaagcagtccagaagatttgattataaagcattcttttaacaatgtcaaaaaataaattaataaatttaaaaaaaaaatttttgaacaaattttggctttcaattatcccatttatttctaggaatagtttcttagcactttttaaggacctttac

SEQ ID NO: 20713 - DNA, 909 bp, Heterodera glycines
  unsure (1)..(909): unsure at all n locations
cattaatgagatacataattttcaaaataaaaattctcgtcaagaaaataaacaaataatttttgagacgaatttttgagaaatttttcatttctcaggggtatatttttgaaaattttcagttcgattcttaggggtctatttttcctttttattgcatttatgttaacaaatttagggcaaaacgccaaaataggtgaaaataagtttttaaaattttttttaggtttttaggtgctaaaaataaaaacctagaaaattggtgctaataactcaaaagtagcttaacaaccccccctaaaaaaacatgtttttcgtgcgtttcaggccaaggggagctcaggaaaaaaatatgtaaaaacctaaaaatcgaagccctcctagtcatcaggtatatgagattaattgaagaggtttaattatatgtttttaaattaattgtgccaatatgggtcaatgaaaatgttcgttatttgtcaccattacattttaaagcagggctcccagatcaaaattttcaaaagcctcatttggcaggcaaaaaaccctcattttgggtcaaaaagcctcattttttacaaatttattcaaaacacgtttaaaatgtttgatttgttaacagatttgtccacaaaaatggccaaattttgtgattttgagcaaatttttaagaaaataaaggacttttaaggctggcggtgccgataggcgccgccaggggaaaaattgagtattttgaccatatttttagcagattttcattaaaaaattattaattttgtgattttttggaaaaaaattggtttttttctggtttttataaattcagcaaaattttttgggaaaattggtgagattttcatttgatgctctattaaaaacccaaanttatttaataattgaaaacat

SEQ ID NO: 20714 - DNA, 1259 bp, Heterodera glycines
caaatttcaaacaatttccttaaataaatttcccacgctctttgtaaaagatgattcttttgttctctttctcatcccccccccctccctttttcctgcccttaccgtaatgcgatgtttgtggcattggtactgtaacggttgtccgtcggtgactgccgttgcgatagttttgcaccaagcttttgcgcagtgtttctctgcttgacagcggattatcttaaaggaagtaactaattgtcaagtggtcattaatttgaaaggaatcccaatgaaaattttttccatttttcatttgattttatcaattttgaaaaataaaaattcttgaaattaattaattatccagcctattttagggtaagttgaaaattgtcgaccctttggtccaaatattaaaatgttgctcatttgtccgtttcccttctcacccgctgctccgtccccaatgcccttcctttgtcgggtggccgtctttttcagattggcaatcttcggcaactgatgctttgccgcgtcgctgatgccctccagcgcattggcaacgattgccccaggcgttgcactaattgcgttcactgccgcccgacggatgtcacttttggcgattagcacctcaattcgggtggaggacggcgcgtggctgtgcgaccgagtgacctaaaaaagggattttaagaaaataattaaaaaaatatttaactctaaaaaagacttaatatttttttcataattgataaaaataagcataatcatccaaaacggtgttcatacgtttttttgaaagtcaaaactttagaccaaaactctagaattgcgctaacaattaatgcttgttctctacattatttatttatttcattttaattatttcaattaattaattgcattttttctccatttggctgtacgtccagccaggaactgccccgatattctctctttgtcgtctagaaaattgatcatcacccaaacaacccccctttttttggtgagaaacaaaagttggtgatcacgagaattttcttgccggccttcttccatacagcccatgccgatttataattctgcatgccgtccttctgctcattttgaccccgaaagtgccacgcgcccatgtcgccacttcagacgccgatttggttggatccaatctcaattgcctacgtattgccctgtcctggcattacgatgatattctatgatccccagactcgggttttgtgatgatgtctcctgtatgtctgtgccgcgcgtac

SEQ ID NO: 20715 - DNA, 1561 bp, Heterodera glycines
caatttaattatgcaaatttatgaccaattaaaatttttaaattaaactggaaaattattttattttttaattaaaaaattttattgacaataaattttgtcaaggaaatcgcataagaggaaaaaccaaataacatttttaaaagtaaataaagagaacttttcttttaaaattaaaaaaaataagtccgatgcgccgaagtctcctttttaaaatttttgtaaaaataactcaagcaaaaaataataatttttaaattaaatttaattgttggattaataaatgtgaaaaattcgaaaaaagggaaagaatttgttaggatttaatccatttttgtttttgaaaaaaaaaatccggttttagtctcaactcgagaaaaatctcgggggttttcggtctcgaccagagcacaagtgtggttgtggagaattttttttattatacatttgtctttttgttggtgaattgggtgtgctttttgtttgtgatggtttgggggtgggcaaagaaatgttggaaaatcaatagaaaggaggaaaaagggaagaaaatggaagggaaatgagcagtgagtgatgagtgatgtgaagagtgagtggttgggaggagagggaagaggatggaggagttggtgatgagttgggtggggcgggggaatttgtccaaatttcaatttcataaaaaatttagaccaaagaaaataatttttgattttaaaatggataataattattgaaaatttcttacaaattcataacaaaataattaataattagggatgtcaattttatgtaaatacatattttttcctggattctccatgctctaaataccgtatatgctctaattatagcccagtctctattaatcccgcagtctccaattatcccccagtctacgaggtgttttgaaaaataatccctctatcataatcccccagtctctaattatccccccttttctgaggaggttgaaaaataatcccccatgggctataattagagcatatacggtagtaggaaaaacactttcttttttgtgtttgcgaacaaaaattgggacttttatttacatatttttacatatttcggggttttatacatattttacatatttcaagattttatacatattttggactttttcggactttttcatacatttttttacatatttttaggattttttatagaaattttcggaaattctcaaaaaaaatctaaaatttcggcaaacttttcgtacattttttattacatattttgagaatttttgaaaatttataaaatttctagtgaaaaataaaaattaaccaaactaatttttaaaatactaaaatgtgattctatgcctatttaggtcatttttatggcattttgtttcaccctttccgaagaattttttttccaaaaaataaccattttaaaaattttatttacatatttgggacatattttgggtttttcttacatatttcgggattttttttttacatatttatgtacatattttgaccactttttgtacatatttttgacatccctattaataatatttatt

SEQ ID NO: 20716 - DNA, 949 bp, Heterodera glycines
aatttccactcttagggtacacaaaaatataaagtgctgcaggtttttcttaaacagattactcgcaaaataaaaccacaaaaaatagacattcgaatgcattaatcccttaaagagtaagagtgctggtcgtttcaactaatactaataaaaaatccattgtaattctggtgctttttgaatttttattgccttcaatttgctttcattacggacaaaagaaacctattgagatttcgaaatttctttggaaatgctgacagagttgaaaaaacaaccaagtttcgcatgaatttcaggatgcgactccacatatgggaataaagttgaaaatggcatcaattaagcaacatgccgaacggcaaaagaaatgaatctttctcagaaaatttccacttagggtacacaaaaatataaagtgctgcaggtttttcttaaacagattactcgtaaaataaaaccacaaaaaatagacattcgaatgcattaatcccttaaagagtaagagtgctggtcgtttcaactaatactaataaaaaatccattgtaattctggcgcttttttggatttttattgccttcaatttgcttacattacggacaaaagaaacctattgagatttcgaaatttctttggaaatgctgacagagttgaaaaaaacaaccaagtttcgcatgaattttaggatgcgactccacatatgggaatcacgttgaaaatggcatcaattaagcaacatgccgaacggcaaaagaaatgaatctttctcagaaaatttccacttagggtacacaaaaatataaagtgctgcaggtttttcttacacagattactcgtaaaataaaaccacaaaaaatagacattcgaatgcattaatccccttaagagtaagagtgctggtcgtttcactaatactaataaaaattccattgtaatctggcgcttttt

SEQ ID NO: 20717 - DNA, 1188 bp, Heterodera glycines
  unsure (1)..(1188): unsure at all n locations
cttagggtacacaaaaatataanagtctgcagtttttcttaaacagattactcgcaaaataaaaccacaaaaaaatagacattcgaatgcattaatcccttaaagagtaagagttctggtcctttcaactaatactaataaaaaatccattgtaattctggcgctttttggatttttattgtcttcaatttgctttcattacggacaaaagaaacctattgatatttcgaaatttctttggaaatgctgacagaattgaaaaaacaaccaagtttcgcatgaatttgaggatgcgactccacatatgggaataacgttgaaaatggcatcaattaagcaacatgccgaacggcaaaaaaaatgactctttctcagaaaatttccacttagggtacacaaaaatataaagtgctgcaggtttttcttaaacagattactcgtaaaataaaaccacaaaaaatagacattcgaatgcattaatcccttaaagagtaagagttctggtcctttcaactaatactaataaaaaatccattgtaattctggcgctttttggatttttattgtcttcaatttgctttcattacggacaaaagaaacctattgatatttcgaaatttctttggaaatgctgacagaattgaaaaaataaccaagtttcgcatgaatttcaggatgcgaccccacatatgagaataacgttgaaaatggcatcaattaagcaacatgccgaacggcaaaagaaatgactctttctcagaaaatttccacttagggtacacaaaaatataaagtgctgcaggtttttcttaaacagattactcgtaaaataaaaccacaaaaaatagacattcgaatgcattaatccctaaagagtaagagtgctggtcgtttcaactaatactaataaaaaatccattgtaattctggcgcttttgtgaatttttattgccttcaatttgctttcattacggacaaaagaaacctatttagatttcgaaatttctttggaaatgctgacagagttgaaaaaacaaccaagtttcgcatgaatttcaggatgcgactccacatatgggaataacgttgaaaatggcatcaattaagaagcatgccgaacggcaaaagaaatgactctttctcagaagaagtccacttagggtacacaaaaatataaagtgctgcagg

SEQ ID NO: 20718 - DNA, 2020 bp, Heterodera glycines
tttgcagctaactttagcactgagtcaagcgaaaatgccaaatccgacgatctgatgccatttcctctccaattattttgtcctattcccctgcctaaaaatctgttgccatttccaatcttggcacaaggtccccagaaagtcgcacgctctcttccatccccccccccctaaatttttggcatttcctttcttgacattgggttccgcccgattctctcctaattttagtcaccatttttttttggcattttcccttcttggcattcgcttgatcctctcctaattatagccgcgaagtttttggcatttgctttctttaattgaaacatatgcccgatcctctcctttttttaatccctacttttttttatggcactactccattttcttcaggcccgtctgatcccgcgaggtgttaacaatggcattggcattggtggcccatctgacgcccagcagcaatatgtgcgcaccaaaatcacgctcagtgatcagacggaggtgcggctcacctactttgcgcagtgccattatgacgcacatttggcggagaatccgagcgcgtacacgcgcgtgttgcagttcatcgtccgtggcgatgtgcgttatgaggagggaggcgccaattatgcaatcgattccccgcctcttcattttttgatatttttttttaaataaaaaaaaatttttttttaaatcagatttttcccgggtttttttttttttgaaaattatgcatcatttactaaatattaaattgttaaaaattttccagggtttgcaatggtcgaattttttaaattttttgatggattttaataattttctgaaaattttgcattatttatgaattgttgaaaactttccaaggttttgtaatgccagaagatttggcaaataattttttgcttttttttggaaaattttgacaggttttttttatttaaaaattttattttcagtgaaatatttggctattgatcagaagcagtcggctcaaattttgatcattccgcttttcctttctctgatcaggtccaaggcgttgagctgctgaacggctccgacctgttcaaggtggacagtgacggggtgatgattgtccggtccggcgtcaacatcgaccgggagagcactgatcggatcattgtgaaagcgcgactcatggtgatcgctgttcatcatttctttattatttttgaattatttgcttatttaaaataataattttaaaaaatttttcgatttcatttaatttgtctttattttttaaatttaatggaaaaataattttcttgaatttctccatatgtagaataattaaaaaatatatttaaaaacatttataataaaaaatttttaaaaattaaaaaatctacgccttttttgtatgttacaccatgtcagaaaattcattaaaaaatcccttttacatttttttaaagtcaaaattttttgtttaattttaagatgtatgaatattaacttccaaaaatagctttctacctatatatttaaaaaaatttaaatttaaattttactattttttaattaataattcacttaaaaaattgagtttttttctctctcagattatttattattttttaaaaacatttactattatttcccgcctaatttaataaaaaagaatttacaaaattaaaaaaaaataatttcgttaaaataataattaaaaattattaaaattaatattaaaatgttaagagccgttccccgcttcatccccgctcgttggagctgtgccaaattgccaccgcggacattcacattgatgacgtcaatgaccacagcccgcggttcacgcgccgctcctaccgcttccgcatcgacgtgcgcccattcaacaacacggaggtgggcccactgcgtgccattgacggagacaaagtgagtgggggagaaaagtgccaacatccggaaaaatgccaattttaattgttaacttttgtaccaacaaaactatggcttttttgttccgatttgtccaaaaaat

SEQ ID NO: 20719 - DNA, 1615 bp, Heterodera glycines
agaatgaccattttttggttttgaaacggcttttgtctaaagttaacaaccccgaaaacacaaaacaatgttttaagagaaatttaaaaaaaaatttaattctcgaaaaatcagcggttgaaaccaatttttttttcttttatttaatgacgcaatcaaaaactgtttattagggcaaaacattttgcttctttaagaagcaaaggcacaaatggcaaaagaccaaaaatgatcagctctgatcagaatagcataattacagtgatcattatttttcgttcatttgtccttcctccgtttcctttgctcctctcactcctccgtttgctggtgttcttcttccccgcccttcttgtgcttgattttctcggctttctctataaatgtcgagaatacctttcccacatcgagaattaccccccccccccccccccctcttttgttttacccaaaacgtagcgttctttgtcctccgccgctttctctccccatttggccttctcggattcgggcaattggcgccattcatcgcctgaattggttgggtgtgttaaatggtaaattagttttgtgtcattttatgccggcatggcactggcaaaacccatcgattttcgagcatccctcgccagttctatgccagttaaaatcccatggctaaaatggtttttaattgcttgcacgacctgcgatgacggccaaatccggttgggtcatccccggcttgtagaaacggtcacggttttcgttaatcctaaatttttgtttcatcaaataatccgttacaaattaatatttcacaaaacaattggctacagtaccaaagaaagaatgacgattgggcgggcttcggctcgtcggccatttttgaaatttttaaagaagaaatttgttaaaggctctaaacatttataaaaaatcaggcagaagaaaatgaaaatgcataaattgatgaatttttgtttgtgcgcaatttgcccatttatacgccaatttcaactgccaacgatttttggttgcttggaaatgccgcgtaaacaaaaacaaaaaaggaagaaatacataacaaataaacaaatgaatatgatccacggattttgtaactgagaaatgaagaaaagggtttcctaagaaaacacccgccgacccttcgccggtggcgaattgtcgggggaaaggggagaaaggggggggggggcatcaacaaagatcaacacatgagacgatccaaaagtggccacaaaacatgaattgatcaacggttctgtgggggatctccgaaaattgggaaattaactaacggtcagctgccaaaatgtgcgagaggaatattaaaattcataaccaaaaaaaagtgaaattaaactctgctgctgcatgaattaaaaattttgtctaccgtaatccacaaatggcactattgtaacaccagtccctaaagccaacttcactcactttctcctccatttcccctcgggaaaggttttgtagcactcccaaaagtttgaacaaaaatgtttatgaatgatggaagacaatgacatggccatgacttcacagtaaaaagagagggtgatccaaatggatcaaaaggtgatcatttgttcctcctccc

SEQ ID NO: 20720 - DNA, 1070 bp, Heterodera glycines
agcgggcgcagacgcagcagtagcagctgccgcctcaacagcaattgctgactcaacaatgcccataatttgaattggaaattggaagaaaaaatggaaattgaaattgcttaatttaattataaacacttggaccggcgaacaaacgatgaacaaaaaataaataaaataaggagcatttattataaaaaatcagggaagcttttcagaatataaattaaacttgtgaggaaattgtaaatcaaaaaaggaagtgtttttgccattggttttcgaatgtgaaatttcgctcgctttaacacaaaacaaaggaatgaatctgccaaattttatttacatatttatagcaatgagttttttgtaaacaaaatcgattacgaatcatcggcaggcaaaatgtttattattttatacataatgtccgaatggcacgagggcccgtgggtctttgctgccgcgttgaacttcgccaaagtccgtcggcagctcgaccactaagggcaaacggactttgtaaagcttgttgggctcgtcaatcccaagtaaaatccgagcagaaccagcaaggtcgtacgtctcctactttcctatggtatcctctaaaaggacccacaccgacaaaggaccaacggacaaaggacccacaaaaaataacagatcagaaaaatgcttagtgaccaaaaataaattcaaactaagctatgagaaaaagcacttaactccatggcacttgaaaattcggccaggcatttcttgacttaattgattatttaaatcaacttggatcggtcgtccgaattggcgccctgggtttagtgagtgcgtgccggcttcttacgttttttgcagaaaaaatcctggttttgagttcgtgtccgggtttttgagttttgcctatagaaacgcacaaattcaaatttaatttttccttaaaaattgaagtgaactacataactcacaaatgtagggcaactgaaaataaataattaccgaatttaagggagcgtaacttttctgctaaggaccatagacttacacttccaaaaggcaatttagtagagaatttcatg

SEQ ID NO: 20721 - DNA, 2926 bp, Heterodera glycines
tcccgtcggcctgagttttgcgagtgttgtgagtgtatttgttgcgtttcgccttttcccctgggtcattcattcattgttcactcattcgataggtcccatccctcgcagtggccatcgcgtctttgctgactccgatttcatttacgtatttggcggatacaacccatttcactctcctgacagcacttagtctgtgcttttctattttaaaaacgatcttttagctaaagatcattttcataattttagcactgatttttggcgcttcaaccgtctcacccatttatggcaaaaatgcggcctttcctcctctgacccaacgactcagttgccgaattcgttggcttcttttgcatgtaatttcatttgtgcaattatcaatcattgaacaattttttaataaaagttcaaacgaagggacaaagtccgcatacatttttgaagaaaaattaatacgtttatttcccccttttagtggcttcatcttctaggcccagcgagtgttttatttttgggggtaccggcattcccttcggtctcgccgcttcaaatgaattgcatcgaattcgaattgatttgcttggaaatgtcaatgttcgggtatgaaaatggggtggtatattcccgatgccccccccccccttttttttgacagaaaaaatttttaagacgaaaaacatatttctaaatttagaattttttattttttttcggatcagtgattttatataggccaaataaatgatatatttgtgaaaagcgactcccaaaaccctcagaagcatgctttcacgacaaataaaacaaattgtctttcaaaaaaaaggggggggaacagcaaaatttgatatggaacagaacgaccattcgcaagactctgcttcagactgagccgaaacaaagctatgaacaaagacaaaacacagcgaacattcggcagagggggcgcagtggcggggaggcggcggacgacgcggcggaacagcggctgatgcccccgcggatgtgagcaaaggcatttttagggatgggaaattggcaattctttgtttttacgcttgtgcggttattaatgatgctttttacccatttaattgtttttttcagatacggacacgcaatgtgcaggagagaagaacaaagtgatggcaaaacgaaagtgagctctcatctgctttaaacattttatccaaaatgtctaagggctcgtaatttcttcagacaacttattatccatttccttatcgatagaaaaaatggactcggtcaatttaccatatttgggccatcttttcggtacttaagcagttttaataaccaagaaaattggcaacattttattttcattctgaaatttttttggggcaagtcgaggatgccaacaaaactctgtgacttcattattaaatttgtcctctgataatgggtttttcaataaagggagtcgacagattacaactcacaacctccttctaatttttattaggaggttttgtacatcgccggaggcaccaccggccacgtttataacatggacatttggcgcctcgagcggccacttgggcaaccgcgaatcccatggatttgcaccccaatgcacagagatgggcttgaaattggtcgttatcggctggagatggctgcacatggccaaaagctgtacactttcggtggcggagcacccgaattttgtgctgaatttgaagaagtactttttggtatttttctcctatcaatcttttctcacagattctcgctttcgacctcagcaccaatcgtttcggaaaggttcgagctcttcccgacccgaagtacggagttcccatcggccggaaatgccatgcgttggtgcaaaaggggaatttggcgtatttaattgggggatgtcgcgacgcagaaacacaacaaaatgtgaggggaaaaggtgatgaacgaggcgaaagggaagggtattcagcaaaatcgaagccatcagctgatagccgacgtttggaagttcgacatgaacaccgcccaatgggtccgaatgcgcaacaacttggcgaaggcggtgtttttccattcggctgcccttacctccgtcagtattgtcgggatttttatttaaaaattccaaatggccaactttgctgctatttgttaggatgactgtttgtttgtgtttggcggttgcaccgacgaactctccgaacgccgctgcaattccctgcagcaaatgtggctccaaccgccctctctcaagtatttggcctcgatttcgttattgggacttttaaacgaaacgcaaattcggcggataaacaaagagggcatccgactgagcaacgtggaggcaagtgccggtcggattggccaattacgtgcctaattgacatcccttcaggcttttattccgcgccttttcttgccgacttccgctgcttagggctcgcgcaacaaaatgaagttaggcgaaatttcagaaaaataaaacaatccatccgataaaactgcacaatcaaatgtattgtaaaatgtaaggcacaaatcccggcttcttttcttttgtgttacatcaattatctataataaaacgtcacaaatatcatttgtaaaaaatttattttgtaatttggcaaatagcaatttaaatggatgatgagaattttttatgaaaaaaaaactctatacgtagaaaagaaatttgtaaataacttttttgaattgtaaaaataatcacagatttttcaaaagcattaatatatataattccacccccggcacaaacatcaaaggtgaaccctcccccccccctttttccgttgtttttgtttacaattgtccctccctcgtcacttttttccccttcgttttcccttttcacaattttccctttctcttctcttctctctctgaaaatggttcgttaaatgctaatcactca

SEQ ID NO: 20722 - DNA, 3138 bp, Heterodera glycines
  unsure (1)..(3138): unsure at all n locations
tgtcgtccccagcttttggaagaacagcttcgccttgagggtcgccgggcagaccaagccgagcgggtcgaacaggctggcgacgctgctcagcaccgttctgcgtgtggtgccgatcggagtgccgggttcgctcccggggtacttcattcgtattttgtccgtctccgcattccattcgagtcccaagactttggccgtcgtcttgccgaggaattccgcgtccgaaaagctgctgttgagtgtctcgtcattgctcaagaattcccgaaggttcatccgcgcgtccgcaaacattcgttttgcttcttgtcctttaatggctgcttcttccgcagtgtccgccgggatgagcacattatccacgtatgtgtcccgaatgagttcttccgcgaagttggagtcgtatttgcgcaggtggtgtcgtacaactgcggcgagacaaaaggggcttggcgtgagcccaaatgcgaggcgtcgaaatcggtatgtcaccaaattgtccgttgtcactggccgaaatgggtcgcgcacccacaaaaatttgcacacatctctgtcgtcctcttcaatcccgaccatgagaaatgctttctcgacatcggcgatcactggtactcggcatgctcggaaccgaatgagcatgccggccaaatccggcagccaaactgggcctctgagtaggcagtcgttgagggaaggtgcccctcgtgtgtgtgcgctcgcatcgtagacgacccgcaactttttgggcgtgatcactgcttggtgagggatgaagtgttcgtgtttaccagctccgatcgtcgtttcctcgattattgctgcattgagctgatcggtgatcactgtggtgtactgcttgagcacctcgggagtcttctgcagccgttgaagcattgtcgttagccgtcgataggccatgctgaaattggtgggcaaagcggggtggcactcccgccatggcaatcgaatggagtagcgcccgtcgttgagttggcgcactgatcgttcgaattgtatcactgcttgcgcatccgcgtcgtctgtcgggtcgtctcttatcccgattgcttccaatgaccaaaattgttcaactgctctgatcggcggcatttgatcgcgttcatcttctccgcatggcaatgtcatgaacacggacggagcgggagttgccccgctactcacttggaaccgttcgccgcacacgattggcccaaacaccgtgtcgacaatgtacgtgccctttccgttttccgaaagccggtcacgaaatcccagaattttcgaatcccgatcaacagctgcggttgtgttgtctgtgtgatagtcctcatgtcgctgtcgggtactgctcccgactcgatgagctctgttctgatcggggtgcagatcagaggcacttccgccacctcaatgctctcccatccgccatcgatccgcttgagtcgcaagcgataagttgcggatcggatccgctgctttttccctccaaaaacttgaactgttagtggccgcttttcggtcggcttcggtcgnagatgttgaattagctcagtctcggcgcagtcaaggtggcttcctggatcaaacaacaatgttgtttggcattcgtcttcgccttcttctgctgctgcggtcactcttcgatcatttgctgggccgggactcggcttccaaaagcggtgaaagcccgttgctccccggcattcatctcggatatgtctcgactgttcggctcgtctcgtgatgtagtgacgtgagtgggttggtccatcccactgatcagcatcgcgtggttgttctccttccgttcgggttcaccggagggccgggattggtttcccggttggttcttccagcacataagccaatgatgatcgtcctttcgacatgcgtcacatcggaccgttcgttggcactgttcgaatgtgtgatcagagcccaggcaacgcaggcatcgcttttgctcaattagtcgcttcctccgtgcctgcggcgtcggataggcgcggcattcactcggccgatgtccgctctccagacaaaacgaacaattccccctcccgaagcttggagggagcccattttgcgcgaagcggggtccattcccacccttgtgtccgttctcgttgccgcgtgccactgttcgctcggtgaaacgggcattcgtcccgtactgctcttcttttcgtgttccgttgggctgcgcacgggtttgttggctgtcccgtaccataaatgctctttgaaatggctcccgacctgctttccccccccctccttccccactcctccgcttggccaattccgtaggagaaagggactttcacagactgtacatctccttccaactttgaattattacgaaaaaatattttgcgctccatccttttggtttcgaaatggcaattccctttcgccctgccacggcattcattcaatggatggtctcccccctcccgtgccgtgccatctctccccttctttcccttccttcgttcccccggtgccttcctttctcccccccccttttcctccctttgcccttccgccgttcgtttcgttcgttcttcgctcatcaatttcattttttgcgcaatgcccggcatcgcccttttctaattgcgaatgccccaattcctctgcttgcattaattaagtgatttatctcaatatttgcccgcccttttccctctgagttcgttcgttttacttatgccatcccctccctcctcctcctcctctctctccccctctttttctccgttcgttgttttatcctccgattcgaattctttttctttgataagatcttttttccattcttccaccgaatttcaattctgtttaatcagttttgacttcattttacaggaaaaacaaacatctgtttcatcccaaattatttggcccgaatacttcgaactttctgaagcctaaattaaaaattaaattttaataagcgccgcctaattaattgcttaatttcgtctctctctttgcttagcccacccgtccgatgaccgtggtcagtagtcattgatcacaatctccgttcattcttccgatgcgattgcacttaaagaaactcccaaaaagaccccacctcccaaacaataactcatttagcatact

SEQ ID NO: 20723 - DNA, 2613 bp, Heterodera glycines
  unsure (1)..(2613): unsure at all n locations
ggctctataaagaaaggcgtacggtaaaggctctccttgaaaatagaccacagaaggtagtgattgagaatcatgtacccggtccgaatgttgcaccatatctaggcctcaacgcccaatccaaaccacaggagaccgaagaaccacggaaaataattattcctaggaaaagacttaaagagcgaactcctgatcctgaatcagataatgatacccttgaggagttaactccggaaccccaaacaacatccacactcaaaacacccattccgatcaaaactattatacatcctactcttttaaacggtcttttaggtatgtaaaagaaaacaaagatttatttaaaattacggcggctggaaaggtacagtcgaacatgaatttgccgattgaaaacagtaattatagagatgttttattgtatctcgcggggaagaaagatgaaacgccgcgcggtgcaaaatttctcaaagatcggttactgaaggatccaacagtaaaagacatggttgataaatcaaaggtcatgtggggacgtggaaggaaaaaggcaataaaatctataaaaacacccgggatagcacgagagaagaaacccttcaaaccactaatatgggcaagactgtagagaaaattttatcaaaaatttattttaatttaaaatctccggcaagtttcgctgggattcaaaaaattttaattgaggccaaaaagattgacccggaaatcacgaccggagacgttaataattttctcgaaaaacagagaacttacacgattcacaagcccatcaggaaatattcccgagactaaagacgataccgagtggcttccataccgattggcagtgcgatttgtgcatatttgaccagttgaaaaagcataacgacggttacaaatatctgttggtatgcatcgacgtgctgagtcgaatgatcttcagtgcaccggccaagtcaaagaagagtgaggacatgatcgaggcttttgatcgggtgttcgaaaagtctaaaattatcccgatgaaaatatatagtgacagtgggcttgaattccaagcaggaaaaatgaaaaaatattttgaggaaaaattcatcatcaaaaatgtaatgtatagtcctgatctgcacgccggagtcgttgaaagggcaaatcggacaataaaggagcgtttgtacagatattttacaaagaaagacactcttcgatgggtcgacgtaatagacaaaataataacaaacattaacaacagtgtgaatagaacattgggagccaaaccgtcttcaattaattttgaaaatgcccgtgcgctctgggaaaaattatataaggctagggaatttaaaattttaaaaaagaaaaaatttaaaatcggtgatatcgttcgtattaccaaggaaaagggaaaattttcaaagggatacctcccaaactttaccgaagaattatttaaaatcgttattgtcgacgacacccgattcatacaggatcgaagatttggaaggaaatttaataaaaggtatattttataaccaggaattagtgaaaacagatggatgatttttacattgtactaccttcgaacacaccggggcaggagaacactacgtcaaaattcacagtacgcctccccgagactttggaattgggcacaaattggtcagtagctctctcatcaattatttacccctactcattcaccgctctcggtataaatggtcaagagtttataaaagtatgggaaaatgacaacaatgtccccattcaagtttatttaccggacatgaattttaaaaccgccgggggattgggaaataaaattaacgaagcattcacacatcattacaaaatcaaaaaacaacgtgggaagagagaagccaaggctgaagataccaaagactcaaaaattgatgtcgcaaagagggccgcagaacgcgccgggagagacgtagaaagacattttaatcagatcaacaatatctcgaattccatccaaacccaactaaacacactacgagaaacaaatcctcacattttagaagagcctgatataaaaatttggtttgacaaaatggttgagatgggaaccgaaattcaaacatcccgaaatgaacttaagtcttttcaagaagaagtagataaagctaaaaacataacattggagcatgtggaaaagaatgacttgaaaaaagcaaagaaatcagccgacgtcgcaaagggaatcgccagacaggcaaagaccaaatatacatcaactctcgagggatataatgataaatcggaaaagggttttagcgggatagtgaataggcttaatgaggctttgggtgagcatattaaacgtaaagatattgaaaatagacaagtatctgaagctgagaaaggaccacaaaaaagagagagactagccaatgaggatgttcaatttcaatatgacagcattgatcaaaaatttattgtctatctttcccctgctgtctcccacatagatttgtcaaaacacctccgctatgtgcttgcntttangaacacaaggctatttcacgcggaagaagcgaatatatgccagatttgacgggaggcgtaaggcagctatacatttatgcaccaaat

SEQ ID NO: 20724 - DNA, 1494 bp, Heterodera glycines
  unsure (1)..(1494): unsure at all n locations
atccccccccccccccaatgggcctggctgaaataacatctctccacaggacacagggaaacaatgacatttctagncgtaacttttgattacaaaaacgctaaaattggtaggtgtctgaaaatgagagagacgcgagtaaaagaggcaaaatttactcaagaaaatgcgggaaattccgcagcaaaaaatgtggagatttttcaacaaaaaatggtttggtcgcgcaaccagcagctgatcacttttgcgcttcactttcttccgttgaatgttcttcgccatttgtttctgtaatttgcgcctcctccgtttgtcccttctcatcacttggcacatcattttctcttatttccaaattcgccaacttttccgttggcattgcgtcggttgtgccgtcgttcgctgtctcagcagctctctcttgtgccactcgttcacacattggcttatacacttcccaatattccaaccgacacttttcaattaactccaaaacctaaaaattaacattttccttctagagtaaaaattttagggaaaagcatcatccagtgggaaaatgaaaaccctgaaaatttagtaacaaaattaaattcaccttatcaaagccctgacccgtctttgccgatacggacacccaatttaaattttcgtagaacgaatcgagcacaagggacaaagagcgggtcaagtcgttcatgaaactggacgaactttggtcaagcgcagtctgaaaacaaaggcaaaaagagcataattttccaaaaattgttggtcacttgaaactgctcaaaatctctcatccattcgacggcaaaagcagggtccaccacgtcggacttgttcaaaacgacgaaaaatggcaatttggtccggtaaagaatggagcaggcgtagagcatgttggacatgaaagtcgtcgggttggtcgaacgggcactcgaattataacaattttgtatattaaaaaagtaatgaatgggcggcacaacgcctccaattacctatccatcacataagcgacaacctgcaaaaagccttttgcatttgtgttgaaaaactcaaaaaaacgaacggtcggaaaagaggcggccaatgaatcggtgatgacagtgccgctggcggaccacgtgaacacctcaatttggcccggggtgtcgaaaatggcgtatggcatggacccctttcgtctgtccaacaagtccaacacctgaaaagacggggtaaaccatcggaaaatggacgagaggcaacacttggttgaagcgagtgcaaaacaaattcagactggtcagaatggcaccgtttgggccgaggcctaaaagtacggggacaaaaagggtttttaaaaagcaattggaggtgcaaatgcttgggttaccgtattcctgcatgacctttttgtaatttacagtgtctctgatgtcaatgtttgctgngaatggaancgttgctgtacaaaaaacgaattgaaaaacgcgcgacattttc

SEQ ID NO: 20725 - DNA, 1061 bp, Heterodera glycines
  unsure (1)..(1061): unsure at all n locations
cgagatgaccaagtaggggaacaccttcntgggagtgagatgactcgccaacctctaaacgggaggtctcgagaatccaattaatttgggttaaatcccacttggacaaatgagctttttccagaaccggccattccaagcacaattaaacacggaggcaacgcagaagaagcaccgtcacagcttttgtcatcagccatttctgtgttttacttgcattaaaaatgacattttccattttcaaaaataaataagtccataaaaactatgacagaagatgaaaacaaaaaagaaaatcattaagtcatttatcacaatttaagacgacaagacaatgagcaatgggaatttgggaagggactcggccaaagtgcataatataattatgtttaatgagtgattagtgtggtaatgtgtagtggtgttgttctacaagtgatgtatttggccgggcaaaagtcgtgccgtctccgggtcaggcggagcagccgacgaatccgatcgctggtcgttttctttggtttgcatttgtagtttctgcactgagccgggtgcaatgccgcggggccttttctcctccgtcgatgaactgctcgccgagttcgactgacatgggagggaatgtcggaaggcaatgccatcattttgttgttgctgttgtggcggcaagcgtatgccgaacagttcagcgatcagactgagtttgaaggcacgcgaacttttcttcccacggcttagccgctgtttggcggccatcaatcgaatgtggtcatcgaagatgagttttgcatcaaaggacggtttggctgatggttgggaacgcattttaacgtcctaaaaatgaagggaagggaactgagaaaaagaaacaaagaaaatggcaaatacaatgaaaactaattaaaccctattaaaattacatttatcaaaaaacaaatggtggaactttcactgaatcactcacttccacgacaacgcgaagtgttcggctatcgaatgaagacacttgaacgtcctagaaggcctttaaaatttgtaaggattataaaattcgtagtgga

SEQ ID NO: 20726 - DNA, 1304 bp, Heterodera glycines
tgggccccagcgcccttggcctttgacttcatgatgggccccagcgcccttggccattgacttcatgatgggccccagcgcccttggccattgacttcatgatgggccccagcgcccttggccattgacttcacaatgggccccagcgcccttggcctttgacttcatgatgggccccagcgcccttggccattgacttcatgatgggccgcttgcgcccttgaccattgacttcacgaggggccccagcgcccatggcctttgacttcacaatgggccccagcgcccttggcctttgacttcatgatgggccccagcgcccttggccattgacttcataatgggccccagcgcccttggcctttgacttcatgatgggccccagcgcccttggcctttgacttccagatggcctcagccaggctcgtagtgtagaacacaaagatttcgcccggtgggactcgaacccacgatctcctcaaagcatgaagtgctctgtccaactgagctacgggcgccacttagtggttctccagtattgcgcctgtggtcgtctcagtttgcgtcatcgttctgtttgcgcttgtgttcaatctcagtctgcgccctcgctcagactcagtttgcgcctgcaattgatttgcgttcccatttgcgttcctcaatgtgcgttccaatttcgcctcaatttgcgcgctgtctttttgttcctgctcagacagtttgctcttccctttcgcttcggtttgagcttcctcaatttgcgcttcctctgacaattttccattccgcctcggtctgcgcttcctcaatttgcgcttcctctgacaattttccattccgcctcggtctgcgcttcctcaatttgcgcttcctctgacaatttccgcttcccttccgcctcattcgcacttcctcaatttgcgcttctcatttgcgcttctccaatttgcgcttctcaatttgcgctgcttcaatttgtgcatctccaattgcgcttcaacaatttgcgctgctccaatgcgcttcaacaatttgcgcagattaggctcactgccctctttgtgagctcggcacaatgccgccaatgagagcgagataggctcgctgcctaagcgcatgaccattctttcctgaggggctgtggtgcggaaggcgaggcgccacgggccaaaaagagacccgaggggccgtatggcgcggaatggaaggcgccccgggtcacaaaaagaccaagggaccatatggtgcggaatggagcgcccccggttacaaaaaaccgggagggcaaacgggcggaatgc

SEQ ID NO: 20727 - DNA, 1640 bp, Heterodera glycines
ctgttgcggctcggcccacaagccgcaacgggacggttcgtcgtccattggttcggggtggggtgggagaggaaggagagggggaggggctaccgaatacccattgctgggttttttctctttattcggtgcacgatcggagccatgaaatgaacaattcatggggcttaaatacgatcacatttgggttgggcctacatacaaaacaattaattagagaaatgggctgatcaaatgggctgtctttttctcttccttctcttctttcttcgctgtgacttccttcatttgcggtagaacattcacatgcattggttgatgttgtctccattcacgtgcactttttgtccccatcggaccatgtttgggcggggagggccggtttctgtgttcattcatgtgcgccgcttggtcgattgagctgttattctctctccaaattgccacttttttgcccatttttcatcgtttcatcgcccactgattattttcccccttttttgccctttcgctcgtcgctctctttccaatcattaactgtccgttccacggacagtcgcggctgaattccagtcgcgacaaaacagttttttcgtcgcatcaaaaacaatttatttgtgtcataaattaatcgactcaaatatcccgaatttaatccggcgggatcccgactttaatcccgcggggaaaaattgttttttactgtttttcaataaatttattatttttactttggtattaaatttggagaaaaaatattaattaatcatataaattatttttttaacatgttaaagtttgaatttttgttttttacgataattttataaaaaatatatctccaaaagacagtttttggattttcttttttattatggcaataaattttcatttttttctttttccgttattttacaaaaaattcaaatgtttcttccatttttcaattactgaacggctaaccccacaaaaattacaaaaaagctacaaaccaacagcaaatgaagaaaaaattgaacttatacaaaaattcattaaaatgtcaaaaaaatataagcaaaaaagaaaatattcatgaaaagaatggaaacaaaattatgtcgaaatttgtaagaaaattggagttaattatggaatgattaaaaatggaagaaacaattcggaatgacaaaatttataacggaaaaaaaatggaaaaaaatgaaaatttatttgaaaataaaaagagaaaatccaaaaatgagtgaaagaaatatttctaaaattgtgaacactccaaaacagaacattcataatttgaagaaacaatttggaaacaaaattttggagcattgaaaaacttgagattattcttaaattttatttttggaaattttttggattttttgtggttttcggcgtttgaatagctgtgtataaattgtttcttccattttctaatgttccatgatttttgcaatgtttttttccgaaatttcaacataattttggtgttgagaaactattttcgtttctgtttaatttaaattgtatataatttcaatttgtttttcattagctttaattattagcccttttggtgttgtttaataagacacaaattttaatgtgatgccagaaagaatggagtgtgggagaaa

SEQ ID NO: 20728 - DNA, 1328 bp, Heterodera glycines
tggcgaagtggtttttgtaagatagtaaagggacaagggtggtggttcgagtccgttgtgcaacatgaatatttttatttatttttgtccaaaatattaaaaaatgacgatatttgggaattatttttgaaggtttttgccaaccaaattggataatcttggtatctttcgaaagctcttgatgtgtagaaactttttctaagcaaatgctaagcaatttgaatgagtagaaaaaagatatgagcgttcgaaattttgtttttgaataattcataaaccaacagataaaatcaaaaaataacagatgaatcgatgcagaatttttttttcaatcggtatgcaaaatttgaagcagatttaacaagtagaaaaaattttaaacagcatgaagtaaattcagtttttctctattaacacagataaagaaatagtacgccaaaagagagatgtttttttctctgcactctctctttattgacacatgtctcgttttttgactcggtgtgtgctatggcatacgcaggaaaaacgagtttttaacttggtttgaagcttctagcttgaactttttggtgcttttttgcaattttggtgccattttcatgcccttttcagtatttttgaaaaaatggaaaatattttgaaaattttgcaaattttcttatgatatttcttacatttccaaaaaattttcccagcggcgcctatcggcaccgccggacccacagtataccttggtttttgaaattttaacaacaaaacagccaccaaaaattgtcattttttggtccaaaactactaaaaattccttcttttcgctccggtgttgaaatttttaatataacatatgaggaaaatttgcccgaagagcaaaaaaaaggtcctttggaaaattttttgctaatttgatttgacaaaaaattattgcccaaaatgttgatttttgctgcctttttccaatttttcgtgtctttttgacgttttgttcattttttatgccttttttcacatttttgtgcctatttgagaaattttcgtgcctaaaagtccgggctctattaatgatacgtaaactgcattagagccaaaaaaatcgaccaaattttcgagaaaattgcgtattttcggtacttgtacagtttagaccacataaatttttttaatgataaaaacgtgtttcgagaggttttcggggtcgctcagcatgaatccggcatccatttcgaccaatttggaaccccggacccgaacgcgaacaaaaaatcgtaaattcactttcaaaaacgcagagtaacggtacaaaagccaggggcttttgatttgaagag

SEQ ID NO: 20729 - DNA, 953 bp, Heterodera glycines
gtacacacagtttcgccagaaggagatcatgtcagtttcaattaacaaataattagtattaaaaataggagagtgagaggaaaccaataaatccattttattgtgtatttcaaccaaaaacttaattgtccctttaattcggacatccccattagcccaattagctcttccccggcttcttcaggttccatgtgtccacccttttgccgtttaccattggcgacgcgcaacaattgcagcgcaaacggcacattggcaacgacatcgtggccattgttttccaagagcagaacacacccttctgtccggacatgatcgcgagcaagtacaaaaaagggcaacattcagtgcctaatttaattattttctttttttccaaagctttctccacgcctatttggtggttcatcccattgagccgggcactgaccgcacgcgttaccgcgtgtcgatgacagcgcgagacgacgtgccgttctttggcccgacgcttccgcgctcttccataatttggaagtgccaactgcgcgactttttgctcaccaaactgatcaatgcggaaaacgcggcttataaggcggaaaaatttgccaaattggcggtattatggcaattttcattttctgaattaatcaagtttgttcaggaacgcactcgggcatcgctgctggatggactgtactcaaatttgaaagagcgggcccaattttacggcatggcatttttggattcggtggacagcgcgacgaaacagcagcaacaggagaagcaccaccaccaatggcaaaacaacgggcaaaaccatcaccagcacagccaacagcagcaactgatgaacggaggaacgaacccaacgttttgttttccattgacactgcgctcgttctgatgctcctcttattcaatgatcaaaagagcaaaacacatttttgactgattatataatatatctg

SEQ ID NO: 20730 - DNA, 1281 bp, Heterodera glycines
tccaataaaaagcaaggagaatgccgccccgttttggcctttttcacaattggggaaggaaaggcagcgcggcattcggagtttttttggtggcccagtgagtttgattagctgacgtgggtgatcagagaggcatatctgatcacagagccactggaccgaatgatctgatcagaaaggcaagcctaataacagtgactgatcaacaatcaaaaaattcagaccacggtctgatcataacattgatcagtcgtgttctaatcaaactcactgaccatccgtttcaagggtctgatcagagtaattgatcatccatgggtctggtcagggtcactctgatcaatgatcacccatgggtacgctaatataaaaaaatgaatgcaatacattgaacagcagagagacagagataaacaaaggacactaaaacaacaacaacaaaaataaaacacagacattttttttggggggggatcaaacgaattcgcctcctattagcacgttggcaaaacatgcacaatcatcaacatttattattattattttaattagagttgttcggcactagggaattttcttaccgagaatccttcgaaaaaataattcgagagtcgagagaatttgtctggcagaccctgactgattcacacgggtttggttccggcatatagaatggcatgaaaagcggaaacaaaataaatttggcattttttggtaaaagttaaagccgattcccgtcgcgttcagtcccggccgagcaactctaattaggtactaattgttcaccgggtacccgaaattatttattcaacaaattctgctgctggtgtgtgcttttcccattttgtatctgcactttcatcaaagcggcaggcaggcacgcaaatcaatcacaacagttcatgtcgatgtcgacgaggacgatgatgacggcttccggccggacggcggctgaccatcattagcggcaattagcaacaaattgagcgatgaagcggcggtgacgtcgcaagccatcgttgtgttcgtcgtggaagaagctgctgctgctgatgctccttgtcgagtgcttgtgatggttgaggagcagcagtccgctccggtgaccagcaccaccgtggagtcgggcggcggcattgcgtggcacttcaaaaggaatgggaacaaattagctaattggaagattgattcttttttttggtttttggatcgaaattcggcaaataagacaggttttggacttaaaaaaactgtgttgggctttgtttttcccgctctcga

SEQ ID NO: 20731 - DNA, 1773 bp, Heterodera glycines
aaaaagcatcaaatggaacatttttgacagaaaattattcataactttgcccaaaatgaaccaatttcttttttctttatataattcgatagacctaattgtttctgttatcatgcaaaattaaaaaataattagttaagtttaaaaaaagttatgacttgaaaaactcaaaaaaccaagtttttttttaaatcataactttcttgaaacttaacgaaattttttgaaaatttccatgataatagaaaacccatagggctctcggatgctatcaagaattaaaaagttggttgctttggagcaaagttatatcaaaaaatattcccatttgatagttttttgaggggggaggggaatgaggcggggttctgaaatggcacccagcaagagcaagcagtgcggactgactacggacaccgacccgttggagtccaacagggacagtgttgttgttgtgccgagaccaccgccgccaatggcaccgttgctgctgctgttgctgcgcgacccgttgccattgccgttgccattgttgccgccgaggaacatcatgttgccgaacagtcccgccgccgtcgcatggtgcagcaacggggatcgactgttctcgttgaagcagtgcaacaatggcacacctgttggggcaaatgctggaccatttttttgcatatttttgttgaatttgaccctttagagtgtgtctcggatttggatgaccgtttttctgaaaaaacccgaacccgagggtcagggaccttttttcacgccacttttttgagacgagttttttaaataagttttggtgaataggagggagtccggcggtgccataggcttcacgggcaaattttgtaggttttccctcggtttttaataaattttcattaaaaatggtaattttgtggatttttggaaaaatttcgcgaattttttttttgggtaaattttagtgagttaagtcttgaaaagggtacaacaagggaactttcagaaaaataattatttttctcttaaaaatttcagggtgcgtagggatcggaaaatttcaaattttctggcttttttttgagacaccgttcgagctggtcgaggtggccaacatggactgcatcaacgagctgtagtcgtccgcgctggccgacccacagctcagccgactgccaacgccgccggggatgggcgtgccgcgcggggtggtcaacggggaggagaagaaggggatgggcgaggtcagtgtggactggtagccgttgcgcagaaaggcggacgcctgcatggaatggcaaacaaataaaaaaaaatgcccatggaactgctggtacctaagtggtgatcagaaaacgaaattgatcaaaataatgatcagcaatggggtaagagacaaattgggaaacaaagtgatcagacagtcaatttgagtgatcatttaaagtcataagttgagccaaactgatcagttcaaactaaatttggccgaaaaagtgatcagccgatcaattggaaggaccagttaaagtcaagatcatttgggacaacaagcgtgatcagatgatctatcgaagcgctcagttaaagccaaaggcagaatcaagaaacgcaccgtgaagatatcgcccacaaagttggggatgattggccgtggagtgatcaaacgctggagaaaaatttaatttttattttaatacaaagtctatccccgtccccgttttcattatcatcaacactaattgctggggtaatcatttaacaaatgaatactgattaatatccata

SEQ ID NO: 20732 - DNA, 2413 bp, Heterodera glycines
atattttttctgcgcatatgctatgagaaaggggcctaaaaatacgccctaaagatagactttttggaattttaaaaaattatacccccaaaatacgaaaaatttgagttttcgtcggtaattttggcatttttaataaatattttcgccatttttttgcgaacttttcttttttttaatgagaattttttcgaaattttggcaaacttggatttagtttttatacaatggacgacaataaaaatttgcgtttttaaattttaaatccattttttggttgcttattgtactttttaattttatttaagcaaatatgaatatacacaccttttggaattttggagggtttaaaacaaatattttggcagtttttagccaatattttggtccatatttgaccatttttagctttttagtccatatttcgggcatttttagtccatattttatgtccatatttgacgttttttagtccatataatttcgagccctaattataactcaagccctaggccgctaatccctaccaaaatgctaaaattaatattttttattgatataaatgtataaattggttttatacccttacaaccaaaattactagcatttactaatttcatgttttttaatgtgttagaaacatgaaaatagtacgccaaaacgagagaaaaagaaatgcaaaattttcatcacagacaacttaataaccgagcgtaaaaattaaaacctcaaaactttctcaattttgagaaagatctgttaaaaaagcgccattaaaaattacaaaatttaaaataaaagactaccgattttttttattaattcaaaattccaaaaaattacaaaaaacgcccagcctaaatttgacagggcctgggacgcccgtttaaactggcttttttgaccgggcggttcggcctgatattttcaatttcggtctctaataaacacttcctaagatatgaaagtcattaaattaccaacatcacaagaatctccttccattggcataacgaaggaaattacaaggagaacataaaattcaacaattaataaaggcagcatttttgctgaatatttaaatttaaggaaaattttttttttgagtgagagacaaaaacttattaaaaaaagactaatatttgcaaaatgcgtattaatttatgtaagcaatgcgcgttttccattttaaggacatcgtatgtgcatttatcaattatataattgattataactgctttttgatgttggattttgtctttaccatgggcataaacaatattaaaaaaattcattaaatcgtctcctctgaatccatttacctatctataataataattctccaaagctctaattattttttatatgacgcttaaaaatggaatatttttttattcgtgattactgatctgtagggctaggaattatatggatataaaatcgcaaaatatggccataaaatatggaccaaaaatcgcgaaatatggacataaatttttccaaattgagggtacaatttctcaaaatttcttcaaattcgctaaacgcaaagtaaaactttcaaaaatgttaaatatgggattaaaaatcatttaaaaaaaacacgatacagcttaaaatttattcattttagcgaaaaatcaacctgaaaagcgaaattttcgcttttttgtttatttttaatataaattaaccaatttttaagaaaatttaaatttaatcaatattttcggcaaaattttgctgaaaaagtctttttcggaaattttttcggtctttagggacaaaaatgccaatttacctgatgggggccgttctaataggggttttttgggaaaatgccaaaataaaaacatgtttttcgtgcgtttcaggcttcccacagtccaggaaaaaaatatggatttccatataattcccagccctactgatcagcgtcacaaatgtcctagaaatgactttatttaaaatttcaagggggtctcaaaactgaaaagtaccaaaggctgttcagttataataaactgcgaaaattttaaaaagaagtccaaaatattatcatagaatataaatttatttcttttgaatatttttttaattaaatttaaaattttcagtgatttgactgtcaaataaaaaaaagcaaatgtaggacttttaaatttctgttaatcttctaaaatgaaagaataatttgtatttttgcaaaatcaattgcgtttaaatactcatcgtttcagtattagccaaaaaatcccactccaaccattgtttaagggtatcgttcaatggacattttttactctttttgattgacaataatcttcgaagacaattatgaaaatagtcaggtaatcttaactctgggtggtaggtatgaaaacacattatattcaaaagtgactatcataaa

SEQ ID NO: 20733 - DNA, 2559 bp, Heterodera glycines
  unsure (1)..(2559): unsure at all n locations
gatgatttcgcaaatcagctcagatggtaaacgttcctttatgggtttntggggaagatgaaatgaatggtttgactgcttgcattggcaacgaagggcccaatatcggaagacccgttgtcttacaataagccccaagggaataaaatcaaaggaaaatttgaaaatgcctccactacagggtattggtgtcgaaaattatcgattactgggcggaacgtgttgaatttaagaaattcaaaaatacattccttgagggatagcgtcgaaaattattgattagtgggaggagcttatcgacatttggacggctttaaaacacacacccgggcatcataatttcatttgctctattttttaaataattattattatttgctgtgctgttaaccagggcgggagcccgacttacagaaccccgtttatcctggcagcaatttctaatttgacttttagtacttgaggtagtgcattagacaattctaatttccaaagctgtttaggtgccctgtcgtcttgtgcttcatgggtggcagtgcgctgctcttcaggtcaatggttggttttgaaattaacacatttaattgaattgatacacaaattttgcacatccatgccaatttgaataccatatataaatatgttgctttttctccatgtttcattttatttattcaaaaaacacaaaaaaataatatttaattaaaatagattaaaaatgtccaagcgcttcactgatttttctattgactcaattctcggcaaaaagcctcgacagggcttcctcatcaatcaaattttgggcatagcccacgtgcttggatccgttcaacacggtcagggttcgtcgaataaacctgtcaacgagtacgtgaagaagcttgaaggaagcttggaacacaacgaaaagtttcactacaccaaaatgaagagccgattcagcatcgaggatgtacctgcaaacccggaagccttactatcagcaatcttccaatactgtatcgaagaatcgattgcagacagtcgcaagcgaggaatcgagcccactcacctcggttgtctcatcagcagcccactgctctctggtggtgacattccgattcccatccggcaaatcaacgaaaacactgtcaacaccatcctgaaccgcttcacccaagtggcccagagtaaaaaacagcagaacatcaccttgtggggcgagccgtttactgtggttgtgactacagtaaaccgtttgggactccccaccaaaagacaagtgaagggaggagcccgtcgtcaattggctcgggtgcgtcatcaaatacatgaacaatgtttaatcaaggttttcccgcgattaaaaacatttggcccactatcaatgtgctagtttaagatcctgaacccggatagacacaacttttgtttgttttacgccctgcaggcaacaatggttgcgaagacaaaacaatggcctcgatggaaatttcaccgatatttgaataaccagcacgggcaacagggacaacttcagcatgatgcggtgcaactcatgaaccaaattggtgcgcctttgaatttgaacgcgtacgacgctgacacatacgtgccgcgagttatcaaccattggaataacaaccatcaacataaccgatttgctgtcttcatatttgggacaactgggcactacaaacccatctacaaatacgtgaacaacagctacaacactcctcttctcctatatttcaacgacaatcactttgatggggtgcagaagcagagtggcctgttcggaaagccttactgtttggagtgcgaacagccatatggaagagcatcaaaacacagcaaatcatgtaaagcacgttgcattctttgcgctcgctgtggtccggcattcccttgtgaagcgactggtggcttcttcagaaattgcaccttatgcaataagaattttaacaacaatgattgcttccaacaccatctccaatccggtttttgcaaacggtcaaagaagtgcagggattgtggtgttgtttgggacgttacagacaacaacaggaacggaagaaaaggtcatgtgtgtggtgaacgctactgcaagctgtgtaaaaacttccacaaccctgaacgtggctgcttcatcaaaccgctcgagcctagagaattggacccatatcgaattgttgcttttgacttggagacaatgcaacatcagcctataagtcgtcgtgagccagagaagagacagcatcagcctaacttcatctcagccaaagtgatttgtcccggatgtattgacaacggtagatggcggaatggaaccgcaggatgcaaagtgtgtggccctcaccgcacagtcgccttttgccaacgtcgatttgtaaacacagctgtcgacaaacaagttgtcactgacaacccgttagagacgtttgtcggttggatcatcaatgatcttccgaagaaatacgattcctacgcattctcacactttggaggccgtttcgacatggtccttgtttttctgaaatgtgttcanagatgggtttcaaccctgaaatgattcgtcag

SEQ ID NO: 20734 - DNA, 1328 bp, Heterodera glycines
  unsure (1)..(1328): unsure at all n locations
aatgactgcacggcacaatgaaatggacttattcattattaggactcgagcgagctctattttgtttcataatttaactgtgaataatggcactgaaattcgactagggaaaaataataaacttttggcacagaaaagagccaaagatgaaattttaaaaggttatacaaaattcgaccggcaattctttggcgttattcactgcccctcccaaattgagcagcggcgattgtttggaggtgacgccaaatgaagcggcggatgagctgatgaaagggataagcggaagaatgcctgaaagtgtgcggagattcggcgtttcacattattggtgagatgacccgaaatgaacggcacaaaaaaaacgatgttaatggaaaagtgtacgaaggtggcgaccaacatgcaatagctgcggtgctgagttgccaaaactccgacgatgcccgcgcaaattgccgaaatgccatagaaaagttcctgacttcccttgacgatatcagcacgccaataaagccgaacggcgctcaaacagaaaatggcagacccgaatacaatctgtgggacaattattgcgtactcagatgcacctaaccattcagcttaaacgcaccgtcagccaacttcccaagcttatcgtactccacggggtcatctcctgccgctgaaagccttgctcgttttgctcaccttcattcaatccgactccaaagtcagtttgggaagaattgaaaaaggcattggaattgggggcaaaatatgccggaggcaacgaagtggcagttgaatttttacgtccgagtgaacgagaaccactgagtgcggacggagaacgaaatggcatctgagaattgtggggggggaggggggggggaagaaagttcaacagtttcggcgcagaattgccgaaaggttattgccgtcctcgcgcctaattccgtaattttgctgctgttggttcgtgttcggattggcgaatggggccaaaaactgctcatcggcgaccatttccggcacggcgtgctccggacgaggcagcgtggtgtaagactgacaccgggagggcgtcagtttgtcttagacaaaacaactaaccgttacaatgtgcaaaaaataaactcacatgttcccatgtcgctgactggccgtgatccgaatatcagtcccgggttttgatgcttatttttcccgtttaggcaattcagcgcagaatctagccgattgtgctggtggattaggcggngaggcgcgtaaactaagcgaattcaatagaatgagcagcaggcgagcaaggatattaaaaggaccctactcgaatgcatgtaatc

SEQ ID NO: 20735 - DNA, 952 bp, Heterodera glycines
gataatgaatgccatcatagcaaaggaaagatgaaagggcaaagcaaaaggaagtcactgaaacggcggaagtgataccagaagagagaggaggagggagcacagtgtggtcagcagaaagaagcgcgaggggggggggggggaccccataaattaacggagtaacagcaaaatgacctaatttgatttgatccaaatgaatcggagggcggagaagtgagtgatcggaggtcgctaaacaaaacggagcatcgccaattggttaaagtagcaaaaggtatttatgtcggaaattttggaaagtgaaaatatttaaataataaagaaatttcttttttttttattcaactgaccattgaattcgaaatacatagttttaatcttaagcgataaaaatttctctccgttggacaaaatttaattttgatgctatgtgattcggcgttaaggacaagcggcgcctttcaaaattactttttgccattattctctcataatacagtaaatgtccaattcacctttcaaagctgcaaaactacaatatgagttttgtaacaatattatcaatgaggttgaatctatattatctttttttcaaaatgtaattctttaaattttcttataaaaaaattttctaagatttttttggtaattcgcacttttataattgaagaggtcatttattgacgcctaaagtgaaatagagccaaaatttagcacttggcatggatttcaagggttttaggatcgctgatcacgaatccggtattcatttcgaccaattccgaaacccggacccgaattcgaacaaaaagtagaaaattcaaaattttcgactttgagtctaaaaatggtttaaacttactttttattgaaaccttacgacttttatctagtttccgcctattaaccaaagtaaacacaaatctgaaattcgaaaatttggaatttt

SEQ ID NO: 20736 - DNA, 2831 bp, Heterodera glycines
  unsure (1)..(2831): unsure at all n locations
ggggggggggtgaaacgacctgcctctcacatggatctcatcccttttttaatctttagactgcgtctttatgattgtgaagttnggggtaattnattgtnaganngaaaanagagnggtaattgtttgtgagatttgttttgtaatttttnaattatttaanaaaagaataaattttgnantnnttttttnntngtnatttttgaanaattnattngttantgtaaaannnntnantttanagtagtnannntttannataannaanagnattnnntaananaanaaagatttttngaaaagnaaaggnatnnnnagnanttnnnttnttntnnnngtnttnttnagnnttnnnannanatntnttnaggtaantntnagtntgtgntnnttnntnagtnngtntntnnntnntnntnntnntnntnttnttngataagtggngaaaattatgntnaaagnnagnagnagnaaanggagnanggntttttnttgnannngaattgtgtaattggnnaaaatnagnagaagnaanagtgggagtanaanggnaacaacaacgacgactgctgcgaaccatcggcgacaaacattcgcttgcgacaacttcagcagtccgcggcaccgccgcccactgagcacacagtgatcatcaaaacacctttgccaacgccaccaaagcattacggcacactgctgaagggcgaagagcattgcctgggtaggcacggagaaatccggggcagacagaaagtctaacagtagcggctgaaaaagtttcaattgcaataaaaaaaatttatggggggaactactagaatatttgttcaatttttgaatttaatatttagtttatgacttttgagttcattatataatttttgttctttctttaaggtgttacaccttcttctgctgatgccgggccttcacttttgtttgaacaacagagcaacatttgatcatttccaaatgcatttgtacagaaatcgccatcacttatgcggaaaatacatttaaaacaaatttcgttaaacatttcttttctttcgttataaaattcctttgttaattagttagatagaattgaaatacttatgcctaaaatcgcaaaatagacattaataggcacaaaaataggcaaataaaaaatcatagacatcctaaatcaagcggaaaacgcgtttttcgtgcttatctgagcttttttaattctcgggggtgggtgaaacgtagcgcacccaaaaacgaaaccctagttattattaggcccggatcacggacaaaaaattaaaaatacaggcagaagtgtttgaatttggtaaacttgacaatatggacaaaaaatttagttctttaatttttgtgactaaaagcgaaaaatagtaactttcacgaaaacaaaaataaataataaaattaaaatatttaatatcaagagaaagatatataacaaatttttaatattttaaacatggaaaaagagacaattttcgaattttgcaaatgcccaaaaatggaagaaacataatgaaatatggacaaaaatgaatttgttaaaatccacgcaaatcacagagaaaacaatcaaatccgtctgaattttaagtccagaatttccgtcactttcagttgcgttgacagaatttttgtgtcaaaaatggacatttttgggtatttaaacgttctattcattaggccaaattcatttctactcacaacaaccatttgccattctgctgactggtgtttcgtatttgcttgtggcttcttcctttttcgttatgcaatggaatgcgatttttattcaatttacattttactgccccatttgttgtttctttagcaaaacgctcttcgaataaccctaatctctgtccaacaagcaattcgatgtctgacatctacggcttcatcaacaatatctcagatcgtatatcacgacgcgtacgtcgcaagcgcccaacggagtctggggtttctggtgaggaccgagtcactttttcgaaagttcattttctttcggttttcaggtgtcagcggcgcaccgccggagactcggaaggacgacaaggcgaagggcggcggctgctccaaaaagtgcgcttgcatcatcgtgtgcagcattctcacgctcattgtgctcgtcatcggtggactcgtcctggccgctgtcctgacgcctgaaacattcaaaaatgctcctctgttgagcctcatcgcgggcaaaaagaatgggggcgtggatggtgaggagaaagaaaccgaatgataagcgactctgttgtcctattgtgtggctatattgttcaataatctgtatctgatcttattgtacacacattatgtttgggataaagaaagtacatttgtttgccaagttttattctttgtttcataaatgcgactttcttttttgaatccagtttcctaatgagtaaaagcgatctttatggtcgcgaaaacggtaatcgttcacatcattggtcccataaaaaaggcaaaaaaaggtcgttttttcgattctaagaagtactcgggggttatcgagggcgctgatcactaatctgacatcagattctcatataaatcatctaatctatgacttttcgtcaaaaaattttttgatggattttcacttttttatcgctgttactaaaaaaactcacctaatatactgttttgtttataccttttatgtatgtacttgaataagcataaaattaatcgacaacataaaatttgtcgaaaatgttttcatgtgaaagttggatttttgacttgtgtcattcatctcgaacaactattccagctacatacatattgatgga

SEQ ID NO: 20737 - DNA, 1547 bp, Heterodera glycines
acgcattcattaaatccaaattttgccgccgccaaaaacatgtcaatgggcgcttaaagtcacttattcttttctgtccaatattcctagcactaatctttgctgatcgccccgaaccaaacaaagaaagataacatctgtatggccattttgacaatgagtcaataggacggaaagaatttcgtttcacccggattataaaacttgactagaagtcattgatggacatcgagtggtgaagtccttttgttataaattacttggttttccctatttaattttgtgaaattttaattttttatttaaaataaatatgaatttattttgagaaaataaaattatttgtaaatttctttatttatcttaattattttttttaatcatgacattttcgcgttgtcattcattttgttaaggcgaggctgagtttctttttgttaattatctaaattatttttagttttattttccttttatttatggcttttttgttttttaaataatttaatttatttgtgttctttatatttttttctgaaaattaattaaattttgtaaaattttaaagaacaaaattcatttttttttcttttttttaactggtatgtattaaaaattaataaaataaattgggaccagaagatttatttagcaaatattaattcatttcttattccaattatattaataaattagaaatttattttctttcttcccttttttatataatttttattttatatatttaaagttaaaaatcaaataataaaaaatgaataaaagcaaaaacaagaccaattaagtatgaataaaataaatttaaggaaaatgaaatagttttaattttatttttaaattgatttaatgagtttatttcaataagctttttatcgagttggttccaaatttttgttacccgccccgcaaaagtataaattttttgcctaatttatatttcgagttaagtctataaaagggaatgttaaagcgtttagaaggtttaagtatttcaaagggattcagatctgttcggccataaattattttatgagccatgaacagatcagacagctttcgcctgctttcaagtgtcggcaattgaaggtattctaatctttgttggtatggaatgggtggaaggctgcatttgaaaagaactcttttggtgaaatatttttgacattttttcaatttttttaatgttttttagaagagatggattccaaacctcaggagcatattccaataacggtctaacataagttttgtacaaaataatccaaatcctagaagactttgatttaataacccgaaataaagaacgcatacgtaaatatgcattctttattatttgtgtgacatgattggaaaattgcaatttattatcaatatttatgcctaaatccctaattgtatccacaacatttattatatttccatacaattttatatatttctttggggtttttattccccaaatgaagtacaaaagtttttttaatttagattctgatttgccatttatttgcccattctgataaattatg

SEQ ID NO: 20738 - DNA, 1757 bp, Heterodera glycines
gggctcaaccccaagtagaatataaaaaaacaaaacttcattaaatgttgttgcttcggtcattcaaaagttaatcaaatagcaatttaataaaaaaaataataacttaaaatttttttacagcactgacaaaaagtgatattaattttttgtggaataagggatgtgatttcataaaattgacagctgtgattttcatagcattgtcaatggcattaaattaacttaaaggaaaaagcgaaaggaatgatatagaaaacaaaatggtgccattagtaattaaattttgtttaatggcggcaattaagcaatttgaataagaaatgaaaattcaattgctgtcaattttatgaaattacaagtctttattccccaaaaaattaaatagcactttttgtcagtttttgttaactttctttaatatgaagagtggtaaaaaaaagacaacattatattcattagaaaaattttttcatgttgttattctgacttcatcccaacaaagcggctttatatggacaaaaaaccaaaatatgaataaaaaaatttgcaaaatatgcagaactgtggaagaaacgctgaaatagtgacaaaaaatacgaaaatattgacaaaaagattctgaaaattggtttgattttataaaaaattcataaacccacaaaattcatgttaaaaggatcatttttactttgttttattaaaacagatgaacacagatttaattcagtgtttgggggtcgaacttgaggtagaaatagaagaaagactaaaggtttagccagttggccatcatattccacactgcctaaaagaatggatcaattttgttttttctttaaaattttcccctttcagagtatttcttaacaattattttaccttctaccccccgccgcccccgtttatttatatccttctggcaaatacgctttccaaaggtcggaaacaattacatcagcattctgtaagttaaaaatgccgtgtttaagacttggataaacatattttattcaattaatttttcaattaacagaaattctgttcaaaaattttagaactcataaaattacaggtaccggttgagaaagttggtgccttttccagtaatacttgtaatggttaaaaaataaattttttgcaatatttgataataatttaaaattattctgaaaattttcttattccttttttgcttataaaattcataaattcgtaaagttgttaatatttttgaagaaatctcatgtggatgctatagctcactcatattaagcttttctctaagaaataaaacagataatcaattttattgataatctttttttcccaaaacctaataataaatgcattagctactttaaatattaaatttatgttcataattattacttttttattgagagtgaattttaatttaagtctatcattttagttgatttattaaatgtttggagtaattttcctttttactttatttacattatttgccggtggaccaaacagcaaaaactgttcaaatttgcaaacattttgggccagcatttgcgaaaatgccgtgacaatgtttcaaaatgccgttaagaagccaaaaaagggagcaatttgtcattcatttgatcattcaattgtgttaataaatttgttgaatcgttgcgaaattcgggagaaataatataatttaataataaattggttaattcctaaggaataattccttagaaggtcgaattaatacaaagagtctcgacatttgg

SEQ ID NO: 20739 - DNA, 2384 bp, Heterodera glycines
cttcagttccatctaaaagtaaaatttaatcaaaatataatttaacaaataattgggttaaatttaatcaaatttaaatctgataaataattaatttagccccgaaaatgtttactagttattaccgaattggcattccatttgttttgtgttgaaaagtttgcagcgtttttcaatggtgagtgaagaagccattggggagacgatcaattaattacaattaattaattgcaaaaggaaaccccgcttaaatatccacttgctcagcaataataaattgaaaatttttgtttacgcgaaaaggaatgaaatgaacaaaatgataaggcaaaggcggaggaacgaatgaataataaaatgcccagcacagcacacaaaatagaaaagttaaaatgacatcacctcaggttccttttccttgttctttttcactgacatcattcgaattattttaattataattaattgggtatccatttggaataaaattaatgaattttcaaatccctaggaaataattcaatgcccaaaaaattttccaacttaatttgcatttacattaacccgtcattttaaactaaatcataattttttttattccaaagtaaatttagaaatttgcttaaatgaacatcatttaatttttggtctcgtcgatcatcgtatttcgttttctttcaaatggtttttgcgattaggctgcggcagccaccaacttctcaatgtccgcttcgatgtcccttggctctgtgttgggcgagtaacgctgcacaacattgccatttcggtcgaccaaaaactgaaaaccaaaacagttcatcaaagaagttttaagaccaatcggcattatccccaaagaaagaaagatcagaacggccaatgtttgcgtgaaaatgagagaacaaacggtaaaagaaagtcgagagggcctccctccgccctctattagcctagctaatggggtaattaggcaaaaatcaactatcaatgaccaaagagacggttaacatcgttaatattttgcgctacaccactctttttgttgtggtgtgccttccccttgccttggtgaagttccatttgatggcgtcgatgagtgtgccgtgctgctctttcttcagaaagccgtacaacggatgctcgttggatccattgacgtcgattttctcgaaaaggtccggctcaaagttgtactttttgtgcacaaagtctttgatttcgttggcattgcccggttcctgacaaatgagttttattctgtattaatggaatcttttgaaagtatttcgtttttaaataagcataaaatgcaaaatttttcagaattaggaaagaaagaaagcgtcggacggtgccaactcggcccacctgtcctccgaactgattgcacgggaaggcggcaaccgcgaagcctttgcccttatacttgtcgtacagctgcttcagttggctgtagttgaactcggtggtgccgcaattggacgccacattgaccaccagcagaactttgccccggtatttgtcaaaactgatctcgtgaccgtcgatgtcgttggccttaaagtcgtagatgctcttgtgctgaacgtcagtggtagtggacatttcgccaataaatttaagtgaaagtgaggggggattatcaatatatctgcggattaatgaaaaagttcaactaatttaaaatcaaatttaatataaataatttattattcagtgctggcttcccgtggtttaagctcatccttaaagctgtggcaacgtacaagctatttgttctgacaaattagataatgctggaaatccattttgaaaagattcgggaagaattactcctccccaaagcaactgtaaaataaaacatcacttaatattttccacacccttcagaatttgccaataatacatataatcaacgaggtgtagcaaaatgataaaatggttaacgaatttacaaatgatttgttgtatttatttagaaaaagccaataatattttagaactcataataatttattttagcatacctatttataagaaaaattaaataaaaatattaaagaaaagaatgatagaaaactgcaacaacacacacaaaattgttgacgaaaacaaacaaaacgttttgaggaaaacaaaaataacgaaggcaaaggcggggcagaaaatcatttgctaaccaaacaccgacaccaaagaccaaccattttccattgtaataaatgataaaacaaagatataaatttaaatatatgtataataaatagttttatttaatttggtcagcaaatcagtgaaaaggactaaaaatgtgccgagtttggcaatgacattgcctagtgggccatttgacggcccctaagggtaaaacctaattatggagg

SEQ ID NO: 20740 - DNA, 2183 bp, Heterodera glycines
atttgataccgcttggtcggctttggatgttcagctccgcggcagttcggctgcgggagagacttttgagtgcagcgccgagtttctgtgaattggtgcggccattgattgttggtttgctgttgctgtactgcttgatcagctcgtgtgcggctgctgcttgtttgtcgttgcttgctgcttttgtttttgccgcttgttgtgcttctcgtttgccgctttgccttttgttgctttgctgcgcttgctgcacttgcgtggttgtactgctgacacggaggtcaagcagtacaccttggggttcccgtcgtttgacttgtttgtttgtgttgattgtgcaactgttgccacggagagcaaacagttcacaccgatcccccttgtgttggcttggattgggtactgctaccacgaagagcgagcagtacttgaattactgacggcacaaagaccgatcagtaattttactgattacttatggcacaaagaccaataagtaatttgaaagtgaaatactaatggcacgaagaccaaaatagtaagtcactgtttcccctgtgaaactactgctggctcggagaccaagcagtatttcacaattcccacttttgctccccccctttttgatgtattcaagtttggctacggagagctcaaacttgatactttttttggaattttttctcaaaaaattccccaccagttgcagttccactactgcttgaagtcgttcagttgtgctggtgctgtcgagggtttgtcgtccctgcccaggtcgccacttgtccgatcaccacccgttgattgattgattgattgagttgagctccgttgagctgcttggagatggccgtgttttgagttgagctccgttgagctgcttggagttggccgtgtgcgcttgacgttgagtgcggtgcaggtcgccgcggtggtgtcgacaaagcccgaggagttcgggcgttgaaattgacaggagaggaagcagaaagtgggacgggaaatgtaccgggggtcaaacgggggcaagtgcagaggaaaaattcacaccaaattttatctcaaacttgggtaattaaaccgaaaaagtggacaatgggcggacaaatgggggaggaaaatccggccaaaggccacaaaataaaatgtgaatgcaaaatggccctattggctgatcacacaaaaatcacaaatgaaatggtaaaaattgggccaaattgggaggacatgaagttggagcagtacaacaagtaaatgtgtgcgaggggaattgggacaggacaatgagcgcatgaaatttggggaggtgcgcatggaaatgaattggccagagggggccaaaatgggacaaatatggcggtgaacgggggccgaggggttggagctgttcggccaacaaattgttgtcgatttggggaaatgaagtgctgtttgttaagcacacattaaaaagggacggaaaatggggagagaattttttgggtgataaggaacggaatttgcgggggggagtgacagccgctgataaggcggcaattgcacatcggaccatttttaaattgaattgatttttggtttttgtccgatgtgcattttggcacaaatcaaataatttgattttcgaaacccgtgtttcgacaaagataatgcttttgggacaattggacagaatatcacagaaaagtcagagagagagagagacactactgctgtttgggatagacagacagacagacataaaattctaatcaattaataagattttatgactgtgcaactgcactttgctaagtagacatatatgttatctgtgcggagattttcaaaaaaaattttttttgaaaataaatgttttataggttttcggggtcgggaaaaccgattctggcatctgttttgacccaattcgaaccccgaacccggactcgaacaaaaaagtcaaaaatccatttttcaaaaaaattcatattttatgcataaaacagggcgcgtatctgtccttatttataagatttgtccttatttggagggtccaaatcttacaaaataaaaatgtccttatttgtaagatttgtccttatttcgggctattgttcttatcccctaagtatattaaatgagagcaagccccgccccctcaattaaattggcatttggcgttttgacttaatagaaaaaaagaa

SEQ ID NO: 20741 - DNA, 1290 bp, Heterodera glycines
agctttttgtttgttcgtcatctgaaaacaaaaatggaggagatgatgtgtgcatgtggcaaaatatttaggaattactaccgataagccacacgtaaatcaaatatttatcaaatacattgaaatagtgtgaaataaaaatggtgtatattccttatcgccacagtgaagccgctgcaatcattcagccagggctcacatatcccatctgccctaagggcattgagtgcagagttatcattattgatcaatgaactcatcgatatacaatgcgaaccacaaatctcacgaaagagcaggtcctttaatcacgattccaaaggataagtccttattatcatcaagctttaacttgataagttttggttaactccaatatcctatgttacttctcaccagtccactggtcatggcaaagtgcgggaccagcttcgcaccggatgttggccggtaacaataaggaaatcatcattgtaaaccgtggtggcccacaatgttcaaaggaaagttcatcgtgctacaatcccaagaaggggtaggacaagttgaccacaatcccgtgatgggcaggacatgttggccacagtcccatgaagggcaggcaacgtttaccacaaatgtgacagatgcccgaagggccagtcagtgaatcgcaaatggtgcgacgcatgccctgaagggccagtcagcgaaccgcaatggtgcgacatatgccctaaagagccagtcagcgaaccgctttggcgcgacacatgctcagaagggccagtcagcgaaccgcaaatggtgcgacacatgcccgaagggccagtcagcgaaccgcaaatggtgcgacacatgcccgaagggccagtcagcgaaccgcaaatggtgcgacacatgcccgaagggccagtcagcgaacagcaaatggtgcgacacatgcccagaagggccagtcagcgaaccgcaaatggtgcgacatatgcccagaagggccagtcagcgaaccgcgaatggtgcgacacatgcccagaagggccagtcagcgaaccgctttggcgcgacacatgctcagaagggccagtcagcgaaccgcaaatggtgcgacacatgcccgaagggccagtcagcgaaccgcaaatggtgcgacacatgcccgaagggccagtcagcgaaccgcaaatggtgcgacacattcccgaagggccagtcagcgaacagcaaatggtgcgacacatgcccagaagggccagtcagcgaacccgcaatggtgcgacatatgcccagaaagggcagtcagcgaaccgc

SEQ ID NO: 20742 - DNA, 2876 bp, Heterodera glycines
tttatattttcaactatttattaaattttaaaccattagctttctagattaccaaatataaagatttttttaataatttgtttgtaaatattatgcaattccgttttatgctatttaaaatatattttttatttttataactctaaatttttgctgtttaaattgaagcattattatttaagtgatttaaagattatattttatttaataaataagtttggattcaaagtaaatatttattaatattctgtcaaataattattatttattttgtatttaaatttttaataatttttaaatccttctattgtacactcattattctatagagcttaagaactgattaacattttttaatataatcttttatttaaatttaaatttttgttttagtaagaagcctatcaaaatttttataaaaatttttagaagaaaaagaatttctaaaaaagatttaaatttttaaagaaaaatttatataattttattgtacattattcaatctaaatttcgataaaaatacaatatttttcaaaatgtttcatttttaaaggtaagacatgaacacttttctaaatttctttaaatattttttaattttaaatttttctttaaatttaatgtggtgtggtccataaattttcgttattttagtaaaaattggagttgattatagaacaattggtaaatggaagaaacaatttggaatgggtaaatagtttcataaagttttaatgattatgtttctattcaatataaaaattgtttaaaaatgataacaattttttggtattactttacaaattttttatttaaaatattaaattctcataatttaatcactgttctagaaataatttaaattgttaaaaaccattttaaaacaaattttaagacagagaaaaaggttttatttttgctggttgttaaattttttgaaaagttaaaaattattggtttacaaaatatttgcattttcaaaaactttaaaaaataataataaacattaaaaaactttcaaaaatattaaaattataatttatagcgtaaaaggaaattcgaaaaaaaatataaagtgtaaaatgcaaaaagaaaatttatttcttaattattaaatatcaattcaaaaggaaagattgcaaatttgtaaaaattaaaaacctcatatatcaacgagtaattaataaaaaagtaatctaaatgcatcttcatgtcttatccaaattccaaatttttcaactaactttgataatgttaaataccgcatagcctctaattgctaacggacaacgaaacaaagcaatttccgactgagaagaagtaaaaatttattaaataataatattataaatctaataattttaaaacaatctaaaattaaagaaaaaaattgaattttactgattgaaaaatgaaaagttaaaaaattttttcaaaataaaaagcatgatgcccgttgtgccaccatttcacgggcggactcgctggagcgctgaggagctggtgttgtatatctgttaaaaattgataaaatatataaataaatactaaaaaaatccatacatgcaaaagtaaaaaaaatcattacaataattaaaagaaaaaattcaagcatattttattaaacctacggtataagataatttgcccattctcgacaggccggaatcagaagcccagaactgagcatgaaaattaaattaaataatgatagaaataaattataacaattttactgataataataaaagaaaggcttaaagcaaagtaaaaagcctattgtattgtctcgaggtcacaagaaaagcaacaagataacattgattatttttattgaaaaaatattgtaaaccaaaatattattaattttatattaattttttcttttcatccttttaactattttagtgaatgaatgttatttatctcaaatggattttacgaaatttcccggtgaaaaccgggctattttacgaattgcaaaaaaattacgtacgaatatcaacaaaatcggcgtggcgcccactcatagaagccaaaaaataaatttgaaaaaataaatgataatccaagtaatagagtttaagtaattcaaattcaaatttttataaattcataataaacgaaaaattaaatttttaattttcgtataattattaagtaaaagaaatcatttataaaaaaaaattttataaacaaaaattcattcaactggtcggcaaaaagacgaaaatattttgcaacaaaattaaatttgaattctctaattaataaatcaaagtggcccaatgaagaaaaggaaaaaaccgacatgtgaacatgatattaaaatagtaaaaaaagatttaaaaaaataatattttaaaattttgaataaataaatgattattcattacaattagtacaaatcttatgaaataaatggtaataaaaatacaaaatcattatcaaaattgaagaaaatgtacaatttaataatataatctacttatttgcaagatcaaatcataaaactaatgaaattggcattttatttttcttttttaaatactacagaaattacaaccattttttgttgccatttttctcatgtttggggagttatgaccgggtcaaataaccattgccaaatgacctggtcaaatgaccactttctatatgaatatgtatttgagaagaacaaattaagatcgcttatcaatgttgataattatttaatgacttgaaaattaacaacttagtttaatacatattttaataaattatctcttcattcgtaaaatcatgaaaattataagcattatggttaaatattattattatagtcaattaatttaagagtgatggtattattttaattttaaaatagctaatgg

SEQ ID NO: 20743 - DNA, 929 bp, Heterodera glycines
acagacgggaatatcgaactgcactttatgccaagtttatcgagacaatgcccggttcccctgccaagactctcggcaaaatttttcaaaatcccggccccgactcaacactctcgagcagtaagggagttggtctcaaattcatttagtgccaaggttgtcgagacaatgtccggtctcctgccaagactctcggcaaaattttcgaccccaaaaagtggtcgccgggaactgtccccaaaagtctcgggcattgccccccccccccggcgggcgtttgtgccgtcccccgcgccgctgtgccgcgtccgagcgcgcccccacctttttgtccttcttcagctccttgttgatctcgcggttgacccgctcctgctcgcgctcctcatcgtcctgcccgttgtgtccgccttggcccaacacgcagcccataaggcgcattttctttttgctggcggttgacgagttgcgctttttggccgccgctttctctgccgccgttcctaaattattttcaaatttattttttggccaaaaatatatttttaaatgcaattttggcattctgtcaaaaggtgtcgttggtgggacactgcttttgcttctgctgttgctgctcctttgcttgtccttttgcccgccccctgctaatggctaatgctaatgggccggggtgagtcattgttcttcacttttttttttgtaggtcggaatcgaatctttctgagtgttgagtcgagaatagacgagattttaaaacagcgggggtcgagacacccagaaaagtttggtaatgtgccattttagtattctcctctcggaacgcaaaaagttcgagactgggaattcgagactgaaaattgtgccgaaaagcccgcaaaatgccaatcaatttttcaaaacaatgccgaacaatggagaggataagg

SEQ ID NO: 20744 - DNA, 913 bp, Heterodera glycines
  unsure (1)..(913): unsure at all n locations
agttcgcctcaatttcgtcaccagagagacccaaacatttgaatgggaacaattggccaacaaaagatggacacttttttaaatttaattaataaaagagatttttacccaaacggtgtccatttttagtgaaaatgaatgatctgtcgaaaggcccaattaacgccaattcctacggtatcgccaacaccgtaagaatatttgtcatttctttcttttggaaaacgaaaacttccatttgcaaaaatggccttgtttgtacagccgttgcttggttttctaaacgtaatcttcttcgttttttgcttgttgtcgaattgtaccgaaataattatttatttacttattaaaaagttggcatttttatctcgccataaaatttctaccttttctttttgtggacagtaatttcataataaaaaatgtcggacgaattattttttcaccaaaatcgaatgtttagcgaagacggaataccaacaaccttttgaaggaaaattactttaatttattgttattaatgaaattagcaccgaatctttcgtccaatagacagttaaacatttgtcgccactgatttcgaggttttcgtgacaagcggtgacatcccaataattttttgggaattccttaaaataaataattgcttttaaaattattttagtccaagtcttgaaggattgattattttatatgaggtttagctaattaaaaatgtttacttgtcaaaaaatgaattttatttaattttttctctttcgcttattcaccattctcttctgaacgagatacgtcagatataggcctagtttgatcaagttcatggggtctcaacatatttcgttggtactcactcatcttcatctttgattcgactaataaatctttaataagaaaaanggtaatttatgca

SEQ ID NO: 20745 - DNA, 986 bp, Heterodera glycines
ttttcttaataattgctaagtaactgaatattttagaaatccctggaatttttgagaatttatatgtattttttggggcgatatttcggccgtgcatatgaaagcgatggatggatttggattagacaactaatttcgaggtcataagaacttacgaatcaattactctgtaataattcgattcagggaagttgctcgtctcggatctcgtatttaggcactagacacgagactttcgaagtaatgtgtcaagcaattcacttttttaaagtttcttgtaaatgtttatagaaaattttaaatttcgcaaaaattggaaaagtcaaaattttttggtttgcattttattttgcatttaactcaataattagttttttcgagtttataaatatcattatgaattttagcagataattggaaaaaaacctattttttttgcaaattttcatcttttagtcttaaatacccagggaaacgacaaaattttccgattattgggcccaaaattcgcctcaattttttcaccagaataaaacaaagaaacgaatggataaagagaaccatcagcaaaagatggatcaaccaaaagatcagaggtatctgtgaaaaagttaagggatttttgattattttaaacataaaataaattagataaaatagacaattaaccaaattgtaatttaaaatcgtaaaattatattatttattatttgctaacccaaacgaagtccatttttgatgaaaaagagctgtcgagtgattaaatgaacgccaattcctacggtatcaccaacaacgtaggaatatttgtaatttgttccatttctttttccgttaatccaaatattgctatcactttcatatgcataagtgcccctttcacatagaattgatcgatccaatttgttctgctgtttaacagcgaatccgaagatgatgccccaataactgcagaataaagaaaaaataaatattaaaatatttca

SEQ ID NO: 20746 - DNA, 1725 bp, Heterodera glycines
  unsure (1)..(1725): unsure at all n locations
aaagtgttaaatatcatttttagtcaattttcaaggttctacaagggaatannaatntttaattaaatggaattgatgctttaaagaaataattgggaatattttttgagattttaatttgnaaataattgatataattaataataattacctaaaattaaattgnntttannnnantaaagtgtgtgnnnanngaanagtgnnngaaggaaaaagtgcaacagatttgcgggtgcgacacttacaaatgtcgccacaacaagggctccgttgcgtccgtttgctgtccggacgattttgcctttgaatgctgccgcattgaagcagtaaaaataattgggcgcaattagcaactaattactattaatgtagagccccggggcattttctgtaatggtgaaaagcccacaaaaagatggaagaaattgtttttaggaatactgtataaattaatttccaaaaaaaaaatacaatacataatttaattaatgccataattaactccaattaaaatttcttttttttatattattaaaattttaatttttcgtaaacttttatgtaattcttattcaaaaaaataataattttatttttcaaataaattacaaaatttctcattgaattttaatttttattcttacatatttagaaatcgacaaaagttccagaaacgactaccacaactacggtatgattaccataaacggaataatcgaattttatcgaatttacatatttttaatttattaaattttttcaatttttttcaggcctctacaaccaccacaacgacaacgacagaagaacagccgagggttgaaaaattcgccaacactccgccactcatttgtatcctggacagcgcgtgcaattagtaaattttttttcaaattttattcactgttaggccagcggaaaattttttgagggattcgatttttttcgggcaaattggcactaacaatcctattcattttattaaatattatttttttttatcatccaattttcagcgcaacaaaatacccaacggccaagctgagtaagcggttcaaaatcagtgaggactgttcggaattggccaaacgcatcgaaatgaaatcgacggacgcggattggcagatgagcttcgagttcatgaacggcttcaaatacgcggcttttatcttcgatttccccatgctcgggggaggaaaaggcgggggacagtgagcagcagcagcagccattttaacaattaatattttattttaaattatttaagcatttttaatttatttttattcatttttttaaatatatttctttttcatttttaaattttgtttttatttttatttaatatgtatttgtcatttaattcatcttatttaaaaatttaaaaaagccaaaaaaagagcaaaattaaaattgccaaaaaaaattgtaaatcttttttaatttttttattatttaagcattttcaattacatttattttaattgtattattcagtcgttttgtaatcatttttcaaattttatttatatttcacttaatttatttcttttcaatatttgtattataatcttttttaatcatttattttctttaatatgcatttatcatttaaattaaaaataaaaaatcaaaaatcccaaaatanaataccaaaaaatttctaattcaacattaatccattaaatccattaaacatttttttactatttaatcattttcaat

SEQ ID NO: 20747 - DNA, 1006 bp, Heterodera glycines
attttcatatttttttcttttaatgtttatgtttttcaatggttgatcatttatttatctttaatatgtattcatcatttagtcaaaaatcaaaaagatgccaaaatattttctaatattttatttaattattcatatatttatcatttatgtttttttcaataaataaactttaaaacgaaagagtgccaaatgaaaacagacaaatttaaggaaagaaacgaaaaattctttccaaatactaattaattacctaattaacaaattaattgatgctaagccccccaaagatatatctaaattatatatgtcaattggctcctcttaaacattagcttttttaaaatctccttttctcgaaaaaaatgtttcgaaaaatgttttcattttattgcccaatttcaaatgctttggccatggctgaaattagccaattaaactctctgaaaaccatttgtctgattattattcacccaaatttgcggcctaatttcttggcaaaaaaaaaatgtatgccgcgaagagcaaaaattcgaatttcataaattaataattctgatcaaagctcggtactttcctttttggcgtcgcacgccaaaatttcaaaaaaaaaatcaacaaaatacgcaaaaatttaagaattcttcattattttgaggacatagtaaatgctagagaccggcgcgggacgggctcccgcgcgggattttgcgggatcccagtccgcaatcccgcattttttgcaaaatgcgggatttgcgggattaatcccgcgggatcccgtcccgcaaaaaattttggattccaatcccgcagcgggatccgcaaatattgaaatttccggtctctagtaaatgctaatcaacaattgttgatgataaattccaacaatttgactcagcttgacaatatgtattttgatgctttgtgtgaatttgtgcgcctttttgttgattaattaattttaaaatttttatgcgacgacatcaaaaaagtaaattaccaa

SEQ ID NO: 20748 - DNA, 1497 bp, Heterodera glycines
ttttgaaaacaaatggccttttggatgggcacgcccctttcatagagtaaatccatcgcttcacacaacggaaaggcggctttgtggggactcaacgatgttagccggtcgattgggtaacgacagaaaagcgggaaagacgaattgagagagagccgcttgtcctttatctgaagacgtcgtccggttgccaaactctcgaaaaattcatcacgaattccctccttcaaactgcggagcatattgtccttgagccaattcttgtcgaggaaaatcacatttagctcattcttcttctgtacaatttgctttatcattgcaattgccttggaaaactgttcattgctggtaaagagacgggcatttgacgtcttaaatttatacaaggcaagcaattaattaattgacagttgctaagtgagtcggtcaccttcattatcgtgtcatattcatgtgatatcagtgaccggtggatgacttcgatttggtagcccctcgccaaccgatcggaccccaaattgtcctcttcctgcttttcctgctgcggatagacatcggcgtggagtgtaagcggaatagttgagctgcctttttctccgccactttggcgatggttttttggagaccgtttaagcgggcgcgcatcgggactaagatggcctctcgtctgaattctctggatgtgttgttgcattctgtgataataaaaagtgtaacagaaaagatgaaaaaaatgggaaataaataatggacaaattaagagaaaaaattggtaatattgccgatggtaagaccctttttgaaaaaaatatttatgttagaatctaactttaaaagtcactgaagatatgttttaagggtttcgggattgctgaatacgagtaaaaaaaataaactgcagccaagcgggctcgaaccccagacccccgtctcaaaggcccggaattaaatttcaaaaaatcgtaaagaactaaaaacttgacttctccggccaatcaatatctcatttgaaagctcgttttgagctctacaacatccatctatgcgtttatgcgcccgattaattttcttaaatctatttttgaaaaatcaagtacctgacgaaaaatcatagataaacacaccgtttcaaaaaacgagagatgaaccaataaatagagagtgcagagaaaaaaacatctctctttttggcgtactatttctttatctgtgttaatagagaaaaacggaattcacttcatgttgtttaaaattttttctacttgttaaatctgcttcaaattttgcatatcaatagagaaaaaaattctgcatcggttaataggtcaagttaatattaaaataggtcgaattagaaagttataagaaaaacaaaattttaaagcctcataacttttctctggtacaccaaagcgcttagcatttgcttagaaaaagcttctcattatcaagagctttcgaaagataccaagattatccaatttggttgggaaaaac

SEQ ID NO: 20749 - DNA, 528 bp, Heterodera glycines
caaaagccatttttcttacaattttcgttgtactttggcaccctgccggtggcaattaaacgtttcatcttcagctcataattctctttattttttttgatgaatgctctgaacagagctgaggtttttaggtttagtcaatttaaaatgagctcctcttcactcttcaaatttcaaaaaaagaatcctcctctaaaaattactttcactaaataaatattataaaaaattccaaaataatattatgattagatttattattagggacgcgatttctagtgaaaaaactttttttttttgctcgattgattttaagaaaggagctcaaaaaacgcatttctgcattaaaatttaacggcttctgttttttaaattagctactcttgaaaaacgaagaaaaaattttgacctcctaactacttataaaattttacatggttttacacatttggacccaaattctttgtttaaaagaactaacctaaatactcgaaataactcatttttccgtttaaatgttaaattaca

SEQ ID NO: 20750 - DNA, 1089 bp, Heterodera glycines
ggtgtttgcacttaaaatggctggctcattttattaaatttgcatttttggagctccggttcgaattcaacataaaaaataataagttttaattaatgtacaatataactaaataattaaaagtgcattttagactaaaaaaatgtataataatttttatttagtgaaaataagctaaaaaaataataataataaaagtaaagtttggaaattaatagaaagttaacaaagctaggaatgggcccttaggccttagtttcggtttttgaggccacataacttttttatttttcgtcacacaccgctaatataaaaattcacaatagaagtcgacctgctgtatccaatggtaccaaatgtatacccactttttggcttacagttcgtgagttcccttgtcagagcaaccgaataataaccaatacccttaatgattagttgcttttaagaaaagtttttaattgttttcttattccgtggcatgaaactcaattgaaaccatgccaatgtctcagaagagaagcaataaatattgaaaaagttaccaaaattaattgtttatatcaattttcaattagttcatgttttacattgccgtcatcgacatgctttgcttgcttataaatgccatcacaactggcattttggccattttgggagcggttttttgttcttttccacgctttatttattttgttggtgcctttggtttaggtaataaatagggtttataattatatggatttacatattttctgcacatatactatgaagaaaggagctcaaaaatagcatttctacattaaaattttttgatctggtgaaagttttttgtccatataaatccatattttgggggttttcggaaataaatccatatttcgatatttttgctagattaaataaactgccattattaaggctaaatccatttttagcagattttattgtatttttaagactgtttaagcaaatattgactaaatactcatttacaaaattttttatagctacaaagatatatattggtagattttataccatattttgctccatatcttggacatttttgagctttgtagaccatat

SEQ ID NO: 20751 - DNA, 1110 bp, Heterodera glycines
  unsure (1)..(1110): unsure at all n locations
cagcattcaatgcagctcttcaaaagctgtccgaacatatttttctttcttttctaacgcatctccaagcggatttacacccatttttggacccgtattttttgtaccccgatcacattctgaaaaaaataattgatgcgctaaccctaagtctccccagttattctgcgcattgctttctccacgcgagggcaaagcagcgaattgtttcattttcctcctttttgtattttttcatgccgatctcgaccctaactcagcaacgcgtgggcgtacagcagcggcgactgcagcattcaatgcagctcttcaaaagctgtccgaacatatttttctttcttttctaacgcatctccaagcggagttacacccatttttgtacccgtattttttgtaccccgatcacattctgaaaaaaataattgatgcgttaaccctaagtctccccagttattctgcgcattgctttctccaacgcgagggcaaagcagcgaatttgtttcattttcctcctttttgtcttttttcatgccgatctcgaccctaactcagcaacgggtgggcgtacagcagcggcgactgcagcattcaatgcagctcttcaaaagctgtccgaacatatttttctttcttttctaacgcatctccaagcggagttacacccatttttggacccgtattttttgtaccccgatcacattctgaaaaaaataattgatgcgctaaccctaagtctccccagttattctgcgcattgctttctccaacgcgagggcaaagccgcgaatttgtttcattttcctcctttttgtcttttttcatgccgatctcgaccctaactcagcaacgcgtgggcgtacagcagcggcgactgcagcattcaatgcagctcttcaaaagctgtccgaacatatttttctttcttttctaacgcatctccaagcggatttacacccatttttggacccgtattttttgtaccccgatcacattctgaaaaaaataattgatgcgctaaccctaagtctccccagttattctgcgcattgctntctccaacgcgagagcaaagccgcgaatttgtttcattttcctcccnttttgtctttt

SEQ ID NO: 20752 - DNA, 2541 bp, Heterodera glycines
aggtcatgggcaatttcgtgttgattaatttcagatttttgacgcttgttcgctgttacgccatacaattggacagtttggatgtgccgttgaagcaactgtttgactctgctatggagcgcaaaaaggcggatgaccaaaggctgttccaatacaatgccaaccatttcttaggcattaccaattcgatttatcacaaatccagcgctcccaagtgtcctgatttttcagatttatctgccttttgaaaattggacaatattttaaaagcaacaaattcttgaagttatttctcttaaaaatttacaaattttcccgaaaataataatgcccatttttgtgcaaatgtttatcaactgacaaaatttttcaaattttcctctacattcataccggcacatcggacgcctcgccacaaagctgaagtttagcgctgtttgcttaatttgaaaaaaaaacttgggagcgctgcacaaatgccactgttacgagtagggttcgagccccgtggggcgggggtggcttttcacgggggcgagggatgcgggggccagcgtcacgggggcgggggcacgataattccgcccagcggggacggaggcgggggtttgctttgaattaggtccaaaaatctcacaaaaaaatattttttaagaatgatttctttggctccacattcctttatttgttgatcgcctcgatactatttcttttgacataaattgcacagatttcgactaaaaagtaaccaaaatttagggatttttgggtaattttttttaagaaaaaaaaatttttttttgggggggggggcgtgccgataggggcgaattttaaatttatttctaacagatattcaccaaaaaaattaagactttttcgataaattttcgttttttaactatattaaattatcgtgatttactcaaaattggaactcagatttttaaaatttttttcttgcggcacatttttcaaaaaaaaaaacttgatgaatgtgcgaggggagagttccggcggtgccgataggcgctgccgggaaaattttttgaaaatttgaatgcaattgttaacaaattttgtacaaaaaatgagcaaaattcgcgagcttgggataatttttaagaaaaaatataggaattttgggggccggcggtgccgataggcgccaccggggaaaattttaagaatttatatgaattttgttagaacttagccaaatttttcagaaattttcttcttttagatgaaaataaggcattacccccaaatcagaacatttcttagaaacaagaacataaagaaaccctgtattaatcagaaaaaataaataaattaaaggaaaacgttagccggaatcgaactcatgacaaaagtactgttagtattgaagcactatccaccaatccacaaataaaataaaaaacaagttaaatttattttatttcataaaaatttctcgatagttaaaaaaaattcaaaattgtctaaattttttgccttatttcccacgaatatgccattcttaggggtgtattttcacccccgtgcccccgcgggggtgaaggtcgcgggggcgggggttgcgggggtcagagtcacgggggcgggggcgggggcggggcccaaaccctactcccgcccccgagggcgggggcggggggcggggctcgaaccctacttctaagtcttacgcgggtttttaagtcatggcaatgactaatttttattttactcttcacccgacttttttgctgcacaaaaagttcataatgatatttaaattaactttaccataagccaatcattaggggtgtatttcttactttgaaaactcgatctttaggggttatttttcccgaaacttcgggtaaattacccgaaactcgaagttcgaagcccaaaaaacgcgaagttttcgaagcacgaagctcgaagtttcgcccatccctgatcgggaaagaggtcgttaggagtagtctgaaaataaatcaaagcgatatttttttattggtccgttattttcgaatttattggtcgatgaccaggaaatttcggtgggactccgaaaatatgtttgacgtctgaaaagtcggtacagttttgaaactagaagataaattgaacttttagaagaaagtcaaaaattaatcaccgaaagtgattggatttttcagatcgctggtaaattgggaatattccttgtgcaaaataactgtaaaaattccgggcactttaaaattgccaaaacttcttttttctttgtgcaattatataaattttaaattttaaatattcatttataaatacaaaaaagtttcatttttgtaaaaaaaagacaatctgagcataatgaaatgtcgtcgtcataatgtaaaacacagtaattcatcagcgacgtttaccgtacccatagccaccgccgcttccgccgcccattccacctccaaaaccgttgcccattccgcctccaaaaccattgcccattccgcctccaaatccattgcccattccgcctccaaatccgttgcccattccgcc

SEQ ID NO: 20753 - DNA, 1084 bp, Heterodera glycines
  unsure (1)..(1084): unsure at all n locations
aatattttcaggaatggaattccgaggacgaagtgaccctccctagttcttaaatcagaaatcgaatttcctaggctcactataaaccgaatttcctaggcccaaaattttcgaaaatcggaattccattcacttcaagcatttattgaaaattgtcattcattttcaaggacaaagcccagtcattttcatgtctgttggcattttaagagccagttaatattttcaggaatggaattccgagacgaagtgactcaaaatatttcttaaatcagtaatcgaatttcctaggcccaatataaaccgaatttcctaggccccaaaataaaccgaatttcctaggcccaaaattttcgaaaatcggaattccattcacttcaagcatttattgaaaattgtcattcattttcaaggacaaagcccagtcattttcatgtcttttggcattttaagagccagttaatattttcaggaatggaattccgagacgaagtgactcaaaatatttcttaaatcagtaatcgaatttcctaggcccaatataaatcgaatttcctaggccccaaaataaaccgaatttcctaggcccaaaattttcgaaaatcggaattccattcacttcaagcaattaattgaaaattgtcattcattttcaaggacaaagcccagtcattttcatgtcttttggcattttaagagccagttaatattttcaggaatggaattccgaggacgaagtgactcaaaatatttcttaaatcagtaatcgaatttcctaggccccaaaataaaccgaatttcctaggcccaaaattttcgaaaatctgaattccattcacttccagcaattactgaaaattgtcattcattttcaaggacaaagcccagtcattttcatgtcttttggcattttaagagccagttaatattttcaggaatggaattccgagacgaagtgactcaaaatatttctttaatcagaaatcgaatttcctaggcccaatataaaccgaatttcctaggcccaaaattttcganaatcggnattccattcacttcnnagcattaattgaaaattgtcatt

SEQ ID NO: 20754 - DNA, 1464 bp, Heterodera glycines
tgaaacaaagatacaaaacaaacaatgatttaatgaaaacaacggtcactaattttgaagtactgtagttagtgattgcctctgagttttccgttttttaatgtgccaatattaatctagagtaaaagcaaatattaacaattttaaaggcaaaaattgaattaatgtgtctggaaaatttaatcaattgtgtcttaaatgtttttttaggattaaatgataataaaaaagaaaattgcttaaattcagttagttgaaagtgaatttgtttagctacaaaatattaggagattttataataacaaattatgtcaaaaaagagttaattccaaaatttgtctattttttaaccgaatttcaggcattttccacttccatttttggcgttatggaagatggacagaagtcatcattgatgacagacttccatgccgatctaatggacaactgctttacagtcggcctccgactgagtaattaaaaataaaataaatttttttaaattttattttatagaaatgtcttttgggccattttactcgaaaaggcatatgccaaaatgtacggcgggtatgctgtacttagcggaggaagggttagcgactccttctccgacttgacgggaggtataacggaagaatgggacttgaagagtctcgatgtcgccaaacgaagggacatggaattggtaataaaaaaatttaaaatataagccatttttcctaaattccgcaaaggagtaataatgaacccgcttaagcagagccagatcaataaaaaaaatttgggattgtatgccaagcttggccaagctctggtaagaaaagcactgacaaatgagtggaaatttaaaatgtttagctctgatttgtaacagatattcaccagttgtggcaatccctaacaatttttcgtgttttcatcaaaattttcgcaaccagaatgccgggctcaaaagtgtacgaaacggaagtcgacaatttaattgttttttgccgaaaatttttttattttttccggaggcatcgactgcacctgaaaagctatcgattggcaccaaaaaaaaaaaaaaattaaatttggctgagtttaacagggaaaggctcattgattgcggaatttaggaaaaatctcggcataaagaagaatgataatttaatgatttttaatattcaaattaaacatttttaaagatattggtaaagcgtcctccgaacagtggcgttaaaaactactctgagaactgtgtatttggctgcgccacgggaccagtgaatagcgatctcacgcgagcagggctcgttgaagtaattttcaacttacaataaattcttaaaattaaaaaaatttcacgaaaaaacaactttcgcaaatattgctgcaattcgttaataattttgttgaaaaactgtgccttttcaaagaaagaaataaatagcgaatgatatgcataaaaatggagag

SEQ ID NO: 20755 - DNA, 530 bp, Heterodera glycines
acggcacattagtgcacttacatggtgcaaaaatgaaaacaaacaaataaatttgatcaaataaaaaatacaaaatgaatcaattcttcgtcctgttttttccttcattttctgtctaactttttcattttggtccattttgatcacttttctctttccctctttgtccaatttgatcactttcagtttggctcccttacatgggtcaatcgcgggaattgcttcatcttatccggatgcttctcgatcatcagaacatgattttcatccttgtataacgcaaacagaacaggaaaaattttttaaagaaatttttatcattttaaacgactttatcagttcataaataatcagaggcctcgttttgagtcatgactccattaaaccaaatgaaaaataagatttaaacaataaactaatgatagacggatctgactaaaagcaaaagaaggaagccaaaaggagaaaacccaaaaataatgacgtgaaaataaaataaaaaaaaaaaacatggatgaaaaagctcctca

SEQ ID NO: 20756 - DNA, 2109 bp, Heterodera glycines
taaaattttatttaaaccgattctattaggaagggaataatttaaagaaatcaccgtattttttaaatatttccccttgccccataagaaaaagtcgcggtacactgatttaatcgcttccattgctgaactcatttggagttcgcgttcctcaattagcaagataggcttaacaattttgcattccaatggattttcttaaatttgttaattatttcaattaaaaaatatttattgactattttctttgattttatgagtttttttttcatggaattttggaaaattgctttccaaaaattttttaaattttatttaaatttttcattgtttttatttatttacaaaccaatttctcccatttcagggcttttttgtgcccccgatgaacttgtgccaactttgtccccctgtttttgtccttttctgctcttcttccaactgttcacatatgcattcgctgcacttgccatctttttcaatattcgcaaaattcgagtaattcttcgtctgatttcaatccaatgtcttttggttttggattcaatttacttatttcacatcgccaacttcccatcatcaaacgccaatagattgtttggctcagtgccactgcttttgccatgtcctcctcctccgttatgtcatcttcgatcacttcaaattgcggctgatcacagtcgtcttctttttctagcaatggctcctttaatttttcatagttgttatgctgctttcctcccacagcattggcaattccggtcaaattgatcagcagaaggcacagttggatggaagggattcgaagcatttaaaaaaattaaaaatggaataatgcttttttagagcaatctgctgggtatttattatgcacattattcaacacaatcaaaaatggcattaggggagaataggcatgacatttcatgtgacatttgtgttaaaccatgtcattttattttcaattgcccaaatccacttcaggagatttaaaaaaccaggacaattaatccattctccaactcaggacagatctaagaaatcaggaccaatattctattccatttgcaatctcaaattcatgacaatctaaaaaatcaggatgcattttccattacatttgccaatctccaattcaggacagatctaagaaatcaggaccaatattctattccatttgcaatctcaaattcaaggacagatctaaaaaatcggtacctatattccatttgatttgccaacatacaatttaggacagatccaagaaatcaggaccaatattccattttattaaagattgagaaagaatagtaatcactgaggacaggcagattcttaggtttttactaattttttctgctgctttaattcaataagaaaaacacaaaaatcccatttttagcgcgaaaattcttcgttttaacttcttaatcatccctaggaatccctattttgaactttagcccataaaataggggacctattttggcatttcgcccctatttcggcatttaaaaaaaaattcatacaaaaatgcaataaaaaaatatcaacgaccgacctctttttcaaaaaggttggaaaaagtaacaaaaacaaaatttttgaataaaatttcaaaatttttaattaaaaagaaataaaaatttctcattaaatattgacctaaaaatttaacaaaaagttggattttcagtaaaaaaaaaatcttttttttccctgggaatcccatattgtaaaaaatcgtttgccgtggtcctcaaatatgaaatttctggactctagtttgagtggggccttctattcccaatcaacgccaccttcccagtttgggcgtaatattttttgttccaccgcactcgaagaacacacgcgaacacacaaccaaacaaccaaataggctttcactatttaataaaacgtacaaaacaaaataaaacaaattcggaagacgaggtgggaaccaaacaatcaatcaaatccaaacggagaacggcgaaacatcaacaaaacttttatcgaagggagaagcagtggaagaataaaacaaataatcaataaagggtcaaaacgccaaacaattaacgcactaatttaaataataacaca

SEQ ID NO: 20757 - DNA, 2694 bp, Heterodera glycines
  unsure (1)..(2694): unsure at all n locations
tgcaggtnncttccaaatccannatactaagatnnctctcggaaaaacacggcccccccatggtcgctctgataagaatggcttaaatctgtattacaaaattaattaacaaaacaaaataacacataggtaaatattgcaaatcgaacaattagaaataataaagttaagatttatcaaatggaaattattgatgaataatggaaattagtgattaacaaatgactcaactgacctgttcagcgtaatttcaaaatttaatagtaaaacttctttcaatcataaaacacaatttcataaaaattcttcattacaaatacttgttctcttacaatatcaaaaatcttttcacgaatcttttacatgaaacataggtatacaaaacaaaagctatacttttcacaattatccatactattaaattatcaaatttaaatgtgttataataactaataaacaccgaaaaccaaaaattcattttcacaaaaaatttttgtggagcctagattgtcaagtataaaactacattttctaacttttgctaagtaaaataggaaaaacaaaacattaaacctttttataataaaaatgaacatataaactgacctttatcgttaattgtaaatccacttcgtaaaagtaattccttttgtcaatataacaataatcgctatcccttactatataataagcgagccgaagctccgcccatttttttggttgagttaaattggcggacttggcgggaaataatttattttttggcgaattgtcttttcgagaagaaaataaaaatttgtttacctatgtgttgtttttttgtgtgaagaataatatcaatcgatcttttttgttattatttcataatttcatctgtttttagttaaataacttcattgtatttgtttcttattaataattgaatgaaatttttttatcttacacagtttttcagagcgtttcataaattcgacaaaaggtaagaaaagaaaatgtttaaattacttttaatatgctaaatagttttttaactttgttacaataatgaatttttttcaatttatttagtatttacaataatgaattaaaaaataaaaaattcatttagctttgtttttatttgcaagaaaaacggaaatttagcgttttgagcttaaaaccggttttttaagaattttaaggaatgctgattatgaatttgataatacctaattcaagacctcataaccgatttcgaataaaactcgaataagatttagctcattttgatacatttttaaacactggcgaatttatgaaacgcaaaaaattgaaatttcaaaaaatctaatacaaataaatagttaatctcttttatttttggattttttattttatatttttgttgttatttaatttaaaattttttagattcaaaatatttttctatggtccgaaaaaagcaaatatttccttctgaagggaataaagctaaagaccaacaaattgatgcagaaagcattgaactgggttcacagctcccattaaaaagcggtttgaagggttcgaagctccctgataaaagcggtgaaaatgataattgggttcaaagctcccagaaaaagcggattgaacaatacaaacaatttattgatatgattgataaaccttcaacttctcagcaatgtaaaatgaaagaaattgatagaaatgttaattatcttgaaacaaacagatttgaaaacaggaaaagaaaaagtgatacgtttataaatttagacgaaattgatttagatgaatcatctaaaataagtatttgtgatagaagtcaaggttcaaacagcactgaaaaaacattatgtaaaaaaaatacccaaatgaatttaaaagatttagtcaaacaaaatcccattttggagggtgaaaacaaaactaaagatttgtttaaaagaaaaatggttggctttttatttaaaaaagcggaggaaaaaaataatatttcaaaattttccctgcaggattttaatattgagtgtttgttttgtaaagctcttcattttccagaagaaaaatcgataaatgcaaaagggaaatttaatgaattttatttatgttgcaattatggaaaattcgaaagattaattgggttttttgatacttatcctgaagatttaaaaactttattttcagaagaaaataatttacacaggcattttattgaaaatataaggaaatataacaattcatttgcatgtgcttctttagcatgtaatagattttctttttctacacccggaccaagttgctataaaatttcaggtcaagtttatcacaaatttaattcaactgctcaaccaatagaccaaaattctttacctacaaatggtcaactttattttcttgacagtagtgaagcacaaaatgttcgattgaattcttttgaattaaatgagcacctcattggaaaaatagaaacatcgcttagaaaaaactatccatttgctaaagcttatgaaatgatgaaaaatgttattaacgaacaaaaaacattttcggacaaatctattttaaatgaaacacaagaagtgaaaatgtttttgagttttaagaatggttttgaccctaatcgatataacattcaacaatcaaacgaagtcgctgcaattatggtatgcaatggaatgatgaagtcccgcctgcaaatttagttgttgt

SEQ ID NO: 20758 - DNA, 1665 bp, Heterodera glycines
  unsure (1)..(1665): unsure at all n locations
acttatacttnagggttgtaaattatatgggactaaaaaccgcgaaatatggacattaaatatggactaaaaaagcccgaaatacggactaaaaaggccaaaaatggccaaatatggaccaaaatatggataaaaaatgccaaaatatatgttgtaaacccccaaaaatcccaaaaaaggtgtgcatatttaatatttgcttaaataaacctaaaaagtacaataaacaaccaaaaaatggggtttaaaacttaaaaatgcatattttttattgttgttcgttgtatcaaaaacacctccaagtttgccaaatttcgaaaaaattctcattaaaaaaaaagaaatgttcgcaaaaaaatgacgaaaatatttattgaaaatgccaaaatgacgacgaaaactcaaatttttcgtgttttgtggggtgtaatttttaaaaatttccaaaaagttgatctttaggggtgtatttttcgtttttttttcatttttcttgtgaaaatttccaaaaaatggccaaaatatggactaaaaacccaaaaatggcgaaatatggatttattcccgaaaacccacaaaatatggatttatatggactaaaaaccttcaccaaatcaaaaaattttaacgcagaaatgctatttttaagcccctttcttcatagcatatgcgcagaaaaaatatgttaatccatataatttacaaccctacttatactgatcattttgtgatttagaggagcctatttttaaagaaaattaaagctttttgttagagaccgagatttccaaattctcctgaccggactggtattttaaaaaatgaccggatcccggatccggtctctcataatccggtcaatccggtaatccggtcaatccgggccccccgacccgacccgagacgtttatgggacctattccccgacccccgaatcatattgctaacaaaaatcatcatttgtggtcaaaaatcagcattttgaaaaattttcttattccaactgaaaaaaattataatgtttttttgcggcgctctttttgtaaaagaaaaactttttgggaaaggggcccggcggtgccgacagtcgccgccgggggaaaaatttgaaattttgaccatttaaagttaaaaacattatgccaaagagatatttttcaaaggaaaatgaaaaaaagttatggttttttggtagagaccgagtcggaccggatccggtcaaaaattcgccggaccggaccggattggcattttcaaaaatgaccggattccggatccggtctctcataatccggtcaatccggatttttcccaaaatcgcaggaccggattgccggatccagaaaaatccggtaccggatccggtccggctcggtctctagcaaaaatcggtcataattttttgactttatttttacaattaaatttcatttaaaaatgtaaccattgcgcaacgccacaattggtgatccatttcttggcaccgttcagcacataaaatgtgccgtcctcactacgctcggcgctcgtcgacacattggacacgtcggagcccgcctcgggctcagtgaccgcaaaagactggaaattaaaaaataataataataaaaacggaatttggggccaaagggaaaaaggtgtccgccccccgggaaattactaaaa

SEQ ID NO: 20759 - DNA, 2547 bp, Heterodera glycines
  unsure (1)..(2547): unsure at all n locations
aaaaaatcccctccccctgataaatttttgtaattttcaacaatatttgattaaattatggcattaggtcaataaaatgtaaatttttttctcatggttgagaattttgaaattttaggcataaagtcactatttttcttaaaaaaggagcccaaaatcgcaaaaaaaaatgttggaaaaaatccattctggcgaaaaatacaagccatttttataaatattaaccgtttttcattgcagaaaataattattttatgtccttggatttcatgaattttccccactatgtccttgcaaatcggcatacccgtccttggaaacggagcatggatgtgggagcgttataattttaaagtaatttattcaacattatctctaaacattaatagctttaaaattataattatagttattaaaaaaagccaaataggcatatttgaaaaattatataaataaattttatcaattcgatgattattgttctattattattttaaaatcggccgccaattgctccatattaagacagtcccgactctgcagtcgacgattgcaaaatttatttgattcgctttggtattaattcactatcttataatatttatatgagaaaatataaaaataaatttatacagaatattgttgagtagaaattaattaattttaattaaatcatcatattaaaaaatgccaatgtttaacaatttctgaatattaactgattatgttgatttaacatttttttctttcattatttaattttatgcaatcaacaacacaacaaaaaattaaaacaataaaattattacatataaatagctttttatgcataaaaagtgcaatgaaaaacccataaaaactaattacattaaaaaattagaagagaaaatgacagcttcaaaaaaaaattgatgtcctttatcgttccaccgttattcggtttcgttttttggcctaaaatacattagtctacttcggtataaaaaacacctattaaataaaaaacacagactgaaataacgagaaaaaatatatattctcgggattgactgccattgtaataacttaaaacagaaattatacgttcatgaaatttttagccacttcgactacttcctattaaccaatcgatctgaaatttttaccacatataccctcccataataaattattgaaagaataaatgaataaacttttaaaaaatgcatttaataggattttaaaacgaatcaagattattacattaaattatgcggtactataattataatagaacgttataatattacatatctactaaagtaataaaaatccaaagaatcaaattttataaggaaaaacatgttttttctcatcaagtggaaggggtggatcaaaaccattttttattaaaaagaggagaatatatgaaaaaaagtaatttcaattctttcgtttatcttaagctcaaaaacataaaaataatttaaatatgagaaaacaatatttagaaaattatttcaatttatttattgaaagattaaacaatccagcaaaaaaaataattatcatctaactttactcagctacatacccacatttaaaataaggttcagcaagtaaaaatgcgccattaatatataaatatataattcgaaacctattcagaaaaaaaacattttttgaattattagaaaattttcanatttgtaataattaataattaaaaaactcaaagcaagacaaattgaaatttaaacattaataacatagcttagttgctttaattttttgttacttcgtcgcaactgctgcataaaaagcagcccgtggcttacttgacttataaataatatgcaaacaaataaacaaaaataataaaaacgctaagcaaaaataaaaattaaccttgaaattgtttaaaaaaatgtagaacaaatcttaacattatacaagaaaaataaaattttaattaaaaaaattaacaaaaaaatatatatatattttaatacgatgttaaaaaccgagaaaaatttgttgcaagagtcaaatttatttctttattatgtgacttaattgtatatttttcccaaataacatttttattttttgaatccaaatcacgttctgcaccagggctggagcgtgaccgcgatccgcggccgcggcaatttgaatgcgcgatgcgcggtgcggggccgcggtttttttctgttcgcgctccagccccgttttgcacccaagaggacgatagtaaatggtagaaagaaaacaaattataacatatgcatattaaaaaatgttgttaaaaactttatcaactgtttttcaaccctgaggaaatagtatttaattgcaatgccataagaaaaaaatttatgaaaaatatataaataattaatagtcatactgtctattaggtttttatagattaaaaattttaacctaaatccagtttatttctaaaaataatattatatgccaaaaagcatctatatgaatatgagtaagcattttaaatcgggggagcatatttaaattgttcgacanaaaatattaaaaattaat

SEQ ID NO: 20760 - DNA, 1294 bp, Heterodera glycines
  unsure (1)..(1294): unsure at all n locations
aaagattcatatattcctttatttcatatattatttatcgatntaaatnntaagtaaaaaccttatgcaaaaatcaaattaaaaangataaattaaattaatttattaaaataattaatntaaatctaatgggttaaaaactaaatcaattcaaatatgaaacaactaaaattcagaattagaaataataaaaatttattctacatagaccaagccgaattgtagagcagtttcgttcgaattgcatatttgacttaaaaaataaattataatattaaaaaaagacaattaaaaatttattatttataaaatgacagaataaagtcagtcaaatataattttatttttaaatacagagggatttttttgaaagaggaattgatcaattagtggaaaaatgggtgaagattgtggagaataacggagcatattttgattaaaattggttcagtatttaatttgttagaatttttcaaataaaatttttggttactatgcaaagactattttacaccccaataactaagttttagaaaattttcttgtgtttttcaaaatgttgaaaaactaaaaaccgatgggttctcttagctactttaaattttatcatctgcttatttattccattttcccattcagttttcttaggtcttatcttggattttcaatttttgtcttacgtcacagataaattttttcatacaatgtgaacattaaattattgcatcatcagttctgttttttgaggttaggtttcttcaaaaaacttttacggatgctgcggggaatttcgatacagacagtcgctttcggggaagtttaaaaattaattgtgatttgccataagaattttaccagaattgaatttttgataaaattttaaaattttatggcaattaagtgccgtttgaaataattaataaaaatatctcttcacataaaatatatttttataacttgtttgaatatttattgaaagaaaataacattccttctatgggaaacacaattgaaacatagatccaaattcaattatattaaaattttttggaaaattgaacagttttcaaaaatgcaaagtatttcaataagataaaagctattctcagttgaaaaaatatgatgaaaaaatttttagttaatgactaacaattttttggtttaattatcagaaaaagaagaattgacaaaaaaatctatgcggcagtcaaagttgcagaaaaaaaatggtaagaattttgtattgtaaaaagaaaagaaatattaaagaatattataactctgaaattcaaaa

SEQ ID NO: 20761 - DNA, 1883 bp, Heterodera glycines
taattaaatttacaaaattaaatattgttttccaatttagctgtttttagaaaatcttttattgtgacagggagcaattcatttccccttgaaaatgttttattgtttaattttcaaaatccgaatttttttaaatcacagaaaaaattttctagcgattttttaaattttatgtttattaataagttttttaaaaaattttcaaaacttttttgcttgaattttcttataattttttttaaaatataagtttggcgaattttctttttactgcagcgccattttaatattttttttcttgaaaataggcatttcaacggctgccggcattgcctacaacacatatttatacgccgtggtgcacaagaaacactacaaaaaagtgacgtcatacttgcgcatggcgacaatggtcggcaaattcttggcattctgtgccggccaagttttgatcagcacgggaattggcgattttatgctgcttaatcaggtggcataaatggacatctaaaattatatgatgctttaaagaatgataatatattttaatattttctaaataaacaatttatttagcattttcattactaataatttaaattgatttataaaaattcttttacctattaaatttgaattatttattttttcttaaaaatatattttacagaattattatcattaaaacagatgattttaatttttaatcctttcaaaatacggatcatttttagattttttaaaattccttatttcaaatatatattttatttttaatttaaaaaactcataataaattaattagttaattaattagttgactctgttggtctcctcctcgctgattcccatcgttcttttgttgccgatgccaaagaagcaacaaaaggatgcaattgttgacaacaacaaattaccgacagaacaacaacagcaaaatgatggtgatatttgaaaaaaaatttaattttttattaagtatttttattttagttttattggagcgcaattcgaatgaaattgaccagcacaaattggatggaattgatgataataaaaataataatggaaaacaatttggtgctaaaaaggcgtttgatcaatttgaaattgaacaaccaaaaagtgttcaaaaaaattggaccgacatgagaagcatttggacaaaaataaaggcacgcatggaaataattttttcaataaataatttaaaaatttatataattttttaaaaacgttcctttccctccaatcattccacggtttttttttttgtaaattaattaagagagaatttttattttatttccgaatgttaatacacagattttgttttttgtttacttatcttttagtaagataccaattaaacttttgtttcttatgtgttaattatgcaaaaataattaatttataattttcaataaatcttattatattttctacatttagaccaaatttttggctccttatcaaaatcgggttgttttccactggtcactttattccattgtcatcacagcaatgttttatcaagtgaattcaaaaaataattacttgaattagaattaattttaaatattctttttcaggtccaaaattacattcaaaatttgtgggactttcatcggaaagctgacgaaagagaatggaatggttttgttgagagcattaacacacttttaagtgagtaaattttaaaatgaaaattttaattaattcacattacatttgtctcctattaaattaatctccttgttgcactctaactgcctgctctccttgattttatttttgaaaacaaaaaaacttattttttaatttaaaaaaaaatggtataatattaatatcctaaatcccgcccaatataaaaaattgttttt

SEQ ID NO: 20762 - DNA, 841 bp, Heterodera glycines
attgaaaataaattttgacctttcctgaagaacgttgactcatttgccaatcacttgggaatgcccgcaaaggaatttgagcacacaatggtaactgagaaggaggaaatgccaaaatgaaaagggaaggcaacggacgagaaatggttgtaggaggtgagcagaccgctgagcagcacaatggaaaggaccaagcgaaggacggcacattgggaagagtcggagggatggagacgaagcgaactgcgaatggccaagagacggtcggcacagatggcgatgatcagcctgtccaaatagagggaaagtgccgaattaagagcgatttgaaaagaatgactgaccaaatggcaactgcggaacaccaattggccaaggccaccaaatggacgcgaagcgacagataaagcagacggaagcgcgggttttggccaaaagagtcgaattgggccaaagcggagggcaaaaggagcagcagaaagagaacatcgcaaaaggccaaagcgatgagaagggagtcggaactgaacaaagaaagtgccaatatggcaaagccaaagaatggcaaaaaaaatgccaaaagaaaggcaaagaatggcaaaaaagggggaaaaaggcaaatgtgcttttttgacgaaccgtctccgaattgagcctctgccggggttaagcagaaccaactgaaaaggggtagcagtaaatggaaatggaggagaagcaaatcaaaaacacttgccaagttgagaaaattgccgacgaaaccgaaaagaaaaagccaagggaaaagaaaagtgaagaagaaaccctagggggggggggggggtaataaaaaaggggaaaa

SEQ ID NO: 20763 - DNA, 1342 bp, Heterodera glycines
atagtatttaagaaaggaaaatggactaaattagccttctaaggaaagggagaagaaaaaccctttttggaattggtcagttgcaaacgaagttaaaaagggagggaaaaaagcgaaagacaaacgaaacgcccgagggggaaagggggggaggacaaatgaatgctttttggtccaacgacgggagggggtgcatttgtgggtggcaggtgacgagagccaatctcgggtgagggtgggcccaatcggacgacggcccgggtaaaaaaaaaccagacggggaggggaccaccgcttccgatcagtgaaaacgcctcaggcaactgggcggcccattgatcggtttgtcaataatacgcacggaaggccaccgtcaaacaaacaaacagccaacactcatacgacagcttaaactaattcattccaaacgccactttcataaaatcactccttcttatgacccatcgcttcaggttaaatgatgagtcattagcatttggcggactctctctctctcccactaattgattccatttattataaataaatatgcaaataattatttgcacgataacaatcaacaacaattatttgtgtaaaatgcaaattataataaaaatatcaatctcttcacagtccgtcggtgtattttgctgtctttagccgtggcactaaaagcacaaatctcaccaattgaaaatgcttttgttcccattaaattctgaccaatgttcatcccttgcaactcttgaaacagcaatttgcacgcgtaagggattttaatctttgccatggcggcggatgacttgcaattttggcaccatcccaagtagccgatcaaaccgcactcggcacaaacatccatctgacaaaagatgaggcgaaaatggagtcatttgcgaatggaattactgtactcacactgaattgatcggaggagatcattagccgttccatcagcagcatcgacgcgccatacgctatcagacagtccctttccatttcgccaagtcgaagtccgccgtccctggccctcccttcggtgggctgtcgagtcagaacagcgctgaaaaatgcaccccataaaccaattgcagtcattgtaataaaatgccaaccggggccccttcgctcgcgcgtgcattttgtccatgaccatgtgcttcagtttctggtagtaaattgggccaaaatagacataggcggccatttgctgtcccgtgctgcccgacgtgagcatgtccttgccaaggaagttgtacacgtgggcggctaattgtttgctgacagtttccacctgtagaaggggggcacattttgcaaaagccagaaaagcgctcat

SEQ ID NO: 20764 - DNA, 2149 bp, Heterodera glycines
  unsure (1)..(2149): unsure at all n locations
gccggtgcgaccgaagtgcgacgaatgcgcaaatcgcccgctctgtccatggtcatcaccagcaaatggagcagcaccaaatccgaagagcaagaaaaagagatgacacagaatgaacgatgaaagaacggcatttgtgccaccaaaattcacttacaaattaaaactgatcctcggaggccaaaattttaaatcgacttttttttgccacccgtcatagatttcaatatgtggaattagatttcgacctggatttaggtccagtccattttttttgacaacttggatttttgtccaaaaaaatgttaatattggttaattaaacaaagactctcaagagcatcggtaattgattttattgactgactcttcaatttctaaaatttttatcaggaaattttttttattacgtttacacctgaagttgagtgccagtgatagggatatcgaagaattgagtcccgatgatttttatcaaaaaccataggggggacccttttgttttgtaattttttttgtataaaaatcgtgaatatactttttattcaccataattatgctgttaatacttaatattcatcattatgtttaaaaaaattaaaaaaaaattttgaccaaaaaaaagttgaaaaaattttcaaaaacaccaactttttcactagcgccatttggatgcaagaagattaggtcccagtaattggaatgcgaagaattggtgatgatgagttccggtgattgaaatgtcgaagaatatgtgagattgagtccaaatatttaaatgccaaggattgttttggattaagtcttgaaagatgtttaaatgccaagaaatgttttgccataagaaaatgccaagaaaaggtgcgagctcgcgaagcggccgagtcgtaccttccaacaaaaaaaagacaaagaaagtgttacaatttaccgggccccagtttactaggagcattaattctgcgaataattgatgattatcaaattattagatgcaatcactttttagcacttttataatattgcctaaagtctttttatttccattcgccaaaaataaccaaattttaaatcttaatataattgcatagtcctcctatgtgttctctattatcctgcaaaatttcaaaaaaaaatcattaagtttcaaaaaaaaagtatatatgaccggagaagctcaaaaccccaagttttttcgagtacatcacaaaatctcgccgccggaacctcgccgtttttcaaacttggaaatttttcaaggagaaaattcttagaaaattttttgtaagtttttttttttgaaaatttttcgaaaaaacagcaaattatcataaaaattcaaaaaatcaaaacgagagatgttcaattaatgttataaaatttcctatttggttggtaaaaaaccccaagaacactttaagagaattaatttttaaaaattatgtaaaaatctgttactcctgctgttaatttacaaattttttaatgaaaaaatttcaatattttccattaaattttgcaaaactaacagttagcaaacaaaaaaaaattaaaatttatttctataaaattattccattccttcccagaatttttattcacaaggcttaaaatgattcaacataatttgttttcaagcagtggcattttttgtactgctttaacatatttttgtagcatttgtggcttcagcaacctcttcccaggcccttttttatctatcgttgtcaaagttgaagaaaaggtgccctcgatgatttttttttgagaaaaataggcctcgagaagaacggcatcttcttgttggctaaattcaattccgcgctttcgatcagcagcagcagtttcgtccatcttgaaaatctggcccaattatagtaccgcttatagggataaacaaaaacaaattccattcaactgcgcgaattaattacataaatcgcaatttttaatttattaattttattataaaatcatatattgaataaaaatattttaatatagattaaagaattaaataaataattttaaatagactaaagaaatttaacaattttgtattgcccgggtactaaacttgnggttaggcgttaacccgggtttatttaacccggatttacgagcacaccaatttttttaattttttaac

SEQ ID NO: 20765 - DNA, 1445 bp, Heterodera glycines
  unsure (1)..(1445): unsure at all n locations
ttcacgtccgtggttcgggattggccgaaatggatactggacacgtgaccagtgacctcgagaacncaaggagattgttattatgacagtagcgcattttccactgacggattttatggaagctgttagtcgatttaaagtgatttaatttattttttcaaagcgtagaatcaaaattggcattccgaggcggcacaaaattcgataattttatttttatttaattttcaaagcgcaaaaccaaaattggcattccgaggcggcacaaaattcggcatcggacaaggaaagtgtacgaatcactgtgctatgccttgctgttcaaatttattcattatgcattttgataccgacatggattggcaatcagttaggcagcgcgtataacgaatttttggattgtgatgcgcacccatttggacaatttgtgtattttccggcaatcactgtgttcaactcagtgtattatgtgtcagatgaggtgataaaaaaaatcataaaattttaatttaacccaacaagccagaaaaggtgctaggtcgatccaaaaaaaaaaaactcaatgattgataaaataattaaattatattaatattagagatcggaccggtcggtttttttttcggtttttttcggtatttttcgattttcggtttcggtttttaaccgaaaaaaaccgaccgagaaatttttgagtttttcggggtttttcggtttcggtttttttcggttttttaaccgaaaccgttcgaccgaaataattaaaaaaccgaaacaatcgaccgacttttttgacaaatcagttggccatttttttaacaaaattcattaaaaattcttaaaattttcctccggcggcgctctacaattttactcagaggtgatctttcgctttttctattgataaaaatggtttattgttttttttgggaaaagataaaaaaaatcaaaaaacccgaaaccgaaacggtataccgaaaatttttcttcggttatttcgatttcggtttttttcggttttttaaccgaaaccgttcgaccgagaattttttgagtttttcggtttttttcgatttcggtttttttcggtttttaaccgaaaccgttcgaccgaccctcttgtccggtctctaattaatatgtgtccatgaattttcacgtctttttgaattttagaacataaaaagttagcacaaaaaggcatatacatactacaaaacattaatattttcaaatttggaaaaaatagtaatttgaaataatgtattagctataaattttcaaatttccaaatatttttatatttccgataaaaattaataaaaatcaacaaaatttaaatgctgatcactgaaatccataaatttataaaattttcaaaaaattttcagctccttttgattgtcctatgtaaagaaatgcgtgtaaaatttgtgcaaatgaca

SEQ ID NO: 20766 - DNA, 1027 bp, Heterodera glycines
  unsure (1)..(1027): unsure at all n locations
gcagccattagcncaagtgcaagtctggccattcgtcgatgagatggcaaaaacaacaatcaacaacaaaagaacagtagtgaaaatgatttgtgagaatttgttcattttttgtcttttacggttttttagcgatggaatgaaataaaattatttttaattattttatgcatttttaaaaattgaatttgactttttatatcaaaaaattttaattaaaagccaattgatgaatgaataaatgatggaagcagaatttgatatttaaagaaagaaaccatttttctaaccttttgttcaataattttttgcgatgaataaaacattttcaaacattttgtaaattgtatgaataaattgtagatacatatattattttacagaattaaattaaatcaattaaaaaaattatttccgaatttcagaacgaaatgcaaaaaaaaaaaaaaatcctttcccatccaaccttgaataagtcataagtagggatgcgatttttaggcacaaaaaatcgcgaaatagacacctaaaaggcagaaaaaaaatcgcaaaataggcactaaaataggcaaataaaattttttttattaacgtttttaggtagtaaatcacgtaaaaataatcaaaaaaacttaatttcgcttatattccaattgttttaaagttttttcgaataagtacagatttttagccaaaaatttttatcatgaaaaaaatattaaattcggtgatcaattttttgaaaaaatttgttcaattcttagaggtgtattttctgaatttttttttggggggtcattcttaggggtgcgtttttcttttttattgcatttttgttaaggatttttataaaaatcataaaataagcaccttaggcacaaaaactccaaaataggcaaagttaggcattgtaaaagtcatcctagacaccccaaaccaagcggaaaatgcgtttttcgtgtttatctctgcctattatgtgcgcaaaaattttaggcatttgcctaaaaatcgcatccctagtcat

SEQ ID NO: 20767 - DNA, 2402 bp, Heterodera glycines
tagctttgagtgataccaagatctcccaatttttttttactaaaactaatattctcaaaaaatatattaaaatattaatgctttggaatggactctaacctaagtcctgcctttactatcttaaccagaaccacaaatcaactttttggtaatggagttttttggcatgctgtgtaaaattgttaaaatcgacctttgggtcattcgtcatggttaacaatgagtaattattttaatgagtgaaacttttacggaagcaaacggactcagaattatagaattaaaacaaatcaaaaatctttttaatgtttcttagaatcccaatgtaaaaagagcggagaatcgttaagaaaatgaaacactcatagtagaaaggactttggtccattagtcaagcaattaggtaattttatttttttttaaagaaatcttaaaccatacttttattgatgatgagccatgatttattttgcgattaagcgcctgaaaatccgtgcctttttttatgacaaaataaaacaatgtttacaacattaaaacaaagttttgtttctagacatccctgttgatagaataaattaatccacgtcagttttcacaccgactttcgggtattcagtcgaaatctaattatttatgtatccataatttaatttcctatgacttcggtcaatctgtcacgttttgatgcttgattattttttgattcattccaactcaaaagtaaatcaaagtttgaggacaaacttaaggaagggtggacgtgtaaagcgcaattaatcacatccgttttatctctttcccaagcacatatccccgctctcttccattccattttccgttccataagtccaactatttaatcgggagcattctctcgataaggagtcagttgagtgggcagttaatcggcgagcgagagccgagagcaaagcgcggcggaattattattttatgtgattggccaatatttatcttatattttactccttctcgcccatccccgcacgcgtattcgatctagtgggcgcccaagggattaccaatttggggaggccatttatccagggcccggattttggcttattcctttttccccccaaatccaatcctcgttctcactcgttcccttcctcatattctgggctggacatcagcaccttcactggtagcaccggatggttgctggcacgccgccggcaatccatccccaggaggacgagtgggatttgcgcgtgttggggaacgagaatggaatgaggtgcaccgctccttcgggagatcagtcatgttcggatcaaaaaaaaattaaatggccaatttcgaaccaatttgaaaatatttttgccccaaaaatgggaagtctatttttaattacaaaaaaaaaaaaaaaattatttttgcgccagaactaattgcgccagaaaggcaagtcaagcgccgcgccaaaacgacaattctattattttgccccaaaatgggaagatcatcacattcttattgctcccaaaatgggaagactgaattttattaaaaaaattgtcaaattcattttgcgctaaaaataataggccaatttacatattttgagccaaacggcaagtctaatgttgcgcccaaaagcaggagtcttttttattgcgccaaaattcgtttctatttgctctgccccattcgccgtgaccattttataagaaatttatttattcttctcgctctcttcgaatatttgctaagaaataagaattttctgtattcctttttttgtcagcaaaaaaaaaagtttaatattgaactcctttgggagtaccgtcaagtaagaggccaaaattaaaatttgtaaatcaatccaagataatccgtcagattaaataaaaatcttcgatatgctttaattacctaattgctgagtatattttgttgatttttaattaaatttattttgttattttattttatgctgacaaactttaatctttacactttaaattgtttaatcggccaaagttttttttttctctcacagtgcattctccgagtaccggaaatccattacatccatctaaagacaagcagcttttatctattatatgtgaacgttcttgcggcaacaaaatttccttcactgtttctgatcagtgatcactcattttaaccaaacattgccgaagtaacaatcattagtagggatgcgatttttaggtaagaaaaatcccagaataggtacttaaataggtaaaaaaaaaaaatctcaaaataggtattaaataggtacaaaaattccaaaataggtaccaaaataggtaaataaaaatttttattaacgattttttagtggaaaaaagcaaacaaagagggaaaattaaaagctcatatctctttgtaaacgaaaatttaaatat

SEQ ID NO: 20768 - DNA, 3024 bp, Heterodera glycines
atcacttcaactgaacttggccaatgaagttttcgacaaactttaaatttacataacattttattccactccccaatctttttttttgcagaaaggggttagcctgtcattatttcttactaaataagaatgttttttgtacgaaacgcaaaattgaaacgttgtacgaactgctatcgatccggtaaaaatattacaaacatttcatattaacgtcgaaaaaccgacaattataaacattcacacatcattttatcgtaaggaaaaaaccggcaatggcacattacatctgtgttgagcacaagtgcagttagatacattgtgcaccactttgaaatgggctaaatgaaaaacaaaatgaaaacaaaatatgagtgtatataagacgaccccttgagtgtttgaaaatatcgctcagatgacgaaggcgacgaatggccgatgaagggacatttgttgggccagaaaaacggggccgacgatgctgctccgagaagcagtccaacacaaaagcggcactaaacagttgaacagtgataaattttcaaaatatcggcgaagctataagtcccttttaaatgaaatttgataaggagggagatacccccaggaaatttacatttcctttcccagttgcctagggttgtacacatcggagaagggctttgcgccccccccctcccgcagaaactttttcgcggtcgaccatttttttaaaattgcttttcaaaccaacttttttacggcgcgcgctttttccaaaaacttttagggattggaaggaggagggggagatccgttcggtttttcttcaacccttttttctcgaccgcccccccccgcctcgtgcgactgacgctgctgccctcctaagctcggcggcatgaccccgggaccgatccggtccacgtagggaagccgggaaaaagctaaattcccaaaaaaactaacattcttcaaaaacttaggttccttgaaatgttttaataatagttttgtcagtttaagctaggtaacggaattttaaaaccctttcccgtacaatcctatatagcctgttagataaaacactaactagtcaggtggacattccttttgaagcggaagaccacgatgggtaagacgaaaggagtcgcatatttcatcaaaggtttgctgatagtgtggttcggcgcccaaagttgcacattcccaacaaaggaccccaaacatcctgttttagttgaattgccgcattagtttattttttaccaaccaaacatcgctctctggtctatgttttgcgtttgtacggtccgttgaacagacgatttcaggcggaagccaaggaattggcagacgcggaccaaagtcaattggcaaaccaaaatcgcccaattttgcgacacatctaacaagaagaatcataatgttgaatgttggctcctttcacctgctcaaatttctttcagtcagcaaaatgtttctggctgccacgtcaccgtgagcgaattcattgccctgaaggtcacgactttcgtgtaagaaccttaaaattagtataaattgattaattttgagttgggaacacttcagagcgttgcccacttgagtcaacacgtgcacaatgtcacggacaaacacacgcggcctttctctttcatcctctttgcactgaaaagccttccggtcaaaattttgatcgtcaaacaaaccctgatctcttcccggaaaaactcagccaaactcccgccatgaagccattccattgcgaacattggccgaaaggcggagaatgatctgaatgttccatatcccaaatacaaacggtcaaaaaaacagagatgcctgccaaaatggttaattatatgaaaagacactaaaaagtcgaccggcatttctgttagctcgaatattcttcgagtcgaatagctcacaacacacagtttgcttacagcaatgatgcgtacaatattcgcatggttcaatcgtgccatcctcgctgcttcttctaataagccaatgcttttttggggcatgggataactcatctgaaaaatatttcgttgatcgcctctgtagctcagtggttagagcatctgtcttgtaccactcagtggcagacaacagaaggtcgtgggttcgactcccatcggaggcacttttcttttttccatatttacgaaaaaggactaaaaacttaaatccctcacatcccaagctgttttttttaatttaagtttccgtaccttcacagcggcgaatactttttgcttgaaccgagtttgtgatttgggaacaacgtactgaatgttgaaataaaaaagtaattatcgcggatctagaattataaattacaagctataacttttatcaaaaagggctggcgcgaaaaaatagcgccatttctcaatgtatttcgtattttacccctttgaatacaaagccaacagctccttggccgagttttatatcagtaagttcgatattgcttaaataataatgacagacaaacaatattttattcagttaaaaaatacatgtcatccaccaacaaatggtccaacgctttgaaattaaaaaatatataagagtgactcgtattataaaaaataaattttacctctctttaattgtttaagtcggccaatataaggataaattgaatcaggagttgggtgacaaatgttttttccatctataaaaacgaaataaagaaattattcatttcattttattatacgtttgcacatccacagaagtgttatcaagtaaagcagaaaaagtgccataactgtggtccaaggggttaaattttcgctgcaaaatgggacatatcgatgcaaacggttggttaaattagttgttttattgttaaaacttgttgagatttgaaggaataaaccagcagttgttatatttgaggaagtgttgctttctgatgtcaacatttcaaatcttccataattttaacaaagcaaagttcgaacaatgtcttttattggtcacagttttttaatcttttctgaaagttcttattagaga

SEQ ID NO: 20769 - DNA, 1528 bp, Heterodera glycines
ctgtcgaaaatcgctaattctagcaattttcgatgtataagttgtctatgctttcttttccgaagaacgcatagaaagggggttctctcccattggtcagcgtttcattcttttttatttttgctgaacatttaacaacaataaatttgtcttacaaatttcttgtggggagggaaaaactttccttgcctaaggcacgaaaacaacaccgagtttctgcccccttaatcaattcgaatctcggggatcggggaatagcttattgatttcggcacttcaaaattgcgggactccccctcccgctgatcggaacaattttctgatcagtcccaaaggactcaaagggacaaattcgatcaatccaattttggactgatcagttgtaaatttcgcctcatttcaatttgttgtctgattggctttttagccaggctccgattgccccatcggaaaacccgttagcttttcagcgaccggtccatctcatttgtttttcgtggttacattgttggcatttctgaccattccctttcccctttttggaatctgatcaccacgcctgatccacctttggactctctgctcttcacgccaatttgcctattgatgccttggataattttagaaaatatacccttcggcgcaaacacaactgattagttcttgtcaataattctgcattttcatgcattataaatgttatatcattatttcatttaaacaatgattaaaaaagagtttcttaactttaccataagcttaaataaacaaatatttattataaatccctttattagaacaatatgtcagcattttattttgtatatgaaacctactaaatttacaaaaccaaaattaatgcttgaaaatagttatcaaatgtttactgcagaaaaattacatcacgatataatatcggaggtgcaaaaagagaatagttaaaatatacattgctttaacatattaaaaacaaaaaatttccaaaaatctggttttttgaatgaaaataaatttatgttttttgtactaaaataagtttttattactttttccaatcttttgaaaaaaattccaagaggccggtgctttttatttcgctataaaaattgatttttcgtgcttttcttattgaattaaagctgtataaaaaaatattaaaaattaaaatcccagccctgctgatcagcctaatataaatcgtccttggtccatttattttctatgcccatcattctctcccttgctatctctcacgcgctccccctttctcttctccctcccccatcccttctctccctcccaacctctttctctccccatcgccctctctcttttaatactagctctctcttcccctcttctctctccgttatctctgtctctatctacatcccttctttaaatcaatataaaaggaagcggtgcgttcgttccattgccattgtcctcctccaattgaacaaattggttcttctccccaatgaccaccatttattcgttcgttatttttgcatagagcaaatgtcca

SEQ ID NO: 20770 - DNA, 2121 bp, Heterodera glycines
  unsure (1)..(2121): unsure at all n locations
cttttaattgaaaattaattaaagcagtaaaaagggatctattaagagcagttatcgcaaagattgggggagcggagatggggattattaaaataaatagcctccctccttaaaatgtcaattattgaaaccaaattaaataataaaatgggaccgaaattccgagaatgtccatgaattccttggtctcctccagtctccattctggccgcgtttcctgttgagttcgtgccaatactaacgtttgtgcgttgctttgcaaggcgttcagctggatgacggctttctggaaaattaaaattttatttttttttaaattttggcaatgtgtgcctcgtaaagttgctgctcatcgtcgctctcccgctgttgggtcatttccgaagaagatttttgttggtgatttgtactatcaaatgtggaagcacttcgaagaaaaagcgctagaaaaaatatattttttaatttgaaaaatttaaaatttgaaaataaaaatggtattaattgggttgacttaaaaaataataattaataaaatcaaaaatgtttccatttattaaaaaacaatttcaacgacaaaaatttttcaacgacaaaaattaagaattttcatataaaaattgttgctcaatgcgaaaaaatagaaacatcaaataagaccaatgaaaacatcatttgtcctatgaatatttaaaagtttaattttaacaaatttacagccaaaaagttacacaaaaattgtaaagaatttagaaacaaagattttttaatgaaaatactgactttttaatagttttttatttaaaaattgtacaaattgtaattaaatgattaatggaaaaaaagcaattaatttgtgacggtcaaatcgattcaccaccaacaaaagtgaaaatgtgtacacaattttattgctaaacacaacaaataacggcaaaaaactatcagcagatttcgttttggtgtaaaaatggaataaaaatggaagagccatcgaaggaacactttgccccccccccccattaattgttaattgtcccacaattctccgataaaaatattacagcataatattttatctaaataaaaataaacattatttctcatttacttttcattttatattgtattttggcaccgtaaaactcgagactgaaacccggaaacataatcccgagtatgatccactaagtaattgcattgtgactctgtcccaatttaagtttaaaaaaacaacttattaccagggttagctgaaatttttaccagacacagcctctcgaaaaatattaatgacaaataataattcagagaaaaaggaaaaatatatgaaaaataaattggccaaatttctgccctaaaatacatatgtaaattcaaaaattcaagcacgataagtttttggagaacaaaatcataaataattattgaattaaagggacaagtgctttccaaattcattggtagcgaagcggaattcaaagttgctaagattttaatgtaatagtactgtaaaatttagtttttcagaaaaaaaaaatactaaatttccctgataggactccctgtagactctgtacagtatcctgttgtactaccgtaccgtttttcgctcgtctaagtcggcaaaagcggaaggaacaatgctgataataatgatgagaggaatgaatgcagcaacagcaggcgatggttgttgatgaaaatgctcggcggaatgctgcgccgagcacagcggcgggcgccggcgccacggggaaaacggaggcaaaacgacgccatgggaaaatgaccttcaacgttgtggtcgtcatcttttaattattgtaatcaatcaacaatcggctgttttggcattggggaattattatcgtgatgatgacaataaattatggcattatttttggaagatttggcacttaaaaggctatagggattagtgttcggcaccgaattggtctctggccggatttcccggactcgagccggaaatccgggttttgaggtccactgatttcccaggattatgaattgaggggtcgggagagagtaaccnncaataaacagaaaattggaatcctttttttggggattagggcaaagtaaagctaaatcccaaat

SEQ ID NO: 20771 - DNA, 1564 bp, Heterodera glycines
  unsure (1)..(1564): unsure at all n locations
ggattagggcaaagtaaagctaaatcncaaattaattcgctttacaacggataagttcaacccgtttaaaaaaatgccaaaatataaaaaataatttgtctaattatcaaaatcaaaaagatatctgtatatgcttatgtaaaaacagaacgttccaccgcacattcccatcaaaaaatttattccctcatttactgataagaaaagcgacaattgtgaagcaatattatgtgtatgtatgtgtcgaaacattaaaattgcacaaaatttagcaaaaaataatgttttaaaaaattaattgcgaaaagctgaaaattaaaatggacggactaaaaaataaaagagcaatatggtaaatatatgtattggtaagctgtgtgtgtgtgcgctaaataatatgttgtttttgttgttgctgctttatgacatacatattgagattaatttaaggaaaaagtcaaaattatcgattgatcgctgctatggttaataatcaataaatatcgatcgattgattggcgctcatctgtcagttcatgaacattgagtgcacaaactgttcaaaatcgagcgcattttcaatggtacggccggacgccgcgtccacgtagggcttcatgcgctgtttgcagtattgcgcttgttcctgggtcaaattctgcaaaaaaaaagggagggggcaatataatattaaagataaaattagaaatctatcaaaaatttttagacaaataaaaacggtgccaggaggggcagcaacccctaaagaccccccgcaaccgaaaattttatgtaaaaatattatttttagtgaaaatctttaattttccttattggtaccattccaactttttaaaaatcactaagaatcaaaatcttgaaaaaacccaaataaaattcatttaaaaataaaattccatcaattaatttaaatattcttcctgcagaacaaaaacatgccaaaattacatttataattagttaattttaaaaacgcaccgcgaacagttcttccgcgaacacataggggcggtactctttgctgagtgcgcggaatgccatctcaatttcgtcactggaccgcacattctccgtctccttgttgatcatgaacgccatgaactcctgcagggtgacgtaaccatcgctgaaaaaatgaaaaaaatttacagaaattttttaaaagattttattatatttatgaaaatatcttctaaaatctgacataacccttacattggccttatgaaatttttttaataaaaaggaaggggaaaatgcacccaaaggaatgtatttcaaattttcaaaaaatacacctaaaaattgcttttattcattttcttttcttttaaaaatgaatataacaattttttctagaaaatttttttttttgaacatgaacgtcatgaacccctgaagggtgatgtaagtatgctgaaattttcaaaaaaatatttgttgatcaccaatcagaccttgacaacgagattctgtaaatcttaattaaaattctcgagactacaaatgcattggctctattgcactttatgagtcctaatca

SEQ ID NO: 20772 - DNA, 1810 bp, Heterodera glycines
  unsure (1)..(1810): unsure at all n locations
tgtggccaatgcaatttttgtgagtttattccatcttttttgtactttgattaacccagaaataacacagaaatgtgacgtcgacctacgtaaaactctctatcagaacattgtgctcagcggcggttcgacaatgttcgccggattcggcgacagacttttggccgaagttcgtcctccccttcctcagggacggacggttccgggggagggtacgcgggatacgtacccccttccccccatacccctccacattcggaactcgcctgtcggcaccgccgggacgcggggacgggacaaacgccaccaaattaatcaaattttaaaaagaaattttttataaaaaagtcaagaaaacaaataatagtaattcgtcataaaatttcgaaaaccgataaaaattcttcaatttttttcttgaaatttcttataaataaattttcttagatttcacgaaaaatttcttttgtaaatttggaatgttttttaatccccgcgcgagattttgaggtaaagccgccggacaaatcctgttgctttaaaattaaaaaaaagtagtccacacgaggatggtatcccctcccgaaatcccgggactgtcccttcccttcccccccctccctttttttattcccattttccgtcattcacttccctttcgttttgccagatgaaacggctctgtccaaaggatgtcaaagtgcgcattttggcgccccaggagcggatattctccacttggattggcggttccattttggcgtctttggacacattccgcaaaatttgggtgacaaaacaacagtacgaaaataacggaaagataatcatggcacgngaaactttttgatggatgcttcggtgggaggacagccaaattcgaataaaatgatcaaatcagcaaattccttttgtattcgtaaataaattaaatatgtattcgccctttttgacataaaaaatgcttcgctttgattccattggacttttgccattgttttgtttggtcctctcaaaaatatgcaatttcctaatttgtccatttgtaaatttgaaatttgagcttttctttgtccaaaatcattttatccgacaaaaattgcataatggataattggacgtgcgcatttgttttgtttgcctttgctatttatgtgttcaccagcagcggattttgtcattgcaatgaatgaatgatggaatgaccttgggccgagggggggggagaaaaccgaaacgaaaatacaaaagaattgaaatgaattatgaagttatacggaagaggggaggaggacagacaaaataattgggcaatttgatttggattatgacacaaattgaaacccaaagcgaacgatggattgtcttttggcttttgctctgtgcccttttggcttccgtcctccgctcccttcccttcccttggctttctcatctccgtgcttctcctcccgtggtgcccctttctttggcatttgtcccttcgccctttccttccgccgtttcttccgtcgggattgcgttgtttctcgtcgtgaaattcggctcaacttttttctgtttcatccttctgttttggaaccacgttttcacctgcaaaagcctttcattcgctgcttccgtctcccttttttggcctttgtttgttttacttgcgtttcgcttagacttaaaacattcgccagcgcaatgcgttcgggagttgacagataattctgctcgttgaatttgtgctccaaccctttgggaaataaacgaaaaatgaaacgcagagtgccgaaagcattctgtcnaacgatcggcgccgttg

SEQ ID NO: 20773 - DNA, 1941 bp, Heterodera glycines
  unsure (1)..(1941): unsure at all n locations
gatcaccgtgcaattgctggtccgaaaacactgtccgtgccttgcgccgtctgtacgatttgctgcccgggcctcttccccctgtgcccattcccttcgtccgccattccctctggccgaaccatcgacggatttccgctggcagccaccgcagcnggccattgtggcggctaatcggagtgtttcgaagtgaaaaagacgcgaagttgggattggccacgggggagggaaaggcggagaagcggacggtgacggaatggcgtgagggagcggaagaggcgcagagagaaggacattttggcactcgccggaggggccttaataaaggaaagcaaatgccaattggggggaaaggaaagtgccaacggagggaagggaaggcgaactcgccatggcaagtcaaacggaccgccaacgacgaaatgctcaccgttttggtgctgtttctcttctgtcccttcttcctcttcccatcgcttcctttgctcttctccgaaatgttcgcttttttccccctttttctgctgccgttgcaaaatcgtctcaatgttcaacgcacaatgcaaattcagcggaggacggagcatcagaagagcggcggaagaagcagcggagggcgggcggacggaggaggcgcagggaaaggcgtaaggtgagggggaggaggacgaacacagcgaagtgaccggcccattgggcggagggtgtgccctttggccttccgttctccgcgtctccgtttccgtgtccatcttcggcccgtcgtcctccgtcgtcgtttccttttgccattttccactttgtctggtgccattggtcagaagcagtcgaacgattgaaaatggcttcttctcctctgccgattcgcttttttccctctccgcaatttctccgccgtttcgcctttcatttttctgaatgctttcttcttcgtactgctccaaattgtgctgctgttttcgatgcttcacttcctgctgcccttcgctatgatgagtaaatgcggaggaggaagaggaggaaacggaggagccgcaaaagccaagcaaaaagtccattttgggtgagaaaccgctaaatgggattattacgacaaaattactgggcaaaatatgctaattagtgctctgccacccattcgcctgccgtgggacacgtcaatcactgccaaatggcctattggattggacatgctcaacatttatgggaagcaaatgaaaggcgtttcattcgtactgctttgagttgtcaaaagttgcgcgaactctaagcaatcatttcaatgcgatcggtgctaattgggcaattaatatgccccaggggaaatgcaagtgaagaaatacggcatgtccgccagtaaatctgcagggattatttgtggtggagtggcgcctccgcccattcactcaaataattaattatgcgtgtgccgttcgccatttcttcgcctcagcagcccatcagtgcccggaggggcggcgcttcggccgtcggttacggtaattggggcaaattggccggatgaatgggggcgatggaaggagaataagcagcgcaacctaattagtttaatttgagcatcattattgaggctctttggagatggaccaattttctcggatttcctcaaaaatatgccaaaataatcgcggtgttttcatcgccgaagggctaattgaggcggtcgagagtgtcgagaacggcaaattggagacgaaaacattgcgcaattgcaggacaaagaagacgcgaggacgtgccaatcgaaccaaaaattcggagaggaaagttgtggcattgaccaaaagggcacagacaaaatcagtgtcaatgcccaatccacgaattgtcctcattatgcaattattttttgttgtaatttgttttcccatccaatcactcagcgatgagttgctcttttctttgcggaggttttgctga

SEQ ID NO: 20774 - DNA, 2090 bp, Heterodera glycines
ggcctggcaggtcaataaaaaattaaacaaataattttcttcgtactttctccccccccgttggccaaaccgatggtaaatgatgttgtccttctaatgaagaaaacagcaattaaattctgcaataaaacgaatatcgtctggtaaaaaaggccaaaatagttgttaaaagttcgaaaatgccaaaattgatgtgaactaacccccgatataggtgtttttaagtgctaggaagtcgctaaaaatcattggtttcctttattttgaaatccataaaaaggacaataccgttaaaattaataattcaaattaacaaaaataaaaataaattaaaatggacaaaattcttattttcatttcattaagtatttttctttttttttatcacagaaatatgactaattaatttgtcaaaactttttgttagctgtcttttttagttatctacttagggtgtaacatgagtttccgcacaatttttttttgacaaattcaaaaattcataactccgtaatttctgcagttattttaataattcttattttattttgttcgtcagaaagtcttctttcatttcatgccattgtttcattttttatttgcttattcaatttttttagtattttttcccgaccatgcaaaaatacttgtaaggctaatagagcttgtgaagtgctttcgaatgataccaaggttgtttgatttggtcgacaatgaaaatgttataactagggcgcggattcttaggtttttacttattttttctgcgcctttaactcaacgagaaatgcacgaaaaacacattttttgttcggaaattcttcgttttaacgcccctatccgaccctaggaatccctattttggatattcgctcctaaaaatccctattttgagtgttctcccctaaaataactttttatccctattttggcatttcgctattttcgcccctatttcgcgaattttttgcccttatttaggtccctattttgggctttttcgaccctaaaaatccgcgccctgatttcaatatcaattataaatattttcaattacatgttatgtttgacaacatggaagacatttattagcaaaattcgcttaatgattgagcaacatggaatccattaagtgttataaatagggtcggcaccaggagtgcagctcggacagcgcattccatcatttgcggcattttttctgcaacatgcgattcacgaccgtagcaatttgattccgcgacgcgggattttctgtccgcgctccacccctgaacagctaaatcaaatcattcctaaaaaagaatttaacgggaactttgctctttattaattaatctatgaagctcaagtgcaaataataaacaaatgattgaatgtaaaaaaaaaaattagattttacaaaaattttattataataatttttcttttccaattttgcaaataatattaatattcatttgaatataattttctcgtaataacgtttaatttgacgtcaatcaattcatctgctttagattgtaattcaaatgatattcacatgcttttcaaatgtcaatgcaaaagctcaaacaataatttattttatttttaaataatactttttacgtcattgaatattatgaagaaaaaactcattattttttcatattttattcatatgcaaggaccattaaattcacgaaaaattcattttattattcatttaaaattagactttatttatttttcctgttttgtatttacaaagattaccctaattattttttccgattcttgtagacatataactgtccattaagtatctccttcacaaatataaatatgccgcggcaatcacgaagacatacaattcataattatcagtgaatcaattttaattaagaaaatgccattattcaattttcttcttccattggcattgtgttgtagtgccattttggcgattggtattccaaatgagggtccactgcgtttcggcgccgaccgtttcggcgccagctcagtttttggactataacttttttctttgtcaaccaaatctaatattgttggtatcaaccgaaagccctaagtgttctctatta

SEQ ID NO: 20775 - DNA, 1451 bp, Heterodera glycines
aaaacgctaccgaacaaaatatgagcaaaattgaagccatttcgtgtgctaattgtttaaaagaaaaggccgaaaatgagaaaattcatcgtgagtattttgcagtaaattttgaagaagcatcattaattaattaattaattaaatcatcattaattatttaattatttttgtaaatttatacttaattttcaaatgaattttctttcttatttttattaatgttattaactaaggaatgctttaggaacagctttttcagcggcaagagcaaatgttggccaaaattgacgagttacaaaagtccgtttttgcattaaaagaaggacagagctcaattggtgggttaaatgaatgcttaattgaattaatttgtgaaattattttaaattttcattttcattggggaaattatcggaagtttaaaaaatttattgacacaaaaatagggttcgagccccgtggcgcctatcgacaccgccgggcccgaatttaaccattattttttgaaaatttgacccaaaatggcaaaatctgcgattttcggcgcaaaacctctactaattcctgtttttgcctccgtcgctgaagattttggaaatattactggtgcaaaaaatttttgttggcccgaagagcaagaaaaaaaaaaagctcttcgagtgccctcgccgaaatttttttgtggatacgggcctggcccagttttaggcaataagccaatgtatcaaattggcattgaaagcgccgctatgcgttttcgtcgggattttttttgagttactaaatttttgaaaattcacacagtttaatagggaaacgaatctttattataattcctaatctgggtggttttgttattcgataactcagaatttcaggaaattcgactttctcgtgcccaactgtcccctttggttggtgccaatttggtgcggcgtttggaaaagtgtggcacggccggcgaggcgatgaccgaactgttgaacagcgtcgttaaaatgtaccacatcattgaaatgtaagtccggtgggaatccgtcacggagtacctacccccccctcccccccccccctcacaaggggtaaaatttctaaaaagaacagccaaataacgggctattaaaaagacttttccagcatttactcccccttcccaagtctcaaaaacccaaaattatgggactatccgttttttatcttggacatcttttgaagggcttaaatgcaattaaatttaaatcttcaaataagagattttataattattagaattttaacgcagaaatctttttttgagcccctttattcaaagcaaatgcgatttacaagccaagtcatcaataagcacttcaaaaactttacaggtataagaagcgaaggaaagaattggacgagcgattcaacgaagtcaaacgaatggcggatgcaattaagtgaatttgccctcc

SEQ ID NO: 20776 - DNA, 1133 bp, Heterodera glycines
  unsure (1)..(1133): unsure at all n locations
aattaaaaagaaataaatattctaagttttaataattacctaattttcaaatgtacaaaattcggtcaaaaaatttattgagcccgtttattaataaggtgagctatgccattatttattatttatttatattattatctttttttccattattttcttatntaatntaaattggtttatactggacttggaaaattgattttttgacgctttccggcgctttttagcaccgcgaatttttccattccgccactttttggcgccgttgttttccggccattttttttcattgtttgcggaatccagttctagtttagcctctatatggcgttagtttttttgttgttgttgcgtattttccttttttttgcactaaaagcgcttacgataatcacattgctgtacgattttctaacaaatattacagtacgcgttttacagttgaacacgtacagtaattattgggatatcgccgcgtgtcaccccaatttgctcatctccaactcggcatcaattaatgctaatgccccactgaacaaagcacagcagctactaaagagcaatatcttcacagctggcgctgcgattttggcaactttgcccggatatgtgcgcaaaagtgtagtggtcaagcataacgggaagaacagcggtaaatgatggtgacgaatgttcgagagtcaatcccgggttttctcaattcgagaatttctcggcctttttttatctttcatagccttgacggctcgagatctgtttttgttgattagaagtgctccttatatatttctgtcgtaattacctaaattattttatcatttaaattgccaaaaatggaaatggaaaaaactttttcgacaaccaatgctaatgataatcaaagagttatttagttaaagatttttatgtttaattttgcggtttttaatttatttttattttagttgaaaattaattgtattttcttgcataatttttgattttaatttcattgttttgtttgttttaggcttttgttctgtgttttccaaaatttcaattccaaatggatcatttttctattacgaagttacgattctgcacaaacattacgagtatgttaatagttaataattaaatttacatcagttatt

SEQ ID NO: 20777 - DNA, 1694 bp, Heterodera glycines
gcttctcgagatgaatcgattgatatataatttgcgccattttttcaagggcttcactatgatatatccaaaattaagcaattgatggatccgagaaacggcttttacgacaaaaatgaggacaaagtgactctggccattgatgtcattgtggggcaagcagaaatggacagaccaatttctgctgatcaaagcaaatcgaaagggacactttttatggacattgaaaaagtgtcacaatttgcgcgagaaatcatttggagtgagcgcaaaagcgaaactgtgacgtgcttagggggacttccatggaaaatatccgttcaaatatttacgattatgggaagtgccgtcaaatgtttgagcctttttctttgttgtaccgctccaaaagaaggtgaaattcaaataatcatttgaaattatatttaaatttaagacgaaaattggagagccgaatgttcggcaaaattccgaattgtttcgcaaatgagcggagttggggaattcagaaaggaatttgagcacactgtttttaatagcgaaacgaactgttggggattccccgatttcatcacatttgcggtgagaggccaatttgacattgcttaattgacctaattatgacaattaaggaattaatggacccgggccgaggcttatacgacagagaggaggacaaagtgacgttggccatcgatgtgactgtgatgaaagagcgaaagggcacaaaacgaaaattggccgttggaaatgcccacccaatcattaatttgacataattctgtttttgtctcccatttttctctcattgaattgattaaaaataatttaaaggattgctttttagaattagtattcttggactggctaaatactaatagaaacggtgagccccctgttttcttttaaactttttctttaaaatttacactttcaatgaaattaaattttaaaaaccttttttcctcaaaattccagtccaaaaaattctgacgccggctacaacaaagaaattgcaaattttcttttgaaatagaaaaaaaaagtaaaattccgtaatggattttgaccacgtccatcatgtagagagagtaatcgatttactcataaattttcgggattttatggcccagccaagtaacagtttcagaaaaaatataaattaaaattaaaattttaaaatattttgataatttaaatcacaataaaattgagttagactgtgtattcaatacataaaaatgatcaagaaataatgctctttcgaaaatataaaattagtaacattttaaaggcattttgaaacttcgatgacctcaaacgaaaagaaaaagattcattaatattttattatttttctcctgtaagttatctctgactcattgactttaaaaatttattttttcttctctttatctcaatacactatttctatcaatctcttaatcatttttacaccgttaaataatgtcaaacactttggccgatcgaattaaaccgctgttagaagatgccgctgccaaagggaggtgatcccacaggtcttaaaaaacagtactcattaatatctaatgagtcggtgtctctatgcttttacattggattcaatcaggttaatagattttttcatatgttttccctttaatactatgtgagaaggcttttaggtcgccgcaaagaaagtgtcacggggg

SEQ ID NO: 20778 - DNA, 1250 bp, Heterodera glycines
atgaaagaataaacgaaaggaggaagaaaggagggatatttatgcaaaaataaaaaagggttaatccagggttaccctttgtccttatttgtaagatttgtacttatttagctctttgtccttattttagtcttattttttggattcagtgagaaatttagattttaaatgataatttttgaaagaaatgttttttgaagcggcgcctattagaggtgcgccgtgactcactgtcacggttaccgtgaaatcacgggttttttcgatcacggtcatggtcacgattcacggggtcaattcacggtttttcgtgaaaaatttacactggataaaattgaaaaggctcccggacatttcgacaatgaccgtttcgacaataccttttcgacaatgccgtttcgacaataaaagtaaatatatttttttaaataaaattcaaatttctgcaaaattatatggacggtgcggatttgggatcaatataaaaaagtttttttttcgtttttttcaaaatagcattatgagaatggctttagtttatcaattttcggcgcaaattgcttattattttttaattaaaaattgaaacattgttttacacctaaatagttgataatgaattaggtagaagcttttaccctgaaaaaactattcttgattaaaaaaacaatttttttttgttcgaattcgggtctggagttcggaattgggcaaacccgagttaagatccgttatcagcaccctcaaaaacgcctaaaaactggttttgagcacaaaattaaaaaaaaatgaaaattagggacaaccattcttcaggattgccgcctgggtaaaaagaggacactacattaagttaaataaatggtttcattttggatttatattataggtccgtctcattttgtcttctttcttcactattaatagggctcggatttttaggtgctaaaaattcctaaataggtactaaaataggtgctaaaaaagtgcaaaataggtgctaaaaaccccaaaaaaggccaaaataaaaaaattaactacctaattaaatttttctctttaaatttcatcaatattttttttaattaatttattattttttatattcattttgttatatttaatttgatattttaaattttggcgatatgatatagtcgtaaatggtcattgtcgaaacggcattgtcgaaaaggtattgtcgaaacggtcattggcgaaacggtcattgtcgaaatgtccagccacca

SEQ ID NO: 20779 - DNA, 1848 bp, Heterodera glycines
ctatgaaaaaactttctaaaattctttttcttgataactttctaagttagcaaatttaaaaaaaaaatttttctcggcgggaaacgatgcggggggggggacgagctgctcccgtaaaagagggaggtaattgcgagagggaggaatgaacgaggaaacgaggttgaaaagaattggtgaaatttggttatcaataaattcttttttttctaatttttttttaaaaataaattacctatttaaatgaaatttaaagtttttttttttaaataaaaatttatagatatgtgacaatattaaataatcaaaatgattaaaaacaattaacatcggaccctatcccttaaaaaatattgtttttttaaagccctgtgaaaaaaactgcgttaacaaattggggacgggacgaaatctcgccgccgaaatctcgccgccggaatctcgccggccgaaatctcgccgagagaaaatctcgccgccgaaatctcgccggccgaaatctcgccgagagaaaatctcgccgccgaaatctcgccgccgaaatctcgccgcagaaatttcaaaaaaaaaaaaattcaaacttagaaatttttcaaggaaaaaattttagaaaatttttttataagaaaattccaaaaaaaactatttgctaagtttttttgaaaatttttcaaaaaaaacagtaaattttcataaaattttcaaaaaaaaattgctgaaaaatttttcaacaatttttttatttaaattttataaaaaaatttttctaagaattttttccttgaaaaatttctaagtttgaaattttttttttgaaatttgtggtgagatttgggggggtgagatttgggaggtgatattttgtttgggagagatttgggaaggtgagattaaggacggagagattgaggaggtgagattttggcggcgagatttcggcggcgagattttggggtgcaccgtaattttaataatatattatatcctcctctaccaaaatatttttaccaactttcaaaggtgtcgggaataaatcttgaactgatttgggttaaatacggcttctcccgttttaaatttatttattacccagaaatctggttttataaagtatagccgtgcttatttcatttacaatgcattgaatagattaattctttggcaaaatttaagtccgtattttttatgtccaactcctactctgaattctatgcgaaaaatcaaacaaaaaaagatcaaaattcctcgtgccgatccttggtatgcaagatggaagcctcttttagatatacatttgtttgtttgtttgttttccctctttccgcccagcgccgattggcgtacgcttccaaccattcactaaatgcataggcttgcgtgaagctaaccaaaaccacaaacagcctcaaccaaagtctgttcgttggccaagattaaatgttcattaatttttgttttcgtccgactttcctttttttctttccgtctgtcttttcttttctctaattttccttttgcgttttctttcgttcctctcccctctctctcacctccttccattgcatttctttctctgactttgctttcaacttcattttccttcctcggcattcggcacttccaacgttggcatgtgggggaatcgcatggcatttatcttcgttgctagccaccggcagaaaacactattgaacggcacgcataggaatgtattttcctttacattctttccctttccctcccgattccaatatccctcctcaaaaagtttcaatcattaagtttgtaattttattaaatgtaaatctactgcgcttaattgcgaaccggctcatttttgcaaaatct

SEQ ID NO: 20780 - DNA, 626 bp, Heterodera glycines
aaaaataaggggggggggggaaagggagaggtccccagaatgtgggacctcggaaaaaaatcggggggggagagaaggggggggttcaaagatagagtgcccaggaaaaaggatggggggggaggggcgggggggggagtcccagggaatgccacatgatgaggaatgttgaggaaaaaaggggggggggggtgaaagagagagtgccaagatatgagggatggcgaagaatgacggggtggggaggaagtgagagtgccaagggatgagggatggcgaagaatgaagggggggggggtgaaagagagagtgccaagatatgagggatggcgaagaatgacggggtggggaggaagtgagagtgccaagggatgagggatggcgaagaagaatgacggggtggggaggaagtgagagtgccaagggatgagggatggcgaagaagaatgagaagaagaatgacgggggggtgaaagagagagtgccaagggatgagggatggcgaagaatgacggggtggggaggaagtgagagtgccaagggatgagggatggcgaagaatgacggggggggggtgaaagagagagtgccaagatatgagggatggggaagaatgacgcggcggt

SEQ ID NO: 20781 - DNA, 1351 bp, Heterodera glycines
ttgggcgtaatttaattttttgctttttatctgccattctgttatgctcctcttttttgcaaagctgccaaaatttttatgtcatacaaaaggcggccccaactattgagttgttataagcacattttttcataatcagagcattgatttctaggatgagcattttataattgaatattttgctttttttatgcatagaatttttgatttttcattattaatcagaaagtgcttcggcgctttttaggagtgggaccctcccccactgcggcgctgttccctggttcgccattcagtgtccacatttgggcactgaaatcctcacttgcatttttttcaacactgtccccgttggcagtactattagagagacgagagactgtgttaaagagagagacagttagagatgctagagtaaaagaaaaatagtttagagattactctaactgtctaacctattattcaacccatcatactttcccaaaccaaaagtactatatatagcccatttttcattattaatcagaaagtgcttcggcgctttttaggagtggaaccctcccccactgcggcgctgttccctgtctaagggacaggtaagcccaaggtcaaggggaggaggtagcgcttcgacacttgtggtcctggtgggagtttaagactgccttaacaccattttgccattctaaggtgcaagtggctgggccggtgtgccaataaaggccgccttggaagatcactgtgaccctgatggacgacatcagtgcctcttgggtaggctatgagacttgtgtgggtggctttattaaccaagcccccacacgccagagtcctttacgttttttttactattttaaaaataatggatccattcctttacagggactaaaagaatggatccatcctttaagattgactaaagggatggatccaaaaataatgtctccatccctttaccagtgactaaatggatggatccatccctttaagattgactaaagggatgcctaaagggatggatcaatccctttaagattgactaaaaggatggatccatccctttaagattgactaaagggatggatccaaaaatattgtctccatccctttaccagactaaagggatggatccaaaaatattgtctccatccctttaccatggatccatccatttaagattgactaaacgtcttttttactattttaaaaataatgtctccatccctttaccagactaaagggatggatccaaaaatatgtctccatccctttaccagtgactaaagggatggatccatccctttatgattgactaaagggatggatccaataataatgtctccatcccttt

SEQ ID NO: 20782 - DNA, 1771 bp, Heterodera glycines
aaaaacctagcaaaagtatgtcactaattcatccaaatgcatacaaatattgccgcgctgccaatatggaaaaggtcattgcggagtcacaggccattcgatcaaaactcaggtccgcaaacgaaaattgcaaacgtcaaccctttgtaccccccccccccttaattgtcatgaagaattactatcaaatttgagtaattaatggtaaaaaaggatattaaattgttattttggcaaattggaatccgtaaccatgcattcggcatttatggttatttgagaacccccatgactatcgaaataccaccaaaaactcggcaattaaaaagaatggggatttttgctttggtttaaaattagtacagagggttttcttagatgctgaacacaaatttgacatattttatgaccaattcctagtccataactcagaactcaaacaaaaatccaaaactcttggctttttataaattaaatttattatattttggtaactttttgccatgctcctgttgtcacatacgtgatccagtgggttgtgaccttggttctgttccgtattttttgcgttgaatcagttccccttcaagtagttgtttttcttttaatttttcaaaaaatatttcttttccaatggaaattttaaattaattcaatattctgttatattttttcaatttaaatcaagaatcaggtaatatttggtcaggtttttaaacaatatatattaacaatcacacccaaattaaaaaaaaatttcccgacggcaccgatcgtcaccgccggagccaaaattctctttgttttcaaattaccaattgttttgttagtttttagctcttgataaatatgtacctaatttcaaaactcggtctcgaaattatatttgtgaaaaaataaatgcgtttatttttgagaattttaaagaaaatgaaattattactattattttattcagttctaatttttattatcctaattaatccaattgaattaacaaataaaaaagttggtggtttgatgaaaaaaatgggaagaaaaaagagaaataattggcaaattctataaaattaaagagaaaataaaagaaaaaggaagaaaatactcaacaaaagaatgaaaccaaattaattcgaattaatcattattttaccaattggcaattttttggagagtagaagtaaaattatcaacaaaaattattataattgtttctttgcaattaagtgggtgggtttccttattttactcgttaaatcaatagaattataatttctttcaattattaataagaaaaataatttatattcatttatatgcctcaaaaaatattaccatttaatttttaaaaaacttatagatcattttaagacgacaaaaatgaatttattcctgctattctttttcatttagtttttaattgtcaaaattgaatcagcgaatggaaaattgcatcaaaagttatttgatgcaatatttggagaaaaatgggaagaaaaagaagaagaaaatttggaagaaaaaaaagaaataattggaaaatttaataaaataaaagaaacaattaaagaaaaaagaagaaaattctcagcaaaagaatggaataaaattgaaggaaaaatagctaaaaaattggggacaaatcgccaatatattcaaaaatggattaaagaattagggcttaatcaaaaaatactgaaaagctacaagtcgaaaacagatgaagaaaaaatataaattgtgcaaaaattcattaaaatgactaatgaat

SEQ ID NO: 20783 - DNA, 1541 bp, Heterodera glycines
acgatttcatctgatgcttattacatcaaaaccgacgtttatggaaaattttccattttatttatgtaacttaagaagccaccggcatttttggattcaaaagcaaagctcttcttccatttttgcgcattggtatcaaatttcattcatagacaattaggcggtttcataattgattggaatttcaaatttaaaaaggaaaacaacaaatggcaaatggccgaaatcggacccaccgatgcgacgtgcacttcgccactgtacggactctccacgacggacggcacgccaagttcagtcaacgacagctgaacagaatcaacacattggcaaacagttgaaagaatgaatgagcaaatggcaatgttaaaaatggcaattaattaaaaatattaatgcgtccgtttataattaattcatccgcaataatttgtcagatttttccactagcaaaaagtaaaatacgagattttacttgcttttgaacatcggcttttcctttcgcccacttacggcggcgtttgctgctccgacatttgcgcatccgccggcagcgtacgtttgctgagcagcgggcgaagcggcggggttcagcagcgcggtgaccgccttcaaacacgcggcaacgtccggggacaaatccctccgattggcggtcagcaaatccatcaaaatccctcgtgccgaattcacttggctttgaagaagctaaaatggggaagaattggagttaaaagaattttaaaaaagttaaacaaataaaaaggaagaaattgtaaaactaaaatgaaccaattctatttatttatcatcgttaattgaatttaataaaatattctttgttctttgagcgtaaaatgtccaaatggacccgaattaaaccgccgacacaaacgaattgcgcaaattaattaaaggtaaataatgctcaatgatcggacaggtcaaaagtcgaggacaaagattaattttggatttcacaagaacaaataatgcgaaaagtgaggagaaaaaggcggacaaaatggggggggggggaaattgacaatccatcaaaaacggaggtaatttatttggacagggcgacccagccgaagcgcgcgacgactttcaaccatttttcatgttaaactctgtcccccattaatggaatggcttttaaagagtaatcagacgcaatttgcaacgaaattacagtaatgagcagagaaggacaaaaattaatgattaagaaaaaggaaaaaggagggagagagagagagagagagaaaaagaggaatttaaaagcactgactgaagagccgtgtgatccggggaaaacgaaatgccaaaataaatagatatgatttttaagaaaacaaaacacatttaaaatgaaaaaaaattacttccctgtgacttttaacacaaatccgctctttgactgatcagaaaagaaaacaaatggctccgcttctgaatgatcgccggccgacccgttcttccattaaatggtctatcatttttttggtttggccctccgccctcacattccctgccat

SEQ ID NO: 20784 - DNA, 2792 bp, Heterodera glycines
attttatagtaggatatataagagttgagctgatgacttctgtactaaattctttttgtctaaaatgttccaaaaaatttcttggaattttttcctaaattttttataaatttttcggggaagagatatatttattttaaaaaatttttccctcaccatttgagccaacggatgcgtcccgttggggcaacagatagcaggtgagcactttgacgccgttccgcgggtcggtgtccggctgaaggcggagcagtgcttgggactggttctcggacagccacaacgcttgcaactcgtgcagcacatttagctgcaaaaaaatgaaaaaaaaaatttttttttttaaatttgggacaaacaggggagggggggggatttgaaccgaatggcacaaaaaaggcatttctatcacaggcacatcgtaaatcaggggaaggggaagattttgttttttgttaccttgaaaattttgagtaaattctaaaactatacccggacgacacctatcggagtgcatcaatatgccttcgctccaaaaaaaaccgttaacctacccagtgaaaaatttaaaaaatgaattttttagttttcggaaattttctataaattttttaaataaagaattttttgctaataaaaacattaagagaattcgtataaaaattctctttttaatctttttttatactttccgtgaaaattttttttaaatattttttgtaaaatttttaattttctttttagaaaaaaggttttagaatttacaaattcgaaaattttctctgcaaaaaatgaatactgcttcccaattgggtccaactgttagcaattctcgacatatatttaaaaaaaataattaaaatttgggaattttttttccaaaattcagggggtgggagaccgaccaatcgccaattccatcgaaaattgaaattgatcaacccccatttccccaaccaattaatcatcaattgctggctgaccgtgtagggcaaatgcgggagtcggttgttgcacacgtccatcacccgtagacgtgccaatttgccaatttccatgggcaactcgtgcaactgattgtcccgcatggacaacacggtcagcgaggcacattcgcccaacagagcgggcacacggcgcagttggcaccggtccatgttcagtgtttgcagggcctggaatgggaaaaaaaatttgtataaattttttggagagggcggatttagggtgggttcttcccccctcccggattagttttcgctcccgtatcgttccctcaaccctccccaacaatttttttaaatttaacctataaatttttcaaaaaaaagaaatttctttataaaaattgcaagaaaaaaatctttgaaaaattcttcagcgattttttggaaaaatatttgaataattattaattaagcataaaattttgaaaaactcggtgaaaatttttcggaaatttattcattttttttcataaattttctaaaaatttcaagggtgatcgctagaactgaaacgaacttctcccacttttaattgtccagaaaatttgtgtatcaattggcattttatttcaaaaaattttttttaaaaattaatattttaattgtcggctttttttcttgctttggcgtctgacaaaattattttttcataaattacggcactttggaagttgaaaaattttagaacttttttttttacatgccttcaaattgccgacagagctgggcaattcgccgatcaagttctgctgcaggtacacctcggtcaggcttgtgcagccgccaattgctggcgttagggtgtcgatagtgttgtcgtcggctctaaaatttgtaaaaaaaatacatatacaaaaattattttaagccaattaatccaagaaaaatgtcagtgatttaaaattccgaaaaaaataaataaaataaaactgacttaagaatcatcaaccgcttcaggcgacctgaaatttattactgttaatttaatgaaataaaaaatttttttaaataattttctgacaaatattttgaactgacagaagagcagacctagtttgtccattcgaaaattcatcgaaaattttttgtaaaaaatcgctcgaaaaatttttcaaataaaaattttctattgataattttgaaaaaaaatatttttttttttaatttttcgaaggggtgaggaaacgaaacaggacaaaatttcgccccaaattttttctaaaaaaactttcaaacttagaaatgttcaagaaaaaatcttataaattttttataagaaattttcaaaaaaaaaattgaaaaattttgcacgaaccaatggaatttggcaattcgcgcaaacagttgtgggacacggtgatgtccacaagtgcgccgagttcgcccagctcgtccggcaacaggaagagcttgttggaggaggcgtccaactgttccagctttgtgcaacggagcatggcgtctggcaaccgttccagactgttctcgtccacgtacagctccaccagcgagcgcagtgcgccaatttcggggggctaaaataatgagaaaacggggaaaaatgagaaatttgaaaaatggaaatggaaccggccgtcgctttttttttgaattattttttgccatttttaacagattttcagtccgtccaaaaacggaattggctaattttataatttttggaaaaatttttagcgaaattatttggaaaactttcgggagggaagaagccttggagagggtaaaaaaaaggaaaagcgaaaattttagcaaaaataatatttt

SEQ ID NO: 20785 - DNA, 1395 bp, Heterodera glycines
  unsure (1)..(1395): unsure at all n locations
gttttaaaatatcctttctgacttgacttggttcttgatatcgaagctgtttctacgctattctaaaacggtgatacccaaacccccagatttttgaatccggttttcagaaaaaatgcctggggtgaaaacaatatttcacattcactccataactttgtgagttcggcacggatcgagaccgggataagaccatnggaaagagcagctcgagctctacaagaaggtatggaaagaaaaaatagttatttctgggactttttcagaaatcagaattaattctccaatgtggcccaaattttaggcccccagccacagccccttgcttctcccagttttaagtcttggatttgtcaaataaattcaagacttcaaattaataatcaaaaattctcttaaaatttttttgaacccaattcaaaaaaggaaaaaaatttgcagtcaaaaaattattcgaatttctccaattttgtttccataatttccgaaagttattcggtatcataatgccaaaacaaaacgaaatcgttttaaaatattcctttctggacttgacttggtttcttgatatcgaagctgttttctacgctatttctaaaacggttataccaaaccccagatttttgaatccggttttcagaaaaaatgccttgtggtgaaaacaatatttcacatttcactccataactttgtgagttcggcacggatcgagaccgggataagaccattggaaagagcagctcgagctctacaagaaggtatggaaagaaaaaatagttatttctgggactttttcagaaatcagaattaattctccaatgtggcccaaattttaggcccccagccacagccccttgcttctcccagttttaagtcttggatttgtcaaataaattcaagacttcaaattaataatcaaaaattctcttaaaatttttttgaacccaattcaaaaaaggaaaaaaatttgcagtcaaaaaattattcgaatttctccaattttgtttccataatttccgaaagttattcggtatcataatgccaaaacaaaacgaaatcgttttaaaatattcctttctggacttgacttggtttcttgatatcgaagctgttttctacgctatttctaaaacggttataccaaaccccagatttttgaatccggttttcagaaaaaatgccttgtggtgaaaacaatatttcacatttcactccataactttgtgagttcggcacggatcgagaccgggataagaccattggaaagagcagctcgagctctacaagaaggtatggaaagaaaaaatagttatttctgggactttttcagaatcagaattaattctccaatgtgggccaaattttatgcccccagccacagccccttgcttctcc

SEQ ID NO: 20786 - DNA, 1753 bp, Heterodera glycines
atggtgctattggatagtccataaaaaacgctaaaaaattacaaaataaaactttttaattcactttcatttttcattggttttaaacattttatatagtgagtgtccgtacacttatgaccatgactgtattttaaagccccaggaattcctaaaaaataatttaaaaggtcatatgtttatggacaaatgataaatcgagaaaaatagttgcccttttgcttgaataaatctgaaacgaactaatgttttgataggcatagcgcccattttaggtggtcatatgtttatggacaaaaattttatttcgcttaactaaatattttgtggccaaaaattctgaaaaaattcctgctaaagctaacccttgatgctgatcaaaaaagtcattacgaatgcacaaacaaatggtgcacgtgtcttttatctctatgcttgtataggaacagaaacctttaattgttttatttagtgtacgtattttattggaatcttttccagaaacctacaaaatttgaattgtgaagggaaataccaaaaatatctgtctttttaataattagcagaaaacaattttcatttaaattatttttttatttttaccataatattctgctaatatgaagattgattgcataaatttgatgtgtcggccaaaagtataaactaatgaggagaaaaaactgtttgtgaaggaattctaaacccaaattacattctgtagccccaattcttcaccgtgacaaaaaggtgagagattaataaaaattgtacatattacgaatgcacaaacaaatggtgcacgtgtcttttatctctatgcttgtataggaacagaaacctttaattgttttatttagtgtacgtattttattggaatcttttccagaaacctacaaaatttgaattgtgaagggaaataccaaaaatatctgtctttttaataattagcagaaaacaattttcatttaaattatttttttatttttaccataatattctgctaatatgaagattgattgcataaatttgatgtgtcgccacaaagtataaactaatgaggagaaaaaactgtttgtgaaggaattctaaacccaaattacattctgtagccccaattcttcaccgtgacaaaaaggtgagagattaataaaaattgtacatattacgaatgcacaaacaaatggtgcacgtgtcttttatctctatgcttgtagaattgtgaagggaaataccaaaaatatctgtctttttaataattagcagaaaacaattttcatttaaattatttttttatttttaccataatattctgctaatatgaagattgattgcataaatttgatgtgtcggccaaaagtataaactaatgaggagaaaaaactgtttgtgaaggaattctaaacccaaattacattctgtagccccaattcttcaccgtgtttccctccatttcttttctttcctctctttcctttttctctccccctccttcctcttccctctttttaccctccatttcttttccttcctctctttcctttttatctccccctcttctccatccctcctagatagtccaatgatcatttctctttcttccgtgtcgtttcccagaaattaattattatatttctcgagagtgcttattaaataaaatttttgccagcacccaattgctttcctttcgcttttccttacttataagagaaatgaaacggcgccgaccgacagagggaaacacaaaatgaat

SEQ ID NO: 20787 - DNA, 1030 bp, Heterodera glycines
aattgagcagaagcgttccaacctttccagggatactccccggtaaaggaataacttacactgaaatgagcgccgagctagctggctcaaaaaaattttagaaaatctgagtctttcgtttttatttattttttgcaaaattaattcttaaatattttctcagaaagggttctgacacgcaccaaattttatttacatgttagtttaggcactctgatgctttttctatcaaaaagggagatgaataaaatttttaaaaatttttaattcctttttaaacaggccaaaaagtttaggcttaacttttttttcagaaactgatcagaagcgcaccaaactttgcagggatactgaaaggaagagaaataacctattttaaatattatcttagccccccccccgtggttgggtctcttccaaaagtcccccaacccccaaaggctgccgttcattcgcttaatccaattacaatgagaagaagtgcagaaacattcacctaaagaggcaagggaagttgagaaaagccggcagaattttcacgtggcctcggcaaatttgggcggggattatcagagtccctaaataagcgaacgaattaataagaacagattccgaaaattgccgctggaattcgtcgctaagttaaattaccattaattctaaaaatgcaaaatcattgtccaaatctccggtagccttttccacgtttatccccccccctcccttactttcccacaaacacatacgtatgtacaatgctgctccagcaatccttgtggccattctttttccgactaattaccattaatggatgccactttaccctccccccccctccgctcgtcaatctttcccccgctttggtctttcttcggcgccaattccatgcgtatttatttatttatttgtccacgccgtctcaaccttttggtgagctttgtttggccataattgagttagtccaatattcgcatccccgcctttgttcataggaatgaatgaacgaatgagtgaattgaattgaatgagt

SEQ ID NO: 20788 - DNA, 2083 bp, Heterodera glycines
  unsure (1)..(2083): unsure at all n locations
aaattcagttcggtctgtgaatgtgcgaagttatggagagaaaagtcattttggacgggttggtgcaggtcaccgccctggtccttcgtttcgtggtcagtcgtcgtctcaattccatacctatcagcgcatgcgcggagggcccttccaccattcgactccgatccaacgccgttccgaatttgtgccgagacgctgaagctgagaacccccagacgagccccaccttttgacagtcgaattcgggtttttctgttttgacggcagggacgccgctcataaaggggcgggatgtgataagtgacctcattattaatttaaataattataattttgacgttctgtttaattatttttgatcttttctaaattttgtctgtccgtggtactggttgtttttttgtgatttttggttttgataattttgtttctcatcatcgcctccgacttttccttttattatttgcttcgattttaataaatttgtttgttttggcctcgcttaatcgttggtcttcgagtatcaatttgtgtgaagcggtggaatcgaagtttttatcacttggcgctcctgcagttctgggtaagcttcagcggaaaatttggagtttttggattttgggggaaaaaaaagttgggaattgtgaaggttaaatgaaattggatattagtgactcacagattgagcactaaaaattttttgataaataagctaattattcaaattaaccgtatgcttttattttttaattagcatggcttgactttcaaaaaatgttttaagattatatccctttttaatgatttatcattttataaaattactgttacttttgtatcacacaacaaatcgtgcaaagtgagtccttttttgaaggtttttgttgatatgctgttaggcaccaaatatgaatcttttttctcgaaggagcgtggtaatcgatgatcaacaactgttcatttcacaattaaaaaaattaaataattatttaatgacctttcaaattggcagccgttttctgaatttttcgttcaagcgatttccgctcaagttccttcattgaaagattctttgttgagggaattttctgcatttaaattgaacacccgaataaattagaagtaaaatcgttctaaaagaatttaaactgttaggtaatcaaggtcatttcgtttagctgattgcttctcgcttctcgaggcttgatcagaaagcgccagttgaaaatttaaactttattattacttttaaaacttttggcataatgtcttttttcttttagtgtttccttttttccagagccataactagagaccggacttttaggcacaaaaatttttaaaataggcacgaaaaaggtgagaaaatgcataaaatgataaaaaaaaggcacaaaaaattggaaaaaggcagaaaaaaaggcatgaaaacacaaaaaggccaaaaaaggcatttaaggcagaaaatcccgaaaatggcataataaaagtcaacgtagaagcttcaaaccaagtggaaaatgtgttatttatgcttaatatatcgaaactagtgcgcaaaaaaaaggcatatgcctcaaaatgcggtctctatctattcatcaaaaatgcttttgtatggctggtgctgaatttaacaccctcccatttttgcgttatccttctgcccatttattttcgccaaattcatatgaaataaaaatcaacgtcaatgttgatattttttaaaacaatgttcgttaagtgaaaaatgttgatttgtctttcactattaggcggaaggcattcgctaattaactcattaagatacatcatttgacaaataaggccgggacttcgttatgggctcactaacttatactaattaccgatgataccaaaggatgggggggggcaaccgttaattgaattactaaggtacattaaatatnggggagagtgtccgttaattgactcactaattaagacacttcanatgaggaagattgcccaaaaatggcatgcaatatatgctttgatgacatntaaattgatcagctctgttttttgtgaagatccatcatgtaaaactgataaacctgat

SEQ ID NO: 20789 - DNA, 2153 bp, Heterodera glycines
atcgagagggcgaatactccgcgcacaaccaccccgcaacgctccgccgctcgagttagcacacgcgctctcgcgcaagcgctagcaagcgcgcaaatattcgccaatcgccgcctctgtgcaaacgcggcgcctgtctcgccgtgttgccgccgctcgctagcggccatcgtgacaaaagcaataatatgtatatatgtttcgaataaatgctaaatgtaaaatatgatctaaaaacagcaaatctctcataatgctagcaaaaaatcgattgatcaaagcatttttgatcaatcgataaaaggggagagaaagagatgaagcgttggcaagaggaaatgaatgatcaatttgaacagctgaatttttattttaccggaatatcataattgataaatttatgattattattggaaccccctcatccacttcatgcccctcacccatccccattagtccccactcactccctccccctcctgcctccctcatcccatccctcccacctccccttctcccggtctccctcattccctccctttccctatcccacatttcctccgttcatcctctcctctcgcctcttctctctcccctttttcttcctcctccttccatactttccctttatcaatatcatccactcttattgttagctttatttcccattcccgcttcttctcctcatcccttccgccgtcgtcttctcccttgggatttagagatttccccttccctcgcttttccgcttttcactccttccaatttgctcatcccaaattcggacaatttttccatctgtcctattcattattactttgtacgaatgctttcacttctgttcattcaggctactaaatcaaaacaaaccaaagtattgagaaaaaggtgtgtaatccttcggggcatttctcaaattccctctcaaatgtcctccgctactctctttttttttatcaatttcattgcttattctttttcccattggttttcgcttttcaatttcccttccctttcagtaaaaagttttcttcctcctcttcttcctcctgtttctctttctcttcctcctcttcctatttttcttcctcttccgtttgccttcctcctccttcttctcttcattcttcttcttcttcttcttctcttccaatgtttcgtcgttcggtcaccaattcgcttcttccttcctccggcaatgaccatcgacgccattctcatcagacaatcacagttgttgagaatagtcggcaccgacgacaacaaaaggaggacgacgaccggcggatggacgcatcggaacaattggcaaaggaaaagacgtgccgatggagcgacattttggggggatggagcggaaatggcggaaaagggagggacggacgaagggaaagtgacggcggagacagcgcggaagaggtgggaaaagaaagggacggaaggaaaagtgccaacggaattaccaatcgaaattaattaaaaaagcatcgtttgggcgatattttccaaattcggaggggggggggagcagctgctaattgctgcttctgctgctccattagtagtccgattgatcagcagaaaaagcgtttcagctaatcgctgcactgaaaagcctccaaagcaccggaaaaatgacagaaaaagcggcggaagcgcagacgaaaggggccaaagcattggcaaaatgggcgagcaaaagcaaaaacgaagcgatggcggacattgtgggaagggtcagcgaactgatggaaatgcacgcggagagacagcggacattcgccaaagactacggccattacctcaaagtgagtgggcggaggaggagaaaactgacgaatttgaattggaaatgaaacattttgccaaaattgaatcgaattggcacaatttgaatggaaaatagaaaattttgccaaaattgtcaatattgaatcggaaatggcaccttttgccccattctttggcgcagcaattgcaaaaggtggcggaaacggagcgtgaaatgcacgcgcagtgtcggaaggtggagaagctggcggaccaggaaaaacgggttggcaaaatgttggccaaaaggggcgaggacgacagcgaactgagggccaaattggagagggtaaagcgagagagagaatgggcggagagagaga

SEQ ID NO: 20790 - DNA, 2404 bp, Heterodera glycines
ttgtcggaaaacattgttcgatgaacggttgagaacaatgagacacaacgaacgaagggacggaccaatgggcacagcgggggggggggagagaagcattggaaacacactttttgatattttaggggaatttggggggggggggtccaatcagtaaaaattatggatggaaaatgggtaaaaatataatttaaattaataaaatgataacatacagtagaccaaaagaggaaggagtcggaagtgttaagaagaagtgaatgattggtactgaattgggctgtgttcggtgccaaaactgaaaggcaaaagcatttgtattagacctaagcagcataaagcagctttttaacaaaaaaaaacctttttcagcagagtttaagccaccgcctccgttcaatttgccccattttttggtcgaccctaaccaaagccacgcgaatccgttcattgaaattggccttctcagtggccaggtcatttgggcacacaatgatttcttcccaattacccgcttttctcttcagattccgcttatccatccttccgccgctgattcgccattttcacatcgcaattcgctgcagggcgaagatggcagtccggcggaagagttcgaatcagaaaatgaggagaataacgcgaaagaggtgcccaaatgaatgaacgaatggccaaagaccgtcccttaaattttgtgagttaaggtgagcgacgaagagggaacggcggacgcgggggacaattcgccgaacggagcggacgattcgctgtcgggaaaaaagaaaaaaacgcggacggttttctcgaggaaccaagtcaatttaaacaaataaaaaatcagcagcgactgattgaattgtgttgacattcgttaaggtcagtctgctggaacaaacatttggggccaacaaatatttgagcgcaaagcaaagggagcacttggccaacagcctcaaactgacggagacccaagtgaagatttggttccagaacagacggaacaaatggtgagcatatcaaatgggacggagtgccaaattcgaattcgaactctaagctacaccctcccctagcatttaaatgctaaattgaaaaaagcaatgccaaaagtaaattgctttaggaaacgtatgggccaagacgatcaaatggtggcgggccattccctggccaccaacagcgggtgtgccgcggtgtccgctctgccgcttcaccacgctgttccgcctccgttctcctcgccgctggtcgtgcagcagttcaaccaacatcgccatcagatggcacttgcgctggcaggcatcaatgccaatgttagacattttttgattacattggctgatcattatggaccaattagaaattcaatcgtttgtccttcattatctcatttaattttaaaatagctgttttctgttttccaggcacataattccaatgcctttgacgccgccaccgccgcagtgccatttcaccaacagtccaaccaaaagcatgaacagagttgttctactgaagttccagcggtacaacagcaaattatgagcacagagtcgaaacaaaggcagccaaattcaattggaaatgtggtaattaaataacaaaacgtttcgccctttgaaaatgaatcggttgtttttctgttaaacagcaaaagacggagcagcagcagcacttcttcgcctcctccccgtgcaattcctcgtcgactccgccaaattcgtcctccgcctcttccaccgcttctctcactcgcttaattctttctttccttccaaacaccgtttttccgccgccaccttcctctcatgcttaataaaatacgattgaaatggcagacaatgcaacttaattgttcaattaaataactttacattttgttgattacgcaattttttcgcgggcaattgcctcgaaaatggataaaatggtacatatataaagtaatattcgcgaatttcgttttttctgtatttatgtggtccgcaactccccgcaccctcatattacggtacctaaactttatcaagcccctcccccccccccttgagtggatgaataaagtctcccctttatttcacatcgccagaatttcacgttgatatgtatccgcattaaattactcgaaaatgaaaagaaacccataatgttaagatttagtaatatgaattagggacttgaattgaaatgaagtaggtaaattttggttctattatttgatatatttatggattagtggttagtgcttcaacactaacagtattttttgttatgagttcgataacggttgacgttttcttttgaatttatttttttatgattaatagacgaaaacatccataaaaattgaccaatcttggcataatttgttaacaaattgaactcaacttttcaaaaaaaa

SEQ ID NO: 20791 - DNA, 1605 bp, Heterodera glycines
atgtagtctaaaaagaattttttaacagacgcgccccactacgacacagtttactcacgtggagagtagatttgctcgttacatacaaatgccacgttcatcgtctggtgtaggaatgatgtagtctaaaaagaattttaacagacgcgcccactacgaaacagtttactcacgtggagagtagatttgttcgttacatccaaatgcaacgttcaacgtctggtgtaggaaggatgtagtctaaaatgaatttttaacagacgcgcccactacgaaacagtttactcagatggagagaatagatttgttcgttacatccaaatgccacgttcaacgtctggtgtaggaaggatgtagtctaaaaagaatttttaacagacgcgcccactacgaaacagtttactcacgtggagagtagatttgttcgttacatccaaatgccacgttcaacgtctggtgtaggaatgatgtagtctaaaatgaatttttaacagacgcgcccactacgaaacagtttactcagatggagagaatagatttgttcgttacatccaaatgcaacgttcaacgtctggtgtaggaatgatgtagtctaaaatgaatttttaacagacgcgcccactacgaaacagtttactcagatggagagaatagatttgttcgttacatccaaatgcaacgttcaacgtctggtgtaggaatgatgtagtctaaaatgaatttttaacagacgcgcccactacgaaacagtttactcagatggagagaatagatttgttcgttacatccaaatgcaacgttcaacgtctggtgtaggaatgatgtagtctaaaatgaatttttaacagacgcgcccactacgaaacagtttactcagatggagagaatagatttgttcgttacatccaaatgcaacgttcaacgtctggtgtaggaatgatgtagtctaaaatgaatttttaacagacgcgcccactacgaaacagtttactcacgtggagaccccccccctctccttcccctttctccacccccttttataggattacccacaaatgtcaaattatcccttattcccgcctacccctccccaccctttcaccaaagtttaccgatttttttttaccaatttagcatgctaaaaataaataaaatagtaaaaaaaattagtgaagtcattatgctgtatttattgtttttccctaagatagcatgtctaaaagtttggtacaaaacgaaggttttcctcctttcctttttatttttaaagtcatctaaaatatgttcccatgagctgtattcgcaaaaacttcataacttactacttttccctttttggttttttctgcatttgaaaacgagcttcccaccttcccactgttgtaatgactgacggcttttaaaatatatatttttttatagtatacctagtatgtatcaaggttctgttttagaattcaaataggtaagtttattaaatttgactaataatacttaaaataaacgaaaataattatatgtaacacaggaaggtgaggagggggggggggtgattcgacgggaatgcttatttttttatttaaattctgtttcggtcatcctctg

SEQ ID NO: 20792 - DNA, 2862 bp, Heterodera glycines
tttgttttcctttttccccaaatgcctttttcctccactttttttctaattgcccaccctcatttcactttccaaatgctccttctcgagttttttcgcttcattctctccccctttttgtgccgagttgacgcctttgcgcttaaaatttgtttccaaaagggcccaattgtgcgcgtcaatttttttttttttttttggcaattttccattctttgggtttcagttccaattttattttgttgtttttggccctgatttttcctttttttttgaagccctttttttccttccttttttccagggaagacgtgttggaaatgcttgactttttttttcgccccccttttcccccgtctctttttttggccaaagtcattttccgcgtcggctccgttttcagttgcgttcaatttaagacgtcatgcgacgctttgctaaaaaacgcggaggaaagcggcgatgaattgtccctggctcaatcggtgggcgattttacgtaatcagcagactttctgtttgatcaccccctccatcggtccgtttgccccccccccccctaatccatccattccacgatcatttccaatttttgtttgatccggttccttcctctccctaccatttgtcgattaaatttacttttttgatcaccttcggtcatttgccctcccccactttaattttgtttggtccatttcaattttagtcctatcaatttttgtgcttttgttcagcttttggtactgatttgcctcgtccttttgttttacctccatctgacgacaattctcaacattttttatgtttttgatcaccttcaatatgctcttttaagctttctttggtttctatttacggtaaatattgttaagggtcgaataatttcaaataaaagagaaattaattaattaaaaagatatttggtaattaagaacgaccgtaagggccggagaatattcgcctttctcaaattggacggcatcactttgctcagagtgattggatttgacgaattgctacaaactgacaatgagcatgtgaaaataaagcgaaaaagacgaaaacactcgatggaaacggaagaagacagtggaagaagtggaaggaactgatcagaaagacggtgagagggataaaacggaaaggactgatcagacagatggtgatggataaagcggaaggaactgatcaagcagacgacgagaaggatgaagcagaattcagtgatcaggcagacggcgagagggaagaagcggaagagactgatcagacagacgacaaagagaagaagaattgtagaaatggaaagcggaacgcgaaataagaattcataaacactcagaattcgtcccataccaaattgacactgtcaaatcgtcctatatttttgatcccaattggcttccatttcattacgggaagatcagttttattgtgcatttattggtcagtctgctgcttttctcattttacagtgccttcgttcttttttgtataaattcgtgcttttcactgttcgttcgttactttgtccgtttttctttgtctttccgtcatttcaaagtcgtcccccgctgttgtacgcctgaatgagccgttgcagaaccgcctgttggtccaccgattcgaacactgtcggcgcggacaacagcacgccgattgtgccgccgaaggtgacgccgaaaaacacccaaaacggaaaaggggcactaattagggagggggggggaatcattttgggagaaatcgttggcattattcacccattccaattttggcattcccttacaattctcctcgaatatgcaaagccgtggctaatttctcccatttttgttcgtgtttattagttaaatttatgaatgtccagcagcaggacaaacaaatacttcatgcaattgcttatctctaaatgtccattgactcacgtaaagcaaaaagcgatcgatgaccattgccacatatttccaatcgtcgcggtgctaacagcgaaatgggaactaattattaattaaattattaatttcggaatacataaaaaataaaataaaagggaaaaaacaaactaactcagaccaatccctgagtttttgtcgttttttgcggaatttacagtagctttgcgctgggtacggtatttttagttttcgttcgtgcgccaccatatgcaattgtttttaatcgcttcggctgactcaccgttttatgcttctcctcccttctcatgtgctccgtaatgtactcaattgaatggactgcacggaccttcattcatttggtatttatttttggcattttgccgttttgattttaccgcttcggcactcaatgggatggctttggtggcttttccccggtcgttttcctccgtttgttcctccgtcgcttcgcctttagccgactcagcttcattattgtctaaacggaacattagaaaattaaaaacggcaaaattccaaaattgtaattgttcgccggttgtcgcccccacccgccctctcattaccacgagaaaatgggcacaaatgctttattgtcccacttttttgctccattttgttgtcccttttgccggccgccggacaattcgggtggtgtgccgatgacacatttagcggcacagtgaattggccaaccccgggaagggtggtgagaccgtccgagtcggctccgtccgtcgcgtgccacgccaaacgattaattgcgggcgacggccttttcatacaaagcaaatggggcataagctgaacagagcaaaagccaaacaaagcattcattggccatgtgatcaattgaaatttgaatttgaaattgcgaaaaaagtgccttaaggaaaacgaagcgcacccaacggggcat

SEQ ID NO: 20793 - DNA, 2229 bp, Heterodera glycines
  unsure (1)..(2229): unsure at all n locations
tttctcgaccgtttagctttttcctgctctcctcggcttattctccactattttgggccatgtcctggtcatcaacttcgttcaaatcagccaaaatgcacgacagactatggccatgttcagtttggtcagcaaccgttttcatatcactgcattggcattaaacagagcacatgcagttttcctcccaattcattacagaaacaatgtgacaaaaaagtaataattaattaattaattgattgtgtaattaaaacactgtttaatagacaatttcattatttttagaattgttctgatccaatgtgtgtttttgcattcgttgtccattcttttggctccctttaatgcttgtaagtgtttttctgctccatttcatacaatatttaattcatcattttcatttagttttattagattttacgtggacttatctgatcgtttcttcctcattttatgtggcaatgcaattcgtttggcctggattaagggtaaaagaataaaaatattccggattaattaccactaaccatttttttaaagcgaataatcgcagtggcaacaactcccaatcgtcggaaaaagacagcggacggttcactacgacttgcttcgcaattcaaatcattgcatggatttatatgtcgcaaaatgctgccattaatacaaaatggtttattgactttaaaaactgtcacccaatcggacaaattgtttattgtccgctccaattcattttggcattttatcccatatcagacgaggcaaatgatcaatttcacaattatttaccttaaaattaaatctttagctctttttgctgctgatttgtaaggacatgagaactctttttgtgcgaatgcttcatcatatatttccttgcaaaaagaaaataaaggcgatagaaacaaaggcacncaacaaagttgtgtactgtaaccgagtacagaaggtctacccaatacaatgcattaatcaaacatcgaatcccaacccagcccaatacggtaacaaagcgcattatgccaacacaagcccggtatacagtatccaaatgctgaatgtcagcacaacaccgtacagtggaagacacataaaaatgttcggtgtcagtggagggaccagtcactgaaaaggccaacattcaactaacagaatcatcgaagataatggatttcacacatcaagataatgctaataacaaagtacttttctcaatgcttggatttagaaaaaaattgctttcaaaccattgctttgatataattcattttaaacaaaaaacatttattttattaacaatcaaaatattgattaaaatcttaggctccaattttaatatacttttgttttttaaaaatttctctgtactgtcgaaatcaatctctgtcgattcactcactgtcgaaatcacacgcagagagtgaaaaaaagcgaaatagtttactgtcgaaattactcactgtcgagatcaatcattgtcgaaatcacctcgcgctctcatcatgagctctcgaatggtaccaaagtttgaatcgtttcaaaaacaatttaaacgctttacacagatttttaaactatttacaattgtttagcattaaaaatcctaaaattggcgatcatttcggtaagctatccgaacaacaattcgcggcattctcttacgaattgactaccttgaaaagttgcttaaacatctttacaagctaatggaaaagataaagggatataaaaggaattgaagtgatcaagaaaaaacgaagcgagcagttgttgagcgcctgccggagcacctaatgagacagaccttgtttaacaatttgttgatgaatgtggtctgctgggcgaaattgaatcgacaatgttcacagacatccgcgggcggttgaggaaatgcaaaaaattccctttacatctcaaaacgcccgcattttgttcctttataactagagtgccacgggaccgggccgggaattcccggtcatccgaggtcccggtcccggattttgaaaagctcaggtcccggtcccggtagggcaaccgggaaccgggaaaaacaagcactggtaagaatggggggctaagtgaaaaatttgtgatgaaaattagagtcaacggaaaaaaaattaaaaaaaataattaatatattctttaaaagtaacattgctaagtgtgcaaatgggcacgcctacatttcgcctactgggacatttcgcctactaagccaaa

SEQ ID NO: 20794 - DNA, 1779 bp, Heterodera glycines
cttcgcggcgtcggttttgcgtgcaggatagaaggagttcaagtagtatttgaggacggcaaggaatctgaaaaattgttgattcaaaagcgttgtcgtcaaccaatcgggaccgtttctcagccgtattctcgtaggcgccggcgatcagttcatcaggatgagctgaaatgagataagattgaacttggaaaaattttaaaaagcaatgtattcaccgaagaagtcggcgtacatttcgaggagagagcgtcgttccagcacgaaggtgggcagcgccaaattctgcagagtctgagtggtgccgagctgaaaagagaatttctattaaaacaattcatcgaacaacgcgtcgtctacctgggtcactaaatgtctgaacacgccggcctgctcgctgttccagttgtcccgttcgtccgagttgttgtagatgtagtcgtagtcggttccgttggtgtcgtagttgccccaatctggcgcttgcattttgaaatccgctgccgctaaaattgaaggggaaaggaaatcattaggattgattgaagacatatatgaacaaaaacaactaaaaaaagaaaaaaattttacgaagaggaattgtggaggtggagagaagaaatcaacacttttatacagaaaatccgactgaactcacaaaggaaggtccccaggtgtccgtgggatttccaaatgaaatttggtgggtgtatagagcacccatgggttcttaagaaaagtgtttttattttctgcgaaatgagtctgagtgccgagttatgacgtgccaaacttttttttattgcaataaattaaatatacatttgcatgttttgtgttggtcggtggtgcggaggttgtgctccggacttttgtttttgcccccataggttcgaatccctcttatgtaattttattttcctcattttatatttgccttttatgcaaattaatcgccattgaaatcaattccatcgggtcaaaaatttttattcctcctccaagtcattcctaaatatgtccgtaaatccccaaaatattattgtccttttaaaaaaatatttttccaaatataatgattagggttgtaaattatatggactaaaaaacgcgaaatatggacattaaatatggactaaaaaagcccgaaatatggactaaaaaggccaaaaatggccaaatatggaccaaaatatggataaaaaatgccaaaatatatgttgtaaacccccaaaaatcccaaaaaaaggtgtgcatatttaatatttgcttaaataaaccttaaaagtacaataaacaaccaaaaaatggggtttaaaacttaaaaatgcatattttttattgttgttcgttgtatcaaaaacacctccaagtttgccaaatttcgaaaaaattctcattaaaaaaaagaaatgttcgcaaaaaaatgacgaaaatatttattgaaaatgccaaaatgacgacgaaaactcaaatttttcgtgttttgtggggtgtaatttttaaaaatttccaaaaagttgatctttaggggtgtatttttcgtttttttttcatttttcttgtgaaaatttccaaaaaatggccaaaatatggactaaaaacccaaaaatggcgaaatatggatttattcccgaaaacccccaaaatatggatttatatggactaaaaaccttcaccaaatcaaaaaattttaacgcagaaatgctatttttaagcccctttcttcatagcatatgcgcagaaaaaatatgttaatccgatataatttacaaccct

SEQ ID NO: 20795 - DNA, 1121 bp, Heterodera glycines
  unsure (1)..(1121): unsure at all n locations
aaaaattattcgaatttctccattttgtttccataatttccgaaagttattcggtatcataatgccaaaacaaaacgaaatcgttttaaaatattcctttctggacttgacttggtttcttgatatcgaagctgttttctacgctatttctaaaacggttataccaaaccccagatttttgaatccggttttcagaaaaaatgccttgtggtgaaaacaatatttcacatttcactccataactttgtgagttcggcacggatcgagaccgggataagaccattggaaagagcagctcgagctctacaagaaggtatggaaagaaaaaatagttatttctgggactttttcagaaatcagaattaattctccaatgtggcccaaattttaggcccccagccacagccccttgcttctcccagttttaagtcttggatttgtcaaataaattcaagacttcaaattaataatcaaaaattctcttaaaatttttttgaacccaattcaaaaaaggaaaaaaatttgcagtcaaaaaattattcgaatttctccaattttgtttccataatttccgaaagttattcggtatcataatgccaaaacaaaacgaaatcgttttaaaatattcctttctggacttgacttggtttcttgatatcgaagctgttttctacgctatttctaaaacggttataccaaaccccagatttttgaatccggttttcagaaaaaatgccttgtggtgaaaacaatatttcacatttcactccataactttgtgagttcggcacggatcgagaccgggataagaccattggaaagagcagctcgagctctacaagaaggtatggaaagaaaaaatagttatttctgggactttttcagaaatcagaattaattctccaatgtggcccaaattttaggcccccagccacagccccttgcttctcccagttttaagtcttggatttgtcaaataaattcaagacttcaaattaataatcaaaaattctcttaaaatttttttgaacccaattcaaaaaaggaaaaaaatttgcagtcaaaaaattattcgaatttctcccaattttgtttcccataatttccgaaagnnacctgca

SEQ ID NO: 20796 - DNA, 3051 bp, Heterodera glycines
ttgattttttttatgtgccacataagagcactaatgtgcctgtggtttgctcaataaataaataaatctttaaatgtatgtgccagagaaaatatatgagcatagatttttttgtatttgggcaacattttgtgcgccttatttttgaaaaaagcttctataatcggatatataaatttctcaatcggtatcaaaatttttaaaaatctttatgaaaaaaaaagttctacagagcgaagtgaattctttgttttttggcacgacgacatttcgcctattggacgtttcgcctactaacccaaaatcggacatttcgcctactggacatcttgcctactgacacttcagctactcgactctttgcctactcacctaaaatcggacgtttcgactactaataccaaactacaacggtacattatcatagacaaaatgtgatgttgatccttgacgaggccgacatttaatcggaaaaagtagggttgcaaccccaaccccgccccgaccacgaaccctgatatttttgaccatttttcggggttaaccccgaccccgacgctttaaaccccgacaaaccccgaccccgacccttaacccgactcggggtcggggttaaatatacacccctaagaatggcattttgtgagagaaaagacaaaaaattatacaaaatttgaatttttttttaatattttgccaatttttattaaataaagtaatttgcattttgttaacttatatgtattgtgatgtagtggttagttcttgaacactaaaactaccttggtcataagttcgaacacggtttactgtttcttttttaatttattttcatttgattaataggacttttttaaacaaaaatacccatgaaaatcaatcatacttggcataatctattgacgttgaaaatcaatcatacttggcataatctattgacgtattgaactcaattttccattcgttgaaattaaattcaattttttgactaaatcatgaaatttaatatatttcaaagtaattttgacaaaaaaacaagaaaaaaaaacaaaaatttatcagaaattcataaatttttggtgaatatctgttacaaaatagaccttaaatttcaaaattcgcgcgccataagaaaaacctatttattcataaaaaattttggctcaaatcgaaaaaatttatcattttttttggacaaaatctgttaacagacacatccaaattttcaaatttttttcccggcggcgcctatcggcaccgcgggacctctttctcctaaaaatctttagaaaaagagcgctgcgaaaaaaagatgatttgaaaaacaaaaaaaaaatataaggtgatcagaaatttttgggcatttttttgaataaaatccactatttttatttgggggccaggcgccttaggaaaattttgaaattttgactatttttttacagattttgactgaaaattggccattttaaaaatgccttatgcatttttaattaattctatacaaaaatatttatgatgaaaagaaataaaaaagcacataaaattattattatgaataataaaaaaaaatttaagctaaaacaatataaaattttttgattatatggtgtaagacaaaaattgaaaaaccccgaccccgaaccccgaacgatttggcaaccccgacccgaaccccgacgcttctaaccccgaattttccaaccccgacggtcggagttgcaaccctaggaaaaaggattggcaaatgccttgcatctgtttggactcgtaaggcagagcttataaataaaactaaatactgatcaatttggaatatatatatatatgtatgtatatttggtgaaattcgttttcgaaatatccattttaggatagtagaacaaaaatctactagacaaaacgtccgattttggcttagaaggcgaaatgtcagtagacgagatgtacagtaggcgaaatgtccgcacaccgttttttatattaaaagggataaagaaatgggacgccaaaataagagataaatttttctctgcactctctatttattggttcatctctcgttttgggactgtgaaaaagcacttgaatttgtcgaattttggactgaatacttaaatattttaaaaaaaaaattttcattaaaatccccaaatgccgttatccccccaaaagtgggctagcttaattatgatggtaggtagaccaatatattaattgagtggaaacatattttatttttgaccctttattgtaaaattttaaatttcacatagaaattattattattcacccgtagcttgcttcaacagcacgcatggacggactgaaacatttgagcgactctgtgcaagcctaaattgcagaaaaaatggcctgtttccaagactaattatcaagtagttgaaataaatcaattataattagtctgccatttttaggcaaatgcctaaaatttctgagcacttgatacgcacagataagcacaagaactttgttttcagcttagtttggggtttttacgataacttttctaatgcctattttggaatttttatgcttaatgcctaagcgcctattttttatgcccatttcgtcatttttggtgcctatctgatccccaaattttgattgttttattcttgataaaaatttttggtttaaaaattgccttatccgaaccttttttaaattttcataatttcatttaggtgctaataactcgaaaagtagcttaacaacccccaaaaaaatatgtttttcatgcatttcgaccatagggagctcaggaaaaaagtaggtaaaacctaaaaattgcatcactattcctaaaaaaggagtgaaattatacgcggaattcattaaattttcctgaactgtgaatttgaataaaaatgcaccaaaatctaaaaaaataatatataaatttaaaaaaaaaaaaaattaattttcatattttttgtgattaattattcaatttctcacattgaaatttgtgtacagtgcgcacaaatggcggaacacagcgccgccttggagcgaaaagtgttg

SEQ ID NO: 20797 - DNA, 1558 bp, Heterodera glycines
  unsure (1)..(1558): unsure at all n locations
tagcgcctgatcagagaatggtacgatgcagaaaacctcctggacacacacacatttttgttgtaagccaataaaaaatatatacgttatgacnttacaattttatgatcaaagagcagactaaagaactcttgtggtctggtgatgaccttgttgcgccaagttcgtttctcatactgaattttcccctaaaaataggctgcaccttaatcggctggacatatatacaaaccagagactgttaagcataagcttcgcaatgaatcgaagccccggattttttttcacattctccaattcaatgtttacttcgtaaatgcgccgatactcatcagcatagcgctgtttctgatccgcgctgctaactccctcggggaaaccgctagactcaatcttaacaaaaaaacacatgattaaacagatgggtcaaaagtctgcagacaaaccttcaacttgatgagcagtctaacataatctttaaaaatttggtcgctcctatagagaaaaaaaatatcgcatacaatttaaacagaaagacaattaccattcatcatagtgccaagctctccaaagacgatcaattttgtacccgtgttcaagtgctctttccagttcaatatgcgtgtagctgccggtgaaggatctttgtgcatccgtgtgtggacatttatgtgggcggcgcgtgctttttttgcgaaacatcgttgcacaatgatgacaacagcaaaacaaaagtcgctcgtcaatttttacaggcagcaccgggacgcgcagaccccgtggggggacaactcgaacacgcagaatgccgcggtatggcaactgctccggccgtgtccaattaacgcacatttcatcggccattggccgtatgatggtcggtataccaaccggatattcgcacgtataattcacaaaaggatacagacttatgatatcaaaaactgatattttttcgtcctcctttggctctgcaaatagcttcaatgggcccgttcttccaccaaaataggctcctctgggttcaataggccctctgtccatccccaaatcagagaaaaaggctcgcatttcggcattgcaggccaactgcgcatttatttcgcattcccaaactgcttcgacctgcaagccttgtccgtccacatcgccttcacgaagctgcatcaatcgcaggttggtctcctcattcagttctctgcatgatttggcgtccaccagtttgtcgccgggatcaaaacagcgctcacagccgtgccagtagcagccaagcactttaatacagcggttttgctcttctatccaaccgtccaatttaaactgtctccaccgcttttttatcccgtttcccgcatgttgaattttaaccgcatccgttttagcacgccaatccaaatatttaatagcaaacacactggctctgtcgttccgctcataccctcgttcgggtacaatggccagttgattctcacaaaggaaattgggccggaaagatgctcatacagatgcttaaaacatttcttctccttttttcacatgatcacacaatcaatggttt

SEQ ID NO: 20798 - DNA, 3106 bp, Heterodera glycines
  unsure (1)..(3106): unsure at all n locations
atcgattgcgcaccgccctccctatcatgctcgagagcatttgttgtgtataaaatttatcaaaaaaagagatagccatttttctgggatagagtataaatgtaaaaattccctcaaaaataaaaggtctattgcgcaccgccctccctatcatgctcgagagcatttgttgtgtataaaatttatcaaaaaaagagatagccatttttctgggatagagtataaatttaaaaattccctcaaaaataaaaggtctattgcgcaccgccctccctatcatgctcgagagcatttgtatgtgtataaaatttatcaaaaaaagagatagccatttttctgggatagagtataaatttaaaaattccctcaaaaataaaaggtctattgcgcaccgccctccctatcatgctcgagagcatttgtatgtgtataaaatttatcaaaaaaagagatagccatttctctgggatagagtataaacctgaaacgggcgtggtcccaaaaattttatatcaaaaattaattatttgaattaattggaatcaccggcgttttgagcctttttgtctgctcccaaacttggcaaattaatggtcatattttatggtatttatgttttcataatttttaattttgtatatttactagcatttaaaaattaatgtgaaatttgtccggtaaattgcaaaagtacatcaacccaatttttgatgttttccggatggaaagatatcgatttgggtgaaaaaatactaaaaacaatgagaatggcggacggttatcgatttctgagtctaaatgcttacagtgtatgtaataattgtgcgaataatcgaacaatctacctaatccttcacacattctctgcgataaaaccaaatatttcattggcatatccaaattttggtgcatattttatgaaagtggtcctaccatcggcaattaccatttctttttttttcgcagaaaccaaaacactgcactattgctaaaataaatcccaaataggtgcctaattgtaattgtgtctcatttctttcctcttgaatttgtgtaaattggaatttgttttgaaatgattgacgaggaaaagccattttagaaaatggaaagtgattcgaatccgcaacaacagtctgtgcctgtgcagcaattgccgtccgacgcttcgccccaaccgcagcaaaacggcggcggagattcggcggacaaaattgggccggaccaaatgcgtttgttgagcgcacagatcgccgcatacaaaatgttggcccgtaatgagccggtccctcgtgcactgctcagagaggttcgtacaagtccaaatcattcatcgtcggattggcacagtgccaattttgcgggtgtcgaaaccgcaatttctccgattttgaaatccatttgttttttaatgggtttgtttaattaaccacgtaaagttcggcacttaactttccggattgaattacatctgggtcttggttttgccggtgatttctctcaaattccgaatttggctctaatttgccggtctacgattcggagtaaagaaagtcgtatggttggagacccaaaaacaatcgaaaaacagtattattttaaaaaacggatttttcttcctttattttaacccaatttctcagcttttaatggcactcaatccccacaacaaaactttgattatttggatgtgtaggggggtacaaaaagcgatgaaaaacccataattttgcaatttttaaccaaatgtttaccattttttgcacaggtgagcgaccggaaacgggacgacacattgccgctgccgtatgagtatccgtacgaattgccggacgggcgcaaattgccgtacgatttgtccaaaattttgctgatccaccagcagcgtacaaacacacggacaacggacattccgacaccgcctggcattgacccggaagtggtgctgcgcgagcgcgagaaccggtgccgtttcattttttcggacaaaacgcttttttgaatttcgaaatgtgcaaaattagttttcataatttttgtcgaagtcaatcaaataaacatttttcatgagggaatgaatgggttagcaattctgggctttcacctttctcacttgtttaatttttcagtaatttctaaatttttttgtggaattttcagcttttgcacactcttcaaaatgttcattgtttgtgcacattttgcaggattcaaaatcgcatcggcctgcgcatccaggagttgcaatgtttgcccatggacatgccgccccatttgcgcatccatgccgaaattgagttgcgtgcactgcgtttgttgaacctacaggctcaggttggcttttgccgggttaaatttcgacagggggttggatgatattcaaaaagggcaaaaaacagccattccgattcatattactttaaaaaggggaggaggtgaaagttgtcagcggtcgcagtcatgggaaaattggaaatttttgggaaattcgggtccgtccgccccaattgatggcaaattttgtgatttttaatgaatttattacgaaaaattttcactccctctgttttttttgttgtatgtttgggtggaaaaagcctaattcaataagttttcgtatttaaactcgaaaacggggtgtaaaatacgaaaaattcgagaaattgttaccatggatagcttttaatttcataatttgaatttgcccccaggtccgtgccgaggtgatggcctgtctgaagcgggacaccacgctggagaccgcgctcaacccgtacgcgtacaaacgcgtcaagcggcacacactgcgcgaggcgcgggtcaccgaaaagttggagaagcaacaaaagcaggagcaggagagacggcgacgccagaagcaccaggatctggttgcaggtctggttttgatgacgaacattcacgaacaaatttttttttttgaaattcgaggcagcttcatgccccctccccgaaaatttgaaaaaataaaaaatttttttcgttttttactttcttaaaaatcagaggttttttctataaaaaaaagaaagaaactttctcaattntcaaaagtctatgtttttcagaaaaagctctaagaaag

SEQ ID NO: 20799 - DNA, 2599 bp, Heterodera glycines
  unsure (1)..(2599): unsure at all n locations
agataatctgtcgatgtatttggcgccaatttcccttctcctttctctgatttccttttttaattgtttaaatcatttgacccaccgctgtcgatggccaaaacgtaaagaattttgtgagtgccattagccgaaaatccgaaattgggctcaatttggttcggctcatcgacgagacaatggaaagggtcgacgccttaaggaaggcacttaatggccaattaatttgccaattatggcttttgctgtgtctcacatatccatcgtcgttgctcctcgtcccaatattcgttccaatacgctgtctctctgtccgtctctctttcgccctttgtctctttcgctttcgtttccgtcctcccttttcgttttgtcctccgattttcttccaatttctcttccaaatcgcttcctttttgctctttatcaatcatttttttaatttaaaattccctctcaaaattaccttttttcaatttcccttttccttccttttcgttacatttgttgattttctttgcggctttttccgtttcattaagctaaaataaaataaataaacattgttctttttcctgcactttctcactgattttggcatcggattgaacgcgacacaaattctgacatgcaaattcatcaaaaaagaacaaagcgcgaaaaacagctacaattaaaatcgtactgggagattgaaaatgtttttacgaaatttaattttacgagtgaaatttctctgtccgtgtcaaatgcgccgcgttcggtaagttcaagcaaatggcgaattaatttttcttcactgacacaccatttggtcgactcattcctcaatgtgtcattttgagaccggaatttgcttcggaattccttgagaagaaattgtcccatttgggcgggtgaaatcggcgcagaaattggaccaaacaaaacagtgaatggcgtcaaaagagtggaagaattgcggagaagggaatgggccataaagcgaagatgggcaacgaaagtgaggaaatgaaagcgatgaagaccttcctaaaggaattaaggaaaggtgagaaaagagaaaggaaaaactaaatcatagagacacaaaaagaagaggtcggaaaggacagaaatcggaataggaatctcaagggttcaggttttgatgtttttgaaaaatgcaataggacattgacatgagttgattataaaacaggaattttcttacaattagtccggatcaatcctatccaggtccaataccaagtgcctggttcgggtttttttcaaattccgggccctaataaaaaaaggaatatgccttaacaattgcgtattaaatgcctgaaattcacggcgcttccgcatgatttccagctcaatttcgtgctcccattttgccctttcctccgcttcttttgcgtctctctctttcaacggatttatctgcagtttgaacaaatctgaaaaatcaatcagataattatgctaattgtacgacattgtttttcacttgcctgagtgtttttcatcaagttcgacctgaaaaattgtatttatttgatagtgacaaattaacatttattttccgttacctcaattacttttttctccgttttgtccgtgtgtaataattccattgccccccattcgtcctcctcgccatcgtcatccgaagaaagaggtaaagtcgccttcgaagttccttcaccgagctgagtagatcaaagatcaactaatacttatttaaattcgaaaaccgattgggcattttgaatatttgttgcgttaagtctctttgtaagggaccgattagaagaaacagtcgcttcatctgaagacaatttgatgggttcaactgatgaagtcaaataagaattgaaaggcgaagtgaaagaagccgaagagacaccgaaaagagcatccgttccaaacacctccgattttgcggttttcgtcccttttccatgaacaaaatcttcagccgaagccgacaaatcactcgataaagcaggttttgaaattgcaattaacctgaatttatatttggttaataataaatacgaggagtttccattttacctcgctgaacgtctccttgggggatgaataaattcatcgtcattttccttgttttggttttcctctctttgtttcgaagttttttcgggatttttggatctttttgtaccttttcgctttttattttctttatccatcagcaggattcatggtgataataaataataagcaagattaaataaacaaagggctttaaaattgagaagacaaaataataaagtaggcatatttcatacttataaaatattcaataattgctctaaaaccggaactggacatggatatcaccggaaccggtatgatttagcagggcacgcacgcggtcccagtcaactagctgtccaatacgtattaactatactaatttgatgtgtgactatgtatgtcacactttgaatggnacatttttcgaagcgaaagtcctttgaaaaaaagaaagcaaaaaatggaggatttatgtaaacaaaaaaacacaggagatagtgttgagaaaagataaacaaaagagaaaaagaaagagactaaaggaaaa

SEQ ID NO: 20800 - DNA, 1367 bp, Heterodera glycines
ccgtaccaaacatcatcgaccgcttcaaaaaacacttgttttgtcatggtgtggcagaacatggatggacaacgacttgacgacggagtacttggaaaaggtgcagaacaatgacaataattcattaatagaaacttcttaaattaagattttcgggaatttccatttcggtgcccgtctcttggtttgggacagtttccgttgccacatcagcgaggacacaaagaagacgcttcgtcgcttggcccttcactccgcggttatcccgggtggcaccaccaaatacattcaggtcaaccccaaaattttgcttattgatacagacatttttaggcgccagatgtctgttggaacgcgcccttcaaagaagcgattcggaagctgtacaacgattggatggcccatggcgaaaaggcgacgacatcaggcggaaatctgaaggccccgccaatggaggtctacctggaatggattgccaatgcatgggactcgcttccaaagcaaatgattgccgactcttttttgacgtgtgggattagtaaggaagaaaaaggccgacacgacgacaaaattcacgtttttaaggtcctcaagaatgttaacattttttgaaattcttatttttagccggacggagcaattcctaatgggctcgctattttgaagcaacgccgacaggaagaagatgtactgaaactggtggaagaaatcgatttaagcgaagacgaaagcgacgaagaaattgatgcagaagtttcctaatattttttttgttaatgttttattaaaacaaattgttcaatagtttttgcacgtttctgacttcaaaagttttgaaaaaaaatttttttttgaggggggcttatattcgaagggggcttctactcgaggggggcttctatttttcaacccccctacaaggggggcttatattcgagggggggcttccattcgagggggggcgtataatcgagtaaatacggtatatattttttttaaaagaaaatcaatgtcattatttcggtatgtttaacaattatattctaaaattaatttttgattttaaatgttaaatataatgtattgagtcaattttctaccaagttaatacaaatataattctttaaatacttaatcatcgataaaatttctaatattttttatttacttattccaaaaaacacaaaattaattggctgtttaaaattcatacgtgaaaattggattatgcatcgcaaaaatgttgcttcagatttttgcatttaaaaaaatcattgaaaataaataacaaaacataaaaactagtttttttttcttcaaggaaattaactgatttttatgtggtgaattcatcccttcctccaaaa

SEQ ID NO: 20801 - DNA, 818 bp, Heterodera glycines
ttgtacctcttctaatcactttctgttcaaattttaatcactgttgtatctcttctaatcactggtgtacctcttctaatcacttgtacctcttctaatcactggtgtacctcttctaatcactgctgtacctcttctaatcattgttgtacctcttctgatcactgttgtaactcttctaatcactgttgcacctcttctaatcactgttgcacctcttctaatcattgttgtacgttttttaatcactgaagtacctcttttgaacaacaaaatttaaaaaacgggcgcaaagcgcccgtccaaggccgcgaagcggcctaacaagctaaaaaacgggcgcgaagcgcccgtatgagttcaacgaatttaaaaaacgggcgcgaagcgcccgtccaaggccaacaaaaattgaaaaaccgacgcgaagcgcccgactgaggccgcgaagcggcctaacaagctaaaaaacgggcgcgaagcgcccgtatgagttcaacgaatttaaaaaacgggcgcgaagcgcccgtccaaggccaacaaaaattgaaaaaccggcgcgaagcgcccgtctgaggccgcgaagcggcattaatagcccaacaaatttagaaacgggcgcaagcgcccgtctgaggccgcgaagcggccttaatagcccaacaaatttagaaacgggcgcgaagcgcccgtctgaggcctcgaagctgccttaatagcccaacaaatttagaaacgggcgcgaagcgcccgtataagcccaacaaaatttaaaaaacgggtgcgtagcgcccgtccaaggccgcgaagcggcctaa

SEQ ID NO: 20802 - DNA, 871 bp, Heterodera glycines
  unsure (1)..(871): unsure at all n locations
aagggtggggagccccgcnatgttgtggtacacgcatcgattatggaagccgcgcatgcactagcaacgaagtcctttgcgcaaagcgctcatgtaatgcatattcttttcatctctcacaagtatactgtctacaccgtgcaatcactgtgcaaagcatactgtctacaccgagcaatcactgtgcaaagccaactgcctacaccgagcaactactgcgccacacgctagttatatatatatagaacaacagtgcaactcatttccaaaaacaaaatctccttacggtttgccgggaggggttcgaaatttcgaccttgggggtaacttttgacggcgcattcaggaaaactatagattttccgatccgagggccaactgagcgccaggcgccgaaaagtcacttttttcgaagcagtttttgcagtttttgggattcaaaaattttttaaaggcctaaatgaaaaatccgctcccataggattttaagttggaatgtttggcacattttttgcttcttcaccgaacccctagggcctaccagtttttccgaaaaactgactaaaaattgcatactttttggggccatttcagcgccggtggaataactccccggcttttgatgggaggaggtcggtgtaagcggcttttttgtacagcctgacgagctctatccaaccatgtttttggatttctgaaattttcagaaattttcgagctaggccccctcgaaaattttccgtttttgaattttatgattttttacagatttttccggggaaaacggagaccactttcaagcaaccgtttttcatgctctatcgattggtgtcattttcagaaaaatttttcaaaaatttttggaaataga

SEQ ID NO: 20803 - DNA, 430 bp, Heterodera glycines
tagaaataaactaaaaacagtttgaaattaccttttacatggttaaaaatttagcctattaaatatttaaaaaaaatttattatatttttttttgaaaaattccgacttccgagttccgacttccgacatttttggagtcggaattccgacttccgaaaatttttggggcctcggaattccgagttccgacttccgaaaaatttttgctccccggaattccgacttccgaaaatttttagtgcctcggaactccatccctgctgtttacgactgaaattggtcggatatgttccaaacatccatttttcgaatcccgaacccgaattcgaaaattttctttacttttttttgtttttttatttactgaggctggtactttctttaataatttgtcagcgatgaacgaaaaaaaataaaattcatttttca

SEQ ID NO: 20804 - DNA, 792 bp, Heterodera glycines
ccccccccccccgatttccccgtttttccttttcttccgttcgttttcccatcagctcgctgcgagttttacggcgtttgtctcttccgccgagctcttctcctccttctcccttccctacggcgctgttggtccatcggaatgctcttagctctgctgacacttcccttttgtcctttgcccccccccccccgctcgatcgttcgcgtccactgtcactcggccatatctctccgcttcatcgccattaaattgttgcgttagcgccagccgaagcgaaagtgactgcccttccccattttccttgctcatctcatttacaattccgttcggatgtgattgccccccccccttaggcaattgaataataatcggaatttgaaatttctttgaaattttcaacccctctcttttagccaattttgaaaattcaaattctcttccctctcgcctccaccaagaattctgttccgtgccgaaaattgccgaagaaacgccaccaggtttaaacctggacctccctccttgcgcttgagcccttttgagcgatcccaatttccctttccagcatcctaaactccgatcacttcagcccgcccgctccactcaattcggaagcatctctgctccgatcactttggcccacttcacccaccactccctgaatttgccccgccccaagacgagaagctgccccttctcttcctgtttttcctcggttagagaaatcattttggggcgaattttggcgcccaaatttcgttctcaattagatatcttggtccgttgccc

SEQ ID NO: 20805 - DNA, 2366 bp, Heterodera glycines
gctttttagcttttctttgttaaccataataaattgattgggattccgattggaaagtggcaaaataaaaatatcaaataaattgttgcattttaacaaaaattaattactaatttttgcaaaaaataaattaaaaaaacaaatcatgaaaaccggaataatattaacgttattaatcataaaaaattcatttcatcaaacttttttctctaaattagaccaaataaaatcatttaatgaaatatttggccacggatggtccgatggagaagagcaaattggagaaaatcagactgaactggccggcacaagtcaaagtcgtcgaaatgatctggaaagaaatgatttacaatcgcgaattgatcaaagccaaataaatggacatcgatacggtaagcgattttaatcggttgagccttggcccgcaacagtcggagggataatctttggacataaggtagatgctcttggatcagcttgaatttaatggattgatttgcatgatcaaatttaatgcttgatttagcgcattcggttttgaatagggttggcaccatgggtatctgtcatccggcacccggacagatttggaaaattgagatattgggactccaataaatcgtaaaattttaatcattcaataggaccaacggaaatagactaaatttgttaaataaatggttgtattaaatagtgaaaaatggcctttagataattccttctccaatcacttcgaaaatgtaaagcaaaaatattctgacttggaaaaattggaaattgtaaagaaatttttcgaattaaaagcaaaacgagtagcagcgaaagataaagcaaaattaaatgagcaaattaacaaagaaattgccaacgaattgggcacaggagtgacaacaatttacaattggaaaagagaatttaatattggtgagttaaatggaaaaaaaatcaatttacttagtagtaattaatgaatacattcgatttatttagattaaaaatatttatttaaaacaaataaataaaaagttaatcaaaaaaagaaaaaattgaaatttctttcatattgttaaatatgtaaataccaaatgtaatagaaaataaattaatcctttaaatatttattaataataaaacaattcttttctccgtttgaataaaattatttaaggcatggaaaattttgatgaaactgagaaacaaaaggaaattgttaaattgtttaaaaaatataaaaagcaaaataaagaaaaaacgaacctcgaaattgctaaagaattgggaattcatcaaaataaactgttggaattcagaaaaagatttgacccaacctataaaagtaaataatttgagtaaaataagggaaattatgggtaaataaataataaataatttttaaaatgtaaaaaattaaataaataaatattaaatttaatttaaaaaatattcccaaaaaacagaaaagcttcttgcgaactcagaaaaaattgcattagtgagaaaatattacaaattgaaaagaaaattcccagaattaagccaaaacaaaatagccaaaattttgaagattagtaaaaatgcattaattaaatggaagcaacaatttggcaatcaatttgaagaacaaggtgaccaaatttaaaagattacgatgaatacagtaacataaaattacagtaaatgcccgggaaaatgacggtgaagcgaattccgaagaagacaggcattttttttatttgacagcaaaaattatgtaaattttattttaaacaattttattttttatttagtccaaaaaatgtctcatccaaaaatgctgatgagacaatttgggcatggaacaatgaaacacaaaaaagaagtcgaaaatgaacaaaacttattgctaaaattggatgaataaaaaagaagggatttaaaaagggaaaaaatgagagatattttttcgttcataacaaagtattttgtcgaattatttcatagacggtaaaaaagaaaaaaaagcgacaataaatctttttatggataattatgggaaaaaattggcgttctgtcacatttactttttatctttatttctctcacttttacgtactatctcttcatccttaataatgtaaagaacaacatttacttcatcctgtttaacttttttcctacttgttaaatccacaccaaattttgcatatcgatagagaaaaaaatatagaatttttcaatcgctttttaaaaaaaaacaatcgtttttatttaacttaaattttaattttaaggcaaatttaattagatggcaaaaagaaaaattatgtgcaagcttaatgtaattaaatcggcacaaaaacgggtgagaaatcgagaggagcgacaag

SEQ ID NO: 20806 - DNA, 1184 bp, Heterodera glycines
attttgtgttaaggacggacggacggacgaacaaatgttacgacagagtcaaaaaacatttacagttcggcgaagaacaaatattatccgcgcttaatctcaattgaattttaatttttaatgccattgcaattagtgggaaagggcaaaagaaatgggcaggcatgacggagagagaaagaaaagagagaagcagatagtgaaagggtgggaagagagagagagaaagcgtgacacagtgtctctctgttcgaatttaaaataaaaagcgaaaaaaaactaattaaaaataaattaaaaacaaaaaacaaacggcagagaattaataagcggacaaaagctgattccgccaatatttctctcctttttttgtttatttgttcttcacttttcttttccatcccttttcaaatggccattcatttgcctaatgacaacaattaattaatgaaatcgttcattcattaattagtcaccgttttcccctcatttgtcagcgatttcttcgtcgatttgctcccttccggcgactcttcccccattctctccgttctcttccgtttcgtggactgccaatcggcggatgacggcgaagcctttcttcagattttcgcctcctcctacggccattggcgtcccagcggttctgtccatcacttttcacttggcgaggcaccgctgcggctgcatgtccacgtgcatcagcagttttacgcgctgcaaatgaatggaacggaggtggaggcggtcattcacaagagaccgttcagccaaattttggtgtggacaaagattggggaagagaaggagacggagacggacagagacgaggagagaaagcattaaatggagacagagacgaggagagataacgagaaaaatcagttattttcgatttgaaagacgggtgattaaatgatctcaaatttttggctattaattaatttcaatttttgttttatttttatgtcactgtttctttacctttttttgtctttttaattaaatataaattcatttaattgtataataaataatttttgtgttcagtttcgaatcgctttttcacttctcctctcttttgcccttttctcgctttgattgacaattaattttaatcctcttacgatgggaaagtcaacactttaagcaaaagtgccctttctttcatttaagcagcttat

SEQ ID NO: 20807 - DNA, 1114 bp, Heterodera glycines
  unsure (1)..(1114): unsure at all n locations
catttaagcagatatatcagtgttttatganctgaaanataataaaatgacttttctttatcatgaaaagcaaattnaataattaattattttatgtatttgcataaaaaataaatatgacaaaacgacacaaaaagaagaagaaaggggtatcagagaaaagagagaaggcaaaaatacacagaggaataaaatatggaaattattaaaaataaataaataaataattatgtttgggaatgataagaaaaggagaggggaggagaaagaggaagagggtccttcctcattatgaggtacggacgaagaacgaatggatattcattattaattagttagtgttagcggaaggagaaaaagcaaggaaatgttggcgattaaatgaatgaatttgaataaattgcaaaaatcaaatggaaccaatgggcggggggtgggagaaacctttgaaaaacgcatcaatcacttaatgaccatcatcataagaagcgtggccaattggcattccgtcgctgtaccaaattcggtccttccatcggcggtcgttcgtccgtccctttttcactgattgtacggtggcagaaatttgtacaccttttttggtttcgtttcatttttttgtttgattgtgccaatttcccctttccttaacgaactgaccaatcgctgcttcttctccggcttttggatgatgccctttttgtaatattggcgaagtgatcgcgacaactgatcagacaaaacaattgcaaaaggtttcaaatggcaaaggcttttcccactcactttgtcgtaattcatcgccgcccgatttttgcgcagcccccaaaaacgcgccaaatggtgggacgactcgattttgaaggtcccttaacggtctctctcaaatttggtcccatttcaaattatcattgctctttttccaccttcctttctgtccacccaacgcacacagcctccgtagtccctgggctggtcgagcaattcgcgaatgaaatgccacaagtgaatggtgccgccgttgccatgcccgcaaacggtgcgctgcggttgcatttgctgcgtttggtggaggacagcaaacgcagcggtggcactttgttgttgatggaca

SEQ ID NO: 20808 - DNA, 3199 bp, Heterodera glycines
cgccgtgtatcgtcacatatccatgtcaatggttgtggcataatgtgccaccaatgtgccataccaatttgtgccccgggcacatacacatacacacacattaaatcattcattccaattaattttccaattaagccaaccacttattggctccagcctcgcggccaattaacccccggtccctctgtccgttggcattttgctgatttcaccccctctcatggcaaattgggtgtgccaattgacaatgtgtcccccaagcggtgtgtgacaaacggccacaaagcgttccaaccgcctccccctggccccgggggcatttgggggcgacgacaactaagtcgtaattagttattttccatggcaattaattaatgacagccaattgatgatgatggtgggtgaaggaaggaaagcctgtgctgctgctaaattggctgggtgctgctgctgatgttgacaaaaaacataattttgtttgaatgagtgtgtgaaaagcgcgaccttttgcccccggcacttttggcaatccgttttggcgcaaaaaaattttttagtcaattgctacatattttaacaattgttagaaattcgccgctaattagtgatgtccgagagtcttggcatatcgagtctttgactcaagaaaggtctcaggtttttggtttcgagtctctgtcaactcgagaaagttctcaggtttttttgatcgcgagtctcgagtctcagctagagaaaggtgcccggtattttcctcttcgagtctcggtctcaaatctgaaatctcgaaaagatttttggtctcgaaaaagcactatcgctgatggcaccggaatactgctgttggttatggggttgagttgatttttgggcaaatggcatacttgatcagaccccgacagaacattaaccccgatcgaacggccattcgtgggcaatttttcgcttttagtgggtgagactccgactttcggcactattaagccttcgaagccgagcgagcgagcatttattagcatttcgattttttggaaatggtggccgaaccccggagctctattcgaaagccctaagtgtcctctattagcctgcaaaattttgaaaaatttcgttaaggttcaaaaaagttaaggccagaagaattcaaaaaagcagattttccaacctttttggccataaattgttcaaaattgacaaaattttttggaattttgtaggctaatagagcatctgaagggctctcaaatgataccaagattattagatttggttgacaaagaaaaaagaatattatataattctcgcaaaaattttaaaaaaattgaaaaaaatcataaaaaatttggaaattttggaaaaaaattgtttacctattttttttgaaaacagttaacatacaaaaaaatacaagccaatttctgattgttcattgatcatccatcccattttgatggccaagcacttatgcaaaaacatattggcctaaataacggcggaattttttttgcacattttccacatttttatccacccgaaaggcatcagcaaaattttgcaaatgttaatccttatcagcctatcaccgaagccaggcaatgccactccacactcataacaacagccaacaaacaacaatattgttgctgtcagcacaagcgcgccgcggaaggcttagcgacgaaattgcaaagttcatttcgtctttgtgggtgaactgtaagccaaaatccgcgggtgggggcgggattagcttaagcgcgttcagcgaaagctaattttggcaggcacaaggtgccagtgccattttaatcatttttatgacaattttgttcgagtgccgaagcggtgcccggggaggtcaccaaatgtcatggaaaaacatcgcgtcaattggataaggaggatgaagccgatgtcccctacccaccggaggagggggaaggcacaaatgcttcttctccggattgattttgccccgggccagccaccaccggcccggcccaattggcactccaacactcattaaggcgcctcgcaggctaatgagcggcacggcacacacacatgggagcagaattttttgtgcggcatgggctgcttactggacggcatttatgggaagcaaaagttttgttttggagacagcggaggactgctaattgccataaaattggaccgccgcattggagacacacattcacacacgcacactaattagtgctaatgggtagcttaatgggagggaggccaacagaagggcagcggatggcttttttatgccgcagggagcaaattttaatacgaaattttcgtagaaagaaaaagggctacagactgttttgcaaagaaagcttttaatctgaaatgtccattgaatagttggatttacgatacattcttatcagagaagggagaaatttttgaaatttttgggctaaaaataaaataaagtttttaaaaaaaatttacgacaaaatctggccgagatgaaatgaccagtctgacgaatttgtcagctacggtattcttatcatagaaaagaagaaatttttcaaatttttaagcctaaaaaaattaaaaaaaaatttttttacggcaaaaactggctaaatcgagaattatatctgcacacggccaattctcgtcatttagccaattgtgaggtaatgaaagagtctgttgctgatcaaaagtccgccgcttttataataccgtaatttgggacggaaaacaaatatacagtaaccaaatttgcttctttgccagccgatcatcacgtttaagcgatctaataaagacaaatgaacaataaatgccggacaaaactcatcaaaatcatcatcatcatcttcaaatcagtcccgcctccgaagggccatcaaactttgtgccccgggggcacatcatttatttgtttttggctctttttaagtcgaccgccactcaattggccatatggccaccgaaagtgtggtgcccgggtggtcaaatgtgattggatttaatgggatttatgaagcagatgaagccggtatgaaaataaatccacagatgggcgggtaaattagcgtatgaaaggggcggcacaataaaatttattgcgtactacttatttgttcagcgatggaatggtggcggcgccgcgctctttcggcacggcaatgataaaaaagaataaatttaggaaaaaatgcggggt

SEQ ID NO: 20809 - DNA, 929 bp, Heterodera glycines
  unsure (1)..(929): unsure at all n locations
ttcccnttcggcataagtcaatttgcaccgttaaaatgccataaaccgttttgatttttgcttatataaacggccgcgtcggcctttgctgaccaatcaattagtgactgctaattgtttgcttagttgcagtgccaccgaatgcacctcaaccaccaccttttgcagcagcggggggaagtgccgtcgccgccatcttcgcctcctccggcgccgcccattgaagcggaaaatccattcacttcgccgtcgtatgactgtaatgtgcagcagcaacggcatgaccacgacgaagttgggaacggtggtgttgctgaccatcgtcattcgccaaacgacggcgttggcatttcgtcctcttctgccacttcctcctcgtccgcctccaaaagttcaatgtccacaaatccggcacggcgtgcgcccgacatgcaaatgggcagtgagtgttattctcgccgatcacttattatcaacgaactaaaatgttcacagaatgcccctgggtgcgtgtgtacgacaacgtcacttacattgtcagtgccattgcgttgcgcgacggtccccgcgggcgcgaagtgttgttgatgagagaggcgaaggaaaagtgccgaggcaaatggtacatgccggccggacatgtggagccgggagaaacgctggaggtgatcagacggattttaatggggttatctatcggttggaattcgatggggaaaaacgatcggaaaaggcaggggaagagtgatcaatcgtagcagaaggggagagagtgatcggaaagggcaaaaagggagagagtgcgacaaattttggatttanaatttatgcaaaacgaataaaggaggcgtgcagaagagaattgcgggaagagacgggcttgcactgtgcggtggagacactttctgtgcgtggaagtgcgcggctcg

SEQ ID NO: 20810 - DNA, 1223 bp, Heterodera glycines
tttcgattcagtaatcgcctcgaatgtcttgtccaccgatgtgttcgtgatcagctccaacttttggatgagctgacccttccggacgcttttccctctggtcattcattcattcaccaattaattaattcattaaaatttaaaaaccattcccaaaatggtaaatcatttgccttttcagtcgaatttggcttcgaatttttcctcccctcggtgatcaccaaagtttatcgccatgtgttcgaagatggggtcgtccaattggtcctttgttggcttaaagtgactgctttctttaagcattgcgtgttggaattgcccgaggctgtcactgccctttggtgtctgcccgccccggtcagttcagtacggcacggaattcgcctgaggttgttgtgtcggcataaacggagcgcccaaaggggccaaattttggcaccgcaacgataccgatggattgaggtggggggtgggggggggaggagaacggattaatgtaaatgaccaccaaaaatgaggtttatcagttgatcaattgagggggaaagcaatgcttttggttttgccctcccaaaaaggggtaaataaaacaaaatatgaaaaacaagcgacgaattaagtgatcaaatgagtttgctatcattttaaatgatcaaattgtatctgtaattggcaacttttggtccgatcagttcattaattcattcattcccctggctttagctgaaccatcccgaggtgctttccactttgtatttgctggacgaacagttccgtcccaaattgtttcttctctgatcggtgttcaagaaagaaagacaattcgatgatcaaagaccaaattaaaattatttaatattttacgagtttttgaatttgggtgattactcccaaattgccaaaatgtgtccggcaattccaaaattcatcctaaaattatttgtataatttcatgttattatttaacatttcgctttatgtaccgtccattttttgaatttgtgttgtaaaatttgcaatgtttaaaattcattctcaaattattcctaatataattaattagatttttacactcttttaatattaatattaacgaaataaaataatattaaattaattgaataattaatatgcttcttccgtttgattctttttttccttcctattttcattttgcttctcattttccactttttctttatgtaaatcggttgacataaact

SEQ ID NO: 20811 - DNA, 2797 bp, Heterodera glycines
  unsure (1)..(2797): unsure at all n locations
attaattgtaacgaaaattcacaaattggagtccaccaaactttttcaattttatgtattcatccactaccaanagtatgaggtttgttgacacagtttctaaattaagaatcgtatctgggctaaaaataataaaaggtgaaaactttcattggggaaggagaggaccgtcagtacgagcgaaagtccttgggggaattgtttctttaaaccaaaatgctaccaatttggccgattcgtggcatagtttatagctaaatctgtgttgaattatggcaaattttcaaaaaatataaaagttctgtcgtaaaactccgaattaaagaaattcggcaaattaatccgggttcgggcctatcattcattaccttatttcatatagacaatttctatacaaaaattgttccttttactttattaatatggacctatttttgattagaaaaacccaaaagggtagggctggttgccactcaaaaataccaaaaagagcaaatttgtgatttgttttgggccacaaatactaaattctgtcttagctttgaattatttgtttgtgaattttaaaaataaatctcgttaaattttgaaaatcaaatgataagcacaggctcttatacattgtagagggatttgcgattttcgaattctgctgtaagagtctgcatcaggggtgggacaactctcgcctctcgtctctcgcctctcgccaactctcgccatttttggtactctcgcctctcgttttttcggacgagaggcgagagttgaaaatacacccctaaagattgaacttttgagcagtcagaaaaatctgcctttcattatttttctcttgggttcaattcctcaacggtacataatttttttttataatttctttaaattatttttcaattgaaatggttcgaatggcaaaaaaaaaatggacaaataataaagtttgtttataaaaatatatttcattaaaatatttattttattctcatgaaaaaattttagatttttttggatttttcaggacctggactcggtttaaaaactaggactctgacccggcttttctggacccggcaataccctgacccggtatttgcccaaatacccgggcccgtaaccctaattttatatacgattttgaagttttttaaattaaaaaataagactacagaaaaaaattgaaaactctcgcctctcgtcctctcgcctctcgcgaactctcgtgtttttggggactctcgcctctcgccaaactctcgctctcgtctttttggggactctcgcctctcgccaaactctcgctctcgtcttttctgagacaagtcacacccctggtctgcatgttctcatcttggcactcaaacccggcatttgttagcaggattttcccacgtgattcgagaatcttctctaggcaatttgttgtattttgagtgcagtctaacggagatgtttgtatagaaaaagtgaaagcgatacttttgcaaaattctatttttatttattattaaattaattttatataccgtattttctctaattatccaccttcttggtgaacgggggggggggtgggttgagggctggcggtgccgataggagccgcctgggaaaattttgaaaatttgagtgtaatttgttaacagattttgtcgaaaaaatgtccaatttgtgatttttgagccatttaaattttagattccggcttgccgataggcgctgccgggaaaatttttggaattttggctagtttttaaacagatttttttgtacaaaaatgaccaaatttgtgcaaatcttatattttcttgataaaacaatgacattatgccatacaatttcaaaattatgatttaagaaatcagcacaaaatttgatcactaccctcaaatcagaacatttttattttctcagatttggaccctccaaatcaggacatttctgataataaggacagatcgaagccctgggataaatagagaaggggttattatttttcgacagatttttttttgaacatgtcgccaaaaaacgtcatcacatcaaagaaattttttttatttcgtttctgttaaagaatttctgaatttaacctgaaaaattcgaaaaactagggaaatttaagctaacttttgaaaattcataacgcacttcagatttggaaaatgttagtgttataaagcataaaaataaagaaaatcgggagaattttatatattttatttggtttttctaacttatgaaaaaaatttttccagaaattctggaaacattcgatttttcagaaaaaattcagaactccgttctgaatatagaaaaaataatttaaaaacttttgtcgaaaacacatggcacggcacgttgcgtttttttgtaatatttggctttgtttattttttaagaattaaaattaacactcaaaagaccatctcgccaatatttaccttttttttgtttggacaatggtaggggacgaaaagtgcaagtaacagaataggctcttaaagttctacgggatttgcaaaattctctagaccacccacaaattttgtcctgccaaatatatttttggtctccgctttgcatatggcttccttcatcagctttcccttccgaagaggtactcatagcctccataagtgatcagctgacgctccgattcgattttctgacagaaaaccaaacaaaagcccaaaaaatacaaattcagaacaaaaacaaatttattaataagcatttaaaggcgaagctcaagaataaatgtaaaagaatgataatggaaagtgcgaccatggag

SEQ ID NO: 20812 - DNA, 872 bp, Heterodera glycines
acgatcgaaccattgtcgcgcgtgggcaattccctctcggatttcgggatgatctcccttctccaatgagtgcctttcgaattccaacggaaaacgcaaaatttgtgcaagacgaaaggagaaaagaaaaggattatcatttgaggaaggaaaaagccaattaatgtattacctgctaattatcacagtgtctttttgcaaattaaacgccgacccattgccacgagcggacgaagtcattcgacaaaacaatgaatagagacattttttaaaatataatcatgaaacttttggaattgatccacgatttcaaaatggcaaaggaataaatgcacaatttgatagtgttgatgatttaataaacaaaacaaaaaaaacagatagcgattggtattatattaaattggatgcgcaatgtcatacagtccatttcaaacacctgaaaattaaaccctttggactgagtgagatcaaaaaaagaggggggggggggggggagggattccggcgtaacccaaaatatcgttgttgttttagccgattccttgcattcggaaggaaaaactttcattcttttccctttttctcataaaataaacattctcgttattaatttgggataattttgggccaaaagatatccttgtctattggccttcgcccaccgaccgcgtgtccaaatgcatgtccttgcagggaatggagcaaaagcgggcggaacagcgaacgcaagtgtaaccggcaaaaagaccacacacagcgcaaaactttcgcgagggcactttgctgggagatgaagcgacctgaaaatgaaaatcataaaaatatataagattgtctcaagccaacggccatgcgatttgacgatcgat

SEQ ID NO: 20813 - DNA, 1802 bp, Heterodera glycines
  unsure (1)..(1802): unsure at all n locations
cacttcgtaataggtggcaaaaggagttctgggctggcttctttccgcctctgtggagtttcttcctcgcgctttcgcttaataaaaataaacatttggatatgggctcactaaccaacatatttaggccataagaatggtcttgggtccatcatttttgaaanagtcatgaaaaatgctccctctgacaaaagatgacatttgtcaattaaaaaacccttcatccaaacttaaagaaagtccaaaaatcgccgaagttctaattcatgattttttattttaacaattcgcgcccctattttgccttggtttacctgcgcttcttccaaaagttgagcaaatgtcttcctaaatcgcgtctttgtcaaagcggccacaattttctttccctttttcgctgaatgatcaaatgattcatttctcttcccccgacttccattcacttgcttgctccgctccgctgacttttgagggtgacgcaattttccgttttcgccttttcttttctttgtctccaaaaaccatttcatcgtcaaattttggtgccgctttgtgccaagtgatattcgcgtggggatcctcttggaaattatcctgaaaaacgggaaatgcatcattttccgccaataaacggactttctcaagtgactccaattgttgctgaatgcgccgtcgtttagccgcttcatcaaagcatttcgtgggttgttgagaaatgatccgacctttaatacattaattccctaaactaaacaaactcctaacactaatttactggattgtcgacttgaacgctgttgaaattttccaaagttactttgcgttgccatttaaatttacaattctgtgatctgaataaaactgaatttatttacctacaataaaacagggctcgcagatctgaggatttatcctcattttgtggctttttgataggtcaatgaggattttttttgaaatgatgatctgacaatcatttaatttgaatttgggtttttaacacagcggcccaattntgggctccaagtacaactatgctggatttttcgtcttagtggtctgtgagttagtcaccaaaagaggggtcccaggttcaagtcctccctatgttgtgtgttaatttcaatttcttcttttaaagaagaaggcagacaaaattgctcataacgccaaatagcgcatttggcgtaaatttttgcgcgttaattcaaaatttacactggtaaaagccttttttgtattgtttattttaatcagacgtaactcacttcattcccaactaaactgaacaaatttgttacctaaaaaaagtttttgaaaaggagaatctttttctaagcgaaaactaagcaatttgattttttagaaaaaagttgtgggagtttcaaatctttattacgttataactcaagtcttaaactgctgatttcaaccaaaatgcggaaagtaatcatttttctattgattctaaatgtccaacagattttgtaccgtatcaacaaaaattaatagaatttgcgaatttcatgatttttaatgtgttagagacatgaaaatagtacgccaaaaagagaggaaaaaaatgcaaaacttttattattccataacttttcaattcgacctattttaatattaattgacctattaaccgatgcagaatttttttctctatcgatttgcaaaatttggtgtggatttaacaaacagaaaaaaaagttaaacaggatgaagtgagtgttgtttttacacacattaaaataaagagatagtacgccaaagtgagagaaattataaagaaaaag

SEQ ID NO: 20814 - DNA, 3625 bp, Heterodera glycines
ccaggcagtcaattgattaattggtaattatgtattatataatggggacgattttgtttatgcattcttcaaaaaataccaatgagagaaaatttgatataaagcggtgaagaaaaggaatacattctttaaaattaaaaagcgataatcgtccatatccccgcccgtcggttcggtctttgggcccccatcagtcagtgtaggaaaagctccgcttccgatggcatgtcaactgtggcaccgtttttgcggcaatagtcgatcatcctgtaaaaggataaaaaaattaattcattttggtaggaaaaatgatatttcaaaacgatccaagacgagtccctcatcatcactttggcatttccgacgatgatcaaaagctcttccgcacgagtgattattgtgttgaaacgctaagcgttgaaattaacaccaagtttttagaactggattaaacaaccttgtccgacatcaaaaagccaatgtcctccttttcgttgttccgaacagtgctgacaatgatcacccgacgctggaaaccctggtaacgctccacggtgtccacagtcactcccttgtgttcgttgctgagtttatggcgcagccgacgcacctaaacgtgaatcaaaattaataaatgatgactgacgatacgccaaaatagtgatttctagtgaccgatagtgacatcagaatcgaaaatttttaatgcagaaatgcgttttttgagctccaaatcgtttaaaaatgggacacttccaggccaggctggtccccccatcccatctttccacttttaaatcacaaaacattttttgaatcaggaactattttagttttaacaaaatatttgttgtaagtttattctaaaatgttaaataaaaaacaccaacaatttgctcatcatttaaagcaatgcttcattttaattcttacgtgcatgaacatgttcaacggattgcccgtccatttgaacgtatgaccctcgcgagaaaaagcactcggtcgccgaattgatctctcaaatggtctaggtcgaacaacgcagcactaaaaaacacataatgggtttatttttgtccgaggaatgttattctactcacgggtcattttcattgacccactggtcgaaagggcggagcacaacaatatccttggctgcagacgcacatgcttgtttgtaagtgggtataacattcatgagtccagtggttttgttttttgcaaatgtcacaaaacatttaaaaatttggagaacagagaaatttctattttgaccgcttcgtgtcttagacgagcgctcgcgccagtttctttgggtcggtggtcagtttggcgctgccaacttttaatgttctattcaaactaacgcgaaaaaaaccataatgccaaatatatttttttgtcaatgaaggaagccgctgcccgtcaaaatcccgctgcgtcaaaagtatttgtatgtatattttatattatacatatataaaaatatcagaatagattattctaagcaaaatgggtcgaaaaaattgaaattcttcataaatgttgtaaacacagatttctgaacaacaatgacggcgaaaatgcaaaaaattctgatcattgtgagcaaacgacaacaacaatgaacgttatgaagactggagaagaacaagacatcaccaatttcaaacttgggaaaactcaaaaggtaggcatttgtctaagtcttccgatatgtgattgaaaaaatctgtggactgccacgcgtgacagtcattgcttgatggcgtcaacgcgtttggtgttcgttcggcgagtgttttcttgccccaaataagctttcaatgtttgttctaataatttttttggtattttacggttatctgtactcagggcattttttggttatacgagtcgtcgtcgtgtcattttttggttgtgcgggtcatcctcgtgacattgtgaagcgattttgtgtataaaatgtgaattttttgaaaaatggattttgagttttttcaaatccgggtttggggttcgaattgggtcaaaacagatgccagaatcggtttcaccgaccttgaaaacccctaaaacaagtttatttcaaaaaaatgtttttttttcaaaatctgagtacagataaccgtaaagtaccattttttataatttcctctttgattatttgcattttaagcattcgcggggcatcattttcaatccgttgaacccgaccatacgtattcacggcagccgttgtagttcggcatcaattcacccgccccctcaacaacaacattggtctcgaagtaacccatcttttctgtattttttacttgtaaacccccaaaaaacttaacaaattttataagtgtctgatcgcccgaccctttccgacttaattgttgaagtcagcagaaacatcgaccgacaagcggacgcagcgaattgagctcggaatttcgtgcactatgaaaattttgaagattcgatcatacaattctcttttttcgattcattcaatatttaaaaatatcattatttttcgtgaaaattgttatttatttatgcgattctggtaaagtattaatgaatttcgtattttgaagccttaggaatgtaattttaagactttttcgctaatttttatttggcgggatttcgactcattttggctttggcgggatttcgacgcggcgggattatgacgcggcgggatttcgacgcggcgggatttcgacgcggcgggatttcgacgcggcgggattatgacgcggcgggatttcgacgcggcgggatttcgacgcggcgggatttcgacgcggcgggattatgacgcggcgggatttcgacgcggcgggatttcgacgcggcgggatttcgacgcggcgggattatgacgcggcgggatttcgacgcggcgggatttcgacgcggcgggatttcgacgcagcgggatttcgacgcggcgggatttcgacgcagcgggattttgacagcgcgccaaaataattcttataaaaataaaataaaaccaaactttttcatttcttcatataatatgcgccgttttcaaaattattaagtcaaaaatttgatttctgcacatatagaaatctgaaaaaattgagttaagatgcactttatgagtccaatcaaatgaccacccttgcttttgtggaccatatctttattctagagtgccacgggaccgggaatttttgccaaaaccgggaccgggacttgccgggacctgagaagccgggaccgggacctcgattttttttcgggaccgggaccgggaccgcaagaaaaaccgggaaccgggaccaaccaagaaattttaaaaattcaaaaaaattttaaaaattaaaaaaaaattcaaattttaatttatatcaagtgaaaataatacaaaattatttggttttttataataaattaaattaatgaaaattttcaaacaaattttcttcaattatttcaaacaattaatcatttttggactaaatcatcgaatattaatagaaattcagatttgattttcacatcactttttttcggagcgccatatataaaaatatcataatagattattctaagcaaaatgggtcaaaaaattgaaattcttcataaatgttgt

SEQ ID NO: 20815 - DNA, 1953 bp, Heterodera glycines
cagatcatttataaaaattaaaaagagtaatggccttaagacacttccctggggcactcccgaaaatatgctgaaactttctgacaatacttcgccgattttaaccttaaaactccgattttttaaaaagttagttaaaaatttataaatttttccttcaattccaatctttttgattttttgaagtaataaatcaattggaactgaatcaaacgccttgacaaaatcaatatagataatgtcaatttgttgatccttttgtagagaattatatatatcgtccattgtttttaatatttgggttgtagtcgacctattttttaaaaacccaaattgttctttatcaaaaaatcttataccgttcagaaattctaaaattttgctacttaaaattcgttcaaaaactctacagacagtgctggttaatgacaccggcctgtaatttaatggatcagttttttcgccttttttgaaaattggtaccactaatgatgttcgccatatttccggaatttgaccggaatccaaagcaagtcgaaatatgtcagctaatatttttgtaattggctcagcacaattttttaataaaatgtaaggaatgttatccggtgaagtggaatttcgcctggggagctttcttaatatattccaaattatgccagcatttaattcaatatccgaaagtttagtcttattttgtgctgattgagtcagtgaaccattaacaactgaattttctaaaaaagatttttgaaatatttctgctaatatttcgcatttttgctcattactggaaaacatatttccagcactatcaattaacgtagggatttcgttgacttttgataatttatttcgaataaatttgttaactgaattttgcccctgggaaataatttttgactcttgttcatttcttaatttgtgcaattgttttttcatttccctagaaataattttgtaatttaaaatgatttcacttttttcaggaaattttcttacaagcttatgtaaccgtaatttctctgaaaataaatctcttattttttgaggatacgattgttttattatcgattttagaggtctatttggtataaaagtatcatataatttcagtactttatttaagaattctttatatttttgatcaacggtgtacactgagtttattgataaatcaatacgattttcaagaatcgcccgacttaatttcgaaaaattaatatttttaaaatctcttctataaacattagaattattacggctgaatttttcttttattttaaatccgaccattttgtgatcggaagttgaaaaatgttccaatacaattaattcattaattaattccgattcattagtcattactaagtctaaaatcgtattttctctggtcggttctttaacatgttgtttcaattgtctttggttcataaactcaatcagcatatttgacataggatcatttatatgttttaccttatttccatcccataaaatgtttgggatgttaaaatccccacagtatatgatattttcggaatcgctttgatccgaaataaatttgagtagcttttttgtattgtgaacgttacaatttggtggacgatatatatttaaaatttgtattggctttttgaaaagtaatttaatgtgtataatttcgctttggaattttgtccctgagaaaagtgtctggtaagggatcattgtttttattaggattgccgatcctccgccctttttttcagttcggtttgcataaataatttggtatgaccatttattgtaagttccgcgtctaccgtatttctggagtttaaccaggtctcattgattagaattattgaagggtcatatttttgggttatatgttctaagtcagttatttgatattgatcgggcatttattaaaaggcaggaaatccagggattattttttatagtttttac

SEQ ID NO: 20816 - DNA, 1106 bp, Heterodera glycines
tccttcctccttttcgctcttcccttccctccctctcgcttccttcccttttcccttccctccctcgccccttctctccctcactcctttccctctttctccctccctcgccccttccctccctctcccacttttccgtcttccttcctccttttcgctcttcccttccctccctctcgcctccttcccttttcccttccctccctcgccccttctctccctcactcctttccctctttctccctccctcgccccttccctccctctcccacttttccgtcttcctccctccttttcgctcttcccttccctccctctcgcctccttcccttttcccttccctccctcgccccttctctccctcactcctttccctctttctccctccctcgccccttccctccctctcccacttttccctcttccttcctccttttcgccttccctccctcctccccgcccccttccttttcgtggcttgtcgctttgtcgctcaccaaatcacaatcaattcccttcccccacttcttttcatggagcatttgttcagagaaattctttatttattagaatagacatttcgcatatgttttaaaggttaattatttgcataaatttgtttgtgcattattatttatttatgtacatatgtatgtgttacggagtttataacacttttcgacaattttttaatcaaaaataataaataattttggtaatacatattaccgatggtaggaccccttttttgaatgatgcaaaaaagaataaaattttcgtaaacaaaaaatttttggaattttgttttctatttttagtgcagtatttaaaaaaaatttcggcacgattcttaggggctgtatatggaattcggattcgcgatcactagggcccggatttttatgtgctaaaaatcctgaaatatgtaataaaatatgtgctaaaaaatgctgaaatatgtgctaaaaacccccaaaaatgccaaaatatgtgctaaaatatgtgttaaaaattgaaaaaataagtgtgtttttgcataaaaattcccaaaaatctcattctttatcataattagccccatacaacgcaaatcaaatacatttcga

SEQ ID NO: 20817 - DNA, 961 bp, Heterodera glycines
  unsure (1)..(961): unsure at all n locations
aaatcaaaaatttgttcggagataatgctattttgggcttctctcgccataactaagccgcaaaaaaaatatgtaaaaacataaaaatccgggccctagcgatcactgatctgcaacgcataaaactatagtgaacaaattttcacgaaaagatgataataagaccatatctgggacttagaacttgtatcaaattaatagattaattgttggttaatctctattacgactaacttcaatcgtttctcagcaaaatatgaatgtaaataaagaagaggaacgactggaaaagaaagtcaccaaatgggctattatgctaaccagtgaagacaaggtgagcatgggcattcctcagtatgggattttgggtaatacataatactgaaaaattgcggtaaaaaggtaaaacagaaacccataaataattcgatggttttgcaaaatctaagtcagattcgcaatttagcaattttttttactggatttatttcagagaaagttttaacttggaatcgcaattctgcaatactaccgggcccattctgcaatattaccggattttgaatcttttcttatagattgaacatgccttgaggcgattggatcatgttgagattaacttacaacttttgtcttcgactggttggagttttttaaataaatactggtattaaaaaatcgaaaaaacgttaagtacattcataaaaaattttttgttttgttaatttgagcatagaattttgaatattaaaacttccatagaatttaagcgttcgattataccaatgtatacattgacaaagtaagaaaaaaaagttataacctaagaaactgaagatagtcattgatggacgcgtaaactgcggtagagttttataaaattatcaattattttttcactgttttatctgtatagtttttaaaggagttgngtaaagccggtgaatgctctgagaagacc

SEQ ID NO: 20818 - DNA, 2863 bp, Heterodera glycines
cggggtggcggaatgggtgggaggacggggaaattgggagggagagagacagagaagaaaaaaagaaatagaggaacagtgagagagagagatagaaaggagaaagagagactgattgtgagacagacaaaagaataactggtcgagagcataacgccaaaatgaggggggaaggggatgatttatttttgtgatggcagaagcattgcggagtttcaagcctcggttggggagattttttgacctccaaaatttggggagagctcaatgagactggtaactatttcataaatcctggatatcagaattttagctaataaaaagcttttatcaatatataaatatatttaattgaaaagtattacgtaacagtcaaacaatttaattgatttttaatcataaaaaaatttacactcttattaacgcgcatttaaaaaaaaaattctgttagtaataaatttggcctttttattttaaataaaaatgaaagaaatgaaaatcgaattttaaaatttttattttattctctaatgaattaaaagaattttatggcaaatttacggaaaaaaagaataataattttgataggaattttaacagcaaaggttttcacaaacagtgaattaatggaggaggcggaggagaaaacggacaatttgaacaaaaaaggcaataaattcgccctggggggaaatccacggaaaagcgccgaaacgcaaaatcaattgaaccaacggacggacgaccaaagaaagaaaggaccaccggcggatgacccaaaaagcgaaagcagcgacgcatcatcagcagaagaagaagaaagagcgaatggaagccgcgggagaaataaattccatcgcttcgctttttagcggggaaccggcggatgtgaaagtgaatttttatggggcgattaaatgtggcatttttcgagacggaactgcgaactgtacgaagtttttgatgagttcaagaagtgtccattttttggtaggcttgctcgatagatagcggattagctctgctgtcctgtcttttcaaaaactgaaaaattgtggactgatttttcaaaagctttttccaccagcgaaaaagaaaaatcgttaaaaaatcgaatgttcagcggaaaatatttttttttcaataaaaaagattaacaattttttcaaccacgagcgagtcgctgcggaccgaacggccatctcaggcgttctcgatgagcttggcatcgagagcccgatcactgtttacagaatgggttccccggaccaagcaaagacaggtcaaaaccgcccgcggttgatgaaagtaattttcggctgctcaaaacatcagagacaaacctttggctcaatggaacaaactgcgcgctcaaatcagtcaaaaactggggatgagcaacatcaaaattcgcccttcactcagccaagaggaactcaaggcccgacgtgtgctgcaggaagagtgcagcagaaaaagaaaggaagatggcggcgagtgggtggtttacgctgacaaagtgatgctgaggtcagacattgcggcatttaaaaataacaccaattggcttgctgttttaccaaatcacattcataaaacattaataaattcgcatttttccggtcttaagcatgttaaacctaataatccaataagagaaaaaggggacgttaaagcctatttagttaatattagatcaatttacaacaaaattgatgaaatatctttaaatttagtaaataataacatgaaatttgtctgttaactgaaacgtggacaaaggaggaaaacccaatcctctttagtccatggataatcgaaaattataactttattttttgtcatagaaaatctcaaaaattaacacgtgggggtggttgcggtgttttaattaagaaagaaattgagttttttgttaaattttctgaaacaaaatataattgcgaaattttggtttttcaattacaaaaactaaaatcaattagatttgtgcttgtttatcgaccacccaagacaacatatagacaaaccaaggaacttttaaaatttttagaaacattctatagccataattgtgttgtgttgggtgattttaattttccgaataaagacctggtatggaaggaagggcagcccatttctatgagtaaatttggtgaacacgagtggacccaccaggggaaattcgtggttggacttagttttgccggcgaatgatcaaattgtaaagcaatgtactgttgaaggtggtgttttttcatcggatcacttagcgcaaattttcacattgactattccaaaaacactacaaaaaacaaacttcttttacactcgacggttttttccgtcgaatgtttcgctttttaatattatggtttcttctagaattagcgctttatctaacgagcattttagtgtgaacgaaaaatacaacgcctttaataatacattgctagaaaccttaaacgagtgtattccaatgaaaaaaattaccaaaaaagatttgacccctaaatatccaacgcatttattggcctccatcaaagagaaaggcagactgtataggcaatgtaaaactgacccaacaaaaaaagcactttatgatagcattagtttacacataaaaatacaaacaaataaatttcactcgcaaattgagaaaaaggctatttcaaagggaagaaattccatttttaaatacctacaaaaatacaatgttaatccctttgaaataccgaatttaatctttgaaaacaaatgctatcatgatggtgatgaaagaatgtgaattatttgccaacttatttgcaaattcgtttaacaattctgatgttgaccctaggctacctaaacttgggccata

SEQ ID NO: 20819 - DNA, 2403 bp, Heterodera glycines
catagagaaaggaaaatcagcatttttctcttagcgaacattgttttaataaatatcaacatagacgttgatatttatttaatatcaacatacattatgccatcaacgtaatatcaaggctatttttaaaatttagatttttttaaatttaaagcaattttttaaaaatgatttttggcggaaaaataaattaggagagagataacagaaaagtgagagggtgttatattcagccccagtcatacaaaagcatttttggtgaacaaaaataaagaaaaattaggtaattaaaaagagagtgttatgggaagagatttaagacagagagagaatagagaacatagcgagaaatctgcgtctcttaccaaaagaatcagcgaagaagagacatgaactactcccttcccattgcgctctctattgaaattgttttctctacctccttcatcaaaaatgttttgtatgactgggactgagatccagcactctctcatttttgcgttatctctcgcactaaaattataaaccgctcatataaattttaaaaaattttcgcaaattttaaaaattacgttgatatttgcgttgatggcataatgttagttgatttaattaaatatcaacatttaaattgataccccgcaaaaactaataaaaaggttgatttgccattctctagtaattagtctttttttcatattttccctatatataatttattagaatttaaaggcacttttcattttgttgcatatttatacgcaaaactttgtcaaaaatataaaaggctatgttccgatccatgcactttgttcaattttgacctcaacacttaaaaattgtagtaaacatagcagtcgtccttcttcttgctcttctttctccgtttgtcctccgatttctcctcattttcattttcttcgtttttcgctttctcttcctcttcccccatttcctcttcatcatccaaaatctcaatgatttgtgccatttgcttctcattggcagtgtgttgctgcgtaacttgagttccttcatttagtttctaaagattaaattattattttgaatccaaagattgggctaatgaattagcggtgattaaagagagaaaagagagtgagtgtgggaaagtagagggtagagggcagtcaatcagggaagcggtgagagattgattggttccctcaccgtggaatgctaggcaaaatgcagtgacaaagggtacacagcagggctggccgtgatcacggattttttcaattttccgtgattttgatctgtgattggcattttaggtatatatggaatttttattgaaacgaaaacaggaaattggcgtgaaaagagaactttttgagaaaaaaattaaataaataaatatatttctgttaagtaactacgcatatatatgcgtgctgacgcgttttataaattccgccacccatgcgcacccccaccatgcacgttttacaaatccgccagcgcgttttataaatccgccaccatgcgcacccccaccatgcacgttttacaaatccgccagcgcgttttataaatccgccaatataaatcaatatgctttatataaatttattatttgttgtgaggacccttgtaagaaaatatagcaattatttaccaactttaatactggataaatccttatataatattttatctgaataaagcatccgaaaatttttttaattgaatttgtacgacattagctatcacaaaaccttaataactatgctaattaataaagtgttctatggaattaatttaaaaaattcatatcaggtgatggtgcaaaaattttaggagatcagatctcaaaaaataaataaataccctgaagagctgctggaaaatttgataaaattggattgtaattaccctaaggactttattttagacattttgtataaaatatagctgaaattattgcataaaattttaatattattaaagatatatgcaaaaaaatgtgctggcggatttataaaacgcgcatgggtggcggaatttataacttcctttttttattttttgatctacgaaaaataacaaaaacctcaaaaagtcaaataaatgcggctttatattcaaaaaatatttaaaaaaataatttctttcattttttacaaaaaaaaattaataattaaatatacttattatgatatttaaacacttatatttaaatacttacaaaaggtaactagtacatttttttaatttaaaaagcaattatagagaattaaaagaatcataaaaatgaattttaaagaaacaatcgcaaaaaattcacaattatttaaattgcttcttatatatgcgaaagaaagaaaccaattatcttaaactagcaaaaagtaattactattaaacctataatctaaa

SEQ ID NO: 20820 - DNA, 1532 bp, Heterodera glycines
taggacggatttttatatccatattttccatatttcgcgatttatgtccatatttccatatttgtccatattttggcatttttatccatattttggcatttttccaaaaaacctctattagaacggcccagtagataaattggcttttttgaccccgaaaaaccggaaaatttccgaaaaaatcattttttaataaaattttcccgaaaatattgaataaattttaattttcttaaaaatttttaaatttaggtcaaaaataagcaaaaaaaaagtaaaatttcgttttcgggttggtttttcgctaaaaatgaataaattttagctttacagtgttttttcttctaaaatgctttttaatagcatatttagccatttttgaaagttttactttaatttagcaagtatgaagaagttttgagaaattataccctaaattttgaaaaatttatttccatatttttgccattttatgtccatatttcgcgattttatatccatatttttttaacgaaacgtgaaattcataaaaaagcgaaattgcgaaacgctaaacgcgaaaacgaactccaaaatgtcacccgaaacggcagaacagtttatttttctgaaaaatctcttccccaaatgaagtacaattattcaaactttttattgttcatttttgttaaatttgttatataatttctacatacaattgttgaatttttttgggttttttcccaaattaacatgtgaaaattttaatttttaccaacccggaacccgggtatgaaaacccgggttgaccgggtttccgggttgaccaggttttaagaggccgggcccggaacccggttgcttctgaaaatatcagcccgccccggcccggcagatttggaaaatccgatctctaattttgagccattttctaagaaaaaataggagtttttgggggcccgcggtaccgataggcgcagcgggacccacctcctccattataaaaataaaagtgattttgtgatccgttaccaaaggggtgggggtataggttttagagtggaaaatttttttgatcaaaaatcgtcccaaaacatgtcattatgggttatttaagctgctgatcacgaatacgtaatcagattttacttctgacatcgttaagacctcagaatccctgtgtgattggggattctgaggttcatttggagggggggggggcgaagttcgaacccgggcggtgtacattattttctatgtatttttagcatattttcaatatttttaattaatataaatagtattattttattaataataaataatttttttaatttaaattctattattttaaggtgagtacatgttttaattacaaaagaaaatttttaattaaaaatttgaatttgtcaaaaattaatttcatttcaattaaattcatttcaatttcaataattgttcaataactatgtccacttcaaagtttatttttaataaataaatcactgttgtacctcttctaatcactgttgtacacaacaaaatttagacac

SEQ ID NO: 20821 - DNA, 1490 bp, Heterodera glycines
atcaaacccaaaaaatgaaaaatctaaaattttagttcctttttttttgttttctcctttttgtgctaatgcaatttacactccaccttcaccaccacattagccccaacacaacaacaataacaactgtctgttttggctggcctctttaatttcttgttttttgctttttgttttcgtcctccgatcatacgcattttttggcctatgcttcatcccccccccctacttcttcttttgttgtgtgggggtggatgagggtggatgagattgagattgggcttaggtgtggatgtgggtgttgatggttgatcaatacaaatcggataataaagagtgatcgaatggatgaatgaatgaactgactgatcaacagcatgaggagaaaaaatgggagaaaaatgggaaccgatcgtttcggattgtttataatgaactgctggctgatcagtagcactgaattcctagactgattgatcagcagaaggattagcaaattagtgagagtgaggcaattcttggagcaaatttatttgtttattgtgacaaaatttccagtgattaattaactttttattatttcgtaaatgaactatttccttttaattatgcgtatataataaatggatttactctaaaataataagttaaaagattactaaatattaatgctcttgggagcaactattagtcacaaaattgtgatctttgcaatttttatttatttttttataaaaattaatattttttaaataaaattaatataataaattaaaactaaaatttttatttggaaatggatgtttaatggttcaaacattaacacggcgattcaattttgggctccaagtacaattaagttggttttttcgtcttagtggtctgtgagttagtcaacaaaaaggggtctcaggttcaagtcctccttatgttgtgtgttaatttcaatttcttcttttaaagaaaaggaataattattttttcattataaaagttttcgtgtcaataaaaaattttattcaaaaaacgttggttacgtacagcatcgataattttgatgagatttatttagcttataactttgtaaataatagatcaaataaaaccattttatgctcattttgaagggaaaattctggagaatctgtcccagttaacctcatattttaagaaaataatttattagctgaaaaatgatagaaatttaattaaattttcactagggtcaaaaattttttcctatggtcagatttccttgaaattttgcataaacacatattttaacccaacctataggatgatgctttgttttttatcaaaatgctttttaactcgagatcggctcttccgtttttacaagggaaaatccccaaaaaaatttaagttttgcaaagttttggcgttctgaactaaataaataataaacttattgcactgggagcccctcaattgaatcgccgtgtaaacaaagtatttccaaagaaaaaata

SEQ ID NO: 20822 - DNA, 1977 bp, Heterodera glycines
tcattcttggtacaggcactcctggaacattttggcaacgatttttcgtcaagaatcatcgttttgtgtatgtacacataccaaacttcggaaattgaacgaaagctgagacactacggtgttcgtgcactcacagttgatgcctaccaggcacaggagtgcgatgtcatcatcatagtgacaacaagatccaagtattccgagatgggatccggaagaacggacaacatgcacttctttgaagacgatcaacgggctactgttgctctctcaagagcccgccacgctgtcttcatcattggagatttggtttcaataagtgcaggacaagtgtggaagcgcttcatcgaaatggcgataacaagaacaagcgtagtccgagccgagtatgttttggcacttttgggacgaacactcgtgaggtcgtcgacatgcctatttgattcggccaaaagagaatcggtggaggatgaaggctttcttgaaagttgggcattgaagcatgggttgcgcctggaccgaacgaatgcctttggacaacaacaatcacagcagccgcgagctccctcattccaattccagaatcgccactttcctgcactacagacgacagggccctcagatcaagccggtccatctggcagcggtggtcaacaaagaggtgcgcctactttggcaccacagtatggaagaggtcaaggaagacgtggcccggacaaccagtggatgcactacggcggaaacccgaaacgacagaagggtggcagacgctgaactcacatgacgtcctgcgggtctcacttctctccttttcttcaatcagcacggtatgtctttcggtcataatttttattattaattagttgggtaattttccttttttgacccctatcatttaagcactttattttctttcattttctctgcactcacaagcttttcgatttcacccctccttagcttccggtgttcgcaccatttacactgtgattccttgactgcaatggcagaaagtgggatgattctgaaaaggtggcacgcctcaaggcatgccttgatggtgaaccaagacgtatctttgataatttaatgcctgcccacaaagcaacttcttcggaagccattcaaaaaatcaaggaaaaccttgacactccacaaaataaagaactcacctatcaggcactaagcatgtgtaaacaaagggaaggagaatctgtagatgagtttagtgcacgactgattcctctaattgaggccaccacggcggaccttacaactaatgctagtgaggaggtactctgtcgagcatttttggaaaaattgaatccaaatctcaaatttctcactcgaaccctgagtgggcccgtcagaagggattttcaaatattgagaatgaatgcacgggaagcagaaatgatgcatagagagattcctaaatctattccagcacctcttttcccaatttcggaacaacaaaatccgagattcaacaacaccgagccgccgaaccacccggaaggcaactttagaacatgggctcccacaggctctaacagagagcctataagtcccagacagaggaaccggaacaattgggataacaatgcccaagcctcaagaggctcttttaacagatcaaataatcatcctcaaaatgacagaagatggaacaatcgcacttccagaaatgacagacgatggaataatcaaacccctcaaaatgaccgacgctggaatgctcggccagtttgcaactactgtgggaaggttggtcacctcgcgtttaaatgttttaaacgtcgtgacgaatttacccaaccatctaaaaaatttgaatttcatcagagcaattgatgaacaaacagaactgaaaacgatctatcacctaaagttaataagtttacctttaagaatgacccatcccctgagggcgcctctcaaaaaaaaaccccattcaaaaaatatctaaatctagta

SEQ ID NO: 20823 - DNA, 1374 bp, Heterodera glycines
ttaaaaatcaatttaagactagttggcgaaattagttggcgaaacgtcattttttggctgagttggcgaaattagttggagaaacgtcattttttggctgagttggcgaaatgaatgttggccagatgtcggttggcgagatgtaaagttggcaaaatatcagttggcgaaatgtccgattttggctgagttggcgaaatgaatgtttttggctgagttggcgaaatgacaagttggcgaaatgtcatggagccccttgtcgctcgccaaagaagtcaggcccgaagaatcgtcactcgcccgccggacgtggaggaggacgctctcagacgccgcgcaagaagaaacaaccgctgaagaaggtgccgggcccgagcagtcgcactcctggtcgacgcgtgaagaaaccgtcaacgaagaagtcgcctgctcgccgtgccactgagacgaagaagaagccaacccgcaagactgccggtggacgtgccaacaaacagacgaagtcgcgtgggcgcaaaacaaccaagaagacggaccaggaggaggagcgcgccgactccgaggcggaagctgcaggatctccgcgcaacagtggacgtgagttgaataggggtgtgggaatggcacaatttcaattgtttaatcctaatgaaattgaattttcagattccgaagagagtgcctcggggacgaagaacaaaccaactcgcaagagcgctgctgctggacgttccacgaaacagaaggcgtcgcgcggaggacgtgcgggcaacaagaaggcgcaggaagaacgctctgaatcgccaactgaatcgggctctgatcgcgaggaggatgaagaatgaatgagccagccggagaaaatgctgcttcacgagaccaccgcgataataacactaacccccatttaaaaaaagagaaattgtatctctatgtatgtatgtatatattgtatgtccatatccctgtggcattgtcttgctgaatgtaattctcccacaaatggttgttgttctatttaaatatgccatatatatgtgtatttttaataattgtaatatgtttgccctgtttatgcatgttttatggtcatttattctcattgctgaataaatacatttatatgaatgagtacattttccatgtcatcattagtaattcctctaagaaggtcaaaatcggttttcaaaaaattttatgtgctatatccataatcatttttttgggcttttacatacataacaattttaaaatcattatttaaatttacatggtttttcttttttccagctcggctgttgcttctcattttcatttgccacgtcatcattcgtgtctctcctttcgctctgttttcattcatttttccttctg

SEQ ID NO: 20824 - DNA, 1977 bp, Heterodera glycines
  unsure (1)..(1977): unsure at all n locations
aaaattctaaaatttagttgtcaatattattttcctccggtcgtgtgaactgcaatagagccacatcttttttgaaggggttaattcctttaaaaaattatgttattcacctctcagctttacaccatgacgacaaagaagaatttgatgcagtaaatgggaattttgtaagtgcaaatttgcgaaggattccggtgataagcaaagtcataatgtttccttaaacccaaaggttacaaaaaattaaattaattaatcattaattatggcggaattttatttacattgtattgcttaaaagcattatgaaagaagctcaaaaaacgcatttcatttgaacgtcaaaagctgcgtcaataaaaaaagaaaaaaaaacaattttttcggagtttttgaaaaaagaattttggcaattggcattattaatattcagaatgccaaatattttttgtgttttttcaaaaaatctgtggcaaaaaatatttagaaaacaagttttttgaagttttctggccataacttttttgaaacacaacgaaaaatttttgaaattttgtcttctaatagaggactattttggctataaaatgataccaagaatgtttaatctggatgattttataaaaagttatggtcgattaaaattgttaaattattttatggtcctgtgaactgcagtaaagccaaacgattcccattaagatttgcttgtttgaaaagataattcaagaaacaattatttattctggcatcaatcaattgtataatggcaaaagtgtgctaattgcagcaaaaatgaacaggcggtaaagaaatttaaaattaaccttaaaaatttttattttccaatttttacccatatttcagttggatttgtagcgacgtgtggatggacattcttccatcttttgaccgtccccaactcgggctcaaaatggcactgctttcttatcgtttcgatgcgctggtggacacgcattttgatggcaaaaggacggaattaacgctttggagaccaatcgcaatttgcaaagagaagaatattggactagaagcgagactgtgtgtatgtatcgatggcattttgtggaatttccgatgccggaccgtccgctgcgcaacaaaatcccgattaacgaccttcggatgnagtaatttctagggagtccaattatatggaaatccatatttttttcctggactgtgggaggcctgaaacgcatgaaaaacatgtttttagcttggtttgaagcttctaggaaggatttctatatccatattttccatatttcgcgatttatgtccatatttccatatttttccatattttggcattttggtccatattttatgtccatattttggcatttttcaaaaaaacctctattagaacggcccccagcagctaaattagcctttttgagcccaaaacccgaaaaatttttcaaaaaatcattttttcgccaaaatttctcgagaatattgaataaatttaaattttcttaaaaattaataaattatgtcaaaaataagcaaaaaagcgaaaatttcgcttttgttgttgattttgcgctaaaaaattaataaattttagcttttatgttttttttcttttaaaatgattgcacgtaattgccgaaaaaattcgagaccaatttccgagtgttgaccgactaattgcaaaacgaaagccttcaaaaaatttggaaatgtatctcatatgcaatttcaaccaataaatttgaagaaattttgcactcaattttgaaaaatttatttccatattttgacatttttgccatttatttccatattttgagatttttgccattttatgtccatattttgcgatttttggtccatatttttggactccctagtaatttcaattacatatttatttgtttatattaaagcatttttatttattttttcagctacattgaccattccgtcattaaatttctccgtccaaca

SEQ ID NO: 20825 - DNA, 1139 bp, Heterodera glycines
tgacaaatccaagaacttaaaactcgggtagaagcatgggggctcggtgggccggggggcctaaaattcgggccacattcggagaattaattctcgatttccgaaaaagtcccagaaataactcttttttctttccatacgttcttgtagagctcgagctgctctttccaatggtcttatcccggtctcgatccgtgccgaactcacaaagttatcggagtgaaatgtgaaatattgttttcaccacaaggcattttttctcgaaaaccggattcaaaaatctggggtttggtataaccgttttagaaatagcgtagaaaacagcttcgatatcaagaaaccaagtcaagtccagaaaggaatattttaaaacgatttcgttttgttttggcattatgataccgaataactttcggaaattatggaaacaaaattggagaaattcgaataattttttgactgcaaatttttttccttttttgaattgggttcaaaaaaattttaagagaatttttgattattaatttgaagtcttgaatttatttgacaaatccaagacttaaaactgggagaagcaaggggctgtggctgggggcctaaaatttgggccacattggagaattaattctgatttctgaaaaagtcccagaaataactattttttctttccataccttcttgtagagctcgagctgctctttccaatggtcttatcccggtctcgatccgtgccgaactcacaaagttatggagtgaaatgtgaaatattgttttcaccacaaggcattttttctgaaaaccggattcaaaaatctggggtttggtataaccgtttttagcgtagaaaacagcttcgatatcaagaaatcaagtcaagtccagaaaggaatattttaaaacgatttcgttttgttttggcattatgataccgaataactttcggaaattatggaaacaaaattggagaaattcgaataattttttgactgcaaatttttttccttttttgaattgggttcaaaaaaattttaagagaatttttgattattaatttgaagtctagaatttatttgacaaatccaagacttaaaactgggctgtggggggggctgtggctgggggcctaaaatagggccaca

SEQ ID NO: 20826 - DNA, 2089 bp, Heterodera glycines
aattacttgtttatatctgtttttaataacccttcaattttaacaggcatatggcattgaactactttttttcaacgatttgaacgaattttccaatggctaatgagcaaataaaattaatatattaataataataaataatttgagaataaagtgtttggtgacaaaattaattgattcatattctgttacgcactcataataataataatgtttttttttatatttgccctttatattttattctgatataaaatattgcgtatttttcttttttataaagctaaaattaattccgactttcaagtattcattaaatatagagaaaatttttttagcgcaattagtgtccatatcccgtgaaatcccatgtttttagcctgtacattgcagatttgtgaactgcgaatttcagctccctcatcttttaattttttaaatattgactaaaaaattctaaagaaatcgtttaaaaaacttctttacctacaatctttaaaacttgagtatttgcttccccggtatcgcattgcataatttttaagaatacttatttcgccagtgcatgttattactagggcttatatttctagttgcaaaaaactgcaaaatagttagtttttagtttctaaaagacccaaaaaagtagttgctaaaaatgggtaaatagttgctaaaaacattcaaatttagggatgtaaaatgacaaaatttattcaaaaagtaaaaaaaattaggccaaatcagtattgagctaaatatttttaaaatcataaattcttgtcaagaaataattaataaataaataaatattggagattgatttttcatttgttagggtgcatttttgaaaaatttcgggtcgattcttaggggggtgtatttttcgctttttattgcatttttcataacaaatttttattcacaagtaaaaatagttgaaaatagtttttttcaaaaattttatagttttttagttgctaaaataaaaaactagaaatagttgctaataacaaaattttatttaaattaaaaaagtaaaacgcctttgggaaaaaagaatgtagacaattatagttagaaattttatttaaataattaattatgtaaatttacaaactgataatctgctggtatgataatgccttttggttataattaaattaaaaaattatattaaataataaaaaaatttttaatttatatagcgcaaaacttcttcggcagacctttcccattaaaaaaaattgttttttttttgaaataatatggaaaactgatggtaggaaaaataaagtgtttgcccaaatcaaagtccactaagtttttctgtttataattttataaattgttgattttttggctctattccaatttacacgtccaatcagtgactatcctcacttttataggtcatacctttttttattacttggtcaatacaaacattcttggtatcattcgagagcttgaagtctacagaagtttttctgttgcaaaattatgagataatggcaatagacaaacaattattcgtgattatacgcgtaaaatgatgcatttccggttttctcattgcagtatttgctcttttcttgtatttataaattccctaatctttaagctttcgaatgataccaagaatgtttgtattaaccaagtataaaaaagttatgatctaaaaaagtgagggtggtcactagagaccggaaatttcaaatttgcggattccgctgcaggactggaactcaaaattttttgcgggacgggatcccgcgggattaatcccgcaaatcccgcatttaaaatttgcgggatcccgtgcgggattgcgggattttggaaaattcgaaaaaatttcaattaaattcaaaaaatttccaaaaatcaaaaaatgctgaaaaataaatttttaggggctggcgggatgcattaaaaggggctgatgggtcgactaagatttttcgattggatccgacggtaaaaagttgatcggaaatcaaattattaacggttcataaatttgactatttttttcttttcaaaaccacttttttacggtgcaagaaatcggaaatttttcaaaaaa

SEQ ID NO: 20827 - DNA, 937 bp, Heterodera glycines
  unsure (1)..(937): unsure at all n locations
tgtttgccatgacattacaaattgttgcacatattgaggaaattaaaaatatttttgttgggcattttcgcgtaaaatattaattagtctaaatggaatttttgatgcacaaataaatgtcagattaaaaaaaagtaaaataacaaatgtaaagatgttttaaattaattagattccaacgaaaatgtttttctattttcgaatttaattaaatattaaaaattaaaaatttcttttttatacatgttttaaatgaaaagccatttttaattaattgagatattttatctaaatttaaaaattgtgacaatagttttcgagtaaaacccttttccgtcatttcaactttgcttaaaaagaatagttgcaaaaaagggtcttttttacaaaaataagggcaggacaactaactaaaaccaaattcatttcataaaattaaaaaaaggtggacataaaattatttggcaatgtttatcattggcgccggtcattgggcaaataattcaaaaaatgccatggaaattccttcctgcactgcataaataaaccgattaaagtacatctgccattttcgtggcattgtgggaatcatcgagaaaaatctcgagaagaaacatacatcagctaaaataaggctttggcacaaaatgcacagagattaaaaccacagcgaaaatgtgccaaattaaatatctttggcattctctgtgaaattttcagtacattttcaatgcttaaaaaagtgcgtgctcaatctgttgaaacttgaataattatataaagtgaaatatgtataagcactaattgtaagaaactttttgaagaaaaactcaaaataaaatattnttaaagattaaagttcaattaaaaacaacaaaaatttcatatttttcatttaaanntagcaaccgcattcagaaattggactttcattttt

SEQ ID NO: 20828 - DNA, 1111 bp, Heterodera glycines
gtaaaaaaaaataataaaatatttgtatggcttttgttttttttccttataaaattgcaaatatacgaaaatggcacaaaacaaatattaaatttgactttttaaaattgtaattttatcttcttcatccatggtggaggacaattttttaatttttttcagtattttaaaattcaaagaaatttattcgagaattatttaaaaaaaattgtataggttgattaaaattttttttttgttttttcctaattaatttaatttcaaaagtatgaaaaatggcaaaataaatgcaaatatttcaaatttggaccttttaattctgtgattcaatcttcttcatccaacgaatacagaagcaaaccaacaatgtttacatatgaaattggaattttaagtggcttattcgaaaaagcgaatctcataattaattccgtcatgaaattcttgcgaaaaaaaaatcgaacaaaaatttggctaaattcttttccttcaaaaatatttaaattgcaaatttattttctaaaaataattattattattatttaaaatatactaattatatttgcaaaatgcttatttagccgattagtataaattatcaaatttgacaatgttataggcagatttagaaactttagaactaggcaaaaaaaattgccatcgccttggtgttgagaaaaaataagtttttttaagttttgaaaaattagcgcattttggctggcgcctggtgcctggcgcagaaagttagcgcctgggcgccgctggcgcaaagaaaaaactgaaatttctcttctagttgaaattttaaaaaaatgcaaaaatgaaaaaaactatatattaactgttgcagttgaaaattaagtatattttaagcatttccgaggtaaagaaagcacagattattttcgacattatttgtgaaagcccaaaacattttttgaatgcttaaacgaattatatttcggctaaaaaaagtttgtgcatttttcatcaaaataaagctgcacaaaaaaaatatttaaataaataaaaatcccaacccaaaatacaagtaatgacaagctaaaaaggaaaaattcttctttcatttatttcaatattttccaat

SEQ ID NO: 20829 - DNA, 1372 bp, Heterodera glycines
ccccgattttcattttgaaacaagtcgttaccatgctggttcagcagtgcgtcgaattgttgctcatctcgcggtccgttctgaactccagcagcattttctccaattccagacatgagcaggcgtcggcgaatttcagttgggtccaaaagtgatgaagcaactgaagagacagaattatggcgagcctcgttttccaaacgtcggtctgctaggtgctgtggttctacaatttgttgccccccctgctggtttgcgttgttatttagacgaatgccgaggttgagtgctctttgacgagtaagcggaggcgaccgaagattaggcattacttcgcccttttccacaaaatttcacttgtcgaattcggtgagaagaaaactgatgaatttcacaaaatttccgttctgtagaagatgaaatgtcgatgggaattactttaccctttttgtcgaatcagctttgtagacggaattactttaccgagctgacaaatcgttggtgaatttcttttcacttttttgtcgccgcagtagttgaagactttgtagaatttcctacttctacaattccccgtataaaacccgcgtcgaccacacctttttgcaggagcgccacgtacaaataatttaattttactcagcagcacgtcgaacagttcagcacttgcacacaattaaagcacacagaataaagccttattattttatgtcaggcaattccaaattaaagtctgaggacaaaaaacgaaaacaaaaacgaaatcacaaacattaaaacaaaatgccaaaaatatcataaaatcaaaaataaaatgaggtcattattaattacgacaactcaacccaccagcatttcaatctctgggactcaaatctccggcattccaaacaatgggactcaaatctccggcattccaaacactgggactcaacccaccagcatttcaatctctgagactcaattctcatgctttccaatcgctgggactcaattctcaggctttccaatcgtgggactcaacccatcagtatttcaatctctgagactcaaatctccggcattccaaacactgggactcaacccaccaactttcaatgacattccaatctctgggactcaacccaccagcatttcaatctctgagactcaattctcaggctttccaatcgctgggactcaattctcaggctttccaatcgtgggactcaacccatcagtatttcaatctctgagactcaaatctccggcattccaaacactgggactcaacccaccaactttcaatgacattccaatctctgggactcaacccaccagcatttcaatctctgagactcaattctcaggctttccaatcgctgggactcaa

SEQ ID NO: 20830 - DNA, 1905 bp, Heterodera glycines
cttctttgtaaattcggctgtcgctactcacaaacataaaatttcaaacctaattacaataatattcatttaatttccatcaccactttttccatagcattagcagcacgctcatcttctcattttgatgacggccgacaaagattaaaagagatcagcggctccggcagagattaggcaaatcttctgacaccgccgaccccaaccattgcaatttcaaataattgtgtaatttttgcttttgccaaaggccacatattagtgtcttcactcattcattcggccattttcatttaatttttgtcagtcccaactgacagctgctggcgaattgggcatgccaaatgcattggcttcgaattcccccccccccccccgggggatggccaatgtaaagacggcgttgtccattccctcccctcactttagcagtgtttcattgtgagtttatcattcccttttaagcccttcagaaaagggtcactctcccgcagaattcgtcattctcattcatttattattcgtaaaatcccatcaaaaccatcaatatttctaaggttaattaaacacaccgtccgaaaaaacgagatgtgtaccaataaatagagagtgccacagaaaaacattatctttttttctctaattttttgtctccttttggcgtactatctaatatttttattattaggaaaaacaacatttacttcgctatgtttagcttcttttctatatgttagatccacaggaaattttgcatatcgttagagaaaaaaattctgcatcgattaatgctgaatttatttttgttaatgctctatttcaaaagttataagaaaaacaaaattttaaagcctcatagcttttctctggtacaccaaatcgcttagcatttgcttagaaaaagcttctcattatcaagagctttcgaaagataccaagattatccaatttggttggcaaaaaccttcaaaaataattcccaaatatcgtgattttttaatattttggacaaaaataaatgaaaatattcatgttgcacaacggactcgaaccaccaccctttgtccctttactatcttacaaaaaccactgagccacacatgcaaatcttttctggcacaggagctcatttcccggacgctgtgtttaataaaccctccaaattaatgaaaatcaactatcaaattgagatgaatctgacgaatgcggggagtttgaagaagaatacaacggaagttctgatgccgttttttgctcggacgaagcacaaaatgcagaaacacaaatcaagcagcaaaacccgatcgaaaaaattcacaatatgtgtcaaacttatttttctttcgtacaataaaacaaaagctaatttcaacgattaaaatcaagggcgtatctagggggagggggggggggaaataaaacagccaaaattggagcaattgtcatggaaaaacaataaaaaaatgcaagtttgtgtccagcagcggcaaaaaatgaattattactgggtgaagagcaaaaaaaaaaagcccacccccgaaaattttttctagatacgccactgattaaaatacaatagcagtgactccattaaatttgacaattaattgcaaaattcggaggaaggaattcacttggcaaaagccagcaaatatttctgtttgaggggttgctaagcaaccgaggccgaattcggtattattcagtctaacaaagcaaatatttttttaaatggaagaattgacgcataaacgaaacggaaattgtttcttattaatggtaacgggtcaaatagaaacagtcgaggtgcttattcttggtttattatgaaaaacagaaatttagtgtatttcattctcaaatgttttacggcagtatttttacgtttatggacccgattggagc

SEQ ID NO: 20831 - DNA, 2849 bp, Heterodera glycines
caaaggcttaaaatttatgagtcaaacgcaaaaaaaaaaaaaaaaactgaataatatcagcccatgcttttatatttatttaggcaaatttttgccaacaacagcaacaacactttccaaatccacgcgattcgtcaacaccaaaatcaaacagcaacggatcatcaccatcatcaatcacatccaataaaccattttcatcatcaaattgtcttggaaataaaagtattgaaaatatgaatgacatttgattattttaattgagtttaaattaattataaaaaacaaaaccatgagaaagcattaaatttttaaaaattcaactcacaaaatattttattaaaaaacaattttgttccaaatgaattaaaagaattttgagaaaaaattaataatttaattataatttaaataacaataacactccttggatgtgaagccaatttttcaattttgaaaatctcattgatgccttaaaaagcttaataaaaaagcctcattataggtcataaaaaattttattttcggcacataaatttgggattacatataagaaatatgttattttttaagcagatcgccatcataaaacttaaaataacttattttaataaacacacatttattacagtatacagcacacagtcgtccagtaatactgtggtggccaacggtagtggtgccaaccgttcaacagcgactacagcggcatttgtcgccgaagatagttgttgcaaccaaatgcgcggcgagttggtcgcgcgcaactcggtcgccgagcgagcggagaaggcgtccagcgtttatgagaatgtggcgaccggcgagcgtcgtgaagctgctaaaccagcagctccacgagaagctaattatgatgctaatgatggtgctaatgaccataattatgagcagcagcagcaacatggcccgccacaaaatgaccagggcggtgaacggagggaaggcccaaagggggagatttggtacgaatttggatgcgtctgatcagtgatcggggggcatttttttacaatatgaatcgaatatttgaatttttgtattgtacggtaattttcaaccttgcttttaatttgaaacatttttcgacagcaaaaatcttaatgtgaatttaaattttttgataaatgcctttttccattgttgaaatttgaataatttaaataaaaataaatattaaatttttgaaaaaaaagaaacaaattcaattaccgatttacggataaataattatttttttatcactcattagcaccagtaataattagggagcgcgaaatagcgcattaaataggcacaaaaaatcgccaaataggcacctaaaaggcagaaaaataggcaaataaaaattttaattaacgttttttaggtagcaaaacacataaaaacttccttaatttttttttttgataatatttcatttgtaaatgaaaattattaaatgttttaaattatttagaataaggacaaattttcaaaacaaaaattcttgtaagaaaaaaaaataaataaatttataaatttttaagcaaaaataggcattagaaaagtcatcgtagacacccccaaaccaagctgaaaaagcgtttttcgtgcttctcagtgcgtattaattgcgcagaaaatttaggcatttgcccaaaaaaaggaatcccaatataataattatatgttacaaaactgtaatgtttattaaacattaattggtgaaatttttgaaatacttatagttccataaaaataattttatttatttatttaatcttcggtcatttttggcaaaattgttccaattttcttagtttcatccatttaatttcgcattacatattctttcccaaattgtttcttccaatatgcaattgttctactagtaattttcatcatttttccaatttccttgtcactcattttcggcttttctccttttatttgccaatacattttcattttctccgttttttctttttccattgttatttttcggctaattccaaattgattcttccattttttaattatgaaaaggccaactccgattttcttacaaatttcttcataatttttgttccattcttttttcgaatatgttcttcctttttccttaaattcatttttcatttcaatgaatttcagtataatttcgagtttttcttcgtcagtttttgatttgtaaaaattcttttgatttaatcccaattctttgatccattcataaatatatcggcgatttgtgcccaatttttttgctatttttctttcaattttttcccattctctttttgaatattttcttcctttttgcttaattttctcttttattttataaaattttccaattatttctctttttttctgttcttcgttttttttttcttcccatttttctccaaatatttcgtcaaatgattttttttccaattttttcttttctgatccaacataattaatactaattaagatgattatcaaaaacacaaataatgaagaagttaataagcatcctttcatttttatgcaatgactcagtctaaaaaagatttatgtagaaaatatttcaaaatctctgcaattgaaattatttattttctggatttttaataataattatttcgtgaaaaatattacaaattttgtaattattatgcgaagttttatagatttatttaatgtataaataaaattcttaaaaatcttatgacaaaacttagcaaatcgttcatttcctgtgattggctattttaaaataaggaattttatgaaaattcaactcagatttcatgcttttagataaattatgaaaaaacattacatctttaatgttttggatg

SEQ ID NO: 20832 - DNA, 1376 bp, Heterodera glycines
tttagcactttgcctcgaaccctttgacgaacatttgctcgacgaatgcgacggaaatggcaattggcgacggcacttttactttgatcgttcccagagggtaattaaaagatgactaatggattatctgtgccttccattagcgttgtttgcctttttggttcgatggctgtgcttccccctgcggcaatcatttcgaggatgaaatttcttgcaagaaaacatgtgggagtgtctcagctgaaaatgtcgaaattctttaccaaacatacgggaccaaacaaacaaattttgtgccggcatggcgtctgatcagcacgactttaagggcaccgattgggacaaatgagggcaaaaaaatcggtgggaaattattaatggtcagttattggaattagcatatgtttgcaaaagtttgttatcagtaaaaaatttgcattcactgtcgtaatgtccactgtccaaatgtccacttctgtccaaatgacttcactgtccaaatgtccactgtccaaatgtccactgtcgtaatgtccactgtccaaatgtccactgtccaaaagaccgcgagcctttaattaatatcattcaataggcctaaatgttctctattcgaaaattttcgtcaagtttcaaaaatattatggacaaaaaacttcaaaaaagcggttttccgaatatttttgtgcataacttttttgaaacttgaccaaaattttcggaatttagcatgctaatagagaacatttagacctattgaatgatattaaatacattcagttcggtcaactatgaaaggagttgtgcctcaaaaagcagggtggcgcccaactggtcggcgcccaatcgacccccaccgttaattaattgagcaagggactaattcaattaattaattgaccataaaaagcatgggacagtatcgggcctaaattaatttctaattcaaggaaatcctcaaatcacttatcaaaagatgaaaaatggtgataattgagcctacaaatttctgtgatcaaaaatctcaaaacagtttgctaaaatactgaaaaaaatgaaaataatttttaaaagatgtgaaaaagtccgaaacagatgtgtcaaaatgttgcgccaaaaagcaactaaataatcaaaagtttctttcttaataaatgtttattgttggtccatttaattaattaccaaattcaaaattaccatatttattgaattagaagcccccccccccccggagggctcttaccggcttttttgccaattagaaaaatcaatatttctttgggtagctttcgataattggcggtaaatgaatggttaattttaacggtatttacgacaaattactacggtaaacgatcctactgtatttgtta

SEQ ID NO: 20833 - DNA, 1720 bp, Heterodera glycines
  unsure (1)..(1720): unsure at all n locations
ccaaaggtatgtcagaaattaagttttttgtccgatccgttttagtgggacaccgataaaaattccgccggattttttttcaaacgaaaatttcaaatcccgaaaataattttttttttttttgttctccttctaaatgacttattcctaattcaacgataaaagattgttcaagactgatttttgtctgtccaaccgcttttttaatgaggagtttacggggttagaattttccttaaaaatttacgcattttttccttcgagtggaaactaactgtctcaacttaggagttttccactataatatcccgtatcaccggccatatgcttattcatttcacgtccatttcagcatgatccgttcaaagaattgatggcccaagcgacacaaaacgatgccaccgcggtggagcggctcattgagcagacggacgaagtcgccagcgcccgggagcagcagcggcaacggcacaaagcggcggtggcagcgcgaaaagcggcggcggcacccgaggcggaggtgggcgtcagtgccggaagggaactgacgtacgcggcggcggcacgtgagcggttggcacgccaacagcaggaggaacagaaggagaagcagaagcggttgagcgccaccggatatcggtgggctttctttcacttacaaatacatttttgggggtttacgggaggtaatttaggtaggaatattttggatttcattgtccaacaaatgaaaattttgtgaccaacctacggtaaaatgaaaagtgaacccatttttatggggcaaaattttataatttatgttcttttctggtttaaatgctacgaatttgtcccttcgaataccccaaaattaatttttcccgaaatttccgagttggaattgagatgttcgtttttttctctcattttttgcttcaaataccaaatttttgcacagggttcttccatcgcaagggtcggcggacccaacaccgaagccgcaacaaaaatcatcatcaaaatcatcagtgaatgtcggcggtgccggaggcggaagtggtcaaacaaaagttgcaaaaattggacacaaccaaacacaacaacaggaacagagggagaggggagcccatcagcagcagcagttgaggtgcaaatatttgaggggaaaaagtcaaaaaattcaatttaaaatcgaaattctgacacttttgcattcattttgaggaaaaaaatagttaatcccgatttagcatacttacattagaattttctattgttggccacagttgttttttgttcgagtccgaattaatttaattttttgttttaaattaattaaaatttcaattttttacacaaacattgtaaatgtgttgcaatttagtcgtcatacaaatgggaaattgtcatcagtggcatcacaacaaaggcagcaacaacagcaacaaaagatgttgccaccgccaccaccaccatcaaatgccaacagcaacaaaatgcccaccggggacaacacaattacaaagagcagcaacaccaaaatgccaacaactgcaacaaatgccaaaaagtcggcggtgccaaaagagcccaaacagcagcagcagcaaagtcagccggcgccagcggctcaacagcaacaaccgcnaaagcgctatttgcccggngacattcgctacaagggacaagcaacaacagcagcagcagcaaacacaaacgccaacagcagcggcgaatc

SEQ ID NO: 20834 - DNA, 1345 bp, Heterodera glycines
caaacgcgaggcacagctccgacgggagatggcattggcacagcgtcataacaggtgggtgctgtggctgctgggttgggtttgtgcattgtgacaaggagcataattttccttaaaaattaatttgtttttattggaaaattctaggaaatttctaaaaaaatgaaaaattgttactcactcccgtcaaagattcactagcaattttttttaaaattaaattttattatttttgacgatgcttttccagagatcgtccgtcgtcgtcgtctcgtaataaatatgccaactacagtgaaacggacgaagacgatgaggaggatgaggacggcggacgttatgatgaggacgaggaatatgacagtgacttggccgacttcattgacgacagcatggtggacgacatgcagagggaggactttgaggagacactcaagtgggggcaagcccaaccatttgtggaatttaccaaaacataaaaatttagcggatttaacaaaaaaaataatcaacgattactttgctttgtgcctaggcaaaaactaagcgggattttttaatttttgccgtttttacctttttataacccctaacaaataaatgttgcaaatgttccaggatcatcaacccgcgctacaacaaggagaaatggttggcccgcgagcggatgattgacgaccgtcgcatggacgcgcgcttccgcgacgtggaggcggaggagcggcactcgtcacggcttggccttgtcgaggacttgcgggaggccaagcggggcagcaaagcgctcggctaacgcactcactgactgactgttgctgcttgtgtggatttggcacaacgaaagattgcgggcacaattcgaaccaaaatttaggcccatttgtttgacattgtaattttacgttttccccaatgtgcctgctcttctgctgctggtgattgttgccactggtggcaattagattgtgatacgttgttgttttttttgttgcccttttttcttcatccaatttgtttgtacccatcctccattttttttttttggtggtggtgttgggctccgttccgtgtgtttttttatgcgatgtgatacagtcaattcctacttttttcattgatcatttgttatataaaacattttattgtctaatcatagcaattttctttcatataaaaatgtcaaagtgatgatgctgatgtagttgattaattacaatgactaattactggtttaaataattaccgtatttccgcgattataagccccggggcttctattgttcaacccccctccaaagggggcttatattcgagggggggggcgtataatcgagtaaatacggta

SEQ ID NO: 20835 - DNA, 1798 bp, Heterodera glycines
tttgaaaaaattaattatttgcttagaagcatctaaaaatatctaataaataataataatgtgtttttaaatttatttaatctgtttttgaaaacgtgaaaaaacatcggtcacttgaaataataaattctaaaattttgtccaggaaaatccaggtttttcgtgttttgcctggacctggacctggatttttttcacatttgacctggacctggattttctggacaaaaatccaggaaaatcccctggacctggatccaggaaaaatccaggcctggatccaggtccaggtcaaactctactaaaaacatttgtgaaataccttttacttggttaagaattaaaaaatttagcctattaaaatatttagaaatttttttattatattgtatattttttgaaaactttccgatttcttgcaccgcaaaaaagtggttttgaagaaaaaaatagtcaaatttatgaaccgttaataatttgatttccgatcaactttttaccgtcggatccaatcgaaaaatcttagtcgacccatcagccccttttaatccatcccgccagcccctaaaaatttatttttcagcattttttgatttttggaaattttttgaattaaattgaaattttttcgaattttccaaaattccgcaatcccgcacgggatcccgcaaattttaaatgagggatttgcgggattaatcccgcgggatcccgatccgcaaaaaattttgagttccagtcccgcagcgggatccgcaaatttgaaatttccggtctctattagtcactactcttttttcaccattctctgtgcaaaattgctcctcctccgcaattgtcatggcataaattgcttttctaccacgcatttatctcctatagaaacccttcgcttttgtcatttcttcagacttaaattggttgataaattctctctttaatattcactgatttctgctctccttcccccaccctctcgagccattcgccactgccctctgccccgagcctccccggactcaacaagtggtgccgctaacaaatctaaagatgtcttcagctcgatgccggatggctttggggcccgcgctcccgacttcggcaacatgtcacagcggccgaaaattttcttgacgaggccgtgaagagatagaatacttaagccataaaataatagtaataatgttaagtttattgtctttcaattatttttttttaaattttattactagagcccggatttttttatggttttaaaaatttttctgctgcttagtcatgactagggagtccaaaaatatggatataaaatcgcgaaatatggccataaaatatggaccaaaaatcgcaaaatatggacataaaatggcaaaaatctcaaaatatggaaataaatggcaaaaatgtcaaaatatggacataaatttttcaaaattgagtgcaaaatttcttcaaatttattggttgaaattgcatatgagatacatttccaaattttttgactcggtaaggcgctttgacaaagacggctttcgttttgcaattagtcggtcaacattcggaaattggtctcgaattttttcggcaattacgtgcaatcattttaaaagaaaaaaaacataaaagctaaaatttattaatttttttagcgcaaaatcaacaacaaaagcgaaattttcgcttttttgcttatttttgacataaatttattaatttttaagaaaatttaaatttattcaatattctcgagaaattttggcgaaaaaatgattttttgaaaaattttttcgggttttgg

SEQ ID NO: 20836 - DNA, 412 bp, Heterodera glycines
  unsure (1)..(412): unsure at all n locations
ttcctttgttatccgagcagaaaatagtccaatatcctccagttacaattggaaataaattttaaaaaattgaaccgtggaaggtcggaagaaaaagtgggaaaaaacagacagaaaattataatgaatgaatggaatgagngntggtcacaactttggggaggaattttgtctgacacaaataatgggagtaaaatatgaaagcataaaatattaaatttaaccgaaatttaatctacaacagtcaggtgcaaaagtatggaagcaaaacattaattttatgtggtgaagaaacggttataatcgatttttaattgacgataatttatttagaagaattttgaatatcatgcaaagtatataccaagggcgtaggcaggggggggggagggggacggaacgggccaactcc

SEQ ID NO: 20837 - DNA, 1527 bp, Heterodera glycines
atcaattttttgctcagattttagggaataattttcgaaaaattaataataaatatttattttttaaaagatgattctacactttgtttgaagcttttaacttgcaatttttgtgctttttttttacttttttacactttttgtgctttttatgactttttggcgttttatgatttttcgtgacttttttcactttttacggcaagatttgcctttgagcgaagaaaaattctgaaaaaaaaatttatcttcgagtaggtaccgaaatttccgataccgctagggctcaaatggcgagtcaaagtcaactttttggggatttttcctgacttaaattcccatacctaaccatcagcatatgattttttcagcaaaaaaaaaatatatttcttcatgattttttggtcatttattaaatttcgcctataggcgtttcttacttaatttgccgttatttttaaaatatgaaaatgtttaatgtaatgcaatatttttgcctccagtagcagaacgacggcgtaacaactcatatacaatgagcaaaaatgaagaatgtaaaatttgagaaatttttcgttttattttaaacgaaataaaaaatttttaatttttcagtctcaactaaatgcattttatagaatttcaaattatgctttttgttcaaagtttcaacacccaaatttatcacaaatattggtctttccttttgtattttcctttgctttttctttcaacttttctttaattgcatcaaattttcgccagggcatgcttctaaaaatttaaatcacgctttaatttaaataaaaatgaatagatcaataaaatggtttccattttttgtcgttgttaaaaattttgcttccatatccttttgttcttgccccgtcccgaatcgttcgctcccatatccctaatgggtaatgaggctgcaaattcaaaaaaaaataaatctccaaaaagtcacaaaaaatgtaaaaaaagtcatgaaaaaatagccaaaaagtcacaaaaaagtcataaaaaacgccaaaaagtcacgaaaaatgtaaaaaagtcatgtaaaaatagccaaaaagtcaaaaaaaacaaaaacaaaaaaaaacacaacaaaaaaaaaaattcctgaaaaattaggcaaaagtttaaaaaatcccattttttaactatttattgcattttttagtgctttttttttgcctttttcataactttttggttattttttattgacttttttacattacatttattttcggatttttcttcgctaaaattcaaattttgccttaaaaagccaaaaaagtcacgaaaaacgtcaaaaaggtgcaaaaaagtcataaaactccgaaaaagtataaaaaaaagtcaaaataagtcataaaaaatgcatgttagaagctgcaaacaaagtgtagaacactttttaagtcatttaaagtcagcatttgacttaaattcccagccctactcattaatatatatataaaaaatttaatcatgctataaattttaaaattaaaataa

SEQ ID NO: 20838 - DNA, 1908 bp, Heterodera glycines
gggggggggtgaggatgatcactttggccagtcgcacccaattacgcttatctataagggaggaaatggtcttgcctggttcatgtcccactgttctggccgattccccgcgtgaattgcttttgtggcaaaggcaattggcctccgccggtccaatgaatcatttggtgtattttgtgtcaaaatttggtcattttcctcgtccattagttgttttttgtgcgggggactgtggccaatgaattggtcggtgtcgtccatggaatgcgctgaacgttttttggaagacgaaagagtggcgggacggagagagtcgacgagcattttgagggtggggaggagcagaaataaattggcgttttggaaggaaattgggcaaatttaaaaatgaaaaatattttaggaaaagcgatgaaatgctaaattaaaaaaagagagattaaatgatcaaaaaaggaggacaaattgaaaataattcagaaggaaaaatgttgtcatcacccaatgaatttgtcacttaaatactctccgcttttattttattttattttagagtttgtgttttgtgcttttccctcgggggaaaataaaagtggcggcgaatggaaggaaagaacaaaagacaaaaacgaaaagagaacttttgttctattttgtgttgaatttgtcgaagtaaaatttaaaaagaacttatgatataatttattttaaaaacgcataaaatagaaagtgattttgagtttaataataataacccctttttaattcatttaatttgttaatcccaaaatgaaaattattggtgctttaccgcttttataggagagactcacaaaatgaatgatgcaacaatagaacaattttcttcattattttccaatggggggagggggggggggcggaatgacgcaatcggacggagacattcgatcattgggaagagcgagcgaaggaagaaaggaaaagccgaaaaatgagcaaaagcaacccaaaaaacaaaagtgaaaattaaattattattattattattattcatttaaaggattaattaaagcatttcagtctattaaaaaaactaaagaaaatagttttatcaaaagaaactgaacaaatatttgagaaagcctttatttcttttcatattttaaaaataaaattgtcaaaaatgttttgctttgtcatttttaataattaattaattattgcgtaaataattgatcggtgatataaggtcgtagagccataatctttttatcctttaatttattttcttctctccctttttcttctctcatcattgtttgggcttcttcccgcaacatgcccacacgtaatttttgtcgcaacaattgctggccgcgtagccttccgactttacacatttggcccaacttttgccatccctaaaaagggaagtgaagtgccatcgtcgtcgtcctttttgccaaatcagccttgacccacccccccccccctcccccatttccatgccaaatcatttttagcgcaattgcccactttttcgactcacttgcatttgcaatttgccgctgttttgcatgcttgtttgccgatccaatcccaaggccatccgcgtttatcacgtacagccctttcgactccgaagccatcggtggaaggaaaagcgatgaaaaggaacaacagtaggaaaagggagagggacacaaagggtacggtaggacgaagaagcattactgtggaactgtgtgaaaagaggaaaaataacagaaaataaaatttatttggaattttcaatgggaaaaagaaaaatgtgaggggatttattttgtttcttggtgaaataaattgtggatttgcagcactctgatttttatacggcggatttggtcggcgattggtgcggcggcgttccccccgccccccccc

SEQ ID NO: 20839 - DNA, 2183 bp, Heterodera glycines
aaaaagggaaaagcaaaaggaaaagccgaaaaaagacggcaataaccagaaaagtaaagccaaaaactgatcaaacaattacgaccaatacccagggctccaatttttgtgccaaatcccttaaatagggagggccaaaaattaaggatatatttagaaaaacaattttttgtgcaattccaaatgaaacccgttttttataaaattgttcaaaaagtattatcagttttgataaattcttatccaatcaattccaaaaatttgttttcctccctgcaaaggaagtaattttttgccaactttatattttgatattaactataggcttaaaattatgtggacataagcaatggctcaaaagttttaaaaacaaaattgcaaaaaattgtcataaatttttttttcaaattcataaaatgctaaataaaacaatgtttaaaatagtaaatttctttgaaaatctgatttaaaaattggattttcatttaagattctcaatgcttccatggattaagaaaaaaacgcattcataatttacatccatattgtaacattagaaagtatttgacgttttgtcagggttttacttgaaaaaggcaagattaagacccgggaaaatcccgaagtgaccccgggtcgcgcaagggctttgctgattagaacacaaaaacactgtaatcccatcatcattaattcactaattgtattttgccaatttgttcccattctctcattcattttgcatttcgaccatcaaaactagggttgcgtccccgacgtcggggttggaaaattcggggttcggggttgtcggggttagaagtgtcggggttcggggtcggggttgccaaatcgtcggggttcggggtcggggtcggggtttttcaatttttgccttatgccaaatagtcaaaaattttttaatattttttcggaaataatatttattaatttccataataatatttgtattgtttttatatttttttatttcttttttatcagaaattttgtatggaattaatttttttttcttgaaattttaaaattttttattacttttttgttttccaaaacatcttttttcacgtcgctcttttctaaagacttaaggagaaagggtacggcgtccggcgtccggcggtgccgataggcgccgccgggaaaattttgaaaatttggttagatctgttaacagattttgtccaaaatatgctaaatttttgcgattttgagccaatttttttaataaggtttatgactttttgggccctgtgatgccgataggtagcgctaaattttggaattaagctctattttctaagatttttcaccaaaaaaatttatgaatttcggtaaatttttgtttttcttcgataatcatgaatatcgcttagaattcatcccaatattttttttattcattttttgaaatacctattttttcctgcaaattttattatcttagttatttaattatgctattctgataaatagttagtgaattatgtgttgtgcagccttaaaaatgtaatttttcgactttttcactaattttcggcttggcgacattttgactcattttagcttgggcgacatttcgacgcggcgacattatgacgcaacgacattttgacagcgcgccatttctatgagtatttaattaaaaaaaaacaatttgtcacaaagaaaataattaaagaagaaaacgtcaaacggtatcgaactcacgacagaaagtaatgacaatggcactaacctctacaccacattccaaatgtccgaaattgagcaaatcttctttatttaataaaaatttggcaaattgttaaaaaaaattcaaatttcgtctaacttttttgcattttctcccacgaaaatgccattcttaggggtgtatattttacaccgaccccgatcggggttaagggtcggggttcggggttgtcggggtatgaagcgataaaaatttggcaaattgttaaaaaaaattcaaatttcgtctaacttttttgcattttctcccatgaaaatgccattcttaggggtgtatattttaccccgaccccgatcggggttaagggtcggggttcggggttgtcggggtatgaagcgtcggggttcggggtcggggttttccccgaaaatggccaaaaatgtcggggttcggggtcggggcgggg

SEQ ID NO: 20840 - DNA, 989 bp, Heterodera glycines
taatcaaaaaatgagaggtaattggtcgggagagggggtccatttgatcatgcagttgttaacaaacaaatgaatgtttcttaccttccttcattccctaaccaatcacccgacattcaattcattcattactcgtcattaatccttccattaaaagagagggggccgagaaaagagttgccctgcttaatcgatatatttccatcaatttgttcaaacaaaattgtttttattgcccatctaataacaattttggaatttgaaaatatgaatttacatttattttaccttaacaaccttcttttttatcttttcatcttggattttaatcaactatggtgtgagatcacgcttttgcatattatttgttaattgcagtcctcaaattttttactcattctctcggttagatggtaattaacttcttttggctcttttgattgattgataattcatttacttatatgctttcattgtttttttaatttgttttccatttctcactttttcaatgtttttactgtttagctgataaagaaagaaaagtgcacaattattgttttcgtcgccggcgtcccttcacgaatcgctgttcattcatttattacaaaaaatttctcatttaaatcgtctgcgttttaaaccaacgtcctccaattgctgatgattttctgccgttcgtctctctcttttttcacggcatcaaattcgattttgacgccgcggtagcgaccggcggatgccaacagtgtggggcggcgacgtcgactacaatcgattgccccattttgccgccctcttctttcccccattgccattgtcaatccttgcggcgcccgcgtctgttgctggacgccattccccccaacgttccccgacatttccatgaccgtggatcgtcgacgcaattgcaacggaacaaacaatggtcgagtccattttcacaatgttccatttgcgccgtgtgcaatttcaggtggcgtctgata

SEQ ID NO: 20841 - DNA, 1520 bp, Heterodera glycines
gatcgattggttttttcagggtagacaaacagacaaagatcggacgcaacccagagttggtggacgtcgtcctgcattcggtgatccacaggtcgtcctttgctacttcataaatttgaccaaatgccaattttaaagtaatatgatttctcgcgatcactctgaaataactggcgaaacagacaacaaaggcaatttacggtattacattttggaccgttctttgaatgggacatatgtcaacgacacgagggtaacattacaatttttctttttcaattattcctttctgttcaacaggttaaagaaaaagttttgctgaatgagggcgacctgatcaaattcggccatgtcaatggggcagccataaatccgggcgaacacgcgcctcaacaatcggccgagttcatcttccgcttcgaacgtgcgctgccaaaattcgcctactttggctactcacaaaagggcgtccgagtccatccgcaccatcaaaatgagcacactcacaatcagcaacaacagcagaggagggcgtatatgcaggtgcagaagcgcaaatggcagggaaatggataaacaaccgctgggaagaaaggaacggcacaaattttaacaaaaaatacataactaatgaataaatattaaataaattcttcatttttcaatgagtttagatcaattccgaccgcattttgcccaccgaagtgtacgggtcattggctccaagtggtggcgcgagtgccgccgccgccgttgggggtgccaatggcccaacggtgccaagaccaatcgcgcctggcggtagctgtctcgctgctgtcactagcagtgtttcggtggttgccaccaccacggcttgcccctcctcgaccggtgctccgcccacttgcgctgccccctccttcccttttctcccctcctcttccaatggtgtaacaacatccgcttctgcaactgttattccaaggtgtttggccaccacttctgttcacaatagcatccaaatcgcccaattaaacgccatggcagcagcgacgacattagcaaacactgcggcggcatccgcagcatcaaataacgcggcgcaacaacaacagcagaggcatcagtccactgggggatcggccgacggcacgacaaactctgctgctaccgcctcagcattgaacgccttgaaccaattgggacttacatcggccactgaggaacaggtcgagttgatgttattttgttgattcattaaaaagaggcggggagggggtcaaccaaattctattaagggttctttggagtggggggtgtcattagctaattttacgaagggatctgtatatgcaaatagacgaccttttaaaaaaggctttttttttgtggcgcctttcaaaaaacttttggcaacaagggggctcggcggaaccgataggcgccgcctggatatgatggattttgctaattgtaagaaattcaggtggcagctgtaaatgctcatttgcgtcagctgatggcttctcatgacgcaa

SEQ ID NO: 20842 - DNA, 2655 bp, Heterodera glycines
  unsure (1)..(2655): unsure at all n locations
ttacgaccacttacacttttataataaattcaactgatacaaggattagattattgatattgctgaaaatgtatttatattttttataacattttttatgggctttcgaatggtatcattcattaaccgttataatgcttgtcacatggtttaacttaaagaaattaattatatcccattttggggtggtcatatgtttacgaccataaactttattcataaaaaatcaatattcacgtgatttgatcacagcctcaatacggcgaggcatagagtttatcaaattgataattgggtcaagcggaattgagttccaggcctccaaatgccaagttggggctttgactgaaagtgccttccggcgattttccgcttgacaaagtgccaaagattttcgattggtgacaaatcagggctcaatggaggggtacgaaggagggtaacattgttcaggctgaaccagcccggcaagcgcagacgccgaccgccaggaagtcgccgatccatattttgtgggttttcgggaataaatccatatttcgccatttttgcctttttagtccatatttcggccatttttggcaaaatttcacaagaaaaatgcaaaaaaaagcgaaaaatacacccctaaagatcgactttttggaaatttttacaaatacacccccaatgagtttttgttgtcattttggcatttttaattaatattttcaccatttttttgcgaacttctctttttttaaaaacttggaggtgttttttatacaacggacgacaataaaaattttgcatttttaaatttgaaatccattttttttggttgtctattgtatttcttaagtttacttaagcaaatattgaatataaaatcaatgaggatttttttgtttgaaatgtgatttgaggatttttgtggcgttttgagatgttttgaggatttttgaggcttttgggaaaaatcgtcagaatcttttaaattttgataaattgacataatgtttgacaattatttaatttttgggttttaatagagtatcaaacggaaatctcacccaaatttagccagaaaattacaattttttcgaaatccacaaaattatgaatttttttaaatgaaaatctgctaaaaatatggtcaaaattctcaatttttcccccaccggcggcgcctatcggcaccgccggcccctcaattctccaagtttttttggaaaaagcgccgcaaaaaaaatcaacttcgatttttcatgctcagaatctcacaagatgcttatttcgaacaaaaaaattgctcaaattgtcatggacaatcgaagatataacatttgatcattttaaacgtgttttgaataaattttgtaaaaatgaggctttttgacccaaaatgaggtttatttgcatgccaaatgagttccctctattacaaaacaaacaaaaaaaatagaaaatggcagaaagaaaatttattaacaaataataatgtttatgaaattaatggattgaaaaaaaaacagagagagaaagagagacagagaagagagagagagaagaggagagagagagggagagaaaagaggagaagaaggacagagagaaaagataagaggagagaagaagagagagaaaagagatcgagactgggagagagagagagaaacgaagaaagagagaaaattgaggagagagaaaaaagagaagagagagagaaagggggaaagagtgaatgagagagagagtgaaagtagagagagtgaagagaagagagagagagagagaaggaatgagagaaagagagagaaaaaagagcgagaaagagggacgtactgggaatgacaatttaattatttaaaacgatgacttttcgcgtttatttttgtgtttaaatttcatttttgttttgttttttgttcatcagttgttcttgagatttctccgatttttgtccttttttctctcttcatgttttaaaaataaattattctccaattcaaattgtcattcgtttcaaattgtcattcgtttcaaattgtcattcgtttcaaattgtcattcgtttcaaattgtcattcgtttcaaattgtcattcgtttcaaattgtcattcgtttcaaattgtcattcgtttcaaattgtcattcgtttcaaattgtcattcgtttcaaattgtcattcgtttcaaattgtcattcgtttcaaattgtcattcgtttcaaattgtcattcgtttcaaattgtcattcgtttcaaattgtcattcgtttcaaattgtcattcgtttcaaattgtcattcgtttcaaattgtcattcgtttcaaattgtcattcgtttcaaattgtcattcgtttcaaattgtcattcgtttcaaattgtcattcgtttcaaattgtcattcgtttcaaattgtcattcgtttcaaattgtcattcgtttcaaattgtcattcgtttcaaattgtcattcgtttcaaattgtcattcgtttcaaattgtcattcgtttcaaattgtcattcgtttcaaattgtcattcgtttcaaattgtcattcgtttcaaattgtcattcgtttcaaattgtcattcgtttcaaattgtcattcgtttcaaattgtcattcatttcaaattgtcatctcccanaaaatcaatcgatggcaaag

SEQ ID NO: 20843 - DNA, 1364 bp, Heterodera glycines
ttcataaccctttttgcgggatgagctttttgaaacaattttataaatttttgtttaaaaacttaagttttgtagtttgtaagtatcaaattcttagatttattgtaactgttgaccgatttccaatttcttaacagattttgcaccagaatgggttcgtccgtcgatgcacccttaataatttgaagcaccccactttctcattgttccctatctcgccatttcttcatgatttctttcaaattgcaactgtttaaattatttaattttaattttatttaattttttgattttttgtcaattttttgcgatttttgggtttattttctttcatttttcattataaaaaattcaaaagaatttgcctttttgtcgcaaaataaaacccaaaattttatgtttcctaatgaataaccaaacaatccaacgaaaaagcgacaaacttagtcataatttgaatgagcaatgatacaacaaaatgacatttaaaaaacagagtttggaatggaaaaacggagaatttacggagcccaagaaagcatcgttattaaaaaacataaaaattaaattgtcgaaaatatttttgataaaattcagagaatgtccaatattattttttcacatttcccatgggaaaaattgaaatttgtttttgttgttttgccgtctttgatgtttctttctgttatttataaaaattacagtttttcatatgacaattcgacgttattcaggtcattcaattaaaattattcgtgtttaatacctttttaaaattctaattaaaaattattaattttataaattaattaaaagtcaataattaagggccccactaacaatcttttactttttggtgccgaatgtatctgttaaaaaatggcaatattctaaattccttaaaaactggtgacttttacattccttttattggattttattaagaatttgacagaaattaaatatataaactttagtttatttttaaacttaaatataaaattggccaaattaagtcaaaacactcaccgaaagattttttgtatcataaattttttttttggtttttatccaaattaagcatttatagtatgttcgatagctcaatgtgttattattattctgccaaactttttccaacgcccggaggagcaaaaattcattcttataattcatttcataattaataatttagctttgcttatttgcaaaacaatagcggtcaattatcatcagaagaatgctttggagaaaaggtatttattaattaaaccaaatattttccaataaatatttacattttttagatggtttataatttgaaaatgaacgactcgcgaataattcgtggcaaaaagtttaat

SEQ ID NO: 20844 - DNA, 1082 bp, Heterodera glycines
ggcttcctgacgattctccttcagttttcgatttttcaccatcgtcatcagcgtcggcttcagtagttggtacaaatacggatgaaatgacccaatcatattgtggcaagctgctggcttcacctccccaattggcgtctttttccttaatataatttatatgattaacttttgtaagtaaacgataagataaatttagtcgtttatattatagagtataattaataccttagtaatagagcataattaataccttaataactattttggctacaatcttcttgcccacgaaggaacctaaaatcttagcaaacccttccccgtctccgtccagttccatcatccgcatttcgcttgctttacgaccgatgaatttttcaccacagtttgtaaacattgtagtagtttgacggcactctttatccatcacatcttgaagttcaagtagaaaaaggacggcatcaatcgggtttttggcaatgtgaccgcaacttgagcatagtctctgctcagatagcttacgcttacacaaaaacccgcttggagttttggccgggcatgcctaatgtattgtgtaaattacaagctgctgatgtcgtagagtctaactcacttcgtatagtttatactgtaggcttagtatgcatgcgcgtacgacaaaaacacccgcaccattgaacatttttacgtctacgatatttttagggttaacaaattgcccttcattatcgcgcttgtatgttgaccgaatttggaaacgggaaagcatttttatatagtatatatctaaattttattgaaaaagttgacaaaggagtcagtcttgagggccgcagcgttgggccaattcatgaaacaggacatgcaaagcataccgcgcaaaatgaaatatgcaaaaaaaagcgaaaaatgtgaaccaaaaatataaaattggcctattcgaatctgtcagattgacttatcggcggatatacataatgggcggaagcctagcttaaacctcggctttgttctaagggacagtatagtgggaaatagatgagccaaagcctgggctagggttatgcaaacgtctgggatat

SEQ ID NO: 20845 - DNA, 832 bp, Heterodera glycines
atgactcgcaggaattgaagggccgtcaccattaccaattccattgaacagttgaaactgtaaaaaaaaagtgaaatacgttatttttgtaaaaaggtcttaaggctacagccaaaaattttcaaatttaccctaaaaataaatttaaaaataagaattataaaattaaatactacagagacttttttgtctatgaatttgtttgtattttatcaaagttgaaaccaaaaaacaaaagattaacccaaaaattttagggagctatttgatatataaataaaaaataatttcagcatccaaaagaagcccaatattctttgttgttatttaattgtaattatccaaataattaactcaacgttcagtttacctgtcattgttgtgccaaattacattgatatgtgaaaacaacaatatttaagcgttctcctaaagcaaaatcaaaaatgaattaagaatttttaataaattgcactattatttcattgtaaatcattaaattaacagaaaaatatagaaagtggaatcatgtcaaaaatagaccaggaataaaaaaaggccaatatgtcaattgatcttagtgtaaaaactgccgaaatataacataaaaggcaaaaaaaacccaatgattaatttgtttttaggcaatggtaacaaattttcaatcaccaaatttttgcaggaaaatatttgaaaaagaattaatattttaatccatttttagccaaaaaaaaaacttgttatgaatttgtacacaatgccaaaaaaaagactaatatgtcaattgatcttggtgtaaaaaatgccgaaatataacataaaaggcaaaaaa

SEQ ID NO: 20846 - DNA, 2237 bp, Heterodera glycines
ctttcatttcttttctcttatttcttttacttttccactttctctctctttttcctcactccctccctcttccacacacacgcacgcctccaacagactgctgctgcacaacagcacgcgcctgttcactgtctacccctcccacccgccgctgcccgcatcacagacagtcagacagtgcactatctccctcctccctctacctaaccacaacagcctgcctgggaagagaaatctttttgctttaactatttcttttgcttttttcttttcctatactatttcttttaccttcttctttttcaaaactatttcttttcatctctttttcttttcactctctcctcacagcaaatacaaaacgccacattcaaaccatgttacatagccacaaacaatcaactttattatataaaccgctctgtttaatttttttaaatgatattaaaattgtctaaagataacttttttccatcacgccttccattttcttctctcctattctcattcagtctctctctttctaactcattctctctcttttttctctctctctttctctctctctctctctctcttctccctccctctttctttgtttcactctctccctctctttttttctctctatctctctttttcattctttctctccctccctctctctttctttgtctttctctccttctctatttctttcatcgctttttctctctcttcttcactctctctctctctctatttttctttctctcactctctctttctttctttctctctccctctatttttctttctatgtttcctcaccctctttttctttctttccctctcactcactttctctcattttctctctctctctccctctctctctccctccctctatctttctttctctctccctccctctctctgtctttctctctcactcaccactctctctttttctttctctcactctctttttctttctctctctcttccctctctcacatcctttctccctttttcttaatctcttatctctctcttttaacctcctcaatcactttctctttctctctctttgtctttcttctctctctctcacgctcaaatttctctgtctctctctttctctctctctctctgtttttcactctatttttttctctctctttcaatcccgctctctcatttcccttctctccctctccctctctttaactctatctctctctctttatttctcgctcaaatttctctgtctctctccctctatttttctttcactctcctttgctctctcaatctcttctctctttctctctttcagtctcgctctctcatttactttctctccctcttcttctcttaatctctctcttttcacactctctaactattttcactcctctccctctctttatctctctctctctatctctttctttttctctcaaattttctgtcttctctctctctatttttctttcactctcttgttctttctcatctcttctctctctcttttcctttctctctctctctctttcctcctgttctttttatcacgctctctatcgttcattttccctcatcttttaatttctctctctctctccctctctcctttcttacttctctctcactgctttcttctttctcacttttttctctctctcttgataattagagataatacagtaaacgtttttaattaatcgcgcaaattgtggttgggtgtcataaaagagactaaaattgtagcagaactgcaaataaatcctaacaaatgaaaaaaggttttttaaaattggagtaaaaatttaaaaaaaatttaaaactattaaaaaaatcattaaaattacttttataatattttcgatcaattggaaatcattacaataattgaaaaaacaaaccgataataaaaaaatcggcagcaaacccaacgaactaatcaataaatgaattacttcagagattttaacatttaagtctgatttttttgttaaaatgatactaaatcgacaaaagcctttgattgatcgcgaaaattatgattggtcatgtaaaagttgattgaaaataaaacaccaggagaaacgcaaccgcagcctaatataaaatcaattaatgaaaaaaggttttttaaatacataggggattatacatatttcaaaaaagcattttagtgtacacaaaaatttttaaaaaaaattattgtacacattcaagaccattaaaaattt

SEQ ID NO: 20847 - DNA, 1965 bp, Heterodera glycines
ccccccccccccctccccgcgccgtttcgatgggaattggggcgaacgacggatgaagaacagagtccgtccgaattgcctcattatgttttttcggttgctgctgcatccgctaatgaatcactaaaccatggccgtttttggcattggtgttcgttagtccatgcccattaactttccctaatgatcttcgtcctcaccttgctcttccctgagcacactcatcagttttgtcggtgccattggcggtggtactgacggggaagggcactcctcgccacggcatttttcagccgttggcactttgcaactgtcctcctctttgccctgcttggctcttccgggcgatttttgtgttgccaatgttgagatgatcaaccgttttgtcggcactgatttagccaatttggaccttttttgcggagattcattcggaaaaagtggcgtcggcgacggagttttagtcgttttcgaattgccctttttggactgatcgtgtgggttttcgaccggaattggttcttcattctcagatgttctgtctgaaattgttcactgatcaaagccaacggtgccatcctaattgcctttgtgccgtttctctccgatcggctgatcattctctgctgtttctcctccctcttcggtacaattcgctctcactgttccttccaacgtcgtctcctgttggtgctgcatcggactgaccacgccgaccaccgtgtggtgattgcgtcgcgattcgccaaccattgatgatgacttggcactctccgagtcggagtccgccgacaacggacgccctccgccgctctgagagggccctcctttttgtgccggtggcgtagttccgcccgaaagcactgaaatgcctttgacggccataattggcttcttctcctgaacaattaaaatgtgtgatgcactgaagcttcgtcacaaatctcatgctttaccgtcattagcggagaattcgccgcttggcatttcccccgttcttttgctgttttctgtactttctcctcctcctcctctttctcctcctttttcaccgctttcatttccaattgttgttgtgccgttgctttcttttcagaagcactgcttgaaaatttcttgtcagaataattggccgttctgccggaggctgccgtttttatgccggaacataaactgcttgaacttgtggtcatcagttgcagcggaggttggcatggcttaatttagaattggttgcataacccaaatactgctacagtatcaaatgggtttctccatcaaaatccttctccaccttttttacttgtgccgccgtttttatccatcccccagttgaactgctcgaactttgcgacgtgttcatctgctgttgtttgctttgacttagtccgcccgtccttccgttcgttgtgctccttttcgctgctgctgtctctccgcttcgcactgaacaatccgaacagttgctggtcacactcatttgcatttgttgccgttgctgtgtcccaactcttccgctcattgactgaaatgtgccaacagtcgtcaccgaagttgcccttctgttggcggatgaagagggcgccagcagaagtgactttgagacgggcgtcgctttccttaaacggacaattagcctaaaaacgaccggcggtaatgacattaattagccctactaattagactacaattattcccacttgttggtgctgttgtggttgggtttactgctgctgtccccattttgttgcttctgctgctgatggtgcgtgccgtccttcgctttgggcggtgttggcattatgtagctttgatctgccgccggcgatgaaagggggccaatgggcggaattggcacggaaatctgtcggaaaatggagatttaattgaattctacacttaaatgaattattttgttgtgtcaattgtatttgggaaagcatcttcccaaagtgttgtttattt

SEQ ID NO: 20848 - DNA, 3441 bp, Heterodera glycines
gtaacgcaaataagagagccaagaatgtccaaaactcaaagtttacagaagagctgcctttgtagtcagtttcttaatatataaattttattggacgctgattgcaaattggtactctttgaattttattaaaatcaaagggtggttggaaaattttgtcatgaaaacttgatcctggagtttttcgggatcaatgatcacaaacccagcatcaagttcacaattccaaatccctaacctaaatttgagcaaaaattcaagttctaaaaatttgaatttcgactttttgttcgagttcggcttatagtgattaggatttggtataaaaatgatgttaggttcgagatctgcgaccacgataagccagggaataagttttcacgataaaatcactccccttgggtttaataaaatttaagacacgaatttacaagtagcgcttttctcgtaattgttaataaacttggcataaaaaacattttaattattcaaaaagacacgtcttaacatagattcttttaaatgacatttgtaattacttactgagtgtttcgatgagcttcggaatgacccgtctcacacaaagaaacatttgagtggttatggatccacttggaagttcattgagcaccgtcttcagagcgatggagctgacgtcgcgcaattgctcattttggctcaccatattggcacaaagtgagtccaccaaagtctccaactgagccaacttaattttgtgcacaagtggtccttaattttatataatttattttttgaaaaaaaagatggggatgaggggtaatggtaatactgccgatagttgcctcctttattttatgttttaaaattacaaatttctgataacactaaaatgattttaaaaaaacggcttcaaattcgacctaattcaaataaaaatttattcaaaaattctttcgagatataatactaattaatttagttttaattgataattttattaaaaaatctttcgaaatttaatactaattagtctattttaattgaattgataatatattcttactttttcaatttgcatgcgaatttttgttccgattgagggatcagatgaaattgttcaataatttccgccacattttgttgatttgcccagccaagcaaattttcacggattttgctcctttgataagcacaaaatttcaaaaattcatcaaattcatttcccgagcataaaatgatcgcaaaatgatcaaaactttgtttcattttccttttttggaaaatgtttttccattttttaatgtcttccgtcagaatttcgtttgctaaacgaagtgcaaatttaattaaattaataataaaaaaaattattaacccatttttaattcgtcaattattgtttcaattgtgtaagtgttcacattgaatgttgaattttgttcaggaaactttggcgttataacagtcattggcgaaatgccaaaaaggggtggccattttcgcacaattttgttcattgtaacgggtgtcaatttctttaaaagcactgcttgagaccaatccctaaaataaaaaataattattattttatttaaatacttttgaattagaaaattcactctgacctaagaatgtgatcaaattaattaactatctaagggatcgcgataattaataattcataatatttcaataaataaataattaaaaataacttattcaaacgcaaattccttttgaaattaaattaattaaattttaaaattgtttattattgtccttcaattgtaataataaaaaaaatttataaaattatataaaaataattctataacaaaataaattcgtaccaattggcaaaatgtgagaaaaattgatataataaaaaggtcaacggtgcgtcggggaacaaaatgcaaattttagacgccatcactgacaaagtggcaccatttaagtagccaaaaattcccgaatatatttgtttatcttaaaattcaaaagattaaaattaaaattttgtttattactttttgcccacaatttgactgcctttaaaagtgcagagaattctttatgatttgggataagcgataattggtattttgatgatctgtagcctaaacttgatttattgaaataaaatcaatttaattgtttacattgatattttgtgttatttgcaataaatttttttaactatatgaattaagtagcatttttttttattaaattaactattaatggattttgtttatggaataaatttatcttattttaatagttttaaaattaatttttctattatcaaaattaatttttaattgatggtggcccattttttcatttattatttttaaatttatttcacaaatcttatttatatgtttttttgtttaatattttgtcgttttttacctgccaaagggtaaatgcttgtttcttcggtcatttgcttaattagttgatcatcctcaatatgaatgtctttttctaataaatattttccaggcacaataaccggcaaaaaatcaacttcaatttgttggtgatcaattcgcaaaatgttcactttgccctgcagccaattaacgctgatgacgtcatttaaattctaaaaaataattatttattattttttcaaacttaattagtggtaatttgtgtggaaaacaaaagtaaatcactcaatatatttttttcaaaagattgaagaataaatttatttaaatataattttcaaattatttttagccaatatatttaaaaatttaaattaatttatttctgtagtgttttttataatatttttttaaatttacttttttaagaaatttgtataaacatttatcttcttcaccaaataattggtcaaattcaatttcgtctggtaaaacacagagcaaatccatatctgatccatccacaaaaccattcattaaaagtgagccaccaacaagcaatcgaggttctaaaacaaataataaattgaaatatcaattagctaattttaattaataattattactaattgctgtaaattgagctgtccacttctctactgatgttttgatatttagttttaaatgatttattgcttcttttttaatcggattaattttgggagaaacaaaattttgaatctaaaaatacaaatatttaaaaattattattttcaatttaaattaacctccttagaaatttgtttttctatttcgcgatttttcatctttgttcttatcatactgtaatgaccaaattcgggatcagaaaaattttgggtttgtaaatataaatctaaaaatagatactttaaaaatgaataataaaaagtttcgagtaattacataattggcaattatttgccacaaaagttataatataaaaattttgattttgaataactatcaaaaaacattaaattagtgaaacttaaaaaaaaatacccaaatttttctg

SEQ ID NO: 20849 - DNA, 956 bp, Heterodera glycines
aaccgcgcctaacaacaccaatgggacgccaaaaacattaactgttaaaaaatgatacaaagatcgcaaatgtttctcttccaaaattttaatcaaatttttaaattttttccgaaaaaaattattatgaaataatagatttagaacaatcatacaattaagagtcttttaacaaaaaagaaacgcgtcaatacataaaatagaggtctaacttcaaaaagcccccccccccctcctaccttttggttttcgttttctttgtagaagggctatggctataaaagtagcataatttaattcattattcataaatattatttttaacggattaaatatatgaaaagcgaagcatgaagttttttttattaaaaaattctaagatttttgaatcattctcaaaatttaatcaatcaaataaataaacaaacaatttattttcaaattttgtttttatctaaattcttaaatttagaaaattattattttttaatttgaaagtgctcaaaaatccctaaataaggtgtaacatacaaacactttttcaattttttttgccgtattattttcctaaattttgttgggcaggaggggcggcggtgccgttagacgccgccggggaaaattttgaaaattagagtgcaatttgctaccagattttgtccttaaaatttagcaaattttgcaattttgagccatattttttaatcaaatttggaattttttggtctgttagtgccgacaggctccgccgggaaattttaaaattttgttaccatttttaacaatttcgcacctaaataaaatttttatttttagacttgattagtagggatgtaaaaaatatggaaattattttccatattttttcatatttcgccatttatgtccatattttcatatttgtccatatttttgggatttaagtccatatttaatgtacatatattggcattttt

SEQ ID NO: 20850 - DNA, 1018 bp, Heterodera glycines
  unsure (1)..(1018): unsure at all n locations
gacgatcacttattgaagcgtgctttcgatcgctgatgcccaatgctggcattattgctcagctgatcaataccgctatgattattatgtttgtggtgtaccaattgtttgaacgcttttgccgtatttgaatatgtgccagagagtgagtcatgaacgcactttttccacatctgcatgttcagcttcaatttcaaaggaatcagtttgtcgccatacgacgctatatagcccaactttggcatcatgccacatttttggatcgcaaaatctgatgcaactcgcttcaaaccgcctctagatttatgtagtttggtttgtcttccggtctgatcactgaaactccgacgcaattgtggatggcacaaatcattttcagcacattcgtgatatccaatttcaacaatttctctgttcatgtttggttgattgttgttgttgtcatcataatcatgaccattttcttcataatcataattagctgggacaatttctttgccggttggcacaccgttgctagcattcaaatcgtggccagtgttactgttatagtttacaaaaggtgccggtgtgcggcggccaagtggacttggtgaatattggtaagatgatgatgattcaccacgtgtataaatgctgcccaggaaatttttgcctgatcgcttgggaggagtccttaaaagtaagcaatgttttcattaagatcgtaattaaaaagataacttattattttaaaaaatttcataaacttctaagtgattttgcattttaggctatcgatgattatctttctctgaattgtcaaacatcagtagggctgggattcttaatttttgcttatttttttcttcgactctaattcaatgaaaaaagaatgaaaaaaacatttttatcacgaaattcttagttttaacacctttatccgtccctagaaaacctgactttttgcccctanaataggggcgtcactattttgacacatttggcatttcgcccctatttcgtcatttttgaaaaa

SEQ ID NO: 20851 - DNA, 1028 bp, Heterodera glycines
ctatagcctgtactttaattctgcgttggatttttgctccccataattgtttgagtaccccaaacggacacttgaaaaaatcgatttttttgttttcggggcagtccccccgagccgatgcgcccagatttatggggagaccgaatccttccggaatagcttccctatagcctgtactttaattctgcgttggatttttgctccccataattgtttgagtaccccaaacggacacttgaaaaaatcgatttttttgttttcggggcagtccccccgaaccgatgcgcccagatttatggggagaccgaatccttccggaatagcttccctatagcctgtactttaattctgcgttggatttttgctccccataattgtttgagtaccccaaacggacacttgaaaaaatcgatttttttgttttcggggcagtccccccgaaccgatgcgcccagatttatggggagaccgaatccttcgggaatagcttccctatagcctgtactttaattctgcgttggatttttgctccccataaatgtttgagtaccccaaacggacacttgaaaaaatcgatttttttgtttcataaatatttttttcagaaagtgctctaaagcgcaccaaattttatttacaacttaattttagcactctgatgctttagtatcaaaaaggaagatggagaaaaaattttttaaaaaatttttccttatattttggttatatcgttttgcttttggtggggtgcttggaacagtggaatcatgcgcacccgtccgatctggcaagttaagcaacgattgctgactagccaaaaggttcggtgccgtgatgaaacgaaccagcactgcttaccccgcggcacccggcacggtcccccgaaggaatggatttaattaaattctctccttcggggatttttttccattaggtcgtccgttagcgttcaattgctctagtcaatttttaaaatttttggtgaaatatttgtcgtgctctgaaggggggggggggggggggggggg

SEQ ID NO: 20852 - DNA, 3267 bp, Heterodera glycines
  unsure (1)..(3267): unsure at all n locations
cccccatataccacttctcacaactaattgagctagttcaataaaggtaaatganatcaaaaannngnngngcaagnnnctctttgaggaagaaagaaattatgaaaattttccgcttggncaatccgcaaaaaaaaaacaatatggtaaaatggattactgtaattttataagattttaattaatttttgttggtttgattaataaaatcataaacaccttcacgtcatacaggaggattttaaaaaaaagttgataattaaggcgcatttcgttaattattcattgtttgcttgaggtgcaaaaaggcaggcctcttccaaaaaacaataaaaatttactctcgaatttttttttggcataactcttataaattagtgccaaaatggaagaaaaaaaaatattgtcaccgattttgtgccgccatttcgctgccaatcgccgctgaacaattgccgttggccatcgttgctgccgtagctccaacttgtcgttgttgttctgcggattgatcagcgccaaagtccggtgccatgatcaacgaggatgacgtaattgttgctggtgatgaggacaatgctaattggtgtggcggaagcgtcagttcattgatgtggtggtgatcagcagcatcagccgccgatgagacagccggctggaagccgccgatcagcgcctgtgccatcgtcaatggcggatgctgttgttgttgatcagcagtagtagcaaaatcgggcgccaatgttggttgttgatcagctgcaggaggttgttgctgctgctgatcatcttcaaccgctgctgaacatgatgaggaggagaacaaagaagtctccatcagctactgatcagagcagaaaagttgaagcgaagaataattggaatcggtcaagtgatcgcaaatgatcagatcagccggagggaaggcggggctctgatcagtagtagtgatcaagaaaatgtttgtgatgattatcgaccagcagctccatcaccatcatctgtaacggatggatgatgattgaatgcgcaggcagcatcatcgatcagtgaaagattttaattgggtcggatgtggatttagaggagagagcggatgtgtgcgttcactgattgaacacaaccacagataggtaaatcccggcgaatatgtgagtttattgttcccacaaatttgccccctaattaagctattaattggatcactgtttgatcaaagaatggcggaaagggtgatcagaagaagaactaagaataaagaaaaattttaattttgtgattaattcttttaagcaagtttttcaatttttatttaaattaatcccaccaactcgttggggtgcgattattgaggctgggataggcataaaaatgccgaaaattcattccccttggtatttgaattaatacaaaaggcctaattaggaaacagagctggcttatggaaaaaatgaactgctaattaagagttttaatagttcaaacgctacgctaattaaggttttcatattaaaaaaaaacacaatttccttttatttaactgtaaaaaaaattaaaatagttatcaaaagaatcatggctaacaaattgctctcaaaaaaacaacaacaccaaccaacttattatttatgcatttgtgcataacatttttggtgtcatgtagtggtgacgaaacaaaaattattattatttgttattaatttggttttagtatttgcccgcaggtggcaggcaaataaatgaatgaatagaatgttaatgacaggcgcgagaaaatataccgtaatcccctgtaattgatccctttgatgcccggctaattaggccttgtgctgctttctgaacaacaccaccgccccgaagctgtgtatgtacaacaacgacaacaaaaataataatgatgacttatttttacttgaaaaattgagtacgggaaaaaggaattaatgacccctgagaagaggaagaagccatttatttaatagccccctcattaattggggatttttattcgagattctcgagatcagccttttgccggtgaagaaaagaaagataattgttgagaaggaaaatgcttaaaatgtatttaatagatagaaaataactaaggaaaaatttataaaataatatttttaaaatattattattattaaacgaaaaatcgttaaaaacactaaaaatgccaacatcagaacaaggattagagtttttttaattagttagtatagtcccaagttttttttatccaaatttaggacaaaaaagttaataaatttagattttggccaaaaattcaggtttgatttcagcacaaatatgaaaatcagcaggaccaccttctctggactctgtttattatagagcgggtttttagttattaaaaaaacgaccaaaaaattgttggaaaaaaatataaaataaaaatagaaattaaatagaaaaaataaaataaaataaaaagtgcgaaacattacatttttattcaaaacaattatttaggcgtctaaattaatgcacaattttgtatttaaaaagaaataaatgaaacattgaaattttacaatattattagattatcaaagttagataatagaaaatcgaaaatacatattgtacatagcaacattattgaattgaaatttttaggaagaaaaaaaaattaaataattttttttttaatttttcccccaaaatttgggggatttgagaggcaaaaacatctaaaggaaaggaaacagagcaaataaaatatgcaaatgagcaaccctctccaacaaacacacatatgtaggtattatgtgtgcaatgaaattgattggctcccaattcgctgcccctcgggggaaattaatatgaaaaatatgcaaaaaataaaaattggcggcttcgattttaaataaaaaataaaattttataatttttaattttttgaaagaatatgtattataaaaatacggcatttaagtccccaccttgacaagtcaggatttctcctggaccgggattttttccggaacatacaagtttaaaaaaaaattatacataatatctttgaaaaattcctagaattgtttgtttaggaactataacaaagtttcattgaactgaaaaaatttaagcccatgtatttcgggcagcaaaattttttaatttaaaaacaaatttttaaaattttgcaggctatggctagtgcctacctagcccggcagcaggtggtggttctccaagcgtataaccatggcaattaaataaattaatattaat

SEQ ID NO: 20853 - DNA, 1922 bp, Heterodera glycines
tttgaaattttacaagctaatcgagaaaaagcttggctatcgaatgataccaagaatgtaaaatttgattgcttttaagcaaagttatttcatcttttgtcaaaaaattcgctaaaatgtcggattttactaaacaacccagcaagatcattacgcaaattcacccttcccctctcatctgttcgccctttggcgacaattggaccggtcagcaacattatatcaatcaggcgaacggcaaaaaatatgcacaatttctctttacggcaaatattaccctaacatatatcatcattttgaataaaaatgcgtatcattataaaaaaaaatgagtattgaaacgaaatgtaaaaaaacaagaaaagtgaagaaacagcagacactatataagtcagacactacattaaaaattattgaaaataaaagtgaacaaaacgccaatgaaaaacagacagcggaattagacactatatgttttatcattgattttaactaaatttctaatacttataacttggtgaagggtaaaccaaacaaaaccattttgtgctcattttgatgggaaaattcttaagaatatttcaaagttaaataaaaatttgaaaaaatagtttattagcaagaaaatgaaccatgtgttatcttatatgttagagacatggaaatagtgcgtcaaaatgagagaacaagaaaaaactttgccaagttgaaaaaatttttctacagttgagaatttcttgaaattttgcataggcccatattttgaccccctctagtgattccaagtttattttatggaacttaagtttttaactcgagatcggctcttccatttttacaagggttaatctcggcaaaatttttaaattagtggggttttttggcgttttgtctgtgcgcacttttggtcaaattgatgatatatgccctaatgaaccgaaccttgacataaagaattaactttttttatttgattatttgaatattttatttttttattatttttgatttaatacagttttaacgattttctcatttgttaaacatttattattctgtgtttatttaacacacgtatgttttgttttttctatgcttattaacaaacaaacagattgctggaataaatggacaatgcctttcatcttccaaactggcaaaaaaaaaatcaatcccaacctaacatttctttttccattatttattaggaaaacatcataatagctttgtctttacgcgtaagatagaagaaagatttggccatcataaatagtcgtgccatacaacgaacggcaaacattccgctaaaaaaggcattaccatcacaaaacaaaaagaaaaattccatctgtttcacttatttttccactctatcattattagggctgccaattttatgtaaatacatattttttcctggcttctccttgctctaaacagcaggaaaaacactttcttttttgtgtttgcgaacaaaaaccgggacttttatttacatatttttacatatttcgggattttcttacatatttgtacatattttggatttttttcatatatattttcatttttttatatattttgagtattttttacggaaatttttggaaatcctcaaaaaaaaaataaaatttcggcaaatatttttgtacatattttcattttttacatattttgaagatttataaagaaaaaataagtttgaaaatgttgcctaaaaataccaaaaaaagtaatttttatgtcattttgtggctatttcatactttacggggaatttctttcccaaaaaataccattaaaaaaatttttatttacatatttggggttttttgtacatattttggaatttttcttacatatttatgtacatatttggatcactttttgtacatattttttgcagccctaatcattatgaa

SEQ ID NO: 20854 - DNA, 1611 bp, Heterodera glycines
ctctactccctaagaattgaatatttttcccaaaaactgataccctaaaatataattttttttttcttgaaaaaatttttcgtttaaaaattgtccttatccgaaaaaacttttcaattttttaataagtttatttaaaaatgaaatataactgaattaaattttttgattaagttttcaccaaaaattggccgaactttcccattcattttacacaaaatattaacagataaaatttattcagtttttatcatgaaaatagaacaaaaatgaaaagataaaaatcttttccaaaaaaaaataaaattattataataaatattttttattttattatggaaataaaatttaaaaaaaaacaggagatttggcaaaaatcaatcattaaaagaaacaaaaaaattataaaattttctttatttttttaacaaaatatttaatattatatcaaatattattaattatattcaaatataatttcctggcatttttggtagtgcatctcgagagtctcggtctcagtctcggctcgagaaaatctcgggttttttggtctctttctcgcgtaatatttttcaagataatctttttttcaaaaaagaaattattttaattatatatttttttatttattatggaaataaaattttaaaaaaacaggatttcctggctctctttaatttttttctttttggcaaactattgcattaattttatttgaaatgctagagatgtattgcgtcatattttctttcgtaatcataaaaacgaagagataattatacagtaagggcttccatttttatgtaaatacatgtatttttcctggattctctatagcctaattagtaggaaaaacactttcttttttgtgtttgcgaacaaaaattgggacttttatttacatattttgggatttttctacatattacatatgtatgtacatatttttatacatgttttggacttttttgcattttttcgtacatattttgcaatttttgagaatttttaaggaattttttattaaatgcccaaaaaaaaatccaaaattacacaatttttttcaaaaattttgagaatttatagaaatttcttgtgaaaatttaaaatttttcttgaaaatgttccccaaaaaatagttttttttttcaaaaaactgataccaaaagttaatttttaaaataataaatgttgatttctaagcctatttaggtcatttttatggcattttgtgcgtatttactctttacaaagaattttttttcaaaaaaataaccatttaaaaaattttatttacatattttagtacatatttcgtacatattttagcattttttatacatattttatttacatatttcgcgatttttcttacataaaaaaagaagccctgataattattattatttattttaatgtaataaattactcagtaattttcgaatgaaattttaccatttaatttctttgttattattatttattataaattcaaccgacaaaactttctcatttaataaattatgtgatttgaatggaaaaattcggccaacttttgctgaaatatttggccactgggaggaaattgatcaaaatccaaattggcaa

SEQ ID NO: 20855 - DNA, 2429 bp, Heterodera glycines
  unsure (1)..(2429): unsure at all n locations
agtcccagcggctgatttctcattttttcgtgcatttgagggcccctaactttttttctaaaaccctgaccaaaaagtttccgctggtaggatnttaagttgaagtgttggctaaaagtaaaaaaaaattccaggcctctacctataataggaagggctatagaagcgcggacaaattcagtaccaactttgtccacttcagtcccaggcgaataactcgccagggtttgaactgagcgagggggtgcaagcagacttattgtagagcttcgaaagctcgatttttccaaattttaaaatttcgaaaattttcaaaatttttcgagttaggcctaaaaaacggttttcgggtttttgaattttaggattttttaacgatttttcccagagaaacggagaccacttccaaaacatagtttttcgagctctatcgactggtaatttttttggaaaaatttcgatttttttccggaaatagaaaaaatttttggcctgagcgggacatttgagtcccgggcccataactcgttaggggttggttttatcgaaaaaacgcattagggcaaaattgtagagttttttaagctctatcgaatggtgtgcatatggccggaaattttcaaaaattttcgagctaggccccctagaaattttcggaaattttttttgggttgaaaatgggggtcaaaaatatttttctggggtattttgatgtgctgagcacgaatatgatgtttatttttcgtttcaaaatttttggaattttttaaaaattcaaaaatattttccaattttttggcccacgggattttgggcgaatattgaaaaattcatatctagcctaaaggttgaccaattttgagcaaataaagcccttaaaaatagagaaaaatcaggagaattttatgggatttatttgggttttctaacatcaatatgaaaggaagttattccagaaaattttgaaaattttagatttttcagaaaaaaattcagaactcgcttctgaaaagtcattctgtaaaaataataaactacaaaaatccgcaatttttttctctataatataaattttattttacatttttatccctttttaaaaaaaagctcccccccccccccccacaatgttcccaaaaagttttttggaaccgcccacaaaaacgcgatttaaaaaattaatagattgttaatttattcaaaaaaatccagaattttgggactcagaaaatccaagattcccccccccccgcatgaaaatttaaaaaaaaatttctatataatggaaaaattcttcgaatgcctcccccaatgagtacatattttaatataggcaattttcgtaacaaagtgcagtcaaattttcaaattttttttcaaaaaaactttcacttgggaaaattttattgattaaattgaaaattttgaaaattttgtttttaaatgcgtggtccgcggccgcggcaatttgaatgcgcgatgcgcgatgcgcggccgcggtttttttctgtgcgcgctccagccctgctttgcatgcaaattatcgcctgcagcaatttgtttcgtggaaagcaaaggcaactgaatcatggcttgccatcgctgtaaaaaatgtggcaaatggaaaaattaatttaaagtttaaatatttttttaattccaggaagttgccagcgattcagaaatttttgatgccctcttcaaaataacattttacgcggaagtgaaaaggtaaaaatgatcgggccattgttaaagtgatcactgaccattgatcagagccaaaatcatctgaaaaaagtgatcaaagcccttagggaaagcattgcatatttcgaaagtttgaacaaaaatccctaaaaattccatttctatgctaaattccgatgctttgtcaaatgagaccttttctcgttcattcatcagtcattttggaatagcttttcgatcacatccaaaatttcatatatttctttttgttaataaaatttccaacaaaatttttcaggtggccaaatgggttggaagtatacaaatttcggcatgaaatggccacaatgggctggtcgctgcaaatcaaacaactcgacgtggacgagtggcgctaacggagcagagaaaagtggatatgagaatggaatgggaggggattaatgggaatgagcgatttgtttaaccaatttttttttttcacatttaacactttttgttgaaaaaacctttgcttttcatttttattaataaaacgattgtatttgaatggttcgcctttggaaatgtaattttgtttggttttttcgaagttaaagatgaattgatttaattttaatgagtcatttaattacatatgtctatgcttactccataatcaattagtactggcaataaaagaaattgacaaaatgcgacggtccccggatttctgcgtt

SEQ ID NO: 20856 - DNA, 947 bp, Heterodera glycines
tggcacttttacgaaacgaccacagtggcacttttacgaaacattcccaaggtggcacttttacgaaacgcccatagtggcactttttacgaaacattcccaagttggcacttttacgaaacgaccacagtggcacctttacgaaacattcccaagttggcacttttacgaaacgaccacagtggcacttttacgaaacattcccaaggtggcacttttacgaaacgcccatagtggcactttttacgaaacattcccaagttggcacttttacgaaacgaccacagtggcacttttacgaaacattcccaaggtggcacttttacgaaacgaccacagtggcacttttacgaaacattcccaaggtggcacttttacgaaacgcccatagtggcactttttacgaaacattcccaagttggcacttttacgaaacgaccacagtggcacttttacgaaacattcccaaggtggcacttttacgaaacgcccatagtggcactttttacgaaacattcccaagttggcacttttacgaaacgaccacagtggcacttttacgaaacattcccaaggtggcacttttacgaaacgaccacagtggcacttttacgaaacattcccaagttggcacttttacgaaacgaccacagtggcacttttacgaaacattcccaaggtggcacttttacgaaacgaccatagtggcactttttacgaaacattcccaagttggcacttttacgaaacgaccacagtggcacttttacgaaacattcccaaggtggcacttttacgaaacgaccatagtggcactttttacgaaacattcccaagttggcacttttacgaaacgaccacagtggcacttttacgaaacattcccaaggtggcacttttacgaaacgcccatagtggcacttttacgaaacattcccaagttggca

SEQ ID NO: 20857 - DNA, 998 bp, Heterodera glycines
aatgagaattcatgcgagattttctggaaataagcttcctttggcctagttaagctgtaaaaaaatttggggcgatttgaatgagaatagaaagagccaggttcgatgaagttttggtaagccaaaaaaaaatccaaacattttttataaaaaatttaaaaatgagaattcatgcgagattttctggaaataagcttaatatggcctagttaagctgtaaaaaaaatttggggcgatttgaatgagaatagaaagagccaggttcgatgaagttttggtaagccaaaaaaaaatccaaacatttaaaaatctataaaaaatttaaaaatgagaattcatgcgagattttctggaaataagcttaatagggcctaattaagctgtaaaaaaaatttggggcgatttgaatgagaatagaaagagccaggttcgatgaagttttggtaagccaaaaaaaaatccaaacatttaaaaatctataaaaaatttaaaaatgagaattcatgcgagattttctggaaataagcttaatagggcctagttaagctgtaaaaaaaatttggggcgatttgaatgagaatagaaatagtactcactcggccgcttcgcggcctcgtggggggccttcggcctcccccccgtgaccgcgagtactacgagatcggccgccccttcttcgagaaggccggtgtcgcgcacaaggtggacttccgcgagggacccgcggtggaccacgtcgacaagctcctcgtggatgaggccaacgtgtgggcgttcgacttcgcgatcggcgacgccgtcaagcccaagtacgttaagtaacacgagcagatgctgcgcctggtgtaggtcggcggcaccatcgtgtatgacgacacgctagtggtgagcaccgtggtgatggcgcccgacacccccatgtcggacctcgatcgcaggttctccggcgtcatcagggaccgtcatcgtccgtctctccgccgaggaacgcatcgagg

SEQ ID NO: 20858 - DNA, 2298 bp, Heterodera glycines
aaaaagtatcaatgataataatatttaaatttaattattattttaaatattatttgctaaatatgaatcataacttagcttaaacttagtcaaattaatgaaactcttggtatttggcgatagctctatatattctttgaattatatgattaaaaaatctagcaaaatttttacaaaaagttgtaaataaaaaaatttcgttaaaatttaaactcaataattgaaaactcattaaaaaattttattttaacaaaattatagagaaatctttgggctatccaatcatataaagaaaattataataggttgtttattaaaaagttactaaggaattcacgctcattattcacatgtcaatttacgggttaaatcacgtgtcaattcacgggttaaatcacgtgacaatttacgggttaaatcacgtgtcaattcacggtcatgatttacgtgttaatttacggtcatgtaagtttaacttacagtcattattcacgtgtcaatttaagggttaattcacgtgacaattcccaggcatgatttacgtgttaattcaaaatcatgatttatgtgttaatacggtaatgattcaaatgttaattcccgggcatgatttacgtgttaatacacggtcgggattcacgtgttaattcacggtcatgtacgtttaatttacagtcattattcacgtgtcaatttacggcttaaagcacgtgtcaattcagctcattattcacatgtcaatttacgggttaaatcacgtgtcaattcacggtcatgatttacttgtaaattcacgggcatgatttacgtgttactttacgggcatgatttacgtgttaattcaaaatcatgatttacgtgttaatttacggtcatgatttacatgttaattcctgggcatgatttacgtgttaatacacggtcatgattcacgtgtcaattcagggtcatgtgcgtttaatttacagtcattattcagtgtcaatttacgggttaaagcacgtgtcaattttttatgtaacaattctttattaaatatatacaatagcatattaaatcattaggagtatgtttttagtgaaattaaagagataaaaaaattttacttttaattttccaaatttttaaatttatttgtctacaacccaatatctgtcttaagttaaaaatttaaaataaaatttaaatgacaaaaattaactgtgaaatatttttaaaaaatttttcaaaaatatgatgccattgtatattagcaaagtcaataattattaaagttaaaaattttaaaataaaatgaatttaattctgtttatttttaaaatatttctgaattcgaatttttataaagatttgaaccaaactttagtgtctattgttacagaataaccattatttgaaattttctattaataaaaatttttttatttaatataaagaaaataaaataaatataagaaattaatttttgttatttttatggtaattttactaaactaataacgtctaattaaattaatttagatgaagtctaaaaaagcaacctatttaatagataatatttaaataatcaacaaaattcgaaattaatttattctctaatttttttattatattataaatttagtaaaagttagattttactttatttattttactaatttttaatgcgttccgattttaattaattcttagaatggccaattaaataaaattttaatatctttttttaaatttaaaagactttacaataaatttaaaaaaatataattattttacaaatcaaaatgaataaataaaaaacttagaaattatcgaaaaattgagatgcgaaaatttaataaattaaatcttaacaaaaagaatgcatttcatttacttgcatttttattattctgattaaaatgctattaaataaattctctttataaataaatacaaaatttaggaggagtgactgagaactaaaaatgaaaacaactaaatgcaatttatataatctttaggaatatataatcacaaaaacaaggttttattacaaaaaaagatatatgcaaaccgattattttgcaataacaatgaccaattaaataaaattggttagttattcctttataatgtttaattttaaatgattttaaaaatttatatattaaaaaacaaaaagtttatttattttttaaaaatcaaaatgaatcagtaagagcatataaattacagaaaaaaaaggaatttaagaggagtgactgaactggaatttgattgggtgccgacaatcggcaaagtgccattgtacaaata

SEQ ID NO: 20859 - DNA, 1979 bp, Heterodera glycines
aaatatgtacataaatatgtaagaaaaatcccaaaatatgtacaaaaaaccccaaatatgtaaataaatttttttttaatgttatttttttgggaaagaaaatccccgtaaagtatgaaatagccacaaaatgacataaaaattactttttttggtatttttaggcaacattttcaaacttattttttctttataaattttcaaaatatgtacaaaaatatttgccgaaattttagattttttttgaggatttccaaaaatttccgtaaaaatactcaaaatatgtaaaaaaaaaatgaaaatatatatgaaaaaaatccaaaatatgtacaaatacgtaagaaaatcccgaaatatgtaaaaatatgtaaataaaagtcccggtttttgttcgcaaacacaaaaaagaaagtgtttttcctgctatttagagcaaggagaagccaggaaaaaaatatgtatttacataaaattggcagccctaaacataacaattaccgtgaatgggtatctcgggactaaatttttatgcgacaacccaagtttttctccggctcctatctttttttttgcttttcacactactttattttttgtgacctttaaaaaatcttaggggaaaaggagggcccggcgtttggataggcgccgcatgggaatttttttataattttaatgcgatttgttaatccaaaaaatgactgggtgggctgtctcgagcaccccttttatatgtatgatttatttcaataattttgcgcagtgttcgagtaaaaatcaaaaatgcaatttgatgtggacaaacactcacctcagcactctttcaatgcgacaactcaattcatggtaattaaataattttggaaaccatcgaaactgtgattattttcctttgtttttaggcaacgcgttaatcattttccacggagttggatactgaccagaaaagaccaactttacgagagcattgagcgtgcctccgttctgtacggttccgattggttcaatttcgtatgtttcgaacaaaatcatttgaaaaagcattcatttttcagattcccgaatttttttgtactccgatgagcagcgctgcgcgacattccatgggccaaaaatttcaaggggctaatttaggatcggatgccaagtttattgtgaagccggccgacggcagtttggggaggggcatttacttcttggacaatggcaatttggttggagagcaatgcgagtgcccgtttagcagtgctttttcagaacgaaactctcgagactgacaagaaattggtggtgtcccgttacatcgaccgtccttttctaatcaacggattgaagtgggatttgcgcgtttatgtgctcgtcacttcgttctatccgctgattgcctacatttacaggcaaatattctattcttttgattctgtgaattaattaccaactcaaaaaatgaatcgcatttttaagcgacggattggcgagatttgcggtgcataagtacgacgaaaaagatgaaattgacaaggtggaaggaggagtggacatgaacaagcatctgacaaattattcactcaacaaaatgtctgccgaatttattcgaaacaccgactgtagggaggagaatatgggtaaaacgcgattttggaatttccattttttctttctttaaaatatatttaaaagcattgtttatcgtcttcgtttcgaatttattttaaaatttccacaaaaattcttctcgatgcatattttcaggccacaaatggactctaagcgcacttctgagggaattggagaagcgtggcgaggacgtgggtcttctgatggttcgaattgaggacattgtcatcaaatcgctgctttccgtccaaaattccattgctgcgatgtgccgaaagtgtaaacattctgttggagaagagtaaatgtcaatcgataagtgaccaggagcaaagtacatttactcttctccaacacattca

SEQ ID NO: 20860 - DNA, 1064 bp, Heterodera glycines
  unsure (1)..(1064): unsure at all n locations
tcaaaaagcgttttattgatttttaaattntggaataactttttaagaaatgatttttgctttatgattttaactattaacattttgtagaaaaaatttcgcttttcgcatttcgcattttcgcatattttggcttttcgcatttcgcttttttttcatttcgcatttttcagtttcgcaaatttcgcttttcgcatttcgctttttatttttcaatttggcccatccctgatgccgacctctgaccttaacaaatctcacaaacctgctggtccttaatttttgcttttttttttactcggataaccaaatgcgatcagcaggcaggctttacaaaaaaatgtgaaagaccacacataaaatatcccatcagagaaaaagttacggattttaaagagcctttaacctaaattggtttcgaatgcgtttccttttgtttggtttttttgatctgcatttgatcattcagtcagctcatattatcatccgatcgtttaagagtcgattactctcatttagtggtaattataataaattttattatttgttggaaggagagaccaccccataaaattggtattgattaaaaaattttgaaatttaaatttcttggcatccctacccctctctcaggcggctaagacagaccccaatcctgaaaaatttgaccattactattagggctgttcgagagctaaaattttccgagaatcgagaagcgagattgacccagtttcttgagagttgagacgaagacttaaatctcgtcatatttctcaacatcaaaaccgagactcttgatcagtcctaatttgcatattttccaccgctaccgtatcaaattttggatatctgtttcaatttctaccaacaaattcctttcaagtagcaatttgtcgcccatttgtccatctttccctctccccccacccttttggcgttgtttgtgtctcatgcgcaactaactcactgaggtccaaccaacaattcattcattcatacaaattcccagccaccggtcgctgtcctctgcccgttgccccccccccccccctggggggtat

SEQ ID NO: 20861 - DNA, 1367 bp, Heterodera glycines
  unsure (1)..(1367): unsure at all n locations
ctcctgagaccttctcagtcccggtcccaaattcccgattaccaatcccagccaatttccaattacaaatcccaatttaccaatccccggatttctgcttgtgccttttcttgatttactatgtgtgtccaatttcattaaatgccgtattcctaaaaaaattatggattttcctggatgactaattaattatcttttcagctatacatttattttcattttgctatggtaacaccaaatgggggaggaggacggtgccgacgaattcggcacctttggctgtccatgtttctgctgttgttggtaattgcaaccactgcggcactgttgggactgttgacacccaggtgaaaagaaaatctcattaattcaaattaaaataataattttatttatttatttaagttggcaagttgtttatttggaggtaagaaaatttaaattttagaaaaatgaacaaatataatactttaaatttaaaatattaagatgatagacttttgaccttcaattgcattgattctctatatttttccaacaaaatcttaaaaaaattgtgtgaatagcaaattttcatccattttattaaaaataaattaattaaatttttcaatgtttcattaaaatatttacgaaattattgtttattgtaaatattttggtcaaatattatttttataaattttttcgtcttttttggtctttttaaatattttaataaattttggtatttttcgtaaatatttatttaaatatgtatttaggaatcaattaatttaggatggtcgtactgaacatcatcatggtttgtggttggattgtaagcgcgacttttcatatgactacggcagacctcgtgaatactatgagacgctacacaggtaaataattaattagacgataacaattgggtaattaatttttttaaatttgccttaggcgcttcgatttggccgggccttttgaccaattttggctgcccccattattgtgtgtgtttaaatttgattattggctggatgatgaagactggtgagcagcagcacaaaaaattggaaatatattttttaaaatcattttaaatttatttatttttatttaaaaccgaatatttcggcataaaataaaacaatataaaaatgtttttgaatttatggtgctataaatactcaacaaataaccaatatataaaattttattaaaaatttgctccaaaaaacaaaattctcaaaaacaaaaaattatttaagaaaattatgttaaacttttcattttgatggtttttgagtaacaaacaattaatttatagcatttttaatanattttattcaattttataggtatgaatttggctatgatgaaaatcg

SEQ ID NO: 20862 - DNA, 1453 bp, Heterodera glycines
attgaaatttttttttcaaaaagggggggggggccatcgggtagtttacccaaaaaatattttcatttgatggttttttgactaacgtcatagcaccatcctttcctttccttcacttaatctctccctctctcttaatcttttatctttctcctcttttctcactcctcaatcacttccctctcaaatctctctctccctctctctttctttctcaatctattctctctcttttttaatgaagttagctaagcagaaaaatttattaaaaacaaaatcaaacaaccaaaaaaaatcatttgaatgactaaggaaaacgataatcagatcatctgctgttttcaattaaattaaataagcaatcgatcattctcagtagggatgcgatttttagttaaatacctaaaatttttgcgcacttgtaacgttgagataagcataaaaaacgagtttttagcttggtttggagcttctacacccacttttataatacctatttttacctatttcgggatttttctacctattacctaggtacctatttttatacctatttcggcattttggttacctattttaaggattttcaaaaaattcttaacaaaaatgcaataaaatcaaaaaatatacccataagaatcgaccaaaaaaattttcaaaaatgcaccctaagaattggaaaaatttctcaaaaatttatcccaaaatttatttattttttctattgacaaaatttttaatttaaaatgtcaatacatattatctaagaaaatattaatatatttaaattttcgtttacaaagagatatgtagaaccaaatttttccctctttgtttgcttttttccactaaaaaatcgttaataaaaatttttatttacctattttggtacctattttggaatttttgtacctatttaatacctattttgagatttttttttacctaaaaatcgcatccctaatgatgatgggatacgccgtggcggggattgtgaatgaataataaaatccgctacgccaggagggatcgaacttgaagttcctttttgttgtgaattttcattctccttttcctataattttgctatttttagttttgctcaattcgcggaatttttcaatcactgaccaattaactgctaatggtggcagccgttccgtggctttaaggtgcagtttttgtaaattgaaatataaaatagataaaccgatttttaaaaataaaataaaattaatattataatttaatatgtattaactttttccggaacctttgcttttgtggccaccggatatttctgggtctagaaccggttttggtcgcctaggattcgagtttttcctaagttatccctgaaaccaaaacagcaaattttgaaaatgggaaacccgatctatagaatttttcccaattcccaattttttgattcaaaaatttttaattttgggca

SEQ ID NO: 20863 - DNA, 1594 bp, Heterodera glycines
tttaaggatggatttatgctataatttaatcatttaaatataaaaataaaattaccataatgtaacggaggacaaacaattggtttatttatttacttctccaatcatttaagtaaacaattgctttaagaattactttttattatttcaaatgcttatcctttttaaaagtctcttctgctgccgttgccgtcgctttgcatttgctccatccttaattaattaattaatgccttaattagcattttttagcgattaattgcgttaattaattcatttgtaagcaattaattgcattaattaatgcatttttttagcatttctctcatttatgtccgattaattaccttttttgaagtgtttgtccctccgtaaaaaatgaatccatcaaaaattgttcaaccgattgttgtgaattggctaaatcgagtgtataaattggcaccaaatgcttatcatcttctccattttgcgctttcagcgaaagaccgacgagccaaaaagtgcaaaaagcgggcccttggctaaattaattaattaattagcaatcccaaacaatttggggattaatgggcacactttggtaacattttgcactttgttttctgctcaaattgcggcatcaaatggtaattgtccaattgggaggaattcttttccaaatttgcccattcaaataatttttggcgaattttactcttttgaaaggcacaatttgttgagtaccgtttataatcaacagctgaacaaacgattaccgcaaagtgccggtatttttcttctatttttatttcctcaaaaactttgctccaattttggggattttccgctaatatttcattggctaaataaaatttcaattaattaattaattatttttttgcattttcccaccgttctccaattcctccactatttttctgagagtgaatttgttgacgttgaaagttgcgttttgttgagggaatgtcggagtgatcactgtcatcgaactccgtcccaaaaaggggcgccaattgcgcacgtttttgttgagagtcgccggtgccaattgggccaattttatcggctcattggcccaatccctccaaaaaataaaattaaaattattttattttatttaattttaattaccatttcgaataaatggcgaagaattgaaatagcaaaaaggacaaaggcgcatttgggaacagaacgcaaatttgggtggccataagtgacaaagagacgccgttgaaaaagccgaaaaggccgccataaatgagacggactgaacagcggggaatggcaattagcagacgaagcaatgcaaattggcattcattaattagttaattagcgttaattaatcaattagactgtgccaaatgttcgtctttttcaaagtttacctttagcccagatattcagacatttgagaaaaacagaaaagttattttcgcttgggactatcgccaattgaaatttggcacatcggtagcctaaaagtgccggttttgccgattttcctaccatttcctcctccccccctccagccaaagaatagacattcttttccaagctcatttctgccattagcttatcccccagc

SEQ ID NO: 20864 - DNA, 1192 bp, Heterodera glycines
ttacttttattaaatttttaatgccaaaatggtaatactctcagggatcttaaaaatctgttccaatacaaaacacaatgtgaacgaatagaagcaatgaaggaaatgaatccaaaatccgggtccggtcgggaacccggacccggccaaccctaggagttttcaaattcaaaagttatttaaaaaaaactaatttaggctgaggatgctttgttgtccgaatttgtcaaaggactggcaacaaattttgacaagtttttacgattgtttttatttgagaaattccaaaaaaattattggcaaaaatatgcggcacattttggcgttgtgtatttgatgaaaaagtattggcaatgtgatgagaatattttaaatggatctgacgaagaatgtcaattctatggcaaatatttgcatattttgtacgaatatttattccgacttaatcttgaaggtttattttttcattattttagaaagaattgccattaaatatgataaaaccaaatttgggatccttcagtggaattggaactcaattttttttttttttgcgggacgggatcccgttgagattagccaatatctcgcaaaaacatcaatagtgatgagaattatatttattataaaccccgaaatatttaaataaaagcgcagaagtgcgttttttgagctcctttcttcaatgcatataagcaaaaatatttaaataggtaaatataattatcatcactatccatccgtttctaaaaaagcggataccaaatagatttattagtagggatgggaatttttgtcaaatgatttttttttgctaactttaaatgaccttaaataaataaatatggaaacctggcaatcttattattgtatttagtcaattctcacatctaatgaaacattaaaaattattggctggatattcgttaaaaataaattcctaacgtgattaaaattactttatttagatggtagcattatttagacaattaaaaatatatttttattttctaaaatccttaatatggtggccaaatttctggtgccaaaacttcccccgcgttcagaaacgtattttttcattaaaattaatcattttaatttttcgtgatgactttttggcctttttatgactttttaagtcgactttttggagatttttcgtgacttaaattcccatcccaatttatta

SEQ ID NO: 20865 - DNA, 1299 bp, Heterodera glycines
cggggacctctagagtttacactgaatttgcatatggcattgaaagccgtggacccatgcaaatgtggcactgatggaaggccaaaaaatgccaggattaatcagatttaaggacgaggcactttattttgagcaaatgaacaaatggaacagctggctgactggctctgctgaggactctgttgaggaagaattgtcgaacaatggcacaactgatgccgatgattccccaaaaatggcgcagaccagtgccatggacatcaaaaatttggcaccaagaaaataggcaggctaacagggatgcgattagcctgtaagcaagaaaaaatttcacaacctgccaaaaggaaaaccggaaaattcaaaaataaccaaaaaaattttttgtaatgtttttaatttttcaaagattttaagacagaaaagttgaaagaagttgggttgaacagtgaaattttttaatttttttgacaattatttaacaaaaatgattttgaaatgccaattttagcaattcattaatcgcatctctgcagcgaagcctaaacccaaaagacagagaatgtgattacaaaaatgagagctgttagttagcccatgcattcattagttttattgcaaccatttttattgtttccattgaaagagatttgttgataaaacaaaaacggcattattggacatcttaaaaaaattgtgcatcctttttggttttttgaaaaattttgagaaaaaaataatgatagttacgccttaaattttgaagaaaaatttttaaaaatgataaaaaaaataaattatgcatttaaaaaatcgcagttttttatttatttattttctctttttttaaatttattttttgattaaaaaatgactacctgacaacttatttattttattattttcaaataaattgaaaattccacataacttaaatttgaattcaaattttttaggccgtgaaacgaagtttcgaatttgtaattgtttttttacggctccaacgtgtgaatttgaagatgaaagtttatttaaaaaaataatttttgtgaaaatgcgcgaaatttttaatatagcaattttaatttaaatgcaacaacccttttggctttttcaaaaaggttcaatgtttaaatggtgtttcaaattagaggtaaaacagattttgcccagaatcatgaaacatcttaaaaatctgaccaaaaaactaattgaaccgagggaactgccacatttgcgcctccacaattgcgcctccaacatttgcgcctggaacatttgcgcctccacaattgcgcc

SEQ ID NO: 20866 - DNA, 1128 bp, Heterodera glycines
atttcgcttaataaaataggaaaaataaaataataatggaaaataaaacaaaccttcaacgtaaattcggctcaaatattcatacaaaatgtcgaaatatctacggtatttttggcattctctctgttcgtattcatcaaattttccatcaattttgtcacattgccaattcattttcatcaaatacaaaatgccaatatgtgctacttttgactctgaatcttcttcatcattcttaaaaaatttgtcaatacttgtcgtttttcctataacaaattcagtaaataagcaatcatcaatctaaatttaaattaataaaaaatatatataatttattttattgaataactttcccaattgagcgaatcatcgaattttgaaagggcgataatcaaatgcttgttatttctcaggtccttggctttccatcgaccgtcctcaattgtcgtgatttccgttttttaagcatttcctttaaatttttgtcaaaattttcttgtattattctttcggcactttcatttgtttgccattcattcgctgtgtcaattgccaattgcaaaatcagctcattaattggcatcttttgttcatttccaaattttatttcataattcaattgctcattatttaatagaattggtgcaaaaaaattgtaatatttttgatttaaacggtattcaaaaatattccaattaaaatgaaaataaaattgcgaaatttgcaccagacaattgaccgcataaattattggcccttcaatttcaatttcatctttaaacacaaattttggcttcactgttggaatttgggcatattctctgtacaaatactcatataaaatgtccaaatatttgcgatatttttggcattttgtatgtttattttctttaaattccttcacaattttatcacgatggaacagatttatatgtgctaaaaaacgccaaatatgtacatatatatgtgacaaaaaaaaacccaaaatatgtgcaaacaacggaaaaaactgctttataaatacgtgaattttgcataaaagtctcattttttacccgtttcgctagcaaaatgcttattttcggaattttttggctaaaattaaattttgccataaaaaatgaaaaa

SEQ ID NO: 20867 - DNA, 2770 bp, Heterodera glycines
gaatctttttttttaattttctggtttttcgtttatctcgaaccaaattaaatttttttttaagtttaaggcaagagagaattcattgaatgatacgaagaaaatgttaaattggatgcttctaaaaaaagttatgaagcatattgtaacgatatactaccttaaggacgacattgtccgttaccacttggccacggtcaaccacatcgaccaacggctcagtaatggcaagctgacgaatgctggacatgttgaagccgtacacgttatcccaccagtttatctaaactagcagaataaaacggagagtaatagatcaaaaatgtggcagagcagattttcgggacaaatgaatctaattttactggttctgtctcacccggactttagtcgccaactttttttaaacaaatttacgaagccaattgcaagtcgaaccttctcatctttgtactgacggtcttcaatggcacacaaaaacagcgtggctttgtccgggaagagaatgccgtcggatgccaaccatttgtctctggcatagatcacagtgttgagcatggactcgtagaacaagcagtagcccatccactcggaaacaatgacgtcgacatgttcaattcccgcctggcaattgctcaatgtcctccaattttgctgtggatgacctcaatgactccgtccatctgattgtctttgatgatttttttcgattgggtggccatttttcgagtattccaccctgagcagggccaaaactcatcattaatgtgtcgtccattaatcaaaagcgtaccgcaaaaactttctttgccccggcgcgagcagcaaacatcgaaagaatacccgtcccggaaccgacgtccatcaccactttgttcttgaagaggtgacggttgtggtaaattgcgttccgataagtcactgtccgaacttcgtctttcaacatttcctggagtttgctcaattatattttagtgacttaaaaaatgagtcaaaatataaatccacggccaagtaaatacctcgtgaattccaaaatgtgcgtatgagtcaaagtagtagtctttactcgtcatctcattgatttgctgcgatttaacagccgtcgacgttgaaacgccacagtcaccgttcagaatgtgttgttttggctcattcaaaatatgatttgtattataaacttcctctgtagtcattgttgttgtaaaagagttatgaaaagtgacagtgttttcaaggctgaaaataaatttatgtttacaatattttccaaaataagttaagtttaaacccaagggagttcattcccaaattagaaatggccgaaacaactgttcttattaataaaacatcaaagttaccttacaaattaggtaggtaggtacctattctacaattgttagaatttctactttttaaataaaaaaaaaacttgtgaaccgccaattacaaaacgccaaagttgaaacaattgaaattttgccgaccgacacacggcagtaccagctgaaaactttttttttttacttattctaaaaaatttacaaaaaaagaagaatacaacccattaagataaaatatacataactttctttatttaaagccttttaatgggtaaaaaacgaaagatccgaactggtgccggtgatgttgtccccgttcctgggcctcttcttaaacaaattgaaaaagacaaatttgcaaaaccaaaatcacatcttcaccttggcaacaatcagaaaaaggaggacgaacagggaaaggtggttttataaattaatcattttgtgcattaaaatcagtttttagttcattgatgctgcgctgagtaccaaaattttacgcgaagcgtccaaacaatggaaagcggaggagaaaaaaagcggagaagaaaaggcattggaaattgaagaaaaatcggacgacgaagaagacatttgcaagcaagcgcaggaattggcagaacaaattgcagtgagttttctttaatggaatttaattgaacaataatttgcaatggaataaactgaaagatcaactcggaagaagaagccgatatttgcggatttaccagtgaagctgacaatgagcgacgtaatattagcagaacaaagaaaagggagaaagaggcgaaagcggagggcagcacaatcactccaccgattgaggcaattgtcaaatcgcatttttatttgtaaatttaattttgtattgtcagattgacggagttaatccggctgtggttgccctctttactgaagttggagctgtgatggcgaagtaccgcagtggaaaagtgacaaaagccttcaaaatgattccggcaatggcaaattgggagcaaatactcgagtgagtcacttgttttgtattggccagtgaaaaaataaatatttttatagaatagcattaaattaacgttttgttcatttaaagattgacatttcccgaaaattggagttcagcggcaatgttccaagcaacacgtgcttttgccgcgaccggaacaccgacacaatgccaaaagtgtgtttttcagtaattaaaattaccaaaaatgcttatcaacaagattcaatgatttggtgctgttgccccgacttcgtgacgaaattgacgagtacaagaagttgaacttccacatgtaccagtgcatgttcaaagcgatgttcaaacctgccgcctttttcaaaggcattcttttgccactttgcaaagtaattaattctaactgtaattttgttaaacattttatttttctgtgctcatt

SEQ ID NO: 20868 - DNA, 1235 bp, Heterodera glycines
aattattctgctgatgaattaagcaattaattaatgtataacattttgaaaaaaacaatagaaatgaaaatgaaaaatgaatctttacttaaaaaaataatttttttttaaatgctaaaagttttaatgaaatagtgaatttaagaaaatgtattgaaattttttagagcatttttttgaccttccgccaggaaatgaaacgccaaaagggcgttgaagacacaaatctttggcacgtcctcctagggttactgtcgtattcgagaagggctacggtagtttctgcgagttattgacactgatgagtagagaacaaacaaaaggcacaaaaaattctcaaaaacgcactataaaaggcacgaaaaaattgtaaaaaaggcatgaaaaaggcacaaaaattctcaaataggcatgaaaaatgcatttaaattaggtgttttatgaggctttgcgactttttgtggtttttctgaaataattttttttcttttcctgttattttgggaaatcctaaaaattgccatttcttttaaacaaatcttattaaaaactacaaaatttttaattcttccgatttttcgaaagttgagataaaaactcaagtgttgcggtttttggtcaacatttgattcggcttaattttttaaatgtccacagcggcgcatttcgcacagtgtaaaataattgccgggaatcccggttccgtttttgtgccaaacgccgggaccagcaggaatgctggaaaaacaaatacataaatgtttgtgaatggtattttttgttcttttctcattgaattaaaatctgtagaaaaaaataaataaaaaaccaaaaaaaaatccgaacccttaattgattaaacataataaaattgatgaaccgagacttcgtaaaaagtaaatttgttcatattaaaatatttcaaatgaataaaaataatgcaaaatgaacaaatagaaataggagggatattaaaaaacgatggcacaatcatgtcattagtagggttataagttgtatgcactaaaaactgccaaataggcgcataaaatatgcactaaaaatccctcaaatatacactaaaaacccgaaattgccaaaatatgcactaaaatatgctttaaaaactgccaaaaatggcttttaaccctcaaaaaatgccaaaaattatgtataaattaagaattgactttaaaattccaaagcaatggctaaggtgctttttttagagaatt

SEQ ID NO: 20869 - DNA, 1322 bp, Heterodera glycines
  unsure (1)..(1322): unsure at all n locations
gactatgatcaatattttcctaaatcgtgaaagcccgcttccggatcaggaaaacgaattttgcataacgttttcacttaaattaataaattttctcgcttttagaaaatgaagcccgctttattactgatatttatttttcttgtattttatttccaaatttattctgcaaattcgactgaatgcggtggcattccgacgggtaaaatgaaaacatttaaatatacttggcagaaactggaaccgaataaaccagtggaaatcaaatattctgcttccaaattaaaaggaaaagaagtgattttgcaacaaaaaaaatgccaatttatttcgaaataattacaaaagagtataagtttgtttaatggtgccattcttaggtgccatttttacagatttactggcaaaaatggtgaacccgagaacaaatgtgtgatcatcaaaatttatagcaacgacagggttcgccaacatttgcggaccgactttttgcgggtgaacctgttaaataaagataatttatgaatgcctaattaaaaaattcaatattccaaataaggttatatgtcaattcgcaaaaaatcttcccgtttcgtgttcccaaacacaaacagggcaaaactccgagtttcgaactccaaaaccccgctttttggcttcaagcttcgacttcgggtaaattacccgaagtttcgggaaaaatacacccctaacgaacgagttttcaattgtgaaaaatgcaccctaatgatggaactgagaacttaaaataacagttttttctacttttttcgagaattttttgctaaaaacctgttttttaccaacggggaaatggttcaataaatgacaatccaaaaatgagtggagctaactgataattgtggctgcttttcggttcgccgacatttgtggacagacttttgcggaccgacatttgcgcaacttttgcggaccaaatttctgggttgaattgtctaaaagatttttccgagttaaacatcattcttgaggagtgatctgaccaacttatgcaacaacatcgaaggtaataaacatatattttttcctgaattttggttttcattgataaatacatatgtattaattcactcgttttataattttggttagacatttttgtaacaacaaattataggaattttctacataaaggataactcaatttagttttgtttgttaatgttaattgtttggcatgcctgataaaaatttcttcaggtaagggtagaagtganncccgaaaaaatttctccatgaatgatttttgaacatacttttaaatgtataaaataaagcga

SEQ ID NO: 20870 - DNA, 2531 bp, Heterodera glycines
  unsure (1)..(2531): unsure at all n locations
ttataagcaattccttgattaacagaacatcgcgaaaagtttcattcatttctagaaaattttcanttatatttcctttaaaagttgatttttaaaaatgttcttaatttcttaaatatttttaagtcttcaatatttttcttgaaaatttctgcctgagcaattgcttttatagggagcttaagctggccagcagcttggtggtctcatatttttgtcctcttaccttacctctttattctgtcgatttctctttttatttattcagctcttttcacgttttcgcacattatttctcattgaatctgcttcgcaccattctcttttcccctattaatttaaaattctgaaatattaatcttaaaattatcaattaatcagctcaagtaatgataattgttgcttattagttttccagaaaatcagctttacctaccattattggaatgcttattgggctgtgagtgatgcttcaaaatattagtttcattaaatacttttatagtttggtcttgttttcaattttaccaaaatttaatatattgtatggcattttagtgcataattttatgtttgccaattttcaggtcaatggtaaaactgggctgctgaaaacacattgacatattttgatcatcaaaattacttgtttaataaacaagaaaaaaatacaaatgaattttacacccaaaatatttctatattacttaatattaatcaattatattaacatatttaaccaaaagatttacaaaaaaaaaaattaattatataaattatataattcattaatttgatcaaaattattaaaaaagccgattaatacaaataaattaaagaacattaaatttttatttatatttttattttgagaaagattttttatgaagaaagttttataatataatcgctgataaaaacaaatgaacattattattcatttgactaaaacatcgtctcccaacaataaaaagaaaaaaacccccaagaaataaaaaaatttcaatgacatgagcactgtgaaattaaggccgaaaagataaatattttaattaattatcaaaatacttaaagaactaaaggcgatcggtgtcggcctgttattttctaaaattacaaaatctttgatggcatataatttttttacatttattagaaatttagaaaaaatatttctaatgtacctttcgatgcagatcagcaaaactcaattgcaaaccgtagtcagacataatattattttacaaatatatttaggcaaaatcatttcaaatttaatttaagtttgattttattgataatggtggattttaaaatagttgactttcatatttttttgcttactttagcatcttatgcttttttgtgcttattgacattatttttttaatttaactaaaacatcgtcgcccagcaatgaaaaaaaaacccctatgaaataaaaaatttccttgaaaacttcaaggacaaacagcacgtgtataaaaggcatgataaatatttatttaatacgttttaaataattacccaaatgattaatgaattaataaagtcaaatacttttaaaaaaacttaaattatccagaatcttggtccttacaaattagcgtttaatgttttaatcaaataattttctaatgatttctatgaaaacttttcaaatgtttgtttctgagttgacaagcgaactgtgagaatttttaattttttaaacgaatccatagtcaaatcttgagaaagttgtgagcgtttccgtgaatcgttatgtcagtttccctttctgattatttcatattcgccattagccattataagacacgtatccatttttcttttgagaatgactaatgaaaaagtccaattatttccctattaaatttatttacaattttatgaattaaatacaaaatatttgtgaatgtgtttactttgcttttaattcatttaattttaacttttttttaaatttgctcacttaggggaaactgtcaagattacaaaaaaaatttaatttctttgcatttgcttttcttaatatttgaatattttacgttttacataaactatttatattcgttatttttattggataatcaatcttccgatgtttgatcaacatatcattatatttggctgaaaatcattcttcaaaaaacaaccattcgtagacggagtaccaattcattttcccaaattgcctttttgctggcaaaaatatcggttaataaaaagaagcattaacagtttttaatgagcgtcgaacagctatttcccctctatcactttcggagtttgaccggaaagggccggtggaaaatgcgtcagtgaatcagaatttcatgaaaaacaagatagggtaactgcaacaatgctacaagaattacagaatgcgttgtttatgcattttggtaaatctttataattattcaatgttttaatttaaaaaaactaagttaccaattaaaaatgaaaactcttattcaatcctcggtaggagtactagagttaagcaccgacgctgacaaaggaag

SEQ ID NO: 20871 - DNA, 1781 bp, Heterodera glycines
ataagtaccgaatttttttccaaaaaataaccattaaaaaaattttatttacatattttcctacatatttgaggatttttgtacatatttcatacatattttagcattttttatacatattttatttacataattcgcaaattttcttacataaaattagcagccctagagataatgaaaaattctagcattttctttcaacagaccaaaagcaaatattttaacatttttatagttatgcaaaatttgtcatttttgctgctttgcgatgtgccaaagtgtgatcgagaaggtgcactcaaaagcgaaattgagcaaacggtttattatttatcgattaattgatataattaattccaatcactaatgacttggccacttttcagtttcccagcctcaaatgccagcacattcactgctacaaaaaatggcctggccacaagttcgacacgttcatgcacgtcactgtagccgaacagcaaaagcaacaacattccccaaaactatgtgctgcttctgagcatggaacaaacaaatcccactgcttttgtccaccattgacggatttggattcactgcacaaaatgttgcgggtgaaaggcgcacgccgagtaaccgtacagccttggctagcagtaaacggagaaacggagaacaacacgaacaacagcaacaacagagtatcaggaacaattgcagctgttgcgtgagcgaaacatgccgagaaaaacaatgctgcgaagcagtggaagacgaggaggagaagaaatatgaaatttaacatacaattttccttttttaaattgtaataattgggaaacagtatgtctttttttatacagtatacctatggttatcgctctgtttttttttcattttaaacgcaaattcattttgtttgattaataaattaaaaaagcgtaaatgatgacaaaaattgatgcaccaaaaatgcattttatggttcgaaattgaaaattaactcaaaaatcgcactttcctccagttttggcatgcctttgccattgacaaagtccgttcagcccatgtacgaagtgcggcggtccaacacgcgcggaatgtgaaagtggtggctgctcagctccgtgctgaaagtgcttcaaacaacgcaatcagagaagagagatttgtccggataattttgaataaaattgattaataataataaaaaaattaattttttattttctccgaaaaaattggacttcatttttaactataattaagccgcgaccctcgtggattttggggtcgggacttaaccctgattcgaacattggagattaagcccgagattggccatcccggtacccttaaatgacctgggggccgggtaaaaagtgtgggaggagcgtcgcccattcttccgttggcaccaatgggcgagcaatgaaacaattaatgaggcaacggtgagcagtagcagaaccatcagaaacagcaacgccaccgggttcagacaaaggtcacctgacgctgaacaaaacagtggtggaaaacgggaaaactcagaatagaaaaaacagtgtttctaaaggaatgaaatgatcggatcagcagagggagcttcatataaaagaatttaatcagctttaaaataatttatctgctggttatgggatttaaaaaggatgtaatggaatgaaactgatatcattcgatagccctaattgttttctgattgcctgcaaaattcgtaaaatttggttaagtttcaaaaaagttacgaccaaaagaacttcaaaaaattgcttttattt

SEQ ID NO: 20872 - DNA, 1327 bp, Heterodera glycines
ccctttttagagccaaaaatagccaataaaggcttgtggtccgtttgtaaaataaattttcggccgtacaccatgcggtgaaatttttgaacggcaaacacaatggccagtgcctctttctcaatttggctgtaattttgttgcgctgctgtcaatgtgcatgctgcgtgttctaccactttttcctttttgtcggggaatgtgtggcttaatgtggcgccgattccatctttggacgcatctgctgatacgacgattgggcgtgccgggtcgtaatgggtcagcagaaggtcggacgtcatcgtttcctttgctttttcaaaagcattttgctgttcggacgtccaattccaaactacgtccttttggaggagtttgtcgagcggtgcacgcaattcacgcatgcatttcacaaatctgccataataattcaaagctcccaagaatgatcggagcgtgcttttgtcgatcggtgcgggcattttccgaatagcgtccgaacgcgatgggtcaggacgaatgccatttgctgacacaatatgcccaaggaacaaaagttcgggctgcaaaaatttgcatttgtccagttggatgcgaagaccatattcttttatgcgtccaaaaagagtgtacagtgccgtgatgtgttgatcaagcgtttttgtggcgattaatccatcgtcaagatacgcgaatacacctgggataccggcacaaatttggtccatcagatgttgaaatattgccggtgccgatttgactccgaatggcaggcgttggcattggaagagtccgcgatgcgtgttgatggcgcacaattgcttggatttgtcatccatttccatttgcaaatatgcatcgcgcaaatccaaatttgagaaaaatttcgcgccattcagtgaagcgtagatgtcgtccggccttggcagtgggtgccggttcaattccaatgcattgttgaggccagttgagaagtcgatgcagactctcgtcttgccgtttttcttttttacggccaagatcggtgcggcccaatgactgaaatcgattggcttaattgcgccaatttgaagaagacggtccaattcggcattcacagcttccatggcgccatgtggaattgggcgggctcggcaaaatataggctttgcatcagaccgcaaaatgagatgcgcctttgcctttgagcagtgtcccagtccttcttcaaagacttcagggaaatctttttggagtaccgctttaagcagggacacattattgatcgatttgtttggcggcttcactagaagaaaattgtcgatcatttttgtcgcctgatccgatt

SEQ ID NO: 20873 - DNA, 1918 bp, Heterodera glycines
  unsure (1)..(1918): unsure at all n locations
tcagaaaaatttttcaaaattttttntggaaatagaaaacttttggctggtgagcataaatttcagttatgtgaccataactttgcaggggttgattttaacaaaaaatcatcttagagcttttttgtagagaattttaaaccctatctattatgctttgtcttatctttttatcttaaatatgcaaaaagttataaaattaattgtgattttgaaactcaaaaccaaaggggggaccccatggttttgcatttcatgaaatttttttttgcttctaaattagccaaaatgcatttttatggcataatttgaggtgctgaatacgtatatatgctttattttgcgtttcagattttttgaaaggtgtttaaaattttttgaaaaatcgtcaaaatttgagccccggaaaatccagtgaaatttcgaaaattcataactctcttcatttttggtcaaatttagtggaataaagctataaaaatagagaaaaattgggagaattttatgggatttatttggtacttctatcttccaaaataaaaaagttattccagaatttctagaaaaattcgatttttcagaaaaaaattcctaactcccttctgaaaaagtattttttataaataaaatactacaaaaatccgcaattttttgctctattttataaattttatttggcatttttatcacttttttgaaaaaagttatagaaataaaagtcattttgtaatttgggaccacaggggtgtgaccatgatttttgagtggaaaatttttttcaccaaaaatcttccaaaaatatgattttaggggttatttgggccgctgatcacgaatatgcaaacatattttactttagacatgattaagagctcagaatccctgtgtgattggggattctgaggggtggggcggcatgttcggacccaggccgtgtttattattttttaatttattaaaaaacgggcgcgaagcgcccgtcctgaggctgcgaagcggccgaatgttccccacaaaatttaaaaacgggcgcgaagcgcccgtcccgaggccgcgaagcggccgaatgtcccccaaaaaattaaaaaacgggcgcgaagcgcccgtcctgaggccgcgaagcggccgaatatccaccacaaaatttaaaaacgggcgcgaagcgcccgtcctgaggccgcgaagcggccgaatgttccccacaaagtttaaaaatgggcgccaagcgcccgtcctgaggccgcgaagcggccgaatatccaccacaaaatttaaaaacgggcgcgaagcgcccgtcctgaggccgcgatgggccccagcgcccatggcctttgagcttaacaatgggccccagcgcccttggcctttgacttccagatggccacagccaggctcgtagtgtagaacacaaagatttcacccggtgcggactcgaacccccgacctctccaaagcatggagtgctctgtccaactgagctacgggcgccacttgtagaggttctcctttttgcgcctgcttttgcttcagtctgcgccttcgattgcattttcctcagttgcgcctgtcttcgatctcagtttgcgccatcgttctgtttgcgcttgtgttcaatctcagtctgcgccctcgctcagactcagtttgcgcctgcaattgatttgcgttcccatttgcgttcctcaatgagcgttccaatttcgcctcaatttgcgcgctgtctttttgttcctgctcagacagttgctcttccctttcgtctcggtttgagcttcctcaattttgcgcttcctctgacaattttccattccgcctcggtctgcgcttcctcaatttgcgcttcttaaatttgtgcatctccaattgcgcttcaacaatttgcgctgctccaatgcgcttctccaatgcgctttctcca

SEQ ID NO: 20874 - DNA, 835 bp, Heterodera glycines
gaagagaaataacctattttaaatattatctagtcagtccttttaaataatttttattcaaaaaaatttttttttgggttttcggggcagtccccctgaaccgatgttaggcttaactttttttcagaaactgatcagaagcgcagcaaactttgcagggatactgaaaggaagagaaataacctattttaaatattatctagtcagtttatttaaataatttttatccaaaaaatttttttttgggttttcgggcagtccccccgaaccgatgcgcccagatttatggggagaccgaatccttcgggaatagcttccctatagtctgtactttaattctgcgttggatttttgctccccataattgtttgagtaccccaaacggacacttgaataaatcgatttttttatttcataaatattttttcagaaagtgctctaaagcgcaccaaattttatttacaagtcaattttagcactctgatgctttattatcaaaaaggaagatggagaaaaaattttttaaaaatttttccttatattttggttatatcgttttgcttttggtggggtgcttggaacagtggaatcatgcgcacccgtccgatctggcaagttaagcaacgattgctgactagccaaaaggttcggtgccgtgatgaaacgaaccagcactgcttaccccgcggcacccggcacggtcccccgaaggaatggatttaattaaattctctccttcggggatttttttccattaggtcgtctgttagcgtttgattgttctagtcaatttttcgtgaaatatttgtcgtgctctgaagggcgggagggcggg

SEQ ID NO: 20875 - DNA, 1469 bp, Heterodera glycines
  unsure (1)..(1469): unsure at all n locations
aaacgcaccaaattttatgtacaagttaaataaagctctctgatgcttttactatcaaaaagggagatgaataaaatttttaattgctttttaaacatgccaaaaagtttaggcttaaattaaaaaaattttcttcggttctagctctttcaataagcaataaaatcgtaccaaattttataggcatactccccggtaaaggactaacttaacctgaaaaaatgacaattgtaattggttttaaatttttttagaaattctgagtttttaactgtttattattttttgcaaaattaattcataaatattttttcagaaaatgctctgaaacgcatcaaattttatttacatgctagtttaggcactctgatgcttttactatcaaaaagggagatgaataaaatttttaatttgctttttaaacatgccaaaaagtttaggcttaaattaaaaaaattttcttcggctctagctctttcaataagcaataaaatcgtaccaaattttataggcatactccccggtacaggactaacttaacctgaaaaaatgacaattgtaattgattttaaatttttttagaaattctgagtttttaactgtttatttatttttttacaaaattaattcataagtatttttacagaaactgctctgaaacgcaccaaattttatttacatgctagtttaggcactctgatgctttttctatcaaaaagggagatgaataaaatttttaaaaatttttaattcctttttaaacaggccaaaaagtttaggcttaactttttttcagaaactgatcagaagcgcagcaaactttgcagggatactgaaaggaagagaaataacctattttaaatattatctagtcagttcatttaaataatttttattcaaaaaaatttttttttgggttttcggggcagtccccctgaaccgatgttaggcttaactttttttcagaaactgatcagaagcgcagcaaactttgcagggatactgaaaggaagagaaataacctattttaaatattatctagtcagtttatttaaataatttttatccaaaaaatttttttttgggttttcgggcagtccccccgaaccgatgcgcccagatttatggggagaccgaatccttcgggaatagcttccctatagtctgtactttaattctgcgttggatttttgctccccataattgtttgagtaccccaaacggacacttgaataaatcgatttttttatttcataaatattttttcagaaagtgctctaaagcgcaccaaattttatttacaagtcaattttagcactctgatgctttagtatcaaaaaggaagatggagaaaaaattttttaaaaatttttcncttatattttggttatatcgttttgctntttggtggggtgcttggaacagtggaatcatgcgcacccgtccgatctggcagttaagcaacgatg

SEQ ID NO: 20876 - DNA, 2722 bp, Heterodera glycines
agagtcaataaaaaatgtattttcattaaacggataaaatactttccataattgcaaaattacattataaaaattcactcactgtcgtaatgtccactgtccaattgtccgcttctgtcaaaatgtgttcttgtccaaatgtccggtcacggtcttcgcatgctcttttttgcgtagttttttcttttatatttttatttcccgtttgttatttctttgatactgagcgtctatttcattgggactcagttgtcccggagctcagatggcctttgttcgacttcatccttgcttttttagacatacatcgtcaagagctttcgaatgatacctaatttgttctaaaatttttatttagtgtttttatagttgatttttggtgcaatttttctgattaaaccagttcaaaaaccgttttttgattttcccgcacctaatgactcataaattttgctatttttagtgtaaagataaatataataattaatgcgccttataattaataaaaaatgtattttcattaaacggataaaatactttaaaaaattgcaaaattacattataaaaattcactcactgtcgtaatgtccactgtccaattgtccgcttctgtcaaaatgtgttcttgtccaaatgtccggtcacggtcttcgcatgctcttttttgcgtagttttttcttttatatttttatttcccgtttgttatttctttgatactgagcgtctatttcattgggactcagttgtcccggagctcagatggcctttgttcgacttcatccttgcttttttagacatacatcgtcaagagctttcgaatgatacctaatttgttctaaaatttttatttagtgtttttatagttgatttttggtgcaatttttctgattaaaccagttcaaaaaccgttttttgattttcccgcacctaatgactatttttcatgatgattagagttcattagagatgattggaagaagttttaggcaggtttttcgcaggcccaattctatattacagcccggggattccttttatttaattatttttttcataaattttgctatttttagtgtaaagataaatcattaatttttaatatgttcgcatttgccacctttcgtctttccttaattatgccttaattgttctaccatcgttcgcctcctttttcttccctccctttcccatgctttctttgtttgccgtgccattccacgacgctgccatccataattatatcttaattgtgttcacctttcggtctgccattgtttcgccttcctttttttcctatacttccttccgtgccctccttttttgccgtgccagaatactttttgctgacgatctcccaattaaacattgcctaactttgaccacggaaattttggtctttttttgcccttttattaaaaagattcaaattcgtgaacacgccacggaaagccctccagcagaagcctattttaaatccaaaaattaaatttaggttatagagtaaatgagaaatttgaaggattaagcaaatctaataaaataaaataatatgaaattggagagataaatgaaaaaaccaaatttttcaaagaaaaaaactcataaattaatgggttaaattgaaaagcaaaaaaataatgatttttaaataataaataaaaataaaatgcatgaaatcaaaaaatattaccaaaaaagaataaaaaactaataataatagttatacatgaaaaattaagcattcttacttataaccgaacacacaattatagactggtacaatttttgccgagacatcaagaaaaaaattatatgtaaatatttttaacttttaatgaagaaaaatttatatgtaataaataaaattattgaattgataatcatttcaaaaatacttaaaacaattattcgataataaaataaactgaatattttttatattcacaaatggaagaaaacagcaaaaaatattataaataaaaagtaatacattttaattaaaataggcacagttaatcatctaattttttaataatttcaacaagaaattcaaataatttataaggcaaaaaatatgattatatttcattgatacattatcattcagttctaagtttatgtttaaaataaataatccaaaagaaataatattttttcagccgatcatctaaaaaacgaaaataaacataataaaattaaaacaaaatgatacaaaatttaaatgacattttataaaattttgttttgaataatttgtttcagctttattattttgtttataattcacatacacccattccaaaacggaaacgggagaactgccgagaatttaaaaaagaaaagttgatgaaataaaatgatgataaagcattaaaaatatacaatttaatgaaaaattatttatttgcaaaatgtcaaaaagaatataatttttattaaaatttatatatgtttttaataattgaaattcgattcaataaaatatatttattcaaggtaaataatcttgaagtatataaaaattagattaaaacttgtttaataaaatgaaaaagtaaaaaggaaatcggtctttaaaaaacccgaaatgaccaaaagaggcaccggcggaaatatcaaatttttttaatcttagaaaaagacttttaaaaaaggtttcataacttacaaacctgaaaaaagagaaatgcaaaaataaaagtaaaataataaataaattaa

SEQ ID NO: 20877 - DNA, 1591 bp, Heterodera glycines
cataaatatatttttaaaatatattttttggcacacattaaaagttatacgcttttatttgcagttttttttataacaattttcaattttttgtgacggttggatgcaaaatgcttctaaaacttccgatatttttgtactcttcccgtcagtttttccgtgccgttgcttttgtgagtgtttaaaatgccattgatttttcttttaatttcccctatttcttcaacaggttcggcctcagcagcgtcttctgtccgtccgtctctcgtcgaccgccgccaaaacgccggtccaggagttcggctttgagtatctgaagcggcagatgaacctgggcaggccgttgtcgccgcacttgcaaatttacaagccccagttgacctgggtgatgtccggcgtgcatcggatcctcgcctgcatcatgtccggaggtgatgggcaccatgtaatttgaacatataaaattgaggcgtaatgagtacctggggtgtatatatccccaaagggtaaaaattccttaaaggcaagtcttatgtttttgtaaaaaaatttggcgctatattaaaaatggtcaattttgaaaattttttcaatttttttttgtttttttacacataatgatgaatattaagtattaacagcacaattatggtgaataaaatgtatattcacgatttttatccaaaaaaaaatttacaaaacaaaagggtcccccctatggtttttgataaaatacaaaatctatcactttataactagcgccaaatttgcttaataggcccaaataattgtcatattcgtgatcagcgacctttaaaacccccgggtatttggtttcaggactttttaaacaaaaaaaaattttgaccaaaaaaaagttgaaaacatttttcaaaattgaccacttttaatatagcgccaaaaattttattgtacgagtgccattgactcagcgcacccaaccccatttagtaaaattaaaacttaaaatcgtggttgcgtgtcgaatttgataatttttcccccaatttaagcgcttttggtcggcgttttcgtttttggcatttgttcggtcgatttcacttcgttcgcggaacggcttaactcgtggaatttgtggcgaccggtgaccaattcagtcaaatttgtgatcgcctttcccattgtctaccacatactcaacggaatccgatttatggtctcatttttacatttaaatacacataaattgaatttttactatccaaattactatcattttcaggcttttgacatggccaaaggcaccgaattggcgtccgtttaccgctccggctatttggtgatcggcttgtccacgctcatttccctgctcattgtggccaattcgaagcatttgacgaaggaacagttccaacagaagtacaagaaggaagcgaacaaatagagagaggagacaaaaacataatgaaattgggacacaccgcctcaatgtttatgtattgctgaacaacaaacagtcaatgaacgcgcataaggcaaataggatgtttagttttgcacggagagaaatattatttaaaatagaaattttggcattttttcatcggct

SEQ ID NO: 20878 - DNA, 1601 bp, Heterodera glycines
gacaaaaatttaccccatactatttttctaaaaatgcaatgaaattcctttgccccctccaccaatttccattcatccgtcagacgattgttcctcattggcatcaaatgatgagcaccaacaacagcaacaacaacaaattgtgccttcgcgctcaataaatcgacagcagcagcagcagaatggcaattcacttctgccaccaccaccaccgccgtcggcattggcacaaatggtggcggagggattgccggcggatgatggtgattacaacaacagtttcatggacaccagtgaggacagtcgggacggtgttggtggtggtggtggtggtcatgctgcaatggtgccaatggatgctgctgctgacctgttgatgatgtccaacggtggtggacagcatgcaaccaatgggaacatgttgttggttggcacaccgccgactagcacaacaatcattgatgaaccggtcggcgaaattggtcggtttgatctacataaatcagggaggtatatgggggaacgggggtgtcagatcctcaaatcacccgcgaaaattgggaattttggatatatattttttggcaattgggccgaatgacgcggcgatatcaatgaaaattgagagacttttgattgtgatgataaaattgcagatttggtcatcatcgatggtgtggtggcgggtgactttgcggatgagcaacaccaacaggaggacgctgtggcacagcatggtggcttcacaaatgcgaaggaacgggatcaggcaaatttcccaaaaattaattgtatacatgaaggaagatatatggctttcatatctccaaattttgaatttcacttttttttttactttcagtttgagcgctaccgaaatttgttggaatttggtcatcacatttcacaatttgcgctcaaaacggatgccgaggaagggccgtgccaaggctcggcaccactccgacagcgaatgaatgtatgttatttttgatgttggaaatactgttattgttttcgtcattatcaaggcatttgtagtcaagccggccaattggagtttaattcatcaaaaaataataataaaaattaaaagaaacaaatatgaattttctatgagtgtttcaaatattttaatgaaattgtatattttttcaaaataaaatttaaatggtttctttaatttttctagaaatttttaaaaaatcctaaattcggaagtgttttttacagcaactttttgtggtgcggcttaattggacctccatccccctataaataaaaatttttgttttgaaaattaaaaaagtaggtatacctatgtatggtacggtacgtttggatccaaaatctttgatatttactccgtatacaataatattttactgtataatcccgcattttcaggaggccttttcgttgctgtgctatcctgacccaactcaatctgctcatgccaatctgtttgatcaaatccaacgggatttggttgccaaggcgttgaatgcggctattttaggcatattttttttgccttcctaattgtaaaaactaaaactaacgaaatttgggttccattttacggtcgaatgggaaggaag

SEQ ID NO: 20879 - DNA, 1515 bp, Heterodera glycines
ttgctgttcttcttcttcttcttcttcatccagactgaactgatcatcattcattcctcaaaataaaatttatgaaataaaatttaaaataataattttggctctattttaaataaaaaagttattttctaaatatttttggccattactttttttgaaacaaaacaaattttatgaaattttagcagcaatagggccaaatttttcgctttcttttattaataaatttcaaaataatttctttgattttaaaaatttcaaaaccatttcttttattgtataattttcatactgtatccactcaattatacaaaattccctaccgtatccgtcttgtccaaacacttcagaactggcaacagatggctccgttgttttggctcgattcagctcagcaattctggcaatcagaacactcatttcctccgatgtgctcagatttggaaaaattgctaaaaatgaaaaattaatttaaaaaaaaaaaaaaattaattttagcaaatttaattattgaaaaatgtttttattattgtattttaattatgaattttaacaaattttttacgttggagaggagaaaattcgtccgctgatgaagaagtcgtgaatgatgacattttaattttaactaaaaatttattttaatttatttaataaatttagaaaaatatgagcaaatgaaggctaaattctgctatagccgctgtaattgtgcacatatttataggccaaaaagtaaataaatttatgggcaaaacgatgacccaaaaatggagaaaatgcgacggcaaaagataggaataataaatatttgaataactcataattttctgccgttttcatcttttatttatttaaattgttgccttttggtgttgggcaaacggtgacccaaaaaatgggcaaaactgcgggggaagaaagaggtgggaaaagggcaaaaaaagttgagatgaaaactttattaaaaataaaaatgcataaaataataaaagatggtttaattatggagaaggcttatattttttggaaatgaatcataacataattggccaaaaacgggaaaatgttaaatttctgctcttttcacgcgtcaataaatgatatattcaattataaacattaaattttcaaaaaaaaatcttaaaaatcaaaggtttggcggacaatgaaacattttttgcgccagaaaatcttaaattatgtttgatttacaatcattcaaccaaaatgggtaaagaatgagtcaattttggaaaattcatttactgacatgttttccaattttttggcaacttatttccagtttttagcaactttttagatacctatttcgcgatttttagcacctaaaaagacctaaagcggggtttagcatctattttggcattttcgaactttagccctattttccttttcacagtaaatagtgaaagggactaggactgatgagcgaataacagccgataatatgaaagagtaccgaaattggcgtaacaaaggccaaagtggaca

SEQ ID NO: 20880 - DNA, 3014 bp, Heterodera glycines
  unsure (1)..(3014): unsure at all n locations
gagactctgcttaatgtaattgaagaaaaaaattgagcacggctccactatcatgtcagatggttgggctgcattgtagatttcatgccgcccgcctgatgtttgaactttacattttttaattttttttgcacgtaaaatttcacgtaactcacgcaaaactcatgatggctaaaaatgaacgtcatattcgtgttcagcgcataaaaatgccctagaaaaaattattaaaaaaaaaaatttcagggggggtcacaaaagggataagaacccaaaaaacacctgaaaagggtccaacttcgtcctcattactgctgcaaattccgaccgttccctcattttttcgtggcgcaattggcctaaatcttttggcagcaagaatttgctgatttgtttttggttgctgaataaaactgcgctttctctgaggtttttggccgaaaaaagcagcggaatttgacgtgccagcggccgacgaaggaatattttggcgaatggggcagccgaattcggcacttctgaagtcggattcggtcggtcgtacgtcgccatcgtatgctggggaatggttaaacattgccttttccatttcccctgacaaaggagggatgtctcccctcccctaattatttttcccgtcncattcttcgaaattttttcctaattgtaagattaaatgtttccacttggggtaaaggaataaaccttctgcaaatatttgctgcgacgaattcccagcggagttttcctcacgaatttgcgttgtcttttccccctttttgctgctgttttcctggcgttgttccgtgccattttcgttggcttaaatgaccaaaattgtttatgtttttgtcagtgtccaatcacccgaattgaaaggcacaaatcgaagggtgcctttccgtgggtttgtggcgtttggcatttttggcacatttggcgggcaatgagtggtggtcagctgaaattccaaaaatactgacaattgtggcaacacaacaaaactgaccgtttgtgaaccaaatttgtgccaattaacgcccgctaaagatgactccgttttttgttgcgtcgtccgttctttggcgaagaaatttccgatgggttgcgaatcggcacgcgaattcccttcacttttttggggttcgctgctgtcatccgccaccattgtgttcagaacttgcaaagattcgtcggacaatgactgagaggagagagacgaaggggtcaaacgccgttgggaagacaaattcgaatgcatttcttggtgacggtagtcaagcgaagaaagggagtcgactttttgaatttcatttggcttaatttttctnttaaatttattaattctttgaatttgcttacaaaatgcattttgtgactgcgcgaatccgtcccaatttcgtctctttggcaattcgatggaatttgcctttgtttgggaattgccaatttcctcttcccgtccggactcagtgccaacacagaaattccttggattttgaatagtttctcgacaacgacgtccattccagaattcgctgtgatgttttgcgttcatgggtcaaaattccgtccaaattccctccccaaaaaaatgcgtcgtttctctcacctggcgattgctccgtcagccgatcctttctgtttccatctgtcattttatgttatgttaatgaatttgccataaaaaccgcaatgtttccaaccaattgaatgttccgccgctctgtcccgagagtcatcgttctgttgtcgtgtcacatcctttttttgttgcattttgtgtataagagccaagttatttgacttagacggccgttcggccgcatttcgtgggttccaactgacggggcatttctcccgcacaaaatcatttggtaaagatgaataaggaggctcttcaagcagttctccacccgtttcagtgcactgctgatcattctgttctatttcggaatcactcgattccttagaaaaaattttagttaaaaattttgcagttttcgcaccgatggcgagtggtgtagagggatgctcgactgttcactttcctccaaatcagccatgaaaatttcgtcggttaattggccgttcgaccaatctttgctattgtcgcacttttcattcgcatttaaacgaatcgatgcatttcttttcatttttcccgtgccaattgtctgtttcgatgtcaaattatgctccgctatttcgatacagttgcgattctgtccgctggagtgagtgaaagaaatgctaacgagaggagcggactggcttgaacagacgccttccgctttgtgcgttctcgtcctctgcaatgcgacatttttcagtctttttgctggtgtctaattaccgaaattggactacgcctcttggtaaggaccaagcgcagatcattcctccgctgaacgttgtaacgtggaggcgattgacgcagtgttttttccttttcatttcttgcatttctcccaccaaccgtcgaatggcttttgcttaaataacctaatgctagctctaattcccactcaagaactaacagcgcatccgaaagtgtccattttgtctcctctacaaatttaaggtctagcattgtttccgaagaggatggcagaagcgttggatggtggggcggctgaaaacgcaaagcagcttataaaattgtacgatgaattaacggacagaattggaaagggtgtagataaactataaattcctgagatcaataccacgtaaattcacaatttgcatagacaacgaaccgatagcaaaaagccttggcaatcgtcgtcagaatccgagtcactgctgacagaacgacatgtcggagagaagaaatgactatgatgaattttctgatgatgaccaaaagcaacggttttaacgacaagaccacaattctgtgttgattgaattccaatgctttccttttcatttaaagggattcaaacctgacacttcactaattttggtgtttcagtcacagaacaaaaaccataacaggttgcttctaa

SEQ ID NO: 20881 - DNA, 1935 bp, Heterodera glycines
  unsure (1)..(1935): unsure at all n locations
gcattctgaactctntggaccaaaggtactgtaaaattatcttgttacggtatgctttcaaatgccaaattacggtatggcatagtttcactactataccgtataacgctacagtatgaacagacaccgtaataaattttgtagaaacattttctcatggattattgttgcccattccttctttcccattgaaaagtctgtgcctggaattggatgattttgtcctggctcaaacacaggtagaacagctccgccccgttgctggccacgtcaaccatttggaaggcgcatttgtgcagctgactgaccggctcgcccttgaggggaaaatttttcataattttagctaaaattttcgtcaaaaaataaatttttttttttgtttttttggtcctacctgtccagcagggtccaacaacacgtgctgtttgtccaccttgcgaattcgctgaaatttgcattaaaaataaaatgtttggattaaaaatgctcacactctttagcatagaattacgggatgcaagaaaaaatattcgatttcagcaggtattcataaattttgactcattttttttttgttttaaaatacaggggtcttgcaaaatgtttgaccagcgaaaaacccgactttttttcacaaggatccttcccgttattcctttcctaaatctccttcatgttttttgagaaccgagaaacccaaagaaaacagattttggcacacattttcacaggaaatttaggcattttgtgtttgatctgattcagctccatgatcaaggaaggctctgatcggcgggttgagtttttgggtggatattttttgatcaattttggatcaatcagcagattacagaccaagcctttcacaagcaagatctgatcagatcaaaatcggtgtgttggactgcttgaaactgatgactgactgactgaccatcaacggaagtcgcatttccgtttggctgtccaccaactgaatgaccgacccgtaggtgaccgtgtgctgctgctgctgctgctgggactgttggccaccaaattcgggctggtcaactgaacggaaaaaaaacacatacaattttaaagaaatttatacaaaaaatagagatgggtaattaatttccttaaaaatttattaaaaatttaaaatttttccaagacggcgccaaaaggcaccgacacggaaaccccccctaattgccctaaattttcaaaatttgactcaaaaattggtaaatttttgctgaaaatttgttagaaacagtgtcattttttccctgccggtatcgcctggcgctgttttgatttttgtcacaaatttcaggcaacggaataacggtttttcaattttttaaaaattcgctatggatggcttccgcaaaaaatttcaggaaaccaattaattacacccacccattaggccccaaatagcctcattttcgctgatcaatcaatcaatcactgaccaacattgatgtgaaatgcgccccattttgttgagctggccacaaacgcaggcggttcatgcatcttttggttggtgctgattttctcatcaacatgcagataacgggtggacactgtttgggaacgcaaacggttgaacagggcaatctgagggggaaaaagaaataataaagttggcaaaaatggggacaaaatgccacttggcccaaaaaaaagtgattaaatgggacaaagtgcctaattaattgggcagtaaaatggcgacaaaattccaactgtgaatgggcaaaaacaggggcaaagttggaaacacatttaaactggccaaaatgggaaaatgccgacttggtcaaaatggggacaaaatgtcaacttgctccaaaatgcggacaaagtgacaaattggcaaaaaaaaaacagggaaaaagctggcaaaaattgttaaagctggccaaaatggggaca

SEQ ID NO: 20882 - DNA, 1413 bp, Heterodera glycines
atttagtagaaaaaaaccaataaaatgccgttgtctaccaaaatggcacaaatcataatgactcatgttgcccccattaattaatgaataaatcaattaatgtgtcaattaataatttgcgctttttcatgccttgcttttgttcccgacacataaatatttacaatcggagcttttcattgactgtttcttcttggatggttttgaaataatctaaaaaataatgtaaatatttattttattattttaaaaattcatttttttactttaattcgctgagacgcaaaagtgcccaactccaaagcgccgcaggcgtacccaaaatgtgcctaattaggaggggaaataatttaaattaaaatttttcagattttctcacattgagatgaaaatatttgcgtttatccgtgtcactgatgtgcaaggctttggccgctgaataatccttaacatttttttaatataaaagtgataaatattttaaaattaaatagttaaattaaaatattttaaatatatattttttttttgattcaaataagatttacaggaattttctattttcctgtaaatttagaagttagtcatcgtaatttatgtatgtatgtatgtatgtatgtatgtatgtatgtgtaaagtttaaactataccctttttaaacttatttttaaagatcggaccggaccggatccggtaccggatttttctggatccggcaatccggtccggcaattcgaaaatctggattgactggattaccggattgaccggattatgagagaggatccggaatccggtcatttttgaaaatactagtccggtccggtccggcatttttgagaattccgatctctacttatttttaaaaaattgcccctttcacatttaaaatttccaatttttaaatttaaaaatatttttggctttctgttacgagccaaatcaaaaagcaacccaaaactcgaaaacccagaggcaataaaaattatgtgtgtaaaaaatcaagtaaaatggtatggagggacgggggtaaaatttcaacaaatggtataataatttgctattcctattaattaattaattagcacactaattagcactaattacctttccattggaaaagtccaacaggtggtgttgttttgtctgctcattttgctttttgtcatcagctgcagttgttgctgactctgctccaaccacaattgacgcgcacagttcgacgaacttttcgcgctcgtcgatatttgccaacgacgaatcgccagaggcatttggagaactgtgaaaaaatactaattagtagagatcctcgacctgggtgagagcccagagcaagggtggcattccgaggcgccgaaaatttcggaaatcagagtccgtgcccataaaaatttcggaaatcggaatccg

SEQ ID NO: 20883 - DNA, 1008 bp, Heterodera glycines
agatttgtccctattttgagggtccaaatcttacaaattttaaatgtccttatttgtaagatttgcccttatttaagctctttgtccttattttcgtcttattttttggatttagggagaaatttagtttttaatgataatttttgaaagaaatgttttttgaagcgaattaataagcaaaatcttaacaagattcagttaatattcaaatttttctctcggcggtttcttattctctttaaaaaattggctcaaaatcgtaattttgtcattttttgaacaaaatcgttaagaattcgtattaaaaattacaaaaatttttccggcagcgtctattagagctgttgttattatttctaagaaatgttctgatttggggcagtgccttattttcatttaaaagaggaaatttctgaaaaatttggattttttggacagaacttgttaaaaaattgcattaaattttcaaaaccgcggcgcctatcgacaccgccggactctcttccctcacctatacccaaaaaattaattaaatttctcatttctaagtcggaattgcgcagagaaatagttggcagtgagtaatgcttggttttgttgaataaaaatgcattttaaagttttggaagcgtgttttaaaaatgtccttatttttgaccctaaaatcttatttttgaccagcgatgttcttatttcgggaaattttcaagggtaacccttcgaagttgtgccgatgattcccacaaaaattcatttggacggacaaacccttaaaactttggcggaatgaaaaaaaactcacttttgaccattgatttgattggtcctcattcattttgttcttaggtttttacttattttttctgcggctttaactcgacgagaaatgcacgaaaaacacatttttgttcggaaattcttcgttttaacgcccctatccgaccctaggaatccctattttgggtgtttgcccgcccctaaaataagtttttacccctatttggcgtt

SEQ ID NO: 20884 - DNA, 923 bp, Heterodera glycines
  unsure (1)..(923): unsure at all n locations
acaaagagcaaatcacaaaaactctaatcatttnggtagcatttccattttccaaataacgccagaaatgtattttaaaggaattttcaattttgccttcggatgctcttttaatgctgacattaatttggtccgaattggaacgcccggcggtggcaagaaaattcgaggcttatttgagctgcccctctccaacaaatgagacggaagaggactacaaaagaacggatgagcagttccatcggatgttaaacgaacatttgaagcagtatgagcacgcagcggcaaatgagcgcaattggtcgggccgacactttggataaatttgaggattttggcttgctttacgcattgctagcggttttacgtcaaaaactgaaacttaaaatgcccttgatcgagaacacatcatcacttattttcttttctttcttaaaagtcaaaaatttaggaaaattcttttggaagattacgtcaccgacttcaagaaagaattcgaacaatgttcagaaaatgcaaacagaatcagggccaatttgaccgagattcaccactcaattgtacacttattcacaacagtacctttgaacattttttaaactttagtgtaaactcccacagctccaagtcgaaacggttgtgtcggactcatcgaactcagaagaaaatttagaagaagtttgtaattaaataacaaaacaacaaaaagaaaaaattaagtcaaactgcgaaatttcaatgtcgacgaagaagggactgatcccaaaatgggccaggaatgagctcagccaggcaaatttggaggatgaattgcgcattcaaatcggacaattttgttttgcaccgaaggacaaattgtgcaaaagcaaaacaaaaaattgtgaatttggtttcgtgaaatgtatgcttaagcgaaaatggag

SEQ ID NO: 20885 - DNA, 292 bp, Heterodera glycines
catctatgttactagatcggggatcgatccccgggcggcctctcgagcaggacctgcagaagctagcttgatggggatcagattgtcgtttcccgccttcagtttaaactatcaagagagggaggagagggttggagaaggaaaggaaaaaaaaaatgaaggaggagaaagggtggcggaagaagaaaagggtggggggagtaggagtatgatggtcaatatggagaaaaagaaagagtaattaccaattttttttcaattcaaaaatgtagatgtccgcagcgttattata

SEQ ID NO: 20886 - DNA, 2060 bp, Heterodera glycines
tttataccttgtgccaaaacctcctttatgatcatcgtcatgtcgtagcggcccccaaagtgtgcaaaggctactgttgagtactttttggtgtgttcaaaaaggagccagccaacaaaatcacgtagagggttttgagtgatgattttttggtcaactgttgtctcagtatagtcaaaaggcgaaaaggtgattgtgcggtgaggaccgcaaatttggcattttttcccccgcagtgaatttttccattctccattgttgatgcactctgtgcagatgatggtagccgcagcaaagttgacctcgtgttcgaaacgattccctacttttttgtcctgtgtagcttcaaagtcgtatgcaatgatccggtatggtttaattcgttgttgcttcaagggctggatgaagcagctttggcaggggttctccccatcttcctcttttatatgaaactgtttgcatagtctacaaaatttttccccacatttatgcccaacattcccatgaacctttacgttataaattaccccacactcttcgcagcgttgaaatttggagcacaaatccttgtgtaggtgacgttcatagcaatccttgttgtaaaaattgttcttgcagtgtaaacattttttgaagtagccttgttgggcttcgcaggggtagtcaacgcccacctcccggcagccgtggcatagtgacgtgcagttcatggagtgtctcgattttcgttcgtagacactttcgcaagagaggcaataataatttttattgaagaatttggaaagggttttgatgccatcgaagtgtttgtcatggtggtagagcagaatagggaattggtaatcggtgacgtctgattttgtgattggacgagtttggtaatcattgaaaataaaaattttatattcgcctgaaaatttgtaaaaatataaatctatttttcatttgaaaataaataaatttttataaatgcctttttaaaaataatcaccgggatattttgtgctccacaacccctgcacttgatggatgtaaatctcggcatcgtattccggttcagttgtcggaatcccagcatcacggagtaaaagttgaactttttgttggagaacagtagtttggttgttgttagtccatctccatttgttccgcgtaataattccacgtttgtagagcgaatagtaccgcatcagttccaaggcataaaaaagacagtagttgtcattgttgttaattttgaagatgtgggattgtgaagagtgaattggaggggcatttcctttggtcgttcgtcggcggggtaaaccatcagtattcaggacagtgacggttacaacaaaaggggcaccgtaaaggttgacgtatttagccttgctctgctccactttacaaaatttgattaaacactgcgtcgacgacatttgacgtaatcggagttattggcagtatgatatcaccctggtctaaaagttgcgaggaaattatgatacctaccttatttgctcctccaaggatgttttgtgcatcattaatactatcctcaaccgaattgtgcacacatgaacggagctccgcagcggggtcggtacatttatcaatttcatcaataacaaattttgattttgagcggatgaaatgatgtttaatacttttggaagtaaattgctcaacgttatcattacatttattggtctgagatttcatgaaagaggaagacgtttgggtatttgaagctcccttcatagcacaacaaatttagaaacgggcgcgaagtcgcccgtatgagttcaacgaatttaaaaaacgggcgcaaagcgcccgtccaaggccaacaaaaattgaaaaaccggcgcgaagcgcccgactgaggccgcgaagcggcctaacaagctaaaaacgggcgcgaagcgcccgtctgaagccgcgaagcggccttaatagcccaacaaatttagaaacgggcgcgaagcgcccgtataagcccaacaaaatttaaaaaacgggcgcgaagcgctcgttcgagcccgcgaagcggcctaaaagtcccagaataatttttt

SEQ ID NO: 20887 - DNA, 2286 bp, Heterodera glycines
aatgtaggagattcaaatgtcttgcaccctttgcccaattaattaattaccccttttctacagcagatgatgatgttgctgacttgcagcagccggtcagccttttctcctttacaatcctttcgcttttcacatggaattgttggcgaaatgcacgcgcagctgaaaaaatgtccaaaaaggcggcataatgtgccaaaaaattcattaattggataaaaaaaaataaatatgtatttattaatatttggatttgcaatttgtttcatggcaattttggatacaatcagccgatgatttattttgttttttgatcccattttatttgtcttttttcgtaatttttaattttgtttgccctccccccaccccaattaaatgaggccgtggacatttggcctggtcaagcccgacggggtggccaacccaattgccgtccgatggcttctcagcgcaatgcattgtgagggctttgtgatcacaaacggtgtgtgcgtgggatcagcaccgtcttttgaccaattcgtccaagttcccccttcgttttttgcaggttgtcgtctgacgctgacaccggacttggccggcgagctgtactcaagccatcaggtgaggaatgagccgggctcgtaatcagcaaaatttctgggtcatgtcagttcgtacaaagggttttgtatggaattttggctcttccagtttacgcgtccacaatgggtttaacgccgtccaatgagtgaccactctgacttttttagatcataacttttttcatacttggtcaacccaaacattcttggtatcatttgaaagcttaaagtttaggaaatttataaatacaagaaaagacaaatacttatactatgaaaaaattacaataagaaaacctgaaattcataaattttcacgtatattcaagaataattttgtgtctgatgcctttatccgggaattttgctatacaaaaaatccctaaactttaagctttcgattgatactaagaaaacttggattgaccaagtaagaaaaaagttattgtctaaaaaagtgagggtggtcactcattggacgcgtaaattggaatagagccggaattttttcaaaaaatttgagagatttgacaaaattttacaagtgtgcgagaaaagtccacgcagattttttggaagaaaattctgaaatttaatttaaaatgtaaaaaatgtacgaaaccccaaagtacgcacacaacgccgctaggcacactcggcaaaaatttaaaaattttttggaaaactccgtaatataatttaacaataaaaagattggcggggtgggtcctcaattctacattactctgaccattttacataatacaattgatactgacttgttttttttctaggctttttcccccgatttttaatatttccttgcacctttatttccatccagttttttttaaggatgccttttattacggacgtctcatccggcacatttgcagtggaccgtcggtggcaatgcgaatggaattgcgcaagttgaacccggcacagaacgcatttgatgaagatgatgaagaaggcgacgagcttcacggcttttcctcctcctcctccgctttccatcggtcggcgacggaatgccaagaaaatgcgaaaaaatttgacccattggaggcgatcaatcggtggcgcactttgcttggcccgtccaaactgttcgccaacatttatttgagcagctgtgccgagtttgatgagatcaaatgcaaaaatttgcgccaaatgttcgcagtgtcggacaccagaaatctttgtgaggaaatttttattatttttttacattttaaatttggggttggaatttgacatcctcacaaaattttgaaggccatggctccgactcgttggactcgctgtgccgggaattcagcctttttgaagtggacatgaagccggttgagaggccagaaattgaactgtttgcgcttgatgactacacattgacggaagcggactatcaaacagacaacaacagaaggaatcaagatgaggaggaggaggaagaaaagggaagtttttgaaattcaaattgccaccattttttattattttaaaataaatttgtttatttcattcgctttaatttaatcattcaccattcaatatacatttggttttgaccacattttatacatattacacattttgtttgttatattactcatttgttttgggtgttggttcgagtccgttgtgcaacatgaatatttttatttatttttgtcgaaaaaattaaaaa

SEQ ID NO: 20888 - DNA, 2783 bp, Heterodera glycines
atattcttatctgtggtgatctgaatttaccgggaatcgattggattaattaccgaatagagaacaataatcattcgaaattatttattgattttatagcacaaaaacaattggttcaacatgtaaaacaaataacacgtggtaacaacattttagatttagtgctctcaaatcctaagcaattagtttatgacagaatgttacagaaagtttttcaacatcagatcaccacatgattgaatttaaaattaatgggagcttttcgatcaccaaaaaagacaaaatttatattagagagtttaaaccaaaaaattttctaaaacttagaaatatgcttcagcaaaaacgcattgacctacatttactgaaattatttaaagttgacgacaaatacaattttctcgttggcgaactttataattcctttgatcaattatttcctaaaaaaatattaagaaaagttataaaaagcaattacccacaaaaaataaaaagattatactccgaaaaattaaaaatacacaggcttattagagaatgccctgatcacggacaatataaaataaaatacaaaattttaagtaggaatctgaaaagggaattaaaaaatattaatgataagaaagaaagccaacttgttaataaaggcaatttggctatttttaaatacatcggcaacaaatttaattctgacagagaaataagattgcttttcgatgaccaaggcagaatttacactaaggataggcagaaatgcatgctttttggtaaaatatttcaacaaaattttatgcaaagaaattataacatgaattacgcaattaataacaaaatagatagcctaatagatatcgaattaaatgctgccttggtctggaaagcacttaggaagttaccaaacagaaactcgacatatccagacgggttaccttatatattgattaagcaatgcgcagatttattggcacctatcataagtgaactctttcgaataatcttagattatggggaaatcccaaacttatggcgtacatcttttatcattccaatttataaaaaaggagacaaatcgaatccaaataattaccgtcccatctctctgacatgtactttatgtagggtttttgaacgactattagcatggaacattgttaaacatcttgagaaaaataaaattttaactgatgaacaatttgggtttttaaaatccaggtcgaccaccacacaattgttggtctcccttgattatttttataaatcaatagaaaatggacaaaatattgatataatttttatagattttgaaaaagcatttgattcggtgccaataaatttgttaattgttaaacttcagaacataggtatctgtggaaaaattttgaagtttctccaaaattttcttatatgcaggtcatatcaagttaaaattggagaaaacttttccgaaagctttagaacttattctggggttccacagggcagtgttcttgggcctcttcttttcttggtttttataaatgacttactaattatataccagctgcagtcggaattaaattatgccgatgatgttaaaatttacatttcgcatgataatgacacgaaaagggatttactctctttagcgttggctaacttagccaaatagactaaagacaatggcatagccattgcgcatgagaaatgcgcagcattatatttaggaaaaaataattctagacatgagtataaaattggcgagaaagtaattttaagcgtagattgtgtccgtgatctgggggttttggttgatcaaaagctctcatttaacaatcatatttcaaaaattttaaaggcggcctattacaaggcatatcaaattttaaaaatattaaaaacaaggaatatcaataccttaatcctagcatataaaagctatataaggcctcacctcgaatacgcaagcgaagtttggaatatctccttaaaagaacagagtaaaagaatggaaacggttcaaaaatttttcacaagaatcgtatacaaaaaatgtggcctcaaggctgcatcatatgaaaaaagacttgagatttgcaaattggagaaattaagtaatcgaaggtcgctcactgatatgaatatgactttcaaaataattagaggcttaactcatttagacccaaaaaaatatttcgaattttcaacaagatcgcaacgaaaaacatttaggattcaaaataaaagattcagtaataaatctcggaataacttttttattcgtacaattaatccgtggaattgcttacccaaaacagctatagaaatcggaactttagctaaatttaaaaattttgtgaaagaattttatttagaaaataagtcctgagtggtaattcatccctttttattttttattttatgtatttttactgtattgaccatatcatattttcttacaatccacttagaataagttaaaatcagatatttttatagagataaaaccttaaatttgatcggggattttcttcccatgaggtcggtggccaaccctagttgaattatagtaaacaaaaaacagtgaagtccatcggcatacaattataattttatttttgaaaatgaaaagaaaatattttattaaatgtttttttaactgtggatcgtacagaacagaagaagctcggctaacacaaatactaaaacaataaacaacaaatgcttggtcagagagtgttcattttgttaattaatttatgttccaacttcgccggacccttctcactgggatagataaagaacat

SEQ ID NO: 20889 - DNA, 2183 bp, Heterodera glycines
aagaaagttacaaacgaaaataatcaataattgcttaattaatcaaatcttttttggtaattgcctaaacgctgcgattttattcattttagctttgttagactttgtgctttcgaatgataccaaaaagatagaatttgttcgaacatgaacaaaattattgtataaaaacccgggattgtcagttgattggactcataaaaatacctttggactcataaaactcgattggactcataaagtgcattagagccaataatttttcatttaatttgaaaaaaacatattagaaaaaactatcaaaaatataattataaaaaatgggaaaacctcttgaaattaataacggaaaattgtttgaaaaggaaaagtgcatttcctcaggaatgaaaggaacgaaaattaattaatattaaatggcgaattctgttaaggattgttcgtaaacaaattaataataattaataaaatattaaagaaattggattgtaaagggaaaacggaaaacgaacaattaatgggaaaatggcaaatccaaatggattcaacaacaaaaacagattttaattaaaatgagaaattatagcgtactttggtgcaaaaaagccgtatttaaaggggtgggcttttccggaaatttcagattcaacacgaacgattccctccgaagtttccacagcacccgcccaccgccattcagcgcacccggccctcactgctccctgtccatgccatcgtccgggtgccctccccttcccgtgccttgcgcctccctcccgtgccgtcccgagcgtttccgtccccattgttgattcttttgtgatatgccgtttttttgttccctccgaagtttcccccagttgtcgtcgccctcccatttttcgtttcgttgtgccgtccccttttgtccattttttttgtgtagatttcgcttttccatcgatcacttttttgtattgtttcagccctattagggcccggtttaattacccaagtttgaggttgccacaataaataatttgaaattgtgcccgacttggcgtattctgaaaaaacccaggcacggcacatcgctctccgctcggtcccgaccccctacgtccctcccaacggtccctctgcgcgcctcgcccaattcctctcctttccgtccccaccaccccgcagagcccgtcgtcgatttttttgtcgtcccgacaatcgcatgttttttattcaacgatgcgatgtcttatttttctctttagttgggatgtgcttatataatggtggggaggaaacaacggggcacaaatccttaatttaaacgtctgcagatgaaatggataggcaaaaaaacatttcaattgaaaatgtcaatttttatccgttttgaatcgcatgaatcaatctaatgtaaaatgataacaaacaacggcgacacaacagaaaatggtcggccagcaaaaaatggtgtaaaatgtaaattggcagaagctaacaattgcgaacattcgccgcttctcccctcatcagtcgccaatcagccaatgagcagtccgatgccgaactttccctgcgctttgacgtgatcgagcacgccactgatcgccagcgagaagggcaactgcttggacagcttcttctccagcacagcaccgaccttccaatttgtgtcgcagcaggccctcagagtcagagagtcgggcacttcaatttgataggcgaaggtcgtgttcacctcctgaaattcatgaaaatatatgccttcttaaaaaaagtaaaaatttggttggaaaaggacctgaagcttgaaattcgcctcaaattcaacgccgaactgcaagtgttcactctgtttgtggtagtaacacaaatggagttcggttggcgcaagagttcccgaaaatatccaagtgggctgaatgtagcgcaaggcgtagctgagagtgttcgactgtttgcctgccatttaatgttttaacaaattcgtttccagttttttcaaccaaccaggaaaccgttcgtccctatggtaaatgtattcggcgccaaggtcgagatttttggtgacacgccgcaacatttgcgcaaccaaagtgccctgggcaattgttggcactcaccgacgggttggcaatgtcaatccgtacgtggaaagtcgtcccacgtgctccagtgaaaattgagcagctgccaacatg

SEQ ID NO: 20890 - DNA, 1533 bp, Heterodera glycines
aacaacggtggaaaaccagaaattaaactgaacaatttctggttaggctcattatttttctaaccagaacaacggtggaaaaccagaaattaaactgaacagtttctggtttggctcttttcttttgtctaatcagaacaactgtggaaaaccagaaattaaactgaacagtttctggtttggctcatttcttttgtctaatcagaacaactgtggaaacccagaaattaaactgaacatggtttcgtctcatttgttttgtattggtaactttatggttgtttttctggtcatgtttctggttttgtcttttcttttgtctaatcataacaacggtggaaaaccagaaattaaactgaacagtttctggttcggctcatttctttgttaaccagaacaacggtggaaaaccagaaattaaattgaacagtttctggtttggctcatttcttttgtctaatcagaacaactgtggaaaaccagaaattaaactgaacatggtttcgtctcatttgtttagtattggtaactttatggttgtttttctggtcatgtttctggttttgtcttttcttttgtctaatcataacaactgtggaaaaccagaaattaaactgaacagtttctggttaggctcattctttgtctaaccagaacaacggtggaaaccagaaattaaactgaacagtttctggtttggctcatttcttttgtctaatcagaacaactgtggaaacccagaaattaaactgaacatggtttcgtctcatttgttttgtattggtaactttatggttgtttttctggtcatgtttctggttttgtcttttcttttgtctaatcataacaacggtggaaaaccagaaattaaactgaacagtttctggttcggctcatttctttgttaaccagaacaacggtggaaaaccagaaattaaattgaacagtttctggtttggctcatttcttttgtctaatcagaacaactgtggaaacccagaaattaaactgaacatggtttcgtctcacttgttttgtattggtaactttatggttgtttttctggtcatgtttctggttttgtcttttcttttgtctaatcataacaacggtggaaaaccagaaattaaactgaactgtttttggtttcgctcatttcttttatctaatcagaacaactgtggaaaaccagaaattaaattgaacagtttctggtttggctcatttcttttgtctaatcagaacaactgtggaaaaccagaaattaaactgaacatggtttcgtctcatttgttttgtattggtaactttatggttgtttttctggtcatgtttctggttttgtcttttcttttgtctaatcataacaacggtggaaaaccagaaattaatgaacagtttctggttcggctcatttctttgttaaccagaacaacggtggaaaaccagaaattatattgaacagtttctggtttggctcatttcttttgtctaatcagaacaactgtggaaaaccagaaattaaactgaaca

SEQ ID NO: 20891 - DNA, 2066 bp, Heterodera glycines
  unsure (1)..(2066): unsure at all n locations
accttcattaatgatagcacnttttcgccaatcccatgccaaacaacaaatgccaaaaaaagagagaaactaaaccgggtttgacgaagttaccatggccacggcactgctgcacccatccccaacaacacaacgatgatggtgattgaaatggtaataattttgttgctgaattggtttgttgctgttgttgtagtaatgaaacagtgccgaagatggagatgaagcggtggtaacagcagtggcggaagaggcagaggaatcggcggatgaagcgacgaactttggcacttttggtgacgaccaaatttttgagcgctgaattggaggtggcagaagcggcgacgacatttgcaaattgttgaagttgacgtcgcctaattgtaagggttaggtaaaatttggaaaatgccccttccctccccaagcggaggggggggggggtgtaaattggattttttcattcaaaaaattatgaaaaaattgttttttagaaggggagggggaatctgcacccgaaaaatagaaccacatgtaggcaagaaatactataataaacttcaaatctagaccaaaggctgtcaaatgaaaaaaaattttttgtcaatttttcatttattttaaaattcgtcgaaaaaacttaaaacttattaattttatccttttttgtagatcacaaattcaaaagcaaacctccatcatagtacgagccaagcgttgttgttgttgggttggcattgtcctgctgaccgtcaaaaatgtccagtgcggcagtggaggaggaagtcggctcggctttgtttcgacgatgttttgggtggaaattgtcgaaaacatacggtcgatattcagcggagggcttttttttaagtattcctttcttaaaaaacaaaatttgcaatttaaaattgtaaaataaaattttatataaaattggaaacatgaaattgtaaaaaaaaattcatttttattaggtattgtataaaggaaaatgggccaaaatttgttggcctgtgcatgtgagaggttattgggtttggggcagagtttggtgcccgaattccataacttttcagtcccgaataccaacccgaaaatttttggccgtccaaactcaaattcagactttattttttttttctcttcccataaaaatctcctgtttgcaggtgagttttggcttttttgggatttattcatttttctcaataaattcaatcactttggtgtgtgagcaaatcactatttaaccaaaaaaatttcaaaatttgaaattgaaacaaaaatgtcaaacctttttgggcgtggtgatggcacacatttccctccgtttgtactccgccaattcttcacggacctttttgagttctatttccaaaaattcttcacgccggttcgacgacgattccattggcattgcttttgcggggtaaattccaagacactgcaatttgttgtattgtattgttagcatcataataaaaaaattaaaattttttgttccaaaaactcattataatgcgcattttcggggttcattgaccacgaatatggcataaacattggctaattgtgaatccgaacccagcaggacccaattggaacaacaacaacaaaaaaagtggtgggtggaacaaaacatttccgaactcttcttgctacttattgttagtctaaaattgactaaaataagcgaaacatttcatttcccctcccatgtcgttcgtgctccgcccacaccgaattttttaaaatttttcacttcaaaatttcttcaaaaaaatttcggcgctagttaaaaagtcaccacttttgaaaattttttcaaacttttttttttgataaatttttttgtttatttacacataatgatgcatattaccatcacaattatggtgaataaaaagtatattcacgattttttatcttaaaaaattttgtaaaacaaaaaggtccccctttggtttttgataaaattaaaatctgtcactttataactagcgccaaatttcttaataggcccaactaattgtcatattcatgatcagcgacctctaaaacccccg

SEQ ID NO: 20892 - DNA, 1462 bp, Heterodera glycines
ccccgggtggaaagaagacccgtagaaaaacagcctttttattcttttttatgggaccagtaaaagttcagtattacctgcaggatttgcaggattaatccggccggatccggtccggcaaaaaattttgaattccaatcctgcaacaggatccgcaaatttgatttttgtgcgggatccggcaggatccgcatacattctttgaaaattttataagaatgccaaaatttttgaataaatttataataaaatcaatcaaaataaattcaattttcatctcaaatttcacctagaatttgcaaaaaaatttcccggcggcgcctatcgacaccactggatcgacattaatcctgtagaattgagtcaaaaggtgtgacgtttggtcattttttggtcaaaatcagttaattaattgataaaattttcaaaaaaaaaaattcagacggcgcctatctgcataggcggacccctttgttcctagtttttgaaaaaataggcgccgaaaaaaaagcatttttgaaaagcaaaaaatagtcaaatttattgaccattaacagatttgatttccgatctctttttaccgtctgacccattcgaaaaatcttagtcgcccttttaatgcatcccgccagcccctaaaatttcttgtcaggtattttttttaggatccggcaggattaatcctgcaaatcctgcaatcctgcaaatcctgcatttaaaatctgcaggatcctgcgcaggattgcggattttaggaaatttcaaaaaattctgtattaataaaaaagtctttcaaagtatagcaaagtattcaaatatatttttaaaccaaaaaatgatgaagatgaaaaattaataacgtttttttgcttacactccaagcaatcgactgaatcttctttaatgcgtttaaaaagaccgatttgccaaattgggtggctcataataatagcttaaattagggttcgagccccgtggggcgggggtggcttttcacggtggcgggggatgcgggggtcagagtcacgggggcgggggcgggggcacgataattccgcccccgcggggacggggccggggttttctttgaattaggtccaaaaatctcacaaaaaaatattttttaagaatgatttctttggctccacattcctttatttgttgatcgcctagatactatttcttttgacataaattgcacagatttcgactaaaaagtaacccaaatttagggatttttgggtaatttttttttaagaaaaaaaaaaatttttttgggggggggggcgtgccgataggggcgaattttaaatttatttctaacagatattcaccaaaaaaattaagattttttcgataaatattcgttttttaactatattaaattatcgtgatttactcaaaattggaaatcagattttttaaattttttttcttgcggccactttttcaaaaaaaaaaa

SEQ ID NO: 20893 - DNA, 1863 bp, Heterodera glycines
cccccccgaaaaagaaacaaaacagagcccatataataatgacacccgcctcgtccgtccgtctccaccactactctttgtgcccaattttgtcgccgctgccgccgccgccgccgctgggacatttttaatggttttttgggggaccaaaattgcctgaggccattttttgccgtaggcgaccgagcagtagtgaaattttggaaattgatacggggaccaatgcctgctggttgaatgttttgcgcgctatatatttttgcaaaaaatcgcctacatttttatgcctttgggtttgtttatgtttgtgtgtgggtagtaaatgccaaaaatagacaagtgcaaagagagagaatgccattaaaaaatggcggtggatgagaaaaaaaaattggtgacaagcgcattttcctagaaattttttgaaaatatgcattgataatttgtttcttgaaatctaaaggcgtccttgaaaataagtacatttaattgccgcgagataaataatatatatacataactatttgatcagctgtattcaagggcgtccttggagcccctaccaaatcggttagccgacatttgcggaccgacttttgcggaccgacttttgcggaccgacttttgcggaccgacttttgcggaccgacatttgcggatatttagtgaattaaaaaaataaatttaacaatatgaactacaatttaagtgaaacaaataaatgattttaaaaaataaaaataaccaaaaatatgagtgagttaaaatgaaaattatccaaatatatgagtgagttaaaaaatgaaaagtatccaaacaaaaagtttttcgcttagaattatcacataaataaatgtacaatcccaaaagtcaaaattattagctgcgaggcgatactgtattgctctgagatggcttagaatctgttcgttattaggtgcttgaatgcggtcaaaattttcaattaattgtttaatcgcacgatcgttggttttattatctttttttatttatttttgttaggtgttgatgggtcgccaaaacgaattcagaaagaagaaaagcaacttgcactgttgcttttgtatgcatcacacaactttggcaaattgaaattgtttaaatgcgatgactgacttatcgtagaatattttgatattaatcccttatatatttggatatattttattttttaaacttactcgtatatttttggttatttttatttttttaaatcatttatttgtttcacttaaattgtagttcatattgttaaatttatttttttaattcactaaattatccgcaaatgtcggtccgcaaatgtcggctaaccggtccaccggcccttccttctcctgactgattcttctaaggcttcattgagattttatttttccgttttcgtgttccgtttttgtccataaaaatttaggtttcgttctcgaaaaaaaaataataattttcgcgctcccaaaatcaatgccctaggaagaaaggcaatggcccctcgggggtcattttaattttggtatgtcgcgtaattacaaaaattaaactcgtttcttttctttttcctttcgtttgttctctctcacaattcgtcgttcatcagtaaaaatattcgtttgattattttcttatttccaattaattcacttgtcaaatgcgttcttctcgcttggaaattgtcgtggattattttttccaattttatggcgaagcttttcaggtttcttttgcaaagaatacatttggaagtcggcaagaaaattaacaattttgaagcttacaattagtctgattttatgtaaaaatgaaaagaagttatttttattaaatgcatcttttcttttcttttct

SEQ ID NO: 20894 - DNA, 1489 bp, Heterodera glycines
gctctaaactgccaaattggcaggctctaggctctcttaaaccccaaaaataggctctaaaaatggaaaataggcactaaaaactagagtgaagcggtaccgggaattttgggcaaaaccgggaccgggacttgccgggacctgagaagccgggaccgggacctcgatttttcttcgggaccgggttaaaaatttaattttaatttatttcaattgaaaataatacaaaattaaatttttattttgttttttatttaataattaaattaatgaaaattttcaatcaaattttcttcaatcatttcaaacaataatccagggttcgaaagtttttttattttaatttctgtagaggaattgaaccatgagaaagaaattccactaggccataagaatatatttaataatttttttgatttttttcttttaactccaattttcttcactaatttttcactcagacccccattcttaccagtgcttgttttcccggttcccggttgccctaccgggaccgggacctgagcttttcaaaacccgggacctcgggtgagcgggaattcccgtcccggtcccgcttcactctactaaaaaccctcatttttaggggtgtaaaatgaaaaaatgtattcaaaaaaataaataattaggccaaatcagtattgagatacataaatgattttaaaaaaattcttgttacgaaataaattcttgagatgaattttttgaaaattttttcatttttaggggtgtatttttgaaaaaaaatttaggtcgattcttggggtttatttttcgtttttattgcacttttggttaaaaattttgggcaaaatgcaaaaatagagcctagaaaataggcaccaataactcaaaagtagattaacaacaacagaaaaaaacatgtttttcgtgcgtttgaggccacggcgagctcaggaaaaaataggcttttgcctaaaaatccatccctagtaagaatttaaattttaacaaaattaaccggttccaggcgcaggtttttttatcaaaatttgtttaacgctgttaaaggtatcataaattggtttttttttgatttagctaagaattaagtcaagtcatgtgcattgggaaaacccggtgctagctcgttccacaaaaaagctcagtgatcgataaaattaaataaataaatttaattattcaattcacaaaacacggtgccgtccagttaacactaatgtacggcgggacgcgtcattttcaaatttttcaatttttgacatcacttctcgccaattttatccatttgtagtagacatagccggacgccattgataccgttttgtagagctcatcgagctgtacaaaaaagccgctggtaccgtcaagcttagcttggattggccaacgacaggggtcgggggcgaggctgagggtcctccggcagatgtgcccgacccatgacgggctccaagtgaaaagagcaagaaccggactcgggctg

SEQ ID NO: 20895 - DNA, 765 bp, Heterodera glycines
  unsure (1)..(765): unsure at all n locations
ttcgtccatgtgcattggccttttttgatttttaaaacacttatgtatattcaagaaatgactaaatttatttcaaacttattttttctttataaattttcaaaatatgtaaaaaaatgaaaatatgtacaaaaatatttgccgaaattttggcttttttttgaggatttccaaaaatttccgtaaaaaatactcaaaatatgtaaaaaaatgaaaatatatatgaaaaaaatcaaaaatatgtacaaatatgtaagaaaatcccgaaatatgtaaataaaagtcccggtttttgttcgcaaacacaaaaaagaaagtgtttttcctgctatttagagcaaggagaagccaggaaaaaaatatgtatttacataaaatttgcagccctattaataagttaataaacaatcatcggcatgcacatcggcgatttaattcattatgagcggacgggaaaattattgggggacgcgtttatacacattacgaaaaaatttaccccccaaatcctaagaaatacccctcaaatccaccttttctctcctcaaattacccactcattaatttaaatttacattctatacctcatatttccctacccaatcagccttctcactcacaaaaatttttctactttaaattgtgtgtacttcaattgtcgatctattttaaataaaatcacgactttgaaccagggatcgcattccgaggccccaaaaattttgggaaatcggaattctgaccccanaaaacgtcggaaatcgg

SEQ ID NO: 20896 - DNA, 2001 bp, Heterodera glycines
tttccgtttttcggggaataactcgccgggggatacgcggagcggagtggctccgcttgagcatttgtgcagtttttaaagctgcatccgatggagttttcggattttgaaaattttcaaaatttttcgagctaggccccctcgaaaatttttcgtttttgaattttattattttttgccgatttttcccaggaaaacggagaccactttcaagcaaccgttttttgagctctatcgattggtggcatttttgaaaaaatttcaaaattttccggaaatagaaattttttttggcttgagcgggacatttcagtcccgggctcataactcgtcaggggttgattttagcgaaaaattgtcttagagcatttttgtagagaattttaagctctatctaatgtgctttatcccatatttttatctttaatataaaaaaagttataaaataaaaataaattttaaaatgcaaaaccaaaggggggaccccatggatttgcattttatgaaaaataattttgctcctaaaattgccaaaaaatacttttctggggtagtttgaggtgctgaacacgaatatgcactttatattgctttttggattttttggagggaggtaaaaaaattttgaaaaatcgtcaattttttggatttgggaatttaagtgattcttttgaaaattcataactcgcctcaaaatggtccaattcagctcatttaaagcataaaaaatagcaaaaaatcgggagaattttatgagatttatttgaaatttataccgcaaaaagaaaaaaagttattccagaaattctggaaattttctatttttcagaaaaaaattcagaactcggttctgaaaactcattatggaaaagtaaaatattacaaaaatccgcaatttttttctctattatataaattttatttgacctttttatcacatttttaaaaaaagatacaaaaataaaagtgattttggcattcgggaccaaagggtgtgaccatgatttctgagtgaaaaatttttttcaataaaaatcttccaaaaacatgtctttatgggttatttgggccgctgatcacgaatacgtgatcagattttacttttgacatcgttaagacctcagaatccctgtgtgattggggattctgaggcatcattttgagggggcggggggcaagttcgaatccgggcggtaacacattatttttctgtgcatttttacgttattttcaatgattttcattaatttaaaatattttgttgagttaataaataaaaaattatatttattttttttttgataaataaattttataagtttaaattaattatttttttaattgatagaatttcatgtatttttttaattaaatttgttaaaaaatattttcattttaatttaatgaatcactgttgcacctcttctaatcactgctgtacccctaaaaaacgggcgcgaagcgcccgtctggcccaaacaaatttaaaaaacgatcaaacgggcgcgaagcgcccgtctggccccaactaaatttgaaaaacgggcgtgaagcgcccgtctggccccaactaaatttgaaaaacgggcgcgaagcgcccgtctggcccaaacaaatttaaaaaacgggcgcgaagcgcccgtctggcccaaacaaatttaaaaaacggtcgcgaagcgcccgcccaagcccaacaaaatttgaaaaacggacctcttatgatcactgttgtacctcttctatttcctgttgtacctcttctaatcacagttgtacctcttctaatcaccgttgtacctcttgtaatcactgttgtacctcttttaattaaaattgtacctcttctatcatcggagcgcaattttccggaaatagaaaaattttttggcctgaccgggacatttcagtcccgggctttataactcgtcaggggttgattttaacgaaaattgtcttagagcattttttgtagagaattccgagctctatctaaagtgcttt

SEQ ID NO: 20897 - DNA, 1413 bp, Heterodera glycines
tacgctttctttgtagccatgacaagacttgatcctaagcaaagaaagggaggtaagctgacggcggcggggggacgcattgacaaggataacacggggagggggtgggggaatggttgttattttcccacactttcgtcaactcattttacatggcgccaaagccattcaaccatttttaatgctaacggcaatgcttttcaagtgaaaaaaaaacagaatttacaatttaaaaacgaatttctctttttttacatatatttaatcaaaaaaataatataaaaattgggtttttttttagaaaaataattttatttaagaattcggcaataaataattttcgaaatttttagtgtctgcccaattttctagcgccaaacattattcaaatgctctaaattcttaattttgcttcatatacccttagaaaatgtacagaattttttctccatcggtgtggaatatttgaagaaattttgttgaagaaaaaaaattttattgaaaaaagaaaattcagtttttctctattaacagagagaggacaaagaaatagtacgccaaaatgagaggtgtatttttttacaaaaataatttaatttaaaaaaattaataaattttccgcgataaataataattttcgaaaatttttagtgcctgtccaattttccaaagccaaatttcctgcggtgccttcaaaaaaattttcggtacccatactcacttggaaacctaaatttacaacatttaggaccatatgcgtcattgcctcagatcaaagttcagtgatcactcactgatcgatgtcttttgctttttctcaaaaaatctgttccgtccgcttaagcaaacatgcgcaaaaaagtgacgttttgtttgcttttcatctgctgcaaatttcattagcagaaggaatacataaggaaggacccaaatcagtggccaatatttaaggcattccaaaaattaattgttggcacttttatttttaaacggaaatgatttaacgatttaaaaatattttaaattataaaaatagcctaaaagcatagataaaataatgtttttttttctctaagaatatgaaccaaatttactttttcaaattttaactttaaaaaatttcattaaatttttccataaatttttgggatatattttttgcatttataaacgatcgttaaatttgaatctctgaaaaaattaatgacgatttttgaaatactttttggtttagcgtgcaacaaaaatttagagattgagccccgaccccgagctataaaatttttttgtttggaggggggacaaatttttgcgctaaatcgtggcaaaagtttttcaaattttcccacggcgcgcctatctgtgatgcctaaaatttttgtttgtgaattatttcctccccgagggttggag

SEQ ID NO: 20898 - DNA, 1360 bp, Heterodera glycines
gaaagggaaaaggaaagactaaaaggaaaagaaaaaagcaagtgagagagagagagagagaaaaaaagacgaattggcaagacatgatagtacttaaaaaacgatgaataatggagagggaggaagaattaaacaaaacagcagaaatggaagaggaaataaaaagatgaggaggaaaaaggaatggaaaatgggaaggggtgggaaaatgagaaaaaaatgacaaaaggaagaaccattaacgatggggaggaaggacagacaaatggacacaaaatgagacaaagggacaaaaggacaaaacgtcatcggaaaaatgaagaaaaaatattgggctgagattgttgaagccgtcggcatgcaaatgcaaatgtgcaacatcgaaaagcatagcaaaagcatctttgccccctcaccccccgctttattatttattattcatcgcttaatccctggagcacaccatttgcctaatgatccatacacccattaattaatgcttccattcattcatcccttttcatttcttccgtgccgccccaatgttcgacatcaatggcaccgtttgttccttgccctccaggaaaaaggtggtgcactcgcctttgcccttaacaaatccaaattaaaattttgcaaatcgtttcatcaattagtgccttaatgtcaattttgccacgctccatcacaatgaaatggtggtaaaagcatttcaaaaggttgctggacgactcgcttatctgaacgggcaaacattccattataatgttgggtaattatttgctaatgggctagctaatgacttggattttgttggccactccgcttgactccttaaattgaaaattgtcaaatttcgttgtaattattccccgcgaaccattcgcgatgccatattcactgtgtcaccaaacaaacagtaacgaggtgcggccaacccgaccttaaatggactgatcagtgaccgatcgatcgatcaatcatttggttttgccggcacttactgattagtctttctgatcattttccgttcctcattatttaattcttaattttttctgaaactgaccacgccagccgccaccgatccggaatggaagccaattcggaccatcattatatcatccggacgatgggccactttgaagttggtgacaaactgaaaaggaaatggagaatgcgacaaaatctcaatgatcaaatttggtaataaaacgcaaaagcactcaccgatcgcatttttagcgcaatgtcccccaatgtgttggacgtgggaattgccattctcgcgcgggactccgctgacaatcatataagcatcgccaatcttgacaaataaaaactcaatttatcagctctt

SEQ ID NO: 20899 - DNA, 1935 bp, Heterodera glycines
tcagattatatgccaatcccttactaattagactctgtgccaatcccttactaattagactctgtgccaatcccttactaattagactctgtgccaatcccttactaattagactctgtgccaatcccttactaattagactctgtgccaatcccttactaattagactctgtgccaatcccttactaattagactctgtgccaatcccttactaattagactctgtgccaatcccttactaattagactctgtgccaatcccttactaattagactctgtgccaatcccttactaattagactctgtgccaatcccttactaattagactctgtgccaatcccttactaattagactctgtgccaatcccttactaattagactctgtgtcaatcccttcctaattagacaatgtgacaatcccttcctaattagacaatgtggcaatgccttcgatctccgccccctttccccgcgctttctcccgccttaccgtctccactttgtacgcgtcatgtttggcgataatcgcgtcaaaaccggagaaacaaatcgttgaggaaattgaccacttgcagcggcgtcgaactgctcgccattcgcgtgaaaccgcgaatgtccgagaacaaaacggtggcacccaaatacagcaaaggcggcactgaccgacccgccttcaaatcgtcggccacggaactgcacgaaaaagtggttaagaaagactctaatggtgccgacccagcgcctgattctgcggggtgcccatccataaaccattgttttcatatttacaaaatgcttttgttaatttcatttttcaaggacgaccatcagcgggaagactttttaagcctcaaaccgttgaatttatgccgctattaaatagcctccccaattaattagcgtagctaaagaaatgcgcttttttgtttttgcttcattttgcttgatttagcacatacgccggcagcatgttcttgagcagacggtccgcttgttgctgcgcttcctccaaaagtacggtacgctctttgaccaactgttccaagttggtggtgtactgtaaccgggggaggggggggggggggtaattaatagtaattagttggattatgagcagaaaagttttgtacatcctccatcattttcatcatttggtccaccagactgccgcttccggtcgacttcaaatttgcgtttacgatcgctttgacccgtttgatgttcggacgcatctccggcaattccaaccaacatgcctccagggcctatccattaaatggcataattaaaattacgaatagttaattataattattgccgaaagcaattgcaaattgtacgcctcctccgaagcggcgatttgttgttggttggggaaactcggccgaatgatttggtcgtcctcgctggccaaagcaattttttgaagaatttcttaaaaaagaaaatttaacaaaagagaagacattatggaatgatcaaaaagggaaaacggacaaaagagaaaaagaaaaacggacaaaagagaaaaagaaaaacggacaaaagagaaaaacgcacttgaagggggcaaattgcgctcgaaaaatggctccaatttgaacaaaatttggtagagcaccatgccaaggctgaaacaaaactgaattgattgaataaatgtttaataaagggggttttggcttctgagtgaccctttgaaattgatcgggtccgcttctcttctctcccccccccccttcggccccctaatgatcgaagtgtgctgattacaaggctatcgttctatacaaaatgggatcaatcaacatcctccccactcccacctgtacatatccgctgcttggcacccctgcggcaaatttttggtgaaaatgaattcgcgaatgatttcgggcgcctgttgcatgtatccctggcaaaaaaaatgc

SEQ ID NO: 20900 - DNA, 1008 bp, Heterodera glycines
  unsure (1)..(1008): unsure at all n locations
agaagagcttttttaatcagaaatcttccccagtatttttgggcattaatttactgcataattaattaacttgtaatttcaacagttttttgttaatattaatatactttctccaatatttcttgtccttggagcaaggaaatttgatgtccatttcatcggtttaaattagagtagagcgggaccgggaccaaaacaccgacaactgagtacaatgagtacgaggtccccggtttgacccggacccgggacccaggccgggttttttctcggttttcccagccaaaaattcccggttttcaacccgaaaaaggtcccggtcccggttaagcccaaaattcccnggtcccgcttctaacctctagttaaatataattattttgcattttatttaagattagaaaggggtttggttttttatatttaattaattaattaataattattttaaattgttatcgcagttctatgtattaaccgtaaaatattgtggtaacgcttttttaaatggatttttactaggtaagacatattttaacatttaatttccaaaatgtaagtttacactttgtttgcgtaagctacaattcgatcgtggaagatttcaaatcagtttttcgtgagctaattttcgttaataaaaaataaataagtttataatatcattttttaaacttggtaatttttttaactttctttaacaagaaaaatattgtaatttatgcatatattcattttattagatttacaatactcattccgatttaaaagcgatgtttaattcgataacgttccttattacgaacggcgatgttttaattttaacgaaattttacgattagcgatatcaaattactactttttttaaattttattattttgaatccgtgattcttcctcttctaacgtttatgtgataaattgtttaagagcgattcgagaatatcgatttgcgaaacggcattaaattcatttataaattaaaatttgccattggatgaatttgag

SEQ ID NO: 20901 - DNA, 993 bp, Heterodera glycines
tttcatttttatttttccaattagctttcgaaaagcaagaggttttcatattttcttatcttttatcaatttagctcattttatggcattttttattatttgcatatttggggtttttatatataagtgttacttatatatttaagtattttttgtaaatattttgatttttaattttattttttccttttccataataaaatacaaagttcatttattttaaaataattaacgtgaaagagaggaaaatcttgaaactcgtttttaattcattaatccatccgatcacagatggttccctaaatttggaatttttcgatgtgtgcgtcaatttctttttgagggttgaaatggaagtcatttgagatttaaaattatgtattgtgttatctgtaaatttatacataaatattctctgtcttgaaaatattataatttttttatatagttttttcaatttaaaatattctttaaactttttgtatgtcttatgttattctatatctttcttattttaattggatttatttatttctttttattattttagcttattgccattataattttttgttagattttatattcgctgaaattaaattttagttttttaattttttctgccctatgaaaaaaggggctcaaaaatagcatttctacgtttaaattttttgatttggtgagtgtttttagtccatataaatccatattttgtgggttttcggaaataaatccatatttcgtcatttttgcgtttttagtccatattttggccatttttggcaaattttcacaagaaaaatgcaaaaaaagtgaaaaatacacccctaaagatcgacttttggaaatttttaaaaaatacacccccgaaaatacgaaaaatttgagttttcatcgatcgttttggcatttttaataaatattttcaccatttttttgcgaacttttctttttttaaatgagaatttctatcgaaaatttggtaaacttgga

SEQ ID NO: 20902 - DNA, 2362 bp, Heterodera glycines
  unsure (1)..(2362): unsure at all n locations
tttaaaatcagagtgttccattcattaataattagaattcaaaattgtaaagaaaataaattgaaaattaaaaaacatactaaaatatatatttaaaatatcttagactataagcttcaacaatcgaatggaagctttgaacgagaataaatggaatgagtcaattacaattcctgaaccatttaataaaataatattaaaattgttataaatattataatactcttaaaagcatgttagagaaaacgagctaattaaaagataaaaattaaaaataatgtatcaaattttattaaattgtatgtttcgaatactggagttttgaaagtaattaaacgagatagcatatatttaaccaaaaagtgaatttgagctttaactttattaagttttgtttttattggaaaatgtttatgcttggacaaattaaatcattacattatagctttaaatttaaaaaatttaaagaaactaataaaaaacatatgtacaggaataaaacttaaccaatatttttaacaaaataatttaaaagaaatatatccttggaaaaacaaatataattttatagtgcacgcaactctataaataaacaagcatttgctgatataaaaaattaattatcaaagtattttgtctaaattaacaattatcactttacctagaaattttcaattttaataatataattttgcattttgaatttaaaaaaatttttttttgtccataattttgtgttaacaaataggttttttttgttatccaaaaaaaactgagtcccataatatgtatttgatcattttataattcctgatgaattttatattaaaaaaatcaatttaatttatttttgtatatttttattgttcaatagttaattaaattatttaatatcaaattcttaaaataaattctttcttttgtatttcacgtaaaatttatataatacattgagactttgagctgctccagtttttacagccacaatgaattgtctttttaggaatgtcaatgtaatttacactttgtaaactttacattttttttgtttttttatttaatttatttttatattttaaaaaaaggtaaaatgtcgtaattaattgttatttattccgcatataatgaataaattttttaaattaatatttatattaaataaaattaatttttaaaatacggattaaaataatatttatgaatattaaattaatctgattatcctttacatttgtgactattttacttttgtaattcccattacggagaaggcctaaaaatcgcatccctaattatttgtattttaaatttcatacaataaaattttataatttatcgagcgcaattttcatttttttttaaatgaaagtttataattattaaataaaaattatatttattattaaattccggttagtaaaatttgttataaaacataactgcaattagcttaatttttattttataaatgtagcgggaaaagcaatagatatatttgaaaagatttttttttgaaaattacataataaatactgatgaataaacatatccaagggtcaagtgtgaagcaaattatatttcgtgaaagaacttgtacttggctgctcaagaagataaagaattataaaatttcatttttaaataaaaaatttatccacctatttgaaaaaagaataatttgcaactaatattaattataaaaaaattgttaaaaggtcttcaatcaactacgtaactcaatgcagtcaaatcaagaatatattagaaaatatagaactaagtaacaattaaaaaacgataataaacaaactatagctctgtcgtagaattatttcatcaaaattttaaagcagacgtcaatcttcatttttcgaaatatggttacaaaaataggagttaagacgaataaaatctgtttaattcatcgaaaaatattttctgaatataatttaattttttctgtgcatattaaataaaaataattttgtaactgaacatatttaataaaaatgaatgtaaatatttatcgaaaataaataggaaacaatatatttacttcttattttggcctcgaaacattaaaaaataatttaataaattaataatagaatttcttttaatgttttttcatatttgagttatcttagaaattaattttttttttaatttcatttttattttcataaatttttaatagaaaaatgttaaaaagatgcaataaaatcaaatttaaataaaaaatatacatgggtatganaatacnattatatctanattgtaatataaaaaattatcataaccttngcttnaaatagtcataagcactataanngtcgctattattctgcaaatatncaaaaac

SEQ ID NO: 20903 - DNA, 1664 bp, Heterodera glycines
attaatccgtcaaaattttccgagccccaattccggagccgggtggtccactacttcgactttctcgctatttgtctcatttttattttttggcgccttatttcgagaagcgcgtttatttttttgccaaaatgttatgccaattcaaatatttccggacagaatttgcaaggaagtgaaaaatcgcgcgctgtcgaaatcccgccgcgtcgaaatcccgccgcgtcaaaatcccgccgcgtcgaaatcccgccgcgtcataatcccgccgcgtcgaaatcccgccaaagccaaaatgagtcgaaatcccgccaaataaaaattagcgaaaaagtcttaaaattacattcctaaggcttcaaaaatacgaaattcattaatactttaccagaatcgcataaataaataacaattttcacgaaaaataatgatatttttaaatattgaatgaatcgaaaaaagagaattgtatgatcgaatcctcaaaattttcatagtgcacgaaattccgagctcaattcgctgcgtccacttgtcggtcgatgtttctgctgacttcaaaaattaagtcggaaagggtcgggcgatcaggcacttataaaatttgttaagttttttgggggtttacaagtaaaaaatacagaaaagatgggttacttcgagaccaatgttgttgttgagggggcgggtgaattgatgccaaactacaacggctgccgagaatacgtttggtcgggttcaacggattgaaaatgatgccccgcgaatgcttaaaatgcaaataatcaaagaggaaattataaaaaatggttctttacggttatctgtactcagattttgaaaaaaaacatttttttgaaataaacttgttttagggggttttcaaggtcggggaaaccgattctggcatctgttttgacccaattcgaaccccaatcccggatttgaaaaaactcaaaatccatttttcaaaaaattcacattttatacacaaaatcgcttcacaatgtcacgaggatgacccgcacaaccaaaaaatgccctgagtacagataaccgtaaaataccaaaaaaattattagaacaaacattgaaagcttatttggggcaagaaaacactcgccgaacgaacaccaaacgcgttgacgccatcaagcaatgactgtcacgcgtggcagtccacagattttttcaatcacatatcggaagacttaattaaaatgtatgacttatttttaacaagtttctaccttcagaccaaagacaaatgcctaccttttgagttttcccaagtttgaaattggtgatgtcttgttcttctccagtcttcataacgttcattgttgttgtcgtttgctcacaatgatcagaattttttgcattttcgccgtcattgttgttcagaaatctgtgtttacaacatttatgaagaatttcaatttttcgacccattttgcttagaataatctattatgatatttttatatatgtataatataaaatatacatacaaatacatgtataaaataaataaataaataatttttatttggcgggatttcgactcattttggttttggcgggatttcgacgcggcgggattatgacgcggcgggattttgacgcggcgggatttcgacgcggcgggattttgacgggcagcg

SEQ ID NO: 20904 - DNA, 2832 bp, Heterodera glycines
attctgggatgagaccagattaatcagacctccccttggcatttaaaattgaacccgcctgtgcacaaaaggtcgccagttgtccggaacacgtcttggtaattgggtttggcctgcgcgctgagacacgctccgagacggtgcacacaatgtcaagggtccaaccagttcagggcgtccaattcgcgatttgttccgctcgtccaattcccaattgtcagtgcgtccaattcgcaattgtcagttcgtccaattcccaattgtcagtgcgtccaatttgtaatttggtctgcgcgtccaatttccaatttgccaatgcgtccaatttgcaatttggtctgtgcgtccaatttccaatttgccaatgcgtccaattcgcaattgtcagttcgtccaattcccaattgtcagtgcgtccaatttgtaatttggtctgcgcgtccaatttccaatttgccaatgcgtccaatttgcaatttggtctgtgcgtccaatttccaatttgccaatgcgtccaattcgcaattgtcagttcgtccaattcccaattgtcagtgcgtccaatttgtaatttggtctgcgcgtccaatttccaatttgccaatgcgtccaatttgcaatttggtctgtgcgtccaatttccaatttgccaatgcgtccaatttgcaatttggtctgcgcgtccaatgtccgatttgcgcgatttgtctttgtccaattgtcggcgtcaatttgtccaatgtttcccgattgtccggcgcaatggttgtccgtgtcaattggtcgcagtggtcgaattgagtcaaattcccttggtgaggtgagaatgtgatttgacgaaatgagtgaaaatccaaatgccaataaattggtaaatggttttacgcctcttttcaaaaagtttgtgatttagttttgaggcggaaaatcacttaaaacctccaatcccttgccttccgttgttctcaaaattcgaggaatttttattgagcaatttgatggaaatgcgaagagcaataaaaatgttttttaaagcattttaaattgtgtttgtcgaagtgaagtgatggatgggaaaaaatgaatggcttaaatatggcggatgagaccgccgtcaatttgcgagagatatgtgtcggagataacaagagagaaaatgaaaaatagaatttaacaatttaaatgattgaaaaagcatttaaaattaaagcataattaataataaaaataaatgagaatttgggcagaagaaattgaatgtccctgatcatcaaattgagtgatcgaaattttgtcagatttgccagccctctccattcgcaacttcctcctcatgccttcctccctttcttttccctccactttcgccattcttcctttgttctcgtttgtacgcgctcaactcgtccaaccatgtcgccctcgttgaccgccttgtggcaaattcgttgctcgcttcgctccgccaagttgagacttgctccgatgtccgacttctcctggtttgggaaatggtgagtaaattggtccgaaaaggggtgtgtttcggacaatccccgaaaaacagaaacttgatctttaacgggtttaccaagttgacttaattcagcctcgaggaactgattttgcttctgctctaaaatcccctttaatttaattcttccctcaacataatgcatagccatgagagaccaaccgaatgtgtttaaataaccggaaccattcaaaatgtttctggtttttgcccaattttttatgccaaccagaaacaacgggattcgaggatccccttccacatatatatttttttgttggaggtattgagaaaatgtttaaaccactgtttattgccaaaggactgttttcactaatcttttgagggcaagtcattttttagtaagctcccaatgagtcaacacgtaaacgtttgtttttggtcttaacaaccataggtggtccaattgaagattggagcttatttatattttttcttctaatttttccataccgtggtatggtttctttcttgtattttttaaaatcaaatccctgtcctttttggttttcaatgttatttgctgccgtttccaaaaggtttttaagtcctgttttaccctcgctgacgagagactccttcaaatctttaccttccaatacatttgtcaacactcgattcccgctttcaagcccctgacgtgcaattgacgatccaatttgtttccctatcggtaaaagaaatctcattaagcttctaaatactgagccgataccagcaccgcgctgatatggtacaccacgaaaaatattgtaacctccatattgaataaattcgtgcgagaatgtagaccaatccacttggtggggatcaaaatcgacatgcattttttgtgaaaaaaatatattttttcaactatttatatttattattcttgtaacaaaagaactgacaagtgtgtcaggtgttgtttttccaaaatgcaaaaatcttacaatcttttcaaagggagttcccagacatctattaaacaaaaagaagagcacatgacgaccacacacacttgaattgggagattgaagtagaattatactataacgaatttgtttgaatcttgacaaataatttgcaatgtgtatgctaggtggtggccaaatgcccaacgagtcatagtattcaatgtgtgacggagaaggactgtaagcacaaacccaatgtgatcccttagaggtgattgggtcaatattcattaccagacaatttggaaattttccatttccatatttggtatctggtcagccgcaaaacagccgatataagtctgttttgtgagtggg

SEQ ID NO: 20905 - DNA, 2236 bp, Heterodera glycines
  unsure (1)..(2236): unsure at all n locations
tttgacgataaatgtgaagccgggctggaagagcggcccccgcatcactttccccaaagagggcgacgtgttccccatccgtatgccagcagacatcactttgtcatcaaagacaaaccgcaccccaaattcagaagggacggctcagacattcggtagcattttggaggaacattcccaagattaatttgtatcattaaaaaggtataaacaagtggttccattgcgagacgcactttgcggcatgtccataaaagtgccaactttggagggtgacatcatcccgttgaacatcaagcacgtgaccaaacctggcagcacacaacggtgggtttcatttggatttctatcaaggaatttggctaatttcgagctcgatgtatgtgaacttaatttcctatcatttcaaaataacaaaaactcacaaaaacaaacaaaaaacagaccaaaaaaataaaaatacatttataggtttctcaagttttttaaaggtaacttctttaaaagtgttgaaaaaaggaatcttggaaaaaattatgtatcgacataaaaaagtttaaattgaaaatgtagacggcccaggtaattaactgacaaacaagcgttttgataaattttactgaatttatggacttaggtaaatgtaaaaaggtggacaaattttgtttactttgcagcgcccttatgagatgaatacaattaatagtggagtttccccccccccccatttttcgaaaaatttcttttgtttttaaaaaggacacgtatactttcccttatcattatttccttttttccagaatccacgatcgtggcattccgaaccctaaaacgggcaaacgcggcgacttggtggtggagtttgacgtgcgcttccccgattcgatagcgcctgccgcgcgggaactgatcgccaatgcattgccacccaactgatcggacgaacggagggccaaaagacgggaaagcgaaagaatgtgcatttgaaatgttcaattgacaagcgataaaagccttttccaatcctcaattccccaagaaatgagtccacttctccacattctgtggttctattttatttagttttattatggtgtttcgtttttcaataattttgtacatttaatttctgatggttgagagagacgtataccaaattctaccaacaatagatttgctatgcttgcggcgctgcaaaacatcacaatgctgggttattatttcgggacaattgaatatcttaaatttggtagtaaaaagagcaagaaagcatagaaattttttattttcagggtgggactgcattttttgatctgcattatttattgagtttgaattcgtcattgttgtttgtccgtcaatggtttttccgtagcgaatgaagtacgtacctttgccttgggcaatgaatgctttctttcgctcgcttttttgtctctttttggccaaccaataaaatggcctttgtgccgttcccatcgaatgcttttgcccttcgcttattgcgtgaatactctgcctttctcaatttgtgtgcaaaatattaaaaatgtttcaaattatttgtaatttttcgtcaccccaataaaaagtaaattaattaatttttctcggcttttcaagtctgttcaaaatgtattagtggtgtttacactttttacatcatttttaaacccacggaaaatcggattcgaaaagtgcggcggtccctccggccaatgtttgcttttgcttatacatatttgtgtgtgcggcttacatattccctctccgctttctgtcactgtgcttaatccctcggcccattgggggcattttgtcttcagcctttgccctttggcgccgtcgttaatttaattgggcgaaggggacgaaattgattggaatttcaaattaaaattagcaaatttaacgggtggaatttgccaaatttaattatacataaaattctttttttttttaaaagataggccactgtttttatgacttcgccaaattccgcttttcgccatgagagtccggaagacgtcgttttcgacctgttcaaattgcctaaccgtgacgaagcgtcgattggcaaattgatttcagtgagaaaatgcaaaataatagagcaatttanattcaattaactaattaaaaaattcgaatgtttccaagggcaacaatgtgaaatattctcataataagtgaaattttcaaaatgatgaattgataattttgttgngcttgaatt

SEQ ID NO: 20906 - DNA, 963 bp, Heterodera glycines
aaaaaatgccaaaaaatgatggaaaatattaattgaaaaatgaaatatttaataatatttttaaaaatattctgaatggcgcataattatgagaaataattgaaaaaatattttaaaataaaataaataaagacttgacttagatttacgatcatttttaataagtgtctttcttcccccccccccccaatttatcggcaaattattaatccctaattaccgcccctcccccgcctaattagtcatttcactgtctttgctcccgctttgttcagctgtgttcatccgtgcattgcactgattacgcgtgccattcgcaatcagttgatcattccgaattggacggaattcaccggaaaagtccgagaactttttgaggaggtaaaaaatagaaagattattttaaaataatgtcaaaataagattttgttcagtgccgtgcagaaactggtggccaagtggccacttacattccccaattggcacgtgccgacccggaaaaggtccatttttactcttttcaattaatttatttcgtcctaatacctataaggtatttagcaggcttttggactagtcagctgacggacaactaagagaagataaattttgaatggaaattaatttttttccccaactatttgtgaatcagattgataattttggcatttttatactaatcattgataagcagggcgaggattttttgttttttaactattttttctgcggctttatttcaacgagaaaggcacgaaaaacacatttttagctcggaaattcttcgttttaacgccactattcatcactaggaatcactattttggagctttgccactaaaaaaaattattttggaagttagccactaaaataattttttgccactattttggcgtttcgtcattatttttgcctactattttggcattttttggaaaatttcacaaaaaatgcaataaaaa

SEQ ID NO: 20907 - DNA, 1753 bp, Heterodera glycines
aaatttggtatgctaatatataacacctagggctatcgagtgctattgaatacattcacttcgaacaactatgaaaagagttatgctccaaaaacctagctggagcccagttggttggcgcccgtcgacccccacctttccaatcctactatagtatttaagaggtacgacctgcatttttttgggcatggattctcctggattttttttccaaaaatacagattcaggcaagactgaagcccaggcccagtatgttgatctctaataaatctttattcccaaaatgcatattcttatatatatatatttttttaatttaagtaatttatccttttgggctcgctgtcttcgttactttatatggcttcgtacaccaaacaattgttaacattttgtttgattgatttttaagaatgttgcaatggacagacagaaaagaggaagaaaaatgattcgtttttaatcattaacatttacatacatataaatgaatatattggagctcaccaagaattaatccgggccgggcgccgttttcgtacaagaggatattttaaaaaaataaatgaaacaattgcatttaaatcatatatactactaatgttaattatgctttttaaggttttgacccaattaggtttttaataactacaaaaagtaaataaaagattacgatttttgaaattattttggcaactaaattagaccaacttggtatcattcggaagctcttgatgaggaggagctttttcgtagcaaatgttaaacgattttaaaaaaagataagagcgttcgaaaatttgtttttcttctaactcatgaataatgcataagcaagccaaaaagggctggggacgttagtcaaaaaccatcaaaatgggcgttagtcaaaaaaacatcaaatgaataatttttgacagaaaattattcataatttcttctaaaatggatcaaattttataatattgatatttttccatagacctaaatgttttctattatcctgcgaattttaaaaaaaatctctctcaagacctggatccagttatgaactgagatttttttaaattcattttataaactcaaaaaaatgtttgaaaaattcaattaattgcttggaaacatctaaaaatatctaattaataataagaatgtgttttaaatttatttaatctgtttttgaaaacttgaaaaaacatcggtcacttgaaaaaataaattctaaaattttgtccaggaaaatccaggttttttcctgttttgcctggacctggatttttttcacatttgacctggacctggatttcctggacaaaaatcgaggaaaatccaggtccaggaaaaatccaggttgtcaaaaaatgacctggacctgatccaggaaaaatccaggcctggatccaggtccaggccgaactctatgaaccacttctaaccaaaatatcttttcaattttggatggaacaaacattaataaattaaatgacagagggacaattaaatggatttaaatttcgaaaatgggttaataaattcatgaactgtgcgaaatccaaacggttttcttgaaattcatgaaatttccattgaaaaaacctggaaatagctaaataggataagcaatgaaatttttgaagaaaaaatacaaaatcaaaatttgtttttttttaaataaacaaattttatctttttctatttaatcaaaataatttttggggagattttcattttttaagagcccagtgtgttttt

SEQ ID NO: 20908 - DNA, 1570 bp, Heterodera glycines
  unsure (1)..(1570): unsure at all n locations
ttttatttatttngttctagtccaatatttttatatttgtgcatttattttgcttatcataacttactaacaaattattaattaattaatttaacaaagaaaagaaaagaaagcaaacgaaaagccaagaaaaataaatagaaatttaaaattaagaaaagaaaagctgcgcaatatttaaaaaaaaaagacgaaaagcaatgaaaaaataaatataaatttttaaagctaagaaaagaaaagcagcgcgatattaaaatgaaatgcaaacgaaaagccaagaaaaatagaaatctttttaaagttaagaaaagaaaagctacgcaatattttaaaaaaaagtcaaattttctattttttttacagcgaaaaattcaaattgtcctttattttatggctcaacagctaccaaccgttttcggccaaatgccgccctttggccaagtcatattaacaataataaaaaataaaataaaaaactaatattttattattttaaaggttgcgcaattggtgcaacccatcctcgtcaacgcgtcccaccagcaattggcggtgcttacttgttttttttttaaatttttttaaaattttgctatttgcaatttcaggaacctttttgtgcggatggaacgcacaacattcaattcttgattggatgcgttgctgcgttgggtcaaccattgccgtaagttgaatttacaaatcgatatttaaattgtgcgcgagtttttttttagcccgatgtgcctgatcgtcgtgtcggttgaccatcgccctgcgcagcagacgccagctggaccacttgccgtgacgaactgtgtgcttcgcacgggtgacggccaccgcgttgaagcctcgggatggcaggcgcatgcgggtacgctggcggccttgtgtgttggcagtgcctactggttcaccaactgcttggcccgtgccaaataccagcgactggactgctggtttcgcattggggttggaggccccaatgcgcttgtggtgccgcacgtggccccagaggtaagttttttttttaattttaaattgatatttcttttgcaatttatgtttaagtttccggcaaacgttccaccaatgctgcccgttcaaattggcgcagggcgtgatgcggtccgggtgctgccaaacgtgaccaatgctggtgatgaacaacgcgcggacgcggaactggacaacaacaacaacaataatgtgaggaaatgatctttttattatgatttgtataattttattgctttacgatgaataaactttggttctcaggacaccgttggtcttgagccacgtccgagtcgttgtgcgagtcgtactgctggtgcgcgaccaacacaaagacgagcggctgaaccggttcgtttgagggtccgattcgacttgccccctgaggtcgaagaaattaggggggtggaaagacaaaaaccatatcccgcccgtaaaattcgtttgctgcccaattttgacatttcacgcattcatattgaaaaatccctttcctgtcccatatgcatgtgtccttttgtgagtggggaaggcgcaatttctcttc

SEQ ID NO: 20909 - DNA, 954 bp, Heterodera glycines
ttttgatgccattgtatcagttggttagtgatcggcttattcgtttctgatcaatgatctattatttatttgttttgatcagcaataatgatcaaaatgaagcttaaaccttgtcgccaaatgggacgaatcggatgccaatgcgaagccgattcgggcccatttgctggatggaagtcaccatggacaaatttgtgacacacctgcagagaaaccggataataattggtaaaacgtcaatcggagcaatgcgaaaaaggcacgaagaaatctcattaaaaaaaaattaaaaaccttaattgtgaaataatgaaaaattaaaaaaagaactaacgcaaaagctttaggtgttaatttgaatttcgtttttacttttttacgtcaattttttatgttttccgttgaaacttttgccgtccccttaattgttttttctaggcgtcacccctcctcattttttcttgtttctattgtaaaaaactaaaatttctttccttggaattttttgaaaataaattttaaaatatggaggatggcttatggaatatgtgcccttaccctcccgagtcccaggtttttcgataaaattgccccacccattggcatcgatcagtgccaccgaattggtcgcctcctcattttcggaattgatcgctttcaggtcgctgatcagcagtgatccgtcctcatcatcaccatcattagcataattgtgcgggaaagtgcggcggtggcggcgccgaatctccaaaaagccgggcatgcccagctctaccttttgcaccggcatgccaaacgcgtcgagcacctccaggcgataggcggggcccgccggctgatgtttggccaaatgaaattataatttttaaatgatttataatgcaataatttccattttttaataaattataatattatttttatttttatttattttactatttatttattcac

SEQ ID NO: 20910 - DNA, 902 bp, Heterodera glycines
atcagtgccgtgctcgcctctttcaccatcagtgtgttggtgtgccgtcgacgcgcgccctggcggttgtccgtttcaaaggcgcactgggcgagcggcaaacggacgcggaacgcgtggaccggcgcggaaacacgacgcatacattcatccgcgtccgctcctccgactggcctagctgccgcggatggcattggcactggcggcgtaatgtgcttttttggcaccacatggccgcggaacagtttcagcggcgagaagccggacagcgtcagcgagttcaagtggcaatccaatttaactgtaaatttcaaaaataaaatgcgtccgctggcgagagtggttttggtaggtttttagagccgcttttatcaaaatgaaattgaatctcgaaccgaaaaaagactcgggtttttagggccaaggcacgatttaagtagagaaagatttgaggtttttgtggctcccgatttcggtacaaagcctcgactcgacaaaagtctcgggtttttgggtctcagtctcggcgtcgaaagtcgaattgagaaaagcctcattttatttggttctcggtattgatttcggctgagtcgagaaaagtcccggaacgcctttaggttgccttttggcctaggaatggagtcgagaaaagcctcgttttttttggtctcggtctcgacttgtcaagtctcagtttcgagcatcggaaaaatattttttattggcaaatgagcagcccctagaaaatttcctgaactaacctaaaaaatttgaaattgtgaaaaactcttttaattccaaaaagttgttccactcacaatccatgcattcgtccaactctccactggacaggccgggctcaatccgttccaacacatttcgaccccagtgaacgcaatgcc

SEQ ID NO: 20911 - DNA, 2634 bp, Heterodera glycines
cttggctcaaaatgtaaaaaaaaaagggggggtggagcaaaattttgggtaatcgcgcgggattccgaaaaaaaattttcaggattgatctggatcgggatttggtagggatccggacccggggatccgtcccgatggtttttccaaaattttggggattgatcgggattaagtcgggatatcggctcggttccctccgaccccagttgtctggtctctagtttaaaatgaaagaaaaaaaaaatttttttttaaattagcatttcattaaaataaagaattttatttattaatttgtatttttcgattaaaatgtattcgttaagcaataaattctacctcgtcgttccgatttcttatttctcatgtgtgtgctataaattgttatgatccagtaatttttcgtatcgacattgtcaccctattcgatttcgtatttgtggtcatcggcactttaattaataatagttttcgcgaattttttagtatttaaacaacttcaataagagaagccgattaaataaatagtagaatatagaaaaattaatcgtttgattgtccttaaattatatcctccttagtttgccgtgtagctacaattccattgttcatgttcccgccttatgggcgtggtaagctggttgagtgttcagggaagaatctgaccccgctagtaattaaatatattcgaaatttttgaatacatttttctaaaataaataaaatttcaaaaaccaaatttggtcaagaaagaaaaacaaatttagtggaaaaaattttgaatatttaaacaagtcgccaaaaaagctacgtcaaaaaaattttcaatgcatttttgttaaagaatttgtgaattttacatgaaaaaatttaaaaatcgcgaaataagggcgaaaaaagcatgaaatggcaaaataatggcaaaaagaagttctaaaaacacaaaaaagtgtcagaaagtgtcaaaaatatggcagttttcttcaggaatgctaaaaatttatttctttaaaaaaaatagcaagcaaagcgcggtcgatcatcgcaaaatgatggactcgtatttatgcgagttaatctggcgcgaagacattaactgactgacttaacgtcgatgcatttgaggaaattttggagcaaattgttgcttttatcttttatgctattgaacgtgctttgggcaattaacaggggttttccccagaacaacaacacagtttgatttgctttttatttccgctttcaaattggaattttaatcttttaaattgttaataagattttttcgcaatatttgtttctcaccattctttataaccatggacaacaaattaatgtcatcacattgtttctcactttttcttcaaatacaaaagtgcacaaatagcaatttggatgcactgtcagcagctgcaacagcggaagaggaagaaggacagcaccgccagcgacaactctgtgccgacagggcactgcttttgtgaggagatgggaagggaggagtgcccgattgtccagtcatcaaatccaagatcggcattcttgcaggattttctcaaatgctggcaccgttttttgaataaattttccgttcatttttgaattgtgcatggaatttaaaaatgggggaacataggatttgatagtggattgagaatggagggtctcggaaacagaaataaatcgctgttttataccctcccaaattcgttttttcgtgttcctccctccgaatttttttttctggctacaggcttggcatatttgaccaatttttaattgattccactaccctcccaaaatgcaatttcaacgctaattgctctatttatatgtgtggcatatggcaattttattttggcatatttttcaggctgaaccgactcgcccatgcccagggattgcccaatgtttttgcaaaagattccactgttcggccagccaccgattttttcaaaatcaacgagcgccaccacatgcaattggtaattggggaaaaataaaattttttttttgttcttcgtggcgaaatctgtaaaaaaaattataccaaaattttagcaaaataataaattctaaattctaggtttttcgttttgttaaaattcatttgtgcctgatatacgacttctgtttaatggagtgtctaattttttttttgaaattctataatttaacccgtttttactagtacatgattaaaattagagctgagcgggactggtactgaaaaaacacttaaactgagtaccgaagtcccgttttttcccggttttcccagccaaaattcccgggttttcaactcgaaaattcccggttccgctcagttctaattaaaattgaaggcccagcaaaatatttaaggcaattccaaattttttaatgtgtgtgcatttgtaggacaaactgatggacaaattagaggcggaagcagcaaccaacgggactgggctgatggcatccaaaacggccgctttttctccgttagcgccctcctcggcgttgcgattgaacggcgtgccaaacagcaaattcaaaaagcgggcccaacggcgcaaggcgcgtgccacggaaagggcccagcaactgcacacggtggtcccggttcgtttttggccattttttctttcgttt

SEQ ID NO: 20912 - DNA, 1694 bp, Heterodera glycines
  unsure (1)..(1694): unsure at all n locations
tgtaacatttggaaccggaaaagtactagccggaaactcttcaattgaaaannngnaacactnggaaccggaaaaanactctttcggaaaacaaaggaancgaaaaggcaangggnngnaanngnaacatnnggaaccggaaaagnactagccggaaaaagaaacaanngaaaannngnaacacttggaaccggaaaaatactaaccggaaaaccatggaatcgaaaatgcaattggttgtaattgtaacatttggaaccggaaaagtactagccggaaaaagatacaattgaaaatttgtaacacttggaaccggaaaaatactaaccggaaaaccatggaatcgaaaatgcaattggttgtaattgtaacatttggaaccggaaaagtactagccggaaaaagatacaattgaaaatttgtaacacttggaaccggaaaaatactaaccggaaaacaatggaatcgaaaatgcaattggttgtaattgtaacatttggaaccggaaaagtactagccggaaaaagatacaattgaaaatttgtaacacttggaaccggaaaaatactaaccggaaaaagatacaattgaaaatttgtaacacttggaaccggaaaaatactaaccggaaaaccatggaatcgaaaatgcaattggttgtaattgtaacatttggaaccggaaaagtactagccggaaaaagatacaattgaaaatttgtaacacttggaaccggaaaaatactaaccggaaaacaatggaatcgaaaatgcaattggttgtaattgtaacattttaaaccggaaaagtactagccggaaaaatggttgtaattaacactggaccggaaaaatactaaccggaaaacaatggaatcgaaaatgtaattggttgtaattgtagcaattgattgtaattgtaacacctggaacctctcttcaatggacctcatgatttttccggaaaagtttttacaaccataggatttttcgagaattacacgattttcaatatatttttggagtgttcaattaccttaaaacaattttctaaatacatgaccatactgtattaactgcataataacataatgcacaatattttaatttttttaaatatttgtttggtcatttatcggacaccagttattctcacagtcaatggtcattcttcaacaagttcaacggaagggccctccttgcgcatttccatgaacacgaatccctccccgtcatccatatctgcggcaatgcaatcagccaccttaattttattaataatatttaactgctaaccaaaatgttcaattttaagactaaatggcgacgcctatcgataccatttgatttaaaaagttgtatattttatttacaatccagatacaaagcaaagaagacatttgttggaatcaattatttatctgtccatagaaataacagtttttgatactctatttaggcgatattcggtactttttttggttatggggccatacttcagcggaaaggcacccgattttctttttcaataaactacaactttttcaagaaataatatgttctgagtgaatctattagcttgcattaactcgaaaaaacacctcaaaagacaatgaacgctccaactgttcaaagtcctcacttccgtccgcaatcatattctgtttaagataaagtgttcaaattaataaattc

SEQ ID NO: 20913 - DNA, 1232 bp, Heterodera glycines
ccattgccagcacttgtcgtcgttagctcttctttagcagtaaacattttcgctttggtcgactatttaaatatttaagaaagaattaatgtatatatttttctcaaaaaattcatccaacctcagacatttgggaatgagttagcatcattgtcggggacatgaatgtggactaaataattgacaaaaattttggatggttaattattgtgattgatttatttacctcggacaaagagcatttcgatgagcaggaaggacccgaaccgaaaggagaaagagcgagctgaaacggtgaggtggttggagaattggcggacggttgaacacgacgtaaagcagaggctaaatgttaatataaaattttttggcatgtacattcataaaagttcaactctatgtgacatctattaaaaggaataacttccgaattctcaactcaaataaaaggcaattttgttccaactcgggttgggggctcggaaaaattttcagcaggtatagaagtagccttttttattaaaagaaaatgttttggtacctgtggcgaatagtcccggtgaaggagcaattaagttgttgtgagtccaaaagtgatcaatattttcaaattgtggagtcttgaattttgcacaagggtccctaaaaacagaaattagtgtaaaaaaaaactaacgcaaatataccaattttcaggtggcaatgaaaactcctcagtctcatcaaattcaatgggttgtatctttgcgatttggtcaattgaccatttgaaatcctataaaaaacataattagaaatttaaataatatgtaaataaacaccgcgcttttttccttagcttcattgtttccttcatcattcagttgtctgcctgtgagcattttacgacgacggaaaatgccaggagtgacaaatgatgacttaaatagtaaaaattatggaataggaactgagtaaaatgcgagtgtaatgtaaaattaaataacctcctgaacaatagaagccttttctttgttaacaagggtattcgttgaaattgatgattcgtcttttttgtcgttagacattccacaaaattttaattctcagattttaagacctgaataattaaatatgaaaagctccgattctgtaacagattgggctaaaagattttgcagaaactgaagcgggttgtcaggccgatttagagggggtgggaaggatttaatggagcgggttcatgacaaaaa

SEQ ID NO: 20914 - DNA, 1175 bp, Heterodera glycines
gggccacttttttagtcgtcgtttttggattttgatgccgaaaaccaaaagtgttttcctttctatgtgcgcctttatttgaaatttgcggtgtcattttgttgaattggcgcgcgcatattaatttttaattgggctacttttttaattaaatttttaattttcatatgaatttttataaataaattttaattttctaattaatttttttatataaaatttatctcctgcaattgcaaatttaaaaaataaaaataaaatctggacttgattttcttggtaaaatatcatttaaaataaaaaatttgtgcatttttatttttaattgtatcgacgataaatcgattaatgagaaaaatatacgtaaatttgtttcgaactttcttaatggattatttttttaaattttaaattccccttttcactcctttatttactattttaattattcatttgtaaaatataattggcttgccgtgccaaaaatagattcttaattatgtatccaattttgcgctgtgttccgttacgcttccgcctgctgctgccgagggtggccaaatggccagagccccgcttttcatcagtggccacactgaccacagcttagtagtaattacgcaaccccaaggaaaagtgaggcttcatcgattttgaaaattgtttctctgactgtcgatttctctgcccaatgcttttctcgctgtctgtccttaacccttcacagacactcaatgcttttctcgctgtctgtcttatactctctctatcaatgcatttcatctcttatctctctcttctctctccctcgctctctctcaatgcttttctctcgtctgccctattctgttgctatatatcactttttctctctccctctctattctcttctctctccctcgctctctctctcaatgcttttctcgccgtctgtttttacctgtggctgctgtactctgcccgttttccattttgtcctcttgctcatacacactttctccattatttcaagcgtgtgaaattgatgatgaagcgaatgggctggggagggtaaagcccaaaagtgtaagccaatctgcgtgaaattgagcctgtggattaagtgtaccacctacccaacataacaaagaaaaacaaatatctttttcaaaaagccaaataccaaagccattttg

SEQ ID NO: 20915 - DNA, 735 bp, Heterodera glycines
atttgtgccactattttccatggcaatcccattaggtacactttttcactgtaccgactgctcccgacattctctcgtgcaaattttgacactttttcaatgtccatcaaaagtgtgccatcataaacacgtccattagtcggaaatttcattgggaaaagtccgtcggatttgccacgatattttggaagggaatggaagcgataaacggcgatcacttcatcttttgataacacatcggatggcactgcaaaaaacagtataatgcatggaataaaataaattaaattattgaaaaataatttaaaacattccaaaaattttcttctcaaaaataattaattattttacggtagctcattgaaatttggcttcttttttttaccaattttctccgaaaattcctcgcttgacaaaatcggaaagtgaattttgaacagtgccgaaccgagcatggcacgacgattctcggctgaacattcaatgccatttttgacggcatttcgcgtcggcccaacggagtgcctttttttttattaatgagaaagactaattattgcaattatttcttaattgtagtgtaaaatttaccgcattccaaattgaaatttctccactgatttgcaattggtaacgttcaaaaatttcgcacaacaatttttgatcaatatgcaaaaatgcctccgattcgatcaaagtgtcagcatttttgtcaatataagcaaaacatcgttg

SEQ ID NO: 20916 - DNA, 1300 bp, Heterodera glycines
  unsure (1)..(1300): unsure at all n locations
tttttacatatttagaagctgtttttctaagctattggagtccggcggtgacgaaaggaaaaaatttttttcttgatntaatgagtgaactgttntaaaaaatattatttgataattgaaaattaagaattttcctacttttcccaccgaatgtgccgtgccattcgcatttttcgtcgcttcctttttaaacatcgcctcaaaacgtcggaagacgcagaaagaatggcacgatgtgcgtgcagaagcttaaaatttaattcagcaaatattatttttatttcaaatttagttaaatttaaatatattttttaaattttatttttgcctcttttttgtcgttttgcccaaccaaaaaatgcgcatcggcgaaatcggccgtgctcagcaacaatttcattcgatctgccaaaatgtccggctttgcagtcttcctttttttgccatctgagcatgaaaatatgcgcatttaaaatgaataaatttaaaaacataaattttcttttttggtgtcttttttttaaatttttctttttgggcttatccaattttttggtcaatggcaactcgtacaaaaatcaactcgtattttacaagataaagcttaagcctaggcccaaccaagcaagcctaagcctagcctagaaattgtacgatttgccatggcaccccaatttttgtccaaagtttcggaatttcaaattgctttggtcatttcagtagtaccttgatcagctgtaaatgtataatttgttgaatcgggaaaagaagacattaattgtttatttaatgctaaataaatgtaaaaataagaaaaataaataaatttaaataatcttattagattttttaaatatacttgcaaattttgtaaaaaaaatttaaagctgcaaaaaataaaaaagttttcaaaaatacattaataaaaaccaaattcttcataaaaatgccagaaaattaataggggaagaggaatagtaattagaaaagagtaaatcaattaactttctgttttggatggcgagggcattaaaaaaagaaattacggcaaaacgatgactcaaaaatgaaacaaatttgatttgattggattttccccctattttcaaatataatttttatctaggcaaaatgctgacccaaatatgggaaagatttactcatttgaaatggtaaaatatgcaatgatagagaattgcccaacatcggctttggagttgggaaatgttagggtcatttggagctggggttgactaaatcagtcgggactaaatgaaacaattttagtttttttttgtca

SEQ ID NO: 20917 - DNA, 1232 bp, Heterodera glycines
aattaattcacaatttccgcagctcttacggtaatggaaaaaattttgaaaaggctctccggaacggattagcatcggggttacgacatagaaaattgtcctaaaaagagatagccatttttctgagaattaattcacaatttccgcagctcttagggtaatggaaaaaattttgaagaggctctccggaacggattagcatcggggttacgagatagaaaattgtcctaaaaagagaccccgaaatgaaaattttccagtaaaaattggcaatttttaaaattttttacccaatttttttttaacaaaaggcattaaaaaatcaaaatttttcccgatggcgcctatcggcaccgccggacccccattttaccttagttttttgaaacaaaaattgcaaaaattagaccttttgcctgcttttttccttttttggcgctggaattaaaaatttcgaaaaaacgtaattttataaaatttcaaaaaaactgctaaaaattttttttccctttaaattttcttataaaaaaatttctaagaatttttcgttgaaaattttctaagtttgattttttttttaatttatgcggcgagattttggttagtccccgaggggggcgggtaacccatggcgtattttcgccggacttactgttcaatgatgtggtgcatataagcggcgctcttcagcagttcgtacatcacttcgccggccgtgctacactttgccaaatgccgcaccaaatcggcaccaaccaaaggggaaagttcagcacgagaaattcgaatttcctgaaattcgtaatggctattcgaataacaaaacagagaggagagtttataatcactagtgatgttcgagagtctctgtctcgactcgagaaaagtctcgggtttttttggtctcggtctcgagtctcggtctctggtttttaagtctcggtctcgattttcgagactcgagaccgagacttttttacacccctaatgattggcttttgttaaagttctatttttataaattttaggtccttttttgttcagtttttgttagcatatgcctggtccagtgggttgtgttcttgtttctgttccttgtttttgcgcaggatcaatcccctccaagtatttgtattttcttcacatttttcaaaattaatattttttttctaagtgaattttaacaattaaaagcgtgaaatattgtcatttttggactaaatatattaaca

SEQ ID NO: 20918 - DNA, 2697 bp, Heterodera glycines
  unsure (1)..(2697): unsure at all n locations
tacaggcaaagacataatgcaatgacttctattgggttcattaaaaaggtctgaccctttaagcacttcaacattaaacaattttttatttcacaaaaaacaaatgttcaatcaatgatgtactcaccattttgatcaatgatcctcccccatcgttcgggcaacatttcaatcccctttttataaaactgatcatttttcgatccaaaaaagtcatccaatgcattttcgacctcgttttgatcagcaaattctttccctctcaagaagtgctccatagatcgaaacagatagtagtcacacgggctgatgtctgggctgtatggtggatgagtaaggaccgcccatcgaagttgctcaattttttgttgcgttgagaacgcaacatgtgggcgtgcgttgtcatggagaaggagtacgccgccgcggaattttgcagaaaatggaggacgacgaatttggtcatgaacccgctgcagttgttgctggtagatgtcggcgttgatggtttgcccaccggaacaagttcatagcggaccaaccctgatgaacaccaccagacgcacagcaataccttcggtgcatgttgaagacgcctgggggtcggctcgcacaattcgtttggcttcagccattgtttttgtgccgttttgttgttgagataaacccacttctcatcacacgtgatcagctgggaaagctgcattccagcactcaaacgggcgagaagttcagtgcaggtgaccactcgctgatgcttttgttgttgggtcagtgcatggggaattcggcaccctttttgttgatgaagccgggctgatggaggtaattgagcactgttgtctgatggaccccgaactctgctgcaagttggcgcgaactagaacacggatgctgctgaacgtgctgctccaagtcgtccgaatcgagagcaggtggtcgtccggagcggggttcatcttcgagctgctcattgccttcacgaaattttgtgaaccatcgcttaactgtagaaagagagagtgcatcatgccctcactttcacaaatatttcgaagagcttgggttggggtagaattttttcggaattcgtaaagtaacagttgtcttagccgaattttatccatgcaattcaaaaattcccacactgcttcttgcgggcaaacataccgcgcatcaatgaattctttaacttcatcatgatcatttttctcttctaattccaatcttgctctatctggtggcttatgcacatacttatgcaaatactttactgaactaacactattaaccttttcaagattaatgtggcacttgaacattttcaacaggtataggttgtgcggaacaacccatctgttgtctaattcatgtcttcttccatttgcaaatatttcaacttctctttcatcatttggtcttgcatacaaagccaaaccattttcaagaacaactgtctcttcttgaaatgttttaggatatcccttagagcatttccttcctctcataccattcttgtcaacaaattaataaatgttttgttcgaattaattataaaaaataatttatttaagcaatttgaaaaaattttctgatttttgactcaaaaataagattttttatttcaaatttctcctttataaatttttctatatatttttaatttaataaattgattgtcctttaaatttgtgcattaaaaatatttttgtgagtttttaattaaattttcaaattactcccgctcccgcccgggactcccgttaaaaatggacgggattttaactggagcgggatttttacgggaatcccgttcgggactcccgtcccggaaaattttgaactcccgatcccgctcccggaaattttttttaccggactctagtttattttaaattagctaaagcataatgccacaaaaaataatagtttggcagactgcagcaacaatcaattagccaattatccaagcatgaaatggtctcgagtctcgcttcaattcaaatatgtagacagagcatcgtttgggcttggcttaaccgactcctttttatttcaattttgaagaaatcaaaaaaaaaccgcatagtccatgtataatttgcataaaattttaatttttaagggttataaattttaaaaagaagtaaaatggtcgatgcgcaacattttacccaactgctcatcggaatgatgaactccgaaaatgaaattcgaagtgtctactctttttagtgcatgagttaaatttttgtttaaggtgaggctgaaaaacagtacgaagcgattgcactcaaagacaaaggtttagttttgtgagtcctnnnnncctncgccttttnggnccccttttgtttnnnccttncttgntttcctctgcggatgttgnggttttgcttcnncttgtggcccttttcccgctttgttccctccgtttngtctcgctctttggctttggttcttctgcggcgtttgctgtcgnnttcctncgnngnnttcttctccgntcttctnnttcttnnggncctntttcncttcgaaaaaattgtgtgtntcnntggtgnnncggngcccgttttgcgcnnnngnctcnccgntttgttggcggctcttttgaagaattcccttggtgtttntctgnntttnncccnttcctgtatggggttccatagacgacaaaactggcaaacagacgtg

SEQ ID NO: 20919 - DNA, 1224 bp, Heterodera glycines
gagaaaaatgaatttacctcgtgacgtttaacttttttttctacacgttaaatctacttcaaattttgcataccaatagagaaaaattttctgcatcgaaaaattagaagatttttcaaaaataaggctcattaaaaagttattcaaaaaacaaattttcgaacgcccatatcttttttctaacgcatcaaatagcttagaatttgcttataaaaatattctcctcatcaaaagcgtttgaatgataccaagtttgtccaatttgttggcaaaaacctccaaagaataattttagaaaatggaccagggatgggccgaggtttcgcatttcgcctttcgcattttttggcgtttcgcatttcgctttttggcgcgaaaagcgacttttacacccctaagaattggattaaattcccataaaatttttcaaaattttacctttaaattggctaattttcagtgaaaaactgtttataaatgatcaaaatttccaattttttccccggcggcgcctatcggcaccgccgcgcccccaaaactcctattttttcttagaaaatggcccaaaatcgcaaaatttggtaatttgatgaaaaactgttctcagcggcgcgccaaaactcttatttctccttagaaaaattatataaaaatcacaaaatttgataattttttagtgaaaatctgtcaacaaattttaatcaaattttcaaaaattttcccggcggcgcctgccccctcttcccaaaaagtttttttggaaaaagcgcgcctcaaaaaagcgttttattgatttttaaatttggaataaaatttaaaaaaatgatttttgctttatgattttaactattaaaagttgtaaaaaaaaattcgcttttcgcatttcgcattttcgcatattttggcttttcgtatttcgcttttttttcatttcgcatttttcagtttcgcaaatttcgcttttcgcatttcgctttttatttttcaatttggcccatccctgcagtggacggacccacatgatgaccaccccttctccggttcccttctttttgtctcccctattgtgcacttactaatttttatttttttattagagcaaatgaaagaacatttttaaacgcgtcgcacatagttttcctatttttagactttaatttccgagcgcattcaagtggcctctagggccaacatgattgcgttctaggaaaactatgatttgac

SEQ ID NO: 20920 - DNA, 1152 bp, Heterodera glycines
ttatagacaaacccctcccaaaataaagtaaaacaaatttttctttaagtaattaaaaataaattttttaatttttttccccaaaatacttaaaaaaataataaagagcgaggaaaactttaaacttttcgcgaaaggacctagcatcttattttaaccaaataatttatttgttttattaatgtgtcatatctcgttaattttatagaaaataccattttttgtcgatccatgtcacagttctcattgtgaccgcatttttggtttcgaccagctgatggtagatgaccaaagtggattccggatggacaaaggtgaatttgtcgaaagtgatcgacatgtcacggtcgacaattggcttgaaaagccttccgcgctcaccatcacgctgggcgatctttatttttcaatataaataatttgataaatacgtgggttacaacaaaaagcaaaaaacaaaaacaaacaaaaaagaggtataaaaaccctcgattatgcattaaaaatagtcaaacaaaagttttctgaaagattttaaggtaaaaaatccagaaaaattattaggaaaaaaaactttcttgattatatttcaattataaagaatcgaataaggaaaattttaaatcaattttattgcgaaataaaaattaatttggggatcgactttagagatcatttttcaattcttagggggcatattttcgtttttattctattttaaaaaaatttttccgaaaaccattaaacaaaaacggcgtaaaaccataaggattcgtccttgggtgccaaggacgtccttggatttgggctctacgtcttggaaaattgaaggagttcttatttgcaagaatgcctctggaaatcagatagaaaaatatttaaatttctcggtgaaaatctattaaaaaaatagtcaaaatctcgaattttttcctccgctgcgcctatcgacagctccggaccccaaaattcctatttcttcttttaaaatggtcaaaaacgtttttaatgaagatctgtaaataaacttctttcttcccaaaatttttccccgcagagactatgggcatcgccgaaaaagtagtaatttgtccacaattttcattaattttttaaaataattcccattttcccacaaaaaaatttaattta

SEQ ID NO: 20921 - DNA, 2498 bp, Heterodera glycines
ctctagagtcgtttaatgtttgtagaagggagcaacaattaaattatctctttaagacaacgcacaacaaagataataatccaaaatggattttgtttctcaatgcaactaaaacttaaaatttttgatgtcatagatccttttagataaaaaacaaaaatttaattaaaccgaatgaaattttagtgatattttccaaacattttgatgaaggtatggggctgactttgtcgagcgttggcgggacaaatgaaaaattttagtggtattaattaattttctaattgagcaattcaaaaacccataagcattatcttgttcacttgttccaatgcttaccgatgggtccgtcggtttcttcggaaagacacgcgttcaaaaagccaatgattttctgcattatttcgtggtccatgcagattcaattatcttaagtgtttaaagaataggaagtttcctgcaataatatggcaaaaatatttttgaaaacgtccaaaaaagaatttttttctgttgtacatttatttttaaatgtattgagggttagaaaggcgccaacagcgtcacctcggaaattttttttttgaaaacctgggttatttgttatcgtgctgggtcgtttcgtaaaaagtgccactatgggcgtttcgtaaaagtgccaccttgggaatgtttcgtaaaagtgccactgtggtcgtttcgtaaaagtgccaagtcgtttcgtaaaagtgccaacttgggaatgtttcgtaaaggtgccactgtggtcgtttcgtaaaagtgccaactattttattcgattttgataacatataaaatgaatatataaaatatataatttatcaataacgacctagcaccatatattttaatgtattatttttgaataatataattggacctataattatatacacatcaggggtgtgatttgtctccaaaaagacgagagcgagactttggcgagagtcaccaaaaggacgagagcgagagttcagcgagaatccccaaaaagatgagagcgagagttaggcgtgagtacccaaaaagacgagagcaagagtttggcgagaggtgagagtcccaaaaatcacgagagttggcgagaggacgagagttgttcagtttttctgtagccttattttttattccaaaaaacttcattcataaataaaatcgtataatttgatcttatggtttaaaaaataaaagcttttcaatgttctccaccaataatttcttgcgcttattagtgatatttgaccagccgtcgaaaataatcgttcactctctctcagcagatgttgagggggacaaaaaatatttatgcgctataaatacagaattctgagtgtttatgcttcaaatgtgtggccaatgttgtcgttggtcttttgggcggaaaattccttttgtagtcacaatttttgcaaaaagcgattccggtttcctttttgaaataattccatattttcgacatggtcacaccttcgttaattttacaacgtgcaaaagcaataattaattaaattactgataatttatccaaaaataattgtgctctgattttaaaacatgaggtgataggcgagtgtcccaaaaatggcgagagatgagagttgtccacgcctgatacaaatgcatgttttttgttctgaactgtgatttaacgaaaatgccgtgcacggcggtcttattgccaattagacaatcgtcccaatttggcgccagaccaatcggacctgatccactcggcggtcggttcgccggcgcaatttaggtttgcactcagctgattcgatccactatcgcgtttttcggtcactttgttctatcatcgtagtgaataatggaggctgttttatctgtttgctttttgtctctcttctaaagcctttaatttcctcgctgatcactgcttggttttggcatgtgatcactggactcatactgaacattggcgcggcattgaacggacccattataaaatatgagacacacacatgataaaaacgagacaaaataaaacacgagtcacgagacgagacgcccctaaaaatacaagatacgagacatgagcacgagacggcctaaaaacacgagattacgagacacgagacgagcaacatccctggtaaaaataaagaaaatatttcggagcgatgcaaggaaattgctgaattcgtgaccacgacaccaacagcgggcctattagaattgtggcgttattgtaccggccttcggagctaacactcgaacagaaaaattttaattgccgaatgattgcttaaaaatttttaaaattccaatttcgaaaaaatagtgaccaaagaagtttcaaaatttttttatattactatactagggaatctgaaatgcatttccttattttttgcatgcttgttttggtcaaaaaagcaagaaaaaaaatatttttagcttagtttgaaccttaggaagaagccattttttctacatttattttccatatttgttgt

SEQ ID NO: 20922 - DNA, 925 bp, Heterodera glycines
aaatgtatgtatgttattcatcaccttcttccgagggtaatatgtattcataggaaagcggtggatgggctgacggattgtgtttgtaaatgtcgaaaatggcccttaagaaatcggccgcaaaaaaacagtatgaaaggcaaaaaaaaaggaaaaaaacgaaaagattttcaagcctagaagaattttattaagaaaaaacttcaaaaaattgacttttttgcaatttcatgttataacttttttggtaattgtccaatcgctaagcaatagcttagaaaaagcctctaaagtggaccctggattttgttggcaaagaaaaaatcatagcgccaaaaacttgtgctcgcgccgaaacgacctagtccaaatccaacattgttggtatcattcgaacgttctttatatgctttattagccatacaaaaagcaaaaagattttttggcttctgaaaaagtaacattgaaaaaatctcaaaatttcgactttttcacaattttcatgtatgacttttttggtattgtgtgaataatttttaattttgtggatgaatgaatcattattaattttgaaaatttttcgttggaattcgagttgtctcaacaacccctttgccgcttttttaaaagcatttgtatgtgtgaggcgccaacaaataaaacaaaaaacaaacaaagtgcaaaaacaaaatcgacgcacaaagtgaaataacggttgtgaacaaaatgggcaaaatgatatgatgatgaattctaattttctaagcgcttctcttcacacacattttttgatcaccgccaccaccggcggccgccactccgttacgtttttccccgtcgttcgtctccgcgtccatcgtcatggcgtcgaaaaccaaatatttcttcttcagcaacggctcccctcctccgccggcaccagcag

SEQ ID NO: 20923 - DNA, 1204 bp, Heterodera glycines
  unsure (1)..(1204): unsure at all n locations
tgctgtcgttattgtttttgtgctccgccaccattagctggaccttcactttcggctgcgacaccaccattaatttcatcaccacccaccgcntgtcgttgttgttgttaccacccgtcnttgacgtcgtcgtcgttgtcatggtcactcttttcgtcgtcgtcaattttgtagagaatggtgtcaaattggatgaactgcttgggcttaaacaacacattgaacaaccaatgatttctgcttggagggggtacgataaggaaaatcaaaattcttggttaaaaattttttgattttcccttaaaaatgcgggttcggaggggtagtgcccaataaaaatcctttgggccctgcctaattttccattccatctttcggcacggcatccccacaaagtgtccaagccacgaaatgtccaagccacgaattgtccaagccacgaaattagagtgccacgggaccgggaccgggccgggaattcccggtcatccgaggtcccggttcccgggttttgaaaagctcaggtcccggtcccggtagggcaaccgggaaccgggaaaaacaagcactggtaagaatgggggtctgagattcctcatagttttttttaaattgatacatattttatcattttttaaatgaaaatcctaccaattgagcttaataatcgcaaaaaccaacctttttttgttgaaaatctgttaacaaattgcacccaaattttcaaaatttcccccggcggcgcctatcggcaccgccggaccccttctttcccaaaagttttttgaaaaagcgctccgaaaaaaagtgatgtgaaaatcaaatctgaatttctattaatattcgatgatttagtccaaaaatgattaattgtttgaaataattgaagaaaatttgtttgaaaattttcattaatttaatttattataaaaaaccaaataattttgtattattttcacttgatataaattaaaatttgaattttttttttaaatttttaaaatttttttgaatttttaaaatttcccggttggtcccggttcccggtttttctttcggtcccggtcccgaaaaaaaatcgaggtcccggtcccggcttctcaggtcccggcaagtcccggttttggcaaaaattcccggtcccgtggcactctagttttcaaggtcgctgatcacgaatctgacctccanaaaaattataaaa

SEQ ID NO: 20924 - DNA, 2555 bp, Heterodera glycines
aacccaaagtaaaaattttttttgaaattttaagcaatttctcaagcctccgaagccaagggtctggctacgctctcgggagattaatatatttttgacatttttattcatatttgtttaaatttaaaaaatgcataaagtactttgatttaatgtcaataggaattttggatttcgtttatttttaaccaattttggtgcatttttgacagttttttatttttaaattttcaattaggcttaaagctgaaatggctaagaactaaaaattagaaatcgacggttattttaccccgccgcctgcgcctcctcccaaggcgccgcttcctcccccgccaccgccaagaaatcctccgattaattcctgggggaataaaaattagatatgttaaatttaaaaaaaaaattgttcattaccccggccatatctgccaactgattgccactgcctccgccgccctgctgcggctgattatcaccagaatttgctcctcctccgccgccacctccgagaagcccactgataagttggtccattattgaaattaaaatttaaaaagctaatagaaaaataaaaccaaaatataagagcgagaaataattcaaaaaataacaaaaagcgacaaaaataattcataggaatctgtttttaggtgttaaaagtgctggtaatttggtttctagtgtaaaagcaaaaaacatttctttttgtttttcaagggtaaaaagtatttattctgatcacggacggatctgagctcaggtttttcaaaaaatgcataaagatacaaagttagaaatgtcatagttattattctaatggtttaaattttaaaaatttgaagtttgttgaattgatattttagcaaaatgaaaaaaaattatataaatattttaaaagaatgaataaatgtatttacaaattggttttgtcattaaattcttttgaacgttcacatttcgcattatgagtcatttatatgaaaagaaagggaaacgagaagcatttgacgaatcaaataaattaaataaatatttaatgaaacgaattataaattaattgaaaatagaaataattcttaagaaaaatgaaatttaaaaatttcaaaccaccaatcttcaccaatataaagaagaagagagtggtggggaaaaggacggagaatttatgagaatgggcggagggattggtgctcaatttgagtgcgtactttgcatcgatttttcagcacaagcggtaaaagcgtaaattattttgttccgtttgatcgaattatttccaatgctttaataaagaggagggcagggagaaatggcgaataataacaaaaaaaaagtcgggtcggaattcgggacgagaaaatgtccggtttcgggatgagcggcaaccctggaaaaatagaacttgacaaagtttggggggtcaaacactaatatatctttattattaaaaattttacctaaaaattaattaaaattacttagtttttcttaaacgcgtcccataatgtttacagttgcgagaaaatttgagggaataagagaaggaaagagaagaggaagaggacacgaattaattaggcaattaaaaataaaataaaaccagttgccatagaggaggagaagggcagactgattcaaagaatgaatcattaggacggaacttttaattactttgtttgttgacgatcaaaatttttttgttatttttataatttttctcaaatgtttttatattaaaaaactcaaaaaataaattcacaaaaaataattgttcaactgaaacgttggcaaaaaaaaaaaaaaaaaattcattttatttctgaaaattcatatatttttaattttcatttgcccatttctatttaagatagttttaaaatcttcgaacaataattagtcctcataatacaccgagtcaatttgggttctccgttcaaaaattttgcattttaactcaatggtctgtcagttcgtctcacaattcgcaggcgccgaaatgtctgcgccgaaaagacctttccctcgtttcgtcccccaaatttatttaaattttagattttcttgtttcatttttcttttggtttcatttttaagcattctctgggacgtcatttgcattctttatatccaaccaaacgtactcacgggcaatttggcatcaacccaaacatggccgtcaacagtggagcaagccgttggttcagcacgcgttgagtgaatcgtcaacttcttcactgcagcaaggcacagccaatttcataaaaatgaacatttttttttaatttaagtccgtaattggaaaaagcccattgtccattcggcactaaatcttgaattctagcttcataaaggccatgttttcttgaaattcccttttacccctgacctttcttctctttctcttttttttgtttccgtttcgttttcactttgctttttctgtcctctgtgataaattatttttttggcacgcaatcgttccatcgatatctcaaacgacaaaagtgtcgcaaaaggcgaggattctcagggtgtggaattggttcctattt

SEQ ID NO: 20925 - DNA, 2674 bp, Heterodera glycines
taaagaagctttgggagttttcggatgtgtgacgtagaagtcaagaaaaagaaaaatcattagaaagtctaatcaatttattaaaaaaattttatttagggagatataaacttaagattaaagtgttattgaaaagaattccaatttatattcatgtcaatttgatagaaaataaacccatatttttcgggcaaataattccttttaaataaaacgctttctaatattaaatgatttaaaaatactttatccaacgagaaaaaataattaaagaatgaaattaattaaactggaaaattaacaaatttaacaataaaaaaatatgaaaataaatgaaattcatttataaaaatagcaaaatttaacaggaatagcaacatattaaataatattatgggattccattcgaaatttgaattctaatagggaaaacctgacgctatcgaatgaaattgaatgtcctgagtcaccgtagggtcctttgcatccctaattcctcattaatacagtaagcaacagtacgcctttaatacatgataaataaagttggttacaactaaaaatttcttaaaataaaattacttttagttaagagtaactatttattcttaaaatcactcggtagcaattaattaattatgagttatttaaaaaatttcgattacaaaaaactaaattatagcaaaaatactcaaaaaaaaagttctttagtttttaggtctatattttttttaaattaaggaatttgttgaaaaattttttatttgattgttttgaataaaatattgattttcttaatttttggtgtaattataaattttacatcctggagtttttcaataatatgcccaaacatcactcgaacactatataagcaaatttctcaaaattaataacacaaaaaatcataaaataaataaaaattcacttggattccatttataagaatttaaaatgcttttaagaacctttagaattaaaaaaattcaaaaaataaatttaaaaaacaagaaaaaatttttaaatttatattttatgggataaatatatgaataaataaaatataaaataatatttggaataatatggtaggttttaagaaccaaacttattttctcctataatatgattgaacaaaaaaattgagaatttcttctataacctcaataaattggaatggaaaattagtaaaaattaattaattaaaaataataaaaaaatcaacaatttttttaatataaaattcatataaaatatatataataactcatatattagtagtttattacttatttgaaacgcggttaaaaaaataataaaaattattccatgaaaatctaaatagctccaaaccatttgcgtgtcatgtttttaaatggcataaattccatgttttatataaaaagcaatcaatcaatgtctacccgcaaatgccacactatgggtcaattacattaatgtatctttgacgcataatttctattttgttgaaaattgagtcttcaaattttacgtcgcgcaaatttattttttgaagaaaattgaatttagagtggagatttccgacgagcggtagggcaggaggcacaaaagttagtggtggttaggactgtgcgcaaatgctgaaaattgttatgattggtggtacagttgtatcgtcagttgcctatcatcactcaattggttaggagtcgcttagcttgccagccttaggtcatatgggccttggcacttcaattcccaaaattttttttgtaccttttgcaagtgtacgactccgccttccggaaattattttttgatcagaccaaaacccggacctgtacagacacggagactcagttaatttgtttttcccacttcagtaccagttgaataccaggccagggtttgcactgagcgagggagtgccagcgaacttattatagagctcaatgagttggatttttccagtttttaaaattgcgaaaattttcaaaatttctcgagctaggcctaaaagtaggtttttcagtttctgaattttaggattttttaacgatttttctcgggaaaacggagagcagttccaaaaaatcgtttttggagttctatcgactggtatttttttcgaaaaaatttcggtttttttccggaaatagaaataaattttggcctaagcggtacatttgagtcccgggcccataactcgtcatgagtcggttttagccaaaaattgccttagaccaaaattgtagagcttttaaagctctatcaatggtgtgccaatgtcggaaagatttcaaaatttttcgagctaggccccctagaaattttcaacaaatttttttgggccaaaatgggggtgaaaaatatctttctggggtaaattaggatcctgagcacgaatatgctgtttattttcagtttcggaaattttggcattttttaaaaattcaaaaatattttccaatttttttaccctcaggtattttggataatatttgaaaattaataactcggtgatggtttcatcgattttattataataaagctttaaaaatagagaaaaataaggagaattttatgagatttatttgggatttctatcttctaaagaaaaaagttattccagaatttctggaaattttcgatttatcagaaaaaaattcgtaactgccttctgaaaagttat

SEQ ID NO: 20926 - DNA, 1244 bp, Heterodera glycines
attaaataaaatcattagccaaattactttgaatttttaaatatttggaagttcattataaatggactaaaattaaaataacctaacttatattaaaaatggaaaatttttttatgaaaatgtatccgcttcatctcaagctaaattacttgggcctaggcctatgcttaggctttattttgtaaaatttataggtgaatttaagcttcaaaatttaaaaaattcaagtaacctggctaatgagtttatttaatatatggaaaattttaattatttttattcttgatccaaaaaaacttctaaatgaattgtatttaagcatcaatttaattaaattttaacatattaaaacaaaaaaaaaatgataaaaaatcataggaaaaatcagatttttgatttttgcactttttgtgaagtggccaaccacgggatcaactcattctcactgatcaaaattgatgagcagatcataaatggcgtagcacgtagcagcatagaatgagccaaaaaaagcagatagcttggcattcgcataattcaagtgattaaaatttttaaatttaatattcttaaacggtgtatgtcttactgtgttgggagtgccacggcacagactcggtccaacccggtgcatgccattgtcattgggccaatcgccactcacagcagggccaatcagaaacaaaaaacagtgtaaacagcaaaataaatgacaaaaaaaaattaatataataatagccatgtcaaaatcacggcaatttactttccatcgcaatcaaaatcttgaaaaagctgcgaatattccgaaacgaaaatttaacaaaaattgaaaggaaaattagttgtgtttgtaagttttgagtgcaagatttcaggccttgaaccgcatttcattcaaaaattctcgaaaaacaataaatcaactttaaaaattttatttctttatacatttacttatctttacgcgagatttgcatattctaaaacaaaattacaaaatataatcaaattttttgcttaaaggaattctttttatttcaatcaatgggaaaaatgactttttcatttttcatttattccatttattatattgtgtatattaatcttaataagattttttcttgttttttattaatgcttaactttttattgcttttattggcaataaatgcgactaactttgatgagattgcaatggaagaatccattggagttgatcaaaccgacaaacagcagcagaacaa

SEQ ID NO: 20927 - DNA, 2692 bp, Heterodera glycines
  unsure (1)..(2692): unsure at all n locations
ttgctcgcggaccatttgtttcgctagaaatatggttccaaaaagaggagatagccatttttctggcaatagccgagacctttgagagttctatgaaaaattagctggcagttgcttaccgctccgcgtctcttgctcgcgagcgtttgttctctagaaatttgttccaaaaaagagatagccatttttatggcataaccgagaactttggaaattatatgaaaaattgactggcagttgcttcacgctccgccggctcttgctcgcgagcatttgttcgctagaaatttgttacaaaaaagagatagccatttttatggcatcgccgagaactttggaaattctttgaaaaattaactggcagttgcttaccgctcctcggctctttctcgcgagcatttgttcgctagaaagttgttccaaaaaagagatagccagttttctggcatacccgagaacttaggaaattctttgaaaaattatatgtcagtagcgacagactacgcggcgcctgctctcgagcatttgatcggggtaaatgggttgccaaagagagatagcaattaaataacaataaacgagtaatttgtaagttctctgaatgaggaattggcagatggagtcagctcggtgaatcttgctcacaggcattggtgggaaagtaccaggtgtcaccacccatttaaaaattccaccccatttaaaaatggcacttttactgcttccattgctcgcttatgtggctgctcaggacggcatcaaaaagcagcaacaaaataatggtggccaaagttttaccggcagcgtgaacaatgccgaaattcgtcgggcagtcaatggcactgaggtggaaaatgccaaaaaaaaaaatatgcatctaaatattttaataattattttttctaaaagtttagtttatgcttgagtgccctcgtgccgcgtatttggtccgtactcatatggcacccgattttgagcacccgcaactggtgagaaggttggattggcttcacgacggtgcactggttgccagctatcagcaggtgataagaaaatttaattataaattcgagaaaacgaaaaaaattaccaaaaaaattaaataaaaaatttatttttaaaatcgagaaaacgaaaaaaaattacccaaaaattaaaataataaaaaagttttttttttgtaagaaatatgctaaaaaattttgaatattcacttttttatttttttgaattattctttttaattaaattttaaactaaaccaatataagtaaaaattgcaattttttgttaaaacttttttaaaatttttttttaattatttccaaccctaaaataaatttaaaaaaaaaaattttttctatattttttggactagaaaacaaaattaaggatttttttttaaatgatgaacccattttttcaaaattcatgcattttcccgcctattttcttccaatttccttcgttttttgttttcccgtcttgtgccatggcattgagttttcccattccccacacacttatacaaacacacaataatattgtggtacaatgaagggcaatgcaacacaacccaacncanaatttgcatgccaatgccaacaaccanttcatcggttggggtgatgaaatttgagctgctgggacataattttttgaatattgggataaattgtgagttggagaataatttgatatgtgaaaaaaagggttttttgaagaaatattttagaaaaaatttccgattaaaaataaattttttgcttgaaaatctaagggattaaagaagaaaagagaagcaataaatagttatagaaatttttaaaaaatttagccaaaaacttttttaaagaaagaagggttcaggaaaattcgaatattttaaatgcatttgaatcgaaatcagtagttttttttaaattttataaaataattaaatttataaaattatttatatttagcattttattattaatctttagaaagtttgaaattcgataataaaaaattccgtctattttcgatttttatagctaaatccatgcaattgtttcaataaaattttttttattaataaaaactttttgtttctaaatatttttcaaacttattccaatgctattttatccaataattgccattttaatagtacataattgtcgtcaaaatgtcgcaatttttattttggccccaccaaattttgtgccattttatcgtcttaaatggcacatccaaaattctttttttcccactccactttaccgccgccaatgtattgaaggactttgcaataatttttatatttgttgccaaccgtggcggctggcacacttatttgggcgccaaaacgaaaatggttatgccacgtaatggaaagagggaccaataaaagttgataaacaaacttaaaattggcttacggggaaagtgccttggaaattttacgaaaaaaaaaaatttaatttgaaaataatttttgaaaaatcctgttttggcattttcccaaaaattttggtaatttcgggttctatttttttccatagtgtgtcaaattatcgactttttgtttactcttagtcctaattattttgctattcaattggcaattaaaaatttgaaagtctcataacgttgaattctaaaatattaaaattttaacttcaataaagacctgccnnggccatgcaag

SEQ ID NO: 20928 - DNA, 1462 bp, Heterodera glycines
  unsure (1)..(1462): unsure at all n locations
ccggggacctctagagtctcataattttgcgttgattgatggtttgttgtactttctttaagagaaaaangagnccattcgncngnncgaggccgaccctttcagaaaagannnganaagncaacgncacgaaggaaaaggcgcagggcaccnaagaggcaaaaagncacggagacagcccncagaaaganannnncggccaaanangncgagggancgcgnnaaanncgngacgagccgcagaaccngcgcncanacncgcaaaccacgagggaangaaccacccangcaaanngnnaaaagnncngaaccgnnggaacnngnnngccnngacanccncncaancggaccancggaancacaaaancgcnananncccgnnancanagaccacnngaccaaagaggnggncacggnnccggnnccaaanaaaaacagngaaacagncgcaagggcannngncaacgagnnngnncnaannnnnggcactccaaaacgcatccacagcgaccgaggaggcgaatttgtaacgaaacattgacagaaattacaaaaatgcttggcgtgaaaagacggtaacgtcaggttacgaccctcaagcaaatggcgtaaatgaaagggcgaaccaaacaattttgaacatgttacggcgatcaactggctcaaattggagttgggatgagcgacttccgtttataacattttgctacaatactacaccctctgaggtcaccggattttcgccgtacaaaatgctatttggaaaaccagctaattttcccggagaccatgacataaattggcagaaaaaccctgcctacacaatcgaccaagaaacgtatttgcaaattttccgcgaaaacataaaagacatcatcaatgttgctaaaaaaactgcagaaaattcaagagaaaagtcgaaaatgtattacgacaaacgaccaaatgtgacagaaaacaaatttggccaaggggaccactgtatggtgatattcccaggctcaaacagtcgttcaccgcataaaaagctgatgtggaacaattttggcccatacaaaataattgaaatttcaaaatcctcagcaaaattggttcccgtcgataaaaagaatgcagagccaatttcagtgcctttggaacgtttagtccgagtaccaccaggattaccaaacatttcgaccctcccaaaaggaagaaatgtctatagaaatgtcctcaacgcattgcttacacctaatttgaaattgacagaaaaggagccgaaaaaacggggaaataatggagaaattggtcgaactgacaaaaaatcgataattcaattagggacaattgaatttttaggcggcgatatggaattggacggagaaggcaattacgcactttcatggtcatcgatttgttgtggaaagggtcacgaagtgtgcaccagaatgagatgcacggatctcgacccggtccttga

SEQ ID NO: 20929 - DNA, 1335 bp, Heterodera glycines
gtagaccaaattatggaacagtgcgcccgactcaaacaaatgtgcaaccgtttctgcactgctcatgtgttttggatcccaccgccatacattcgacaaaaggacaacgaatttggcgaattcatcactcgtttgacacaaatggtcccggaatggttcgtgggcgtgacatcaaatgggagaagcattttggagattttccgccatggagacacattcgacacaacgcgcgtggcagccgacggatggatgacaccggagggcgtgaagactttggctgtttgggtccaatcccaaattccttcttttcccggcaacaaagagcttggaattcgttcgcttcgttctgctgttcatgtcgtccgccaaaaccaacgtgggggtttgggtccaggcgaccgacctccatcacgtgccttgtctaatcgatcagggttgggtcgagacgaccgccttgtgtccggtccttacatgcgcatgcatccttaccgcggccacagctccaactcttccttctctggtgcgggtggacgtcgtttcgtgcgcggctttcgtcggcagtgagctctacacccaaacgaacaccccttttgacagtcgaatgcgcgggtttctaattgccacggcagggacgcctctctttagcgtttggggatgtgttaattatttaaatttgtgcctatttttatttgttttggcgttttgacttttgatatttgaccttcttttattcattctcatttattcattcatgttttattctcctcaattttgtccttttttggtctcctccggaaaatttggttttaatcgtaattgattgtttctcatctcgtcttccgactttacttaattttgtttggtgtgattttattaaagttgtaagcctatttggtcgattgattgtgtttgatcgtcgtgcggtggactcaaaaaaatattacgcattttctttaattgtccattttccatttcccctttccccccaattttcctcttctctctccttgacccatatgtattattgttatttcccacttcaccttcttctcttctttctcttcttcttccttaggcttcactgcaccatttttcggacaatttccttttcccattttttgtaatgaatccaccgcaaaacgcaaaagaaattccacggctccgtcctctccattttttgttgttgcctccgtcgaagtaaatccaattattggcaatttctagcaaatggccgaatgccattgagagcataaaaaagatagtgccaaagaaattgcgagggtaaaaacataataaaagaagtcccaaatttgccataaaaattcggattctcct

SEQ ID NO: 20930 - DNA, 1088 bp, Heterodera glycines
tattttattgagacaaaagttcaaacaatatgctccgtcttaaaattataaatttatgatttttttatccacctcacttaattcccatgggcaatcgacctgaaattttttaccaagcgtataatgtgatcttttatcggttgtacgaaataatacaaaaaaaaaactgacagaacttgtcaaaaataataaaatttaaaatttaaaaagaggaatttttatcgctaaaatttttccacaaatttttctccgtttgttaaaaaaataaactggaaataaattcgatggaatgatggaagtgatgtaaattgctccatttcctccccatcccaaaatttacataaaattgccaaaagagaaacgggggaggggcggaaattaagccaataaagtccccccccccttgggtccctgggtcaatcccgttaaaagaggccagccaacacgatttgaaattctttcttgtttgaattttctttgaaaatgatttttttttctttattgaaattagatcggattttcccaaaataattaaattttcttgtatttttgttgagaaatttttcaaaagttgtcggaatagtggcaaaaatagtgacgaaacgccaaaatagtggcaaaaaactattttagtggctaacttccaaaataagcatttctcgtcgaaataaagccgcagaaaaaatagttaaaaacctaaaaatactccctacttatgactttgttagagttgtgtttaaaaagcgaataggtataatgttcctgatttcatttgttttcctcgatccatatttttttttcactaaactaatgttttttttatttaaaaatgcctgaatctacgggccgcccatgcccgatctgttgcctattcccgacgactacaaatcgaatcgtgaaaatgcaaatggtaaagcagcttgggattcatttgggtttttggtaaagggttatgaaattaagagcgattttatttaaaaaagggggaaactcaaaaaaaataattcagtggtcataaaacaggaaaagtaccttaattattaaaacctacgggattttatgggttttaataatagaaaatctactaa

SEQ ID NO: 20931 - DNA, 1365 bp, Heterodera glycines
  unsure (1)..(1365): unsure at all n locations
ttaaccaagtctcatttatcaaaattatttgatgttatttgtctaaattagatattctaaatcagctattttgtttgcgattgaacgggcatttattaatatggaataatccagggcattttgctaattgctttttctgagtttaaatntagacttttaggtggtttgctcagtagcccctagtggttattcgggaccagagcgtttgggcccccgtttttgggccccggggtcgtttgggccccaacccaaaaatagaaaaatgtgcttttttaaaaattaagattctaaaaactaagcctgagggatccctcgccacttgcataagttaggtttaattagcattcgctcattttttacaattttacttattccaaatcctattattttctaatagttaaccaatttgttgtacattctgatttggacatttttcagggcgccttcaattgccgacacccgtcgatttttcacttcattgacgtgctacgtcgtgagcagaagacaacagaagtcaaatacgcgtcattcattgccggggaggagccaccaccaaatagcgaaagtttttggcgacagatgaacgaattcttaatttggtgcgcctttacgtcccgatgaatgcaggcaacatcgaccatgatcacaattaccaccaaaatcgcaatcaatttcacattattttggagtttctccggtgaatttctcgtaactatcgaatgaaaccgtgattttttgttttattgtccaaattaccttatgaaaccgtgaatttctgttaatttttacatgttttattgttaaaattattgttgaatttatttttaaaatctttattttacatttttatgctgaaatttaaaaagttgtttttactgtgatttttcatttttctgtacttggggcccaaacgaccctggggcccaaaaacgagggcccaaacgcgggggcccaaaaactcggggccccaacgcgccccccccggttctaagaatttagccattaatgcatattttcccttttaattccgagttgagcgcatttgtttttttcaaaaggaatgactgaaattgccgacgacgatttgcctgggccggggccgacgcccgccgactatgcttcttcgcgcactccaaattctgaacaaagaaaccgaaaaagaagtcaaagaagaagggaggattccccagctggctcaaatcagtcttctgctacttttagtccgatttgatagacgttgttaggtctgagcaaaaagctcattattgttgcactgtgttgttgtgaataaaacattaaaaaatagacatccgaagaaattgatttattgtttgttgaacaatttggtcaccaccatgagtggtt

SEQ ID NO: 20932 - DNA, 2238 bp, Heterodera glycines
  unsure (1)..(2238): unsure at all n locations
atagtgaatggttggatttggatagagtgccacggacccgggaattttgggcaaaaccgggaccggggacttgccgggacctgagaagccgggaccgggacctcgatttttcttcgggaccgggaccgggacctgagcttttcaaaatccgggaccgggacctcggatgaccgggaattcccggcccggtcccggtcnnccgtgngcattctagctttggatgacaaagaaaaaagttatagtccggggcaaaaacgtttcggggcccaactgacggagtccgccataaaactaatttttatattgcaaaaccaaacatcataataataattagagcccggaattttgaaagtaccgggaccgggcccgggaccgggcttcgaaaattgaccggggcgggccgcccgttcaaaaaaagcccgttttaccgggcgtcccgggcccggtccaaaattnttgccgggcgcccgtacgggaccgggcttttttcaaaatttttggaattttgaaattcgaaaaaattttataatcctttattttagcttagaaatgtcaagccattgtaaatcgaccttttttactcttcaaaagaattttaaggtgtattttttcaaaaagattttgacgacattggggggggggggtccggcagtgccgacagggccgccgggtaaatttttgaaaatttgagtttggtttgttaacagatttacacgaaaaaatgacaaaactttgctattttgagctacattttagaaaaaaatttagctttttgtactaggcgacgctgaagaaaaactttgacttttaatgaaatttattaagaaaatttttggtttttcatgaaatttgaaattttttttttgtaaaaagaaagttatgaaaatgttgttcaatttcatatggattttggggtctttttaacagttgaaattgcccaaaaatttcaaaaatccaaagttctatcttgaaatttttgaattaaagacatttcgccaaaataattatttaaattcaattttgggcagtttcgctggcggaatttaagcccgttttagcccggtcaaattgaccgggcccgggaccgggcttcgaaaattgaccggggcgggccgcccgttcaaaaaacgcccgttttaccgggcgtcccgggcccgtttttttccaaaaaaaaacggggccgggaccgggacgcccggtaaaagcccgccgggcccgtccgggctctagaaataattaattttcaattctaaattaaatgaataatttcatatgaataaattattaatttccaaattattgcctctttaccatttcatcacttgccgcgtttgctcggatttgtgcataatcacaaagtttgtctcgaactgtggcgggtcggttttgatgatgggcttataagttccaatcagttcgtatgttctgttcggctcaaaattggtgtacattggcaaaaattcgtacattcctgggaatatggggtgaattacaaagtaaggccattgaaaatgttttttttaccaggatgagttgacatattcattgtgtggagagcaactaaaaaatgataattagtttataattcactcattaactttaaaaggtcaattcatttcactcacagcttgggatttgcacagtgccaatttttccgttttgcatcggttcaaaaaatcgtttgaaatcatttttacggaaaaccactgaagtgtcaagccaaaccacagtgtcatactccaataaaacgtgctttaccattttaacgaatcattttaaattcaaaatttaaaaataattaccgcccacagaaaaattttccacgcgtaacttttggggtggcgaacccgtccttccaccatttgaccgaaatcgaaaattcgccattcgaaattgcacaccgaatccaattcattcatctgcataaagatggtttaaattagggttatgccccgagccctgcgggggcaaaagtcgggggtcggggacctcggggggcgacatgtcgggggtcgggtcgggggggagctcaattgtcgggggttggggaccccggtcgggggatgaccaaatttatattttaaccaaaaaataataatttttctttttcaatgctagtaaataaagtcttcaaaactcaaaaatcgtctttttctttactttcctcatctgattcaaattcatttgttggtgccagtaaaagtgcgtccaaattggccttcacaatcaaaatttggc

SEQ ID NO: 20933 - DNA, 1339 bp, Heterodera glycines
gtctgtcgatcacttggattgcccctcaagggcttggttgacacccaaaaccttcggctcatccaccaatcgatcgtgcagttgttgaaacgtaggtgatcagtgagcgctcgtccggtgtgtccacctcgcacacatcctccggatcgagcagttcggctacgccgaactccgactcgaaggcgtcaaaggcattccggagccgatccaacggcttctgggcactgatctggaaaaaaaagttgaagctaatttaatgatggaaaagattataaattttttttgaaaatattgggttcaaaaaaatttcaaaaaatttgaaataaatgccaaaattcggcctttaactctaaaatttgtggcactaaaattttagaaaaaaataattaaatcccattcattttttatatagatcagtcagattacctcttcccagttgatcagcccgggacgataaaagtgcagaagggcacagaatgccaacccgtccttccaactgccggaaaagttggcaacattgacgccggggtaaccggacgtaacatggcgggcccattggagcaatgcttcacgggcagtcagcaatgccaagtgagaggttgtagcagtaacagaagcagcgatagatgcagcattagcttgtgaagtgccgttgttggtctgttgagtgatcaaagggatgggtgggaaatagagtggtgaatgaagagttgaaagagaaaatgagagaggaagagagagggtgactcgagaaagagatgaagacttgagagagtgaaaggggaaaaagataaagaaaaaagagagaaagaaatggagagaaatcgagaaatcgcgcgcggctaaaaatcgcttggcatatgccaatttttctcgccgagatttcaaaatttttaatgctaattaggttcaaattaactacgttgctaattagaggatcattagccaacacacacgatccttaccctctcaatggccagcccgttcgcgtaggaagcgcccccttcaacaatccgcgaccgcgacccgtcccgcacgagtgctgccgcggacccctctcggaccaagccccgctgcttggcacccttctgcattttgcgctcaaaatgctcccgctgctcccagctggacgactcagaaaagccgtgcgcgcctgtcgccgcgtcgtagaagcgttgctgttccgtgtacgctcctccaccgcctccgccaccagcagcaccagcgccggtcgcgcctggcgcggcgtagccgtttcggtactcgcccgacatgccgccacggctgcgactgcgctcttggaaatccgcatcacgccgaatgtgctgctgcgagccgt

SEQ ID NO: 20934 - DNA, 1328 bp, Heterodera glycines
gggggaaggggagagggagaagccctacgcgaaagaaacaacccccagcagccagcggagggaagttaattagatcagtcagtgctaattaattgtgtgtggcccgggggctgaatgtgatctatttagtgaatttgtaaaaagataattaatttgacgacacaaaatttgtttcatggcgaaggaaaatgcttcaggtgccccccatccttggaggaaaatggcttggccatacattgcaataatcagaattatcagggtgatcggaaattttaattacattttcaagggctgtataatagtgagtttcaaaacagatggctgaagaataatcaaaagttgatcaggaaatttcaaagtgttaaggaacagtcaaagtgatcgaggcaatacaaaatagttaaagtgatcgtgacccaaaacattcaatggcccaatcagaaacagtcaaaatgatccgaaccagtcagaagagcattggccataattaattaacgacagagtcatttccatgggacgataggcacccagccatccatgaacaaacaatagcacaagcaagaattagtaagagcatcagcaacatggcttgtactgcattagcatggttgggttggccgccgtttccccccccccccccgcgggcacattcaattctttgtcccttaattgtcaatgatttaatgtgggccatcggtggggggaggggcaaattttgggtgaacaaaaaagcaccacagcagtgggacatgggattgggcgaggagacgggttggctttgtgcttctgtgaatgcaaaaaaataatgaacaacggcggctccgttaattgatttccgctcaattgagtaccagctatttggacccatcagataaatttaccgggtcaaacaaacttattcaattttggcaacttttcaaagtccattaacagacaattaaaagtaattaaataaaaacctatgatattttttttatacctatatatatatttttaagttgcaagcatttataatttatagtccaatgaatcacatattttaattttttggttacagaagaacttgtgcttatgaaaaattagtggccgtttaaaaacagtctggcactcaatcgcgcgggactcaattggcccccagccgcccgggtggagggatggacccaacatggccctgttactcacctcccccgtgttgatgatttgatggcggtgagatggggggaaggtttttaacccttttgaggggggtaaggagcatcccgctcgccccctcgcctaaatcgacaggatgcgcaatattaggaaggggaaggaaggagagattccga

SEQ ID NO: 20935 - DNA, 1396 bp, Heterodera glycines
tgccttgagtacttttggccataactttgctcaaacccccaccgcgccctcacgtttgggccacaaataaaaaatacaacttaattttaaagggagtatgcgttgacttttttttttattaacaaaacattttaaatgttatttttatattttttgttttaatgtttattaaagaataaaaatattcttctgtatcgtatgcaacatcaaattgacaccaaacaacatcaagtgaattcgccacaagctctgtccatgaatcttaacaacttttgagacaacaaagttatcggaatcttaaataaggaaaaacaaatatctaaatatatttagctacaaaaacaaatgaataatgaaccactccaatcgattctacaaaaattttgtttaaattttctagtccacaacatactctgtgggttactgatctcctaacataatttttgatgtaaatctttattttcttaaaaatggctcatatcgcaagcatgatgcgtcgctgttgaactccctcactcaaatatcgtgccgccgatgcgggaattctttgactcttacaggttacaatgtatcaacaacatcaacattaaccctgctcaccgatatgatcacaattaccatgccaatgtcaatgttaatcccgataactttatcaaatttctcgttggcatttctcgaaattatgaaatgcgcccgtaatcatttttcaatgttttgtttttttgttggaaatacattgataaatttgttttaatattataaatatttgtcgaaaaaaaacagttttttctcagctggtcaatttataaatttggcatcattcgaatgctttatatgtctagaagcttttgataagctatttctacgcgattgaacagcttataaaaaagttaaacatgaatactaccaaaaattcagaattttgtatatttttacttataagtattaatactgtatgttggtatatctttgtgttttttggaaagccaatagagattgttaagagcattcgaatgataccaagtttattggattggatcaacaaataaaaaagttatgatgctctaaacttggctcagactataccggccagactacagtgtctcagtttttttttacccttaaaaattcaaaaaaaaccaaaaaaattttgtgtgttgcaacttggggacccgacatttggggatcccgacctttggggacccgacttttagggacccgacatttggggaccgaacgacatttggtatccgacatttagggaacccgacatttggggacccgacatttggggattttaataaaacaaaaaaatatattaaaaaattaattttaagtccaaattagacaaatttacgtctgctttacccagagttaattgcattgcaagaaaaaa

SEQ ID NO: 20936 - DNA, 1291 bp, Heterodera glycines
aaatattattttgtttttccttgcaaatggaaattaactctggcttaatgcagacgtaaatttgtctttgacataaaattaattttttaatatatttttttgttttattaaaatcctcaaatgtctggttccctaaatgtcggatccccaaatgtcgttcggtccccaaatgtcgggtccctaaaattcgggtccccaaatgtcgggtcccccaagttgcaaaatcccccacaaaatcgggtagcccttctgtcagcaacaaaacaacaaccagccaggtgctgttatttgatatacagcaattttttgaaatccaaaaaattaatttaaaggcctcccattaaaatacgaaaattaaatataaatcccaatggaggaaggaaaagaaaaagggaaaaatggaagaaaatggaaagggaaaagaagcgaaaaattgaagtagaaaaatgccatgccaataaaagtagagagcccatgtcccaccaaaagaaacattgacaaattcaaagagtggaagcctgcccaagaagcccaattaaaaaattgttaggaagtccgaaaagattttacaaacattttgaggaaaaggcaaaacagaaaaaggaaaaaaaggaagtggaagaaaggagagagaggaaaaggagcaaagagcgcagaaagagaagggaggaacgagagcagagaaaggagcgaattttgaaagcgaaagtgacattcggcgaaggacgctacgacaaggtaaaaggagaagcggcttatttggtcctaaaaaaggcctgggcctattagaattaacatcacatcactgatgtgatgatatgacgatatgatttatcagacgtaggacccctgttagaattaaatcatatgattaatcagctcccgcgtctgatttatcacatcatattgtcatatgcgcgttagaatatatcatataatcacatcagggatatgatcgtcctatcagacgatcacatcgtatgcggggtatgacaagtcgtacgattagtcatacgcgtgtttgaattattcttttcaaatcatatgatgctcgtcatatgacgagagtttcactgtgccaaaaatcatccctccgaaccacgtatgagccttaaacaaaaaatcgtagaaaatttagagttcaatgaaataatttaaaattttaatatgttgttctttgaacttttatctttctaatgaaccataattttattttttctgaccaatagttaattttatatgaattttttaacaaatctacccaaaatgtgtattatttaaaggagaaaat

SEQ ID NO: 20937 - DNA, 1947 bp, Heterodera glycines
atatttttgggattttgcctgcttttctgataattttccttaatagccaatgcaattatgcattcataaactgaattgctaaataaatgggagcagactttccatctctcaaaatttgttttatttattttccaatttattttcgtttttttccaaaaattatgaaaaatttaatttttaatgcatcctaaaataatgtgtcatcttatttacacctttaattagcatcacttttctgtccaatttatattcacaattatcacctcattaacaaacacagatcactgacggcttctcattgttccaactgaacatgttcattgacgggattggcaaagatcgtgccgccgctgaacaagcgttggccatggtcggcacacaaaatgcccaacttgctgaactgcttgccgccagtgctgcgcaacgggaagaaatgctcagcaccgagttgaagcagctggctgaattgcgtgaccagctggcagaagcggaagcaacagccgccgcccaccaagcaatgcttgttttccgcaaaaagcgtcaaaccaatgaggacggcgtacagctgaagggtagccaaagggccaaagtgattgcaaaggtgtgacgtacgatcaatggtggatgaccaaatcaacatactaatgggcaattaattagcattggcttagtgtgacactaattagggcgagcttcgagggtctgatggtggattattgtggggtaattaactaaggcggcgaaagcagacagttaaaagagatacccaaaatgccattatgagcaattaaaagttggcaccggaaccctaattttgagggagttcagttgggaagggatgagtgaacaccgcaaatgtaatttgcaacttaaacttgccaataaaaacataatttagtaagataatgtggcttgaattacaggttacacaactggaaatggaagcgcaaaaaattcgtggaatttatgacgccacccgattggaagcacaccgagcaattgaggtattaattactaatcgcaattaattacattgcttattaataatagcaatttaaataactgtaattatgtaattaaattttaataaattaaaatatttctaaaaatataaatgattatactaaaattaaaatttttctgaaaatatgttttaaaattaaatttttaatttcattgatggcactaattaatgcattttttaattgtccaaatgtaattaataatttaggcggcgaatgcgttcacgcaaattgcgcacgggttgctgcaggcgcgcaacaacactcgcaccgcacaacaactgatgaaggaaacgcacgggcacctgcgcggcgttgcggaagcggcaacaaacgcgaaaagtgcaagcaaagcgatgggcgcatcaattgacatcggctgcaatggaagtggctgtgtcgaggtagggggaaaattttagaaaaatttgaaaaattttctgccgtttttttgatattttatgatgattttttataaataatttttctcaaaaaatttctgcaaaaattgcttaaaatttttcatcttgaatgttcatataaaaaattaaatttttttccagaaaaaattttaagtttgacaattttttaagaaaattttgaagtggtgggaacaacaatgattttttgcttggtattcatcatttgttataaatgatttttgttttaaatttattatttttttctataaaatatatttgaattaaattatctttttttatttccaatccctcagggctcagggtgccgctttggacgtgcgtttggtcaacattcaggcaaggctttgtcaggccaaagcggacttggtcaaagtcagccggacaaacggggagctgaacgcgcgcgaggacacagttgctgaaattgacaaaatcatggagaaagcggagaatgcttatcaaaaagtgaaaaataatgaaaa

SEQ ID NO: 20938 - DNA, 2877 bp, Heterodera glycines
atcctgaatacgttcaaaacaatcttcaatgcttccttgttgttcaaacgtctcagacgcgaccaaaatatcatcaagataaacaaaatcattgatcagatcttcaaaaagacgagacatgaatcgctggtaagttgctacagcattacaaagtccaaacggaagcaccgtgaattcatgcagtccaaattctgtgacgaacgctgttttttcaatggacttctcgtccattttaatttgccaatatcccgaaaggaagtcgagggttgagaagtatttttttcctcccaatgcgagaagaatgtaatcaatgttcggcaacgggtatgcgtctttcactgtgaccgaattaattcctcggtaatcaacgcaaaatcttaagcttccatcacgtttcgggacaagaacaatggggcttgcccatggcgattttgacggccgaatcaatcctctgctcaaataatcctgaagcatcattgaaactttttcacgatgtgcaaatgcgagtggtcgcattcgatttcgaattggcggtgcacttcccgtgttaatgatgtgctgcgttatcgcagtttgtgtcagttcgttgtcgtcaagcgcaaaaatttgttcgaactcgagaattaaattctctaattgaccgtgttcatttttgtaactcctgtcaatgcgagtttacagaatgtctttaatcattccagcacgtcctttttcagaatatctagcgttttttgcaaccaatggtgttacaaacgaattttctaattcatgccaatcttcgacaagttcaacttgcgcaacattgcttttcgcctccaaagtaatcggaatggccgaataattgacaatcgggacaacaagttgtccattttttcctgatgtaagagttggctcaaatttcagttgttcatgaaaaccgtctcttccgattacagatacttctttatcatccagctcgcgcaggactgacaactcgacaagcgtagatgattgcggaagaagagtgactctataaattatgtgtgctgaattcgcttgtttatcgagtggagaaaaatcgatcacattcatgttaactttgtcgatcaatttaaatcctaattgattcaaagcatttgttccaaaaagaagatcgtatccaaaagtagactggacaacgaacattcgaatcctagccgtttctgttcccctaacaattgggaggcaaacagttccgtaacatttcacttctttgccatttatgtccacaatgcgcctttccgagtaggaaatgatctcatttttgtccaccatgtccataatttgtgcgaaaaactcagctgaaatcagagaaatttgggcacctccgtccaacattgcatccgactgtcgtccgtaaatagaaactttagcaacaattatcttcccgacaagaggactttcatttgaaacgacaaggtcactcaatttgtccgccgcgttgcggaagaaattttcaatttgtggtcggtgctcagcattcacagcacccgccagcaaatcattcggtttttgcggttcgttgttttgttcaacgaggtagttttggcgaagaaaatttctcgacgccgaaaactgtggtccgcttttggttggagcttgacgattccaatttaagggcgcagtatttgtccctgttccgggttgtttggaaaattggttttggttctcttggaagggtcgagattttggtggaaccatacaatttcgagacacgtgatcaattcggccacagttgaaacatgtgacattggttggtttgtttgtgtttatttctggtctggaccaattactggtatagttgtttgatggcacgttattggatgaatatgacgaattcggcatttgccgttgaaaagtttgatttgacctaaacgaatttctggcagccgattgcgttgcttccgctcgggctgcttgtgcaatgaattcatcaaatgtcgctctgggtctgcgtgtcatttcaagagtgattgccaactcgggattagaaatggctcttatgattgaataatcatcgtattgctgttcggttagacccggataagcgcggcggaccaaacccgaaattctgttcccgagctcatcgacactctcgtttggtcggcgccgaattccgcgcattagttggtcgaaagacgtcaattgtttggcgtctgtgtcgtccaactgtcgaataattatccgcctgattagctggtattcatgcgggttttcggcaatagctgaattgtaagccctctctgctttgccaaagcatttcgatcgaagagcgcgaagtcgtttatcctcaggccattcctctgtcgctacatcaaactgtttaaaaaatgcgttcactgcgtctgatccgctgggccgtccaaattcggaatagagttcagagtcattgtgtacgagaagctgtctaggcttctaatggcctgtgccatcatgccgtcaaataccagtccggggtggacaggctgctgatattgttcgaactgattcggatgattttctctaattggcacattttggttgtgattttggaactggggagcttgttgggaattttgtgccttaaatcgctgagcataataatcgtcattgtgagcgtaggcatgaggtggcgggttttgtcgaaccaaatgatgctggttttcggcaacaactggtctttcgactcggagaggtcggtaccgttcagtattacccggggcattctcatacaattgttgattcattcggtaactgtttggctgtggtcgttcaacgttcaatggcagtaaaattgttcctactgtgccccgtttgttgattttacttgacattcatatccagcctttgatttcggtcgagaattaaactcaaagtttt

SEQ ID NO: 20939 - DNA, 916 bp, Heterodera glycines
  unsure (1)..(916): unsure at all n locations
cagtccccccgacccgatgcgcncagattatgggagaccgatcttcgggnaatagcttccctatagcctgtactttaattctgcgttgattttttgctccccataattgtttgagtaccccaaacggacactgaaaaaaatcgattttttgttttcggggcagtccccccgaaccgatgcgcccagatttatggggagaccgaatccttcgggaatagcttccctatagcctgtactttaattctgcgttggatttttgctccccataattgtttgagtaccccaaacggacacttgaaaaaatcgatttttttgttttcggggcagtccccccgagccgatgcgcccagatttatggggagaccgaatccttccggaatagcttccctatagcctgtactttaattctgcgttggatttttgctccccataattgtttgagtaccccaaacggacacttgaaaaaatcgatttttttgttttcggggcagtccccccgaaccgatgcgcccagatttatggggagaccgaatccttccggaatagcttccctatagcctgtactttaattctgcgttggatttttgctccccataattgtttgagtaccccaaacggacacttgaaaaaatcgatttttttgttttcggggcagtccccccgaaccgatgcgcccagatttatggggagaccgaatccttcgggaatagcttccctatagcctgtactttaattctgcgttggatttttgctccccataaatgtttgagtaccccaaacggacacttgaaaaaatcgatttttttgttttcggggcagtccccccgaaccgatgcgcccagatttatggggagaccgaatccttcgagaatagcttccctatagcctgtactttaattctgcgttgactctagag

SEQ ID NO: 20940 - DNA, 2247 bp, Heterodera glycines
  unsure (1)..(2247): unsure at all n locations
aattgtttcccctcccctcccattgctcagattttgccgttccaatgcgccccattccctcggcctttgagcgtcgcgcgcggctgtcgtcgtcgtccattggcatcgatgcgcccgcaaagttcgctatttcccgatttttgtggcttataaatttttccgtttcatgatccaatgccaactgtgcggcttggtcatggtccgtccgtcgctgctcgtccggcacatggcccgggttcatcaacggcacgccaacttcgacgcccatgtaacgcgggacactcacccttcagtcaaggggacaccggatttttacaatttttttaaatttcttacttacaattagagtattttaaaaatttctccgacctagaaattttttaagaaaaaaactttaggaaattaactttaggaaaatttttttaagaaaatttcaagaaaaattttttaatttagtcagcgaattttaggaaatttttgagaaaaacttagtaactcatcataaaattttgaaaatgttgttcccccatttcacacccaatcttcgtcaggtggtctatccgctttggccctctgtgcccccgttgcgctacgccgtcgacgaacatggccagctgagttggatgtgttgcgagcacaaattcgtggacaagtccgttagtaaggcccacgtccgaagggccaccaccattttaagaggatgggacactaatttagagcagttttttcatccatttccgtcggatttaagacaaaaatttttttcttccatgtttaaatttttaaatgaccatttccaacagaatttcaaaatttcgactcaatttgccaacaatttactcgaaaatatttttgatacaataaggcatccaaatattctggtctctccctgggagagctctcaaggtcgggctcatttatttttgtgtttgacccaaatttttttgatgtgtagtttttctttaatgatttgctgtccaattttcccaaaatgaccatttagggctgcactgcttcgtcaccgcgcgactgtacattacagcagcggaacacaaacaacagaagtggccaatgcaatggaacaacgatgaggggagggggaaatactttgtttttttttgttgctatttttagaagaaatttttgtaagaattgtttatttcataattatagcacataaaaattggtttgtaattgtgtgaagtccaacgagagtctcggctctgtgggatgttttctcttccactctccttgtctcgtctgttcgtctgtcaccactccctcgcacttctctttcgctctgcttccactgtcttcctcctctttgctgctgctgctgctacttcatcttctcccttttctttcgctgtctgtgcctcctctccctctcgcgttgttttgtctgcggtgtcttcttcctctctttctctgtccccgttgttgccgtacactctgtccacaattttgcgtttgattcgcgcgatgtgccgtccgtcgtacttcggcatgaacgtcgttgcccagtcctcctccacgacgtccgtcagacggagcgaggaaaatgccatggacagaagctgagaaaaaggggaggatggacaaaatcgagacgaaaatcgtcacaaaatgtctttgtaggaagaaattggttcatctcctcaaatcctacccgaaaatttttaagcggtcgaaaaataattattcgaaaattaattcatttcccatgatctgaaataatcacagcacaatactttaattatgatctagaaaattgttaggggcaggaccgggcgaaacccatcaattaactaaaacattcaaaccgaaaaatagccgaaaattactgccgcatttttctaaacattccaacgcctattttttcattttacgcaagaacaaatttaattgtcatttccatttagaaaaatttgcgtattttaaaatccaaaaacaaaaattttcccgaaagttcggctaatttatccgaaaaatgaaactgaaaaaaccccaaaaattaaaaaagcgaggaaattgaatttaaaaatgggtgtagagtcagcaaattatggacggaattattgtgataaatggacgaaatgcgcctaccgcaacggccaacgttctcggcttgtggtccagcacaatttgtggttcggcatacaaatcctgtgttgcaaatgcttattattaaatacaaaatccaggttttgtgtcactctgtttttggcagcccgactntttttcccc

SEQ ID NO: 20941 - DNA, 1802 bp, Heterodera glycines
aaagctcagcagattatgcatccatccgttcgggaagttgccaacaaattgaccaatttatttagacagattctgatcaaaatcccctccaatatccgtcgccggggttagggctttcgtttgcttaaccccatgtatatatgttgttgttgtttttttgcggttttaagtagagaccgaaatttttcaatgtatgcataagggtaagggagttacgggctaggcacctaacctatacggagtacggacttatgggctaaataatccaaaaatccatagtccataaaggcttattggtcgaaaaaaattcgggttacaggcgctacgggtccgtaaaaacgcgtgcacggatcacggcccgtattcagtctctagttttcagcgccttagaaaaattttttttatcagcatcgtcgtcatcacaaattgaaaaaaaacaccgcggatgaaggaagagacaaaatgatggtgaaaaacaaaacggtgcctgctgatcagcagatgtgatcagaacaacacaaaacggaggccgggggcgactgatcagcggttggactttgagcaaaagcttctcaaatatcactgactgaagaagctgtcgacgtcgtcgtcgtcgtcgttgtcgtcaacccacccaccccgtccgcctcccataaaataatgcgctgattttgttagcaccccctcatgagaacgtaaaaagttttttgtaaacaccccccgcccgccgccctccatccactgatgagtagggatgggaatttaagtcacgaaaaatctcaaaaaagtcgacttaaaaagtcatgaaaaatcgccaaaaagtcacaaaaaatgcaaaaaagtcatgaaaaaataaccaaaaagtcacataaaaatgccaaacaagcacgaaataaatccaaaaaagtcctgaaaattagccaaatgtaattaaacccaaacgccgtttttaaacattcttcgaagaaagtaatttaaaaacgactaattttaatggaaaaaatattcaaaatttgttgcggcgcccagattttttaatatattaaagttaaattttgccttaaaaagtgtaaaaagtcatgaacaatgtcataacaacgcaaaaaagtgtaaaaaagtcccacaaaaatgtatgttagaagcttcagacaaattgcagtacaccttggaactcatttcaaggtcatttagagtcagcacaaaaaaagtcatgtgtcttaaattcccatccttagtgcatattgtgtttttttcgttagtttgatgcccagtacgagttgggaaacttagtacgagtcggggtaccagtatgagttggggcagtacgagttggcccagtacgagttgggaaacttagtacgagtcggggtaccagtatgagttggggcagtacgagttggcccagtacgagttgggaaacttagtacgagtcggggtaccagtatgagttggggcagtacgagttggcccagtacgagttgggaaacttagtacgagtcggggtaccagtatgagttggggcagtacgagttggcccagtacgagttgggaaacttagtacgagtcggggtaccagtatgagttggggcagtacgagttggcccagtacgagttgggaaacttagtacgagtcggggtaccagtatgagttggggcagtacgagttggcccagtacgagttgggaaacttagtacgagtcggggtaccagtatgagttggggcagtacgagttggcccagtacgagttgggaaacttagtacgagtcggggtaccagtatgagttggggcagtacgagttgg

SEQ ID NO: 20942 - DNA, 2534 bp, Heterodera glycines
tgctgaaaatatgtttttgccatggggtgatcgatcctctcctatcggagatgaccggaacacccaactgtgttagagcattagaagaaacgaaattttgatcaattttttaaaaataggtaattagcggtaattggtggtaattagtggtttgggaggggaaaattttcccattttccttcaaaaatttttacaaatccccaacgaaaaacaatttaaaattgcaaaatttgaaaattaaatgtgccctcccctccgtgccccagcgacaaaattgggtcccactttcggttgacgaagatgaattgccgcatctgaccggccggcgccgtcgccgcatcaccggcgccaatggcattggccgcggcgaaatggccagcgtacgcgggcggtgcgccagccgccgtctcgccgttgctgctgctagcacggaacgcgtcgttaaccgcgcccgccgccgacgtcggcccaacgccgccgaccgacaatggcacagctccggcggaagtgccccaggcgccaccgccattccctttaaaggcaaacatacggcgatagggagtatggtaggaaggaggaaaacccagacaaatacggtaggagggggaaaacccagacaaatacggtagtagggggaaaacccagacaactacggtaaggaaaaagtaaaacaccgtaaaacgggaaaaaaattggtatagctcgggcaaaaaagtacaaaattttgatcactgagaactttcaagagtttgattcgagagtcttggctcgagaatatccttctttgtgacccagggctaggggaaaaaaggtcgggtacatcgggtactgtaatccgattggtttagacgcaaaaattaaaaataaaagaaattcttgaatcttgatcaagagcatttgtcctggagacgactcccatgccccatgggattctcagctgacaacgagctcgagagtctcgaaaaactaattaattttgtgcccccgctgtgttgtgccgccataaccgacctccgcccagcgaggacgagtcgttggagtcgttcagcggctgctgcgagtcggtgcggccccggcgggcgccgtaaattgccgccagattgggcagccggcgccttacgccgttcactttgctgaccaactgttgcgagggcggcggcggttggtgatgacgcacgtccgcctggagcagttcagggggcattgccgggctaaatgtgggtggtaagaaggtgtccgaaagtggtacccaaaatttcgaaattggcatactgtcatactgacgatcgagagccttggtacagagccgaaactcgaactaggtctcgggttttttttggtctcggtttccgaaagtcgagtttttgaaaagtctgttattgtggtcttgagtctcggggtccattctcgatctcgaatcttggaaatttccggtctcgagcatcctcgctatttgtgtgacttcatgcgccactaaccgtccgatcagtgcaattggaatttcgtcagggaattcgtcctgttgctgctgctgttgcgcatgcgccttgtgggatggtggcaaattgacacttctgaacaaattgaggggaatggttactcggtacggtagggaggggtactgtaagtgtttttatgtggaactgggcaatttaggcgcgaaaattatactgtatttccatataatgcgctagaattttgtgcaaaaaaaaaacagcccggaaaattccaaataacgaagaggacgatgggtacggtaagccgcccaatcacttgttggttgtcattccgcgatgcagtgagccgtgatggtattggatggacatcagatcggctgccgcgatggaatgtgtcggggaaaggccttcctctgaaaagaaagaatttttatgccccgaggggccaaaatttaatttgtcaaaattttgaattttataaaattgaatttcggaagagcaagcgatggcagaggaatgaagcgaatgtctaccgactgacaccaggggaaggacattggcatctcgcccgattatttacggagaatgaaaagtttgccgggaaatggacaaaaaacatttattgaaaatgtatgcacggacaatggaagacccaatttttggggggcagaatactgaactgtccgctctgaattttggcacggcacacattcattcattcattcagtgaaattcgcaattcttcttcttcctctcccctcccatttgttgttagtgccaatgccatcgtcattaacgcggcggccaaaaaaaaagtttttcggcggatgggagaagacacgacacaaaaaataaaataaatttccgctccgcttggcccttggcccattggcggcaaaatttgtgtggtgccacccgtggccaagagagtctcaacccccccccccctccatttgcgtttggcactgtgccctcgagggcggcggaattttttttttggcgtttgattgccgtgggaggggacactccaaaaaatgccgtgccatcattggccaaggctgtcaattctgttcactg

SEQ ID NO: 20943 - DNA, 1935 bp, Heterodera glycines
ttaaattgctgttttttctatgtaaataagttaaaagctaaagcaaacctattcattgaatacagttgcaaataagatacatttcaaaattttcaggggtaaagggtcgattcttaggggtgtattttccgaaattttttgggtcgattcttaggggtgtattccgaaaatttttgggtcgattcttaggggtgtatttttttgaaattttttaggtcgattcttaggggtgtatttttctgaaatttttttggtcaattcttatgggtgtatttttcgtttttttattgcattcttgttgataaatttcccaaaaatcgcgaaataagggcgaaacgccaaaataagggcaaaaacttattttaagggcgaagatgtaaaataaagatttttaagggcgaacacccaaaataaggatttctaaggtcgaacgaataagggcgttaaaacgcaaaattttcgaattttgttcgaattcggttcctgtgttcgaaattgatcgaaatggggtacttatggttttcaggggcgctgaacacgattataacatctatttagaccaatttcgaaccccggaaacggattcgacctaaagtcgaaatcccccaaaagtcgaaaattcaaactttttcaacaatataatccttttctggagttcgaaattggtctaaatatgtatatgttataattagggccgcaacttttagtgaaaaaactttttttttgctcaattgttttgaagaaaggagctcaaaaaacgcatttctgcattaaaattttttcatttggacgtcacttttcgtcactagaaatcactattttggcgacttcgtcactaaaatagttaaaaatcactattttggcgttttgtcactattttttcactatttcgacattttttgaaaaattccttaacaaaaatgcaataaaaccaaaaaatacacccctaagaatctacctaaaaaaatttcaaaaaaatacacccctaagaatcgagctaaaatttttcaaaactcctatgaaatgaaaaaaaattttctcaaaaatttacttggcaaaaatttttaattttaaaaaatttttaggtaactattttgggttttttggtcttaaaaatcccagtcctactcatttgcaactgcaatcagtgaataaaaattatttttgctcaatttttggctgaaaattatgtcactattcgtcactatttcggactttttgtcactgtttcttcactattttgggatttttactcactattttagttaactatttcgggatttttcgtcactaaaagttgcggccctaataatgagtagggagtgtaattaattatatggatataaaatcgcgaaatatggccataaaatatggaccaaaaatcgcaaaatatggacataaaatggcaaaaatctcaaaatatggaaataaatggcaaaaatgtcaaaatatggacataaatttttcaaaattgagtgcaaaatttcttcaaatttattggttgaaattgcatatgagatacatttccaaattttttgacttggtaaggcgctttgacaaagacggctttcgttttgcaattagtcggtcaacattcggaaattggtctcgaattttttcggcaattacgtgcaatcattttaaaaggaaaaaaacataaaagctaaaatttattcatttttagcgaaaaatcaaccagaaaagtgaaattttatcttttttgcttatttttgacataaacttattaatttttaagaaaatttaaatttattcaatattcccgagaaaatttggcgaaaaaatgatttttttggaaaattccggtttttgggctcaaaaagaccaatttagctgctgggggccgttctaatagaggtttttttgaaaaatgccaaaatatggaaaaatatggaaatatggacataaatcgcgaaa

SEQ ID NO: 20944 - DNA, 1321 bp, Heterodera glycines
  unsure (1)..(1321): unsure at all n locations
ccttttatcaaatacttnttaatnatcttaanaaacnttcaaaattnntatcantttcatttttattcananacccccaaaaattaccantaaaatttatttcacaaataaaaataaattcaaaataattttncaaancaaaanccttctttaccctcanctnctttttaattaaatttaaaaaactgccacttttaaatagcgcctataaatcatgaatatttgataaaactttaaataaatgatttaacacatttctatttaatatcacttaaacaaatataaattttacttaatatgtaaaagatttaatttttatttataatttattcgttttgctgcaaatgaattatttggaagaatacgaaatcaataaaaagaacaaatatcgagagtgcagaaagaaaaacattctctcattttggcttactatttttttttctctattagaagaaagacaaatttaatttgtttacaccaaaaatttttacgttcatccgcatcatttttgcatattttgaaaataaatttcctttacatttaattttattcatgctctttttaaagatatcatggatatttttgacaatatcttaaaatatttagacaatacttataaaatgaaaaaaaaaattctactactggcggtggcggtggcaaggaccgcagcggaggtggtggcacggacggcagcggaggcggtggcacaggcagcggaggaggcggtggcacgggcggcagcggaggaggcgttggcaacggcggcggcggaggtggtgacacaggcggtggcacgggcggaggcggaaattgtggcacgaacgtcggaggaggcgttggcaccaacagcggaggaagtggcacgagcggcggaggaggcgttggcaccggcggcggcggaggcgcacggacacaggaggcggtggcacgggcacaggaggcgctgtcacgggcagcggagatggtggaacgggtggcggaggaggcggtggcggcgcaggtggtaagcaatcatgggatcccaagggttcaaaaaatttcgtaaggaaatcagaagaatgccgtaattttattttttaaaaacaaaaaaagttaaatataaaaaatggttatagaccagctataattaataattatgggccttactgcccattttcgtgtttttattttttagaggctaaaagcattaaattttgaaaatcctcttttgccttatttggcttttccctaaaattattaacaaaaatgcaataaaaacgaaaaatacgtccataaagaatgaaattttttcaaaaattcatctcaaaattttattattttc

SEQ ID NO: 20945 - DNA, 1226 bp, Heterodera glycines
  unsure (1)..(1226): unsure at all n locations
ccgaaacttctcgggaatggtcgtctccgttcttttggatcgaattcttttgttgcctttggttttccattggtacgaacaatcaaatgaaaaagtgattaattcctcatttttccattttttagaattaattgtccgatttttggtgagttttttctactaccgtaattccctaccgtatataccacccatttttcacaggcatcgcccagcaaaacggagttcatgaaggtacagaaattgttgaaaaaatgttataaccttataagaaaacatttcgagattgaaattccatactaatataaagctcgggaattttctcgagatttattcgggaaagggtcgggaagacagaatgccaggggctaaaaatcctcctatttccatgccccccccccattgattttggcatggcattcttttcaaaaaagttagaatcagcgaagtacagaagtgctatggtaaaagtcggacccatcccactttttctgctttggctaattaactaattaatgaatcgattaattggtaattttgtgcattcagtcctttctcaatgtgctcgacttcatcgctgttactccgttcttcgtcaacctcatgtgcgtgcgctttttctgtgcaatttttataattccctctcattaaattagcacccaattggtttcaggatcagcttcgcatttgcatttttgggcctaaagttcgaaaatcctcttcctttttttgttgctaattttcgctttttggctcctttttggtagctttaagcacattttgaatttggcatattctttttctggccattttctgtttaattattttaaaattttgccacatttgcacttttttcttgtctgtgatcattgattagtacttttggttaatacttttattcttttgatgctcggctgactagcttcacttcagtttctaatcactgatcagatcagcatcataatccggtcttctttttttgttgcccttctctacacttgtccactttctggtcacctccaatccttctgcccctctgtgtctgcttctctctctctctctctctctcttccctttccggtcacttttccgtctctngtctgctttttctccaatcattttcggcagcttttcctcaaccgctcattctctgatcactcactgatccngtattgatcaccccccccccgttttaggtgcataacaacgaattctcttccgtcgccccc

SEQ ID NO: 20946 - DNA, 1133 bp, Heterodera glycines
gtagggcatttgaaaattcaaaagtttcacttgtactttctgaattgcttcttctttccatgctcaggtgttcttcttgggcattgcccttgtgcttttctccagcggtgtttattttgcggagcaaagcgaaccgaacacaaagtgaagaagccgagggaaaaagggggggggggcaaatttaaataaaaatgtaaatccaaaccacattaatttattaattaaaatttcaaattcccatccattttttaaaattatttattattattcaattaaagctgttaattccaattcctaaaaaatttaatttttcgatcacccaaaaaaaataattatttaaatattatttaaaatcacatccccttaaagtttaattttgaattttaaaattactctcccttcagattcacctccattcccgcttcgttttggtacgttttggccacaatgaccaccgtggggtacggtgacctcgtcccgcacggcgtttacggcaaaattgtgggttcatgctgcgcactgatcggcgtgctgactttggcactgccggtgccaatcattgtaaaacgatagttaattaattgattggtgaataatttactaaatgggggggggtcattagtgtttttgaataatccaaaatatatcggcttttttaaaattttgactcattaaaagaatagaaaaaattacgcgactaaacatttctttttctccctttaaaaggtggccaatttcaaacgtttttatcgccaagaaatcattctggccaaaatgtacgagcagaatccaccgccaaaacaggtgagagacattaatgatcctttcccagcattaattacgcatttgtttggccattttattaaatttttggtacttattggttttgtacatgcaccccaaaatttaaaaaatatgtcaacaaaggatgatgcactgaatttttatgccatcaaaaaattccaagattttatacctttttttaaaaaatgccctcctcatttgtcaggtgaaggccatcataatgcacgcgcgtgccgaggaggagagtattaacgcgccaattctcgacgatgggccaaaggcggtggccccgtctttgagaacgtcggttgcgggagagattacacagc

SEQ ID NO: 20947 - DNA, 2400 bp, Heterodera glycines
ataacgacatagcaccaaaatatttaccaaatctttctaagtatttttaaaattgttattattttggataaaaaactatctttataaatggtgaatggatgaaaacaaattttaggagaaaaattttaaatgaaccaactcttaattgcaaattcatttcaaaattaaataaataaatgcttttgattttatcaaattacgcgaattcatttaatcatttttttatgctcataataaattagatttacatattaaattattttttttgatacaaaaggacaaaacttttcttttttataattttatttgcattttgtcaaggaaaggccaaataaaattattcttaattgatagttaggctttaaattgaattaattcataattatcaaaaaaaaaccgaatttaattagtcttaattgacgttaggctttataattgaaaatcgagagttaatctgaaaggcaataatttcatcatattttatattagcattttgttcatgattgaattttcctttgagcaataattcaaattttggctttatctgagaagaataaataaattatttacgaattttttcaattttttgaaaaatactttttaaatcatctttaatccttttctcaagctcaatatcaaaatcatttttttgaccaattatccgacaataatattccaattttattgaaaatggttgaagcatcttcaaacggcaccgaaatccacggcactgccattttcgctttttatttgcatttgtgaaggaatgtccaaattaaattatgcttaattgacagatctggctttaaactaattcataattatcaaaaagaccaaattaaattatgcttaattgacagatctggctttaaactaattcataattatcaaaaagaccaaatataattatccttaattgtgagtttggctttaaattttattaaatgttatacagaaaaccaagggttagcccgaatggtaataatttcattctattttatattagcaattcttcagtgtttgaattttcctttgcacaatgatttaaatttggctttctataagaagtataaaaaagattttttaaaattttttgaaaaattaaattttcaaaaatttatttaatcctattctagcacaatatttaaaatcattatttggctaattgtccgacaataatattccaattttcgtcaaaatggctgaagcatcttcaaacggcaccgaaatccacggcacagccataatccgcggcactaccattttcgctgcttatgccatggcatttttggaacttggcacatttattccgacaattccaattgtggcattctgcgcttcaatagtgtacaaaacttccattcttcaccaaaaccttaagggcattctgttggcccaactgtttggcataataatgaatttgtggccacgtgcctttatgttaattgcccaaattttcgtgacgaaaaatatttttttgttgccaccaaattttatctctggcgcttcaactgcggcattgacattcaacaacatggcaggccatgtgctgattgtggagcgaatatgtgcaactgtttatgtgggcacttatgagagctaccgtagttggacatttacggcactttggctgccaattatggtaaaaacttattagtggaatatcgtactgagtgttttgtaaatccgcataaatacagtagttggacatttacggtgctttggctgtcaattacggtaaaaaacttattagtggaatatcgtactgagtgttttgtaaatccgcataaatacagtagttgggcatttacggcgctttggctgccaattatggtaaaaaacttattagtggaatatcgtactgagtgttttgtaaatccgcataaatacagtagttggacatttacggtgctttggctgtcaattacggtaaaaaacttattagtggaatatcgtactgagtgttttgtaaatccgcataaatacagtagttgggcatttacggcgctttggctgccaattatggtaaaaaaattattagtggaatatcgtactgagtgttttgtaaatccgcataaatacagtagttggacatttacggtgctttggctgccaattacggtaaaaaacttattagtggaatatcgtactgagtgttttgtaaatccgcataaatacagtagttgggcatttacggcgctttggctgccaattatggtaaaaaaattattagtggaatatcgtactgagtgttttgtaaatccgcataaatacagtagttggacatttacggtgctttggctgtcaattacggtaaaaaacttattagtggaatatcgtactgagtgttttgtaaatccgcgataaatacagtagttggacatttacggtgctttggct

SEQ ID NO: 20948 - DNA, 1389 bp, Heterodera glycines
gaatttaagtataaccttagaaaattcaatgccgcggttatcaaatgtacaactcttatcaaagccacgccattattatgggaatccggaaaaatgatatgtctggggacgaaaagtctgatagactgtgaaaatgctattaaaaaatttatagaaataattaagggctcggggtgtccgggggcttcttacaccggacacacggttgaaaatattgtttcgacctttaaattcggacatgaaattgaactgaacgagtttcgaaaaaatcgtcgtgccttttatgaacccgaaatattttgcggtttaaatttcaagcggggtaaaagcatgacagcgttaattttctggaccggtaaagtcgtaattacgggaactaaaaacaattctgaaattgatgaaatgtatcattatattcttccctatctgaaaatggctcaaaagaagttagggagacgataaaaatttttatttattgagacggtcccgaaattcttgcagatgacctacttttgaaaaagttttttttcaatcctaatttattattatttttcaattttatatttaaattgaatttaataattatttttactgtaaaattcattaatttgctgcaattattaattaaatttgcacttctacaattccattattgattaatttgcgcggcggcggcatcgtggcgcggggagggagggcgtggaggaaatgcaaaaaaaaacgcacattggcaaattttcaaaatgagttttaatttcaggataaaaaatcatataaaaaatctcaggatttgagaaaataccccaaaaggtttggaatcaaaaaaggaattaattggcaaaagaatttccttcacctgtcactttggtgacaggtggatgattgatgaccttcccgcggcgctgcgcggcgcgggaaaaaaacacccgcaacaatttgggaaatcggatttggtcaggcggcaacttcaaagtggtccaataggttttggttttgaaacaccccccatcgtggattttttgatggggcggcaacttcaaagggctgcacccctcccataggcacgggctcgtgcgggaaacacccgcaaccaacccgcaacctttaggggtcctatactactgacgcataaactggagtagagccgttatcgattagaaataaggcaattgaatatatcggaatatattatttatacggctggatctgtttccttatatttttaatatattcccatttgtttaaactaaaattttagcatgtgtcatttgctgtattacattttaattaatattaattgttctcaataaaagattaaaatataatttctttctttgaaaatatattttaatttataaaatataatttctttctttgaaaatatatttt

SEQ ID NO: 20949 - DNA, 999 bp, Heterodera glycines
gaaaaaaaagtctttacaaaaataatccccctgggagaagggagtgggaaaacatgatttcaaaattttcatttttttctagtctaatctactcaaaacggctcagaattcaataaaaataacatttccggtgcgaaaaatgggttttgaaagtttttttggggaaaaaagactttacaaaataatacccctgggagaagggagtgggaaacatgatttcaaaattttcaattttttttagtttaatctactcaaaccggttcagaattcaataaaaataacattcccggtgcgaaaaatggggtttgacaatttttttggggaaaaaagactttacaaaataatacccctgggagaagggagtgggaaacatgatttcaaaattttcaattttttatagtctaatctactcaaaacggttcagaattcaataaaaataacattcacggtgcgaaaaatggggtttgacaagtttattggggaaaaaagactttacaaaataatacccctgggagaagggagtgggaaacatgatttcaaaattttcaattttttctagtctaatctactcaaaccggttcagaattcaataaaaataacattcacggtgcgaaaaatggggtttgacaagtttattggggaaaaaaagactttacaaaataatacccctgggagaagggagtgggaaacatgatttcaaaattttcaattttttatagtctaatctactcaaaacggttcagaattcaataaaaataacattcacggtgcgaaaaatggggtttgaaaagtttattggggaaaaaaagactttacaaaataatacccctgggagaagggagtgggaaacatgatttcaaaattttcaattttttctagtctaatctactcaaaacggttcagaattcgataaaaataacattcacggtgcgaaaaatggggtttgaaaagtttattgagggaaaaaagactttacaaaataatacccctgggagaagg

SEQ ID NO: 20950 - DNA, 2579 bp, Heterodera glycines
tggcaggtcaaatatacaaggtcgaaagttcctcaaattttaatgaaccccttaattgtaccagctgataaaatccttctaagatggtactcaatcagagaaataagtctttcgtaatgcccacccttccagtccgctgaaggggtcctcaaatgccaatttggaatttattatgaaattgggacacaaaagatttgaaggcaagaaatgttggagcttggtcacaataaattgaagagggacatccaaattttgaacaaaatcgccgatatgaatgggaaaaagataaatgattgatcgggtactaagtcaaggtaaattgctctagtaacaagacaagcccaaactacaatccaatattttttagaatttttgaaaattatttctttggttttggtttgagtgggaactcgaacaataagtgggccacaaaaatcaagtccaatagctgcaaatggtgcgattggttgtactctctcagatgtaaaaattatggagagggtttgaagaggacttgaatgatgattgagtaaatggtttcataaataattagagcggttagttgtgacttgggtggtaaataaattggttcaatggtatcggtatttaagagctattaaacaaacaaccattgcttcgaataagccccatagggtcactgtataagccgagggcctcattgtccttgtcgggtggtggattttgagattgttcttgctttacaataaaaattaagggatcgcgcaattcatttggggtaataaaaagagtgtgaaatgttatcagtgatgcattggcataaaaaatagaaattggatccgagattgttgggttcagatcggatttaaattatttgtatgaaacgcttttatttctttattttttgtggaatgaatgggggagatgcgatttttgacaaaaatgtcatgctcggggggcgaatggagccacccaattacagcagatgaatcaacccacagattaagaattgggtctaagtcaaattcgcttaactgggaaaatacaaatttaagggctcgggtaccctttaattctgttagaggcatcagaaaaacagtgcaattgatagtgttttttgtcttgaacattcaagaaagacacgaaacgggaaatcgaaatttctgaatttgggctccaatgggtaaacaattttgaccaactttctccacaattttttggtaaaatgtcatcccatctgattttgtcatgccacaaagactgaaggaataatatgtgtgaaagtaaaacaggtgaaatgagtcctgttgggtcataaaacgaggaaacaaaggccaaaacagagcgctttgttaataaaaaattgggcgggggtggagaaagacaatagcttaaggaatcagtgtcagtgacccatttaatgcctaaaaatttttgatttgaaccggttaacttttgatcttgggaaagatgagcgagagtctaggtgaattgctggcaaattctctaagatttagggaagcccattcaaaaagagaaatggcatcagaacatttagattagccttctgagggggtggaggcaacgagtaaaatattatcgacataaatgttatttagtatttcgttagaaagtggcgaaggggatagggataaatgatgctgaatcccagatgattggaaagctgtgcaatcacccgaaaattttgggagttcgatggattagttgattgttagcaattgggactgaattggtggaaggctggggattggaaagtctggattcaaatttgcgtttgtcgttccgaagggctttggcgaattggcgtaattcttgtaggcagttatgatagggggtattagcaacttaaccatgattattcctaatatctttgggcttatgtttgtaatatggctaaagcatatatgttattactttaaagtaatattatatacattttttcatattaattataaaaacaaattagtttagattattatttaaaaagcataaaaaaattccacatttcgatatgatagtttttaatttataaaacaattagattatatttcttttctatatctgagttaaacgattatattgcattatacaagagaagaaaaaaaaataacttatagaaaattaattattgaaaatagcaaacaaaagaaaattaaaaattttaatttgtttttctaaatcaaatttttttgaaataagcggataaaaaattcttcgttgagaaaattttagcaatttttaaacaaatttatttaaatatgataattcttattctaatttgaaacaggctttagagataaattattcataattctataaatttttagtgatttttctatgatgaactttttgtaatatcattgtttgttatatttcaaattatttagcaaagagttaatatgataaataaattgtacgcataaatcatacttacatttagcctaatagctatttgtcaaatgaaaaagagttaacaaaaaatttattagaatggaaagcgtaataacaaacaacaaataagtgaaataaaacacattgaaagatttaaatctaactgttgatgaacattaataggctaa

SEQ ID NO: 20951 - DNA, 2595 bp, Heterodera glycines
  unsure (1)..(2595): unsure at all n locations
ggccgtttttcaaaaaaggccccaatgaccaaaacattgcggctcgaactttatgncacggaacattaatgtgagtattgatctggctaatttcgaaacttgtttaaacaaaaatttgaaaatttcaaatttttcgaattcagattttgttcaaactngtttaaattaaacacacggaaaactaattaaaagtcatcagcagtagggatacaatttttaggtttttacctattttttcctgcgttctccatgttctgaaatgcccgaataatagttttttttggtggctgtcaagctacttttcgacttattagcacctattttcgaggtttttattttttgaacctagcaacctaaaaattaaattttggctttttccccaaaattattaacaagaatgcaataaaaattttttggaaatttcaaatgaagtaggcttggaggtggtaccaacaaggaaaaccgcaaattttcagcaaaaatactatttcaaaaaattgaaggccaatttgttcgtctatttcgctgtgatggaggcagaagaaatttgttcgccgggcgatgtatttatattccataagctagcataattgcaattgcaatcagttaattatattttaggtcaactttaaattttcaaaaaaatacaacccaaacactggcgccggtcgatgaggtcgcgactgtgagcctttctgtgatcagtgtaagggacttattataaaaaaacaagtaacgaacacacgaagtgtttgtggacggggtggtgaggaattaggatgaaatttggtatatctttcttggttaaaatcttgctgataatcttaaaatctacaagaatttgcggacgaaattgcagcacaaatctcatttaaactctcaggtcactggccttttggcggaggaatttgcggacgacattgcagcacaaatctcaagtgttggacatgttggcagctttgaggcatattttggaagaaaatgaggtgttagcgaatggtgtggagctgaggaggaggtgggtattgatctgatttgggaagcccgacatcgatattcggcaccgacaacctcgggtgggggtgccgaacagcggtgcgggatgtttgatttataagaaagatggtgatactgggaaggaagcaatgagtacgaaaggcggggtaaataaagttagaaaaaatccatttataaataatataagtacttgaatgcaaaaggaaccaaaatggtgcagatcaccttcaaagaggttgaccgactggaccgccgcagggaagagattctgaatacaatagtctcggcagcgaatattcagggatattttggtaacgctgttgttgagcctttgcaatacttccgcgccgcttcactgacaacgatggagtttgtctttatgcccaacgattacatcgtcagaggaccatcgatacgggacaggatggcatcattcctgcgcccgggacaaacgcagtggggagttgaaaatcctcctgattacggcacaaaacgaccgcggtcggagatcatcggcaagctgaaaaaacgtcttgccagcagggtgagctgtggttggggggaataaatcccggcatcgccgcttggcatcgaccacctccggtggggtgtcaaatagcggtgcgagtccatttaaatgtattaaccaaatttatatgtgaacatagtgtttggtcaacttctatctaaatgctcaggagaccgtatggactagacttctcgaagaagtccagaaggcctgaccacctactggccggtacgaagatcttacggtagcttatgacgccgtcatgagcgccggtgaggcgatcctcactgctaaatggccagagggcggggaccaacaagaaganaaggccgctcttncagaagcgatgcaacggattaatttccaattcgccgatctgttggcaanagcattagatgaaggcgaggaccttaatcagcgattgcagccgaccaccctcgggcgggggccgcagctgcaagaggtgcaggaggaggaggaggaggttggctggtttgtaaggtttacagctgtattatgataaatgctttttacatttttactttatagtacaatgccttccgtcgttaccgtccatcaaaccaaccacagccgcagaggaccacccgcgggcgggggcagccgcagcagcataagtcgaattaagaaggaganannnttcnttttaaatattcataattnaaatcatttantactaatancaacatcatcnntannaccanataaanaaatnaatctnaannattannatnaanannannatttnatntntntnaanatnannnccantnattnnannnnnnnnnncnancccnncatcnctntttaccaccnaccaccctccctctancttctcaaacancnnanccnanttcatttatatncattaacaaaatttnntnccntnntcancnccggtctcctatnnntncncnccantntcacccactctttctcttctcgaggaggtannccccatttaccgtnnanattcttncgcgttacttaggaagtacactggaaaatgcctgtacaaagtgattttgtat

SEQ ID NO: 20952 - DNA, 2107 bp, Heterodera glycines
ggaattcgttgctgttgattgtgctgtatgccttgctgatttatgttgtgtcggtatatttcagagttgtgatgtaccgtgttcatatttggttgttcaacaaactgaacatattgttgaatcggtgcgctcggagctggcgctacacgctgtcgcataccatactcatgttggtaattctgatgctgtacattctgccgtcccagattcatttgatggataactctctgtggttgtgctacagacgtaggattgcgttgctgtcgtgttacaatttgcggttctccgtttatcactaattccttttccaatctagcaataacactaaaattttctcgaacttgatccatacccatttggtttgctaccctgttttccactggggtcgacgcaataggaaaagaaattgggagtaaattttgctgacgttctaatctcacattttcaaacatacgcccagcgtcaaaatctgttagactcacatttctgttgtgaacattaaaagttcgctcttccaaattttcaaagttttcgaaattcaaacctccaaatccgtttgcattgtccacttgttcgttttcgtttcctttgtcctcctcaccatcacgaacatttctttgtcccacgtccaacaatgcatcatggatttgttcagtgttcatcattggttctgaaaaatttgaatgctctgacatcccgtcctcattttgtctcagtccattttccgcattgtttctgttttctctaaagatttcctgcccttcctggttaagaatgattcccgcattctgtgctctctgcctagttaatggcggacttcgcactatcattgttctcccagaaaatcaatttataaccaaaattcaaaatttccaccgcccaggtcgtctgcaaattcaaccaaattacgtagttcaaaatttccgttttcttcaaaaacaagttgaaaaccgctcaggtgtcaaatcgttccgataaatgccgctttgctgcacctcccaggtgacaatggcgagagatttatttattttctttaaaatttgtaatccaacaatccgttagccaaattatattatcgtctcgcccagagactgataaatatccagaaaatttcgtttgttcttacttttcgattttacacccagtacttcacttatagaaaacaaaattcgagtgcttcttacctgctttaccaggagcgccaaataggacgaaattccaaattaacttaaacaagcactgaatttgctggactgtcgccaccaaataaactcaaatcaaaacaaagtcaaagacaaccaatctttaagagaaattcataatatcggagatgaaaaccacaaaattaaaattaacaacgaacaacgaaaacaaaagaaaaatagggagggaacaatttaatcaacaaaatgccaatacaatttaaatatataatgagaggtcaaaagtcaacttaattactacaccccgcccctatggaaaaaggcgtctctgccgcaaaaggtcaattattcggctccaaaaggtggggttcgcgcaggaagaagcatcagcgtcggctactgtttgcttcattcgcaaaccgaggattgccacggccgcgatagggaagacgagcgttggtgtacgggtggtgacgagtcggaccaaacgaacggtggcgatttgtccaaatttgagaaaagcgaccgggtcggtcacccagacctccccccccatggttggcaaacgacgtcccggatcccgaagaagacgaagctctacgagagtcacccagactactcgtagagggtttttggacgacggacttcacggtgcggatattcaacgccttatcccctggaaacggggattgggtaaaaagccacgctttaagcgctcgaatccctgcgtctttcaaaactccctcaggcgaaataaggtgttggttgaaggagttgccgaaacggaagatttccaaaattgagcgaccattttccgtggtgctaatggagcgaaatttagcctggtcaatgaaagggcgcattttcatgaccaattcttcatattgagcagttttggcatgaacgtaaggagggaaggtgatgaagaagtcgacatgctggaa

SEQ ID NO: 20953 - DNA, 3076 bp, Heterodera glycines
  unsure (1)..(3076): unsure at all n locations
aaaaccattcgcatgaactgttcgatggaaatnggcaatgcatgtgcggctggcaccaagctgatcatgttggcaatgtcgggcagaacctcattgnagaggcgaacgggcgcaagagagacatggatgaaagaagcggtagggaacaatttaattgaatttattaattatttctgtttaatcaaattgaattttaatgaattcaattaatgagaaatgtcgaataattaatagtgagaaaaaaataattgaaatattcacttaaaaactaaataagaggataattgaagaatataacgaaaaaggacgagctgcactcatttgaatttaaaatttgaacaaaaggacattaattgttttttattgattggataaatataattttggatttaattaggccccgggcgaaatacaacgattttttatcgccgacccatcgggaggagaagcggcagatgtgaaacacaaattagaagaggagcagaaaaagcatggtgacattgtgtttttgcacggctttgtggataagtacaagcatttacatctcaaagtgattttattaaaaaacaaaaattaattttaattaattcaaaatatattatactttctaattacaattaattgctttcaattgatagaaacggagaaaaaaagcctttgttttggcaattctttggcgcaatttaataggtcggatttacataagcctataaacatttttgcagtggttcggtgccctgacttggcaacaacggcactgtgccggtgccgaatgggtggcgaaggtggacgacgacacggtggtccatctgcgccggatggactattggataaacaaaaaatttcgccaaattgccgatgaccatccgctgatttttttcgggcatatgggcggcagtcgaaagccatttcggaacagggacagcaaatggtcagttgggcttagagtttgtggaggtgggggcatttctttgttttttcctttatttttttggaaattatgggctcggactctttgcggcctcgcatccttctcctggcattttcttatggcacaatatttcttagccttttattcgttttttgttcttgtttcttgtcattttcttggcaaaatattttttccaaacactttctttgtcgtttttcgacaaaatttcacacttgtgtaggtttctaagacttgagaggcgcattgtgtacatctcaaaacaatgaaatataacaaaaacagacaaaataggtaggctttttgtgtagctgcaccgtaacattctccgtcgagtaaaaatttgtgaatttacgccacagtatggcacctttaatccgcccctttttcattacttttggtaacttttgcatttttaaacattttttaaaaagtttgaccatcttaaatatagtacttgcataatccgatacgatatttgtcaatcgttacacgaaaatacatttgcattgacttgacaaagaactgatcatgcaaatctgatcactcccaaaaactggtcaggacaataaattattccaatcaatttctgatcagtcccaagttttttaaataatatttgatcagtaccaatatattttggttgcgggtttgatcgcccttagcaaaatctgactgctgatcacagcttattttctgatcacttggcattcaaacagattgtttattaaatgtttctaattttgtctctgctgaacaagtcctcccacactttttttgttgatttaactgtactggttgataaaagatttattgcgttgtttgacataaatataaattttaaaaatattaaaaaagcatatttttgaaaattgctttcatttcgctcgcttgatttaatcgtgagtcattgtgccgttgatcagtcttatcggtatcgtatccattctggcaaaaaatgttctcgtggggatagtctaaaatggaattacgcattgttttaatccaatgaaaataaaattaaaaaatgacccgaaagtaaattcgaattgtacaaaattgtggtgccgagatatacaaagaatcgcatgacaacacggcaaaagcaaaatcattagcccttggcattggtttcggcaaataaacattggcaaaaagcaaaaaaaaaaaaggaaatttattttaattaatttaattaagaaaatatgttaatttatttgcctgccatttgaatgaaaagtgcttcaaaaattgcttgtcttctccaagcaaaacaacagaaatggaaatattttcatatttttccttaaattttatttaaaaatagaaaaggacaattcgccatttgattcacctttaaatatccaaatccaaaatcaattcctttctccctaggttccttcttcgagtcccaaccatatttaacaaaatctcccctgcgggtgtgcacacaaaatttatgagactgatcgggggtgctctatctacccaaaaaatctcatttcgaaatcccacggacacttggccacctccctttgtaaataacattaaaacttttacaaaaacaatccttttcatttatgcttattttattaaagtgagattatttttagagctatgtacgaaaattcgatctgattcaactttaaaatttttcaattagtgatagacaaaatagcattataaaaataataaaaagagttgtgcctgataatttgataattagtaaatttttgaaaaaatcatcaatattcaaacggcagaattaatgctcctataccgtatttactcgatttccgggacgggagtccgaacaggatcccgtaaaaatcccgctcccgttaaaatcccgttcaccgaaaaaaagcgggaccgggaatctcgtaaaaatcccgcgggagtcccggtcccgtcgtgctctaatcaaaaacaaaaagaaaaacacaattaaataaatcgtaaaaagaaaaaaacatttatgaatttaataactcaaaattaaacagtaattttgaatttccgagtcctgttaatgattgggttttaaaattttcatgggcgcacgattagtcagacaaaaccctgtaaatagtaatttttgggaaatttaaagtttcctggttggat

SEQ ID NO: 20954 - DNA, 1352 bp, Heterodera glycines
ccctccccaaaatgaggcttgcttcggaaattgaattaaattggaatggattaataatagtttaatttattttttaaaatgattacttaacagtaaaattcctccgttatttaagtaaatcacctgataaattggaaaatgcaccgacaaaagcacaaaaatttttgtcaaaaacagaaagacagaacaaaaaatcaatttcgttgagcgaacaattcagacgagcttggatgctgactcttttcttggcattggtttaaggtaaccataaaaatgttaaatattatcagaaattttaaaatttccacggctcgccgccttggaattttttttaaatggcgcaaagtttcggagtcatgaaagcttttcgagattggattcattcacatttaaagtacaatatttcttatgctgggacttatttgccaaaaaaaaactcaggaccatgaccatggtgccgggtagcgatgttagggcgggaaaagcagcgtattgcgtttcgagtcatgttaaaaaaattgattttaatttttttgatgatttttagaataaaaatcagggtccagttttaccgacagcaccaatgggcaaaatttgtaattttaattgtatttgttaagatattttctaacagattcagaaacttttaagtattttgattaatatatattttaagtgtgaacattttattgaaattctttaatcgattttctccattaatttcgatggtattttgagattttctattctcataaaataacatttttagacaataaaaaaatatataaaacatttttgaaagaaaaaaatagttaaaatgaatcattttgtcgcttagcaaaagtaaagaaccttgagattagcgggacataggaacacagttaagtcactgaaccatgcgcataagataagtgcaaaaatctattggtttgaccgaaacaagaccaaaatgttcgggtcgcggattaaatttaatttaaaaaagtagctgaaaatgattaaaaataccgacagaccaatggttttttaatcctttaagaaaaatttaaaaaaactatttaaaaaaatgtttttttactttctcgttgttagtattaaatgacatatttttaacaaaacttgtctttaaccatggcttatttagccgctgtttgcttaaccacggttaaagataaaaattttaattaaaaataaactacggttaaataaaccataaaccacgggtaacttaaccggaaaataatacccctgctggtgccgcaaaaactcttgcaatttttaaaaatttcggtaaaaatttccattttacatcggctacttaattaattgaaagaaacaaccctttggatgca

SEQ ID NO: 20955 - DNA, 3070 bp, Heterodera glycines
  unsure (1)..(3070): unsure at all n locations
ctgtaatttatattaattaaaatctcattaataaaaatctttttattttttaaattgaatagaaagaattccgtatttcctaaaatacatccttcccccttaaattagagccccccccccccctaaaatagaatcccccttttcaggggagttgaaaaacagagcccccggaggcactattttaggaaatacggtatgtcacattcaataaataattacgctttttaattataaataattaaaaatttttttttcccctaaaaatcgatgattttcttaaaataattttccctcaccctttcccgaaggcgattttcttttatgcgttgcacaaatcgcctaatttgcacagacatattcatcagaagagcacaaatgattacgccgaccagccaaactgctggtgaccagcgaaagacatcatcgaatgccaccaaaagaaaatttaattgcattttaaattaaaaatgtatataatttaatacaatttaattcattttttaaattaaattttatcgcttaaaaaattaaattaatcgttttgaattggttaaagtgaaagtccttcgcattgactttaattaattttttaaccaattttttttatcgcttataataaaaaattaatcattttttaattgcataaagtgaataaaaagtccttagcactggttttaatgatttcttcaaagaagaaaatatttttaaaatttttcgccactatttcggtattttcagaaccattttttgatgattttctcttcttaaaaatttccctaattcaacctggaatttgattagtacaaatgcgcacattagcaggaaaaacagtccagcaaagaccaacagtcgcttcgcttcttcatagctttcaggatggcttaaaatgtgaaattaattattattaatattaaacggaagaaggatgaccaataaatgttcatttaacgaaacaataaaaattgaaataaattttgcattggtaagattaaaattgtataaatataaattgtgaatctgatggccttatctacacacggaaatcttttaaatatgatatttttaaattcaaatattattgccgtaagggtacagttaattctgatttggatgaattttcatgtttcacatagctgtgctcaaaaaaaagatgtcgcgacaattcgtagaaacggcaactcgtataatggcttaggctaggcctaagccttatgcctaagctttaggcttggcctaggcataagcttcgactttatttagtaaaatatttttatagtatcgtacgagttcccttttgtagaattatccgtgagccataaaaaaaaaaatcccagcagctcatatacatacatttgctggtgttgcaaattgccaaaaacgcgttcaattgattgtgccaaagtagaggttgaacatggcacaaagtctcctgctgccgttgcatctgctgttactccttgcccaacaataacaattccgtcaaattcatcggctggtggtggtgttgcgtgcactggtcgaacatgacgatgttgttcaccagcagcagcagcttcaatgctctccattgaactgttcaatgtggacgggttggaactccaccaaggaaccatttttgtagtgattgagaatgtgatatgtcgtgttgaatttgaatgattggaatggttttggtcgagagttttcgctaattagtcgagaaaggaatttaagttcttgcttgaccttgacttcgaagaaaactaatttaaatttgtttcaaaagtaaaagaataataaaatacacaagttgggataataaaatttaatattcataattatagagataaaattttcaaaaacgaaaaaaagtgcaaatcggattttgtctatcattttcacagtgatccgatgaaagaatttttggttatttaaaaaattattanatttgaaataaaaatttttcataaatatttaaatatattaaatgaaaaaatatttgaccttaatttgaacttaattgaaaaagttttaattaaaaatacatgaaaggtctttattttactgtcaaaaatattttcactgtcaaaattccctctcgttaaaaagcccaccctacaaccctaaattttgatgattaaaatgcaatacaaatttaggcaaaattggggcgactaattaggcacagaagtataatgatacataaagaaaatttatattataattttacttacaaaatattttggtaatgtttagcgctatgaatttcacatggattgatcaaataaaattaccaaatttaattctttaatttactattaggtattatatattttgccataattggcgatgatcaattagacaaattgagtgaaaacaatcgttcaatatggaaaattaatagggagtgaaacgggaaataatacgaatttttctccgcaaatttggggatcattttttgggggtaaaaaatgtgcggggcaaaattgggagagggggcaaatttggttgagacaagaaaaattcgcacacacatcgcaccgacaaataaaacacgaggacggggacacaccgtcgacggggattgtttgtcgattataatcgaaggccatcaccatcatcaccaaaacatcagcacaattgatgggaaaaatgaacaaaaaaaatgcggcaaaattttcataaaattttataattgaaatggcgccaaatcggtgatatttagcacaaattttcataaatttaaagaaaatggccaaattagtggtaaaaatatttaattttcataaaatttatagaaaatggccaaatcagtggtaaaaatatttaattttcataaaatttaggttggccaaaattttctagcataaattttcatgaaatttctaatagaaaaaggccaaatcggtggttaaaatatttagcatagcaaaacatatttttttgttcatgtttcccaaattttgaaaattttaaactaaaacttgtcctcagattaaaggtgaaaccctgacaaaatttgtcgtgaatgtgttgagattttttaagaaatatctggtaaagaaatttaaaaaataaacatttctacaga

SEQ ID NO: 20956 - DNA, 1202 bp, Heterodera glycines
gttttcccacaaggcattttttctgaaaaccggattcaaaaatctggggtttggtataaccgttttagaaatagcgtagaaaacagcttcgatatcaagaaaccaagtcaagtccagaaaggaatattttaaaacgatttcgttttgttttggcattatgataccgaataactttcggaaattatggaaacaaaattggagaaattcgaataattttttgactgcaaatttttttccttttttgaattgggttcaaaaaaattttaagagaatttttgattattaatttgaagtcttgaatttatttgacaaatccaagacttaaaactgggagaagcaaggggctgtggctgggggcctaaaatttgggccacattggagaattaattctgatttctgaaaaagtcccagaaataactattttttctttccataccttcttgtagagctcgagctgctctttccaatggtcttatcccggtctcgatccgtgccgaactcacaaagttatggagtgaaatgtgaaatattgttttcaccacaaggcattttttctgaaaaccggattcaaaaatctggggtttggtataaccgttttagaaatagcgtagaaaacagcttcgatatcaagaaaccaagtcaagtccagaaaggaatattttaaaacgatttcgttttgttttggcattatgataccgaataactttcggaaattatggaaacaaaattggagaaattcgaataattttttgactgcaaatttttttccttttttgaattgggttcaaaaaaattttaagagaatttttgattattaatttgaagtcttgaatttatttgacaaatccaagacttaaaactgggagaagcaaggggctgtggctgggggcctaaaatttgggccacattggagaattaattctgatttctgaaaaagtcccagaaataactattttttctttccataccttcttgtagagctcgagctgctctttccaatggccttatcccggtctccatccgtgccgaactcacaaaggtatggagtgaaatgtgaaatatttgttttcacccccaggaattttttcctgaaaaacggaatcaaaaatctgggggtttggtataaaccgttttaaaataagggaaaaaacaggctccaatatcaagaaaccaagccaagtccaaaaaggaataatttaaaa

SEQ ID NO: 20957 - DNA, 2342 bp, Heterodera glycines
tattctgatcggaatcagtccctcgctccgaattttcctcttttccgttgcggcagttgcttcaggcatggcgctcacttcagcggtgagatgtgcagagacaatggcgcccatgacgaacatcgtttgcccttccacggatcgacaccattccgccattctgtcgacgaagcagggaagcgagcgatcttcggtcgatgactcacgaggcgcaaccggaccatacccagcctaaaaccaaagcaaatattagttgcggaacgtaacgagaaaggaagcaaaataccaaggatgagaagagttggttcgactgaatgggtgcgtcaatgttggctgccggtagacgcctatttccatacaaattgataattcgttccattttttccctgttttcctcttcgctggcgctttcgccgtttttcgtcgccattccttcgagcagcttcagcaatgtgttcacagtgtcgatacccggcttctcgtgtaactaagcgattttaacattcagatcaacaaaacattgatttaaagaaaactcaccggaattttccaaatgcctctgacaaaatcttttgccaagttctccttgtgaatgcttttgacgataaacatggcctgcttcgcattgtgttgattgttcacctgttcaaaaatattccatcttttttctttacgatttaattacgcgcacctgcaaacactccctcaaatgcattgtcagctttgccaaaatggtcactttgtccgcaaatttcgcatgtgcaccgctgttgctctcatcggaagttacaaccgtacagtcaaagtcgccacattcgatgagaagtgatttgatgttgcccacgacatgatcggtgatgcgctgacttgacgaatttgagacgagctcgctgaccacggctttggcccagtagacggtgtcggacaaatcgttgacgggagcggacagaaggaaacgttcaacgatccagcgaagaaccgatttttcgcccagggattgctcgatgaaaattggaacagccatctttggataactgtgaagcacttcggcaatcaatttgagcaggtttggaggctgcataagacgagtgtttttgtctgcgtccgcaaatgtgtcaaattgcgtcaactccgtcacgatttgactcagaagctaaaatatgaataacgcacatttacatattgacactacgaatgaaaataaccgttttaagaaattggtctgaagccgccgctgcatttccattgcctgtgacgtcaccccgctgttctttgaccagaatttcgttttgtttgatggccaagcatttcttcgccgcgtccatgtaaagtgagggcgaccgcaccgccaaagggaccaacatgcgcacaactctctgaaagcgagtgaattacattacagattttgaatgaaaattaacaaaccttaacatccttctgataacgcttcgttctcattgggcgcgaagtgatttcctgcatcgaaattggctggccattgcaagttgcggtgatcatttgttcgaaggctgactgaagaagtgcggcgtccgagtcgatgcactggcgaagaataagcgttgccaatgtgttcagtgttggaggcgttgtcgtgccatttgtcaccatttgtgccgaaattggattgcgcttcatctccagcagtgccttcactccatcctccttaaaaaggaatgttcaaaatgaaaatgcatttagacagacttacattcagaaactcctgcgccatcccatccaatgaaacgaggcgaagcaacaatgtcagcgcgttgtgtgccaattcgttgtccaacgggtgagtgctgctcgacttgatcatttccaggatgcctttgacaagcagttggtgtcgttcagtgcccttcctgagttcactttccagcttgacaagcttctccatattgaagtctccgcgcaggttggcgtttgcgtagattggcactgatgagtgaagcggatggaagccctgctgttgctggtcaggcaacaaacgcttggtcatctcgttcaggtcgatgaagtaaacgctctgggcaaccgtcagacgaacagaagtcttcttctcattgacagctttgttcagctgcgcaaccgacagctgagagaattcgcgccacgcgcccgtgtaatggtcatccgctgtccagtagaaccactaaaacttggtttatgtgctgcactttccacaaacaaaagacgcgacctgaaattgagttccgtccaatgcttcctgtaagagatcctgtcgtatgtctgcactccgctcctgctcgtacatgaggaagaacagcaacgtcggcgtcagcaatttcctcgtcaat

SEQ ID NO: 20958 - DNA, 1202 bp, Heterodera glycines
  unsure (1)..(1202): unsure at all n locations
aaaaaaaattttttcttaggaattttacagtgcncagggatttgaattatccataacnacatcatagngtaaatatctagcaaaaacaaattttttttacacaaaatcctagtccagcaaacagatgaagcgacttaataaatcgattatggatttgcaagagttaatttctcaactcacactagctaacacggaatttgccgagtgtaggcgtaaaatgagccattatgaattacaagcgtatatcttggtccacattgagtgtgtgggcgagattaagtaattttctgaaagagctcaaaagcagctttcgaatggtgtattcaattaattgtttacttgaaaattcacagagatatgtccaaccgaatcttgaaatgaataatggcgtagtattctataaaaaaaaatttttcttaggaattttacagtgcccagggatttgaattatccataaacacatcatagggtaaatatctagcaaaaacaaattttttttacacaaaatcctagtccagcaaacagatgaagcgacttaataaatcgattatggatttgcaagagttaatttctcaactcacactagctaacacggaatttgccgagtgtaggcgtaaaatgagccattatgaattacaagcgtatatcttggtccacattgagtgtgtgggcgaggttaagtaattttctgaaagagctcaaaagcagctttcgaatggtgtattcaattaattgtttacttgaaaattcacagagatatgtccaaccgaatcttgaaatgaataatggcgtagtattctataaaaaaaaatttttcttaggaattttacagtgcccagggatttgaattatccataaacacatcatagggtaaatatctagcaaaaacaaattttttttacacaaaatcctagtccagcaaacagatgaagcgacttaataaatcgattatggatttgcaagagttaatttctcaactcacactagctaacacggaatttgccgagtgtaggcgtaaaatgagccattatgaattacaagcgtatatcttggtccacagtgagtgtgtgggcgaggttaagtaattttctgaaagagctcaaaagcagctttcgaatggtgtattcaattaatgtttacttgaaaattcacagagatatgtccaaccgaatcttgnnaatgataatggcgtagtattctat

SEQ ID NO: 20959 - DNA, 1015 bp, Heterodera glycines
tttacagcgcaaaattgggggggggggttggcaaaaattaatttctaacattttggacgagggcatgccccaggatttgcacctccccatcgggcggagaacttattttttcatgccactttttgcggcgcgtttttaatgggggacagcgggggtccagcggtgccgataaacaccgccaggaaattttagtagctttttcttcaatttttaatagaatttgttggtagcaaaaaaaaaaatttttttttccgtaattttgtggacttttggaaaaacctcgcgtaattttttgggaatttgatgaattacctaaattttggagggggtactaacaaggaaaaaagataattttcaacaaaaaataataattgcccattttcaggctgtattcgcggtctttgggtgttcggcgaagacgaatgcaaacgagtgggttcattattggttaatcggtgtgccaaaatgtgcggcaaacatgcttttcaatgccaaatcgtccatattttctttccacattcattttcagtcccgtaaccggacaaaaaaaaattttttttttcgtagccccctttggtttttttttgataactgccttcccctcaaatttgttttggataaattgttcagcgcttttttaatatttttgaaaacttttcgacggtaaaactttatcaccctcttggagaggtctaatttttaaattgttataagagaaaaacaaaacatggcccgttccgcgctgtttcattaaaaaaaatttttttttcaaaaaacccaaacaatttgtttgccaggtttttgacactctgacgaatctgagcatggagctgaagatgaaaagtgccggtgccaccaccagcagccccaaaaacagcatctccgtcatcaacaacgacagcggtgccgtcgccgctttcgctgccgcaacgccgccgacaaaaattgtcgctgccgccaaaccgtcaccgccgccaccgtcgcagcagcaacagcagcagtcgatccgcgtcag

SEQ ID NO: 20960 - DNA, 1450 bp, Heterodera glycines
tttccccggcggcgcctatcggcaccgccggcccccctttgttgcgaaattttcttgaaaaagcgtgtcgcaaaaaaagtgcatttgaaaagcaaaaaaaaggtcgccaaattacatggctgggaccccttcgcaaaattggccgctgacctcccccccccccctgacttcttcgcaaaaatttcggttgacccccccccccctttttcatgtatgtttttgagaggaaatcttagaaatgggggggggggtgtataaactgaaattttcatcaaaaaattattttatccataaaaattgtatcacttcgcattcaggaactgttggagaaaattgacgtgttgcagcgccagttggacaaggcaaacggcaacatcgaagtgttgcagcgcgagttggacaaggcaaacggcagggagcgcttgcgcaccgaaaacgagcagttgcgacagcgcgtcacggagttggaggcggacacgcactcactggaggcggtggcgcgcgcgttggccgggttggaggcgaacaaacagaagcagaagcaggacacaacgaacgtaaggcaacaaaaaagggggaaaaaactcgaaaatttgatttggtaaatgaaggcactttttgatcaatgtaaaaagtcggagcaggtcgtcccttccatgtcatttcaagcccccgaaattttttttttttttaattttcaattcaaaaaattttttgaaaaacttttcttacggtttttaatattttttggaggagttatatactacttttttgttgctgatcgacgacaaaatatttctgtgccacttttgttttttgctgcaattgtggcgatgataattaattaattacctaattaatttcttaattttgacaggatacgacggttgcccagtgatgatgatgtgccgatgatgatgtgatgagaatatgccatcaaaaatttgtgtgaattaaacaatgcccccggaatatcttttcacataccatccataaatacccaatttatttttctctttttttgatttgaatttattgtttttttaaatcccgatttctacaaaaccatgtgtgtgttttttattttgtttttgtttcaccacttttggattatgcactgtttttgtccacttttgattatacactgttctttcatgtcttgtcttgttgcattattttgcctgttttttttctggatcgaccacggctgagacggacggattccgtaaatttcgaaaaaaaaaaaattttttttgggggggggggcgggtgaattggtgtccaccggatttgcgccttctccaatgccagcagggatggggactgacgacatactcaaaacaaaattcgacaaaacaggaatgccggaaatgtggcaaaggtgcagaattgtggtcccgatgggaaaaagcagtaaaattttgaaaagcatttattctggggtagaaaa

SEQ ID NO: 20961 - DNA, 915 bp, Heterodera glycines
  unsure (1)..(915): unsure at all n locations
ccaaaaatggcgacccttctcggaatttagagaatgttaaattaaagaaaatgttaactatgcaacttagaaaaccatgactacaataatctaacccatttcatttaatgtcgattttttacataataattttttaattgtaagtttgcgtttatttttgctttatttcaaatttcattgtcagtattaaataattcacttaaaaataacaatcgtccgtgccttttattacaaaatttaaatacttttctttttatttaatttttgttcatataatatttttaattataaattttttagaaattttatcaattacaatagaaaattacttattgcataatgaatttatgttctctatttttaaatttgaatagaataaagttttaaattcgttttagtttaaataatagaatttcatcaaagctcccttggtcctgcaacgagctacgcgatgtcgggtggaattgtgaataatggtatattttttatcataaaaatttatagaactttaatatagttcagtgcataatttttcaattcctttttttggctccttaataaagtttaaagtaagtttgattcactaattgcttacaaaattgtgttcaaatatttaaattgtaaagttttgatattttatttttattaaagtaatgaactttcattttattagaatttttcgtttttatttgataattactatttggaacaaacattttttaattgttctttttgctcgtgcctggcaacggaatgttcctttttgagttcaacatttcatttattcaaataattttagctctcttagtcctttaagttctctgaccgatgtgatatttgtttgtaaatgattattngttattntaattttatatttttattanatgaaattagatcatattnaatttgaaattt

SEQ ID NO: 20962 - DNA, 1278 bp, Heterodera glycines
aatcatacacatcaaatcttataatcatttttgtacctctcctaatcacagttgtacctcttctaatcctgtaaggtcaacaaattttgaaaaacgggcgcgaagcgcccgactgaggccgcgaacggcataacaagctaaaaaacgggcgcgaagcgcccgtatgagttcaacggatttaaaaaacgggcgcgaagcgcccgtccaaggccaacaaaaattgaaaaacgggcgcgaagcgcccgactgaggccgcgaagcggcctaataagctataaaaatagaagactaaataaattatttattttttgtcaatcatatctaataatatatccagttgctccaggaacattcttcacacaatagccattcagcaaaacgaggtggaactcgacaaagacgtatggacgttcattgaaagcggaaggcagtctgtcccacaccaagaaacttgaaatttaagtaattaaaggaaaaaataataatttcacacactaagcaatttatttttaaaataaaataattaattaatagaaatatttgtcgatcaaattaaaacaaattcatatactaattgataatactatcatcttctctccaaattatgttaacaaatttcatataaactgagttttttatgagtttctatttaaaaatatacgaatatacatagatgatttaaaatccataaattaatttgtttttacaaatttactctaaatatataacccggttttcagacagaaaaatatcgggttcctgcgaaagttttaatataaattctgttttttttggttaataattgtaaatgaaatgtttttcatggcattctccgacaactggttttcgagttgtataatcgtaggctcagttgttagatttaagaataaataactggtaaacactatttttattatatttttataaataaacccaatttcaaaagaagattaaaacaatgcaaaaaaaaatattaaaatatataaaagcaaaatattaattattagatgtttttaagtgatttatttttaaatatattttcattattattaaatcaacttctattaatcttttttataattaatattaataattaaaatgagtaagttgcataatttattatgaaattcggaagattttttccaaattgcatatattatattttattgtaacttataaacaaaatgtcatttttattttttcatttttaatgaaaggcaaccaatagaatcgttttaaaaaggtcatttaatataattattcaaatgctaataaatt

SEQ ID NO: 20963 - DNA, 2075 bp, Heterodera glycines
  unsure (1)..(2075): unsure at all n locations
atcattagacgtttgcatgtattttcgatttctgataatttttctggtcgtgtttctggcttnttctattgatctttgtagttgtatttcttatcattttcttttatctttgctgttgtgtttcttatcattagacgtttgcatgtatttttcgattctgataatttttctggtcgtgtttctggctatttctatttgtctttgtagttgtattttttatcatttgttttgtctttgtagttgtatttcttatcatcattttcatttgtatttgctgttgtattctgattattttcaagttttcatgtgttttttcttacgtgtttcttcaccgtagcaggaaaatgccgcgtgaaataataaaaatacggtagtgcataaaatatattttccataaatttttacttaaataaattcactttttagctaaatctgacgaacaaataaacctgttggatgttcttgaagattaatggaaattcctttatccccatttgaaatcacatattgatatattgtttaatcatatattgattttatttgtttgtttttattttgatttatattggaaatgtttttgttttgagaaataataaaaaggttgatgctgtaatggaaaattaatttatttattatttgtgacgatcactatgattttttggtaattttttagcgattagtattttacgagagaaggacaaaaaaaaacaaaattttccgctcattttttaatacagttcattttaaacacctaaagatacctttatttttggtttgtcacttaaaaaatgatttcggctttttagcatttctatccgcaattttcgaaaattcttaagaaaaatacagtaaaactcaaaatgtttcgctcatcggcgtctatcggcaccaccgccggaggccaaaattacttaaaactttaaaattttactcaaaatcaaaaaactataaaaaaacaggagttcacatttttgctaaatggttaattgccgccggttccatccctaattaatggccttcttttttggagttttcaataattcaatgttgggttaaataaattatttaattaaaaaacgaaaatataaacaaaaattttataccaatatttattttgctgtaatttatgcatttataataaattattcatttttatttttctgtaaatcatttgtgctgatgaatccgcgaaacacattaagcaaattcactgggaatgattttcacttttgtccattaattcatttatttgtcaattcactcataaattattttttaataattcgtacagtcaaataattaaaaaaaatttctttaagtggacattttctaaattttaatttattaaaaaaattattaaggttcaccatctttagctgcttttttcttcattcgcggcattcattttgccagcagaagtgtgatttatggaaaataagttgatcctggacttagcgtttaatgtcgaaaaaagggtaacatttatttttattatttgaatttttaattgtctaaaataataaaattaattttaatttatgaaaaaccatctctagccaaagtattatcagccacaatctcagcattgtgattttgtgccatgaatgaatttggcaatttacaaaaaatgtgagaatttttttttgaattatattgaacaacttaaagcatttagagttttaaaaaagcaattgacagctttttcctctttaggccaacaatttggccaaatcgaacgaagaatttatcactgcactcgaagaggggctacggtgcttgacttaggcccatttgagaatacgcaggacaatttggcacatgccagaacccattagtgctttaacggtggccgtattgtttttaaaaaggccacgacatttggtctttttgtctatttggtgatagaaattcattaattttatcaaagaatttttggattaaatttttggtacaaattttggtcgcttgatcatgaagctgacattcgttttgcctaattcgaacccccgtccacgaaactcaatcaaattaaatttcactttacattaaagtgcggcacacaaaacttacagatg

SEQ ID NO: 20964 - DNA, 963 bp, Heterodera glycines
tggtgttgttttatccgactgcgtttgtagccattgtaatcgagaaacggggataacccgcacggaacggcacagaatcgcacgtgggcacaataccaatgccattttcaagtttggaaaaaacatgtctttttaatccaagattccaaatcaaaacttttgaaaatctcctcattggtgcctcaaaattttttttttttgaattaatcatggaaatcatcttttaaatcgtcttcgtttcaagaaaaagcgtttttaaaaataaattttggttttagcaaaatctgcggaagaaacatgttttgattaaaatttatgaaaactccttcatttcccttttcaatctcatattgataaatgttttttatttcatatattgattttatttgtttttttattttgatttatattgaaaatgtttttttttgtttttaaaaagattaataaaaggttggtaccggaatggataattaattaatagaattttatattatcagtagggattagcttttaagcacaaaaatcgcaaaataggcataaaataggggaataaaattgtttatgaacgctttttaggtagcaaaggaaataaaaactaatcaaaaacttatttaagtgttatattctaatttattagaagtttttttcgaataagaacaatttttgaaccaaaaatttttatcaagaaaaaaaatttaaattttggggaccaatttgaagaaaaaattttcattctttgtggcgtattttctgaaatttttcagatcatttcttaagggtatatttttcgttttattgcatttttgttaaggatttttcagaaaagcctcaaaataagcgccaaaatggtgaaataaggaacaaattaggcttctaggcattaagaataaaaaccccccgaaataggcaaagaaaggcattataataacattggtcctaggaacctcataacaaaacgcgttt

SEQ ID NO: 20965 - DNA, 1458 bp, Heterodera glycines
gatacattcgacatgagccgtgtccgtgccgatgggaaaattttgccagagggtctgaagtgcttgcgtgcctggatttttactcaaatcccacgattccctgatgataattctcttgggatccatcgtttgtctcgttccgttcaatctgtctcttctcatttgtcagaattgtctattgatcactctcataattctcgtgaacgccgggctcaccatccttatgctgttcgccaatccttttaccgaggccgaggccgtagggatggaaatgcgctggagactcgccgccgtcattgagcctttaaaccttggaaccccaccgatcggagccgaatttgccaattcttttttatttgtctttcacatctcttttgacgagggaccgtcttttcataaagggtcggggtgtgatatcatttggacttcattaattatttaatttattatgtttgttttggcgttccgtttattcaaattgaccttaaataatttgttttggttttaattagttcttatgattgtgaagtaaaaagttaattgtgtgattgatttattttcttctgtgcctaattctcgccggttttcaagtttgtttgaaattgtgtttgttttggttatttcgttgtctttaatttcgttttgcataaagcataattttattgttttcgatttattttgagacagggcaagtacctttgactgatcaacaaatttaaattgttcgaattgcttcctttgccttcgcttgccaatttggaaaataaagtagaagccaaattggccaatttgttttaactaaatttcccgtactcaaatgatccgattcatattcccaaatgtccaaacttgacaaattgctcaattatctttttttaattgcgataaatttcgaagatttttaatagaataataaaaaatcgaaaagggttgaaaaagcgatgattataatgatgaaaaaaacagttaatcgataaaactgacaatttttagcattcacattatctttgtcgattataaaatgaatagaataatagaaaaagcttaattaaaataccaagtttgaattaagaaatcctatataaaagaaaaaacaatgtattattaatgtttctcgtttttctcgtatctcgtgcctcgtattttattttcccttttgcaatatccctggtgtgtggataagtagtttagtttagaaaaaatcgtcaaataaaaatgcaaccatccttttcgcaatggtcctgcaagtttttatgttttttatttaccttacaatttttaaaattgagaaaagccttaaatttaaagtgtttacttaatttatcaagtttccctatttttttcttccttcaatttttttgtctctcattgttcgattttgtgcatctttttcatcagtttttctctgctgcatttctacaatccgcgactgcggcaaataaacattttaatcagcat

SEQ ID NO: 20966 - DNA, 1368 bp, Heterodera glycines
aaagtgattataagaggtacaacagtgattagaagaggtgcatcagcgattagaagaggtacaaacaatgattagaagaggtacaaacaatgattagaagaggtacaaaagtgatagaagaggtgtaacagtgattagaagaggtacaaatttgatgaagaggtacaaaagtgatagaagaggtgtaacagtgattagaagaggtacaaatttgatgaagaggtacaaatgtgatttaaagaggtacaacagtgataaaagaagtacaaaagtgattagaagaggtaaaaaagtgattagaagaggtacaatggtgattagaagaggtacaaaagtgattagaagaggtacacatttgatgaagaggtacaaatgtgatttaaagaggtacaaaagtgatttaaagaggtacaaaagtgataaaagaggtacaaaagtgattagaagaggtacaccagtgattagaagaggtacaactatgattagaagaggtacaacagtgattagaagaggtacaacataaattcaaattaaaaattgtatgaattataaatttattaaatttaaaaataaatcctccatttattaattgaaaataacgttgaaaattaacccaaaaaatacaaagaaaaataatgtacaccgcccggcttcgaacttcgccccccccccaaaaaatgatgcctcagaatccccaatcacacagggattctgaggtcttgacgatgtcaaaagtaaaatctgatcacgtattcgtgatcagcgtcccaaataacccctaaagacatgtttttggaagatttttggtgaaaaatttttttcacttaaaaaccatatgctcccccctttggtcccgaatcccaaaatcacttttatttttgtatctttttttaaaaatgtgatagaaatgccaaataaaatttatataatagagcaaaaaattgcggattttttcagtatttaaaatttcaaaaacacctttacagaaccgagttctgaatttttttctgaaaaatcgaaaatttccagaatttctggaataactttttttgtttttgtgatataaatttcaaataaatctcataaaattctcccgattttttgctatttttaaagctttaattcacttaaattgaccagtcctccattgagttatgaattttcaaattttaacccaaatttccaaggaccaaaaaaattaaaaatattttcgaatttttaaaaaattccaaaaaatctgaaacttaaaataaacatcatatttgtgctcaggaccctaatttaccccagaaaaaatttttttcaccctctttttcaacccaaaaaaaattttgaaaatttctagggggcctagctcgaaaatttttg

SEQ ID NO: 20967 - DNA, 3510 bp, Heterodera glycines
  unsure (1)..(3510): unsure at all n locations
tcaattaaaatcacagcttcaacgaatgaagtgaaaatgtgcaagaaaagggaaaaagtgaaaataaataaataaaaaagaataattgttaataaaaagggaagaaagaaaagattagcaaaaaaaagtaaagcaatgaaaggaattggcacaatttccgttgcaaatcgcacaaaaggcgaaaatgccaaacgaaaagaggataaatttgcaaaaatgaattaattacacgtaatgccaccacaaacaaccacagcgctaatcagaaaattaaaaaaatgccaaattcaaattttgcaggcgccgcttttcctcatcaaaaatcggtgaatttttcggcgtgtgcgtccggcgcgtcgccctgcgagtcgccgtgcgactgcaaaagttcgtccgcttcgtcgatttgctccacaaaatggcgcgtgtcgtcgggcccactaactttggggtaaagcgcctcgaaaacgcgcggcatttccgccgggtatttggcgctgaaggacgcgttgaaattgggcggagtgatctgtaagagagagacagcacgggaaaagtggagaaaggaaaaaaggcagagaaaaaggggcgaaaaaaaagtcagcaaatggccaaaagaacggccaaaagtgaaaaacagataaacatcagcagcggagtgcagacaataaggccaccacatcaaacaaaacgcaaattcaaaaatccgccaaacgtccgactgacctttcgctgatagacggaaatccaatcgaccgacgcgaaccatttgtggtttttgatgtcggcgacgccgttcttcaaattgccgtaccttttggtcaggtcgacctgcagcaggttcttcagcaggtccttcagctcgttggagaaatgtgacgggaatttgacctggaaatgatggcacaatgccaaaatctgaaaaagcaatggtccgacctttccagacacaattttctcgtaaatttggatgggctgatccgcaaagaatggcgggtagccggcggccatttcgtaaatgagcactcccaacgcccaccagtccaccgctttgttgtacccctgcaaaaagttgccgacaaattcagtaaatttgctcatccaaaaaacacgccttgctaagaatgatttcgggcgccaaatattctggcgtaccgcaaagtgtccatgtccgacctttgacccgttttgcgaatccgaagtcggtaatctgcggaaaaagtgatgccaatttcggaatgtcatatgcaaattgagagtccaattttaatggcatggcattcttgcaaaaagagtgccaaactccatcttcccccctcgggcttttgcatgccttcaaatatccgttgctatcgatcagcaaattctccggcttcaagtcccggtagatgaggtccaatgagtgcaaatactcaaacgccagcacaatttgtgccgcataaaagcgcgagtgtggctcagagaaacgaccaatgcgtcgcaaatgggagaacatttcgccaccgctgatgaactccaaaaccatgtacaaattgctgttgtcctaaagagaaggggagaaatagaaatttgaaattaaaattaaatttaaaacgaaaaacaccgaaaaagacacactttaaaggaatattgcatattgacgaggaagggaaagtcgatggcctgcaaaatccgcttttcgttcagtgtgtgttcgacctaaaggcaattgaaacgaaacaatcggtcatttgctggtcataataaaccgacctgcttcagtttgaccacttnttgtttgtccaaaattttcatggcaaagtaaatgccggattgtttgtgcttgaccagcatcactcggccaaatgagcccgtcccgagcgtttttatgcggtcgaagtcgtccaaacatgaggtattctaatgaaacatttatttttaaaatgcacaatgttagaacaaaaaccaaaaagtcattttgcttaaaattatttaacaaattttgcgctgtctgtccttttgctacagtatgctgtgccgtctaactgtctctgctgcacttcgaattgttgccttttctcatttaaatccaattgctacagtaatccccgtctctctctctctctctctctttctgtttcttccttttctattttatgcccttttatgcacctaaaccacaatatccttttttacgctaattctaattctaaatccgtccatgtaacaagtgcatacaaaattttcaccatttgtctggccgagcctttttaaggaaattgaatcttagaccttgggaaagtaaaggggaaggagagaggagaggaggggagacggatagagcggacataccgtccgttagtccaaaaatagcattgcgaatgaatccctttttaaattatgtgagcaaaaataaaaaacaaacaaaaataatctcccccctttttttcactatgtgaccaacaacacaaacatttgttacttaatgtgttcctatttttggctgtctttttgttatttggaagaaaatatccgcacggaaattaatgagaaggataaaaagtaagggagaattgtcacgaataaatgaagtttggaatggcatttctccgagaaaggcatgccgtgctctttgtgcgtcacctcacctgccaattcaaaaggcgacacacggagtgcctaatggccgacttcagccaaaacaattcggcacggagattgaactcgcgtgcgcctccgggcaatgcgacggctgtcgcctgcttgaacaggtcgcatactttctgcacaaagctcttgcgctcaattgccaaaatgacagtgcccttcagaggtggccaagaataggcgtgacgaagttcgggccggaacaatggaccgtcgtcatggtcggcattggttgagaaagacgagtgttgtggaatagcatttgccgaaggggccgcccaaacggtgccgccgttgggaggcagtgacgaggactttctctgctgctgttgatcaaccctcgtggcttttagcaggggctgttgctctcccaccgattgatcaatttcagctgagaggggcggtgtttttccgtcacggtaaccactcgccatagcattctccgaaagcagtttttccgtcgcgttgtgctgaaactccgcttctgcctgtgcgggggcatgtcgtcgcacgggtgtgccggcggtaaggccgccaaattttgtttctgaaccgcacggaaggacgggcaaaccgccgaaatgcagcggcggtggctttatgttcggttgctgctccgacggtgcgttgtttttctgatggtctgacggagacaaatccgacgctgcagcaagagtttcgcattgtgaagacggcgatgtgccgccccaaccgccgtcctcatttggccgcacttcgtcaccacaattcggtgctatttctgatggtgttgttgttgttgttgttggcattgatgaagcggttgagttggcagagaaaaccaaagggaaaggaaagggtccgtcggcagagcccaaaaaagaa

SEQ ID NO: 20968 - DNA, 1226 bp, Heterodera glycines
aatgccgtaaattctcttagagctctaatcgatagatatatgaaaacaattttggtatgagtccgattttttgaactacctatatcattttgcttggccaatttttacggtaaaaaccaactcgttttttgccaaattttaccgggcccgtctatttatggagaatctagtttcgaaatccaaactttacgacttttattttcgaccaaattcagaccttacctgagttcttgcgaaaaaaacggaaattttatttccttctttacccatccatcagtgacccgacaaccactcatttattggtttcccattttttaataaaattgaattgtttaggcgcaattggtcacattcggccgttgaatttatgaagtatcgacgtctttttcccatgcttgttggagatgaacatgatccgggcagtgtgtttgatggtttgtgaattttgggtttctttttgaaaataaattttcccaaatcgctaaaaatcccattaatgaaccgtcggcggacttctgactcaactctcaaaaaagcatttatataggaaaccggtacttgtgcagtttacatgatacttttaacatacattttcaaatgcctataaatgttgttttagaaattaatgaaaataagttttagggggtttttagggtcgctgatcacgaatacagcaagggctctgtcctgggccctttattatttttgatctatattaacgatcttcctgatgctttgccatcatgagtaagaattaaattatatgctgatgatgttaaattgtatatttgttataaagcgagagctgacacagaaattatgcataaagcattgcataatttatccgaatgggcaaataaatggcagatcagaatctcaattaaaaaaacttttgtacttcatttggggaataaaaaccccaaagaaatatataaaattgatggaaatataataaatgttgtggatacaattagggatttaggcataaatattgataataaattgcaattttccaatcatgtcgcacaaataataaagaatgcatatttacgtatgcgttctttatttcgggttattaaatcaaaatcttctaggatttggattattttgtaaaaacttatgtagaccgttattggaatatgctcaggaggtttggaatccatctcttctaaaaaatattaaaggagaaggaaaaatgtcaaaaatatttcaccaaaagagttctt

SEQ ID NO: 20969 - DNA, 1336 bp, Heterodera glycines
gctaagacaacggatccacgtaaggggcaccgagcggcggttcaaatccggtctccaccccaatttttcgcctaaataatatatggattaaaaatgaattcagtaagtcgttagaatgatcagtgcttgatcatcccttaatcatcatgatctgatctttcttccctccccatttcatctcttccaaattctgcaaaacaccaacaacctttatcgtctaacgctccatttcgtgcaccccctcgttttccctccctctctctctctttctctctttccctcgctccctctcacttcctcccactttcttctcagcttttcctaccattttgcggattattaatgccgcctccgcttcatcccctcccctccccccctctccgaaaacccattcaaatgccacgccttggcattcattccttcttcttcttgtcctcacattcctttgctctttttgctgttttattttcttggcgagggtgtaaaatgaatggtgaggccggggagggggagagacaagcccaaagggaatcttttttaaagaaacggaaaagtgacggaagcaccgcgggggggggagggggcgaagaaaggtcgatggaaattatctgaaaaggccatgccattttgaatggaaatttttgggggggggggaggcgcaaaaaacgcctggggtaagagagaaaagattgccaagaagcaaacagcctatttgtgaattcaatgccaagcacagcccacctcgtggtaggccctggggcctcatttcttgaacagagacccgcgaaatgtccaccggtgggtagggacacacggagtcgggcaagttcggtggttgctgctgatggtcgggcagaacagtgaagtcgtggcttatctgagcaagatgattaggcacttggagcgtgaaggacggggaggaggggcgacgccgcagggaatggcagcgatcgaacgaagcgaaagggccggcggaagtggaagggaaggccgaacagccgtcattgttggcacagtgcacctttggcgtgtcattggcactttgccccgacgccttcccaaattggcactttcactcacttgcccacttcggcctcttctcccttcgccgccaatttgtgatgttggccacgttccctcattgttctgcaacatttccatgctattcccgccgtcgttgtcctccagcctgagcattgccctcagctgatcgtctggcaccacaaaattggaaggcacaagccccgaacgaccgtccaacgtctcaccccagtaaaatctaaaaaaacagagacgagactatgcttaaacattcgctttaccctgtcctcatcca

SEQ ID NO: 20970 - DNA, 806 bp, Heterodera glycines
ccccctctctgccccccccatttttctcccgctttttctccctttcccccatttttctcccgcttcctcttttcccgctctccgtcccgcacattctcccattcccccaccttgtgttgggtttgccccgaagcaatttcctaagcattgctgcgtctgatcccatgggcaactgctgcgattggcttctcgtcccatccttctgctgctcttcttcctcctccgtcttcccatcttttcttcctccaatgcgcatttgccctcaagggcaaatggtttggtgaccaatatggcacttcggtgtttttggcgttgggggcgatgattaataagcctatccgttggtgccagtgccactgctttgccccctcaattaatcctgcttaagaatgatcgcttaagttatttggcactgtcacaaagagggggagggggagcaaaggggatcgatttggcaaagcggcgatgttgggaagtggcaaaacaacgcgtcgtttctcggcaaaaactctcgtcttcagcgacgaagtgcccatcgccacgccaccctccgccggagggggcagcaaagggattgaaacggacgacggaggaggaaatataaaacagtaaaaatagagcgcgcaagggagagaaaaggaggggggcgggggcccctcccgcggaggcggcggaaaatggcggcgcccgagggcaatgatgaggagggactgttagccggctgtcgaaggcacaacggccacggaggcacggagacgccggcggcggggaaacgacagagggaacggcaaaagccttcgctcact

SEQ ID NO: 20971 - DNA, 2374 bp, Heterodera glycines
gtctctcaaactcaggctaagcaaggatttgagaatctggccgaaaagctcaaccagtgcggaaagggtgggcggcaacggcacaaggcaatcactctgaacaatcgaaaaaataaaaaaaatggtacattgagaggtaaacgacagatcattgatcagctaacacttgcacattaacatttgacaccatacgaagcctataaataggtgagataattttagttttttcacaatcgactacactctcagcaacatacattaaatattttgagagaaacatactaacaaaaaaaaactcagtggaaaatgagcgtaattaaaaagattgacaaagacagtgttgagggtctggaaggaagtctttcattattctctttgccgccaacaaatgtggccataaataagacaaacgtccgtgaattgttgcctctgtctgcacttaatcagacaggtccttatttgtttcgcctattctcggacagccaattttgtgacttgagcaaaacctatatgtacctgctcagctcaattgaacggaagaatgacgcgggagaatgggtagcactcagtgacacggacccaaacgataaacatgttggcgtcattcaaaactttgctagcagctttgttcgctcgctgaaggtcaatatttcaggcattgaggtgtttgacagttcaatttattatcactaccgcgactacataatgaaggagttgggctattcacaggaaattcgcaaggctttccatgaggcatcgtgctactatgccgacgatgatgaccagaacagcgcaacaaacccaggttttaccgcacgtgcggcacggttttcaggcggcagacaatgtgagacaatggtaaaactgaattttgatttggcacgtcaaagtgcattgatgttgaacaatcaggatgtaatattcactattcaccgcaacaatgattcattcctcctgcttacgcccccatacaaaaaaccagatggtacacagcaggaaaataagaaagagtaccgcatccgtgtgcatgacatgcgtctctatgtgcgcactgtggacgtaacgccaagccttaaccttgccattagccggcaattagagtccacttcagcaaaatatccgctgcgtaaaattgagatgaggtctattttccttggcacaggtcggaccgagctggcacacaatgtgttcacttctacgttacctcgtcgtttaatttgcactttcgtttcaaccgatgcatattccggtaaccgaaaaatgtcaccctacaagtttgagcacgccaatgtacgttcgattagtgtcgaggcgaacggacagacttttcccagcacaccgtatttgctgtccttcgatggtgtacagccccgctttgtccgtgcttttgtcgacatgtacgcaggcctgggtttggatgactccgacaccaaaacggtctcgattgggatgcagcgttttcttaacggttgggcctttttcgtcattccgctgacttccactctggaggacacacctggttttgagctgatcaggcaaggcacatgcacgataaaggtgcaatttgagcagcctataaaagcggatggatatgagatgcttgtccttggtgaattcgattctgtgttgtccattaacgcagaccgggttctgagtacagacggaagtgtgtaactgactgaaactgattgacactgaaaagcaacaatgaattcagctcaattggaaataattctgaaaaggttgcaccctaccaagaacaaattcattggtgttttcccatctgatcgaattccgaagcgggtttccaaattccctcattgtatggtcgtgaatacggacaaagaagggacacgaggtgaacattgggtggcttgctatgctttaagccatagaagggttgaatattttgacagtcttggtgagtccccaaacccatatttagcggtctacctcaacacatttaaagaggtactggtcactagggagcaaattcaatttcccacatccgatacatgtggacatttttgtgtatattttttggcaagccgatgttctggcgttcctttctgccgtgtgattgagactttgcgtaagactcgaggcatggcagattacctcgtgaaatggtttgtcagaaacttgatcaacggtctataaaagctcacgtttcctgaacagtgagaaaaatgatggttcattttatgaatgtttttaacgcaggtctagtcctcagctgtgtaccgtcactattgcaatcggagctgataaatgtggatttgacggttgacaatcaaaactatttcgatagcggcaaatatcgtaccttttcaaaagatgctacagcagcacaacattttggttatagttggaa

SEQ ID NO: 20972 - DNA, 2748 bp, Heterodera glycines
  unsure (1)..(2748): unsure at all n locations
ctaaaataantcttttctcgaaaaaaaaattcaaaaaatcttgtattttttgaaaaaaagggtgggtgctaccantcgggtccactcgcgtttcggcgccggcagtttcggctgccagcatagttatttgtgtctataactttttttctatagtaattcaatatccacacattgtctgatatacattcgaaagcttaacatgtttagaaactttttctaagcgattgcttcgcgattagacaattaccaaaaagttatacatgaaaattgcgaaaaagtcaaaatttacaagttttttcttaataaattttttacaggcttgaaaatctatccgctttttgtaaggctaataaagcatgataagagctttcgaatgataccaagattgttggacttggatgccaaagaaaaaagcttaagtggaaaaacgagctggcgccgaaacgccagcgccgaaacgcgtgggtcccctaccacctaaactattacccaaattttggacaaaacgccaaaataggcaaaaaaagaacctctttcaaatttttttaggctaaataaaagctaaaagcctagaaaaaaagtattaataattcgaaaagtagcttaacagcccaaaaaaacaacatgtttttcgtgtgtttcaggccacggggctcaggaaaaaaataaaaatgttagccctattcatagcattgtaacacatcggcacgtcgttctgatgaggcatgaacagccaattgctcttggccatccgacggattggcactgtcaccaggaggaaattcgaggaaaatgtcgtcatcgaacgtgacgaagctaaggatggacaccgttacgggcactgtttgttgctccaatttacaattttatgccgcaagagacgaaaagggacgaaaaacggtggagaaagtgaaaacattgtggtcgattatggaaaatagaaaatatgatgatttaaaagcaactcaaatttagttgcttttatatgatagtaaagactcgtaatccgccgaatgactttgttcggcaacggattttgtgggattgcaaagcttatcctccgtttcacctaaaatttgcatttctttgctgttaaaccatcgctttttcattcgaattagaattggtgtccaacgtctgtttacgcattttgaactattcgtacacccaactattaaagcggcgactgatcagtgcaattccgatgccaagctgaaaaggcggaagagaagaaaatcgaacattttgagtcaaaaatcggcagagattaagctgaaaaaaacaatgattaaccattgtgatgtttttccctcttagtataaaaatgctttttccgctgccatttttcattcacgttgcagttttgttttttttttggattcagtgtcggcacatttcaagacccttccattgtttcatttatatgtgcttaaattcgacttttgtttttaaattagtcaaaaaacctttcaattttttgtttcagaaaagcttttgctaaccctgctttttacacctctgaattccaaaaaaaaaaaaaaagtttttcattatgcatttttgcttctgtacatatttcgttttcttaaattgtttcaactgctttccctttcccgttttctctctcgcaataatctctttaacgaattgcccttttcttattgtatttttttgtaatatttaataaatttttgactttcttcagcaagcactctgtcggttttacgaattgttttttgatttttttcttttctaagtttttttattttaggccagtttgccatgccgttggttgtgtttggtggcactcaaaaatgggttgctggtagcgcagggacgtcttcatttttggaaaacggtggataatttttaaagcacattaaaattttgcaaaataacggcatttttttctaaaaatggcatttttatcagaaaaccatgacagaaataccttgaattaaaagtcgaaaaattgacctgaaagttcattaaataactgaaaataacaatgtgttactcaaagaatccaaattgtcgaataaaacatcccatacaaagcaaaacccggtttaaaaaaaaacattttgccaaaataaaaatcaattttcctactaattgtgcacatttttggtgattaagtcagtttcatgcaattttgattagagtatcacgtgaatattttgagagaaatgtgaaagctgcatattattttgtattctgtatgcgaaacatagggttttgcttttaatgtgagttgttgtgtaggtgaaaaattattcaaaagtcattttcgtatgggtttctgtgaaaattagagcattttatgaatgaatggttcccctgttgttgacattttcggtcatggtaaaaaacaatcatttacgtccccttgtccgttttttggtatgatattgagcatttcttgtgaaccgattgcgaagccgccaaaaataatgtaccactgttagaaactcaggaaattgaccttaccggtagactaaaatttatattttctcattgcgcatgccgtccaatttgctcgcacgcggctacctgacatttaaggacagaaaatgagtaattgatatctgaggatatggaattggtgacggactatgtatgagtaaaaacaattcaataaatcacccacttttatcggtaatgctggagaattggtgtcccggtggaaaataaatttaaaatttcatgtcaattttaaaaaaaatgtgctggttacctacgaatttt

SEQ ID NO: 20973 - DNA, 895 bp, Heterodera glycines
aaaatgaaataaaaataaattttctttccaaatcaaaaataaatcaaatattcgcttcaataaaaactataagtcaaaacagtcaatcaaattttgcatttttttatttccaacccaaaaataagcacaaaataagcacgtaatgctgaaataagcacaatcttagaaataagcacacttgggaactctgaataagaggcttctttgtcttaaattaaattccatttagcctccaagcaaggcatttcgtgttgctgtcccgtcgtatgccgctgctttcatccgtaataattaacgacagattttttttttttgagtcacgttggtctaaaacgtgtggaaaaattttttagtttcttttatttagctaattgctgttttttattttaaagctccaactaaaagcctacattttgcatattttggcgttttttcacaaaactccttaaaataaaataaatcgaaaaattcacccactaagattgacatttcaagttttcaaatgttcaccggtcggaaaaattaatttttttttttttattaactcaatttctcagccaaaaaaaattgttacacataaaacctaaatttgaaaataataaaattttcggtgaatttaatgcaaaagatgacaaatattaatactggtccaattttttcagacctgttaaatttgaattttttcctttttggaggttttggtgcttaaaaaaatcgccgcatccattagtattttccaattttttaacacttaaacaataattttcagtgatggtgagcgtgcttctgcacttcttgctcagtcacttctttggcgacgaatgataatttcttagatcctggtcggcgcggcgccatcacccatttgaccccaatccgatcatttattaaaaaa

SEQ ID NO: 20974 - DNA, 1067 bp, Heterodera glycines
  unsure (1)..(1067): unsure at all n locations
ttgataaaaacgcaaaaaaagtctcattgtcccccatcaataattattgtattaattcagtntaataaaaattattgcatatgagtttattaatattatgtcacacaatctgatatgactttacctgctttaccacacaaggtctaagaataccacctgttaagtttgtttttcagggttatgtcgtaagtaaggaacggaatggatttggatttatatggatttccgttttttttgcaatttttgatccaagtagtattttaaggttggtttgagacttctaggatgccttccagattttccatgtttcagatttttgtccatatttggctgttcataaaatttctcgaaaaaaatacattggaaagaccaaaatttatttttaaaaatacacaacctaaagatcgtaaattttgaaaaataaaaaaaatatttttcataaagaaagcaaatactttcttagaaaattaacaattgaaacatcaaattgaaaaattaaatgatcattgatcgactacgaaaccaggacagaaattaaatgattttttgtagtaatagtaccaaaaaaaaagatagccaaatgccaaaattttgaatttaacgcttacatgaaatatttgaggataaattgtaaaagtaaattaatttaatttctactgaaaaaaagtttataaagtacagaatatgctattttttttgccatggtcatctaacgtccttaaaatgcaattgagccaaaattaatttgtgtatattcgatcgctctaagaattctcgattttatctttaaaatttcaaaaaatttcattgagtttaaaaaaactatgactaaaaaaaattctgactcaatttgaaattttgggaccattactttttatgattttataaaaaatttataatgaatattatgattgacaacacttaatgctattgaatgtgatttaattagagaccggatttttagtttttaaactaatttttgcggcttagttatggagagaaaagcccaaaaatagcattttcttcgaatagttttcgatttagagcgactttttagcaactatttt

SEQ ID NO: 20975 - DNA, 985 bp, Heterodera glycines
tcctctctcaaaaaatttttttttttaaattttttgcgtttttttatgaaaaaaattggagcattccaatggaatgattccattagcagttgggaacaacttttctctcttgtctctctataattgtctgttctcttatttctttgcactctctcgcctactctctttttctctctttaactcatcactcaaagtaaaggacggcaagaaaaaaaaattttcaaaatttattttaaaaatcttaataactcatgtcccaacacagatggatggaggagtaccgggagatgcgagaccgtgaccagctccaacaacaacaccaaagtgtgtcggccggcacttcggtggtcgactcggctgccgttgccgccggcatcgccgccgcttttggcggcaatgccaatgccctccacaacaacaatgacacggcatccagcacatcgaccaacagccactccacaataccatcatacaaggttctttcaaacaaaaaacgatgattttattgccttgtcgggggattgtatgagatttagggctttaaaacttgttgcaaataagaaaattatttttctatcatactttaaatagtaggggggtcgacccgacttcatacgaacgcaatccaggggggtcgaggggttttttgctcttgggccaaaaaatttttggtttttcaaatccgctttttttgcggcgcgctttttccaaaaaacgtttggagaaccgggggtgggtccggcggtgccgataggcgccgccagaaaaattttcgaaaattggggtacaatttgttaaaaaacgaagccctatttgataaaaataaccaaataatactcaatttcgtaaacttttttttttttgcattttttgtacaaaattggctaaatttaaaaggattttgttaaattatttaaatttttttgcctttacgaagtcgcctttttcttttcccttcgtctccgaccttccccagattttttca

SEQ ID NO: 20976 - DNA, 1742 bp, Heterodera glycines
cccccccccctttatttaggtatgttttctatggtttgtattccggagatttttgagcctccagaaatttttttgtgtgactgattctcctggaaaaagctcgccccgtccgcagattttatttatttgattacaatttttttatcagaaagttttaagaaagagtttttaacgagtttttaaaattttatcaaaataattaagttcttccaataattttttcgaaaaatcgctgtttgtaaaaaaaaaattcgggcacgggggggaggtgatgaactgatacgggaggggggaaacgaagtgccgccgaatctcatatcatcgcgcccctcaaaattgtttaaaaaataaaaatagacgacccgacaactccaaaaaaaaacaattttaaatgctgttcattctacagaactgcatccatctcggcgcctgctcgtccagtgaacagttgccttttcacaacgccgatttgccggccgatctgttcacgtgttgcctaacgtcgcctattcaggcaccaattttcatattttttccctttttaaataatttcaaatttactctaaaaatgtgtagacatcgttgctgtgccacatgctcaaaacgggcaccaagaatcgtttcccgccatcaatcattgacgaaatccctggcgttctgtccgaccggcgcacactgttgggcgagttgaattggattttcaccgccatcaccgacgcaattgcgtggtgccgtctgccgcgcagcaccttccaaaagctgttcagacaggtgaaaaggaccaattttttgtcaattttttaatttattcgtctgtccttatccataaaaaacaattttgttataaacttttgtggaacggtcccctaattttgggaggtgcattctgacaaggcacagtttttctacaaggttgactaatttttgaaaaaagccaaaacatttttgagtgcgggatgatcagcaaaaaaaaattttttttttcatttaaataacaatttttaatgctccaatcgtgtcccgacgcggtccagacatttgcggcccgacttttacggccagacattttgcgcttactatgtcaaaaatcgtgctcaaaattaagtttttcaaaccctgaaagcctaaacagcattaaataagtgatagaaagtgattgtgtctgatagtttgatagccaataaatttttttaaaagatcattaattattcaaacaacataattaatgcttctaataaactagaaaactaagatttcttcatttcatgccgtttaggctattatggatggaaaaaattcaatttagaatccgatttttgacatagccgcaaatgtaggggcttcgatgcaataggaaatttaaaaaatgtgaaaatcaacggacttttctaaaaccatttttttaaatgtttcaatattattttggataatttattgagatttaaaaacattcgcgacggaaaagtggccggcttgaagtggaggggtaaagaaaatgaactgcttccgggcaacgttgcttatgacaatcagcagatcatcatcccgcttttgtgcccttccaggacctgttgatcgcctccctgttccgtgcctttttgctgtcggaacgtatcatgcgcgagaacgggtgccatgtggtgtccacgccgcagttgcccagagtgcatgaccatccattgtgggagtactgggacctggtgggggacatgtgcctgaccaacctgtacaacctgtgcagc

SEQ ID NO: 20977 - DNA, 1773 bp, Heterodera glycines
  unsure (1)..(1773): unsure at all n locations
agagaatgtggaatgtgaaatgaataattatggtgattgcctnttctgtgtcccagtgtcagcagaagaagcagataaaatcattttattaagccaaatatagcagaaaataaaaataggaataaaataaataaataaattgttattattatgccatttttgtagccaattttttaaaatctgatttctagttttttccacattaaagtctaactttacctttttttaagcatttgtaaattttagcattgtgctaaaaatgccgagtttgtccatggtttttgtgagttttttttaacatttcaaataaaaaaataaaataaaacttttaaggaaattatcattctggggctgcatttggccatcattttttgtgccattcttggcatttacttggacatgggcattgaggacaatgtgttcatcatcagtagtgccgttttgtgtgttgtgatctgtcagctgaaagcatatttttacaagaaaaagggcgttaaatcatcgtgcgcagtaaaaaaaactaaacaaattaatgtttaattaattatttttaatttaaggacatgctcgtgttgctgttgcatttggtcgtcttttttgtcgcaattcttggcatttatattgacatgcaaactgaggacaatgccatcatcatcggtggtgccgttttgtcgctggtcatctgtcagttgcaaaattattctgccgccaagaaaaaggagaacccgaatgccggaaaagtaaaattatattaaaaaattttaaataaatataatgattttttttattttagatttcgatctttgttcttttcggacgttgatcgatgcgggcattatcattgataaacaaaacatacatttcattataattcaacttgctattattaacaaataaaatttaaaaaaatctatttaaaatttaaaataaaaacaaatttttagtagaataaaaaaaagcattaaagagctaagagagaaactttttttcggtctctattcaactgagtttcgaaccaataattttttttttaatctttggtcttagaatcgcgaaataggaattaaattggcacaaaaacaggaaataaaaattgctattagcatttttggtaccaaaaacacataaaaaacttattcaataaacttaattttggttatattgcatttgtaaatgaaattataaaattttaaacttttttaatatagggaaatttttaaaccaaaaatttttattaagaaaaaacattacattttagaggatcaattttggaaatttttttaattcttaagagggtgtgtttttctttttaatgcatttttgttaaacatttttcagaaaaccctgaaaataggcgcaatgtactgatttttttttgttctgtcctgaattggatttgttaattgaaaatgtactgatttttcagatctctcctgaattggagcgcataaacacccagtagaatcctcaaaaagtattattcaatttttattttataaaatgtttcgaattcttttgatccaaatgtccattcttctggtcactatgatcggaatgtcaatgttgcgaatggaatggacaaggaggaacatgaaaaattgcttgaactgttacttctaaaaaagaaaaacaaaactctgatcagccgcgatttgaattgatcgaatttgacacagcggaggaggagaaagacatggaaaaagcaattcaaattggcaaaatattcttttggcgtaatatgatagctttatggaaatgtgaaaatgacgattt

SEQ ID NO: 20978 - DNA, 1396 bp, Heterodera glycines
  unsure (1)..(1396): unsure at all n locations
gagctgttttttgttaaatttttgctttaattattatctacgtatattcttcattcccatttattaaaataaatatnttcttccatttgttttgtgtccatctttaatgaatccaaaatttcttttctttctttagtcagtgaatatttattttccacggcacaaatattccaaaaaaaaaaaatccatacaaaaaacaacaatttcgtcgccgccgcctaaaaaattcatgacgctgtcgggcggcgtccatttgcgacaaaattcggcaaatgccgtcgccggcgccgccgccgccgtgcggcatgagcagcagcagcagcactgcgcggctgcgcgtcaacaaagtgtggacgcggcgggggacaacggctgctgtctggtgaaggcattgatctccaatctgatgctggcatttaccacgtaaattttggactgatcaaaaaaatcgtcgtcatcttttgttttggcgttaggcataaaaaaattttaaattaaaagaattgttttgagcctatgaaaagttgggcatttccgggttcttattgtttactaaatctttttttaaattcttttgtaaggttttgtcaacaaagaaaaagcttgtagcttcttaaactttactgagatggaaagggtcccctaccgtaggggaaatacagtatgcattttcaaaatcgtctgctcattataatataactttttctttgacatttatttattttgataattaattttttaattatcgtcttgagttctaaattcgaaacatatgaaaaatttcctaaatttttgcattaatattttatttattaaatttaattcattctctcggctgtccttttcaaaaattaatctttgttctttttttttctctatgtatccgatggaaacaaaaatgtaaaagaagtgaaaagaaaaggtcttctcttactctacatactcaaatttccttctcccacaaattcctgcaaaaatttttgcattttcctcacaaaaaaatttttcgattcattttttactttatttttttcattttttgatttaatttaatttaattttttaatcattttaaatcagagttcaattttttaacaaaattcgtattataacaaatttttgattcttggaaaaaacgcatatatttttaagccgggaagtgattggggatcttgtccagagtttcctgcgggatcttannatcccgaccccatatgtttttgacagggatntcgggatttgaaccacggtgtgtccaatcctggncctgtttccatcccgaatgtctgtcctggtccgactttttcaaanttacgcgctttatagtacattttttgattacatataaagctttatcctatccaaataaaaaaaaaaaaatctttttttcaatcaa

SEQ ID NO: 20979 - DNA, 1388 bp, Heterodera glycines
agcctcctcctcctcctcctcctcctcctcctattcatattcctctgagtacggtttttttttttttgttctgagctttggtccccttaaatgagaacagacttcgagaaatattgaaagtgattagaaatagaaatttggtaaatcttttgggttgttcttcttagctattcgtcggttgtttaaaattggcatttccttggcgacaaagccgttgattaaaacattttgaaacacaattgtagaggagaaccgatgtaagaataaatttttcttcgcctaatcttatttgaatttatgcaatccaataatgacaataattatagtacatatattttattaatatattaaaaaaaaaaaattaaaaacagatgcactttttctgatgatttatttttccattcaaaaaaaaattgtttacaaaaagaaattatgccgagcttccggaaaggcaccatcacattttctgatctattttgcataacaaaattttaagggataaaatttaaataaatattaaatttcttcttcacttgtctggaatagttttttttaattcaatctcggtggaaagcattaatttgaaaacatttcttgtcatatgtaagagatagagagagagagcctcaaaatttcatcaaaattttccaaaacaaaaacgagggatgaagcaaggctccactggcactgttttaagcggggaggggtcagtcagagtacttcttcaacacaccgcacattgaccaccaccaccggcccattgtttgtgtttgtggtggccaatggccatacatatttatacttttgagagggtggcgccggcggcgacggcggcgcccctccaacggtggaaaacaatcgctttgaaactcgcatttgcttaaaattctaccgaaaacatccacttggggcgggtcacactttgaatttgaggagttgtcatcagaatgaagggctggggaaagaagcttttcgtccccggcagaagaattaaagctgtttggggggcccttattccattcgcgaaaatttgacacaaaatcgcattttacatttagtgcacagctctagcacccacctgctggatggccaaaaggcatcaaatttccgagccaatgagtgccattttggcatatggcgccctcctttgattgggttaaggctaatcccgaggtttaaaatccaaatttttaaggcttaacccactaatagctccaaggggcgagagaccaatttgaaaaattcaaaatttggttatgacattttggtttaatattaaatttttgaaattcaatttcatttttctccatttcgtcactcttttttgccaagaaagtgttctttagtcccggcaaaatgttctcccccccccctccccattctaagca

SEQ ID NO: 20980 - DNA, 2272 bp, Heterodera glycines
ttttgtccttacttttgtttagcggaaatgtcccctccgtacatttttgaaatgttttttggcggaggttttccgtccgggtctttgcaccgacggcgcggacagttccattttcgtcatacggaaccgcaacacagggaagagccggtgaggaaggggccgaggaacattgggatttatttgcaataaattagcccttcctggccctgggttttcgtttttggtgtcccaatattatctaatgcctttttcacactcgaaagaacctcttctaccaactgttgcaaattttgcccgtaattattatcatcgtcggtggccttctcgtccaattgttctccagcgacccgatttactcactgaacagagacaggtcgaacagaagacaattactttaattgatatttatttgctctgtgcccttttgagcttttccctgtctttttcagcacttaccatgtccttcgatacatcaaggatttgcgggttccttactacacaaagccggacttcgaggctaattacggaaagcgtctctatcaggtggaacaggtaaagtgatgttgattcggaaaagttgtcttacaatttaatgcgttttagcacgtcgaaaatgactatgtgagccatctccgcaaccaatgctatcgagaaaaatcgcacagtaaaaacaaaaagtgcaataagccaaattgtttttttatttaggagaaggacttttatggaccgcaaaaatgcgaggagacgcggatttgtggagaagggcgcaagagatggaattgaccaattgcagaaagttggaggagctgtacaaatgatcaatttaagattcgactggaatcattcaaaggaaaaacaaattttaagtccttgcttttgtgtagtatctatattttctgaagtgataaaataataaataaaaaatgtgcaagacataaaaaatatcaactgctgatataacaaaacaatccaatttacactttttctccatttctgtttgtctcctcattcccatttgtcaattctgtatcgttcagctcaggcttaattaattcgctggaagtgggcaattctttaatctgaattttattttttgttgcatccccattaattgagtaatgagttaatttacctcattaatggtgtcttgcgtcgcttcgcccttttcttttgccttttcggctttcttttcttttctctgcttcattttctcccaccattttggtaattctccactctgccgttgtttttctgtcccaaattcgtgcattgttttctaaactgccaatttttatttgaataatggaaaattatattaaatgtgccttattctcttcgctgatttctttgctttcgttgaacagtttcataaacacgcccccgggcgttcttctccttaagcggttttgtgtcaacattccgccgttccgctcaacttcttggcattgcttgaacagttccacggcatgtgattttccagcaaaatgcaccactttttgcatcaattcctacaaaagtggcgatatgctccatttttaaataaaacaatattactaattttgtatttactaaatcttttgaatctccccccccccctctcaccgggactttctctccaagtgcttcggcaagttcgtttgcgagttgttcttcgctcatttcatccgcgttaatctccacatccaaaagttttgtctttgcatagtttggcgtcataagtttgcgtggcacaaacttttccggtggtatcattttccactgccgtttctgcgtttgttcgtttttcccgtccactgctttggcttcgtttttgaaaattttctgcccccttttaaagggctttttccatggatggctttgcttatgcttctgatgtcgacggctgtcccgtttgaacttcttccatttgcctgttcttctaccgtggttctgttgttcggtcggcagttcggcggcgcccgtgtcgacgccctcccaaagggaaatggacgtgtccacggcaacggaaagtgtctaaagaggaggggtcgtcaaaatgaattgttcctctccatcgcatttacggctctaatgcactttatgagtccaatcaattgacaatcctgggtttttatacaataactttgttcatgttcgaacaaaccctatctttttggtatcattcgaaagcacaaagtctgaataatgtaataatacgagaaaacaagagaattctaacattccaagaaagttacaagcgaaaataatcagcaattacttaattaatcaaatc

SEQ ID NO: 20981 - DNA, 1480 bp, Heterodera glycines
cgacgaattttatccattaaaaagagaaaataaaggcgcaattctaagccaaaaatgtcaggcgtggccgaggccgaggccgtggcattggaattggctttctgtcgcctgtgcgcggctccggcaacattttcagcgaggacggggaagaacggaaacgcaaaagccgccgtcgctcttcgcgctccgtttcttcggagacggccaaacggtcgcgcaagtcgatgtcagtgttgtcgcgttcgcgctcagcaagtttagaagaggaaaagaacaggcagcagcagaggggaagaaattcggacagttcagagtgagtgtttgtttcggctgaaaagtgccaatccatggcattggcatttccccctcacttttatggccaattctccccccaggcgttcttctcgctccttctcctccgcttcctctcgcttccgccgttcccattcgcgctccgtcgcagcggaaaaaagtcgcaaaggacaaaagagcagaaaagggacggacggcccccaatcgccagatgacagagagtccgttgagctcagaacgtttgccactgatatggaaatgagagaagccatggggaagagagagaacgagcgagaaggggaaaaggcaaacgaagcgaaggagcagcgggaacggcacgaacagacgaaaagctacgggcaccgtcgacgctattcccatcggcacgggtgccgctcgtgctgccaccgacagagtcggaaaagccggtgccatcgtcgccatcggcagaaacgggcaaagcaaagtttgcgagaggaagaagagagtgccagaaagggtgagaaaatgccaaaaaacaaaagatgaaacaatgtgtttgatcaatcatccgcaaatgttaagatcaaagttgcgccaagaaaaggaaaaagaaatacgcggtcgtctcgcgttccgcgtcctcttccaacgcttcgcggcgttcctcgcgctcctcctcctccgcctctttctcttcttccttttcgtcctcttcttcttcctctcattcaccttccgccaaaaaacaaaagaaagaaatgcaaaagaaaaggcgaaagaagcagaaaaagaagcatcactcggaaaaggagttggagaaaagagtggcaaatggacaaaaaggagagaacgaaggcagaaaagaagaaaacgaaggcagaaaggaagaaaacgaaggcagaaaagaagaggagtttaaaatggcaaagggaacggaggaggaggaggaggaagagagacgaagtggcacttactcatcctcgggggaggaggtgtatctgaacgaacgggaggaggaggaactgctgatggtcatggagcaggggctggacagaaggctgggcaaagagaggggccaagtcggggaggggaaggacaagcagcagcagcagaacggtgacaaggagcacaaggaggaggaggaggaacagaagcagcaggtgggccatggaatgggggggggggg

SEQ ID NO: 20982 - DNA, 2246 bp, Heterodera glycines
  unsure (1)..(2246): unsure at all n locations
gtttcagttggcnggagggcacgtgaaagtaaatttctcgatttcannttacagcccttgtgaatccgtcagagtgaacaatgactgaagcagaaattgaaattcattcatttttgggctaatagccttttttatcttatttcgacaagacgtaaaacatctcttaatttactttttttcatatttggactaaaattacctaattaggacattttggtcaaattcccaacaaaatatccgttggttctgaaaattttctgatccaaaattttattttcaaattcattcaccctttgcattgtttcttcatcttcaactcgaacttttgcagtgacaaaacgctttgagacagtgatggccgaatttggaagcattttaaaagcaaaagaatggaaataaaggcaaatacaaaattaaagaaataaaattaataagggaaaaattattagtgaaaattaattattcaaatttgaacagcataatgtccaaattttttaattttgcaagaaaattcttaaaacaatttaagaagaaaatctgaaccaacaaattgcatttttacgctcaaaagccaataaaaaaaactttaattgaaccaatcaaaaaaaaaccctacgacaaaagtgcaataaaagcacaaaatgtgcatggatcagcacgttcactccttttttgaacagtgtataaaaattgctgatcaaacgataataagtgcagcaaagaattggaattggaaaacaaagtgataaaaaactgccaaggtcatattttaatcattgtcatttgatgcgaatggaaaatgtgtaaaaacagaaaatttgaaaaagtatgggtgttcaattggggacaaacaaattagtttcaaaatgtattaactgaaaaataattatacagaaaacgtagaaaattaagccattcattttgaaaacgattcataaagtttacttggtctacaaatcaaatttgtcaactttaagcaaaaaactaacccgtaatcaggcgggatggaatccctccgaaatgaaaaatgaaattttcaagaaaaatagggcattttttgaaagttttctaataaaattgcctatcggcaccgccgaacgacgaattgcttaattgtttggaaaagtttatccaaaaaatgcacaaaagtgccatttttaggcgatgtgatgccagaaggaacgaagtgtgggagaaagtgggataaagaacctgagagaacctctaaaaggagcgcccgtagctcagttggttagagcacggcacggattaagggcatttatgggccattttggtcaaaaattccatgtgttaaaagccaaagaccatcaaacacttttgcctgatccaaattaataaattcgtttattattttatattatttaatgactttgtctgcggagaattaaacgcttcgcaataataaaacaaaagaaggaggaagaaaatgataggtaattaccaaaacagaaattttatttgcgcaggtcggcgccatttcagcgccaactgtcagagagtaatttattagcgagagtcaatacctccgggactgagacggcccttcctctccgaactgagtgaggaggcgccaaaaaagcagcccccgaggggacaaaaaatgtaacaaatgaaataattatgtattgtaaatacatatgaacaaataatgggatgggggaggcggcaaacagcggaaaagtttcgtcccacccatttgagggcggggaaagagaaagaaagcaacattcattcattcaattcactcattcattgaccgccaaattcacatgcctttctttcatcattcatttttgaaatggtaaaattgaattaaagatgggattaaacttacatttgggaagaatataattcacaaatgaattttaataatggtttaaagacaaaaaaaaagatcgctaaatttaattggggtaatcaaaagaaggtaatttgtgggctaattggattaattaatggtgctatgatgtataaacaggacattgactgacattgaccaacaaacacaacggcggatgacgacaaatggagaagaagaagaagatggatgaggagaggaggagggagggattaagcggcggaaggcggaaggcggcagggagaagcattgagcagccgttgccgaccaaacatcgcttacaattattaaaatggcgacaatttgtcatcatattttatcaattgaaatttttttgaattatttattcgactttttgtatatatat

SEQ ID NO: 20983 - DNA, 2347 bp, Heterodera glycines
  unsure (1)..(2347): unsure at all n locations
acagcaaacaaaaataagaaatggttgtctccattttggccaaaacgcactttgaggacggtattcacaatttcagctgccatggaatacttcgtcagtactttgtcattggctggcgtcgtttcttccttcgcttcgtccactgattcgttggaagcttcgctcgagtcgctcgtcgacgattggctcggcgacgacgaaacgtctcttttcggcgccgtcttcttttgttttacgtttacactcattttgtcaaagcttaaaatgtgcaaattacaaacacactcataaaacataaatattgaaaacgcaattatcatttaattagcttttaaaataatggtctctaaattaaagtgaatattatttattggagcacacaaataaataatgagtcgccaaatacggtaattgtcgttttcattaactgattttgagatacatttcggacagggaatacacttgttgtccttctattaattaacttattatttctgttttctgaattttccttatgttttaaagtaaaccgaaatactttagaaaaacaacacgcgcggaaatgatcaaagtcgtccgaattcaaatcagaaatagtccttaaaaataggcaatgtccgacaagtgatgccattgtttggtccccttttcagtcaagttccggctccggcgctttcttcggtgcctcgggtcctttatcagcagtactcttctgttgcggtgttccctcagtcgctgttccaaagggtgttgagtcgcgtcccgtttcgttggcaaatggcgacgctgagcctaatttagagccgagtttctcaaggaccttctgaacattgnggtcgttcatatgcttcatcatattggctgggttctgcataatctccataagtttcttaaataaaatagaaattacttgaaatttactatcgaattaaactgcctgaatcagcgaagggtcgcttttgatggcacttaacaattcggggtcatccgacaactccttaaatcaatagtgaacaatgaatgacatggaaacttgccttaaacatttccgtgaagggtcccattccaaaatgagccccgccttcccccgaatcagcggcgctttccttcgcctttcggttcgcctcttgcgctcgacgcacgcgttcgagtcgttcgcgctgctctttctcttcggcacgcctttgtttagcgcgttcgtactcctgcagctttttggcctacgcaacagaacatttgtgaagtcacgcaagtggctgcttacattcggctcaacttctttcatccacccataggccacgtcatcataatccactaaaaggcaaaactgagaaaaaagtgaattattcaatacatttgcaagaagtagcaaaatcatggtgtgcctccgtccaattacccaacagtctaaaaattgagttgtttaattcactccttaaattcgttaatatttttccgatactgattagcgcgtccacggaatttgtaaggctgagcggagtcaggattgatagcaattgctttgtcacagtcttggatggctgccttcatcattgacattttgaggagagtgctaaatttagcagattcttgggtggaacgggtaccccaagggggtaaatttcttaaggcaaaaaaaaaaccgaagttggcaaaaaaagacttccaatgggtaattaagccttgaaaatcctaattcaggatcgtcgatgactcccatcctaatataatttttaagggaaaaaagttgggggagaatgttaaatcgaccttcaacgtcctcgctcacctcgacacttcgagattattttctagtgttttttttcttattttcaaatatttttgttatttttcctttcgaaaactagaaaaaattgcttgccgcagagccaaaaaaagatagttcggttgatgaggtgggagggtggtatatccaaggacgaaatcctctgttcatccttgcttttgaacccaatgttgtgtcagtgttcgttaaattaacaaacttggctcttttggcgtgcaaaatggcggaaccaggattcagctcaatggccttggtaagaaggtcaaaggcagattggtaattgccttaaaaattgttttctccttgagcccagtaaattcctcaaatgattgccaccttcgctgaacgctgccatggccgattctcggctctcgttggcacgttcaatttcctcttccgccacttgcttgctcaggtcgcccatagaaagttgcaaatccccggttttgtcagtctgcactccgctgttgtccaactcgggcaatggcacttcttcgtcttcctgtcgctgttcttcctttccgcacttttcctctgtct

SEQ ID NO: 20984 - DNA, 2733 bp, Heterodera glycines
ccccccccccccccccccaggggtcggggagcaaccctagtttataagaagaatcaggaagctaacaaacgttttttggctgcctttttcaattattttcccaacttatacaccattgatagagcttcaatagctctacaattttactctgaggtgatctttcgctttttctattgataaaaatggtttattatttttttgggaaaagataaaaaaattcaaaaaaaccgaaaccgaaacggtataccgaaaatttttcttcggtttttttcggttcggttttttaaccgaccgaccgactaatttttgagtttttcggtttttttcggtttttataccgaaaccgacctaccgaccctcttgtccggtctctagacaaaatacataacaaaagacaaaataaagaaaaaaaaattcaattttttattttaaaaaaatcgtatttattttttcttttgtaattaccggttggtccaaatttttcgtccggttcttccagaaaattcttatccaccgcagctgctataaataggtatatttctatctgtaaaaataaatattagaagtttatttttaaaaatagggtaaaaatgttaccttttgagcaaaaagaagttttatatacatatttacttgaaaataaaataaaccattgacccgcttatctaagcccctttcggctgcaaaataataatttatttatttttttaaatagagaatgttaactttaaaaatttttacaaaattgcatttatttttcagaatttttctttgtaaatttttattccattttttatttgcaaaaaaccgctaaaacccggcgccgagaaatttataaatttaggtttattttgtcaaaaacaggtttctagcaatttttattttatagttactacacatctgaataaaatgtaattactttccgtggtgagtcgaagtgacaaaaaggcaaatgtgggcgaagtgacaaaaaggcaaatgtgggcgaagtgacaaaaaggcaaatgtgggcgaagtgacaaaaaggcaaatgtgggcgaagtgacaaaaaggcaaatgtgggcgaagtgacaaaaaggcaaatgagtggtgatcagaagaggcgggtcatttaagtaccgaataatgattttaattaattaataatataactattttaatctattaattatattgctggccataattataatttcgttattatttaatatttcccaatcaaattacaatattatattctgtctagagagagaaataatatccacatgcatagttgatcaattcgatcaattgcacttttatttattcacaattatatattatattctgtctagagcatttttcatttctttaatattccactattaacttgtctttaataatttatttccgaatttttaattgatttagaatgaaaagtctacttttgaaactttttgttggcctctgcttcattgactttacgtcaaatataaagtcaaaatttgaggactttcttgaaaatcaagaagcaatgaagttgatccaaaattaccaagaaaagcgaatcaaaactattaaagaattacatgctgaactaacaaaaaaagggattaaattggcagaacgtagtttgaggctatatctttgtaaaattaagagtgccaattctgatacatcaaaagaaagtccaaacataccagaaataaaatttgaaaagtgtctttcccgtgatctaacatatactatttatttaatcggaaatggaagcaattggcgaaaataccgaataatgaatgaaaacaatgcagatatatatatcgcgtgttcaaaacattccgtaaaagactaacattaatttttataaaataaaaaaaggctctctattatattaagatggtcgctgatcaagaccgtgaaacgccaaccatttttattttaaactcttcaaatcactttgaagtgatacttaatttgattgggaaatattaaataataacgaaattataattatggccagcaatataattaatagattaaaatagttatattattaattaattaaaatcattattcggtactgaaatgacccgcctcttctgatcaccactcatttgcctttttgtcacttcgcacacatttgcctttttgtcacttcgcccacatttgcctttttgtcacttcgacacagcaccactgaacataccgggctttccgggagggagaatgaagtgccacgccttccatgctcattttgacagattttgcgacgaaaaattcacaaaagagtacgtccggtcggattgtaacgattgttttggctctgattgcaacaaggaccaactgaaattgtcaattggtagcaaaggtaaggaaggaaaaagagcaacaatgttaacgctaattatgccaattaaataatttgataattggtaacgaaatgtttgtccccaaacatgaactgctagggcagccttcatcagctgatagagcattggaaagccagagatgccggctcaaagcggggacgggacaaaatctcgccgccgaaattttaaaaaaaatttcaaacagaaatttctcaagaaaaaaaccttagaaaattttttataagaaaatttcagaaagaaaaatattttaaaaatttacagcgatttttttttgaacttttgtaataaattactgtttttttaaattttcaaaaaaactcaacaatttttttttcttgaaattttcttataaaaaattttctat

SEQ ID NO: 20985 - DNA, 1237 bp, Heterodera glycines
actttttaccatatttattgtttcgtttcgttttccatatatatttatactttttcttctcttaaatcacagaaatatcgtctccccaatgattgtctctgtgggagagatcgctttgcacttttttcccccttttccattttcccctccctcccaaatgttccgctgctcctccgtcctttttgttggtccgcttttcctcattttcgccggtccattggtcggcggaattgcgttcagttgcggcggtgggccaagcaaaggctccgacagaagggaaaaggccgaaccgatgctttgaggacgagcggattggccgaagtgattggccaccggcgttttgtgctgtttgtccaccgatgggtcggtggaacggcggaggaccgttgagagagcactcgtggcggtggagttgttgttcatctcggagacgcctcctccccccagcgatggcattcttttgctgtcaattcggtcgccttcggtgcaactctttcgacgacagaacaacatccaaaaggtgtcacgaaaggaactggacatgaagcagtaaatgccgaaattgatcggataagtggcctggcaaagacaaatttggcaattaatgaggggggggggaacaaagccaagagacagaccatgacgagcatgttgttgacgaggaggaaggtgaccgggaaaacaccttccaaaaagcggttactcagccccaaagtgttgtacacctaaaggggtggcacgggaatttagggggaggggggagacagacgcaaagcatggccatgaacagagcggtgggcaaattgacgatgaggaagatggacacgatgatgacctggcaaagaggacaaacaaaaatgatcacaatcagtgaatgggtgattaatcaatggctttaaatggccaaatcactaagaaaagtccaaactcagcggaccaatcagtgaacataaaaccaatgcgatcacagatcagcatggtaaaattattgcttgtttccaatctcccaccagcataatcgaagtcgaattgctgtccgtctgacgctctgcttctctcgctctcttctctcttaaacaaaaagcaattggccactaattaattggttaattaaatatttaattgttcgacctgagaaggcgctctttcctccgttgcgcttttcgtatctgaaagcaattcaatgctattagataattgttaaaaaatatttttggtaatttaattgacccaattg

SEQ ID NO: 20986 - DNA, 2305 bp, Heterodera glycines
  unsure (1)..(2305): unsure at all n locations
attgtgccattacaaatttttaccgtttttaaatactcccaaaaaattagacaaataacagatattttttggtaaaatgtcttttctggatcataataatacaaatgattcaaaataatctcactttctttccacaaacaaatacaacaaattgaatgaaaggtattcttacgagatcaaaaaaggaactcaaacaaattaaaaaataaaataataaaaaataaaacattaaaatgtaaaataaaaataggggtttttaaatttaaacttaatttaaattttttgtaaatgaccaattcgctatttaaaattgctcattcgcctaacgttcataagaattgtcttattattatttaaaatatgtaaacatatgatcaattcttattaatagcttttttattgatatatcttataaattggtgcatttgatataaacatttcatacatttaatatactaaaaaagattttgcattttattgtttattttttgtttatctaaatttcgttgtttaatttgaaaaaatcatagtgatttgatcccgacagggcacgatttttccaaaacccttcctgattttcttatagaaatttcattattttatttattttatatttttaagtttgaattctcatcacggaatttgctaataatacaaggaataataatggtagggggagacagcattaattaataattatgcacttgatatgttaatacacaaaatttaaaaataattttaaattttagactgttaaaattgtatggatttattggtttttattaccaaatttgccacctttttccatttgattgtttctttgcccatttatttgtcggttttggcatttttgttgcgtcaaaggcatcgtccgcagttcacttcctcattttatatgctttttattgcgcttggctttgtggatttaaggtaagaaagctttaaaataatttaaattggaaagaatttttgattttctcacaaaagtgcccataatttaaaatattttccaaaaaaaattcgccgtctttcatttttgttacatttttcattaaaaaatttccaaaaaattgccaaaaaaggacccctgattctcatttttctcatcatattggatattgggactataaattcgattcagaccgtttttgaaggatttggagttttgaagctaacaaataagatgaacatttatttaattaatttatttttgtttttattccattttagcaaatttttgttgtaccttatcaagaaatgcgcttattggggttatgttccggctatattttacccgttgaaccaagcaaacagcgcagcgaatttaatttacttttcgctatgggcattgtgtttaatccaacttcaggcatttttaattttaaaataatttttaaaagcaatttttctaaatttaggctaaaagaaccttatttaaaatttcagttgaatttcctaatgtcattgaaccgtttttgtgccatttgttgttcccaaatgtatcggcgccattggtcacaaataattagcaaatatttattggccattattcttttgttcgctttggcaatttctgcaccaattctttggcattctgtgtgctttcggttgtctgaagtgagaacaccgcttgggcaaggacagcacaaaatggacggccccgtgttcatggaaattccaacacaagtaaaaaatagaggagcacaaaataaagaaaatttattttaaaaattgaataaattattttgaacaaagattttccgatttttttttaccttattggcatattgggtgcttttgccattcttagtagaggtcggcattttcaaactgcaggcctcgtgctcgggcttaaatgttttttgaatggttgcccgacggacatgtgttttttcaaaattctggaaagatgattataaaaaattatataatcttctatttgcttgtggttataatttgaaatgacgtacgattccatatccataaaagctttaatttttagccttaaaatagcttcggagctaaagttgatcagagtgatcagacacaataacataatcagacagtcagaaaataagaaataatgtacaataaatttctagagatatcactaaaaatcgaactcaaaataattttttcctgcttatacaatgggctattaaatacaatagtaagtaatttatataatttttttttaattgaatttttttattttctaaactctgcttcaaaacttttttgaaaacatggcattgtaattatgatcttcggtctaattntttaaatttaaattatnattattttt

SEQ ID NO: 20987 - DNA, 2610 bp, Heterodera glycines
aaatataaatgcgcagctgatcagtgcccaacttgctttggcatttttgtatgccaaataaaactgaaaataaattaaaaataattattatttttcttttggcttactgtgccattgtttaaatctgccattgcttatatttgaattggttgttcaaaatattattagaaattgtgcacttttaacaaccttttttcaaatgccaagaaatgattacattcttttgttgctagggtaaaaaagaatggtgaacaatgtttggccgtcaacgggaatgtaaaattcagctgccattttttaattaaattattctcgtatatgcaaattcaaaaattttgacttttactacattttgttcgaatttgggcaagggatatggaattggttaaaactaatgccgtattcgttgtcatcgaccacgaaaagtgcttaaaacctattttcataatttttaaacataattttatttatttattaaaagttcatgtgaaagttgccctctaaactgcaaaagtaccgaaaaaccatgcaaatttaaacaaattctttggtgattagtagaattaaatttatttgtagttaagggtaacctaaacttcaattatcatgctgaagaaggtccaattttgaaactgacggaaatgaccagacggaaaaagtaatttttttataattacgagggtttaacaaaattttcaatgctattattatggtgacaatttgtacacaatttttattctgaaggacaaaatgctaataatgactataattaaattgataaagcctaataaagggatcatttgaattataatttcttgttataaagcccaaaaaccaaaattttccaaagtttaaagggcaattaaaaaataattgtttatttttaaatgtatggaaacatcaactgtgaacaaaaaaaaatcacaattcgaaaatgaaaaaaaagcgaaatgcgaaaagccaaaaatatgcgaaaatgcgaaaagcgaaacgcgaaatttttttcaaaattttttaccaatagtaaaatcatagattttgaggttgtgatgcaaaaaaaacaaaatctctgcattttccggttcaatctttttctcagatcaaaaaagacaaattctacccattttggggttaaaatttcaaaaatttgaaaattttaataaaatatggtaggaaaagttgcaaaattttcaaaaaatatactatttttttcaaagaaatactgaaaaaggcttgaaaaaggcagaaaggtcaaaaaaggcaccaaaatcgcaaaaaaaaaggcaaaaaaatgtcaccaaaaagttcaaactagaagcttcaaaccaagttaaaaactcgtttttcgtgcgtattaggccatagcaagttagaaaaaaggtaattattaatcttgcagcccaaaataataataaactgaagcattcttttaaaaatttaaattttcaaatatattcattcttaggggtggaaatttcgcatttcgcgccaaaagcgaaatgcgaaaagcgaaacgtcggcccatccctgccctcatgggcatcagcccatgagggtacctttggtacaagaagctgtcaattcgttgtcccctgtacagcccctggggtgtacgatatcgctgatctgagcccgggttcatgatcagaacctttaaaaagccattgaaatttattttcattaatttttaaaacaaaaatattttttttattaaaattcatttgaaaagtgtccccaaactagaagagtaccgatagttcaatcctgaaaacgtagtccgcaaaagtcggtccgcaaatgtcgcactacgaatcaaatcataggtaaaaataaactgcaatgaagcgtagaaaaattttgaaaacttaaaaaatgtcattttttcatagtaaattaatttgttataagaataactctattaatatacatgttattttctatcaataaacaaaaatttttgagctgcataaaaaaattattgcaccaccctgatcagatcaatccttcttcgtctgaaaaccaaacaacaaaaaatagaaattgtttttaaaataatcgtccctgcctgatattttactgaattttttataatattttaaattttttatttattatttttttgttttcattatttttcttttactatgggtttatttattctattaaagcataggagtactgaaataattatattttttctcgacatgtctttttttaaatgaatgaaaaatgtaattaaaatatgaattacatttaatcatttatgtcaccatcaggacaaagtaattaaaatatttaattaaaattatattatctattgttttaggtcactcaatggcaccgttaattaaaatggcaaaaattgtatgaaaatattttttactgtcataattaaaatgggtcccaaaactgtaaagtaaattaaaaaatgaatagaaaatttcattactaaagaatcttatattttaagacacatttcatgtaaacattaaaggttgaatttaaattcacagccaaattttttaattcctttgccggaaaaatttacattgaatttaaatcatgagttcaaatagtacacagatgctaaaatcaaaaaagaatacaaaa

SEQ ID NO: 20988 - DNA, 2417 bp, Heterodera glycines
  unsure (1)..(2417): unsure at all n locations
cttttagttagcagcatacactatcgaagttattaggctatcagttaaaattcgtcgcagctgacccatagcaaatgggcagaacaaatttactattactgtgatcgttacataacaacaacatagaaaacctcataactgattagcacttataattcctacacgcaaaaatgaaaataaaccattagcgacaattcctccagccaattcattttgatgttcggaaaaagtttcccacacattgggttgagacattcgtacaatttcttgcattatctttgcactctttatagtctctttaaaattttcaggcgagtatagttccgtaaaatttgttatgactttatttttaaatataggaacgcttatttccgggaaatcaattcttccatgtcttgttaattggcgcactgattccattggaatttgctcaatgtctccggttttttgattatactctataagtttgtctccttcatttaagtacagaaaattataatttccacagtcaacctccctagaaaaggggtgaattatgcgtgtcactgggtcgataaaaccattctttattttcccatcaagtttgaaagtaaccgggatttcagaaaaacaaacaccctgttgccaattaaaatgcaactgcgtgaaaatagcaaaacagggctttaaatccaacttattttccgttactaatcgtcccaccaaaaagggatttcccagaaaatatctcgccaacagagtaggattagccactgataaagtaagaatttgatctgacagaatttgcatatttgtacatattttacggacagtctcttcaaaaatacgccgggtattttgggtaagccttaagcttaaagcggtgagttcagccgataactgcgaagagtagacgagtccaacttctggatcaaatcttttcttcctgttcgttgttcctatcgtttgagctttttccaccatagattcataatccgacatcaaaacagcgaaagactgatcagacaccattaattggtcgttaactagacattctttttgtttaaaaattgttttatttttaaatgtaagtgcgaaatcaccactctcggccaaccatatttcagaagaatattcgccctccatatttgccatccaaatatatgagcattgatgaccaatgtcggggtcccaaagcaggctgttttttgtacatctacatgacccggcttggtaaaggcaatttgagcattctccaatgggagtgcttatcccctccattccatggcgtgtaaagatcaccgtgtcatatacataacaattcgaaatctcaaatgtttgccaaaaaagattatatggccaaaagccccatccaacttctaaataattatttgtggccataaaagttccatttatcaaatttagttctcccgccatggaatggtttgtctctcgcatttgcctgcaaattgaggtcggaatttccatttgttccgtttttgactcctggctcatgtaaaataggtgcctgtgttgggctccaactcgggcatattgggtcagcaggtagtgtcagcaggtagtgaccataggcttgttggtgcgtcgggcagacaaatcatgggactaccttttgtacccaaagttcctccaaaaagggtcaaaactgcaattagggctaataaaatagggcttgcgattctcgccgctgggattcttcctccttgaaatcgcactcctttctcgggcgagtgagaccgctctcttgtactgtaatcatcggcattttcgtaacgtcgattgttctccttctctcttatccacgttcttctcccctcaggggttggagaccgtctagtcctccaattctccctttctcgattccggttttcattataatcgttatttgccctttcccattgtcctccccaattacgattatccctcttgttttcccgattaaaataagtttggtttctctgaccatttttctgggaattctcgtattttctctttcgacaatcctttatcaaatgcccggggcggtgacaataaaaacaaacacctcttttattttgctggctatatcccccccttgggccggagctttgttgttgaatagcaagggcctcaactttcgaactaagctcagcgaccgaaatttgacttcctcttcggccagctattaacaactcaaaatgctgggctaactcatatgcgttagaataatccactgggcgatttgcttttacctcaaattgtaaatctggacttaatctgtccaaaaattcctccaaaagacgcttttgtattacattttcattttccccagataagacagttcggacaacttcattaagccgattagcnaattcataaactttctcccccggngcttgcttacagattgacatggcttgtctggcgatcgacttagt

SEQ ID NO: 20989 - DNA, 1036 bp, Heterodera glycines
  unsure (1)..(1036): unsure at all n locations
tttcctttttaagaaataaattaacaaaattttgttaatggaaatgcatttttaccttccaagccgaacaaatgctttatgtctcctccattttcagttttgttttgttgtcatcagcacgaactgatgatgcactcaactaaaattaaaaaaatatttaaaaagttaataattaattttaatttaattatttttaataccccaattccaattaaaatggtgagaagcgccataccgaaagtggccatgtcgattttggcaattaggcaaagcaatttggaaattattttcaaaatcaagctaaatttcaccaaaaacctctcattttaaagctaattaatggaaaaaaaaactattggcaaaggcccgcgggtgtttcctgtggaacaccgtttttgcagtttttaatgaaattaattaagaaaaccgtaaaattttcaggaacaaaaaatgttaggagaggaatcggccattttcagagttcgggattccttctttaatcccaatccaaatgtctgatgcaaaatgattttgtcattttaaacaattagaaatttttgtgtttactatttcatttggatggccattaataattttaaagagtgaaaataaacaaaaagttaataatgtttatattagctcgcatttttggggaaagaaaacattggaaaaggaaaatgtgtcgattgagtgtgccacttttttaattgggcaaactacgatcattattggtgtaagtgactcattaatggcgggggacacaacacaattaattggccgatgaattgggacgggtcaatgatcagaaaattaagcaggcaaacattttcacagttttaagaagtgtgctaaaaatgaaaggattgagaagagaatttcgccagtgtgcaggagcagttaatgctaatgaccgttaatgaattaattaattagcagccgggcaaagcgcctaatttgataggcgtgtcaggggtttgtggcatgctaatgacttagggattggattgatacaattgctgtgagtaataanttataa

SEQ ID NO: 20990 - DNA, 1235 bp, Heterodera glycines
tttagcattttttaaactgaaactaatctacaaaaaaataaaataaaataaataatttattttattatttaagggttttctttcttaataatcgcagccttattaaatagaaaattgtgatatcgcaaagggaaataaatagcatttataaataaaaaacaaatttatgaaaaagatgtacggaatacaacaaattattaaaatagattaaggaacgaacttatgatataaagttttcccatttttgattatcccaaggaattggggtgtgccaagaatgacgtagcaacataaatttgcggaatacgcgaaataggcaccgtcaggaaacttgaaaattcgtttttaaaacttgttgttagaactacgcccttttgctatatgtatatgtacacaaatttacaaacacccgaaaaattaaaagaaaaaattttcagccgggaattttcgggatggcttattataaagaacacattcatttcagcgaattgcgcgaaccaattaaatcttgtcattggggtatatatttacagcgtttgtccttttctggatcacatttcacacaatgcatttcttcaatgcgcatcggctcagcgtctttttgcttccagtaataccagaagctttccgcgctgccttcccgtttctgttgagaataaatgaacaaaaaaaagttacaaaaatagaaaataaaaatccaaaaataaatgaaaaaataggaaaataaaattttttttatattacaactcacgtgacaggaaatattcaatgggccagtctcactttgcaccactttgtcattgaactataaatatatatatatatatttatacaatatataaattaggattactgaaagaaaggcagatccacaaacaactgccgtattgcatttcgggttgctacaaggaggcgcgcagtggtagccaggggttcttttcggatcaaaaagctcacccacattagcacaggcgcaagagggaaacagtttggcgccgtctaatgaaatgttaattaatcaattcctgatttttttgcgataaaaaagttgatcaccaacaacaagatgcaatataataatatacttatttaaaatcttaaaatttgttttgtttttaattatgctatgatttttcctcttaaatgtgtgcctaagtgtatatgaaagacgttgtgcttaaaaaaattttttttttagcgtaaaaattaaaggttaattgtgaaaaattctgaca

SEQ ID NO: 20991 - DNA, 1027 bp, Heterodera glycines
tataaatttaaaaattccctcaaaaataaaaggtctattgcgcaccgccctccctatcatgctcgagagcatttgtatgtgtataaaatttatcaaaaaaagagatagccatttttctgggataacctctaaatataaaaatcctctgtgaaataaaatggcgattgtgcacagccctccgtctcatacgcaagcgcttttgtgaggtataaaatttctcaaaaaaagagatagacatttttctgggatagagtataaatttaaaaattccctcaaaaataaaaggtctattgcgcaccgccctccctatcatgctcgagagcatttgtatgtgtataaaatttatcaaaaaaagagatagccatttttctgggataacctctaaatataaaaatcctctgtgaaataaaatggcgattgtgcacagccctccgtctcatacgcaagcgcttttgtgaggtataaaatttctcaaaaaaagagatagccatttttctgggatagagtataaatttaaaaattccctcaaaaataaaaggtctattgcgcaccgccctccctatcatgctcgagagcatttgtatgtgtataaaatttatcaaaaaaagagatagccatttttctgggatagagtataaatttaaaaattccctcaaaaataaaaggtctattgcgcaccgccctccctatcatgctcgagagcatttgtatgtgtataaaatttatcaaaaaaagagatagccatttttctgggataacctctaaatataaaaatcctctgtgaaataaaatggcgattgtgcacagccctccgtctcatacgcaagcgcttttgtgaggtataaaatttctcaaaaaaagagatagccatttttctgggatagagtataaatttaaaaattccctcaaaaataaaaggtctattgcgcaccgccctccctatcatgctcgagagcatttgtatgtgtataaatttatcaaaaaagagatagccatttttctgggataacgtataaatataaaaatc

SEQ ID NO: 20992 - DNA, 1437 bp, Heterodera glycines
tttaaaaaaaattacattttaatttacatttcttttcgaccaatattcagggaataataaaccctaattcttaaaaagttcaagctttctacaatattaatttgtagaacaaaatttgaacggatttaattggcggcacagaaaaaattttggtgccaaaatttatattaaagaaaaatcggttttctaatttttcaatttttctggcattattagaggaagacaattaattatatggaaatgatcatttttccgcgaaaaaaacggaatatttccgtggaaaaaatgatttgaattttgcgattttgtgtccataaatttggtagcatttatttttttaaaaaaactgtcttttgtaaggcctcaattattaaatcgggggcattttctgagccccgaaaagtcggaaaatttccaatttttttaatatatttttcaaattatttataaaaccattttttaggattttaaattttgtttcgcggttattggtccaagttttatggccatttatttttggccatttttccaatttaatttcttggccaaattctaaataataattgttttgtctgtttgcatacaaattaatgatgaatggcccaaaaaatattttatggcaaaagcatgttttttttaaccggtcgatcagattttttttcaaatttttaacataatttttacattttttttcaaaagcacgaaaaaattgaaaaaaaacgatttattttatttaaaaaaatggacaattaaaaatatattaaatagcaaaatgaaattatcagcatcttttttcattgtaaaccaacgaaattagcaaagttataattaacaaaaaaagtacggcattttaaaattaaattttattttttcaaaattttaattatttaaatttttgtcaaccgtttctttgaattttatttgacattttaagcatcatatcacatttaaaaattatttggacatgttttattttatttttatcgaaaaataattttaaaaaaatatatttttaattttttttttttgtatcaacaagttcaaactacaaaaattatgcatttaaaaaaaatttttttttcattattttgattatttgaggtcattcttattaagtatgcaaaaattcttttgtgtgccaacccctatttagtcgggcattttattgtcattttttatatttgtcatttaaaaatcactttttaatttaaaatattttctgctctttaaaaatatatttttgggttttttgactaaatattgaaaatttttaatttaaaaaataaaattggaattaaaaactagagttgtaggggaccgggacttttcgggttgaaaaaccgggaattttcccggtcccggtcaaaagaggtcaaaaccgggacttaggtactcagttgtacgtgtttttcagtaccaggtcccggtcccgtacaa

SEQ ID NO: 20993 - DNA, 1653 bp, Heterodera glycines
  unsure (1)..(1653): unsure at all n locations
aaagtgtcaaatttcattttattttcttttttttaaactgtaaactcaatcccctttcgagaancccgacaattttgtgtaaccaagcgcagcatcaaagatcaaatcgcgcccattgagaaatgccccggggggatttggccatgaaaattggcgcgcaattttggcgcaatgttcgagattttttcccatcgcaaaaccattcttggcaccatctaaacgcagtttatggtcatgctttattagcatcgtaaaattcgaaaaaaaatcttccaaatgccaaaaaacacgtaaaaaatggggaaaaaatgcgaattttccgatatttcggagcgcgtaacttttttgaaatttactaggctagttctgcagtcaaataaagtgccaaaaactctcggcaaagtttttaattaattttaaaagtttttggcatttaaaaaaataatttccccctcgaggcgtaacttttttgaaaattactagcctaatattgcacatttagtgctgtcaaatgaagtgcaaagaacactcggcaaactttaattaattaatttaaatttttttttttggcatttcaacagcaaaaattactcatcaaatatttcgaagaaaattccgcaattttttcggcggcgattacgtataacaaattagcccttttttgcaatttttctatttacctaattggtataatcaaattaaaattttttcaaaatttccgtcgtcgttgtcgaattttcgcccggccatttcaaaaaattccaattttttttgcgccggcggaacaaattaattaattaattaatttccattttgcgcgacaattcaaagaataaatttgtataaatcgctgctcccacccgctcaaaaaatggtcattattcaccgcgaggaggcgagcggcggtgcgcgtcgtcgccacagcaaaaaaatttaaattaaataaattaattaatcacaattttttgaaaaatttcgcccccgggaaaatttgtgcgacgcttttgcacatgggcggcagcagcgaaacagtcgctgctaattgctgggtaattagggggaggacgcgacgcgacaaattaatgagttttgatgatgaaaaatcggaggaggggcaaaagcccaaaatttgtgtgtgaagtggggggggggggagcgcaaaaatcagttcgttcggagcaaatttcaatttttgaaggtaattagtagcattttgttttcgcaatttttttttttgcggctgtccgggggaaaagccgtgaaaaactggcgacggcactttggggtgaaaaattgaaaattggtgggggttttcaacttgtaagcccttagggggggtggaaaattgtgagtttttgaggcctatggtgatgaacggggttccattttataggcccgaagggacgaaaatttgaggttttcaagttgcgagcccttaggggagaggggttggcaaattgtgagttttttgaggcctaggttaaattatggggttcctttttataagccctagggggtaaaaaatttggggcttcaactttaacccttaaaaaggatgaaaaattattgtttttgtttgaataactctaaccccggtatgaaaataagacaggatggcaattttcaaaccctagattaaatgaaaatagtgga

SEQ ID NO: 20994 - DNA, 666 bp, Heterodera glycines
tatacatgtcggccaaagcagtttttttattattactaatattccaacaatatattaaaaatttttcatctattttacaagaaaaaataattaattcattagtaaatggccaacttctcaaaaaatatttataatattatttaagtgttataaatttcaattttacggttttattttttgttatctttagtaagaatctttactgcgtttaatttatataatttttgaataatacaattcacaaaaatagctattctaaaatctttttttattaaagcatgtacagtgtgacccgaaattataggttcaaccccggattgatttttagaataaactcaaaaattataaatagcaatacgtaggtgctaaaatctgccaaaatggttagtttttagttctaaaaattccaaatagatgctaaaattgtgaaaataggagccctaaaatttttctttatatgaaataataattgtttatttgaataattttaccttttgatatttgtcaatatgtgaaataattatttttatatcatgtatgtacattaaatagtgattttcattattcttttatatgaattctttttcgatatatcattatttatttatctttatttcatattcattaaaatattttgatttaatcctcatgcaatgaagggctgat

SEQ ID NO: 20995 - DNA, 1328 bp, Heterodera glycines
  unsure (1)..(1328): unsure at all n locations
gaatgctcgctgtgaaatagaattacttattaanttttgatttctatntaatcttttatttaaatgttttctaattttgggtttttcatntaattgtgtttagcttatgctttttttatatttttttaatttcataaatttcttattcgtcggtcgaccaaccacggtattatacatgtcgaccaaagcagttttttatatttactaatatttcaacaatatatttgccaaaatttttcatctattttacaagtaaaaataattaattaattagtaaatggtcaacttctcaaacattttttaattattatgcgatttatttgaattttattttttatgtatttaaaatatttataatatgatttaaaatgttctaaatttcaattttaaggttttaatttttttttgttatttttagtcaagattctaactgcgtataattaatataatttttgattaaattatcagtcaaaaattagataatagtcaatttattaaatgaatttcaatttgttatttttgcattctttttgataatttatagtaaatttgtttatgatcaaaaaatatattatacatagaatccgataccgagtctcttttttcttcgatttgtattttgtttaattattatttaaaaattttgatttaagcaatttctcataatattattatcgtttcaacttttttaatttaaatgttattatttaatcaatgaaaaaccaaaatcgtaatgttaagttttcattgttttaaataaacctataattataatagtattttcttattatcataattaaaactaagtttgtataattaaaataagtcattagaaaatgcgcaagtgatgcaaatattttaaaataaagttttgtagtattagtattgtaatatagaagtaaacttctacaagaacatccttctgaattccaaaccccggacccgaattcgatcagaaagtcgaagatcaaaattttccaaaattagggtttttcttctaaaccagtttaaatactcggaaacaaactgaaagcattgattcttaaatcagatatcttttatgccatttttgaccaaaaatgacttggttttatgacaataaaaaatttcactgacgcattttctaaccaacatcattaatattttttaatctaatgcatgaatggcggctatttatatgaattagaaccaggattcgataagtttatagattttgaactaagtaaaaaaacagaggaatgttagggtcaatcgatttgttattattaaaatttataaattttactatatatctttgttaatattaatatttcataactttcatcaca

SEQ ID NO: 20996 - DNA, 2330 bp, Heterodera glycines
  unsure (1)..(2330): unsure at all n locations
aatgattttattaaatanttaggaataatatttntttcctataattaaaaataattaataagaaaataatttagacaacggtgaatggaaaatgaagtggggctgttcaaccattgccggcaattgtgattttgttaatgccaagaatgatgaaatggtatgtgagagctttataaaattttaaaaaatttctaattttgcgtgaatattttcaaaaattaatgaattttggtgtttggtgttgctaaaagacgcgcagtcggggatttttttttttggcatttttgtcattcgtagagaattttgataaacacaaatttattttaatttttccttttattttttaaatttgactcgggctttttccttaaaaaatcatattttacttgcaattaggggattatgattaccatgatcaattttaaggacaaatgcctgtgtccttttggtgagaaggacgttgacttctccaacgaaaatctcacaattgaaatcccggctgtaatgaccactccgaccctgacaactctgaccacgaaggaaacgacgacaaccactaccactaccaccacaaccacgacagttaccacggaggagccaacgaagcctaagacaactgcaacattggtggaattggctcaatcaaccattaatgagggtgcaattagattacctaattatttgtttaaaagaatatgtaaattacaggaaatggtgttcgcgtcagcaatggtgtgcattgctatttgaaaatcattggtgaattaatattttttattgattaatattttatttttgctaattaggcattctttgtgccgtccaagcgctaattgttgctgctaaacaattcagtgctttgtgaaatatgatgatgaatgatgaaaaggagattaaaataatatgatttcacaaatatttatttttcataatattattgggactatgttaactaaaaattatattcacctattaatcaatcaatctagataaaaacattttcctctttaaacaaacgatcactttaaagaactccaattatttacataaaaaatggggacccaacacttcgagatgctgttatgactagagaccgactaaaaaggcaccaaaaatcgcgaaaaaggcactttaataggcacaaaaaaatcgaaaaaaggcatcaaaaggtacgaaaatcccgaaaaaggcatgaaaaaaggcatttaaaatttttttaaaaggatttttagggagcaaaacacgtaaaacctaatcaaaaaaaattcatttttggtcatttaaatgattattaaaatattttagagctttttcggataaggaaaattttaaaccatgaatttttatcaaaaaaagaaatcttattttggagatgaatttttgagaaatttttcatttcgtaagggtgtatttttgaaaaaaaaaaatcaattcttaggggtgtatttttctgaatttttttcaggtcttcttttttaggggtgtattttaccgattttattgcatttttaatggattttttcggaaaaaacgccaaaaaaggcacctaataaagatctcatttaaaattctttttttggaaattcttggttcattttcaaccaaataaatatttcatggtattattcgatagcacaaggtgttctctacaagaatattaattttcaaaatttttaaaaatagtataaaaaaagttatggtcataaattttcactaagttttgagtcaaaattattttactagaacttttttaaaactcgatgaaattttaaagataaatagattaaataaagtacttgagattctaaaaagaaaatttaatctattgctgctgaaaaaaattatgaagcattgaacaggtctatgttttttgccatggcatgcaaatataattataaacatttaaaattttcaagtcattaaaatgcaattaagtcaaaataaatttatatattcgatagacctaaaaattctatattagcttgcaaaatttcaaaaaatttcattgaggttcaaaaaagttctggacaaaaaattccgacttaaggttttgtggaatttaattaccatatctttttatatacttaagtaaaaaatttaataaaattatattctgatagaaaacacctagagctattgaatgataccaagaattattaatttggttgaaaatggaccaagttatgaatttatatgtcttacatttttttgttttcctaccacatggcggtttttaggaaacgcccatggtggcggtttttaggaaacgcccatttggcggtttttaggaaacgcccaatgtggcggtttttaggaaacgacctagcacc

SEQ ID NO: 20997 - DNA, 1910 bp, Heterodera glycines
  unsure (1)..(1910): unsure at all n locations
tttcatgttttgttattttttcgttgaaaccatcctttaatatgttatgatattaattttaaatatttttcaaacccatcagaacacaatcgttatgcggacaaaaacaggttgccagactataccgacccccaaactataacgaccagactataacggccagactacaccggccagactacaccggccagactataacggccagactataacggccagactacaccggccagactacaccggccagactacaccggccagactacaccggccagactacaccggcgagactacaccggccagactacaacggccagactacaccggccagactacaccggccagactacaccggccagactacaccggccagactataacggccagactacaccggccagactataacggccagactacaccggccagactataacggccagactacaccggccagactacaccggccagaatataacggccagactacaccggccagactataacggccagactacaccggccagactacaccggccagactacaccggccagactacaccggccagactacaccggccagactacaccggccagactataacggccagactacaccggccagactataacggccagactacaccggccagactacaccggccagactacaccggccagactacaccggccagaatataacggccagactacaccggccagactataacggccagactacaccggccagactataacggccagactacaccggccagactacaccggccagactataacggccagactacaccggccagactataacggccagactacaccggccagactataacggccagactataacggccagactacaccggccagactacaccggccagactacaccggccagactacaccggccagactacaccggccagactacaccggccagactacaccggccagactataacggccagactacaccggccagactataacggccagactataacggccagactacaccggcaggctataacgaccccccaccgtcgtaaatgatgaaataggcacaaaatgccataaaatgacttaaattggcttaaaacatcttttaatagtttaaaaattactttttggtatttttcaggggtgtattttttaaattatttttcactacaaattttcaaaatagtaaaaaaaatgaaaaaatgtacaaaaatattcgtcgaaatttcaaatttattttttagggatttccaaaatttacgtaaaaaatccaaaaaatatgtaaaaaaatgaaaatatatttttaaaaaatccaaaatatgtacataccaaatatgtaagaaaatcccgaaatatgtaaaaatatgtaaataaaagtcccaacttttgttcgcaaacacagaaaataaagtgtttttcctgttatttagggcatggagaatcaaggaaaaaatatgcatttacataaattagcagccctaattattaaacattttaattaaaagttaaattttcttaaatattttttctctctttctttctctaaggatgttttttagctttatctgtattttatatatttaaaaattaaaaaattttcgcgatgtccaattttcaggcattatcataatttaaatgccaaatatttgcataaatatatacactaaaaattgctaatgcataccctaaaaccacgaaaaaattttcgtttagccgtctaatcctaagcggagccaagggggccatggtattttttgttgttgaaattttagctatttttttatgaaaacgaggtttgtttttttcatcctagtgcgataattgtaagttaagggagaaaatgtgaaacgnnactttcttnnaaatgcccatgagaaataccgagacct

SEQ ID NO: 20998 - DNA, 946 bp, Heterodera glycines
tttgtccctttccgccgccattcgcaaaagataaggccccaaaattgaccaagtgaaaagagattaaaaatgggacacaattcggaatactttggaccggcgacaaaatgataaaatggaaaacaaattttacaaaaattaataactgacaaaatatattcaaaaaccaatttttgaattaggaaaaatccaagagattattggacaaaaacttttgattgatccaaaattgtggcaaaaaggagagggcatggaaaagtgccaaaaagggtgaataaatccctggcagagtattaggcttatcagaggcaatgaaatgactcatttttcattttaatttggcatttctccgtcgctaagaaaaacaaagagaagggacggcattttcctttattcataaaatgtctctcatcaaaagcaatcagtagaatttctgttcataaaatcaggcaatggcaaaaaacattgacggaaaatcaaagaaaagaaaagacaaaatgaaagaaaaataacattcagcccaaagagttacaaattggcaaaattaaataaaacatatttttgggcgaaattttagaaatggccttaaacgttttataggcagaaaaggaagtgagagatggtgggggaggggaagagagaaaaacggagacattacacaaaactacggagaaatggatgggtgttcaaatgacgaaagtgactgttggcggtgattagagattatggtaaggcaattctgatggttgaggagggcgaacatccatttaatgagtcaaaaaaaacactaattgtaagtgatttggtgacgaaaggggatataatattcaataattaacgcgcacgcagtcatcatttcatttattcattcattgttcgtttacacttggggaggatcagcatcagtatgtgttggtgtattaagcaatcaaaacagtcacattaa

SEQ ID NO: 20999 - DNA, 2263 bp, Heterodera glycines
  unsure (1)..(2263): unsure at all n locations
aagcagtancagcaccaaccggcagcgcatccactcatttcttatgcattcgttcgttcagtcagtcactgctcctccccgtcctgcgagttggacgaactgctccgttcggcggcgtggagagcccattgctccgcgggcgatgcttatctcccgaaccagttgcctggagggaagagggaatgtgaactcattataaaaattctgtcccattttttcttggtacattaagtgacaattagcatttgtctaaactccgacttttttatggttacggtattagtttgcaagtacagtaaacagtgactgactgacctgtgccatcgcgccaagcaacacttctggcgaggaaacgaacagaaaatgctcattgccgaaactcttacagagttgggaaacctaaaaaatgtacccaaaaatgtgtaaatcatttgtctccaataatgccccctccctttgcccaccttctctctcagttcctttttgctttcgggtgccacccaaactgtgtacacattctggaaaacaatagtacaaattggtcaaaatttggtggcccacctttgggttgtgctccaggcacgtgcgcaacattggaatgtccgtctcggagtcgccgcacaccaaaatggtgccctcgcgcaggtcgcacttcaaatgttggataagcaactgaatgccgttgcccttgtcgaagatgtgtcccaatgatgactaaaaattgggattttggctaaattgtgaatgtatcgaatggcattttccaccttaatgaacactttgatgtctgtctccgtcgttttcacttccaacaactgatgagtggagtcaatgtcctcaacaatggcacggattctttggtcaatttgctccctgagttcacgcggcactgtgccgaacacatcctaaaacattttgggtacacaaatgtagcacattcattctccgttcggtccgtacttgatgtgccaatgtcacatggccatagtgtttctgcagtccggagccaatccaagcaaaaattttgaattccggatgctccaaaagttccgaaatggagtcgaacacgtagttcagcttctccaggtccgggtccgggattgactggtccttgaacttgttggccgggtccacaaaccattcacggccagcagaggcgccaatgtaataatacccctcggggatggtgcacacgtccaaaatgccttcaaaaaatgaattttaaagcaatgaagtaacagtaaaaaaatttgaaaatgccacccacccaatcgcatcatcggagcggtggtgacaatggcacaagtttgagcacaacgacgagcgaattgggcttggatgacgccagaataggcgggctgaatgctggccacgtacgagcagctgtacgacttcaaagtgccgtcccgatcagtgaaaaagtaattgaaatgatccgcgtcgatgaacatcttcaaaattaaagtatgcaataataagaagtgtaaaacatgaacatgctgttaattgaatcataaaaaagaacggtatttggaatgatttgatcaatttattaactcataattaactcacatcgaccaccgccgccacttcctcccgaaacgttgtctcggagacgggatggtacactttcaaagtggagatgaactgttcgatgttgtaaatgtcgtcggattggatgaactgcaggaatttcaggtccttcttgaactcctcaatctcattttttatgtccagcagaaccacttccccggcaccggtcggtccgccgcttgcaaatgccgtcgttccgccgtcgtcgctggaacttccgacggtgccgcaaccgccgcatgtcgccgcagttgcacgcagtcgaatttggcttgtgcccggcaaacagctgatctccaacgattctttggcattttgcagagagatggaaaagtgcggacggatgggaatgccctacaaattaagagattgtattgacaaaagtgaacccttccccatctgtcaatgataatgatgcccccttgtcattagtgaccaattgcacttgccttcagcacgcgctcgacaattccacgccggacgtcccgcgtgcgcagcatcaagttaaagaagaaaaccaccttcataacctctatttcaccaatcaccttcttataccanctctcttccaaaaannttcaacttaaagggaaaatcggagcacttttttggggtatgcacaaccctggatggtccgttcaatgtcgttggccatgatgaactcgttgag

SEQ ID NO: 21000 - DNA, 1557 bp, Heterodera glycines
atattttgacagtttttagtccatattttggtccatatttggctatttttgagctttttagtccatatttcgggcttttttagttaaattatttaatttacaacaaaatcaacagatcccttttttgtatgcaaattcgacaaaaaatgccttagcaaattaatttaatttttaaattcgcgaaattgtttaaaaagtttacaaaattttttgtccaaaattttgtcttttattgcccttatttgctcatttagatcctcaaaaattatacagtttctcaaaaggttaaatagatttacttgtaaaagattagtagctaagcacaaaagcagtaaaactgaaaactcatttattaatagaacaataaaacaatggaacaatcttgactctgaaattacggcatcatcttccatacgtagttttaaaaacaaagttcttaatgggttaaagcccgtaaataccataaaatatttacattgcatgagaaaaatatttttgattatttataactgtgtttcgttcgatgcttgtgatctgactttattttttcatgtgtgatctccatttatttattcttgtattcaccgatctgcagagtaagtggcttatgcccttctgcagatatttttattgactgaataaacaaactaaatacatttttcggaattttttagggtttaaaacacatattttgacagtttttagtccatattttggtccatatttggctatttttgagctttttagtccatatttcgggcttttttagttaaattatttaatttacaacaaaatcaacagatccctttttgtatgcaaattcgacaaaaaatgccttagcaaattaatttaatttttaaattcgcgtaattgtttaaaaagtttacaaagtttacttacaagatagatatttagattcatggaaatccaattcaattgcaaaaaaacggacgcttttatttgcttggactgccaaacggcggcacaaaatccaatggacaattaatgcaaaaattccaggcaataaaaattgatcaagcggatttttttttataaaactttcgaatataaaattttataaattcctttaaaatgtgaattatatatatttttatatttcaataataaacaaagtctaccaaataaatgaccccttttgacgcagtcattaaaatttatgcgactaacaaaaattaacacgaatccatcgaaaattggcgggaatgcattcacaacgaaacaaaacaaccaaatgcgcaaacaaaatgatacaaacatatatcttctacacgaaaaaatgggtgaggtgtgacgactaattggatggaaagtgaagggataaacaataattagtcaaacggagaaaagagacagagcaaaacggaaacaaaagcggagggaaagggccaatgccaaccaataggtgagaaagttgtaattcatcaggcttaattttcaaagaaaactcagctacttgaaaatcgtaaaacggaaaaagagcggagggctttctttgtttttatgggtggcacaatcggcttaactatgctgaaagaa

SEQ ID NO: 21001 - DNA, 3058 bp, Heterodera glycines
tgatttaaatgtcctacaatttactcagattgaattgcctttgcagaaatatgacccgcccattggcccatgtttgaaggcttattgtcttggccatttgcttatcattctgtgcatgttcatgcattttgagcaggaccggagcaagctgggctatttgaacttcacgatgaagctggcattcttcatttgctcaagtcaatttttagggccaaataattttttaaattggccaaattaattataagtttttattcacacccccccccccattttagtgcaagcgtttggtgccttttttgacaaaaagtaggtgaaagaaagtttcatggcgccagtaaaaaaggaaatgaaaagtgccaaaattgtttctctatgaaaaataaaatttaaaaaatataccaaaatcaattattaaaaaacggtaaacatacggtaattggattattttaagcttttcttaatttcaatcatcatactaagggtgggtagattatacacaaaaacagagacacaacaatttcgttttttttggcactcatttttatttttactttttactggccatggcttataattacagcaattaaaaattttaaaaaaactaattttaggccatatgccccatttttggagacaattcgttgccttggactgatcgcttattatgccaccccaacaattaaagacatttttcggccaagtcgcatttttataaccgtgccattcatcgcttcagcaattgcgtgggccgtttttgtgctcctcaaaacttttgtctgtttacgttcgcttaaatttaaggtgaacaaaaatagcttcgcgatttaaatttttcgaaaatttttgaaaaacgattatttttcaaaaattcagaggcctcgaaaattccgattcgagaaaatttacagaagctatggaacttcgacaatgtagaggccttagaacttctgattttagaaaactttacacagagaccatggattttttgaaactgtagagagagagaagccttgggatttccaattttagaaaattctagagacgacgaatttacaaaaatttcaaagctttggagagaaaatttgcaggcccttggaaccttttaaattagattaatatttcaagcattttcccggacaaatctaaggtcagaagggttcaaaaatggtgctgaaggatgatgaagaatttgctgaaaatccgtcggcattttgaaaaacggcgaaggaggaaaataaataaacgaaataattaatgactttttatattgtaaataatttaattaaaaaaaagcaaaaattaaaaacaagcaaaactaatttgtagagtccgtcggctcgttttggcatcgcccaaaaagtgccacacaatttttctttgtcaccaaatttttaaaatgattttttggcgcccccacaaagtgtccaagccacgaaatgtccaaaagagtaaaaacccacgaaatgtccaaaatttttcaaaatttataaaaacaaaatgagtctaatttaggatttttagggttttcggggtcgctgaatacgaatataccctttatattaccccttgcctaaccttaggcccatctgaataataaaaaactcaaattcgagacttggacatttcgtgggctggacattttgtgggtcagcggattttttagcattgtttagatatattttttgtaattattcaagaaatgaaataaacttaattcaatatgaagcacaaaatatataatatattaagtaaaacaaaaaaaaaaaaaacatgaaaaaggcaatttaatttaaaaaacaaatttaggtgaaattttttatatttaaattttttcaacataaattggattaaaattcaaaaagtgccagcagttaacaattttattttaattaaaagtacattttccattgtgcgaaaatgtccggcgaatttcggcgataaaatcgccgcgcacattactaatccattttctttttcagtgccatccaaaaattatttttaaattaattaattaatctaattgactcgaatgcgctaaattaaacgaccagccgatttacaaaacagttatgctgaaacagttaactgggtaatttaaagaaaatagaattttaataaataattttctttaaaatttaaaaaattatgccaaaagaactcaattttctgaattttatgtgccatctttttgaaaacttcaatttactgcactaatttgtaagtaaaaaaaatccgaaattggcataaacattaaacattttcctaaaatcgggatgaatccgtttaataataatttataaattaattaatttattattttaaagccgtattaacaaattccatggcatttatttactgttgtatacatttttacgacttttacggcacggcacaaattcaatggatgaaaataataataattcaaaacaaaacaaacaacaattaattgtgctgatttccgctgtttacagtttaaaaagcagactgtaagtatgtacagaaatttttttttaatctctcagcggtgacaaaacgccaaatattccggtcttttttgaaattatagagaaaaattctcaaagacttttctaatggggaaaattttaaaactcaaaaaacccataagtttttatgaattttgttggttttttaataatttcctgggaaaatttcctcgtttttcatttttttttaaattttcccggaagaatgaaaattgaaaattgagccttccccataaaaaacggaaaattttctgaaaattcagcccccctccccctaaaaacggaatttttttttctcgagatatgctgacaacaaaattgtgctgctgatcattgcaccggaaggacaacacattaagggcacgcaaatggtggccaaatccattaatggtcatcgccatttgaaaaaaaaatttgcgatttcgccggagcgtcgccgaccttaccggatgtgccgttggcttgcttatatagcggtcgttgattctgtggtggagccggaaggccacatcgagattggcgcggaaccgggtacggatttggtgaatgtt

SEQ ID NO: 21002 - DNA, 2929 bp, Heterodera glycines
actgtcgccatccgacgaagggcatcatcggcaaaacggtaagaatgaaggcaggaataagtcaacatcaacaaacgatctcctcttttcaatagtgatcagatatgggtggggaaaagacgaggagagagactttggccaacagagagaatggagagggagagagagagagactcatagaatggagagagagtgaagcaatcccatagaactagtgatcagagtggagaagagacttttggaaacggagagagtgggggagagacatttttaattttctttttttctctattttaacttgattttagacttttagaactcaatttttattcaatttgatgcttgtcctgaataaggtaaaataaacaaaaaaagaaataatgaaatttatttgatatgcaaaatacatatatatgaaaaaatgtaaaaaaaaaggctcacaaaatgtctttaatttagtaatgaattttaaaaatttaattgaaaaattcgtaaattgtcaattcttgaacaaaagcatcgaatggaatcgaaatggacagctaatcaatcgaaactgaaaaaacaaatgatattggcgaattttgccccatttatgctgtatccgcagcattcaaattttcatattttgtgcataatgtaaattgccctattcctcgacccaatcccgtcataaacttgtccgtctgttcatccaatctcaagccaatcctgtccctctcatttatcgtgccgtttctatcccattcacctctgttgcatatgccatccctttctctcttattcctgtgtttatgccgtcatacccctcatcctatccaaagtccatacccattgtgccagtatataagtccactcaatttccccctcgggggctgcgagatgtctgcggtgggtcagtctgtgccatttcttgcctttggcaatcctttcccaaataaccaattgcactgacccacccaaaatgctctgaggttgttgttgacccaaacatattcccggttttcaattcataattaattgtcaatgcttttccttataataaattcctctctcctaaaacggtaatttgaaatggctgaaagccttaaacccggggacacaacagtttattagaagattttgcgatattatcaaagtgtcatttactcaccgatttttccttgttcagaaggcacgtcatcggcccataataaaattggatgctgtgccatggggagaaaaaagcgttaattggtgttaattggtctcgacagaagtcatttcgatgaccccttctgaattggtgaaatttcgaaagtgaatctgatcggaaatgatcggagtttggtaagttttggattcgggacctggccaatgatcccttttagaattttttgagaaagattcgcaccattggttagttttgtttcgagattgttcagtgatagggattagcgatccctttcggaacatgccgagattgatcagcttcagctaattgtctcttttttgccccctccaaattttgttccctacccggctttaacaatttgatgaaattggtgtcattttgctactcccgataatcgctgccattgtttatgagctcattttcccccgagggattattgccatggactgaataattggaggacgccaaaagaacggaggaagaagcaattgacgaagacaattgtgaaattggctttgacggtacggtatggctgttgccctaaacaattattggtttttcaatgccactaattaagtgattagttaattagatgctatattgcgaaacgattaagccgattaatcggcccacctaacattttaagcttctccacctttccgtccccattttcggcttgaactccgatgccattggccttccattggacagttcgttgtggcatcgctttctcctctctgttcaccgcatccatcagaagcatttccagcttttgctgcatttgatgcaattgtcggacggcacccaaaaagccgtccttccgatcgccggcacttttattcgcccccgacgatttccctcctcctccgtccggcaaaaactaaaccgagattaaagtggcggaactttaaaatgccgccgaaaatgggtttaggaaaagaaaacacaatgggaccaaaaactctgatcagttttacctgccgttgtgttttgtcgagaatgtgccgtccgtcgtgcagcgagagaaactctggcaatggaaattgttgctgatcagccaattgctttgttttcccgctcaatgtcggcactttctcctttattggacaaaaggtgtttaattggcttggcattgtgtgccaatctgcttaaatgccaaccggctcaatggagcgcatttgagaagaaatttgatcagctgccatggcactgatcatgccattggtgggcgcgtaacggagtccgccgtcgatggcaccgcgggcgcgaagaatgttcaacaaatgcgcaatgtcgtcattgctttcctttgatggttagtgatcggaaaggaatgaccaaaggaagcttttgaaaattttacggaaatttgtcaatgattgattgggatgtatgacaattaatataacaatgagagagaaagggttttttattaaaaattttagaaatttctttctttcaatgtaagggctctgtcattagcctgcctactgatgggcttgagctttgggggtttggaccaaccttgtcacgccgccagacgaaatgaaaacacaatagaggcacattcctcgccacctatgagcccaaaatccacgggttaaccgccagcacggagggccgccgctccccgtagtcgtacagcaactcctcgtcgctgtcaatgtcgcgcatggcgacgagcaccaaatggaagccgtcacagccgaagtcagccacctgacaaaagagcgaatggagaagaaatgtggagtt

SEQ ID NO: 21003 - DNA, 1384 bp, Heterodera glycines
cttcgcttgttgcttgctgattgattggctgctctggttgtactgctgacacggagatcaagcagtatacttgtgttgttccgaccgtttgacttgtccgcgtcgggttggagtaactgctgccacggagagcgagcagttcacgccaacggtccttcctttgcttggcaaggaccggtactgttgccacggagagcgagcagtactttgcttgattactggcggcacggagaccaaccagtaattgcccctattactgatggcacggagaccgatcagtaatattaccgattactggcggcacggagaccgaccagtaatttgaccaattactgctggcacggagaccgagcagtaatttgacttaggaaatactgatggcacggagaccgatcagtatttccccgaactcccacttttgcttcccccctccttgttgtgtacaagttttgccacggagagcgaaaacttggaacaccgagtgaatttttccaaattcaccacaccttttccgttgagtgcaccgccgcggcttgtcgcgcacttgttgctgcttgtcgttgcttggttgtccctgcccaggtcgccacttgtcgtactccgggtttgagtgcgggtgtgggcgcggtggagtccgacaattgcctgcacttgggtgcaggactttgacaagttggagggagagcacaaaggggccgggggcgatcgagacgggactacggtcggattgggccgcaaaaaggaagcacagaaaattaccaccaaattttatctcaaacttgggtaattaaaccgaaatgggtgagcaatgggggaggacaattgaggggggcaaaaatcggccaaatgggccacaaagtgaaaaatgtgaacaatttggccctattagcccatcacaaaaaattgcattgaaattggtcaaaaatgggggaaattgggagagcaaggagttggagcagtacaacaacggaattgtgtgagggggcgcaatcaatgcatggaaatagcttggggggcgccgtgatggtgattgattggggagcggggcgcttgtgggacaattgtggggggcaagaggaagagagagagagagagagagaggcgaagcaacactttggtgtgctgctgatgattggtgtgttgatgaagcgctggtgttgagcacttatttatattggccaaaaagtggggagagaatgggcgagttgaagctgataaggcgggaggaacggaaaattgctggggagagtgacagccagtgataaggattgggggaggaatgtcactcaatcgaacattggccccaaatttgaaaattgtttaatttggtttttggggccaattcaattttgcacaatttgtgcacaattgtaaatcaaattat

SEQ ID NO: 21004 - DNA, 1061 bp, Heterodera glycines
tttaaatttattctctatcccagaaaaatggctctcttttttgcgagaaattttgtaccatacaaatgttcccagcgcgggcagaggggcgcggagagcaatggccattctattctacagggaatttttaaattattctctatgccagagaaatgtctatctctcttttgcgagaaattttgtaccatacaaatgttcccagcatgggcagaggggcgcggagagcaatgtccattctattctacagggaatttttaaatttattctctatgccagaaaaatggctatctcttttttgcgagaaattttgtaccatacaaatgttcccagcatgggcagaggggcgcggagagcaatggccattctattctacagggaatttttaaatttattctctatgccagaaaaatggctctcttttttgcgagaaattttgtaccatacaaatgttcccagcgtgggcagaggggcgcggagagcaatggccattctattctacagggaatttttaaatttattctctatgccagaaaaatggctatctcttttttgcgagaaattttgtaccatacaaatgttcccagcatgggcagaggggcgcggagagcaatggccattctattctacagggaatttttaaatttattctctatgccagaaaaatggctatctcttttttgcgagaaattttgtaccatacaaatgttcccagcatgggcagaggggcgcggagagcaatggccattctattctacagggaatttttaaatttattctctatgccagaaaaatggctatctcttttttgcgagaaattttgtaccatacaaatgttcccagcatgggcagaggggcgcggagagcaatggccattctattctacagggaatttttaaatttattctctatgccagaaaaatggctatctcttttttacgagaaattttgtaccatacaaatgttcccagcatgggcagaggggcgcggagagcaatggccattctattctacagggaatttttaaatttattctctatgccagaaaatggctatctcttttt

SEQ ID NO: 21005 - DNA, 2679 bp, Heterodera glycines
  unsure (1)..(2679): unsure at all n locations
gaaaacaattttaaaatttatgaatgagaaataaattcaatttaatttatatgtatttgccaaattatnttaattttgttagccacataaattaatgaataaataaatgaagttactctaaatgttacgcttatacaaaaacataaatatatgaaaatgttttaaaattattattaagtttaaatagtttttgcttgaatcataaaacattgtttgtgaacaaaccgacgacaaaatcgccttttttaacaggaattaaagagcatttactttaaaaaataaaggacaataatttaatagaaaataaaaattttaattttcaaatcaacaacaaaatttaaaataaattgcaattaaaaacgccaaaacaaaacacgatgttatccgtggaggcgggaaaatgaccatattctgatagtgaaaaaaaaagaaaatgaacagtattctcctcatttttattcttgtatcaacaatatttatccaaactaaaaagaaaaaatagcgaataaaaactgaagcaaataaaaataaaaatatttaaaataaattgaacttggtgtagaattaaattttgatcaaacatttgcgaatataaaaattatgttttttttgttaaatagtaaaatgaattaaaaaatgttcaaaacattttcagttgtcaatcttaaaaattacttcgcttaataataaattgtaattataaatataaaaatatttcgcaatttataattttaaagttaaattggagatgaatgaatttgggaaaattatataatatataaataatgaataacgataaaaaaaatacacattaaataattaaagaaaattactgatgaaaacaaaaacttaaggagaatctgaatgcgcacacaccaaatctacaagagcaagtcaagagaacgtgaataggagaaaatattatgaataaattaattaaatcgtcataaaaatagttgataaaagaagcaaactaattttatttattaatcatatcaaccaacataaagctatagaaagtaaacaaataaaatattatcaaaagcaacaattgattctttgtcaaattgttggttaatgagctttggaaaatttatttaattgaaaataactataaaaataatccttaataaatcattgatgaaacaaaaatttttgtgcatgttacctaaaaataattctgaaaattaacgtctcgaacttaatggtattgctcaaaacgacgagagtaataaaaattgaaaacaatgtacaattaaattattgactttttattaataaaatatttaaaaccacagtttaaacaaaaatattttaaatataattaatatgcatcaaacatgcacaaaaatctcgaaaattaggggtgcaaattcaataaaaaattttattcctcataaattttatcgattgctttcgcaattgcaaatcaaaaatttttcaagattttcgcatggagctcactgttgactcactcgcgcagccattcagattttgaaataattttaggcataatcaattttttttcttaagtgatattcaaatcggaaaatatttgacgaaaaaatggcataattttttttatattgaaagaaaaaaaaattaagtaaattttaatggtcttatcatattcaaatcaaaaatttgctacacattcgcgaacgatgatgttgagtaaaacaagttatgtgcataaataattaaatagcaaaaaaatttattatttatttatttaattaaaaatgcatatgttaatgaaacggcaaatttacaattatcggcttaattaaatttataaattttcgttgaaataatcaaatatttcaaaatagaaaattgtctaagaatttataaatgaataataaattttataaaacttaagaaaacaattacattttctaactcatattcttatcaatattcacatgctaaaagaacacggaccaaagaagtgcatcagtacaagttatggtgtaaaaagaattaaatagcaaaaaataaataagtggcaacaaagaaaatatttaatttaaaatgcatacagttaacgaagcagaaaattttattgcaacataaaaataaaagcaaaacaaaaaagcgataaaaataaattgttttcaaaagaaaaataaaataccaattaaaagttaaaacttcaaatttatattttatttaattttacctaacccttcacaattttttatttgtctcgtaatttgaaaattaaatatttaataatttaacaggggagttcaatttgcattgttttatccgtattattcatcggttgggtcccctttttggaaggaaaattctttttatattcatgcttgtttagtatgatagttaatttgttatcttaaaaattttctttgcaaaaaatgaagggttttttctaaatataattgtgtgatagtacaaattttaattattataataaatctacattgaacttatttattttttaattttcattttttatatttatagaaatgatattttttcaatgtttttgaaaaataaattatgccaaattttaattggtaaaatatacaaatccatgtgtttggcattagttttgtaattttgttaagaaataaatttattcttttttttctattcatttgaagtttcatgttccgtaggttgaatgattttatttggttgataagctgtttt

SEQ ID NO: 21006 - DNA, 3449 bp, Heterodera glycines
  unsure (1)..(3449): unsure at all n locations
ctaaacattccgaaagtgacgattagattaaaaaaaacgtttgtagaaattaccccttggtgcaaaggccttgcttaaagaaaacgcagagaaccgacttggggtcgacatctaaaagcaaaaaccaaataaaatgaaccaaccgatacatttttacgaaaaatgtcgcaaaaaaaaataaaatgggcaaatggaggcaaagactggtcccaaattttattttaatttcaagaaaactattttaggggtaatccaactaagcagctgcattcattttgcccattttcgaaccccgaacccggtttcgaacatttttcggaaaattttaaaattcttggcaatattttgcaaaaaaaatgaaaattttaattcgaaaaatgtccgaatccgagttcatccgtgtccgaaattgagccaaaagaaggcattgattcttgcctcgcgcctcagattctacccatagaaacaatttccgaaaataaaaaaaatatcgagaccaatgttcttcaaccattgccaacaaatttggaatgcatttcgcgcccccaaaatattccatcaaatccgtaatccgtaattgtctgtccttgctttatttgtgtgtgctctcaagtacctgcgctcactttttgctgtgttgcttgcacaactggtttgaaaattttgtttatgtccttcaggtcttcatcctcttgcttcttcttcggcgtgaactgcttggagggcgcgcccataatctgagaaattttcgtgttttttttaatttttcataatttttgagtacatttttctccatttgtgccctcaattttttgtttttcatgccaaatgtgcggtcttcaaggactttctgttttttcttctcctccgcctttttgcttgttttaggcgcattttttggaggcatttttatccgcaaaaaatttctgatggaattaaggaaatatctaaaaattcattagttatatgtatgtatacatataggctctctatagatagcgataaaccaaagggaaagggacagtgcctccattgatttgtaggcacaaaaactttgtttcataaatttttaaaatttaaatgttttggcgttatttactaaaaaattttttatcctcttcgaaaaatagagaaatttaaaattgtcggtgagtgacatccctcgtcaggcagtaaattcagtggcgcttatcggcactttcatgctttgcgaaataatattaggtatagagattaaatatttgctactcttaggaatttgaatctctgtaattctaccccgccattcccgaatcccgactttttcaaaattccgtgcttcagaaataagtctcatgtcaaaagcaattaatgtatcaattttaggaaaaccattgtttaatttaccatttaagacctgttaacttcttttgccttattttgaaaatgtctgcgaaattagaaacaaccagtccagatggggctaaagtcagcatcaacatccatgacagaaatgaagaaaaagccttgatcaactccaaggctgtccatgtgaggctgtttttttggaaaattttgaaaaatcaaagaatctgacgcttaaacggattgctattgatatttatatggtctcatattgtaaattttaaaattatacatcgggtcccgatctttttgaaaaaaaaatttgtgaaaatttgtccccgtaatccgtgttttctcaaaaatccataaaaatctgattttaggttattgaccctgccgaggcggccaattcacttggcactttcaaggagcaagaaccggccgcccagcgaattgctttacggttaaaacaccataaattttccaattttattttttttcgaaaaatttttgaatttttcaggacataccctcgtcgttgggctgtgcttgctgtggtggcattgttgaactgcttcaacacaatgatttggattgccttttcaccgatttccaaccatgtttccaatttttatggcgaggtttgtattttttttttccaatttaaagttttggctcacaaataatgtcataattaggtattgttcaaactgtgctatcaattcaaatgatagtaagtaacaagaacggccaagattttctatggaatacggtcccatttatttacaaaaaacaaaaatggttggaattttaggccaattaaaacactggatcgatcccgtctcgttaccaaaaatgaaaatccctaacctaaatttggacaaaatcgaaattctaaaaatttgaatttttccgatcacggcctacgctcttgcaaaaaaaaaactgaaattttttatttttagaaagattccgccacttatttctctggaattttcatttttgtgaccataccagtgggccttgttgcgatgtggtcgggcggacggtttggtgagctgaaaaattttttttataaaaaattaactcaaaaaatatgttttaggcctcagatcatccattttggttgcagcatgggctaatgggattggagctgcaattcgtttggccaggtcagccgtctggggttcgaattaacccatgaaaaatgtcagtcgtcaaaattcaaaagatatcgtattttcgaagctgatgggcaccccctataaaatttaggtacgccattcggtagatttttggctcaaaaacgactaatttggtgcttttttgtcaattttttcaattcaccctcccctctctgaaatttttgaaaatttatttttttcaaattaaaaaaaaattcggtgcgtgatttgtctttcgtaaaagattttaaacagtaccgattgcaatgaagaaaaatgagttttccattttccctcccaatttttcagttcatttttgcccgattcgatgatccatctccgttttccggttggcatcactggccaaggcgtggccgcgttggcctacccgttcatcatgtttttgcccaccaaagttgctgctgtttggttcccggacacggagcgcacattggcaacaacaattggggtaaaaatgggtaaaataaataggaaaaaagcaagactaatagaactcactttttaaccgagattggttccattagaaattttttaatgaataattttttaaaaattcaataattcatcataaaatttctaaaaaaaatttgagaaattttcaagttatcttataaacagtatttttataaggcttttcttgaaaaaattctgtttgaaaatgcaaaaaaaaaaaaatttttttttttggggaaggatgaacgactttttttaaatttcatttttgtccaggtgatggcaaatccgttgggcgtgttggttgccaatttagtcagtgattaattggcgattattcggtccattttttccatttttaatgcatttaggtcagtccaatgctcgtggaaagttgtcttagagggaaaatttatcttaccttttatgtcttttgcaaanttattt

SEQ ID NO: 21007 - DNA, 2005 bp, Heterodera glycines
  unsure (1)..(2005): unsure at all n locations
tatttggtacatattttggttttttgtacagttttgttacttatttcgggattatttttttacacnatatatatantatatatatatatatatattgaccacttttgatagttaattatattttcatctcaaatattttctctttcaaccccgagcattttttggtcccaattaaagatttttttaccaatttataatgttttaaggaaattgggacccggcattgcgacggcactgccggaagaattaggatttctaatgagattgataagaaaatatgaaaatttttcaacctccccccaccctttctgatgatttttagtcaaaattaaaaataattatttgagattgatccaacgaaaaaatacgaaacataacctaaatcacaacttactcgaccacgcataggagaatcaaagaaacaaaaacttggcaaaataaatatacaaaattatttaaacaaaaaccaatctttaggggtgtaaaaagtctcagtctcggaggccgagaccgaaaactcgagactcagacagaaaccaaaaaagagacttttctcgagtcgagaatcgcgaccgagaccctcgaacagcactactcaatatggttaaattcgaaaaaattcatcagttaataaggttctagaaccggagttaaaatgaatatttgcaaaaatttcccggttgcgcctaacaatttgttccaaattttcaacaatcttccacattactcctttcgccggagattcaatttttctccttaaacgaagccacctccccactcatacgaagccctcctcctttctagcctcaattatgaaggtctcatattttccacgaaatttcttaaaaaagttacaaaaataaaattttacaaaatgattttttatcggccaaatgttgtttttgaaaatttcagttggaagctcagaattaacttgttttcattgatacttttgtgctctttctttaatcgcattcttttccacgaaaaatttgagtactttttggttaaattttgaaaatctataaatttgtcgagcgttaccgaatagcgtcactgggaaaaaatgatatttgtttatattgataaagggtttgcatcaaacaagttaatctaattgatttaattatgataattattaagaaaaattttccaaaatttaaaccaatgaatctaaaaagtaattccctaagtcaggaagatgtttgctaaaatcttaaaagaatcgtttaagaaaacatccagttcggactaaacatggaaaaatcgaaaagcccctaatcctaattacgggggcataaatcgcctctacggaattcgtttaagaactcattatttttgtcccaaatatctttcgttggccattgatgttcatctttccgtttgaactaaaaagaactaaactagcaaaacaacttaaactgtttttgaaccggtttataatgtgagaaaatgataaaatgttgaactctaattctttacttaaaataaatattttaagatcgccacggaaatacgaaaatgttcaacaaagaaatgaaaactttgcaggaagcccaaatcgccacgtaagattagtaaaatatttaaatatataataattaatgctctaaattttaagtaaatacctaaaatttttgcgcaattaatatacacttgggagtttttctacctattacataggtacttgtttttatacctattttggtatttttgttacctatcaaaaatgcaataaaacaaattggaaaaatccttgaaaaattcatcccgcaaaatttctaaaaaaaatttttcaaaaattcatccccattcttttcttgacacaatttttaatttaaaaaagtcattattttctaagaatattagaaatatttaagttattcggtaacacagaaatagaaccaacatttacatttttctactanaacgcacagaaatagaacaaacatttacatttttctataaaacgttaataanaatttgtttactatntttctaacta

SEQ ID NO: 21008 - DNA, 1221 bp, Heterodera glycines
atttaattaaattggatttttgaaaaaatgtttatgctttatttttctcttgtttaggcattgacacctatgttgctgatgggcaaccaagttgtagaggagtaccgcgaggcattccacgaagcatggcatgcggccgcttgcaaactcaacaagcactgccctcgagtgatttttgtgagagcatttaataattggtttgaatgcgtatgtgtatgtttcagctctctaccctgcccggtgtggacgaaaatgggcaagcgtaccgagcgagaactaaagttgccgagcgagttttgtttaacaaggaccaattgctggcccaaatggaatatttccttggtgagatcaattttttttaatttaaaggctcaatacccggtgaactggtttttaacagtgtgaaccgaccgggtatcaagtgcgacatggacgccgcatacattgcagcggaggcgatagtaagttaacaaaaaacaaaaaggagataaatattagcttatcttttataaccaaaatccaattacaaaggtttgtttcatcgaagacgccggccaaacctacgtggaattttccttcgaaagacggtgccccgttcaacagagaagtgcgcccgaattcggaaacgaattccgtaaatacggcgctttctgtccccttaattagtgttaggagtgtaggatttttcgaactggaactaatttttattaaaggattctttaatgagtatggcaaacaacatcccgacataaggaattagttgacagattaatttgtcaattatcttaagaattatcattaaaatttcaatttttcttctatagggactcaaaatttcatataagccagacagctcctaacaattctttttcataatgatctaattttattctttgagatttttaatttaatttaaattttttcgaagtttcaaaaatcccgcaatcccgtagtggatctcgcaaattttagaagcgggatttgcgtgattattcctctggctctcttcccgtaaaaatttttgagttccaatcccgcagcgagacacgcaaatttctattaattatggcgttttagaccccttactgacggttagtggttaaggattttgattggtaatatttttcatatggctcgaacagaaaacccataaaaccaacgatagaaaatcgaaacttaggagattctggaactttcctaaacgattctttcatgataatg

SEQ ID NO: 21009 - DNA, 2727 bp, Heterodera glycines
  unsure (1)..(2727): unsure at all n locations
tttcgaaaaaattctcattaaaaaaaagaaatgttcgcaaaaaaatgacgaaaatatttattgaaaatgccanaatgacgacgaaaactcaaattttttcgtgttttgtggggtgtaatttttaaaaatttccaaaaagttgatctttaggggtgtatttttcgttttttttttcatttttcttgtgaaaatttccaaaaaatggccaaaatatggactaaaaacccaaaaatggcgaaatatggatttattcccgaaaacccccaaaatattgatttatatggactaaaaaccttcaccaaatcaaaaaattttaacgcagaaatgctatttttaagcccctttcttcatagcatatgcgcagaaaaaatatgttaatccatataatttacaaccctagtaattatacactaatgttaataaactttggaaaaacgtcaaaataggttaaaataggatttttcaaattttttaggtatattgtcgacattatgcgtatattttatgtgcatatttgtcattttttcgaaaaattctcagttagacgggccttttttatttaaagcgactcttttgaccaatgaagcagaatgttaaaaaatttaactttaagaaaattggtaatgttaaaaaataagtctaaaaaagtcaactaaattatagtattttttgtctacaatttttggttttagaaatttcacactcaattatgaaaaattaatgtgtatttaattccgagtcattattagggttgtaaattttaataaatattttcaccatttttttcgaatttagctttttgttaaaatgagatttttttttgaaattttgcagaatactagcccttacactaatttgtaaggcatttttttgcaaagttttaagggaatatgcgaactgaaaaaatcagctttttcatttataatttttggacaaaatttttaaagcttatccgaatttgataaaaatttcccggtggtgccgacaggcgcagcaggatcaatttatttaatgtttaaattacctactcataaaacaacaaattgactttttttttgagaaatcctttaatcgaagaaatttttaccaaattttaaatgactcatctcataaaaataattaaattaaaaaaaataataaaaatttcaaaagaaattaggatttttttttaataaattgagaaagttgaagaaaattaattgtaagaatgaagaaagcctgaaactagtcatttttcggatatacatgtgtttgatccggcttaaaggcaataaaaaatgcttataggatgtctgtacatgatgtcaattttggaagctgcaggtctaatgttagaagctacctaagcctcatggaacttaatttctcagggaaaacttggaaaattggctgtagtatagaattgggcccgctaaaaagccgcctaaaacgagttccaatcaatctctaatgactagggtaataaatagggttataagttgtatgcactaaaaaatgccaaatatgcgcataaaatatgcactaaaaatcccccaaatatgccttaaaaacacgaaaaatgcccaaatatgcactaaatatgccttaaaaactagcaaaaatgactttgaatcctcaaaaaatgccaaaaattatgtaaaaaattcagaattgactttaaaaaaccaaaacaatgactaaggtgcgtttttagacaattgaaaaaaattttttatatgaacaaattttttcaaaagttcacaaaaagttcaaaatttccaaaaaatgatcgaaatatgctctaaaaatgtaaaaatggcaaaatatgcatttattctcgaaaagtccccaaaatatgcttttatatgcactaaaaaccttcaccaaatcaaaaaattttaacgtagaaatgctatttttgagccctttcttcatagcatatgcgcagaaaaaaatatgtaaaagcatacaatttataactctagtaataacatatgttctaaaaaatgctgaaatatgtgctaaaaacccaaaaaaatgccaaaatatgtgctaacaataaaatatgtgttaaaaatttgaaaaatcaaaagtatttttgcataaaaattccaaaaaatctcattctttatcatttttgcccgcgaaactttttacgataaatttttttttataaattgaaaactccagccagagaattcgaaatccaatgaccaattaagaattcgattttttttttaaattttttgtgtttttcttacagatatttctcaaaagtgtcaaaatatgtgtttttatgtttttataagtcgctctaaatcaaaaattgttcggtctaaaatataaaaatcccagctctaattatggatcagtaaatcaattggaatggaaaacagactgtattaaagcaatttaggacaatgtaatgaaagtggccatttatgtgggaagataaattccaaggattaaaattaccttattttttttttttgtataaccataaaaatatattatatagttaattttttatgaactttttttcagaaataaccagatttaatttctttatatgattaaaaagatcaaatatttttcaatattctgtttaaagaaaaaaagctttgtcttatcataacttatcgaattaatctcaatgattgattttcttttctcattccatctcgacttttctgatcagtgattagcggccctgcggacgctgcttcaatactgctggagttggggcag

SEQ ID NO: 21010 - DNA, 1515 bp, Heterodera glycines
ttttatgaatttttaaaaattttttcatttttgttgatttttcagaactttgatcaattttttctgatcatttttggctccatagccaaaaagccgaaaattggcaatagcaaatcatctatgctctacacgatataagtgattttaaagcgatctgagcagtgacagttcggaatgttcccttgttagattaatttggcaaaagagactgtcttgcattttttaggtgactttcaacttggacagtcgacgaccctttgggatgtccattgtgacgaagaacaaccgttccggatttgcagggatttatgtgcatgaagttaaccctggtaagcttagaatttagagattttagtacgatttgttttatcccatttcaggcggtcttgtggcgttggacggtcgaatcagacccggctttatcattctggaagtcaacgacatttctttggatgaccttagctcaaaggaggcgctcaatctgatcatctcttcggttcgaaatgctaccgaaaccagggggtccgttatttgtttgtttgatggttggttcatttttacgggttttgtcgtttaggcaactcaaattggtctgtgctcccagcagtgagtctgttgaactcgcgcgaaacgttttccaccccattttggccgagcccgtacgaccgattgatcccaccgcgtggattcagcacgcaaacgccgccagagggttggaccaccaattgcagcactttccccctcccccgccaaccgctcattcgcaaggtccgtttgtcatttttaaagtgatagcttcgttgctttcttcgtcctcttcagggcaacagccgccgatttgttgtattatgccgccacaatgtcagccgaacgcggcgaaaccgatggccagcaaatcgtcaaccattccaaaaacaaaccctcagcaacagggaaagggtgggtcaaaaataacattcgaattgtctcattttgcacaatgagttagtgtggttttatattgatttattcgctttcaagtccatgaaaaacaacaccaatttgcgggtgctgcaaattgtgccgttgacggagacattcgaatgatccaaaacccatcgactgacattaccacgacagagtcgggcatttcctccgtggaatgctctattggccaattagagccctccacgaaagcgaaaggcgcatcaactggaaacagaaagaggagcaaaacgacggagacgaagaagcgaaggggaagcggaggcatcgggacggcactccgccgattggtgtgcattcggacgacgaaaagaggggggagagggaacagtggggaaaagaaaaatgggtaagcggaggacagacaaacggacgcagcggggggaagggaagaacggaaggagggaacgtacagcacaacccaagaaataattgaaagagggcaaagcacggcggatgagtcagcagcgacttgcaacatttttttgattttggaatatattcgccataatttttgctaattctaacctc

SEQ ID NO: 21011 - DNA, 942 bp, Heterodera glycines
ccccccccccccctcgttcgtcataaggggggcggctgtaaaaaagggagggggtcgtcgtggaagggggctcgtaaacggaagggggaaaaattttaaaatttgcacaatttcctttcaaaatttttcccggcggcgcctatcggcaccgccggaccgcccgcccccttcccgcaaagttttttcgaaaaaacacgccgcaaaaaaggtggtctgaattgaaaaaaaggtcgccagaaaaaggtggtctgaatagcaaaaaaaaaggtcgtcgcgcctgagtaaaatttttgatcttcgtatgaaaaatcgggcccgagacacccgccctgtcccaaacgtccgtcgtatggcccttgggctgagacaccccttgtgcatgtatgtaccattctccctccctttgcttgcgccgactcggactctttcgcgagggtatgtcaatgttttcagcatggcgcccattccctgcacataattcttttgcttcttcaccacattttgtggttcgtctttggtggtgccattgtcgccgttagcattttcattgataatgcccatgctgctggaggttgttgcggctaattcttgcgatgccgatctcaatgctgtaataataataatcattattattaatttgccatttccctctcccgtgcaatggcacacccttctgctccttcgtctcctctttcctatgcttttcctcttttcctcccacttcgtttctcatttttactctttcgcgcgatttgctcttcatttttggcattattttccgccttatgattgacgtctttcttcgcagaatgtgcaccagcggagaaggggacaaacgccgccggggggcgttaggccgtgctggccgatttcgacgattattctgccgtatttcagtggcacgtcggatgagttggccaatgaggtcgagacacaaagtga

SEQ ID NO: 21012 - DNA, 1938 bp, Heterodera glycines
  unsure (1)..(1938): unsure at all n locations
ctaaaaaagaattaaanagtattgaaantggtttgtcctctgtaaaaaaaattttccctattcttgaaattttgcatagggccatattttatgccactctatcgaatccctattttattttttggaatttatgtttttaactcgaactcgagatcggctcttctatttttacaagggaaaatccaaaaaaatttcaagttttgcaaagttttggcgttctgattactaaataaacaataaacttatttgcactgggaacccaaaattgactcgccgtgtaaaattgaggcaattagtacattcgaatttcattttttaatttaaaaaaggttaaaatattgaaaatattaatgtcatccatcaatgcttcaataaatagatcatttaaaccattctttgaattaaaaacttaaattccaaaaaaacttttcgaaaattgttcgaagccgggttaagggttcggattcgccaaaaaggaggccggattcgaactcagctcgtcaaaacacccctagaaatatgttattagattttcagaaaactaataaattttgttcgggaccaggaaaagagatgattgccaaaacatttgaactctaaacagttcatattgttgacttttttaattttaatcttttcggcaacatttttcgtaattttaaggaactgaaagatttttttacatttgtttatttttgccattttcagaggctattggaacgaagagacggcgtaaaagcgattaaatgagcaataagtgttaatatttaagaatttttttttttgtttgtaaatattgtacgtttgttgctgccttttcaagttataatgttcgattatccctttaattgttatacatacagtcatggacatatgtttaacaacactcaaaatttttctactaaatttgatttaaattgattataaaatctcaatatgactatattgtgtatatatgttttatatttcttgtagcattttttgtgggctttataatgtaccattcactatcccctgtcaaaatgttattattagttacaaaccattgtaccaactgcactccctttttggggtggtcatatgtttaacaacactacccatttttttttcatcagcattaaaaaaatctaaaaaaattcaggtaagcataactttggatgctgatcaaaaaaggtagcaacaccaagttgatcagatcactccttcatgtagggctgccaattttatgtaaatacatattttttttcctggcttcttgctctaaatagcaggaaaaacactttcttttttgtgtttgcgaacaaaaaccgggacttttatttacatatttttacatatttcgggattttcttacatatttgtacatattttggatttttttcatatatatttacatatttttacatatttcgaggtttttatacatatttacatatttcggggtttttatacatatttacatatttcggggtttttatacatatttacatatttcggggtttttatacatatttggggttttttgtacaggaatttttcttacatatttatgtacatgtttggatcactttttgtacatatttttagccctacacggcgattcaattttggggtccaagtacaattaagttggttttttcgtcttagtggtctgtgagttagtcaccaaaaagtgggtctcaggttcaaatcctctttttgtttgtgtataaatttcatttttttaaagcaaataaataaaaaaataataaaaacagaacgccagaagaacaaatacaaacaataaaaggtaaacattttattttaccctttgattttatgatttttttttagcttataactttttcaataatagaccaaataaaaccattttatgctcattttggagggaaaattctgaagaatatttcttaattagtcaaaagtttaaaaaaattg

SEQ ID NO: 21013 - DNA, 2139 bp, Heterodera glycines
tgcataatgaaatgggaagagcacagcatgggcacggtttgcagccattgctaccatatgcaaacgcatactgaccaaactgtaggattggaattgtgcaactacggtaatcaaaggcctggccacaacgggcacattaaagccatacaacacgatggggctgagcagaattcgcacaaaacacatcataattgtagggcaaaactaaagcgcaatgtgctgagacgaaccgaaaatactctcagcgtcaattataaaatatttaaatttaaatcaaataggttgtcgaaaaataataattttaattatactattaatattaaaaatatataataaaaaagataaataaaatcattccatctcggacaaaaaaaaacatattgaaacgtaaattttaatttcaaatcttgaacgcatcaaattgattggcaagtaagcttattagaggattttttctttttagaaaaaaaaacaaatttactagatttcttcttaactttcatgcaatatttgcgtaaatttaagttttttaataaaactatatctaaaacgaactctgtgtcgggttgaggtataattcattcgtttatccagaaatttgatgtgtttcttcccataaattttgcttcatctctattcttttttccactaatgttctaagggttaaagccccgaccccgagccccccgacccccttggctaccgaagggccgggtccgtgggagtgttggtcgccggagggccgagtccttgggagtattggctactggagggccgagctcttcggagtattggatgccagtgggccgagctcttggggtttttggctaccggaggaccgaactcttagggatgctggctattggtgagccgagctcatagaggttttgatttccgaagggccgaactttgggttttgtgctaattgtcaagggaatatggccaaaaaaatttcttttaggataatggatcaaaataatataacaaaaagaaaagaaggaaatgttggagatttttgggaggggggaggtgtgcaaaacacatccacgctcatacattattattccaattatttaaaaatggaccctcccctttccacatctgctctacacttcaaaattaaaatgtttattggtagtcaaaattattcaaataatgtgaaaaatttggtgtattattcggtggtttttggcttcttcttttgatcggaaatcatatcactgacacagcaattgattctggcacattcttcacacatctcgagtccaatcgccactcgcccatcttccagccgacgtgtcttgtctttgttgtgaaataaattgttccagtcctatgaaagctgtcaattaatttggtcgtcaaaaatttgattaacctgaacacagccgaatcgctagtacaaattggccccgcgtgattttccaaagaaatcgctcatcaacgcgtggcttcttagctttcacttgttgctcctccgcagtttcgggttgtacaaattgctctgccatttttgatgatgtttcgcaagactgatttgattgctcgtgaaaaattcggcttaaatacctttgcaaagtgggcgtggtctaattttccgggagtataaaagccccagcaatttgtcagctatgtctcattcgttctgcttcaatggtcctcgtcatcgaattttgtgcccaaattctcggctgttcccctaaatcactccgcgacaagctcaatcatcccgaggaccgagtgaaggcactgaaggagctggtcggaaaaaaggttcggacgacatacaaggaccggaatggaatgcagaaaacattttttgtcgacggaatatcggaccaaggagcggctttgaccccggcgtatggcagactcagacaaccgtacaacattaacattgctgcccatttctacgctcgccaccgtatcaagctgcatttcccatacgtgccgtgtgttgtggagaaatattctggatgtggcgaagacagatactacccaatggagctactcgaaattgtggatgagtactacaccaacaaagagcgatggcttggcaaattgtttaccgaaattgaggacgacttcattcctgtcaaacgccgtggtcgagttgacgaagacgaagaaattgaagct

SEQ ID NO: 21014 - DNA, 1751 bp, Heterodera glycines
  unsure (1)..(1751): unsure at all n locations
gttcgatttaataatttaaactagctttattaattcccttccagttggnccgttacatcgcttcaaatgtttcgttccccatatccgtgttgaagccatcatgaattaacagaacaatatttgttgtctccgaagtggtgtttgattcttggtgatattccaacaattctgccgctgttgcaaatgcctaaaaaattgagaaaattaaaatttgtattctttattgacaatttttattttaaatttaccttggaaggcgccgtttcaagtcgtcgtcgaggattaagcccagagatttgggcgataatctgcaaatttttaaaattaaaaaatggtgcaattttaaatgaaattattaattatttttttctgaaaactttgtcactattataataattccaattaaaatcattttgttttaaacaataaatttagttcatatttagaccccaaaagaatatgttttttcccaagaaaattaataattaattaatttaattaaaaatgaatttaccttttcaacattttttgcttgagcataatttagtccactcagcaccaccgacgttctgtgaaaggcgacaagtgcataaaatcgttgatgccctttcacttgctgatcaatgtgtctaaattaaattaaaataaaataaataatttttatttttcttaagacctcaatgttttgaaaagtcggtgttgctggttgcgaaaattggttgcatattcaggggtaatgtcgaacaaaacaacgactcggagggttctggattgtgcagaacaatcttanaaatatggatggatgcatatattatttatgttttttaaatacaataaatttatttaagcataaatggacaaaaatctcagataaaatactgcaaaattttctaaaccaaaaatagaaaatcaaaaaatttttagtgaaaaaggggaggggcttggaaaatatctttaacaatctcaaaataagctgttttaaaactaatattaaatttcattatatatgctcttattttatgaaataagctaaaatttttcaacccactgaaaaaggattttattttacaggatggctataattcagggaacgtgtggaggccggggtaaatttcacgaaatgggaatataaattttttttaatttgttaattaatttctaccgtctgttgtttgcttgacagttatgttgggtgctgattgtgacaaagttgtcagaatgcaaatcagtaaaaataatagaatatgacaggtgatcattgggaataattaaaactaaattgaaaatcaaacattatttttttgttttaattaatttcaattaaatttattcgttttaaatttcaactttcatttaaatgtgcaaaatatgaagaaataaaagtgaaaaaacgaatattattttttgctttaataaattttatttaaatttattcattttaacattcatttaaataattattcagcttatcaaagtcaatgtgacaattaatgttagctagcagcattttagcactggggtttcactttatcaccaaatttggctgtgtggaattgcgcggtttatttatgtactcttcaacaaataattagtccattatttatcattgtagatttagtatatatggatganagctaataactggagatacgaagcgtaagctgagaggtggggagagggagatggagacagattatatggcattattnaatccattatgttttgtccccagccgtcgctgatgagcatga

SEQ ID NO: 21015 - DNA, 1638 bp, Heterodera glycines
cgggtgggatggatacatattacatggacatcatttataaagcttatgggggatctgcccatctgctggtggctggggttgcatttttatccgaaaaagtgaaaccggtgggggctgtgcgcaagacggcgtagcgggcggacgagcgtggcgggcgggggggcatgagcatttccaaaatgggtgggtgggggaaaatgttaaagttggaatgaagatggggtaagaggatggagaagattatacttatattatgcaaatcattagaaatgtcgagtgctatttaagaaattaattgatcggaaatttgacaaatattgaaaattaatgcaatataacactaaatttcgatcgaaatttcaaaaaattcctcaatggtacaaatttccgcaccatcgaaggatttgtatcccttcaccagaaattgggacaatttaggcattaacgttttgctaaaattatttaaaaatcattggcacagcgaaaaatttttttttaccatttttttaatttgaaaatagtaaaatattttaagtgcaaatatttgtcatttttttgtgcatccaatttattagataaagaatggacgaaaatgatcatggtcacttatatccattctcaatatcaaggtcatttacttccaactcccttaaattttgaaaaaaattatttatgggggagggaatgtcgcaattttgagataaccaaaaaaatgtttggaaaaaatttatgcccaaattgatacatattattacttttttgaatttcaaattttttaaaaaaatttgttttttgaaaaaatctgattttaatttttatgtttttaaaacaaaaaaaaatgaacaatacgaaaaaggtagacgactataatattttgattttttttgtgctgcgcaatttttctgcgataaaatgtgcataattagttaagcaggatgatcagcaacatattataaaaaattataattaattagaaattatacattaatcagcaacagataaagggatgacatgcaaatgagcttcggaatgttgtacacgagaagcggcttaatgcgattagtgaaagaggagatcagtcaacttgataatttgcttatttattctgtgtttgttgaaactgatttttaggggtttcctgtgcaactcgattggtataaaaaaattttgaaaatcggaatcctgaactttagtaggtcggaattccagaccacaaaaacattcggatgtgtcgaattaagatttgaaaaaaaatgtgtgagtccagtggacagtggagacaggtattacattacgtagaattggccaaaaaaaaatgggtcgatttttgggccaagaaaaaatcagacttaggcgggtagaaatcttcaaaactattccagcaggtggtaagccaaatcttagaaataaagacaaatggtagcacttttaaagcgatttttaaaaatcatttttcaaaagagaattttagaatttttgcacagaaaatcaaaaattcaaatttctatttttaaggataaattttgcaaattctttcgaaatttcatttcttacaagtatattttcgttttttttttgcatttaagttaagaatttctaaaaaaaatccaaaatagtggcaaaaattgcgacaaaatc

SEQ ID NO: 21016 - DNA, 1442 bp, Heterodera glycines
  unsure (1)..(1442): unsure at all n locations
aaaaagcagctgaaagcaaaatcacattatttttgctngtcagaattcaaanagaattcncagtctataaatgttaccaaaaaattacaaaaatatgcaccggcagttttcttttcttttttaaagatgtgaaaagtgacgaaacaatgacgaaaggggtcaatgtcgaaaagtgccaaaaattcaaagaaagaaggggtgactcaatgagaagaattgaggaaaatttatgggcaacggtaaagctagtgaaaacggagtatgcttgggcaggtgaaaaatgtgaaacaacagtaaatgattatatagagaaaggtaaaggtggaattttggatttttatttggtcaccacatttggccataaattaaatccttataaaggttgggacgaaatgcccaaaataactttcatttgggaaattccagagcccagcgacctatattgggcaactcacgctccagtaggagaatttttggcagaaattacagacgacgcaattgttgtcgaaagcgaacagagtgtcttttactttgaaaaagagaacactggccgagaagggattattggtgtgccagaggatgcttacaaaatgtccaatgatgttttcattataattcatcaaattgaccatcgttttaaaagggaagccaaaaaaaaatggagcctaacagaaaagaaaggccaactaaacaggaagtgaatttcaaatttaaatctgaccaaaaaaagagtaatgagtcaaacaaggtcaatttgaatatgcaaagtacaaaagcgcctcttttgtccacaactcaaattacacctaaggttagggaggtcattaccactgaagcaccaccaattacaacaacgcaaacagtaaaaattgagctcactacgaagccgcgtaaaattgagccaaaggttaaagtggaaactccaaagtccttctccaaaggcattcaatttaaaagagtaagaaatgaacaacaaatttacaaaattatgggaattaggaaaggcacaatcctgactactacaattccatttataagtacaactcaagcaccaaaaattacaaagccgaccacagtaagttcagtaacggtaccaaccaaatcaagtcaaaatgtaaaaacgactatgaaacaaaaggttgatacaaaattaccgtttataaaaactacggtaaaaccaacggtaacagtcacgacaaaaaagacttctaaaacaatgccagtaactgttaccttggcaccaaaaactgagaaaactgttacgacaccgaagccgatttttacaaaagttatgaccacagtggccacgaccacgacaatttcaccaataaaactgtgactaacaaaaaacagatttattaaccaacctaattggcacaaaattgaacaaaaaccttagcagtaagccaacgtcgcttacaaacagcacggaaaaaaatgat

SEQ ID NO: 21017 - DNA, 1818 bp, Heterodera glycines
aatacacaagcaaatgatgcaatttgacaaaggttgtgggaaagcgagcgaacggcgtgaagactaacagcaaaagattttaagccgtaaaaatggggcggggaaagagtcgtcgaaccgccgggatccctttggtattgtccaaggctcttaaccgattagccatcccaccacaattagcgggtgcttgttttttggccaaatcacttccttcactcaacacatagaagacattcagaaaaactggaagcaccgctgaaacgcatgcgacgcattttcatgtcaatggattttgggaaatgggcgcagcgaaagtgccgagaattgggtgggcgcggacgaggccgggctcggggctcagaaagtcactgaatccgaaatccggtccccaaacgattcgaaattggagtattcttgaaaatgctttactaaatatgaattatctcaaattaatcaaattctaaaattttatatttttttaatatttgcattacaaggaattttggcctaaaaaactccaaatccgagcccagccaaggcacggactctttgagcaccataacatttagggatggaggagacgttgttgcacaacgatctgtggataaacaacatcctttggcacaacggacagagggcggacgaagtggccgctttcattgactggcaactcgcctcccgtggttggcaatgagtgacagaagttcatcaccaatttgcacaggaaacccaatgattgacgtggctcgactgctgttgatgaacacttcgccagaagtgaggaaagaattggagaaggacggccgcctcctcaagcagtatttggaagtgcatcggacggaaggaggacagaatcaattcgatttggagaaggtggggggggagggggagacgacggacatgacaattggccaccacagcttaccaaagcgtacaaattggcaatggtcggccaaacggtgggctttgtgatggtgttgcccttcttccaaagagtgtgggctgaagaaacgaattgcgaagtgaaaaacgccaaactcatggaaagagcagtcgctgctttggccgatgcggtcgaagtgttggaggaggaggcgccggaatggttggaagacgcggccgaagagccggggaatttggcggagaatcccggcatttgatggacccttggagttttggcaaattcccatataataagtttatacccatgatttatacccatgatccaagctttcgaaaacaacatatgctgtcatgggttcgagtcgcattaatttttgtgtttccactcattgatgaatgaaaataatatcacctttattttgcttttttaatttatttttttgtttttggcaattaaattaaatttttttatcaaaccactccttctctctcacactcgtacgcgatccatctatattgctgatgctctgcaatacgcgtatgtattctgcatacccctctgtccctgactctgtctgcgtagacagataatcattcagagcattatattcgcacctttcccgtccgtctacttgttttcaaatacattttaactgcacaattacgcccaacgcctgacttattcattcactgaactctcatcagacaccaaactttttatgtaaggattagtatattagttttcttgacaaatattatatttcataattcagaccggcgattgcgttcaacaaatcgacgctatgttaggggaagtgcgcttgaacacaaacccattgccttggtacaacaaccacaagaggattttttttgaatagttaaaaagggaaaatttcttattttgagccattaaaa

SEQ ID NO: 21018 - DNA, 1952 bp, Heterodera glycines
  unsure (1)..(1952): unsure at all n locations
gacctggattttttgaaactcattttaaaaatcaaaaaaatgtgaaaaaattaattaattgcttaggaacatctttaaatatctatttacaataataaggtttctttanatatcattattagggatgccaaaaatatgcacatgcatattttttcctggactgcgggaagcctgaaacgcacgaaaaacatgtttttagcttaatttgaagcttctaggatgactttccatgtgcatatttcgcgatttatgtgcatatttgcatatttcggcatttcatgcatattttatgtgcatatttgggcattttttcaataaatcctctattaaaacggccccctctattaaagcggccatttgggctttaatggccgaaaatttttcaaaaatatcagatttttgggtatattttctgataaaaaaagtaactttttaaaaaattggaactttatgccaaaaatagtcagaaaaatagaaaattctccattttttgctcttcttcaaaataaataaatattacttttttggttctaaaataatcattcatactatttttagctattttcgggatttttatgcttaaatttaacaaacttgaagaaatttgaaaatttgccctcaatttggaaaaatttatgtgcatattttttactttttatgtgcatatttcgcgatttttggtgcatattttatgcgcatattttacgattttatgtgcatataattttacaccctattaatgataacttgaaattaataaagcatgataaatttataatcctaaattaaatgttgtttgcaagtctttaatttcctcgggaaaatatacagggctataatatatatcttaaaggcattgtcctacaaaccggacatagacctagtatttgccgaaactccggtcggcgtgagcgtcggcctttcacgcagcagtgatgaagaggcaggaattatctactttgagacggctttcaaagaaaatggcaaacacacaaagcaacacctgaccataacgtcaggaggcggcacttcggacaatttggcgcacgattcaatggaaatagcgcatacattcgccataaatttcctcaaaacaaagggaaacacatcgctagaaaaagcgcatgtgcatatcaacataattagcactagcacggtatgtatttgattaattaacaaatgggtggagattccgcaccacatccgaaatgaaattccttaggaaatgggttatttttaaatttaactaagtcccagtcccggttgtgcccaaaatttccggtcccgacctaccctaattttaacgcattttaatttaagaaaaatgtggataattagatggagccaacaaacgacgaagcttaaaaatgctatcagcaatgaggaaaatgacgtcagcaatgagaacgatggtatcggcagtgaagacaattcatcaaatgacgtcgtcagcaatggcgaggaaaatttgaccgtgacgattcgtcaaatagagtcagcaatgccgacatccttgctgttcgtcatgattcttttaaattatttgatttattcgtttcagcgcaccgatgagatggatcggaacatgaaagacatcgccgcatcggttcgactgcttttacgtcagcaaagagggcgatgggttgctggacggtggctcattgggctgttgatgggaggacagtgtttcgtcgcagaacgtattcaggagtttctctaagcataattcgaccacattatgggattgttgttattatttgttatgcaataatataggaattttggtaatactgtgctttgtccacccccctttcgaaattttttttatgatttcaaatgtcattaaaacattcttccaaggattttcggggtcgctgatcacgaatccggcacccatttcgaccaattcggaatcccggacccgaattcgaacaaaaagccgaaacttcaaa

SEQ ID NO: 21019 - DNA, 3045 bp, Heterodera glycines
tgatgattcaccacggtttgggtgaaatggtttattgcaattacgtgacacatgcccaggttcattacaattgtagcaaaccacggggctttgggcaatcggggctttaaaaccgttcccaaaatcacgcccactctgttgcggttgctggaaatttcttccattatttggtctgaatcgctctgtgttcgcccttttcgctgccctttgtgttgtctcggcacgcgaagccaaagccacaaactcgacgaagctcatccccgatcggcgatgcaactccaaacttagagcgagctcggggttatttaagctgcggatcagatgtttaatggagtaatcatcggacaaattttgggttaatcccgggtacgctctacgcactaagcttgaaatccgatttgccaaatcgtctaagttctcccccgattttctgtagacaccattcatgaggtcgtcaaaagcactcatctccctacaatccgtttcttccaactgctgcaaaatgtttcgtttgatgttttcgtacgcgaacggctctgtggctaaagcagcattgtaggcacgttcggctcggccactcaatttggcttctaatgattcgattcgctttttgtttggccattcactcgtatattgtgaaaattttttgaaaaagttgcggatcgaatcacttccctcgtttcctttaatgtcgggcagcctgtccaggatcatagcatattcaatgccgcttaaccctgttgtttgtcggttcacctcctgctgtgggttttgttgcgccatcgcctgatttgtcggcggcggaatttgctgttgttgcacaacattcgttggctgagctctcattggttgaattgcgggttggggaatttgtggttgaaacgcattcggtgcccaattattcataaatggcacaaaattttgagccggcatttgtggaacgaaattcggtggataaaacatttgaaaattttgtggtggataagccatcatcggctgttgaggccacgcgcctggcgcatacatgccattcataccgaattgcaatggttgaatgagattggggttgtttgggattccgaaatttcccaaattgtttgcttgttgctgatttactggcggaatttgcgggttccgcggtggattttgcaaaaaatttggcatttcttgctcatcgttattctcaatccgaataaaacgtccgcgcgcatccctaggcctttctacaacgcgtctgttaacgcggttgtcaacaaaattaaaattttgccgcgcctggtgaccgggactgatgttaggcgtggacgtcataaaattatttattcgctgcgccatatgtgcagcattttcattttgccgattgtttcccaaattccagccgaaattttcacccaaatttctcagcccattcaagttactctgatccaaaaggcggcgctcttcgtccgcattcaactgttggttctgctcgttctgttgaccattgacgtccaaaagtgctcggcgaatttcgtcgtcttccatcatcggttctgaatggtggttgttcccgttattttgctggctatttcctccgttttgttcttcattttctccaactacacgcctttgatttacattcctatgcagtgaacgagtgatcattttcagcagtttcccttttgtcaattgatctcaaataaccacaatctgtgtggcgcaacccctttctgagagtgtcgcttttgatgctgttttgttgcaaccccttcctgagagtgtcgctgttgaaacaaaatcgttgagttgtgctttgtccgtactgcggaacaaaacaaaaatggcgagtgtgaagaaaaacagcgagttggtgatccgataacaaattcaaaatctgatagcccaacctgtggatctatctttcaaatgtcagcaatcaaattgtttagtgttcaccctgtgaatcactaattttcctcaaaatgcgctcaatctccaatttacttcccacttttgcttcgttttttgttgaaaaccgaaaatcgaatcaaatcccgtcgctgagcttacccagaaaagcaggagcgccacgtcgaaaatatttgaagaaaatgagggagaacacaaatgcagggcttttgcgggctcttctcttctcctccgaattcacttctcgtccccgttcgtcgtcaaccaaaattaacaaaaaagaattgcactcaaacaattaaaaccaaaagtgtatctccaacacaaattaaagtccacagcacaaaacagaacaaatttaattcaataaaaattcgaaagtcggagagcgatgagaataaattaccatcattttgaagccaaaatataatatgagaaagcactgagaaaacaaaaaaatttagaaggggaacaaaattaaatagacaaaatgccacaaattaattatttaaattaaaaacgaggtcaaatatcacaatgaccgtaaacccagttttttgtatagaaaagggttgtccaaattgcaaatggatacagtatctgatttatttcacaacgccaacacgccgttgaaaataaaaacacaagttgcatgtgatggcaaaagttgtgaaattcaaacgcattttacggccatgaattgccgggaagtgaggcgatcaaaattcataatgatagagaatgtgtggctttacctgttttgaagctaagtcggggatctgacggctaatatgagaataaagtgcagttctctctttaaacgaactgattttatggccactttctataaaggcgatggcggtcgctgtatgaccgtaaacccagttttttgtatagaaaagggttgtccaaattgcaaatggatacagtatctgatttatttcacaacgccaacacgccgttgaaaataaaaacacaagttgcatgtgatggcaaaagttgtgaaattcaaacgcattttacggccatgaattgccgggaagtgaggcgatcaaaattcataatgatagagaatgtgtggctttacctgttttgaagctaagtcggggatctgacggctaatagagaataaagtgc

SEQ ID NO: 21020 - DNA, 1144 bp, Heterodera glycines
aaaaaaattttcatttgcctaatatttattatactgtgaaactgttggaaatgcagctgatgcgtcggaaaagctccgatttttggggaagtttttttctttcagtttcaccactgattgttgaggcaattttttcgccattttcttttgtctacaaacattatttattgcgtttcatcctgtagtgtgtaaaaaattttcagtaaaaaaaacttgttatctgaatatttacaagcaaaatttaagaccatttccaaagaggaaggaacaaaaatttttgcctaaattttatattatattgttgaattgtttgaaatgcatctgttgtctgccgttttgaaatttttcaacttttcgcgaaaagatttcccagaaaatgcatgggacaaataaaaattaaacttctattatgatcaatttaaatttcctatcagtttcgggtttgctttaaacacgctggcctatgaaaaaatggagttttatggatgtcaaattttgggacttttcttcgacgtggccatcagcgggttgtttcgtgacaaaaacaaaccagtttgatgttattcgaatgagctagacgcgctctacattttcaaatgtatcaacaaagggtctaccgccactccctggcgagatatggcctgtcaaagcagaacggggccaataaatttgaatttttgttaatcttcggcagttgcctttatttcgagcctactctacttgtgcatcttttcccaatatggcactgcttccgaattattgaactgtttcacgactgattgttgagataatttttttttccgattcctttatctccaagcatgagccttataagtgattgttcatatccttctcttgaaaaaaattgtcactaaaaaaaacacgttttctgaatattaacaacaaaaatttttagacagtttctaaagaggaaggaaaaaaatttttcatttgcctaatatttatttatactgttgaactgttggaaatgcagctgatgccgtcggaaaagctccgattttttggggaagtttttttctttcagtttcaccactgattgttgaggcaattttttcgccaatttcttttgtctacaaacattatttattgcattgcatcctgtagtgagtaaaaaattttcagt

SEQ ID NO: 21021 - DNA, 1814 bp, Heterodera glycines
ctaaaaaaataaaatagtgaagctttaaaaattaataaaaaattttaaattcagaattactggagttagcatcatagcagtgcttttccttgtctttttgatgccctcgcaaaatctggttcgcttctgatcagtttataaaaaaaaagttaagcctaaaatttttcgcaaatttaaaaagcaattaaaaatttttagattttttattcatctccctttttgatagtgaaagcatcagagagccttatttaacttttaattaacatttggtgcgtttcagagcacgttctaaaaaatatttatgaattaattttgcaaaataataaataattaatgaaaaagtcagaatttcgaaaaattttaaaaacaacaagcgttggcattttttcaggttaagttagtcctttacaatggagaaggcctgcaaaatttggagagattatatcgattttagtgcgctaggttcgatgaaactttttaaaatataagcctaaactttttggcctgtttaaaaaggaattaaaaatttttaaaatatttattcatctccctttttgatagtgaaagcatcagagagccttatttaacttttaattaacatttggtgcgtttcagagcacgttctaaaaaatatttatgaattaattttgcaaaataataaataattaatgaaaaagtcagaatttcgaaaaattttaaaaacaacaagcgttggcattttttcaggttaagttagtcctttacaatggagaaggcctgcaaaatttggagagattatatcgattttagtgcgctaggttcgatgaaactttttaaaatataagcctaaactttttggcctgtttaaaaaggaattaaaaatttttaaaatatttattcatctcccttttgatagaaaagcatcagagagccttatttacttttattaacatttggtgcgtttcagagcactttctgaaaaaatactatgaattaattttgcaaaaaataaataattaatgaaaaagtcagaatttcgaaaaattttaaaaacaacaagcgttggcattttttcaagttaagttagtcctttacaatggagaaggcctgaaacatttggagagattttatcgattttagtgcgctaggttcgatgaaactttttaaaatataagcctaaatagggaagctattcccgaaggattcggtctccccataaatctgggcgcatcggttcgggggtactgccccgaaaacaaaaaaatcgattttttcaattgtccgtttggggtactcaaacaattatggggagcaaaaatccaacgcagaattaaagtacaggctatagggaagctattccggaaggattcggtctccccataaatctgggcgcatcggttcggggggactgccccgaaaacaaaaaaatcgattttttcaagtgtccgtttggggtactcaaacaattatggggagcaaaaatccaacgcagaattaaagtacaggctatagggaagctattccggaaggattcggtctccccataaatctgggcgcatcggttcgggggtactgccccgaaaacaaaaaaatcgatttattcaagtgtccgtttggggtactcaaacaattatggggatcaaaaattcaacgcagaattaaagaacaggctttagggaagctattcccgaaggattcggtctccccataaatctgggcgcatcggttcggggggactgccccgaaaacaaaaaaaatcgattttttcaagtgtccctttggggtactcaaacaaatatggggagcaaaaatccaacgcagaattaaagtacagg

SEQ ID NO: 21022 - DNA, 2780 bp, Heterodera glycines
aacaaatttaatcgaaaaaataaataatatttcattgaagacagattatgagcatgaacattaattaaaatgattgatcttgttttttcataaatcaactaatttcacctgttaatataatctacttaattaatcaattaattcatgccttcctctattccgtttaatttaccaataatttcaggatttgtttgactaattaatggtttggagtagggttaagccccgacccagagccccccgaccccgacccccgacatttttgggacctattccccgacccgacccccgacatgtcgccccacgaggtccccggcccccgactttttgccccccgacactaattcgggggattgggtactccgagcgttttaaaaatttaaaagttatgcaaccaaaacatttaaattttacctatcactacgccaaaataagtttttttctcactcttttagaaaaattaataatatataatttgccaaattaaactttacacagatttacaattttccaggaatttaatagattttcacccaattgattacttttaatggcttcaaaagaatctgatatttggaattttttcacgaaaatttcttcagaggttgctaagtgccggctttgtgaaaaccaattagcgtgtaagaaatcgtgcacaaaaggattgtgggggcattttaaagcgaaacacgctaaagaatttgaaaactatttgcaaaaatccgacccgtcaacggtaatacaagcttccttttgatatgaacaactttggtcaggttgaatcaggaattgaccgtacatttgctgatcaagaattgagatagagaaatgtattgacaattgcatcacataaatactttattttctttttagatgatatctgggcccaaccaaaatcaccatgtggtatttctattccctcaacaatttccggagatcctgactctgattttttatcaaaaattgaggctgaacttgcttgttttaaggcaggccaaaggatggaagtgaacggagacttattttcttggtggaatcaaaacactggccgtcttcccgaattgtcaaaacttgcaagaatggtccacagcattcctgctacatcagtcagttctgaaagactcatttggctgtggttcgacttgattttggtttgaaattcctttaaaaacaaatgagaactccgcttggaatgcctgtcgatattccgtactaaaatataattaaaaaattcaatttaattttcaaaaatgccacctcgtaaaatataaaattggtccgttcgatgcggcgccaatgttcaaaggaattgcggcaattaattgcaggaaccaagcagtgatcggagacgaaattgtcggattgatcagaacggtgtagaacaaatagatacaatagccgccaaaattgacactgacaatgcaaataagtgcccgaaaagcgcgatgattgatctgatcagctgatggcaaacctaatgtgacgaaaatttgatcattagagaatgaatttttgcgggttttaatttttttttttaaatttatttcgtatgcaatatgtaaacgtatctataaaatcgtgaattttaattttattaatgctttttttttgtttttagtcatagatttaattgtttgaataaacttttttagaatttgaatacaatgaaatttttttttcctatattttaactaattaattcatatttaaaatttttgtccatataaatcagtccccaattaattagagagcagcacgggattgcggggtcccagtccgaaatcccgcattttttaatagttgcgagtttagtcgcgcaagatcccatcccgcaaaaattttgagtactaatctctgtatttttaggaagttgcgggattttgcggataaatcaccccgggacccggtcccgcaaaatttagggatctgcaaattagaactttccgatcttcactattaattattaataaccagggccctgcgggccctgtgaaagcgccgggggcgctttcaacgctggctctagtgggagatataatttggggcgtgcaaaaagcatctattggccgctaagcgatcctcatagtttaggaatatgagaatttggaaatgaacaaataattaatttaaaaacgatattgttttaaatttaatttaaatgcgacatttttatttaaattgatttaaatttatttttttaaattgaaatagcttcgctatttaacagtctctagagggcgctacgcgccaaaaaacctttatatgtaagaaggcaactgatttttttaatggccgggaattcaattaacgttttcttaaaactcaaattttaatatgatcgcttaaaatctcttacttttcctctttctcatcccctttctccctcctttctaccttcccatttcacttcatcactctcgctttctcttgctctcttctttttttgttccttcctctttccctttgttgctttttctgttccttttccattttctgttcttcttccactttctcttccactttctgtttctcttccactttctcttccactttctgtttctcttccactttctcttccactttctgttcctcttccactttctcttccactttctgtttctcttccactttctattcatcttccactttctgttcctcttccactttctcttccactttctgttcttcttccactttctcttccacatctgttcctcttccacttcttcttccactttctgttcgtcttccacttcctcttccactttctgttcctcttc

SEQ ID NO: 21023 - DNA, 1894 bp, Heterodera glycines
ctgcacatcccttttccgtaaatttttcacttttctctcgcctctttccacaatgcggtaacaccagcgaatgccgctggggaggatgggtcgttgtacagcttgtcaagtgtggtattgatcaactccactttttcgggcgaaattccttcttgattgtctgcggcgtcctggtggttttgctttgggatgacctctttggtggagccgtccatgaatacaaaattgggtcttgcctaagcctctcttccaatatggccgctccaggtggtttaatggtggggcggcccgctctccggtctattatatacttgagggccattcgcaaattgctatgcgccaacggtttgccgtttgcggtgttaattgtatttccccgaacgcccatacgatccgcataatggttgcatttgatgtgcagtcgttcaatccgttgagtcatggtcagctgatttgacgggatggcaaacagttcacgctgttgttgttgctcatccctttgtgcagaagttgatgggcccggttcgggagagtactgtactctcacccttctcgcttgcctcacgcgttttctaatgcgcacctcaccatcattctcaccgtttacggggtagtggcgtttggtcccccgcctaggcggaggaatagtgggcatttcttcttcgacggcagaagcaggaaggggttgttgcagcggctgtggctgttgttcaacaatttttggctctcttttcgggatacggtatggtacaggcctctttgtcggctcgggttttggtataattttgggtggaggcaagtatccggcctgcctggatgtggatggccgagggtcaagcgggaattcaggttctttttcgaccgaggcagcgcgacttttggtcgtgaatcgggctcaaattttgatggttttagttccaactttgttggcttctgaggctctctcttggcggtaggacgcggtggtggttcaatttttgctttcgcacgaggcgggagcgggagccggggaggtgaaggaggataataaaccctgtattttttgcggtccgaatcatcatcatcatatgcttcgtccttttttaattttcttctgatggcaatcctgtgctgagcagcagtgtccatctggtcaatttgatgttggtatggcaacacaggcaagtcgccatagtattgggatggtgttggcagcgctaacccactctccaacatgtactcatcatctgtatcactttccggtaagggggcagcagctgcttctgcaagaaggtcccgcacaaccggtcgccgtcgttgtatatcgtgtcgccttttctcccactgctccaaacgaccatttctccgagaaggtctactcggtctgggaggacgttgtgggcgaggcggaggactccctggtggggacggagcgcgacccggaggacttggtgggagccgagggcgtcttccaggtggaggtggtggtggtggtagatttggcccacgccaagggcgtctcccaggcggcggaggtggtggtggtggtggagcgggaggccgcggtggtgtgtccacaacttcaccatcttcatcttcaccacctcttctcaacagcacgcttatccctttggtgagctcaactttggccggcttgtctgctagctctcgccgcatttttaaatatcgcctaagctgctggttgtagttgacattttttcgagagggatgtgctcgttcggcccgggcacggttcaaatcgtgtcgaacagcatccaagtttaaatcgcccgtgtccgtcgtaatggtgagaccccgataaatttcttgaggaacaaatagaaatttatttgccatgaataatgaaagattgtagcttgataattacaacaatgatgatgggggtatgaatgca

SEQ ID NO: 21024 - DNA, 1677 bp, Heterodera glycines
ttaaatagattaaaattcaaaattttcaaaagttaactcaaaaaagttcattgctcctcttcaaattgttaaggtgcgtttttgactttttgttcttatattttcataattcatactaataacaaaatgttttaagagatgagattttctcaaaatttgtcttaaaggttgaatacattcaaaagtttacaaaatgctaaaaaatatttaaatcgtctgtgaccaaagcttcatgatcaacatcagagttcggtcccaaaaaatgattggtcacaaattgcacaaatcgccttcacaccgctggcacgagcctttgccgccttaaaacggaacggatttgtcaatttatttctcatttataaaaatttcaatatttttctttacctgaaaatctgcaagttcgtgtgcccgcgatgcaacccgtcgatttcattgcgcaagtccgcaaagtaaatgaggctgaagtggcggggggggggggggggggggtggacaattaaaataatattccatgacatgaaattctggaagaaaatttcagaggaaattcaaggaaatagaatcgaccctgctctatccaatggtatataacacatatgcattttccgacttacagttcgggtggttcccttgttagattttcaaaaaagctaaaatacttttttttcttcaaattttttaatttttttttgcggcgacgttatgtcccggcgacgttttgtcggcgatgttttgtcctgatccggagcccaccttacatttttaactaaaaatatcttttttatgacttaaatttgttgaaaaacaggactgtggttacttttaaatagcttagttgaacattaaaaaagtatcacataattttatagccgattttggcgtctccgccatcatgaagaacaacgagcgacgcgactcgttcatcggcacaccctattggatggcaccggaggtgatcatctgcgagacgttcaaggaccagccgtacgactgcagaggtcgtcgtcctcgtcgagtcccccccccctttttgggccactattttccctattaaaaaggggacaaaaaactgtgcacacactccaaattattaattaacattgtttgagtagcgacagttttgtgtttgcacaacgcgtgtattgactagtcaatccgtggacaaatctgaccaattcccacgagtcgttggccttaaaccaaacaacatttcttattcttgccattaattaatgatattataaataatgcaacctgtccctctccctaaaatgatatgaaaaggttttcgattaaatgcaaaaaaaaaatccggaaataggccgggaattgtcggtagatcgtcccataaccgaaatcctctgtttgcgccaggagaaccctccctgatttctacagataaagataaccaccactggttgaagcacaactgcttgcacatgccctttaatttgtttaattttaaaatttttagcggacatttggtccctcggcatcacttgcattgaaatggcacagatggagccgcccaaccacaacatgaacccgatgcgtgtggtcatcaaagtgcaaaagtcggagcctccgaccctcgtgcagccgcacaaatggacgcccgagttcagcgactttctgcgcaaatgcctcgtcaaaaatgtggacagccggtggagcgct

SEQ ID NO: 21025 - DNA, 1175 bp, Heterodera glycines
  unsure (1)..(1175): unsure at all n locations
ctacatatgatttntaaaaaattagccaatntagagaatagtgagaaaatgataaataaatagattnttatagaaaaagtgataaaaaattaaattttgtgaattattgaattaaaaaatttacacatttcgccctaatcaatttgataagctgtgcttaaagaaattgggagcgagcagtgaaattgaaaattgaatgagtgtgaaaaggagtttttgttctccaccactgcccccgacaatcacagagagcattaaaaaatacataaacaaataaatgactcattaatttttactcttagctaataaaattgagaaataatttctatcaattacatgaagaaaatgattttcattaatttcttaaattcaattgaaaaatgatgttaaaacgtattctaataaataaataattttattctaaaagaaatatttcataccaattatcaaataaaaaatggtatccatcaagggctgcttgtaactgaattttcaattaagaaatccaaatccgtaattacgatgaaccaaaaagaccatatccggtaaatataattaaaataattttaaaacaaaaataaaaaaaaattgaataatcttttttgaatgaaacatataaaaaaatgttcttgttgaaagtctaaattaatgcaagattctcgaaaaataatcaaataaggaccgaaattacagaaaaatcgctaaattccagtaatctgtaactgcgtgaagccattccaactaaagcctctgagtttggcaattttaaacatttattcacatgttcatcaaaattaaacatatttgtaatagcagattcaggtccaaatatttaaaaattcacttttaatttaatttaattttcagaatttaatccctccgatgtgtgccgtgccattgatcgctccccccaatttcactcgctttgccttcgttcgtcggtggtcaaacagaaaggctttatccctaagcatttgcgtcccccgtggttggactcatctctttttgaggacaacaaattaaaagcggagatgaaagtgtcggccaatggatgttatgcgtgttacagggggagaaaggcgagcaatgggacaaatgaggacgaggattactgtgcatgtgtggtacggtattcgcagaggaaaggatgggcgtactacactgtatgtcattta

SEQ ID NO: 21026 - DNA, 2034 bp, Heterodera glycines
ctgcgctactgtttgctgagttagaatataattcaacatgtgaaaggatttttttttgtacatggcaaatcatacaaaaatcaactcgtattttacaaataaaatataagcccaggcctagcctaaagcttagacctaagccttggcctaacctaagaaattgtataagttgccttttgtacgagttgccatgacaccgaataaaatgacaaaaatcatttattcacaaaaaattagcctcttccctgagtttcctaaagaacaacccaaattcactccctttcctccgctctacgaattgctcgttaattttgaaaatgtgtgccttccagccaggctaacttttaattctgattttattttaataaaaaaaaatatttttaaatttaaattaggaaaataaaaattttctactctaattgtcaaaaatttcctccgtgtcgcctttaattttcaaattattcttctgccttccaaatgtccggcggaccgctttgaccaccaacagagccaggcgcattttcgtgtttgcttccatcctgtggctaacggattaaatgtgatagataccgtaataaaatggcggcatactacattatgccaaaattgcaataattttttttaaatcccactagggttcggaccccgcccccgtcacccccgccgggggcgggacaggttttttggcctcacctccgcccccgtgactcagcccccgcaatcccggcccccgcgaccttcgcccccgcccccgcgaaaagccacccccgcccacggggtccgaaccctaattcccacctgctgctgttgttctgattccgcctcctgctccattttgcgcagtttctccgcattttcggcctgcatcttttctagcttttccaacgttaccgatttcaacggaatcaattttggcttgcaataagcgggaagcataaattcctgcaaatttgttggggaaaaataagaattttaggcttatacagtaagccttgtaaaagcgcaatcaaaaaaaaaaaaaaattcatttaaacctctttcaagtgctgttcaggcaagctacatatgtaccaactacagaatgcagaattgtgggttggaatttgtttatcatttttaaaaatttaattcccaattttctcactgccaaaatattgatttaattggggcataaatcaattttgtgtaaaatcaaaaggaacaacacaacaacaaccacctgctgatagacatgtccatgcggtggccacattatctccttcactggtggctcatcttctgcactcaatggggacgaatttcgcccactttctgttgattttgaattcattttaattaaaatttatgatttaataaattttctctataatcacatgaatgcatgaaatatgttttattctgtcttcatgtacttaattttccatggcaacggcacaaatatgaaattaaatattctcaacaaattattgttcatgccttgattcatgaaaaatcgagaaaatgaatgctttttcaattaaaaaaaatggtccacgatttttatcgttccttcaccctagaccagggttcggatcgaaaatttttcaaaataagaacatcaaagccaaaaaataagatttttgggtccaaaataaggacatttttattttgtaagatttggaccctccaaataaggacaaatcttataaataaggacagatccgaaccctgccctagacagaaattcatacgtcaattactgtatcatatggtaatgagaaaacaaacaaatttgctaaaccatggcattgtgtttaagcgggaagtaaataagaaataaaaccaatcaattttttctcctccttttctcattctctctctgtttgtgtgtctctctgccaccaactctctctctccgtctctctctttctgacaaattttcctccactatttcttccccgtctatttgttccattctctcatcattgtcagtcgcgtgagcaacgcgccaccaccaccagcgccgccgccgtcgccaatgctccgctgcttcga

SEQ ID NO: 21027 - DNA, 2679 bp, Heterodera glycines
  unsure (1)..(2679): unsure at all n locations
aaaaaacagggagaancgggaaattggggcgaagaatgacttcccagggggaccgcaagagaggcttttgcatgtgaatgggatgaaagaagaagtgaaaaagcggaccagcccccgccgcgcatgtgaatggtgcctaagggcagaaaaagccgatcgagcgatcaacgacgacgaagaagaagaacgaccaatcaacccaaatgatcaccccatcatttttattgtacccgcccattttctgatcctatataagcaacacaaattgtacatttcgatggcttgcgacaaataaagactaaaaacccgtccattttgggggtttcttgggtagtctgggcagcccctctccctctccctccgctttcacccacccccgaaccaatggacgcaaagcgtcccgaagcgatccgcttcatgtggcgaccctggcagggattttggtggggttttggggtttgtgagcaggggtagggggagcatgccggccccacaggtttttcgtaacctgtggcgtctggcattggcgctattccattttgcgttccgcgtttctggccccttgggttttttgtaacccaaggcgcctgcattccgcaccgtttggcctcccgggttttttgtaacccggggcgcctccattccgtaccatatggtcccttgggtcttttgtgacccggggcgccttccattccgcgccatacggcccctcgggtctctttttggcccgtggcgcctcgccttccgcaccacagcccctcaggaaagaatggtcatgcgcttaggcagcgagcctatctcgcactcattggcggcattgtgccgagctcacaaagagggcagtgagcctaatctgcgcaaattgttgaagcgcattggagcagcgcatgttgaagcgcaaattggagaaagcgcattggagaagcgcattgaagcagcgcaaatgaagcgcaaattgaggaagcgcagaccgaggcggaatggaaaattgtcagaggaagcgcaaattgaggtatctgttaaattcgattgcaaaatttcacttcttaaccttttaaaaatcaaaaatattttcaggaaattttcacaaaaatcaaattatttctttaatattaaaaataaaaataattttttaatttgctcaaaatgtcatatgccattatgaaaatgagcattgttctcctgctagtgccaattgcattaatttttgcatttcttttattcaaaataaataattctttgccaacaaataccaattcaaaaagtatgtttctgttttttaataattcagcaattagagcaaaaagtagcagaatttggacaaccaaaaaccttaattagttaattattttttccaataatcaggtgacacattcattgtcaaaaagttcaaagaaagcgaattggcacatcggttgttggatggcaaattcggcatcgaaatcggcgcctcatcgcacaacccgttcggtttggacacattaaatgtggattacaccgacgacccgacagcatttttccagcaagatcagatcaaaaattcaggtctgcagctaatgaccaaaactgtgagagcatccccaattgttttagaaccattccatacaattgtttttatccattttaagatttttgacactgacgccaaaagtgatcaaaaaaactggtcgaatgaacaaaaagattaaatccactcctataatttatatttgatatggctgttaatgggggctggattagaactgattatttagtatttttcaaagtatctttccgctgatatttttaattttattattttaaagaaatattatatttatggcaaataaaataagtaagaaaaacaaagcagtttatgaccggacaatatttgttcatcaatcaacgcatagaatttttaattagtaaaaaacatttatgtatgacaattattttaaggaaatcctgcaaaagttcacataatagccccgggtgacaaattaccatttgcaaatgattctgtcgattttgtgatcagcgcgcatgtgttggaacacatttttgacccaatcaaagcaattaaggaatggttacgagttgtaaagccaggtcaaaattgttttataaccaacttcaagtaattattcttataaaggtggcttcgtctatatggacatcccacacaaagagcgggtaattaattttaatttttagttttttttgagaacggctattattcttgtgcttgggaattggcctttagttttggaaaggctattttctgcatctccaagtccactgataagtagggccctggcgggaacagaattcccgcgggaaaacccacgaatcccgttcccgtttcccgacgaaaaaatttgggcgaaatgacaaatttaattaaaaaaattaaattaatttaacttttcgatattttccttttaattattaaaatttaattactagcgaaaatttttcgagcttcgaaaattgagttttaatccgagcgttctgttctaaccgttttacgagacttttgatcggggccgaaatcgaaccgctttgtccgaactgctcgaacggcgcggtcggccgacgaatggcgaatgcgaaatgctggcccgatgcccgatgtgttcatttttggatttacggaaagatttgctggaacattgccgacgttttaattggacgagtggc

SEQ ID NO: 21028 - DNA, 1318 bp, Heterodera glycines
attcagagggtgacaaaaggttaacaatattacatttctgctgaggatataatatatataatgttaaataaataaagtttctttataaaaataaagaattaattgctccactcgttttcgaaatgagtcgtttggtggagaaggcaaatgtggcaatcccgtttctttttgctttccataagttcataatccaaccgtttgatttccatttcctgtgtcaaatattttatattttacaagttatttattatgcccaattaaatttttagtctaatcccgcccatccattgtaaaagccccgtcgaatttcaccccaaaatacatgtgaattccttcagaaaaacttacggcatcccacaaatgatgcgctaaattttgttcctcctcgcttttctgccaattgcgatgatcagtcagcccggccaattcgatttcgtattcctccacccaccattttttggtgcttatccttgggcatgaattgttcggacatggcattgacctcaaaatatttttgtattaaaattttaaataatattttaaaaaacctacaatttttcgtagtgcgccgacttcattttccagttccaatattttttgtccttgttgtgccaacttctcttcttgttccaacagtttcttttcctaaaaaatgaccaacttttggaattgatttaaattagaaaattaacggaccaaaagggcagaatttaaaaaatataataattatattaaaataagattctcaaacaaatttaagttttcactaaagttgtgtttaaatgttgatgattttcttaaaattttggtgcatatttccagcaccttttcctctagctgctgttttagccgtttgatctccgcggcctgccgtttgatctccgcggcctgccgtttgatctcggcgtcctgaaaaagtgggacacaatcagtgtattaagtaaagaatatttaacagtttcccttcagattttgcccgcatttccaattttttggtggtatatttttaatagcttatttttgaatattttcttaagcaattgaattgaaaactctcaaatatttgaccaaaaaactgacaattttatgaggaaaatcaatattttcacaaaaattttggttaaatgttgatgattttctttaaattttgatgcttatgtcggcaccttttcctctagttcctgttttagcagtttgatcttctcggcttgccgtttgatctcgtcgtcctgaataaatggcacaattagtggcttaattaaaaaaaaatttgcattttttcccttcagatttcctcaacatttcccagactctagag

SEQ ID NO: 21029 - DNA, 2280 bp, Heterodera glycines
tttgatctcgtcgtcctgaataaatggcacaattagtaggcttaattaaaaataatttgcattttttcccttcagatttacctcaacatttcccaatatttcaataaatttgcataattttaaatcgctaataaattcttattttttgaatttttgctataacttcaaaattgaccaaaaatgaaatttttgggaaaatttaaatagcaataaaaatcaaaaaaatctcaatctccacggcttgcttggacaaacacccttagtaatttggctgttaactccataccccctgctccccgcctccctctcagttttccaccttttttgtggattccttttgtaattttttaatttggttctcccgtttggccaagatttcgtctttctttgcgccctcttcctcaaggtacagaatatgttgttctttctttctcttatcacgtttcaaccgttcgcattcatcgacattttgttgttttccatttttgggaaataagaggctaaaaaagttaaaaatgtgatggaatataaccggcaattttgaactcattaattttcaatcaaattaaatggaattgattttgaatctgaaggcattttacaaattgtgattcattacaaaattgaaaaaagttaattaaagcataaaaaacggctaaaacctcaaaaatgtctctttggcaggtttttaaaggttctaataccttaaccgaaaggcccgaaaaaacaaaaattcaattcataagtttattgaaaaactccgaaaaacctcaagtttcaatgaattattttaaaataaaatgatttaatttttatccctagaagttttagtttaattatccaatgccattaggaaaaatgctcaaaaaatgaaagaaaattcgaaaaaaggtaatgagtgaatacacaggagacggagaaggacgatttgaatttgaaaatttggacgaaaaatgtcaaattgctaggaaatgccattttcccagcagtgcatgccggggattaacaatcctcccccactttttgatgaacctttaacatttgcgtggagcaattctttttttaaatgatcatttcctatggttagaaaaaacattaatttaaaaagttaccctttccttcctccatactccaaataaattcaaaaacctgataccgaacaatcttggataaacattcaattctattcgaattttcaatatttccccctgcggtgcctttcgacactgccttagccttgagttttttttcttgaaaaagaaaattgggcttccgaggagcaaaagatcattttttcccttgaaaattttcaaatatactatttgacatcttttcctttcacaataaaaagcggaaagcattatttattcaaataaattttattattgagccaaaaattgatcacaaaaaacaccatttgatgtgatctgcaggggctaccaaaaaaaacactaataaaacttttgaaaaaactccttagcctttattaatttgaaggcgttaacttttaagcaaaaaatgcaatttttgtggcataatggtaattttggccttttgatagaatattaaaaaaacccttataaatggttttttgattttcggcaaaaattggcttctcatggactttattaggcgcctgattgtattttaggcgtccaaccaaaggtcataactttttccatgttttcccaaaattacattcttggtataatccgaagcttaaaatgaaaggtttttaatacgagataataaaaacgcttttttacaaaaatttaaaaaacgaaataaatttttaggtttaaacgggagccgaaaatgtaacagaacaaaatagtgagtagtcgttccaaggttttccaggaaaaatcacaaccctatcatataatatcggaatttttttatctttataaggttcatttaaaaatagctatgaaataaaaaaaactgaattaaatttattttttagggtttatttcaattatgtattgaatttttaaagcaatttagtaggtattttcgtcggtactttccaattacagtacagtttaccacggtttagtggctctagtgaactttatgattacatcgacttttatgagtccaattaattgacaatacctggttggtttttatataataaatttgttcatgtttgagcaaaccctatctttttggtagcattcgaaagcacaaagtctaacgaagctaaaatatataaaacctcaacgtttaggcaattacgaaaaaagatctgattaattaagtaattgttgattattt

SEQ ID NO: 21030 - DNA, 947 bp, Heterodera glycines
tgcaaaaaaaaaaatatgtttgcaaaatttatggactcatttagcagaaagatccataaatccatgcgagttcctgttttccaatacttaaatttccattttagattttgtcgagatacccataaaattcgcctccattttctcggggggtgacgtggtcaacagtttgttcagctcctggtcgagaagtgcatatgtttctcgcttggtgcatgttttccactcttcgcaactctgaaaatatgaaaacaaaaattagaaataatttatatcatcggcaaatcccaattacttcactcattgatatgagccgctgggttcggattttatccgaattagaaatattgaatttatcgaaggacgcattcagcattgccatttagatagccgagaaatatgaacccaaagataaaatcgaattaaaatctgacagactgaggatgcgagaatatttatggggtaattttctatggttttatctttttgttgtttatgtttacacgggaatgactaagggagagacgacaattgttttgcgagaaggggcaaaggaacggggagggtgggcaatggtttgtgaatttatcgggaagggagagaatttggcgagaacgaacccttcggttaattccaattcagcacaaatttaatgagattaattagtcagtggtttatgcacgaccaaataaacaataattgaccgttgaagtcatgacgggcataattttccaaaatactatttttggcgaatgaatgtctcgaggactgtgaatgggaggtgggaaggaaagagaggagcagaggcgagaaaggtcaacagcattttcgcgacaacattacaaaaaaaggggggagtgggggggggggggaaggatcaatgggggggagggttctctttttgtttgctcgccgacagcgataagcgaagggaggggaatgacgggggg

SEQ ID NO: 21031 - DNA, 1183 bp, Heterodera glycines
  unsure (1)..(1183): unsure at all n locations
ggtttcctataaagaaaatatgattcctcatagtttttttttaattgatacatatttatcatttttaaatgaaatccctaccaattgagcgtaataatcgcaaaaaccacccttttttttgttgaaaatctgttaacaaattgcacccaaaatttttaaaatttttccccggggggggggtaatttcctcctcgcccgcccccccccctctttttcccatatttttgaaaaagcgctccgaaaaaagtgatgtggaaatcaaatctgaatttctattaatattcgatgatttagtccaaaaatgattaattgtttgaaatttgaagaaaatttgtttgaaaattttcattaatttaatttattaaataaaaaaccaaataattttgtattattttcacttgatataaattaaaatttgaatttttttttaatttttaaaatttttttgaatttttaaaatttcccggttggtcccggttcccggtttttcttgcggtcccggtcccgaaaaaaaatcgaggtcccggtcccggcttctcaggtcccggcaagtcccggtcccggttttggcaaaaattcccggtcccgtggcactctactagaaatcactattttggctacttcgtaaaatagttaaaaatcactattttggagttttgtcactatttcgacattttttgggaaattccttaacaaaaatgcaataaaaccaaaaaatacacccctaagaatcgaccttaaaaaattttcaaaaaatacacccctaagaatcgagctaaaatttttcaaaatatactcctatgaaatgaaaaaaaattttctcaaaaatttactttcttggcaaaaatttttaattttaaaaaattttttatgtaactattttgggttttttggtcttaaaaatcccagtcctactcatttgcaactgcaatcagtgaataaaaattatttttgctcaatttttggctgaaaatttgtcactattcgtcactatttcggactttttgccactattttggcatttttactcactattttagttaactatttcgagatttttcgtcactaaaagtcccagccctaatgatgagaagttgatttttggcaattaaagttgccaattttanatttaaaaataattaattacctaactgattcnaagtcataaatcacagaatcaggt

SEQ ID NO: 21032 - DNA, 2762 bp, Heterodera glycines
  unsure (1)..(2762): unsure at all n locations
gcgtccaatcagtgaccatcctcacttttatgttataacttttttcatacttgttcaatccaaacattctgtgtatcattcgaaagcttaaagattagggaatttataaatacatataagaaaagagaaaatatttgcattaagaaaaaattgcaataagaaaacaagaaattaatcatttttcgcgcgtatacaaaaaaaaaaattttttttttttgtctgttgccattgtcctagaattttgcaataaaaaaacatatagacttcaagttttcgaatgatactcagaatgtttgactgagctctagctagtaataacaaaaaaaaaaacaaaacaaaatgtaattgaatttttaaaagcatttaaaaatgaaatttttaaattatccattaacaacattatttcaaaatgaaatttgacaaaaaatttctcgcttaagaatttcttcaaattctttcgtcatttctttcaataattcggcaggccttcaaaaaatttcgcttccgtgaagcatttttgggacttcaaaaattttttgatttcttttttcgccttaagaagtaaaatttagaaaatataaaataatcattttttactttttgcttttgttgtggtgtgatgtcctcggcaaactcaattttatgtttttttgctttgatttgcattgggtccttgtccattcttcgcatcactaaatcatatttaaaaaaaactaattattatatgttattttatagattttaaaagctttaattaatcattctttagcttttttgcccactataacaaaaattaaaattcttgatatcattcaatagcccttaggaattttctatgcctgcaaaatttcaaaaaatttcgttaagcttcaagaaagtaatgtcgaaaaatgttcaaaaaaacttgtttttttgagttcctcatgtcataacttacatatttgaataccgaggtcccggttttgaccgggaccgggactagtcccggttttttcccggttttcccagccaaaaattcccggtttttcaacccgaaagggtcccggtcccgggtttgcccaaaattcccggtcccgtggcactctactcaaaatcacaaaatttttttcggacaaaattcgttaacaaatcgcattataaaatgcaaacattttcccggcggcgcctatcggcaccgccgcggacccctgttccccaaaagtttttggaaaaactgccgcaaaaaaaagtggtgtgaaaagcaaaaaaaagaaaaagaaggtcgtcgcccggaggtacgccctccaagcagccgaaatcctgggaccgtccctggacccctcccaatctcttttttgtatgttttatttaaaaatatttaaattcatccgtacattccttgaatttgtcactgttgcgtagtttttttgctatatgttccggcactgattgttcacctaacaatgctttcagtacgcaatcgatcgttgaacgttcgacaaattccgccaccatttcaagcgcattaatataactcaaaggctcccaactttcctggccgacatattctataaaaaaaaggatttttcaagtacaattgtcctgggaattaggggtgttttgtaatacttcaataaaaccgttttataaaaataaacgcgttttcatatgaactttaatgtaaaagcaacaaaaatttgttttttttgtttacaaatttattattttaaaaaatggggtagccctaagttttctctatttgcttgtaaaatttctaaaaaaaaatatttttgtttcaaaaagtaatgccaaaatgttcgaaaacctaggggtttttaggagtgttttttgtcacaatttacaaatttttttaaatttaatttttctaattattaccaattatcagcacacaaatttgtttttaaaatattaaaaattactaattaaattaccttctccccaatcaatatagtaaaattgacttttgtcccggccgacgaacattgccaaaatttttgaaacagtaaaacattgcgcagctttcttttcatcaatgccttctttttttgcctccaccatttttctttttctgccttttgattgacacattttgttttcttaaaaatatgaattaataaattaatttagtttcttcttttacagtttaagtcccataattttttttcacatttcaaaataaaaaagccaaattaataagctttcgggatcatttatcaagatccggcaagcaacggttttcgaccctatttgaacatcgggcccaaattcgaacaaaatccaaaaaaatttggctgaacattcgtcaaacccccagaaaaaatggcgcaactgatatagttatggtcgaaaattttttctatgggttgacacagcggcccaattttgggctctcagtgcaaataggtttattatttatttagtaatcagaacgccaaaactttgcaaaacttaaaattttttttgggattttcccttgtaaaattagaagagccgatctcgagttaaaaacttaagttccataaaataaacttggaatcgctagaggaggtcaaaatattggcctatgcaaaatattaagaaaattaaacaataggaaaaaattttttacaagggtaaaaatttcaataattttaattcttttttagccaagtccacaatttaaggtcaaaccaaataaaatttacaatattctccagaattttcccttcaaaatgagcataaaatggttttatttgctctagtattcaccaangttataagct

SEQ ID NO: 21033 - DNA, 2874 bp, Heterodera glycines
  unsure (1)..(2874): unsure at all n locations
agttgaagtgtgatgagagatttctattttccgctgtgctggaggtgcgcgtcgatgtttagaaggagactacaagatgtggccacaaatgccnccatgatgacgcacagcggagatatgtggcaacgtatacaagttttggaattggtaaaaaacacccatttaaacgtattaaaatatttatgtttaggcaaaagcatttgaatgtggttacagggtggacagattttaccgggcatggcattacgaagcggcggatgatgatttattcaagggatatgtgcggttattcttgaagttgaaggaggagtcaagcggatttccgaaaggagttgagagcgatgaacagaagaggcaatgggctgaggaatacaaggaaaagtacggaattgcgattgaactgtgcagggtgcagaagaatccggggttgcggtatatcagcaagcttatgctgaatagtttagaggtatgaaatacgaattcttagatctgataaaatgttaatttttaggggaaattttcgatgagaaattcattgagcaagaatgcggtgattgacagagagtctgccttttacgagttggcgtgtgatcataaggtggagttgtgtgacattgtggagtactcgggtgacgcgatgcgggtgatctacagggacaaggaggagtttgttactgagcacaagtcaagcaatattgtggtcagcttatggtaagtttttttttgaaaaaaagcgagaaaatataattttaacaggacgacgagcatggtgcggttgaaattgctggagtttatgatggaggcggaaaggaatggcggggagattttgtacacggacacggatagtatattcgtgtttcatgacagagagtggagccaataacgacggttaaataccttggagagatgagtgaggagtatggaggttacgaaattgaagaattttgttgtggtggggcgaagcagtatggtttaaagatcaggagcaaggagacgggggaggtcgattatgtcatgaagattaggggtgtgacatttgatgtggacaaccggaaggcgttgcattacgatgcgtttaaggagatagtgctgaattatggaaagggggaagtagaccccgcattctttgtttacaaaaatgattttgggaatgttttttgaaaatttttttaaacaatctcatattattttagtccaacgcgtgagtcgaaggtcgtgacgagggagagtcacaagatgtacaagccggtctgtcagaaggggattattgatgaagaattgaatgtgatgtcatttggattttgttaattctgtattttatttttgttttttgttaaataaagttgaataaaaattaaagtgatattgggactagcaggggtggaacggtctaaagtgaaggcctgcacctgttagctgtaatatttttgtaacccgtaaaatccgaaccaatgattcccatacccctcgcattgggtgtacgcccaatgactgccactagcaaatgttggttattttaaaataactccaaggtctctaaaggaaaataacttttatgcccattattttcgcgcattattatgcatggtagttgtggatatttaagcttaacatggtgtcttgagtataaatgctgttcgacagtaacgccgaggaaacctctgtaggcaaaaagtattagaaccgttaaatacgatgtcatccggtgagataaactgattgtacctaaggtgtctcgttattagaatctgtcttcttagaaatttcaaattatttttcttacgcagtcgtagaatttcagatagctcgtgaggttggcattcgttaaaatggcatagaatttcaacgagagaattcattttttgagcaccgataggcattttcatattcgttgcaaatccttatataccattacctcaccactgtatgacgaatttttgccttttctctttaatttcaaaattctgagaactgaaatacagatgacgaccactaccaaatcgacaattgacaaaaaatatacccaaatatttgaacttgaaactttaattttctcaaattctttgaacacgacaaaattaaagaattcactatttgtctcgtacacgtattttggaagtatctcgtttgagtcaaatcgatctttgtatattttcttctctttaattagataaatttgtccctcaattattagtaagtcggtaaatgatgatggtatagacccgatcgctttagtaataatttcggtttcattattgtgggtccataaattctcgattgatctaatgtcaatttcatctattcgatcgtctctgattacaaaaagtcgaccatcaatatgatcaaatctaagatccccactgggaaaattcctgacaaccatttcttgactccctcttgttatcgaagtttcatttgtcttttcgttttggaaaattaaataactatgactccaccctgaaatcggattcctatttatcgtacacagtctcgagcgttcgaatccgaactgtctttcattggccgaactctttgtcatagtgagatacttgtcgtcaaaaagttgtgtatcagaaagaatagtaactctttctgaaatcacttgactggctaccgttaggagaacaaataaattaaacattactgacaaattgcttaactaataaatcggccctcgggcgaaccttatatagaccgtcaatgacctcacaataagggattccgtagcatcgttgtgtcaagaaataaatgcaaaattgaccacatgcatctgagaaattgatgtggacgatgcggtcgttaatgagaatttcgttcattaagttaaggtatgaacttaaatcttattggggatatcgcccaatgaatcaaaat

SEQ ID NO: 21034 - DNA, 1711 bp, Heterodera glycines
taaatttttaatattaaaaagatagattatgaatgtattatctgattattttttttgttagtccaattaaaaatgaaaaattataattgcaaagatctcattttgaataccgtatccaaaacacgaattactgttacagaacccgtcagcaatttgggcttctgcggctttttgttgaccattttgtctgtcgttttcctgctgatcactgccccattttcgttgtttttctgcgtcaaaattgttaaggaatatgaacgggcggtgatttttcggcttggccgactgatcccaggcggtgccagggggcctggtaattttttaattttcgcattttttatggattaaaaatttttaggtttattttttgttaacccatgccttgacacctttcgtaaagtggacttacggtaaaagaaaattaaatattttaatttaatttttttttaattttttctttaaagagtgttaacatttgatgtgcagccacaagaagtaatttattgccggggcttgaatggatttttaagtgcaaaataatgacaaaattttcaatcaaaaaaataaaaaaataaaattttgtaattctacaaaatggctaaaaaatttattagatagtcccgctggataaaaatataattattccattatttatataattttatattttaatttttttatcaattaattggggtcaagaaaaatagataaaagcgatttattaaaaaaggaaatccgatttttgtaaaaacgattaaaaaaaaaatttaaagccctttttgaaatatagcgccaataattcattttaatcataatttttggatttaaaaattaaaaaaaaagattctctcccgtgacgcggtcactgtggcggtcgatgtggtcgtatatttccgcatttcaaatgcaacaatttcggtcacaaatgtggaggactgcagccggtccaccaaattgttggcccagacaacactgcgcaatgttcttggcacaaaaacattggccgaaatgttgaggtagaaaattggtcacaaaaaatgttgataatagtaaaataatagtataatttgaaatttttttttttttttggtattttatttacacaaactatcgtaaaataaaaatttaaattatttataataattctatttatacaccattaataatattgtttaacaaagaaacttgtagtataaattaaattaattttaaatgcttttatttctgtattgtgaatattttttaaatatacaattgtataattaatacataaaaaaaataataaattttatttttgaatgatttttttacctagcaactgattaatgaataaataatttataaataataaaataaataaaaatttatggagtttattaaacaaagagaataaaaatatataaataatttagtgaccgtgatcacatcagcctcaaaattcaggttcaaattcttaaaaaatccaaaaacgaaaaatatttttaggaaaccttggacgaggctacatacccatggcatttattcgagaattttaaaaaaatttaagcattttaatttcaggggcgttaaagttgaaagggttgagatcaaggatgtacgcctaccctttcaattacaggtcctaaaaatttttgttttttttacaaataaattttaaagcgcgcaatggccgcggaagcggaagcacgcgtgaagcgcgtgccaaagtgat

SEQ ID NO: 21035 - DNA, 1185 bp, Heterodera glycines
ttcaaaaaataggatatacataattgcagtcccaaaaactccattattttgccttcctaatcaaccgataattgcttttaatgagtcactctattttaagtgccgaaaagaatcagacaattgtggtgccagtaccagttgagctagtccgctggcttaacagaaagtgattaatttaaaatgaagaaaatatcaattaattaaatttgtgatttcaaggaaaaacaacaacaaacaagagaagaaataaacacagtttgatcaacaaattttagcaaataaattcacattttttatttatagaaaaatttttctattttaaatttataatttctttttcataaaagtgtttatcattttcgtttgtactcttaattaattgaatattttttcattgaatttcatagaacactttttaaaattaataattcataataatatttaaattttaaatttcttttttataaacgtgtttatgatttttgtttgtctactacctcttaatttggtctctctcatcaattaacataaatatttacgattttcacgagttgtgttgtgctaaacccttgcctaccaaatcacatttttggtgccccatttgattagcatattttctaaagcaatgggagtgaatgattgaaaaggcgaaaaagttatctatttgcttcatctgtcaacccaataaacaaaattggtaggtgctgcccctcctctaatggtgttgatttaggactgaataatgatgattaaatggctaatatttgaaaacaattttttattttgcataaaaaaatgaagtcaattttaattttaaaatgtttaaaaggaatacaaaaaaattttaaaaaatgatgaagtttgtcacaatgtttttgcactttttgcctttgttctccatgccgaagcaattgttaaaaatttttaaatttatttatgttgcataatttttgtatttttaaattaaaataaataaaaatttacatagcaaaatttctttaaagatgaagttagtcagtattttggtactttttgccttcgttctctcttccaacgcacttgagggctcaagtaacaaaaaattatttaaatttatttattcataattataattttgtaaatttaataaaatttaatatttattaacttcgaaaatttcattaaattttacattttttaaatttt

SEQ ID NO: 21036 - DNA, 638 bp, Heterodera glycines
tcttttcttgaaattttcttttttgctttaattcacccctcattctaacgtatttttggataatttctaatttttcatcatcagttttcgttttgtatttatataggcataattctttaatccatttttgaatatattggcgatttgttcccatttttttcgctattttttgttcaattttatcgccattcttttgttgaatattttcttcctttttgctttattttctcttttattttataatattttccaattatttctctttttttgagttcatttcgtttttcttcttctttttcttgccatttttctccaaatatttcgccaaatgacttttgttgcaattttttattcactgttccaattttgacaattaaaaataaaataattaataatagtagcggaaataatttcatttttgtcgtctcgaaatgattttattttatttttcttcaattaaatggcaattcattttttgaggcatttaatgattttttttctgattaaaaaactgaataaatcattattttacttaataaaataaggaaatcctgtttaatttcaaagaaataataataataatttatcttaatgacaaaataattgccaattggtaaattaatgattaaataaaattt

SEQ ID NO: 21037 - DNA, 1143 bp, Heterodera glycines
tcggagaaaaataaattttaactgtcatttttggtgtgataattaagtggtaattatgggctaatttttctaaaatttcgagaaattagtgcgaaaaaagtctttttaatttggttgttaaaaatttttatataattattattataataaatttttggtttaatagaaaaattaaccaattttaaaattaacattcattaaatttgtttcattttttataatattaaatataaagcattgttttattaataaaaacaaattaattaattatttaattgagattctcaacctccaaaaattgtgcgcccaatttaaaatatttaattttatcaaaaaaaccaaaacaacatcacaaattcacaattctcagcttgcccccattcgtccgcaaatattcccattcattctcaattctctcactcatcatcatcatcattaatttattaattttctcatttctgtttattctcccgccccccataaccatgatgcaataatataaaatgttcgtgatgcaatcggcgatgtgaatgatgttgggttgggttgggttggggggggggggaggagggaataaaatgccccaaatgaggggatgaacagcaggcagggaaagggcgggataaaccgggacgggcggataaagataaatgtggagccggtgggatcagaatgacactcactcccattactgaaaaattttaaaaatgaaataaattcttaaaatttatttttaaaatttgtattttatgtatgaatttttcatttcaattctgttaagtgaacgggggaaagaaagtgataaatggaagcggtgggattagaatggcactcaatcacttaaaattacttaaaatctttcatttattttttaattttcgttgcttaaatttttcttttttattatgagtaaaaaaacattttattaaaagaatttttaattttgtttttaaataaatttattatttatcaaataatcaaaataaatatttctaaaatgaagtttggacgtgaataaatgatatgtgataaatgggaatgctattgcatcagaatagcactaactccaaattctgaacaataaaaatataacatttatatggccggcaatgtagagatttttttttctattatgtttattat

SEQ ID NO: 21038 - DNA, 1799 bp, Heterodera glycines
  unsure (1)..(1799): unsure at all n locations
cagtgaattaaaaaaaagatctatttgtactttaattcttccgttaacactttatttctacaaatattgaaataaaaatgttcgtaaaatttttccattgaaaaatgccaaaattaaatttcttaattatcgtaacatttgaaattaggaaatgatttttaaattaaaaaaaaataagtcatattttaattacgattacgtatttctgaaaatgaacaacacaccaaagaccgtgctgttaactaatgttgcgcaatcgccaattaataatgtcacggcaagaacaccagggcggcttcttttggattggcaccaccggaacggcgccgcccactgatgagccaaactctgcgggtgcgggcgacggcggaggatcagcagcacaaccggcaaaaagcggggattataatgcccccctccctctatggggagccaaaaatgccgaaaatctcttgccccccccacaaaacaaaaaagcggcctgcagtgattagtctcgtgttccatcgggatttggaattggcatgaataatagctccgctgtcctgtcttttcctgtgccaattttgactgaccccggtgggccgacccgttcaatcccggcacggcactttcgccccaaccaaccctccggcggcccattgtactacttactgtcttcctttttgggagttcccattcaaaaaaaaaaaattgggggcgaacaagaacaatgaggatgagtatatgggggatgtgaccacagagcgcaaaaaagcccattttcgggggtaccggggggccaaaaatactgttgcaaaaatcagtggcccgaaaggagtgaccgaccaccagcaactgtgggtgacaaaagaaaattgttggaagaaaatgatgatgagatgatgatgattatgatccttgtgccatgtcaatcccttcctcttggctattatacgtttggcattgtgtacccaccgtcttggcaccagtggaaggaaaattacatattgttgaagagaagagggcgggggagggacattttgggattattcatccatttattgttggatggatggcatatttttaggattagaaaattgcattttgaaatagtcaaaaatgtttaattcaggtttttattaatttagagaaatgagagacgcgccgcgccggtgccaaagggcaacggcggggaaattaattgaaaatttagcacgtttaacagacattgccaaaaaaaaacaacaaccaagttttgtgatcttttggatcgtttttcggcaaatttctaaaaaaaaattgttttaccagagtttcgacgaaagtgccgaaaagcgcggccttttaaaaaattgataattttgaaatttgcataaaagaccattaattttatatttttacttacgaacacactgtttataaataaaccaatttttgtattttttttttaataaaagataatcaaatgggctatttacattaaaaaatggacgacgacggattaatatggtgaaacggaagaatgaatgaatgggaggacaacacttttgagatgggatgcctagtcaaggtgtgaagaataatgaggaggccaaagaaggcttcatcctccatcatctgatgatgaagatgagaaaatggggcaattattggacccttaggggcgagcgcattcaacaggaagaggccaatcttgaagaaattgcttctgataaagacagaattggccaaaccgggggggggggggggagggattagacaaataaataaacctttagtgtatgattactttctttctggtcgaaanggtgcttctt

SEQ ID NO: 21039 - DNA, 1261 bp, Heterodera glycines
  unsure (1)..(1261): unsure at all n locations
tcatttaaaatttttacacgaaatggaggtggagggggtgtaaatcagaaaaacgaaaaaaacccatttttctaatttncctttttaggataaagaagaaaaatgtgaaagtgtaatttgttcttaataattatgaatgggatctgtgaatgacagccttatggagagcaaagaaagccttcagttgctgtgcgctaatgaatatgctaagaaaaagctttaaaccataaaaaaaaccttaattcatgcttacaaaatggggattcctatttttatataaattaatttttttatgcaacaaaatataacaaaaagttataaaatttaaaatatttttcgagcaagttttgattttacctactttattatacaaaaattcagtcaaaaactaaatatatataccttaagaaacgacttaaaattttctaaaaaacaccccattctgaaaaactgaatttttcaaaacaaattttatgttcttagaatttttctcataaaatcttttctaagaaaaaaaaaattatgaccaaaaattgccaaaaaaaaaactgaaaatattaatttaaataaggaaaatattgtttaaatttttcaatttttgcattaattatttttcaataaaaactttatagtttcataatcaatttttctgtgaccaaaatttatttacaaaatttttttataattcaacaaatttttgttaacagttttaatatctaatttttaaaagttcaaacgattcgttgccggaaaaaaaaacgaatttatttttgtttttcaattaattgacaaccatttaaaaaaaattttccctgaacgggaaaacgaaaaaaagcgggacgggattcccgcttttctcgttcccgtaaaaatccgaccagctctattctctagtaattatccccaaaatctgcaacaaaaaaataaatttaaaaaatttcaaaaatcttttttttgcaacaagccaaaaatggcatcaacaaagcaatgaatgacatctgatgaatgatgaaatcaaatacaaaaagccattctgctgatttgcttcctactcaacttcatcactaatctcttcaagattagtcatcagcaaagtctaattcactggtattacgtaattcaccaactgtagttttgtcacatgaagtctgaaaagataaataagaaaaatttaaggcgtagattatgaaaatattaagttttattcatttcagaactttaagtcaaatttcaaaataaaaaattttaaatgattgggaga

SEQ ID NO: 21040 - DNA, 1805 bp, Heterodera glycines
  unsure (1)..(1805): unsure at all n locations
atttttcagaaattacattgtttttcatgattttttctcaccgagaaattaaggagtattcatcttggcacattcatttttacgtattaatccccaaaggttttgcatatattaatcccacattccttttttgttattgaaataataaatggattataagaaaacagaatcaaacgttttattgctttgtagaacaaatattttataagattgatcaaataacaatataattcccaaattatagtcaatttgctttgtgcattaattaataatatttcacttccaaattagggtcataattgcttccgggcccagttcgatcactggtgtctcttctccatctgatcggccgacttcgtcaattcgtattttgaatggatttgttgccgagttgatcaacaccaacactttatgtccatgtggagttgtcacggagacatgctgaacagggtgggcggattgatcagtgccgagttggctatccgaagcaaaaagtgtggagccaattcgaacggagccgggcggcataaagcggcttaattatggacaattttggataacaaatttaaattggtcaaaaatggtattccgaacctaaaatgagccaaaaaatagaacattggctgtttgtagaactcgtctcgttcagcgtttacaattattggtgcatcaacaaaattgtgcacccaatttggaccgccgttcatgtccaaacctggcaataattattttttaaaaaggctaactaacccatttacaaattgattctaaggaaaagcataatttcatgccggaattccgaagaggaggctgaatgcggaaaagaaagatttttttttcaaatttttgtatttttcaaaagatatcttcaagcaaacttcaattcaaatttttttgtctcggctctttacaagtttaaaaattgaaagctccgggcgttcaaacattggacccaattagcgtatgctaattaatgcgataatgatcggttctgcacccgcgtctaataaatatttcaacacacatttaatgatgatctcatatattcaactttgccgacttacacaagttccagtccacccaaccgccgctccaatggcgcaggttctgcacaatgtcccacccgtattgccagccccgggtccaattgccgagccgtggccccgagtcgtccggaaagataaagcccgtacatgccttgaaagtgccagcaatttgttgcaaagcattgtttgaccataaatgccgaaagaaagatgccaaagagaagtcaattccgattattagaggcattcggtcattatttttcacttaattagggctctaaatgttccattttccttgcctctgtggaaatgatcattttgtccgggtgttgcgcatggaatttgtcctgttccgaatgtccgcccaaagtgtaccaatgcactccaatcccatcgatcacttccatgccattttcgccttttgaactttttttacatgcgaggaactgaaaataccacaaaataactgttcggttactttaccaattcctcattagtatgggtaattaaaagttgattgacttgttccgcactggtggccataaattcgggtaaaattggggccaaattgcgacagatctgacaccaaacagaagtcacctctttgtcagagttggagtcaccagcgaaggtgccaaacatctgttgngcaagggggaggagtacagtaacatttgaaaggagacaagagcggactgtacatacagtatccaagcgcaacatttgaaaatgaaacccaatcatcacctctttcatgga

SEQ ID NO: 21041 - DNA, 1745 bp, Heterodera glycines
  unsure (1)..(1745): unsure at all n locations
gcagacntaaaatggaagaggaaatgggncatttaaattaattatgtaaaatatatgtaaataaactaattaaagtgttttcaaagggaacgactgaccacggacaagcaaagagtcggaacttttcaccgcttaatctcactgcttctttgatgaagggaatctgaaaattttaaaatgcgattcttttgaatttttcatttgcagcagactttctgttcaaagtcctccggcgccagcgaaaaagtgctcaaatcgaagtcgtcttcctggtcaacataggaatattgacgcgtggaaaagtcagtgctggcaattggcacacggccgaatgagtaacgaatgcctgcggggaaatgggggaaatgggaggggcaaatcggcggcattggcaaaggcattgcaaattaattgagagattagaaacgagagcagaacaaaagactaattgagagtgaaaagtcggccgagaatcaggaaatggaacgtgtcacaatcattgaatgccaaaatttagcagaaggccaaaaaaatggttaccctttccgtaatggaagtacgcctcgagcaaatggcgtctaatgggcgcactcaacgcgttcaaattgatgccggatgagtcggaaaaggccccgccaaagccaagaatggtttggtatttgtcggatgggtccacgctaagccgcaagacattgtcggaggacggaaaaacactttcttaaaagggaaagcatttgaatggaaatacaaaaatgtcaaaacgagcctatgcaaataattcaaagtctttgttttttatgctgtcatttttggcatttatgcaaaaagcgaaattggatttggttttgataggcataaaacatgagaagtgcttttcgtttccgcacttcgtttgcccttttagcattgttttagtgccattccttcccttttccttttaattacatcatcaaaacgggggggggagtcaattcatttcggcatttgtgccacaagtgcacatcccttacaaaagggctcactttgctttttgtttttgctttgattttctctcatttgtcatttaggtgaccttattttgcctacatacaccctaaacttttttctgtttttgggattaacaatctgcaacaaatgggatattcctccggttacggtaaaaaccatgaatttcgccgttttggtcagaaaatgagtaaatttccagtaaaaagaaaattaaaaaatattttatcaaaaatttccaatttttacccaatattttttgaaatttcgggtttattttaactgcatctactcatatttaaatttgaaggttacttcaaaattttttaaatgagggctaaggatttataatatttagacaaatttaaattgttaacgtttttcgttttcagaaccaaaacgtcgttggggaatcagaaaacttggaaattgttaacggttctttttcgcagttcgattaacgcgtaacacgatggaattcattggcataatgtcaaattggctgttttaccactaattatgagttttgcgcccaccgcaccttccgttgctgccccttttgccctcattggcatttcctttctttccaatcgcttccatttccgatcacttgaataagtgaccaaagtgtccgacggcacttcgtccaccgacccatcctcaaaagcatcgcaatgcgaaacatcgcacgcgcaaacgaagctgtcctggccgggcgaatagcgccgttggcatccctt

SEQ ID NO: 21042 - DNA, 1135 bp, Heterodera glycines
taaattaatgcaatttttgcaacaaattttcttcaattatttcaaacaattaatcatttttggactaaatcatcgaatattaatagaaattcagatttgattttcacatcacttttttcggagcgctttttcaaaaaacttttgggaaagaaggggtccggcggtgccgataggcgccgccgggggaaattttaaaaatttgggtgcaatttgttaacagattttcaacaaaaaaaggttggtttttgcgattattaagctcaattggtaggattttcatttaaaaaatgataaaatatgtatcaatttaaaaaaaaactatgaggaatcatattttctttataggaaacccacgagtatacaaaaaaaaaattgaaaataatctaattcctgtagagggattgaaccaggggaaagaagaagggaaagtgaaggagactagccactaggccatttgcacagttggccttgctactttatgaatatatttaattattatttctaatttttttcctttgactccaattttctttcactaatttttcactcacaaatcagaccccattcttaccagtgcttgtttttcccggttcccggttgccctaccgggaccgggacctgagcttttcaaaacccgggaccgggaaccgggaccgggacctcggaggaccgggaattcccggcccggtcccggtcccgtggcactctaattttttcatataaaatagtcggatttttgaatttttcttatgttaattgcccaattatattaaataaaattactttttttattgaatttacatatttatttattttttaattaatttcccactgattctcatcgacggaatgttctaatgaatcatttaatgtgacagcagcaaatagaaatcggaaaagcagaaaatttacatttccatcggtaaaacaaattcatttttaataaacccaaacagaattttttatcaatttgaatgcatttgaaaagtccaaataaataatggaaagctattttatatatttattaatacaattcagtaactacaattaaggaattttttcgttttttgggcattttactaaaaacaattttgtcactaagccccctggccatgaaaataagaagtttatgcaa

SEQ ID NO: 21043 - DNA, 875 bp, Heterodera glycines
catttttttcccgtgaacagggactcgggcccaattttttcggatctcgaatttcgggaaaattttcggtatggaccgcattaaataatatttggccgagctcataaaatattaaaaaacaaaaataaacaaataaatttaatttgctttcatttaaaattatttctagacaaatactaaacatgcttttgtgttcaaaaatttcgcactttcttctgcttttgcttggtgccctgctgttgttgtccttcatttcaatgggcaacggtaattaatttaaaaataatataattctaattttaattatatgaagaaataaaaatacaaatattatttaactttttttttggcatgataatgggtttacttatttcttctttctaccccccccccccccctcttaattagttggaaaattagtacgagtcagggtatactaccagcagtactgagttggcctagtacgagttggggctttcataaaccattcatactccaatttatagttgctaaaaagtgccaaaataattaatttttagtttctaaaaacccccaaaatggttttgctaaaaataccaaatagtttctaaaattcaaattaaggggggtgggtgtaaaatcgaaaattttcttcaaaaaacaaaaatattatgccaacccattaattagatacataattttcaaaatcaaaaattatcgtcaataaaataaattaattatttttggagatgattttttgagaaatttttcatttcttaggggtgtattttttgaaaaaaatttttaagtcgattcttaggggtgtatttttactttttattgcatttttttaacaaattttgggcaaaacgccaaaatagttgaaaatatttttt

SEQ ID NO: 21044 - DNA, 3388 bp, Heterodera glycines
tcgtcatctcagtgcgcttataaacacgataggtatcctgttatctccaactgctccaaattgagaggttcgactcgcggtgcattttcctcacggcgcaaacgtttgatgacctgaataaaaagaaaacaaaattatttacaaaattgtttttgatattaacccaccttttttgtggcatctttgctcggaaaagaggccagcacaggtgtgcatgtgttttgaagcacttgagcacgaatggtcgcaggtgcttcgcacgtctcagcagcacgtcgcttgagtccagttacaagacgctgacattccacatgcgcagcgttcatgtcgcacgaatgaactccgaccaacttctgcacaacgttatttaaatccgtgtgcaagcgtcctggattttaaaagattttcaaaattcaaaataatatattgcatacccttgcattggtctgccgggccatgaaactcacaccgccaaaatttcttaagtccatcgttactgaatttgtgaaacacataaagtgcaccatcatgcaccaatttatcattatttcgttttgttttaattacttgctgctggttcattttgtagttaataaaagcttaactgtcaaaacattaaaagtaattttaaaaaattagcaaattatttgaatgcaattttttcgatactcactcgtacgaaaacggccgtacgaaaacgtctccggtacgaaaacggcggtacgaaaacgtctcaggtacgaaaacggcggtacgaaaatggcggtacgaaaacggcggtacgaaaacgtccaaaaggtacatcagaaaccaggggttttcagtcatttttggccataacttttttgtcccttaacgaaattttttgcaattttgcaggctaatagacgacacttagcgctatcaaatgataccatcaatgtttgatttgattgaacatgaaaacagttatagtccagggaccaaacgtgccccgggtcccaactgatcgagtccgggaaaaagcgcatgaaaatggagggggggagggaaagtgatcaccgatcttgaaaaagtcatctcgtcgatgagggacgaagaagaagctgttgacgaattggaattgtgttgtgctaacaacagagagagagagagagcgagggaaaaatgtgtaagcgctaaaatttaatttgacgaattttttatttaggaaatttgaattgaaattttctataaaactttaaggggagggggggggggggaccagtcattttaggtgagagttgcacccaaaaatacgcggaaatttatgcatggaagagtcccaaaatcagcgtttgtttttccccatcggtcgaatccttatcctgctgctgtacaataaaatccctaatccccgtcagttttttttaatttggagataagtgcctaattttattaaactggttcatcaaatctctccttacagcgattgaaacaacggaatacataaattagtacagtaacaatacacagatggcacatattccgacattgctaacatcacatgatggcattatgggtgaaaattatacatatacaaacaaatcggatggatttgacgggggatcaatttcattgcacaattatccgtgatttaattagtatcctctgcaaaaattctcgtccatttcgtttgccctttttctccatgccgttgttgttattgttgttgttgtaccatggctcatccgaccacgcgtcacgtcattcagtcactgtcgctgcttgaggggcttctggtcgcattcccatgggtcgtattgttggtggcattcgtcgtcgccgccgtcaatccctccagtgccgcgatgttggcattcaatgccgtcgtcaattccgcgcgcgccgcggcattggcatccaatgccgtcgtcaattccgcgtgcgcggccgcgttcgtcactgcaagaccttgaaaaacaggacaaaaatttgttgcttcaaaaaaatgcatatattacgttcaagcgccatcatgacttctctctgctcggcctcggtcataggggcatcctgccgcgtacgcgcagtactccgtccacgctgcttggtcgacttggaccgcttcgttggcgtcgctttgcgcgccacaatccggcgacgtcggcgagacgctttcctggcggacgacgcacggcgcgacactcggcgagacgctttcctggcggacgacgcacgacccgttcccctgtttctcgttgcccttcggctcgcggaacgacgacccgtatttcgtgaacgactgcgactacgaccagcagcagttgaagtcgtacgacgagttcgctgaacggtggggaggaggggaaaatgaatgaatggtggcggaaaaagcggatgaaaatgaatgaaaatggaggggaaagggatcaccgatcttgaagaagtcatctcgtcgatgagggaagaaaaagctgttgacgaattggaattgtgttgtgatagcgcaacagagagagagagggcaaaaaatgtgtaagcgctaaaatttaatttgacgaattttttatttaggaaatttgaattgaaattttctataaaaatttaaggggaggggtggggaccagtcattttaggtgagagttgcacccaaaaatacgcggaaatttatgcatggaaaagacccaaaatcagagttttgctggaaacctgaatacagacagacacacttttaggttagatgtacatacaaaataggtagagaagaaaaaagaaagccggaattatgtaataatttatcttttttggtcaacgcctttgctcttttaaaaactctaagctaaattgtaaaaaaaaaaggacaaaaggtcgaaaatggacagaaaagaagagtaatttcaatgaatttgaactaaaaaaatggaaaagatatacctaaatttgtcctatttatactttttgtaaacgactgacaaatttatgaaattttctgcgtatttaagcggtgctttcccccacccaaatcatgcattcactcccattgtttcccaatcggtcgaatctttttcctgctttacaataaaatacctaatttctgtcagttttttttaatgtggggataagtgcctaattttcttcttaattgattcatcaaatttctcctgacagcgattaaatcaatgaaactagagtagagcgggaccgggaccaaaacacggacaactgagtaccgaggtcccggttttgaccgggactagtcccggttttttcccggttttcccagccaaaaagtcccggtttttcaaccagaaaaggtcccggtcccgggtttgcccaaaattcccggtcccgctctactctaaatgaaacaacaaaatatttcaaaaaaaaggacaaaaagtcgaaattgtacagaagagaaaagtga

SEQ ID NO: 21045 - DNA, 3289 bp, Heterodera glycines
ttaaacaaatttaaaaaataatgggcattttaaaattcccttcctagaatatttattaaactcaaaaatttgtgtagatttgttgcctcgtctgcgtggtgctgggcgtttggctcatttttgaccgttacgcggtggacaatttggccaccgcaattggccacgtggtcaaaggccatgaaaacgacgagggactcagcgaattggtggcactcggaattcttttgtttatttatatttgttcatttcgttaaatacaaatttatttctttgctaattcaaataaaacccatttatattttgcaattgaattttaattttacaatttaaggcatcaaagcccaccgccgtccgtcagattggctatttgcttttgtttggcggcatcgccgtcattgtggtcgcttctttgggctgttgcggcgctgctaaagagtggcgtccgctgctttgctgtgtaagcaaaaacaaaatataatttaaatacaaaatttaataaaataaaataaatatttattacataattaaataaataaattcataaaattttatttttgattttaaaagtttcgttatttgttttactttaaaatattatccaaatgttttaaaatattttttataatgtatatattttaattaaatatattgttttatttgattaatattattattattattattcacttttcttcttcagtatgcaagttgtctgatggttattttggcggtcgaaattgcggcgggaatttacgcagcgatggttggtggcatcttttggttcaacaaattaacaaaaacaaattaattgtcagcactcgcacatgttcgacaaagacttccgccaaattttacgcgcttcattgcgcatgtaaatttattttaatttaattttgtttatttataaattctttttttaaatgcttttccatttttaggtacaatgggacagagaatggcgtggagggcagcgactcaatgctggtcaaaacggcatgggacaagcttatgcaagaggtcgaggagcagggataaagcacattgaaaagtgaatgttttttgaaattcagaagagttgttgcggcgtcgactcgcgggtcggcgaatttcagcagagcgggtggtatcaggtcacacttttggtcccataattcagccgtttgatcgataagcaatgatttttttttgacaaatgccacacacaaaattgaaaaataaatatttttaaaattaattggcttttaatttcgtagcataactagccactagccaagaaaaaaattaaattttttacagcagagtccgtataaaatgacttggcaaaatttgagaattgattgggctaaacctccgtgaatttgaaaaattatgcaaaactcggccaaaattgaggacaaaaggcaatttttgatcacagatgaccaaaggccgtcacgaatttccgcctgcgtgttgtccaccgaaaaagaatggcaaattggcaccaagttgcccaacagtgttcagatttggcgaggtgaaatcagtaaaattattagcaaaatatggaataaatataaaagtaaattcaaaaattatttaataaattttaaattaaaactaaatttttgcttagcttttgtttaattattattatttatgctatttgcttttattttttgccattttgtaaatttatgccaatttgtgaatgcttttgaagggctgttacatcaaaatcagagagtccatccgcgaactgagcatccaattcaaattggtcatgtggacggccattgtcatttcacttattcaggcaaaatgatatgtatttacatgtcaaaatcaccaattattgaactttttgtttaattaattgcttatgtttcgcttgtgaaggtgttcggcataattgtggctttttgtctgtgcaatgccatcggttcggaggaggcggcctattgacaacaacaacaaaaaaatagaaaatgcatctgtgctcattcattttatgctgccctttttcccattcgttcgttctttgccttttgtctaaattttacattttgtgaataaaatttcgatttgttttgatttttttttttgttgtgaattcgggaggaatgcttcgacttttctctccttttttctgccagttttaccaggtttttttttcgaaaaaaagcaacatttggttattgatgtgggccgaaaatgaactcagctacccattggcattacctaaaacccgtccaaacgagggggggggggaaggtcgaaacaaaagaaattaggtccagactttttcaaatgtcgaactttagccctatcatttgtttgttagtggaacagaaaattttacttttacttgcaaaaatataaatatttattaatatttttttttgcgttttaagggttgccatgaccatctgtattatgagcattatgttcgcattgcttttgccatttcttttctgattctggtcggcattgtcgaggtgaaaaagtgaaaattaatttccaattttttttgattttccaccatttttaaactcctcccccatttgccatttgttcagctgttttgcgttctgttcacccacaaattgcacttccgtctgggggacattgaccaccaattgtacatcagctgatgaatgccaattacccataatacgtttttgaccaaaacattgacataaattaagcgaccgaaaaaaatcatttaaaaattatcagtgatgattaataatgacgagggaaagacaaatacataattctcacctttttattttttgaaaattttctatcaaaattggaaaaatcataattaacattcattttgcccaatttgaacccctcaaaaaatttttcaaacttatttttacggcaaatgatcgggccggacattgttaaatcaaaataaaatctttacctttaatttagaaaagaaaaaactaaaaaataatttcaaaatttgactaatcacaacaatattcgaatcaattattttcacattttttaaataaaattgataaaattaaatatactttaaattttaaagttttcatataattccttattggacaacggtatttattgctgaacaccacagaacgttttgttgcggcgttatcgacaggcttattcggggaaaaattcggaaatctgactcaaaattactgctaaatttttgaaagtttaagaaaaaatttaagtctcggtttcgagtaatccttagtttatgaagtctcgaggctcggcggtcaaataattttttttctgccggaaagaatttattaaaattaat

SEQ ID NO: 21046 - DNA, 3281 bp, Heterodera glycines
  unsure (1)..(3281): unsure at all n locations
ccacagcaatttgagctcccacagctattttcgatcacctatcacaagcagtaaatcccgtttcttttcttttttacagtccctattttgtcttatttttggattacacacattatggcacgctatcgccaacggggccatcatcgtccgtccgaaaagcagcagcaaaatcacggcaacatttttgacaaagatggcgccaacacttcacatttccatcactcaatgcaacaacaattccacgatgatgaaaatggcttggaattatttgccactacggtaaaaagctcaattttttgtttaaaaatggtatttcagcggtaacggatcactattttattaattttaatgaaattaataaacgtaaagtattgattttttgaaacttgtcaataaatttaaatcaaaatgtgagaataaaaatttatgcttttagtccaagtcaattataaaattcatacaggtcaatacaccaatacattaatcctattcttctttgactcctgctttcttcattagcaggccgatgttcttctccaacatgtccaggcgacccccaatgtgtccgatattcttctctaacgtgccgatgtttttctccactccgtccaccttgtaagccaacattgcgagctcgacccccacacctccgagcgccaccaggccagatgacgccagctccctgcagcatgcgcaaagttgtgttggcgaaatttgcggctttgtcgatgatgagcaagtgttccttggtcatttcagtgaccttttcggcgacgttgagtttaagatgcggtggcaaagtgtcgtgacgagcagcgaagagaagccagaatcatagtcgcgtcttaaaagataaatcgagcaaatttatacaaagaagttaagaattaatgaaaaggcattcgaaaataattggaaagggacttttcccttaaatgagggagaaatggggggaaacgaaattatctacttatatatttcaaatattaaagctttttgattatcatgtgtgtgtattagggttgagcagtactggtacctgtaccggccggtaattacagggtttttttggtaccggtaccggttttttcaaaaatcaaagtaccggtaccggtttgtctagtaccggtaccgccggtaaaaatttgcactggtaagatttgtgagaacttaaatctttaaattgattttttattttaatttattagaatttttgatttcatattaaacggtaaaaaaattgaaatttttaaggagtttttattttaatttaaaattttattctgtaaaataaaaatttggaacttttaggttttagtttttttaattaattttattgtctgtcatttgaaataaaatattctaatttttttttttcattttaaacagcctagaaatcgaaaaagtaaccaaagatttggtcatttttttgtaaaaaacaacgtgaaaactgaataaaaattttgtatttgaaaaattttgtccaaaaatttttacgttggaaaattaccggtttttaccggtaccggtggaaaaatttggtaccggtaccggtttttgcattaccggtcagtaccggtaccggtggaaaaagttggtactggtaccggtttttgcattaccggtcagtagcggtaccggtggaaaaagttggtaccggtaccggtttttgcattaccggtcagtaccgtaccggttttttaaaaattaccgctcaactaaagtgtgtacacatgaatagaataaacaaaaaagaactacaaattttttgtgtctgtcgccaattttctcattggcgacgagaaggcgggtgccaacccgccacggcgtgcgcgagtgctcgcgttcaaccagggcacggacgggcagcgaatcgggaaagaacttgacacagacgaggaggaccgttacggggagtccgttttctcgggaccaagcacgagcacatgggccggaccgtcaaagacgaagaaataccggaagaaaaagagcaaaaaggcgacgagacgttcgggcggattcccgattcatcaattcctaaatcgctgattttgatcacgttcctctccatttaatcgtaccagccattatcatttcacctattttttgtcccattttcacttctttacaaattcatttctcatcggctggctaatctccggcccaagctttgtgcaaaacaattttgcacaaagttctttcttttcaatttctttaacttttcacatctgccaatttacattttatttttatgcgccatttctttgttcacacttttcacatcacaatttcggcccattttttgtcccatttttctcatcgcattatcgggccgtctgtcactccgcccattttgtcgaatgtctatttaagcggccctgcccaaggggtcgctctcttcgcttccttcacccccaaccattctttttattcgttttgctggacttttcgatcaattttttcaccatttacgcatttttaattcgtcgatcgcttctttaataaattttgtgtcggaatcgaagtctcgaattcgttttcgggggacacggtaaggagggaaaaagaccctcctcactccatcacattcgcctacgtcttttccctcaaccctcccggatcccaaattcccctcccatcagccactgggaaaaaattcgggagtgacccgaagtagcgccaaattcgagcagttcagtctcccaccagtaggagcagcggaagagacggggagaactcccgtcgtcgtcaagtccaagcagggcagtgaaggaaggaagagccgagcggtgccaaatcgtccgacgaaaggacagggccgttcgtcagcgtaactcccaccagccggagtgcccgccgcagggaacgggagtcgaaacccttggtcgtcgagtcaaaggggtccgacaagcccttccccaaaccttgtcggtggtgccgttaagcaagcagcgatttgctgcacaattctctcaagcaccagtccanactttgtcacccctcccccctcccattctcgtccccctttggcgctgatcggatcggtcagcagcatcagacccatcaaaacgaacggcaaaaagggcgccattccctttacggcacagcgagcggagtgagcagaaagagaagggacgagagcggtgaagaggagcgggaaccatcccgcctcagcttggcccacccccacccccaagcgcgcggcggaaataaaaagattggcgacagtgtcttcacaaacaaaaaattgtgatgaaaaaatcaatcaaatatatttaaat

SEQ ID NO: 21047 - DNA, 1014 bp, Heterodera glycines
ttctgatttatcagaaatgttctgatttgaagggtccaaatctgataaaataaaaatgttctgatttgtcagaaatgttctgattttggggtagcgaccaaaatttgttctgatttcttaaataaacttacaattttgaaattttatggcttaatgtcactattttacaaaaaaaatataaaatttatggcaaaatccaaataatgccgttttggtaaagggtatagaccagggatggcattccgaggcccaaaaaatttcggaaatcgtaatttcggtggccaaaaatttttttggaagtcgtacaccggaaatttttcaaacaatataaaatgcaaaaagtatttctgtttatgcgctagatcagaattcacatactcaaaattagtaaattttattttttactcagtcagcgcctcaaattacccttaaaattgctttaattttggggtttccctcttttttgtgggaccaaatgatcttggcgattgccaaagccatttaaggtataactcgtcgaacaatcaataaactcagcaatttgcacactaatcattttatctaaatttttacagaaattattgtaaatttaaaatttacagaaaaacacaaacatatatattctgtaggtggtaaaaaaggtattataagtttaggcaaaataaaattcacatcgatttaaaattaatttcatcaaattctttcgctctaaaaactgttggattattcgcgcttcttgaggtattccagagaaaatggcataatgttgaaatggtcacaaagctggcgaatcttcaaaaagcacaaaatttaatagatattaatttactaaatttggggtgtaatagtaaaaaagaaaatttgtttaaattgggttttttagttaatgggaaggggaggaaattacgttgaaatagtcccgctcaaaaattgatggggatatattttataaaatttgaatgctgcaattgaattaggtagtcgagctctcaatcatcctccactccaaccatt

SEQ ID NO: 21048 - DNA, 1404 bp, Heterodera glycines
tttttttcttgaaaaacttctaagttagtaaatttaaaaaaaaaatttttttctcgagggggaaacgatgcgggggggggggggggggaaatgagctgctcccctccggaacaatgcttgctgattccgtgacacattttgttgttgttgttgtcgttgaactgaccacacaaatgccgtaatggagatggacaacggtgaagaggagggcggcggcacggagcacgcacaattcggtgaccaaagatgggacggagacggcggaggaaaggcacagggccaccaccgccacgtacagggacgccaacgcgttgaaaatgggcgcccgcgagttggacatttgggcgatgatcagatggacctgtgacaacaatgatgagaatgggggaaaacaatttgtgaaattttccattttttaaaaaacgtaaaaaatttttcataaaaatttaaagaatgatataacaaatttttgtttttaaactaaattaatttgtttaaattgataatttttgttattgggtgatgaccatgatcgggtggaacgagtgcaagacgttccttctttcttcctcccccaaaaaattttaaaaaaagcgaatttttttaatttttcaaaatttcaaaattcctaaaagcttttctctaataaatttagttttggttttaattttttttcgttgaaaatgtaaaaaaacgataaaagaaattcgttttgaaaatttgaaaattcaaaacaaaatttcaattatttttggttttcttttttaaaatttataaaaaaacattactataatttttccaatcttaaaaggtcgtaaatttcccaaactaaaaagttgtccgattattttttttttttttttggagttttttggtcgtttttttgtttggaaaagacatttaatttgtggcccaaaagtatcatccgacacggagcgcaaacccaccgcaatgttggagaacacaacgccaacagtccaaaagaacgcgtgcgggtcgcgctccaacactttggcgggcgaacggacggcccacacaaacgcggcaccgaacagcacaagcggagagagcagcgggggcaccaacgcctcgtagaaggaatgctttaaaaaaaaacaatgacggagggggggggaatggcacacagaaaaatgaggacccgggtttttggtgccaaaatgttaaaaataaagccccctccccacaaaaaaaaatgggagcataaaaatttttactaaatttttttaatttttagtgcttttttttgttgaaaaacttgggggttttaaagtttttcttcgaaaattatgaaaagaaagataaaacaatttcaggggtaagaaattcttttaaaaattttaataaattttttaagaaaccgaaaccctttaataaatctataaa

SEQ ID NO: 21049 - DNA, 1381 bp, Heterodera glycines
aatttagggacaaaactctaggcggaggcagctctgtccctctggtcagatcagatgagatggctctttgtgagcatcctggtctatggccagccgagtaatgccatagaattgtggaacaagtacaaagaccaaatgtacaatccgcaaggcattattactctggcacagcataaagtagcagagcttgaagccctagccgacattgattggcggctgcacagctgctttaacttaagctgtgtgcattttagcctgccagacccgccaacttcaattgccaaaaatactgacgcggcaattgaagagtttttctttggcgatgatgatttgaatttgcctccagggcaaccaaatcctcgtccacagccaaatacccctccgccacttaacagcgaccaacagaaggtctttgatgctgttttgttggcaatacagtcgaaccctagggattcgactgtcccccgccgtttcttcatatacggcgatggaggcacaggaaagacattcctgtttggccaaattattaggcgcttgcgaaaggccccatacacctacaaagtgcttgctacggcatccactgggtgtgcagccattttgctgccatatgggaaaacagcccattccacgtttcgtctgggtagagaagtgtcattagacaaactcccaagcattccgctggagagcttctttgcccgtcggattcgtgaggcccaactcatcatcattgatgagatcaccatgcttcacaacacggtgattgaggtcatcgaccgagtgtgcaaagagatggcaattcgccagcacaaggatctcctcttcggaggaaaaacggtcattttcagcggtgacttcaaacagtcgctgccggtcgtgcctcatgaaggcttaaccgctcaggtgacagcctgttttcaaacgtctccgttgtttggtcaattcaccacgatgaaattgaccatcaaccagagactgggccaaggtcagcaagcgtacttgcaaatgtgccgccaaatcgggctcggagaaaccggagagcacttctggattcctccgcagttcctcgttaagagcaaggaagagctgatagattatgtctatcctaacttccaacaactccttggcaatgacaaagagctgctcaatcgtttgattctcgctccgcacattgacacgtgtgatgaagtaaacgagatcatgatggcgaatgtgccaggtcaagtgcgggaatacttgtccacggataagccccttgacgaccgcccactggacatcgatgagatcgagtccgaagtggctgcgttgaaccggcgcacagactcgggcatgcccccgcacagtatccggcttaaagtcggatgcgtcgtcgtccttcttatca

SEQ ID NO: 21050 - DNA, 2353 bp, Heterodera glycines
ccctcctataataaagcgccctattttcgagtaggggcttctggtaaaaaacagagcccgccgttggttttttaaacacgataaatgtatattattagatgttgacgaatgtgaagagactatctctgccactactaccgtatgcccacaagcgaatacggtgtgcacaaattttgtcggtggctttgattgccaatgcaaatccggcttctctggtgacccattgaatggtgaaggttgtaaagacataaatgaatgtgaaatggctgaacattactgtggatggtaaattaaaaaatatttaaataaaaatcttaatttgttatcaatacggtaacttttcaatccattataatgaacagagaaggagatttttttgcatgaaaaatcacaaaaatgaacaaaaaattttgtatttaatttgaaaataaaatatataattataaatttccaatatttaaaatcaaaattggtcatgaataaattttatgcattaatttttgagaaaattttctcattttcgtagaggtaatcaaattttctaaatttatttaagtctatatttatcagtatgttttcattttcattgtgtttttgttaagggatttacgaaaattttgcaaatgtcctaaaaaatgccaaaatcggtgcaaaattatgttcagtctaaaactgattaaaaacatacaataaaaataatgaaataaagcaataaaaaagcatttttcatttttattatcgaaaatcttaactgatttttctcaaaaattaatagttttttcaaaaagttttaaatattgaaaaactaaaatataatttcctgaatttttcgttcacctatattcattaggaatgcaaattgtaaaaatttggatggcacttttcgctgtgaatgccatgatgggtttgagcaagtgccaaactcatcggccggcaccaaatgccaagacatcaatgagtgcgacgacaaaacagtgtgccatcatgcagcaacctgtacaaatgtggagggcagctacctttgccaatgtgtggacggtttcattggcaatggcaaagagtgccatggtaaatattaagttctaaatttatgaaaataaattaatattaaatgcctatgaaatattattgagcaaaaatatcactttgaagccatatatttgtgtacagagttctttttttttattatttattttttgttttttaaaacaaaaacaatatttttttagccaccaaaaataaaatttgaaatttaataaggaggatcaaatttttgtaattctcgactgctcctgtcgttatcgcaaacctacaacatgtttaatatttttttaaatttagttgaaactttgaaaattgaaaattttgtggttaaaattttagaaaaaaattgtgattagggtattcaacaaacacactgttgaaaaaatatttggaaagattgcttttgttcaacaaaagtgtaattctatgcttttgaaagttttaatttttttaaaatatttgtcaaatattttaaatataattttttttaattttagagacaattttgtttccaattgggcagaaacgcaatattcttggaatttcaaacaagcaaatggattccaaagttgtgcaattggacttgccaatgcaaatatttggacaaaattattcccaattttacgtaattttaaaatttattttaatttattattttaattttcattttaaggtctcatctaacggatatatttcatttaatcttcgcttcaatgacacaatgaattttgatgaaatgtttaaaaattttcaattcaatggcggtgggccaatatttttgccgttattagcaaaatttgtgccaaattctaatgaatttatcgacattcaacaaattgatggttagaaattaagatgttttttttaaattttttataaaaattttgtaccagttggcaattttactcttctcaaagcttcgatttttttgaaaattcttaattaatttctgcaacaaatccaaaaattattttcggtactattttataatagaaacgaaacgttttgcagattttattcaaattattttgataaaaataatagagcaccaaattttatagggaattcgaaaaggaagacaattattatttatttattttaatttattagtttaaatctcgtgtaaaaaattattaataataaatataatttcaattttaaatcagaccaatcgccacaatcaaagggtccgctaaaccgtatcgccatgcaaattcaacagcacttaaagattgccgatttttagccctaccggctcgtcatcacattatggggtgaaatgcatacagtatcacagcaaccaaataca

SEQ ID NO: 21051 - DNA, 1093 bp, Heterodera glycines
  unsure (1)..(1093): unsure at all n locations
ttttttcttcatttacaannatatcagaatttgtttctaagttaaaatttgttttntaattattcttgcaatgattataccaagcttttaaaaattatcgattttaattntactactttttgccagccctactcattaattatcttatactttaaatgcccagcaggatctttgttgattctcataaaaaaccttttctatttttaagtctttctcccgaaaataatcaaacaattggtccgggagtttcgtgccatctgcaaaaaatttttagtacttttatctctatcttcgaattctctgaagatagtatataaaacttcttttagcaatattctcaaatctgttgtgcacgctttgaatatatattttttatcatttttagttgcatttgaaaaaagttacaataaaaaattggtgggtgaaagatttatttgtcaccctgctaatgaatttgcattgccatttattacggacaaaaaattgtaatgattttaaaaaagtcgataaatccttgtgtcaaaaatattgtcgaattcaaaatgtgccagctcatccggttgagttcttcacagctgctgctgctgctgcccaaaatctgtggttatgttacaccataatgttgcggttgcgaatgccgtacatttgcgacgcgtgctgctgctgttgctgctgctgctggcggtggtgccgttgttccgccgcccaccgtatacggtgcgcagtgcgcgacggtagtccgtgctaaagcgcgtaatactacggtaaatggaaaagccagaaattttttaaaaagacagaaaattcagcgtttttcaaagaaaatctttaaatttccaacaaaactgcccaccttatttaaattttttaccaaaaaaatattcctttgacataaattgtctgttaattgccagccaaatccaaaatctaatttgtttaaaaaaatataattcagttacaaaagtcaataatccgtaattaatttcagccctgatcccgattgtgctgggacgttagtcaaaaaactatcaaatgaaaatttttgggtacccaaaataatcagaccaaatgttattttatgaatacaacaaca

SEQ ID NO: 21052 - DNA, 1132 bp, Heterodera glycines
tcgagttttttgatctcggtttctcgattctcagatcccgggaaattttcggtctcgagtatcactgttccaccgctcccctccatcagtgtcgggaactttcccccctccttttccccggccccttccgccgatcgaacgacaccttgagcttttcggcaccaactggtcaaccaaatgacagcgtagcacacgaaaattcggcggaataaagcagaaagacataaatgttagttgtattggcattttctggcgtttgtgccgggtcgccgaatgtgcacatcactggcctgcataaaaacaattgtacatttgaaatgtttggctagacgagttgtcatgaaaccaaaccaaagttacgccgaaatattatctatcaatcatgaattgttgggtctttatttttcagaatttctacgtccactcaagatttcagctcgtccggtttacgggaattggacaaactcccgaaaattgaaacgaacacaggaacagaactcagagtttggcaaggtacaaaagtgacacataccgtaccgtaaaatgttaccatttttatggacaatgtttctcccagatcggaacactcaaatttggccaaatcaaacacacacattcctaccaaattggccatttgtcgcccgccatccgatcaatgccaatgcacaattgaagcgtcgtggcggcatttacgccgacaaacggcacaaattgaatgtaaaagcatgtaccaagcgtgaggtaattgatgccgaaaaggaacacaaaatttgatggaataaccgatcagcatgaacgaagcgtacaagcgatcaaaatgttgcatttcgagcgcagcgacctgtagatttgaagatggtgatcaaaaactttatgaattgttagcaaaaaatgccaaatgtagaacataaaaggtaactcgcccggtgggactcgaactcacgaccccagcaatccgtgccgtgctctaaccaactgagctacgggcgctccttttagaagttttctcaggtcctttatcccactttctcccacactccgttccttctggcatcacacatatttgtgatgtcgacagtccaaaatggggataacattgaatggaacttttgggtaaaagccggaatcaaat

SEQ ID NO: 21053 - DNA, 1046 bp, Heterodera glycines
  unsure (1)..(1046): unsure at all n locations
acccctanttttggtccctaataaacaatcaaatgctcacattcgcgccgatttgactgaactgattaactctcccaatttgctgtgcggacgctcggcacagcaagtgaaagactttctcaaagagttgcatctgacaattgacgaagtgctcaaaaatgtgaagaaagatgaaaaggagagaaagatggaattggaagtgtgacggaagagggaaggaaatcggacaattcatttgttaattgttaatttattagtttcgatgaatataaaagtatgatgactttggaatattaaattaaaatggatttaaaggtgcgagatatttaaagcttaattcaaaattaattgaacaattgttaaatgtgtgccatttaaccaaagacatttggtcgcacaaattaaatcaattcaaaattctctttctcatcacttcgctcattctttcattgccctttcgtccacagaaaactggcggcttaaataataaaattagcgcaattttattttatatattttaattaaatttcaatttaaaattacattttgtgcatatactcggaagaagaagccgaaaagtgagcgcgagttgctctattttcattttcagcagtttctctgacatcagcagaagcggcttctgtagcgaaggagcaaaaaataattaaatgtaattaatgggccaataaaatggcacttttccttttgcctaattgaccgtttagcccttccccaagggcaattgctgaggagtgcttttcataattggccattgaagccgcggaggaggacaatgcgccggcagcttcggcataatcactccgctgctttcctgagagctttgagactcggggagatgggcggccaattaggccatcattaacactcttaaaagcatcaaatggctaaaatgagaaaaccaatcaaaaaccaattggtccgcttcgtcagctgaaaaaaagaacaattaattaatttaattgtatttatataaagagggggcggagttaattggttattaaataagtaaatgttttatattctat

SEQ ID NO: 21054 - DNA, 1025 bp, Heterodera glycines
gggaatgccccttgtgattttgcttttttaaaaattaatttgccaactgatcgcgagttgcccccatttcggcgccggtgtccgccgttttcaacagacgacgaatggtacgacttggagtgcgttcgaccgccgctttttccattacgaccattcagagcgctcccatgtctatcagtgccggcagcatttgtaaatgcttcggcattttgtcgatccttttgtccttcctcggcacgcacttctatttcattttgacgccgggctgagttgcctggaaatgggcgagttctgtttggtcatccgtgttgccgataaccaagtgcaccggacgcggcaatttgtccgagttgatttttcccgtcgaattcgccgagtccatcagattggcctgcagctgtttctctggcctgtccctctagaactcgcagaccaggctctccaggttgtccgagttggccactccgttttatgattgattgtgctaccaacggcggactaatcggctgccgatctgataaaaagttagggagagcatttaaaatgatttggccgtgccgtggtttgcctgaccctttcgcgcgacgggccatttggtggccatgttgggacagatcttgtcgaacagctcgttgttctgtccgttgttggccggcttcttgcacaacactccatttttcttgcccggcatgctcaagcgcaactcgtggaccacgcgcaactcgtcggccacgaggtgagcaaattcaggcggtgcctcttcaataaaggagacggagtctccgccgaccttaaattggacgggaacagaacgaatgaacagtcattctactgtataattttccattttttgttaatccatttgagtgttttgaaaataattttaaaatttttgaatttgtttattatcggcccgcaatttttttattcatttaaacgcacgaaataattaaggaaaattgaataatattcccataaaaatgatgaatcactgaagaacctttgcgcacaaattgctttgcctg

SEQ ID NO: 21055 - DNA, 2006 bp, Heterodera glycines
  unsure (1)..(2006): unsure at all n locations
tcgtcgtcgtggtagtggtgtagnaagtcgtggtggttgtgcttgcggtcgatggctacagaaaaaaatgtattcgaaattaaaaaaaaatttcttagcaaaaattgtaaatcgatttttgagtccaatgaaagagccaaaaaattttcggattgtacttggatttcacagatgtttccttagtttcatcttgaacaataagagaggccgaatttttagtttttttttcaaaatttttaccgagagaggcccaatttttttaaatttttttcaaaatttttaccgagaaaggcccaattttttaaaatgcttttttcaaaatttttacagagagagcccaattttttaattgttttctcaaatttttaccgagagaggcgcaattttttatttttttcgaatttttaccgaggggcccaattttttaattttttttcaaaatttttacagagagagcccaattttttaatttttttttcaaaattttaccgatttgttataaagcaattcggcattgcaattgtctttatcacacatttcacatcgcgcaacatagccatccaattgattggcatctttcttttgaagtgatgcgcaaaacttttccaacttgttatctctgcggtggaaatgagagggtgggtcaactcagtcccggccagttccgtcccataggctttttagggttcctcatttttcccattctaggtaattacgccggattggaagagggccatttgggcgctgcttcgcctggcgtgcgccaaccttttcgggcctgtttggggatggatgtatccctagtctaaatcctcctgacccaaaaattttagggtaacactgtagtttgcccccccttttttttggaaaaagaaattccaaaaatttttttcataaaaacaagtttccaggggtttttggggtcgctgatcacgaaaatgttttcatgtatttaaaccgattttgaaccaaaaatgcgaatttgaattttcgactttttgttcgaattcgggtcaggggttcggaattggccgaaatggatgtcattcatattcatgatcagcaacccaaaaaacccatggaaacttgtttttatgacaaaaaattttttgaaattttttttccaaaagtggggggggggcaaaccacagtatttataaccaattttagttcatcccggatttgtgattcgctctgaatttgaatttttcgggagccccgttgagcggacaaaaagacccaatccaatggccaaatcagtatggccgaacactgttgactcccgacccccttactgatcatttttgccgcaatacaataatgttttcgcgcagcctttgaagaatgcaaattgttgtccgtctgaaaaaagggaagaaaatttgaaatcggaaaattttgcactcgagaatttttcaactctcggcacctcagatcattgggctcggctctcaccgacccgactcagaacatttttgtggtttaaatttcttgcttccaaatccagaaaattttaagtcctctggaattacgattcccgatttattttttcggcttcataatttcaatttcctaacaattttgggtctaggtatgtgccatccctgctctatgtataaacaatacatcagcattgtaaatttgggaaatatgtaaaactattttaattatttctttattaattaattgattacggtattcgcaaatcatcgaatagcattgtacagcttcgttgcactgaaagtatcgtggtacgacatttgagggtttgacatttaaggaactaacacttgagggtccgagatatgaggatttcccaacagagttgaggaaccaaaatttggggacactcaaaattaaaaaaaaaagtgaagaaagaatgcctttccccaagggcaaacgggatcattttgatcatttaaggacattcataaatttccaaacgtcaactattgagtgcacataaagcaatgaaattccgagattgcacagctttggtgaaacct

SEQ ID NO: 21056 - DNA, 2215 bp, Heterodera glycines
attagataaatggagtacactcttggctggattatctccccgcggccaaaattacggaggaagacatctttactcagccaaaccgggaggagataccccgggggaaatcattgtcattttatcggagacaatcggacagcttgacatgcgcactgatcagatccgcgctagtcaaccgaatcgtcaggcaaatccgaacggtgtcaaccccgccccgccgaatcaccatcatcatatccctctccccccaatgagcttattggattttgacggtactccttcgcgttatgagcaattttggacaaatttccgcgataatgtggatcagcgacctgatttgtcgcctgctcagaaattgcgttaccttatgggccaattaaaaggagcagcccgagatttgagcataggttaccaaataacggatgcaaattacccaatagttaaagaagtactcacaaaccgatttggcgatgattttaagcgcgcgcacgacctgcggagcgaacttttccgccttcccaaagcatccgcctccaccaactcattacgcctcttctccgaggcggtggagcgcatttgtcggcaacttagttccttagaccccgccataaatgattccccttatgtggtgacggcccttttggacaaattgccccctgaaattcgccttaaactcctcgaacaggagcgagacttcggctcgaaatggacagccaagcaatggcgtgatggcttgtcaagcctggttcaactgcgagaagcggcatacatggatcgggagattgcccgtccaaccagtcaaatcgccccacaggctcagcaccgtaccaacggacgcttcatggcccaaaatcagccacgacgggcttttccagttgtcacaccctccaaaaaaggagcagtgcaacaccccctcccgaacaaacctcagaccaactgttcattatgtgaaaaggcatcacataggcctaccgaatgccccgcatacccaagcgcaaaaaaacgacagcaacggctgacggagcagggcaggtgtcatctctgcatcagaagtggccatgaaatggctgcttgttcagccaccacaaaatgtttgtggtgcaaggaccgtcaccatcttatcgtctgtcaaaaatacaaaggcgaattgtcatttccctttaataaaaagggcgcaatagccactcgggcccaacagggagcccgtccatcaaatttctccggccattcaatggcggtacctgttgctgctgcttctgttggccagagaaagggaaaaattccttcttatttgatgatgaaggccattaaggcgtacaaccacagagaccctttggacccagtctccgcaccgacattttttgacccggggagtcagacctcatttattgaaactgatctgacccaggaaattaatccccgtcgggtctcagtagaaaaaatggtcgttggtggttttgttggaaatcaaaaagaaactttttcggaattcatctccccctgctattcagtgctgctagctagggaggatggcggatgggaagaagtctttttgaatcagacagagaaaataacgtcgtccatcgactgcctgatgacaccagcaaattccgaggattcagaaaatccattgccatgctacgtcaagccaagaatcatgatcggtgttagagatttttggcgttttatcttggattgggatgaaattcggcccggaatttacagaatcagaaccgtttttggtgtcatttttggaggggaagattgcggtgtccccgagaaaacctcaaatccgtcgttatgttgtccagtcctccacacacctcatcccatcgaatccgatgttgccaaactttgggctttagaaacgatcggtgtttccgattctccaattttaaaagatgacgaggtggcgcttgaaaaattcaacaaaaccattaaaagggacaaggaaggacggtatgaagtgggccttccctggaagtcagagacggaatatccgcctgaaaattttcgaatcgctttttcgcgattttccgccctggtgcataaacttcgcaattcaccgcgtcttttacagggatgcaatgaaatcattgaggattatgtagcaagaggaattattgaaagttcgtcccggacttgtgccccccagcattttttgccccaccataccgttatggggaaaaaattacgaattgtttttgacgcttca

SEQ ID NO: 21057 - DNA, 2910 bp, Heterodera glycines
tttgcttgctgttccttgttactatttaaacagcttcattttttcacatttcttcttttttgggaaacaaatttatatattttttaataaaattccgtgctttcatttatgaaagaaaaaaaatagacaaaatttgtgaaaatgtttaattttgtcaatttggtcctcgcaaattttagtttttgtcgcgttccaagacataatttatccgatgctcttggccttccataatgaacagtttggtaaaatgcatgcgcacctctttacgggtgattgatgctttctgaatcattttatgtctatcaaaatgagtaataataaccaatagcacacctccgctgcgttattccatttccatacggtaatatcgtattggtccgttgggcattggatttccttgtgaaaaatcatttttgaacactccttttggcacattttcgcatcaatttggaagtgcgatatcaatgctttcgtcttttctatgcaatacaatttggcctcataaatcgcttcgtcctttagcaatgggaaaatgctaaggactaaatgccttcccaagtcaatccgatgctccacagaaccgtaaatcactggcaactcatcgtaagaaacaattcccttaattgcttttttgttttgcctgttaaatgccctttaaaaacccccgttttattatttagtgccaccacaaatgactcattgttgtacataaatctccatttgagcactttgaccgtaacgtcgaactgtcggcacacaatgttttcaaaggggaaaatgaccgtttcaatttccaccattttgccactcttttctgtctgaaaaaacgaatgggacgggtaatttttccaaatgctgccgtataatgtttgccatttgttgccatttaaatcagtacaacgaacatcaatcgcataactgttttaaaatgaatcaaaatatatttaatattatttttttattttgaaacgtatttaaatattatatacctaaacaaagaatgctcgtacagacttggagaaacttccagtgtcaatttactgccaatgcttgtaatttggtggaattttagaataaagcaaatccatgctattaattgcattaaaattcaatttgtttaaatctctaaaaataaataaaatgaaagaatttttgcatttttaaatcaataaagaaattgattttacacgtatctaaagaaattattgtgaaaacgacaattttattaaaattaattacatttttgatttaaaatatttttttatactgaaaaaattcacatcgtcggtgaaagttttaaagtgaatttgaaaaattattttatttcggacaccataaaaaagaaataatattgaaatgccatcgatttgacttggggtttttcaattcggagttgtgctgtcaaattcattcattcattgataaaattcgtttccattgcttcgatttccgccaataattttcggaataaaaactttctgaaatttgtcacttttatttcggggatttctatgaaaattcgcatgactttgctctcgcgtgctttaattcttctcacaatggcaaaaagtttttcaaagttcgcgtcgtatttttccaactcaaagaattgccttcgctcgaacaatttgccaacaaatttgtccatttcaattcgttcctcagatcttttgcttttttctgtgatttgcttccacacaaaagcgcggtaacggtcaaaatttttgcttccaaatttctcaaaagatatccaattttccataaacgaattcgaatattccgtgaaaatatccgacaattctttcacaaaatttttcgatgggttttttgcccaaaataattgacggaattttcttaagcatctcatttttgtagtgacttttgtaatcgaaaagcactgagcccgccttttgtctgtaggaagtgttgattttgcagctgctcaccaattcaaccacaaattcttccaatttttctttggattcacttgaaagttttgtcagaattaactccaaaaatttgccaaattttttgtcatattttccgatttctttccaattcattttgtccctttccattaaatggtccactttctctttcgcatatttcatataaatgctatacaagcggatcacttttaaaagaaattcaattaatttaaaataaagatgtctaaaaaagatgtctaaattaaaaaaataagccacttaaaaaaatttaaaaacggcataaaatttttcattttttaaaaatgttttcatttatttttatgactaattattaaggttataaattttttctgctcatatgctatgaagaaaggggcttaaaaataacattactacgttaaaatttttgatttggtaaaggtttttagtccatataaatccatatttcaaggctgataaccctactaattatattgaaattatcaattttgagttctaaaatttaacaaaacacagtgtaataatgagcaaagaatatagcagcgaaaaaccgttcttctatttttcgtaagagcattagcacattttatttgaaataggaagaaacgcctgacaatgttcccactcccattcatttttaaattttttttgagtctgaaattattcacaagtttccgttcgtatattcagcgcgcctttcaacaaccgtagtttttattagagtccggtttccttttgcagatttatttctatgagagatgcgcgaaaaacatattttagaatccttcgattcatcgcacctattctctcctagaaatccctattttggaattttcgcccctcagatttgcctctatttggggtttcgtcccgttttttgacctattttggctttgtattccattcgaaatttagaattcatcctcattaattcagaaattgttttggtcccaatcaattt

SEQ ID NO: 21058 - DNA, 2795 bp, Heterodera glycines
  unsure (1)..(2795): unsure at all n locations
aaaaataaccaaaaacttttcacataatgttaacngagacacaaaaacatttgtcggaattgcaaaaattaaatgggaaatgggcaaatgaaaagcaaaaatcagtcattggggggggagagaatttacaaaatggcatttggcaaaaaagccacgggaaaatgagaaaaagggcgataaaggagagaaacgggagaaaatgatcagaatattatagagaagacgaagcaaagaatgggaaaatgatggacagataaaaggaacagcaaaagatggaaaggaaaagcgggggcggagagatgcccagcagatgttttttgttggccatataatgtgagagaatggcgatggaatgggggggagggggcggctgatggcatgacaaatgggggaaagcagtgaccgaccgaccaacggacgacccccaaaaactgcgggggacggacggacggacggacagacaccgcttaactgcactaatccgtttaaaaatagttgcattcaaagggcggcacaatggagaaaagcgaagatcttgaagacaaagcgacaaaaagagcattggcacggattgcgtgaccttttagggttggcatttgtaaagggaaggggcggggaaggaagcggcaaagagagggggagggagtcattagctaattaggcatgcgaaacataaacatttgtacaagaagcggttaaatgggctttgagtcattggcatttccctttcgacaatttccaacactaattgattcattttcgacttccaatttccctttcgtcgtttccccgtcattttccaatgattcaatttgccattctccgattggactttcttcgttcatcgttttgctctccaactgatccgtgccggcaatgtcagcagatagccgtggtcgtacatgtaaattcgcctgtcatttggtttcaattggccatcgatccgccatttgtcctcaattaataaataaataaattaattaattgcccccgctgaccgatcaaacggattgtaagtgatgtgattggcatttccgtacaaattcacccagcggatgttcggctgacggtacttttcccggtaaaagtcgaacgccaccgaaatgtccgttgtcaattcggtggaactgcgcaccaaatacagaaccccacagaggacaaatccgttcgaaacatcggtgtgattaatctgaaaaaagagagaaaataaggcgaggcggggagggggggggagcaatcggcggggttccgcgcaaaaggcgccggaagatttttggacaataactttgcttgttgtcaatcaaatttaagtcttcttggtttagttggatagctagcagctaatgtgtttgttattattctgccaaatctcaaaaatttctttaaattttggctttaaggactcaaaaacttagtttttcgtatttttttgccctgatttttttgtatatgaaaaagaattttaaatttgcagattaatagaattttcaagtgcttcagaacaataaaaagaatgcttaatatggttgagaaaggaaaaaaatttatcaaaaaagcatccggcgacgttttttcatgatccgtgcgggtgggaaaagcattttaatcaatttggcggtaattaggtaattaatgacaaatggtaaaatataccattgtcagattccatatgctgtacatggacaaattgttgatgtccattttggccacgctcagataagggacgtcttcgaaatggaacagcaactaacaaataaataaatgggaatggaaatttatcaagcagtacggtactcatggtgtcatacagtacccaaagtgcgttttcgtccaccgcaatgtccatgtaacttttggaagcattgaacaaatactaaatttaattcatatgtatttttttctttacagtattttgagctaaattttaataattgcctatttaaatgcttttaatttatttattaatttaaatttgtttttttcaattttaacgtcgtcgtatttatgtgcgattccttccgctatttgaacttcgtcatagcgatgcgaatgcagctcatatttggccagcattggagtgccagaacggtgataaaagaaggagccgttgaagaagacggaattggagccacggaaagggtgggggagagaatgactgacggagggacgacccctggggggacaaaggggaaaagccgaaaatcaaaaaggaaaagccaaaaatagagaggaaaagtcgaaaaattaaaaggaaaagcagaaatggaaaatgaagaaaagcacgaaaactgaagcaaacgcaaggaaagcagaagactgtgtgccttgatgcaacgagaactactcacctgcgaaggtcggcctcggaagcgaattccatgagagaatcgccttcaaaatggacggccaaccaacgtttgtttaagtcagcagccgagcggggataagcatctgagagggagggggagattaaaagcatgggaatggtcaaatctgatcaaatttatggccaattccgtattggcaatttaaaagaactcatggacatttaattgatcagagaatattctgttgatcaaacagttttcgtatcagcgatcactttgtgatcattgttaacccaacctctcatccacgcgccgtaaaaagtgttggcgtgggcatgaaagatcggcttgccgactccgtccaggaagcaatctgtgaaagaggacaattgacaggattatcataagcgacgcaacggtcttttttggatccgactttaaggatggctttcaaatgccttttcatcg

SEQ ID NO: 21059 - DNA, 896 bp, Heterodera glycines
  unsure (1)..(896): unsure at all n locations
agttgcgttaagacagatttgacatcggaattatgaccttcagggattggagttgggaacgaattgatttggcataccgtatgtncgggttgaccattttgctggggaacaggaaaggactcttgatcggtgaggaattcttcggagtcattgtacgccaatttcagttgggctcggaaatgagcggacattggaaaacgtgaaaaacaaaataaaacgaaaaaaaagacaaattaggggaaaacaaatttacggaaaatagacaaaaaaagggaaggggaaaatagtgggaattaggggtattttcccggccgttgtgtcgcgattggcggggatttgcccaatgcgattttaacctttccagactcttgaataggactcaaaaaattgttcacacaaaaattcaacaaatcactttatttctcgatcactctttaaattggcgaagaaaaatgcaacggtgaaaagcgatgggacgcaatggaaaaagcggaaattgcacgaatagggaacagaaagggaataaaaaggagcagggaacaatcccttttaaaggctttatgtgggggaagggggagagggtggataagcaaaggcatcattgaccgggcgaggaggcgttgtaaagtgtaggggggggggggggtggaagaaggcttaatcatttcgcaaaacgcgacactcccgccgccataaaaaatggcacatgtgcgaaaggtgatttggggaaaagtggggaacagggggggccatttggaaacttgatctgatttaacggaatcggcactgcggtggacggcttcattccttctttttccacgaaagtcacacgttcgggattgaatttgcgtaccgcccgaggaccattctgatagtgcttgatcgggccgactcca

SEQ ID NO: 21060 - DNA, 1508 bp, Heterodera glycines
actcagtcaaatcattaacactaaatcccgatcattttcttccatggtttctcctgatcaaatgtaatcatgcagtagtgattgaactgtctgttcttcagctgccctcccactacgaccgcgatggtgccaatgccaatgccaaccatgcgctgttggcacggggcgacttggccaacgacgacggcaacaacgatccgatgggctttggccaggcggaagcggaccaaacggcacgccatcggcgcgggccggcactcatccttctgctggtcgtgttgccgctggttgttggcgcatttacagtgagtgccgttttaaaattccggaaatgccaaattcgaattttccaaaaaaaaaatcggacggaatgccaaaaaagtgaaaattttttaaattaaaacggaaagatttacttttaattagagtgccacgggaacgggaccaaaacacggacaactgagtaccgaagtcccggttttgaccaggaccgggactagtcccggttttcccagccaaaaattcccgggttttgaacccgaaaaggtcccggtcccggttaagcccaaaattcccgggttttgaacccgaaaaggtcccggtcccggttaagcccaaaattcccggtcctgtggcactctacctttaataattaattttcaaaagattttattttaaaaatttgctgtccgtgtcgtattttttttaaatggattattcgtggtgactattttcccaaaaaaaaacattacgccaaacattgtgccaaaattaaaaatttttttcgttcccctccccaccccccaaaggtgctgctcgtctttctcaactaccactgcaacatgctctgatcattaatttggcacaaaaaaagagtgattgatagacaggatttatatagatatttttagcttttatctcgcctattcgcttttttgcattttaatttcgccattgtaaaattataaaaaattatactatttttttttattaaaaaagtaataattttttctaaatttaaaataaaaaattttctttcattttctgatgctctaaaaaacctttaaaataatttaatgatgaaatattttttgcgaaataaaattcttatttttaatatttctttttaaaataaattttctattatttatatttttgtcactaataattagggctgggatttttatgtgctaaaaatcctgaaatatgtaataaaatatgtgctaaaacgcccaaaatatgtgttaaaactagagtagagcgggaccgggaccaaaacacggacaactgagtacaactgagtaccgaggtcccggttttgaccgggaccgggaccagtcccgggttttttcccggttttcccagccaaaaattcccggtttttcaacccgaaaaggtcccggtcccggttttgctcaaaattcccggtcccgctcaactctagttaaaacccaaaaaaggcctaaatatgtgttaaaaaatgcaaaatatgtgctaaaaattggaaa

SEQ ID NO: 21061 - DNA, 977 bp, Heterodera glycines
agccgcccaaatatgtgccatacgtttttatgtgccaaaacgccaaaatatgtgatttttatgtttttataagtcgctctaaatcaaaaattgttcggagaaaatgctatttttgggcttctctcgccataactaagccgcaaaaaaaaaatatatgttaaaacataaaaatcccagtcctactaataatcgaatattttctttattcttaacaaaaataattttataattaattccctgttttacattttaattaatttaatttaatttccatttttatcaatttatttttttattttaaattatttatttccaatattttccatcaattatatattatttttgcaaaaataaatcccttctcgtccccataaaaagtcaatcataaatatttacatccattttaccacatcatttccataattttctccacaaaaatgggcgacgccgccagcagaagtgcttttgtttgctccaattattttccatttaaaacgccaaattaagcgccaaatttaaaaattcaaattttcatttttgcctaaaagttcattcatcgcccggcatcctcattttcccccacatttggtgtgccaatggaagtgccgccgccgcaatattcaaatttggcggcgggcaccgtccgactaagtgccctcaggcgatttttgtgccgtgccgtcccccacccattttgccctcaagcggtccaataaatgatggtgggaggagcgaaaagtgtgccgtcttcggcgcccacaatggcacttttgctgccaccttctccggcggttggaaataaaataaaacaaaaaaagtgtatttattttgtttgtttttactcacggaactccccccgccaggcggcgccgttttttgaagaggattttggcacgaataaaagtgccattgaatgggccgccgggcgggtgggaaaacgaaaaataatttattggcgaaatttttattatgaaaaa

SEQ ID NO: 21062 - DNA, 1970 bp, Heterodera glycines
aataattagggtttgtaattatatgcacatgcatattttttcctggactgcgggaggcctgaaatgcacgaaaaacatgttttaacttgtgttgaagctttttaggacctatttcgatatgcatatttgggcgttttttcaacaaatcctttattaaaacggccccctctattaaagcggccattttggcctctaatgactgaaaatttttcaaaaatttttgggtttttctgacaaaaaagtaactttttaaaaaattggaaaattatgccaaaaatagtcagaaaaaaaagaaaattatcaatttttaactcaattttcttcaaaataaataaattttacttttattttgtatttttcgttctaaaatgattattgctactattttttagctattttcgggatttttatgcttaaatttaacaaatttgatgaaatttgtaaaaatggccctcaatttggaaaaaattatgtgcatatttttcacttttaggtgcatattttgcaatttttggtgcaaatttcatgcgcatattttaagattttatgtgcatataattacaagccctagtaataataatcatttttttacgaaaattttatttattgtttcatgaattaaattcattcggtatttaaattctaaataaattcttttgagaatacttgcagaggattttgtaaatcgtgaatcgttagaatatttacaatcctgttcttatcaatcgactttttgaattttttgtaaaatttggctaggtgtacgctttatgaacaattcattgatttatcgcatggacggtaaaaaaaagaaaaatcgccaaaaaaaatcatcagggtaacgactaaggctgcaatttttaggctctaaaactggcaaaaagttttcggggtcgctgattgcgaatcaggcatccttttcggccaattccaaatcccggacccgaattcgaacaagaaatcgaaaaattaaatttttttatttttcatttttagtctaaaaatggtttaaattatttttaattgaagcactgatgactttcagttcctttccgtgtatttaaacaatgctaaccaataatatgaaaagcaaaaattttaattttcgactttttgttcgaatttgggtccgggatttggaattggcagaaatgcataccggattcgcgatcagcgaacacgaaaacttatagtttggcatattttattctgaagtgtaaaaaaatttttcaaaggatttgttcaaaccccgcggcgaagaacctgctgcgaaccatgtgcggcgagctggccgcggtaaaccgaccccgactccaagcagttgtctatttcgtgcgtttgaatcgattttcatcaaaatgtgcttttttaaaattgaattttcgattttgggttcgaatcagggttcggagtttggaacagtttgaaacataaatattgaaaccggaattccacatcagtaatacaacaaatgcttttattgtataaaaaatgcgcgtaataacaaaaaaaatttcttccgttctttgatcacataaatgtccctgaaagaagaaaaaaatcattgacaaaaagtgtgataaaagttgaaccgttcgctcggcgctggcggcggcgtgggagctgatgagcgcccccggctccttgagccgccgctcccttgcctcccaggatgttctcccacagatcatcctggaacatggcgagttggccgtctccttcatcgccaaaaaaaaatgtaaagccaaaagaaaagcatcaaaagaatgacgacgacgaaaagggcgacttggattaacatttcttaagaaaaaagaaattttaaaaatgttgaaaatgttttatttttaataaatttgcatttatgactttatcaatgtgtatacgaaaacagttacaatttttttatgaattgatacgcatttttaggaaaatcgcaaaaaatatacattgtaaactgcggcaacgat

SEQ ID NO: 21063 - DNA, 1681 bp, Heterodera glycines
tttgatggcatctacaaaaacaaagtcagcgtgaaaattctagtgtgacaaaagtatcgaggaaatttaaccaataaatgcacacaaacaacatatttattcaaatatagaaaattgtgtgaattattgatgcagttcagcaatgacgtcacacgtgaagccgctgccaaaatcaatcagcctggtcactcacctatccaatattgttgaccacaattccataaggggcaggtcgttgttgaccacaatcccataaggggcaggtcgttgttgaccacaatcccataaggggcaggtcgttgttgaccacaatcccataaggggcaggtcgttgttgaccacaatcccataaggggcaggtcgttgttgaccacaatcccataaggggcaggtcgttgttgaccacaatcccataaggggcaggtcttgcttggttcaccacaatcccaatggctagtgtaggaatcctacgctaggtcattagtcagcgtaggaatcctacgctaggtttttcaaaaatgatccgaggaagcgattttccactcccttttatagactttgagctcgagtaggataactacattagcctagtgtaggaaaggctagtgtaggaatcctacgctaggtcattagtcagcgtaggattcctacgctagtttttcaaaaatgatccgaggaagcgattttccactcccttttatagactttgagctcgagtatgataactacattagcctagtgtaggaaaggctagtgtaggaatcctacgctatgtcatcacgtattcgtgatcagcgtcataaaatagccctaatgacatgtttttgaaagatttttggtgaaaaatttttccactcaaaaatcctggtcacccccctttggactggaatcccaaaatcacttttatttttataacatttttcaaaaaagtgataaaaatgtgaaataaaatttataaaatagagctaaaaattgcggatttttgtagcattttacttttcctgaatatcttttcagaagcgagttataaatttttttctgaaaatccgaatttttacagaatttctagaataacttttttcatatttatgttacaaaagccaaataaaacccataaaattctcctgatttttctccatttttaatgctttatttaatcaaaattggtcaaaccttaggccagatatgaattttcgaatattcgaccaaatttccaaggaccaaaaaaattaaaaatattttcgaatttttaaaaaattccaaaaattctgaaacgtaaaacaaacatcatattcgtgctcagcacctcaaaataccccagaaaaatatttttgaccccctttttcaacccaaaaaaaatttttgaaaatttctagggggcctagctcgaaaaattttgaaaattttcgaacatgtagtacaccattcgatagcatttaaaaagttctacaattttgccctaaggagttttttcgataaaaccaacccctgacgagttatgggcccgggactcaaatgtcccgctgaggccaaaatttttttctatttccgggaaaaaatcgaaatttttccgaaaaaaataccagtcgatagagctcgaaaaactatgttttggaagtggtctccgtttctctgggaaaaatcgttaaaaaatcctaaaattcaaaaacccgaaaaccta

SEQ ID NO: 21064 - DNA, 2662 bp, Heterodera glycines
attaatttcaattatttcaacaataaataaatgaaatcaatttctaaaacataaattgaattcggttgggttttccttttggtcatttcaaaaataaaaccataaattcttttttttataataataatttggtttatattttttatgtgttcgacaaaagtggtcgattggtggagcattggaagatggaacggctaattgccaccagtgaaatggtcaaaggtgttcaaattgttcaggaaaagccaggaagtaaaataaaaagaaaaagtaacattaattaaaaattatttattaagcgccaataattgctgtcattgtgccaaagtcattcaaccaaataactgttgctgatctgaagcaagaaatgatcgcaatctgccgggaacagaaggcaaattgcatgattaaccagaattttatatttacaaaataaaatatattttaaagtataattaatttttttttaactaattaatttaaatatttaaattaaattaattgaaaatttcattaaaaattaatataatttttttttattaataatacatataaaaaatttttgaattcaattttttcaatttagcttaacccgcccgaacaggtggccattgtgaaggattttccccgtgtgaatacgcgaattcaaaaatataaaattcgtgaagaattgaatgccaggaaattgtccttatattaattttttagaattttaaataataaatattattaatttattttgcttcaatttaaagaaaatttcatttcgaatcttccatttttcactttgatcacgaggcgaataattatacggatataaaatcacgaagaatattaaattatattaaattacaaaatattattttattataaaattttagtaaaacctctaaaatggttaaatacgggtattgaaaatcattttagagaaacagcgatagaataaaatttcaaaaataattttaagtgaaataagaacctcgaaatttcatatttttttaatgcttatttttcacacaagtttttcatttttttaaagaattaattagagtgccacgggaccgagaattttttgggttgaaaaaccgggaatttttggctgggaaaaccgggaaaaaaccgggactagtcccggtcccggtcaaaaccgggaccttggtactcagttgtactcagttgtccgctaccaggtcccggtcccgtggcactctagaattaatcaaacaaaattatccatatttattctaaaaaatgatttttttaaacaaatttccgatctttagggacaaaaaggtcacatttgtctgctgcgggccgttctaataaagttttttccgacttttcccctaaaatagaaatactaatttcttatccaacctgttataccaccacaattattattcaccatcgcatttttggttgagcccaccaccaaaaataataataataaaatcaaatcgtttgtcgtcgtcgccggtaattttgaattggttggcgatgtgattttccggtttttttgtccgtcccccgtcccaaccccctgctgaaaagaaagatgcgcaatttggttgggagatgaatgtgaaatttggggggaggggcggaggatgggacgagcggtgaatgaacgcacccttttttggtgtcccaccaaatttcactacaataaattactctcggaaccaaaaaaagatttatgctataattattataattatttcattaatattattttatagccccgcccccacccctttttggtggtggaaatctccgaaaatccaaaacaaaacaattgcgtttttacttttatgggggcacttttaattaatttaatgggcgaactggtggcaatttggtttctttatcagttaattaattggttaattaattaattaattaacccctctccccaaattaaatttaatttgttaattgtacggggaaagaattcttatcccatagtttaatgttgaaaaattcgctaaaattttgttacttataaataatgaattttttaagtatcccaaagaatattatataaattaataaaagaaaaataaaatttattaaatattttacgcatcgaattaattaatagttaattatgtcataaaattagaaaatttgcattacaattcccatttaatcgtttgttatttattgattcaatttagggggtctccgattaacattttcaaaagttaatcaccactaatatgtttgtaatattctgcatgcaaaatgttacattctttacaataacaaaacaaggcatttttttatttaaaatattcaaatttaatacaaaaattttttaagcatttatgtcacaaaaaaattaaaagaaactaattttatttttaacttagaacgaagaaaataaatttaatacaagtgcaacttgataataaaataaaataaatatggctggaatttaaaaaaaaatttttttttttctaaaaaccaaaatatattaaaatttaatattttaaaaagatggaaatatgctaaaatatgtaaataaaaatttcaaatttttgttcgccaacataaaaaaaatgtttttccaactattcaaatctaaaagatccaggaaaaaggatatttaaacgaaattttcccttgtgtaagaataaatataaataaatttgtaataaaa

SEQ ID NO: 21065 - DNA, 2094 bp, Heterodera glycines
  unsure (1)..(2094): unsure at all n locations
ttgtcctcggctgaattgtcctaggctgagtttgttatcccagctgactgatcctgacgcgagaacaattatttaaaaataatacaaaacgccagaaaagcaattttttttttgttttttttctgaaaacaaacataaaaaatatgtatgaaacaattgcgaaatttcgtttttttttgcgcatttatgaaaaagccatatgaaattccatttttgcaaacttttttggcaaaacatcgcattttacctaattaaaatttctgtaaaaaatacccactttttatcaattgaatgctcttagtgtttttataatccgtgaacattggcacttcaattgccgcactgataaatgaaatcgcaattttcattgacacaaaatatttggtcaacagtttcacatcaattggcaattttgaaggcgattcgtgcatttgggccgataaagatttcgaaattttattccagcttaaatttaattttaattaaaaaatttcaattaaaatttaaataatgacctaattaaattaataaatactaaaaaattaataaattttaattaatataaaagggttaatgatttggtttggcgattttatgatgaaatgggggattggcaacacttaaaatggcaaatcgtaacagattttattaatttttaaataaaatttagatatttattttcataaataaagcaaaatgaattttttaatagaaggcaaatcgtgcatttgggccgataaagaaaatgaaattttattccaccttcaaatttaactaataaatgccaaaaatttacatttggcttagtttaaaaatgattaataaaaaaattttaaaataaaaagttagtttttttttgctaattgtttcatgtatttatttaaataaaaaattaagaagctttttatatcaaaaattcatattgttttcttggtaaaaaaaattctagcattatttaaaatttaaaaaaattgttcaaattgccgtcattaagaatgaattttttaaaaatttaatttcctaattaatttttccattaccaaattttggatttaaaaaaaatttcctagatttcttgtgctaaaaattccagccaatactaaaattctttcttaatttagaatttaaatattaaaaaacaaaattactttttgagtccttccgaaaatgtttgataaatgtgcagttcaatgattgccattatgtcattcgacggcacaaaagcgttgtttattgtcatctccaacattctgccaatttttatggcgaaacgttcaattaaactccgatgagtttggcgaagtgtgtcctcatcataatccatcgcattttccaccaaaattttgtccaaattaattgttccaccacctccgccaccaatgttttgttgatatttgtttttaaatttgaaattcaaaatttcaatgtcattttcgaacaaatttttaattttcggtggcatttggccaagcattttgatgacaattgaaaaatattccttggccatgtcgtccacaacgtaccaattgtccatgtaaatttgtgtaagattttcttttgcttccagcagcgaatcaatttgttgaataaattcattttttgatgtttggtgattttttgatcttttatagcttgaagttggctagacatatttttaaataatttatttttaattgaataaaatttaaaataatctttttactcgttttcagttaaatttaaatataattattctttaatcatttaaaaaagaaaagcccaaaatataattcttcttttatcaaatacataaatatttaattttagttaaaataaaaattaatttatatatatataatatttttaatagaattaaaattaaaaaattttaaatcgtttgaaaaattgaaagcccaaaatatgcttttacatcgttttcctgataatgttcatttttggctcttttattgcttgaacttggctanatatatttttnaattaatttctctgaattaaaatctanatatattntanatgcgtcataacattatttaaaaattcatttanaattgaaattaataagggcgaaatttttaaaattaatttataattgag

SEQ ID NO: 21066 - DNA, 1241 bp, Heterodera glycines
aaaagaaaacatattattaaggagttttgaggttgctgaacacggttatgacatccatttgaccaaattcgaacaccgaaccctgactcgaacaaaaagccgaaatttaattttcgacaaaattcaaaattggatggaccagcggacggctggcggacgggcgacttttctctgattgcttcttgcgcttagatggggtgggaaacgacggctaatggctattcactttttgcgttgagggaaggggattttggatgggagtggacgatgattacgtgatgcgatgagaggaggagagacgaggcgggagggggggggggggatcgttcgtcattagtcaaaatggatgtcagcttcgtgatcaaagaccccccagaaccccaacaaaaacgcttgacgacttttttaaactttggggaacaaactgcactattaccaaaattacaatggggttttccgaatttcagtacttttcgagaatattctggaacaatttacttacataaaacttagactttaagctttcgattaataccaagaatgtatgtcttgagtaagaaaaaagttatggcttaagaaactaagtgtggtcattgattggacgtgtaactgtcgatttagcaaacaactcatcgcacagaacaatttgcaaataaatttctgatgtcaaaacatcaaaaaagtgctgttacgccaccaacgacgacgacaacggcggcagagagtggcggcgaaagagacggacgcactgagacgacaagcggacagcggaaacgacacagcgcaaaccaaacggactcggcgaacggcgccgctgggggacaaggtttattcccgggctttggtttctgctgggaggtgttcatgtccacaaaaatcgccacactgttcgtcattggtttgagtttaaaatggccgggagtaaaattatttgttttttcgaaaaaccatatcggagatccttttgataattgacccaggtgcgttttgaaatacccaagtccattgactcgttaagttaccgattgactgccggccaaacaatttgtttgtttagggtcgaataacgccgttgttttgtcctcttctgagtcggctgcaaaggaagcaaaggtcagaaagatgtcgacaacatcgcagaacaaggttttaattggggatggaaatttgaaatcgactaggaacggcagggcttggaaaccaaagcagggcgggagtctcggtacaaagccttcattttt

SEQ ID NO: 21067 - DNA, 1891 bp, Heterodera glycines
  unsure (1)..(1891): unsure at all n locations
tctctctctctctctctcgctctctcccagtctctctctctcttcttttctctcaccctctcctctctatcctctttctctctccatttttctctctctatcttcttttctctctccccacttttctctctctttttttctctctctgtatcgctctcgctctttttccttacatattccataaaagcatattcgttttatttcattgattaatgttaaaaattaagcaaaaagttatatttaatttaaaaactaaaaaagtgaaaacaatttaataaacattaaatatgcggtcagggtcgtttcgntaccgccggttttcgtacgggggacattttcgtacgagttcttgtacaagcgtcagattcaaatagaaaaacttaagaactaataaaaccaaaatttatcattttttgtttcccattcataaaattttgtagaaaattcataactttataataataacaaaatccgggacaaactaggtcgcatctcatagtttcggaaaataccagcgagaaaattgttaaggttttcgggattggcattcgcataattgtgatcattttgagggacaatattgttattgatatcgttatagcgttggacgagacgaagaatgcgtgcgtcggcatcgcgatacttctttttctgtgcaccatcatgcaccaatttatcattatttagttttgttttaattacttgctgctggttcattttgtaattaataaaagcttaactttcaaaacattaaaagtaattaaattaacaaattatttgaatgcaattttttttttttgcatatccactcgtacgaaaactgcggtacgaaaacgtccccggtacgaaaatggcggtacgaaaacggcggtacgaaaacgtcctggcccaaaagaatggcatgtgccacttacacttttggtggaaatgagggcaaatgtgaagtagtgataaaagacaacaaattgaaattttgatttgaaaagcagaaaagtagaaagtcagacctccagcaaagggaaatttggttttttatagaaggagaaaacaaaaaaattttgaggaaatttagtaataggtaatagtttaatgttttttatttatttattttttgaagaaattgttagaggtctggtagaactatttgttgaaaagatgagggaattgtttttcgagcgattgcatttggtgaacaattttgtcggtgggtggcaaagaacttaatgcttcatgacagacaaggattgttttgtcaaaaatttccggcggtttggaaatgtcttcgctggcctccttctggtttggtccttttgcaacaacgggagtctggtcatttgtcgtttgtgagagctgggttggaggtgccaatggagttgggttttgttgacgttttcggagacgcgcttcgtattcatctttgagttgttatttggacagtgccgggcggacgaacagacgggtctggttctgttgagaacgaactcgagcacgctcgcgcttccatcctccgagtgccacgtgttggtgtgtgggtgttggcatgaccaccttgagcgggcgtggagttgttcgctgcgggtcgtaccggccgagtcgaaagacggtggttggttcggcctcaacttcaagatggtccaagattttggtggtggcttccctgtcttcctgaacacgctccgatgggcaaacggcattgctttccgggaggccaataaacaccaatctacgttggcgttcttgttctgcgagtgcggcagtgattgggtccattgccggtgccattgaacgtttggcgcgaggcggggtgatgtttgttgcgttggttcgcttcatgtcgaataattagaaaataatatttgttttttgtcgttgttaatnacagaaaactagc

SEQ ID NO: 21068 - DNA, 2342 bp, Heterodera glycines
ctcgttattttcgctcacagagcacttgtaagacctcacaatagagtttaaagacttgtaaattgattgacagctctggattgctgaaaataacgagttcacacaaaaggtcgaaaagtcgaacattgttcgaactctacaaaaatgatcaggaagacatttccagacagggggttgctccaaggggggtcaaaatgttgttatttttgctccaaaacgacgtttagacccacttttaggagttcgaacaaatttcattaaccatttccggtcacagaacatttctaagacctcagaaaagagtttaaagacttgtaagttgattgacagctctggattgctgaaaataacgagttcgaacaaaaggtcgaaaagtcgaacattgttcgaactctacaaaaatgatcaggaagacatttccagacagggggttgctccaaggggggtcaaaatgttgttatttttgctccaaaacgacgtttagacccacttttaggagttcgaacaaatttcattaaccatttccggtcacagaacatttctaagacctcagaaaagagtttaaagacttgtaagttgattgacagctctggattgctgaaaataacgagttcgaacaaaaggtcgaaaagtcgaacattgttcgaactctacaaaaatgatcaggaagacatttccagacagggcgttgctccaaggggggtcaaaatgttgttatttttgctccaaaacgacgtttagacctacttttaggagttcgaacaaatttcattaaccatttccggtcacagaacatttctaagatttcagaaaagagtttaaagacttgtaagttgattgacagctctggattgctgaaaataacgagttcgaacaaaaggtcgaaaagtcgaacattgttcgaactcgttattttcgctcacagagcacttgtaagacctcagaaaagagtttaaagacttgtaaattgattgacagctctggattgctgaaaataacgagttcgaacaaaaggtcgaaaagtcgaacattgttcgaactctacaaaaatgatcaggattaggtctaaaatctgaattaaataaaaatgaatataaagtagcgtaataaagtgatttaatacatttaacttaaagtaattttaaaatgcattttttcatttgaaaatattctttttcatattagaaaattaatatataaaaacgaatataattaaggaattaatatttattataaaatgagaagcaaaggggaaaatttttcaccatttagttaacaattatccattcctttgaactcaccctgtggccaagtggttaagctcctcgcttccactctcaacggttcgagaccgcgaccatgtttttgattttccacaatttatcggaaatagtcgcgcagctctcgctcgtttaaattaattaattaaaatttaaattaattaaattctcacgcacaagtccatccaataaggtttccggttgaagggatcaaagatcatccaatagtatggggggggggggggccaaataaaattatcgattaataaatttaaaaaaacaaattaaattaaagtcgatttcattagtcagagaaatcatagaatgtactctctctctctctctctctctcgaggagaccatccaataggtttgggtttgtggaaggggatgtcagagaaaaaaagtagacacactcaaattatcgatcgaaatcaatcgataatttgattgggaatattatctacttttctctctcttcctctctctccctctctctcttcttctctctctctctttctctctctcttcttttctctctctatcactctctctcctcttttctctctctcctcttctccctttctttctctttttccctcttctgtttctctctttctcgcttctcttctctctccccctctctctctctacctcctgtttttctctttatctctctctcctttttttcattctctcaactccttttttattctctctcgatttaatcattctctcactctctccctcttctctttctctttctgtccttttttttctctctctcgctcctcttctttctctctcccccctctctctctttctcttatttgtctctgtctcattcactcccatactttctctctcttttttcctttttctctaatcatttctctcctttactctccgctctttgttcctaactgtcttcatctctctctcttcttcactctatcttacaatacaacttatctctattatctctgatttttcacttcatttctttccatccaaataaaaacaatcgccgtcaaaactttatttaaatttttttgtttactt

SEQ ID NO: 21069 - DNA, 999 bp, Heterodera glycines
ttcgttacatccaaatgcaacgttcaacgtctggtgtaggattgatgtagtctaaaatgaatttttaacagacgcgcccactacgaaacagtttactcagatggagagtagatttgttcgttacatccaaatgccacgttcaacgtctggtgtaggaatgatgtagtctaaaatgaatttttaacagacgcgcccacgacgaaacagtttactcagatggagagaatagatttgttcgttacatccaaatgccacgttcaacgtctggtgtaggaaggatgtagtctaaaatgaatttttaacagacgcgcccactacgaaacagtttactcagatggagagaatagatttgttcgttacatccaaatgcacgaacgtctggtgtaggaaggatgtagtctaaaatgaatttttaacagacgcgcccactacgaaacagtttactcagatggagagtagatttgttcgttacatccaaatgccacgttcaacgtctggtgtaggaatgatgtagcctaaaaagaatttttaacagacgcgcccactacgaaacagtttactcagatggagagaatagatttgttcgttacatccaaatgcaacgttcaacgtctggtgtaggaatgatgtagtctaaaatgaatttttaacagacgcgcccactacgaaacagtttactcagatggagagagtagatttgttcgttacatccaaatgcaacgttcaacgtctggtgtaggaatgatgtagcctaaaatgaatttttaacagacgcgcccactacgaaacagtttactcagatggagagtagatttgttcgttacatccaaatgcaacgttcaacgtctgggggaggaaggatgtaggctaaaatgaatttttaacagacgcgcccactaccaaacagcttactccgatggaaagtaaatttgttcgttacatccaaatgccactttcaacgtctggtgtaggaatgatgtagcctaaaaagaattttta

SEQ ID NO: 21070 - DNA, 1921 bp, Heterodera glycines
tcaaggattgatcggaaagagactctaaatgagcattaattatgcctttggctaataaaaaatgatttggttacatttttgtttgttgatttttagacagaaaattgaatcttatggaatacattttttgtcgatcgttaggatggaaatatgaattataattaccttttgtgtgtgtttttagattgaaaatcaaattttaatgaaatttgttttcaatttttattgcatttgtttgttgatttttaggtcgaaaattcgaattataacgctttcttaatgaatgactaacttcgtgttgatcaaaaagaaaaaatttaaaaaaaaaatacaaatgagggttgaccttcgctcccacctgctggccaggacatcgggcgtttatccaaaaatatttttaaatttaaatccaaaaaaaaattaaaaaattattttacaccaaaaaaggtttgcgtgatcagatgaagaattccatgcaatcagtgccttgtgatgtcaaacaacaggtggtgaatgcttgcaccaacatgttgatcaacaatttgccgttttcaagcgtcgaagaggcggaaaaacaagcattggcccaatacccagatgctttggttagtttaactgatttgcaactttattcgggaaataagttcatgaatttcgagaaaaaaatgataattagtggataatgggttaaattttttttaaaaattcaatgaaaattgggtcccacttctgtcgaaaggtgaagccgaggaaaaaagtttgaattttaaattattaagaaaaatgaggtactttatttaaatttcactcattcaattttgactaaaattaaaagaaatgctacaacacaagaattaatcattaattttaataaaatggtatatttcgcacttccgaaaataaatttatttaaaatataaaaaatttcaataaaattaattacttttattacaatagaatgcaatgcaagcaatgtggaacaaagtgaaggagatgaagtcatgcttggcaacctgttttgcagggcgagttcagaatcaaactgcacaacaaattgtgcaacaattttcggttaaatcaattaaataaataattgtcatcaattcattaattagtctcaattttccctaattagagttccgatttcacgtcaatgaccccaagggacatgtgcaaccaaggcgtgaatatgcaccatcagttgtcagcggaggacaacaagaatttgcatgcgtgcagtgcccaacagattggcacaggcatggagccattcggaatgttcaaacatggccaaggtggacctgctgctgatggtatataatttttaaaaatttataataaatgtacggtaacgtgtacagtagtattacatgtgttgacaaagaattaaaaattctttggccaattccaatctgagatttctgttttttagtgacatactgtacgaattttttatataacgattgatcaaaggagggttgggcactttggagacatagatggataaggaagcgggttgggggataaatttcgtaaatcgtacggggggggggggtccgaggcttttcgtataattttcggggaaaatcgaaaaagcactgttattgattgacaaaaaattttttatggtatatttgttaacatttttaaattctatttagttttttaaatttcgtagaaattttggcctctgaggcgagggggtgggtatttcgtatcgtaaaggaaaatttctgacctcccctcggcccatgctacttttcttttaattttgaaaatttcatttgaattagcaggcgcaaatggtggcgctgctgcatttgccaaccaaaacaatcccatgggcaacggcggtggcatgatgatggcccctgcggcgattggtgctggtcaacaacaacaggcggcgccggcggcaaca

SEQ ID NO: 21071 - DNA, 1086 bp, Heterodera glycines
  unsure (1)..(1086): unsure at all n locations
cttgcatggnnnctgcaggtcgagcaaaaaagtagttagttattaatttgaaaagagccaaagtacacggagagaaatgtcggaaattgggggggggggggaaagaaaaatggaaaaataatttaaatagacataaaaaggaagactcctttgagtgaattaatccgaaatcggatgatcagatggtggtcatgatcattaaggaagtgacgagtgatgatcagactgatgatgatgatgatcataatgagtctccatatttccctttgcccacgcgacgccattcactcacaaaacatccaaccgaaccgatcaaaacgaatgccaatcgatcggtagacaatttatgtgatttgtttttacttaaaattacttatttattaattttgaagggtttaatgaaaggagtgaattgaaaagcagaaattagatgagacacaattgcaaaactgttgatcagtctgatcattttgttgccccgcccgtccgatgatcgaaacgaaacccatcccaccacaaccgccaccccaatcagcagaagcagcagcaaaacgacaagttgctgctgatgattgagcctggcgctggtgatgatgatgggtgggagggtaagctcttaatgaagggtccttggcttgctttctttttgctgtcattggtgctgcaacagagaacaaatcaaagggggaatcgatgggaaatgaatttggatggcgatttggggaaaggggggggggggggatcatcagaagggatcaccagcaagggattaggattatcctccgcttctgttggcgagggacggacggacgacgaaatgcgctgggagagagaagaaacccactcactcattcattcaatttcggggatgaactgcataaattggacgcaataattaactcagagcggcggcgaccaaaagccatggaaaggcattttttaagtgaaagccaaaaaacacccacaaattttaatgttaaagaaattctttttttaataattcctagcctaagttatggcgaatatattcttgagaggccacttggaaatgcgtctgtccaaaccgttaattggcagccaattttt

SEQ ID NO: 21072 - DNA, 1728 bp, Heterodera glycines
atgccatttgaattaaagatgttttcttgaaacaataataatacggcaaaggttgacaaaatataaaaactgcgataatttgtgcgaaagtgtcaatcctttatcgcaaatggagggcgagaagagaaaaaaacaaagttttagtccactttaaaatttcattgtcgtaatttatttggaaaagttgtcaaaattgttatacatacaataacaaatcgaaagaaaagcagcaatccgcggaatcatattcttttaattattttgttaatttattttattttaagccgtattagaatgatgggtctacgattaataccaacagagaaagataagttatcaaaattagacaattcaaaaatgattatttctaccgtatttcaaggaaaaataattagtcattttgagtattagacaagggtaattgtttagaattgtggtccagatgaaaaaaaaataaaaattttctttccaatgaatttggggtaaaaaaaggcgatgatcacgaatctaattttattttgaaaaatcaatgattaaaaaaattagttttttctaagattttaatttttaaatttcgaaaattattattttttaatcgggaacacaattttactcaattgcctttaatagcaatttgaaggatgttttcagggtaaataacggtgtcattcatttagtaaaccgaatttatacaaaaaatgttcgcataaaaaatcaaatctctcgaattttcttctccacaaatactcatacattaaaaaataatcttaaaaatttggttctaatgcactttatgagttcaatcggtttttatgagcacaatcaattaaccatacctggtttttgtacaaaaaattgtttatgttcgattgagttctgtaatttggtatcattctaaggtacaaagtctgagtaaggtaataatgagaaaacaagagattccaaaacttattttcggctcagaatcagtttccggggattttcgagggtgctgaccacgaatcagaactcggatttgcccaatcccgtatccggacctaaactcggcaaaaagttgaattttttctaaattatcgttgagataaatcaaattttggcaaaattgcgcatttttatccaattaataattggagcattgttacatcattaattgctgttaaagcaattcatagctttttaaactcaactttttgttcgaattcgggtccggagttcgtaattggataaccggagtgtgaattagtaattatcaccttcaaaaactgatttttgagccaaaataaaataaatcaggactattattctttaccattgccaggaagacccaaattttaaaacctgacatgtttttgccgaaaatttattggtcgaatgtagagatctacaaaggcaaaatgacttgctgagccgccgattgtatgtgcatgtgattgcgcatatgcatttgtgcatgtttgtgtaaatttttaataaaacttcttagtttaaaccaaggatgcgatctgttctgatttgtcagaaatgttctgatttgaagggtccaaatctgataaaataaaaatgttctgatttgtcagaaatgttctgattttggggtagcgaacaaaatttgttctgatttgtcgcttctccgaaaaatctgttaaatttctttataaatttggattggcgtaccgtttaagaaaaatattattcaattttggcattataatttctttcttgctgtta

SEQ ID NO: 21073 - DNA, 1402 bp, Heterodera glycines
  unsure (1)..(1402): unsure at all n locations
tgatgataatttgacacaatcattttctatcacttttacattttcccaattaatgcgctgacagatcgaatgagtttttgccgaagcttttcaccgcgtcttcaactggcactcgaatactcccaccatatatgccgggggatgatcccccgcccagcaggtggatgaccttttttttgctgcgagttttcaaaattttggtggacggggttcacgggaaaatttttctaaattttcctttttcactaaacggacaatttcgtcattgatatcactaagagccctccgatgaagatgatgagtcgtccgaagttttgtcagaagtcgaaccttccgagcccgaggccgatgatgagccggagctgctctcggaagtttcagtggtcccagtttccgtcgtctcctcggtcgtctcttccgtgtcgccgactctccgctgcccggtctctgtggcttcctctttctgcttctcgttcgccgccgacccgccctccttcttctcctcctcatgtcgctactgtgaaagaaaagcaacaaattttggatttcggagtggggcttttcggggacgccgatcactttatgaaattcaaagttttatcaatgccgaacctcggaagtcgaaaattgattgttcgccaaaattcacagaaatttttacaatttgaaagtgcggcccaaaaagcgctgattttaaagacaaaacttgtgtgattcactaatagccgaaccaattcactacaaatcaaaataaattgtgccaaccaaagggatccaaaacaacgacccttcgctccatttctcacttaaaataaaatgttcacgtgcattcgccaaaattaggaacacacaaaatgcaaaaaatgtagcagaaagggggggggggactcattcattcatttgtcgttgaggtgaggccaacaatttttcctttcccattctgtgattttcccactcattcgaagggatgtgtagtcatttttgtgggaattgtgccgagtttggcaccttttactggcacaaacaatcctttgcgactttttcattctcggaaatggaccaccgctcgctcactcattcctcaattaaaaaagcaaatgaatgaaaaggacgacgacgacgcgcccgagaagtgaataataatttggcatttatggcaattacaaaaaataaggcgcggatgggcgggcggacggaacggaacataaatagacgaacgaacagcctcgcctcctttcatttcccttcgccttattattcctccacagtcgccttctacctncacggatttctctcggttccatcgctttttgttacaaaatgttgaaaaatgaaacaacagcgaaatttgcttctttntgtcagtggtcgtcgcccaattccatgcgtcgtaagtgcaccg

SEQ ID NO: 21074 - DNA, 2107 bp, Heterodera glycines
atttgggcaggcgaacgtaaccgacgcggcccgaagtcttctagcgtgaggccgaattcagtggaaaaactgcacaatcgtacgacgaagaaatgtttggtaaaagaaaggagaaaaattagggaaaaatgggggaaatttggcaggctgaacgcgacccgataatgcgcataatggcggaccaattgtgtgaactgtgccacggaatgttctcccacgtgaaccccaatttgcgtgcccaatgctccagccaatgctacaaaaacgcgcaattccgcaaatgcgtggagatgtacacggcactgcccgaggggcacccgggcggaacggtggaaacgaaacgaggaaaaggggtggaagggagagaaacagaacaatggcaatgggcgcagaagagtgaacggacgacggacgaagccaaacgcaacggacgccaaatgggcgacaaacggacagtgtccattgtgaaatacttgtgaaggaagggaaggaactgtgctgatactgctccgactccttcgcatttgaacacagtccatttggaacaaatacctatatattttatctcttcattttttatcacgtttatcgatatccggtgattagccaattatacatacatacaatatacatacatagacacaaataatgatcacacaacggttttgatggaatgtgacaaatgggcgaaaatcaacatttatataccaaattaagacgcttcttttccagaaaaagtttcacttttgccaggcaaccaaaaggggccgataaaggaaggcattttccaccagacagcagtctactagagatcatactcataattttgaaactttatggcataatgtcactttgtggcaaaatttggtcattttctggacaaaatttgttaacaaatcacattaaaaattacaatttggcaaaatgcgccgcaaaaaatgaaaaagctgtttttgagcccgattgcttttgatttttaagccctattggcaaaataagcattttaagtttctaagactcgacccttctaagctcctttgttgtcatctataggaggttatttactatggctgaattgttattgtctaatggacaagcgattcggcaaagaaaacgcgggggcgtcggggaggttgtgcaggaattcgatgcctttctgaaggtttctgacgatgtcaaagaggagccgaaagcagtgaatggcatttgttagttttggtcttttacaattcagtcagtccttcttcaatttaagtgtttgtgctttgcttccttttggtcgccgttcttctcattggcgaactttacaatttcatgaccaattctgaagttgagtatcgttttgctgttgacaccgactttcaagagtaagcaagctcataggattttgcaaatatataaaaagttttgcacttttttgaagaatccattttagtaatccgatgttggacattgacatggtcatcgccgccccctgcaacaatttggccattatgccaatgggcgtcgattcgttggacggcgagggcacaactcgcttaaagaagagcccaactcggtgcgttctgctgaaaattttcatgtgctccaaatatttagatatgaaatgagtcctgacgaagaagagttgtggacggcgttgcagcgagtccaccgggagcactttaagccgggcacttccctgaaggctttgaacgaagttgtctcggaaaggaatttgaatatcacaccgaatttgcttcttttcagataaaatttgtggacgacgaaattgaggaaggtcttcaagaagtggaggaagagaaggagcggaatgagcgaatcgaaatggaaattaagcgggccgaggcaaaggccaaggggcgaggggagggcacggcggaagagcacgtcatcatgatgatcggcaacggattcggcatcttccagattatcgcctcaggacgtggtgagtcaacgggaagtcgtatcgagccaaaatttccaattctttttccggcggcaccgcagaatgaccataaaataatttgacaattttaaagcaccataactttttatagaaggatccaaattaaacattcttggtatcattcgacagctctaagag

SEQ ID NO: 21075 - DNA, 1023 bp, Heterodera glycines
ataatcatcttctacggaaaatttttcccaaccccctagaatttttttttcgaatttactcagattttcgtattttttcacccgcaaaaaatttgtgtttaatgaattttttcttacataaagtgaatagaaaatgcttaaaggatgtctgtacgttatcttagagctgattgctgttagtttgattcggttgggcaaatgttagaggcgatttaagcattttggcccttaatttctccggaaaacttggaaaattcaacacaactccgcctaaaagacagatttctgtctgcaaaagaaatagaaatgtgaaaaaagatttgttctttcttatttagcttattttatcagtttctttttggtagttattgagatttgattcgtttttatcaagtgtctctattttaaattaacacccctttttcgggaaaaaattcataaaatttttttccatcgtcatttcgccttctcctttttagaatcttaatattttcagaattgctacgtacagttaaaaattcagctcgatcggttcatgggaagtggtcaaactcccaaaaaacagggtgtctttattttaaattaacacagtgtattggtggctaaaggttttaaaattggaaaattcgcctctttcaggtcaaatcagcgttgttcaattgttgtcgacgcaaaatggacgcattggtgggacggttggggcgaagtgcggcggcggatgcgtattttgtacgatgcattcggccaaatgagtcgccagcagaggaaaatgtatttaaatagtaccaaaatcggcattggaaagattttaaattttaataattaatccgattttagcatttcgaccgttccgtcgtccttcgccaaatgcgtcagatggatcttttggccgttgtcgagcagtgtcgcgcggttattcacagccagttttggatattcgcactttgttggcgctacattattctcgagccgattttgcgtagtcctaaattaaaaataaaataaatcgcagtgcccattttt

SEQ ID NO: 21076 - DNA, 706 bp, Heterodera glycines
gagtaagaaatcattctcgtccacctccccccccccccccattcattcattagtcattttcccaccctcatagattacgcaaatttcactcccgacaaaatgcgagaaaaagagacgacaattcttcgaggggcgccgactgatcaattttcggcagcaaaattataaatgggacgggggatggaaagtgcactttcggcggatgtatcaattaaaatgggacaagcgaagaaggagtgcgcgcatttgttgttgttttttctgttgaattataatatttttaaaatcactccaattaatttaaacaatttgctttcataaatcattgttgggatggcacacattaattaatgttaattacttttcaatttcaatgagcagattttgtcaataatcgatattaaagtcgaaaagaggaaaatggttggaacagtttcaagttttggtattaaaatttaaaaattagtttccgtttgcctttctcctaaattcgggttttctgtccagcatttttcaacaaatcctctattaaaacggccccctctattaaaccggtcatttgggcctccaatgactgaaaaattttcaaaaaatatcattttttgtgtattttctaataaaaaatgtttttaaaaaattggaaatttatgccaaaaatactcagaaaatagaaaattctccattttttactcaattttcttcaaat

SEQ ID NO: 21077 - DNA, 2077 bp, Heterodera glycines
  unsure (1)..(2077): unsure at all n locations
aaagcaaacgattgccaaattctctataaaagggaccattttttaaaaaattctctcattttaatttctcccaacaacgcctctctctatttttgaattctcttcagctgctgctccattctattttttaattcttagactaagcgtcgttttctgttgttcattgttcaaaaaatgtcttaaacttttgtttttcattctccaaaaaatccttttatgtttttcaaaatcctgcaaaatccatttgaaaaacttgaacccactgactcagctttgcttgatccggcaagggttacaaaaaccggactcgttcattcaaatctcccctgtcctttttcctaacaaaattttcaaataaaaattaattaaattaatctgctttctctttttaagcgaaaatggttttagaatcttaatattttcagaattgctacgtaaaaaaacgctccttaacctatgttttggagtttttaaagtcaattctgaatttttacacaatttttggcatttttttgaaggtcaaaagccattttggcagtttttaaggcatattttagtgcatatttgggcgtttttcgggtttttatggcatatttgggggatttttagtgcatacaacttataaccctattcattaatatgcttaattcttaacttaattttaataatattttttcatttttttaaaccgataaaatattttaaaagcataaatggaaaaacattaaaaatgaatatattctaattttaaaaaatggtaaagcacttaagtaacaataagcatccaaaaaaacctaaatttaaacaggaattaagcactaaaatagcaaattaagcataaaaaccgaaaataatctactgatcacctacagcacgaaaagggtattaaatgacaaaaaaggcacttgaaaagtacatagataaaagcagccaaaaattcagtttacatagagcagcaaattgtgcgatatattctgatttggatggtccaaattctgacaaaaattactgcttttatcataaataaatatgttaaatttgtctattttaaaaattgtttttagaaaaaagtgccatattttcgcaccttctttttttaaattgactcttaaatccgaaatctaggtgagtttatttgagaccatgcatacgcatataggcgatataatggaatatacaatacaatggaatacagctgagaaatacatattatgctttatatcgtttcatcgcattgaatgtttgttggcaccagcatcattcttcatcccactcgtccgtcctctgcttaagtttgcatgatgatggcacttccgttcttctgctgctgctggcgatgaatggcgacattggcacattccgtggcgacatcgttgcgcaatttgcgattagcggcagcgaatgaagcattctcgggccgttttttcaccagcgaattgttgaagaacatctcgaagacgaacgaacacaccatgacgatgtcgaacacctgaaaaatccagaaattggaaaatgcagaatcaaatgggcggccaaactcacaaaagtgaccaacggcacatttgtgtcatccgcacggaagttcatgcaagaccaataaggtgtccaatagagcagcaaacacgatgaggcccaagcagagcaacaccagcaaaggacagaatagagggccatgcaatagtcgaagcacttaaaaatgaaaaacaaaattagtaaccgactcaatggaaaacaagcaaatttttgcaactcgtaacccgacaaaagcaaaactgatttcaatttgatcaaaaaaagcataggatttgactgaaaagcaatttgttcgcgtttttgtcgggctgatgtgctgtctgtgttcacgcattgaactcacttcgtattctgccgcagagcgtaacatccggaagaagccaatgccaatggtgagaagcgagcacaatgcgagcaacagttgggcggaaaaggagtccacaacagtgtcgaggagattttctgtcttctcagtccagaaaaaaaacgaaggctgaaaaaaacaaatggcattttatttncgattttctgatggctttttgct

SEQ ID NO: 21078 - DNA, 3695 bp, Heterodera glycines
aaataaaatgtataatttttaatttattgtttaatttattaacatataaaataatgacctatgcttcctgctgagttccccttttatagagagatttgatgttgtgattaatttccaaattgttttataaaattaaaattattcctaccataaatcttaaattttatttaattatttatttttattttctctcttgccataaatttttctttattcgaatttaaagacgaattgaattattcaataaaaaaatttaatcaattcttttttcttcagttttgaaaaattaagaaaaattatttaaaaattaatataaataaagagataatatgttttaagttaaaaaaattatggatattaaattccacaaaatcttaagtcagatttttttgtccagaactttttttaaaaataatgaaatttttttaaagttctggtaaaataattttgactcaaaacttaatgaaaatttatgatcataactttttatgaatttatgtgtcttacattttttgtttttttaccacttggcggtttataggaaacgacccagcacgcgtttaaccaacccaaaacacgaaaagcgtctttttgggccaaaaacgaaaccaaaaaccatggctctgaaaagcggactaacaaaatctggagattctcgttgcaacaaggactaaacgcatatttttaagcgggttaaatatatttatgattatttatgaattattttatttaatcttaaatatttttcataataattaaataaaaattttaatgtgcattttcacatttatatttattgttattattttataatttaatcttaacattgcattatagttttaatcatttgaagatagtcgaatgctgctggccttacaaattagcaattgagtcgaatactggccttagcaattatttttactagtatatattataatttaatttaatttttatttatttattttctttatttcgatttccaaattctatgataaatgaagtgttattatgtgagctaaattcatatttatctttatatttttataaaagaagattttaaaattgtcatagaaacttgattcctaatgatttttttattatgatatgatagcgtaagaatctcacttttgtttttagttttgaattatgtttaaattcattaaaaaatcattttttctttgaaaattagttaaagtatttaaaacatcataattaatagttttatattgaaatcttatgttttggattttaactatctgaaaatgagtttttttttcttatttcaattttttgtttttaattttaactatgaattgttaattaaaaatgcatttttttatctattagatattattttccgatatatttaaatataaattttatataattcgtttattataatctcaattttttgtaacagtgttggtttatcctattttaaaaagtataagtatattatcatacaaaattttataaatgttcgattgactaataaaattcattatattataaaactcacatttttattgttattagttggttttttaataacaccttgatgaattgtgtcggcattttagtaaaagttgcttcgttgtcgtttgcttgtttaaaaattttttattaattataaacttatctaataagcatgaggttctttatttaattttatcataatttataaagtatagtatagtaccataagaattttataaacttttgtaaaaatatttataattttttttagaaactagattgttttggcacaaacctcaattttttgattataactatatacctttaaaatgtttttttatttctagttgaagataattaatttgaaataaagcgtttaaaactttaataaaacgtattggataaatttaatcttttaactaattacttttaattattcaagcgtaatttccaccccactgctcatcagatacccatgtatttcaatattcttttttatgtatatttaaattagtttgaataatttaaactgatttatttattcgattaatgtttaaaaagctaaattaaagatatattttattaaaatactattaaatcagttttaatcaaataaattatataaaagtttaattttccgaagattattatgtgaaatttttaaatcatttattgttaaaaagtagtattcaaaattatcataatataataataaaatggtgaaaatgtcaagtatttgtgttttgtaatataaaattttataaaaattaaggataaaatattgcataattatttttgatttaaatcatttatttatttataatattttcgttaacaatgcaaaaatttaaaacctttcttatctaacaaatcggtaaaaaaaacattttttaacagcacatttttttatattttctatagaaaatcagttaactttttataaaattttctaaggctttttggggtgctaaattttaatttcatttttaagtgtttttttaattagataattgcggatgtcataattactcgtgacgcaatcgaagatcaaatcgttgtattctttggctgaagtttcttggcctttataatttattattactgtaaaaaatattaataaattatattttaatttctttcttaattgtagaatggaataacattctctttcttaaaattttacaaaaattaccaatgctaagagcgattttatcaacaggcgtaccggtttgtattaccatttaatagaatattaatattttttaatgatgatattagttgagctcctctgtttttgaattttgatttaatatttatttttttactgtttcgggcaattcaaggccagagacaataatttcatttttaattaattaattaatttggttacacagtgtttttatactgaaaatcagtactaattgcgttgttaaattgcccaaggctctttaaaaaggaaaaatatttttgtagactagcgggaaaccacatcgataattggggccaataattttggtgatatcgtagaagctgttgttgggccttcagcaagccaataaaataaacatattatagctttatcatcctatgctttgcttttttctctcttaattgtgctttctatttgttatttattaatttattgctgtgagctttcttatttggtgtgtctacggaagggccgaaacacacttaggatttcaaatttgtaatacggaagggatcgtactgacgaggcccacccttccagttaattttttggcaaaagtatggtccgcaaaagtacggtccgcaattgtcgtccgcaattgtacggtccgcaattgtcgtccgcaattgtcgtccgcaaaagtacggtccgcaattgtcgtccgcaattgtcgtccgcaattgtgggcgcttttgtcaacaaccgaatgcgaataggaactggaatcttctgactgggaattaccgacgctacgaggaagtgctaaattttttagatgaatttcactggccaaaccatgaaaaggtgacagacaacatttaagtaactttgcaaaattattttcttttagtcattgcgactgacaaatctgaatgaatgccgtgacagcaattttcacgccacaaacatcatttgctgcatgttccatttgtaaagaacaaaatgagggattaaaaaaaatgaatggagaatcaatgtgtggtgagacggtccagttcatacaggtaaa

SEQ ID NO: 21079 - DNA, 1169 bp, Heterodera glycines
  unsure (1)..(1169): unsure at all n locations
atagttcatgtttaaaccctttcgccagcgacttcccccccccccaacatcttttacaaccgcctcccttacgaacgaacgaaggtggggtgcgccaggcctcttacgatgagggagggggtgggggggggggggggagtgcgccagctcacctcttgtgtacatatgtgtgatcacattattttccgcttctgttattagttacggatggaaattacacggaagcacggacgagaaatgagttggtacctgacctgacacagttaggttcaaattagtcagttttgactcgagtttcgctacaagaaagtataaaatataagtttaggatgtgaaatgcacaactatgataaacgcaagttaatcccgatgaattatgtaataatcagccaagctcgtttattccctacaacgtaatactgctcgtttattccctacaaaataatactgctccaagctcgtttattcccaatggaatacgaatgatgctccaagctcgtttattcccaatgaactacgtaatgataagccaaacttgcttattcccgatgaagatataaaactgagccaaactcgtttattccagatgaactacttgataatcagccaagctcgtttattcccaatggaatacgaatgatgctccaagctcgtttattcccgatgaactacgtaatgataagccgaacttgcttattcccgatgaagatataaaactgagccaaactcgtttattccagatgaactacttgataatcagccagctcgtttataccatgaagatcgtttattcccttatgaactacataaagagcccaagctcgtttattccctacgaactacactaataacaacaagggaattaagttttattggaataataatgaattggtatgttaatgatttattaacaaattataaaaatctaatttgcataaattttttgctaattagatttgcgaaaatttgaaaaacgaaaatttgatcatatgtttcggtccatgccgtccaatctcncaattctctttattatcttttagttggtaatgtgggtttttggccaaatcaattcataaattacagcaaatctttaaaatcccgatccnaaccacattnanngcagttcaggctcgtttttttcagcacagtatggtgttgtgactgagtcg

SEQ ID NO: 21080 - DNA, 1358 bp, Heterodera glycines
gtgcagaaagggactaagaaggtacataacctgattgacactgaaaagcgagccaatatccccattagtcgggtgaagcattttttggtatccgtttttggcttagtgatcctggtttgagcataaatctttgttgtgactgggtcgtagactataattgggaaacttcaagatttatgcttaatcacaagagcactcagtcacaaacgaatcccaagtatgcctcactcactaatggatgttttcgctcgacttttcagtggcgaagcgacgaagacttacgcacctacttcctcccgtttctgcacactactagagtgcttatcggcataacaaattctgccgtggcgagggatatgaaaatataatcaccttcgctaaaaggagtcgaacttgaagttccctttctgttgtgactgagtcgttgaccatttgaccaaatggtctatgactcagtacaacagtggtgtacactgtcatcagggctcatcatcttggtaatttaaccccttccccctttttcagttgtcaacagcatcatcatggtggccgacaggaacggcttccagacggtcaacgagacggtaaagaacttatttactgtggacacgtattctgtatgtaggattcttccaggctgtcaagttgccgaagtgcgcatacgtaagcatcgacctggggacgatcgttcaagacccaatcgaggagtgtgtcgaaaaacagcctgcacaacatttaaacggtaaactgaaatcggagagcgagcggggcagacgaataacagagatgtacataaatataagcattaaaacgcttagttaaccccccccccccccatttaaaatctattctctggtcagtagagtagaaccattgtgaaattattaagcttgattggagattaagttgccgtattccatcgattaaaagacccatatcgattattaggtccctcttcttttgagggggttgaacattaagtactataattgagaaaatactgtagtctaactttgtcaattaatcaacaggtttattttttgaattagcgcacaagaaatacttttggcataatgttttaattgtacacctaattagagcccggaaatttcaaatttgcggatcccgctgcgggattggtactgaaaattctttgcgggacgggatcccgcgggattaatcccgcaaatcccgcatttaaaatttgcgggatcccgcgcgggattgcgggattttggaaaattcgaaaaaatttcaattaaattcaaaaaatttccaaaaatcaaaaaatgctgaaaaataaatttttaagggctggcgggatgcattaaaaggggttgatgggtcgactaagattt

SEQ ID NO: 21081 - DNA, 1962 bp, Heterodera glycines
tttccatcatcgatccatgctttagggtcctaaagggcaatcatctcagacttggcgctatcaaactgggaaaacgaacagttcgccctgtttttgagcctcgtaatcgatcacggccacaccgacgcgctgctttttgcactcgcgaaatcggacgccatcaaagggaggcaatgggccgggaaaagaatctgaaagccaaaggaaaagccttcggcactttcatacaaaggaaaagccaacatcggttgaggatttaatcatttattccgtttcaatttcgtctccctttcccccgtatttcatttttctttcttcccccaattttttcccatttgcccaccctctctcctcttctccttctgtgccgttgccaatctttcatattccccactgttgtttgtcgctaatttgtccggttttggtgccattcgttcgtattcccttcgctttgtcgccgttttgtccgttttttccggtggcgaactttttgcttaaatggtgaaaatggtgagagaaggcccataaaatttcgattgttgcttaatcggcgtgatccatctcatttattaccttcagtctttttgttttctgtgtttgtcgactccaaattcacataaggctgctcttttccgcactttgcaaatgtttttctgcccttgggcaaagtgtccgatttgagggccatcggcacaatttgagcaattaggccaaatgaagggacggacaaagcatcactaattattattaattgattgacagattaaaaacaattcattgccacaatgttaattacttttctcctaaatattttggcaattaaatttaattatttcttttgggataaattgacgtcgtcgaaatagcaacttcgaattggcaattatgaattaattgcaaaacgaatggggagagaatgaatggcgtattaattgggcgggaaagagcttaggcggacaaaaagccgaacgaagtgccaacggaaggggggcgggtgaaactgatgcctaattaggccggaaattgaagtggcaaaactcccgcggggtacttataattatgcttttccgctgaaggcatttgggtcgccgttccctgctgtcgccctttgcgacgttgcccgcacattccctccccctttcctcgctgtgcttgcccactgcatttcaaatagctggtaatttttatttctccggcctaatccagaaaaaatcactatctctttttttggaatattttacgtgtcaaagggtgtgcatttaagcgactcgctgtgcttgcccactgcatttcaaatagctggtaatttttatttctccggcctaatccagaaaaaatcactatctctttttttggaatattttacgtgtcaaagggtgtgcatttaagcgactcgctgtgcttgcccactgcatttcaaatagctggtaatttttatttctccggcctaatccagaaaaaatcactatctctttttttggaatattttacgtgtcaaagggtgtgcatttaagcgactcgctgtgcttgcccactgcatttcaaatagctggtaatttttatttctccggcctaatccagaaaaaatcactatctctttttttggaatattttacgtgtcaaagggtgtgcatttaagcgactcgctgtgcttgcccactgcatttcaaatagctggtaatttttatttctccggcctaatccagaaaaaatcactatctctttttttggaatattttacgtgtcaaagggtgtgcatttaagcgactcgctgtgcttgcccactgcatttcaaatagctgggaatttttatttctccggcctaatccagaaaaaatcactatctctttttttggaatattttacgtgtcaaagggtgtgcatttaagcgactcgctgtgcttgcccactgcatttcaaatagctgggaatttttatttctccggcctaatccacaaaaaa

SEQ ID NO: 21082 - DNA, 1043 bp, Heterodera glycines
taaaaaacaatcaaattaataatcgccgtttaacagatggataagctcaaaaaaagtgttggttttatggaataaaaaaaacataaataatattcgaatagaacaacgtaaacaagacgaaaagatcaaacagaaacgagttttagttaccaagaaactcagaaaagaatttttcgttaaaaagttgcttctcaacatgtgacagggaaagaaaatataaatatttctttttcacagacaatttctttttccctttctttgacatttcgttagtccaaagaaagtatcgttctctaccctcactctttcatttcttttttcaattgcttagaattctaacttaccgaaattttaccgaaactcaggttttaaattgttggtctttctttctgcagctaaaataattctcgaccgacctgttattttatgtatcaattctgaaatattattatcatgccttgcttgagagatgtcatgacaactcgtacaaaaggcaactcgtacaattgcttaggttaggcttaatcttgcttggactatgtttaggctttattttgttaaatacgagttgccttttgtacgagttgtctttgtacacattgtacaaattgcttttcgtacgagttgccattgacccgcttgacacgttgtttttaaatttttatttcttgaaaatccatttgtagcagtaaaatgaataatattgatgatatttgcaaagaaatcgaactgcgtctgtccgtccatggtgcgttgcttggttctggatgggctacgatggagaccactgtcacttctctgctcaacagttagtggcgattagttttaagaaagggttggagttggatataagggaaggagggggcggggggaggttgtctttcaactccaacaatctgaaattctttagacaaccaaaatgacatctcaattctgaagagcttgcaattagaacaagaggcgaatgccggattactggtccaaaaagttgacggacttctggctggaaatgcagcggatataactgccatgggttcgtaaat

SEQ ID NO: 21083 - DNA, 894 bp, Heterodera glycines
agaaacaaaagatggaggaggaagagcgaaagatgagggaggaggaagagcggaagaagtgggaggaggaagagcggaagaagagggatgaggaaagagcggaagaagtgggaggaggaagagcgtaaaaagagtgaggaggaagagcggaagaagtgggaggaggaagagcggaagaagagggaggaggaagagcgtaaaaagagtgaggaggaagagcggaagaagtgggaggaggaagagcggaagaagagggaggaggaaaagcgtaagaagagggaggaggaagagcggaagaagagggaggaggaaaagcgtaaaaagagggaggaggaaaagcgtaaaaagaaggaggaggaagagcggaagaagtgtgaggagaaagagcggaagaagagggaggagggcaagaagagagaaggtaagcgaaaacactcggacgaattggcggagagttcggcagacgaaggtgagagggattcgagatttataaaaggtagttaaatattgacacattcaaggacgattgaggtcaaagaagaagctgaatgtttattccggatttgatcacaagcgaagttctctcaataaggtacgtcgaactaacccaaataactttgtataaacttcgaaatttagactatggacacggactatgacgattctttttggtctgacagtgattagtaaattaatcacttcgcctaattattttttgttgtaacatttaagcctcatatatcatcattttgaataaaaatgcgtatcattataaaaaaaatgagtattgaaacgaaatgtaaaaaaacaagaaaagtgaagaaacagcagacactatataagtcagacactacattaaaaattattgaaaataaaagtgaacaaaacgccaat

SEQ ID NO: 21084 - DNA, 2226 bp, Heterodera glycines
  unsure (1)..(2226): unsure at all n locations
aaaaattttttctatttcggggaaaaaatcgaaattttttccgaaaaaaatanccagtcgatagagctcgaaaaactatgttttggaagtggtctccgtttttctgggaaaatttcgttaaaaaatcctaaaattcaaaaaccccaaaaaaccgttttttaggcctagctcgaaaaattttgaaaattttcgaaattttaaaatttggaaaaatgcagctttaaaaactctacaataagtctgctggcaccccctcgctcagaccaaaccctgacgtggtattcacctggtactgaagtgggaaaaaaaaattaactgagtctccgtgtctgtacaggtccgggatttggtctgatcaaaaaataaaaaatactggattatagaggacacttctgcggagtgccctcacagcgggaattttttgatccgagtttcagaaaaaaagttatgggccgtcaaacgcacgaaaaattgagaaatccgtccctgggactcagtcgtccgcgcagaatttttctctatagttttcccggatgcgcctcaaaaagttgtaagacccttccactactttcagggcgctcccggccttcggccgggagattttgtttttgcaaacgaaactccttgtcaatataacatatatagtaactagcgggtgcgtgaaccgtcggctatttagctgggaaaaagcgcttcgcgctttgggagcttcgctacctagattagctatcgggttgtgaaaagatttggaatttttaaaaaattatcagcgatttttaggccgcttcgcggcctcagacgggcgctacgcacccgttttttaaattcggtgatttttaggctgcttcgcggcctcagacgggcgcttcgcgcccgtttctaatttttgttgtgcttttcggccgcttcgcggccgttttttaaattgtgttgagtcggacgggcgcttcgcgcccgttattaaattttgatggactcagacgggcgcttcgcgcccgttttttaaattgtgttgtgcttttcggccgcttcgcggccgttttttaaattgtgttgagtcggacgggcgcttcgcgcccgttattaaattttgatggactcagacgggcgattcgcgccctttttgtggcctttttaggccgatttgcggcctcgaacggccgcttcgcgccgttttttaaattttagaacagatacaaaagtgattagaagaggtagaactgtgattagaagaggtacaacagagatgagaagaggtacaacagtgaaaaagtgatacaaaagtgattagaagaggtgcaaccacggaagggaaaggcacaacagtgatttgaagaggtacaacagtgattagaagaggttcaacagtgattaaaagaggtacaaaagtgattagatgaggtgcaacagtgattagaaggggtataaaagtgattagaagaggtgcaacagtgattagaagaggtacaacagtgaaaaagtgatacaaaagtgattagaagaggtgcaaccacggaagggaaaggcacaacagtgatttgaagaggtacaacagtgattagaagaggtacaacagtcattagaagaggtacaaaattgttagaagagatgcaaactgtgattagaagaggaacaattttcaatagacgtaaaagttgagtaaatcaataacgcacaccatctcaaacatgagaatgtaataaacagatggcatataaaaaaatacaaattatggacaataaaattaactaatttgaaacaaaaaatttattcatcaaaaataatttaatttaaatttaaaattatttattaatttttaataaaacaaaaaggttcaaattaagtaaaagcattgaaaatgacgaaaaaaataaataatgtaaagtttttataaaaatttaattcaaataaaaaaatgtaatttattattaataaaataaaaaatattttaaatgaataaaacaacgaaaacacgaaaaaaatttaaaaacaacgttggaaattattaattgaatatttatttaatttgaaattaaattattttttttacaaattcaaaaaaaaaataatgaaattctttaatttaaaaaaaataaatttaaataatttanaagaaatcttctattnnattaaaaacagtcaaaataacccaaaaatgcacaganaaataatgttacaccgtccggattcgaactttgcaccccccccccccaaaaatgatgcctc

SEQ ID NO: 21085 - DNA, 1580 bp, Heterodera glycines
  unsure (1)..(1580): unsure at all n locations
aatttttaaaaatacaccnccacaaaacacgaaaaatttagtttcatcgtcatttgggcattttcaataaatattttcgtcatttttttgcgaacatttcttttttntaatgagaattttttcgaaatttggcaaacttggaggtgtttttgatacaacgaacaataataaaaaatatgcatttttaagttttaaaccccattttttggttgtttattgtactttttaggtttatttaagcaaatattaaatatgcacaccttttttgggatttttgggggtttacaacatatattttggcattttttatccatattttggtccatatttggccatttttggcctttttagtccatatttcgggcttttttagtccatatttaatgtccatatttcgcgttttttaatttacaaccctaattattaacaaaaataaatctgctttatttgttaaggattaattgtaaaattagatttaattgagttaaacatgtcctcttttattcaggtaactcacgtagttttcacagacggtgaacttacgcaggaatcgtattaataaaaatatttttaatttatttcttttaataataattttgttttttatgaattaatttatttaatatttattatttgaaaaggactaaaatccattggaatatttattgtttctgaattatttgtcacattaaatattaaaaattcgaatatttattatttttttcattttcttgctcatcgctgccaatcattattattgtattatttcgtattttccatttttattaattagtttaaagcactcaggcaaattttacataattacgccatataattaattttaataattaatttctttatattttagtaattcacttatacatttaaacagtttaatcgacatcaattcttttttcaatttgctatttattttctctatatctttttttatttttataatatatattgttatgggcaagtcaaccgcgatcatggcctattctataggatttatattccacggattgtatttaaatttgatttcagtttttgtttattgtcataggcggtattttttaaaaattgaagataacatttattgaattataattaacatttatttctttgtttttggtaattttttatttctaaatttttagaaaatttatttcttgaaaattcatttacaatataaatattatttttttgataataaataatttaatgttcttgttaattcataagtggaaatcaagggtggagcgcgtacagaaaaaaaccgcggccgcgcattcaaattgccgcggccgcgcccgcggatcgcgcaaaaaaaaaaacgccgcgaatcgcggatcacgcatcgcggtcgcgctccacccctggtggaaatgctatttattatttcagttttggttacttttttccactaaataatttttactttctgctgaataaacttatttggatttttattatttttttaatttaaaaaattgatagttaatttatttaattatgcactcaaaaatattaattattctcttattatgcgacatatatcagggatggcacggaattcc

SEQ ID NO: 21086 - DNA, 2719 bp, Heterodera glycines
  unsure (1)..(2719): unsure at all n locations
gtaaattccacagcctgcattctcggcgaattctcaaaactctcgcggcaaacgtgcatttttccgagtcgccaaatgactttccagtccctcccttgccgccgcccaatccagcgaacaacttcctcaatcccgaaagatcaatcgtcctcccccgtcgtcgtcgatacgtgcgtgtttgctcattgtacgctacttgtgacggaaagaacgggtttcggcgaggaattctgtagttgcccggtcgcagtggatcatatggcccattcttcttcaatttgcctttgcctctgacttcctccgttggctgtctctttcgaattctctctttcacagcttgccgctcattccttcctctgacaggagacaaactcgattctgtcgtgacgatttgtgaatcctgcatcactgtccctggaggcagacttgactccgttgtgacagtttgcgggtccctgccttccatcacagcacttggtgaatccataatggcagtcacttgaatttgactgacttcgtcctccgcagaagtgttaatttctagagggtacaaaaggttaatcgctcgaaccagagtttttccttttgtgtgtactcgtgccgtgcgcacgagtccatccctccccttcaaaagcttttcgacttttcccatcgtccaaatggaccgtgggtcttcctcttcttcaaccaggacaatatccccctctcttgggagacttccttctgctcggttggttcgatctctttctctgagcgaaagtaagtactccgttttccactgtttccagaatcgatcaattctttttattgcaactctcatcaattgatgcaattcccctcttttccggggttggtatgcatagtcgggatccattggatcttcgtccgacaatggaaggcttgtttccacacgtttatatggcaataaaaaatcgacgggtctgagcggttgtgtgaattcttcttctgattggaatgtaagaggccttgtgttcaccacagcttcgatttcgcaaacaagagtatcgaattcttgcctttccatgaggcttttccccactgttcttcgtaacgcacttctggtgatacccaccagtctctcccacgcgccaccttgccagggtgctcgtggtacgttgaatttccaactcactcctgagtggctggtttctaccagtatttctcttctccattcctcttttatgcactctgctccagcaataaaattggtgccattatctgaccacataaggcttgggaggccgcggcgtgagctgaaccttcgaaaggtcctcaaaaattctgttgccgtacaatcatcggccacttccaaatgaaccgctcgtattacgagacaggtataaagtgcgatgtagactttaactccgccttttattgttaatgggccaaaatagtcaacgcccgtcttctcaaatggccttatcatcgcaactcgttcactgggcaagtttggcatttgtggataggcatatggtttaagcctctctttgcggcaattcaagcatccgtgtcgctcagacaatatcgtgtttctgatgaaccttcttcctttgggtatccagtgcttttcccttatgtatcccaacagagtactgtgacttggatgcttcattttccaatgtgcttccagcacaatgagttttgtggtccatgcttcaggaggcaagaaaatcgggaatttcgtatcctcctttactgttgcttctccaatgcgtcctcggcatctccagatttctttgtctttgaacagacgaagattttcctttgttttttcctccgttggaaattgtcgttgtgcttaccatatcagcaaatgttcggatgcacataattcgggcactgacagtacgcccttgtcttggttcccgtgcttttttgggcccattttgctcagaattggcaacaaatttccattgtatctgttttttgccaccgaatgtatccagcgtaagacataggcacccacagttttggcctttttccagctggagtaccggttcacatcaatagttggttggaaaggcacctcattcatgactgcggctgttttcacttcttcatcttccgcacttgccctgagcttctcttcatctgggtgataaacctttgctggttttggccacagggccttttcttctgataaccatttggggccatgcttccataacaaatttctgctcaactctcttggtgttgtgcagcgtgatgccacgtccgcgggattatctgcactgaccaaatgtttgacttcaaactgtccacgtatttttgctaatcgatttgaaacaaatcgatcgcatttcttatgctccttaattcgttcaacggaacacaagctgtcagtccaaattgttgtctgtgttggtttgagtttgagatgttggagcacgtactttaacaacttcactcccagcgttatggattgtaattccatttttggaattgttgccgcaacatctgatatgttggagggcttcaccaggctctttgcaaacaccaaattggcgctcattttttctgtcgattcccggatgtaaatggcaacgcctaagccttttccgctcgcatctgcgaagcaatgcatttccttgtccacttcgtcttcgttgtcgactcttcgtgcgaatcgaatttggacctctgtcccctctttcgnttngccagtctccatgatttgattccattcatgaatcaattc

SEQ ID NO: 21087 - DNA, 2142 bp, Heterodera glycines
caattggaagagtgcatgtcgccattgaatacgtgccgacttcggggattcgcttttggatcaaaaggacatggtccgaatttcactatttttccaaaaaattacgttgttttatgcactcaaaagcactttttaggagtcgcattgtctgttcttgtccggccgatcgttctcaaattgtgttggcatttctcaaaagggtaaccaaacacatgcagaaaaggctggttgagcagtgggaattggtcaaggcacgccaatcgccggacgaaggtccttttgctcttacgaaaacccatttacgactcgagaagtcacttttaaattcagagacggagcccaccgaagaggaaatggtcgccgagagcacaatgagtcttttttctcgagaatgcgcttcttttgcttcgacttttattctcggcgaatcgttttcccccaaaaatgtgaagaaagaagcgatagtttcacaaatcgcccaaattctgctgatggacaaggtaaatttgttgagaccgaagcactgaaatgaactgaaaacaacggcaaaggaattgttcctcgacatgctcggactgctcgccaaactgatcacttgctccgactcacaggcggcggtcaaatgcattccgatgctcaacgtgatcaccctaaatgtacgcattgagaagcaaataaacggccagacaaaggatgcacaacatcaacatttgtttatcttcctcacttttacagtacgccacatcatttgacgaacaaaccgcggttcaaattctgatccatgccctccaaagtctgcaaatgtatgtgtccgatgaactcgctgcaggacccattctcacgctgatcttcaacatttattcaacattccgaccaaaataccccgcacttcttgaagtcttgagacaggtttcagttaacattttagttttatactatttatctgtttaattggatcaggttccgaattccatgcccgagaatgtcgagcagttcgaccaacgaataataacaacaatttcaaaacgaagaggaggggaaaatgcacgacaaaatcaagagggatttgatgaggaaggttttgatatcggtgagaatggaggaaggcttttgaaacatggaaattttcaaaatacagagaaaagtcaaaattcaccacggccaaaaaagttcgaacggaacggaggaagacggagaaatggattgaccagagaaatggcggaagggagattgttcttttccttttcactttgttctacttttgtactggagacgggatcattcgttgtttttgttttttgttaaagcgatttataacaaaaatggcagaaaaatatgaaacacaaattgttttgtgtgagattaaattacgcgtcacttttgttttccgtccgttcattttgcccgctttgccttcgattgcgcggtggcccctgagggttcctttctttttgttgcgcccgtcgatgcttcggccttttcttgcgtcgattgcttcttccgtccgccccttcccccctgggcgcccttttgctccaagcccaagtcgcccatttccttctccaccagtgaaattaaaatgttgcaacgtcgttgtaattcctgaaatcaattacataacataaaatagagccccccccccccgcaacaaacaaagtctacaggcccgtaacaagaaaaaaaggccagcaatagtatttctgctttggtagtgccctgatccagtaatgacccctcctcccctaccaattaaggctcataccatggcagttcgagagcgaataaaccaatcaaatcgaaattggggagcggttcggatattttgacgcaattcgtcgtataaattttcattatcaagtccgatttcataaatgttgtagaggagaaatctgcaaaaatgagatgaaaataactcattttcccgaaatcataacttacatagggcttatgcataacttatttatttaattttaattgccaatgactccctttcccccccccccttttcacctgtcctcctcctccgtgtaatttttacattttcccgtcccgtactgaagacggagttggtgctgaggtgccttgtacttgttgattttggcctccaatgcctgtttgatggcatgccttttctgaatgcgt

SEQ ID NO: 21088 - DNA, 1200 bp, Heterodera glycines
ctaaaattcaaaataataatttaaattagttagtccacaatatggtttctaattgtaagaaaatttactgaaaaacattttttgtttgaaagattttagcaattttttaaaattttatgatgaactatcaagtttttctaaatttttacaaaaaagcactgaaaataaaaaaaaattttttttttaatttttctgtcgaaggaaatgaaacaaatgcccacaataattttcccagtgtggcattgtgccacggcattccaaaccatccgcccgtccactgacattgtcgccttggccgccctctgccgtgggctttgtccgcgtgccattccatcatggtcggcgatagcattcacaaaaatgaacgccgctgtgccggtgtccatcagcgactgaccataatactgtgttttggccatacggcgcgggaacagcgtgaaatcgaccgccaaaatggccaacgaagtggcgaccaaaagcacggccataaaacgaagagaaaattcaatttacataaaaaaaatcaaagaaaaggtattcacaaaatttacttacctagcctaattcgaaaaaataagtctaataaaaaaaaattattgagaaaattcaagaaaaaaaaaaaaagtcaaatttttctgaaaatttagcaaatctatttccattaatccttaggttgaaaaaagctttaaaataattttaaaaatggtgaaattttggtttttttttttgcagcgacgttgtgtcccggcgacattttggggtgtacccgacttttcacgaaaaaacaaaaacggataagaaacgccgaaaaacacgccccagaaatgcctaattaaaatgtgcaattttcttttgaatagcatttaattccctcggctgatcattttcatgtacgtgtcgagaaggggtgatgcccccggtcgaagcaattcatcccggaagcagttctttcccccccccccccccccctccagcccggaaaattttaatttttcaaaaaaaaattagtgaatttttcacaggaaaatttaaagaaaaaaattttcagcgaattctctctcacctgaacattgtgtgcgcgtcgcgttgggcgcgtgccgcgtccacgcgcagcggacgcattgagcgcagcggcgtcacaccgcaggcgcgcgcactgtcacagcaagcgaaaatgacggcacagagcgcgagctgaac

SEQ ID NO: 21089 - DNA, 787 bp, Heterodera glycines
  unsure (1)..(787): unsure at all n locations
ccacgtcacaaatcaaaaacaaagaaaaaaccagatcaatttttaggtggaaagaagaatttgtcatttttattttctgtcaacttgtatcaatttccttatttagtcttcctctcctattcccacaattaatttcctcattttctcccctcatccgattatccctactttctcctccatttcctttatctctcatcccatccgccctccctctcattacccttccccccccccccccaatttcctttctttctcttccaattcatctccctctcttctccctctcattggcttttttcctctttcgctttctctctctctctctctttcggtctctttccactaacaataagtgcaaaaacagtgtgctccgtccccttacgtcgtcctcatggaatgcgcgatccgttccgtctcgtgcaacattcgctgggtggtcgggagaagtcgtacacataggaggggcgcagttggtactccgagggaaggcacagaatgccattggtggccaaattggtgaacagccgacgcatttcatcgggcgactttttgtgggttatctgaacggcgtgccaaatcattttttaacccaataactgcttgcagatcacttgccaaatattcgttgttgcagccccgggaacgatattcagtgtctggaatacgcttatgttagtcgctcagagcgagaataggaaacggcaaagaataaaatttaaagaattttcttgcctttttttagaaattttatgatggttaacggaactaagttttccanaaaattttt

SEQ ID NO: 21090 - DNA, 1338 bp, Heterodera glycines
actaattgatgagtattattatttgtccatcatagcattaaacggtggaaatatttgaatgaccaaattaattaataattttgacctgtcctaccagggcctggtttcgaatgaaaattcccgtgttttcaaatttcaaaaaatgcccaaaagttttcagagagacaaaaaaaaccgctgtgttactctcgagatgggaaatttgccaaggtttttgggccttgtctcggttctcggataggaggttttgctctctggactttttcaaatttccaccagttaggcctctgcccaaccatccaaggcgttcaatcctgaaaattttcagagaaatctaaaaccactgtgcgtcttggataactagaaatttctagggttttttgtctcgattctcggggctgggtgaggagggttagttactcccatggttttgactttcgggacccttttttaaatttttcccagttacacctctgtgcaaaatcatccaagggccttgaaaatttccaaaatttcaggcccactaagccgcgcacggcggggaccccatttgcacttattttagtacaaatagcagagcacaaaccgttagccatctcataactccccgcgcccaatccccgcgccatcgaatcgatttttcgtgcgtttgttggagtggggatggggtgggggcgaaagctttgctttgccccaccgtccgtccggcggcggcgaccgttgggcagacgggcgggcggcggacagagcgccataacaaaatgtaatggggggggcaggcgcgacgggggggggggtgaaaccagagaaggaatggcaatttgtttttatctatcggtccagaaatgaaaatgttgtcgggatttttcggcaggattttcatgcagattctcattagttagggaaatacaagtttccgcgtggctcagtcggttagagcccgtccctcattgtttggagagccgtgggttcgagtcccacacacccgcctgtcgatccccaacaaataattgccgtccacgggtgcagtacgtcccccccccccctcggatcagttcccttaaaaaaattttcctttataaattttcgaactcttaatgattcatcataaaattttgagaaaaaacgatggttcatcagaaattttttgaaaaactactataaaaaattatatacaatgttttgtttgtaaagaatttgttaatttttggattgttttaaaaaatttcgggggaggaaacgagctattccctgctgcccacctggtcgcagttgaaccatgcgcagcgaccattctggtacaggggataatgttgctggtcatgaggatggtttggg

SEQ ID NO: 21091 - DNA, 1536 bp, Heterodera glycines
taaggagagatttttaccaatttcgttgcctaaatttctgattttcttttttaaataaatgcaactgcttaatttattagaattatgttcaaagtcccaaaaaaacacacacaaaaaattcaaaaaaaaaaaatttacaaaatcaattttctgctataaaatttaggaatttctataaatattatttatatttatttttaattgcgagttttcggccattgattgaaatggaaatgattttacctaaagtctcccgaatttctgataaataatcccgatcagtcgtaaagaaacgcagaaagtgatcagtgttccgatcgactcatcccctcctctgatcggcttacataatccaatcccgcccggaggtcccgacaaatctgattaattactctcaaatggctgtggaaatcactttcattaacttcagtttgaagatcatttagtcaattattaatttttaatttttaaccctcacagcccccaatttttttttcaaaaattccaacaatttttcgtctttttgtgccccccccccctcgccccccgtgtgttcgaccttaatcagcgcaagcgcatccgaagtgtcaaacaggcgccgattatttgcgcatccccaatttttggcgcggcgcctcaaggctgaggtgaagtccccccggggggggggggaataactaatgttttttttccaaattaaaaaccacacacaaatcgaatgttttttttttgttgatcagagaaatttttttttattacattttactattttttcaccaaaaactgacaacctaaaaatgtgcaagaaattttcaccgattttttaaaaatattttaaactaaccctttctgaggtctttggaaaaatatggaatttcaaaaaagcctcaaaaaacttagaaaggttagcgcatcaaatttcggtgtttcttcagggacaaaaaaaaaatttattatgactcaaaaatttatttgagaatttcaaaagtaaatttaaagcctcataatttttgaatgaaattctgtgcgaaatacttttgtttctgatcagttttgacactttcttaagaccatttgtgttctgatcaagaagcatttatcttgataatttttgacaaaaaatatatatttcaatattaaaatttacttttttagcggtgcaaaaataattaaaattaaattattttttaaatggcacggaaattgcatttttgtgccctcatttggctggtgttatggttggcgttgagcactgttcgccaagtgtttgacatcattggcaaactgtgggctttggtactgatcgacatggttcaggtgtgccctgatcactttttatttggcttattggcattgattaagaaaacgatcacaaaatccattgatcagtgacccagatttactcaaactgattaggaaactgctaagaagcagccaaaatcaccaaaagtgatcataaatctgaaaaggactcagctttgataaacacactttaaatgtgcctgatcatttaaattattggcactgatcaagaaa

SEQ ID NO: 21092 - DNA, 1466 bp, Heterodera glycines
cacttctatgaaaccatccaataaattcttagcaataataatattattagtatataaataaagcattattcaaaagcaaaattaataatcgataaaagcatctttattttaatataggtttaattatttgtaaattgaatatcatgtaaaactaattaaaaatctttaaacgttataattaagtgagagacgaagaaggtcatcttttttgaaagatcagaaatataataaaagaaaaataacttttcatcaatatttgatttaaaatttttaaatacgaaaatttaatttaaaccttaattttataattttgagatttcttaaattctccctggagagtacaaatgcggtgcctccagttcgtcaatgaaatatctaattaatttattaaaaatttttcttgttatctaaattaataattaaaaattataacaaaaacaaatatatcaatacttttgtaataaacatgcattttttgtagtttagtagatggataaaaattcaataaaactatgtattcaaaattaatttatttttatcggtggccgaacgtttcgtcactgaacctttcgacactaaacttttcgtcactgaacctttcgtcactgaaataaaataaagaattatttattagtgaaaactattttttttaaaataaagttatgtatttgaaaaattctaaaaattgttagttttgtgtcaatttaacatagtattttaaacacataaatattattaaaatatcagtctttctaacaatttgtttacattcaaagcaattactttgccatggaaatcggttcggtgatgagaataacctttaaccctctcggccctccaattgtggtgtgggtcatttctgataaaaatatttggcaaacaaataaaaaggaatgaagagaaggcaaccagcggtcattcttatgattactcccttcattttcctaataaaatgcaagaaaataactcatcatccgacgaagagggtcaattgctttcatcttcatctgggaatgaagaagcggctaaccaagaattaattcaattcatcgaatttaagtcaaagcgaggtgcctcacttcttgcacgtgatgggtttgagtaccaattcgagcgcaattcagccttagttgataatgttgaatattggaagtgtgttaaagtgagtaacaaaataaaatcgaatggatttttctttggtcagaggccaccctactgcgcgggtcgcatacatgtccatgctccttggcaagagcaaaatggcattcggtttaaatttggactgctaaaaaatgatcaacactctcacattgccgaacccgacaaagaatatgtcaaatagcagccaatttctttttgaatttccttaatctaagattcgttccgccatcgaacagttgaaacaatctgcaagagcccaataaacccaatacagaacaagagaacgcggtggatgctgcgagggc

SEQ ID NO: 21093 - DNA, 2629 bp, Heterodera glycines
agcaacagttgcgtgccgcgttcagctttggctttgcgcatcggttggttcggcggtacggcgcggcggccggcatttttgatgcaagcggacgggaacagctggtggtcggcacggagaccggcaaaatatgtctccaaggcttaggttaataatagataatatatattttttaaattttttgtggaacttctccaaaattaaaaatgaaaactattctttttatatttattttttaaaataaaaaataattttttattaaatttaattgaataaatgttcagcaaaaaaacttactccgattcaatggctaaaaacggaggaaaagcaaatctttggcattttcaggaatttgtgaaatttcttcgaaaaaattagagcaaatggaaaaaatttttttaatatagtttttaaaacaatttttcatcgtagcaaaatttgctttccaaaacttctccgattcaatgccaaaaagggaggaaaaagcaaaaacttggcattttcaaaaaaaacaaaaaattattttcctttgaaatttattttttaaagtttggaaactacgaaattgttgccaacaccaatttattatttagagtcagtgttcaacgtgaatgagccgatcacatgtttggccatttacccgcgaatgcaaacggacgccgaccattacgacgtggcactgatcgggactacggtataaaaaaaattgaacaaaaagagttatacggtaatatgtaaaataaaattttcaaattatatatgaaaagctgattttggtgccaaattttcatatatttttaactaaaataattttttttaaatttaatttgtgcaatttttgcaattttcgaaaaatcaaatagcataaattttaattatttagttaagtatattcaaataattgttatttaatttatgcaatttataacaacagtttttggacttatttattataattaatctcgaattaattgtgtaattaatttcatttcctgttttagggaagtttgttggcattggacgtgtacaataatcgcacgtactttaaattaaaaagtaatttaattagctaatttgacgcatttaaaaaaggcttttccaccgccacatgcccgagggcgtcaactgtttgcgcgttgggcacgcggacgcgcaccgcgactcatacgtgattgtgtgcggttgtggcacaacaatatggggtagcgcattaatttgtttaaaacatttcgccaaagtttttgttggcatttttaaataaatttggcatctttcagaattttaattatatttgtttataggcttccgattggatggcactgatgtgttctggaccgcattgggctacgaagtgaatgtgattgaactgtgcgacatggacggggacggccaaaatgaggcaaaaaataatggggaaaaattaatttaaaaataaataaaacaaattaaaaatggaatttttttgaattttatcaattaaaaataataataataaattgttttttttttgtataaaataaaggaaggaaaacgttttaaagatatttattaattcatattaaaaatttacgaacaaagatttgttgttttataattaaaattaattaaattaaaaatttggaattaattctttttgtaaaattgagtcaaaataatttgaaaatattaaaaatgaaatttgcaaaaaatacaaaataaatcaaaaatattataagaaaaataccagcagagataaatttgatttaatttaaattagcttataaaaaagggaataatttttatttttattttttgtataaataattatttgtcagttaattgttggcacaaatggaacggacatcaaagtgaggagcaataaataatggattgtcaaaaagaaattctaatccctttttattttaaaggtgctcaaaaatgcgtcattttttgccgaatttgatgagggcgacccgacattggcactctgtgccatggggcaaacattttgaatttatttttataaaaattcaatagaataaatttttttagatttatttatttacgtttttattaaaagaagaatcaaaatgaattttttgtttttttttttgatttctgattgaccctttccaagtttaaaccattaaaaaataaaaatataaaattgaaaaaaataaaaaattcacacaaatttaaaaaaaattgagtgagtttaattaaaaatttggccatgttagcttctttttttgtatcatgcataatgcttattttggatgttaaattataccgaatatacaattccaaaaatgttaaaatttaaaaaaaaattttgttaattaaacttttaaaaaataaaatattttaatacaaaaaaaaattaaagaaaaccattttttttggggggttttacaatttcccaaaattttcggacaactttttaatggcatggaaaaaatttaaagttttccatctcaggcccgcccgcttcgtgttcggcctcgtctccggcgtggtgggcgtgtacgcaaacggcgagcgcgtgtggcgcgtcaagaccaagtcgcccattgtcgcgctgctccaattcccgaacagcgcgcgcatcgcgtgcgtttggcagaacgccaagttttggagacaaaaaatt

SEQ ID NO: 21094 - DNA, 1198 bp, Heterodera glycines
  unsure (1)..(1198): unsure at all n locations
agtggtatttcgtatggtcggtattgcccggcgtcaatgcccaatatgcgtccggcctaaaaattttaattttccgattttggcccnaattccttttctgcctcgagaaaaaaattgcatttaatcccctcactcaccgctctgacgccgttgtaaaaattctgtgccccttggccaaccaaatcagtcaatgggccttggaaaagcatcgcattgtcccgtcccgcgttggaaaagccattggacggggggcggtcgaagccgacgggagccttaaaagcattgggaaagaatcgcaagaaccgccttttgccttgtcccaatacaaccgcccctcatagtcggcagaaccaacttggttggggacaaagcccgggttggagaaaaccgcccccggcgttggtttcctattcgggtcaatgccgtcgttcgctgctgcttctgttgggcccacggcatttctgtgagcattttgccgagtgccattcggagggggcggggcgaagggttggcttaagtaaattgtacagttttgccagtgtcccacttgacactcgctcccattgccccacccgtcttgtgccggggacggcgccattggcaaaggcaacggaagggaagggcccccggcaacgatggcaccctcggggaatttggaatttgtttcggcaaaaatctgagaggaaaatcattgagggactgggagaggtcggctccgccggccgttgctcgacctcgtccaacatcgcgtcctcatattcctcaatgtttgcggtgctcggcactttctgtgtctaaagaaatgttcaaaaaaatgtaaaaacctttggctaaactctcacattaataaaagaaaacaaaagcgaaatggacacaatcagctgatgacaaaaaatggcgtggaggaaaaacatttttttatattgaaaaggaaggcgaaatccgtgggaaaaaacaatgggacagacccaaacgattttaattaactaattaattgaccaatggaaaagaaatgtttgttgttttttctgctaagttacgtaatgcgtttggttttgttggacccgatcagctgctcaactgctgactgatcggacctgtcttccatcgtttttcccatccgatcggtgagcaaacgaatggtcaaaacgatggacgtcgaatgcttttgcgagaattcccggcactggacgatcga

SEQ ID NO: 21095 - DNA, 912 bp, Heterodera glycines
actgactttggatgcaattggcagtacatcagtgtagccacctgatagtccttaataaagcctttgtaacgcccttgcggcagtgggatttgcatgacaaaatcttgcttaaaacggctaaattaactaattttgatataggatttttaacaactttagcaaaatatccaatggcaaattcgtcggcgtaagtgagcaaatggaaaatgcccaactgagagaccataaaatccttcagatgattcatcaggtgcgtgccataacccttgacctaaaataacgcaatgcatgggcataataagcaaattttgtttcagtattgtgtatattatgatccaattttgtttgttttgtccatttgcctgttcatcggctgctactgcacaaaacacaatctcggcaaatccctgttcggcaaaaggacggtagcaaatggaggcaatggcacctttgtttttcttgtaaaccatcaaattgcgatgggagcggtcgaacaccaaccgagcaatgtattcacgcggcattttgggaagttggacactgactaaatacacaaaattcggattttatgattttcggatacaaatccaaaaattcccgttttgtttttagttgtgggcttttatagagtatttctccgctaacgtacaaagttgttgaatttcgaacagccagcgcacttttcgcttgttttggtcaggtgaaaagtcattccagcagacgtgcattgagatgactccccgctgctcctcctgctcggcaatgcttttcttagcctcagctgaattgttaaataaatttcactctgacctaacctcaaaaactcactaaatgtgaggctgcaagaagaggaagaactgctggccgatgccgacggcactgttaggggtaaattttcgctcccacccattt

SEQ ID NO: 21096 - DNA, 1011 bp, Heterodera glycines
ttaaatcaaaagcaaaataaaattatttaaagaattaaaagtaaataattatgttaattaagtttaataatattatatattatttaaaatattcgcgatataattacaattttatattaattatatacgtggtgagccgaagattaaatgattaagccaaaatctatgaatgcttcttatttattgtaaaggagtcatctagcctaattgagcaaatcaaacaaagcaaacaatctaagaaaattcaacttttcaacttcggctcacatctatctatatgattaatataaattttactatgtatcgaatattttaaatatatatatatataattaaatttattaacataattatttttgcatttaattttttaaatttgcttttaatttgatcattggcacttttcgcatttcgtctcagcacgcttttcaacaaccaaattcaaaaacattcttcgtaataccatcacgggaaaagaaaaaatgaatttgttggataattattgtcttttccctcggcttcattaatcgcataaattgaaatcacttttaaatatttctttcactacaacatttattcattcatttattccgtaaagtttggcattttgtctctttccaattcatttcattcgatgattcgtccgtttttcttccgttcgtttcgtttgtgcctttcttttatgcttttatgcctcgcctcggctaaacaatatttgccaaattggtcatcaccaattataattgactttcaattcgctaattgcccaaccttttccggcggcggtggtgccgccgcttcggccggtgccgctgccgcctgtccgtcgtccgcgggcaattgaagcggaatgaccggcaccggcggttttgccgcatcgccctccgccttcacctgctccacgtactttggtggttccaaattcttccggatgttctccaattcctcaaattctttgcggccccattccggtggcggtcgtccgctgccgtgcacaatttttggctccgg

SEQ ID NO: 21097 - DNA, 2044 bp, Heterodera glycines
gcttctccaagtcgtacttttcaccctccaatttgacaatgcgcgcgtgcaactgcttgatctttgccttgatgtcattgggcaacatgttcgacacgtccaccggtcggttcacaatggacatgtaattgcgctgaattggattctcactgttatcccatatatcccttgcttatccccccccccctcccaattggacgtcctcctcactgttatcccatatatcccatgctaatccccccctccccttgctcactttggcctcctcatgctgctctttgctcagtcctcgcggtttgctcgtctgtcccggcattccctgctgtgcgcccttctcgcttttctcgggaaccacaaagtttttgcctgctccttccgcgtccgccgccacaaatccgccaaatccgccggccatcatcaggtggcgcttccgcttctcctcgtcgcgcttcgctttctccgcttcgagtcgtgcctttcgttcctcctgaacgcgtgtcggcttattatatcacttcattctcatcaacttgctaatgcacacttaaaacttattttggcacgcaatgttaatgcctggcccatggatcagtctgactgtgccaacattcactcgccgatctctcattatttgctaatgagtcaatcagtgccttttcgccaatgcttcacctcatccttccgccgtcggtcctcgtcttggcgccgtcgttcggcgaattcggcctcctccttctcgcgctccgctcgcctctccgcttggcgttctttcaaaacgcgcagttcgtcctcaactgcagcgagttcctggcggcgtcgctcgtcattgtcgcgcattttggcttcctcctcctcctcgtggcgcttcttcaccgccagcatcgccgcttccgcctccgtcatcgattcttctgccggcttcggctgagggggcggcgcgcggcgaagttgcgccgtcggcgcgacggactccgtaacactggtgcgacgaaattctctgaaatgcccaagtatggctttcaattggtctcggtctttgactctcgcctgtccgcccttaatttctcgaaccgagtctcgagagtcacttcctctctttcccctccccctttttcccttcctccttccctcttcgtccctcccccttttcctcttcctcccacattactaacttttcccttccttccccacttactctttcggcgcatcgcctgcccctccgggtgaccccggctcttcttcctcctcctcttccttttcttccgccggcggtgcctccgcttcggcttccggcgccggctcctcttctttgggcggtgccggttcctgcacgctcacttcatccgcggcaatactttcctcctcaacctcttcgtcggaacttaagggcaaatggatgaggagagagaacactggaaaagagctagagtggaaaagacagagagacgaggaaagagtgcgaaagaaaaagaaaaaggcgaaaaaagagagtgtgagaagagagagagagagagagagagagaaaagaaagagagtgagaaaaagtaaaagctgaaatggaattaaaatcaaattattattttattttatattattgtttatttatcacctccttaatttcaaatggcattttattttttatttacacttttggactgccggggcttttcatgtcaaacggtggggaagggataagcgggaacagaaaaatgggtaccggataaattggatttgaaaaagccggccttccttctctatagctgctttcctaaattaaattctgacaaatttaaaccccaaatttcggcttttggtctaaccctcccgcctctctccccggaatgtccttttcagctgaccgatcagttcctcctcctcctttttcttcgccatcatttctcaccggggcacccatttgggcgtcgctttgatcattttgcgccgctgtgccgtcccattggtctctctgtgctgactgatcagccggtggttgacgcgtcgcagcgcgtgccggtgcagcacaaagagcggactgaccgcgtgc

SEQ ID NO: 21098 - DNA, 2899 bp, Heterodera glycines
aaataatggaatacccttaattttgaaaatttttttttaaaaccaattagcgttgaaatattttcaggttaagttagtcctgtaccggggagtatgcctataaaatttggtgtagttttattaattatagaaagtaataagttagataaaaaaatttgatttatgcccaaaaaaaatatgggcgctactgatcacttcttcaaataattatttgggattaaattttcactaaaaatttaagtctaaaatttaaatcttttcttttttgttttacccaaataactgccgaacaaatcgtcccgtccgagccgttccccgagcattgctttctccgctgatcggagcagccgtgccactttctgacggcattcaatcagtttgcgtcgtgccaaccgcaaatgttttgtgtcaatttctttggcatccgctgtcactgaaaaactggtggtgctgctgtcaatgcctgaactgctcgccaatgacgggcctcctccatcgacatgggctgctgcagttgagctgttgtgctcttcagctgttccgctctcagctgaatttgatgatgccaaatgcagcattgaagaacgatgtgcggctgctggaaatgtttaccgttttttgattttgaaatttatttcaaaaatgaaagcgtaaattcaaattttatttaaaatgcaattagcataaaaacttaatttcttagataaattattccatttattatatgcaaatgttctcgaattgttctatcattataagggtggggaaattataagcacataaaatcgcaatatgcgcataaaaagtgaaatatacacagaaaatttttacaaattaaattaagggcaaaatttctcaattcttcaaaatcatgaaaatttcagcaaagaaatttcgaatacagctagtatggtatgaaaaatcttttagaagaaaaaacaaaaaaaaattaaattaaattatatttattatttttgaagaaaatttaataaaaatcgaaaattttccatttatataattatttttatcataaattccaattcacccccccccctatcaataattatttgggacagcatttaaaattttttacaaaattccaaaattcgtctaaaaaatttcccatttttcttacaaagataaatcctgaattcctattaccatttatgtgttcctgttggtgatggtgttgctgattatgattgctttgtttggcattgtccaacagttccatttgtgccatgtcccgctcgaccaccgtccgttcaaattgcaattgcatttcacgcccatgcacttcccgttggcgcaactcctgctccaactcctccagcgtgttgttcaacgagcgcactgtttggttgagttcggcacgctctctgtcccatgccgcttcacgttcagcaactgctcgctgttgttgtgccaactccgttttcagcttaccatggtcaactatctggaaatttgtgccggaaaaatttgataattttaaaatattttgcctttttagagtttttaaaaatttaaattaaaaataaaatattataataaatatcgacattttgaaaaaagcctggacctggatttcctgtaaaaaaaatccaggaaaacccaggttgcccaaaaatggcctggacccgtatccaggaaaaaaacaacacctggaccagattcaggtcgttttctatatgtaatataaataatttcaaaattataagattaatttttaactattattctataaaaaacaaaaagaaagaaaataatttttaacgaatattctttaatttatccttgactctttctgtttaaattttggcatttatatatatatatatatatatattttttttgtcattttcaattaaaaagaaataataaaaaatctaaaagtgaaaaaaaaaataaattttcaataataattcacaaaaccaaattttccaattttgccactgccattgcttcgttgttatttgttgtggttgctgttatctgctgccgatttagtcgtttagcatattccaactccgtttcatatgtacgcaacttaaaaaagcaattaaattttccgatgccaaaaatcaaataaatttttaaagataaataaaaataaatatcctagcaaatgtttagaattcgcaaataataatttaaattatttttttaaatcaattaaattataaaaacgaaaaaaatgccatatcttctcttcatacggctgatttgttcacgtgccgcattctcctcatctgcgtgccgttcccgctcacgctcgactgtctcacggccgcgtcgaagtgccatccgaagtcgttcaatttcggcatcttttgtggacaattgttgtacaagtgtgcacatcatcaaatcagacacctgtttagaacattaggagcagagattaaatgattccaagagactgttctcggcaccaagcaaatctaagttctccaatatcaattagtggcactaattgacctcatcgggccatgagtttttttaaggttgaagtatcgttctcgagaatttaattctcgaccagcaattatatgctttaggaaatccaatatcgtaaaatttgtgccgaataagtaaaaatttctggcctagcattagcacctgctgttgttgttgtggttgttgttgactgctacaacctgctgttgatggtcctcctccagctgaaaattgctgtggcggtgccatcaaaagagactgtcgacaattttgtggcataggccgagaacggcattgtgccgatgcgggtgattgggtcgaatcaaccggcataactaaattttaaataaaatttgccaaatgccaaaatccaccattgaaaaagcatacaatgccagccagacgaattttgctcaaataattcgttgccgacggcaca

SEQ ID NO: 21099 - DNA, 988 bp, Heterodera glycines
catacttttttagcttcgcccacactcatacttttttcgtttcgccacactcatacttttttagcttcgcccacactcatacttttttagcttcgccacactcatacttttttagcttcgcccacactcatacttttttagcttcgccacactcatacttttttagcttcgcccacactcatacttttttagcttcgcccacactcatacttttttagcttcgccacactcatacttttttagcttcgcccacactcatacttttttagcttcgcccacactcatacttttttagcttcgcccacactcatacttttttagcttcgcccacactcatattttttagcttcgccacactcatacttttttagcttcgcccacactcatacttttttagcttcgcccacactcatacttttttagcttcgcccacactcatattttttagcttcgccacactcatacttttttagcttcgccacactcatacttttttagcttcgcccacactcatacttttttagcttcacctacactcatatttttttagcttcgccacactcatacttttttagcttcgcccacactcatacttttttagcttcgcccacactcatattttttagcttcgccacactcatacttttttagcttcgcccacactcatacttttttagcttcgccacactcataatttttccgggtcttttgggttgaaaggcagggataaaaccgaattttaattatcaaaatacaacatccctcaacaatcaaaaaaaggcgtccccgcctttcagcctttttgaaccgaaaggggtgtccaacaggtagttcaacggcgggtgggtcgaaactcgcggtggcgcctattgtttggatcgctgtggtcaatttcataaggccgatagcgagtgtttgaacgggcagcggcacgaatttcccggagctcgaaacaactcgacgatgatcgggccgatctctcgccgat

SEQ ID NO: 21100 - DNA, 766 bp, Heterodera glycines
ttggtgtaaaaaaatttgcccaattcatcaccatgatcccaaccaaagagtgattacggatcataaagcacttatttggatgtttcggagtaaaaacgaaaccggaaattcccgagtcgaccgatggcttctcgaattaagctcccgcttcattctaaaagttgaattccaaccggggaagaaaaatgttatcgccgatattatttctcgttcaaagcagctgaccaaattttggagccaaaaaacaatcaagaacttggcggacgtaaatttttcagtaccttagactttatgtcaggttactggcagatcaaaatggaagaaaattccatcgaaaaaactgccttcacaacagaatatggcctttatgaattcatggttatgccttttggcttaactaacgcagtggctaccttccaaaggttcatgtctcgtctttttgacggaatgattaaccaatttttgttcgtgtatatcgatgacattctaatcgcctcagaatcattcgaagagtatttgatacacatcgaattagtcttttctcggattaaaactgccggtttaaaattaaaattggaaaaatgccatttttgtgcgaccgaactaccatttttgggtcacatccttacgagagaaggaataaaaatggacgcagataaactgaaaccagtgatcgaattgccaacgcccacaacaaaaaaagagcttcattctttgctaggatttaagacatactataggaaatttatacattcctttggtacaa

SEQ ID NO: 21101 - DNA, 2632 bp, Heterodera glycines
tttggtgttggttgtgctgatcactactgttcgtcctcgtcgtactgctgttgctgatcgaaatgtggtgctgtctctgctgctgcttttttccgccactcgccgccgccggactttccttggccaacagtgcggcgcttttctttttctccgcatccaaaaaagaacggctgaaaacgaattacggattttaaagaagtttgtaattacgggttacggtaaaacagtttttactggcaagaaacattcgtttttttataatgtgaatttttgtttccagaagcttctccctcctaattaccaaaaaatgcaataaaaattggccgttttttcataatattttttgcattccaaacacacaatttcatgtagagatatgggtcagacaggtccaacaaatcagcatcaacaccgtcctggtccggaccatggccatcgttttcatgaacaactgcagttgcagtggcatggcggtccgcaacattttggttcttgatggcatcctctgttgtattgttggacatgtgttcaggatcttttggatgttgcacaacatcatcatcctcatcatcattatcttcgtcatcatcgtcctcttcctcctcctcctcatcatcatcatcggcatcttcatcatcattttcatcgtatttcagcgccgtaacgatgggtgccgttgttcttctctctgttggcactttctccgccactcgtccagtgccaattttggcggcggcggtttccttggcatttttgtccccgacagagaggcgatcatctcctttttgtggttggagttgtttttgtccatctttgtcgtcatgttgttgtcctccatcaaccaattgagtctttgccaacacaattttctgttgttgctgctgttgggccttccgtgccatcgtcgcccgtgccgcctttcgccgcccaatcgtcgccattggcggcgctttgttccctccacgcaccaaaggccaaatgtaggaaaacaggaacaaaatgaaattcagcgttcgccagaataacctgaaagcaaatcaaacaaataaaaaatgtgagaaaactgagtgaattaaaaaaaatgccgagactctcgagcgtcatttgcgattaaaattttagtaattggacgcacttgttgaatggtcccgcatctttggccgcctgcaaaaattgggtccgccgggagggtgccaacaattcagctgcatcgtcgttgtcgccgtcgtcttccaccagtgcttttgccgtcgacagcacaccgttcttttccgatgctaatgacgatgaagcggacactttgtcatcctgtggctggcaatccacagaaattggaggagcaaattgttggcgataagcacagctgatcacacgatcgccctccaaataagcgcaagagaccacacaaatgaagcagaaccttagacagaagaagagagtaaagaggggtgcgagaggaaagagaaatataataaatgagatgccgacaagcaccgccagggaattttaaattttttttttttaattttgtgtcaccataaatgtaattttttccaaaaatagcaaaagtcattaaatcctcaaaaaacagaacgctatttacacctaaaaagccataaaatgatgaaaaatcatcacttaaggggtgagtgtatgaagttgtgaaacgtacgttaaagcaagcacacacgtgtagtacatcatgctctcgaagggcggacggggcagtgcggcgtgacaaacggacaatagttggggcggaatagtggccactaggttgaatgtccacggcgtgccgttcatgtgcatgtacagctgcagcgtggcctcgttgctggtcagcaggaagtcgggcgtgtagctgaacaagacaaacagaattggagaaaaaccccgacgggattcaagacagtcaaatgggttttggtgtcttacaaatagcatttttggcattttaaaaagttgaaaatttcgactcagtcacaagaccaagactctcggaccgaaaccacagaaaatccattaatgttaacgcacgcaatgtccagcagagttgtctcattggggtcgagtcgaaaccggtcacagttcaacacgcgaaagccccggttttcgcacggcgtgttgctgacggaaatgttggacacactgaagctgacctgtatgccaatcaaagaaaattgactccatttatcccagctaatcgctcacttcgccgctgttccgcaccacaaaggaacgccggacggtcaacgtggtgggcagtttgtgcagctgccgtcgcgggttggcacagtcggccaaatgctggggctgaatttcgaacagcagaggcagggaacgtgccgttttgttgtcgatgtccatgtgcctggttttacattgaagattgaacagggaaagcaattagggattctttctacgtcaatgactatatcttatttttgggtgccgaactattttcaaaaaccctgttggaattagagacggtcggactccagttctaatcccggatttctttatagcggagtccatttttgccaaaaattttagcagaaataccaaggtattccacatcatgtagacgaacaaagtcgctttattgacgaactattgactgattatacacatt

SEQ ID NO: 21102 - DNA, 766 bp, Heterodera glycines
  unsure (1)..(766): unsure at all n locations
tcataaaatactaaagagaaaatggaatgatttttacaacaatttaaattggtgaaaaaaagatcgaaaacaccaaaacattggcgacggagtgaaagcgaatggcaattggcaaaaagtgccgagtctggccgatcagtagtgatcaaagcgaagtgagcgagcattttcagttcagacaatgcattggggctgagaagcgagcagcgattcgcggtgactcatttcctccaattcgagggcctaaaaaattgggcaaaaaatggggaaattttacaaaaaataaataaataaataattgccaacttgctgtggtggcaaataaattggtagatttttagaaaaagcttacctattttgacagtttttagagcctaaaagcattagccctaaacaccatgtactttaaatagattagataatttaaatttcatgaaatgtgcattatttaaaattttaaaattctaataatttttaaaatattcatcaaagttttgattgatgaataaactaaaatactagattttttttttgtgttttcatgaagttttanagaaaatgtaaattgctttaaatatttttcagttcttaaaatttttctcgaagtgaggggggacagattggcaattccactccctcccctctgcttggacatgtgttgccaagaaaaagtgccaaaatcggactttggccgcctccattttcagctgatgactctgctcagtgtgccgtttgatcagctgttcctcgtggttgccacatctga

SEQ ID NO: 21103 - DNA, 1826 bp, Heterodera glycines
atcagtttaattgggccatttaattagtatacttattaataattttttgtttattctgtggccaatcgcctcctctcctcagtgaacagcttcacattcttctcattcagctccattatcggtctgtctcgttctgctttcgtctttaaacaggcaataacaaattacaatttttcccccgtcgacactgaccattaattggattagagaagaattttgaaaaatcggggcaaaaattaacattttaattgcaaaacatgtgccaaaatcgtcggacttaggccgcctccatttacaacttacactgtgttgcttcatgggaagcggtcaaactcccaaaaaatagggtgtccctattctaatgcaacacagtgtatagctctgttcacccgaaatccaaaaaagtaaaaattgcaagaaaaattggtagttttaaaaatttttagttattctcttaacaaattgcatttaaaatttccaaaaaattatccggcagcgcttaacggcatcgccagacccccattttactaaatttttgaaaaaggaacccaaaatggcaaaaaaaaaagtcattttttaatgagacgacgtaaacatgagataatcatcatagaacaatcgcacaaaacataaacaatcaacattccccgaaaatccaaaatttcgaaaaatttattgccaaaaagcaagttttccaacatttttgagcataaccttttttttcgattcccattgaaaatcgatgcaaattccgcaaaaaccgccgccaaagaaagaagtcggattcgaagccattttaatagggtaaattggattagtaaataattgtttgctgtatgctatcatttaatttcacaaatacaccgaccaaaatgccatcgctttttctttaccgttttagtccatttttcgctgtttctccaattaatttgaccattggcacgaataacgatcgaattttggagtgtatttcgcgccacattttgccaatactcggaaaaaacatttgtgccatgcaattgtccgacagaattttctgccgtttgcgacaattcgtcccatcatttctcaacgattgttcatcatttcgcgtggtgtgctttgtctatttcggccaattccgaactccggacccgactcgaacaaaaagtcgaaactccaaattttcgatttagcatttttggttgaaaaacagcgtcaattatcatcacttattgaaggattgctaattcgaaaatttggactttcgcctttttgttcgaattcgggtccgggattcgtaattcatcacaatgttcctataaaattttacttctatactacaattcttaattctgcagaagtttattttaaacatttgtatcactgacgcattcaggtgacgtaaaaatgagatattagtaatagaataattagaaattgcattttaggttttgaaataaatttatgcaaatatttgaaaaagactcttccattgaattaaaaaaatacaatatagacgattgttcatcacttcgcgtggtgttaattttgcatattttttaataatttttttttgcatattttttaataattttttttgcatattttttaataatttttgcatatcttttctgcgcatatgtttttatgaaaattgtaaaaatttctaggaataatttcataacaaattcggactcctaaaatttctctaaatctccgtgcttttctgtgccattttgggatttattttacggcaaatccattgatgaaaatattggtgggctaatgaccgcccaattttcaggcatcagagaatgggaacacttatcatggaggggaaaaag

SEQ ID NO: 21104 - DNA, 2399 bp, Heterodera glycines
  unsure (1)..(2399): unsure at all n locations
aataantcgagattatgtacttttttaaatttttaaacaatttaatcaccaaaatcaacgaagtttggagaaaggaaaattttgaatgtaaatttttctcaaatcgtctggcgaaaatcccataaatttcatgttttaacccttcgctaagtttttcgcttcccacctcccttttttgtcccttttctcacattttttgccaaattggcaaagagtcgccacggctcgcgcctcttcctctccacctccggcaaatgttggccctgctccaatttgcgtcctgcacctcctcccattttcttccgctgctcctccgcttttgtcgacgctttcgttttgtttcgatttgctccgcccgccaattcaaaaatttttcgcttctcttcggtgcgttccttaaaaatgggacaattaatcaggcaattagttaattaattactaataaaaaataattagtttaaaaaaatgttttaattagtgagaaaaatgattggaattaaaaagaaatttagaaaataataatgaaaaaagaaatattatcacgagtggtttagaaataccaaaaatttaaataataaaaaaccaataaatttaataaatttaataattttaaatgataaattagcattattttatttgcattatattttggcattaaattaatgttttttgttttgttttcatttactcacatggatcagctgtttttgaaggtccgtgttcgccttgcgaagtccccgaaccaatgagatcagaaagacaatgaacagaatgaggagctgaaaaacacagatgatttgaataaaataataaataaaattggcagcacgagaatggttgggataattacgcccggcgatgcgccgtatctgagccatctgagcgcccttttcggcacatttccaatgatcagttccgtgagcacgtcgtagaaacggtgccgttctcttcaacagaacttatcattgtagatttgaaaatttaattaaataaaatacactataaattctcacgcgaatggtccacaaagcaccgaaggttgtttggatgtaagcacataaccaacggggacagtgcataagagcagagcggagaggagaatggccaaaaagaagttggaggaccttaattgggcgaatttggccaactcgatttatttcaatttttggaaatgaatttaaaattggggtagtgtaattttgaaatgaaacattttttgagaaatcagatcggattcatttaatcagtggaaaaaattttattaatacaacaaattagatgcgattaccaattttaataattcaataaataattttttaaaatttaacagttctgtggataaaatattttgcccgaaattgttgacataaaaaagcagttagttgaatatcttaataaaactcttcatgagtccataaattttatatagtattattatttttaaataatgcaaaatacctgagaaaatgcagttgaatttggaggaatattaacatttaaatgagaaccaaatatttcttattttgctttttttctgtgaattttcaatatttaatatttggtcagtgaaattaaaaatattccaacagaatttgccgttattttctgtcgattgactgaaatcacagcaaatgcccccgatttaaaacatttgatcatccgccaattgacttggggattaaatgcggattaactcgtcccaatccgtggaatttaatgagaattttcactgaaaatggcctagcaaagcatcggtttaatgtccagcagagaaagtacagctgttcacgggcaaaacgatgcctcaaaattgaaaattcaatgcaaaaaatttttaaaataaaagaaatggaaaaacaaaagttcaaaaaaaaagaaaaaaatatatatattccaatgataaaaagcaaaaggatttggaactaaatttacaaagatctgtttttattcttcatataaatttataaaaataattttgaatgatttaaaaacaaaacttcaaatgaataatattattaattaattttttgcttttcacctcgacgcccgaaaaatttcccgggccggcacattgcaagtgacacaagcccagccacggatatacatgatgatgatctggcaagggaatcaacacaaatgaacagagacaaaccggacaataaaagggaaagatcaccagcttaacgttgtttatcgcggggagaagcggcgcgaagaaaaggccgagccaaaccatgcctaaggcaacgggggaaggataattaagagggtaattaaaacaaaacggataaatttgatgaaaaatgagcaaaggttggaacagttaataaaaaatattaattaatattccacatttatgtaaaattggattggtgtaataagttgacactaaaagagca

SEQ ID NO: 21105 - DNA, 3450 bp, Heterodera glycines
atttcgtggaagaattctcagcctgttgaacagtcattgttgccttaattcgagtggatttaattgccactaatattaaatgatcgcctcactcacccgctcgaaaacagccaaagacgacttttgagcgtcaatttcagcgtcagggacaatggccaaagaaaggacgacaattgggctttggaaatgaccgttgtccaactgaaaacgcaaagttagcccataaaatgtcattctatttcaccaattttgagcatcggatggtaaaatggcagtcgccctgcactttgctttgccgcgcgtcgatgtccaaaaagacggagccgagaaaggcattgtccgcaatttggtggacattctgtcacagtgacaagccagtcaatcaacagagtgaggatcccaccagcttgaccacatttccaggccaacattcgccctcggccggctcagaacgctcaaaacgcaatttgtacagcgcagcgacgagcgattcgaatccgtcgaggagagaggacaaatggaaggagcaaacggagggggcggaggaggggcagggggaggagaggagggaatggcgtttgagctgaacgaagcggaaattacggagataaacggaaaatgaaaacaaataaattaaatagtaattagagtgttaaatggacaaaaaggcaccgcagttgcgaattcgacgtcgcattcgttcaactggggaccaattgcgtcgaaattgagtgagcacttttgcacaatttgttgagcttcggcgagttcggcggcacattttggcacaaatttctgaaaataaagaaaaatatatattaaaaaatgaagctaatttcacttcgatgacagtgccaagaaatgagtgaacgttttcgtaagtgcccagcaaagagttgctttgggcccgatgggcaaacgactggaaattggtgagcagtgccaaattgtgtcgggcggagaccaaacggcgtaaaaaggtttccttaaagaaatttaaatggttttaaatatccaaaaactcaattaaataaaacaatgttttccactgcctttcttcacctgctgttcgttgtgttcaaaatattttctgtagctgaaccatcggagccgtcggtcgacctgttgggtccatgggccgttcaaatgtgaagtgcgcactccgaattggttctgctcgtcgctgctgagtttcacgggccgctcacaaccgtccacaaaatttgtaccagcctcgaagatttcatcggaaagtttgacgaattgttttcgctaaaaggaataaaatgaaacgagtcactagccataaaatgtgcaaaataaaaagaaaagcaaagtttttgcctcgacagaagccaattggatgccggactgctcgaactcggccagcaaaagtcggcacgtccgttcgctgaccgcgtccaattgctcgcgctccaacgacagtctcagcgcttcgtaaagttccgaaaattcacaaaattcatttattgtcgcttttttcaatttgtcaccggtgttgtgttgagcgtttcaacaagagaagtgaagtagcgcatcgcttcctccgccgcttttccccactttgggtcggtgtgcatacagcggacgcaatccgtctaatatgggaacaattctccgattatgatgcgtctcccagaaactaagcgccgaatttagctccgtggccctctgtttgaggcatttaattggacgagggccgaaattcttcctccccccccgccatcagatgaaaaaatcaccaaatcagcggccgaacaaatttcgttggacagatcgtccaccagagacactgtcgttttctgtaaataaaatcagtagtgtacaaacaaatgcaaaatttgccatttttttccctctgtcggctgccctttcggccgctctttgcacaatttccttcacaaattcgtttgactttgcgtccaccgctcgcgtgagcagttcaaagccgtgcggagaacggagaagaaaattgccgaaaaggcccttaaaggacggaagattgggaataaaatccatgggcattttcaaatttacaaattcgacaatttaaataaaacaccatgttggcagatgcaagcgacgcatttgttgcgggtttgccaccatcggacgaaaggtggcggcgaaagagtggcaaaaagtggcaacgggacgaattggaaggaaaaagtcgcattcgaaagacaaaatgcaattaataatatgcgaatggaaaaagtaaaaataagaaaccaaaatgtgattacaaaacaaatgaatgccattgcattttgagttggaaatgcttttaaaattcaatttatcgtaaaatttcagacagaaatcgtaaaatacacacattaaagcaacaaaaacagaagcaatagacaaaggaaataggtaatttgctgtgctttaatttagaagcgtccaaataagcccgggaacaaattggagcaatggcgatgctgaataaacgaggaacgctcctaaaaagaagagagtgaaatttgaatgcaaagcaattagaaagtgatggggacatgctgaagccgatcacgggcgagcacattcagccgatcaaccaaccgcacggtttggccctggacactggtaagtgcggtcagcagaaccaacagtttttggtccgtcgattgctaaagtgtccaaaactattttgaaaaagaacaataaacaaagtgtaagaaccaaaaaagcgttttccggcgcattgttcgcatccaaaacggccaatttctggcacaatttgttaatttcttgcaagattgaattgtcacgctcaatctgatcattctgcacagactaaagaaaaggaaattctcattgtcggaatcggctctaatctccgtgaaaaatttgtaattaaaaaaaggcatatttagccaatcactttgattacccaatgtcattgaaatttccacccattctttgccaagttctgatttcgcccactttgatatattggctggcgatgaacagcccctggtgcagactggcgatgctgccaatttgggcgcccaattgtttggaggcggtcgattccgccggtgcgccctctcgcgaatagcgtgccaaatggtccagtccgatttgttcggcgacttcgttcacaattttgacgggcacttgctgcaaaagcagttgttgctcgtcggttgggtccacgcgcgagtcgaaaacggtgagggaaagctgaaaaacaaagagcggttggaacgttttttaaaatatttaagcggtttctccccgccgaattgtgcgataagtaagaccttatcgcaggcgaccggttcactcgcattgaatttcaacaaaattggcgcttcgctgtgaaccatcgccttaataagtcaaacgtataacatgatgacgttgtttaattgtcaaaaatgaaaatattagagctcgacatcttgaaaaaagcat

SEQ ID NO: 21106 - DNA, 1372 bp, Heterodera glycines
cgatgccgacagaaaaccccattgccaatcccgcaaaaaccgttgccgagcaaagtgatcggattcagcaaatgcattttgatcatgtaaaaactgatttgattggactctattacagttcagacgactatgaaagaacttgatgaatttaatgcaactaatttttttttcaagaatcatccaacgtaaacattcttggtaccattcgagagctacaagagtcctctattagtatgcaaaatttcaaaaaaaaaaattgaccataactttttgaaaacacaatcaaacttttgccgaatcatttaggacttattgggctatcaaatgataccaagaatgtttaattaagatgtttctaaaaaaagttatggtccattaaaattgtcatctaattatttgctggtcgttggaactgtaatagagccttagattggaattgatttgtgatcaatgatcatcacacattttctacgcttttcagttacatcgatcaaaaggtcgtcgcatttctccagcgttttcaccgttttttcggcgcttatgcaatggatttggacattgtcactggaaatatgcgcattttggaattaattttggacaacattttgccaatgttccgcgattcaatgcgttatctgtttttgaatgccatcgcttttcatcgtctgtgccaattggactcatcaatgctcagcgattgtccggcacttcgctatgtctctttcaatgaggacttttttctgccagcttttccaccggatgacagcgccatggcatcggatggccaagtggtggcaaaatggctgttcacgccccatccgaacggtgtgccaaagtggctcaaatgctctgtaaattcatcggttttccaatggacgttaacgattgaacaattcaaaacggtgattatgcccccccccccctaattaattggtttttctgtggctggtcccagctcatttttggaaaaaacaattaaaaaaaaggtcgtgctaaacattttttaggcttttcggggtagctgatcacgaatctaacatccattccaccaaatttataaccccggacttcgaattcgaacaaaaagtcgaaaccccaaaattttcaaaattatgatttttgttctctgactgaaaggctaaatttagtcacaaacgatcaaaaaagagtctcattcattctatgcagattcgaacataaaaacattgaaaatttttaattttgtccgaggttctaaatccgtcgaaatgggtgtcagttttcgtggtcagcgacccaaaaccccccaaaaaaggtgttttacatgtttttttgaagaatggcccaacttaattattacatttttctctgttttttatccctcgactctaga

SEQ ID NO: 21107 - DNA, 1204 bp, Heterodera glycines
  unsure (1)..(1204): unsure at all n locations
ttggctcacgcgttgtccaattggatgggatgagatcaaatgggacaatgtgtggaacgaattgagtgctgctcgaccgaaacggattagcattgngatcagggacggcagatatgacgccgggtgaacaaaacaatttaattaaaatgatcaatgcttttttaaagtgcaataaagtcaaatcgtttttgttcagtcttctcgacgccgcttcgcccgggccgagtgatcactgatcagcaacagaagcacaatgaatgaattaattattaattgatggatggatgtgatggcgtgatcgaaatgatgttggcactttgccatttcaatattatgtataatttgtttgtttgtatgtacctatttgacctttgcttgctttgccgcaaaattcgtctatttccattgtatttgatgtgcatgtgtaaaatgcattgtgataattaattaggacttccttttttggcaatcctaaagaattggggtccctaattgtatttatttatttttgattttcgactcaaatcagttttaaggggtttcgagggtgctgattaagaattcttaactcggttttgcccaattctgaacctcggacccaaattcgaacaaaaagtcgaagattcaattttttcgaattccacatttttgttcaaactttgtttacacacacggaaacgaatttaaagtcatcaaatgcttcaataaaagatcgtttaaacctattttagagtaaaaatcgaaattcgaaaaaaattgaattttcgactttttgttcgagttcttgtccgggattcggaattggccgaaatggatgccgtattcgtgatcagcgaccccgaaaagccatgttttcatgattttttaaaacaaaaaaaattttcgataaaggggggggccaccttatttttatgtcttttatatgatttttgctcatcggtactcaaatgtacgctaatattttcgtataaaaatgccattgtttcttcttcccctcctcattccattcattctctcattctttctccctatattttccccggtcattttgttgctgcaaatgccttcagaaattcggtacgtttattatttcttctttttttctgacgttttcacatttattttgctcaacttttaaatttttcaaaattcacttaattttgaggcttacaaatagcttcattggatttaaactaaaatttca

SEQ ID NO: 21108 - DNA, 1886 bp, Heterodera glycines
cctagtgcttagtgatggactagcgagtggtgtccgtaggaataaaagccaaggcgtggctgcgtcctgtccaactattccctagtgcttagtgatggactagcgagtggtgtccgtaagaataaaagccaaggcgtggctgcgtcctgtccaactattccctagtgcttagtgatggactagcgagtggtgtccgtaagaataaaagccaaggcgtggctgcgtcctgtccaactattccctagtgcttagtgatggactagcgagtgatgtccgtaggaataaaagccaaggcgtggctgcgtcctgtccaactattccctagtgcttagtgatggactagcgagtggtgtccgtaagaataaaagccaaggcgtggctgcgtcctgtccaactattccctagtgcttagtgatggactagcgagtggtgtccgtaagaataaaagccaaggcgtggctgcgtcctgtccaactattccctagtgcttagtgatggactagcgagtggtgtccgtaagaataaaagccaaggcgtggctgcgtcccgtccaacaattccctagtgctaaataattcacttttatatttcgtagctgtacacactgagttaattttgggctcccagttcaaaaagtaaatgtgtgtgtggcaaagtggtttttgtaagatagtaaaggaacaaagggcggaggttcgagtccgttgtgcaacacgactatttttatttatttttgtccaaatattaaaaaatgacgatttttgggaattgtttttgaagctttttcccaaccaaattggacaatcttggtattattcgaaagctcttgggaaggagaagctttttctaagccaatgctaagcaatttgatagttaggaaaaagatatgagtcttcgaaaaattgttttccttataactcatgaaataatgtataagccaaaaaatggctgtattactgaatgtattatatttttctctatctttatgcaaaatttgaagcgcatttaacataggacaaaaaaactaaacatagaaatgtaaattccgtttttctctattaacagagataaagaaaaagtacgccaaaataagagatgtttttttctctgcactctctatttattgacacatgtctctttttttgactcgctgtgtgtacagaatgaccattctttgatattccaatggtttgtgaccaaatttagtatgttttaatcaatttaggaactaaagtgagaattttggagttttagactttttgttcgaattcgggtccgggattcgaaatttgtccaatgaaggtcatattcgtgatcagcgaccctgaaaaccccccataaacatgtttccaagacttttcagaacaaaaaaactcttcgtcacaagggggggggggggtaccatctatagtattacccgcttttcttcttcttaagaattgattagaaagtatgtgattacgccataaaaaaagttttccttttctttgtagaggctttatttccgtttatcaaaacgaaatgcgccacacgcaaagcggcgggccaacgcaaccgccgaacggcacaatgactccgccccacccgcaccatcgacgccagcagcagcaaatgccatcggcacagtctgtcggcagtgccgcccaatttggacgacaaccattcggagccggcggtgggccgataatggcgaacaatgcaatcgcaaatcgaaaaaagcgcagatttgccgacaaaatggtggcaccggaggtaaaaatgggctcggatgcctaataatgttaccatttgtaattgccactgcttattgctcatgttttttcacagattcgttctttgatgcccgaattggatgcatacgtcggccttttgtcctacgagcagaa

SEQ ID NO: 21109 - DNA, 1485 bp, Heterodera glycines
tttcaatctctgagactcaattcttaggctttccaatcgctgggactcaacccaccagcattcaaatgtctgggactcaaatctccggcattccagacactgggactctaggcaacaactttcaatggcattccaatctctgggactcaactcaccagcatttcaatctctgggactcaaatctctggcattccaaacactgggacttaacccaccaactttcaatggcattccaatctctgggactcaacccaccagcatttcaatctctgggactcaacacaccagcatttcaatctctgggactcaaatctccggcattccagacactgggactcaacccaccaactttcaatggcattccaatctctgggactcaacccaccagcatttcaatctctgagactcaattcttaggctttccaatcgctgggactcaacccaccagcatttcaatgtctgggactcaaatctccggcattccagacactgggactcaacccaccaactttaaatggcattgcaatctctgggactcaacccaccagcatttcaatctctgagacaacccaccagcatttcaatctctgggactcaacacaccagcatttcaatctctgggactcaaataaccggcattccagacactgggactcaacccaccagcatttcaatgtcattccaatctctgggactcaatccaccagcatttcaagctctgagactcaattctcaggcttttcaatcgctgggactcaacccaccaacatttcaatgtcattccaatctctgggactcaacccaccagcatttcaatgtcattccaatctctgggactcaatccaccagcatttcaatctctgggactcaacacaccagcatttcaatgtctgggactcaaatctccggcattccagacactgggactcaacccaccaactttcaatggcattgcaatctctgggactcaacccaccagcatttcaatctctgagacaacccaccagcatttcaatctctgggactcaacacaccagcatttcaatgtcattcaaatctctgggactcaacccaccagcatttcaagctctgagactcaattctcaggctttccaatcgctgggactcaacccaccaacatttcaatttctgggactcaaatctccggcattccaaacaatgggactcaacccaccagcatttcaatgtcattcaaatctctgggactcaacccaccagcatttcaagctctgagactcaattctcaggctttccaatcgctgggactcaacccaccaacatttcaatttctgggactcaaatctccggcattccaaacaatgggactcaacccaccaactttcattggcattccaatctctgggactcaacccaccagcatttcaatctctgagactcgacccaccagcatttcaatctcggtgactcaaatctcccgcattccagacactgggactcaaccca

SEQ ID NO: 21110 - DNA, 4131 bp, Heterodera glycines
  unsure (1)..(4131): unsure at all n locations
agaattttgagaaaaagacattgttattttcttatataaacatttgtattatataaaaaaagatttttttatcatttaagcaaaaagaaataagacaaaaacagataaaatgcatttattaataaagaaaaggcaaatctgttaaggaccgacgcgtcttggcatgaaattaaataaaataattaattagtaaataaataaatattcgatttgaattaaaataaattttttattaaaaaaaaaattaattcaccatttgtagaaaccaaaacaccttttaattaaaaataatcttaaaatgaaataacaatttaaggaattatcaattgctcaacctaaaaaatataaaaaattaattcacattcaataacacaaaagtttcggaaaaataaaatgaatgccaatttaaattttaacgaactttcaattattagcaaacaattttaaataaaatcaaaagggaattcactaaagaattttgtgctcttttctgtgggcttgttaattttcactagaaaaatttcccaacactaagaattttttcaaaattttcgccgaattttagtgtattttagcgtgtatcgatcactaactatgaaggagtgatctgatcaagttggtgtaaaagacttttttattcagcatcaaaagataagcatgcatgaattatttcagatttttataagcattttgaaattattttttaaatttggttcacttggaaagataattaaaaatcgtattatttttgtttactttttattaaaaagaatacaatttaaaacaaacaataaacaaaattattgaacagcaaaaataataaaaatatttaggaattcaaataaattgaaaaaaacaataaaaataaaatttaaattgtttaaaaatttatataataatatatttaatctcggcgtgagcacattagcttgataaatgccgataataattgtaaaacaaatgatacctactatcaaataacattaagatactttaaatactgcaatagtatgcaaaaattttaatttcgtattttaataattaaacatgcaaataaattttttaataaatcaataattaaactttaatttaaacaaatttaattaattttaattttaattatttgaagtaagaccgtcataaggggtctatcagaatatcgtgctaataaaattttttgttattcaaaaattttttacttccttttttttatttttttaattaaatttttaatttgatttttaatttggattattttaacaattgttttttgatattttaattgatggctttctaatccatttaattgtcgggggtcggggaccccgatcggggaatgaccaaattttattttaacccaaaaaacaaatttttctttttaaatgctcgtaaatgttctcgaaactgcaaaagcagctatgaattgacaaaaaaatttaaattcaattaaaatagtttatttattacattaaaaattaacatacaattaaataaacggaactgcttacctttttataatcaagcattgaattaaaataagagatataattaattgattttcagtttttaatataagattcggcttattttggcttttttcaattttttttaatatagatattcacaatttatgtgacaaaaaaatcataaaatgtaaggatctttttttgttttttatttggttaattattagaaataataaattttttaattattctaataattttaatgttaatgatgaaatataatataaaatccaaaaaattgagtattcaaattaaaaaatggcaaaaatttttattaaatatagaactaattaaaaaaatattttatggaattaatattctgatagaaaacacagttaaaccataaaaatctgtgccctgacaaacaaacaggaaattcaaataatttaaactaagaaattttgaaaattaagtgaacatttgtccacaaacggataataataattattattttgcattaattattcggaaagtttttcaaaattaattttttttttttttattaaattatcgttgaataacaaaaaaaaatacaattgataaaaggctaatgggttaaaataaaaatgctgattggaacttcaaaatatgaaaataaaacatttaaacgtattgtataacttttttgttttataattaaaaggaatgctaatgatgccttttgccgtaggtcaacaataataaaaattctttgaaataatgcctttttaccacttcaaattaatgaaaagcattggaattgcaccttttattggtcatatgttttgcttctgattacaagaaattttgtaatgtgtccagcggtgttaaaattacaaaaaagtttttttaaaaggtttttttgtattattttgttcctttttccccccaaacctttaaaaaacgttgcgcgggcccccaaattttccctttttcccgggggttttacccccccccccccccccccctttaaaaaaaaaaaatttcacaaagggtttttttttttttttttttccccccccaaaaaaaaaaaaaagggttttctccctccaaaaattttttccccggtcccccccccccccccccttttaaaaaaaattttttttcccccccccctttttttttttttttttttggtggggggggaaagaaaaaaaaaaaaaaaaaaaaaaaaaaatccccccccccccccccccccccccccccccccccccccccccggggggggggccccttcttttttttttgttttttttttgtttctccccccccccaccccccccccccccccccccccccttctcttttgtgttgtgtgggtgtgggtgtgttgtgtgctccccccccccccccgacaccatcacacaaaccaaaaaaacaaaaaaaaaaaaaaaaaaaaaaaaaaaaaaaaaaaaaaaaagaaaaaaaaaaaaaaaaaaaaaaaaaaaaaaaaaaaaaaacggttgtgaggtgtggtgtatgattcatattgggaataaaagccctctgaatgttcgggccagatttggggcgaagccaagagaaggaggtgagagtcgggttggcacttgtttgccgtggagtggggtggagacacttctttggaagggaggcagatgaggccacgtggcggtggaaaggaaacctttaagcatttgaggagggtgttggtggggggtttgtacccttttcggaggggtaggccgtgcatgaaattcctgtttttcccatgtcgatgtcattggggcgtaaggcggcaatagtttcggcagtagtccagcaatccgagcattgacttaacaaatgggaagcacaactttttaaaaatattcagaaaataaaacacattgtcagatggactgaccgaaccgggcaaaaacaatcgcaacttttgcgacttcagtctttgcgggtcactgtaatccacagtacgcacccatgttacgatggaacccttgggggatttcctctaccgaaaagactatacttgaatttaaacaattttgaatagcagacgttcacagggcaattgccacgtactaagcacatcttcttcggtcttctcaatcctgagggatcggcacgtgtcagggaatgggtttgccacttatggaaggttaggaatgtgcctcccggcttcagggactcagtccggtcaaactcaatggacgcagtacaatccttctcagttctggcacatattcgggcggttgatcgtccaacaatcactattcagaagtcaactttctgatgttggtgtgttggtggtagaccgtactgccacagtcctctcctcagttttccttcgctgcgagactacgtgcagcaagacgcgcaagaacccatcatccagcctagttgagtaattttgcatggttgcaaaggcgataccaggttttgggtaaacccgtaagggaaacccgggacttggaagtccaacgagaaagacttgtaagtcgtcttcgattggctcaggaccgagttaactcttccatggatcgtgaagagcgagctcgtaaacgaatgttacccctgcggagaaagttggaaaagcctttgcctcctcttntctgccccatagccccttaaaggtttgggccagcctgatggagagcgaaaggaattt

SEQ ID NO: 21111 - DNA, 1360 bp, Heterodera glycines
tattaccagcttattttccggttctttttcctcatcttcagccgagaacttcgccgatttccaactgattccataaatgacgaacccatcgattgctgttgatttgcactaatgagggggcggttgtcagaagaaacatttttcgcttttttaacggggggtgccatcaaagaaaaaacaataaatttgcttaatgaaaattttcggcgctatatggaagtgacaggttttgaaacaaaaggggggacccttttgttttgcaaaaattttttgagataaaaaaagcatgataatttgttatctggggttttaaacacaccatcccagaaatgagctccaataccaaaaaagattaaaatacttgtctcagtggtctgtgagaaggtcaccaaaggggtgggtcccaggttcgattcccagtgcatgctattgatgtatttctatgattttaatgaataaataaaaggaaaagtgaccaaaatgattttaaaattgtttacaaatttttaaacatttttatttgtcatgtgtaatgaaaaataaccatcaatcctcgatcagtcaacgatatcgacgtcggcatcttgatcactttcttcattcgttttgtcttcctccgcttgctcccgttgttcctcctcccgcttaattagttggattaaaattttaaatccccttccatcaactcaccagcttcaattcgtcgagtctgccggtgtccagcagccaattcgagacgaaatgatgctccagctgttgtcgcatttgttcagagtccggcatcgtcttccaaagttgctcaagtcgccgccacacggaatgcagtgcctcatctcctgaaaaatcacaacttttaaaattgaacccccaaaaatgatatggtcccaccctgctcatccaaaagggctaaaaatccgtgttggcgcgcaaacggaacaaagtggtgaagcagcaaatgggcttttgtcttttttgaaagaagcgttcgcaccattggttgttcgtcgagaaatgccttgaactggtaaactgccgtctccagtccatccaaatcacctggagacaatggctgggccttaaattaaaaaaaattatttccacaaaaatgaaaaccaattactttggtgaaaatttggattttccccaaatgtgccattgttttgcaaattgttcagatcaccgccaagaaacctggaaaattttcaaaaaacaaaatttattttcaccatttcacttcgcgcccgtcaatttcattgaggtgctcaatttgttcccacaacgatccgcagaaattcttcaaattcgttcgtgaatcttttgcgggaaaaacagccgcaacaaaattgttggaaagggaatt

SEQ ID NO: 21112 - DNA, 1819 bp, Heterodera glycines
tcagttgggccgtcacgtttgggccggcacggttgggccccagcatatttttccaatataattttctacaacttttttctttgtcatccaaatccattgatatcattcaaaagcttaatgtatttaaaaactttttctaagctattgcttcgcgattagataaatatcaaaaaaagttatacatgaaaattgcgaaaaactcgaaattttgaagttttttcttaataaaaatttttccaggcttgaaaatcttttcgctttttgtaaaactaatagagcatgttaatagctttcgaatgataccaagattgttggagttggataacaagtaaaaaaactatattgaaaaacgtgctggcgcccaaccgtgcgcgccccaccgacgggcggggttcccggaaaccgttttaaaataaaattttataatgtctattttaattattattggggtgttcggaaagttctttcatagcggtcgttttatgtaaattagaatttttttcgcacccaaccgcaacctttggccaaattctttctgttctataggaaggaacagattttgctgcatatgttacgagccatttcattttcctttctttgtaaattgattttttaaaattatcccaatggagcacccaaaatcccaaatccgatcacttttattgtacgggtcaaaactttgctttgatcagttggaaatttattaaaagcagtttttgtggccaaatcaagtccggagaatccaaatctggcttcagatttgatctctgaattttctctggcattgtactgctccatgtcgttgacaagaagttgaagcagtacagggtcatagaacagcaactgactaaatctgaggcgatattcggattctccgggtttggtttgcccatgaaaacatcaatttcattttattaggtcctttcagaacaatgttgtacaaagagggtgctgaatcttggcacttttgagcacccattttcagacaggacaatttaaagaaataactcgtcggtcttggtgactctttttcagcttgtcagatagtcccaactttgctctacaaaaccataatttgttttgtgcctttagccttttcttggccaagaaatcagtggttgaatttggtgacttttttaagtagaccgatcagtttatttgagtttaactatcttgaatttaatcgacagatcatttttaaattctcaaaaatgggagaagattgtggagaataattgggcatattttgattaattttgagttattatttgatttttataaatttttgaatgaaatttttggtcggggtgacagaacttatacaacaccccaatattttcctatcactaattttcgtcttttctctttttaatttccaataaattttaatttcttccatatataataaaaatgaagagagaatgcgccaaagtgagagaaattacaaagaaaaaaagaaacggcgagatagtgtgcaggcttttctctgcacagagaggaccaatagttatctgaaagacataatagtattttctctttccttagacagtgagagggaaaacatagaaatagtaaagaaaatacacattgcagagaaaaagagtgtccgtctgatggatggcagacatacataacacataaatttagctgcttacatattttctctggcctgtttaaaaataggtaatgtttaggtattcattttcatcaattgacccttacggctttttgtccatttagtagcatggctcgcgaaaaacactacacattacttttttggaagggaacgcgatttccaaggtttttcgagggttaaaaa

SEQ ID NO: 21113 - DNA, 1229 bp, Heterodera glycines
cgaagacaaccatcagctttgaaatgggagttggggtccatgggcgacaattggatggacatgcactgaaatgggtaggcgggattagggatatggaagagataaagggggggggggtgaggaaaactcattgaattttgttaccatttttacaattaccgtaccctcgggggacggggacaaaaaaaggggaaaaggaaggaaaaagacaaagaaaagccggagacgaaataaaggtaaaatgcactcactcgggaagtgatattctggcaaacattgcatttggccgaagggaccaacgtcgttttggccaagtcgtgggacataaattggccaaattgcatcagaagggcgttgaactcggagacggtcacttgctaaaagcgatttgacagaaaaaattggaatatccgaaaagagcaaaatgcctttgtggtggacagaatgttcaggttaatctcacgcggatttggcctcagtgtgctgcgaatagaggctaaattgtggatgtttaattcgaaatagtttttttttgtgttatttacaaattggctccgataatccgttgtcatattcgggcgggagcagcctaaacaattgctaattaaatgattagggcaattaaacagagtcatttaataaataaatgaaaattaaattgttattaaggccctaagtccaaatactaaaagcattaccgactgtagggacggaaagcggcgccacggagaggcaaacggaaattgttgcacgttccgtccattgtgcggaaatggaggttatagcagagggaactgagaaatgaggagagggaaggggtgattagaggatgacacaaagacaattaattaattattctaattagttggataattacaatatttattgtcccccaccgttcacattccgcttcgtccagtcgcggcacacacgcattggcaatgttcgagcggaccacctgttcctgagagagcggacgacgtcccgaattgtctgaacatcagaaagagcaattagtgaccggcaatcattcatttgatggtctttggccaaatgatcagtgatcatttggaaaattcccggggaattggccaattctttcttcttcagctgaaaatattcaccttccgttgccgagactaagcgttcccggattaacacttcagccgcgttcgatgggtcggcttggatttgtttgcagcgttgaagaggcgagcgactgagcacag

SEQ ID NO: 21114 - DNA, 1643 bp, Heterodera glycines
  unsure (1)..(1643): unsure at all n locations
acacaaacagcgggaaaaatgacgcttttgtaatcgttggcaaaagcgatgttcgtcggcaccttcttccttttttggcactttcttccctttcccttttctcttttgtgccgtcgccgtccgctttttctgtccttttcaacataataaaagtgccagggcaatttgagaaggaaattaattaaaaagaaaaattaaaaaatgagagaaattaagaaaaactgtaaagaaatgataaatgttttaataataataattggtaaaatgacggaattggcggtggaggcgagtaaaaacgacgcgtaaacatcaaaaacgatgctttaaacatttcgtttgaaaaaaatattggccagaaagccctcagggaccgaccaatttccgagggggggggcaagcaaaaggcatttccgacaaaaaatttgaggaggtaaaaaagggcaatcaatttgcgaaggttgtggcagtttaggggcataattactgcgcgaggaatcggcgcgagaagaaaactttcgggggggggggggggggtaaagcgccgaaagacacgacactccttcccgaacgaagaagaagtccgacccaactttaaacttgacgaattaattgaccgaccccggaaaatgctgcgcgttgaaccggttgaagaagagacgggggagggagaggagggacactggggaaacattggacataatttgaggaatttggcgaaaagtgcaaaaaatatctaacaaattatacaaaaaagggggaaatttggggagggggggagcgaagttgaaattaacagccatgagaataagcaaaggcataatcgatgtttaatgacgtgctaacacaataaggaacgaagtgcaatttgcagacagaaagagaatgagcgatgatcaattggaacagaaggagaggggagaacattgatggcctaatcagaggtcatttaggggggggggggagaccagtttagagagaaaagcaacgccccgggggggcaacacctcctccccctccgacgccgccgccgtcgccgaattcggctgctgatcagtcagtgcccccgtccccgccccttgtcaacactttttgcagcgatcaccccattatccccctccccattccattaatcgggggttcatatcactgctgaactgtggacggtggggcggcggtgacgaagttggaaccaccggcaccagcatttattatttttattgttcaacccaacaccgaaggcctcacaaaattaataaattctcaatcaaaaattatgttgactcaaaattcgctcaatttgtcaacgaagtgtaaaagtgacgtcatttgcctaatttaacagcaaaaaaacaaaaaaaaactgctaggaggagaacgaactgctagccaaggcaagaacgaccagagaaagagcgaattagaacttcctaacaaattacaaaacatccctggaggggatggcagtttgctggtgctgaaaccacacggcaacactgcttacccaacaattcaccccataaggacctccccccgtccgattgggccaaaaatcggagaagtgcccttgtccccctccccccgcctcccctcccgtccattgctttggcccctcagantaaaacacaaatttcacatttgttcct

SEQ ID NO: 21115 - DNA, 2449 bp, Heterodera glycines
  unsure (1)..(2449): unsure at all n locations
aatttgtgttatttcccagcaatttgtttaatttaatggaaaactttaaaataattagcgaaaagcacaaaaaatgtttttatccattaaataaatttaatttcaatttaataattgcctcattaattattgagagtacaataatttgttttgttttcaagaattcaaaaaatgctaagaattggtttgcattgaaaagggcaaattcggcggggcatggaaatgcttaataattcgttgtacttgaagctgttcggtgggcaaatatttgatcaaaaaaggtgggctgaaaagcacgcgaacggagtgatgagtttgaagcggtcatcagaaaagtgcaagaacaattcactgaaatgcttaacacaccgtttcaaaaaacgagatgtgtaccaataaatagagagtgccagagaaaaacattatctttttttctctaattttttgtctccttttggcgtactatctaatatttttattattaggaaaaacaacattcacttcgtgatgtttaactttttttctgcatgttaaatccacaccaaattttgcaaatcgatagagaaaaaaattacgaacataattggagggtttttatgaataaaagtgggttaactaaaaagttatgccgattttagcgctgacccacaaaatgtccagcccacgaaatgtccaagtctcgaatttgagttttttattattcagatgggcctaaggttaggcaaggggtaatataaagggtatattcgtattcagcgaccccgaaaaccctaaaaatcctaaattagactcattttgtttttataaattttgaaaaattttggacatttcgtgggtttttactcttttggacatttcgtggcttggacactttgtgggggtgccgattttagtggtaaaacttttggatggacgaggaaatgttggaatttggcgattcgctgccgtcgacatcagcgacgccaatcggcgatttggtgccgttcccgtcgacacccactgcaccaatggacactggagagatgacaccgccaccagtggccatcgacgagcgatcaccgcgcatcgaacagctggaaaagcaactgaaggaccgggatgacaccattcaatttctgcgcgagcaggtccgaaaccgagaagcgctgatcagtgatctacgtcgtgtgcggcaccatcaacggcgacaccaacaccagcaaaagtgagtgaaatttcgatgccttctcttttcccaattaattttctcaaaaattgatcattcattttttgtcaattttagcaacgccaaacagaggaagaccaaggaaggccatcgacgagctccaacgcagctcgcgaaaacggttgacggagcagattttggatgccattgatcgggaccgatcgagatcggcaagtcggtgttcactggagcgcatccaccgagaagtccggcacaaatacggccattatacaccaaaaaaggcaccagcgaagaagggcaaagatgaaatggaggccaatgacggcttgcttttgatgacccaacttggcacacagaaagcttatcagcggatgaaagcaacccttcgtctgatccacaaaaaattcgacattttaccgccattaaaaaaggtgcatttgggttgatcagaaagtgcaatttggtgttttggttggtcaccctcaaacgacggatttgcctacgagcaaattgaaaccaatggaggtgttggctttgtgtgtgttgacgtcagatctgcgcttgagtcccgattttgtgcggccaaagacaatatgatcagctttggcaacaatatttttgtgaaaattagcggagactacggtcaaagcttcaccaaattactgtctcatttttccaagctgtgcggtcaaattcgccgtcaaacaattttattgttgctgtttttccggccaaagacagcagagaaaatttggagcggtatggagaggcactttgggggcaaattgagcaaattgatgcgttggcggggaaaacagtgaaatggtagacggaaaggctaaactattaccattttcaatttaaaggttcattggtggcgacatcagctttatttggtcattgattggtcactgcggttcagccgttacaacttttccgtccccaatttgcacgtgccggactgatcagatgcttcaggagcaaagctgccaacacaggtctattgatcagacaattaagcttgcggaacaatggaggacgacgttgcaaaatggcgataaggcgactgctgctgttcgatcggcatcaatgggcatcacaaagccgcctctgcttcgttcaattaactttgatcggatcatccctgccccttttcacgtctttaaaggcattggaaatgccattgttcgagaacttgagaggcaggagggatgtgcaaaggttgctcaaccagttcttcagcaaggatcggggcccgaangg

SEQ ID NO: 21116 - DNA, 1450 bp, Heterodera glycines
accgtggggaagcagcgcggattagcgaattgctcccccctattgcgcattggatcagatcacattctgattttgctgggcatcgtctcgttgtgttgaaaggggcattattcccccaccagcatttgccatggcaatgatagccatgtatcagctcttccgccggtagctcgtagttcacatccgtcgacttgggcacggtcgcccaacatccctcggcgcagcaaatctcgagcttgtttaattcccgcccactcacgattgtgaccccacgttttgcacattccatggtacatggcatttttgggccttcttgaaatggcaggttcgggtccattcccgatgatcgcattgacggctggcagccgaacgttccgacaatgctgatgagcatgatcagcagcgccattcccgttttgggcttaattaagcctcgctttcgtgaaacatgacgctccggggaccaaatctcccggtttctccgagtcctggccgacttcctttgttcagctccaggtactgcttgaacttctcggacgtcttttccgtcgtgtacttcctccacgggcttgttgggagtttgttcgagttcattttggtgctgttcgaccgctggtgcttcgggaaattcgcccccgatttcgcccgcctgaactgcttgaggtccgtctgcgccaaacctatctcctccttcagatctcgtcgaattcggctgaaacttggtaggaaccttgaggagacttggggccatcgaactatctcccaaatattttttctcatgtctctgagccgaatgcgggtgtgccaaagttcccgcttttccttgtgctgccgacggcacttctgctgctttttcggaaactgccgacttcagcggcgccgtgtcgccgccattttctccgtccgaatcgttgggggccttttctcgagaactgtcttccctgatttctcgatttactcttccgtcgggatgtacagcttcaacttctcgtcctcgcttttcggcactttcttcgcctttacttccttcattttctccgtcctttcttgctgccgagggtgtgttctgctccctcgcttcgctctgagtctcgactgtttgtacttcatgtcgtacatgtactgcttgatcggcttgatcatccatttcggccatttttggcggcgcttcttccaacgggcaaattttgttgattggccgtccccaaacccttccgttggccattttgatcatcacacttcggatgtgctcgttcgaccctttgatctcgacaatccgtccgatgggccataaattccttggatggaatttgtcctcgattagcacaacgtcgccgatctgcggagcgccgtgagcattcactcgtcgcgctgggtgcgcccagcctgctttatctctcaacaccaacaaatactctcgatgccatcgtttccaaaaatgctcgagccg

SEQ ID NO: 21117 - DNA, 2604 bp, Heterodera glycines
  unsure (1)..(2604): unsure at all n locations
gcttgggttggttttcctgggttggtttggccttgcgatacattccgtcgctttctctgtccctcccctgtcatcgatcataatatcactaattatcttgacattaaagatgtgtcgaaaactctctcagcacggcccttcaaatcgtcgacttcccaacttttgccgtttttcggcgtggcgagcgtttccccgttttcgttgccgagtgattccctctttttctgtcactttccttttctttattttctttttttttatctttcggctccgtcgtgtgctgtttaacgagttcgagcagtttcttcgcaatgaaagcacaaatgcgccggtcgcagcacttccgcgcactttttcgcgtagaaagggaaacggcggaggagcggcgcaacggacggaaagtttttgcgagacgaaccccgaagagtgagcaattggtgtcccagtaggagcggggccaagcggggtacgtactgcaaaggtgtgaccgcaaatattgccatttggtccctccctgtggtacgtaccccttcctaatgccaatgggagggaaaaggaggaattaaccaattcatgtttaggtgcaagaagttatattttacatccgagttggacatgctgaaaagcgtgcgaatgggtgagctcagaaatgaatgaatgggtggtgggaaatgtttaaatatgtttataccgttcaattgaaccatttatcgcttttcaaaatttatagccctcttcaacgacctccaaatcgtcgaaggctctcatctcagcggttccaatcttagcgcccttttcaattttgtggatttattggccaaagtcaaacaaatgaccaattagcaaatgctaattaatgttttcttttctttagcattttccgtacagcacagaagaaggagaagaagcggacggaaatcgcactgaggtgaaagaaacgaatttggaggcgaatgccaacaatcgcttcagcgttttctgaacgcaagtggacgcgcccgcgttgtgttcagtcatttgagggattttgttgagagtgtcggattagacggatcggtcgctttggacgattggaaaagggaatttctgcgagcagaagtgagcaaagggaagagggattaatcgcaatcagcttaattaccaccgatcattccaatgagtgaaggccgatcaaggaagcccttttcccgtgacggaggaatgggaacactgcaaagggtgagaacgaaatggcaaggcaatggggggaggggcactatttgaacagtgatcagtttggtcggaaggtgatccttctgatcatcgcgatcggggagtggtccctctgatcactctgctccgagcgtttttctttcccatcaattttgagtttctgtccaatttttctgggccctccccccccctctcccctttgaaatgtgcgaccgttttgcagaagttcgcccattctccgcggcttcacctgcggcctttggatggttttccattcgctgacagtcaatgcttttcggcagaacagtaaatgatgaatgtgtgaagtgattgtgcattctctgtgctttcgcaggtgatcagcagaagcagttccatccggtcgccgttcttctcaccatcaaagattgggtgacgcatttcttcgcttgtgaacactgccgcgcccatttccatcggatgaccacaaaaacggccaaaattgaggcggcggtcagtcgttttcccaaaattcctctaacttttctttgctaaggttcgccaaaaggaggacgtctttctgtatttgtggaaggcgcacaatttggtcaatggtcggctgaggggccgcgagacggaggaccccaaattccccaaataccaattcccgccaaagttcctttgccccgagtgccgcaggggcgacaaattcgacgagggaaaagtgcgcgaatttctgctgaaatattacggccgagtgagaccaattgatggagagcagcgaacgacggagaacggtcgcggaaacggggaacacggcggaggaggggaggaaaaggaagaagaagcggataagcagcagcgaaacgaacggatgccaaaagtgatcgggggaacggcggaggaagaaaagtgatcaaaggtaaaagcagaggagaaaagtgatcagagaggaaaaacggaggagaaaagtgattggaggaacggaggaggaagaaaagtgatcaaaagaaaagcggaggagaaaagtgatcaaaggaaaagcggaggaaaaaagtgatcaaaggaaaagcggaggaaaaaagtgatcagataggaaaaacggaggagaaaagtgatcagagggaaaaaatgtgatctgaggaaaagcggaaaagaaaaagaaaaatgattagaggaacgatggaggaagaaaagtgatcaaaggaaaagcggaggagaaaagtgatcagataggaaaaacggaggagaaaagtgatcagagggaaaaaatgtgatctgaggaaaagcggaaaagaaaaagaaaaatgatagaggaacgatggaggaagaaaagtgatcaaaggaaaagcggagaagaagaaagatagcaacacatttgatttcatttgcactttcaccanaagcatcgtt

SEQ ID NO: 21118 - DNA, 1641 bp, Heterodera glycines
ttttccaatcagttttttatactgttataggtcgtatccaactgagaatcttttgaatagggtttttgggtgcgctgaccccgaattagatgccgccgttgttataggagcccaaataattttttaggaattttgttgtacctgtttcgaggtaggctttaaaatgaggctttttccaaattagctctagagactgtaaccagacggaagcagggcccagccgttcgtccagttgactttttacagaaggttggggtggtatttttaccaatcagttttttatcctgtttcgaggtaggctttaaaatgaggcttttgccaaattagctctcgagactgtagccagacggaagcagggcccagccgttcgtccagttgattttttatagaagtttggggtggtatttttaccaatcagttttttatactgttattgatcgtatccaactgagaatctgctgaatggggtttttggctgcgctgaacccgaatttgatgccgccgttgttataggagcccaaataattttttaggaattttattgtacctgtttcgaggtaggctttaaaatgaggcttttgccaaattagctctcgagactgtagccagacggaccagggcccagccgttcgtccagttgactttttacagaagtttggggtggtatttttaccaatcagttttgtatcctgtttcgaggtaggctttaaaatgaggcttttgccaaattagctctcgagactgtagccagacggaagcagggcccagccgttcgtccagttgattttttatagaagtttggggtggtattattaccaatcagttttttatactgttattgatcgtatccaactgagaatctgctgaatggggtttttggctgcgctgaacccgaatttgatgccgccgttgttataggagcccaaataattttttaggaattttattgtacctgtttcgaggtaggctttaaaatgaggcttttgccaaattagctctcgagactgtagccagacggaagcagggcccagccgttcgtccagttgattttttatagaagtttggggtggtatttttaccaatcagttttttatactgttattgatcgtatccaactgagaatctgctgaatggggtttttggctgcgctgaacccgaatttgatgccgccgttgttataggagcccaaataattttttaggaattttattgtacctgtttcgaggtaggctttaaaatgaggcttttgccaaattagctctcgagactgtagccagacggaagcagggcccagccgttcgtccagttgactttttacagaagtttagggtggtatttttaccaatcagttttttatcctgtttcgaggtaggctttaaaatgaggcttttgccaaattagctctcgagactgtagccagacagaagcagggcccagccgttcgtccagttgactttttacagaagtttggggtggtatttttaccaatcagttttttatcctgtttcgaggtaggctttaaaatcaggcttttgccaaattagctctcgagactgtagccaaagggaagcagagcccagccgttcgtccagtgctctttaaaggaatttgggtggtatttttagcaatcaattttttata

SEQ ID NO: 21119 - DNA, 2738 bp, Heterodera glycines
cagaagtccatgagtgcctaattgcttcgaaattaggttgatccattaattacccctttttcctctatcggatggtccattttttgaaaaatttagattttcaagtaaatttccagaaaacagaaataaaatccttttttccgaaaaaatttccagtttcgccttaagcgcctgatcacttattcattctaacactcagagatcacttatcaaatcagttgtcactctaaacaattagcatcggctttaatcacttagaagcagcccaattaggggcttttaacttagtcctccttacgtcgatcgtttggcagacgtcctctgatcagtgccacttggtttcgacgggcgccgatgttaacctcaagtttaaaaaaattattttttttgtcctaattagtgatcagtaaccaactacgaagcttttctaatccatcttttctgatcacttccaaatttattcgattatttttgcctgatcagtgatcactacttgattcaattttttaaatccatcttttttatcaatatcctttttaaatttgattgcttttttccaataatttaaatgcttttttcatttaccccttactaattcgtttgatcactttttttgtcactcctatcattttactcaactgatcacttccaaatccgatcaatctttgattgccatttttgaccttacctctccagcctgggaggcgaagccgtagtcgcccgattgttttggcaaaatgccttcgccctccttgtccaaaatggtctcccattcctttttgtattccaccaggggcacctaattaaatttaaatttttttgcgatttttttaaaattttctcctcgacttggtttcggtttgctccaatcgcggtttgcccggcttgtgatgcgtaaagatttgtgccgcattgaggccggagaacttcctaaattttcagggaaacaaaaaagtttttttaaacgaaatttctgaaaattccgacctcgccctttcggtccggttcaataaatctgaaaatttgaaggtataattatgggctatgcttataacgcgtggaatagaattcctttacgatcatatttatacattttgaaatcattttctcatgctttaaattctgattagttatcgaactattccttttctgatcagttaattgtctgatcagaagctattccgatcactcaacatcagacggaagatctgctgatcggaacccaaatttaggaaatgtcatttacacatttgttaccgtaaacgctattctaatcactatttttttcaaaaactgtttccgatatttaatcctgatcatatcaatcacttccttcatcggcacagggcatactgtactaatcacataaagccagcgtcaacgtacccaagtttcttgtccctggtgatgttccatcttggcatcccgcaggctaaacaatttgtgccgatcaggcttttctgatcaatcgataatccctctttttcgactcaccggtcatgcccctctgtgactcgaatttgttggtgcccgcctgcatggtcaaaaaggtgtcgcccgccttcagcttttcgaagttccatcgcttgcgcaccggcttcgagtcatcgtcgtagccgttctgaaaaaaatggttgctgaaatcagataccgtatacgcaagcaagaccgtatactttcgggtaacttttgatcacccatcaacatcattcaatgattgatatcaatcattacatcataccgtttttgcttctgctcgtctattaagacaatagggaaatttaatcgtctttacaataatcattagtgcaatggtgtcacaattgatcataaatgaactgatcgcttgcccaatgaattatcgtaatcagtgttacgatcagataattgaactcatgctcatcgcttatcactgatcgctgataaatcaccaaaatttaaaattccgactgacctcttcacccatagtgattgttgttcagtgcttgctgcttggctgatcggaaaaagatctgatcaatgaatgaaaacggcacgcacgaactttgcccaaatgttgctgcaaaagaaatgccgaaattaattctaactgtttctatgtggttaaaacaacaacactgatcactcttcctggcacactcctggcttttccttccctcccccggcatttcctctcctggagagagataaaggaagataaagccggctgtcaggaacgggagacacacacatcacaaaaatgaatggatgtgaatgaatgtgtgtgggaggtggtggtactgctggtgggttagctgaagaggcttctcggctcggcttttcctccgccccctctcggctttaacaaattattcaaaagccaagccttcctcctctcctcatttttgtgtttgtttgcgcattgcttttgctgccagccgctttttcccgccccattcgccgatcagatccgatcgctcctttagtatgcctagtacaacacatccgctgacacaagagagagtgggagggcgagagacagagagagagagagtgagagagagagagatgagagaaagtgagagagagaaaggtatagaaagagagtaagataaagaacagaagagatatagcaaatccggcgatgaacaccaaagtggcagtaagggctaaagctcttgcttgctctctgcctgcttctttcttctttgctgctgttccctccattctgatcagtcagatcggcttttacttatatc

SEQ ID NO: 21120 - DNA, 2612 bp, Heterodera glycines
tttatcaaatccaaggaaaaaaatgatttgaatcacatccacaatcaatcgccaaaagaaaccattttgggatcgggaaaataatcccagatcacttccaattttaatccgctttgtatgggcatttcttcacgcattttcccgactttttgttgcgaaataatcccggcaaacattcgcaagagcaattgcatttctttttcgtacatatctttgggttcggattgtcgcaactcggctcacatccgttgcatttcttttggccatagtgctcaattattgagcatggaagcttaaagttaaaaatgttttattatttttcatttttaaaataacataataattaattatttgtaaattcactttgcactttggcttatatgatgctgtaagaattggcacaatcagaagggaaaacaggcaaagaattttgaacattttataaaattaaattaatttttatttgctaaatgaaataacgcaaaaattgtaaaatgaaaaaaaataaacataaaaatgtcataataagataaaaaaaactttcaaaatttagccagaaaattaactgaatataaaaaaaataaaaatcttaattttaattttaattgctttttttatttttaactattgaaaaattttcatttataacaacaatacgtcttactaactttggtatatataataggacatattaaatttaattctatccaaacaacagaaaaacttttctcttactaattgcaagtataatcgatttaaattaattgattttgcatttgttaaacgaaaggaaaattatttttttgttatggataagcattattcaaataagggcttaaataataattttttttatttacacaaggattgatgaatgattcttattatttaggaactaaaatttgattactatttttgggccaaattaatttttgaatttgaatttgtatatttatttaacgatgagaaaattaaaattttttataaaactataattggaatgtgggcgaaagaatactttttgggaaatatgtgtaaacaaatggaccattaatgaaattaaattcgaaatagcatttcaaaattcattaattgtttatttgcgtgcacagttttgctttagggctaacaaaatactttgcttttttcgggtgttaaactgcgtgtaaaacatcattttaagtcatttttgtagcaataacaaattgtcaacgagtaaaaacaaaagtctcacccgtcagtttttgctaggaaaaatagattttagcaatattttaaataaaaaattttccttttttaataattataattttttaaaaattttttagactttttttttcaaatttttaaattgatttattgttttttttaacaaatatagcaaataatatttatacattggttctatgggtacttttccattaggctgccgcaccccaaaatgtagaaaaagggaagaaatgcgccagttttggcgccggcgggattatttagaaggaggcataaaagccgcaatttgaagtaaaatgtcatcgaatgtatcagcaccgcgccgtttgcagtcttcgcgccaaaggaattcgcataagcatgagtcaagcattttggggtgagcagtacgggaccaggaattttggccaaaaccgggacctgccgggacctgagaagccgggaccgggacctcggtttttgtccgggaccgggaccaaccggggaattttaaaaattcaaaaaaattcaaaaaattcaaatttttagtttatttcaaatgaaaaaattaaataattaattttttgtttttttttttataaaacccaaaagttaacgtaaaattaaactataatatatttaatcagtgtttcaaacaaaatttatttaaattattggcaaaccgggaccgggattttttttcaaaatccgggaccgggacatcggaggactgggaattcccgccccggtcccgacccaccctaatttattgtaaattgactaagttttatttaaaaaactttgatcaattttatggaaaatattttaataaaaagacttttttattcttaaattttgtaacttagtaaagacaaacaaacttacaactagttggccgtagaaacaacagtaaggaaagctttaaaggcataaattaaattaaaaatttcacttctcaaatttaaaattttcacgtctcaaattttaaatgacaatttccaacaatattatttgacaattatccattagcatatttacttaagcataaaactaattaatctggataataattgcaaaaaccttgaaatgttcgtcttttttttatcacattttgcaaagtcttcgtgttctccaattcacaaacatttcacctcaccgtcagtgttcttctcaatccaatcacagtaacgcgatactcgcgtgtacagtactgtatattaagatggatatggtaattagtacatttggacatttgaaaaaaccatgggactgggctggatttcttgtaaaaaaaatcagataatccaggtctaggaaaatttccaaagcccgttctcgggaggcctttaaaaagcgtgaccttaactatcgggcctttggtcggttttctgctttgtgatggc

SEQ ID NO: 21121 - DNA, 1027 bp, Heterodera glycines
cgcacggagcaaattgcccagctcaaaattggcgcaccaacgtcggacgcttcctgaagcagagaagagcctaaagcacgaaaagcgacaattgcccaaaagggacggaagaaatggcaccgttttgccgcgcaattccaacgtccgccaaacggagggccggcgcatctctcaacggatcgtcgccaacgaaagtgacggaatgcccgatcagttgcaattccttaaagggcggaattacggaagttgcgcaaagggcaaatgcctttataagggaaagtgtttgggacggagagagccgagggaaaagcgaaaagcgcggggcaccgaccaaaggcaaatggacgagcgcactttggacgaagtcacaatcagcagactctgagcttgttttgcttctattttcaacattttcttatttttaccccttttgtcttctcccattttcgtcgtattttcaatgtctccgcgttcggaggaatgataaccggaagaagaactgaacgaattgtttttgcgaatgcctttcgtcccaaaaatggtgccacggctgtcgaattgtaattccaatggcatctgagaaagaagggaaatgaaaagcggccgtggaaatggcattcgttgtgtcctcattgcctgaatggcactgattttgacgccctcgtcgccctttggccccacaactccgagctgttcggccattgcttcagcaacaattgggtgttcgtctgtgagcagcacaaactgaacaccgcctgcggtgagttcggccaattgggcagagcaattggcaccgatatgattggccaatgccaccatgcctagggcaatttgatggcattgaacttggccaaaacatacccaaaaaggaccatccgttcgaatttgagccgatggacgacgaccgttccgaaaacgactcacaatgaaaggccggcagaaagtcaaagtcatcgtcgagaatatccaaaatggcaaagccaacacaactcttggcctgagaagacagtgccaaaaaagcatccta

SEQ ID NO: 21122 - DNA, 1201 bp, Heterodera glycines
gatcgatcggtcgccgtttactttcgccagtgccctttccgtgggatgtccttccgttgcgcattctgcgtctttcctctcggcattgttcgtttccggctctctttatgctcagttcgatcgttcgtaacatttcgtcctccgccctttcgcttggcgttttgccatcgcccgccatttttgccgcgtttatcgttttgttttgagcagccaaccaaagatcagacaccgtcggacaatttgagcacaaaacgaagggcgaatggacctttgttttgtgacttggcaaagcagcgaatttggtggacagaccattaatagggaagtgcgcccgagggcatccgcaacccccgcctggcgcaggagcattccgccgcacttttgacgcagccgacgcgcgaccagcaaaagttgggcacccaaagtgagcggaagtgctgcaacacaacatattttaattatggcctcctaatgagtccgggccaaaacggcggagccgaaaaaggcaccgatgaaaaagtgaaatgaattggcaaatgtttaccctgaggcacggaggcaattaggaaaaggaggaaaacgtggacgaaagagtgaaaaggacgagcaaagtcagtgagcagcagagaaaggagcaaagcaccggtggaaaggccgagggaaagccaaacgacggcacggacgagggaacggtaacttcgccggagggcactctcgtgccgttgcctttggcattcgctgccgtcggttggtctctcgagcgaatgacaacgggggaaaaagcttttcagggagaggagccgcgaatagagctgaaaaaagagaaaaccaactaacaaaagcgaccaataaactacgtactgactttggacctaccgtattttttcccgttcggatgacgagtccgaggcactccccacttgtgcatgcgaactgggcgaaaagaatgttgcgcaccgtgaacaggtcggcgtgctgcggtgccgcgtgggcggtgaaccgcgtcggttcggcgttccccgtcagccaaacggtcgaagcacgaaaatcattgtgcaaccactgaatgaagtgccaaaatggtctttttgatgtaagaaagccgaaatcacaaaagaccaaaattcgaagccagccagagccgtgaagaggccgagtgagtacattcggtgcaggaaaagtatgtcattttaagactttt

SEQ ID NO: 21123 - DNA, 1316 bp, Heterodera glycines
  unsure (1)..(1316): unsure at all n locations
tttcatttgattttattttaaattttttactgcatcgcaatccgaataccgctttcaatgtagttattcgaatgacttcggccatctggaaaatctggtccctctgtgatccgaagccctcataaattgtacgtaagagacagctaaacagagcactacttaatttataatcttattcatttaaatttacggcgctggaagagtgccacggaaaagctgttcgagccaaaaatgaaaatcagctagacgaaacgcgtcatcgagcatcgaattgtcgacaactaaacaaaatgttaaaatttataatttaataatcaaattagcaacaaaaattgtttgttagataaaaaaaggaattatacatacaatcatttattttcataacccaaaaattatggttccaattgcaaaaaaaaatggggagggggcaccatcggcgacagtatgaaggcaaatccaaggcccgaatccgaaaaccttggtccaattcgctgttccttcctttgtgaaggtattgaattgcgcaccccatccaaccttaaacatatcgtcgagttcgttctcattgatgaccgtcgcctggccatgtttgccaattgcattccgaattcgcatgcccaagtcggcggacaccattgaccggatgggcccaggggccgggcgggcttttaccgggccgcccaggcccggcgaattgtctaagcccttcggtttctcgtgcataactatcaatataattagggtgaatggtgtttctccagttaccgtatattaaagggtattcgttgtgaactttttttgaaaatattgatcagcctgtacgagaaggggggagagagagagtttggtggcagagagagaaagaaagtgagagagagaaagggtgaatgtgagagggagagtgagaaaaaatgagagagagagagaaagaaagaataattttgaacagtcgattttatagtattttatcttggaaaaatcaagcagtagaactactataatggagaaccaagaaaagccaaaaaaaaattttttcttgaatgaaaatgggtgctcattggaaagaatggaaggagtaattatggagtagaaaatgtgcgttttttcggttttaaaattttccattttcccaacactgccgctggttgacagatcactccctaacaatagcaaataaatgtttatttttcggtcataattatgctttttttgttcnaatatttacttcggcatttttcataaataaaattctgatcactggagatcaatcgcatcattcatcgcctctcatcagttctttcaaattctattcattc

SEQ ID NO: 21124 - DNA, 1390 bp, Heterodera glycines
ctttgttcactgtcaatcaaattaagaattgttggtgttgttcgatagctctatgtgtttattattaatttgcaaaatctcaaaaattttcgttaagtttcaaaaaagttatggccagaaggaactcaaaaacccagtaattcgaactttttttgctctgatttttttgtgcataaataaaaatttttgaaaatttgcaggctaatagcatttttcgaatgctttcgaataataccaagaatgtttaatttggttgagaaagaaaaaagttatggtcgaaaaattcgttcgacgacgtttcggctgacgacgttttgtcctactccgatcctctccagctcccctctgttcggatcatataggatcaattgtcgcctcaattgatacattaatctttatctctgggaagcttcttattctctatctcaaactcacggcagtcttgaaaatttaataattttttaattccaagttagtcctcatattcggagaacatctgattgaggaaactttataaatatttttaaggaatttttgatttttttttagtattttaacaccaatttataccatcattaattttaaactgttatcccttcttttctttcctttttaattattttttagctccaacggactgttcatatgcccgttcgtgttgcctttctggacaactttttcggaaacaacacatttttattcgccaatttcatcaaagagaatcgtggcgcacgaaatcgcatcaaaaaaatgtttggcccaaattttgaacatttctcaaaactggtcaaaaaacatcggacggaactcattgacccgcaaagtttgtggcaaagaaacaaatttgtttactatttaggaaaatatttttatctttacagtgtttcacatcgataagcttttgccattgtatttggatgcactttttggcgttgacattggcattttggttgttggcaaattgtccgttttcatcgccgttttggtccgttggatggacacggaacttttgtcgaaccattcgaacatgacggtcgggttacgacaagtcggcaacatggtttggaagctcagaacgaggccatattttgaggtgagccgacggaaaaaagtgatcggagataaaatgaccaaaaattaaatcgtttaaacattttattggtattttgaacataattgactttctctgttgctgatcaggacatgttcgacgagctgatcgatgacgattttgacgaattagagcgcaagagttacctgctgaaggagctgatcaaagggctgcttcaatttgttgaccaaaagcgtcacgagcgcgaccttggcaagttggacatgcgcagggccagcaaaccggacacccgaaagagaacatttgatgatcaaaatt

SEQ ID NO: 21125 - DNA, 1386 bp, Heterodera glycines
  unsure (1)..(1386): unsure at all n locations
caaatggaggccgaagcattgccnagggcggcggagaggcgaaaaggagcggagacggaggaggagcaggaggagcagcagctgatcagctggctgcaccatgcccagtgggacaccatagccgaacttctggagaacgagtgggtccgcgaacagctcaaaatcggtgagtcagtcacaaaatcatgaaaagaaaaattcagtcccgactcgatgattcataccaaacagacagtatttcggggaggggggggggggggtaaggngcatgtgccctttccggaattcgaaaattttttaattgaaaaaaaatttaaaattttgcgggcttaatgggcatacgccgaagtttattcgggcaatttttcaactcattcttttgaaagctccaaaccttgtttaaaaaaatctgaatagcaatttctttaatcgaattattagaataattagtgaatataaataattaattttgtcggcataggtttcatttcgaatgacgaagcgaaagagcgactgacatatttggttagttttgaaatggccaacgaaatagtggcatttttaaatttggcaacagaaaaagaaaaaaaagaaaaaataaaagagatgaaaaagaaatatgaaaaaactaaagaggaaaaagagaaaaaagaagaaaaggagcaaagtgagcaaaaaaaattggcagataaaaacatgagagaaatgatcagagaagaagagaaaatgaaagagttaaaggtgagaagggaacaaatgcagagagaaaagcagaaaaagaaggcagaggaaagagagagagaaagggaaaggagagaaaaagaaacgagcgcaaaaatgaaaagagaggaaagtgaagagaaaagtagtcgggatagagaagaaaaagaaatgaaagagaccaaagaagaaaaagagggaaaagaaaagggagcagcaaagagaaaagaaaagggaaagaaaaaggggaaaacgcagacagaagagagagaagagagcgaaagaggaaaaatggagagagaaaaagaagcggaggaaaagagtttggagagtgaaatggcacaagtccaattagacggtaaaagaaatgtttaaaaaattcggactctgtcagttgggctccacgtttggccccaggaagttttttcactataacttttttatcgaaaaatcatagtatcaatagaaagctctttatatgtgctctatttggcttaaaaaagcaaaaagattttcaagcctggaaaaaattttattaagaaaaaacttcaaaatttcgattattcacaacatgtataacttttttggtaattgtctaatcgagaagcaatggcttagaaaaagtttctaaatctgttaatctttcgaatgatacctaagattgtt

SEQ ID NO: 21126 - DNA, 861 bp, Heterodera glycines
ataaattattgcataatacgtaaatgaaatgccgaacttttttggtcgaaaaatgcctcgggcacattcgagaaaattggaattaattaccataacccaagaaggagttgggcgagaaatgagtaataaatgtgtcaaaaaaatggctgagaaatgagtaataaatttgccatgaatttttaattgggggatataagcaatttgaataaatgattgggaccgaagtaattcgagaacgcctcgggggataaatttcttcaaattggcatagcgaaaattttggtcgagaatggcaaggtgaaatttcaaaaatggtggaataaatgaattagtgtaccgagaaattgccgggagttttttggtcagatgagtcattatctcataataattaggcaaaaagattggccgggcaagtcgagaacgccccccggggggttaattaaaatttgacttaaatggcacaatgaccacgaaggtgatccaaggaggggaaaacccaaggacgtggtgaaaaattggcattttgtcttacaattagcccacaatttctttggcactcaattttatggcattttcctccttaaaaatgccaattttgacatttttaatctcaataatccattggagagatggacaatgaaaattgactggatgagtgaaatgtcaattaaatttggttattaccttttcgaaaatgccaaaaatgtcaattgttggcaaagttattttctcgagttagctaagtttcctaaggtctaatcttcattgagtcgagactgttggtccattctcgagatggaggaattccggaaaaaagattggttatggtgatatgagaatcttgggaaagcacccatcata

SEQ ID NO: 21127 - DNA, 1069 bp, Heterodera glycines
atggagggaagagacggaagtaaaatttaaaaaaaaatcgtaaatgacggaatattaagcggcttaaattagacgatttaggaattattcttgaaaaatttaagttagaaaagtaagaaattttaagagatccgaaatttgaaattttttcagaaaaaaattccaaaaaaaatccaaaaatttacggcattaatgagagcttaaaatgttcaaatttgtgaattacctaattgccaaaatgcaacatgtgctatgccgaaagtaagaaaaacaccaattaaaatgtggcaaattaaggcaaagtgtccatttgtttggcatttaatttgcgcgttgaatgcaaaatgccaaagtgtacaaaaaaaaatgtaattggcaaagagcggagagaggataaagcaacaacaacaacaaaaatgtatgtgataacagtgccgaaatggtgcgcgcggcgtgccaaacaaaatgagagaaacatttaagtgccaaaagggggcggaaagactaagccacgacgaaagcatggggaaaagcggtggctggtggcggcgttcacacaagcgcacacaatgggaaatggcattttgccgccggaagagaaaaagcgtggaagagaatagtgtattgtgaatggcatttttggtgattaagagagaaaaagaggaaaaaatagtgtggagagcgagaaaggtgagagataatggagagaggagagagagaaagaggagagaaagagagagagaggagagagagagaggaagagagaagaaaaaagcggaagagagaaatgaatggaaaaaagaaaaaagggtgatagaaagatagaaatagtgaacagagatggagagggggggggggggataaaaaatgaactgagttagggaagtgcaacagggcagagagcacaattggcacgcaataaaatagcagcagcagcatcagacacataagtgttccctaatgatgatgatgatgatgatgatgataaactgctgctgatcagtgaactgaacactgatcagcatctattctcaacaacaatttccaccatctgtctgtctgattgtct

SEQ ID NO: 21128 - DNA, 2417 bp, Heterodera glycines
gtacaaattcgtcctgcccattacgtcgaagtttgagtccatactgaaaacattaattgtaaattatgctaattaaaatgataaattaacctgcttcgctccgccgctacaatactccacaatttcatgattggggtactcatcggggaactgtcccaagtgtggtccagtctgtagcggattcatgccgatcggatggacaaagatcagcgagtcggtgtctgtgtagagtagccgacatcctggcgttctcatcaccttctgcatcgctttcaacagcaaaaggcgggcctttgatgttgtccacagcgagattactgaaaattacaaatatttttaaaaaattctttaaaatctcaccaatattggagcactcgtgctcctccacccactccttttgcacatagctgatcagaatatggtccgcatccaactcgtcgatggaagtgacgtcaactgagcggttgtccaagtattccgccagcaccgaagggtcgtcggttatcagcgtctgggcaaggccaaagttgcgcaacgagaagcgcccccacaggttgttgagacacagcttttccaacgaccgcttgcccttgttgactttcatgttgttcttatcgattgaaatgccgaatttctctgcacactctgtgatgaactgctgctccaactctgtatttcccttaatgctggcgtcaaatccgctcgcttcaattttctgcgacatgaactcggcgatgtagggcctaaacagtttgtcgtcgccatgcttgtacttcaacagtcggaacactttggtcacacggtaaccctcctcaagcgcagcatccaattcaatggatgtacatgttgtgacccatccgcgttgttggtcgtcgtgttcacattggtagtcaaaattcacgcctccctttgggtagtcaagagcacactgcatacaaagcgggaagcatagccgctcgttgactttaaccggcaacactggcacatcgcacttgcgtggcgggatcacccacaccttgagcagagacaatttgtatgggttgtcgcgtacgcttgtccattccacattttcattcaagatgagcacttttgggtgttcaattgggtaagtggtggagaaactgaaacaaacaattagaaattgtgaataattgtataacaaaactcacttgacatacgggtagagggaagtaaaagcctccgaatccgcatttcatacattttatttcccttaaaattgaaaaattattcaaatttgaaaaatagtcaattattaccttgcgcaacatatccggattatatccgcgtttgaacagttcgcggaacaccaacaccatatcgaagcggccgccaaagtgagagaaggcataggtgtcgtaggccaaaggcaagtcgtttatcagccagctgacaaacgcttccaatgggctttccgccaccacttgcttgtcgactgttgtctcagtgaagtggcgctggcagaacgcaaccgtacgattgggtccacacacttcacaccctcccgatgcctctcgccagctctcattttcaatgcagtcggggcaggcgacccgtgctgcgatgaaattcggcaaatgctcacgcttttcgggcttttcagatggagtatgctgcatagtctccaagtcaaatgccacaatgcggtaggcgtcgctttccttgggctcaatgggttggatgtagcatccccgctcgatgttgtggtagttgttgcacatcttacagaagcgttcaccacaaacatgcccttttctgccattttgagtgttgttgacaacatcccaaacagcaccgcagtccttgcacttttttgaccttttgcagaagcctgactgtagatggtgctggtagcagccgttgtttgtgaattttttgttgcactctttacattttttgaagaagccggcggatgatggacatggaaaagctggtccaacacgtgagcacagcacacagcgcgccttacatgatttactgtgtgtcgacattcttcggtatggccgctcacactccaagcagtatggttgcagaccgccctgcttctgcacaccatcaaaatggtcctcattgaagtacaacagcagcggagtgtcgtaggtgttgtcaatgtatttgtagagcggcttgtactgtcccaacgagccaaagatgaacacagcaaagcggtgttgtcgctgcgcgttgttccagtagtcaacgacgtgaggcacgaaagtgtccgcgtcgtagccgtccaaatccattggtgcattgacctgtagcataagctgaactgcatcatgcttgagttgttcctgttgcccgtattggttgttcaagtaacgggaaaacttccatcggggccaattgcatgttttggcaaccattgttgcctgcaatgcgtagaacaggcagta

SEQ ID NO: 21129 - DNA, 1820 bp, Heterodera glycines
aggaggaataaatttattccgatcatcgtcatcatcatcaccactccaccggcggcagagcggcccattgtctcattgccttccccctcctctctcatcacacgccaaaaatttaaatgcggatgaaataggcaaattattctcaatcacacgtcaaacatttcggggggagggggaattaatgccgaatttgaatttgttatggcttttagaaatgatgcgcttataaacgtgcttggggttattgaaattttcattaattgtttaatccttaagaaaatttaaaaaatttattttttttaaattgaaaaaaataccaaatttcttattttattttttaaataaattaatcgaacttttcacaaattttattaacatgtcgccttttcaaatttgtttctttttattccttaaaattaagtaagttgaattaagaataaatttttgatatgattttaatttttatatttaaaattttttttttcaaaatttacttccattatttcatcctttttttcgtgttatattcgcgttggcacaccatattattacaacattataaattgtggcttttcacgacatccattggccccggcggtagcgagcggctcggcccgggcagcacacattagcctaattagtttttctcgttccttgccatccatcttcataacgtaaaaggtggaaaattttgggcatttcgcctttgaaaaatatttaaaaaagtaaaacaaaaaaaacaatgtttattattttcaaactagtaaatagaaaattttttgaagaaatgtagttttaggtagtttaagttttttaatgaaaaagttaagcaaaaatctaatcaaagaaaataaaaaataattttttgctatattttctgttaacttaaaaaatccttaagccatattgtattcctgtttctgtaatccaaaaattgttttttctagcccatttattctagtcctttctgtatttaattaattagcaaaacagaaaatcacattacataactttctttatctttgtttccttattagtaatttagcctattaaatttttatgtttgaaaattttagcttactgagagaagaagcttgctaaattgcaaaaaaaatgtgcattcattgatggggtggatcatccatcattcattcaccaaatgacatcacacacacacaaaggccacatcacaaacaatcctacgcccaccccctttcattttaacttttttttttcatttggtgattggcattcataataattattttttacataaaataattttagcaaatgtttcacgaaaaaaatctaagcaagaaaaaattggtcccatctgtgtataggtaggtatgtacatgcaatatttttttttaattaaattaatgagaaaataattttttcaattttttggtaaattaattaataaattttaacacataaaattctaaaatatttcatttcttttgtttccatagctttttccagaaaaaagaacttatccatctttgtcaatttctttcaaaatgccataaatagccttaataaaattttcttaatatatttttgggttaaaaataatttaattatttttttacccttttctaaccgttttattcaagttttttgccctttcccacaaaatacttcttcatcggcttttccgtccgtgttaattaagagcttttacaaccgttccctcccccctccgcttctgcccccccccgtcgttacacgttacggatcccaccgctgtgccgtcccgctctcacggcgtcgtccgaccgacgtcccggctccgtcgacggggtttttttcttcgg

SEQ ID NO: 21130 - DNA, 1373 bp, Heterodera glycines
taagggaaaaaagtgccaaagaattccaaaaataacttctataattagcggcaaaaaaaagtgcccaaatttattgacctaaaccaagcctcatcagatggagcgttggaggcttatgggttaaaaattgggaaattcaaaaaatttctgtatttaaagtgagaaaagactctaattaatgatggatgatgataataattagagttgattgtctgcagtcggttggcgctccgctgttaattgataagaaaaggcgataagcaaaaaactcagcgccccgtctcccgtcacatttaaaaaaaatgttgcgtatctttcagggatgggccaaatcggaaaataaaatgcgaaccgcgaaatttgcgaaagtaaaaaatgcgaaattccaaaaaacgcgaaattgcgaaattttttctacaactttttaatagtcaaaatcatacagtaaaaatcatttttgtaaaattttattccaaattttaaaaatcaataaaaagcttttttgaggcgcgctttttccaaaaaactttttgggaagagggggcaggcggcgccggtaggctccgccggtaaaaattttgaaaatcttttgctgttttgttttgtaatatttcggtacacctcagttgggccccggctcgtttcggccccagcatgtttttggctacaaattttttctattttaaccaaatccaacattgttggtatcattcgaaagcttaatctgtttagaagctttttttaagatattgcttcgcgagtagacaattgctaaaaaagttatccatgaaaattgtgaaaagtcgaaatttttgaagttttttttcataacttttttccaggcttgaaaatcttttcgctttttgtaaggctaatagagcatgtgaagagctttcgaatgataccaagattgttgcatttggatgacaaagaaaaaagctatagtggaaaaacatggtgggcccaaccgtgccggccaaatcgtgccgcggcccaaattctatcttatgcagcctgacctcggtaaattgtcatataccaccaccaagctcatggttttccgtgtaatttttaagtaaaatgtcacagaaacaggggggctttaaaatgttgattttaagagttgaaattttatgaaactcgagaacaggggggggggcaataattgacacagagagagagtcgagacagaaatgtaattcccggaattaaaaaaaaaactcgggccaatgggaggagcaggccccacccattcagaaatgtaccgagagccgagactgagaccaattgacactcaaaaagacgacaaaattctagactcgagaaatgagaacgggatatattcttgagcagcccaatgtcttctgtactct

SEQ ID NO: 21131 - DNA, 932 bp, Heterodera glycines
ataatgggactgtataaagtcgattgctgaaggaatcgtaagcgccaaaattgttttatgagttttttgatctgtctttatgatttttccttacacctctttttgattggcttatatcacacggtaggaaccaattaaactcgtacataactcgaaaatatttgtgtccctattggacgagggggggggcgagggagggggcacgggagacggagacggacaaatggaagggtttaggggggactgggggagggggtgcatgtgatgtgcagctgatggtggctgaggcggagcacgggacggggcgtgggcacattcctctcgagacaatttctggccaagaaactggaccccgggacaactgagtcccgaaaatttggtgcctaggaatgcatggacacattactctccatcccattcccaatggcattcggggggggggcaatttctggccccaaaactatccccgggacaactgagccccgaaaaaatcgtgcccaggcaaattggaccccgggggacaattgtaaccgcgacatttgcgacctttggcggcttgaaatgttttcatttgaaatgaaaaaattattgggcgaaacattcaaaactttgttagttctacaaaaaaacaaaactaataacgcttaagaataaacaaaaattgtaaaaaaaaatgcctcaattttatttccaccgcagacattccaagcccaccaaacccatccatttgtgtggattgtggggttctgctgaatgagtgggtgggtgtgttggacgcgccctctgtttttgagatgaatggcgcaggggaggggggatgggcacagggcgggggcacacactcacattatttaagggcatggaatgagggggcaaagttggtgtcggaaagaagggaaaaatcgaaaaaatagggagggagaggcacaaaa

SEQ ID NO: 21132 - DNA, 1415 bp, Heterodera glycines
caaaaaaaaattatagaaaaaactgcgggttttaatattttttgttcacaaaactcacctggtgaagaaatgaggagataaatggacaaaattgatggcacaaaaactgttgtcaacaaatgcattttaatccgaattttgaaattgaagaatttatttgatggtaacattttccaaaatgtgagcgatttaataatggttttgtgttgctgatgatgatgatgttagaagaagcatgaattgtaattggcttaaactttaaaaaaaattaaaaatttgcaccgaaaaattaaatttgcaccgattgtcgcaaattgtcagaatagcgcaaaataccgcgcgaatctcaaaatggaaattttatgctcctgactgactgtatgttgacaatttattttgatgttttaaggaaattttttaatgtttttatggatgccttctcttgtttcatatgatggattgaaattggaaattttaatgtgattatttgcttagcttaacgagtatatgtatgcttttgaacaaataaatgcgcccccccccccgcccttcaaaattttgaaaaaaaaataaaataataggagactcagaattttgaaaattttttataaaaactgatgacaagctaatgtgataaaacaggttaattcttttcctttcagtatccctgcaaagtttggggcgcttctgataagtttctgaaaaaaaagttaagcctaaactttttggcctgtttaaaaaggaattaaaaatttttaaaaatttattcagtgtccgtttggggtactcaaacatttatggggagcaaaaatccaacgcagaattaaagtacagactatagggaagctattcccgaaggattcggtctccccataaatctgggcgcatcggttcagggggactgccccgaaaacccaaaaaaaattttttggataaaaattatttaaatgaactgactagataatatttaaaataggttatttctcttcctttcagtattcctgcaaagtttggtgcgcttctgatcagtttctgaaaaaaaagttaagcctaaactttttggcctgtttaaaaaggaattaaaaatttttaaaaattttattcatctccctttttgatagaaaaagcatcagagtgcctaaactaacatgtaaataaaatttggtgcgtttcagaaccctttctgaaaaaatatttaagaattaattttgcaaaaaataaataaaaacgaaagactcagattttcgaaaatttttttgagccagctagctcggcgctcatttcagtgtaagttagtcctttaccggggagtatccctgcaaagtttggtacgcttctgctcaattagcaaaaaatatgagtgatcgaatttacaagaaaaaagttaagcctacattttttggcatatttaaaaa

SEQ ID NO: 21133 - DNA, 2838 bp, Heterodera glycines
  unsure (1)..(2838): unsure at all n locations
aaagtggaatttgtgaggacgaaactgtctccgccaataccccaactggacccgataaaccgttggaattgctgtgcggcggttgttgttgtccgccaaatcccccaaaaagttgactgtgggtcagagaacgggacttgagtggccgcaacaacattcactggcgcagaaaacccgttgaaatttcttgcaggttgttgtccaccaaaagcggaactcggttcagggaatgaaacttgcgtgccaatgtcttttgtttcaagttgaggtccacgcacaataatgtccgaaaattcgaacaaatccacaagaggaggaggcgttccgagaaaaccagctttcggtgcttccagaggttgcactttgctcatcaactcctattttgatactttgttatggaatatttttcagaaaatagtaccttttctttttcctcaacagttaggatatcttcatccacagcaaacgaattcgtttttctgcctgtctccggctctcggtgtcgaaatggcttaatcggtccctgtcgcgctaacggcgtagcaataatgtcaacaagtgaaggctgcgtaatttccgtatcgatggatcttgctgatggcatcggacaacgcctgaaattgtgaaagtgtgtcaattataagtttaaggtcaaaaccttcgtcacaagttattcccagttaacaactataacaataccgaatttaaatagtaaaactaaccaatatggttttctcgtttcacgtcctcgctgtgccgacaataattgaagtcttgattgtgttaaaattgaacgacgaggcggtcccgaagtgtctgcctggtcagaatcgacccgtgggctaaaccaacgctcactttcgtaagcccttttcatgtgtagcgacgatgatgacttaaaagaaaaatgatttctatcagtatatcgccttgcaactagtgcttatatctaattagtgatctaattttggctaatntagtatgttattttgttgttgtttatggttaggtttgtaatggaaaagaaattaacctttgttggcgatgatccagcaattctttgcaactcattaaaaaactgcttggtttttgacataggcgcaggagttattttacttctcaggtcaataacccgtgaattggatggataaagaggatagagttctttcgacatatttttatctaaagagaaaaatgcataaaaagccatatgacaattaagtgtaaaaacgtcaaaattgaatagattatgcgaagtgacgaacaacattttgattaattaatgttttatcaaggtcaagtattaattaaacaagtcaaaacacaaataaaagtgaaagggacgtgaaaagcgacgcgtgaacgtttgttctttttcttcaacgattgctcattcccagaccaaacactacgattgcgtaaatgtaaacccaagccaaaagtacagtaatagcgcgtaaataatttatggcattttatttatttaaaatttaaaattcttcgctttaataaaacagaaaagaaacggaaaagtagtaaattgtccttccacgcttttccttgttttgtttgccctttccctttgcttttggccagtggccattgcctttagctttggcccattagcttccgcttcttctgctcccattgaaccgcttctcctttcttctctttttgttttcaatccattgtcattcattcttcattcgtccttctttgccctttctcttccatttgttttgcctttcattagcataattttactcgcggctaagaatggctatttaatgacgacttcctttgcaattttggcacaaataaaacgcgatattgtgagtaacagtcataaaatacttaattaaaaatatattttggctccttttttttagctcatttgtcatggcagcgcatttttcacatattttatttatgtttttgccattttcaatgcgtcattgcaacagataatcaggtacagtgattttcgacaggataattaggttaacaaattgaacccccaattaaagttgtttttctcatcatgatattacattattcgcacgttttattgctgatttttgccgtttacactgcgtcaaatggagctgttaaccatgtctagaaattttctataaaaaatttgtcatgattcaaattacaatcattttaaatttccagaacgaaactgattcgtcgagcgaatgggatgaaaatgaagcgctggaggatgaggaaaaagaggagtctcaaattattggtgcgccatcggagctgttggtcatggcgacccacgactcggttcaagtgtcatggttaccaccgcgggatgacaatgtgctgatcagaggatatttggttggtcggcgatttaacaatcatacagccatattttttttccaaagatcggttggggtattaacataccggacgtggaaaaggcgacggttgacccggaggctcggcattttactattcgagggctcaaaccgaaccgtgaatatgtgatttcgttgcgggcgttcaataaaattgggcacggattccctatctatgagactgtcaagtcggtggcgtttctttccttttatcatttcatggacacgtaaaataaataattattttgttgtgcttaaagaacgtcttcgtatggcgtccattcgtcgaagtcagcttcgatctctgatccaaagtccacttttgccggatttggtggacaacaacaacagccgccaagcaattccaacggtttatcggctccagttggcgtagttgcggagacagtttcgtcctcacaaattcgactttcatgggctgacccaaatgnagaatgcatttaac

SEQ ID NO: 21134 - DNA, 2836 bp, Heterodera glycines
cagtttttcatgagtcgtctccccgctgcccccccccttcccttggccccgtcgtcgtcgatggatttgctctcattttcttccttatttggcattccgcagggggagactcaaagggtttggcccctcaggccatgccaaaggtgccctcgggatatttgccccgtggcactttctgcccctccccctttcccctcatttttacgtcctaagactcacaacacaattcggacgaagggatgctaatgagcggcgctgacacaaaaactcctttttttgcccatgccgatttactggaaactttggctttccgtcatttcttaaaaacgctgctcctttgttttccccgttcttcccacgagttcttcaagtgccatgtgaatcggacggacattgagaggcttttccttctcaaatgccctcccctccccattctctccttctcgcgatcagtctcaattggcacggcattccaaggacagacgcacctgaacaagccaatggaaaagcttacactttcgtactttgtgcggttcatttattttcaattcgaattacaattgatgtagtcaataatttaaatgttgttttttatcttccataactttttggaaattcttttttggatttaagcaaaatgaatgacatttcttcaaattctggcggctatttgccggggccattcagtggcgatccgccaagttcgggaagttcggccgatcttccatatatggtcgaactcacttcttcaacttcaacaacaatgagaccattggtgcaaatttcgtctgcagcaacagcagtactgctcaacgacacttttccctggaattcgacgaaatgccaatacgaagatcgacaaaacaaaactcattagtccctttaattatatatcccaattagttttttaggaacctccactgacaactttgcgcttttgggtggtttccgtttttggtaataaaggacagaaaatggtatttaaagtttaaaattggcaatcattaaggaacaagcatcgcgttgtgcagcattgtggagaatttgtttttcttttatcttttctcgacaaggcaattaattattaatttcattttgcaatttacttaatttaacaaggaatatcaattgttgaatttattattatttatttatattataaaaatcaaattaaaaacagaaagcaccaccggaccacgttcaacatgtacatgatgttcatctcgttgttcgacattttcatcagcatttcctacatccttatccaatcaatgaacgttttgatggactttctccgatcactgacacttttcagaatatggtgggacaatttcaaatatataaaaataaaaataaattttatttttataaaataaatgaataatttaggcacatttacatggttccctttttgaccatctctcactgtgccatcacttctgcgtcttttctcatgtgagcttttttaattaattaaataatcaaccgccttaattgtcaaaataattaatttaatttttttttctatttttttagtctcgccgccaccattgagcgctatttgctcactgccaattcgaaacacattcgattggtgcagagaaatcgccgatacataatagcatttgccattctgatgggaatcatctccaaagtgaccatctgtttggagtttaaggtcaaatatttaattgcctctaaattttaacattaaaaaaaaatttgcaatttaatttttaaaatgtattaaaaatccaaattaaaatttattcagatttcgtatttggaagattgtgccaatactatgaatgaaattgaaataaactttgccgactttgtcttcgacacggattatcacttggtattcaaattaatagttacattatccatttaatctaacttaaatcagttatttttagtattggcgcttttattaccgcaattttgtaacaatatttttcccattcttcgcacttttaatgttcgtttaatcataatttattatttaattatttgctttataaataatttatacataaataataatgttttgattcaaaaaaatataaaataaattcgcagattgaatgccaaaatcatcagtgtgttggccaaggtcgaaaaagagaattacaaattccaaatgcttcattcgtccaccgcaacggccaaacaaatgaaacggaaggtaaaagaaaaattaaatataaaaatgaaaattttaatttaaaattaatttttcctcaaaagaaagtcactcgggcagcgaccatcaccaccattctgttggtgtgctcctatttggtgtccaacatcatcagtgtggcactgaccacttgggaacacattgacaaaccgtccctcgtcggcgagtacatacagtaagcctcagtaccgtcttcgttattcgtgccatcgtcctcccccctccctccaaatcagactctatctgatctccattgatatgtcctcgctgctcaccgtttgctcctgcgcttttcggcccctcatttatttgatctgccagccggcactgcgcaaggaagtgttctgtctgatgaagggaatttacctggcgagcgacgagtcgggcgacacggccaaacgcacgcaaatcaccaccacggcctttgaacgcatgtataactcggtgagcaagtttgattgtcgatcagaggagggaattccgaaattgtctcatcaaaaaaaacccagtgcgacactggtgctgatcactctcatcagagaccagggacggaggagggcggcacgcggagtacgtaccccttcccacgaataagccctacgctccaaatttaagggaaaaatagtatta

SEQ ID NO: 21135 - DNA, 991 bp, Heterodera glycines
  unsure (1)..(991): unsure at all n locations
tattccggaaggattcggtctccccataaatctgggcgcttcggttcggggggactgccccgaaaacaaaaaaatcgattttttcaagtgtccgtttggggtactcaaacaattatgggggagcaaaaatccaacgcagaattaaagtacaggctatagggaagctattccggaaggattcggtctccccataaatctgggcgcatcggttcggggggactgccccgaaaacaaaaaaatcgattttttcaagtgtccgtttggggtactcaaacaattatggggagcaaaaatccaacgcagaattaaagtacaggctatagggaagctattcccgaaggattcggtctccccataaatctgggcgcatcggttcggggggactgccccgaaaacaaaaaaatcgattttttcaagtgtccgtttggggtactcaaacaattatggggagcaaaaatccaacgcagaattaaagtacaggctatagggaagctattcccgaaggattcggtctccccataaatctgggcgcatcggttcggggggactgccccgaaaacaaaaaaatcgattttttcaagtgtccgtttggggtactcaaacatttatggggagcaaaaatccaacgcagaattaaagtacagactatagggaagctattccggaaggattcggtctccccataaatctgggcgcatcggttcggggggactgccccgaaaacaaaaaaatcgattttttcaagtgagtgtccgtttggggtactcaaacaattatggggagcaaaaatccaacgcagaattaaagtacaggctatagggaagctattccggaaggattcggtctccccatatatctgcgcgcatcggttcggagagactgccccgaaacanaaaaatcgattgattcaagtgtccgtctgcggtactcacacaatttatggggagcaaaaatccaacgcagaattaaagtacaggctatagggaagcta

SEQ ID NO: 21136 - DNA, 1543 bp, Heterodera glycines
ctttcactatcaaaaagggagatgaataaaaaatctaaaaatttttaattgctttttaaatttgcgaaaaattttaggcttaactttttttttataaactgatcagaagcgaaccagattttgcgagggcatcaaaaagacaaggaaaagcactgctatgatgctaactccagtaattctgaatttaaaattttttattaatttttaaagcttcactattttatttttttagcaaaattaattcataaatattttttcacaaactgctctgaaacgcaccaaattttatttacaagttattttaggcactcagatgctttcactatcaaaaagggagatgaataaaaatctaaaaatttttaataattgtttgagtaccccaaacggacacttgaaaaaatcgatttttttgttttcggggcagtccccccgaaccgatgcgcccagatttatggggagaccgaatccttcgggaatagcttccctatagcctgtactttaattctgcgttggatttttgctccccataattgtttgagtaccccaaacggacacttgaaaaaatcgatttttttgttttcggggcagtccccccgaaccgatgcgcccagatttatggggaggccgaatccttcgggaatagcttccctatagcctgtactttaattctgctttggatttttgctccccataattgtttgagtaccccaaacggacacttgaaaaaatcgatttttttgttttcggggcagtccccccgaaccgatgcgcccagatttatggggagaccgaatccttcgggaatagcttccctatagcctgtactttaattctgcgttggatttttgctccccataattgtttgagtaccccaaaggacacttgaaaaaatcgattttttgttttcggggcattccccccgaaccgattttatttgcaagttattttaggcactcagatgctttcactatcaaaaagggagatgaataaaaaatctaaaaatttttaattgctttttaaatatgcgaaaaattttaggcttaactttttttttataaactggtcagaagcgaaccagattttgcgagagcatcaaaaagacaaggaaaagcactgctatgatgctaactccagtaattctgaatttaaaattttttattaatttttaaagcttcactattttatttttttagcaaaatcaattcataaatattttttcagaaactgctctgaaacgcaccaaatgttaattaaaagttaaataaggctctctgatgctttttctatcaaaagggagatgaataaaatttttaaaaatttttaattcctttttaaacaggccaaaaagtttaggcttatattttaaaaagtttcatcgaacctagcgcactaaaatggatataatctctccaaattttgcagtccttctccgattgtaaaggactaacttaacctgaaaaaatgccaacgcttgttgtttttaaaatttatcgaaattctgactttttcattaattatttattattttgcagacgctgcaggc

SEQ ID NO: 21137 - DNA, 1524 bp, Heterodera glycines
  unsure (1)..(1524): unsure at all n locations
cttttntggcgcgaaatgcgacttttacacccctaagaattggattaaattcccataaaatttttcaaaattttacctataaattgtcaatgaaaaactgtttataaatgatcaaaatttccaattttttccccggcggcgcctatcggcaccgccgcgcccccaaaactcctattttttcttagaaaatggcccaaaatcgcaaaatttggtaatttgatgaaaaactgttctcagcggcgcgccaaaactcttatttctcattagaaaaatcatacaaaaatcacaaaatttgatgattttttggtgaaaattgtcaacaaattttaatcaaattttcaaaaattttcccggcggcgcctgccccctcttcccaaagtttttttggaaaaagcacgcctcaaaaaagcgttttattgatttttaaatttggaataaaatttaaaaaaatgatttttgctttatgattttaactattaaaaagttgtagaaaaaatttcgcttttcgcatttcgcttttcgcattttcgcatattttggcttttcgcatttcgcttttttttcatttcgcatttttcagtttcgcaaatttcgcttttcgcatttcgctttttatttttcaatttggcccatccctgctttacatcccttcacaattcaaattcttttctcatcggcctggctcatcttcggccaactttgtgctaagcaaatttccttcacaatttctcactttccacatctgccaatttacattttattttttgtgcgccattttcctttgtgctcacttttcacttcacaattttctgcccgatttgttgtcccattttccatttcattcacgtgccgtctgtcactccgcccattttcaaaattgtctatttaagcggccccgaccaaggggtcgctctcttctcttccttccagcccgagggggcctcttccttcggttcattccctttcggatcattcattttgctggacttttcgatcaatttcgtcgttacacatttttaattcgtcgatcgcttcgttaataaattttgttcggaattcgcttgggggaaacacggaaaggagggaaaagaccctcctcacttcatcaaattcggcaaagtctcgtgcgaggccaaacgaaggcgcccactgtcgcgacaacgcgaaatcctaagataaaactaaaaataaaaaagggaaaaataaaaacaatagaaaataaaatggggaaaaataaaacataaataaataaaaatatttttttatttttattttggaaaaataatattataaaaatctatcgaaaatataattacataaaaatgggaaaaacttttgaaatgaataacggaaaaatgtttgaaaaaggaaagtgcatttcctcaggaatgaaaggaacgaaaattaaataatattaaatgattaaaatgaaatggcgaattctgttaaggattgggttcgaaaaacaattattaataaattaattaaatatattaaagggaattggaaattgtaaaggaaaaa

SEQ ID NO: 21138 - DNA, 1252 bp, Heterodera glycines
aattataaattatagcgtactttggtgcaaaaaagcggtatttaaggggtgggcttctccggaaatttcagattcaactcgaacgattccctccgaagtttccacagcacccgcctgctgccattcagcgcacccggcccgcactgctccttttccatgccatgccattgcccgagtgccctcccctccccgtgccattgtttgggccccattggatttgccgctgcccgagttgccctccttgttgcgttgcttttgcctctttgatttggccgcatttcccatttgtttgttaatttgatttcaccatattttgcccttttgtcgttccgatttttgtgtgttcccaatattttgtatttccctcaccgtcccgattgggacggtttaattacccaagtttgagggtacaaaataaagtgattttcggcgtctttggtctttaattttcgtcaactcgctctgaatacgtccgcccagcccattcaaacttttttgccgtcgtcagaacgacacccactccggtcttgaccccttcctttcccggcagcctccgtcgtctcccctaaccatcccgatcccaatttccttcctgtcggcaattagggaacatttgggagggggccgaagcagcaacaaattcgagcagttcggtctcccgccagccggagcaaccgaagagacgagtgtgacctcccgtcgtcgtcaagtccaagcagagcagtgaaggaaggaagagccgagcggtgccaaaatcgtccaaagcgggacagggccgctcgtcgccgctaatccctccagccggagaagcgcgcatcgatcaaagcggactcccgccagctggagtatccgccgcagtaaacgggaatcgaaacccgtggtcgtcgagtcgagaacgaagcttcagttcaaaggggtccgacaagcccttccccaaaaccttgtcggtggtgccgtaaagcaagcagcaaatcgctgcacaattccatcaagcaccagtccaactttgtcacccctcccccctcccattctcgtccccctttgacgctgatcggatcggtcagcagcatcagacccatcagagcgaacggcaaaaagtgcgcaattccctttgcggcacagcgagcggagtgagcagagaaaaaagggacgagagcggtgaagaggagcgggaaccaatcccgcctcagctgggccaagccgcatttggccaaaccccgcccgagtaaaagattggcgacaaaatccatgt

SEQ ID NO: 21139 - DNA, 1380 bp, Heterodera glycines
ctaaaataccccttaggacatgtttttgaaagatttttggtgaaaaaatttttccactcaaaaaccatgtactcccccctttggtcgcaaattgcgaaatcacttttaattttataacttttttcgaaaaagtgataaaaatatgatataaaatttataaaatagagaaaaaaatcgcggattttttcattattttaatttgtgaaaatacgttttcagaaccgagttctgaatttttttctgaaaattcgaaaatttccagaatttctggaataccttttttcattttacagatagaaattccaaataaagtccataaaatcgtccttatttttctcaatttttcttgctttattctatgaaaattggacaagcctaagtttagttatgaattttcaaaaattacctcaaattctcgaagcccaaaaaaatgaaaaattttcaaaattttttaaaaaattccaaaaattccgaaacaaaaaacaaaggtcatattcgtgctcagcacctcaaaataccccagaaaaatatttttcactccattcttcaacccaaaaaaaattttcaaaaatttctagggggcctagctcgaaaatttgtgaaaatttttcgacatatagtacaccgttcgatagagcttaaaaagctctacaattttgctctaaggcaatttttcgctaaaaccaacccccgacgagttatgggcccgggactcaaatgtcccgctcaggccaaaaattttttctatttccggaaaaaaatcgaaaattttctaaaaatgtcaccaatcgatagagctcgaaaaacggttgcttgaaagtggtctccgtttttctgggaaaattcgttaaaaaatcataaaattcaaaaaccaaaaaatcgttttttaggcctagctcgaaaatttttgaaaattttcgaaatttttaaacatggatagatagagctttaaaagctctacaaaaagtccgctggcgaccccccgctccgagcaaaccctggcgcggcattcagctggtactgaagtgtccaaaaaaagtagttcttacgttgcctaacctacaggtcaggggtttgatctgatcaaaaaaagtttgctggcaaagttgtagcccatagtttgggcattgatcttttggggttcactaagccttaaaggcaaatgcaaaaaatttcgtaacagtgagactgtcagcaaagtcagtttttgcgcccctggtactcagttgggcgtcgagaatttttttctatagttttcccagatgcgccgtctcgagctaaaaatgcattcgatttttaatattcaataaaaaatttccttatttattacattttaaatcatgtcgacctctttcgcgttgatgaacctcttctagtcac

SEQ ID NO: 21140 - DNA, 2080 bp, Heterodera glycines
atttttcatttttccaactttctcgagtctgggaaattatgtgccatcctctacaaatgcttgtttgtctgtccttcaatcgacttttgcccaaacctttgccatttcccacccattgacctccgtccaatccgctgaccaaataaactcgcattttgagtgcccatcccccagaaaatgcattcacatcactgacacataaatggccaatttcgcgcattgatcagcaaagaacggtcagtggtcacttccgctgctccaattatttcttttgggcagtgtttgcacacgcattacgccccccccccccggcggaacacttgcggatcatctcctgctcataagccgagacccggacgggacgaacctcgagaaagaaaggggagggagaggaaaactaattagcatgattacaaaaataaatgaattgcagcaaggccattaaaaactgatgagagatgggtgatgggggggaaggtcattcatgccattaatttgtcacattctttggccattaattcgcctctcattcatttgttggccaatactttccgtccgttccactcaaaaacaacaacagcacaacaacaacaacaacaacaagtgcacagtgttgtgctggggtggaaatggtcaagtgaaaacggacggaaggaaagagggcaaatgaaaggcaaacaaagtgaaaaatgaatgggggaaaaggggggaaaggggggggggggggaaaattgttgtttgaccccgggggagaaaagaaagaaacggcgggagagaatgccaatggtaaataacagcagcaacaaagacgaacacgagaaatggggggggggggagaagaagctcattcattcgccatttacagtaattggggggaaatgaaacgatcgataggaaaatgtgagaagggacagtcggcgaaattggcaaagtttggaaacaatggcactttacggacaaccaattaatgggttagcggcaacactttttagccttgtgttccaaggaatgtttcggcaccgttcagtcctccgctccctgccccgttggacactccgaaaatagcgccgactcgcagcagcaatgccctgaggcgatgcaactccgcacgtgcgtccgccaactcgcgcgcgcattgcgtcacgcggcgccgttccaattcgcaattggcacaaacagacggaaagaaaaaatgggccgaagagggcacatcgaatgggttggcggaaaatgggggcgacgccttttgagggcttaatgacagcgattaattaataatttaataatgggcgaaggatgcctcgaggcacaagaagtgtcggagtggtgcaaaatgtgcccggcggtgtcctccttcggcaccatttgctgctgctgtgccggcactgtccccccgcgcatatgcgaggcgccccaatgcaaaaggtaagcggcctaaagttgccctttctcgaaaatttactttgtctttttgacctgcgtataaaatctttggggacagagaaggcacgggaaaaagtgatcagaggaagtggcgatcggttgacgagtggccaaaagttggccaaaaaggcggccaatggccaattgttgctgctgttgttgctggagatggtcgaatggcgtcgggggacaaagcgaattcggcggaggagcgacgggcaaagactaacgaattgggaaacgaatttaaagacaattcgcaacaaatcaccacgcttttgctgggcataagctcttcctcgtcccgctcaactttctccccttcgttttgcgcttcattttcacttggaaaagtgcttttggaagcggtcgtctgctcattgtcagcggtcggcccaaaaacggacgacgacgacgaagaagaagaagagccccgccttttcgctcctctaaattcaaattcaaatgccaattggccaaatgtctgtcatccctcccccgccgtttttgcgctttgcccaccctttcgccgccgcttttcccccgccgcactttccgtccctcgtccggtgttcctccagcgccgtctgttccccaaaacattttccgcatttttgcatgcaaatttgcgttcctg

SEQ ID NO: 21141 - DNA, 1114 bp, Heterodera glycines
  unsure (1)..(1114): unsure at all n locations
ccaaaaatgtacacaaataaataaaaggcatttnttcttcttcccctcccgcatcaatcccgaacgaatatttcccctccgggggagggggttacacgcgagacggcgactgattggatttttggattggattgaattcaattggagaaaaggggcggggggacacaattcgtggcaagaattagtcccaccagcagagcacaatcaaaaaggaatttttgattaaagtttaaaataaatatgacttacaccgcccctctccccccccacacaaaaaatgtttttatttgttacatttcataatttaattatattttaaataaaaaatcaaccatttttattttcctgaataaaatttaaaataattttggtcaaatgttcgactctgtaaatgagttttacttcattctcaacttgttcgaataaactttcgttctcgagcttatcaaattttcatcagtccactcgagagtctcggccaaaatttggcaagaaattatcccacattggttcattgaatgggaatgttaagcggtcgagagcgggctctcgcatttataaaagccccccccccccaccatcaaatcccttctcagtcctctcattttctgccctccgatcaaatccttcgcgatgcccaaaaagcaacgaaaatccgtccatcccctccaccccgctaaacatcgccaaatcgatggcgtaaaatatggaggggtatggtgtacaattggcaaaatgtcacacagatttaatggccccgccggaaacggacggcggcggatgggcgaaaccgatttatttattttttgtacagtccgaaaaatcttttgagcatcgcatagtgaaaatgatgatttgcaaaacgaagtcacaaaatatgtacctggcctaaatttaaataatcctttcaaaagttcattcttggcaaagtgtcccttttccgctgcgtttcagttcctccttaatcatcctttactaatagtcctcaacttttcaccttctccccccacccgccaatccatcgctttgcttaccaaacatcacaaaacgattttccggtgcgatttccttcaggcaattttatcgcacggattgcggcgggggaggggggggg

SEQ ID NO: 21142 - DNA, 1264 bp, Heterodera glycines
agcagttttatttgaataataccaatccaattgatgagtgatgatatgtgtaaaatgtattctttaagctttttctctctctttttggtatgtatttattttttggttcaaattttttcagaattgaagcacttttttaaataaaaatgaaacaaaggcacgcatttttaagggtaagaaatcaaaaaatagaggcgaaaatggcaaaatttaaaaaaccatccctggttttcaatgaaaaaaaattttttgaacaattttaccttttgatgcgattgaaaaaattcaaatttattgaatttttaatttttataataattttacggagctaaaaattttttttttaatttctatttgatttaaacaaaaattacatgatatatttgaatttttcgaagatgattattataaaaaaaatttttcaggaaaaaattaaaatataggaatgattttttaaaaaatccatttaaaaacggcattttcattatttatcccacacataggaattgatgtactagggccgggccggaacctgataccggctttggtacttcatagctttttggacggaaattcagaaatttatttttgtactccttttaattccaaatcgaatctattcaatcgatcatttttgcctcaaactcattccgatatccttcctctctctctcttacaaaataattttttaatttaatccttaattgtacaaatatttgttaattcatcctcaaatttaaattctccttgtctctttttgccccctttttatgatcaggagattttccctaggcaaaatgttgacaaaattcacatattttcttacaaatcgtcacggacatccaaaacggattaaatgtgtacatgtgtataatatcccatcgtctcgcctaatccacgcaaatttcagtcgcccaattttttgaaattttctctcatttttatcccaccaaatcaatgctgcatttaaatcatatttgttcacattagcatataattagatcacatatttttttaaacatcttattttttgttggccttttccgtgatcatttttgtctctgacaaaaaaaaaccaccgccaaattttttttaaactttttccccctttttttagtccaacacttttgttgttccacttaatcgctttctttttcttccttgtcctcccttttggccgccgattggtggaacagaaatcgttggatgcgccgccgcttccgaaaatgctttatccccaagggcacccactgctgcttctgct

SEQ ID NO: 21143 - DNA, 2399 bp, Heterodera glycines
taattaataatacaggtctcaactgctgtcaagtgttctacaatgttgacacgaatgtgtcgctggaatcgtcatgcagcagcacgtgcagaaacgggatgacaaacccgggactgagctgcccggacttgctcgcccaatgacggacccaaaatccgccaaaaagggccaaattcggatttgggttaaaggattcgttgttccgccattggaggcctggccattggaggaccggccattgaaggacccgcctttggaggacccgccattggaggattggccattggaggacccgccatttgcggatattcccgacattgagggaccgactttttgaggacccgacatttgaggatatacacaattcaaaaaaaaatgaatgaaaattttatttatatcattataaaaaaagagaaaaagctattcccgagggccggggaagcaaaaaataaattgtaccaaatgctggcaagcccttatcaatctttgattattttggaaagtttcatattcaaaaacaatttaagattaactacttcattaaatagtacttgtgttttggtaattcatgaagatccccttttttctattaacatgtggaatcattgttaggaccacaagtcaaaacaagaatgaatttataatactttttaatatcagagtcattaatgattgttctgaagaaaggagagcggattgaatgagttgaaccaactcagaggatagtattcgagaaagaaaaaaacataaagagacaagatttgtttttagaacagagcccggaattttaaatcatatttttctatgcgttattatggcgagagaagcccaaaatattttctcagaacatttttatttagggctacttataaaaaaataaaaaccgcccgaccctaaaaatgcatattttcttgaaaaaatttgctcaaaatctgttaacaaatcgcatttgaataatttcatgaaaatcaatgaattattaaaattttattacatttttattttttcaaaaattttcaatttataaagacttccagtttccagcagggtttgatttcgctttcacccttttggagtgaaagattttccgggaaccgggaccaaccgggaatttttaaaaattcaaaaaaattcaaaaatttttaaaaaaattcaaattttaatttttttcaactgaaaatgatacaaaattaaatttttattttgttttttatttaataaaatccaaaggttaaagctaaattaaattaatgaaaattttcaaacaaatttctttaattatttcaaacaattaatcatttttggactaaatgatcgaatattatagaaattcagatctccagaattaaacttgaaagcattatttgtgctgtaaatatttaaattattcggttgtccttaatgctttttgatacattgcacccgttggcccttgggaaaggccttttctcttttttataatgatttaatttcatttttttttgaaattgtgtatatcctcaaatgtcgggtcctcaaaaatcgggtcctcaaatgtcgggaatatccgcaaaagtcgggtcctcaaatgtcaagtcctcaaaagtcaagtcctcaaaagtcgggtcctcaaaagtcgggtcctcaaatgtcgggtcctcaaaagtcgggtcctcaaatgtcgggtcctcaaaagtcaaatcctcaaaagtcgggtcctcaaaagtcgggtcctcaaaagtcgggtcctcaaatgtcgggtcctcaaaagtcaaatcctcaaaagtcgggtcctcaaaagtcgggtcctcaaatgtcgggtcctcaaaagtcaaatcctcaaaagtcgggtcctcaaaagtcgggtcctcaaatgtcgggtcctcaaaagtcaggtcctcagatgtcgggtagccgaaatttttagtttacgtagcaattcagaaaatattaagaaaagggaaccgatattttatgaatttttttcaaaattggggtattcatttaatataaggacactttggaaaactgagcaaaatcggtgttggttggttcagtttgattcagttggtcacaggtttgagctgattaaaaccttatggcccttaatttctcacggaaaacttggaaaagccaacacaactctgcctaaaagacagcttaaaaattgataacccataatttcgaaatttcccactgagacgcctaccgataaaattccttatcagaaaaatttctgaaaattaataaatgcctgggccttccgagtcgggccaaactcaagaaagtgccgggatgaaattctcaggccgtaatgggaaaaggggcaatttaaatttactgtattgtggtgatttcgatcatcagccctaacagtgagcccacaaacggttgtgataggcagaaggtaatgtaagcgg

SEQ ID NO: 21144 - DNA, 949 bp, Heterodera glycines
agttgcgcaacgagaaaattcgcatgatgaaactgatggaggaggacgacgtcggctaccgtcagctgctggacgagaagaaggacaagcggctggtctacctgctcaagcaggttgaggaccaatttaaaaaattttttttacaaaaaatggaagatttaaaaaatggtttacccaatacaaattaaatttggcaaaaagatggaaacgtataacaatactaccattaacccttattttcttgaaattttcttaataagaaatttcctaagaattttttaatgaaaatgtctaggtttgaaaaaattaaaaaaaattttttttcgggggggggaaatgaagtgcacccctaaatccaggcatttggattgaaaaatatatccattaaatgttttaaatttgagcagattgtggaggggcaaagtctcgtaaacaaaccatttttaatgaactcagaaattattagtagacctgatgtgataataagagagattagtcttgagaaaatttacaaaggtttttcattgaaattttttgtttttttgaagtagacagaaggtcccttcccgactcatattcagtaccgaaatccggttccgggctctaaaagaaacccatcaaaacgtcggataactccccccgattttttccatttttattccttatatttctatttccaatacagacggatgagtatgtggagagtttgactggcctggtgcgacagcatcagcagacggagaagaagcggaagcgggacgagcgcaaggaggccaagctggcggcgctcaggcagcaactgcaacagcagcacaacgccggcggagacggcggcgccaacggaggcggcgatgattcattggacatcattggtcggaacagtgccaccggcgaaacgctcaaagggatgtgccgggataaacggggcgggggaggccagggacaaatg

SEQ ID NO: 21145 - DNA, 2117 bp, Heterodera glycines
  unsure (1)..(2117): unsure at all n locations
cgcgtgacatacnnccttgcccatgtatgtttcggttatcaaaggccctantctagaagaattcgggagcggcgcggaccttagaatttnttaaccgttcnccttattgtacagtaaatttcaatttttcaggggatgaggcgcncaaggcggagctgctggacgagtggttggaccagcacccgggctacgagttggtgtcccgcgactcgggcgccaccgactcagaggaggaagaggaggacgtacagacggaggaggaggaagaagaggaggaagtccatgacgacaacaaaatggacggcacagagcagaagaatgaggaggaggaggacttggaaggcgagaaaaggggggaaagatgggacggacggaccccccgggaagggaggggaaagagttaccgaccgattcgagaaaaagtcgaactttacacctcccagtaaaatgctttaaaaaaatacggacaacaaataaataaatttgcttttttgcactctcacagatttggacgaggagcaacggaatcggcgcatcattgagaaggcgcgcaacgaggaggacgaatacgacaacaaaaatgcacgggcacaaatggagtcgtattacgcgacggcacacagagtcaaagaaaaggtagggcaaaaattgagggttcattccaattttcaatatttttttttgaaattttcgcgggaggggggttggaaacgacatactccaaaaaattgaattcaaaatttaaaacttacaaattttgtcaggtggtcaagcagcacagcacacttggcggtggcgacgatacgctgcaactgaaaccgtaccaggtaaacacactggacaaacatacaaatgaaaaaggccaaggagtaacggaacgttttgcgaagcggtcgagataggcgtgccatccaattcccccccccccccccgggatcgtgtccatgttccaaaacgattttttctctttagttgaaaggtctccaatggatggtgtcgctgtacaacaacaatctgaatggcattttggccgacgaaatgggccttggcaaaaccatacaaacggtgggttttttggaaccctcatttttgaattatttttccgttacttattttttgtcccattttgcacggtttttgtctgcctttttcccatggctttttctccacaggttgcactgatcacttatctgatggaggtgaagaaagtgaacggcccctatctgatcattgtgccgttgtcgaccatttccaattggaaaattgagttggacaaatggtcaccgcacgtggtcaaaatcatctacaagggggacaaggaccagcgcaaacggcttgaaccgtacggattttttttggatttcactaaatttttatgtttttgaaatttaaattttttttttagtttggtccgtaagggcgctttcaatgtgctgttgaccacctatgactatgtgctgaaggagcgctcattgctgggcaaagtggttttttttgacaaaaacggaatgccaaaatggcaacccatcacaaataatagttgagaatggcataaatttcctggaaattatccaaatttcacgccaaaatgacaaaaatatcatgaaaaatgtggtgacaaaatagccaaaaatggaaatttctgggaaatgtgccaccttcatggactttatccttccacaaattgtttttcaatttaaatttcaaaatttttttcaattaaaatgcattttcaaaacttgcattacgaaacgacacattcatgccgaatgaatcaaataaattacactttcttttctgttatgacgtgtaaattgaatccatccaccaatcacccgacacagatccgctggaagtacatgatcatcgacgagggccatcgcatgaagaaccacaactgcaagttgaccctgacgctgaacgcctacttcacggcacagcatcggctgctgctcaccggcacaccgctgcagaacaaactgcccgagctgtgggcactgctcaactttctgctgccctccatcttcagctcgtgcgacagttttgagcaatggtccgtccgtaaaaatgggggagagggaggtttaacatttcgttttgggaaaaagtgcccattt

SEQ ID NO: 21146 - DNA, 2403 bp, Heterodera glycines
ttccttcattgctgcgagcgccgattgggcggccctcatgcatttgactggtgccgcgactgcttttgggactccctcaccgtccatttcgctcccatcatgctctcccgaatcctcagctcagtcaggatgctcactgggagtttggcttccaacagcggaccgaatgactcgtcgtccacgttggctcccagctgctcgagttggcacactcccctctcgaactcgtcgatcattgccgtcagactggccacgttgtctttagctggtggcaaatgtagcagctgagcacgaattgctcgttgcaaatcgttggtgtcgccgaatcgctccttcagcagttgtaccacaactgggtaatttccatccgacggtgggtacacctccaccgctcttcgcgccggcgatccttcttttaggcaccgcagcagatgaagctgcttttcgaatcccgggattggtttgtcgtccaccgcccgttggaagtaggcccaaaaggtggtccaatcctccggtttcccggaaaacgtcggtggctgcaatcgaaccgtttcgaaagtcgtcaatgtgtctgctcgagtttccgaatgatggtgatgtgagggagctgctccctgagttcggaggcgttcccgactgggatgctcctccttccgaatacgggcatgatgggatgcccgagggaatgcttgtccctggtcattgagcgtaagtcgctcaaatcgttgctgttcggcttgcagcggttgctgagcttgtggctgctgttgcgccgggggttcgttctctccccctcggttccttgccatccattccctgaccgggttgttcacccgaacactggccactgatggggcatttgagcggcgttggatgagcgcagccatgtttggcatgacgggtggggccacccggttggcttgttcgaatctttgtggcgcttggccaacttgtccagcctggaaccgcgccaaggcatccctgaacgatgtctcccactctggcatgcttcgtcttgccatggtgcgtgggagctccttcgatgggtgactgtcctcggtgtcgactgatctgctcgatcgggagatgctctgctccctttcttcgtcctcaaatgtttgcctcatcgcctgcatatcaccgagatgctcagccgcaatttggagcagttcggcaggagttggatgctcccgcagttgcagatacttcgtcgaggctggcaagggggcggccacgaaatcatacaagaaatcctgccgctcctcgggtgctgcacccgcttctgcgattcccttatcgaaatgtccttcgaaaatccgagtgacctgtccaagtccccgttccattgccatcagccgcgcggcgtgctcgggcgcttcgcccctcgtgaaatccgagtccatcagctcccgcgcttctgcgattcgcgacgagagtgtttcagccgctctctcaatccgatctcgggccgacctcaccgtaattgctccgctgcgcaaattcttcgatgccgcgggtgtaacacccgtttggcttgtccccaggccttgcgcgtccatccctttctttgttttggtctgctgcgccgcattcgctcgttccccgtcctgtcggtcggaggggagatccccctgatttccattcccgtttgccgcttcctcatcgagcggttcgctgttccgttccattttcgtttcgctctggttagtccgaggtgtagcgggaggtgctcccggttgctggtccttgtttgtggcaggacccccgctaacggcaccaactttgtttgccgttagcacaaatcgatgtgcttgttggtcctcggcgaccacaactcgttgctgttccttaatgtgcagtgggaggtgccccctgctaacggcaccaactttgtttgccgttagcacaattcgtttgttgtgttggtcctcggcgaccgattgtgttgttggtcctcggcgaccgaagtgttgttgcttggttccccctgttagcggcaccaactttgtttgccgttagcacaattcgtttgttgtgttggtcctcggcgaccgcttgtgttgttgcttggttccccctgctaacggcaccaactttgtttgccgttagcacaattcgtttgttgtgttggtcctcggcgaccgcttgtgttgttgcttggttccccctgctaacggcaccaactttgtttgccgttagcacaattcgtttgttgtgttggtcctcggcgaccgcttgtgttgttgcttggttccccctgctaacggcaccaactttgtttgtggcaaaaactctctgccgatttgggcgggagtttctcccttccttctgctccaatccactcctcaaaattcggtctcttttctctctctctctctctcttcgctgccgttcggtcccttc

SEQ ID NO: 21147 - DNA, 2348 bp, Heterodera glycines
  unsure (1)..(2348): unsure at all n locations
gattattaaaactttttcataattataaaattaaaaactttttattatcattttctcgtttacatatttttcgcctttcacattttgactttttgcatctttctcatttgacatttttgaataattttggttttgcaacatctctgataaacttcccaagcaagcatggatttccgaccggggacgggcgaaatttcgagatttatgtttctaacaacggaacagcgtatgacacttttttgtatttttcaaaaatgtttgcagaaaatctgttaataaatcacaacccggcggcacctatcggcaccgccgtgtccctctttttccgcagaaattttttaaaaagagcgtgccgaaagaaaatttgcctagctaatcgttcaacgtgtttaaatttcgatctaaaaggacaaagttggcaattttggtgaaacccttttaagaaattgggccaaactttctaatttcccctggcggcacctatccgcaccgccggcgaccctttaatttcttaaattgtctcaaagactggaaagctgcgagcttcgaaaaaaaaattcagtctatgtatccctgataggcttcctaataatttggaattatttttatttatttgcaagaaatcatttattagatagacgaccgaccgaattttatactccaaaaataaatttatgcttttcatttgctcattaacaaattaaatgattaataaaatgataaaacataatggaaatctaagagagcagcgaggggaaagagggcataacgaaataacacagtgtcggccccgcgtttctcgcccccgtcacatctcatcacaaataacgctcgtaaatttcattcttttatataagcagtcgctttaaccctccactcgtcatcgttcgtctgaccagtgttgtctcactcgctgcccgggagagagttgcggctgaggggcgcgtgcgccgggtgccgagtcattgacgcgctgcgcgcgtgctgtccgattccgcgtgcacgggcgccgcaactccgccggggccacgccggcggggtcgcggcgtcgcccgcgatgcgcctccctcgtcgggcggccgactgttggcagtgcgccaacagcggcggacagttgggagcctagcggtcgggtcctccactggcctggactgtcccgaccggtgggcacgcactgcgcggctacggccgcggaagtgtccggctctcagtgtgacttggaacgcgcgtttcgcccataaagaagcgcttccgcgcctcgatgaagctggcggtcgatgcatattttttaattttatgaactgattgatttaaattaaataatttttaaaaggaagtaaaataaatcaaattttattaaattaattcttgcttattgggtattttttaattaaaaaaataaaattttacaaattctgcacaaatgtacttatgttaaagtggtaaataattattttagaagaaaatttgaattaagatttaaatggactaaaaagaaataataaaattgaaatataaaatttcatatgtatatagaattaattaaatatttagaaaacaagaatattttttattaaacatataaaataagcatttcaattcaatcaaaactcttccaacagaaagtgcttgttcagtcataaaaggaataaattttcaaaaacaaattaataaaaatgattacaattattcatttaattaatcagctgtcacacagaccatgggatggatttaagcatttaaaaaattcaatttaccagttgaaaaaaggctaaataaacattcacaaatttcaatttgggtggtctctgtggtgaaatggcagcatataaattaagcaaaattaacccaaattaattaattgcccaattaaatcctcaattgtcaaaatgcgtcttctgttgctcctcctaattgttcttgtgtctttcgtcggtgcctttggcaataaagcggcgaaagactttatgaagaagaaaaatggcacaatccatatcggctatcaactttttgcgctaccggaggattatgggagaaagcgaaagtgatcggccactaatgggaggagggaaaaagcgaagggacggcactttgccacattcgagagactaattgataaagtgatacaaacagaaaatattaagcatcttttcaaatgatgttagttgcagttttgggacaaataaatgttgggaaacaaatattttttaaattaataataacggcttttactgaattttgtaattttttggnctggnctaatattacaagtcatttcgttcatcttattagcgtgtaatatcacttaggaagatgacgaaaaaagcaaaataaaaaattcaagggca

SEQ ID NO: 21148 - DNA, 1398 bp, Heterodera glycines
  unsure (1)..(1398): unsure at all n locations
taattgttagagctgggaaatttaggtaagaaaaatcgcgaaataggtatttaaataggtacaaaaaaagctcaaaatagttattaaataggtacaagaatcccaaaatagtagaaaaataggtaaataaaattttttaaacgattttttagtgacaaaaagggaaaattttggttctattttttgtaaacgaataattcaaatattttgaatattttcttagaaaatattgacattaaaattaaaaattttgtcaataaaaaaataaataagttttgggggacaaattttaagaaaatttttcagctttaaggggtgtatttctaaaaaaaaatttttgctcgattcataggggtatattttttgattttattgcatttttattaaaaaatttttgaaaatctttacataggtaacaaaacacctcaaatcaagtggaaaaggctttaataaatagatgatatgaataggtattataaaagtcattgtagacaccccaaatcaatggtaaatgcttttttcgtgcttatctgtgcgtattatgtgcgcaaaaattttaggtattatttacctaaatttcccagccctattaatgatatttcaattaaaatgataaattttgctacttaaaagtacttgcaatgttgcgattccaaagtgtcttgcgcagagacatacgatgatgggtaatttgtataggtgcgtatgccttttttgaggcgttcaatgcaaaaacggtcggtgagtaccgatgcagcaaaaaccgatgcgcatgaaccacaatcacctttattattgacaactacattataacgcagatttttgaaaaacagttttaatacttctttttgtctataatttgtttcaagcgataaatttttttaattgcacgccatagcgaagatttaagctatcgaattctacctgaattatcaacattgagttaaccggatcaagaatttctataaaatggcagcctaacaggtttaaagtataaaatattttgccaatttatattacagcgccactgcaccgtataatttttgccaaaaccgatgacttgccgcgacctgagaagccgggaccgtgacctctattttttttcgttaccgacaccgcagaaaaaccgggaaccgggaccaaccgggaaatgttaaaaattcaaaaaaattttaaaaatttaaaaaaaaattcaaattttaatttatatcaagtgaaaagaatacaaaattatttggttttttatttaataaattanattaatgaaaattttcaaacaaattttcttcaattatttcnaacaattaatcatttttggactanatcatcgaatattaatagaaattcagatttgattttcacatcacttttttttcgagcgctttttcaaaaaacttt

SEQ ID NO: 21149 - DNA, 1027 bp, Heterodera glycines
attattaagctcaattgttaggattttcatttaaaaaatgataaaatatgtatcaatttaaaaaaaaactatgagtaatcatattttctttataggaaacccacgagtatacaaaacaagaaattgaaaataatctaattcctgtagagggattgaaccaggggaaagaagaagggaaagtcaaggagactagccattaggccatttgcacacttgggcagtgttacttttaaagaatatattaattattattttttatttttccctttgactccaattttcttcactaatttttcactcagaccccattcttaccagtgcttgtttttccctgttcccggttgccctaccgggaccgggacctgagcttttcaaaacccgggaccgggaactgggacctcggatgaccgggaattcccggcccggtcccggtcctgtggcactctaatttatagtcaatagatttcttttccttaccttggtcagttaccattccgatgaaatccgcacattccggccactttttgcgcgcgtcaaattcttttggcaatttgacctcattaggaatggggcgctaaaaactaacttttttatactcctaatgcataagcgtatataaaaatcatcaaaagtgatgttatataaaaaaccagcaaatgaaatttacaaaaaattagccatttgcctaaagacaacaaagattttaattcatgatatcattggatagcgttaagttttttattatagagcataataagtaggttgcttttgagcaaagttatggataatttttgttagaaaatttcatttgatggtttttaatatggctggcactcataaaacatggaccgtcccaaaatccctttcagatttcggcacccaatttaatatttaaaatattaatgaattatttaactgttgatttatcaaataaaataactcatcaaacctttggtccgcgattggttttctaaaagtttattaataaaaacatttgaatttgggctatttcatgcgtgattaatct

SEQ ID NO: 21150 - DNA, 1690 bp, Heterodera glycines
tttaaaaaagtttcaacttaaattgtgtattcataactaaataaaaatatgctctactaattcaattatttacctacccattatttttttaccttaaatgaaatattaaggaaagaatcatgaaaaattaagtgcaataaaacgaataaaggtaaattgaatttaatatgccgctttttgcaatttcatcctttcaattagtgtagaaaagagaaatagaaagacaaaatcgaataatttatccataacataaacattatattgtaaataaatattattaaattaaaattggacaaaaattaacactaaaaaaacataaccacccttgtggcgaattgtaaagatcaaatgagaaagaagtaaaaattataattttctatcaaaattattaaatgtattaattatatcatcgatataaaataataaattcatttttttaacgaaaagaatttaaattttcaattcaagaattagttaataatttatttatataatttcgttttaattttatttttaatgaattttttaacgatcttcatttgtatattatatttattttttttaccaattaaaaattatatattttgaattcaaagatttaatgattattttaattcattttaacttttatcaattatttatttttgttcctttaatgggaagtaattttgaaataatcacgcaatcatttttttaaatttatttcaacttcttgcgctgtacttattttagtcaattcccacacatcattagcgtcgattttataatttattcatttatttattttcacttgaatataaaattaaatcacattttgtaatatttcaacataaatattctctgctaaaatttatttacatttaattgcactaataagataaacgttttcttttttagattttttattttatagtttattaattaatctatatataatatcattttaccaagtgtttattaaagctaattgttttattaatttaaccttttaaattaatttcttgtaatgttctatgtcagtgagcaattttgggctggtaaatctctgattaaagatgaattttacttcattctcaataaagcaaattaaatgaaaaaaatcatttaataatattttatagtctattttctattaactttttcctccttttcacaattaattgtcatgattatttttaagcctgaagagacattttaagattgtattttttaaaatttattttcttatatttttatagttttaatttaacattttatttaaatttatctcgttttctcaagattttttattttagcgtacgacttgttcaaaaatggaattgttaaagattattgtttaatactcacataataaataatttattaagtgcatttctattaataaattaaataatttaattttttgaaaatcaaattttatttcgttattttgattacttatttaaaataataattcaatcttcagtgggtggctaggtcgtttcttaaaaactgccaccatgggcgtttcttaaatactgccaagatgtagtaaaataaaaaatgtaagacatataaattcgaatctaggcctcatccaaattaataattattggtattattcaatagcattaagtgttgtctatcaaaatagaaattttgaaattttttttaccaaaatttaaaaacagtttatgggcataaattttca

SEQ ID NO: 21151 - DNA, 1145 bp, Heterodera glycines
tcagaaaatggctatctctttttcggccaattttgtaccgatcaaagggaaaatggcttaattcaggccccaatgtgcgcctttttcggccaatttggttggcatcaaaggaaaaatggcttaattcaggccccaatgtgcgctgaatcgctaattagctttgcactttcgaatattacatataaattagccctctcaaattttccttcgggcctcagaaaatggctatctctttttcggccaattttgtaccgatcaaagggaaaatggcttaattcaggccccaatgtgcgcctgaatcgctaattagcttggcactttcgaatattacatataaattagccctctcaaattttccttcgggcctcagaaaatggctatctctttttcggccaattttgtaccgatcaaagggaaaatggcttaattcaggccccaatgtgcgcctgaatcgctaattagcttggcactttcgaatattacatataaattagccctctcaaattttccttcgggcctcagaaaatggctatctctttttcggccaattttgtaccgatcaaagggaaaatggcttaattcaggccccaatgtgcgcctgaatcgctaattagcttggcactttcgaatattacatataaattagccctctcaaattttccttcgggcctcagaaaatggctatctctttttcggccaattttgtaccgatcaaagggaaaatggcttaattcaggccccaatgtgcgcctgaatcgctaattagcttggcactttcgaatattacatataaattagccctctcaaattttccttcgggcctcagaaaatggctatctctttttcggccaattttgtaccgatcaaagggaaaatggcttaattcaggccccaatgtgcgcctgaatcgctaattagcttggcactttcgaatattacatataaattagccctctcaaattttccttcgggcctcagaaaatggctatctctttttcggccaattttgtaccgatcaaagggaaaatggcttaattcaggccccaatgtgcgcctgaatcgctaattagcttggcactttcgaatattacatataaattagccctctcaaattttccttcggcctcagaaaatggctatctctt

SEQ ID NO: 21152 - DNA, 2278 bp, Heterodera glycines
accaattttctataatttgactgaatttccccaccgctgttttaagagcaattccagagattaatttgtaaccccttattacaaatactaattaattgacttatttaaaaaaagatttggatgaaatcagttaaaaatagacgaaatattgttgtattctaaatcgaaatgtatcatacaagtacgatgaatgtggacgacacaccggccatccgttgcactgatcggcgcgtcgaattcagcatcaacacgcgcaatccgttccggtaggctgcctagtcaattaaggtattttcgcctaattgctaggctcgggttttgaaagttcccgaatttcggaatcaatatttactgaatttgaacaccttggggatttatttttcaacctcctcgaaggggggttttatttcagagggtgaggtgtcaaatttagggaggggggaattcagtaaatacgacttctcggtttcattctttattgtcaaaattaaatttgttgattacgggttttagttcggttccgagtcttgacccaaagttgaaaactctctctatcctattgttagacccattcccatacttttaatcaattttaatttacatggcaattccgtcccgagttttaactcggcatgccatttccgagcagttccgagttccgttacctaatcaagttcaaattctcaaatctcatttaaataattgctggccaggcaccacattatttcgtctggtacgcctcccccccccccccctcattaaagaattttagaattttttgaaaatcttttttatccatcggcgagttttagttttcttttccagtggcaacctctacgtgcagggcgagttcggcttgacggagtgccgtcgcgagttctacaacaacgaggcaccgtttgcctcgcttgaggtgcggctgggcgactgtggcatgatccgcgagaagagaccgcatgggatgagtgagtgccgggaatttgattacatactaatcaatacaacgcccgacggtgaccagaaccaacattttaccatatgaaattaataagggggagggtatttagataccactaatcaattttaatagcaattgataatgatgacatgccatttttgtataggctattctctgatcctgatcaccaactttcatccccgcttcgtcacccgggttgaccgtgcctacaaaatcttttgtgcttatcagcaagcggaacgcccggttggtgtcgatcttgaagttgggtgagttgttagaaaatcttcaggattatgtaatcatttcaaaacattcggatattgataaggatacgattaaaaactaacgcgccgaatagcatttatcttgatcacttttgcattttttcgcgattgatcactcactgatcataatcaaaaactggttgatccgttatccgttctcccatccgtttgttaggtctgtcccggaagagtcggtgagttcggatgcgcttatggtgcccgaatgtgagtacacaatgcgtatcggtgatctgaatgggccactggcgacaggaacaggtgaatcctgatcactcaaattgtcgagactcaaaagtctcgacgaattaccgctctcgacacatgtttccagacttttgggactcaagagactcgggattttcttaatgaattttcctagacttaagattctcgaaagttaagggagaccaaagttgatatcccaagattgttgacaacattctaaggctctctaaaattattaccagaacacccactacttttatgtaggaaatcttggcatcatagttttattgacttttgaaaaaatagtgaaaaaaattttcaaaattttttttcatgaaattttcttctataattctgtggtttaaaatttttaaaaaacgggggggacgaactgcttccatgtcagagatcacattccgagacccatgaccatttaatgaaattgttattttaaacacaaatactttaaaattccgagaatgtcttaaataatttttttggcttttttttgcagtgaaagttggcgatctgatctatcaccgatgggagtgccaacggtcggatgcgcatggaatgttggtgaaaaactgtcgggtgtttgacgggggcaacgacaatgtgacactgctggacgaacgggggttgggattaagcgaaaaatgaattcataaaacaaattcagaggccataaaaaggtctaaaaattaagtacataaaattagagatcaagtctttcaaaatttaaatttaatttacaaatgacaaa

SEQ ID NO: 21153 - DNA, 1807 bp, Heterodera glycines
  unsure (1)..(1807): unsure at all n locations
tgcaaattctctgggggactaaggaagaacactttccccctaatcatcctctttgcttcactttgtggcgcccattgtattgtgttcctntaccaccatgtcgctaggacattcatttgaccgatttcttaatttgcttaataccagtacgtgtcccgatatgtacgcgatgctcatatttaataaaataattaataaataaacaaaattttataagttttaaatcgtttattcaattacaaaaaacacttattcgattgaaaaattaaaatagtacgaaccagggtgttgagacgtttcaataataatcaattgaccaacatctcctttgtggtgcggattcatcagccggtacatttccatcccatcggagcggaccagttgaccaatgccacctgatgccatttctgttgccgagagttggagaagccgcggaaagtgttgacgcagcaaataaccgcctgcagtccgcttcttcatggtcagcggatttgcgcttcccaacacatgcgtcagaatggcgccgaatagctctccaattttaatcggctaaataatattaatattattattatattttttttttcttaccgccgagtaagtcacgactctcgtcgtaacggtagggccagatcgtccataatataggtacaccaaaaagtcggcgaaacacttggcgtcctccagttcattttcgaatccaaattgaatgaagccgaactgtatgaacaattctccgcacggtaacttcctcagtgcacagagcctctcgaaatttcgagcaagatcgatctaaaaattcagatttattgttattttaaatattaccaactatttttaagaagtaaaaatgccgcttggcacgaaaaatttcgaacgtccggctgacaacggtgatgccggatggtggacgcgtacctcctttatttttaaattgtttaataatacttttgaaaaattacctggcttctttgcaactcctccgaaaaggtacattatcggaattgcagcaacaatttcccaaataagctcattcggcaagcgcttgttcattttgggaatttttagtgtgtaggaaatgaatgtgaacgaatgaatgcttttagggattgcttatagacggagaaaggaatgatataccctattaaggaaattttgaaaaggcgtcgaaaattatcgattgattacaaacatctgttaccatatgcaatcccgaaggaattgcgcattgtttcgccgaatattatcgattgatgggcggagacaacagctttaaaagcgcgtacagacacagaatttttcatttgttccttattctcctatctatgttttaactatttttttaattttgctgttaaccggggcggtagttcgacatacagagctccgtttatcctggcagcacaattttttaaatttgttttttaggtcttgaggtgatgctttagacatatctaatttcctgagccgtttagatgccctgtcgtcttgtgcttcatgggtggcagtgcgctgctcatcaggccaagatgggttgacattgtctttcttttaaaaataaattattctaattgtgcatttttctcatatatttttcatgaccaattgtattttttgatgtgcattgctcatataaataccccttttcacaacaaagttatcaatttaaaaataaaaattaatcatttttattagatttaaaaatggaaaatcgcaaccttcagtgcccctaagaattttcaattgattacattttgtccattcctgcgataaaaggacgtcatggcattcaagcgggagctggaac

SEQ ID NO: 21154 - DNA, 1751 bp, Heterodera glycines
tctcctcaaaatacttttttcatcttttccttggcttgggaattcactgcccactcgtcactatatattttcatcgggataattttagacttttcgaacacccgatcaaaagcctcgatcacgtcctcactcttctttgacttggccggtgcactgaagatcattcgactcagcacgtcgatgcagaccaataaatatttataaccgtcgttatgctttttcaactggtcaaatatgcacaaatcgcactgccaatcggtatggaagccacttggtatcgtctttagtctcgggaatcttttcctgatgggcttgtgaatcgtgtatgttttctgcttttctaggaatttattaacgtcatcggtcgtaattttcgggtcaatctttttggcctcatttaaaattttttgaattccagcaaaacttgccggagattttaaattaaaataaattttcgataaaattttctctacagtcttgcccatattagtggtttaaagggtttcttctctcgcactatgccgggtgtttttatagattttattgccttttttcttccacgtccccacatgacctttgatttatcaaccatgtcttttactgttggatccttcagtaaccgatctttgagaaattttgcaccgcgcggcgtttcatctttcttccctgcgagatacaacaaaacatctctataattactgttttcaatcggcaaattcatgttcgactgtacctttccggccgccgtaattttaaataaatctttgttttccttcacgtacctaaaaagaccgtttaaaagggtcgggtgtataatagttttgatcggaatgggtgtttttaatgtggatgttgtttggggctccggagttaactcatttattgtatcattatctgattcaggatcaggagtttgctcttcaagtcttttcctaggaataattattttccggggttcatcggtctcctgtggtttggattgagtgttgaggcctagatatggtgcaacattcggaccgggtacatgattctcaatcactaccttctgtggtctattttcaagtatcccctttaccgtacgcctttctttatagagccaatcgtgtctcttcgccttgaggtcctcgcttatgccggggtcttgtaaattctgagaaatttttgcgtctaaactcgctttttcattttggagataatcaccactattcatcgcactccgtagagccaaatattccgcctcgggaatcattaacattttctttgcaaatttcatgatgttattttttctaataaatgttgggctaaaacactcaggacaggtatcaagacagctcccagggctataccactcccctgttgtatcctttttcttgccgttttctctgaacgagatttggcaatttctctataaaaatcggcgtattgtgccaaccttcttttttgtttgttcgttagtttaaaactaaaactcaatatatttgcacaaatttcaacgattgccaaaatttggtcagctgtagcgttttcgattaattcgttcttcttttgttctgatctggtggaggcaagcttctttaggaatgctgtattctccttcacttcggagctaaatttatacatttttaatttaatttaaattcatattcttatatactattcaattggtaaataaattttccagagtctcatctggaaaaattttgctacataatctgaattcctcatcagaatttgggtgcatgttaatcatg

SEQ ID NO: 21155 - DNA, 1259 bp, Heterodera glycines
aatttagtgcccaaacttcccggtgcccaaatttctcgctgtccaaacttcctggtgcccaaacttcccggtgcccaaacttccgccccccatttaaatggtgtctttccaatcctttccccacactcttcattcatttatattatttattgtttttattaccacatgaatgctcatgtgcaggcgcaaattggctttaatgttggaatatttaacgcggtaagtgttttaggagttacgtaattcttgaaatattcgattgaatatttgtaaagagatgcttttcccaatgtttcattttttagaacctgggaggttccctccgttggaaccaagctgaagcacagagtttggcaagggacgcgcgggctgatcggtgccatcgacaacgcgatgaacgaaacgcggcagttcaaaatgctcgtgggaggactgatcagaatgcagcagcacgacgaattgacttgcgttttgcacgcgaagaagtacagcgttatgtggttgaagctgaaaccatcgcagaacaagcgagggacagacggcggcacgcggagaggcgtggaaagcagagaaacgaattgatgatttccgtcgtcggatcaacgatttgcgacgggttgaaaagcgagcaattgcacaagcagcggaagcgcggcgtcgctttgaccgaatcgctcgtgttcgtgagctctaaccttgttcatttaaagtacataatttcagcagagacagcattgagttggaagaaagatgggagccatttactccgcctccgttcacttcgtttcccaccgcttcgcccactcgaattgcgccttttgtggtgccaacaacggactttggcacggacaccgtacgacctccgccacacgtcactccgccgtcggatttgacatcgctgttcacttccacagtcatttcgccacggactcggcccaagccgtacactcggcacagcgcaactgttccatgggagaccggcattccgaagtgagtcttgccatcaaattatttaattgattaattattagataattaattagtccttccaatttagcattttggtccattcttcctccaccacaacagtgcagccgttgccctcttttgagcttctgatcgtcggcagcaaaacgcgtcccttcttcgatcggcgccttggccgaatcactgaacaaaacgacgatttgctgtgcgatttcacccacacttttccgtgcctttggggggccgagtcggggcgatgggcaattgtgcac

SEQ ID NO: 21156 - DNA, 1044 bp, Heterodera glycines
cgtgtaattcacaggctgatcggctgattgaacaagccacgctgaatgataatctgtgccagtgttatgtcgggtggtgcccgttttggtgacagaacctgcacatctatcacatttctatttcgccttgtttgaattctattgtcacattgcatccttttccaatttgcacttttgataaagaaatattatgaagggttcgttctgatcttgttggtccaaatcgtcttctgatttattggaataggcatttatatcaacaatatgtggacggatggaaattgtcaatgtctcgtggtcgaataaaacaatcgcaaatcatttgtcgtcgtcgtcgttcacgcctcgctgctgccactcttctgttcctcgttcgtcccttccttctccccgccatttccgtcgttgtcgccctcccgtcctccgtcgtcctctttgccaacgccgtcactggcactttcctttttgtcgctgtttttgcccttttcgccatcattcgctttgaacatgcgacggcctttgcgagtgacgccggacagagagagcggcggaccatttgcactgtcgtcgccggcactgaccaccgcgggcaccgaagcgacggccgacttggctttgttgttcggctgatgggaaaaaacaaatttgacggggaatcagccgaaggcaggacacttttggacagacataacaagtccatcagaagtcaattttaatagccagcaaaatgatttgtaagagtggggacccattttaacactgaacaaaaccgcgccaacggggcgccgaaatctgccggcgatgaacatccgtccggcggaattgttggcattggccggcaacggctgactgcgcgcagtgttgttgtgttggatggcggtgcccacgcgaattccaccgggccccgacacagcggccgcttccctgcccttctcaccatcgatgacgtcgaattctacctgaattcggggatcgttgtactcccctgattctccgtgtcccaatccctcggtcgactcaaaatcagtccgactcacccgctgg

SEQ ID NO: 21157 - DNA, 1286 bp, Heterodera glycines
aaaaagagataaccctttttttgaggcccggagggaaatttgagagggcttattttatttttaatttttgaaagtccccaagttattaggattcaggccccccatggggcctgaattaacccattttcccctttgatcggttcaaaattggccggaaaaagagatacccattttttgaggcccgaaggaaatttgagagggttaatttatatgtaatattgaaaagttaagctaattagcgattcaggcgcacattggggcctgaattaagccattttcccttggatcggtacaaaattggccgaaaaagagatagccattttctgaggcccgaaggaaaattggagagggctaatttatatgtaatattcgaaagtgccaagctaattagcgattggtaactagcgtcaggcgcacattggggcctgaattaagccattttccctttgatcggtactaaattggccgaaaaagagatagccattttctgaggcccgaaggaaaatttgagagggctaatttatatgtaatattcgaaagtgccaagctaattagcgattcaggcgcacattggggcctgaattaagccattttccctttgatcggtacaaaattggccgaaaaagagatagccattttctgaggcccgaaggaaaatttgagagggctaatttatatgtaatattcgaaagtgccaagctaattagcgattcaggcgcacattggggcctgaattaagccattttccctttgatcggtacaaaattggccgaaaaagagatagccattttctgaggcccgaaggaaaatttgagagggctaatttatatgtaatattcgaaagtgccaagctaattagcgattcaggcgcacattggggcctgaattaagccattttccctttgatcggtacaaaattggccgaaaaagagatagccattttctgaggcccgaaggaaaatttgagagggctaatttatatgtaatattcgaaagtgccaagctaattagcgattcaggcgcacattggggcctgaattaagccattttccctttgatcggtacaaaattggccgaaaaagagatagccattttctgaggcccgaaggaaaatttgagagggctaatttatatgtaatattcgaaagtgccaagctaattagcgattcaggcgcacattggggcctgaattaagccattttccctttgatcggtactaaattggccgaaaaagtgatagccattttctgaggcccgaaggaaaatttgagagggctaatttatat

SEQ ID NO: 21158 - DNA, 2718 bp, Heterodera glycines
atttcgttcaacatttcttttaagtctgtcatccccgcccccattatttaatttactatcaaaaaccacaaaacggccacatttttctctattttttctgttatcaatttaatcaatgtttttgggctgatattccactaattaattcactttactaacatttttttcttctcctctattttttcgtcaaaaaacattgccgccaaaagttcaattctctatcgaaactaatacagtacaacaatgcgcggtgcggaaaacattgcactaatgggaaaattgtcgctattaacaatctccacttttcactaaaaagcatttcccactcattcatcaattcattcttcatccaaagcacatagtgctctcatctcaatcgtcaaacgctccgcaattcagagccttaagcttaagcaaacaaccgcgcgaaccctatcgcctattccctcatttgtttccaaatttaattgttacatctaattattctaattttatttccccgtttcattttgcttattatttgcgctcatatttgaattttttaactcgcgctctcatttcaatcaatagaatagtcgtaagactaagagcaaagcaaaattttttttttttcaaattgtccaccccaattttcaactgaactatcatcctttggatagaaagaaacgaaaccaatggaagagcaacaagtcacaataacgggtgtagacaggacattatttcaaaatctcagtccccctcctaaaaaatgaatataattttaagaaaattaattaaatagtttctaaaatttaattaaaataaataatccattttctcttgctaagtcctgtcgaagttttactcaacattttcttccatcgaatgataggtcagaaataaataataatcagattttcggcattttatgtcttgtttgaattcgttaagttgagatcgactttatataataagttcatttgatttaatcaattgattttttctaaaattcatttttaaaatatttatcttccatttccttatgttttatttgtttatgaaaatatttaaaaaaacgctttttaattatgtatgcctttaaaactaattatttcgccattataatattattttcagagcatttaaattcactggaggaaaaagttttgtttctaggttattagttataacaattaaatttttagagaatttttttttgaattcgcagtgcttcgccctttttcaaccatccttataggtccatttaactttctatttttccgcattccttctttttttgcacaccattgttgactatattcactttttttatcgttttcctgttctgcataatgccacgaattcagttgggcaatgcacccatcactgggctttcgctgtgtgggtccttgcgaggatatttctaaattatatagttttatatcttttttaattgataacttatcaacccatcattgtgttaccctatatcaattcactttgccagtttaaattaatcgaattttaaacattaaaaaaaaaattttggctttttaatgctcttctcttatttaaatatttattatattttcactcatattcttccagttaaataaatatttatcagaatcagtcccaaacttgacttaaacattattgaatgaagagtttttttcttttgaattatattaatttcatgtatataattcaaaattatttattgtcatgaagaattttgattaaacttttttaaaattgttttattgaaagaattaagcatatcatccatattcttttttgactaatcttggtgcataagaccggttttttttattcagtattgattctttagattattttattttaataattttacataatatatttatttaaaagatacatggagttaaaaaatatataattttatccttattttaagaagaaatttaaattcttatttcgattttataaacttaaaagcatttgttggtgtcccggggctctgtgctcgtaaaccagaaatttcgtcattattttaattttttctaaataattataaagtaaagcatttaatttattttcattaataaaaataacaatgaaaaattaaacaggcggcataaaattcacaaattcatcaactccagaatttatagttctgttggcattatctaagctgcaaatagaattttttgtaaatttagccttttcaatttaaaaggtttctttttattgtaaaaatataaatgaaaaatgccgttcctcttcttcttctctttcaattcaagtcaagcttttttattttttagtttctttaacataaaagcaggcgtttgttatattatttattatattggattattaagaataattttttttcgacttcaaattgttaaaatttaatttgagcatcctttttggtagcttatttaagtgattttatttaaaaaatttgaaaaatttcagtgattgaattttgattgttgaaagtagcattttcaaattattttgaattatttaatcattaattgattaaagttgtaatatataatccaaatacatattttctttttttggaaatcaatgcattttcctttttcttcgttgcctccccccttccctcctccgcttcttttcttaaggcgtccttttcgttgttttgtgcgctgaagggcatgtcagtggtcaacaaaaaagaagaaacaaaattgattgcccatcccatttgtctttatatta

SEQ ID NO: 21159 - DNA, 2501 bp, Heterodera glycines
tcagtgaatattcatcgcacaaatttgaagcacaccttggcattgtgcattttaacataaagaatttgcaatgtgacaaaatttcggagaaatttgaagaatatgagcggggagaatgccaaaaatatcaaaaatatttgaacattttgtacgaatatttgttcagagaatacgtcggcgaagtgccaacagtggagccaaaatttgtgttacaaaagaacaaattggaaattgaaggcccaataatttatgcggtgaattgcctgaccaaaatttcgcaattgtattttgataaatacagtgcgtggaattataaaagaaaattaaacaagctcttcacttatcattttgaaccaaaattgttaaatgagcatagattgaattataatgtaaaattggtcaacgaaaaaccaaaagtgccaattaacgaaatgattttacaattggcaattgacacagcttatgggtgccaaacaaatgaaagtgtcgacggaatattccggcagaattttaacgaaattttaggggaaatgtttaaaaaagcggaacaacgggcaaaaagggaagataattatggaattttcgttacgtatgacataattgtccgatcgatttttgatgattattgtttatgggtgagtcttttaaaaacaaattgttttaattaatgccaaaattaagactgatgatgcaatttttactgaatttgtgaaaggtcaagagacaaattttgagaaattttataggatgcttaaagaatattattcaaactctgtgaaatcaaaggaattttatttacaaaaatatggggcctattttggtcttgtgtatttaatgagaaaaaattggcaatgtgccaaagttggagaggatttaaaagaaaagtgccaaaaatacaaaaaatatttgcatattttgtatgaatatttcttcagaatatctgccgaaggtttttgctttccatttaatgatcatttaattaattaataaaataattaagcaaaaaacccaaatatgacaaatcaattgccagcggtaaagcctgtttttgaatgcagtaataaatattggtattcaataatttttattattcaaattctgaatgatttttcgatatgtttttggaaaaatggcgaaaaagaatgtgagaacgcctatggaaattatgagatggaattgcaaaatgagaaagaaacaaatcatgcaattgaagaggaagaaaaaaatgggcaaaatttggagagaaaaagcaaaaaacaatcgacggaaattggcaaacttcggacagaatttgaccaaaaaatggaagaaatatatgaaaatacaaaagaaaaagaagcagaagaaaaggccaaattggaaaaagcattggccaaagtaccaaatgatttggaaattaaaaagatggaaaagaaatatgaacaaatattagccgcaagagaaattgctgcggaagaaaagtcgaaattggtaaaaaaaatggccaaattagcaattaatcgtgaaagaaaaatgatggaagatgaatttgaagaaaaatttggcgctttcaattcgtcaccatttgcataagcaaattctcgtcttattctaatccaaaaggaatttgaaacttgaaagtgattatttgagctatataattaatttacacaactccttattctaacagaacacaaacactaagtcgatatttaatttttctcttcaattaaggtctaaattttacggaggtttgttatgggctgctttctgagaataattctagcatgcttaaattatttaaaaattatttatttaatttgatttaattttgttgctttttggataattttacgattttacactccactaaatttggactttatgacacctattttcccatttttagcacctattttgggggttttttataaccaaaaactaactaagcaaaaatttaattacaccaaaattgatttttgcaaaaattactacgcagttggtggccctttaataagttattttaagagtttcttataactttttaactcccttaattacccccccccccccagttcactacgcaataaaacggaagacaaaaaatttgagaaaattcatttgattactttgatcattctgatcaaaataaattcattcatattcattgattttgtcttttattaaaaggtttaaaaaagataaacgtgataaacaattaaaaataacgaaaaatacgagatttttcaaaaaatttatgggggacaaaccataatagagcccaggagaattatttttgtacgagttgcctattgcgagagttatcaaggcacaaaaattctactaagttccctcttttctaagctaaaatggtaattacacgtaaaatcagaatgattttaatttctatttaagttaatatgtaattagcgtaacaaaaatgacaaatatacatacaatacaatttgctcgagaagaagccaagggatactgtataaaaatagtttgtatactgtacacaa

SEQ ID NO: 21160 - DNA, 1008 bp, Heterodera glycines
ctgctgcggtttaggcttctgatgagacttgaattttttaaaaattttaattatttaaacattttaccggccgagttcggtccatttttcggctttcattattcattggcactgattttgaagacatttgaataacagaaaaaagggcttttcaaaaaagtttaaaaatattttattaaaattaatttttttaaataaatattttttaataattttcatttcttaattttatattttttatactttgatcagtgtttgattcagaataattgtgctaaattcttaagattataatgaaatgcttcacaattttcaatttttaattccgttaaattttttaaaaatgaatttatttccacgaattctccgcaaaatgaaattttcttggcatgacgaagagtcccccccccgtgtgccgttcttctgccgcttttcctcgtgctgaggtgtcacggacattcggcaaattaaatttgcggcttctgcagcagctgatgagtgcccggcgggaggagaagccgcccgcgaagaatctttcagcctaatgaagttgagctgaactacggacaacttcccgttcgccgcgtgcccccgggggatgccaaaatcggccgcaccgacgacgacgacaatggcacggcacggcgaaggaggaagagggacacaacaccaacaaaacatggaaccaaaaaaaagccaaaattggaatttgaaattagcgaaaatggcgcaaaaagttggaattataagggattattaaattgaaagaaattttggagaaaaaaattaaaagtaagggaaaaaggtaaatttacaaaaagtaatttagaaaaaaagaaaacttcggattagtaaataaaattggctttttatattttgaaaaagttaaaacatttcgaaattcccaacaaattttgcgtttgaaatttgccaaaagcataaaacttttggtatttttctctcgtggattagcaactcaaaaattctcacttttgagatttgtttatt

SEQ ID NO: 21161 - DNA, 871 bp, Heterodera glycines
taatgtgagaagggcccataggtttgcaaatgggcttttcatggattgccctcggtgagaggggggggggggggggagaggcattagggcgctctcgagtctcggtcttgagagacggggtcaaccatcggtgctagaaaatttgactctcgagcagagaggcacatgcatggaagcataatgccgaaatagttcattcaaatttcaattgagcatttctgcattagcggctattttggccaaaactgtatgctgccgatttggataatttgatttaagacagcaacctaaaccggtgatcgattaccaagctcaagagtgatgccataaccgttcacgacctaaacaaacccaaatttaaagattttgagatctttttttttcaaaattagaatgccaaagacaattccgctgatgaatgatcatcgcctattcaatcacaaccatgtgatcgatcaatcgatagatcagctcttctggactttggtcgggatcagtccggcgccaattttgacccccacacctacgtatctttgcgccgtccaccaccagaatggcgggcatgccgcgcaccatatcgccccacagctaagtccaccgaacatttggggccgtcccgcgcatagtgaccacccgaaatgcgagcagtccctggccatgtagacagtgctcgaccaaatgacgcactgtgcaataacatggaaaaaataaacaaaacgacacgaaattgttcccaaaaaagcgtgatttaaattacatttgacatgaagtgatcataatttcagatcaacacatttcaataagtgaccgccacaaaatactgtagaacaaaatatagtcaaataatttttgcttttttgaaatttaaaaa

SEQ ID NO: 21162 - DNA, 1443 bp, Heterodera glycines
tgaccaaaagcgaagtgagttatgaatttcaaaattttcactggattttccggggctcaaattttgacgatttttcaaaatttttttaccaccctccgaaaaatccaaaacgcaatataaagtgcatattcgtgttcagcacctcaaattatgccataaaaatgcattttggctaatttaagagtaaaaaattttttcatgaaatgcaaaaccatggggtcccccctatggttttgagtttcaaaatcacaattaattttataactttttttaaactcatggtaaaaacatgagataaagcatattatattgggcttaaaattctctacaaaaatgctctaagacaaatttccgctaaaatcaacgcctgacgagttataagccttgaacggaaatggggagctcaattccggaaaatttttctatttccggaaaattttgaaattttttcaaaaatgccaccaatcgatagagctcgaaaaacggttgcttgaaagtggtctccgttttcctgggaaaaatcggcaaaaaataataaaattcaaaggcgcgaacccgctccgcttaacccccagcgagttattcacgaaaagccaaaaccggcattttgagcgccgttcagtcgccaatttctacaggctcggcatttgatctgatcaaaaagtgatcagtgacaaagttgtagccaacatgtctggggtgtgccctctcagcggactttttccgctcccggttccctgagaaaagttacagcccgaaaaccgcgacgattttttttagttggccgtttcagcgccgctggcgctcagttggcctccggactggaatttccttatttttcccagatgcgcaatcaaaagttacccctgcctgcaaaatttcagccccctccgggcaaaccacggggacttataattttttctacgagttgcaccttttctctatatatagtagaaactagcgggtgcgtgaaccgtcggctatttagctgggaaaaagcgcttcgcgcttcttgagcttcgctacctagatttgatcgaattggttggagagatttttttgaatttttaaaaaattattaggggtttttagtccacatcgaggctcaagacgggcgtttcgcgcccgtttttaaatttgttggccttggacgggcgcttcgcgcccgttatttaaagtttgttgattcatacgggcgcttcgcgcccgttattcaaattttgttggccttacagagattagaagaggtacaacagtgactaaaagaggtacaacggtaattagaagaggtacaacagtgattagaagaggtgcaacagtgattaaaagaggtacaacagagattaagaaaggtaaaacagtgattagaagagatacaacagtgattagaagaggtacaacagtaagagaagaggtacaagagtgatagaagaggtgcaacag

SEQ ID NO: 21163 - DNA, 2225 bp, Heterodera glycines
  unsure (1)..(2225): unsure at all n locations
attgcccatatgcaggaagaaatgcggcgccttgtgccgaaattccagtgacgaagaaagttttggtcatcccattacggtcgtgtagggtggtgcgcactttgcgtccaatgatgtgtttcagcacaagcggcgatncctctgggtgttgagccggtcgcgcaatgactggactgatttttggataattataatgtattcaaactactatatataattcaaattgttgtatcactttggtaaatccaataatatttttctttgggttttttaattagtcatattttttttaatttgtcaaatattttttgaattaaatttaatctaaatttctaaattcattgtttaactgctaaaaatttgaaaatttttaggacctaaattgcttaattgtcaggattaggatttatataagatttgcggcttaaattgggaatattttggttggctgattttgatagattaataaatatttgatgatctaattagaaaaataggcattgcatatatttgtgtaaatttccttttttgtgatacttttatttaatttattaataaataattactagggatgtcaaaaatatgtataaaaagtggtcaaaatatgtaaataaatatgtttaaaaaaatacgaaatattgtagaaatagtcaaaaatgtaccagatatgtaaataaaatttttttttaaatgtttatttggtttttgtatctcttttttttggaaaagaaccgatttttagtggtatattttcaatatattatttaaagaaggaatttccctaaatttcaaaacatgtaaaaaatgaataagtagttatggcccggggcccgtctgaggggttggggtggtgtgaaaacatgtgttttcacacctttgagagggtgtgaaaacatctgttaccggtaggtgtccgggaccgttttcgcgcaaaattttcgcgcattttttcggtgtactgcatttaatttttttttaaacctaaaggtgtggggcgtttattttaccgcacttttcctcatactttatttttttaataaattttttttcgtcattatactgtaattttttgttaataaatatttctccatttcggtggcgttggctgttggtcagtgaacaaaggggggggggggtggtggtgatggtgccaagcgaaaacttttccctattcttctgccatctgtgcgccgatgggtgtggaaagcgaaatggtgaagtggacggagtctgtgtatgagttctctccgtccttctctctttctttttctctcattcgtctcgaaacaaatttgccgtctcttcgttttgcatttctctgcgttgaataagcggacggatcggcgctttgccggaggtgggcaattgacaaaagttgtgaataaaattatggctgacaaaaggcggcaatgtctgacacaaagatggaaattgtaaaaaaagggggggggggggcggaatggccagaggggatggactgatcatctgcatctcctttcattatttgaccatccgacaatcatttctccatagcatttttgtgggaatggccaaggggttgaaatcgctaggaattttcctttttttttgaatttcctcaccatttttttttggcaatctgatcaacaatgagctccattcgccgtcccacgaacatgacgtggatcgtcgaggagcggtgttcctgcctccgggcggatgcggtctgcatccgtccggaggagttcactaaaccgatagagtgtttgaacaccgctcatttgggctcattctccgaacacttgttggcggcgccctgcaacgccaacgtctcgatcaatctcaccgacgtggtgcaccagtttaacaatgccaacattgccagagcgacgggatgtgtgaacagcatggtcttcatcttctttctcttcatcttcctcgcccaggtggatttaattttgaattttaatttaataaacgaagcagtacaggaagaggaactcggctcgattgccgggacagaggccgaagaagttctgcctggggagaacaacaatgctccccgaggcttgagcggaaatgagggagaaaaaagattgggagctgaagaagtcgcgcaagacgaagcagaggaagtggcgcttccaccgagttcagttcaagacgaagtcgggagcacctctcccgagtcgcagtcaaatgaccagatattggaaactagagaccggacgggcccgggggtccgg

SEQ ID NO: 21164 - DNA, 1516 bp, Heterodera glycines
  unsure (1)..(1516): unsure at all n locations
ccctcaaaaggggggctttatttcagaggggggtctaattcagggggggggggcttaccctcaaaaggggggctttatttcagaggggggtctaattcaggggggggcttaccctcaaaaggggggctttatttcagagagtggctctaattcagggggggggcttaccctcaaaaggggggctttatttcagaggggggctctaattcaggggggggctttattattcaacccccctcaagagggaggctttagttcagaggggggtctaattctagggggggggattgatttttcaacccctctcaaaaagggggctttatttcataggggggtctaattctggggggggggcttaccctcttcaggccggattaatacccgagggggattcgaatacagggggggcggatgccccccggaggggcccctacattacaaaggcaggatttaaagcaaagctcgggaggtttaattcaaaaaattagtccttaatgattttgaaatagatttatatgtagttgtcctatgtagactggtcgaatgactgagaaaagatattgtaaaaaagaaaaattataaccattaaacattcaaaaatgcaaaagtaatctaagaccattaaaaaatttcattcaaataaaataaaagaattaaataaaaaattgaaaaaatataataaataattcaaatttatttatcaaagcaaataatttgtaaatgaaatatataataccaacccgtaaagtggtcagtacgataaacttcattttccaagaagaaataaatctaaaaataaatcctggcagccaaaaagcttgaaaattaatggatattttaattgaaaaaaggattactaatattttaaatattttaccttaaaaagaaattttatatgatttccaataaatacgaaattattttttcttagcttaaatttgaagaaacaatttaatttatgctgaaattagaagattaaataacttttaaataaaatacctaaatattaataaatatgctttaaatatgaaatgattatcaagataatttctaaagtattaaatcataattgattttacataatgattgctagcactcatattattagaaaaagcgacataaaaaaatgccataaaacagccgaaatatgccttttaaaaacaaataaaccaagaatacacctcctaataatctaggtttcaaattttcaaaaatgcatatatgaaaaattacctttttcataaaaattgttaaaatataaattcaccccccccccaatttcttaaatttattttagaggatgtgcaaggctttgaaatgaccaaaatgatttttcaagcaaaactaattgtatagaataaaagaaaggaaaagtaaaataattataaaattagacaaagtaatatactaaaataatataaagaatattaaattctaaattgttaaaatgagaaataanccaacttctatttccactacggaaataaaaatgaacaattaatcatagaatatatga

SEQ ID NO: 21165 - DNA, 2983 bp, Heterodera glycines
tcattttttcacttgaaatttctttgtaaacgctattttttaatttttgttagtggagtaaattgattttgtccccaaaattttgggtgtaaaaccgtgcctgaaattcagcagtgccatgtgcgtgttgcccaatttgcggttgacccggcccagcaggaagaacacgtgcgcctcgtcgggcgacaaaacgcggagctcctccaactcggccctggccgcctcgtacttgccaatgtcaaagagtagcctggcctaatgtgaaggcatttaaaaaagaattgaaactggcacgacaaaagcggtgggggtcgattgggccccgccggttgggccccggtacgattgggcccgccagttgggccccatgggcagtcaccttttcttcgttccagtgtttaaaaaattgaaattgttcctaatttattaagtattaaattcaacctatttatctgataatttcgagaacatcgataaaattcataatgttaaaccggtgggggtcgactgggcgccgccgactaggcgacgccaactgggcgacgccgactgggcgccagcccaactgggcgccaatcccatacaaattatttccatttatattatcaaattttttagatttatacaacaggcacattgcatttaattttgtttaattcattatatttatttttgatgtattactaattactagggaagcaacttttagtgacgaaaaatcccgaaacagttaactaaaatagtgagtaaaaatgccaaaatagtgaaaaaagtccaaacgtctgcactgcagacgagagaattttgagactgacacggaattttaacccactgaacattaggaatttttgactggtgtttctcgaaattaccatatgcatgcttagaattttatgaataaatttttggggatgataaatttttcattacatatgaaaaaattcactctgagtcagcagcttcaaaattttttggtctgcacctaaatacttcttacattcagcggtggggattaatggtaattcttacaatgacagttcgttcagtattttttttttgtagctcaattggttaaattcatattttggaggcccgggttcgaacccaacatgaaaataaatacattttaattaatgtgtaaccaaagttaacgattaaaaaccacgttttatttttaaaaataatttttctttagtgaaagtaaatcaaaagccgaccaaaaaagtgactgccccatggggcccaactggcggggcccaatcgacccggtccgcgacaaaagacataaatggtatacataaaaaaaaagttacgaaattttttccattgaccccaaaatggccaaagccatttttagcgaaaatgactacaaatgtgccagttttcccggattctgagagacaacaaatggttgtggccacgaattgggaacgcactttgtgaaagcggcacggcacattgttgggcgaatgtttgagcgcactctcgagatattgcatggcctgaaaaatcaaatggttatggtgtcaattaagtttttcaaattttgttcgggaccgcgtccgtgttgtgcagcgcctgttcaatgacggccaattggcacagcagcacgttgttgttcgggttgatgcccaccgcacgtaacaaattcatccgagccatttgcaactgttcttcctaaacatttaattgtcaaaaagtggtggcatttggtatgaacatacagtatttgtagtactgctgctaatacacagtaagaaacccagaaaaaatggaggaaaacaaaggaaatttttttaaacccctcccaggggcgacggtggggggggggaagcagttcactcattctcctcagaaattgtaaaattttaaataaaatttgggaatcaagcggaaaagatactaaaattcgtaactttttttctgattcaccttgaaattgaccaggccgagtccgtaccaagccctgtagtcgttgggcgagaattggaccgcctttcgaaatgcttgcgccgcacggccaaagtcgttcatgtcgatgagctcgtggcccagcagagagtaggcataggcaaaacggtggtcaagacggattgatcgctccagacactcttttaacggcggaatttttacaaaaaggcaaaatgtgcatttttggagggaaagtttaacgactgccgccatcaacaattttaaaaaataattcaaaaatagtacctaatcacttctacgtaatcccggaccttttaaatggattgtaccgattccgagtttaaaacactggaacccatttcgtaggccaaacattttttcgggattgggaattaaattaaagtggaaaatgtccccattggaaaggggtctatcgaaatatggcgggtaatgtctgcaaaacaaccaaccaattgctgtctcgtgctgtttctcgacactgaaattggggaagggcaaatgccgaattaattttcatttaatttgttgttttgcgtgtgcccacctgaagcagttggccgcgatgcaccacgtttgcggttggttgcgcgcaatttcggccatttttgacgccagggcggacaactttttggagtcgtgcagttgccacagcgcggtgctgtaaatttccatgccattcaaatggcgggggtaaagacgacgaatttcctcgaacacctaaaaagtgaacaattatataatttcattattttcaatttcggaaaattttgtccttgcgggcttttcatattttttttaatggtaaaattgaaaaattattacaaaaattatttcaatgaatccttcttctcccccgcggcaaaagttaaaaaaagggagggtggttggtttttgtccaaaacgagccgaatttaatggttttgagcaattttttttataaaatttaatttttaaagattggcggtgcctgtaagcgcggtccagtggaatttgaataaattttcataaaaaaccctaaagacctgccagc

SEQ ID NO: 21166 - DNA, 1370 bp, Heterodera glycines
agtaaaagggcacttattcatgcgagttaccctgtgcgcaaaaaatatgaattcgaattcgagggaattattggtggaaataattattagacgttgacaatttttgcggcattatactataataaaaaagataagcagtttaatatgcttttcagattgaacgcaaaaggggccaccccgccgctttgcactcggacatcggattcaacgagcccggccaactcaacgatggtccgttgtgcaagtgctcctgggcttcaaaacagtcgggcataagacacgacaaattcgtgggggagcaatttgtggccaaatgtcagcagaattcgaggtccttttttcttaatttcaattttcttcatctgattgtgagacgattgtttcagttccatcgaaacgctttaccattacgttttggtcgtcgacccgtcgccctgcgctttttcgagacggccgaccgccattcaatacgacggacattcctacgaattcgaagggttctccattttctttcaccggcctttgccccgaacactttccccagacaccaattaatcagtggacgaatgactttcagttgaggctggtcaaagagaatatgcctgaagtgaacttctacccattaataatattaaactaattccttttttcttttaatttattgcttttcaaaggcgaaagcaaaaaaaaaaacttaaatttcagagtttcacagtcgatgatctcgagcttttctacgagtttttatttgaagaagtattggaactgtacgatctcaaccgtttttcaactgacaaacattctgtcgatgacccaaagaaagaagagaatgaaaacttgggctgtcctttttatcactgtatgcccagatttgcccgaaaattgccaggtttgaatttactcttaccattagaaaatgtcacaattcctttggtcagatgatggcaaagaattgcttccgatgtccgccgttctcacccattttactcgcgaattttcacctttggtcgatgacaatatggccaattacttttgcagagacaaaacggcattcatcgaatttgcattgcaaaagaagggccaaatttgtctaaacccatctaaggttgaagtgtttgttggtggaactttacgtgggaatttgctctcttcagcgtccaatggcgctcagagtggacatgatcgacgggtacaattcggacccgacaaaccgcgacttttacccaattttggtccatttcggcgtcaaaccgactgcttatgcctttatgaagcggccacagtggggcaaaaagaaaatgaaacttttttaagctcaaattgtacattttcgcagataccaagaggcactgaaaaaacacatcaaattt

SEQ ID NO: 21167 - DNA, 1605 bp, Heterodera glycines
  unsure (1)..(1605): unsure at all n locations
aaggtggcactccctntacggcattttggcgttntatgcttccaatggcaaattcatttcagactcgagtttctcggtgatgccgttgtggagtttttgaccactattcacttgttcttcctcttcagcgatctcgacgaaggcgggattggccacttttcgttcggcattggtaaaggaaataattttcaaaggaattgtggctagcaaaaaatttgatttaatgttaggttcaaaatcgacacttggccactttggctgatcgttttgagcttcacaaattcatggtctattcacatggccccgatctttgtcatgaggccgatttgcgacacgcaatggcaaatgccttcgaagcgctaatggctgcaatgtttttggattcaaatttggaggaatgtgacaggtaaaattaacgaaaaataacgagaatgttgatgatttcatatttttaaattctcatttaagtgatttctaatactatatataaataaattgctaagtttagggtcttttcaaatgttttgttcaaagatgataaattattgagaaacatttgggtcgctcttcctgaacatccgcttaaagtcagtttgatcactcattttaaattgaaatgtttttagcgtaacaatcccttcggtgatcgtcatttgattgaaaaagtacaatgtctgcaactgcttgccaactttgaggaatcaattggcgttcgttttaaacatatccgtcttctagcgaaggcattcactaggcgcaatgtgccgtacaactatttgactctgtaaatggcgttttaatttttcgggtttctaccttaacattgttctaattaatttcagtggaaacaaccaacgccttgaatttctcggtgacaccgttttgcaggttttctgtccattttcgttggttttactcgttccctccgttgtcattagctgctgaccaccgaatatctctacaaacacttcccgcttcaccaggaggggcacctctctctgctcaggacttgtttggtcagcaacaaaacgcagtctttggtttgcgacgagttggacatgacgcgcttcttagtcatccccgaggtgctttttatacaaaatttgtactgtacaacaaataatttcaatttaggcactactcagaaagggcactctcgcgcagctgagactcaaggacaaagcggacttggtaagatttaataaaattcaaaaatagccatttaaacgattttcccgcagaatgaagcatttgtcggtgccctttacgtcgatcgtggcctgatttattgtcgccaattctgtcgtagctgttttttcccccgactcaaagtatggaaaaggaactgaaaaatcactactcgcgatcattcgaacattttttaatcacaaaattctaattgcgcctccttcccacgcagtatttcatcatgacccaacgatggaatgaccccaagtcgcagctgcagcagtgctgtctcgcactcagagagtgcggcagtggcgacccggacattccggaatacaaaacgattggtgtcgaagggcccacaaacacacggatttaccgagttgctgtgtatttcaggttaacactggaaaaaat

SEQ ID NO: 21168 - DNA, 1297 bp, Heterodera glycines
  unsure (1)..(1297): unsure at all n locations
ttaacccttgttaaaatatttttttagaaaaacaaaggcaaagaatgacgcccgatggtaaacccacctttaaatttttagaaatttttaaaaagatgtggaaattttttttaaggggtttaagggatcgctgaacacgaatgcagtacctatttcatccgccaattcaatcccaggtccgaatttgaacaaagggggtagaatctttaatttttcaaataacacatttgtggttcaagcgcgcttaggtaaatacagggaatcagactgaaagtcagcgacggagttcgaataggtcgaaatggaagccggattgtggtcagagaccctggaagcatgttttcatgactttggaagcaaatacaatttttcagaaaaagggggcaactatcggcagtattaccattacccctcatccccatcttttttttcaaaaaataaattatataaaattaaggaccacttgtgcacaaaattaagttggctcagttggagactttggtggactcactttgtgccaatatggtgagccaaaatgagcaattgcgcgacgtcagctccatcgctctgaagacggtgctcaatgaacttccaagtggatccataaccactcaaatgtttctttgtgtgagacgggtcattccgaagctcatcgaaacactcagtaagtaattacaaatgtcatttaaaagaatctatgttaagacgtgtctttttgaataattaaaatgttttttatgccaagtttattaacaattacgagaaaagcgctacttgtaaattcgtgtcttaaattttattaaacccaaggggagtgattttacgtgaaaacttattccctggcttatcgtggtcgcagatctcgaacctaacatcatttttgtaccaaatcctaatcactataagccgaactcgaacaaaaagtcgaaattcaaatttttagaacttgaatttttgctcaaatttaggttagggatttggaattgtgaacttgatgctgggtttgtgatcattgatcccgaaaaactccaggatcaagttttcatgacaaaattttccaaccaccctttgattttaataaaattcaaaaagtaccaatttgcaatcagcgcccaataaaatttatatattaagaaactgactacaaaggcagctcttctgttaaacttgaagttttggacattcttggctctcttattttgcgttacgggcggacatttaatttaatgtttgacgaggtatattttttgctctttgaaaaatacgattaattaccatgccatannataataattgc

SEQ ID NO: 21169 - DNA, 617 bp, Heterodera glycines
  unsure (1)..(617): unsure at all n locations
tttgagcaaaattcgtaaagacgaattagcnnaagagcaaaaagcagtctttgcgaagctacaaaaacaagataagcatcacaaaaagcacatttgagaatgaatgacggttttatcaaaatcattgtaattatatttaactaaaatgattcaatgttctgaaaataccttctcccatttcacttccgtcgctaatgcgcgcgcttcaaaaacatttgacgatcaaaaacatgagaacacgcattagtgccttcactgttctctcgcaccttgtcaggtatttactgattgatcaatgagataatgattgcttgtttcagaactttcccaggaattatgaacgattacttgggcaccattactacaaacatcacaaaaactttgactgacagtgcggcggacggaactatgaaaattgaaattttgcgtttcatttcgctgttgttgaacacccacgaacctgaggtagaaagccattcggtggttggcataaattgatagaggggtcttagtttcnctaaatnccctcccaagctttttagtgtttcattttcttcaataatttctacccgtgaaggtaaggtcccaggactactctgctatcgtttattttgggg

SEQ ID NO: 21170 - DNA, 1022 bp, Heterodera glycines
aaacatataatacagggaagaaaggataaaaaggaaaattaatggttaaatgaagtttaaataaaaattatcaaaaaaatttccaaatttatccccaatttttatcatcttctttggctcgttcctgaagaagtgtctggcacatctggtatgcgacttcttcgtcgttcctcgggtcggtgatgtcccaggtgagatgttggccacaaaatctgtcgaagtttcctctgttgatgtgttgcatgacctgtctgtaggcgagccgtggccgcatcggtcgacggatgactgctccgtttctgtcgtgttcaggttgaagaagctgctcgtagtgccgcctagaaaaccgataaatttttatcgattctgacgaattcataccaagccctggccacaaaatcgtcgtcctgccgttgtgtcgagatcggctggttgttcaagccctcagcgtactcgttgaatgcccgcaggtgatcatccgtttggtcccttaagttcttgatttgtaacagtttatgagtcgtctcatacatcaaaggacggattcgaacatcccgcctgcagactgggcacgtgcgatttgtcgccagccacctcctgatgcatatcgtgtggaaggtgtggctgacggacctttcacaaggcagaacgctgatcagctgtccacgcagaagctgcaggtggcaaatgaggcacacgctgtccgttctctggtgtcttccttcctcccttcttcccaaaatacgcatgttcacagaggtgaagtgcggatgtgaaccgggtccttatgaagacaaatcttacaaaatttttcactttcggctacctctgttgtcgtcgcctttgttagctggcgtcatctcaccaacatagtcggcctcttggaagttcaagcgccgatctatgacctctctcgcgcgaattgcctctgacggcatctgcgccactcccacttcttgcatgatgggcattctgtcggcttgacgacattgtagaacaggtcttcatccgaccacccctct

SEQ ID NO: 21171 - DNA, 944 bp, Heterodera glycines
accccgcgatgtgctaagcaatagatgtctctgccgctcctcatccaaggcacgctttcgccgctcgagaatctgctgatgttcctttattgctttttgcacatcaagttcagcgtgatgattagcatagcgaatgatgtcagcgcaatatgcttcaacagcttggcgagttggcagaactaaattttttgcactatttgaccttaatgttttttttacaaacataggttaatttctgtgaagtttatcgactcgcgtgcagatttccgtagagcgttgacgtcagccttgagcttctccaaccgctcattgatgtatcgctcgtatgcggcgtgcctgccccagaccagattccgctgcttaagcctcttctgctggtcaaggtgctgcttgaggaattggtcggcttggcgcaatcgatcttgtactcggcgatctgctgccatgcgcttctgggcctcgattctctccgcctccaacgcctttgcttgttcagccgtcatcagaatcgggcgttgcattcgttgttctgctgcctgagcggccttagcccgtcgcttccgcttgtctcacacgtcgccgatttgtcctcatttcgtcgttttttgccgatggaattggcccgcggtctttgttcttcgtctgttgtcttttgagcttcttcctgcgttcgtatgactgcttccaactggaaatgtttttgacgcaggtcttcaaaaacatggtcgagcagggggtgccgttcaacccgtacagccttcttttttgacctcttacgcacaagccttaatagttaaataatttttttttgtagcacattaatatctctactttagctttgcttggaggaggtctgttagttggccaacggacataaagctctttgtcatcttcgccttattgcacttcttcacacaacttttgatgttttcgttgatgagggc

SEQ ID NO: 21172 - DNA, 2035 bp, Heterodera glycines
  unsure (1)..(2035): unsure at all n locations
aaagtccaaccatttctcattgcttttatttttcgttctgatttatgcccatattttccatggcattccctttacgtataaaatttcacttttgcgttcgctcccatgaacttttcgtgcaaattccgacaattcttatctgatcagcagacgaaacattctgatcaacttgctcatcaaactcattcattttcttcgcttaattgttccaattcaatttttggcacctttaattttgtcactaaattattatttgttcctccaaagttttttctttttttaatattttgcgacaagtttgactttgtgtcttccatttcgtctttattggccttttaaaattgattccaaatttaattatttttttcttgataaaattttttgggtttaaaaattttccttattcaaaaaaaactttaacaattgaaaaataaccaaaataagtgtggattaagtttttatgtgttttgctacttaaaaacgttaataaaaaattttatttgcctatttttgtgcctaaaaaatgaagcgcattgattacagttgcaaataattgtatatattcgaaatttttgaatacatttttccaaaataaataaatttcaaatcaaaattttggtcaagaaaaaaaacaaatttagtggaaaaatttttgaaaatttttgaataagtcgccaaatgtgatcgcgtaaaaaaagtttttttcattgcatttttgttaaagaatttgtgaattttacatgaaaaaatttaaaaatctagaaataagggcgaaaataaggacgaaatgccaaaatatgggcaaacacttattttaagggcgaacatctaaaataaggatttcaaagggcgaataagggcgataaaacgcaaaattttcgaacaaaaaatgcaggccaggtcgttttcgcgccagccagtttttgaactataatttttttaatttaaacgtagttatactttttctgtctgccttttggctttgaatactgcggaaaaataggaattttctcttttcactaatagaggacaatttttggcctttcttgattagctaataattttgaaaattactcaccaattaaaatatacttgcatttttcaaaagaggtattcataattttaaaataagcacatatttatagtgagactgttttcaactcgcttctattattaaagggttaaaagatgcgcataaaggccttaattaaacacaagaacatattcacatattttgtgtaattctatctcggactccctcctgctcaaaataatgagtttaatgtaaaatagatttgactagcggatactactaaattattttaaaattttcatctcttaattattttcatttaaaagtagttatactttttctgtctgcagctgtttgactttgaatactgcggagtaaaaataggaattttttcttttcactaattgaggacaatttttgtcctttcttgattagctaataattttgaaaattactcaccaattacaatatacttgcatttttcaaaagacgtattcataattttaaaataagcacatatttatagtgagactgttttcaactcgcttctattattaaagggttaaaagatgcgcataaaggccttaattaaacacaagaacatattcacatattttgtgtaattctatctcggactccctcctgctcaaaataatgagtttattgtaaaatagatttgactagcggatactactaaattattttaaaattttcatctcttaattattttcatttaaaagtagttatactttttctgtctgcagctgtttgactttgaatactgcggagtaaaaataggaattttttcttttcactaattgaggacaatttttgtcctttcttgattagctaataattttgaaaattactcaccaattacaatatacttgcatttttcaaaagacgtattcataattttaaaataagcacatatttatagtgagactgtctttcactcgcttctattattttaagggtanagatgcgcataaaggccttaat

SEQ ID NO: 21173 - DNA, 1111 bp, Heterodera glycines
attttcagcgtccttaaattattgtctctgccgctgttttcgtttcgattggtttcatttggagactctttttggcactttccgtctgcacatcttttgtcgtcattgtggtggaccttggccttatagttgcccgttttcgaagccatttgcgacaaaattctttccgaaacaccgggcttaattaattaactaattagtataatcaaaccaaaatgattaaatggttgtacaattaccttatcattgagtaaaggatgaaattgagcgcaaaattggcacagaataaaaagtaactgccgacaacgaaccaatagtgatgctcgagaaaaatattctgacttttgttcgtttggaagaatttgagaaagtttttgaggttgtacatgaaattgaaaaggacgtaaacgaaagggacgacggccaacaaaacattggtggcacgcatttcgccggggcccgtctcgccttaaagttttgttgtaattaaaatttgaaaattggaatttttagttaatttgtttactaaatgtatcaattagcgttttcacagtgcgtcactggaaaatgggtcagtgaatcagaatatcttggaaaaaacgagacccggtagtataatacttatatcttgattggtatgtaaacaagcttacaacaacctatttacagtataatttttttagggattgggtaaatttcaaatttctttagactttaaagaaacttaattgaaaaaattcagaacgaagtttttaaacaatttcgaccttttataaatgctacagtactttaatttagaaatactgtattattgacttatttttccggtaacttacaataatttctatgtcattaaaatgtgtttaagataagttttcaagtccatttacacttacaaatttgcatttttattttttgtctgtttatttttcaaaatttgcttctgcccaccgattatcacataacgcgagcggagtttgataattatgaaatggtaacgacaattactacgacgaaagggaaaataaattgggacaaaagccttggaaaaaggaaaatccccttaacttgaaatttgaaaaataaaataaatttattttttttaaatttt

SEQ ID NO: 21174 - DNA, 625 bp, Heterodera glycines
agagctctttttacggcgcgcttgtcggcaccaccaattaattggcctaaaaccgcgaatttggaaaaaaatagtaaacaaattttcaaaaattcaccaatttttattaattaaacaatttctttgaaaatcccccaatacgctcgtccctctctttttttttaaatcacagccaacagagatcccatcaattaccatttataatacttttctacacccgaaatttttaatgaaaaaatggtatttttgcttaataaattttttttaaatgggtcgttgccggcccgggttcatgcggaacccctgaaatcgtccctgcattcgtgctaaaattttagtaaataggcttaaaaaaattatattttttttatgaataggcctaattttgaaaaattaactgaaaattattgactctaaagaaagagcaaaaaaaaaagaatgcaaagtcattaacaatctggcgaaaaaatataaattttcaaaaaagttttatgggtgatccctatttttgaaaaattttcaacgtttttttccaaaatattatgatgattagtagaaagcataaaaaaatttgggggaaacgacctgctccgatattttattgcttaattcctaacaaagattg

SEQ ID NO: 21175 - DNA, 1091 bp, Heterodera glycines
  unsure (1)..(1091): unsure at all n locations
aacatcctaaaanatatctttttataaaaatattcctttgcaaagaattcaaaaccgactcccttttgccatttgattgataattttattgcaatatttacaaattaattttctccttttcgtactaattcgaattttaaaattttgttgccgtaataaccgactaccacgacgcgtcaccaatttattttagaatctgatgataaaatcaatgcgatataaatgattgggttttaactctaagccgttcgattaaatgcctacttcgaatatttgactgttataggcaaaggatttctaagaaaagaatattgtacggttcccaaagagcatgtattaatgacggaaaatcctcagaaaattactgagtcgcttcaatgtccaaacatcctaaaaatatctttttataaaaatattcattagcaaagaattcaaaaccgactcccttttgccatttgattgataattttattgcaatatttacaaattaattttctccttttcgtactaattcgaattttaaaattttgttgccgtaataaccgactaccacgacgcgtcaccaatttattttagaatctgatgataaaatcaatgcgatataaatgattgggttttaactctaagccgttcgattaaatgcctacttcgaatatttgactgttataggcaaaggatttctaagaaaagaatattgtacggttcccaaagagcatgtattaatgacggaaaatcctcagaaaattactgagtcgcttcaatgtccaaacatcctaaaaatatctttttataaaaatattcattagcaaagaattcaaaaccgactcccttttgccatttgattgataattttattgcaatatttacaaattaattttctccttttcgtactaattcgaattttaaaattttgttgccgtaataaccgactaccacgacgcgtcaccaatttattttagaatctgatgataaaatcaatgcgatataaatgattgggttttaactctaagccgttcgattaaatgcctacttcgaatatttgactgttataggcaaaggatttctaagaaaataatattgtacggtcccaa

SEQ ID NO: 21176 - DNA, 1505 bp, Heterodera glycines
tgtaaaaaatattacgcaagaaattatttttagatcctttttagaaatgctgcataaatttttatgttaaatagtcacaaaaaaaacttttttttactcccaatatctaccagttatcatacaaaaaggcaatagttaagctttgagatataaaaaaatcgtctagaataattatctcaacaatttgtcgggaaagttgaataaatttcagttgcaataggcatattggcacaatacataaatgtagagcaggctcaaaatagaggaaataccaaagattaaaaaattcgtgtttatggcccactctgctttggctggacataactcgccagagagtggagatagaccctttgttgatacatttgaaaatgtagagctcggctagcgcattcgaataacacaaaatttgttttcatttgcccccaaacaatccgcttatgacgggccgaaagaaaattcacaaaaatttggcaccggaaaaactccatttttttatgggccagcataataaagtaaacccaaaatgtaagtgaatttaaattggtcatgtgagatgtttagttttttatttgacccatccgttttctgggaaaaaacttttcgagaaaagctgaaaaattttccaattgcatcagaagcagactcaaattcttcaacaacataatgtaaaaaatattacgcaagaaattatttttacatcctttttagaaatgctgcataaatttttattgtaaatagtcacaaacaaactttttttcactcccaatatctaccagttatcatacaaaaaggcaatagttaagcactgagatataaaaaaatcgtctagaataattatctaaacaatttgtcgggaaagctgtataaattctgggaaaaaacttttcaagaaaagctgaaaaattttcaatcgcatcagaagcagcctcaaattcttcaacaacataatgtaaaaaatattacgcaagaaattatttttagatcctttttagaaatgctgcataaatttttattgtaaatagtcacaaaaaaacttttttttactcccaatatctaccagttatcatacaaaaaggcaatagttaagctttgagatataaaaaaatcgtctagaataattatctcaacaatttgtcgggaaagttgaataaatttcagttgcaataggcatattggcacaatacataaatgtagagcaggctcaaaatagaggaaataccaaagattaaaaaattcgtgtttatggcccactctgctttggctggacataactcgccagagagtggagatagaccctttgttgatacatttgaaaatgtagagctcggctagcgcattcgaataacacaaaatttggtttcatttgcccccaaacagatccgcttatgacgggccgaaagaaaattcacaaaaatttggtaccggaaaaactccatttttttatgggccagcataataaagttaacccataatgtaagggaatgtaaattggtcatgcgagatgt

SEQ ID NO: 21177 - DNA, 1115 bp, Heterodera glycines
  unsure (1)..(1115): unsure at all n locations
aaaacttttaaaaattntggcaaaaccgacaatgacatagaatttgtttaacattatggacggaaaagaattcatgtcacaattcaatttaatatggaggaatccatggtcagaatcaaacaaagttcatttgattagaaagaaaataggtaataaaaaataataattaataaatttaaattattgaagggaataaatcattcatttcaattttttttcaccaaagttgtaattttttttgttttctaaccattccaaatgtgctagaaaattttaaactgcaaaattgaaattttagatgtaacttccatctttaatcattaaattttgatttaattataccaatgctataaaagaattattatactttttattaaaggaaaaaatgccagctcatattgtgtcaataaccttggcataatttttgatgaacaaatgaaaaaactcaaaaacggcacacctatctctttggaaccaaaatgtaaccgacgattacatctacaagttttttggcaattgcgttggacattggaaaaaatgccagagtttacttcgatttcagcccaaaaaaagaatgcgatcgcttttctggacggatgtataaaagttcttcgttacacagaatgaatttttcacaacaattggaaaattcaaaaaaaaaactcactgaacataataactaaaactcggaaatatttggatataaaggccctttaataagctgggggctgtttaaattgggaatttttttttgcaaaatgcctaaatatggacatattataaaatttgaacaatgccaaaatatggaaaacatttaaaatatggacataaatcgcgaaatatggaaaagatggatatgaaacataacccctaaagcttcaaaccaagctaaaaatatgttttcatgcatttctggccacttagtccaggatattgaatttccatataattccgagccctatttataaacaaaaaaggatcaattaaaaattattggtatatttgattaatttatctcctgggctatttcatgaaccatagaaagttttcataatttaaacgcttctttgacgaacattcatattaaaaaattttgattttttgacttctaagag

SEQ ID NO: 21178 - DNA, 1442 bp, Heterodera glycines
ctctagagtcaatatatttttttcaataaaaaatatttttttttatctatcaatttcgggaggatcagttgaagaaacaggctcaaaaattgaaaacaaatttctaaatttttaaggagcctccatcaactgaaccaccgcctccgccgacaacattccaaccgccgccgaaacagacagcgacagtaaaacttaatttttaattaatgtaaatagcatacaaattggcaattatttaaaataaagtctggacttggatttgcatattctggagaaaatccaggaaaatccaaattgccgaaaaattgcatggacaaatttccaggaaaaacctaggcatatagattcatgtccagatcggtctctaataattaattaatttggattaatttgtaaaatttaatttaaaaaaaacattgacatttttattgccaattttttaaattaaattttaaatttttcatttgtttgttttgccaaggttgcctgcttcaatgagcacgaatgttgctcggtgtgggccgggaaaggcgagtgcgagcgaaaccaagcttacatgagttcatggtgtaaagcaagttgcagacaagtaagccgaaaaacaaaataattatataaatataatttaattataaagggtttatctaaaaattaatttttttttttataaaacattcaaaaattttattttaaattaattgttaactaaatgaaattccaataataaaattctaattattgaaaaaatcaaaatttattattcatttattttacacaaaggacaaaagaaaaaattatttagaaaaaaattttgtgaaaaatttactatttttcaatgttttaatttaatgcgtttaatttaatatattgaatttaattaattaattattttggatttagtgcgattttgactatgacattgacaaaggttggttatattacaaaaatttattgtaataagctgcataatttaattgcagaatgtggaaatcgtcacccgaactgttggcaatgggcaaacgaaggccaatgccaacggaaccttttttggatggtaatttacaaggccccggatttttaggtgctaaaaatcacggaataggtatctaaatagttgctaaaaaactgccaaaaactaaaaaatgccaaaataattgccaaaaaattggaacataattgctcaaaaatgcgaaaatttctcaaaatcttatatgaacttttggggaaacatgtggatccggcggtgccgaataggagacgtaggtgaaaattttgaaaattgaattaagatttgtgccaatattcggttacatatgccaaaaatttacaaaaaattgtttttttattttttcataaattttttgtttagaagcaaaaatagttttttaaaaatttcacaagtcaaaatagttgttaaatagtttcataagcgaaaatagttg

SEQ ID NO: 21179 - DNA, 1776 bp, Heterodera glycines
attataaaagtcatcgtagactccccaaactaaagcggaaaacgcgtttttggtggttagttacgcgtattaaatgcgcaaaattttttaggcattttgcctaaaaaacgaattcctcgtaatcacagacccataaccagaaaaaaaaaatttcgggaggggcaaccgaagaacttttttgctcgtcgggccaaaaatttttttctctccagcgtaattttagtatctttaacattgtcggcgccggagggcaaaagataggaatttatggccgcctttcgctaaaaaggactaatttttgcaatctttagggtttaaatttcaaaaaatacggtaaaatggaggtgcggcggtgccaataggcagcgccgggaaaaaattttaatccattttgttaagaaaattgggtaaaaatttttttaaattgcaaattgaaaaaatatttatttttaatttcaaggggggcagctgaccccccccctggttacgtgcctgaatcattaaaaaattttttgtttaaggtgtataatatcaagaaatacaaattgaatttagctgtggggtttggctggcgaatgtcgccgtaatccgacatggatgaactgtttctgcaaagtcagctgtggaaaatgcataccacaagactatgtgttcggatgtaagttatatttaatgattaattgcgttgacagaattaataaatatactaattaattccagtctaaaatattaatttaaattgtaaatgtttgcgatttaacacgctaattatagcacttttgataaaatatgatttggagcaatttttggaaaaatcccagaaaaatgaaaaatttagcatgtagccaaaataaaaaatagaaaattacatttccaaaaattcggctaatccatgttagcatgcactgactaccatccgcgatgttgggaatgggccgaggaaggcgaatgccgcaacaatgcatggatgtcggagaattgtaaacaaagctgtggcacatgtgtcagccaatatgaactcaaacaggtactgtattatttactacgtgttttaccgtaaaaattaccgtaatgttgtatacaccaaattttaatcggttcaatttttaccctccatttttcacaaattctctttagaaattgttggaaaatttcttatgaaaatttaataaaataaataattggtaaggtatcaaaacttcacattttctttaagctcaagacaactacaaaaaataagcttcaaaataaaaatttcgaaaaaaatcaatttgtttgtctttgatttaaaatttgataacccattaaaaaatagaaaaatagaatgaagctaaaccaaaatggcgcaaattaaatcgaaattaaaaaaaaaatcaaaaaattttaaaaataatccctgttttctttttttttaagatgtgccgtcggggaggccgtggtaagcgtcagattagcatgctgttggaaggagctgctggttctccgcccggaggacattcagaagaccagaaaggtgatattttcatcaattaattttcaaaattttatttttaatataaatttaataatttatttttgacattttttaaaatgaattccatcaaagattcacttggaccgcccaaaactgctgcttcgggagcgaaagaatttatttcaggacaaaaatcaatgccggaaagcaacggaatgccaacataaaaaccacttaaatttgaattctgtttcccttctgacccaataccaaaatcaaataaatcaatcatccaatgtttc

SEQ ID NO: 21180 - DNA, 1277 bp, Heterodera glycines
tgccgaaattcaccagtttgttcagtaccgtctgcgccctgacggcattttgttgctgcactttttgcgccagcacatcggcggtcgtgtcacatatgaactgctcaatgaactgttgcgtctccattggatgtcctcccatcagatgagcgtaaaatttaattaaataatttgttaaattatttttggaaaattatttaactaatttcttaaatgcgaaaaaaattaaagcaaattccttaacagtaaattgaatattaattataatttcgcaatgagaatctttttgcagctgggttcctcaattagtttcttctgaatttaccttaaaaaactcaaaaaatgcaactccaagtttaatttttcaatttacgaaaagattttttcagaaatttaattttctgctttaaaataaaagtatttaaaaagcgaacaattttaatttaaaattaaaataattttctttttatttttttacgaggcagtgaatatatttgaaattttaaaaattatttttatcttcattcattagaatcttgtaaaaatataattaaaaaaatcgcattttttattacgataattataagtatttaaaagaagtaattttaattaaattaaaaatgtttttcatttttccagggcagcacactgaccacttcaaagggcaccgccgccaacacgggcacaaccaacagcaaactgagcaatgccagcacatcaccaccatcttctgaacatgcactgttgttggcccgtcgtaaaacttttgatgcaaaatgcggtgacaaaatgccatcgacggaggaatcattttcaagacaggccacttacaaggcacggcaattaattaattgctttttattatattaactaacaggactctgtaaagacagggaggtgcgagttgtgcgcgatggccaaaaaaattttcgactattttttgaaaatatatttaaattgaatttcttccgcttggcagcagcgtcaggcacaaaattctcataaaattttgattattcagcttaaaaaatcacaaattgaaccatttttgatgcaaaattttcaacaaattctactcaaattttcaaaataatattcaaaaattatttcaattaaatagaataatggagtctaaaagtaaattttttggtaaaaaattacgttttcccttaaaaaattaccagaatttctttcattgactgggaatattttcatttttgggactaaaaaagaattagattcatttatatatttttttgatttagccaactgcctac

SEQ ID NO: 21181 - DNA, 1762 bp, Heterodera glycines
atccaggaattgccggaaatgcctattcaatgccaccatcgctggaatacattgatggagcagcagcagcaacgcctccacccaaatgatgagaatgccaacaaacagttgaacgcaactccgctgtgccaatcgcggcgtgccaagtcgccattggtaactttttaaaatatatttacggtttttgtaaattttaattcctctaaaattttttaagaaaatttactgccatttttttagattagaaaccaaaaatgcatctcatcaacattttaatttaacaaaaataaagaattaaaaagtgccgaaattgttcgtaaacaaaaattaattccttatttaattaattatttttatttttatgttttttttttgggataactttattatattaaaaatttatgaaatttttacagaatttaacaaattataaataaaactaaaaataaataaaatattttatttctttgaaggttcaattcctttaaattaaaacaatctgagatttatattaacttaaaaattaaatttaaaaaataattaaattatttagattaatgaaattatttggatttttctgctttaatcaaaaaaattttttttatgaattttgtgaattttaacaaattttattctaaacataaaatcataaaatgaatatttattttctatttgaaacttcaattcttcaaatgtgaacggctttagatccttgattaaattaacttaaaaatgaaaaaataaaaataaatttatttattcaatttgtcaggtgaccggtctcggcacaattggaaaacgccatcatcagtttggaaatggaatgccaaacaattcaaatagctctcaggaaaacaatgccaattcgccttgccaacttagcaccgattcggaagtgtaagaagaacaaattcgatacacaaatttttgaattttcaaaattgcccattataattgatcatttaccataattaattgattcttaactaacacgaattgatgactaattaatgcacgcggacaaaatttttcacctacgaaattatggtggtttttttatttttttatttttcgaaatatttctttcaggctaaatataaaacttaaaaacgaagttatgaattaaatttcttttaaattatatccgaagaatttaaaatttataaaatattttcattattaaatggtgaaaataatttggagttttgtccgaaaaaatttaatcattaatttaattaacgcaagattttaattatacattcgctacttaatgctgctttgatcattaattgaaaagttttgctttttgaaaaataacttggccattattacaattatttattcaatattccaaattaacttttggtactttcgtttgaattatttttcactttcaattaactcttcccatctcagggatttggtttcgttataattgtattttcttcttatttattttttaatttaaacttttttcatatttaacttccatttttcatggcttgaataaattcatttgtattaaaataaggagcaaaattttgccggaccgggtaattttcgcgcggacccgattttttagactatgacttttttctagagaccggacgggatcgggatcccgcgggattttttcgggatcccgcgtgatttcatcgggatcccgactcgggatctgtcccgatcgtttttccaaaatgttcgggattcggtcgggatcccgactcgggatccctccgacccctgttgtccggtctctact

SEQ ID NO: 21182 - DNA, 3101 bp, Heterodera glycines
aaaaatatttttgccatgttttctctgctgctctccatcttcccaatggtcttcttggtctattgcaatgcaatgccaagtcaatttaaataaatataaaaaacattgcattttaaaaacatttaataaaaaggttacatattttattaattatccatttaatttgcaaatttataaatttaaattccataggttttccgtgctgtccgggcagtcagcaagtggttgctgtgatgtccaattacattaacactttctctgctgctgaccaatctacagtatgctcaaccgcgaaaaatactgtggatggaataaaaagtgaactttcatatcgcgtgggatgcccaagcggaggagaagcacaaattgtggatgaaatcgatcgacagctgaagagttaaacaaattagaaaataattaaatgaattttgagagaatggtacattttaaaaaagagtaattaatttaaaaatattgaccaacttatctcattaagacattgcgaaaatggcgatcaattatgaggacgagtgcccgtacaatttgggctttgcccgtgccatgttcgacttggccgctgctgctgctggccatgcgggcaacggcacagaatggcaaaacatgaaaggacaatttgaacaggaaagccaagcaatcaaagcaattggccaagaattgaacattgaagttactgatgtgcattttggacatccaagcaaaggcaaataaaactaattagtggctaattaagtaattaaataattttctaggattttcagcgcaccaaaatgtgccaagtccgagccatgtgattgccaaccctggccaacagagttcagttgaccatggaaaggatgttgaaccgttgtcatccgatttcgacttctgagggcatagaaaagcggaatatattaggaggaaaattcatagtgcagaaaaacattttgttggccttcttgtgatgaacatttgttttggtaataaagtctgtcttccgtaattaccaaaaatatttttttatatttattgatagtaacgtaaaagcatagaacttccataattattatatatattataattcttccctagtcattaaaagcgaattaccccgattattgtcttgtaaaatgaaaatttattaagctacgctattcatcatcttcttattgttggaagttcaaattgtgaacgggaaaactaagaagaaaaacaaaaaaaatagttcggaaaatgattcttcgccctctaaattttcaaaagcttcatcttctaaatctgggtcctcagttagccgtggtcaattgaaagaggaaacgcgcactttggacgagatttacatggccgcgctgaaggaaggcgacaaatttattctttatgccggcggcgattttccaggcgatattgatggcattaaaggagcattcgaagcgcgcttaccgatggaagttattgtggactactccaaattccatggccctcgaattgacattcaggttgcgcttgttttcaaatagcccattttattggtcaattaaccgtgatcggtttaaaagctggtctcaaaatatcgtatatccgccaatatgcaaaaaatctcattcggcgtgtgacccgatccaacctagtcttcaatccagaccaacactacatatttttcagcttgagaacaactcactggtgccagatgttgttcagctccagactctccatgattttcctcgctggaaaaaacggggcatgctgatgcagtacaagcccaagggatggaatgccatttacgagggctaccgcgaccgggacggttatttcacaggaattatgattgccgtgttcagcaacaatgtcaacacccatatggtatccaatgagagtgattggctacgcaatgccaccgactgtctaaaaccgatatttgccaatggaagaattattcagacctacccaaacgatgatgatgcagtacttttttggtttaaacaagtaaattataatactaaagtaataatatcggtaaaatactttaaggtagtagacaaatatggatgggattatatgacaaattggctgctcgaaagccagtgatggtccgcggcaccggtgttgtatgagcacgtcttacgctacgctaactagcatgggtccagcagttctcagcaattcttcatattattttaaataaatatttattgattaattttactcttttgtatcatacgatagtccttgaattgcgttattagtttaataaatttcaaaaaaaaaatttttattaagagcaccggggaaatacgaatgaaatgggtcagacacagtcaataaagaaggggtagagaaatgtaataaaacaaagaatggaatgagaatggactttggtcatatccaacaatggtcaacaaagtgtttttctgtattatgaattttcttgctaatatattccgctttttggcggaaaatccttgaaaattatttggaaatataaataaatatttatttaaaattaatttatttgcctttgcttgtggctccaaaatgcacatccgtaactttaatgttcaaatcttggccaattgctttgattgcttggctttcctgtacaaatttgcttttcatgttttgccattctgtgccgttgcccgcatggccagcagcagcagcggccaagtcgaacatggcacgagcaaagcccaaattgtagggacactcgtcctcataattgatctccattttcgcaatgtcttaatgaggtaatttgaaacaataatttcattttaattatttatatcttccaatgatctgctgttagtattgtaattactcttcagctgtcggtcgatttcgttcacaatttgtgcttctcctccgcttgggcatcccccgcgataggacagttcattttttattccatccacagtaattttcgcggttgagcatactgtagatttgtccacaccagtgaaagtgttgatgtatttggacatcacagcaggtaactcttcgatatttcgcgcaaaaaattctcgaataatccctttttatcaaaaatttattactttaaataagtgtaggacatgtcacaaaatggttttcggtgctatgaattt

SEQ ID NO: 21183 - DNA, 2551 bp, Heterodera glycines
  unsure (1)..(2551): unsure at all n locations
tgctggagaacgtttgtgcggtataaaattgttcacaaaaatagatagacatttttgctggaattggtatttgtagccataaattctctgggaaatataatattcggcggacaaggctctccctgtgatggttgagatcatatttgcggtataaggatatacagaaaaagatagccatttgtctgaagttcctcatagaagtcaaaaattatttccccccccccccncccccgaattttgggaatggtaattaaagccaaaggcattggccatctgttgcgcgtcccctcggggcttagcgaatgaatggcatttccaacggtgccgtattggccaagtcattctcaagaaaatatcaaaaagccgaggattgacaatgccgaggccaatttagacatgcaatggtaaaacccaatcacaaatcatcaatcaatgcccccagccatttctcgacatttaattactttgctaattgcctccataattactttgtccgctccttttgcggtccttcccctttaatttcattcaccagcccatttccatcaaaaaacaaaagtgtgcccgccagggacagaatcgcgcgacttccaaccgagcgaaaatgagaagagacaaaaatgagaggagacacgagccaagcgacggctggcagcaattagccatcacaaagaaagaaagcattgagtgattgatcagcagaaattgtggagaacggtcccaaattcagaaacaaacaaagaaagaagccaagggcatggcatttacgcaacagcaaatgttataatcaccctttttggactaattcagtctatttcagtacaatatccccccccccccctcactccgtgccgtccgttcccttcccatggattgctctgtcggcatgtgaaagggatgtgccgctgctgcccctaaatcgtcaccatttgtcatcaaagtgtcccaaattccttcttccccaccccctcacagtgtgccattttcaacggtctctcccccgagggcattgtggcggaaattaatttgccatcgccgccacctttcattcaatctttcctctcctttggcatctacaaagtccttttattttttgctccactccaaccagttttacaatgatgaaacagaacaaatgggccattattcaaagaaaaattggcacaaattgccgaagacgaagggggaaagtcaaaaaaaagaacgatcgtcaaattcgctgagtaatccaaattgccgtcttgcaccccgtctgaatgatcgttttcagagctgaaaatttgggagcaatggcatttggtgcgtaattgtgcccactaccatcgtagaagggtgcctccaggccctggtgctgcactcccgtgtcgtggtgttccaattcctcgtcccgaaactgggccaatttctccattaattcgcggttggcattggcatcatccgccatcaattctttgatctggtcattgtaatgcttaaaaaaagaaactttataatgaattaaatttcacttttatttttattaatgaaattatatctattttgatggatattttaacctccttccccctcggacaaagaaatggacaaaaccttttttcactattaaaagtccaaagtgcggccaaatttaattttaggaataataaaatcaatgaaaggacgggaaatggtaagagacaatgacaattanatgattgacagattaagcaccctccctcccgcttcagtaaaagtgcccacttggccaatgacttcctccacggcaattgtgcatgccatcgctgcctttcgccaagcaaagcggtgccaacaccttaagaaaaaaggaaaaataagccaattatttgttaaattgtggtcctataaatccatttcttttgctccgtccccactcacccaacataaaaccggccaccgaacaaatcggagccaacgcagtcgacctcactccgtatttgactatcaatcgctccatctcgtccaaatgatgtctttcttcgcgtcgcatttgttcaattatcggaacgagacgatgggttttcggaagaacggcgagttgaccggcataaatctgaggaactcacaaatttatttgttgtttttcttaaatttcactctgtcagccgccaattcgcccgcgtggtcgacacgaacaattggatggacaattgccttccggtaagagggaagaagggacgaagaagaggcggaagaggaggaggaaaagcggagggagagaaaggcaaagggacggaaattcattgaaaacggacgaacggatggaagaaacgttcactcgaattgatgtgcttaattgaacgtaaatacacggtaaaataccttcattaatttaggaaaaaaagcatcgagcgacagttttcttcagagacacagaaactaatcaaaaaagaaaatgagatgggtcttagatttttatgcgcagttcgctttgtttttgcttacaatgccatcccttaattgacctcatcaggcaggggactaatcacttgcgcaattcattttccaaccaccccgaaactcaccccccccc

SEQ ID NO: 21184 - DNA, 1067 bp, Heterodera glycines
tgagcagaaaagtgataggcattttccaatttttcccaaacaatcgcgccgagaaacaaattccagaacaattagtatcggcctaattattctgagaatgcggttggaattcctattactgttgagcagaaaaagagatagccaattttccaaatttttcccaaacaaacgcgccgagaaacaaattccagaacaattagtatcggcgtaattattctgagaatgcggttggaattcctattactgttgagcagaaaaagagatagccaattttccaaatttttcccaaacaaacgcgccgagaaacaaattccagaacaattagtatcggcgtaattattctgagaatgcggttggaattcctattactgttgagcagaaaaagagatagccaattttccaaatttttcccaaacaaacgcgccgagaaacaaattccagaacaattagtatcggcgtaattattctgagaatgcggttggaattcctattactgttgagcagaaaaagagatagccaattttccaaatttttcccaaacaaacgcgccgagaaacaaattccagaacaattagtatcggcgtaattattctgagaatgcggttggaattcctattactgttgagcagaaaaagagatagccaattttccaaatttttcccaaacaaacgcgccgagaaacaaattccagaacaattagtatcggcgtaattattctgagaatgcggttggaattcctattactgttgagcagaaaaagagatagccaattttccaaatttttcccaaacaaacgcgccgagaaacaaattccagaacaattagtatcggcgtaattattctgagaatgcggttggaattcctattactgttgagcagaaaagagatagccaattttccaaatttttcccaaacaaacgcgccgagaaacaaattccagaacaattagtatcggcgtaattattctgagaatgcggttggaattcctattactgttgagcagaaaagagatagccaattttccaaatttttcccaaacaaacgcgccgagaaacaaattccagaac

SEQ ID NO: 21185 - DNA, 2370 bp, Heterodera glycines
agaaattttgtcccatacaaatgttcccagcatgggcagaggggcgcggagagcaatggccattctattctacagggaatttttaaatttattctctatgccagaaaaatggttatctcttttttgcgagaaattttgtatcatacaaatgttcccagcatgggcagaggggcgcggagagcaatggccattctattatacagggaatttttaaatttattctctatgccagaaaaatggttatctcttttttgcgagaaattttataccatacaaatgttcccagcatgggcagaggggcgcggagagcaatggccattctattcttcagggaatctcagaatttgttctcttcgcagcaaaaatggtcatttgttttagtgtagtaagggttgtccacaacaaatggtgcacagcattgttcagcgtataggcaacagcaagtgacgctctcggtaccgttagattcgccacatcatgctgagtctccggacaccgaccgcgtcccgttccgttgcctattcgcggcacagcgactgctttcgtcggttcactttttaccaatccactagtgttgtaaggattttcaccaaacttcgtgcacacattgtttagcgtataggcaacggaacgtgacgcgctcggtaccgttagattcgccacatcatgctgagtctacggacaccgaccgcgtcccgttccgttgcctattcgcggcacagcgactgctttcgtcggttcactttttaccaatccactagtgttgtaaggattttcaccaaacttcgtgcacacattgtttagcgtatgggcaacggaacgtgacgcgctcggtaccgttagattcgccacatcatgctgagtctacggacaccgaccgcgtcccgttccgttgcctattcgcggcacagcgactgctttcgtcggttcactttttaccaatcgactagtgctgtaagggttttcactttgactttgctttatttttcattttttccaatcgcctagtgctttaaggttttcactttgactttgctttatttttcatttattccaatcgactttgctttattttccaatttgggatttttttgtaatttcgctcttttggtcatgaccgtcgggggcaagtgctggctagcgctttgttccttgcggtatgctacggctgctgctggggtgccacgttagtcgtggtctcagtttctccagcgttcggcagtcggtccccgcctcgggactctaaagatgcaggtggccagccgtgccggtccccgcctcgggactcaaaagatgcaggtggctagcaagagccggtccccgcctcaggactcaaaactctgagcacattgaacggtgatggctgctgctggggtgccgcttttggtggccttagtttctccagcgttcggcagccgtcgaaacactaaacaagcagctttgctgtttgtcaaaacaatttggcgagttaattgacttgtgtaaatgtggcctaaggcacaaatactgtggaggaactcagcacttgggatgctgattaaggacagaactggctgtcttttgagtagcaagatgcacaagacgctcgggtggacacgtgtgcgcgtgtgcaaagcccctgccgacgagcaagttggagatgccggtcaagcatatgcagtatacggtcacgcttgtgtcttggttgtgttcttgtaaagatccttcgaaagaatgtacatgatagatcaacgcattctgtgggagaataaatgtgattgcagcagccgcggtaattccaactctaaccacccggtggttcggtgactagcgccgatgacagtgtcaggcggggagtttgactggggcggtacggaaaggttatcacagggatcgtgtctgattttgcccagtgttctgaatgttaagccaatgaatagggaacgtgagctaggcttaaaccgtcgcgagactggttaattttaccctaccaaagacctgatgctatgatagtaatcctgctaagtacgagaggaaccgcaggttcaggtatttggttcatgtgtttggtcgatagaccaatgatgtgaagctattgaaatcccgctcaagcgagattgcaatattcttgctccccggtgtcgggaggcactacttatgcgccgcttgcggtgcagcccaaatgccccagcatctggcccgatgtgcgtgcttaattgctcgcacattgccaaagccgtagcactcgtgtgccatggtggaacgtcggggcgcaaaatcacttttatacgacttgactactggtcagggagttgttagcagtagagcagcttttacactgcgatctgggggaagttagcccttgatcggatgatttgtattctttttccc

SEQ ID NO: 21186 - DNA, 2666 bp, Heterodera glycines
  unsure (1)..(2666): unsure at all n locations
tgactgtatgtcctgaatttgaaaaaaaaaacnttgtcaccctgaatatacatatacttctgaccaattctaatgctaaaaaacaggtactcacgcgaaaactgaataaaaattttgtatttggaaaattttgtccaaaaatttttatgttctaaaattaccggtttttaccggtaccggtaccggtaccggttgaaaaagttggtaccggtaccggtaccggtttttgcagtaccggtcagtaccggtaccggtttttttgcaattaccgattaccgctcaactctactgcaaatgaatggcacaaggttttgggattattggacaaaaaaggtcgccaattatgacgacaaaacaattacagtgctggtcagaaaattggcaccccaagcaaatttgttcaaaaaaaaagttatgaaatggcaccgaatgggacatttaatgccaaacaaaacaaaaaagcagcgcaattccatttttggaatatttaggcacaatttgacgagaaattaacagaaaatgccaatttgtacagcaaagaatgaatcagcaaaaaggggacgaggaaaaacaaatgggaaaatgaggtgaggaggaaagggaagcaaaaggaaacataaaataattaaaataaaataattaaaaatttcctttggtttcgccgacttttgggggattcactgcacttttgggttcatttattaattttaaatgcctttattagtcggacggagaattgtgacgtccctttttgtacttttattggcaaaccgttgggctaattccgccgcttttttgtgggagaaaaattggaaatgaaaaattctaatttattgaattctgttaagaaatttctcaaaaaaacccaaaatgtcaaattattggccgcttaaaagtctattggacgaataagtaagtgctcttgacccgaatatttatatgtaatttatctcggcacattaaatctttgccaaaattaaagtttgataatttttttaaacccatattcagagatcactttttgcccgtttttctcaagtaatttctcatttaagaccttagatttttccgcacggttggaccgctaaatcaaatggatttttcgaaaaattttccgattttattggccgagagggcccaatttaaagaattaaatccgttttcgcaacaaaaaacatttcaattcgaacaactgtaaagtcaaaagtcagagttgacttaattgtctgccataaatttaataatgtgatcgaagttcataaaatgagataaaataaagaaagaataaatgtaaacatttgtcgttaacttttgtctttcgcttctgcgtttaaatttgcgtgtggaagtgcctaaacatttaaattattttaattttcattttaatttttgagaatgaaaatgcctaaacatttaaaattattttttaattatttttcaattttcgttttaatttttaccattttcgcagattttctttctctgcaaattccgatttcagctgcacattgtgaaagctgcccttctcaaagtcctccttgatcttcacgtccaacttcttcctcagattgtccctcaatttgcgcttaaatgcgctgtttgccttttgttctgccgccatttgaatgcccaccagccaatgcctcaggccaattgagtttctgtccaaatttgaatttcgaatttaaattagtatttttttacccatttttctccaagtcggcagaagggcattccgttgggccgatcatttttgggcggacgtggcaaaagtccacccaaatggccaaggggttctccacaaattcaagcagttcgtagcgcagcctttttccgacaaaatcgcagaatttgtccacgttgtgacttgagcctttgcattcgatgacaataaaatgttcgtactcaaacaataaaaaataataaatatatttaaaacatttgttttattactttctcagtgaatgctatcgcttcatcttttgtttccattttgcttctcaatttgtcacatgcttaaaataacaattaaatctcaaaataatttccattataatttttataataaattgccattttccaattccacgggcatagaatttactggttaaattggtcatttttgagcagtacaaaaacgcaagtggtaaaaataggtcagatttaagtccatattcggaccttacggccctaattgttaaaacacaaaatttttatttcgtttttcccatttttataattattaatcttttttattattttcccattttgcctcgcttcagctcattcttcaccacttttgcgctcgaaatgttcactttttcggccaaatttcgtcccccaattgtcggcattatcactgccattgccaattccttccgaatgcttttcattgccttttcaatttcaatttgctgctcttttttcgtgcgatgctttctccgcgctttttcccatgccaaatctctgcggccgatccaatcgccgaacggagaccaactcaaaaaagtgccgaagaatttgtgatcaattggtgtcaattggacgggcattggccatttcctggaaaattggcaaaaagccaagaaaaaaaacaaattcgaaattaccatttggagaaaatgagaaagaatttgtggaccagaaaaggcattgacgaatttggg

SEQ ID NO: 21187 - DNA, 1409 bp, Heterodera glycines
  unsure (1)..(1409): unsure at all n locations
tcctcgtcaatgtcgcgcagaaatnggtgaacagtgatggcttgtttcagttttcgcgacgcacatcagtcgagtcctgaaagaagcaacaattggtaataaacaatataagaaatgcgaattattgaaggtggacagaaattattcgaatcccgcttcatntaaggggagtctcaaaattaagaagtctcgaataaatagaagttgtcattcaaacaattagatgccatgtctctgaatccaataatgccggattatattaatgactgatcagtcttcatgcaaaaatttaaaataatcagaaaaatttccaccatttcgagagtattgaaaaagtcaatattattagacagactttcagtcttcttgagaaaccagtcaacaacgagtcaattatctacctgcatgtacgcgttgttgtcgcgcaacttttgcaatcgttggacggccaattctttgatcaggatcaaatgcttgagtaattgttccgtgcgcgtgccgatgttctttgcgtggtgattgccagaattgatgagctgtaattatcaattaataattataattaacaaaattaaaggaatttaatgttagtaaaatacagtagctgatcttttttctgagattttcgttttgagaaattttttcgacagtgtttataaagtcacccaaggaaacaaatatgttagcttctttaaaattattaattttgaataaaaatattttaatctgtccctttttaagacaaattttggctttattatgcgtcaatttcgccctcccccgcgtgtgccatgccattctgtctcccacctgttcgccttggcgctgcagttcgtcaatgcgctgctggtgcatctgcaggtccacctcgaacgtgtcgtgcttcttcaacagtccctgcactgcagccatgttctcaccgacgttgggcgagctgagtatctgttgcttctcgttcagccaggcttcctcctcctcaacacggccgatgaaattttggaactcttttttcttctttatccacgattcctcctcgtcaatgtcgcgcagaaattggtgaacagtgatggctttgttcagtttttcgcgacgcacatcagtcgagtcctgaaagaagcaacaattggtaataaacaatataagaaatgcgaattattgaaggtggacagaaattattcgaatcccgcttcatttaaggggagtcaaaattaagaagtctcgaataaatagaagttgtcattcaaacaattagatgtcatgtctctgaatccaataatgccggattatattaatgactgatcagtcttcatgcaaaaatttaaaataatcagaaaaatttccaccatttcgagagtatgaaaaagtcaatattattagacagactttcagtcttcttgagaaaccagtca

SEQ ID NO: 21188 - DNA, 2321 bp, Heterodera glycines
  unsure (1)..(2321): unsure at all n locations
aggccaaaaaatnnttttctatttccgaaaaaaaatcgaaaattttccgaaaaaattaccaatcgatagagctcgaaaaactatgttttggaagtggtctccgtttctctgggaaaattcgttaaaaaatcctaaaattcaaaaacccgaaaacagttttttaggcctagctcgaaaaattttgaaaattttcgaaattttaaaatttggaaaaatcgggcttttaaagctctacaataagtctgctggccaccctgcgctcaggtcaaagcctaatgagttattcaacggggactgaactggacaaagttggtactgaatttttagccaaggctacagcctcgggagcccaacgtagggcttagggttcgctggcaaagttgtcgaggacactccaacttgggtccctcccagcgggcactttttgattcgggtttttgaaaaaaagttaggggccctaaagtgcaagaaaaagtgagaaatcggtccccgggactcagtcgtccgcgctgaatttttctctatagttttcccagatgctcctcaaaaagttgtaagacccttccaccactttcagggcgctcccggccttcggccgggagaaaatggttttatcaacgaaactccttgtcaatataacgtatatattaactagcgggtgcgtgaaccgtcggctatttagctggaaaaaagcgcttcgcgctttgggagcttcgctacctagattagctctggttgtggagataaggggttgtaggagttagccccaaaaaaaggagggggcgttttcacgccctttttcaaatttttggggggttcggaagaacacttcgtggcctcggtgcttcgcgcccgcttctaaatttgttacatgttacatgaaaacggagggagttcatgaatttcctctctgagcatgtaacatgtaacatgtattaacataatgaaatgcaaagaattttggaaaagttgttaaggtgtttaggccgcttcgcggcctaagatgggttcttcgcgtattaactaatgaaagcaatgaatttttgaaattttattaatgggttgtaggcaggtttacgccctaagatgggcgcttcgcgcccatttctaaatttgtggggctcgtaagaacacttcgtggcctcggtgcttcgcgcccgcttcaaaatatgttacatgttacatgaaaacggagggagttcatgaatttcctctcttagcatgtaacatgtaacatgtattaacataatgaaagcaatgaatttttgaaaagttattaaggggttgtaggcagctttacgcctaagatgggcgcttcgcgcccatttctaaatttgtggggctcgtaagaacacttcgtagcctcggtgcttcgcgcccgcttcaaaatatgttacatgttacatgaaaacggagggagttcatgaatttcctctctgagcatgtaacatgtaacatgtattaacataatgaaagcaatgaatttttgaaaagttattaaggggttgtaggcagctttacgccctaagataggcgcttcgcgcccatttctaaatttgtggggctaagagaaattaaaaaataagtgtagtaacatgtaacatatacaatgaactccctccgtttacatgtaacatgtaaaaaattggcttaatgaacaaaaataaaagttaatcggaattaacataagatcggaaataattaattgatcggaatttcaccgatttttcttataagttttatcttatatgtaacgtgtttcgtgttaagcttgaaattgtgttagggtctttgcgtcagccgacatgcacttggtttcgctcgtgaaatgagcagacacattgcatatttcaatgcaatggaaaccggaagtgccctaactcgcacgtcatccctcctccctccctttagtccaggtggcagcacttttgtgtttgtgcattctttttaaagtgcagatgggaacggggcgacatctgtaaagtgccacacacgctggactataactcgtttgctttattgcaatttgagcatgtttttggccacaatgttcagcactttggctttaccttggtcatcggtctcccttttgggagcgtatactcggacgttgttaccgtccgttgcccttgaaaaggccgtatacaattgaccatgggaaaacacatccctttcaaggtcaattccgaccgtgctgattgattggccttgacctttgagaatggtcatggcgaaggcagggttgatgggaaactgcaaacgctcatattttatgccgccagccattttgtcctcgtagacattgcgtgttctttcgatga

SEQ ID NO: 21189 - DNA, 891 bp, Heterodera glycines
  unsure (1)..(891): unsure at all n locations
agggaaggaaaaggcagacagagaagcagacagtggtcataagcagaaagtcacgggagcagcttctccgggaagcgacagatgtgcaggcacttcacggagagatcacgagactaattagagttggcaaacattgccccgggggaagattaagggtaattaaatttaggaccttagaaagacggaggaagagctgaacttgctgaggaagcagtacaacgaaagagggacgcttttgaaggaggaaagggaggcaaaggcgaaggcacggagggagacggacagactgagggagttgttgctgttcaacggtggagacgaggaggccaaagacccattggacaaattggaagaatttgaggggggaaacgtcggagaaattactgatcagacaaaagccgaagaaagtgatcaggcggaggagggaaaagccgagcaaagaggccaagtcgaccctttcactgaagtgaaaccccaatttttcaatgagacaaaagcgttgtttaaaagttccgcgacagagagagaatggagtcgctggagttggagaacgcggaattgcgtcgctttgtggaaaacgtggcggagaacggaagggacgaaagggagcggagaatggcggaagggacgcggcgattggtgtttttggcggtgaaagaggccaaatcggagcggcgactgcaaatcagcaaacgattgcgcatggcaatgagcacaggtaaaagagaatttgggagaaatgggacaaatgggggaaaatttgggataattgggacaattaggggtaaatttgggaggaggatgagggtgattttgatttttgttttggtgtgccattctctcatncgcaccaaaggggaccctcctttacccgctttcttcttttgattc

SEQ ID NO: 21190 - DNA, 1997 bp, Heterodera glycines
aaaatgcgctgcttcattccgtgcccgtgcacgaatacaaccgacttctcagacagcacaaacgccttctgcgcgacagatttttgagctcgccgtccgacatgggttaccattcggaaacagagcaaccgacggataacgacgattttgtggacaaaatgtacacggagcagcacttgaacatcggacgaacgatcggaggtccgtcggactttgaaaatttggccgaaatgcgttggctttagactcggcccattggcacaacgaatggggccaattgagggaaatgaacgacgtattaagaggacaaaacgacgcactgaacagggagagggagaagctgaaggcggaactggacgagctgaacgcatttctggacgacatcgaagcagaaacggaacttaagtcgatgtgtgagtggacaatttggggggggggtcccgagagttggcccagtggtcgagaccgacactatcgagtagcggagttaagaaatttttcattggtgctagtcttgcgagaacgaatacatttagtggccaacatcgaacgacgttttctccaagctttgagagaacagtctgagtgcgcggaagagagagaggcgttggggtgcgaattgcgaaggagcgaacgcaatttcaggtgattagtcagaagcagtaattggcagcttcaagatggcactaattgatgttaattgggctgaattagtgccgtcgtccctttcagtgagacgcgtgatcgttggctgagtgaacggcgtcgactcgtggacacaattggccacctcaactcggctctgcaacggcttcaccgtgaccaattgctggccatccccggctcggtccatgtgactacttcacaattagaagcattggccacccatttgagaagggcatatcagaaggagagagaagcgagtgggagagagaatgagttggaggagagggcggaagagatgcagagggcggagagtgcactcatggcgaagagagcggcgctggagacgattttggacagagacggagagttgagggcagtgcatgccgtgctgcaggggtacgcactgaacgaagtgacacttagcgcggaattgcaacggacacgcaaaaaggtggatagatttgggaaaactagagagagaaagggagagagagagaagacaatgccaaagtttgaaaacaaatgaaaaaaaaatttaaattttaagctggaaaaagtggaaaaggaaatgaacgaacggactgaagaattggaagaaatgagagaaatgctgacgcactttcaacatgtaaaggaagttgatttaaaacaattggaacaacaaattgagcaaagacaaaagagaggggaagaaagaatggacaaaaaggaagaaaaacaaagggaggaaaaggaaaagcaaagggaggaaaaggaaacgaaaggcgacagagaggagaaacaagcgcaaaagagaggggacagcagcagaagaacagtgctaatggtggacaattcgagcgaatgggccgaacagctgcagaaagtgcgggaacgggccaaactctgtgtggacacttacaaggtaaaaggagaaaagagagggagagaataaaaaggaaatgcgaaggaacaattggaaagtcgggacaaaacattggacgaatatcgccaattggtggaacaactccgaaccgaactcaccgaagtacggaacggaagaagagaagcggaggaacagaggaagagagacggagcggaaacggaagaggagacgagcaaaagcggagaaaggaagcggacggacgaatgggaagcggaagaagcggaggagcggtgggagaggcggacgagggcattggagaggcagctgaagaggatggtggaggagcaggcggagatggagagggagcggacgaagctcagagagaccatcagagccaaggaagagagcgagagacggcacagagagggagagggcacgagggatgtgaaagtgcaggtgatcagag

SEQ ID NO: 21191 - DNA, 1664 bp, Heterodera glycines
tgcccggtaccaattgcaattcatttccaacatcgctcactaagtccaaacctagagaatttgcatagaaaatatcgagttttcacaaactttcaatgagtgtgagattgcgtgattctaatttttcaattgctccaggtaaaatgtcaaaatgtgattttataaaggccaaatctccacgaatgcctgaacagtcaaaggcaatttgtgattggcgaatagcatcagaatcggatgggttgaagtcccgaataatcgcaccaatttggttaagattttgacagtaataatccgctgcattgagccaagtcccccaacgtgtgatgattgggcgcggtgggagagggagatcacaacgttcgcggaatttggccaagcgggatggcgcttttgaagaagtctttttggtacttgcaatcaatttgtcaacatttggaaagaggccacgaatttcctcgcacacacgatggagcccatggcacaaacatgtgagatgaatgagatttggatagaaaattttgaggcccttaaaattggtttacatagatagcactttttataaatttttcattgttaacctgtgctgccttaaccatgtaacgtgccgcgtcagtgacaagtaacaaaaggtcgtcagctgaaattagctccctcaaattgtcgttgataaagcgagcgattgtttcatggttggttttgtccagaaatttggccgcaaccaaatgcggtttgtgcaatttcccatccaaaatgccaatgatcaaatttgcgacatatctgccacgagaatcagtcgtctcatcaaccgatgcccaaattttttggtgtttgaattcatttttaatctcagtcattttctaaattttaccatctctttgaatggaaagggggataacctgctcataacatgcaggcaaataatttttatgcaaggcatcattatgcggaaccactcgcttgcaatatttttccagaaaatctgtaagaaaatttccgctaggtattcccagaaaatactaacctctaaaaccctgattttccaatttaaaaaatggaatgttcgccgaggtgagagcggtacacaaatccattgagaattcatccagttttttcgtcgtttgagtggtcaaaaattgttgttttttgcttccacatggccgcataaaaagttcaacatttgctttgtgtttagcagtttcgttgtgttgtttcagttgataaaacattttagaagggacctgaaaatgcttttcgttgtttatgttgttgtagtcgtgttgtttgtagatgaaaagtgatgctttaacctgctgttgacatgcctgacaataaatgaccttcccatcagttgtgtagatcgcttttccgtcgactctgctgatccagtcgttcaaccaagctgattttgattttattttgggcattttcagttacttttatgataattttttgaaaaaacttggaaatatgtacgaaaaagtgcgaaatatgtaagaaaatatgtacatatgtaatatgtagaaaaaccccgaaatatgtaaaaatatgtattataaaccaggctctagaagcttcaaatcaagctaaaaacatgtttttcatgcgtttcaggcctcccacagtccaagaaaaaaatatgtatttacatataaatctaagcccta

SEQ ID NO: 21192 - DNA, 1110 bp, Heterodera glycines
  unsure (1)..(1110): unsure at all n locations
aaaggatgacgcgtttcttccgtttcatntttgccactntaatttgccaaagtcgtcgaattgggcgcggtcagacaggccaaaaggtggcgcagactgacggggaattccaagcgcacctttaaccgattggtttttgttccttttgcatttgaaatgtctctgctttaccttgtgtttgtccatgtcgtaaacctgcgaatgtttaatttttaattttcgcaattcctttctttcttttccgccctccgtccctcccgcgttccttccgccctcattcctcccccccattttttgctgccaatttcatttccacctgtaatttgccttcctccgttatcattaaatacgcatctttgccgtgctttgccacgccgaccattcgtttatccaaatttggaaagtattcattggctttgtccgaggaaaaagtgaccatattccaaaaggggtcgaaggagacgaactttttggtctaaaaaacaaattgcgaaattttgtgacgattggccgaacatttgacagaatcaaatggccatccctccactgaaagccttttttgggcaaaaagtcaatttgactgggcaattggcgaggactgtgccgcgccatctgaaattcagtaaagatttacagatcctaagtaagtaacctacataaaaacgtttgtagcgtttgtcccatcggaaacggtagactgtacggtagtccaacagtacggtaacgccacttttacggtttgtgaatgcggcgttcacacgccggggaccgttcgggaaaagctcggaaagagcaaaggcacgtctaaaaaggaaggcattgacggcgaaggcatttgggggccgacttttgctgaaggccctgagaatcgcgccacacttcgtaaaccatcccagcggagaacagatagagatgcctgttgaaagctgagcaggggtttaaaaggaaaggattgaagtgaagcgaccgttggccaaaccttcggtgaccgcgtccaatttgcttgggcattctcccgcgttccgcgcctgaaggcgaccgtttgtgcgcggtttgtgctggcgacggacgacgtgttggacgattcgacgtgctcggttgtccgactgt

SEQ ID NO: 21193 - DNA, 2215 bp, Heterodera glycines
ttgaaaaaaaacttatggagctatatgcaaagtgacttggccaatttcgatttcctaattaccgtgtgttggtcgtgtgaattggtcccgtccagttaaaaatggacgggattaacgagagcgtttcccgttcgggacttccgtcccggaaaattttgaattccccatcccgctcccggaaatttttttaccgggctctagtatctagaatgtgagaagcggcaccaatttctatcgcatccttccaatgttggtacccgtcctttggcactataaacaactaattaaattaattattattttacaaattgacagacattttgccacagttcgaatataatcagtagggctataaattatatgctctaaaaaatgccaaatatgtgcataaaatatgcactaaaatctctcaaatatgccctaaaaccccgaaaaatgcccaaatatgaactaaaatatgccttaaaaactgccaaaaatggctttgaactctcaaaaaatgccaaaaattgtgtaaaaattcagaattgactttcaaaactccaaaacaatgtctaaggagttttttttaataattgcaaaaaatttgcatttcaaaattctataataatttttttttaactttttattttacgctcacaaggggaacattccgaactgtaaccactcagatcgtgtcccgacatttgcagccccgacatttgcggcccgacatttgcggccccagccaattaccgacatttgcggccccgacatttgcggcccgacatttgcggccccagccaattaccgacatttgcggcccgacttttgcggcccgacatttgcggccccgacatttgcggcccatttcttaagtgttatttcccgacatttgcggccccaaattactcttttaaaaatttaacaaaaattaaccactttctagtttctctatatatcacagtgaggtcagttatagttatttgaaaattccaatttatttgattttaaccaaatttttccttttaaaatttaaagaacattattctaatttttcaaccaaattgggcttactcaaggccccaacaaagcttgaactttccatccattctactaatcctgaatttctacagtatcggccagtcgatactgtagagctctgaggtgccctaataacgtttcgtcattcctattttcatcgttatcataacgcaaaatcaaatttttgatcgctctgtcattttccacatattttttcttccttgtttcagtcaggccccttgtggggtccaattcaaatggccgaattctgtttcgctgatattcctcctcctctttaattccgtttatgaatctttaaaattaaagtctcgagattagagctcttaaaattcactttgaaagagctggatgcacgcctcgaaatctctttgcaaatgagcagtgccatctaattttggcaccctacaaatctgaccaatttcaaaatctgccatgacagataaaggaacaatgccttccaaattttcatgcattacagtaaaagattctattgaaaattttattgaataaagtggttaatttttgttaaatttttaaatgagtaatttggggccgcaaatgtcgggccacaaatgtcgggaaataacacttaagaaatgggccgcaaatgtcgggccgcaaaagtcgggccgcaaatgtcggttattggctggggccgcaaatgtcggggctccaaattcgtattccctcccccccccccccgattttacaaaattaattaaactttttcaaaaaaaacaataggaaaatcttttcagcttattaatcttttactttttgttcgatttactcggctgaaagaataggggaaatgctttacaattttttttgccaattttgattagcttacctcacttgtgctcaatcgggtgccgtacgtgtccaaatatttcctctcgagcaagtcgattctgctgaatgagccaccgttttgacgaaagatgtaggcgagacgataaataccctcctaaacaaccgaatttaaggggaaatttgggatttttgaataaattgtactaaaattgttagagaaatattttaaatatccgtggacggacttagccgtaaaacccaccggaacaggcctttcgtacatttgcacaaagcggtgtaagaaggtcgcacattccttgtccaccccttcctccgggcatttatcgcagttcaataa

SEQ ID NO: 21194 - DNA, 2600 bp, Heterodera glycines
caaattgaatcaacgaaattcggcaatggttgccttcctcctcattggcactcttttgcctctttttagtccaaaatgaccacgatttatgcattcatattccatcatttggaagaaaagctaagcgagtttgagtttactgttaatctttgggagtgtattaaatgttttgaacctttcgctttcgaatcgcaaaaattaacccaaaaatgaaaaaacccaaaaaacaaaaggccaacagaacggtcaattggcgtgtattaattgccatttgtaagatgatgattgagatgatgatggtggttgtcctgttgttgtccccccccccctccgctcatttgcccatttaagccttctcccccctccccccgcggttcgtccgtttgcttctccttactcttcgaacaattgacgaccacccattgaccgggggattaggcgaatggatgaggaagaagcaaagggcaaacacagccaaagtgtgggcaatgagtgagttgtcgagcacaatgccaagaaggacaatcaaacggacgcatcggtggcactcacttcccgctgtgtgtcaaaattttgagcaaaaacacagagagagacgagcgaggattattacctaattgcaagcaaacgctattattgcaagcaaacgctattcagcggatgcgatcatttggcattcattgggagggataagcgcagagaacggacggcagcaattaattaattaactaattaatcaattaatgaccggcaaagggatgactcagcggaagaaaggtaattgaaacgcactcatttcagaaatatgtgatgagtggatgaatcttcggttgttccgcggctgttttgactttgtccattctcttccaaaatgccaatttctcttttctccccccaatttttggtcggccctttaaaattatggcaaaatcaaaggggcggaaagtgtcgtcgtcgtccgttccctccgcgccttctgtgaaatatccgtccaatttcgttcgtttgggttcgccgtcaaagaccgaacaaatgaatgaacgaatgactccgtctccatatggcaaatgttctttcctcagcagcccctcgggggataaaagcttttaattagaggggcgaacctgtcacaaggctataattggttgaaatgcgaatgcaaagtgagtggagcgcgaaaagggactaatggacgacaaacggagggacaaaaggaagacgaaaagaggggagggattgccattattagtgttaataggaattacaaagggacaaaaaacaaaacaaaaacaagcagacacagtaacagacacaccgaagaaaaatgggtgcgaagcaaatgggaaaacatcctttatttattttagttttcccaaatttcggttgttattcctagagttgtacgggaccgggactggtaccgaaaaaaaggttggggtcaattccataccggccgtttccatgccataggccattttcgtaccaaaagtataaatattaatagacagtgaaattaaaacatccaataaaatttttcactactttttagacttagctccccaaaagctttcggatgataccaaatttatcaggattcgatcgttttaaaaaaaaagttagaagtgtcaaatctttgaatttttcgaattttgaaccgagccaaaaataggtttaaaccaaattccgcaacttccgggaaacccaaaaccgggctcaaaatcccggagctttagggacttcgggttcttacagtacctgctggggttaaatttgaatagttaaatccgggtcttacttcctaattttcgtgccaattgtaaattcgggaaaaaaaaattctcgatccaatttaagaatccggggaccggataaaactggtaaaatagacaaaacaatattttaaaaattttttacttcggcttgtaaaaaagtatgaatggtcattgttttgaagctttgcacggttctttttttgttagaagtatttccattttcttctctacaacagtaaacataaaatatattgtcttataatgcatgagaaacatcaaaatgttgaaaatccccttctatttttgaaattttgccgaaaaaatttttggtacgaaaatggcctatggcatggaaacggccgcatagaaacggcggcatggaaatgggtcgatcccctatgccaatattcatgttacaaaatgtgtcacttaaacatcaattaagcttcaggaattcctctttcttttcatttgcactgtccgacggattggaaaatgatcaccgatatgcaattgggtattcattcatcctttggcatttgcttgttcctttcattttttgctgcttaggtatcatggccaatgttctcggcgtctccattttcattttggtcattttctaccattacatcgtcgccaaccaaaagaaacagtcgccgcagtgagcgaaagaagcgaagaaaacgccgaagaaagtcaaatgatttgatgggttatgattaattaattaatttatgtattaattgagagggacggcgcataaatttgtaattgattcattgtaaagagaaaacaaagttaattacacaaatgaccaacaacagaaat

SEQ ID NO: 21195 - DNA, 1101 bp, Heterodera glycines
gagatggaaccaaaagttccataatatctttccataagggtggaaaggcagaatttgaatggccagtcgatatttacactgagcacccgttgaagcgggtgatgcgaagccatagcaaactgtatttttaaattctggccgcaattctaccaaaaacgtgtttagaccgcagtaactcggctcagagtgaagattaagggacgcaaaagagacgatttaaaagcgattcgaaaattctatcgactgatataataacgatgcagtcgcggcgttgacaactgagatggaaccaaaagttccataatatctttccataaggctggaaaggcagaatttgaatggccagtcgatatttacactgagcacccgttgaagcgggtgatgcgaagccatagcaaactgtatttttaaattctggccgcaattctaccaaaaacgtgtttagaccgcagtaactcggctcagagtgaagattaagggacgcaaaagagacgatttaaaagcgattcgaaaattctatcgactgatataataacgatgcagtcgcggcgttgacaactgagatggaaccaaaagttccataatatctttccataaggctggaaaggcagaatttgaatggccagtcgatatttacactgagcacccgttgaagcgggtgatgcgaagccatagcaaactgtatttttaaattctggccgcaattctaccaaaaacgtgtttagaccgcagtaactcggctcagagtgaagattaagggacgcaaaagagacgatttaaaagcgattcgaaaattctatcgactgatataataacgatgcagtcgcggcgttgacaactgagatggaaccaaaagttccataatatctttccataaggctggaaaggcagaatttgaatggccagtcgatatttacactgatcacccgttgaagcgggtgatgcgaagccatagcaaactgtatttttaaattctggccgcaattctaccaaaaacgtgtttagaccgcagtaactcggctcagagtgaagattaagggacgcaaaagagacgatttaaaagcgattcgaaaattctatcgactgatataataacgatgc

SEQ ID NO: 21196 - DNA, 1179 bp, Heterodera glycines
caaaagaaacggacttgcaagactttttccgtgtgcttttgcggctcctctttacttccttcctcaaggcattttacgagcacttcgtgttcaatttcgaaaaattgttttaaagggattctttccgacaaagattctaaatttagttgttttttttacacaattggatcagcttaccagtttcgggcgtgaaaaccgtttcatcagaaatcatccgcagcatctcacaaaaacattcgttggcgtcctgttgctggtggttgccccgttcatcttgagtgtcgaattgtggaaaggtttggcggaggacatgcacaagaaacaacggaatgacttcgggagagtccgccgtttggtccttcgccaaaacattcatctcgttgtaaagcttcttcatagaattggtgaagagttttatgcgttggttcgacccgtcaacagattggttgggattgtattgcttcaaggcggtttcaaattccggcacaatcttaagagaaatgcttttaatgcatgtttctaactttttggttcgttccgtcgcattaattcacacgactatcacaggggggagtaagcaaaaaacaccgaagggaagaacccaataggaacagagcagcaggggactaaccttcaaacactgcaaactcgagttcatgtaacaagtgttgcccaaatttcgtagaccaatggggaactgttggcgcggttccgtctctgtcgaatttgcatggccggacgactcagcattttctgcctttatcaacatcgattcagtgcttccaataagcattataacagttccatcttttattttgattccgttccatgcttcgtcagatatcgtcttgccctaaatatcattgttttttatgtattatgcatataaaaatgaaggcccatttaccttaactatcaacttttgtcgttcaggtggaacatttgtcaacccgaatagttgcgccttgagcaataggggaggttcttcgggattggcgtcaacattaagttctttggtaccccactttatttttattttaaccatttgttgtgaaatctaatgaaaattaataagaataaggtaaaggaaaaccaagatcactaataaatgaaaaagcaatttttttgggaattctaaccaaaaaactcagatttcattttaaaacaaaatcatcaaaa

SEQ ID NO: 21197 - DNA, 1599 bp, Heterodera glycines
  unsure (1)..(1599): unsure at all n locations
aaaactcaggatttcattttaaaacaaaatcatcaaaaagagagatattanttcattcaatttaaaagaacaagnnatagtgntgtagtaatagtgcagatggtagatataaaatttttttttgaaatntaaagtcatttcattaaataggtatgcattgtaaaacgnactcatttttggtcttaaattttgtgttgaaatgcgaaaatcaaggtcgaagctcgcatttcattcaaatcaacaaatcaaagatttccaagtgaatgcattccgttgccttttcttctttatcaacagaagaagctcgcttgaacttcgaacaaattttccatgagaatggcttcgtccgaatcgatggtgtattttcaaccgaagaattagctgaactccgtgatgctgtaaaattaattgttgaaggctttgacccgaaagaccacccacggacaacatttaacacaagtgacgaggaaaaggttaacaaaatgaaacaaagaaatgccccccccccttgtgggttttgacgatttgattgccagcagcgtgtttcgtcgccgcgggtcttccaatactcaaaattgacgaaaacccgtccatagttaattagggttcttgagaaggagaataggcattttcttaaccaaaattagcggcagaattctcctgttttcgtgcctatctcaattcgaatattctttgttctgtctctatcaaatatttcttttaaagcatgtgtccgacagctacttccttgaaagcgtagacaaaatcaggtttttctatgaagaaaaagcggtggacgagcaaagtggcaaattgaaagtacccaaagaaatggcattgaataaaatcggtcacggtaatttagccgatgattcggtccttcctaataaattacccttaattaagccttacattggctggacccatcttttcggaaaataacttttcatgaacgaattaaagtataagagaagcacagttcaaatgaatcgttttttaagaaaattgtcagtctgaccggcgctgttcagcctcgcgtgatgcaaagcatgttcatcttcaaagtccgttggaattccgtcctttccaacgaatggctttgattcaaaagtttaagcaacccaaaatcggaggctcgactaatgagcacgtcgattcaacgtttttgcacacagaaaacggagacaatcttttgggtgtttggatcgcagtggacccggccaatttggacaatggctgcctatggtttcttcccgggtcgcacaaaggcaaaatttacaatattaaattattcaaaataatgtttttagacgccaattatctttctgctactaagcaatacaaattcacaagaacagaaacaaagcacaatgggaaaaaggcatcctccgatgggccattgttaaaatttgttgggaatcggccttctttcgaaggatgcaatttcattgcattggaatgtcaaccaggtacacaagtattctaacgctaaatgcaccaatttattatcaatgatatcccaaagaaaaatttgataatttaaggctctatagtattaatccacggggatgnnttgttcantaaatctgctcctaactt

SEQ ID NO: 21198 - DNA, 1696 bp, Heterodera glycines
  unsure (1)..(1696): unsure at all n locations
ttatcgtttgcttttggtacttcgtcccttgcccaattctgatcatccttcaaattaccaaattggatttgtatgtgcctttatatatgaccgaaacnttgggatgtttttgcccgtcacatttggccaatttttgcgacaaccattcgccatttgagctttgccgatggcgatgatttggataatttgcgtcgtttggtttcccctacaattctcactgattgcgaccaattcaaaatcaaacttctggcccatcattgaccaaatggttgcacactccgacaactgatggtcaaccgaagagattgtttgcagtgattatttggatccaccaaaaattgattggatcaacaacttcaaagaggtgtctcgccatttttctcaaatttttttgtttttcccaattttgtttagacatttcaccgtgccacctcttcggccagttacactgttcgaattatttttcgtgtgaaaccaatgccaattgcgccatttgaattgatgaacgaagtgacaaatgagaagctgacactgattaagggtggaacttttcgttggctgttgaaacggtgcccaattgttggggagacggcggcggcggttcagaaacagcagaagaaagacgagaaatggaccgtttgaacggagtctacttctgtctttacgatgccaatttctcgactcccgggaccagtgatcagcggaagaaaaagtgatcacttgagaaatggccgatcattattgatttttgataattgggttgattgatgctaattgtttgctctttgaactcatatcacttttgtggtagacttttcaatgttactataactgaatctctagacaatttctattgatactaaagaaatttcccaacaaaaaaatcaacaatggtttatataattgaaacaaaagaattaacaaaagcatttctgagagaaaataagcacaacaaattgagatcgatcatttctcaaatagaattattcaattattcatttccgcacacttaatcagcagacgacatttccgttgctttgatccgcttcttctttttcttctttcgttggtggcgacaatggcctaaaatgaattaaatattttattattcggcaaaatcaaatgctattgctgctgctcacccaatggatttatcgaaactacacagatcaaaagtgacattgttcaaattggcactcggatttacgctgtcttcccatttaattgctggcgccgtctccccaattgggcaccgttgcaacagccaattatacaggcaattatagcctaattctttgctaagtttcagtgtcagcttttcattcgtcacttcgttcatcaattcaaattgttcaattgacgttggtttcacaagaaaataaaattgaattttgtaacttacagaagtggtggcacggagaaatgtctaaacaaaatttgtaaaacaaaagttttcatggcaactcgtacaaaaaaaggtacttgtgtgttatctgtgggcagatttaaaaatatcctaattcaaaacaaaagtgtaaattgaaaaaaccaaaatttgatttgccccccctaaagtgatgttcctttttctcacttcaattaacggcgcctctctttgttgagcaagaaaatggtcaaatgaaatttcaatgagcataattcccattggccaaatggcaaattttgtgcttatctg

SEQ ID NO: 21199 - DNA, 2980 bp, Heterodera glycines
ttttcgtttttttaatgattttgacagtagatttgctatcttggagaaccgataagggctgcctcgaagaaattttttatgatttatccaaattttcaaaaaaatgcgtatacggacggacttgtctgtgataattagggctttggttcttaagcgcgaaaaaatcccgaaataagggcgaaaataagcacaaaacgccaaaataggggcaaaacttgttttaagtgcgaacagctaaaatatgttgccgttgtttcaaccaaagaaaattgtttaaaagttttggcttatatttaaaaaaatcgaaatttttagaatttttctatataaaaacttttaggggtaaaatttttatagacattttctcgaaagtggggaaatacttgctccggtatgggtaagaatgactgtttctttcgaccattttactttgttaaaggtcgagcatttgaaattgactaccaattgtacaacatcaaagtgcgaaaaattttttatcgataatgacgaaagataccggacgaatttaatgaagtgagccattgggatttaacaaaaaacaaaaatttgagatttacgggttggggttagatgggcgcaggacattttcgcgccgctttcttgatatcatttttttaaattttgcaggctaatagaggacacctagggctctcgaataatagcaagaaaataaaaaacaaaaataatttctaacagaatttttttaattaaaaataaaattattttaatcatcaaaaattctgatcatttagaacgaaaaaataaagtgatcttgatatgattcgatagccttaggtgtcctctattagcctgcaaacttcaaataatatacgttgtttccaagaaaatatttggtccattgagtcgatatttcttcgatcttttggccaaaaatattactctaacattttttttttttgttgaaaactttgcttttaatcacctttaatatacaataaactttatttaagtgggtgaaaaattgaaaaagttattgcgtttgacgccaaaatggccggcgccaatgtgcggtgggggccagttaagcgtggccggttaagcgtgagggtcgtttgaacgtgaatacccatatacagggccggatttttaggtgtaaaaatcccgaaataggtacctaatagttgctaaaaaactgccaaaagagttgctaaaaaagtagggtgcaaaataacataagtgaactatagaaagtaccgtatttgctctaattacccccatgggggattatttttcaacctcttcagaaagggggggataattagagattgggggataaatggagaaggggggattatttttcgacagaattattttgtgtaaaatttttgaaattttttgaccatgtcgccaaaaatgcaatcgagtcaaagaaaaatcattttttattgcattttttaaaagaaattctgttttttctagttttttaactatctattaagaaaggggtttaaaatagcatttctgcgttaaaatttttcgatttggtgaaggtttttagtccatataaatccatattttgggggttttcggggataaatccatatttggccatttttgagctttttagtaaatatttctggcttttttagtccatatttttgtccatatttcgcgttttttagtccatcaaccctatctataatgcacaaaaaacacattctttttcaaaaaattttgttttagcaccacttttcatcactaagaattttgttttgacaatttttcaatttttgttgattgaaaactgccatcgccagacccacttaaaaaataattagaaaccttttcgtgatattttaattctttttgagaaattatgaaatttttaataaccggttttaccgggtacccgacctacccggtttaaagactaatacccgacccggtacccggctttcaatacccgggcccggatttgcccaaatacccggacccggccagccctagcttaagcttgtcggattaacttcccccacccctagatcgatcagtctcattgagatctatcgattggtaccatatttgtcggaattcgtccacgggaaaaaacaccgtataagtcaagagaatcgaatatttattcagccaatcaaaaattagtttgaagtaagggattggaatacattgcattttaaggaccacaagtacatacgaaagcatttaaaaaaggcatacaatgtctggcaatacatagatttttgcttttcaagcaacaattttaagaacaatgaagaatcaaacaattaaacattcattttcgttttttcaattataaactaaaaggcaaaaatgtggcaaaatgatgggctttttagttgttaggcatcgcatgtggcatggaactcaacgcgtcgatcaatttcgctggtcacctgatcaatctgatcactgagttcctcagttgaggtatgaaaactgttcagttccacatctaatgaatcagcacgttcaatcagggctaaaaaaaattaaaaaaacaaaaaaataaattaataaaaaaatagctcacaaattttctcttcccgactccgcttaatctttgccaacaattcggttgtgcgcttgcgcaactcttccgcccgctgtttccgctcctcatttccgccttctttggattccaataaagctaacactttgtcgtaggtggactgaaattaaaaaattaattatagtaggcattattaggtgtttcataaaaatgatcctctctgaaccacatttaaaaataaacaaaaaatttaatttgggaaagaatttgataaattaattttcggaaatccgaaaacccatgccaaatacataaaactaaacagcagactgatctattttttcattgttacctcccgcccccttaaaacccaagtagaaaatcttggagaccgtcccctgatttacacaattaaataattttctatacatatcattttaaattgtttct

SEQ ID NO: 21200 - DNA, 1395 bp, Heterodera glycines
  unsure (1)..(1395): unsure at all n locations
tcgaaggggaaatacacgcaatgaaaaatccaccgccatcgcctgccccttcctccaaaacacctgaggaggaggtaacaacaaattcggtccacaatttttttggcttttgcttgaagaagttgtgctttcactttgaattttttggccccaattgttttaaattatgctttttttgcacagatgcacaccaccaatcaaagcggtggtcaaatggaaggaggaggggcaccgacgggcaatgtcaatgtttgtccgcaacaacagagccaggttttgcgaagagataaacctcactgaaaaattaagggaaaatggttgcactaatttttacttttttaaaaaattgaatttccaaaaagttacagtcggtgctttttggtgccgcttggatttaacccctccccctaattttaaaatcgttaacagaaaacaattgggggagaaataatcacccaattcggggcaggcgtttttggttagcggcgtttttcccctaaaaaatgtccatgattcagtattgtgtttgaataattttcctcccctccactgattttaaatggtgcaatgccgtgcaaaaagatggagggggcgggtggctcatcgggctccacattagggcagccttaagcaaatcttaaagagcattgtagagatatgtttacaatatccctttctgtgtttaagccgcctttcgttgtgttgccaagtcgtttgcgtgtagaagtaaggatgacttttgctagccgttttttagtcaattgcctgcttaaggttagtggccgtactcagacatcaatttccctcacttggatgtctcattccaaaattggtatgacgatcgcctcgtacgtcgtgctcaaaaaaagcgacttaggattgtggtggccgatcaaaaagcaaaaggtcagtcaaaaaatggaataagaaacaaaaaaataaaaatgtacaccattaaacggacaccccggcccttccaaatacgaaaaacaaatacaaactgataaatattcgatcaacatagctcgtcggtctattggcaattgaccatttatccaccccggtctccctccgctcccctttatgtttcacttcctatccaaatccagtagtattttgccaaaaaatgtgtaatttttgctttcattgccaattaacaaattaatgttataaatctacgaaaaaatataaaaacccaattttttataattttgttggttcgagtcaccaagtgccattcgcttttcagtaccagtacccctacaaggagggcgttgagaataacgccacgatcaaacgcttgagccncggtaccgaataccaattnngaagtgaggcctgggataaacacgaccgttccacagacgcatacacactgcctgtggtccgaacaat

SEQ ID NO: 21201 - DNA, 1275 bp, Heterodera glycines
  unsure (1)..(1275): unsure at all n locations
ttaaaattagtcacaatcatggaaacatcaaagatctttccctatttattttaacataaaaattgaatttaaaagttggaatttttgccttttgttagaattcggggttttggtgttcggaattattagttgaaagggatgtcatattcgtgaccagcgagcgaccccgtaaaccaatgtaagcatattttcatgccatttgaaaaaaattttcaaaaatggggtggggggggcggcaaaacaaatattgccggattttaggccctgtcctgttaattgtaggactaaaaattttaacaaatcaatgttgcgtttttcgagcattttaggccaattagaaatggactaacaatgcatcagtgcttttgggttttcatgtggctcgccttatgcaaaacaaaatatggaggcttttagtgccacaaaacgctgtcccacccttttagcaattcaaaacttgagaaaatgtccttcttgaataattccgcttcgtaccaatgaaattgttagaacagatcagcagaggaaaaaaaaattcaaatgaaaatgtgaacaaaatgagaaaagacacgtattttttaaacgcaaaaaacttttttaaccaatcaaccctcattatcattatcgtcattaatagcctcatcaaaattgtcctcggcttcttcccttcccttttgttcgtctgccatttgcctgcgcgacattttccgccccgccggcgccgcccacccaaaagaattgccaaactgttccagcgtcatcccctcgttgtcaatctgctccaattcgatggtcggttttctgtgaggggcaggaaattgttggccattaattaggtacattcaaaatgatttccaaattagaacagcatgtatgaatcgtcattattatgaatcttatagggaaattttttttttgaaaaaacagacaatttgcaaaaaatgccatttcataaaaaaaataaaaaaatgtttttctctgaaataaaaaaaaagaattttttaagagtttgaaacgaataaacttaaaaacagtgaaattgtgtgccgttaaatgagaagtgaatgactcaaactgacgaatattttggcgggaaagggtcgtcgctgaattcttcggccaacacgtccaaagtcatcggatgtcggaagtcgaaatggaataagccgggcgttctgcaaaaaaaaaatgcggtggacgcccactcattcatcacttgaaatttcgctttttttaaatttcgccaantcaagaccnntgcaggcccatgcaagc

SEQ ID NO: 21202 - DNA, 1608 bp, Heterodera glycines
  unsure (1)..(1608): unsure at all n locations
aaacgaactgtttaccaatcgccatttttgttacttcatacgctagacttcatctttatcgctatatgnagcaagtgggccaactcggccataaaatactctattgcggtcagttaaataaatgttttttttttaaattatttattaaagacactgactcaatttattatgttgcaaaaaatgggagacgattggttcccgaaggagaagggctcggacaaatgaaacgtgagcacactgaccgacgaatttttgaattcatcagtggtggcccaaaaaactatggctttcggcactgtgatcgtgttacgcgggcagatgaaaaggcggagctaaaagttcgaagctttcgactctcttatgccaccaatcagctactaaatttcgaatcgatgaaacaacttgttctggaacattacaactttgatggagaaatgttctttttaaaaaatttttacgtaaaaaatacatttaaaaattcagtgatcccgctctctatatgaacgacgaatgttatgtctgccccggatcatcccgttctatccgtgttacttttccacaaattgggcgctccccttgctcagatttatatacctatcaagcgcataaggattatcgcccccattacgtgaaaggccgcgtaaggccaggaatggagacactgccttttggctatcgcaacgggtttacacgtgccaacacacaacaacaacaacaacaaccgcaaatcaacgaaatgcatggaagaaatgtcaatgatggtgatgatgctgcattccgtgatttgccgggctgttcacattggcaacccactcattatcgcaatcgatataattatcaatagttttaataaagttcttcatttggagtcaaaaaactagataagtgaagaatgaaaatcgacaaaactgaaagacaaagtttaaaatcagcaggtacaaaaacattctcttccaacttgtttcctcaacaaatatgggtaactgacagggctcattgtgtgcacattgttgttgactgtgacttgctcatttcctttctgacgattgtttagctccatatattgcggggggcgggggtgaaatttatcgttggcaataggtcttcgtcctcgcccttgttcttctttgcctctctgacggtttctgtttcgacctcctcctcctcctcctcctcctcttcttcttccttgtctatgaataatggccgaacccaaagctaatctttctccccctcgttggttatcactaattcgtgtttcaacgacacttcttggacctccgcttgcttcagcttttgcacgggcgtcttcacctccacgtgccattacgacgacttgctggtgcgcgccatcatgatcatcattattatcatcactcgtcttttgggtttgccctttgttggctgcagcaactgcaacaccgccttcacgttcactcaacgcttccgctcttacaatatggctgtcctcctcctcctccataccactgccttcctctcggttgacaccggtttcagctctagccctggagccttccccggttgcggcgactgctgcccatgtaccctattcgtgtcggtcaggccattgaaatctctggcattgtc

SEQ ID NO: 21203 - DNA, 1334 bp, Heterodera glycines
  unsure (1)..(1334): unsure at all n locations
caaaatgaaaagggggaaaagcacatcgaatggcaccgaatcgcgcaagggcaactcgccgttgcccagcaactgttgtgcccactcgtcgtgttcgttcagcttccgatggatcgcgctcatgtcgcgctccaccgcgtcctgtgctctgatcagtcgttccaccgtttccatgtctttgcccatttcggtgccgcccaattgcgctgctttttccccaatgcgttcgttggtctcttccacgttgtgattgaatcggtgcacttaaatagtgccgcgtccgtcacttccgttggcacggtcactccgctgacctgcgagtgccgcgttgagaagtgttcggtagatgctcagtcggcccgccagccgttgccagccttcgttcacttccgccagccttttgcgcacatagtccgattcggcagactttcgcccgatcaatcgtcccccgaggcgattcgcctccgccagagtgccctcgtcgattccttgactttcgtccagccggtccagcctggatttgaaggggtgggtggtcatccgttgtccgtttgtgctcccccaatcactgacagtgattggcaatgctccaaatcttttcccaaatcttccgcaccgaccatcccttctttggcccgcacaaatgtgcacaatcggtctgctaattgctccaactccaacaagtcgcgtgcttcgtctaacgccgcgtgcaatttgcgcatcgcctcactgagttttgaccaacgcaaaagaaactcatccgcccgagagacctttcaagcaaaaagaataaattaatgagttccaatggggccattttgggcatgatgccaacgttttccgtgtctccgtgtcatgtcctcccccttcccctccccgtccctctcgccaccgtttgactcaccgccgtctccgtgccatggcgccccctcagccgttccaatcgctctctcattttgtcaatgcgtgtgccattggcgtccatctcccgctgcagtgcctgctgtcgcttcagtctgtccaacttttgctctaacgacgccccgcccgcttccgccgtttgtgctttgacgcgcttttccttctcctcaacccattcgcacatttctgacaatttggcttcaaattgctccaactcgactccctcgtccagcagccgcttaaccttttcaattcgctctcgaaagccgcccattcgcaagacgacctaacaaaagttacaaattgggtaattgtggngataatttggataattaacggactcgatgataaatgggatgataaaacggattgctgataattttgtcatttgtgtttccctgccaccttttttg

SEQ ID NO: 21204 - DNA, 991 bp, Heterodera glycines
ctgatcggtctccatttctgtcattgatgactgagtccaggcgagcaaatcacgcaattgggcggcaaatttatgagtttcgtaggaggagagaaggggagcagaacggcagagagtgaggtcacgcagagacagcaaagagtcattcagagaatcggaaatcattagggataattagctaaggaaggcggacaaagccattagtacccggcagaaagtcgaccaaagggttcggtgattcaaccgattcgaagcgctccaataaaagcttaaaatgggaaccaattaatccaaatccgtcggggacggctgttccgccgacctgaagctgttcgtgcagttgtgccacttcgttctccaacacttcgttggccaacatcagtgcgtacgcctgcttcgcgtctttgcccacttccgtcggaatttcggccgttttttctctgattcgttccgccaatacttccgcttctctccttaggcggtgcgtccgctccgcttctttcaatttgcgtcctctccgttcggttaattggccaatttgtgcccaagtcgtcctcagtctgtcgctcattatcgccactttttgggcaagcttttcatcgtccacgtggcttatcagttcgccttctgcttcttccactttggccattctttcgtcgcccatccgaagggattgtctgaactcttcgaacttcgtccttagttgttcgcactgctccaagtcgttgccacattcttcgctgttcgtcgtttgcttctgttgctccatccattcctccaattccgctccgtccgccaaaaatgaacgcactgccaataccgacccggcaccccgtgccgcttccttggccatgccctccaatgcttttgcttggttctccacccgttccattcgctcggctacgctttcatgcccccttttggccagctgttcgccccgctgtctcagttcgccgaatgcctttctccacggcactatctcattttgcaa

SEQ ID NO: 21205 - DNA, 2417 bp, Heterodera glycines
  unsure (1)..(2417): unsure at all n locations
gtcatcattatattcatataaaattcaattatttttttaccaaacgggccataaaaattaattaattatctaacatattcaaatctctctttttcgtaaatcacggcatcctttcgccgatcgtaaacggcgctttttcctcccgtcgttttcgttcgtgggcggcccgggccgcggaaaaggcacacaacgcgagcggatcgtggaaaaattcggcttttacacatctcgagttctcggagatttcgttcgcgcgctcgaagttgcatctcggctcagtgttgggcaaacagctcgaaggcaacgatcggacgcgggtgggctcgtcccattcggtaagaacatttgaccaggggtccggacaatcggtcagtggacaattcgtcagaaaattttatttatttttcgatcaatcgataatcaaacgattcgagattcgctcaatttaaattaaatcgggttgggtttagaacctttctagttatttaatagaacaattttcgtttatcattctttaaaaattatttttaaaaatgttcattcattacttttaaaaataaaacaaattattatttaaattttttcaatttaaattcagtccttgtataattacaaaacatttgcatttaggatacagtgttggccattgtgaagggggctatgctcaaaaagcgagaatcatcgaatggttttctcattgatggtaaaaaatgatatgcggaagaaattagaaaattgcagttttactatttaaaactttaaaaaaataaataaaatacaaaaaacgaaaaacgaaaaaatgtggaaatatgagtttttattcggcgattctaaaaatagattagtgtaacagctttaccaattctaaaaatttaacgcaaaaatcttttaaccaaaagtaaaaatgtgggcgaagtgacaaaagtatgggtgtgggatgtggccgaagatgagtcattgcagtccaaagattaaaattatcattttaattgataatttgctttttcaccgggcccataaattatttattttcattatttatcaaaaaaattattaaagagaaataaaacccaaaaccacattcgccaattcattcaattgcacttttacttttctaaattttattttaaatatatttaataatcatttaatgatttagaatgaacttttcaaacttctaaaatttcttactattttagaaattattcttcaactcgatatttgtctccaacgaaaccgacgactaattaacatttaaaatttaccgaaatttgttaaaacaagtaaaaaaaattgctgtactttgatttatagttatttaatttttaaacatatattttaagacatataaataataatagggtaattatttttattttaaataattttcatttattagaatcatttttgggactgaaatgatccatcctcgtgcctgtccccacacccattctttcttttgtcactcaaatgattattaaccttttagggtatccccgtgaagtgacacaaggagaacgctttgagcaagaggtgtgttggcccattaaattcaaatttcaccaaaatgccattttcagatccaatcgcccgttttggtcatttatttcgaggccggcgatgaaacgctggtcaaacggctgatggggcggggacgaagtgatgacaacgtggagacaatcaaaaacagactgcacacatttgtggagtcgacaaaacccgtggtggaccattacggaaagcagggcaagctggtcaaggtcagtcagtcagctacgacaaacaaatgttggatatgttggatatggaaccgttccgttagaaaatgcagggctaccgacatttagggatttgtaacttgggcacccgaaattcggggacccgacttttagggatccgacacttaaggattccaacattttgggactctatatttgggggtttgaaacctggggacccaacttttggcacccgaaatttggggattttaatgaaaaaaatatatttttatttaagttgacgttttgtttgatggcccttggattttttanagcccgcatttttttgttattatttaaaaaataattaaaattaataaattatattcaattattttaaatttatttagtaatctttgagatgaaaataaatattataataggtggaacaagaacaatttataatataaagtatatatataaagctgaaaatatttattaaagtaaaattagtggntaatgccttaccaactcaaaaatcaaattaaaaatttttagtatcaaaaaattaattttttgattactctnattttttgaaaatcgattcttagagttacatttcaaaaaaaaattttttttttgaattttttacaggaaaatttcantaaatttttaaaaattctcaaaatatgtaaaaaa

SEQ ID NO: 21206 - DNA, 3342 bp, Heterodera glycines
  unsure (1)..(3342): unsure at all n locations
tcattgatgaagctcaaagcattttccataaaagtgttcggtcttttggcaacaacacagcaagctcctcgttaaatttctcaacgctcatgcccatcaattggtcgttccattcattagcagccgcgggctcattagtggccacctcttgcttcgctttggttttcggggcttttccatttttagttcctttagcagccgcgggctcattagtggccgccgccggtttcgttccggctttctgagcttttccctttttggttgctttatcagccgcgggctcctttccggcgtcaactgttaaaatggcaatttgtaaaaacaacagagcgacatggattcgtgtccaagggtgttcttgtcgaatgagcaacagatgccaaggacacccttaagcccttggccagtccttagattccaactcattggtttgttgagtgaaaattatttctttgaaatttaatccggctcatttgataaaattaaaaaaaatatatttccgaagaataagtccttgaaattcctaaagacatatattattagattacaaaaaaattaatttttatgaatgtattgtgcgtaatcaaatgttcaattagtgggctcatttttctaaattttacaaaatataaaaaatatgtacattctttaaaaattgcaaaatttgtaatgtatgcatgataaattatgtcatggaaatgccaaacatataatttattaatatttttacatcttttctaattataaaatccgaaaaagtttaattgagtgccaattccagataggtatgcttaccatccaaatacgaacttttattattatacatacccttattgttgtcgccgatgttcatattgcgaaatccctcaacttcgtctaaatataatatataatttattatttgtttttccaaattttcagtccatctcatgtacatggaaaaatgttcaatttttgatgagcaattttttcaaagtgggatttacaccaatgcattacgcttgttccaaaaaaaacagcgaaaatgtctaaatacttaaattttaatttgggaaaagtttgagtttttcaaaaactaaaaatattagatgaaaaaatgattttcatgaatttaaaatttaacaatgacattttcattttacaatttcattgggcacatttagaattgaatttataattgcgtacaaatttattcaaactctccctaatacaataaataagaaaaaaaaaattcagtcttntaaaatttacccacctgnccgttgacttttgccagtttttgcaagtgccatcgaaaaacatggtcagcgagagaagagcaatgccaacgaattttgccattnttgtcggtcccaggaaatttttatttaaaaatgaattaacaatggtattttttgcttgccatttgccagttaaaataccgccaattttggcttgctaccccttctttaaatggaaggaaggggggagggggggtttggccaaaaaaacaagggcccaacccaaaccgtttccaaaagcctgggccaaaaaatttttttcctttttaaaaatttttgtgtccaaaggggggaaaaaaaaatatttttccccttttttttaaattttggaaatttttattccccaaaaaaagggggaaaaaaaaactaaaaaaaaaacccctccctttttttttcttggaaaaaataaagaaaaaaaaaaagaaaaaggggggggggcccccccaatttatttttttttttttttttttatttattataaaaaaaaaaaaaaaaaggcgtttttttttttttttttttttttttttaaaaaaaaaaaaaaaaaaaaaaaagaagaagaaaaaattggtggtccccccccccccccccccccccccccccccccccccccccaacaaaaaaaaaaaaaaaatattttttttttttttttttttttttttttttttttttttatttttttttccccccccaacaaaactataacaaccaacctttttttttttttctaaaaatttttttttggggggtgggggaaaaaaaaaaaatgccccccccttttttccctttttttttttttttttaaaaggccccccgcaaaaaccccccccttattgggcccccccctctccctttttttttttttttccgggggaatttgaaaaaattccccttttaaaacctaaaaaaaaattttcccggggggccccaaaaaatgggaaaaatttttttttccgggccaacccaaaattaaatccaagttcaacccgtccatttccggatttaaccaaaaaggacccttggccaccaaaagcctttttaaaattgaaccaattaatttaatgacattcaaattgcactttttctgtttttttggtccattttttctccacccatggccaaaagatccgttcgatttggcctttttatgccacattttcccttcgtttgttttgttcaatgcaatataattgagtgaattcgatcagcttaaagtgcaacaattagcttatttttttgagttttgttcatttattttgcctttttcgatatttccgcgtctcttttctgtccttttgcgttcgttctgatcaaattgtattgacttctttcgaagaccgaagtccatgacggattattaacttgacaattcaatttggtggttttaattggttttttaaattttaatttaattacccaatttttgctgtgttatcatcgctttcattccgttaataaattttgttagaaatttcttctccgccttttccttcgacaacaaaagctgcttcatcttcttttgtgtgctcattgtttttccgttttggcctttccattgcttttcatttccgtttaattccgcttttagcaattctttggcttttaatgtgccaattgtctgaaggtgcaattgttgtgtcgttttgtccgtttttttgcccatttttcccctcccaaattcgaattgtccctctttttccgtttccaatttcaaaatcatttccattgcttttacggcggcactttctctttcattcgctcttaaattttttaaaattaaattaaaatttgaccttttcaccctccaaatgtcagctcattcagctcatcgtccagcaaatgcaatttttccaacaataaattaattgcgtccgatttggccaatttttcctccccaaatttttcccattttcccccaattttgcccattattttttcgttctcttcgtttttgcaattccttctgatccatttcaatttcgagtaaattgttctgacaaaaaccgcaacattcaaatagcaaatgcatttttcttccaattcattccccaaaaatttttcgtat

SEQ ID NO: 21207 - DNA, 1092 bp, Heterodera glycines
  unsure (1)..(1092): unsure at all n locations
ccccccctgaaatagtaataaaaaaaaaattttttttaaatattttttggcaccaatttccgtgcattatctttgaaaattgaatcaatcattttacagaatgcttccgtacatattgctgaggatgtcaaggaggaggtggtggatgaacacaaagtgtcaacgacgacggcaacctttgacaaagtcgttgttgtacacaatcaccacccgcagcagacaccgccgcncaacaaaagcaacaacaattgttgcttcaaaactcccgcacttccgtccaccgatgggtgcgtaatgttgttgtagtgttggtgtattgtcattgtgattaaaaagtgccaaaaaatcttggcatttgccgggcgctgtctgaggcttattattgttagggcttatgagaaaattcgaaaaaaaaaattgaaaaagttgacttgcttaaattttgaaatttttttatgtaaaaaattttaataaattttttttgtcggacggtacgggcccctgtatttttaaaaaatttaccgtgttagggctgccccagtgaaaacccgtcgtgtgccataaaaataaaggcaaaaaaaaacacattccttcccattttaaatctgattacaattaaattttaaatcctgcgcatggattggtaccaattttttttccggtggcctgggaaggcaccattatagtatttgtatcgcttttttggttattgaaacgacaaaaaattgaaaatgtttgtccactaattggggatacaaactatagtacattagtgccgctggggacacatggtttgctttgagaatgttatcagcagcaacaacataggcacacactgtgatggggcgaaaatgaattaaaaatctgtggtcgatcaatttcaatttttttttcccgtgtgccctttgaaaatttttgaatttgatttggtcgaattcgggattggccaaagtgaaagtcatattcgtgatcagtgcctccgaaaacccaccaaaatgcatcacatgtctgttcaaaccttcttttaatctttttttggaaccattgaaaagagcgaattaattaccctctgtcccctcaatgggtgggcgg

SEQ ID NO: 21208 - DNA, 2638 bp, Heterodera glycines
actccggtcgttccagggcaatgcgacttcggtatcggtcgtcgacgaacgtgaggttcttctcttcgaagcggatcatccacacgatcccgatcgattcgggtcgacgcgtcatcccacgccaatcagaatttcaatccgaagaagtcgttcgagtcgttcgtcctcttttcgaaatcatcttcgatcgtgaaaactctccgtctcttctttcggtcgattcgaacgtgactcgatcgattcggctctcttcttcgctcagtgccgtggactcgacatgacaaatgtcacgtttggcgtttgatgcattttcgatgcgtcttgatccactcgaggattttcgccgattttggatcggcacagtgtgaaaccgcttggcaacttttcgattggttgaacctgcagttcgtgccagacatcaattccgagcatgatgtcaggttgtcgttgttcatgcggaggattgagcttttgttgcctcaactctgtcttgtccagctctgacagttgaatcattggcatgtcgttgaccaagaatttcatggcgttgaggttgaagatgagtttttccccgctcgtgcagagaaatccgagcttgaccaggtcgctgatgtatctttttggttcgcgttctccgaaactggtcaagtggcattcttcggtgtggaccaccggaagatccagtagctgtgctgcctttgacgaaatgaatgatctgtggctgcctggatcgatgaaaattgccgcagtcatgctgagatgcggttgtgctggattgaagaccgttgaagttgcggtcatgaggagtgcgcgggtgtcgcttccgtttacggcattgcacatttgcgatgtcgatgccgttggttcgttgcttccgtcttgagttgtgattgacacattttgttgtgtttgccccaacattgctgctgtgatttggttcggtggtttttcgtctgcataacataatgccgttggatgaggttgtttgcatttgaagcatcttttcggttgtgggcaattgcttgcttgatgattgcttttgaggcatttgaagcataatgcctttgtgcgcaacacttctcttcgctgttgaattgtgctgtatttccggcattcttcattccagtgatcgttgtcacagaagatgcatggacttggaggcttgcgttgattgaatgtcgcattggcatgttgagttggaaattgcctttgattgttgatcgcattggcacgttgagttggaaattgtcgttgattgttggtcgcattggcacgttgagttgaaaattgcctttgattgttgaaagtgcgcaatttctttgttgcggttgtggtgcgcgaggcctttgttgctgtggcctgtgttgaggctgtcgattgatcagccttttgtgattgtcatccaccgctgaggtgatgaatgtgcgttcccgttgctgtgggattggtgcgcggtctcggaattttgatgccgagaaattgggcctttgtggttgcggccgttgttgtggcgagtgtccgtactcgcccatgacttcttggatttggctttcttttcgaaccgcttcgttgagtacgtctcggaactttgtcgtgttccagcgtgccgggtcttctccctttttggttaggattgtgcgcaggaatccgggagtaagcttcttttcaagcatgaggaaggtcggtgggccttcgatgtcttctcctgtattgttgagttcgcgtgtgagtcgttcgagttgcaggaggaattctttggtgtcgcacaggtttttgcagggcttgaggtttgccaattcgaagtgaagtgccctgatgtgttcgtccggtgcgccatatgtgtccttcagcaattggagggccgtgtcgtaattgttgtcctccagtcgaaagccggccacgacttctcgggcctctcctccgagcaggttgcgcaggagattgaacttttccgctttgctgagtgcgtgtgtgccgattgctgatttgaacgattcgtagaactccggccatttgcgtttgttgccgaagaacttgtccagctggattggctggaattggtagaacggaggagtgaaggacggcgtcttatttggttgttgctgcgaggtgtgttgcattgcgtttgcatgagctgcttgagcgtcccgctcttctttgtccgccttgctgcggtagagtcgggattgaactgtgagtgtgcttatgaggtcgcgcaagtcgcgcagcttcagtgctgcttcgtcgactttgtctgttgttcgctcctttttctcgaacttgttgaaatctgcttctgctggatcgcgttccgttgcaggcagtttgcgcagtaaatccgcccatgctgtgagcgattctcgtacgtcgtcgaggaagatgtccattgtttttgcttccttttggaccttctccagttgagcctcgaaattgaatgcgttttcgaggtttgatgccgcttgatcggcttggatgtttagctccgccgcagttcgggttcgggagagaactttgagagcagcgctgagtttctgttgaattggtgcggccattgtttgctctgttgctgtagctgtgcttgttgctattgactgcttgctgtgctttgtttgttgccttggatggcttgctgtgcttt

SEQ ID NO: 21209 - DNA, 1616 bp, Heterodera glycines
ttcatttttcttttaaggttggggagcgatcttaagggaagggggagttgtaaggattattggcgccatttcctcaatttaattatttcccatgggccgttatcaattcaatcacatttatccttttcaacacgtttttcctttacacattgtaatgtttctacgcccattcttttcgtatttctctttccccagcgatcagtcagtcagttgtgatggaacagacttcaattattattccgatttctcgcttcgtgtaaatccagcatcggaatgaatgaattcatcttaacagtcaaggagtcgtttgggggttcggggattggtcaaaggcgcattggcttttcaccattacctcacaacctccatccgggataaacggtgcatagttggtctgggggcacagtgtgcatccctcggtaaaggtaataaagtataatcgtttttcagtgtataatcgtgttcaatgggttaatcatcttgaaggtgccatggaataccctcgcgaaaatataagaatttaggagaggctctcaaccaataatcagtgtacattagatagtagcgcacaaagagagtaagtagtagatggtctgaagttaagcttgtgctgcttagaggaaattatatccaaaggaccatatcatactgtcgtgcacatataaaaattcttgaatttttcatgaccttgaaaaaatatatattatttctcagctcattcagagagtatatactaaaagttccgaagttaagcttgtgctgcttagaggaaattatacccaaagtaccatatcatacactcgtgcccatataaaaattcttgaaattttcatgaccttgaaaaaatatatattatttctcagctcattcagagagtatgtactaaaagttccgaagttaagctagtgctgcttagaggaaattatacccaaagtaccatatcatacactcgtgcccatataaaaattcttgaaattttcatgaccttgaaaaaatatatattatttctcagctcattcagagagtatgtactaaaagttccgaagttaagcttgtgctgcttagaggaaattatacccaaagtaccatatcatactgtcgtgcacatataaaaattcttgaatttttcatgaccttgaaaaaatatatattatttctcagctcattcagagagtatgtactaaaagttccgaagttaagcttgtgctgcttagaggaaattatacccaaagtaccatatcatactgtcgtgcacatataaaaattcttgaaattttcatgaccttgaaaaaaaatatattatttctcagctcattcagagagtatgtactaaaagttccgaagttaagctagtgctgcttagaggaaattatacccaaagtaccatatcatacactcgtgcccatataaaaattcttgaaattttcatgaccttgaaaaaatatatattatttctcagctcattcagagagtatgtactaaaagttccgaagttaagcttgtgctgcttagaggaaattatacccaagtaccatatcatactgtcgtgcacatataaaaaatctttgaatttttcatgacctttgaaaaatatatattatttctcagctcattca

SEQ ID NO: 21210 - DNA, 2319 bp, Heterodera glycines
ttcttcacttttatttttgtcccattcttcgccaaatatctcactcaggtttagtcggattttgcttgattcaattcaaaagcaaagaaaactgctatgaatattaaaaaccacaaattcattgaatatttatataaaacaaaaataatattacgaatttattgaattaaatgaatttatttaatgttttattcgcttttaataatattaatattcattttatttgtttgttttaaatattgccaatagaaaaattgttacttaattcagagcagagtgaaatcaattttttactcattttttaattttattcaaaaaatatatgcaaattaatttttttttttattcgtagtagcatttataatttatccatcgtaagttagttaattcatgaatagttttcgcatttctttctttaatttcgaaatattttttcatctttgggtctatgcccatttcttcactcgtttggtttgttttcattttcgtcatttcgctgaatatccgtattcgaaaattccatcaaaatttgtcagggttttgcctgtatcgattttataagcaaggaaaaatttttaaaaaatttaaattcttcattttacaattcacaaatttaaaaatatcatatgttagaaaatcatactgtgaatgaattgctcaacaatgttaatcaatttttactgttttgttgaaggacaatccataaaattatgacaaaattcgtgtgcctataaaaaaatggactaaaaaaatttaaaaacttttcaaatatatttttgaaaactgttttagctgcgccaaatttttgcatgcggtacggcttgcgtggtgacgccggttggccgaattctgtacatccgccagggcaatgggcgtgccggccgaatggaggacatgcaaattccgatgccaaattcggatgaagaaccattgaacatcatgcagagactgtacaaagcaatcaccgacatttattatgggcgacagaaacgcgaagaatggactcggattgttgtctaattatataattaaaaaaaaaattttaaaagaatgagtttaaaaaataatatttattattttttttattattaccgttttgtgataaaaagtaattagcgtattatttttttaacttaaattcttccagtatcctaattgattaaaatggtaaaagaattaatttgttataatttttaaaatttcaaaatacgtatgttagagactcaaatcaaccctataaaagtgaatgtaaactttaaaacaataattttttttcaatttattcgtcttaattttgaaatcattcaaacatttttaacaatttgccctaggtcattaaaagtattttacataattttaggttttttagcatttatgttagttttaagttagtttaaaaaagtttaaaaattaatttggtgatataatgaaattagtgggataaaagtaaatgaaaagagtttgaactgcttgagggtgctcgacctcttcgtaaaagataccaatattggcactcaacataagtgccaatctcactgattttccgagaaaattcgtcataactttgcttaaactcaaccaaagacgattttttctcggaaaatcggcaatattggcacttatacgaaccgcccaattggcatcttttacgaaatgacccagaaccattaaatttctaaaagtgacaatgcccaatgtttttcgaaaatttcataaaatgtctaactcttgtttaccatatgaacgggtttaaaaaattttctgaaattttgtttaaagcatgtattatttgaggaatttcgatttttgtaaaccatcagctgatataaagaaaagcattgttgtctgtccttttccaattatattgccatttcggcatcggtctaacaaagctgcgcatggctttgggaaattcctcaggaattaattttcgttgtctaaagaaatgcgctagtgtcgggcattttgacattaaaaagccattaaggcaccgttgtagcaatgatgcacgtggtccttggaaattcctctggaattaatccctgaatttcttctattttcttatcactcacaaatcactgggggaaaattaagatgattctgatgattagcgttcttgttcgattttggcgctagtgcgatatttattctcatggttcttggaaagtactcaggaagtatttcgatttttgtaaaccatcagctgatataaagaaaagcattgttgtctgtccttttccaattatattgccatttcggcatcggtctaacaaagctgcgcatggctttgggaattcctcaggaattaattttcgttgt

SEQ ID NO: 21211 - DNA, 882 bp, Heterodera glycines
taaaggatgaagatgcgaccattggatggcatttcagctcaacttggggcttttatgcctcctaaataatcgttatgcgccaaaattggcgcttttttttcaactaattttacattatgcacagaatgacacgggcagcaaatgagaaggccaattgcatcacttggttcaccacggattcggcgagtggactttcggtggagaaaaattcacttttaaatttgtgagaaatttgctggccaatcgattggtcaaaatgcaaaaagcccaaaaattcgtttagcgcgttgatcccggggaccactttgaattccagaaacgcatcttttgactgatcattttcattgatcactcgaaaatacgcaatttcggccacacattttacaaaagtcaaattgaacactgtccttttctgtcccgcagaataattaatttgcttttcggcggggaatagcgttgacggatcacgtacaatggtgtctgaaaatcatcttaaaatttgcaaaattttccaaaattctttaaattcaataaatttaagctaacaatctcggaaatagctcaatatggaaaatgaaaaattattttaaaacaaaaaatcaagctaaaatttattaattttgaagaaaattgaaacttttaaattttacgaaaatatagtttagtaggtacttccgtattttgctaccccctcccccctcgaaaaattttaaaaattcatattttggggttcaaagtcactgatcacgaacatggtgtcatcaaatgtcgaaacaaacaccatattttcatgatcagtgactttgaaaacctcaaaatatgaattttaaaatttttcaaggggggagcgggtagcaaaacccggaagtaccgtttagtata

SEQ ID NO: 21212 - DNA, 1072 bp, Heterodera glycines
gttggtctctactaattgccagaagccaaatgctggttcgctttaagcaattctttatctgtctgtctattcttgtggatttttactcattttctacggtagacatcgccttacagtactttcatctgtcaataaaaatgaacatgtactgtaatttgtttctttttttttcttcaaaatacaaaaaattttggaagtcatttttttcaatgtgatatacaaattatggtcaaaagatgcaataaaaaccaattaatgagcataattagtgcgttaattaattcaattagttagtgataatccgttcatcgtcgttggcacataaattgccggaacaatttgcaaattgcgtccaaaaatgtgaaaagtgcgggcaacaaaaacagggaatggacagcacacaaaacaatgcacacgcagagaacccggacaaatacctggaaaaattttttgtaaatttttgaaattttcccgtaaaaacgggcctgagcagtgtaaatttggacaaacgcaaggctcaacacgcaaatgcaagtgcctggaaagaggaaaaaagtttgaaaattttaattttatttaacaaataaaatgaaaaatattataccttcccatggcctaagcgcaaaattttgggaaaatctatgaaaaatgaaattttgacaggcgtcaatggaagaattgcacgttttttgagatttgttaagaaattaagaaaaatttcaaatttttaattttccaaaattttgggaaatttttaaaaataatttttgcctcaaaattggcaaatttttcggagggttaagttgttgttttattggtccaaaatgccgggcatttggtcgtcgcaatgcgcaacattatgccacacaaagcccaagggaaattttccgatcatccaacaatctccttacaaatggatgcttgcaaggctgggaagccgacagaggtgaaagcgtgccgaattttgtgttcaacactttggtcggcaatgccatgcacattttggccacccaaagtgccggcccatttggcggcatggaaatgatacgaaacatgggcctgaaaagtagag

SEQ ID NO: 21213 - DNA, 828 bp, Heterodera glycines
  unsure (1)..(828): unsure at all n locations
attttctaaaaatcgattacctaattaacaaatcattagtaatccgcaaagaaaattttggggcctcagttgaaataactcatttgtcagttgagttgagatttaccgtatgtccataccgtccatgttcttttcaccattcttccctaccctaccgtattctcctcccaagctttgcctaaggtactataagtaccatgttctcctcccccattctcccctaccgtaccattttctctgtccccattgcccctaccgtaccatgttgcatttccccattctcccctaccgtaccatattgttttccccattctccccctaccataccatgttctccaacaaatccaggtacagtccgtcgtcatgcaacaccgacacgttgaactcgggcacatatttgtccaccacctggcgccactcgcgcaacatcagcgcccggttgtaccagtcctgcaactcatccccatggtacgcaaccgttgtcatcatcgcgtccaactgagtcccatcgctccgattcgtcgccagggtcaactcagtcccatttccttgactttctgctgactgttcttgttgcgggtgcgttgtatggtggtacttgagcagaccgcgccagtgccgaaactcgggccagttgagaactgaaatgtgaataatggcacgaggactcaaaacaagggcctcaaatgattgatttggcactcaattttcggcactttattggaaaactcccaatttttggcacttttgggaaaccatgttgtgtcaacattttttgtaaatttccaatagtaagnntgggattttgccgcttttttcctattccaa

SEQ ID NO: 21214 - DNA, 2081 bp, Heterodera glycines
  unsure (1)..(2081): unsure at all n locations
aaaaaaatggacaaaaaaaaagaggtaatttccaatgcttacaattagctcacgggagcagctcattccnccgccacgccgtaaattttttgacgaattatntaattgtacgtttttcaaaagttttcaattaatttttttttttttggggggggagggcgtaatgcataaatgccattcattattattcatccattcccggagccccgacatttgcgccatgcccaaaatcggactcaaatgttgaattttttgaagccctgatagcttaaacagcactaaaattaagaaaacacggtgttttggttcattaggaccaaaaatttgttgtttgaaaatttaattattattttcaaaaattctttgtttttaactcgatttcgtgacaaaggcgcaaatgtcgtgtgatgccagaaggaacggagtgtgggagaaagtgggataaaggacctgagagaacctctaaaagaggcgcccgtagctcagttggttagagcacggcacggattgctgggaacgtgggttcgagttaccttttatgttctacagtcgggacacgccatccccacctgttcctcctccagaaagcctttggcacgtagcaggcgatagatgcgcaccgcttggtccccaattctttcgcggatggccgactcaatgtgttcgttgcacaaaaattcgatgcccttttcatagtctgtaaatgtgccattaaattccggtaaaacacacaatttttccaagccgtccccgaaaagtccgggcttaaatatgaatggattggtcatttgtggggtgcacttcattctggcacgtgtcttttcctacccttcccgaaagcataaaaaaatttccaaaaaaatttttagtgagaaaatttcttggaaaaatttttaaaattttatagcgatattcaaaagtgtttatgatggatgatgaattaccaagtttttccaaaaaaaaacgcaatttccaattttttttttgttgaaattttcttattaaatttgtaaggggtgtaacaccagaggtcgcgcgcgcaccacaaaaaaaaaattagaaattccgcaagaaaaaaaaatgccggcacccgaaaagcggtagtgttcccatgaatacatacagaagatgactcgtttatctatgcccttgacatatacatgaagatcaccatgaacacaacaaactcactgatgatgtagagaccgcccccactttcgcccacccggcgcacaatgctgttgctgtccttgccgagcacctccaaccgcgcgtcaatggtctcccggctgatgctgtccagcccgtgctccttggcatagcggaacacgtcttggagctgtaatcatgccagaatcaattgttgtactgaaatgtgtgtgccaacgatgggaatgtgagccgacgcaaaaaaaaaaaaaaaagtttcggtaatcggaattcatagggtttttaaaattcgaaaaaaataatttcggagaaggaaattctaagacatttacaacattttaataagttgttcgtcgtcatctgggagaaaaagcaggaatttgtagtcgtttttcccaaaaatgtcccatttttaccatcttgggaccaaatttcaattaaaaaaaaaacatggtaaaacgggtgtccgccggcgccgttaggggccaccggcaattttttttgatgtgaattgacccaaactcccgtccatggcatatatgccattgttgttgctcaccgaaattgggctggactgcccggtgtcgatggacggagttctttgttcgcccaccttcagcaacagttggaccactcgcgccgtgtgcttgtcgtccaccaccaattccccaccactgttgaaaatttacggaaaatgtaattgaaattttttttaatttttgggcgggggggggaatgaagtgcacccaaaaatgccccgttttgtgccctggcccaccaaatggtgttgccgcctccaccgctgctctccaacgcgtccagcaccaacgcgtcgcggaagaagcgctccatgcgcggccaattgatgcgccacagaatgtgccggtcgctgtccctcacgttggcgttgg

SEQ ID NO: 21215 - DNA, 1720 bp, Heterodera glycines
tgctttttcacagagatttacaatcttttgcctcctgaatagtttcgtacgcttcctcaatgcgttacacgtatacatcggcttcattattatataattttttgctggtaaaccttctgacatttgaacttatgccaccttcgacattggtaattggtcttgacactggtctaattcgaccatatgaacttccgtaatatgtggtgtccaaatcaatttcgaatgcattgttcgcgatgaaaacatttttggccatacaaaatgggccgctataatatttttcataaattaattaaatatttatgatatagaaaattaatgctattgaatgtttcaaactatgttaattcggttactttgaataacatataattaaaatctgttgaaaacccatacgagctggcgcatttaagaaacgacatagcgcaaaaaatatgaacttaatctattcaatcttactaatgattatgctgctgattaatatgaatgtggatttcaacggtcttataaaattctctgacaccaagtgctgaggataattgtccatttttaatttgacagttattatatattctactacataacgataattttctctggcgatccgcgcattctcatagcgtacttggaatgttttataaactgatggttcaatgccgaaaccgagcacaattggtacgttatggccataagaagtacgataattataaagaagaagctgcttttctgtgaagaagtattcatgctaaaattattgtatacaacacagttcgataattagtctaaaagaacaacccaaattgatgagatagttaatccggcctctatcaattacaaataagcatccatttgtaacaccaaccgattcattggtgcctgctttggtgattttgatcattgcgtttctttcacccctttcattccgatcacactttacaaaatccaaccgtaagtttaagcatgaatatatatcacccagagaccgttggacggaattaaaacaatcaaaataatagagaaagtaataaacattctaaaaattaataaaccaatataactaaattcctaagcctttttattatatttggtaataaataaggagcccgcaaattttgagaagatttgctaatttcaccttgacagggtttcagaatggaatttctgggaaacaataaagaaaacctgggattcggaccccccgacaaccatatcccgatatgattcccaaccctgaatcccggtattggtctcggaaaaatgatcattttcttaagatatattaaaaattgcgaaatttacaacatttctaatatttgaatgattaaatttggttactctaatgttcagcctttgttagaaaaaatacttgaattttcattttttgggaaaatcccgagtctcggctgggatccctgccctaaaatgccgctttgtatcaggttcatggcaaaatcgggatttgaatccatttcagctgccaaaagtccgctaaactgagatttgaatttcgacaatcctttccacgtaatgggacaattgcaaatacaaaactaaattcgaagaaaaatcaaaaatatatttgactgagataaaatttacaaaataatattaataaaataatatagaaaggtataaataaacatgctaaaatgaaatggtggtgggaattgatatttcaacataacattttgtttacaatgcaacttatgattacgtaatg

SEQ ID NO: 21216 - DNA, 1745 bp, Heterodera glycines
ccactaattatgggggaacgtcgaacgagcgaatgcgattggcgtcgtcggcggttaataaccgctcgtccgcccccccccccctccccccgggggacgaatggtcgtcactttccattggaccaatctcaatcaaattttgcggtgcagcagaagcacaaaatactcgcatatttatcttcattagcatttaaagcccaagtgtttttgtcggggtcaaaagttgcgatgacacaacgaatcaccgccccattcgacggcggcggcggcagtccaaccggtgttgggagtgtcctatttaagcagaaattaaggtgctctcttactccatttctctttttggttataatttgggcagaattaaaccaattacctaacaaacttttattgtttttaaatggacactcaacaattaactaattacataattagtgagacaattaattactattgcttgtttgtaaatgcatttattttccttctcatttcggatgcttacattttcccaatttttggtgtttccctttaaaaaaacaccattcagtaacttttgcctaaaaatgatctctcatctgctgctgtttgtttgtttggagaatgctgttcctccaattcattctttcccgcccccattcgcagatacaaacaaatttcttcgacggcaaaaaaataaataaaagtttaaagaccaaaaatcgtttaaggcacagcaaaatttattgtttgcggagcagtgaatgaaccaaagtccaaatttagtgtttatattataaacatttatttagtaaatctgtggggggaggggaattggcacctcattataaaagttaatgaatgttaattggtgatgctaatcatcatcatcagcagcatataatcacaaccactcactagtgtgaacaaatcgcttgccaaaagtccccgtggaactctcgaaatggtcagaattgggcttggatcaaagtgccagaatgataatgactaattattgtccagcctaattactggctcgtaacggaaaagggaaaaagacacgtcacaaatattcccccgcccctccaatttctctcttaaccaattttccattttcattactagggcaggtaattatatgcacataaaatcgcaaaatatgcgcataaaatatgcacaaaaaattgcaaaatattcacataaaaagtgaaaaatatgcacataaatttttccaaattgaggtcaaattttcaaatttcttcaagtttgttaaatttaagcataaaaatcccgaaaatagctaaaaatagtatgaatgattattttagaaccaaaaaagtaatatttatttattttgaagaaaattgagcaaaaaatggagaattttctattttctgactatttttggcataaagttccaattttttaaaaaggtacttttttatcagaaaatatacccaaaaatctgatatttttgaaaaattttcggtcattagagcccaaatggccgctttaatagagggggccgttttaatagaggatttattgaaaaaatgcccaaatatggacataaaatatgcatgaaatgccgaaatatgcacaaatatgcaaatatgcacataaatcgcgaaatatgcacaaatctgcaaaatatgcatatggaaatccactctagaagcttctaatcaagctaaaaacatgtttttcatgcgtttcaggcctcccgcagttcaggaaaaaaaatatgcatgtgcatataattaccaacccta

SEQ ID NO: 21217 - DNA, 2305 bp, Heterodera glycines
cagtaaaaatggtcatttctttttatgcgtgttacaaatcagaaatttttcgagattttccggagtaaagctcatccgattgtctgccagaatatttttgtatgctgaaaaggaacgctccacttcacacgactgaatgggcgcttatttgaacattgcaataacgtccggcggcaaatgcgtttgaacgtgttcgccgcgcaaaaccataccaatttcctagaaaaaatatgagtttaaaactttttctaaatccaaccaaaattctgtcaaatcccggattgtttcgcaaaaccgtgttaaacttttctcgaaccaatttgcccacattgcccggtaccaattgcaattcatttccaacatcgctcactaagtccaaacctagaaaatttgcatagaaaaatatcgagttttcacaaactttcaatgagtgtgagattgcgtgattctaatttttcaattgctccaggtaaaatgtcaaaatgtgattttataaaggccaaatctccacgaatgcctgaacagtcaaaggcaatttgtgattggcgaatagcatcagaatcggatgggttgaagtcccgaataatcgcaccaatttggttaagattttgacagtaataatccgctgcattgagccaagtcccccaacgtgtgatgattgggcgcggtgggagagggagatcacaacgttcgcggaatttggccaagcgggatggcgcttttgaaaaagtttgaaaaaacctggaaatatgtacgaaaaagtgcgaaatatgtaagaaaatatgtacatatgtaatatgtagaaaaaccccgaaatatgtaaaaatatgtattttaaaccaggctctagaagcttcaaatcaagctaaaaacatgtttttcatgcgtttcaggcctcccacagtccaggaaaaaaatatgtatttacatataaatctaatgcctagtaacgacaaatcttacaaataaggacatttttattgtgtaagatttggaccctccaaataaggacaaatcttataaataaggacagatacgcgccctgttttataccaaaggcaattatccaaaaaatgctgtgatgtaaaattctcatttttaacccattttgacacataagttactcaaaaagtattagacaaaaattagttttatgaactgaaaagatatttattacattattatctttaataaatttttttgttaatgaaataaaattaaaaataaaagatttgtttcataaaaaattttttataatggaatttggtataaaaaagcaaaaataaaattctaaaatggatttgcatgtagaggatttgaacctgggaccaaaaaattctcgactagcgcactacctctacaccattacacacttgtaaatcggcgaaacaattatttcttttctttgattataaagaactaaaaactttggcacgtcataattcggcactcagactcatttcgcagaaaataaaaacatttttcttaagaacccatgggtgctctatccacccaccaaatttcatttggaaatcccacggacacctggggaccttcctttcttagaattgtttttgtttacattttgcaaaatttgaaaaaaaaaaaatcattactgtaccaaagatatggcgaaaatcataaaaaaactcttaattttggtagttttggcactgtgccgtttgggtttaaattttttattttctactcaatttcacgtttaaaaatgccattggaaggcgtgtcgatctatgcccatattaataagcttaacattcgtcaaaatgtaattgtccacgatctttgcactgaccactcgttttcatggccacagtgccggaaattctttttttgtcaggcggttgtataatttgccgttgccgcttttttgtgccggtgccatcgttcgccggcggcttcgccggtgccatgcgtaacaaaatgggaaacatgcgcacttgccagcagctgaactctccgtcgacaaaacggtctccgatcaaccgccgcattgggccgtcggtaaatattaatctgagggctcaaactcaaaattgcttaaaaacagtggatgtcggtttaaaccgacccgaaaagtggaaaaaaggattgatctgtgccaatgacttttttcacagaatggcacaactcttgtaagtgaaattatgtaattggaatggcattctatgaataaggtcaatattatccattgggtgtgtgtcttatgcgttcttttcactttattatccgattgtttgtggattcgtcgactttcgctttgagcaaatgcatgacccaaccgata

SEQ ID NO: 21218 - DNA, 1310 bp, Heterodera glycines
  unsure (1)..(1310): unsure at all n locations
acagcaaattgacaaaagaaacgaaacttgggagaagtgaaacaatttaacaaatatttacgacaattttgaacaaattttaaaaaaggcaaagaaagagaaaaaagaaaggatgaagagaatggaaaacagaggagtttggccagagagcagaaaatcaacatttggggtcaaaaatcagcattttggagaattttaatccagattcacggccattccctgaagctgacaaaaaaaaatcaacaaaaatgtttaaacatttttgggaacacaggggggccctccgggaaatttcttttggaattttcatgttttttttctctgcactgtcatttattggttcatctcaaaaattcgtaaaaattatggttatatttttaatttttatatacccttaaatcaaattggccatggattattatcatttattcatgacaaatacaaatatgacagtcatttgatcgaaatacgagacaatgcagtaaatattgatacaacagcgacgtaatatacactcatatacatatatacaacacacataaagtacattaaacacacatcagcgacacattgatcaccatcttttatgggccagatcgagagccttgacgggatccgcggtttcgagtcgtcgttgtgtcgtgccgcgatgctgtggtatcgtcgatcagctcatcgatgtgttgctcaatccaggcgagtacatccctcattgaatagcggcgcactgaaagggaagggaaaacattataattgaaaatgttaaaacaaaaacaaaaaacattaccgtcgtcggcagtccaaacgttcgcgctgatgaattccgcaaatggaggtggcgtcacattggggaagcggagtcgtgtgccgcgcaaaacctgaaaagggaaggggagctgattctgaaaatgggaattttcgttttcaacccccccccccccccactgcactcaccatcggggctacgtcgttgttggacatgaactggtagggctgttgcgcgttactgaagatctcccagcagagcactccgtaggcccacgtgtcactcttcggcgtgaatgtgcgttcgcgcatcatctccggcgacagccatctgatcggcaccggcttgcccgtttccaccggcttcgacggtcctttgaatgcgaggccaaagtctgccacctttacctgaaagaaaacggcaaattatgcgctggtcacaatgcganaagcagaaaccaccgtgttttctgagaagaggcagttcctggcggcgacgtcgcagtgcaggatgcccttggagtgcacgtggtccagtcccgcgg

SEQ ID NO: 21219 - DNA, 2708 bp, Heterodera glycines
  unsure (1)..(2708): unsure at all n locations
agatacgtgtcgagcgagccgttggacgccagctccatgaggaccatcagcggttcgcgcccaacagcaacgccgtagaatttgatgacatttttgtgttccaaatggcgcatgatcctcgcttcgttcatgaactccttgatctgaaaaagtggggaggggaatcgattaaaaggctgaaattcaattttttgcccgcccattctacctgtgcctttgtgctcgtctgtgacacctccttgatggccatctgcactggctgcccgatggttgggtcgcggaagacgccacgcttgacaacgccgaacgcgcccttgcccagttcagcgccctgcgtgatggtcgaatgtgcgagctcccatttctgccggctgacccctttcaggagaatcaccttcctttgctgaaaaagggaattttaccgaatttatttttgagcgtataaaaggggctgcattttaatgcgtgaatcattttcaaacatcacaaattcggcctctcttcattcgactcgacttctgcagttcatctgtcagttttcaaattcaaaaaagacaatcacttcaaaaaattttctttataaaattttgtcccaaaaaaataccccagtcgcggattcaaatttccgcggtcgcgcaaaaaaaaaagccgcgaatcgcagtcgcgtcccacccctgatacatacttatgcacctgactgtatatagttaactaaattaaatagtgatgaaaataatgccatattttttaataactttttttcaaggaacattgtttctatttaattcttcttatgacaagaaattcatgcttttaattgttaaacggaaaacatgtctgttaaattaaatattggcttgcatttttttggtgttttaagagaaatgctgatttttgaggaatttttattgccaaatggaaatttgctttttaaaactgattgataaggtttttgaaatgaggtcggttcgctaggtttggtcaatcggtcgttgctttgcttcccatcgccccgggtgtcgtttgtttttggatcagtccgaagtaaaggcctcgccgttggagcagttgctgatgcgtgcccatttccaccaggcgcccatcgcgcatcacaacaattaaatcggccgattgaacggtggccaaacggtgggcaattacaacgcaagtccttccctcgctggccttctccaacgcctcttggacaatcggaaaagggactttccattaacaacaaaagaagatcgtnaaaaataaattggcccatccctccccccccccgcctcatcggccaatcgtacggagttccctgatggggtccattagtgtttaaattgaccaccttttcgctttcggtgtcaagcgcactggtcgcttcgtccagcaacaaaatgcgcgggtcgcgcacaatcgctcgtgcaattgcaatgcgttgtctttgtccccccgacaattgcgtgccccgtccgcccaccgccgtttcgtatttctgaaatttccaattcaaattttcggtgctgcattctttgcctggggtaatgtctccacaaattggtgaatgtttgctattttggctgctcttgttattcgttcctccgtcgcttccttttccgtcagtccgtaggcgatgttctcgcgaatgctcaaattgaacagagtcggttcctgtccaacctttgtgagcagattaaatcaacccattgactaattaaccctaattaccccaccccctgcatatatcatcaatttgaccaaaagtgcgcaccattgtgaaaaaaataaagtttcgaagcgaaagtaaaaaaaacataaaacatgaagaaacaacagacactgtaagaattagacactattaaaagttaatgaaaataaagtgaacgggactgggtcgttttggcgcccacgttttggcgccgacgatttagcgcccacgttttggcgccagggtcgttttggcgcccacgttttggcgcgaagccaaaaattaaaaaaggtaaaaatttgatcaaaaattttacaaaaaagtgaaaaacttttaccttccaatgggtttttcaaattttcaaaaaattcacaacccccttagaattttttttcaaacttcccgatttttgactgtgttttatgggtgtagattagagatcaacatgtacctggatccagccctgtatttttcctggatccaggtacaggcacaggccatttttcggcaacctggatttttcctgtacatttattttcctgtacttatgtacagaaaaaataggtacaggccattttttgaaacaggtacaactacggttttttcaaaatgttgatctctagtgtaaatcaacatgaaggagtgatatgatcaacttgctgtgaacattttgttggtcaacatgaaaaattgacttagcaagaattttttcaaatttttctcttcgctatgcttcaaaaaatgtcaaaacattttgaatatttttaaactcttaaattttttcggttgaaatttcaaaagagttagtgatacatattttcatttattcaaacatagaaaaaatttaaaaacctgaccctaaattttgtatgcttgtaaattagtctatagtaaaccaaaagattttttttctgctcgttttgaaaggaaaattctaaagaatatttctaatttaatcaaaagttttaaaaaattgtttattagcaaaaaaatgaatatgtgttat

SEQ ID NO: 21220 - DNA, 2376 bp, Heterodera glycines
  unsure (1)..(2376): unsure at all n locations
ttactctttttatagggcaaaggcgtaacggagacttttcggccgttgagcaacgccgagataagaagcaacaacggagtgccaacaaatcacgaaaacggacgcataaatcaagtgacctacggagcagaagaggagaaaacgtacaaagcgtataagacaaacgatggcatccaaaaaggcacaacggcacggaattaatcaaagaggagagattaatgagacgacaaatgactaatgacgacttactaaatgaataaaataagcaacaagtaaaaaatattatatttacaaattagccgaaagagggatccaagcaaatgccaaaaaacattaggaaatggcaatcagaattcagataatctaattaaaggatttaatcttatcagaattcagatatctaattcaaggatttaatcttatcagaattcagatatctaattcaaggatttaatcttatcagaattcagatatctaattcaaggatttaatttccagtttaataaaaataaatttaacaaaatgtcttttttttacggttggctgaatgacaaagaaagtccttggaatatttatccgtaataactgatgcggttttgaaaatccaaatgatggttcagtggtggaaatgaacaaatttttttgaaaaattttcacatttcttatatagttcattaaaatttccaaaaaattttcccggctgcgccaatcggcactgctccgccgtgaccccattgaaccattattttttgaaaatttgaccgctaaatagccaaaattagactttttgcccaccccgaaattcttttctgaatacgagcctgagtggtgccccataggcgccgttgccaggtaaagttttgtaaagtgaaacctgatgccaaatgcaacccacaanaatccagctcaatcttaaattgccacacttacgagcgatacctctttaattccaaatttgcaataaaaatttatgacgaataataaacgtttgaaagaaaagtccataaatgtttagaattttgtgataacaaataaaaagtatcacttctaaaaaaaatgatttaaatacgtttgtcaatcagcttcttctaggagtttttactcaaattttcttcggccataaattgtttaaattctgtaaattaattaattaatcacttaatttattggatttttttcctttcgattaatttatttaatttaccattcaaaaattcatttagaatgtttttagcgacagaaggctgaattttgttggccatatttttgtgaggaattattggcgaaatgattggcatttccatcccaatttgggcatggccaacttcgctttgctttctctcaaaccattctcgttcaggggaccaattcagaaatgccccttctttggcataattaatttcttttaattgcaatggcattggccaaacccttaaatggattttgcgattaattcactcttgaatttcataatttcgcaatttcatcaattcggcacaacccaaacacttaccaaaacgagtaaatgaggaaaaacttttccaatagaaatgtcaccgaagtttcgccggggaacagaaggaacactttggtgaccatggtgaggatcacttgtgaattaaagtgaccagcactttcgttgaacaatttcttttctaaattttcattgaattcaaatgtaaattttggtaattaaaacaatttataaaaatatggcaaatttcaatttaatttttaattaaaactaattaattattcttccgttttgtcgccgcaataaaaaccaacttggaaaacatttatggccataacttttttgtaactgaataaaacttcttgaattttagtatgcagatagaggacaccaacaacacattcctaagaatatataactactcgctatatggcttttaacatggagcaagcattaataattaaagatatgcaagcaaacataataatattaacgtggatttatttcaagtgaatcaataaagaagcaatttttatttttttatttaattgattaactgaatatttcttcattttcttattgaaaagccaattattctaagcggtgctgacattttttcctgctcatttttttccaccaatttcttaacataattctttaaaataaaagcatttcattcaaaaaagcatcaccaaggcaatggttcttttggcaaactttgccatgctaatgccaattattggccttttgctgtcctcccattggatgggccaaaatgcgcaacagccggacaataataacaattcgctgcatctgaagctgatccccggcttgggcgtgcccgacacccaccacgtgtattatgtgggtggacattgtgagggtcaaatcgcttttacatc

SEQ ID NO: 21221 - DNA, 2706 bp, Heterodera glycines
tccgacgaaaaaatcattttcattttggtaaaaaattcgtcctcttccgatcagccattgttgtcgccgatcagcagcggtgcagaagaaaccgcagcagaaacagcagcagctcggggaaacaacagcaggtgtgaaggtaaagaacctcggggatggtcaccgaatcgtttcgttcgaaactttaattcgaatttaattaggatgaaaaaatattcgaaaatttaattcgatttcggcattcgactatttcgtgtaggggatttatagttttttttaatattataattatcttaaacatatataattattaaaagtttatcaaattaaaaaataatacattatttttaaaatacatcgaatatatcggatataacaaattgttttatttttaatttatataaaaaaattttttaattacatcgaatcttgaaaatacattaaattattaaatttataaagaatttaaatttaattattcattaattatttcagatttaaattcagtaacgacaattttatttattttctgtaatttattcatttagctcaattttttggtcacgtcgttcgatgttcaccgcaatttttattacgcttacattgcttattggcacagtttctttagtcaactctttttctagtgaaaatagtggtgaagatggtgacatattgggagatgacggcatttcacaaatattttcggatgacgatgccaaagtaattaatatattttaattaataaaaaatctatttcaaaataaaaaataaacagtgcaataataacgggaaaatctaatacgtaacgaagttacaaattctcagaaacctaacatactttctattaaccttagatatataaaaatataaacataaaaatattttaaaaataaaattgtcaaaaatatagaaaaaagttagatttaaaataaaaaaatatttttctagaaagtaagttaaacttttttcaaatatatttaaatttaactaaaacgaagataatttcgtgtattcaaaatattttatttattcccatataatattttttagcattaataaattatttttttgccatggattttcaatttttttaaatccattaattccagggatatcttaatcgttatggttacattgacaatattctgtcgtcccaaggtcatcatcatcatcattaaataaataaattaaaattttttaaaataaagaacaaaatgctgatgccacgccacgagctcatgcccaacaacagcaaagcaaatccggcgaattagttggtgaattgacattggattcaatccgatcggctgtcaggaaattccaagagtttgccggtttgccgacaaccggcgatttggacaatcagacaaaacaaaagatggcaaagccacgttgtggcattcaggatgtgcaaatgctgaccagtgggagtcagatttttgatttattttttttaatataatttttataaaaattaatttattaatttttttttcatatttcaatattaattaaaatattttaaatgtttaatttgtttacataataaattggattggttatacagacaataataattaattttttttaataaaaaatttctatttgaaaatttctttcccattaaatcattagggattttaaaaatttatttatgtttgtaaactgaaaatattgttttaatttttaaaacctaaacttatgatcaaaaatatttactattaaattattttgggcttttacaaaatgaatgattatttacaaaattttaattagctttttttcaaaagattatgtaatgaaatggcgcaagagacgcgtaacctttcaacttatgcagtcaaccaatgacattccagaacgcatgcaaaagttagtaaaaaaaattttgaaaattcaaaaaaaaaaatttttttttttttcattagacaggccatccaaatggcatttgacacttggtcaaagattgtgccattggattttagcgaagcaagcagatatgatacgccggatgtgaaggtgttgttcgcccggagaaaccatggcgatccttggccattcgatggccgaggtaaaattaaaaaaaaattaaatttaattaccctaaaacgggtgcttacaaataaggacaaatgccaaaaaaagtcccaaatttcgacaatttatgcccttctttttaaggtggcgttcttgcgcatgcaacctttcctcaagatggcaaactccattttgatgatgacgagaactgggttttcatggacggaagaaaaattggaaagtaaaaaattttaaaaaacacccattttgccaatatttttaaatttttagccatcgctttacggatttgtattgggtagcgctgcatgaaattggccatgtgttgggcttgtcccattcgaacattgaaactgctattatggccccattttatcaagtaaaaacactaaatgaatttttaattaatctttttttaaggacccacgtgatttggtcgattggcgtggcaattacaaaaggccagagctgactcaggatgatgtccgcgcagcgcaacaaatatacggtaaatttctgtgcaaatgagagttatatgaaaattagcttttcttggatttcctaaatgggagcagttatcttcaacctgctaaattaaaaaaaatttaaattcgctaaattcattcaagtttttctaagaaaaaatattaa

SEQ ID NO: 21222 - DNA, 3091 bp, Heterodera glycines
aaaaccctcgacgaccccctagagactccgtctcctccctccgagcggaccccctcccgccgaccaaaacctttcgacggaccccttagagccagctgccagactccctccctccgagcggacccccttttcaccatcacaaatacaccatttaatctttttcttccaacgacttagttggcccaagtggttaacgtgtccaggattcgcctccccaggttcgagtccacttcagtttttaaattttctgcttaaattctcgcgcaccaccacgaccagagaccgggatctcgaaccgataatagccgagatctcgtgtcgagatctcggccattatcgggaccgagctagcctattcgtgtcgaggcgggaccgagcagcccttaggtacgggtctgctggcgagagaaagttagacggtgcactctctcgtcgctggagaggttagacggtgcactctctcgccccaaaagaagccaataggtttggggtggaaatcaatcgataattgaagtattctgttattgtagtgacgggggggggtcgtaaatcgtcaatccaagcccttaaccccctcccttatctttgtatgcaaatttggtcggcgattttttttcgcggcatttctctgtctccgatcatggcatggagcatctcgaatttaaaaactatttttaatatataataatgatgatttttatatttaggcaaagacatttggataaagtttccattgacaaatgcccaaaatgccatattaaatttgtttggtctggcggctgtaattttgtgaatgtttttttttgtcaagacaataatataaataacattttccaaaatataataaaaaactataattaaagaaacggcttctgaaaataaaagattttttgattaaaaaagtttataattacataaataatttttagattgtgtgcagaaataaatattgccgagcaaagttttgttatgtatgtcaacagcaaaacatcagccatttcgggaaacatctttgcttgttggtttacatttgcatagaaaaaataaaataatttatttgtattatttttaaagacagaaaaagttgaaaacgaaaaagaattatgaataataaattaaacatttaattattatattaggagctgccattcgcgccccccccccccccctccctcctaaaaaaactatttttgcaaaatttcaaaaattttcttggaacaaatattccactttttaaatggttagccgacaatttgcggactgataaggggccgaactgtcaaaaaataaaaaaaagttatgaatgcatttaaagattactcaaatcctcccaaaattgaaattaatgacggtaagctgataactaaatattcaaaatttaaattattacttttttatcggacgtgaaaaatgaaatttttttgggaacggtttatataaacttttcacatttacaatagcctttttcaaaaaatttttcctttgaattttcatataaaaatttttttaagagtttttattatttttttttaaattcgtcggctaaattatgtccggcgaaatttcggcgacgaaatcacatgtaaaaattcaaattgaatgatcactctttattttttagacagttcaatccagaaaacgcggtccgcaagtgtctcactaagattttaaatattgttccttcgaaattccatcacttttaaattatagttgtggcaaaagcaaaccgaaccctgaacaaccatacaaatgccttagttgtggaaaatgccttttcctgacaaaaaatgtttccgaattgaaacaacaaaaaatgtttaaaattcgagcggaatttgaaccgatgatcaaagaaaatgaattaaaaatgaaaaattcggaaataatcagtgatataaagggtaaaagcaaattattgtcataaaaaggagaaaaaagggaaaacgaagtgcaagaaaaaaaatcatggttttactttatttttattttttatttttgggttttcgataaaaaatttatgcataaacattcaaagtaattgcacaaatgttggacaacaaaatttcaaggattttctgaaactataaaaaatcaagacacttttaaagatttcttattttactaccaaaatttggttaaccgaataattataatgaaaaaaattacaaatttcctatcatcactcgggaggggtaaataaaatcacgaaaaacaccaaaaaatcgacaaaaaagtcaaaaactgagcattagtctttgctgcaatatgaccaaacaaaaaatgggtgctagcagagatgttgcgaaagaaaaataaaatatgagacacgagacgagacgatacgagatttttttgttaataattaaccaaaaatttttggtttttacttttacggaaaaaaacgttttgcgaaaagtgtaaatttaacaaaagagagcgaccatatcagtacggttcttgagataaataatttttaattttttaactgtgtgtttccgaccttaccataaaccaggggtgctgcacatccgccggtcggattcaccttaagaccatttctcgatatttttactttctatttgtcagtctctggttcatttatcggtctagaatttcagattcaattcaaggtttcgattcttaagttcatccaattctccgtctcgagtcttgggttcaactctcaatctcaagtctcgacatcctctattgacaggccgtggttacaatcagtttccctatgtcgaaatttaaaaaaaacagagcttttaatgttgattttctacccaaccctgcctgagctttggatctgcctgcacccatcactcttttttcagaatagatttaattcactgattatgttttttctgtccttaatgtccttaaaaaaggtggctgtgctttgccttaattcatatatcctttaacattggactcatcataccatttattatccttcctgttttttcatctcttgtcttacccaaacgcgcagtcggacggcgttcatgccgtatgacttcatcaacgcaaacagatcaatttttttgccgctactgtcgagaagggttgaccatccttatcctgctgt

SEQ ID NO: 21223 - DNA, 1016 bp, Heterodera glycines
caattgacatttgtcggccttttaaccccaaatggggacttattttgtaattcttctgtactgttttcagttctcactaacatgtcagtttgcgtcagtttttggatttggcttgcttttagcaccgacacattttcgaaacttctttggagagagcttcagatagtcggcatttgattttacacaactatttgtcatccctactgattagctttcagtagaagtattagcgctgctgataatttgtctgggcgacatttattagttcatacatgcgcacccactcaatttgtatctaggcgctgcaaataaaaaagtgcagaacgacaaaaatggcagcaaatccgacattgaagaattgacgaaattgttagccaaacagcaaaaactattcgagaattcagaaattccaaataaagttctataaatagaattgttaaattgaaatcaaatgaattttttgagggttcgttcgcttttaaaattatttttggaatagatggattttgtgatgattccacagcatgactaagcaatattaaagttctgatatgaaaaataacagaaggttaactaatgaaagcataaaagttcacaagaataaacctaactttcttttttaaaatatttttttaaaataacgtaatacatcccctaaataatgccaaaaactaaaactaggtagccggctttttaaaatagcagtcaaagtgaattattttgtctgataatatttgtgcttgcgcatcgtcttattgtcttcactgaattgtgtccatctgcagccctgacacaattttcagctgctgtttgacttcgtgcactgaaccgcttcgttgtcacataaagtgaacttcgacgaaacttttaataaaaaagtattgggaaaaatgttttatatttaaaaaaatatattttgccatacctgagaaaatttttgtccgaatattgtgctaaacttgctacggaaatgtgcagaactcatgcaaaacaagtggaaaattgagcattttccc

SEQ ID NO: 21224 - DNA, 1570 bp, Heterodera glycines
  unsure (1)..(1570): unsure at all n locations
tttgctaatgccgacattcttgacgataaagctacttttataattaataaaagtcgaaaattgaaattggttatattgtagtattaaaacaagggtcagatttgctggtttatcagcattttgctgcttttcaaggggtcaaagattttttgagcttctgttttacgatgatttttggaatcaaaaatggcaaattttcagtaaaaatcagttaaatggtcaaaatttctaatttttccaccggcggcgtttatcggcactaccgggccgctgttcccaaaaacttttacactaatttataaattttaattttaattgccaaatatggatagcgaaatcgaagatttgtgccaaaaaatagagccattgaatgaggcaacatcacaatgaaaaagcccaaatcggacactgacacagcggaaagctaaataatttaaaattgtttaaagttattttcttattagttgatttgtttaattgagataactaaatcattggcacgattccgcatttcatgagagcgaagaatccacagattaagcgcatcgccaataaagccaactaaaattttggcaattttaattatcgagcaattttttttttaatttagaaataaaaaaaaacaaatttcttttattaggtgatttaacctataaaaggacctgaaaattgaaatggaaaaagataatggaacaagaattcatccaagtccgtagttgtcagcttcaacttcaacaaaaaaaagtgttgaaaggattattttatttattatcttactgaccgaacgtgacgatagacatcgagtaaacctaaaaaaagtttaagtatcaaaaattcataaaataccattgcaccggaggctgaatgagtgtatgtgaattgtttgccatatttagtttttgataaataatgaatttccaaaaatgaactataatttatttgcaatgcagataggtattcaattaatgtttaaataggtaacaattctccgaaaacaaaccacatataacgtgaatgtgaatttcaatataaaaatttaattccttgttttaaattttgtttccaggtacaaatactatatataatgttctgtttctagaaattctttgcctaagagatctttgtcccatatgaattcgtttttagacaattaatttttgtggcatttaaattttcaattctttggcatttgaggaacaatttcattaaaattattggctcagtttttgagaatggccacagcaggaaaagcttatgatttgacgatgaaaatttgtttcatgcatcgaccgacaattcaaaaaataatgcaaatctcttctgctgtgtgagtttggtgcgataatcccacaaaaatgttattatcacagaaacgacgaaacgaattgtaaaataagattattccatcggacaaaaagagggaaatcaaaccgaaaaacacaaaaaaataataatnnaatctgccggattcaaccagcccaacaagtgcaaaacagcgaaagaatagattacgttattttaaaaaatatatattttaaattaaaaaagttattttttacttggactaatc

SEQ ID NO: 21225 - DNA, 1516 bp, Heterodera glycines
atgcagcagttgaccatttttaccactatcttactctcactcatcgtctgctcgtctctcatttattataagctattttcataagccaacgcccttttctccctcttttctgttagtcatttctcattggtgttgacgatccaacattcagtgtacaattttgttaaacctctcaacattttaaatcaaaatcctaataaaaatttcgttgaatttctccgcctcttatttgtgtaaaattttcgaaaaagtaattttctatttaaaatttaaaaattcagaagcaaattcaagaattttttttattctccttatttttaaaaaaattcagcttttttttttaccacatgaattatgattaaatttttgcgtttcgaattcattttggaattaagaaaaataaaaattgataatcatttgatcatttttagcgcactttaagcaccgccgttaggcagcgcagttccaaaatttattccatgccacagatattatgggcaggacacgccaagtacctcaaacttgggtaattaaaccgaagaaagaagtgcagtggggaagaatgacgcccaaaatgaaggaaatattcgatgctgtgcgaactctttgtgacccctctctgactctgccaatgcagcagttgaccatttttaccactatttttctctcactcatcgtctgctcgtctctcctttattataagctattttcctaagccaacgcccttttctccctcttttctgttagtcatttctcattggtgttgacgatccaacattcagtgtacaaatttgttaaacctctcaacattttaaatcaaaatcctaataaaaatttcgttgaatttctccgcctcttatttgtgcaaaattttcgaaaaagtaattttctatttaaaattaaaaaattcagaagcaaattcaagaattttttttatttttaaatgcattttttaccacatgaattatgattaaatttttgcgtttcgaattcattttggaattaagaaaaataaaaattgataatcatttgatcatttttagcgcactttaagcaccgcagttaggcagcgcagttccaaaatttattccatgccacagatattatgggcaggacacgccacgtacctcaaacttgggtaattaaaccgaagaaagaagtgcagtggggaagaatgacgcccaaaatgagggaatattcgatgctgtgcgaactctttgtgacccctctctgactctgccaatgcagcagttgaccatttcaccactatttttctctcactcatcggctgctcgtctctcctttattataagctaatttccctaagccaccgcccttttctgttattcatttctcattggtggtggacgatcccaacattcagtgtacaattttgttaaaacctgtcaacattttaaaatcaaaatcctaataaaaatttcgttgaatttccccgcccccttattgggggcaaaattttccaaaaaagtaatttttctatttaaaaattaaaaaa

SEQ ID NO: 21226 - DNA, 1049 bp, Heterodera glycines
ttaaaaaaaacttgcagagcaaacagtgtaatggtcttcttgccgatgtgaactttttcttcagaagccctacgctcatgattgggcaaaaacatgcttatgatgacattaaataagctgaacaaagaacatgcaaatacgaggagttgagaaaaaagtgcaaaacaatacattgcgcacgcctgaagctgtagttcgcctgcccaatggcctgtgcatggaaatgttgcctctttaatatgagcacagcattccgcgatgacatagtcaaggctttgttggtccgcgtgcacttaagataaaacagggatgttatacttaagcttttaactcaagcaattctactttgtatccaatacggtaaactctcaaatccaccaccattgtcttttgccacgtcgcagtaagataaaatgtatctgttgagcagaactcgaagacgttgataattcttctcagttcctttaatttagcatattcaaacaccaaaaaaaagaatcatcttcacaaacctgtcaagagcatggacaaagtaatatagccgcaatgaccatgcggtttagtacgaaaaatgttgttttcaaaaatggtaaaccgttgctggagaggacacgcaacaagagtgtctttggtcacaatcactgaagtatgcgttccgtcggatggatttgaagcagcaaaatctaagcaaacatcatgcaaaatattgagccaaatggctcggtatataacgatcacagcctttcaattgggcaatagaaataaaaagcactttttgcatgttcgtcgaaagaagccgtaagtcgtccagaattgaaaacacaacattgcagaccaaaaaaattttgccactttaaacacttcaggcgacaatcgcttcaagtaaacaattccatacggctgtaaaggctcgacaatagcccaggctgcattatagaggactttaatctcttgggatttccaatttgaagctttcttcatccgcttttgccccaaaccttcctcaaaacaaacaaacaaactatttatgttaaaccattcagaacctt

SEQ ID NO: 21227 - DNA, 2003 bp, Heterodera glycines
  unsure (1)..(2003): unsure at all n locations
tgtgcaaggaatttacagcgtcaaacaataaaatgtgggttgagaattcgttcgcaaagnccatagcaatgagaagctgggacttcgaaatccttaaaaccaaataaaacttatgaacaaaaatgtactcaaaatgcttttattacctatctctgcgccggatggaattgttttaggtgcagcatcagaaaatatttcattccaaacgctttggttaattttcctcacaagcaattgatgaagttgtgcagagtcgaatgaagccaatttggtcaatgcagtttcagtcatttttgtacgataccaacggccagcgcggatcagcaacatgctgaaatggagtaacataaatatatatacagtacaaaagtacatacccagcaaaatcagcatcgtccgaaatggccttaccaacggaaacattagctagtgcagtgctctgtgctcttttgtctccgaattctgattcatagtcatgcatggaaggtattgctgcttttgacttgaagagttgcagtctcactagctgtgtcttgatatcgttctgattgtctttgttcagccagccgtgttttatcattgaaaccacgcaatctcttttgcactggagcttagctgtagctgaaagtttaattgccataaataattttttatattttgttgttaatagaaatgtaaaaaaccgttctgctttcccaaaacggtgttctcctgttgttgtcctttctccttcatgaccttgacctccttgcctgatgcttttgcagctgaaaaagttgaattcagtattaaatttattaaaaagaattgtctccaaggcgacccaccccaccccgtggggtggccggagcaagttcctcctagagtcgacccaccccgtggagtgcaaacaaacctttcttgccgtcggatggaattttactctttcccaaaacggtgttctccaaaacggtgttctcctgttgttgtcctttcttcttcatgaccctattgcctgcacgttttgcgttctcttctgaattgaatttcaaagaaaaattgtgccccacaaaaggcgacccactaaacaaaacctttttggggttttttcggcaaaggactgctgtcaacatctccttgtgcaccagatcatttcttgccacggggtttggcaacaggttttacattttcatagacaacatctgagaaggtaacggcttttgtcaccgccgctgccaccacttccttcttgttcgatctttcgggtgagggtgctgcattgtattcgagcgaagcgttctcttcgtcagtgttctctgcgtctgaatcagtgctgttttcacagccactcaaactattgtcgtctctcttgtcatcttcttgatcttcaaaaataaaatttttataattacacgttcaatttcccattaactgtgttaccgtctgttccatcggatggagttttaaaaagaggcgtccgtgcaagagtcatgtctttcgtaggctcagtgtacattgtactgcgttgcatctgcttgaatgctttttcccaaaacactgttacgaaaacagtcttccagtccgtcttgtcgttttcttttttgccgcttctgcaatcatcatttatggcagggtggtctccgataaaatattcattgcatacgaattcctcataagtttgattgcgtccaagcacctaatacacccaattagaacatcaaataaagtgaatgagtaaaaaaaaacataccaaaaccccaaaactctgaagcactttcaccaaagcagcagtttgttcggctttagttcttttactggtgatcttctcacacagtttctcaacaatttcgacattaactggactgttaagtagcagttggtcgcattgatagtgcgaaagaatatcagcctgttttaaaatactttagagttggagaacaagttctctctttgctcctcacttttccggccacgagttctaattcgctcggcttaaccagaccctcatgcttgagaagtgtcca

SEQ ID NO: 21228 - DNA, 429 bp, Heterodera glycines
  unsure (1)..(429): unsure at all n locations
ttgttttttgttgtttctgtatnggagaaaaaaatgttctaaatctgataatcaattaaatgaataaatttttttttgaaaactgaaataatcaattaaaaatgcatacctaatatgggaagggagtaggtcgtcctccccccacccccgccccgtcgtttcccccaaaaaattttttaaatctaaattttttataaaaaaattcctaagaaatttcttagtaagaaaatttcaaaaaaaaagttttgaaaattttttccgcgatttttccaaagtttatgatgaactaactactaagttttttcaaaaaccggtgaaaactttttcaaaaatttttttcttgaagttttcttattaagaaatttcttaggaattttttttaataaaaagtttctaggtttgaaaacatttcggggggggggggggggg

SEQ ID NO: 21229 - DNA, 1463 bp, Heterodera glycines
aaaagaaggcatcaaattcctttttctaaatttcttcaattaggtttcttagatattggaaaaaaattttttttttaagagtagcgatttttaatgcttttttctatgtaaaacattaaaaaaggttgttaagaattttctgttttacgtgtcttttctaaatatttttcatggtctgctcacaaatgatgacgtggcagtcggaaggacagttcaccggcatgttcactataattatataatgtctgattattaatgatgatttggtgaagccgcaaatgtcgggccgcaaatgtccgattttggcttgggccgcaaaatccaacaaaaaagtgttaggtatgcatttttaattgattatttcagttttcaaaaaaaatttattcatttaattgattatcagattttgaacatttttttctccatacagaaacaacaaaaaacaaccagctgtacgtggaacgcatccgaaaagtgcgccaacaattgcaggagcgtcgcccgctgttccaatggaccctcaaggacttcaaccggtgcgcatttgcggaactgctcagctaaattgtcctgcttccactcttggagcagtcggttccccgccccctgcgtcgttcccatccaaaattatgtccgattttgacttgggccgcaaaatccaacaaaaaatttggccgcaaatgtccgaaaatggcccttaataaatgggccgcaaatgtccgggacgcaaatgtccgattttggctggggccgcaaatgtccgggccgcaaaagtcgcgccgcaaatgtccgattttggctggggccgcaaatgtctgagcgcaaatgtccgggccgcaaatgtctgagccgcaaaagtccgggacgcaaatgtggggtaaccaaaccaacacaaactgcagaaaaaagcaaaaaaacaaaaaaaataaataataattttttaaggccagtatccaaatgaaagttataaaaaatctttaaggttgtctacgacacagcgaaagaaaatctgtgccgaaaataatcaaagtgaaattttaaaaagaatgatgccaaaattcctacactgttttaaaggacctaacatttttttttaatttgttgtaacttacattcagtcgaattcgaacatcagcaggcaacagactgtccctgatgaacggttttggcacaatgcaatggaccaattttatccatttgatgctgttgaccacctaaaatggaatattttttgaacagacgaaaaaataaatagatattccatcattttttaaatttcgaaaacttggcattttaaataatatcctttaaatttttggttgtgtttgagacctcttcccacgcgtccgcaaattggtagccgtagggaaaggaaatttccaacgaatcggcactccatgaccacaggcgattggtgtccagctccaattggtgtgcgaacagatcaccgcccacgatcattt

SEQ ID NO: 21230 - DNA, 1568 bp, Heterodera glycines
catttcgtggcaaaaaaaatgaaaatgccaccggggaaagatcaaaagcaaagcaaagcaagtgaaagaaaagttgcatgatgggcttggaatgttaggacgtcaaaagtgtgtgaaaggggcagacaaaaaggcggcattcgatgggtcacagagaaatgaaatgaatgagaggggcaaatgcgagggggggggggcagatcggacgaaaggaacttctactgatcaatcggatggaagaaacttcgattgatcaatcggacggagcttcggctgatcagtcccctcccctccccacgccgctttttgagtttgccgcgacaacagttgtccccccccccatggtcatgttttgttggctttttgatttgagaaattgttctttttaatggggggggggaagaaggccttcctcatcacattttcagatcgaaattgggaaattggcaagcacagcgaaaaaaacggatgagatttaattagattatttttaaccatcgatggcccttttcctgagaacatatttttggcacatctgacagaaaaagcactgccgaaaaaaggcgaaaaggcgagggacagattagtgttctatttttggtgaagccaatttggggagagaatcgtgcgaatgtgtgacaaaaatgggtcggggcacttttttggattggacggacaaaaaaataaggaaaaaaaggaacattttgccggggagcgaataaaatgcttaaagcgactcgaattttaaattcaaaacggggaaatcccggcaaactaaaaactgtccattctttctttgtccattgaaaaattcggtaatttttaaaagaaatttaaaatggcaaaagaaatgccaaagtaataattatgtgcataaacaaagaagggaatgttttaagcgagcttttggccgttggttttgagttccgtttcttttttttgcagttaggaaatttcggaatcatcaaagcgtaagtaacggaaatgcttttgcctcggccgggccaacaaactttggctccctccaatcagacaaccgcaaaacaatcggcggactaagcgggggcaatgacaaaggaaaagccgaccgaccgatgccaatgaatgcttcggcacaaattattgcggtggcacttttggccaaaattggcaaacaaatcccaaatctttcttttgtgttgggttcattttcggtagggaaggaaagaaaaaagttggcgcatttattgggtttaagcggaaatccaagcggaaaatttgaattcaatctctttaaaatgatattttggcataatttttgggtaattattttggtaatgaatgttttctccgctgatttatttctttaaatttttggccttcgttttaaatatttatgccttttttctttgtgtttttcaagtgcttttcgcacgtcaaaagctttgccgtcttttcgtaattgaattttctgcactttcaaagattcgaacgcacaaaataatttatgcaaaattcttttcgtctctttatttaaattgttaaaaatcgaaatgcctttcatgcaaaacaattaagcattcattatt

SEQ ID NO: 21231 - DNA, 852 bp, Heterodera glycines
aaatgtgacaagtgattgtgatttatggttcctaaataaagtaccaaattacaaatgttgtcacgagggaagggaattaatgcgtatactgtataatgctgtactgtaaatgaacccttcactgtaatgtggttgattactgtaatcatcgattggtcgttactctctttgttggatgaaaatagaccattttcacttggttggcctcaaagtattggtcaattggctgtcggtgttctcaccggagcgacggcagcggctacagaggcgggcaaaaggccgcgaaacgcatcggccaaagcattgcgagcggagacgcctaattaaagggtaattataattaattaattacccagatggaaggctgtaattgatttaattagtcgacgggttaaaaaacaacggagaaaacaaatttataaaacgaaaacaatggtaaaaataattcaccggccggtggccatgaaacggacaattggccgaccgatggcttaagcgacggacaatcggccgacgggggacaatcggagggacggaaaagcgcaaaagacgaagactaaacaacgggaagaattctttttcctaccgtttctttcgattttcctaccgtttctttggcctccgtcggcgtctcaaaatttgtcgtcgtttgggcgtgcctttttgcgccttcgtccgtttgcggcatatttcccattttggcgagcacgcgttcgccgatggcacgcgcgtgggagggattgcacgcgggaggaaaagcggacatcggcgggagaggagaagcagcggaggagaagagacttctgctgaattggcattgccaaacactcatcggacaatttgtgttccatt

SEQ ID NO: 21232 - DNA, 1455 bp, Heterodera glycines
ggccgaagaaatggtggcacggagaaatgcctaaacatgggaaacgaaaagcaaatggtatctaatccaaaattttacttaaaaatgaccacacctctgaaattgattgttaaccaatttaattgttcttgacatataaccagaacaactcaattgctttggctttccatcgcttctcggaatttgcaaccatttggtcaatgcttggccagcctttgcatttggcccttttgcatcaccaagggcaacaaatcattggaattgattgaattgatatcgtaaagaattgtcggcgcagtgtagcgaaacaaattttaaagatgaagaccctttgcaaaattcaaatggcgaatgtttggcgcaaaaatgggccaaattccacgggcaaaagcattccaaaatggctggacattcttggctttataggagaaatgcggcacgtgcaaatccaaattgatgcctttgtcaaaaatttgctaattggcacggagaaatgtgatgacggaatggtcaatgtaactgaaaggcaatcctttatcacatcccaggttaaaataagtcaaaaattctttaaaaaataataattttaaaaatcatctttttcatatattttccccgtcttttttctgcttttccgtcaaaagtgtatgccttgctctaccgtttagtaaactatttttctcgatcttcaatgttttaatgagcaaaaaaagatgaaggaccaacggacaaaggacacacaaaataataatttaactaaaatatattttttggcgaaatcaaatcttaatctgttaagattagtttttttgatcatataagtcatatagcatttttctcacagtccaaattgagtaaattagtcacagtttattttttaatctttttaaaattcaaattattattttgttggttctttgtctgttggtcggtcctttgtctttgtgggtcctttgtctgtgggtaaaagaacggcgattgtcaggggaaaacttttgcttttttttcttacgggcgatgccattaaaaaataaatttgcctaaatggaaatttttgtatgaaaagaaactaatgaaatttaatatatattggattgtgaaaatataaaataggaaggtctgaagcttaataatgccatcaacattaatgagcaaaaatgagcacaaaaatatcagatccatcacaatttgtccgttcaatacttcacaattatatttcactgcttaaagttaaataagcaaccagcaggacaaatgggaatcgttatgtctccggatttagggctttaagccattttaaactaccgattaaaagcattgacaaaataaatgtgcattaaaaagtggaactaagtttggcccaataaaatcgatcggtgcaattattcatttggtttgccataggcaaagaaaggggggcaatttgagtaggataagggataaagacggcacaaa

SEQ ID NO: 21233 - DNA, 600 bp, Heterodera glycines
ccattgactaattagtcagttccttatgatgtaattccttccttacaaataaaaaaaataccaaaacaatgaattgcaataaattaattttcatatttttttgttgctgtgattgtcccccgaattttaagcaaacgattaaaacaaaaaatgatcatttggttgtactcgtgtagactaactatatcgcatcaatttccaccgggattttaccttttggtcctttaaaaatcaaaattaaaacgcactttccatgacgtcacctcaaaaagccacaattacataaatcaccatttcaatcacatttaaccttttagatttaccgatttcaatttgtgcataagaaagcattcattttgcctattcctatttttcttgataaatgcaagcgccgcaaccgttgccaaatttgcaccaaattttccaagcggtggaccgcgaccggtccggtcagatcagtgcggacgagttgcagcgcgcgctgtccaacggcacgtggcagccgttcaacccggagacgtgccggatgatgatttcgatgttctactacaacaacgatggcggcatcagttttgcccgagtccaatcactgtggaatgt

SEQ ID NO: 21234 - DNA, 1110 bp, Heterodera glycines
tgagtttttgtttttccctttttcgaaacattaatcagtcattttttgtctgtttttcaaggacacatcaacttcgacgacttcatccaactttgtgttgtgctccaaacgctgaccgctgcttttcgtgaaaaggacaccgacttggacggatggattcgcattcgtaatatgctttttcttctcataatttttaggaatgatgccaaaatagttttattaactgctgatggcaatttatggaaattttgttttttacaacaaaaaatgtagagattttttgggcaaatagcgtccattttgtttagaaaattaattttttttttttttttaatagcgtttatccgggggcatgcaaaatttctaggcctttaattccgtcataagaagaaaaaagatttccgggattttggtgaattccaatttttggagttcgaatttcaaattcgccttttttattttccggtatttcgtaatttcaattttttttttttcacagattatgaggaatttctctccatggtcttcgctttgaagatgtaagtgagtgaaggtaaaaacatttaaattaaatcttttaattccatttttcccctcaccgttcattccaggctgatgatggcctcgcatcgctccaccaaataaataaagaaaatgccgttctgctgctgatatacccatatatggaaatatttatttaaaatgcattaatattactcgctgttacatattttggggttgtcgctttataaactgtaaaattactgaaaatggcacaaaaattttttttgaaagaagtgacaaccgcaaatatactattttctttcctttgttttttgcctgcctttgtttttgaaaagcatatcctttctctttatttctcgttgctttttttcgtgtgcgcatacattttttgcgctgttccccgccccttccgccttggctacgtgactgtgtgcgccttgtcacgggcacattagggtcggcatttttaacaattttttgtgcgtgggcgggcacccttttaggaggttctctcaaagtgactataaaatggaatgacatgacgtggagtgtcataaattcaacgctcaacaaattccacggtgg

SEQ ID NO: 21235 - DNA, 1485 bp, Heterodera glycines
  unsure (1)..(1485): unsure at all n locations
tggaaaccagggctggacgcaattgcggattgcggattacggaaattgcggggtttttggatccccgtaattgcggattgcgggttgcggatttttgggatttatccgcaattttgatccgtaatttgactattggattatttttcgagacgatttcttgtaagattattttttataaaatgaatttttttctatttttatttaaagaaaatatatacatttgtttaaattcttatttctttagcaatttaaaaatgtccatctgcattggagacacgacaaaaaaccgaagttgaagtgaatgaatatttacgggaccaaaaaatcaaatccagggccgatccagcattatactgggaagttaattcacaaaaatggccaatgattggtgccgttgtacggaaatttctttctccgcctgcaacaagttcagaaagtgagaggcttttctcaacggccggcctgatttcagatgacttgagaaagagtttacaggcggaaaatctggcaaagcttttgtttcttcaccataacttgcttctaaccggattttcaattgaatgattttgcttttataaatttgctttttaatatgtttttaaattgctttaaaagatttataggattttttaaaataaaatttaaaattattaaaaaaaaaaattttttttaattgcggattgcggattacggaaattacggaaattgcggggtttttggacacccgtaattgcggattgcggatttccgaaactgagaaaatcgccgcaattgcggattgcggatttccgtaattgtaaatccacttgcgtccagccctgatggaaacacacgttgctacagtaattgacagcggcgaataaactgcaaaattgtgtcagaatttaaaataacaaattcaaagaattatattacaaaataataattaaataatagtattgaagtaaataaaaaatagtttaatattatttgcaataacaaaatatacaaacaaatatgttaaagttcaaaaagtatcggaatatagaaaatttttatattgttgttatattatttattttatttgcaatttatcttacatttgattttatatttttctctgtttcaaataaaaattaagtgtaagtttaatatgcatattttattttaaaaatgaatgaatgtagcaaaccagcattaatttaaaggaaaaacgtttttaatcaacgaaaatttaaccgattaatgttattgaatctattaactgaaaaatcatttttcggtgtacatttataaaatgccaagacatttttctcacgttccaagctcagcataactctaaattccaatcgattggagacggcggttgtgccaaagaatatgtacaaattttgccaaagcgttggcacactgtgcattcaaagcgaaaacaatctgatggnggaggnttaatttaagttngctttgatattanaaatgcaaatatttatttgcaagttagagtta

SEQ ID NO: 21236 - DNA, 998 bp, Heterodera glycines
  unsure (1)..(998): unsure at all n locations
ataaatttagagaaaatcttcgacaaaaagtgatgaaagtgaggaaaataaatcctgtgtttttttaattaattaatttaatttatcgagcaaaccaaaggcacattagtgctcttatatggcgccaaaaagaaacaaacaaataaaattgatcaaattaaaaatacaaaaataccgaaatataaatgaaaataaaataaatcaaatgttaaattcacaggtgattattttaatgtaattgtggcacagaaaatttcctactcagaactcattgcttttagtaaacccctgaattcctttgccttattaatctgcaccgctaaaactggaaggttattccagtttcttactatcctatggaaaaaattattttgagttttggccgtgtggcgctttacccgtaaaagtaaaggcctcctgagcctttctgagaaaaagaaacttttcccagcatcgagcctggtgaaccctttgattattttaaaagctgttgttaaatcattgatttttcttctttcttccaatttgtgtaaactcgtgattttaagtctttccatatattttttgtacacaaatccacattttcgaaaagcttttcttgtgaaaaatttttgtacccgttcaattttgtctatatctttttttaaattagggttccaaacttcggtagcgtattctaattgaggtcgtacaaaagttttataagctgctgttagagtctttatttccctggtttttaagactctcaaaatctgaaagcttctaagatatgcgtttcgtataattttgcttatgtgttctgaaaaattaagtttcgagtgcattataattccaaagtcacgaacattatccgattctgaaatcttttttgagttaataaaatattcttttttcatattatttttccctaaatataaaancaaaacatttttcagttgaaatttctaacccatttattttagaccattttccaaagcctcaattgctttatccaactg

SEQ ID NO: 21237 - DNA, 1799 bp, Heterodera glycines
  unsure (1)..(1799): unsure at all n locations
ttctgttcgtttggggcattgaaccaaagcgacaaataatggagaccagcagacagaaggtttagccactacaccacataagcatgtgaaagaaatactttaagtaaataaattttttttctcaaaatttgtccttctccagtttcattctcttttcacacctgctgacgcccgttcttaccagtgcatatttagtcccaccgggactggcaaaaccgggatttcccatcccggtcccgtgcaactctaatttaaatttcaaatgctcgagtgaaattttcttaattgtcaaaaataaaaatttcgaatgcatagaaaatgaaaacgattgatggtcggtgacgacggtaggggcaaaaacgacgattgacatggacgacaaaaaagataaaacgagttcatttccctccccgcgggaaaattggtaaagttagacccaaattatgtggcgtggcgagacagcgatgaattcgtgggaacaggacaaaatcactccgctagaaattaaaaaaaaaatttttaacatagaattttttcaagaaaaaaatcttataaaattttttaacgaaaatttaaagaaactaaaaatttgaaaaactttcagcgtttttttttgaaattttataaaatattgtttttttcaaaataatttgtaaatgatgggcaacaacagcagatattcaaataaaattcattgtttttcatttagaaaataaattaaatgaattgagttgaccgttttttctttaattttcaaatagtgaaaccccaaataaaagggcaatgttaaattcgactataactcatcaacgaatttatttgtcactggagcacgtaagtgttcagggcttaaaataataaaaaaaattgagggcgaacgaacgtatgaaaagtcaaaaagacaagaaattcctgcagtttgacacgaactcgagaaattatattttcccatttgtcatatgtatttatttaaacaaaaatgagattcggacaaaattgataacaacaataataagatattattcattttaaataagagagatccattgaacaatattggtaacaaccaattaatatgctattcattttaaacatttaaataatatgcccatagaatgctgagatgtgtgccggaatgtccacactgaagccaatggaaatgatcacacctgcaatcaccacggggtcctgctgaaacaatgaagaaatatttaaactaaaattaatttgtaaatttattttttaatgccaaaagatttatggttaaattcaaatgaatttaatgaaaatggcattttctcctagcattaatccgtcagattggaatatatataggaaaaattgttttcaggagctttagaaagttcacaaaaccgggaatttaacccgagagagtttgggtcagtattaccaaaggtctcgaggttgaaaataagaaacctttgcacaatgccaaaaaaatgctttaaagaattttcatcaaaaaccatgctcatgattggcaagatttcccaataaattaaataaaacaccaaaaaactcacaattgtcagtccaatcattaaatttagtttttatttgaaaatttaaattgcaaaaaaatccataaatttttcaatttctttatcggagaagccaatttacgaaatggaaatataaatgtattttaatgagggcataanaatttaaatanatataatgtacataattaagtaattaatcaangataaaaatatgcaccatattttcgagcagacccagaagagaccgaagtcatggagcacggacacattgaaatc

SEQ ID NO: 21238 - DNA, 1665 bp, Heterodera glycines
tctcctcagctggttcctggttgctgctgatccgcgctcatttcatcgtccggtgaaaatgactcaaatgcttcgaaagcacgcgggaagtaaatgctgctttctctcgggtaagcatatggtctgtaaaaataatttattgcttttaaattaaaaagaaaaatttattttttaaataaaaattttttaattcaaaatttaaatgaattttcagaaatttaaaaaatttcctttttaattagtagattttgaagtaaaacaattattttaaaaggtataatatagagaaaagacaatataattgtttatttttattatgaatttattatttaaaaatttatcaattaatgaatttaatttataatttaatattattgtataatttttttacagatgctccatttcgtcgatgaactggtgaagcttgtgtcttctggtcgcatttgacaaatcgcctgggttgttcacaaaaatttgtgccattgtgtagaagggcatcaacttaaataaaaagaaattaaataactaattacttaattttttataaatttctaattaaaatattaattaaaataaaaatcattggtattttcactttgtcttcacgatagttgtccacttccagcagaggcgagtctggcgggaacaatttgaccattgtcagattgatttcgaatccgagcaccgcctaaattcaaaaaaatcttaattgtgccaaattaaaattaattaaaatgtaccctaaagcaaatgacgaaaaacactgccgaaacgatgacaatgccaatggaggcaaaaatgttcgaaacaaatttgatgtatgcgttggcgatccgttcaaaattggaagtgaatttcgcgcgtgaactcgtgtcattgtgctcatccgaatttgaatcggtcgatgaaattgtgccggttgcgctggtcgaattgctgttgtggttctgctcgatgcttttcaattctgccttgaattccaatcgtgcgcaaatgatcagcacttaaaaacaattaggatttttaattaattaattaattgctttttaaatttaataatgaattataggcaataaaatttttaaatttaattaattaattaccggcagtgaacagggtaatttggtagaagaaatcaaacgaaatcttaaatgggggtgaaaaaaattaaattgataataaaaaaaatatgaaaggaattttgaaacaattaaaaataatgaatgaccgattattttttcaatttttaaattccatatttaaatataatattttcgctatttttaaataaaatgcatattaatttttcaatatttaaacgcaccgatgcgatgtttccaatgcagagtaaagtgatttcgggcgatcctgtccacatgccgaccaagtcggacgtgatgttggtaagtgctgagatcagaattgcaggaccagtgtcttccaaaaccttgaaaatttgaattttacaaaaatttacaaaaaaaatttattttttaaatttccaacctcggaaagcgagttcagtaaggagttcatccaacgattttgaatttgttggaattttcaattcaccattttttctcttgcgtttgatggtcaattgccaggaatgaattgtcaaaaaggcgtcatcaattcctattttaataattttaaattatttta

SEQ ID NO: 21239 - DNA, 2399 bp, Heterodera glycines
  unsure (1)..(2399): unsure at all n locations
agtaaaacacacaaaacataaagaaaatgcgntcgacgaaggggtccgatcancaataattcacaggacggcattcgtgtgcgggaatggcacgaaaaagtcttatgttcaacaaatgtgcaacgntcgcttacaaaaactaatttgcaacgaaatattgttttagattttagactgcattagtattttttttatttgcctatttttcttttttcttgatgtggcacatcgctacccttcggcgatggcattttcttgtctttttgtgtcttatactgtcagattgtccactctccgatcgtccacctctgtcagattgtcctcactgtcggattgtcaactgtcagattgtccgggggccgcataaagcacgatgaatccgtataataagtagagaccggacggggccggctggctttaccgggcccagaattagtctaaaccagatcccggtcattttgacagggctaaaacgggcttaaatttcgccagaactgccccatatttgaaaattaatacatacatattacaaactttaagaaaattaatttatctaaattttaaacaatttgggctaaattaaaatcactcgattttactataagtaaattaatcccaagctaaaatagaagactaaacaattttttttaatttataaatcaattttccaaaaatttggaaaaagcccggttccggcgggcacctggccaaaattttgggtcgggactcttaaacaataaactaatacaggtaatcattttgtagtttaattgaaaaaccttggtacaaaactttgaaaaaaatatacatgatggaattcactcaaaattgcttaatcagacattttagtaataaatctattatcaaaagcagccgactttcagcttgtccgacccaaaatgacagagtcagggttagcttcagctgggtttaacatttactgctaacagatctgaatccctttgaaatacttaaaccttctaaacgctttaacattcccttttatagacttaactcgaaatataaattaggcaaaaaatttataccttttgcggggcgggtaacaaaaatttggaaccaactcgataaaaagcttattgaaataaactcattaaatcaatttaaaaataaaattaaaactatttcatttctgtaagattgaccggaaaaataaaagtcgaattattaattcattaaacaaaaagtgatttggtcattatttttattttttttattgatctaacattatattttattttttggcggcgatctcgtttttaattgtttatgcgctttcttgaggacattttaattaatgttttgtcctcaatgtaagcggatttttcccttttgaggactttttctttattgacaataaataaataaatacattggagtaaataaaaagacacaaacaaaaaataataaattaaaattttcagtcgaaattttaatttttgaaaatttgatcagcttgggccaagacttttttggggcactgtatgctttggctttttgttactttttgaataaaatttttgtaattttacacaacaaatttgaggaagacttttggatttttaatgcatatttatggttcttttagagcctaaagcctacctatgggcgccgctggggaaattttttaaaaactatgctaaatttgcttgcgaaggggtcccccattttggagcccattacgagcgagggatgggtgaaccggaaaaatcccgtcggtcccgatccagtgcaggctccaatatttttgtttaaactcccgtgatttattgctaacttggtagtctctcttttaaacaagcatcaataagtaaaatttatgcataacgggatacaaaagcaataactgaaatcaacaaagtgaaaaatcaagtcctcgaaattgttttcgccaatgaataccggggacccggaatgagacgttgcaaggacaaatactgctggtaggtgccgtaactcatgttgttgtcggcatgcacgttgttctggccgttgttctcccgtcttgaccttttccccgtctgagggtgaagcatgtggacaatccccgcgtttgttcgcattttcaacgggtattttccggatgtgttgttgttgttggagatgttggtgctgtttgtgttgttgttgttctccaattctcccccagcaaatttggtccctttgtgtcgcgtgccatcccatggccggttaattcgtgcgcaagtttgcgaagcgtcctctttttcgtccaccttacgccaccgccgaactttcgaattttgcggagaaaactgctgattttgaccgtccatcaatgttggataagagatgcgcagnacagatcaggggttgagatcctagaaagatattttanatgatttaaataatgatttttaaaa

SEQ ID NO: 21240 - DNA, 1242 bp, Heterodera glycines
cagaatcaaaattgagtggaaaattgggagaattttaggcacaaatcgaaataaaatatacaaatggaaaaaagaattaaatttaaataaaaagaaaatcaacagcatgaaaaagagtttttataatgcaaaaaagaaagaattcattgaaggatttgatgaatttaaaagtttatatggcctcggaaaacagaaagaatttgtgaaggaattggacattgataaaaagacatttataaattggaaaaaggaattgatgccaaaatataataaaagtacctaagagaaatttttatttttattttagatttaaaatgtttttaacacaaaataaatattccaatgagcaaaaatcacaaaagctgaagcaatattttgaaatcaaggaactaaaaccaacaattagtgatggaataatagccgagaaattgggaatcggattttcaactataaaaaatgggttttggaacattgatttttgtgaagaagtttatgctattcgaaatgtgttcgttaatgttaaaattaatttttgttttattttgttttttttttgtgaccaaatggcaaatatttaagtggggttacaaagcctaaaattattataaatatgatttaattaatttatttatcaaatttcatgctgctcgaggtgttgatgcattaattaaatatcacagaaggtacgaaaaatggaaaaaataaattccataaatttactcaaaaacttcaaaaatttactaaatttggttattagtgattttgaaaaaaatttatacagaaaacgcattgcatttgtaggtcaaataaagcttgtaaagaatttcatcattaggcagtcctctttttcaatttgtttttccgtaactccaaatcacggcatttaattagcgtaattttgccgaatcgccttaaatattcattcgccttaaatattcattcgccttaaatattcaatgacaaaaagaccctgccccgaaaccgaatattctccaatttcccaaaaaaatggtatccaccagttaattgactcgcaaatgacttttgtcaagactacagtggaagcattgaaacaactccagacctcttttacctccgaccaaatgccaatttttaataccctaattaccctttgtcctctcaaattgacctgcttaatggatcgatttcccaactccgctccactgctctctccactgaaggcatgccaatttcagcggaggaattggaaagacagagaag

SEQ ID NO: 21241 - DNA, 2137 bp, Heterodera glycines
  unsure (1)..(2137): unsure at all n locations
cccccccccccccctctctcaatgatttgccattcgttcttcgtcagctctcgcccaaatggacgcgcgtgagtcgggtcaaatgagtctgttgaccgtcggttactacgtcatcaccacgcttttcgccaccgtggtaaagccaaacaacaaaaaagcataagccgtgtcccccgttcatttgtgtctttccatttcatacgggtgttctgctggtgatggccatccatcccggcgacccgtccatcaagcaggacttggcctatttggaggtgcagcacacgcccatttcgccgctggacacttttctcgacgtcgttcggtgggccaatgccatctctcccatgcctttttggcacttttccgacactcttttcttacaattagcaatatgttccccgaaaatgtcgtccaagcgaccctccaaagagcacagacaaaatattttgccccgagaagaaacgcacagcaaaaaacacaccaaaagcatgaaaaaggtgattaaaggagaggaacggaacagagcaatttccattttggcattgactttatcgttttttaaagtgttcgataataatttggactccaatcggtcgataattacttaccgaaaaaagatcgagagtgtgaatggcattaatatcctcggtgagtgtcccccccccctttccgttcggcacccccccccccccctcttttggcatcatcgttttctgcaccggctttggcattgtcatttctcaattgggccaacgagcgcacatcatcatcgagtttttcatcattctcgaggcggtcatcatgcaattggtcggtgccttcatgtggtcagttagcactcaaatcacagtgaaaatgccaattcgatgcattttgcattagtcggtttctctccagccccaatcgcttttcaggctgacccctctgggcattgtgtcgctaattgcgggcaatttgctcgagttggacgacctcagtgacaccgcagcagtccttctcctttacgtagtcactgtgctgacggcatttacagcccacaccatggtcacaatgccactgctttatttcgtgttcactcgtcgcaatccgtttaaagtgggccaatgaacggcgggggggggggaggagggggtactcacgcggcatttggcttgggcactttttggacacttttacggcataaattttgtttaatttaatcaactctcatttttcaagtgaaactaaggtcgtgcattgtgctgcttttgcaactcccttacaggtcgtccacggcatgctccaagctttggtgaccgccttcggcactgcctccggcggtgccgctttgcccgtgtccatgcgctgtatggaggagcatttgggcgtggaccggcgcatcactcgctttgtgcttccgctcggctccaccataaatatggacggaaatgcgttgtacgaagcagtggccgtgattttcatagctcagctgaacaacgtgacactgacactgaccgaagtgatcacagtgaggcgagtaaagtgaagtgggcaaagacaatggcaatcgatgcaaaacagggagagcgctaattggtctaattatgggcgaagggtcgggtaagaacagggaaatatgtaattaggtattacgggagaagacgtaattgggcaatttcgagtggatgtgggtaaacgtgttttaactgttcagtttcattgctaccatcgcttcgctcggcctcaattctgtccccgctgggctcgtctcgattttcgtcattttgtccaccgtcggattgcccgtcaaggacatccctctgatcattaccaccgattggctactgtagggtgatgtgcccaccgtatcggtccctttctgtgtagtgatcgaattcggacgagtatcaacgtgcttggcgatgcgttcgttgcttcgacggtgtcccattatctgaaggaccgtttggaggagtccgatcggatcaatgagtttcaacagaccgtcaaagaaggagcaggtccctttggccttctctcttttccgtgtttagccatttttgcttttctcttcagatttgctctcggttcactctcgaaaggcttcggtggcacggaagtgaattgngcattcccagccgcacccattccaccgatg

SEQ ID NO: 21242 - DNA, 1239 bp, Heterodera glycines
cttcaaatcgaacttttttttcaaataaattattccctcatcttttgtaaaaaattctgctgctttgttctccgcttacactttctttagaaaattccttttaatttggtgttatttgatctcactaaatattttcgattactcccgtctcatttaattgttgaatggatgactttcgaaaactcgattagacaaataaattaaaatttgaaaaaagggaaaagatagttaaaaaagaagaatacaatattgaaagaaccagaaaataaactaacatctccagcagatttgcacctttccattcgcactgattttatctatgacctataggtagatagatgtatatcctttaggatatatttgcatttctattggcctgatgatttagaatttcttgcgcgttttagtgtaatgttaactcgtacaaaaggcaacttgtcaaatagcttaaactgggcctaagctttaggcttaggcttaagcatatgctttactttaaatttttttgtcaagttgcctttatacaaatttttcaacgttgatttttcgggtggagccaactgaaattgaaagttaagcaatgaatttaatattttcattgtgagctctcaaacgatatagtaaactaaaaaataaattcacaactgcacaaaagtcgagggaaaatccaaattgcctattttgattgtggacaattttgggaaaaaatcagtttggaaatcagccaactgttccattcggccggaataactgatatttttaaaaaaatcgtcgctcgtagcgcagaaaaatacgccctttagaaattcaaagatgaattccatagcagtgataaaattatgtataaaaaaatacaattgtttttttgacaatttcactatttttccatcgccactcgcgtgccgtccttaatcggcaacaatctgtgcctatttactcggtgtttatttgccttttttgttaaatcatttgagtaccggcaataggacgtggcgaaaagcaaggacagcgaaaaaggtgctaggacgaagtgagaaaagtatcaatgttcataataattaaatttaattattattttaatttaatttgctaaataactaatcataacatagcttatacttagtcaaattaataaaatttagtatttaacgacagctccaagtatcctctactacttacatatattttttaaaaattattaaaaatttacaaaaatttgtaaccaaaaaagtacgaaaa

SEQ ID NO: 21243 - DNA, 1829 bp, Heterodera glycines
gtttttgcgtggccattgtcgcgtgccgtttttcaggtggggacgttttcgcgaggccatttacgcgtggggtacgttttcgcgtgagtacctgttttggactgaaattggtcgtatttgtgcaaagcatccatgtttcgaatcccgaacccgaattcggacaaatttcttaactttttaattttttttatttcttgcggctagtatcttctacaataatttgtcagcttggtcggatgtgcgtcaaacggaaaaaataattaaaattttataagaacacataaatagtataacaaaaaataacaaatttcagaacaaactaaggtcgcatttcatagtttcgggaaacaccagtgagaaaattgttaacgttttcgggattcacattgacatttgcataattgtgtcattttgggggaggtgattgttattgatgtcgttataacggtggacgagtcagagaatccgtgcgtcggcttcgcgatacttcttttatcgtttgatcacctaaaaaccaaaaaaataacaaaattgtttttggatataaacccactttttttgtggcgcttttgctcggaaaagctgctagcacaggtgtgcatgttttttgcagcacttgagcacgaatagtcgcaggtgcttcgcacgtctcagcagcacgtcgcttgagtccagttacaagcgtgaccggaaaatcggtcagtggaaaatgcgtcagcagaaaatgcgttagtgataaaaatattttaatattaagttatgtagtattggtattgtaataagaagtataattttataattatcgttctgaatttcgaaccccgaacccgaattcgaacaaaaagtcaaagtcaaaattttcgaaattagagtttttcttcaaaatcggtttaaatacacgaaaacaaactgacatccatcaatccttcaataagcaggggtgcgatctgtcctgatttggaggtagcgaccaaaatttgtcctgatttcttaaataaacccacatttttgaaattttatggcataatgtcactattttatcaagaaaatataagatttgtggcaaaatttagttatttttgacaaaaatctgttaacaagttgattaaaaatcgcaaaaatttttccctgcggcgcctatcggcaccgccggatcctccgtccatcctccaaaatttttcgaaaaaatgcgccgcaaaaagtgtttttaaagcaaaaaagtcgtcgcttgactttaaagttttttggaaaaatgcgccgcaaaaaattttcaaaaatctgattttttgggcccgatgtcctgattttgaaaaattttcgatcgcacccctgtcaataagacatcagttattccgtttttgaaccaaaaatgctaaattggccggaatggataccggattcgtggtcagtgacctcgaaaacgcaaggaacttgtttttaaggcaataaattttcgctgacgcatttctgctgacgctttttccactgacgcattttccgggcgccaattaattaatgcacagcgcaattaaaaatgcttttagcaaaagtgaatgagagtggcggacaaagcgagcgaattcgagacccaattgaaatcggcgacgacgagcagcagcaaatggtgtgtggagaggctattactgtgcgatcgatagttgataatttttttctaaattaaaaaacctaagaaaatgacagaatttaacaatatttttaagagttgttttaaatttttttataatataatataaactttattaaccagggctcccaagtgtccttatttctaagatttttcttattttcaggcttcccctaatttttta

SEQ ID NO: 21244 - DNA, 3033 bp, Heterodera glycines
  unsure (1)..(3033): unsure at all n locations
gaaaaagtaaaaataaaagaagaaancaattgaattaataaaaaacaaaactttttaaaagcacataacaattgaattaatctcacagcttgagaactgataagtcgagcacaaatgatctctaattcttcaattttaattattttttccttttcaaattttatttttgatttcaaaagttaaacattcgttataaaaaatgtaataattacatttaattcctgtgtatttcacttaatttttgagtctttttcaataatcgaaattcaactccccgaggggtttcaaactcctcctccgcagtccgtgccatgccaacgcatcagttcccaaaaagcagtaaagtcgcgcagccaattaggaattttccctactatgggaaaacggcgcaattaaaaataaaacatttctgactcaccggacttagtttcggatgaatacctttgctttaactcattatgatgagcgcttcatttgctgaaattggcgaaaatgccggcaaactttggtccatcccacagagatttgagaaaaaagtgagaaaaagtaattgaattgggggtggattatcatcagaaaggcgtggggataaacaaacatcaaacggcgcgggagaggctttggccgttttgtatgcagtgactgccgacactgaggggaaaccttttggacttttggcatttcccttccgtgccattcccttccccacccgaccgacaccatttttcgatctttcatcattgggaggatggaaaaacaccatcccaaaatggcaaaataacaattaaaaatttgtaaggacgtactaatcagagttacttttgacatgatatatcaaggacattaataaaactgagcatttaaaaatttattatttcattaatatccatttttaaattattctatccctattttttcagtttttagggaatcatttggaaattaacttatttatgctaattacagaaccaattggcatttctgttcgctttttgtcttgcgcatagcaataaaataatgcaaattggcatatttgtgaagaaaagcattcctgtgccgtgccgtttttgggggtttttataacattttttgctttttttccttatttaattaagctatagtccgtttttccttttcatatgaatgactttttacatcattttttgcggcgctcttttttaaaagaacttttcgggaatagggtacggcggtgccgttaggcgccgccggggaaaatttagaaaatttaagtgtgatttgttaaaagattttcaccaaaaaattaccaaatttggcattttgagctaattttttaagaaaaaattgatggttttaggtgtctccgggtgaaaagtgtaaattttagccctatttattaaataaaccataattattagtgttgtaaattatattgaataaacatattttttctgcgcatatgctatgaagaaaggggctcaaaaaatagcatttctgcattaaaattttttgatctgatgaaggttttagtccttataaatccatattttggcagtttttagtccatattttggtccaaatttggccatttttagctttttagtccatatttcgtgcttttttagtccatattttatgtccatatttcgcggtttttagtccatataatttacgaccctaatacataattactagggacgtgaattttaggttttaactattttttttgctcaattgatttgaagaaaggagctcaaaaaacgcatttccgcataaaaatttttcgattctgatgtcattatcggtcactagaaatcactattttggctacttcgtcactaaaatagttaaaaatcactattttgggattttgtcactaaaatagtgaaaattcactattttggagttttgtcactattttgacatttttgggcaaaattccttaacaaaaatgcaataaaaccaaaaaatacacccctaagaatcgacaaaaaaaatttcaaaaagcactcctaagaaatgaaaaaaattttctcaaaaaggtattttcgtggcaagaattttaattttaaaaattatttttttatgtacctattttgtttttttgcccttaaaaatcccagtcctactcatttgcaactgcaatcagtgaataaaaattatttttgcttaatttttggctgaaaattatgtcactattcgtcactatttcggactttttgacactattttggcatttttactcactattttagttaactatttcgggatttttcgtcactaaaagttgcgaccctagtgaccactgaccatttgcatctgtccattgattgttgtcaatggacattaacgcacccgcaaagcctaattaaccttatctgtggaaccaaatttgccttaaaaagtggaaaaaaaaattcataaaatttacgctttttttttgaagaaattttacaatcaaattgaaaataagactagatttttttttgcaatttttgttgctaaaatatgtaattgcactcacaaagcaccgacttttgttggtcaataaacattcaattcttgcgacaatcgatagaaaatgctaatgggtggtatacaaaacccaccaacactcactcactcattcattcatttattcgtcacttcccttttcttcctcttcccttccagcagaatttttgcactttttcatcactgttttataggacaaaggacggacttagtactgttttgggttttttattgaaaaatttgtcatgcaacaaaaattaaaaaataaaatatgtattaatagggctgaagtttttttagctatgaaaaatcccaaaaaagttaactaatgatgaaaaatggcaaaaattagtgacccaaattttaaataatcttaaataagaaacatttttttcttaaagggaaaattaacaaaaaaaaatgatgtcctaataataagggtggaaatttaagtcactaaaaatcttccaaaagtcgactaaaaaagtcataaaaatcccaaaaacatttaactttattcccagccctactaatcttttt

SEQ ID NO: 21245 - DNA, 2059 bp, Heterodera glycines
caaaaaaatcgattttttcaagtttccttttggggttctcaaacatttatgggaacaaaatccaacgcagaataaagttcagggtataggaagcttctccgaagggttcggtctccccaaaatctgggcgcatcggttcgggggactgcccgaaaacaaaaaaatcgatttttcaagtgtcggttggggtactcaaacaattatggggagcaaaaatccaacgcagaattaaagtacaggctatagggaagctattccggaaggattcggtctccccataaatctgggcgcatcggttcggggggactgccccgaaaacaaaaaaatcgattttttcaagtgtccgtttggggtactcaaacaattatggggagcaaaaatccaacgcagaattaaagtacaggctatagggaagctattcccgaaggattcggtctccccataaatctgggcgcatcggttcggggggactgccccgaaaacaaaaaaaatcgattttttcaagtgtccgtttggggtactcaaacaattatggggagcaaaaatccaacgcagaattaaagtacaggctatagggaagctattccggaaggattcggtctccccataaatctgggcgcatcggttcggggggactgccccgaaaacaaaaaaatcgattttttcaagtgtccgtttggggtactcaaacaattatggggagcaaaaatccaacgcagaattaaagtacaggctatagggaagctattccggaaggattcggtctccccataaatctgggcgcatcggttcggggggactgccccgaaaacaaaaaaatcgattttttcaagtgtccgtttggggtactcaaacaattatggggagcaaaaatccaacgcagaattaaagtacaggctatagtgaagctattccggaaggattcggtctccccataaatctgggcgcatcggttcagggggactgccccgaaaacccaaaaaaaaattttttggataaaaattatttaaatgaactgactagataatatttaaaataggttatttctcttcctttcagtggcggtcaaagtttggtgcgcttctgatcagtttctgcttaaaaagttaagcctaaactttttggcctgtttaaaaaggaattaaaaatttttaaaaattttattcatctccctttttgatagaaaaagcatcagagtgcctaaactaacatgtaaataaaatttggtgcgtttcagaaccctttctgaaaaaatatttaagaattaattttgcaaaaaataaataaaaacgaaagactcagattttcgaaaatttttttgagccagctagctcggcgctcatttcagtgtaagttagtcctttaccggggagtatccctgcaaagtttggtacgcttctgctcaattagcaaaaaatatgagtgatcgaattttcactaaaaaagttaagcctacattttttggcatatttaaaaagcaattaaaaaatttttaaaatttaataattttcctgcaccgaaggtactcactcggcctcttcgcggcctcgtggtgggccttcgcccccccccccctcccacgcccttcagagcacgacaaatatttcaacaaaaattttgaaaaattgactagagcaatcgaacgctaacggacgacctaatggaaaaaaatccccgaaggagagaatttaattaaatccattccttcgggggaccgtgccgggtgccgcggggtaagcagtgctggttcgtttcatcacggcaccgaaccttttggctagtcagcaatcgttgcttaacttgccagatcggacgggtgcgcatgattccactgttccaagcaccccacccaaagcaaaacgatataaccaaaatataaagaaaaattttttaaaaaattttttctccatcttcctttttgatactaaagcatcagagtgctaaaattaagttgtaaataaaatttggtgcgctttagagcactttctgaaaaaaatatttatgaaaccaaaaaatcgattttttcaagtgtccggttggggtactcaaacatttatgg

SEQ ID NO: 21246 - DNA, 1215 bp, Heterodera glycines
ggccataaaatgcatttggctaattaggagcaaaaaaattttcatgaaatgcaaaaccatggggtcccccctatggttttgagtttcaaaatcacaattaattttataactttttttaaactcatggtataaacatgagataaagcacattagattgggcttaaaattctctacaaaaaagctcttagacgatttttttgataaaatcaactcctgacgagttattgcgccagaactgaaattgaggcctagtaaccaaaaattttctatttccaaaaaatttttgaaaaatttttctgaaaatgacaccaatcgatagaacatgaaaaacggttgcttgaaagtggtctccgttttcgctggaaaaatctgtaaaaaataataaaattcaaaaacggaaaattttcgagggggcctagctcgaaaatttctgaaaatttctgaaatctaaaaacatggttggatagagctcgtcgagctctacaaaaaagccgcttacaccgacctcctccggtcaaaccccggcgagttattcggccggcgctgaaatggccaaaaaagtatgcaatttttgcgcagtttttcggaaaaactggtaggccctacgaggtcggtgaagagcaaaaagttgtgccaaacctcccaacttgatttcctatcgaggccgatttttcatttaggactttaaaaaatttttgaatcccaaaaacagcaaaaaaaaatttaaaaaagccgtttcagcgccgctggcgctcagttggccctcggaccggaatgcctatagttttcctggatgcgccgtcaaaagttgcccccaaggtcgaaatcccgagtccctcccgccagcggttcccgagatttttgttttagcaatgagttcatctgtttctttagtagtatataaactagcgggtgcgtgaaccgtcggctatttagctgggaaaaagcgcttcgcgctttgggagcttcgctacctaggctgtgaagcgattcaaattgatcgatttggttggagagatttttttgaatttttaaaaaattattagaggcttttagtccacatcgaggctcaagacgggcgcttcgcgcccgttttttaaatctgttgaacttacacgggcgcttagcgcccgttttttagcttgttaggcgcttcgcgcccgtttttcaatttttgttggccttggacgggcgcttcgcgcccgtttttcaaat

SEQ ID NO: 21247 - DNA, 1994 bp, Heterodera glycines
gcagcccttcttactgtaggtagaggcctggaattttctttgacttgtagaaacgacttcaacttggcttcctatcagcggaaactttttgattagagttctagaaaaaaagttatgggccttcgaacgcaagcaagagtgagaaattagccgacgggactcagttggccctcggagaaaaaaacctatagttttcccgaattctcctcaaaaagttgtaagacccttccactactttcagaccacggccggccttcgccggcccggaatattaagtttgagatgagttgccttatcattctaacgtatatataatttagcaaataatctcttttgatgattaatggtagtttcaaatacagattgccgcctttataaatttatgtcctcgtacttaataatacatttaaatttagaaaaagatgggtaaaaaagaaattaaaattaaaattattaatctagtatatttaagtaaaatatttgagtatcaaagaattttttgaataaataagtttgtatttaaaattttttgggctgtctgtggggagcatatcaccagcataattatttttattcttagatattttaaattatatatataatttatttaaaatattttttacataatacttggtttattcattttttttaaaccttttgtatatattaacatatttaaaaaaaattaatttattcagctttttttaaatttattaatagataattgctgaaagaaaaatataaaatttaatttgttcttttatgtaaattttaaattactctaaaagaattaaataaagttgtttttctttgcttttttgtttttaaattaaaaaaacgcagaaaaaaaaagaaaatttattattaatttttttgtcgaattgtaaatcattgaaataaaagtaatgaatttctactagagcctattggtttaatcacataatatttaagcctccaaaaccaactttaaggaatttgttgaattattaaaaaaataacttacaaatgaattcattgaggatggagtttttcctttcaaaacacagaatatgttaccaattaataattatattaatttgaattggcctggaccaggacaggaccgcacttttcaaaatcccgacccaaatggccgggaccggtaccgaaacttttgaaatgggaaagggacaaaatcccgggtccgaaactcccttttgccgggaaaagtgaaagattaactgattggttaaaatgccaaaaaggtgaaagatgtgaaaggtgaaaacgaaaccgcgccttattagggtcatatttttacattttttactatttattttaaaattttcaaaatcttaattagtagggctgggatttttatgttttaacatattttttttgcggcttagttatggcgagagaagcccaaaaatagcattttctccgaacaatgtttgatttagagcgagttataaaaacataaaaacacatattttggcgttttggcacataaaaacatatggcacatatttcggggttttggcacatattttggcatttttgagaaaaatcgtaaaaaaaatacaagaaaatctgaaaatgcaccctaaaaattgactactttacgtttattaagcatttagaaaatttctttatatattcaaatgcctaaagcagccaaatcaaacgctgttttaaatcgtcactggatttcaaagttcccggaaggaacttattcaactgatggaaaaattaatccgggactttacaaattgattgatatcgccaaaattttgattggaggtcgggcgaaaattgataaagactgatattaaatatgattttttttgcgtaaatacacttggtttttccaatttttagcacatatttttgcattttttaacacatatttaggccttttttttggtttttagcacatattttgggtttttttagcacatattttattacatatttcaggatttttagcacataaaaatcccagccctattaat

SEQ ID NO: 21248 - DNA, 1946 bp, Heterodera glycines
agtgcatgtgctaacgcaattacaactacaccaatattacacatgaatggacaaaagcaaattactttatttaataaaaatttggcaaaattgttaaaaaaaattcaaatttgtataatttttttcttttctctcacgaaaataccattcttaggggtgtatatttaaccccgaccccgagtcggggttaagggtcggggtcgtcggggttggaagcgtcggggttcgggtcggggttaaccccgaaaaatggccaaaattttcggggttctgggtcggggcggggtcggggttgcaaccctactatagaatttaaaggacatgagagagagaggagaggagataggaaaagagagagagagaagggtgaaagagagaggaagaacgagcgaaaaggagagagagagaggaaacggtagagagagagtgaggataggagagattagaggagagagagtgaggagggaagagaggaatggagggagagagactgaggagaaaagagaggaagggagaaagagggaagagagagagagagaaaaggagggagagagactgagagaaaagagaaggagtgagagaaagagaggaggagaggagcgaataaaataatggttaaagtgagagagcaagagagagagagaggaaaggaggaaaagagactgaggagaaaagagaagaaagtaatgagagagagagagagagatagaagagcggaaagaagagagtgagagagagagaaaagtaaaaagagatagagaaaaaagaaaagaagagagggaaagagaaagagagagagagaggaaaagaggaagagagagagagaggtggaggagagaatagaagaaaagataaagagtgagcgagagaataagtagagaagataggaaaggagggagagtaaggagagaaaatagggaaggagggaataagagagaaagagagaatgcaaattattttctttaactttttaaaaatcatttgagaataaaaacagagaaccgctcgttatggttaaaagatattttaaagaaacttaataaaagataaaaaaattaatttaatttaaaaatatcacctaaaaataaatattttattatcctttaaaatattgtttaaagaaaaaagacaattaaattaaaataattaaaaagaaaaaagtcaatataattattattaaaagaaacaataatttaattaacggaagctgctaacgcaccgaaacaaacatcgctttttcaccatgagaataaaaagataaattgttgaaataaaaaattaacccgaaataataatataatatttgtgatttttaataaaaaaataaataaaacaataataataatataatttaattattgtttaataaattatagtttgatacgaaaaatcattctcaataattgaataaaaaataatgtatgatacaaaataaattttaaattcaaaaaaagatgcaattagaaatgatataaattctttgattattatattttaaattacagcatttattcattctttaattgaatattttctataaataaaaacgatgaaggaaaaaaacaatttcaaaattaaatttacaaaactatataactgcaaaaacaaaaacattttttttaaatttttatatgttgtataaaaattattttagaaaattttaacttatttattgttttaattaaaaatgtttaaataatagggttgcaaccccgacgtcggggttggaaaattcggggtttggggttgtcagggttggaagcgtcggggttcggggtcggggttgacaaatcgttcggggtcggggtcggggtttttcaatttttgccttatgccatatagacaaaaaattttatattattttagctttaattttttttattattcataataataattttatgtgctttttatcataaatatttttgtataaaattaattaaaaa

SEQ ID NO: 21249 - DNA, 1317 bp, Heterodera glycines
aaaaaatggctagtatgtaaaaatttgcggtcacaaataaaaaaaaaatggctaatatgtaaaattggcgtctttaattttttagactaatcggagcaaaagcacgaatgaattaaagaggcgaaagaattcacagtatcgtttctaatagggaaatattgacaggatattcggctaaaaacgggtttgatcatttttagcgcatttttaggtatacatttgagacaattgggcaggacaagaaaagaatgaagttgatgcctcatgaaactcggaattggttatgtttagtcgaaaatatccttacataatactcataaaaaatacaaataattcaacccacctattctatgaccacattctgaaaaaaatcccagaaatacgaggaaagatatgcttggtcacaataaaataaaaaatggctagtatgtaaaaatttgcggtcacaaataaaaaaaaatggctaatatgtaaaattggcgtcttgaaatttttagactaatccgaagcaaagcacgaatgaattaaagaggcgaaagaattcacagtatcgtttctaatagggaaatattgacaggatattcggctaaaaacgggtttgatcatttttagcgcatttttaggtatacatttgagacaattgggcaggacaagaaaagaatgaagttgatgcctcatgaaactcggaattggttatgttttgtcgaaaatatccttacataatactcataaaaaatacaaataattcaacccacctattctatgaccacattctgaaaaaaatcccagaaatacgaggaaagatatgcttggtcacaataaaataaaaaatggctagtatgtaaaaatttgcggtcacaaataaaaaaaaatggctaatatgtaaaattggcgtcttgaaatttttagactaatccgaagcaaagcacgaatgaattaaagaggcgaaagaattcacagtatcgtttctaatagggaaatattgacaggatattcggctaaaaacgggtttgatcatttttagcgcatttttaggtatacatttgagacaattgggcaggacaagaaaagaatgaagttgatgcctcatgaaactcggaattggttatgtttagtcgaaaatatccttacataatactcataaaaaatacaaataattcaacccacctattctatgaccacattctgaaaaaaatcccagaaatacgaggaaagatatgcttggtcacaataaaataaaaaatggctagtatgtaaaaattttgcgtcacaaataaaaaaaaatggctaatatgtaaaattggcgtcttgaaattt

SEQ ID NO: 21250 - DNA, 1376 bp, Heterodera glycines
  unsure (1)..(1376): unsure at all n locations
cagttattattttctatttcatctgaagaagaaataattttacttcttttttacaaattaaccaaaaaaatattttagtttatttaagcatcttttatcttcttcaattcaaaagtattaaatttaattagaaaatatttcaagactggtatcgttgtttcaaatatatgcaaagctcatagtatttgtttcttactcatagcaataatattaattttatattatttaattttttggtgtatacattatgtatagatcctatttttttatactttatttctcatatcttttttttaacatgtttagtgtgaaatgatcaaacatggaattaataacttatttcttgtcttttttctctagttcatgattggtttatggcgggcggtcttgaaacgcattttagtttttaatttaattttcatatcataaattttatttttaaatactttttgttttttaattttcattttatagaataaaacagataataatttctaaaggtatttatcaatcgtttcttttggttaattaaaatttgtttatattaatacgagacttttttattatgaagtttatttaaatttcttaattttatctaaatacttctttaaaaaataatctcgcaccattttatccatacagtttgaggaaaatcttggattttttattatatcgttttaattaagataatgatagacatgagtttaactttattaaattacagttgatactgttttttaaatttttcataaattagcatttaggctattcttttatttgttacttcgaaaagatgtcttcataaaaatattttttgaatatttttgatggataatccttattccatttgaataaatagactggtaaaagttactgtatttatttatttaaaattattcatatttaaatttattgagtttatcatttttctataattttttacacaaaagtttcttaattaaaatctgtattttggttatttaatgaaccttttatttgtactacaaaactaatagatttttctctaattatggatttcggatctcgagaattcaaatcggtctcggaccctttagaccggccctttatgacatatatatgttttgaaaatttaaggagtgattttaataagattaaaatattaatattatttataaatattattttctttcattaattcttattcgttaatttttgtgctgtgcatagcgagcaaatcaacttaatattttaaatttaatgatatggaaataaaatgtaaaaatatagtaaaaaaaataaacaaaaaaaaattatcttttgatttaccttttgcttcggcaaagtggataaacaaaagctaggcaatacaaggggaaaaatctaattnnaatcat

SEQ ID NO: 21251 - DNA, 769 bp, Heterodera glycines
tagaagagagcaatggagaggatgcctgtgtagctcagttggttagagcacagcacggaaagctggggtcgtgggttatagtcccaccgtgggttgatcttttgctcttccgcatcaaagaaccaaagaacatcacttggcgctcctggcatggaatcacattcggtgtggagtttgtgtcgagacgacagctccccctccccactctgagagaagttgtccaaagactggcgctttctcatcaagagaccggggaccggtcttctcaaaggccggggatgtgataaatgcggtcactttctccccttgtgccaagacggcagtgaaggagattaagagagtgatcctcctccaaagataggattatacatctgattaaacaaatgcttgataatagtaaatttgggtgaaaaaaagatatttaaaaaaaatttgcctctgcattttcgttaaaccaataacttagttttttcattgaccatatctaacaaacttggtatcattcgaaagctcttaaccagctctatcggcttgcctaaaatcgcaatgatataccgacatgtaaaaaagttataaattaaaattgcaaaaattctgactttttttggttttattgttgcaacttttttataaattgttcaatcgcttagaaatagatataaaagcttctaaacatgtagagctttcgaatgatgccaaatttatataatttaccaacaaagaaaaaagttatgatgtttatgttggccagacgcaactgacccctacc

SEQ ID NO: 21252 - DNA, 1839 bp, Heterodera glycines
gaacgagctgttcacaccagtaaatgcccgcgttttgtgtggttcgagattctcgagtcctgctaaatttctaccctcgaccatctcaaatacttcgccaatatcgttcacctaatccgtacaacattagcttccttttttctgatcagccaaatcattcaattttacagtaatttaagagctaccgtagttttctatcactttttttaaacagagacaatatcccatttatcaaagtaaataaaaaaaatttgatccatttttcaaaaaaaatctttaataaaataatttgccaagaaaccaatgccaagattctgatggtaattctgattttggctcttaaatgactcattttgagagtttttggacccatatcattttggaaaatggtccatgccttaatcatggccacggaaacatggccctttttgccatgtccatgttcatggctatttctggcactcccttcagttgcccttagaatgcacaaatgccatcgacactgacgcgctgctggaccggatcaatcctgaaaaggacgtggacggactgaaccatgtgaacaccggcaaattggccaggggcgagctgggcgacggcatctcagtgccatgcactgcgttggcatgccttaagctggtgcaaaatgccacgggccaggaggactttgccaagggcaaacatgtggtggtggtgggccgctcgcgcatcgtcggcggtccaaccgcggcacttttcatgcggttagtacggcacggcacccgtgaattgataagcatgttatctgcttgcactgatcatccctctgctccgatcaaatccagagagttctgccatgatcggataaattcagtcacacttaattaccggttcccacactaattaatgtgccaattttgccccaggcatgatgccacggtgaccatttgccactcacgcaccgagcggctggcggagcattgccgcgaggcggacattctcattgttgcggtgggccagcgtgggatggtgcgcggtgattggattaagcccggcgcggtcgtcattgactggtcagtgtattttttgtatttggctaattagagcgctaattactccaattaatctgccagccatcccccttttttttactaacaataaatttttaatcaagtaaagtagcttatcaaatttatttcaaatcccaattttatcgtcggcatcccgatcccactcggattttaataaacagggccgagatctattttttgactgttactgactgataaagccaacttcattagtcaagatttcttatcaataacagccaaaatcgatatctgataggcgacgccgagactcttgaacagaaaatgttagcacccaatgagaacatattcatatttttttcattaaaaccgctaaaggataattaatgctgcattttgtgcccaaaagtaaaaaaaaaaaacaaattttttttgaactattccaataagtttgtggatcatttaccgtaatctgtccgaacactttcactttttaattatttttgggtttataaatcgggatcggtcaagatgccgggttctgacatttcggaagaaatactaccaggacagtaaaatatggatttacgtattttccaaatcctggacccggttaggaatttgtttcaaccccgaaattcgattgcgatcaaagtccattctgatcatttccaataccaaatcgagcatgatcatatagatttaatttttttttttcttccttaatagatagtgttcctaaaaattcagattcattatattttaaatcttcttcttcatttatacttattaaggataagatcaaattaaa

SEQ ID NO: 21253 - DNA, 1043 bp, Heterodera glycines
aatggcaatataattggaaaaggacagacaacaatgcttttctttatatcagctgatggtttacaaaaatcgaaatacttcctgagtactttccaagaaccatgagaataaatatcgcactagcgccaaaatcgaacaagaacgctaatcatcagaatcatcttaattttcccccagtgatttgtgagtgataagaaaatagaagaaattcagggattaattcctgaggaatttacaaggaccacgtgcatcattgctacaacggtgccttaatggcattttaatgtcaaaatgcccgacactagcgcatttctttagacaacgaaaattaattcctgaggaatttcccaaagccatgcgcagctttgttagaccgatgccgaaatggcaatataattggaaaaggacagacaacaatgcttttctttatatcagctgatggtttatttacaaaaatcgaaatacttcctgattactttccaagaaccatgagaataaatatcgcactagcgccaaaatcgaacaagaacgctaatcatcagaatcatcttaattttcccacagtgatttgtgagtgataagaaaatagaagaaattcagggattaattcctgaggaatttccaaggaccacgtgcatcattgctacaacggtgccttaatggctttttaatgtcaaaatgcccgacactagcgcatttctttagacaacgaaaattaattcctgaggaatttcccaaagccatgcgcagctttgttagaccgatgccgaaatggcaatataattggaaaaggacagacaacaatgcttttctttatatcagctgatggtttacaaaaatcgaaatacttcctgagtactttccaagaaccatgagaataaatatcgcactagcgccaaaatcgaacaagaacgctaatcatcagtatcatcttaattttccccccagtgatttgtgagtgataagaaaatagaagaaattcagggataaattctgaggaatttcctaggaccacgtgcatcattgctacaacggtgccttaa

SEQ ID NO: 21254 - DNA, 1341 bp, Heterodera glycines
  unsure (1)..(1341): unsure at all n locations
cgttttcgccaacttttcgcctcttctccaattaattntggtcatcaacacggacaatgaccgcactttggagtcaattttgtgcaacatttggctaatgatcgcgaaaaacatttgtgccatgcaattgcccgatcccgaatatgcttccagccatttgcgacaatttgtcccgtcaattctcaatgattgtccatcgcttcgtgttatcaattcccattctgatggtttcatcgccgaatttccatactatgagagtgccaaggcttcgaatggacaagcgttggccaaatggctattcactcctcgtccggacaatgtgccaaaggtgttcaaatgcttgttgaagttgtggtatggggaatttaactcgagcatggaagactttaaagcggtgatttcaatttgattttatttgatatttttacggtcttttgggttcgctggcaaaaatattttgttttggacgacattcaactcgtttttggcaaaagtgtcccatattttaggcatttgccaatgcttcatctcctgtcaatttcattgttgccgtttggatttcggcgccttttgcttttcccgcacaatttgatcagaccaacgaagtgactcgggaacaactgacgtttaaaagaattggaaaatctattcgccatttacttctgatccgttgtccaattgtgcgcgacacgaacaaatgggcgaaatgggaaaaggaagcgattgactggcaattcaatgatcaatggaacagaatcgacattcaaattaataatgagcgtaagatgggtcagtgaatgcttattaaaaaatgcgaaattgttgcttttttagacgtttcacacaatgatgggcccaagtgatcaggggaagtgaatgaatgatttgctgtgaagtgatcgaacaatttgaattgcgatttggagaaatgaatttgagcccatttgacgtatatataatattgttctttttgttgcgatgatcaacttttatttgtgtatgcatttaggacaaatttagtgattttctgaaagtgacattgattttaaatgatgattttagaggtccggcatgtgatttcaaaatttttcacttcccatcatccgattgagctgaaatttttatgtaccaagctacttttttaaggggaaaaacaacgcacacaaaaattacaaaaaatcgaccttggcaaaaaatttttacaaatttttttttgaaaaatcgggtattccaaaattatagacgcattaaaaatttcagcaatgatttttttttgaatagatcttacgaaattctngtgcctttatgctgcctaattaatctttttatttttcacttttt

SEQ ID NO: 21255 - DNA, 1538 bp, Heterodera glycines
  unsure (1)..(1538): unsure at all n locations
tttggcagcgaagttccacatgcaataccatttgtagtccattcgtttgcaaattttctataaaagaaaacatcaaaagtagaattgtacacaatgtttaccatagcagacttcaatgagaacacaaaaatcctggggcatttcctcgaacacgatcagctccttgaacttcactttgttgttgcgcaattcgcccacgtcgagcacatttgcaatcttaatccgattgcatttaaatgaaaatattcaaaattgtttcggagttttacttgcgtagcataaattgtgttctcatgacgacaaagaacgacgaacgcaaaagaagagtctgagaaatcagaattatgttgtaaaatgtcaatgttcttctcgtaaaacctttgtcaattttcttcaaactgaacgacgggttcagcgcgtaacggcaagcgatccgggagagtggcagcagcagacgagaaaagcatcggagaaggaaacgaagtcgccaacggagaactgacaattccaaactgtctgtagtgagacgtggccaaactgagtcgacgcggcccggtactagtgcagtttgagtccgccttttgggtcaaattttttcaaaattttttttttcttttttattgtcgcaattgttttttagattaatggaaaagcttaaaaatttcactgttgtcgatttatgcaaagtattggctctaccagacaaagaattcgaagaattggcagtcacagatcacttttttccacatacatttctgattttttgtggcgtaagcaatttggaggaccggacattttttataatttgtggacccaaatcgcggaattgtacccaataatcacataaatcttcttttatttgttatttaaagcaattgcgacaataaaaaagaaaaaaaaaatttgaaaaaatttgacccaaaagggggacccaaactgtactagttccaaatattgattaaaaaaatgaaattatgagaagggctcgaaaaaatatggaaataaagtcgcaaaatatggaaataaaatatggaccaaaaatcgcgaaatatggacataaatttttccaaattgagagtttaaattctcaaaatttattcaaatttgttaaatgtaaagtaagtaatactttcaaaataatagaagaaaaatacacgataaggctaaattatttaatctntagcaaaaaacaatccgaaaattgaaattttaacttttttttttttgcttatttttgacataaaatttatcaatttttaagaaaatttaaatttattcactattgtcaagaaaattttgcgaaaaactgatttttgggaaaaataccaaaagtagacaaatacggaaataaattgcgaaatatgaaaaattatggatatatagaaatgcatcctagaagcttcaaatcaggctaaaaacatgtttttcgtacgtttcaggcctcccagagcccaggaaaataatgtggatttccatatccataattccgaggccctacttcttaggactggttcatattgcagtactggttcgccaaa

SEQ ID NO: 21256 - DNA, 2663 bp, Heterodera glycines
ttcaattaatttttgccatgtttttttgtttttttctttattttgaacaatttttcactgtaacaatttcagtacacaaacattgtcgggccgctatttgagcagatcattgaccaacacattgaggtgacggcattcatttcttttaaaaatgacattccccctaatttgtcttcccttttttctgtagtttctgatctcgcgcattctcgccaatcctgcgcttcaacacgtgtgcaactccttcttcaaacatccgacaacaacgacacccatgggcaatgcactcgtcaaatttttgctcaacaaattgtcggaattgggcggaggtgatttttttttgattttctatgaacatgtaaacagaaatgggtgcaccccaaagtctcgccgatacaaaatctcgccgtcgaaataacttataagaaattttccaggaaaaaattcttacaaaaattttctaggattttttgttttgaaattttcttataaaaattttacttcatgatagatttgtaagtttgaaaattaaaaaaaaaaaattcgggccgtgagattttgttccgttcctacaaaaaaatcttttttttttcactcaaaaattcacaaccccccccccctaaactcataaaaatgaacaatttttcgtttgttaagccaactctgagaaggcgtctctccacctcatgctgttcaaactcatcttccaaactgtttccttttcgcagaacagctcggagtccgaaaatttgttaaaagtgctgtgggcatatgatggacgggtggcatttgccaaaaccgaaatccaaaaatattgtaatttttcagccttttttgcaccgaattgtgcaagattccatgcaacttgcgagcacttcgcgcgagtgcaccaattactttttgctgttacgggcgcttttccgctccatcggcaccggcacgcatgacctgctctaccaacagttcctcccgttgttgccgtcaattttgcagcaattggtatttttttttgttttcaaattaaatacaaaaactctcaaataaaccaacaatttgaattatagcgtgtcattttgccaccaaaattcatccattttccagaaccgtctccaaaacggtgcccatcgtcagtccgtccatgaactgttcgtcgagctgtgtctgaccatccctgtccgtctgtcctctctgttgccctatttgtctcttctgatggatccgctcgtctgcgcgttgaacggctcgccggcattggttcagcagggattgcgaacattggagctttgtgtggtcatattttcacattacatattttcattcaaataaacccgattatttatttttaggacaatttgcagccggaataccgtaagattttaagttatacaataaaaaacgtttaatattggaaaatatccgagccttcgactatttcgattctggatacgtccccgcctttggggtcttccttgaactgatgatcaccgataatttaaaaaaaaattttcggggggaaatgacggggggagggaatggagtgcaccctattttttaaattcattcactcattcgtcagtgtacgaccacatgatgccggtccgtgccgcactgatgagcggtctttggcgcacagtttatgcgtcggacacacagtcggcggtggctgccctgcgcattttgggcaaattcggcggttctaaccgtaaggcgttgttggacccgcagacgtggaccagtagcaccgattgctgcagcacaacagttgtcgtcgcctcggctgcccaccgctttggggagacatcgacggcggcgcctttgcttaagtttgaatggtggtcgctacggcagcacattggcgagcaggaacagcaacagttttttccttctcctgttgagagcggcggcgatgctgcaccaccgacaccgcagacagtgggtggtgggatggcaccgatggaagacacagtcggacgaacggcacaccagcaacagcagcgccgctttgtctgcacattgccgcttcgtgaagcagtgcggagtgcggtctccattctaaggtgttcatgggtactaaccagttttacgatggactaggcggaaacattcgaatccaaggattcgccttggctttgagttaggccaactctataggaattttgccagttccccttttttggttctttcagctttgtcttgaagagcattacttattgttagccattcaactgtataccatttttacagaagccaacctgtcactgatgccactcaaattgtcactccaatggccggcactgggccaaattcgttatcatctccttctgccacccagacaaatgccaatttaccattgaaaattcaagcggtggaattgatccgaaatatgctattggtggccattaaaagtgtcgacattccgccatctttgatcaaaaaggcactttccgactctgtaaaagtggtgcaatcaacaacaacagcagcaccatcggatggtgccgtcgatgaacatcatcgtgccatttcatccccttcctcttttgtatgtgccgacaaaatttctcgcgacattttcgtcgaggcaatcagcggacttttcatcgccgtgttcaactccgacacaaagaacaaattttgccgttttttaagatgttcactaagca

SEQ ID NO: 21257 - DNA, 1027 bp, Heterodera glycines
  unsure (1)..(1027): unsure at all n locations
tacaggcgtcacgtcctccgcttcatgcccgttgagtccgtccatgcccgggatgccctccgggcccggtttgcccggcgctcccggcggcccctgagggcccggcggacatgtatttgcctcaccagtagaacaacctgtacaacaacaaatttaccttttggaactcgggaagaaaactcccaaaaactcactgcatccatcgccttggtgcaaggcatttgactgcaaagacggcggaacgcccggtgattggaagtcgaagggcgtaccaggggcatggcctttaggagggagttaaatttaaagcaggaacaactactcttggtctcgagtgcttctcgagcattgttaaaaagaagggagtgccgaatggtttcgtcttacaaaatcgagagcagcgccgcaaaattcggctgaattttgatttagcatcactaattaactcacccccaactaattgtgagtcgtgcggtccgcttccgtcctggacctcagtctnttgtcggcggtgacctgcgcttcgtctccgcgcggcgttcgctgtggcgcggctcatccgccgctttggttggtttagtgcgattaggcgagcccataattggtcagtttgggcacgaaaggtgtcaatttcgaggtcgaattgttgccaaatttgttgcacgtcgttgtggatggaagcgatcagtgccaacgcaacgagcagagaaatgccggcgaaagatgaagcgattaatggcaacacgtgcactttcatcgaattcaaactacaagcaataattgactggcaaacgatgtttatgcggggaaaaaaaacgatgtaatgtcaaaattttggagaattttcttgtgcacaatttactgtgagctaccgaagcataagcttcggtccaagagataagagccagtcccgcttaacgtatttttgaagcgaagaatttccgaagtttatggagatcagctctaatccttcgctttctataaggagggggcacangattgctgacaaaaaattaaaaaatcggag

SEQ ID NO: 21258 - DNA, 1356 bp, Heterodera glycines
tgacaaaaaattaaaaaatcggagtagttttttcccgtttttccgttctttgaatgggcggcgccatccaaaaaaaagttttgttttttaaccaataaacagaaaaagcacgcaaattgtgacgaaagctgccggcggggagataaatgagacaatgttttgtgacggtgcctttgcctttcgccactctctctctctttctctttctctctgtcttctcaatctcgggtttctccttaattgtcttttttatctccggaaaagtgtgatccaatcagttgggaagggatcaacagcagaaacagaggagcaagcaaaaagcgagtttcgggagtcaaaaagcggcgaatggaaatggaaaaccaaagcggaacaacggcacgggctaatgggcgggcgaatgaatgaattaaaaagcgagagagaattgacgcaaattgggcgaagatgggggcagttaaaaacaaaattgtgaaaaaataattggtaaagcataaaaaaacctaaactcaaagcaaaacaaaatagacaatgataaagcaagagatttaaagctttgtcaaattattcaacagagaaacagcaattcattaattaattaatgacagtaaattaaatgaaaatcatagaatagcacggtactgttaacaaggtgtgagagtaattattaagtcggccaagttgggacggatttttcattttctatataatttttcatatgtaaaaatattttcctataaattgagccacaaattgaaacatttggtttttttagaaagaaattttatgaaaaaggatacacttcatcatatttttgatataaaatgatagcttttcactgttttttttcaaataggaattttgatgagagattttgtcaaaaattaaatcccctcattttgaccacttttcaacacaatatgtaagttcacccgtgttgcgacttttgcgccgctcagcaaaatcgtcacttgcgccgcgatatttgcgccgcggacatttgcgccccgacacttgcgccgaccagcaaaaatggatatttgcgccgctcacttaaaaatatattttaaaatatttttgccaattttcaacgaattttactcaaattactgtgcaacaacaaaaaagcaattaaaagaaatgcaaaaaaataataataatcacaacgatagacacctattttatgtttttgttaatgcgtacattagcagcaaaggcaaatttgataccaaggaaaacaaaaataataagtcacatttatatatacaaattttagtttaaaaaactttttggatcacttagaacggtgcacatggattttgtagggcggcgcaagtgtctgcggcgcaaaagtcg

SEQ ID NO: 21259 - DNA, 949 bp, Heterodera glycines
ttgcctttgcttttccgcactttttgcgcctgcagggccatttaattccagcagaaattgcgagttgctcttcattctccgtgccattccttctcctccttcttcggtttgctctttttccaattttcgcaattttttgtcgcggcatttggcacaaaaaaggtaccaaacctaaagatggacaattatgaatttgtgctttttgagtttatctcggcttttagcataatcgttttgcgcttcccaccgccgctccttcgccgccttcgccgcattttccgctccatccgaccgtccaatgccccgccgaattgtacccgcaattccccgcgtcttcgccgcatccctcgtgctcagtccgcatgtgtttcccaaatggtgcggtgacgcatttccccccgcaaagttcgcatggcaaaagttccgtcgatgggtccgttgggtgcgtcgtcccatctttggtaacgaatgcggcttcttcgaaactcggcgatttttgtgccaaaatttcgtcagaaattttgtcgctaagctttcgccaagcattcgctgctgaacgaagtgccggaggcatttgtgccgcatttccatgcccttcggcggtgtcccaacggaacggcactcgcgtaccaatgtccgtaaggatttttgccgcttttatcaattcttcagcggtacatccgttgtcattctccgaactgtgccacaccgaagcgacgaaaacccaacggaaagcttcgaacagtcgcggaccaatggccctttttgccttccgaaattttggcgagtccaaaatggaaatggtcgcgggcgatgggcaaagtttggcggacgattggcgaagggacggcggaggggcgacggaaatgccattggaggaggacggacacagctgaagcagttcagtgccgaggtgtgcgttatgatgaagcacccaagccttaaggga

SEQ ID NO: 21260 - DNA, 1127 bp, Heterodera glycines
tgtgagcagttcgtgcagcgatttgttgtccatttggtcgcagtgactgtccgagccgaacaatgcgcggcacgaattggacaaacaccaaacgaaaagccgctccaaagtcaaattggaagttccctttgaattccgagcggaaattggctcgacggtgcagcgaaagccgaaggcattctgaggattggtggagaacaatcagacaatcagagaaatggccgaacgatcagactttcccccccccctcaaaaagtgccttttccgccgctttgtcgtcgttttccatttgccgttgcgctgactcaaaaatcagccaaaggcaattgccgggaatcagcaattggccccgaggccaatttcgtccgtggtaatttgccactggcaccattttcctgccgttgcctccactgacgtaaacccaaacgatgtccgtcgattgcgccgtttggcactgcgagtcgaaacggacgcacaaaaagtcgcaatttggcacctcgaatttgtgaacggagaattggccaggagagtaaggatgaagtgattcgacagtaatggcggcggaagggaggcaaaaggaagaaggaacgaaaagtgacgaagaaacggacggagaagagggggagggcgagcaacgggcggaagaggggcccaatttggcattggacggagagcgcggcttgggagaagcggacgagctggagctttgcatcctattcatatgcatatggccgccggaagaagcgatgacaaaattggcatttgtcgtgccgttttgcgccacctctgccgcgtttaaatgggccaaaattgaaacgccctaaaagaagaatcacaaattacagaacaatcagtccgttctgtacattcagtttgctctgctctttacctcgtccaatgccgcaaccacgtcaaatgccctccagggacgcgcctccacccaaacgttggccaaccccagcaaagtcgcgcatatccgtcgttcccccgggcctagcaattccgtcgccttcgccgccgtcgtctgccgcaccattcgctgactcatccgccgcacaatttgacggagcaaatgcaggaaaagatcggcctccgcgcttttctttgtctccaccgcccttttcctc

SEQ ID NO: 21261 - DNA, 1484 bp, Heterodera glycines
cataacttttttacaaagcatcccaaatttaaaggattctttatttgtttgcgatagcgttaagagtcatctaatagccgcaaaaattgcaaaaaatttcgtggggtggggtttaacaaaggttaggatttcaaataactggtattctaaaatattttttaaccataactttttttgttgaaaatgtggggccacacttcctgaaaattgttgactcaatcgaagttcgttttgtttgttgtaatctacgcaacgcaatcgcttgggttggccatcttttctcggagagtgcaaccatttggacaatgcttggccagccgaagttgttgaatttggcccatcaaaatcatcaccaaacgcagcgggcgacaaatcataggaattgattgaagtcaattggttcagatcggtgagaattgttggtgaaatgagccgacgcaaattgtccaaatgctcagcatttgaaatggtcaaatggccaatgtttggcgcaaaaatgggccaaatttcacggacaaaaacattccaaagcggctggacagagtcgttgtcagttgaggatatgtacaaattcaatttggtgcctttgtcccaaatttgcttgttggcacggagaaatgcgacgacggaatggtcgatgtaactacaaaaatgcggttttactgttcaaaacgccaaaattttcaaaaatatacccctaagaaacggtacacctcagttgggccggcacgtttaggctccagcatgcttttcctctataatttttttgtttatcatccaaatccatcgaaagcttaacattttagatgcttttattaagctattgtttcgcgagtagacaaaaattatgcatgaaaattgcgaaaaagtcgaaatttttcttaataaaatttttttcaaggcttgaaaatctattcgctttttgtaaggctaatagagctgaagagctttcgaatgataccaagattgttggatttggatgacaaagaaaaaatagtagaaaagcatgctggggcccaaccgtgccggcccaactgagagcgactcagctaagaaatgaaaaattcatcctccaaaattaaagatattagaaattgtgtagactcaatactgattttgcttaatttgttgctttttgactaaaattttgtcattttatacccgtaaaaatgaggttttttagtgaatttggtgatttgaacgaagaaaagcgatgacggagtgatcgatgtaactgtgaaaatggaaggaaagcttttattgccataactctgatttttaattactcaatccgaaggcgcttaaaaaggattttgctgggcaacggacggtcgggcaatggaaatggcacaaatttgtcatccatccgcacagatagtttcggttctggtcctttgtccttgctaatttcgatagttctccaaattgtcaattcgcttttgccatcaaaatgtttgtccaccaacgcatgaaacgggcgaaag

SEQ ID NO: 21262 - DNA, 1435 bp, Heterodera glycines
attttattcatctccctttttgatagaaaaagcatcagagtgcctaaactagcatgtaaataaaatttggtgcgtttcagagcattttgtgaaaaaaatatttatgaattaattatgcaaaaaacaaataaaaacgaaagactcagattttcgaaaatttttttgagccagctagctcggcgctcatttcagtgtaagttagtcctttaccggggagtatccctgcaaagtttggtacgcttctgctcaattagcaaaaaatatgagtgatcgaattttcactaaaaaagttaagcctacattttttggcatatttaaaaagcaattaaaaaatttttaaaatttaataattttcctgcaccgaaggtactcactcggcctcttcgcggcctcgtggtgggccttcgcccccccccccctcccacgcccttcagagcacgacaaatatttcaacaaaaatttttaaaaattgactagagcaatcgaacgctaacggacgacctaatggaaaaaaatccccgaaggagagaatttaattaaatccattccttcgggggaccgtgccgggtgccgcggggtaagcagtgctggttcgtttcatcacggcaccgaaccttttggctagtcagcaatcgttgcttaacttgccagatcggacgggtgcgcatgattccactgttccaagcaccccaccaaaagcaaaacgatataaccaaaatataaggaaaaattttttaaaaaattttttctccatcttcctttttgatactaaagcatcagagtgctaaaattaagttgtaaataaaattttggtgcgctttagagcactttctgaaaaaaaatatttatgaaacaaaaaaatcgatttttttcaagtgtccgtttggggtactcaaacatttatggggagcaaaatccaacgcagaattaaagtacaggctatagggcagcagagtgctaaaattaagttgtaaataaaatctgggcgcatcgctttagagcactgccctgaaaaaaatatttatgaaacaaaaaaatcgattttttcaagtgtccgtttggggtactcaaacatttatggggagcaaaaatccaacgcagaattaaagtacaggctatagggaagctattcccgaaggattcggtctccccataaatctgggcgcatcggttcggggggactgccccgaaaacaaaaaaatcgattttttcaagtgtccgtttggggtactcaaacaattatggggagcaaaaatccaacgcagaattaaagtacaggctatagggaagctattccggaaggattcggtctccccataaatctgggcgcatcggctcggggggactgccccgaaaacaaaaaaatcaaatttttcgagtgtctcgtttggggtgctcaaacaaatatggggagtaaaaatccaacgcagaatta

SEQ ID NO: 21263 - DNA, 2259 bp, Heterodera glycines
  unsure (1)..(2259): unsure at all n locations
gatatttttaattgaaaccaaaaatttttaatttcaaatggaaaagaaataaatttaagataaaccattttaaaatattttaaaagaaacttactttaaaaaatatgttattaaaaagagctaataatttttttaaataattagcgacttgaattttgggccaaaaaaactaagaaagtctaggccaaaaaaactaggttgcctaaaaaactggacttggacaggaaaactgaggcctgaatccagaggtccataaggagtttaaaatgaaaattaataatgaaaaaataaattgataaaatatttaatgaccaaattaaatattggaaataaaaataaaaattaaaaaatataaattttaattattttaaattaaaattgtaaatttttaaattatttttaataaaataaatatttttcattcattccttcaccttcacattaaaatagccagcaattgtcagattcgattcacacaacaccgggtcatattctgatcggcactgaggggaattccaactgatttttaaattatttaaaattattttaatagtgtaaagcgcaatttatcacatccgtttaatctctttctcacaccatttatccccgcttttccccatctttattccgttccataagtccaactatttaatcgggagcattctctcgataaggagtcagttgagcgggcagttaatcggcgagcgagagccgagagcagaacgcggaggaattattattaatgtaattggcaaatatttatattattattttgctccttctcacccatccccgcacgcgtattagatctagtaggcgcccatgggattaccaatttagggaggtcatttatccagggcccggattttggcttattccttattcccccaaatccaatcctcaattttcctcgtcccttcctcatattttggacataattttccaaattgagtgtataaaatttcttcatatttgctaaatgtaaggttaaatatgacctcaaaaatattaatattgtcttcgtttcagggtcttactaatcagaaagatttaatcatattcgtaatattcttaaattttgaactaatatttcgtgattttcttttaaaaatatttcttttttttgtttataatttaatattttatttaaaaatatcttccatttcttttattaatatctgatgcattttcctaaacacttcattttcttggcaattctttttcttctgttgggaactgctcgaagtaaatttattgaaacactaacgcaaattaagttaatattttttaacaggtgctttggtggagaatgactgccccatttgcgataatgaaatgaaaaaagaaaatcaaagaattgtttcattgtcatgtgaagtaattttttattctactagagcatatcttgtaagtgagccgcttgggatacaaaaacccaagaaattatatcaagtcaaaatttataaaaaatattaacctgataggctcgcaaagtttaggccatgtttgaattggcatacccattttaatttaatatgcaaatatttcagcatgaatttcatcgtaactgcatgaaaaaatggtaatataatttgtttaataatagggctcaattgctacactaaccagtgtgcaacagcaacctcagaatgcttcatggtggactcaccaacaccaaactaatatgcaatccgggcaatggccgaatccatggaataatgtaaatcaacagccgtggagggcatattaccaacagcaaatgccaaacccaccatcgggggcacaaacacacccacaaaatgtgcaacatgattcacgaacaaatccagagcatgttcggatgccatggaccaatttgcagcaacaaccagcgcatgcacaacactggaatgccaatgagcatcaacaagcgccaaatgcaccatggtggtcacattatacatggcaacatgcaggccatccacagatgccatgggcatatgcaccacagcaaagcacacatacaccttggtggacaaaccctgcgcatatgtggtggcaacaagatgccaatgcaagccaagtcaatgcccacaatattcatgtggatggtaacgcaactgttgttcaagaaggaaatgatctgatcataaatgggcaacggcaccgaaatgcagccgcgaggggtgtcagtataagcactggcggacgtgttaatcatgacggtgttcaaancagggagacatcttttcagtctaaattctgggcagaatgtaaatc

SEQ ID NO: 21264 - DNA, 1451 bp, Heterodera glycines
ggggagaagtgagaagagggggggggggacaccgacgcgacaacccttagctgaaagtttctgacgatgcacgtaattctttatgccaatttttgtggaaagaaacgaagaattttgcactgccattctaaacaatcgcacaattaatgacagagtaatcagcttattgttaaaattgccgtggtttcgcttgactatttattaaattaaattaaatgaaattaaagtaaagaattccagtgattacttcggaaggtccaggccagtcacttcagcactcaaaaaaccgttggcatattgcggcagtttgacttggttggtcaaccattcgaccacttgtttgttggtccatccgcgttcctcggattggaaccaattctcccacaaatcgtccacagttatcgcctcgtcgttactgtgaaatgcattttctcgccttattttgtccgaaccgccaaatttgagatcttctttcaagaactaaagggaggcttattcatacatttaaattattggtgcgttcgtgtcatttcactagcacatacatcggcagattcaaaccgatcaattgagcccgaattgtcatcgtcgagaacggcatggatggctttgattgccaagaaaccttcaacatctctttgtttctcttcttccgctgtgattagaacatcttaaagagttaggtatagattattaattaattacaataggtaattaatgagtttaatccctaattttatttgttttgtctctgacttcttgtcggtggtttaatcgattcatcagctgaatacacaaaaaagaacgccgaaatgaaaaagactgaaaggcaaagagaaaagggtttgtggaccatcgttgaatcaaacaaattacctaaacggaactcattattttcacattcattttgctctaaattgtaatgaacttaataatttctcatccatttttccttttaatttcgctttcccttctctttttcttctgtcgcgtattatttcacctaattgttaacgggttatcaatttcatagctcacacatatgtacaaacataagcataaggtaggtaatctggttttttcgacattaaattccaacctcagtatacaatacacattaattaatttgttgccccaaagaatcttctcttcctcctccgcccccccccgccgcccctcccttttcaccccttctcagtccatgcatttattgatggggaattcatgaatgaagaaggaatgaatggatgtgaatgatgagggtggtgctgattgactgacttactcatgcactgtcttgcgatcgctctgctttggttgatcgactggttaacaggcgatgaatagaatgagcagaatgaacaatttctcttcccattcaccaatccatttctccccttttctgcccattctctcctccgttcacctatcccttccctccttcccccccc

SEQ ID NO: 21265 - DNA, 995 bp, Heterodera glycines
cccccccccccccccccccctccttctcattctcacagcgccttttcccttctcactcgctaatttcccatatgctttggtttttttacttattcggttggggaagggaggaaaatggattaaattggataccaagcagattaaatgcgaaattggatgaagcaaaagaacatggaaaattatatattttttaaattcgtcctttttattttatgtacctatttaaaaattaaaaaaactttttttttaggaaattctctctaacttggattttgagccatcgcgttgaaaagacagatgatgaaaaacgactgggacccattaaaaacgaagtcggacattaaacagcggctcaaccgtttgtctaatttttcggattttgtttaaatcattttgactcggattgacaggtctcttcgggcggttcgaccagtactcagaatttgcagccaaacctcggactcctgaccatgcattaacagagcatgtaacgacacccgtaacaaatatccctcccgtaaatgaagagcaaaatggggaaaaattgcgggaacgacgagaaatcgaagggggagcaattcaacggaagaatgatggtccacccgagaacgaatcaaggtaaaatggcatggtggcaatcaatttctgacgaagcaatgctaagggaccatttggaacacataattggccaactcgtcaatgtatcaaagcctctttcaccggttcgctttgtgtccgaaaaggcgacgacttcgtccgccgaagcggacgtatccaatggcactcactcggaagaacagcccgaatgttctgtcgcacgacttaagtaagaaattcccgaacaattgattatttctttattttttagctccgatatcgaaattcttctgcagcacataacctttgttccgccctttatttctccaatcagatctgaggacattttgccgaggaaaaaaagaccatgtcgtgaaataattgttccatttttcaac

SEQ ID NO: 21266 - DNA, 1803 bp, Heterodera glycines
  unsure (1)..(1803): unsure at all n locations
gtgcacctcctctcattcacttctatttggtagggccaatcttcccatagtcaaagcgccaaaaaaccgcccgtccaaaattcagcaccagcagcagaaagagagcaaaagctttttgttggttcccttcggtgggccaaaatgaaattgaaggaatgaagggggattgatgaaaaaaaacagggaaagggatggattggcgaatgttttacttcccacgcggtttcatcgtgctcaaagttattcgttattacatattttgccgcattattccgtccgttccttccattgtgacgcaattgttttgttttgtttgtctcccattcccttcccatccgatcacgttgatcaatcaaatccaccaccgttttccagcgcctggaacgtatgtttatacaataatcccattaaatcggggaccaattggtcttttccatgggcccgcgtgtgtcgtaaataaatcattcccccactcattcaaagggttgtgatttatggataatatgcattatgacgacgcgaacggacggattttcctcagtccgttgattttatgtccatttttaagtggctgaaaaaaacatcgaatgttttaatccccggagggaagcggaagaaccttttcactatccctaatttcgacagatggtctagtctctttttttgtcgaattggcgtgagattttctgccgttcctaagcccttcgaatcttcttcgcccatatcttctgtttttgcctttattcataggtttattttctcaagcattttggccaatgtcattctcttttttcattttcttttctcctcccgcgccgccaaaacgaaagccgaccatccgctaaaggctaaagcatttcatgggattcgtctgttttcccttttttcaaatgaaaacctctctcgccattgatgccaaattgaacgcatggaaaatctgagcggaatttcccgtcaatttgcctaaaacattcgccaatccatccctttccctgtttttttcatcaatcccccttcatttcttcaatttcattttggcccaccgaagggaaccaacaaaaagcttttgctctctttctgctgctggtgttgaattttggacgggcggttttttggcgctttgactatgggaagattggccctaccaaatagaagtgaatgagaggaggtgcacttcaatgacaccaccccgtagtatattcattccttcagtccaacaccaatctcatctcatctctctccctctaccctttccctctttttgttttcattgttcgaacattggcacacgcttcagcagccctaccttttgtctgtgttctgctggctgcatcataaatgatgggaataatatgacttttgacagaagacagaccacatgattaccagttgtatccaaaatattcaatccaatgacaggctgtgtgatccggattttaaagttggagcagcagagagagagagaggggggggatttttgggtttctctgctgaacggcgcctactttctttctttcgtttccacccccacctcctttttgcaatttagaagataaatgttttccttccccccccccgggtgaatgtccgtctccttatcttttttctcctttgtaacactatccttttgcaaagtccttccccttcccgtgtggtcacgttgtatttgtgtgtgagaagagtgaaaagcgtcccccaaggggtagttcatcaatgaaaccaatggttccctcttaatacttatttttgagtcatttccggcattcccntatgccagcagtcatcagacataatactttatta

SEQ ID NO: 21267 - DNA, 1514 bp, Heterodera glycines
tcaataacccgctttcaaaaacaaattaaaaaatctctcaatcatcattcaattcccttttttaatacttttttctgttgttgttcattttgtctcttttatatgtctaccaattattttattgtgacattttaattgatttcgattattattaaccaatcaaattttcctatccattggatgttctttaatgtgtcaattttcctcataattccaatccttcattaaatacttttcctttattttcaacctgtaaacaaattcagtttaatttcagggattggtgcccctaacaaatattaaattatttactttttggctcccagaggagtaaggttgtgtacatattttcattcttacgcatgtctcatttttgaatcggtgtgtaaactgaatttaaaattttccagtttaatttaacagaaattctattccgccaaaatggagaaacgacgttggaaacgagcggaaagcagcgacgccagcaccacgtggggcagcagcagcagcagcacaaataacaatcggcccgccatgcgttccattctgaagagttcggaaagtgcatccgcggccgtggtgccgtcgtcttcttccactgcttgtccggcttcgctctgctggtccacgcctcgactcggcagacgcattcgccatgccaatgccaaagcgttttccccggcccagcgtcggcaacactccattgacgccaaattacccgtcacttcgtccaccacatgccgtgccgtcacatttttcctcgcctccgaaagtgattaaaaaaataaataatttaaatcaattaaatttaaaatgaaaattttgctacaaaacgaaattgaaccattcattaatttcttttttcactgataacaaaattgctttcatttgctcattactttctttctttcatcgttttacttcctcaattcaatccatttttttctctttttcttcgtttcgcgatgatcaaaaacacaaagaaagagaaatatttgggggggggggagatcaccgttaattaaattggactattagaactatttagtcggaaaaaatacaatagataaaattgaacgaacttcggcattaaacatgcaaaattcacatgttaactgttttccgttgtttcaggctccgattcatcttttgctgcggataaaaccgaagaagtcaaattgccacggcagcatcgcttttgccgacagaattcctcctcctttcgccgcacttcgctgcccgttcagtcgaacattgcgcgtcaaaatttggtcggttttttctttacattttcatttttactatttaattgaagcatttttgaaaattattcacttttcctcccattttttccttttgctgatctttttgtaatgtgttaaagtgatttctgagttggtcgcttcggttgcacagaatgggcccaccataagcaataggtatttgcaacgccgcgcattcgtcgccctttaacgacttttttccccttccgttgcttttggttttaatttatg

SEQ ID NO: 21268 - DNA, 1248 bp, Heterodera glycines
  unsure (1)..(1248): unsure at all n locations
ctcaaattaccgtccaattgggatggagtgatccgacacttcaaatcccgncaaagatgatttgagaccccaaattcccatccaattgggatggggtgattggagacctcaaattcccgccatttttggaaatcccccgtcattatcgggtgaaaaattggggattacccgatgaggttcggggtctggaaaaaataaaaaacggcagcaaattccttaattaccctaattaaattttaattgcaattaaaaatgcccattctgctgcttgctgaccatcggagttggtcttgaacagccgcacgtacacctttgaggccggcaactttccgcacatcagtgtgccctccgcacgtgttgagcgcgtggaaatggactcctgcgcaccggtgtgcaagagcccaccaagcagtgcaagcagtaccagcacggggacaaggcggccgagaatgaataatccatgcattttttcttgaaatttttatttttttcggttctttttcccggaaaattcccccctccccaaggcccctccacactcctagaaatttttaagggaaaaagtattttgtgatgaaaattttcggaatccttattggtatcccattcaagacctctttcacccaaattctccaaaaaattcgttaaaatttccaaaaatccagtcgtcggagcggtacatcatccaagccgaattattaaaaaatcatccaagtttttaaaaaaatataaaattcgaaaaattttaagaaatttagaaaacaaaaaaaaaattaaattaaattttgccaatttcccatggccctcccaaattcaaagtgcagcatatcgatcagaagaaaacaagaaaattgttattatttattatgttattttgtacatatgtattgtataaaacgaacagataagagataaggaaggattggtgaagaataaatggccaaattgtgtaaaattttatcaattatcaacgccactttttgctgtcagccgaccccataaaataataataataataataattattattattatttaattggtctacggtttatgatagatgaaagaccacggggccaattaaccgagccgatttttgtncaaaaaacccatcnaaacaacaacaaaaaattgatgaggcagctaatttctgttggctgcccctttatcgataaacaatgaacaacaacaaatacacactatcaaatttaatttggggccactcgagagtcttgaggtggggggggg

SEQ ID NO: 21269 - DNA, 1236 bp, Heterodera glycines
tttttaaaatttacattttttttttaaaatgtgtgggataaataaaatatattgtacccgattttcataaaatttaggccttccatattcatcataaaatggaattacgacttttatttgcttccctatttgccctctgggcagtgacagcggcgatgcgcaagcaggggtcagaaaattttgaaaaattcaaaaaaaaaaaacgatttttttttcatagggttgccatcagcggaaaattcgtgtgcggccacgcgccggccatgagcaattcgaccaaagttcgcattgtcgacattgacacaggtcgaggaatgcgatacgaaaaaattttataccaaaaaaggaaaaaaatatccctaaaaatctttttgtttatattatagggaatgcttatcatgccccccccccgacgaaattttttttagaaatttcaaacagaaattttcaaaaaattgtagacttttttaagaaaacaaacgctagaaaattttttaaatttttctcttaaattttcttataaataaatttttattaaaaaatttctatgtttgaaaaagctttttatatgggcccaaaatttggattgtctcttctccttcttcaggaatttggttacatttagggcccgacccggacgacactttggacgaaaagtttgtggacgctgccggtgcatttaagtgagtaattaatgcgccgctatttggaataccgtagtatttgtctcaaactacaaaattcccccacccatacgggagccatactgtaggaccaatagttacagtacccctatgggtgaaaaaaaatgcatttttttgcagactcaatgggtacacacgggaactcactgacattgatccggtgctgtacgtgtggacagactgtaacgacgggcatacggtagggtgcggaaagtacaaaagaaaactgtcgttcttaaaaagccgtatttttcggtaattaatttccccggattgtaccgtatacagattagtgatttgctacagcattctaccgtaatctttctttaattttagccatgccatcggaaaatcaaatttttgatcccaaaaacaaaggtattgttttaggaaattttaattgattattctgatcactatgtaatcagatcattggtgaagacccgaaagccaatgattggcttgacatcggagtggtcaatctccagtcagggagtgaagtaatttttgctgggattaacggtaattagtg

SEQ ID NO: 21270 - DNA, 3406 bp, Heterodera glycines
  unsure (1)..(3406): unsure at all n locations
ttttttcttgccaaatgaggcttttgaaaattttcatataccagccctgctaatagaaaacatacggggctaccgagtgataccaagattgttgagtttggttaacaatgaaaaaagttatagtccaaaaactcggaccacgcgaaaacaatcccgacccgtcaccttgcctttcccctttccactcaccttcccatccaatgcatgaattttgcgcgtttgttggccgtccaacgcctggcagaagaacagcaggacgggcaaaatgcaaatcattttgtcacaaatgactgtaagaaagggataaaatgtaagcatgtcataaataaactttttttttctcaaaactggccacaaatgtggtgctgagccattataaaaagccatcaaagcgggcgataaatgaaaaattcaacaaaaatcacctacccataacttagcttaaacccgacttaaattttaattattattattagcattcgggattcgatagccctaacatttcttattagcctgcaaaatttcaaaaatttttgcatagttcgaacaaagttaggccaaaaattctcatgaaatcaggttttcaaaaatttatggccatagcttttttgaaacttaatgaaattttttgaaattttgcaggctaatatagaaatgttagggctatcgaatgctaataagaattaaaatttaatttggatttaagcaaagttatgggtaatttttgttgaaaatttttcatttttttgtaatgccttttttagatgcattttttataatgacattgcacagcaaatgagagtaaaaatccaatgactttcacaatcactgctactgattcccaacaccggcgtttttgcttttattagcatttttcactgaaagccgtacccccccccccccccctctcccgccatttgtcaccaattgtgagaccaccaactctctattagaaaatattcactttactttattcattccatttcatcgaatttccccttcctatttggcttattgggagggggagatgagaataaaatatgaatgataaaatgatgaacgaagtgtaaaaccgacgggttatttttttaaattgtcctgtctgaaaatgggtgctcaaaagtgccaagattcagcacccactttgtacaacattgttctgaaaggacctaataaaatgaaattgatgttttcatgggcaaaccaaacccggagaatccgaatatcgcctcagatttagtcagttgctgttctatgaccctgtactgcttcaacttcttgtcaacgacatggagcagtacaatgccagagaaaattcagagatcaaatctgaggccagatttggattctccggacatgatttggccacaaaaactgcttttaataaatttccaactgatcaaagcaaagttttgacccgtacaataaaagtgatcggatttgggatttagggtgctccattgggataattttaaaaaatcaatttgaatggggaagaacgaaaaatggcttttaaccgaagcaaaaatttctgctctttcctataggacagaaattgatcggctgtcacttgcggttaacggtgcaaaaaattccgattagcatagcataagaagggtgacagaacttatacaacacccccaatatanttttcacataatcaccaactgaagtgctgattttgtagagcgttgaaatcttcttcagcggtgtgtatcgttggaattgcgctgcgtgcgaaggcgtttggtttttataggaaaaaatgctgtgagcctacaaaaaataaaatttaagcttttccttcagccaaaaaacgaaaaagggtccaaaacgggtataacagaaaaccgggggtactgataaatagggcgaggattcttaggtttttacttattttttctgcggctttaactcgacgagaaatgcacgaaaacacattttttgttcggaaattcttcgttttaacgcccatatccgaccctagaaattcctattttggagctttgccactaaaatacctattttgagtgttcgcccctaaaataagtttttatccctatttgggcgtttcgcccctattttcgcccttatttcgcgatttttaaattttttcacataaaattcacaaattttctaacaaaaatgcactgaaaaatatacatttttttgacgcgattacaggcgacttgttcaaaaaattttccactaaatatgtttttttcttgaccaaaatttttgtaatttattttcttttttgacaaattttgattcttgaatatttattttggaaaaatgtattcaaaatttttttccctatttaagtccatatttggactttttcgccactaaaaaaccgcgccctatttattaattaccggttccataattagaaaagtgccgttagcattctccgacaaagttgcatgcatttgcataattggataacaagtcaaagacggaatggccaacatgaccattatcagaagccaaaacaatttattccaaaactgaaaaatgatcggttattttcagggctcccagactgaggttttatcctcagtttgtggttttttgataggtcaattaggatttttgtgcctttttgagaacttttgaggatttttgaggcttttggggaaaatcgtcagaatctgttaaattttatgattcatcttcttaaatcggctcaaatcgcaatttagccatttttgtggacaaatcggttaacaaatgaacaatttgaaaaatttttgtaaaaatgaggcttttttgcctgccaaatgaggcttttgaaaattttaatctggcaaccctggttatttttaatatttcaaaatggagttatagacttttgaatttttaattagttttggctcattaaaaattgcctttttatgactcagcggaaaagcaattgccgtgaagcgatttaaaagcatgaaaagggtagcgatgttcgtcacttggtaggtgaaggtggtcaagaaatagaacagtgccaacgcccaattgggcaacgcgcggtaaatgggcaaaagtgaggggccgagcagagacggtagtcgattaccgtagcaggaggcggccatcattagaatgtcctgttgatttatttaaacgatttaaaaatgctaattagtagatatgggcacttacggaaatgccacgcacacagaacaaacggtaaaaggaatttgcgcgagtttctttgtttttcacaattgcaaacatttcgccaatgtacaaaaggatcgaaggaacggacaaaataatggaaaaacagtagaattttgtagcatttgaaatgatccaattcgaaaaattgtccattttgtcgagtttgatattttttttaaatggttaaattcaaaaaaagatttatattattttattgaatgctttt

SEQ ID NO: 21271 - DNA, 1839 bp, Heterodera glycines
ttcattatttacatttattaacctttattaccaaaaacgtttcgtttactttatcttggttgaacacgctgaatatgtgtatacgcgtttaagtttttgtaaaacaaatgttatttaaattttttaataaaatttgccaaatttttaaaattttatttctttcaattttatttaatttatttttttcttaaagaaatatttttaatttattgtgacttcattattaaggattgcttaaatttttttaataatcatcaagttttataatccagtcttttaaaagtaaccatttcgcatgagtaaactttatttatccatgcctatgctagcaatgactcttatggtgaaatagtaaatttatatgtctgaataaatacttaagaatttgttatatttgtttttgtaaaatattttactttactcttgcgtgggttgatttatcgataagctgtatttttttcgcgacctgatatttttttgggtgcgtatttcctctattttgcatttattattaattgtcaatttataaattattttatttgaattatttttttctttatattcatttttttaaataaattgtttttttttaaaaatgtgtatagttatttgctatcaaaaagtctatttaaatttgatattttaaatgtgatttaaactttattatattgttttattttattttcaaaatatctaaaaataaagttttattttatttcaaccaaacatattataatcttcacacttggctcgaaaaatggtcgtggtcgtgccttttactgcttccagtccgcggtcactgtccttcctcttggaagtgaagcaggtggagactttcgtgccacagatgacgcaagtctcctcatgggcaaagaaatatttttatctttatatcttagggtattttaaaaaattatttttgcttttatttttatcaaaattgttttgacttaaaagaaaactatttttttgaatatatttattattgtcatgtgaaaaattgtttgttgagttcgaagaggtgcgtgagatagatatttcattatcatttaatatttatgttaattatggtttgaaaaaacagcactttttcttttcgcagtatttgtctatctaggtatattatctctgaaataaattttcaaaaattgacggaaattttaaaaataagttgttttatacgttgttggcaaaatgcacattgttaataattaaataacaacgtgaaggttgttcgcccgaataaactaataaataagttgttttgcctttctctacttttgagtagtgaacagttaaataaaattaaaaaattttgggtttcatgggtgatctgatcatgttggtgtagagtttttgatacgcttcgaaatttaggcttgtgtgaatttttctgatttttggggcgaacattttttcgatattatgaatttttgaacatgaaatatgtatcattttatgtctcttataaattcgatctcaaaatttgggaatagtacagaagaaaatgaattttacactgtttttttaccgctctcttttgttaaaattacacttttcgcgaacgcgtcacagccctggaagataacattattgtatgcaaaatttgaagtgaatataacgtgtagaaaaaatagtaaacgtcacgaagtaaattcagtttttctctattagcagataaagaaaaaataggtttttctctgcgctctctgtttattggctgatctctcattttctcggatagtgcttcaatgattgtcagtgcttgcctggggccatttccgctgatcaacattaaaagggataaaaatcggcattttatttgtgggtatttctcgt

SEQ ID NO: 21272 - DNA, 2202 bp, Heterodera glycines
agagaggcaaacattcaaatgtttgtaattttctctcctttgaactttgacctcaaatattgattttccccattaattcatgcccttcccttcgtccatcccacagtcattctggtattttccttcctatttttggtgctccccactttgctccgtccctccgacaaatattttttgtattattttttccatttgtgttaaataaatattttggtgttcgacattcacaaataattgtttgagcaattaaccggctcaacaaataattcataaattagtaaaaaaattaaataaatgtgttatttattataaattgatgtatttaaaatcatttcttttttcaatcggctatttttgtcaaaatgatgcatgccttttggcattcgtaccgcagcctatcccccaataattagacgattagagtggaataataatagcctttattctatccgtacaaaaatattagatgaaccgcttcgagggatcgagaatagccaatttctcctcctgaaagaaaaaagaaaacttgttctggagggcagaaaaatagtttaagtgggcagagcaaacggaaaatgacgtcttaaggcatactgtacgaacgaagggtcgacggtacacattaaaataataaggatacgttacaaagttttttagtttctcattcaatggaaaaatttaaaaattttgctaagttttgctaatatttatttttaaacaaattaattttaatatcgaaaccaacttaatgtttatgtaaaaaaaattgcttaattaatttttattaataaatattaataaaagacaaaacgaatttgatgatctcagagttttaaaaagccatgaaaaaacaattaatgattaaattaaaatttctcaatttttattgtttttgccatgcttttttcagtgtggcaaagtgttcctccgtttttgatatatcagagcgttagaggtggtttattacatatttttacatagccacacaaaatgttcaaggtacttagaacccgtcttcgcactaatccagagtctgttcttattgatttcgagctcggttttttatttttgaacttttgaatttattgaaataataaggagccagaagcgcatttaaacatgtttggcctcaaattcaaattaggatgtgcttatttcacttatctcaatcggtattacgttatgtgcaggtaaaatgtctgtttttactcctattattttacttcagagacatggtcttatccgtgaatatgaagctaatgaagaacttagaacttaaattaaattattcaacagacggagtaattaattgaaaattattctttaaatatttaattgatgggcaacttgtgcagcagggatgttgcaaaagggaaaataaaatacaagacacgagatacgagaaaaaattctattttgttaagagattttgtccataaaatgattgcttttctggttttggattaaattttaaaaattttagggttttgggtcaggttgtttcggaaatcttgtaaaaatttattaaaagatttggcataaaattggattttttggctatatttaaaaaatgaaaatattttattgtttttatttttgttaataaattttaaaataattttaaaaataaaatgaataagaaaataatattattgtgtgtgggactagaaccaggcagaaatcaatgggaggctggaagtttagacactagactaaattttccttttttattttggatttaaaagaatagatcaaattattttttttcttaatttttccaaaaaatattttttcttaacccacccccattcttaccagtgcataaaaatctcgtgtctcgtgccaaaattcgagatacgagacacgaatacgagacggtctaaaatcatccctgttgtgcagtgagatgattctacaatactttatgattcttttgcgactcataaacgatatcatcatatttcttatttgctcaattagcttttaatgcattattgcatattttaattttcttaatccattaatagattgattagatttatttaatactgcttgggcttaatttgccctacacttcatgagattattttctcataagtcaaaaagctttttgtttatttttgtagttaatataatttaaaattattattttccatatccggtgggtttctcataaaaaagttggccttgtagagggtggat

SEQ ID NO: 21273 - DNA, 1992 bp, Heterodera glycines
aagcgcattaaacaaattgaaatttatgtggaaaacctactacatcatcgagaaattacccgtctcaagccaaaagctatatgctctcatttatattcaccgcgcaaaaagaagtggcactttttatggcacagaatgaaaatggaggggaaaaaatgccgacggacaaacaaattgacgacgggacggcacttaagacaatgcacgaacaaattgtttggaagttgctgaacaacaaagcattcagggacaagctgaaaagtgcgtatggcacaaagagtaccctggaaaatccaaaaagtcggagtttgggattaggatccaaataaatggagcgcgagatccgagattaagaatggaacggggtacgggactcaaaaatggctcagcccctggctaaactcctgttatcggtttgtgcccgccaaagaactgccgtgaacccggcccaggacaggaattaaaaaattattttcactaaaacagaaatacatattttaacggatttaaagcgaaggaaatcaactatttattttatcgttttatttattattagcacaaaatttcgatctgatctcattaaccagccttttttaatttcttaatgatttaaattttaattaaaaaaaatttcatcgaattcataagattaaaacgaatgtattaccaaaaacacataaataatataatgaaattgctaaagtttgtgctcatgtaactttagcatttttcctaaaatttaagaaattgaaataaacaaaaaacgaatgtccgatttaattggcgatggcactgaaattggcaataatttgttaagtgaaagtcacaaaaggaaatttgagccgaaagggaaggaaataattaaaatgggaaaccaaaaagaaacgcaaaaaggtaataattgaattaattaaattatttaaaaaatttatttatttttcatttgttagcagcaaaaggaaacggacagaaacagaacgaaacaccaaaaagtgacgaacaaagtaaaaaaaaaagctaaacgattattgaattattaatagggctgccaaaaatatgtacaaaaagcggtcacataaataaataagaaaaataccaaatatgtaagacatatgtataaaactcaaaatatgtaccaaatatgtaaagaaattttgttatttttttgaaaaaaattcttcgtaaaaggtaaaataggcacaaaatgccataaaatgacctaaatagacttagaatcacattttattatttttaaaattattggatatttctttttttttgaaaaatccgttattttagggatatattttcaaaaaaaaatgttagctatttcacgagaaatttctatatattcttaaaaattcccaaatatgtacaaaaaaatgtaaatatataaaaaatagcgaaatttaggttttttggcgcatttcataaaattttcataaaaaatcctcaaaaatgtataaaaagtccaaaagatgtaaaatattgaaaatccctaaatatgtaaatgtataaaaacttcggaatacaaaatgtttttccgaatttagaccatgtagaattcaggaaaaaatatgtatttacataaaattggcagccctaattattaaatagtaatttaacaagacttaaaattaataatatgaatttataatttaattgttgttatcaaacattgggttacttactgtatgttgcatacggtattttgccatttttagtttttgtgccattgttcgctgatagtagtgacctgtataattttgcttatatttacaaacaagtgttaataaatcatatcaatgattcggccatcaaagagtttaatgtccacgtcactcatttccgatacaaagacacattacatgcattaatttggaaaatttttacgatggaaacggcacaaaatgagaaattggaacgaattcgcacattaattttggacatcgctcaaattgaaaattttggtgaaaaattggcaaatacttt

SEQ ID NO: 21274 - DNA, 1513 bp, Heterodera glycines
ctttcgcatgcgcttccctttttccctctgctcaattctttgtatttttcccaaaggcaaaattcgtaggaagacgaagcgggctccaactgagcatcggccaagtcattgtggacaatctgacaatggacaaacggaagtgttcaaagtgagtttgctttgccttaagcgtctcagtgatttgaatggaattgcgcgagtcgcgctccattagcatgtgagcggcgccgaccaacggcactttggtggcacacttttgcgtgtcggcggcggaacgcagaaaaacctgcgaatacgaaattgacgcgtaattttgaaggaaaaaaacgattgaccagcgccaacgcgggcgcaccgaagccttgagaatgaacatcgtcatggaaggacgaattgaaatggatgtgaatgtcgtagtcggacacttctgtcggggaagaccgaattgtgggatttcatcaacagcaaatcccatcgaaacattggccaattccgttcatttggctaattccaattcaaattcccggcacaaatcccatcgaactaattccgtattcgaacccaccccggcccaacccaaccaatgcctccaatcgaccgaccgtcaaaattgtcgtcgccctccgcttcggccttcgcttcttccctccaccgattcatttccgcttcgtttccacttccaatagcacttttattccccgctgttatcattttcttcgactttcgtttgggccgtgcctccacacaaaaaccctttgaattttgcaccaatttcaaatgtaaattcaaaaaatgaaataaaatttggcaacatttaaaaggacaaaggtttcacttgggacgtccatttgcagcgcaattcgcattggtattcgaatgctttgatgtgataagagcagcttaacgggggacaattgcgaagaatggcaccggacaaacggacattggcacgacatttcgcattcgttcgtcctcactcaaatcgacggagcccagctgaaacaccgacgaaaagcacaaatcgaacagagggaggggacgtgcccttttgagggaaagcgaacggtgccaaaggaaggcaaaagcatcgccaacccattcagctgatggcacaaatacacaaaaggcagtgccattcgctcgaggcgatatttgcgcgtcgacgtttgaatttggctgcgcaaatattggacgagcaaataaccgagttgggcattcatcgcggcaaaacttggacagacttttacaacggcattagcaaaaggcacgggccaacctcgagaagaacacgcaaattgccgcgactctgagaaaatggacaaaaattcataaagggtgggcaaataatcaccgaattgcccccgggacggccgaattcaaaaggcgaaagccgggcaaatcggtgaacacgcagaagcggtcccagagaaaacggagtcggcggagcatttacgagaaacaaagacaagaagaatagggattcctcacacccgactttttagccgttcgctcc

SEQ ID NO: 21275 - DNA, 597 bp, Heterodera glycines
tggtaatgcatgagaaactgtcttcacattaaaagttgttgaacataggcatttaatcgttgtcatttctggttgggatgttgctgctgtgtcgcagcagacgacgcatttcccagcccatcggacgatggcgccgaagcgatcaaagcggcagctgaaggggaaaaggcgaaatggtagatgatgtacagtatgggcaacataccgtaatgctgcagagcattcagatcaaaattggacgctgccgccgccgccaacatccccgggggcaactgaaagacacagacaattgccaagtgaaaaacaaacaaatccaaccccttgggggacaaacggaggcaaaagggatgcattgggttgttgtgctgcggttactgcttgctgctgttggtttgtggtaacggcgccactctgtccagcacttgcgctgttattcctacgaaatgctgccatttggtgctgctgttgttgttgcgctgctgccaaaatgttcgacgcagcggcgcttcccggaggaatgccaaattgggcaccggcaccaacaattaacgaagagaaaggcgggaagaatgggtgatggaggggaggggcggggag

SEQ ID NO: 21276 - DNA, 1575 bp, Heterodera glycines
  unsure (1)..(1575): unsure at all n locations
ctttgaacttggcacttttgtgccatttatgcttgttgcttgttggcattgtttgtgcagtgtacaaaggtgccgacatcagttttgtcacacagcaggaaaaggatggtcaaccctttctcgacagtagcggcaaaaaactgatctgtttgcgttgatgaagtcatacggcatgaacgccgtccgactgcgcgtttgggtaagacaagagatgaaaaaacaggaaggataataaatggcatgatgagtccaatgttaaaggatatatgaatttaaggcaaagcacagccaccttttttaaggacattaaggacagaaaaaacataatcagtgaattaaatctattctgaaaaaagagtgatgagtgcaggcagatccaaagctcaggcagggttgggtagaaaatcaacattaaaagctctgttttttttaaatttcgacatagggaaactgattgtaaccacggcctgtcaatagaggatgtcgagacttgagattgagagttgaacccaagactcgagacggagaattggatgaacttaagaatcgaaaccttgaattgaatctgaaattctagaccgagaaatgaactcgaaacctagaaatgaaccagagaccgacaaatagaaagcaaaataaattgtaaaaataactgatttgaagcaattttgcaaaatgttctgatttttgaccccaaaatctgattttttgagcccgatgttctgattntgaaaattttcgaacgcacccctggtttatggtaaggtccgaaacacacagttaaaaaaattaaaaattttttatctcaagatccgtactgatatggtcgctctcttttgttaaatttgcacttttcgcaaaacgtttttttccgtaaaagtaaaaacaaaaaattttttggttaattattaacaaaaaaatatcgtatcgtgtcgtctagtgtctcgtatttgaggagcgtctggtgtcgtgtctagtattttatttatttgttcgttttctagtgtctcatattttatttttctgtggcatcatctatgctagcacacattgattgtttggtcatattgcagcaaagattaatgatcagtttttgacttttttgtggattttttggtgtttctcgtgatattatttaaacatgcccgagtgatgataggaaattagtaatttttttcattataattattgggttaaacagattttggtagtaaaataagaaatctttaaaagtgtgttgattttttatagtttcagaaaatccttgaaattttgttgtccaacatttgtgcaattattatgaatgtttatgcataaattttttatggaaaacacaaaaataaaaaatgaaaataaagtaaaaccatgattttttctccttgctcttcgttttccgttttttctcctttttatgacaataatttggtgttacccgttatatcactgattatttggcgaatttttgctatttttaatgtcgattttcttagatcatcggttcaaatttcgctcgtaatttttcgacatttatttgttgtttcaattcggaaacattttgtgtcaggaaaaggcatt

SEQ ID NO: 21277 - DNA, 1466 bp, Heterodera glycines
  unsure (1)..(1466): unsure at all n locations
gaaaaaattttttaaatttaaaaattatgttaataattatgaaaaaagtcgatttttaggggtgtatttttcaattttcttgtatttttattgcaatttttctcaaaaaatgccaaaatatgtgcaaaatatgtgccaaacccccaaaatatgtgctaacatattttatgtgacaaaacgccaaaatatgtgtttttatgtttttataagtcgctctaaatcaaaaattgttcggagataatgctatttttgggcttctctcgccataactaagccgcaaaaaaaatatgtaaaaacataaaaatccggtctctattaattattaacaaaaaaatctcgtatcgtttttgtttggtcatattgcagcaaagactaatgctcagtttttgacttttttgtcgattttttggtgtttttcgtgattttatttacccctcccgagtgatgataggaaatttgtaatttttttcattataattattcggttaaccaaattttggtagtaaaataagaaatctttaaaagtgtcttgattttttatagtttcagaaaatccttgaaattttgttgtccaacatttgtgcaattactttgaatgtttatgcataaattttttatcgaaaacccaaaaataaaaaataaaaataaagtaaaaccatgattttttttcttgcacttcgttttcccttttttctctcctttttatgacaataatttgcttttaccctttatatcactgattatttccgaatttttcatttttaattcattttctttgatcatcggttcaaattccgctcgaatttttgacattttttgttgtttcaattcggaaacattttttgtcaggaaaaggcattttccacaactaaggcatttgtatggttgttcagggttcggtttgcttttgccacatctataatttaaaagtgatggaatttcgaaggaacaatatttaaaatcttagtgagacacttgcggaccgcgttttctggattgaactgtcaaaaaaataaagagtgatcattcaatttgaatttttacatgtgatttcgtcgccgaaatttcgccggacataatttagccgacgaatttaaaaaaaaataataaaaactcttannaaaatttttatatgaaaattcaaaggaaaaatttttttgaanaaggctattgtnaatgtgaaaaagttatataaaacgttcccanaaaaatttcatttttcacgtccgataaaaaaagtataattttaatttgaatatttagttatctgcttaccgtcattaattttcattttgggaggaattgagtaatctggaaatgcatcataacttttttttattttttgacagttcgggcccctatcagtccgcaaattgtcggctaaccatttaaaagtgggaatatttgttcaagaaaatttttgaaatttgcaaaaataagttttttgggggggggggggggggggg

SEQ ID NO: 21278 - DNA, 2651 bp, Heterodera glycines
ccatcaaagtggttgctgcattttgtgaagggttcaatttgaagtgctgtttttctgcgaattccttcagctgattcgccgctttgattcgctggtaaatttggttgacgtaaatgccaatgtccaacactctgagcaccgattttatcgttggatttgcaattttggaaattttctccgaattttcactctctataaggtcaattaatttctggtacattgcttttagataattgtcgtcagaaaatttgctgacttttttcactttgaattcgaaaaagtccgtttcgatggcattgtttagaaaaagcaaacaatgatcactgatcactgccaaattctgtttcggattgatcgtttcgtcaaatgatcgacgcgtctcggcactttttgccgaatcttcatcgctttccgcatttttaccttaagtaatttgaagttggcggcttttttgtcaaaaatttccatttggaaagttcagttgtgttacggtagctcaatgtttagacattttgcccattttttattatatctgttaaggtttgcttattttttaaatccttggaaatttttaaagttttaaaatttaaatagaacgaaaatttagcctttttgggtttttgcaaccaaaaaaacttttataaaaattattaaaggtggcatccctaataataaatattcatgttttaattttttatattttaaatccaattccatttaccacttgtctctgctgtcatttcccatttttgttctgctgaatgtttttccaccgttctttcgttatttctttcccattttcgattatttttgccattttttatttctttttcatttttcatttttaattcttccgaatttcctttttcttttgtctctgtttcttctgatgcttttgagtttttgaatttttcactttttgataatatttttcctttctttttgcctttttcctcttcttttttcttccatttcgctttttccttttcctttttcttttcttttttggaattttcttcatttaaatttgaactttctttttccttttcatttaaattttctgaatttttttccgttttttcttcaattttattaataatttttgtctctttttcatttttctttttgaaattttcttttgcatctgtaaaaatttcttctccatcggatgaatcagaagaagcagacaattgttcatttgctgttaaatattcgatcttaaattgaaatacttttttctattttttaaaataataaattaccggtgctaacattttcctaatttttgcaatttcttcgccgtttaaaaaatttttcagtaatttttctaaagaattatttgtaatatttttaaaaattaattacaacaaaaaccgtttttggagaacatttttttatgtttttcttcatcttccgattggtcgttaattattttgctaattttctttaaatgtaatttccccaaaaaattgttcttttttactttttttaaatttctgttcaaacacagcgtaaattctaaaagaaattcttcagaaaatttttctgtcgccttattttttgcggagaaattttgcattttttcaattcgccgaatttgtgcgaatatttcttcggtacaaattgcgagaacactcagcagagtgacgtcctcgggtccattctcccacagaagcggaacattctaaaacaaaagcataatatttaagcataagtttttcatggcggggaatattttatttgcgggttttttaaaaagttcagataattttgtttttattttcatatattattctacggagaaaaattgaatatataaactgttcatatgtacaaaaataaatgcaaatttgaattttcggtccaaaacttaatgaaaattgagttattcgttcatttattattttctgctactcaccttcttctcgctcaccatttgcttatacattttggtgtctgctaaaaatcgttcgctcatttttgacactttgccatttcgcgcaaaattttcaacgttcaaacgaatttttttgtcataatgccaaaaaagtttcgaatataaaagccaatcgaacctcaactgatcgatgacatttacgaccaattcttggaccaattcactgaattcaccttcaaatttctgtgtttatttgcatgaacgggtaaaaatgccgatgtcattaatgacaattattcaattaaaacgaacttgcccccgtcgatattttctgagattcattccccaaaaaatcttcggcccattctccgtataaaaatgtgtccaaaacaattcgagctctccatctaccaacttttgtgttcgcttcaaaaaaagattcgtacaattgcgcgtacaaatcattgtatcgttggaaagaaactaaaaaacaaaaaataatcgtttataatttaattttaatttaattcattaaaccgacataaaaaccccagtgtttcatggtgtgcattgctaatcattgccattcttgggaagccgaacaatttcacgaattttgtcctaattgcttggagttcattgtaatcattccttttccatacagcactaaagaatttttttatagcgtatatgattttttatttgcattttttatgtgtttattgctattttaagtttttttttacttaaatgg

SEQ ID NO: 21279 - DNA, 1107 bp, Heterodera glycines
catcaatggaattttccacatagcgctagcgagtcaatgcaagatcactttattttgttcgttctaagaatgtagttacagacccgggactgagtcaacaaatgtctttgggacttaaccgttcactgacttaaaacgcatggaactgtgacaaatacggtgtaaatggattcccctcggcatgtaatcgcgcatcctttgaactttcgactttttgcccgaattctcgtcaggggttcaaaagaaaataatctagtgtgggcgaactgaaaatatgcttacaagggcacctcgcgaactgttagcaataaagtgggtataaatttggtatcattggatagagagcatgttcgacttctattgtgatttttttagtaatagtggtatataggaaaatataaagttatggcctcaaaaatcgaaattttgactgtgttttcactaaaaattggtggctcagttggttaaattcgcatttttggagctcgggttcaaatccacacaaaaataaattaattttaataaattttaatataaataaataattttaaaaagcattttttagactaagaaaatgtataatagtttttctttagagaaaataagcaaaagaataaaaaaatgtaaaggatggaaattaatagaaagtgaaaaaagctcgacgctgctctatccaatgataccaaatttatacccactttttgactaacaattcgcgtggttcacttgttatgtggcgaacggtatccattggctacagtacattgacaggccatgcaatgcaacgggtttatctgtaattttttgtattgattttgccacaaaagccaagccattttgaccatagggaggttgtaacagcttcggtcatcggacagagtgatccgtgatcagaaagagcgtaaaaacagcaaaaccataagaaaaattcaagcaagcattttttgttgaattttacgaataaataaattaatatataaaaagtgtgcatttttgagcattttgcgtgccttttatttcagaaaacaccaaactacgaactaaattttatccttttttttcataattaaaaatgaataaacattgaaaagttgatgtttgtggctt

SEQ ID NO: 21280 - DNA, 1749 bp, Heterodera glycines
tttttccccggaatgtttttttccaacattttttgttttccttatccttttttccttttggaggtttttttttgctttaaaaacctttttttgtggcgccttttttccaaaattttctgggacagaagggggggggggggttccggcggtgccgacaggcgccgccggggaaaaaatttgaaaatttgaatgcaatttgttaacagattttcatcaaaaactgcctaatttttgcgattttaagccatgcgacgactttttttgtttataaaatgggttttttttacggcgcgcttttaaaaaaatttttttgaggataggggggtccggaaaaatttgtaatttttaatgcgagttgtttacagatttttctccaaaaatgaccaaaatttgcgatttttggctaattttttaagaaaaatagtgacttaatgccataaaatttcaaaaattctcaaaaattacatttttaaatgacataatgccataatttaatcaaaatattgttgaaaattacaaagatttctcaaatttctttgtttttaaacttttccaaatgctcattttcaaggacgtccttgcatacaaggacattttttattttcaagaaagagggcccaatttcagggacgtccttgccattcaaggacggatggcaaccctgtctaagccgctatcaattcagtaaagtgatcaaacagatttaaaaaaaaactcattaattatgaacaaaaagaagtgttaacaggaatttttaatcatttttaatagcctattatttgagcatttagtggtgaaatatttacaaattagtccaaaaatggccgtcggggaaatttgatagattttaacctggtcagtaacatattgtgcatcaaaaataaggaaaatttaaaagacttaaagcctcatttagaaaatttagccttattgacatacaaaaaccacaaaatgaggctaaagcctcagatcttggagccctggatataacagattataatagtcaggatgagaaggatgatttagagattgatcgaacatatttggtcaatcgtaaaggcactgatgtgataactagagaccgcatttgaagaaattccaaaatattgaacaaaactaaaaaaaatttgtggaagaacttctgaggaattaaatttgcatttaatttttcaaactaattaaaatttggttttaaagaaatgatcacaagactttaatcttacgctatatccaaaacttaatcaaagaggggtaatactaattgatcgaccaattaataataggatgagttgtttagattgattaaaaccaattaaatatgatgatttctgcaggtaatgaaaaatttaagccaattaaatataaaggattcattcaaaacatttcaaaatattgaaaaattatttagtgttttaattttgtagggccatcccccgatggccccgttccaaaaattctgtaaccaaaacctattgggtggtgttccccatttgcagcctaatagtaaaaaatggaaaaaatatataattttggagatggggtgaaagcgaaggaagagaagacatttattccctacactctctaatttactcttgtttctttattgcattaatttttctgtgtgttttcacccgtgaaaaatttttcacatataattaagaagattaagaaacatatttagggaaacataaacaaatgatgaatgaaaatgaaaattttgaaataatcgctgcgaaaaaaaggagtcgg

SEQ ID NO: 21281 - DNA, 3213 bp, Heterodera glycines
actttgagctccgtctcaaaattggattgtttgctccccccgagggtgcttctcccccccccccccccctttctcccccttttctttctccgaatttcgtgcaaatgttttattccaaaaagaaaaatgattcttcgattattgttgagcaaaattcccactcctcaaaaaatgaacatttcccctcattagtcatttataaatgtataatttaatactatttgccggtccatttgttacaaatcaaaaacttttcgcttttgcacaattaatcgcccggttcgatgagtgtataacaacggacccacaaattagagtcagtataattagaaagattctgttctttattttctttgtacgatattttaccaattcccattgactgttgccaataaattggttgctgacatccttttgagtgaattgtgaatgaaaaaataaattggattatccctaccaaaacgagcaaaaatattaaatgctaaatgttttattcgtgcctttctttcttcacttttcgcttcgtccattcattggattgtctatttttcttggcgtttcacttattgttgcggcgatagaaaatgtcgcagcaaaggcacaacaaatggccaattcgcgcgcggaaacgactggagaagagagtgtacagcaaagggttacaagcggagcaaagaatggccaaggcattcatcagaaggacgaattcgtaggggggatggatggacaagttgaagagacccctgcaggggtagagagagaggggcataattaacgagtaattagctaactaattggggtgatgtattaagaattggacctgcataagaaaagcctgaattggcgagtagcagatgaagtagacggacacacaagcgacctgaagggggggggggacggatgcacggcatcggcgccattcattggcactaattaattaactgtcagcgccattaattggccctttgtcactaattaattaacgttcgtcttatttgtgtattcggcgttctttctcctcattatttaccagcattttcaccaccgttcgcctcgtcttcagtgcttcttcgtgtgcgcccgaaacgggcgcaaagccaacgcaggaattggcacggctattacccttcgagaaatcgttgaacaacggaagttgggccatcgttttgggccaattttggcaagctaataaaaggaaatactcgggattgatgcgcaacctttagaaatatttgtgaccggaagaattggggaaaatcacttcggtcagtcattttacagatcactttttgtgcccaattaatatcttttctccatttttaccttttccattttcgtataatttgtcattttttgcccagagaattcggcaaatttttgtgtaaaggaagaggaaaataatgccgggcaaaaggaagagaacgacgaacttaaaaatgaattttgtaaaggataggcgacgaaggggggggggggacggacctaggcaaatttataaaagtgccaaaagtagcttttcctgttgaaatttgtgcacgcaaaagctgaaagacggaaaacaattcaatcgtcggattccttctcaaaacgcgtgcgtcttcttacagttttccgcctttttgttatgcgtcgcatatggcaaggcggccaaagcgacaacgcaccaaacggcacaaattgtgagcagaatgttcttccgagaacagagacggcgcgcatggagtggaacggcaatggcaataaatctaaggggggaggaagtgaaagtgatcggaatgaacggaagacgggacagagagagagagaatgagagagagggagggagagggtgagagaaaggagagagagaatgagagagagggagggagagggtgagagaaaggaggagagaatgagagacagaaagattgagaaagggagagagagagagagagagaaggagaaagagggagagaaggagagacagagagagagagaaagggagagaatgagagacagatgaaagggagagagagagagaaaaggagagagaaagggagagaatgagagacagagagagagaaaaaggagaaaaactgatcaaaaggcgaatgttccgagctcaaatcaccgaccgttccacgcaaacgacaagttgggtgaggatggaagtgaaaaggaacacgcattccaaataacgaatgatggggcacaaaactttcgaagggatggaactgtggggagagaagcaaaacgaaagggatggcatacccgcaggcaaaacccaaacggggccattgtgccgaagggtagggacccattcgacggttgttgcctgaagaaaggaaaggcgtaaaaagaaaaactgatcagtaaacaacatacgagaagattgagcgcatcggcaatggccaaattcaacaacaaaaggtctgaatggaaaatgcaaaaagagggagacggagggggggggggaggggtaaaggcccaaaaagaagtgatcagtgaatggggaaaagcactgatcggatcacgaggggaaagccaatggaattccgaccagcaaaagtcgtgggcactcactcatcacacttttgcgcatccgtttgtctccaatgattgcgacaattacgagaagattgcctgaaataaggccaacctaacgaagtgtttgttttctctccaatttttggattttttaatttacccaaaagaccgacaaaagtcaacaaagagaaaagggagccgaaaatgagcacagcagtgggcgaaatgagcggacgacgacgcatcgaattggcagcgaaaatggcactatcagagaatttcagacttaacattgtaaaataattaactcgtttctttccgatgaatggtcggtcgaacgattgggttaataaagcaagcgaacgacggacgaagagaaagagaaaagcctaattcaatttagaggaaaaggaacagcaatttgtggaaaatgaactgtggagaaaacaaaaggcaaaagggggggggaggtgaaagttggtcttaaaatgccaattcgaactgccatcagttcgctcttgcatttttgaaatgttagaggtgaaaagggaccctcccatcagaatttcctccgtcgcttcaattggcttcttattttgacgacttgtcaaagcgcaactcagttaattaaaaggagaaaagtttcgccattttgttgctctccccttttccccgtttttattcgga

SEQ ID NO: 21282 - DNA, 1896 bp, Heterodera glycines
  unsure (1)..(1896): unsure at all n locations
tgtgagcggtgtgtggccgcgggcgtggacttggactcccccccggaccgacgagcgcctggctgttgctgcggcggtcctgcttggcgcgacggacaacaccgccggtggctgatgcgcgcgcgcgaggacgcgttcagcgacgatgacgacgacaacgcaaacgcggacgggggacgacggtggcggcggccaaacccgcgccgcttgcgtttcttccacgacgcggcgaccgggcgttcgccgatggcacagtttgccgattttgtgctccacgacgggcccgtaaatgtgcgcaccgtgatgctggcccacaacggggtatgtagtaagcgtggcgtacagaagccccgaaatgaaggcatccctcggcactttgtaggggcggtacgatgtgcatctgctgatggaggagctacagcggcgcggagtgcgcccccggcggctggtcgccacagggctgcgcgtctacacgctggagctgggcggccgaaatcagcgcagcgtggtcgccaaggactcgctgaactttttcggctgtgccctctccaagctgccggccatgttcgggctggacggcgtgccggaaaagccgttcttcccctacaactacatccgggccgaaaacatggatgtggtgcatgtgggactgccgccggctgtcgactatgacccggaccggatgcgcccggcggagcgcgacgcgttccagcgctggcatgcggaggagcaacagcgtcgacccaaccgactgttcgtgctgcgccgggagctgctccgctactgtgccaacgacgtgcgcattctgcggcgcgcctgtctgcgcttccgccacgtggtcggtgagctgtcgggaggcgtggagccgttcctggccgcctccaccatcgccgggctcgcgttggtcatctaccgacaacggcatctgccccgtgatctgatggtgcacacgccggagggcggcttcctgcgcgggcgacgcgcttccgccgcctcgcgccacttcttcgcgctgctggagcgactgcgcccgcaatggcgtggtcgactgcgcactgcgcgctggtccatcggcgaagcgtgcgtggaggacgacggctaccggctggacgcgttgctctaccgcccggtgccgctgcgaccgctcgtcatcgagttcaacgggtgcttctttcacggtaaggaaggagagtagggtggggggagtcccttcatgataccattctccacgtctctaaggttgccccgagtgctacccgaggcgacatcaggtgttggcgggtggccaaaccgccgagtcgctgtgtgccaggacacggcagcgtgcctgggagttggagcagcaacacggcttcacggtgcgcacggtgtgggagtgcgccttccagcggtggctgcgccgccagcccacccgagtacggcgcctgtacacggatgtgtgccgggcggtgcccggcccgatggacctgcgccgggacgcgctgttcggcggccgagtggagccgttcgcgctccactacacgtgcacagagcgagaggaaattgacgcattggacattgtaaggatgngggcggggggggctttgtgatgcaccccagcgcccttggtcattgacttcatgctcttgaccaacgtgaaggcgaggcgaggaaggcgaggcgcctcgggtcacaaaagacccaaggggccgtatggcgcgcaatggaatgcaccctgagttacagacaacccaggggagccaacgcgcgaaatggaaagcgccccgggttacaaaaaacccggggggggggggttgtacggcgcaaatatcctatgcgcaaatacaatgggacaatgcgaggcgccgtgactgacgaagatcccgtggggcctacttactcccccctttccttgct

SEQ ID NO: 21283 - DNA, 1075 bp, Heterodera glycines
cttttcgggcagtgcacgaacctttatatcaatttaaccccacaaagaactggttgatttacctgtcgaatgcaggagaacctgacccgcttccgctgctgttggcgcgcctttttgtccaccaaagcgtcgaacagctcgcgcttcatggcgtccaactccaccgggtcacgctgcagcagtgcctcgtcatcggagcacagttcggactcggcggtgctggccgaggagggcaattggaagtgttcaaattcgacgctggtctgacaacgaaaggggaggtttttattttgagtgcaacaaagaattttttggaaaatttgaatgcatgcgttcagtcaaattccccttattcaagtttagaaatttcagaaaaaacccatatattttctaagagtaattcttcataaaatttcgaaaaaatctctgaaaaatttcaaaaattttttacttaaaattgtttagaaaaattaataaattttaaattaaaaacaaatcagagagggggggggggggactggtaaggtagtagtgaaattggggggaaggggtacaacagcacattccataaccatttttagtaatgaagcgctaatagttccttcaaccttcacactccataagacacacagtgttaattggtcaattaaacaccggttgaatgagattggttttatatgtcatagcttataattcactgaccagcttcggtgcctcgtaactctgttcgctgctgttcaccgcgccgccggcgatgccgtgccgccgcactccgtcgtcgctcgtcgtccgcccctcaattgtgatagtactgctgctgctacatggactaatgatgttgttgttcatggcgttgtcttcgttggcattgtacgccgtcatcgtccggccgtttctcatccgtttttccgcttcatccgtctgtccttgctgatctcctcgctcttccatttctacctcctcctcctcttcgccgtcactgcccatgccaatgttttccaattgtgtgtaaacggcctgaacataaaatgtgaaatggtaaataaaaaacactttttgatgccaccccaataca

SEQ ID NO: 21284 - DNA, 1559 bp, Heterodera glycines
tttttaatttaagggaaatatgaaaggttttttacagaaattttctgaataattcgttcaaaaggaaattggatttttcccctccttattttgtcctacccaactacagtactggtgaatgaattcaattttccgaaaccgtatccatttatagtgtaatttttacaccattacggtatcacattaccgttcccgactttgtcgtctttgcggtgcctccaccactgctgctgctcgaccttttcttcttgctcttcctgttgctgacaccgtttctgctgctgccgcttgccatgccgtcgtcttcgtcatcgttggcatcattgtggtgccctcctcctcctccgtctccgcccgctgtgtcctccgtgccgtcttttttcgatgcgtccgcctcctccgtgcagcaattgcacgagtagcgcaacagcagcagggacagcagacacgacttggcgtacgtgaagaagaacgggcgggcaaaggccaaatcgatgaacaggtaacgggtgagctccgaggacagcacccaaacctgggcgaaagcagggatgaggaggtgaaacaatgtcgccatgtgtttaaggtgtatcgtttgccaaaatttttgttttttttaaatgtataaaatcccgatttaatgaaaatgtcgggctggacgaaaccggaaacattaaaaataagaaattttaaacgtataaaatcccgttaaaaatatcaaaaatctaacttttttagtttctaaaatttttaaatttatagagaaatggttaattcatttaaataaccgcgggatatttcaaaaaaatggccaatggattaaaattgtagggaaaacaaaaattgttgcgcatcatgggaaagcttccgaaaatggtcaagttcaaacaccacaaatttggtgtgcttttatgaaatttcttggcgggcaccacgcaattctctccatttaaatgtcccagtgaaaaaaacttacgacattgacgagaacgagcagcccaatgccgagcagtcgttgcgaattggggacaatcatccgatggaatgaaaatggcgccgcccgaatttgtcagttgtttttagttgttgccactcttctgtccacagcacacgacgtatgtacacaaacacacttttaaatgcaaaaataaaataaatatattaaaaatgaatttttttttaatatttagcgacaaaatttgcgcaaattcttgcaatggaacatcataaaatgaacacatttaattgtggtttaagtaaaataaatggtaacacaaaatgatcaaatggaagaagatgaggggaggagcaccaaaattgcgtaacagcaaaagaggaaataaatatataacggagaatggggggggggggggagaacacattcggatgcatttatcaatcaaaatcaatcacaaattgttgtgttttttggtggcgacaaaaattattgagaatttggtgcaccaccatcagcaacaacaacaaaagcagcagcaacagagtgagaggagaggaggaggaggaggaggaggcgatgaatgtttacaatgtaaaaatgg

SEQ ID NO: 21285 - DNA, 2054 bp, Heterodera glycines
acccaaaagtgtacacttcagtaccaggcgaataactcgccaggggttgctttgaacgaaaaattgtttctgagcaaaaatgtatagtatttgaaaggctatccaaccaagttttaaaatttcgaaatttttgaaaaattttcaagctaggcctaaaaaacgattttttggtttttgaattttatgattttttaacgaattttctcagaaaaacggagaccactttcaagcaaccgtttttcgagctctatcgattggtgacatttttagaaaattttcgatttttttccggaaatagaaaaaatttttggcctgagcgggacatttgagtcccgggcccataactcgtcaggggttggttttagccaaaaatggccttagagcaaaattgtagagctttttaagctctatcgaacggtgtacttcattttcgaaaattttcaaaaattttcgagctaggccccctagaaattttcaaaatttttttttgggttgaaaaagaggttgaaaaaattttttctggggtaaattagggtcctgagcacaaatatgatgtttattttagtttcagattttttggaattttttaaaaattcgaaaattttttaatttttttggtccttggaaatttgggttaaaatttgaaaattcataactcaatggaggactggtcaatttaagtgaattaaagctttaaaaatagcaaaaaatcgggagaattttatgagatttatttgaaatttatatcacaaaaacaaaaaaagttattccagaaattctggaaattttcgatttttcagaaaaaaattcagaactcggttctgtaaaggtgtttttgaaattttaaatactgaaaaaatccgcaattttttgctctattatataaattttatttggcatttctatcacatttttaaaaaaagatacaaaaataaaagtgattttgggattcgggaccaaaggggggagcatatggtttttaagtgaaaaaaatttttcaccaaaaatcttccaaaaacatgtctttaggggttatttgggccgctgatcacgaatacgtgatcagattttacttttgacacatcgtcaagacctcagaatccctgtgtgattggggattctgaggcatcattttttgggggggggggcgaagttcgaagccgggcggtgtacattatttttctttgtattttttgggttaattttcattacttttaataaatttaaatgtttggttttattaataataaatttttttagtttaattaaattattttttgatgaataatgattttcatttaaattatttattatatttaattaaagaatttcagctattattttaaaatttaattgtaaaatttttttcatttcaatttaaataactattcaattattatacatttcataatttgtttttcattaataaaaagtgtattatatgttaaaaaatgaaaaatataacacatcgattttttatctattttgattaaaaacaattccttaattaccataaatgctctatttgaatgcccactttctaatcactgttgtacctcttttatcacttttgtacctcttctaatcacttttgcacctcttctaatcactgttacacctcttctaatcactgttgcacctcttctaatcactgttgtacctcttccaacacatcttccaacaatttttgtacctcgtatgagctcaacaacatttaaatacgggcgcgaagcgcccgtccaaggccaacaaaattgaaaaacaggcgaagcgcccgactgaggccgcgaagcggcctaacaagctaaaaaacaggcgcgaagcgcccgtatgagttcaacggatttaaaaaacgggcgcgaagcgcccgttcaaggccaacaaaaattgaaaaaacggcgcgaagcgcccgactgaggccgcgaagcggcctaacaagctaaaaaacgggcgcgaagctcccgtctgaggccgcgaagcggccttaatagcctaacaatttttagaaacgggcgcgaagcgcccgtctgaggtctcaaagctgccttaatagc

SEQ ID NO: 21286 - DNA, 1327 bp, Heterodera glycines
ttttgcgaacaaagggaaattgtctgtgaaattaggccttccttagcttttaaaatcaaacaccaaaacaaaataaatttatctaataaataattaaaaagacaatcaaaattaaattaaaataagtcaacaacaaaataaatcaaaacaaaaatcaatcgacgaccaatcaacaaaacgcctaaaaattatccccaacgaccaactaatccaccaacttcactctagaaaaccaaaatatttgggtcgaattcaaattaaacattatgccaaacaaattcaaacaatcaaataaaaggtcaaacagtcactaataccacaggggttcggggttgcaagcgtcggggttcgtcggggttaaccctgaaaaatggccaaaaatgtcggggttcggggtcggggcggggtcggggtcgcaaccctactttaaaattttaaatgtttataattatatttgtatgatcgatcattgcaaaaaaaaagaaaaaattttttgcatttatattctggtagagaacaattaaagctattaaatgataccatgaaatattaatttggtttaacttggccaagttatgcatttttatgtgttacataatttttgtttcgaacccattggccgttttacgaaacgcgcctagcaccgcaaaaacatttagcgcttttctgtggattacccatatacaaactgctgagcttcagattttaaaaaattattggtgactaaaatttgcaaaaaaaagagagagagaaagagagagaaaaatttcaaaaattttaacaaaaatcaaaaatttattgggaaataaattttgtaaaaaaagaagcaaaattaaaagaaaaatggataatggaattttcaaaaaaaaaatgtgccaaaatttttggaatggaactattggccaattatgccatagcacaaaacggtattcttcccccccccccccccctcccacgaaaaaagtgccattttggtcaggtggcattttttgttggcactttcgtcgtcctcgggagcagcgcgtttccgccccccgtatcaatctccccccagctcgattccctcccgagaatttttttttttgaaaaatttctaagttagcaaatattttttttaatttctcggggggggggggggaaacgatgtggggggaaccggcggggggggggaatgaatggcacccgtcgtcctcacacgctttgcaggatggaattgcgcaagtccaacaccaattccgtctgccgaatgttctttgggcgcaggtcatcttctgcgctttttctcctcccttttttgccaaaaatgcgcctcacaacgctttttgat

SEQ ID NO: 21287 - DNA, 1495 bp, Heterodera glycines
ggatttcgatttgcaactctgatcagccttatcagtgctttaccagtatcacaactatcagggactggccagcctgattagagactgactgctgatcagcctgattagggactgactgatcagattaggagctagctaaccaaaatgaatagaaacaatcagcataatccgagactgatcattaggactgatcaaatgtcaactgaaactctcgaactgatcagagccaatccaatcaaccgacctgatactttttcctgagctcagtgatcagatgatcggtgacagaatattcaaaggattgtgccatctccagcaaatcgtcgggccgctcaatgctcgacggaatgcgcaaaatttggttcaacaaattggatgcatttgacgacggcacaaaagtgccatcggcgagcttcaaaagtgccagaatggcacggaacactgtggtggagccgaagatgaacagatggtcccacactcggaacagaagccgaggcgaaagcacagatgcaagcaaagtgatcagccttgaaggaaatgatcaataaatcaatttgatcagagaatttattgtgatcggaaatttatggcacgaagattaagaaaaaaaaaccgccataacttttcttaaacataaagcaattgaataatcttggtatctttcgataactcttaagttttcaaaaagttgcaatcaaaaattattcaaaaaattaacataataactttctgaaaactgaacaaaattttctgaaatttctcatgctaatagagtataacccaagaagagctacagtataataattaattaatttagttttttttttaaagaaaagttacgacgagtttttcccgaaaaaacccattttttgactgacgaaacgttatgacacattaaaaaaattttttatgtcaatcaagcgcttggatttaggcggctaacactgctaagcaaacagaattgttgatcagtggtttaatgatcaatttcatttactggaggagggactgactgactgatcacaatcaatttctcgagaatccgatcaaataacgtggtgagccgaagcgacaaaaatatgggtgtttgtaataattaaatttaattattatttaaattttatttgctaattaattaattataacttagcttaaacttagtcaaattaatgaaatttagtatttagcgacagaagatcgaagtatcctctactaatatgtttgtaatttttaaaaaattagtagaaatttacaaaaagttgtaaacaaaaaaaagctcgaaaagtttgggctcaacaattttgaccctaacttttttgaaactcaataaaattttttgaaatttatcagaataatagagaaatttttgggctatcttttcatataaagtgcggtgtgaattaattggtctttaaacaattttcatgcatttaaacgaccttacattttttggatggacataaaaatatgacactattaattccttcataacttt

SEQ ID NO: 21288 - DNA, 1220 bp, Heterodera glycines
  unsure (1)..(1220): unsure at all n locations
ttttagagcataacaactgatgacagccactgtcatggtttccaagnnagatttctattaccagattgccaaaaaaagagatagccatttttntggaccgtccatacctcacatatactcaaacggcccgaaaatcatttttagagcataacaactgatgacagccactgtcattgtttccaaagagatttctattaccagattgccaaaaaaagagatagccatttttttggaccgtccatacctcacatatactcaaacggcccgaaaatcatttttagagcataacaactgatgacagccactgtcattgtttccaaagagatttctattaccagattgccaaaaaaagagatagccatttttttggaccgtccatacctcacatatactcaaacggcccgaaaatcatttttagagcataacaactgatgacagccactgtcattgtttccaaagagatttctattaccagattgccaaaaaaagagatagccatttttttggaccgtccatacctcacatatactcaaacggcccgaaaatcatttttagagcataacaactgatgacagccactgtcattgtttccaaagagatttctattaccagattgccaaaaaaagagatagccatttttttggaccgtccatacctcacatatactcaaacggcccgaaaatcatttttagagcataacaactgatgacagccactgtcattgtttccaaagagatttctattaccagattgccaaaaaaagagatagccatttttttggaccgtccatacctcacatatactcaaacggcccgaaaatcatttttagagcataacaactgatgacagccactgtcattgtttccaaagagatttctattaccagattgccaaaaaaagagatagccatttttttggaccgtccatacctcacatatactcaaacggcccgaaaatcatttttagagcataacaactgatgacagccactgtcattgtttccaaagagatttctattaccagattgccaaaaaaagagatagccatttttttggaccgtccatacctcacatatactcaaacggcccgaaaatcatttttagagcataacaactgatgacagccactgtcattgtttccaagagatttctattaccagattgcaaaaaaagagatagccatttttttggaccgccatacctcacatatactcaaacggc

SEQ ID NO: 21289 - DNA, 2088 bp, Heterodera glycines
cattgtccgatcggtcagtcatcgctcatcaaatgtccccgtccgtagtcatcgtcgccgtctcctcctcctctccgatgacgctgctgcactgtgccaccgtccgctggtccacccggtcgccaatgttcgcgctgctcagctgctttgaccgggaatgcgaacgacgcgttgtaggcacaaatgatggtggtgtcgaacagggacaccgagttgcgggccatccttcctgaagaagagggacatggagaatactatgatttgcaactcgaccacaactgtcatctcacattcagtgagtgttacgttaatatgccataaaaccaaaatttttcgtgtatttttgtctcataatttattggttcgaccctctaaatgagatatattcacaactttaaaatccctgaatcagtgagtgagtaggtaatctctctgggagaatatatgatattgtttatttatcggttccagtcgatagcggtgggacacctatattttggaattgctctccgttgtctcaggaaaaatcgttaaaaaatcacaaaattcaaaatgtcgaaatccgtttgctagacctcaccgtcaaaatttagaaactttttgaaagtttaaaatttggaaaaatcgatctcaccgagctctccaatgagtctgccccccctggttacgggccttaaagaggtgcctagttgaaggggtttaaaaaagtcatctaataagattccgtagggattggagactcgagactttttctcgatgaaagattcaagaattctcgggtcgaaactcgagtatttttcaaaaacttaataaacgatttttaagccaataaaaatttttttgaaaaaagtctcgagtctcgggtttttcggtctcggttcgagtttcggtctcagagtcaagtcttggtctcgagtctcgggaaaattttggtctcaagcatcacttaagtttgtattcaatgaccttggatttgggccttactgcttagaaaattgattattttccagaacttctgcttctgctggtgctcctctacctgatgtaaatatatttgaagccaatcacatttcttggtgggcacaactgatcgattgtcatatccccaaaacatttcggcacttgcactccgccggcgttttggctggaacaaacagaaagcctcccatatgcccattttcgtgttttcaagtgcatgacaacaaggcaatcaaatcgtggggaaaggagcgccaatttcagtccgacttcgacggggcgaaaccacgggaaaatgttcagccaaatgtcgctgcacacattgctgaaacaaaaacagttttttcaggtggagggtgaacccagcccctgcttgattacggcctgccattgactgatttatggaaccgccttattggtgtacggacatttcgcctactcgacatctcgcctaccgacatctcgcctactgacatttcacctactaagccaaaatcggtcatttcgcctactaagccaaaattagtaggcgaaatgtcatgtagccgccttatttatccaataagaaaatacatttttctcttcagtgctaacaaaggaaggtcttgaggtgtccgtggagtttcggaatgaaatttggtgggtgcatagagcacccatgggttcttaagaaaagtggttttattttctgcgaaatgagtacgagtgccgagatatgacgtgccaaacttttttctatcccaataaatcgaataaacatttgtaccgttttgtgttgttcggtggtgcggaggttgtgcgtttggcgtttgtttttgcccccacaggttcgaatccctcttatgcaaattaatttcccccatcttatttttgcttttatgcaattgaatggccaaaaaatcaatcccactcacacccaaaaatttatttttcgtccccgttcctaaataaaatgtccataaatccccaaaatattctcattcccaaccattggacgtttatgtttttcggtactaaagtcggggtagtaaaaaatccatcaaatttttttagaatttggaagcaattcacaagaagaataacataatttgttatggtttacgacattaa

SEQ ID NO: 21290 - DNA, 1592 bp, Heterodera glycines
tgtttcaatgcgatcagacggtcgacctcccgcgtcttcggctgctgcttttttccacggctttgcttttaaccctttggcacttttccatggccaattcaccgcggagaatggccaaacgattgagaagcgaaaggcgatcagtttcggtatttgttaatcgtttacgcagttgattgaccttgaaagcattaaattggcataaaattgaggagaatagcggaaaaatgtgtaaaaacggtgctccgtcacctctctgaacgttgtgccggcaatttgtttccagcggcacaactgtcgctcgctcagcggcggtctgcccccgtggtcgagttgttccgcgctactgctcctccccattttcgctgtccaccgttcccatgccgtccgtcttggctccgtcctgtacacctccaactcgaccaatgcgtttctcaattgttccctcaactgatccttttcccgctgcaatgtttctgctcgtcttcgcagttcgctttggcatttatctccgtcggccattgtccgtagccaccagcccaactgctccaagagtttgtccgacttcgtctcgcgctgtgccgtcgtcgcactttcactggcactgctgccccggctcaaaatggcggataacaactcgtgcatctgcacacgaagtgcttcgaaatgaccgtttgtcattgcgtcgtgtttttggtggtcaatggagacagacatttgttggacagaattgtcatcggcaacaatcgtttggtgactgatcatttgccctttttcttcgctttttattggctcggaatgactcctttccgcgtgttttgctcctttttcaatgtttggcattggcaattgaagcgataagtcacaatgactcggaatattcttaaaggataagcaaaaagttcgctcgaaagggaaaagaaaaattaaggaaagttcgaacatttgttgccgtccaattttctttaatttgcgtttggtcaatcggtcggccgagggacgcctcggaatggtcgaaaaccgcgggcaatgacaccacggagatgtacgttttgccctcctccgactccaattcgttgtcagtgtccaaagggtgccctcctcccaattggacaatgtttttgccgcgatggaaagtgacggtcagctcgggcagcacagttttcttttggttccgttgttgttggctgaatggcgcgatcattttgataaattggcttttgtctattaatgtttgaaaatggcactctttttcaattcgttcggccatttcccgccccattttgtccatctccgctcgcagccattccctgtcgctttccaaattgtgcagtgcctttctcaggtgttccatttcggcaccgtccaggtcaacttcaactcctttgtccaattggttgggtcggcaagtgacgtatttgttgagtgtccgtggccgaacatcacattgggcatcacgacggggacagttcagactgaccaattttaaaagtcagtttccatttgcacaacaaagcactgccggaactggtcgttcacagggcccccggggaaacccaagagaacttttttagttttaaatttcaaaatta

SEQ ID NO: 21291 - DNA, 1524 bp, Heterodera glycines
cccgagcattcaaaatggacgcgtgttcaatggccgagtgaagacggcggtccaattttattcgactgaactgccagcccatgcgcttgtcgttcgccgcttttttttcatgtttaagttgtgctgccaaattggcacttttttgtttcaattccccacacttttttgcccaatattcctcgttttgtttgctgttgcgcattgattcaaccaaaatttgttcaaaatcattttcaatggccaagttttgccccccccccccccgacgaccttttccatgcgttcgtccgtctccgcctccactcgcttcattctcaactcgcacagactcttctcacccctcgccctctccaactcattctcgaggatcggcacgcgttctgtcgtccttcccatctctgcaacgcgttcagtgaatgcgtctctttctcgctggtgccgttcgtcctccgaccgtatgtttttggcagcattttccaattggacagtcagtgtggtgaccaactccgttttcatggtcagcatttgttcgatgtctttcaatcggtcgctcattgtcgttttgtcctccgcaaatgccatttgcattgacttttacggcgattaattcgattttcattttgctttgcttttttaattgtccttttgcccttttactcactcgaatttggacttgcaattcgtccaattccttctcactgtaccccaacgccttcgctgttagcattgtttgtgtgccttttgagcctctgaacgtgaacacgtcccccggggctggtcggaactcgtcgagtcgacccagcacaatgccctggtcgagtccgatctgctccatgacgtggcaacgacgttcaatgtatgccaatgcctgctccaatttgtcccgttcggcctaaatgccgtcatttaactaatgttttaaaatgccttttgtttagcattgcctgcgctccattaagagccatttggatggctttgatttcacaaagccgtgtttctgccaactgcacaaggatggcatgctctgtccgcagtgtgtccaattgcgcatttgcttgttccaagtcggcactcatttcgtgccttttttcctccatttgggtcatccctttgtccctgagaagaagctaaacgaatattttgtaaacattccctccccctccccttttggtccgtcactttttcttccatccgctgcttttcctcctcccaacggtgccgtccctccacgcattccttccgttggcactctccgccgctttgtgccattctctgcttctgctgcagcgtttctccctccgcgacgctttctttaggttggatttgctgacgtcggaatgtttcgctcgtctcgctactgaccaaggcttcgtccctctgttatgtgctcaatgatcactgatcattctttgcttttggttctttgctccgactgtctttcgtcctaccgtctctccgtttccgtttgtctctctttccctctcttcgtccatttccgtcgcagtcttttgcgcttctttcttt

SEQ ID NO: 21292 - DNA, 1305 bp, Heterodera glycines
taaaggactaacttacactgaaatgagcgccgagctactcccacccagaaaaattttcgaaaatctgagtctttcgtttttatttattttttgcaaaattaattcttaaatattttttcagaaagggttctgaaacgcaccaaattttatttacatgttagtttaggcactctgatgctttttctatcaaaaagggagatgaataaaatttttaaaaatttttaattcctttttaaacaggccaaaaagtttaggcttaacttttttttcagaaactgatcagaagcgcaccaaactttgcagggatactgaaaggaagagaaataacctattttaaatattatctagtcagttcatttaaataatttttatccaaaaaattttttttgggttttcggggcagtccccctgaaccgatgcgcccagatttatggggagaccgaatccttccggaatagcttcactatagcctgtactttaattctgcgttggatttttgctccccataattgtttgagtaccccaaacggacacttgaaaaaatcgatttatttttgttttcggggcagtccccccgaaccgatgcgcccagatttatggggagaccgaatccttcgggaatagcttccctatagcctgtactttaattctgcgttggatttttgctccccataattgtttgagtaccccaaacggacacttgaaaaaatcgatttttttgttttcggggcagtccccccgaaccgatgcgcccagatttatggggagaccgaatccttcgggaatagcttccctatagcctgtactttaattctgcgttggatttttgctccccataaatgtttgagtaccccaaacggacacttgaaaaaatcgatttttttgttttctaaatagttcccccgagcgatgtgctcagtaaagcgcaccaaattttatttacaacttaattttagcactctgatgctttagtatcaaaaaggaagatggagaaaaaattttttaaaaaatttttccttatattttggttatatcgttttgcttttggtggggtgcttggaacagtggaatcatgcgcacccgtccgatctggcaagttaagcaacgattgctgactagccaaaaggttcggtgccgtgatgaaacgaaccagcactgcttaccccgcggcacccggcacggtcccccgaaggaatggatttaattaaattctctccttcggggatttttttccattaggtcgtccgttagcgttcgattgctctaatgaatttttcaaaatttttgttgaaatatttgtcgtgc

SEQ ID NO: 21293 - DNA, 2891 bp, Heterodera glycines
atctgagattctgaagcaggccggggtgaggtcaggctcccctccacccgccggcgaaaaaaaaaattagttttttgggcatttttaaattcaatagactattaaattttgtaagtgttttttttaatagcttaaaagtcgttttttaataaatttttcgtcttatcattgttttttaaacaatttcactatttaataactcaatcagtttatgattcatttcatacaaatgctttcggccctgccgactcggctctgctgctctttcggattgaattttttgaaatcatttattttgaaaaaatttattttcggagaatattaaatttttattttggtttctgtacaagccaaagtgatgccgggccgaaacgtccccggagccaagacaacctagccgaaacacatttactacagaaacagtaaacaaataatggagctggccatctgctgcagatgccttatcagcggtaaagttgaaaaataattcattaattcaaagatttatttttaaaatatctgtttcaatttggcatggaaaggcattaattagcccattgatgagggagatgacaacaatagaagctttttataaagcaaaattctttgataaaggcaacagacaaaattattcttgaatatacgtgaaaaatgatgaattttgtgtttcacgttgtaattttgttatttagtttttgaagaattcatgtcaaattttcgtgccaaaattggaattagtccatatttatttgtcttcttaatggtaacggatttaggaaacgtccatatgtggcggaatttagaaacgtcccagcactgatgaaaagggcaaatgccgttgtccctacgaaaaagcttaaaaaggaaaataaaatgcaaaaatgaaaagaattcagttataaatgcttatacctcgagaggtgacattaacgctttcactctctttcaattttaattataaaaattaatattttagaaatatttttaattttcgaataaaataattgtttaattctagaaaaacacccattttgtgcactaaagtcatgtgacagaacatccaagtccctcatatattgaataagtggacaatacaatacaactccaacccgaaccccagcaatacccgtccccattaaaaaactaaaattatataatttcgtatttttataaataaaaaataaatatttataagattgcagaacaaattttttttttcaaatttatgcaaaaggaaaaaataaaagttaatttacggcttaaataaaaagacctactaggacaaactgaaatgatctcaataaaggtaaatggaaaaaggacaactcaaggacagccaaaagaaaagcaaatgataaaagataaggaaaacactacaaataggaagacacaatgggttggaatcagggatggcatggaattcctatttccggcttccgaaaatttttgggcttcggaattccgatttcaaagtttttggggcctcggaatgccatccctggttggaatgtaatagggagaaagcgcaacgaaaatgcccttaaaaataaggaaactgttgctcattgaaaggccaaatggcctttggaatgaaaaaagtaacttttttgaagatttaaaaattcctttctgctaacatgccaaaaccccattacacacgtttcagtaggtcactcaaccttttttgtgaatgagttagtgagtaaatgaccttgattttcttggagatggatcgttttaaaaatggtgaaaatgccaaattttctgacattttcttccttcttcgccatgtgttcgtcattggccaccatttcaattattttttccgcaaattcttccaactttttgtcaaattcatcatgaagaccttttaaatcgtgttcatcagatgattgtttatccaacttgtccccattcttatattttggcagtattgggaactttaaatttttgagcttttcccaatcagcgattgagcttttctttcatcaaaatagattttcgacatccaactcagttttctgagagctgcacgtatgttcagagatgggattattacaatgtctgtaaaaatactggttcaaaaaagaaaatatcaaataaataaagccaaaatatgcctcgagcattttctttttgtgttgatcaacagcagaagttctagactgatcatctaattttttagcttgatcaggagttgccttcagatcattcagcaatatgatcaaatcttcgtcaattagctgtgataaaaaaaaattattaagcatagtgacctttttaattaggctgtgcaatttttgaaaatttgagtacaatttgctaaaagattttcattataaatgataaatttttgcgtttgagtcatttttatgaaaaataagtttcgtgggcccgtcggtgccgataggcgccgccgggagaaaattggaaaatttgaccatttttaaacagattttcactgaaaattggcaatatataggtcaaatttacaaaattttaggggaattttgggtgtcggctgtgacgataggctaaatagccatttttgaggattttttccaaaatatcagcataaatcatcaaattttgaaaattttgctctttgaagtcataaatgtagtaaaatggatgaactaattaattaataaacaaaataaacaataaaatttataaggaataaaagtcaaacacagataacacaatatatgccaaaattttgaaaatttggaagtttttgatagcagttttacacaaaaatcgccattcttgaggatttttccaaaaaatcagcataaatcatcaaatttctcaaaaattagcaaatcatcatctcaaaaataaaatcatcattgactccttgatatcatcaaaatgatgataaatcatca

SEQ ID NO: 21294 - DNA, 816 bp, Heterodera glycines
tctagagtcgtctaagatcaaatttgagcaattttttgtttgaaataagcattttgtgaaattctgatgagcgtgaaaaatcgttgattttttgcggcgtttttactaaaaaaaacttttgggtaacgaaggaagggtgggggagtataataacctactaattacgcattgtttgactgaacgataggcgcacagtaaccgctatggttcgctggcttatctttaattttatttaaatagccacgatctactgaaacactagtcatccgcctaatctatttaaggatgattaagaatggaccaaaaataatatgagcgcaattctttgacattattgctcttctgcgttgcacccctgctctaacttattcgatcgcacggccgatttttgttgttataaaatatactaatttatatcaaaataagaaaacttctgataacgtaaatgaattttggccctacatcagaagctcaccattcacccttcacaacaaacaaatttgaacgagaaatcttagaattgctattattacaaattctattccttaattatgaaaaggaatgaatgaacgacttttgtctggttaaattatttttggcattatctaagcgcaccgcaaaatcggaaaggatatcctttactccaattaaagtttcttaaataaaattctaatctaaattatggagaaataaaattcccccgttgaatatttatgaatttataattatcgtcatactaatattatatgattttttttttcccggcagaattatttaaaaataatctttcaaaatgaaatgctattgccaatgttc

SEQ ID NO: 21295 - DNA, 1045 bp, Heterodera glycines
aaaataaaaatatggatacctttaaaagcccaaaaaataaatttttatttagtttttgcagtctccattccatgttttgagatttttttaaaaatttttgaatattttttttttcccgaaaaatgttgcggcaaatgttcccgtccgaaaatgtctgtcacatttctggtaattttgttgctgcaaatgtcttcaagaatttctaaaatgaattagaaaatttgatatatgtagggctgggatttttaggtttttacctatttttttgcggcttaattatgacgagataagcccaaaaatagcattttcttcgaaaattttgatttagagcgacttataaaaacctaaaaacacctaaaacgagggtttcgagtgaatagcacctattttggcatttttcgagttttagcacctattttggcctttttccagaaatttcatagcaaaaatgcaataaaaacgaaaaatgcacccccaagaatcgatctaaaaaatttcaaaaaacataaatatacttggtttttccaatttttaatacctattttcgcacctattttggcctttttgggggtttttagcacctattttgcacttttttagcacctattttagtacctattttaggattttagccagggttcgcagatgaaaattttttcatttaaaaaaattcataattttgtggattttcgaaaaaaattgtaattttctggctaaatttgggtgagatttccgtttgatactctattaaaaaccaaaattcaaattaaataattgccaaacattatgccaatttatcaaaatttaaaagattctgaggattttccccaaaagcctcaaaaatcctcaaaatttctcaaaaagccacaaaaatcctcaaatcctcattttccaaaaaaatcctcattgacctatcaaaaagccacaaaatgaggataaatcctcagatctgcgaaccctgtttttagcacctaaaaaccccagccctagatatatgtaaaagatacacataataattaaaacagaaaaaagtttgaataaaaca

SEQ ID NO: 21296 - DNA, 1439 bp, Heterodera glycines
cgagatcccggcaccccaaaaaccccgtgatttccgtgatccgtgagccgtgatccgtgatcacggccagccctgatgcatgtccaatattaatttgcgatgctcagagactgacaatttctgagcccactaatttgtgagcaaatttgggcactttttcaatcattatgccaaagacgaccatttggcataacgttgtcatgacgccagaggcaatttaaatcatttaaaattaaaaacaaatattataaagtttttcatatgaattcaaaaaaattagcaattaaattttatttattcatcaattagcaaccccttcaacaaaactatgttgaatcatcattaattactttgttaattagtttggcaaattaccgtctcagttccgtcgtttaggcgttcaaattgctgctggcgatgtcgtcggcacaatggcggcggcacagcaacaccaacgtgttcagttggttgttttgcaaaaagtgtgctttgacgctgaggtgttgcttcttctgatcgggcaccaccaccaacaccaccagaagcttgacggaaaacgaaatccgatccgccaaaattgtgcttaaagggacggggcgctgggataaagccgcttgaacggagcggaaagccgacggggtatatggggagataaagcggtggaaaatcagcagctaatccccagggagaacgggaggggacccagagctttgtgtactcaacgcccagacacatcatttctcgagaacaatggtggacaacaacggttgacgaaaagcagcaccggccgcgcgggcggtgggagccccggaagagaagggtgccccggggggaagggggcttgttttttacgttagccaccaacccctccgtcgcccccctgatgacaaatgagggccaggacagtgggacgaaaagtctcgaaattcttccccgcccccccccccacctcgagagttgcggaatatcatgagagtactaggggaaaaacgggggaaatctgtcccttccttcctgtggcattttcctagcgaattgcgggggtgggagtgggcaaatgagtcctggtcgattagcttccaggtgaattgattggcacaataattgagtccctccgagcatccgcccgcacaaatgccaatttggcaagataaagcatcccatagaattgaattttggataattatgccatttattgcgacagagtgcagggacagttgagtgcacggaattttctgatcaactgcgggttgagacatctgagtcccagaagtttttttcctctattttccatcataaataatagtcaaaaattatatagtaaaacccctttacagtaataatcgaaaattcaaatgacacttacaattagacactgaactaactgtccactccactaattagtttttgtttcgagacaaaccaaaaagaaacggtcg

SEQ ID NO: 21297 - DNA, 931 bp, Heterodera glycines
  unsure (1)..(931): unsure at all n locations
cgcgcgtgttgttgatcatgatttcgatccccaccatcatcatcatcatcgctctccatggatgtccacntctcttcatcgtctgtctccatctctgtgctctctgatgagcacacactctcttgccatccccattcgccctccggcgtcactgtgtggcatcggcgccgccgccggccgcgccgttgcgttgcgcttcgagagcgccagcgatgggcggcacgtggagtagcgggtttaggcggcttttgagagcacaaaattgcagttttgaaaaaatattgaattaaattttcaaaaatgtcttccaatattttgtgcctcaaagtctgcggtttaaactttcgatagcacaaaattttggtttaaaaataatttaaaatgaaatttttcaaaaatttgttactaatttcaatttaaaatttttgtctttaattttagtttaaaataaattaaatttctttttgaaaaattgtcactaattttggtttaaaataattgaaaattaagttttgaaaaaattgcaattcaatgcttgtaaaatttcggtttaaaaattattttaaattaaaaaaattaaaaaaaaaattacctccaaaattttgtgcctcgagggcaacagtggcggtaatgtaaattgttcaggttttgttgcggatgctttcaccgggcgcaattcgttcaacgatttgcttctgcgcatcgatgcctgtggaatttttggcccaaaaggacacattatgccaaatttggaaaaaaaattcaaatttaagagaatgtgccgtccgaagttaaatatttttgaaatgcccaagcaaaaaaaatatatatacaagcaaaagcgaaaaagcgtaaaacgaaagcaaaagcaaagcgattgctgaccttctgcagctgatcaatgttctgaaagagggattttcttttaatt

SEQ ID NO: 21298 - DNA, 1641 bp, Heterodera glycines
ttttggaggtgaatatttgagaaaatttttcatttcttaggggtatttttgaaaattttcgggtcgattcttagggatgtatttttttttaaattttaggtcgattcttagcggagttttcataacaaattttttgttcaccagcaaaaatatttatttatttatttatttattcgtgaataaaaaagttatcagaagggcaaaacaaccgaaaaaaaatgtttttcgtgcgtttcaggccacgaggagctcaggaaaaatagtgaaaaaactataaatatcatcccgaattattgtgtttttttcatttttaaaaatttgcccttttatttttgcttaatccatctttttttcttcattttgaaaaacatgtcatatgttttttatataatttacttaaaagatttggaaaacatgcgcagataaaatcaatttgtgaaaatccttttccatgtgaaatgctataaagcgagattatttggatagataagagcaaacttattcgttttgcggcagcagtccatcaaccagtcttttctgttctatttttttttgatgtgctgcttgtcctctgttttcccgaaaaataactcatttaaactcattagaaaacaaaagtgcaatttattaaattaatcaaaaaaatacgcggtttcctttgattaaatcttatgataatcgaatttgctagcttgaagtgccaaattaaacatctataaaaattaaataaactttattttaaagcgtttttatctgtgattttgaaagaaatagattttttgaacttatgatattagcattctgatcatcaccatgtcgacggcaatgaagaaaagaatatttaccgctttggtggcaattacattattttattgcatcattataaaacaacaatattttttcagagaatgtaaatttttttaaaccttcaaaaagttatgaaaaattagccaatatttaatgatttatggaatagcattacaaaaataatgatgttgatttcaagatataaaaaagacataaaattggagtattttaaagcaaactttttgcctgaaagaatctgataaaattgggcgattgtttcaattcccgggtccgtctcaataattacgaaagatttcttccggatttcaattgccttttcacccatcgaactttatttaagttcgatattttctttgctaaaaaccgaattttttccttaaaaaatggaaaaaaagtcacgaaaaagtcataaaaaacaaaaaagaaatttttatgaaattttcgcggtatcaaaataaaaaaattacaacgttctgtagaataaattattttaaaaattgtgacaaaatcctagaagaacaaaattaatttaattggtacagggtcgtttcataaaactgccaatttaacaaatttttaaaggaaattcgtcatacatacaaattagtgtaatttgaagctctttggtggctgtattagcatgaaaatttaaaaaaatatttcattaagtttcagaaagttatgaccagggatgcaaaaaacatgcaaagcaaatacatattttttcctggcttctccatgctataaatagtaggaaaaacactttcttttttgtgtttgcgtataaaatcgggacttttatttgcatatttt

SEQ ID NO: 21299 - DNA, 1548 bp, Heterodera glycines
  unsure (1)..(1548): unsure at all n locations
aaacgcccataacttttttacgaagagaccaagcacgatttagataatgaccaacaaaaatcagaggagaatgattatgacataacatcaacaatatcaataataacaacaacaacatcttcgtctgtcgttgattcgagtggtattttttttatttaggggggggggggggaaatttcgcaatatgtcgtttaatgacaaaaaaacataatatttcgctgtatcaaaaaataaaattgtccggtttctttagaataaactatttgaaattgagaagacaatgcttttcaaatttcgtcaatatatcgcttaattgacaaaagcaaattcaacaaattttcgcggtatcaaaataaaaaatttgtaacatttctgtagaataaattaaagacaatgctccagaaaaataaaagggcaattaagataatggccaacaaaaagcacagaagattgtttataatgattatggcataataccaataatacctaaatcatcaataattagggattttaaattgggatttcagttgggattttaaattggaattttaaattggattttcaaattaagattttcaaattgtgattttcagttgggattttaaattggattttcaaattaagattttcaaaatgtgattttcagttgggattttaaattgggattttcaaattgtgattttcagttgggattttaaattgtgattttaagttgggattttaaattgggatttcagttgggattttaaattgtaattttaaattggattttcaaattaagattttcaaattgtgattttcagttgggattttcaaattgaaatttcaaaataggattttcaaattgtttgggatttaaaaatgggattttcaaattagattcaaatctagattttaaattgggattttcaaattagaattttcaaattacgattttcaaattgggattttcaaattgtgattttaagttgggattttaaattgggatttcagttgggattttaaattggaattttaaattggattttcaaattaagattttcaaattgtgatttttagttgggattttaaattgtgattttaagttgggattttaaattgggatttcagttgggattttaaattggaattttaaattggattttcaaattaagattttcaaattgtgattttcagttgggattttaaattgggattttcaaattgtgattttcagttgggattttaaattgggattttaaattaggattttcaaattaagattttcaaattgtgattttcagttgggattttaaattgggattttcaaattgtgattttcagttgggattttaaattgtgattttaagttgggattttaaattgggatttcagttgggattttaaattggaattttaaattggatttttaaattggattttcaaattgtgattttcagttgggattttaaattgggattttcaaattaagattttcaaattgtgattttcagttgggattttaaattgggattttcaaanttgtgattttctagttaggatttgact

SEQ ID NO: 21300 - DNA, 945 bp, Heterodera glycines
tgggtaggagttttattggattttaggaaaaaaaaaggcccagccagggctaggagttttcttggatattcagaaaaaacaggtccagccaaggctatgagttttattggattttcagaaaaaacagtccagccagggctaggagttttcttggattttcagaaaaaaataggtccagccagggctaggagttttcttcgattttcagaaaaaaataggtccagccagggctaggagttttcttggattttcagaaaaaacaggtccagccagggctaggagttttattggattttcagaaaaaataggcccagccagggctaggagttttcttggattttcagaaaaaacaggtccagccagggctcggagttttcttggattttcagaaaaaacagtccagccagggctaggagttttcttgggttttcagaaaaaacagtcaagccagggctaggagttttctttgatttcagaaaaaaggcccagccagggctaggagttttcttggatattcagaaaaaacaggtccagccatgggtaggagttttcttggattttcagaaaaaacagtccagccagggctaggagttttcttgggttttcagaaaaaacagtcaagccagggctaggagttttattggattttcagaaaaaaaaataggtccagccagggctaggagttttcttggatattcagaaaaaacaggtccagccagggctaggagttttattggattttcagaaaaaatagtcaagccagggctaggagttttctttgattttcagaaaaaaggcccagccagggctaggagttttcttggattttcagaaaaaacagtccagccagggctaggagtttaaagggttttcagaaaaaacagtcaagccagggctagcaggggggggggatttcagaaaaaacagtccagccagggccaggag

SEQ ID NO: 21301 - DNA, 2646 bp, Heterodera glycines
aaaaaaatacgtttaaatttaaattatttgaataactcttaattttttctattcaactgcatataataattgaatcagtttatcttcgctatatgttatttcttaatttaatcatttaactataaatataatgaatgatttcttttgtgctattaaatatttttcattttattaattttgaaaattttttgaataattttttttatatttataacaaatgatgaaaagcaattgtttttaattctgtgttttacaaaaaatttattttaattacttctaactaaattttttgaggctttttattaaaataattaaaaattttaatttttttcgtaagtctttgatcttttagccattttattgcaataataatgtatggatgagagtgaagctgaaattatatctaatctcgtcactcattcatgcttatcttagtaatattggcatatgtttttgtatgtaaaaagaccgaaaacttcattatagcttttcattttttcaataatctagattttttaaatttatttaaatcacctggtgtaagtatagaaatatttatataaaactaattaaaattcgaccacgtagctcgccagatttagtctcacctaataagttgtatttttttcaaagccttaacatttagctaaaatattctcaacaaaaatttactcttaaaacgttaatatttttattccaaatttgtattaattaaacaaaattttttaattacataagtattgggtgttattatttttacatttttcgttaatttttataataagtattatattattagcttatcttagtaaataatgtgtgccaatttatttacaattaacacttcatatgttttgtaccttttcagaagatttggttgaatataatattatataatatgataactagcgggtgcgtgaaccgtcggctatttagctgggaaaaagcgcttcgcgctttgggagcttcgctacctagattagctctggttgtggagatttggaatttttaaaaaaatgttaggggtttttaggccgcttccagtgattagaagaggttcaacagtgattagaagaggtacaacagtgattagaagaggtacaacagtgattagaagaggtacaaaagtgataaaagaggttcaacagtgattagaagaggtacaacagagattagaagaggtacaacagtgattagaagaggtacaacagtgattaaaagaggtacaacagtgattagaagaggtacaacagagattagaagaggtacaacagtgattagaagaggtacaaaagtgataaaagaggtacaaacgtgattagaagaggtacaaaagtgattagaagaggtacaacagtgattagaagaggtacaacaacgtgaaagaggtcaacatgatttaaaatgtaataaataagtaattttttttattaaatattaaaaatcgaatgcattttaattttaaattattaataaaaaacaacgttgaaaattaataatatttattttatttaaaatgaaattaattttttaaaagaggtacaacagtgataaaagaggtacaactgtgattagaagagctacaactgtgatttgaagaggtacaaaagtgatagaagaggcaaaacagtgatcaaaagaggtacaacagtgatcagaagaggtacaacataaattcaaattaaaaattgtatgaattataaatttattaaattaaaaataaatcctccatttattaattgaaaataacgttgaaaattaataattgaatatttaataaatttaagatgaaatttacaaattcaaaaaaataaataattaaattctttaatgtaaaaattttttttaaataatctacaacaaatcttaagattagttaaaaacattgaaaatgacgtaaaaaggcatataaaataatttacaccggccggattcgaacctgccgccccccccccccagaagatgactcagaatctccaatcacacagggattctgagggcttaacgatgtcaaaagtaaaatctgatcacgtattcgtgatcagcggcccaaataacccctaaagacatgtttttggaagatttttgtcgaaaaaaatttttcactcaaaaatcctatactcacccctttggtcccgattccctaaatcacttttatttctataacttttttcaaaaaagtgataaaaagctaaaataaaatttatttggtagagcaaaaaattgcggatttttgttgtatattatttttacaaaatgacttttcagaaggtagttaggaatttttttctgaaaattcggatttttccagaaattcttgaataactttttttcatttgaagatataaatttcaattaaatcccataaaattctcctgatttttctctatttttagagctttaattcccttaaattgaccaaaccttcactgagcaatgaattttcaaaatttaacccaaaatcccaagggccaaaaaattgccaaaaaataaaaaatttttaaaaaattccaaaaattctgaaacttaaaatagacattatattcgtactcagcaccttattttaccccagaaaaatatttttcacccccattttcgtccgaaaaacatttccgaaatttcaagggggcctagctcgaaattttt
